United States Patent Application Publication US 2018/0305689 A1 - sequence listing, part 11

SEQ ID NO: 93090 - RNA, 19 nt, Artificial Sequence
  Description of Artificial Sequence: Synthetic oligonucleotide
  Sense strand starting at position 532 of SEQ ID NO: 1170
gagcauacaugucuuagau

SEQ ID NO: 93091 - RNA, 19 nt, Artificial Sequence
  Description of Artificial Sequence: Synthetic oligonucleotide
  Antisense strand to SEQ ID NO: 93010
aucuaagacauguaugcuc

SEQ ID NO: 93092 - RNA, 19 nt, Artificial Sequence
  Description of Artificial Sequence: Synthetic oligonucleotide
  Sense strand starting at position 544 of SEQ ID NO: 1170
cuuagaugucagggugagu

SEQ ID NO: 93093 - RNA, 19 nt, Artificial Sequence
  Description of Artificial Sequence: Synthetic oligonucleotide
  Antisense strand to SEQ ID NO: 93012
acucacccugacaucuaag

SEQ ID NO: 93094 - RNA, 19 nt, Artificial Sequence
  Description of Artificial Sequence: Synthetic oligonucleotide
  Sense strand starting at position 626 of SEQ ID NO: 1170
uggucacauccaugcauaa

SEQ ID NO: 93095 - RNA, 19 nt, Artificial Sequence
  Description of Artificial Sequence: Synthetic oligonucleotide
  Antisense strand to SEQ ID NO: 93014
uuaugcauggaugugacca

SEQ ID NO: 93096 - RNA, 19 nt, Artificial Sequence
  Description of Artificial Sequence: Synthetic oligonucleotide
  Sense strand starting at position 699 of SEQ ID NO: 1170
cuaccugaacacugaguau

SEQ ID NO: 93097 - RNA, 19 nt, Artificial Sequence
  Description of Artificial Sequence: Synthetic oligonucleotide
  Antisense strand to SEQ ID NO: 93016
auacucaguguucagguag

SEQ ID NO: 93098 - RNA, 19 nt, Artificial Sequence
  Description of Artificial Sequence: Synthetic oligonucleotide
  Sense strand starting at position 1770 of SEQ ID NO: 1170
cuguuuguuccgaguggag

SEQ ID NO: 93099 - RNA, 19 nt, Artificial Sequence
  Description of Artificial Sequence: Synthetic oligonucleotide
  Antisense strand to SEQ ID NO: 93018
cuccacucggaacaaacag

SEQ ID NO: 93100 - RNA, 19 nt, Artificial Sequence
  Description of Artificial Sequence: Synthetic oligonucleotide
  Sense strand starting at position 2180 of SEQ ID NO: 1170
gaggcuucgagaggauaca

SEQ ID NO: 93101 - RNA, 19 nt, Artificial Sequence
  Description of Artificial Sequence: Synthetic oligonucleotide
  Antisense strand to SEQ ID NO: 93020
uguauccucucgaagccuc

SEQ ID NO: 93102 - RNA, 19 nt, Artificial Sequence
  Description of Artificial Sequence: Synthetic oligonucleotide
  Sense strand starting at position 2209 of SEQ ID NO: 1170
gugacacuacaaggugaua

SEQ ID NO: 93103 - RNA, 19 nt, Artificial Sequence
  Description of Artificial Sequence: Synthetic oligonucleotide
  Antisense strand to SEQ ID NO: 93022
uaucaccuuguagugucac

SEQ ID NO: 93104 - RNA, 19 nt, Artificial Sequence
  Description of Artificial Sequence: Synthetic oligonucleotide
  Sense strand starting at position 2261 of SEQ ID NO: 1170
acgagaauugaacgaaauu

SEQ ID NO: 93105 - RNA, 19 nt, Artificial Sequence
  Description of Artificial Sequence: Synthetic oligonucleotide
  Antisense strand to SEQ ID NO: 93024
aauuucguucaauucucgu

SEQ ID NO: 93106 - RNA, 19 nt, Artificial Sequence
  Description of Artificial Sequence: Synthetic oligonucleotide
  Sense strand starting at position 2304 of SEQ ID NO: 1170
acaauaucugucuguaaca

SEQ ID NO: 93107 - RNA, 19 nt, Artificial Sequence
  Description of Artificial Sequence: Synthetic oligonucleotide
  Antisense strand to SEQ ID NO: 93026
uguuacagacagauauugu

SEQ ID NO: 93108 - RNA, 19 nt, Artificial Sequence
  Description of Artificial Sequence: Synthetic oligonucleotide
  Sense strand starting at position 2315 of SEQ ID NO: 1170
cuguaacacuuuccaguaa

SEQ ID NO: 93109 - RNA, 19 nt, Artificial Sequence
  Description of Artificial Sequence: Synthetic oligonucleotide
  Antisense strand to SEQ ID NO: 93028
uuacuggaaaguguuacag

SEQ ID NO: 93110 - RNA, 19 nt, Artificial Sequence
  Description of Artificial Sequence: Synthetic oligonucleotide
  Sense strand starting at position 2368 of SEQ ID NO: 1170
gaaugucauugagcuccaa

SEQ ID NO: 93111 - RNA, 19 nt, Artificial Sequence
  Description of Artificial Sequence: Synthetic oligonucleotide
  Antisense strand to SEQ ID NO: 93030
uuggagcucaaugacauuc

SEQ ID NO: 93112 - RNA, 19 nt, Artificial Sequence
  Description of Artificial Sequence: Synthetic oligonucleotide
  Sense strand starting at position 2416 of SEQ ID NO: 1170
gaggaaugagaccguuaag

SEQ ID NO: 93113 - RNA, 19 nt, Artificial Sequence
  Description of Artificial Sequence: Synthetic oligonucleotide
  Antisense strand to SEQ ID NO: 93032
cuuaacggucucauuccuc

SEQ ID NO: 93114 - RNA, 19 nt, Artificial Sequence
  Description of Artificial Sequence: Synthetic oligonucleotide
  Sense strand starting at position 2419 of SEQ ID NO: 1170
gaaugagaccguuaagcag

SEQ ID NO: 93115 - RNA, 19 nt, Artificial Sequence
  Description of Artificial Sequence: Synthetic oligonucleotide
  Antisense strand to SEQ ID NO: 93034
cugcuuaacggucucauuc

SEQ ID NO: 93116 - RNA, 19 nt, Artificial Sequence
  Description of Artificial Sequence: Synthetic oligonucleotide
  Sense strand starting at position 2442 of SEQ ID NO: 1170
aagacaacgugggugaauu

SEQ ID NO: 93117 - RNA, 19 nt, Artificial Sequence
  Description of Artificial Sequence: Synthetic oligonucleotide
  Antisense strand to SEQ ID NO: 93036
aauucacccacguugucuu

SEQ ID NO: 93118 - RNA, 19 nt, Artificial Sequence
  Description of Artificial Sequence: Synthetic oligonucleotide
  Sense strand starting at position 2525 of SEQ ID NO: 1170
aggcuaaggaguugaacuu

SEQ ID NO: 93119 - RNA, 19 nt, Artificial Sequence
  Description of Artificial Sequence: Synthetic oligonucleotide
  Antisense strand to SEQ ID NO: 93038
aaguucaacuccuuagccu

SEQ ID NO: 93120 - RNA, 19 nt, Artificial Sequence
  Description of Artificial Sequence: Synthetic oligonucleotide
  Sense strand starting at position 2702 of SEQ ID NO: 1170
gagagaugccugcacuggu

SEQ ID NO: 93121 - RNA, 19 nt, Artificial Sequence
  Description of Artificial Sequence: Synthetic oligonucleotide
  Antisense strand to SEQ ID NO: 93040
accagugcaggcaucucuc

SEQ ID NO: 93122 - RNA, 19 nt, Artificial Sequence
  Description of Artificial Sequence: Synthetic oligonucleotide
  Sense strand starting at position 2860 of SEQ ID NO: 1170
ugcaaauaacaggguuauu

SEQ ID NO: 93123 - RNA, 19 nt, Artificial Sequence
  Description of Artificial Sequence: Synthetic oligonucleotide
  Antisense strand to SEQ ID NO: 93042
aauaacccuguuauuugca

SEQ ID NO: 93124 - RNA, 19 nt, Artificial Sequence
  Description of Artificial Sequence: Synthetic oligonucleotide
  Sense strand starting at position 2885 of SEQ ID NO: 1170
gcuaaacgauuugauagau

SEQ ID NO: 93125 - RNA, 19 nt, Artificial Sequence
  Description of Artificial Sequence: Synthetic oligonucleotide
  Antisense strand to SEQ ID NO: 93044
aucuaucaaaucguuuagc

SEQ ID NO: 93126 - RNA, 19 nt, Artificial Sequence
  Description of Artificial Sequence: Synthetic oligonucleotide
  Sense strand starting at position 2964 of SEQ ID NO: 1170
cagcauaggcaguauuaga

SEQ ID NO: 93127 - RNA, 19 nt, Artificial Sequence
  Description of Artificial Sequence: Synthetic oligonucleotide
  Antisense strand to SEQ ID NO: 93046
ucuaauacugccuaugcug

SEQ ID NO: 93128 - RNA, 19 nt, Artificial Sequence
  Description of Artificial Sequence: Synthetic oligonucleotide
  Sense strand starting at position 3058 of SEQ ID NO: 1170
aaggaagucucauugcuga

SEQ ID NO: 93129 - RNA, 19 nt, Artificial Sequence
  Description of Artificial Sequence: Synthetic oligonucleotide
  Antisense strand to SEQ ID NO: 93048
ucagcaaugagacuuccuu

SEQ ID NO: 93130 - RNA, 19 nt, Artificial Sequence
  Description of Artificial Sequence: Synthetic oligonucleotide
  Sense strand starting at position 3226 of SEQ ID NO: 1170
cugaucugcucccuaagaa

SEQ ID NO: 93131 - RNA, 19 nt, Artificial Sequence
  Description of Artificial Sequence: Synthetic oligonucleotide
  Antisense strand to SEQ ID NO: 93050
uucuuagggagcagaucag

SEQ ID NO: 93132 - RNA, 19 nt, Artificial Sequence
  Description of Artificial Sequence: Synthetic oligonucleotide
  Sense strand starting at position 3227 of SEQ ID NO: 1170
ugaucugcucccuaagaag

SEQ ID NO: 93133 - RNA, 19 nt, Artificial Sequence
  Description of Artificial Sequence: Synthetic oligonucleotide
  Antisense strand to SEQ ID NO: 93052
cuucuuagggagcagauca

SEQ ID NO: 93134 - RNA, 19 nt, Artificial Sequence
  Description of Artificial Sequence: Synthetic oligonucleotide
  Sense strand starting at position 3304 of SEQ ID NO: 1170
aguaucaauuuggagauga

SEQ ID NO: 93135 - RNA, 19 nt, Artificial Sequence
  Description of Artificial Sequence: Synthetic oligonucleotide
  Antisense strand to SEQ ID NO: 93054
ucaucuccaaauugauacu

SEQ ID NO: 93136 - RNA, 19 nt, Artificial Sequence
  Description of Artificial Sequence: Synthetic oligonucleotide
  Sense strand starting at position 3333 of SEQ ID NO: 1170
aggucagcccuuuaagaau

SEQ ID NO: 93137 - RNA, 19 nt, Artificial Sequence
  Description of Artificial Sequence: Synthetic oligonucleotide
  Antisense strand to SEQ ID NO: 93056
auucuuaaagggcugaccu

SEQ ID NO: 93138 - RNA, 19 nt, Artificial Sequence
  Description of Artificial Sequence: Synthetic oligonucleotide
  Sense strand starting at position 3339 of SEQ ID NO: 1170
gcccuuuaagaauggaaga

SEQ ID NO: 93139 - RNA, 19 nt, Artificial Sequence
  Description of Artificial Sequence: Synthetic oligonucleotide
  Antisense strand to SEQ ID NO: 93058
ucuuccauucuuaaagggc

SEQ ID NO: 93140 - RNA, 19 nt, Artificial Sequence
  Description of Artificial Sequence: Synthetic oligonucleotide
  Sense strand starting at position 3410 of SEQ ID NO: 1170
ugugaaugucaugauaguc

SEQ ID NO: 93141 - RNA, 19 nt, Artificial Sequence
  Description of Artificial Sequence: Synthetic oligonucleotide
  Antisense strand to SEQ ID NO: 93060
gacuaucaugacauucaca

SEQ ID NO: 93142 - RNA, 19 nt, Artificial Sequence
  Description of Artificial Sequence: Synthetic oligonucleotide
  Sense strand starting at position 3415 of SEQ ID NO: 1170
augucaugauagucaaggu

SEQ ID NO: 93143 - RNA, 19 nt, Artificial Sequence
  Description of Artificial Sequence: Synthetic oligonucleotide
  Antisense strand to SEQ ID NO: 93062
accuugacuaucaugacau

SEQ ID NO: 93144 - RNA, 19 nt, Artificial Sequence
  Description of Artificial Sequence: Synthetic oligonucleotide
  Sense strand starting at position 3419 of SEQ ID NO: 1170
caugauagucaagguguca

SEQ ID NO: 93145 - RNA, 19 nt, Artificial Sequence
  Description of Artificial Sequence: Synthetic oligonucleotide
  Antisense strand to SEQ ID NO: 93064
ugacaccuugacuaucaug

SEQ ID NO: 93146 - RNA, 19 nt, Artificial Sequence
  Description of Artificial Sequence: Synthetic oligonucleotide
  Sense strand starting at position 3432 of SEQ ID NO: 1170
gugucauuagaccaaggca

SEQ ID NO: 93147 - RNA, 19 nt, Artificial Sequence
  Description of Artificial Sequence: Synthetic oligonucleotide
  Antisense strand to SEQ ID NO: 93066
ugccuuggucuaaugacac

SEQ ID NO: 93148 - RNA, 19 nt, Artificial Sequence
  Description of Artificial Sequence: Synthetic oligonucleotide
  Sense strand starting at position 3522 of SEQ ID NO: 1170
aggcccuugccugauaauc

SEQ ID NO: 93149 - RNA, 19 nt, Artificial Sequence
  Description of Artificial Sequence: Synthetic oligonucleotide
  Antisense strand to SEQ ID NO: 93068
gauuaucaggcaagggccu

SEQ ID NO: 93150 - RNA, 19 nt, Artificial Sequence
  Description of Artificial Sequence: Synthetic oligonucleotide
  Sense strand starting at position 3655 of SEQ ID NO: 1170
caauaaguuucguuauuga

SEQ ID NO: 93151 - RNA, 19 nt, Artificial Sequence
  Description of Artificial Sequence: Synthetic oligonucleotide
  Antisense strand to SEQ ID NO: 93070
ucaauaacgaaacuuauug

SEQ ID NO: 93152 - RNA, 19 nt, Artificial Sequence
  Description of Artificial Sequence: Synthetic oligonucleotide
  Sense strand starting at position 3670 of SEQ ID NO: 1170
uugaauauuuaugacaggu

SEQ ID NO: 93153 - RNA, 19 nt, Artificial Sequence
  Description of Artificial Sequence: Synthetic oligonucleotide
  Antisense strand to SEQ ID NO: 93072
accugucauaaauauucaa

SEQ ID NO: 93154 - RNA, 19 nt, Artificial Sequence
  Description of Artificial Sequence: Synthetic oligonucleotide
  Sense strand starting at position 3672 of SEQ ID NO: 1170
gaauauuuaugacagguuu

SEQ ID NO: 93155 - RNA, 19 nt, Artificial Sequence
  Description of Artificial Sequence: Synthetic oligonucleotide
  Antisense strand to SEQ ID NO: 93074
aaaccugucauaaauauuc

SEQ ID NO: 93156 - RNA, 19 nt, Artificial Sequence
  Description of Artificial Sequence: Synthetic oligonucleotide
  Sense strand starting at position 3690 of SEQ ID NO: 1170
uuacaaugauuggcuuacu

SEQ ID NO: 93157 - RNA, 19 nt, Artificial Sequence
  Description of Artificial Sequence: Synthetic oligonucleotide
  Antisense strand to SEQ ID NO: 93076
aguaagccaaucauuguaa

SEQ ID NO: 93158 - RNA, 19 nt, Artificial Sequence
  Description of Artificial Sequence: Synthetic oligonucleotide
  Sense strand starting at position 3695 of SEQ ID NO: 1170
augauuggcuuacuugauu

SEQ ID NO: 93159 - RNA, 19 nt, Artificial Sequence
  Description of Artificial Sequence: Synthetic oligonucleotide
  Antisense strand to SEQ ID NO: 93078
aaucaaguaagccaaucau

SEQ ID NO: 93160 - RNA, 19 nt, Artificial Sequence
  Description of Artificial Sequence: Synthetic oligonucleotide
  Sense strand starting at position 3766 of SEQ ID NO: 1170
ucaggaaucuagcccacuu

SEQ ID NO: 93161 - RNA, 19 nt, Artificial Sequence
  Description of Artificial Sequence: Synthetic oligonucleotide
  Antisense strand to SEQ ID NO: 93080
aagugggcuagauuccuga

SEQ ID NO: 93162 - RNA, 19 nt, Artificial Sequence
  Description of Artificial Sequence: Synthetic oligonucleotide
  Sense strand starting at position 3816 of SEQ ID NO: 1170
gaggauuacacguaugucu

SEQ ID NO: 93163 - RNA, 19 nt, Artificial Sequence
  Description of Artificial Sequence: Synthetic oligonucleotide
  Antisense strand to SEQ ID NO: 93082
agacauacguguaauccuc

SEQ ID NO: 93164 - RNA, 19 nt, Artificial Sequence
  Description of Artificial Sequence: Synthetic oligonucleotide
  Sense strand starting at position 71 of SEQ ID NO: 1171
gcuucucuacugcaauuga

SEQ ID NO: 93165 - RNA, 19 nt, Artificial Sequence
  Description of Artificial Sequence: Synthetic oligonucleotide
  Antisense strand to SEQ ID NO: 93084
ucaauugcaguagagaagc

SEQ ID NO: 93166 - RNA, 19 nt, Artificial Sequence
  Description of Artificial Sequence: Synthetic oligonucleotide
  Sense strand starting at position 316 of SEQ ID NO: 1171
gaccaagugcuguaggaug

SEQ ID NO: 93167 - RNA, 19 nt, Artificial Sequence
  Description of Artificial Sequence: Synthetic oligonucleotide
  Antisense strand to SEQ ID NO: 93086
cauccuacagcacuugguc

SEQ ID NO: 93168 - RNA, 19 nt, Artificial Sequence
  Description of Artificial Sequence: Synthetic oligonucleotide
  Sense strand starting at position 600 of SEQ ID NO: 1171
cauggaugcucucugggau

SEQ ID NO: 93169 - RNA, 19 nt, Artificial Sequence
  Description of Artificial Sequence: Synthetic oligonucleotide
  Antisense strand to SEQ ID NO: 93088
aucccagagagcauccaug

SEQ ID NO: 93170 - RNA, 19 nt, Artificial Sequence
  Description of Artificial Sequence: Synthetic oligonucleotide
  Sense strand starting at position 601 of SEQ ID NO: 1171
auggaugcucucugggaua

SEQ ID NO: 93171 - RNA, 19 nt, Artificial Sequence
  Description of Artificial Sequence: Synthetic oligonucleotide
  Antisense strand to SEQ ID NO: 93090
uaucccagagagcauccau

SEQ ID NO: 93172 - RNA, 19 nt, Artificial Sequence
  Description of Artificial Sequence: Synthetic oligonucleotide
  Sense strand starting at position 603 of SEQ ID NO: 1171
ggaugcucucugggauaca

SEQ ID NO: 93173 - RNA, 19 nt, Artificial Sequence
  Description of Artificial Sequence: Synthetic oligonucleotide
  Antisense strand to SEQ ID NO: 93092
uguaucccagagagcaucc

SEQ ID NO: 93174 - RNA, 19 nt, Artificial Sequence
  Description of Artificial Sequence: Synthetic oligonucleotide
  Sense strand starting at position 753 of SEQ ID NO: 1171
aguuuaagagauggucauu

SEQ ID NO: 93175 - RNA, 19 nt, Artificial Sequence
  Description of Artificial Sequence: Synthetic oligonucleotide
  Antisense strand to SEQ ID NO: 93094
aaugaccaucucuuaaacu

SEQ ID NO: 93176 - RNA, 19 nt, Artificial Sequence
  Description of Artificial Sequence: Synthetic oligonucleotide
  Sense strand starting at position 802 of SEQ ID NO: 1171
cuagaaggaucauucuagu

SEQ ID NO: 93177 - RNA, 19 nt, Artificial Sequence
  Description of Artificial Sequence: Synthetic oligonucleotide
  Antisense strand to SEQ ID NO: 93096
acuagaaugauccuucuag

SEQ ID NO: 93178 - RNA, 19 nt, Artificial Sequence
  Description of Artificial Sequence: Synthetic oligonucleotide
  Sense strand starting at position 836 of SEQ ID NO: 1171
acuugagaggauuguccua

SEQ ID NO: 93179 - RNA, 19 nt, Artificial Sequence
  Description of Artificial Sequence: Synthetic oligonucleotide
  Antisense strand to SEQ ID NO: 93098
uaggacaauccucucaagu

SEQ ID NO: 93180 - RNA, 19 nt, Artificial Sequence
  Description of Artificial Sequence: Synthetic oligonucleotide
  Sense strand starting at position 838 of SEQ ID NO: 1171
uugagaggauuguccuagu

SEQ ID NO: 93181 - RNA, 19 nt, Artificial Sequence
  Description of Artificial Sequence: Synthetic oligonucleotide
  Antisense strand to SEQ ID NO: 93100
acuaggacaauccucucaa

SEQ ID NO: 93182 - RNA, 19 nt, Artificial Sequence
  Description of Artificial Sequence: Synthetic oligonucleotide
  Sense strand starting at position 845 of SEQ ID NO: 1171
gauuguccuaguugggaaa

SEQ ID NO: 93183 - RNA, 19 nt, Artificial Sequence
  Description of Artificial Sequence: Synthetic oligonucleotide
  Antisense strand to SEQ ID NO: 93102
uuucccaacuaggacaauc

SEQ ID NO: 93184 - RNA, 19 nt, Artificial Sequence
  Description of Artificial Sequence: Synthetic oligonucleotide
  Sense strand starting at position 1005 of SEQ ID NO: 1171
agagcucucccgggaaaga

SEQ ID NO: 93185 - RNA, 19 nt, Artificial Sequence
  Description of Artificial Sequence: Synthetic oligonucleotide
  Antisense strand to SEQ ID NO: 93104
ucuuucccgggagagcucu

SEQ ID NO: 93186 - RNA, 19 nt, Artificial Sequence
  Description of Artificial Sequence: Synthetic oligonucleotide
  Sense strand starting at position 1006 of SEQ ID NO: 1171
gagcucucccgggaaagau

SEQ ID NO: 93187 - RNA, 19 nt, Artificial Sequence
  Description of Artificial Sequence: Synthetic oligonucleotide
  Antisense strand to SEQ ID NO: 93106
aucuuucccgggagagcuc

SEQ ID NO: 93188 - RNA, 19 nt, Artificial Sequence
  Description of Artificial Sequence: Synthetic oligonucleotide
  Sense strand starting at position 2090 of SEQ ID NO: 1171
aagaaugagucugcagcaa

SEQ ID NO: 93189 - RNA, 19 nt, Artificial Sequence
  Description of Artificial Sequence: Synthetic oligonucleotide
  Antisense strand to SEQ ID NO: 93108
uugcugcagacucauucuu

SEQ ID NO: 93190 - RNA, 19 nt, Artificial Sequence
  Description of Artificial Sequence: Synthetic oligonucleotide
  Sense strand starting at position 2255 of SEQ ID NO: 1171
agaggaucucucugacauc

SEQ ID NO: 93191 - RNA, 19 nt, Artificial Sequence
  Description of Artificial Sequence: Synthetic oligonucleotide
  Antisense strand to SEQ ID NO: 93110
gaugucagagagauccucu

SEQ ID NO: 93192 - RNA, 19 nt, Artificial Sequence
  Description of Artificial Sequence: Synthetic oligonucleotide
  Sense strand starting at position 2386 of SEQ ID NO: 1171
uaucauuuaugggaaguuc

SEQ ID NO: 93193 - RNA, 19 nt, Artificial Sequence
  Description of Artificial Sequence: Synthetic oligonucleotide
  Antisense strand to SEQ ID NO: 93112
gaacuucccauaaaugaua

SEQ ID NO: 93194 - RNA, 19 nt, Artificial Sequence
  Description of Artificial Sequence: Synthetic oligonucleotide
  Sense strand starting at position 2473 of SEQ ID NO: 1171
cacaguccucacugaggga

SEQ ID NO: 93195 - RNA, 19 nt, Artificial Sequence
  Description of Artificial Sequence: Synthetic oligonucleotide
  Antisense strand to SEQ ID NO: 93114
ucccucagugaggacugug

SEQ ID NO: 93196 - RNA, 19 nt, Artificial Sequence
  Description of Artificial Sequence: Synthetic oligonucleotide
  Sense strand starting at position 2532 of SEQ ID NO: 1171
uggguuggaucuguauaau

SEQ ID NO: 93197 - RNA, 19 nt, Artificial Sequence
  Description of Artificial Sequence: Synthetic oligonucleotide
  Antisense strand to SEQ ID NO: 93116
auuauacagauccaaccca

SEQ ID NO: 93198 - RNA, 19 nt, Artificial Sequence
  Description of Artificial Sequence: Synthetic oligonucleotide
  Sense strand starting at position 2535 of SEQ ID NO: 1171
guuggaucuguauaaugcu

SEQ ID NO: 93199 - RNA, 19 nt, Artificial Sequence
  Description of Artificial Sequence: Synthetic oligonucleotide
  Antisense strand to SEQ ID NO: 93118
agcauuauacagauccaac

SEQ ID NO: 93200 - RNA, 19 nt, Artificial Sequence
  Description of Artificial Sequence: Synthetic oligonucleotide
  Sense strand starting at position 2542 of SEQ ID NO: 1171
cuguauaaugcugauggau

SEQ ID NO: 93201 - RNA, 19 nt, Artificial Sequence
  Description of Artificial Sequence: Synthetic oligonucleotide
  Antisense strand to SEQ ID NO: 93120
auccaucagcauuauacag

SEQ ID NO: 93202 - RNA, 19 nt, Artificial Sequence
  Description of Artificial Sequence: Synthetic oligonucleotide
  Sense strand starting at position 2555 of SEQ ID NO: 1171
auggauugcugagcuggaa

SEQ ID NO: 93203 - RNA, 19 nt, Artificial Sequence
  Description of Artificial Sequence: Synthetic oligonucleotide
  Antisense strand to SEQ ID NO: 93122
uuccagcucagcaauccau

SEQ ID NO: 93204 - RNA, 19 nt, Artificial Sequence
  Description of Artificial Sequence: Synthetic oligonucleotide
  Sense strand starting at position 2568 of SEQ ID NO: 1171
cuggaaaccugagucuuga

SEQ ID NO: 93205 - RNA, 19 nt, Artificial Sequence
  Description of Artificial Sequence: Synthetic oligonucleotide
  Antisense strand to SEQ ID NO: 93124
ucaagacucagguuuccag

SEQ ID NO: 93206 - RNA, 19 nt, Artificial Sequence
  Description of Artificial Sequence: Synthetic oligonucleotide
  Sense strand starting at position 2579 of SEQ ID NO: 1171
agucuugacccaggaauga

SEQ ID NO: 93207 - RNA, 19 nt, Artificial Sequence
  Description of Artificial Sequence: Synthetic oligonucleotide
  Antisense strand to SEQ ID NO: 93126
ucauuccugggucaagacu

SEQ ID NO: 93208 - RNA, 19 nt, Artificial Sequence
  Description of Artificial Sequence: Synthetic oligonucleotide
  Sense strand starting at position 2705 of SEQ ID NO: 1171
gguuuauguuuacucagau

SEQ ID NO: 93209 - RNA, 19 nt, Artificial Sequence
  Description of Artificial Sequence: Synthetic oligonucleotide
  Antisense strand to SEQ ID NO: 93128
aucugaguaaacauaaacc

SEQ ID NO: 93210 - RNA, 19 nt, Artificial Sequence
  Description of Artificial Sequence: Synthetic oligonucleotide
  Sense strand starting at position 2706 of SEQ ID NO: 1171
guuuauguuuacucagaug

SEQ ID NO: 93211 - RNA, 19 nt, Artificial Sequence
  Description of Artificial Sequence: Synthetic oligonucleotide
  Antisense strand to SEQ ID NO: 93130
caucugaguaaacauaaac

SEQ ID NO: 93212 - RNA, 19 nt, Artificial Sequence
  Description of Artificial Sequence: Synthetic oligonucleotide
  Sense strand starting at position 2837 of SEQ ID NO: 1171
agagguucugggcaagauc

SEQ ID NO: 93213 - RNA, 19 nt, Artificial Sequence
  Description of Artificial Sequence: Synthetic oligonucleotide
  Antisense strand to SEQ ID NO: 93132
gaucuugcccagaaccucu

SEQ ID NO: 93214 - RNA, 19 nt, Artificial Sequence
  Description of Artificial Sequence: Synthetic oligonucleotide
  Sense strand starting at position 2928 of SEQ ID NO: 1171
gggugaugugaucacaucu

SEQ ID NO: 93215 - RNA, 19 nt, Artificial Sequence
  Description of Artificial Sequence: Synthetic oligonucleotide
  Antisense strand to SEQ ID NO: 93134
agaugugaucacaucaccc

SEQ ID NO: 93216 - RNA, 19 nt, Artificial Sequence
  Description of Artificial Sequence: Synthetic oligonucleotide
  Sense strand starting at position 2986 of SEQ ID NO: 1171
ccaggaaaguccuccagga

SEQ ID NO: 93217 - RNA, 19 nt, Artificial Sequence
  Description of Artificial Sequence: Synthetic oligonucleotide
  Antisense strand to SEQ ID NO: 93136
uccuggaggacuuuccugg

SEQ ID NO: 93218 - RNA, 19 nt, Artificial Sequence
  Description of Artificial Sequence: Synthetic oligonucleotide
  Sense strand starting at position 3030 of SEQ ID NO: 1171
gugcgagcgacuucugcuu

SEQ ID NO: 93219 - RNA, 19 nt, Artificial Sequence
  Description of Artificial Sequence: Synthetic oligonucleotide
  Antisense strand to SEQ ID NO: 93138
aagcagaagucgcucgcac

SEQ ID NO: 93220 - RNA, 19 nt, Artificial Sequence
  Description of Artificial Sequence: Synthetic oligonucleotide
  Sense strand starting at position 3125 of SEQ ID NO: 1171
acuggagcaccauggaaau

SEQ ID NO: 93221 - RNA, 19 nt, Artificial Sequence
  Description of Artificial Sequence: Synthetic oligonucleotide
  Antisense strand to SEQ ID NO: 93140
auuuccauggugcuccagu

SEQ ID NO: 93222 - RNA, 19 nt, Artificial Sequence
  Description of Artificial Sequence: Synthetic oligonucleotide
  Sense strand starting at position 3218 of SEQ ID NO: 1171
aagagagauugugucaggu

SEQ ID NO: 93223 - RNA, 19 nt, Artificial Sequence
  Description of Artificial Sequence: Synthetic oligonucleotide
  Antisense strand to SEQ ID NO: 93142
accugacacaaucucucuu

SEQ ID NO: 93224 - RNA, 19 nt, Artificial Sequence
  Description of Artificial Sequence: Synthetic oligonucleotide
  Sense strand starting at position 3294 of SEQ ID NO: 1171
auggauaugugucucugau

SEQ ID NO: 93225 - RNA, 19 nt, Artificial Sequence
  Description of Artificial Sequence: Synthetic oligonucleotide
  Antisense strand to SEQ ID NO: 93144
aucagagacacauauccau

SEQ ID NO: 93226 - RNA, 19 nt, Artificial Sequence
  Description of Artificial Sequence: Synthetic oligonucleotide
  Sense strand starting at position 3296 of SEQ ID NO: 1171
ggauaugugucucugauca

SEQ ID NO: 93227 - RNA, 19 nt, Artificial Sequence
  Description of Artificial Sequence: Synthetic oligonucleotide
  Antisense strand to SEQ ID NO: 93146
ugaucagagacacauaucc

SEQ ID NO: 93228 - RNA, 19 nt, Artificial Sequence
  Description of Artificial Sequence: Synthetic oligonucleotide
  Sense strand starting at position 3300 of SEQ ID NO: 1171
augugucucugaucagauu

SEQ ID NO: 93229 - RNA, 19 nt, Artificial Sequence
  Description of Artificial Sequence: Synthetic oligonucleotide
  Antisense strand to SEQ ID NO: 93148
aaucugaucagagacacau

SEQ ID NO: 93230 - RNA, 19 nt, Artificial Sequence
  Description of Artificial Sequence: Synthetic oligonucleotide
  Sense strand starting at position 3341 of SEQ ID NO: 1171
cuuuaaagugcacauaaga

SEQ ID NO: 93231 - RNA, 19 nt, Artificial Sequence
  Description of Artificial Sequence: Synthetic oligonucleotide
  Antisense strand to SEQ ID NO: 93150
ucuuaugugcacuuuaaag

SEQ ID NO: 93232 - RNA, 19 nt, Artificial Sequence
  Description of Artificial Sequence: Synthetic oligonucleotide
  Sense strand starting at position 3352 of SEQ ID NO: 1171
acauaagagguuugaguuu

SEQ ID NO: 93233 - RNA, 19 nt, Artificial Sequence
  Description of Artificial Sequence: Synthetic oligonucleotide
  Antisense strand to SEQ ID NO: 93152
aaacucaaaccucuuaugu

SEQ ID NO: 93234 - RNA, 19 nt, Artificial Sequence
  Description of Artificial Sequence: Synthetic oligonucleotide
  Sense strand starting at position 3370 of SEQ ID NO: 1171
uuaacucuaugucugagau

SEQ ID NO: 93235 - RNA, 19 nt, Artificial Sequence
  Description of Artificial Sequence: Synthetic oligonucleotide
  Antisense strand to SEQ ID NO: 93154
aucucagacauagaguuaa

SEQ ID NO: 93236 - RNA, 19 nt, Artificial Sequence
  Description of Artificial Sequence: Synthetic oligonucleotide
  Sense strand starting at position 3371 of SEQ ID NO: 1171
uaacucuaugucugagaug

SEQ ID NO: 93237 - RNA, 19 nt, Artificial Sequence
  Description of Artificial Sequence: Synthetic oligonucleotide
  Antisense strand to SEQ ID NO: 93156
caucucagacauagaguua

SEQ ID NO: 93238 - RNA, 19 nt, Artificial Sequence
  Description of Artificial Sequence: Synthetic oligonucleotide
  Sense strand starting at position 3602 of SEQ ID NO: 1171
gucucugagcuugauccau

SEQ ID NO: 93239 - RNA, 19 nt, Artificial Sequence
  Description of Artificial Sequence: Synthetic oligonucleotide
  Antisense strand to SEQ ID NO: 93158
auggaucaagcucagagac

SEQ ID NO: 93240 - RNA, 19 nt, Artificial Sequence
  Description of Artificial Sequence: Synthetic oligonucleotide
  Sense strand starting at position 3684 of SEQ ID NO: 1171
ugagcuucugaaugaauug

SEQ ID NO: 93241 - RNA, 19 nt, Artificial Sequence
  Description of Artificial Sequence: Synthetic oligonucleotide
  Antisense strand to SEQ ID NO: 93160
caauucauucagaagcuca

SEQ ID NO: 93242 - RNA, 19 nt, Artificial Sequence
  Description of Artificial Sequence: Synthetic oligonucleotide
  Sense strand starting at position 3812 of SEQ ID NO: 1171
gaaggaauaugggaaauga

SEQ ID NO: 93243 - RNA, 19 nt, Artificial Sequence
  Description of Artificial Sequence: Synthetic oligonucleotide
  Antisense strand to SEQ ID NO: 93162
ucauuucccauauuccuuc

SEQ ID NO: 93244 - RNA, 19 nt, Artificial Sequence
  Description of Artificial Sequence: Synthetic oligonucleotide
  Sense strand starting at position 27 of SEQ ID NO: 1172
ccuugaucuugacuuagag

SEQ ID NO: 93245 - RNA, 19 nt, Artificial Sequence
  Description of Artificial Sequence: Synthetic oligonucleotide
  Antisense strand to SEQ ID NO: 93164
cucuaagucaagaucaagg

SEQ ID NO: 93246 - RNA, 19 nt, Artificial Sequence
  Description of Artificial Sequence: Synthetic oligonucleotide
  Sense strand starting at position 93 of SEQ ID NO: 1172
uuguuaaaucuugggauua

SEQ ID NO: 93247 - RNA, 19 nt, Artificial Sequence
  Description of Artificial Sequence: Synthetic oligonucleotide
  Antisense strand to SEQ ID NO: 93166
uaaucccaagauuuaacaa

SEQ ID NO: 93248 - RNA, 19 nt, Artificial Sequence
  Description of Artificial Sequence: Synthetic oligonucleotide
  Sense strand starting at position 238 of SEQ ID NO: 1172
augaaucauuaggcacaua

SEQ ID NO: 93249 - RNA, 19 nt, Artificial Sequence
  Description of Artificial Sequence: Synthetic oligonucleotide
  Antisense strand to SEQ ID NO: 93168
uaugugccuaaugauucau

SEQ ID NO: 93250 - RNA, 19 nt, Artificial Sequence
  Description of Artificial Sequence: Synthetic oligonucleotide
  Sense strand starting at position 298 of SEQ ID NO: 1172
ggguuuacauuauuaggau

SEQ ID NO: 93251 - RNA, 19 nt, Artificial Sequence
  Description of Artificial Sequence: Synthetic oligonucleotide
  Antisense strand to SEQ ID NO: 93170
auccuaauaauguaaaccc

SEQ ID NO: 93252 - RNA, 19 nt, Artificial Sequence
  Description of Artificial Sequence: Synthetic oligonucleotide
  Sense strand starting at position 394 of SEQ ID NO: 1172
gguuauaugucauuugcaa

SEQ ID NO: 93253 - RNA, 19 nt, Artificial Sequence
  Description of Artificial Sequence: Synthetic oligonucleotide
  Antisense strand to SEQ ID NO: 93172
uugcaaaugacauauaacc

SEQ ID NO: 93254 - RNA, 19 nt, Artificial Sequence
  Description of Artificial Sequence: Synthetic oligonucleotide
  Sense strand starting at position 401 of SEQ ID NO: 1172
ugucauuugcaaugucuca

SEQ ID NO: 93255 - RNA, 19 nt, Artificial Sequence
  Description of Artificial Sequence: Synthetic oligonucleotide
  Antisense strand to SEQ ID NO: 93174
ugagacauugcaaaugaca

SEQ ID NO: 93256 - RNA, 19 nt, Artificial Sequence
  Description of Artificial Sequence: Synthetic oligonucleotide
  Sense strand starting at position 417 of SEQ ID NO: 1172
ucagucaauccauauugua

SEQ ID NO: 93257 - RNA, 19 nt, Artificial Sequence
  Description of Artificial Sequence: Synthetic oligonucleotide
  Antisense strand to SEQ ID NO: 93176
uacaauauggauugacuga

SEQ ID NO: 93258 - RNA, 19 nt, Artificial Sequence
  Description of Artificial Sequence: Synthetic oligonucleotide
  Sense strand starting at position 448 of SEQ ID NO: 1172
acugaagcucagugaaauu

SEQ ID NO: 93259 - RNA, 19 nt, Artificial Sequence
  Description of Artificial Sequence: Synthetic oligonucleotide
  Antisense strand to SEQ ID NO: 93178
aauuucacugagcuucagu

SEQ ID NO: 93260 - RNA, 19 nt, Artificial Sequence
  Description of Artificial Sequence: Synthetic oligonucleotide
  Sense strand starting at position 486 of SEQ ID NO: 1172
uuggcugguaagugacaaa

SEQ ID NO: 93261 - RNA, 19 nt, Artificial Sequence
  Description of Artificial Sequence: Synthetic oligonucleotide
  Antisense strand to SEQ ID NO: 93180
uuugucacuuaccagccaa

SEQ ID NO: 93262 - RNA, 19 nt, Artificial Sequence
  Description of Artificial Sequence: Synthetic oligonucleotide
  Sense strand starting at position 1063 of SEQ ID NO: 1172
uacuaugagugacuuguga

SEQ ID NO: 93263 - RNA, 19 nt, Artificial Sequence
  Description of Artificial Sequence: Synthetic oligonucleotide
  Antisense strand to SEQ ID NO: 93182
ucacaagucacucauagua

SEQ ID NO: 93264 - RNA, 19 nt, Artificial Sequence
  Description of Artificial Sequence: Synthetic oligonucleotide
  Sense strand starting at position 1065 of SEQ ID NO: 1172
cuaugagugacuugugaag

SEQ ID NO: 93265 - RNA, 19 nt, Artificial Sequence
  Description of Artificial Sequence: Synthetic oligonucleotide
  Antisense strand to SEQ ID NO: 93184
cuucacaagucacucauag

SEQ ID NO: 93266 - RNA, 19 nt, Artificial Sequence
  Description of Artificial Sequence: Synthetic oligonucleotide
  Sense strand starting at position 1130 of SEQ ID NO: 1172
gagugaagguaaguaagua

SEQ ID NO: 93267 - RNA, 19 nt, Artificial Sequence
  Description of Artificial Sequence: Synthetic oligonucleotide
  Antisense strand to SEQ ID NO: 93186
uacuuacuuaccuucacuc

SEQ ID NO: 93268 - RNA, 19 nt, Artificial Sequence
  Description of Artificial Sequence: Synthetic oligonucleotide
  Sense strand starting at position 1180 of SEQ ID NO: 1172
agcaaauuaacaggugagu

SEQ ID NO: 93269 - RNA, 19 nt, Artificial Sequence
  Description of Artificial Sequence: Synthetic oligonucleotide
  Antisense strand to SEQ ID NO: 93188
acucaccuguuaauuugcu

SEQ ID NO: 93270 - RNA, 19 nt, Artificial Sequence
  Description of Artificial Sequence: Synthetic oligonucleotide
  Sense strand starting at position 1317 of SEQ ID NO: 1172
aagguauuaagcuggagga

SEQ ID NO: 93271 - RNA, 19 nt, Artificial Sequence
  Description of Artificial Sequence: Synthetic oligonucleotide
  Antisense strand to SEQ ID NO: 93190
uccuccagcuuaauaccuu

SEQ ID NO: 93272 - RNA, 19 nt, Artificial Sequence
  Description of Artificial Sequence: Synthetic oligonucleotide
  Sense strand starting at position 2268 of SEQ ID NO: 1172
ugggccuagaugcaagauu

SEQ ID NO: 93273 - RNA, 19 nt, Artificial Sequence
  Description of Artificial Sequence: Synthetic oligonucleotide
  Antisense strand to SEQ ID NO: 93192
aaucuugcaucuaggccca

SEQ ID NO: 93274 - RNA, 19 nt, Artificial Sequence
  Description of Artificial Sequence: Synthetic oligonucleotide
  Sense strand starting at position 2338 of SEQ ID NO: 1172
acagauugcaggugaggau

SEQ ID NO: 93275 - RNA, 19 nt, Artificial Sequence
  Description of Artificial Sequence: Synthetic oligonucleotide
  Antisense strand to SEQ ID NO: 93194
auccucaccugcaaucugu

SEQ ID NO: 93276 - RNA, 19 nt, Artificial Sequence
  Description of Artificial Sequence: Synthetic oligonucleotide
  Sense strand starting at position 2352 of SEQ ID NO: 1172
aggauauuguggcucagag

SEQ ID NO: 93277 - RNA, 19 nt, Artificial Sequence
  Description of Artificial Sequence: Synthetic oligonucleotide
  Antisense strand to SEQ ID NO: 93196
cucugagccacaauauccu

SEQ ID NO: 93278 - RNA, 19 nt, Artificial Sequence
  Description of Artificial Sequence: Synthetic oligonucleotide
  Sense strand starting at position 2367 of SEQ ID NO: 1172
agagaaguaauucgacuug

SEQ ID NO: 93279 - RNA, 19 nt, Artificial Sequence
  Description of Artificial Sequence: Synthetic oligonucleotide
  Antisense strand to SEQ ID NO: 93198
caagucgaauuacuucucu

SEQ ID NO: 93280 - RNA, 19 nt, Artificial Sequence
  Description of Artificial Sequence: Synthetic oligonucleotide
  Sense strand starting at position 2376 of SEQ ID NO: 1172
auucgacuuguccaacauc

SEQ ID NO: 93281 - RNA, 19 nt, Artificial Sequence
  Description of Artificial Sequence: Synthetic oligonucleotide
  Antisense strand to SEQ ID NO: 93200
gauguuggacaagucgaau

SEQ ID NO: 93282 - RNA, 19 nt, Artificial Sequence
  Description of Artificial Sequence: Synthetic oligonucleotide
  Sense strand starting at position 2379 of SEQ ID NO: 1172
cgacuuguccaacaucaua

SEQ ID NO: 93283 - RNA, 19 nt, Artificial Sequence
  Description of Artificial Sequence: Synthetic oligonucleotide
  Antisense strand to SEQ ID NO: 93202
uaugauguuggacaagucg

SEQ ID NO: 93284 - RNA, 19 nt, Artificial Sequence
  Description of Artificial Sequence: Synthetic oligonucleotide
  Sense strand starting at position 2466 of SEQ ID NO: 1172
uguagugcaugucuuauuu

SEQ ID NO: 93285 - RNA, 19 nt, Artificial Sequence
  Description of Artificial Sequence: Synthetic oligonucleotide
  Antisense strand to SEQ ID NO: 93204
aaauaagacaugcacuaca

SEQ ID NO: 93286 - RNA, 19 nt, Artificial Sequence
  Description of Artificial Sequence: Synthetic oligonucleotide
  Sense strand starting at position 2470 of SEQ ID NO: 1172
gugcaugucuuauuuacaa

SEQ ID NO: 93287 - RNA, 19 nt, Artificial Sequence
  Description of Artificial Sequence: Synthetic oligonucleotide
  Antisense strand to SEQ ID NO: 93206
uuguaaauaagacaugcac

SEQ ID NO: 93288 - RNA, 19 nt, Artificial Sequence
  Description of Artificial Sequence: Synthetic oligonucleotide
  Sense strand starting at position 2598 of SEQ ID NO: 1172
agaguuuaagcauaggugu

SEQ ID NO: 93289 - RNA, 19 nt, Artificial Sequence
  Description of Artificial Sequence: Synthetic oligonucleotide
  Antisense strand to SEQ ID NO: 93208
acaccuaugcuuaaacucu

SEQ ID NO: 93290 - RNA, 19 nt, Artificial Sequence
  Description of Artificial Sequence: Synthetic oligonucleotide
  Sense strand starting at position 2650 of SEQ ID NO: 1172
ccacauuguuggguaaauu

SEQ ID NO: 93291 - RNA, 19 nt, Artificial Sequence
  Description of Artificial Sequence: Synthetic oligonucleotide
  Antisense strand to SEQ ID NO: 93210
aauuuacccaacaaugugg

SEQ ID NO: 93292 - RNA, 19 nt, Artificial Sequence
  Description of Artificial Sequence: Synthetic oligonucleotide
  Sense strand starting at position 2735 of SEQ ID NO: 1172
cucccauuagagugagaaa

SEQ ID NO: 93293 - RNA, 19 nt, Artificial Sequence
  Description of Artificial Sequence: Synthetic oligonucleotide
  Antisense strand to SEQ ID NO: 93212
uuucucacucuaaugggag

SEQ ID NO: 93294 - RNA, 19 nt, Artificial Sequence
  Description of Artificial Sequence: Synthetic oligonucleotide
  Sense strand starting at position 2823 of SEQ ID NO: 1172
guugguauaauaugucaga

SEQ ID NO: 93295 - RNA, 19 nt, Artificial Sequence
  Description of Artificial Sequence: Synthetic oligonucleotide
  Antisense strand to SEQ ID NO: 93214
ucugacauauuauaccaac

SEQ ID NO: 93296 - RNA, 19 nt, Artificial Sequence
  Description of Artificial Sequence: Synthetic oligonucleotide
  Sense strand starting at position 2981 of SEQ ID NO: 1172
ccuacaguggcucagaaau

SEQ ID NO: 93297 - RNA, 19 nt, Artificial Sequence
  Description of Artificial Sequence: Synthetic oligonucleotide
  Antisense strand to SEQ ID NO: 93216
auuucugagccacuguagg

SEQ ID NO: 93298 - RNA, 19 nt, Artificial Sequence
  Description of Artificial Sequence: Synthetic oligonucleotide
  Sense strand starting at position 3082 of SEQ ID NO: 1172
aacugugaguagucaagaa

SEQ ID NO: 93299 - RNA, 19 nt, Artificial Sequence
  Description of Artificial Sequence: Synthetic oligonucleotide
  Antisense strand to SEQ ID NO: 93218
uucuugacuacucacaguu

SEQ ID NO: 93300 - RNA, 19 nt, Artificial Sequence
  Description of Artificial Sequence: Synthetic oligonucleotide
  Sense strand starting at position 3124 of SEQ ID NO: 1172
guuaaucuacugggauaua

SEQ ID NO: 93301 - RNA, 19 nt, Artificial Sequence
  Description of Artificial Sequence: Synthetic oligonucleotide
  Antisense strand to SEQ ID NO: 93220
uauaucccaguagauuaac

SEQ ID NO: 93302 - RNA, 19 nt, Artificial Sequence
  Description of Artificial Sequence: Synthetic oligonucleotide
  Sense strand starting at position 3133 of SEQ ID NO: 1172
cugggauauaucugcugau

SEQ ID NO: 93303 - RNA, 19 nt, Artificial Sequence
  Description of Artificial Sequence: Synthetic oligonucleotide
  Antisense strand to SEQ ID NO: 93222
aucagcagauauaucccag

SEQ ID NO: 93304 - RNA, 19 nt, Artificial Sequence
  Description of Artificial Sequence: Synthetic oligonucleotide
  Sense strand starting at position 3134 of SEQ ID NO: 1172
ugggauauaucugcugaug

SEQ ID NO: 93305 - RNA, 19 nt, Artificial Sequence
  Description of Artificial Sequence: Synthetic oligonucleotide
  Antisense strand to SEQ ID NO: 93224
caucagcagauauauccca

SEQ ID NO: 93306 - RNA, 19 nt, Artificial Sequence
  Description of Artificial Sequence: Synthetic oligonucleotide
  Sense strand starting at position 3159 of SEQ ID NO: 1172
ggaggaacucuuuguagga

SEQ ID NO: 93307 - RNA, 19 nt, Artificial Sequence
  Description of Artificial Sequence: Synthetic oligonucleotide
  Antisense strand to SEQ ID NO: 93226
uccuacaaagaguuccucc

SEQ ID NO: 93308 - RNA, 19 nt, Artificial Sequence
  Description of Artificial Sequence: Synthetic oligonucleotide
  Sense strand starting at position 3284 of SEQ ID NO: 1172
aaaguugguuucuuggaaa

SEQ ID NO: 93309 - RNA, 19 nt, Artificial Sequence
  Description of Artificial Sequence: Synthetic oligonucleotide
  Antisense strand to SEQ ID NO: 93228
uuuccaagaaaccaacuuu

SEQ ID NO: 93310 - RNA, 19 nt, Artificial Sequence
  Description of Artificial Sequence: Synthetic oligonucleotide
  Sense strand starting at position 3320 of SEQ ID NO: 1172
cuaaguaucccuuggauaa

SEQ ID NO: 93311 - RNA, 19 nt, Artificial Sequence
  Description of Artificial Sequence: Synthetic oligonucleotide
  Antisense strand to SEQ ID NO: 93230
uuauccaagggauacuuag

SEQ ID NO: 93312 - RNA, 19 nt, Artificial Sequence
  Description of Artificial Sequence: Synthetic oligonucleotide
  Sense strand starting at position 3324 of SEQ ID NO: 1172
guaucccuuggauaauuau

SEQ ID NO: 93313 - RNA, 19 nt, Artificial Sequence
  Description of Artificial Sequence: Synthetic oligonucleotide
  Antisense strand to SEQ ID NO: 93232
auaauuauccaagggauac

SEQ ID NO: 93314 - RNA, 19 nt, Artificial Sequence
  Description of Artificial Sequence: Synthetic oligonucleotide
  Sense strand starting at position 3442 of SEQ ID NO: 1172
ugauaugucaaguggagag

SEQ ID NO: 93315 - RNA, 19 nt, Artificial Sequence
  Description of Artificial Sequence: Synthetic oligonucleotide
  Antisense strand to SEQ ID NO: 93234
cucuccacuugacauauca

SEQ ID NO: 93316 - RNA, 19 nt, Artificial Sequence
  Description of Artificial Sequence: Synthetic oligonucleotide
  Sense strand starting at position 3615 of SEQ ID NO: 1172
gaaguugagaagugaaguu

SEQ ID NO: 93317 - RNA, 19 nt, Artificial Sequence
  Description of Artificial Sequence: Synthetic oligonucleotide
  Antisense strand to SEQ ID NO: 93236
aacuucacuucucaacuuc

SEQ ID NO: 93318 - RNA, 19 nt, Artificial Sequence
  Description of Artificial Sequence: Synthetic oligonucleotide
  Sense strand starting at position 3727 of SEQ ID NO: 1172
uuagaagcagggugugaau

SEQ ID NO: 93319 - RNA, 19 nt, Artificial Sequence
  Description of Artificial Sequence: Synthetic oligonucleotide
  Antisense strand to SEQ ID NO: 93238
auucacacccugcuucuaa

SEQ ID NO: 93320 - RNA, 19 nt, Artificial Sequence
  Description of Artificial Sequence: Synthetic oligonucleotide
  Sense strand starting at position 3790 of SEQ ID NO: 1172
ugggauguccacggagaga

SEQ ID NO: 93321 - RNA, 19 nt, Artificial Sequence
  Description of Artificial Sequence: Synthetic oligonucleotide
  Antisense strand to SEQ ID NO: 93240
ucucuccguggacauccca

SEQ ID NO: 93322 - RNA, 19 nt, Artificial Sequence
  Description of Artificial Sequence: Synthetic oligonucleotide
  Sense strand starting at position 3877 of SEQ ID NO: 1172
ggcaaagacaucggagacu

SEQ ID NO: 93323 - RNA, 19 nt, Artificial Sequence
  Description of Artificial Sequence: Synthetic oligonucleotide
  Antisense strand to SEQ ID NO: 93242
agucuccgaugucuuugcc

SEQ ID NO: 93324 - RNA, 19 nt, Artificial Sequence
  Description of Artificial Sequence: Synthetic oligonucleotide
  Sense strand starting at position 3899 of SEQ ID NO: 1175
cugugaaguucugaauauc

SEQ ID NO: 93325 - RNA, 19 nt, Artificial Sequence
  Description of Artificial Sequence: Synthetic oligonucleotide
  Antisense strand to SEQ ID NO: 93244
gauauucagaacuucacag

SEQ ID NO: 93326 - RNA, 19 nt, Artificial Sequence
  Description of Artificial Sequence: Synthetic oligonucleotide
  Sense strand starting at position 3848 of SEQ ID NO: 1175
gcagcuguuccagggacuu

SEQ ID NO: 93327 - RNA, 19 nt, Artificial Sequence
  Description of Artificial Sequence: Synthetic oligonucleotide
  Antisense strand to SEQ ID NO: 93246
aagucccuggaacagcugc

SEQ ID NO: 93328 - RNA, 19 nt, Artificial Sequence
  Description of Artificial Sequence: Synthetic oligonucleotide
  Sense strand starting at position 3489 of SEQ ID NO: 1175
ugcuaucccucucuggaaa

SEQ ID NO: 93329 - RNA, 19 nt, Artificial Sequence
  Description of Artificial Sequence: Synthetic oligonucleotide
  Antisense strand to SEQ ID NO: 93248
uuuccagagagggauagca

SEQ ID NO: 93330 - RNA, 19 nt, Artificial Sequence
  Description of Artificial Sequence: Synthetic oligonucleotide
  Sense strand starting at position 3026 of SEQ ID NO: 1175
ggaaccuucucuugaacca

SEQ ID NO: 93331 - RNA, 19 nt, Artificial Sequence
  Description of Artificial Sequence: Synthetic oligonucleotide
  Antisense strand to SEQ ID NO: 93250
ugguucaagagaagguucc

SEQ ID NO: 93332 - RNA, 19 nt, Artificial Sequence
  Description of Artificial Sequence: Synthetic oligonucleotide
  Sense strand starting at position 3010 of SEQ ID NO: 1175
gcucaaggcuucuagagga

SEQ ID NO: 93333 - RNA, 19 nt, Artificial Sequence
  Description of Artificial Sequence: Synthetic oligonucleotide
  Antisense strand to SEQ ID NO: 93252
uccucuagaagccuugagc

SEQ ID NO: 93334 - RNA, 19 nt, Artificial Sequence
  Description of Artificial Sequence: Synthetic oligonucleotide
  Sense strand starting at position 2967 of SEQ ID NO: 1175
uucugugugucccacaaau

SEQ ID NO: 93335 - RNA, 19 nt, Artificial Sequence
  Description of Artificial Sequence: Synthetic oligonucleotide
  Antisense strand to SEQ ID NO: 93254
auuugugggacacacagaa

SEQ ID NO: 93336 - RNA, 19 nt, Artificial Sequence
  Description of Artificial Sequence: Synthetic oligonucleotide
  Sense strand starting at position 2742 of SEQ ID NO: 1175
cugacuucccgccauguga

SEQ ID NO: 93337 - RNA, 19 nt, Artificial Sequence
  Description of Artificial Sequence: Synthetic oligonucleotide
  Antisense strand to SEQ ID NO: 93256
ucacauggcgggaagucag

SEQ ID NO: 93338 - RNA, 19 nt, Artificial Sequence
  Description of Artificial Sequence: Synthetic oligonucleotide
  Sense strand starting at position 2046 of SEQ ID NO: 1175
ccuguauccuccugggcau

SEQ ID NO: 93339 - RNA, 19 nt, Artificial Sequence
  Description of Artificial Sequence: Synthetic oligonucleotide
  Antisense strand to SEQ ID NO: 93258
augcccaggaggauacagg

SEQ ID NO: 93340 - RNA, 19 nt, Artificial Sequence
  Description of Artificial Sequence: Synthetic oligonucleotide
  Sense strand starting at position 2034 of SEQ ID NO: 1175
ggcaaaugcucuccuguau

SEQ ID NO: 93341 - RNA, 19 nt, Artificial Sequence
  Description of Artificial Sequence: Synthetic oligonucleotide
  Antisense strand to SEQ ID NO: 93260
auacaggagagcauuugcc

SEQ ID NO: 93342 - RNA, 19 nt, Artificial Sequence
  Description of Artificial Sequence: Synthetic oligonucleotide
  Sense strand starting at position 1465 of SEQ ID NO: 1175
gcaaaugugacccaaggca

SEQ ID NO: 93343 - RNA, 19 nt, Artificial Sequence
  Description of Artificial Sequence: Synthetic oligonucleotide
  Antisense strand to SEQ ID NO: 93262
ugccuugggucacauuugc

SEQ ID NO: 93344 - RNA, 19 nt, Artificial Sequence
  Description of Artificial Sequence: Synthetic oligonucleotide
  Sense strand starting at position 1452 of SEQ ID NO: 1175
agaguuggcacuugcaaau

SEQ ID NO: 93345 - RNA, 19 nt, Artificial Sequence
  Description of Artificial Sequence: Synthetic oligonucleotide
  Antisense strand to SEQ ID NO: 93264
auuugcaagugccaacucu

SEQ ID NO: 93346 - RNA, 19 nt, Artificial Sequence
  Description of Artificial Sequence: Synthetic oligonucleotide
  Sense strand starting at position 1375 of SEQ ID NO: 1175
uggcaaaucugaucucaga

SEQ ID NO: 93347 - RNA, 19 nt, Artificial Sequence
  Description of Artificial Sequence: Synthetic oligonucleotide
  Antisense strand to SEQ ID NO: 93266
ucugagaucagauuugcca

SEQ ID NO: 93348 - RNA, 19 nt, Artificial Sequence
  Description of Artificial Sequence: Synthetic oligonucleotide
  Sense strand starting at position 1181 of SEQ ID NO: 1175
cgggaaauccucuagugcu

SEQ ID NO: 93349 - RNA, 19 nt, Artificial Sequence
  Description of Artificial Sequence: Synthetic oligonucleotide
  Antisense strand to SEQ ID NO: 93268
agcacuagaggauuucccg

SEQ ID NO: 93350 - RNA, 19 nt, Artificial Sequence
  Description of Artificial Sequence: Synthetic oligonucleotide
  Sense strand starting at position 730 of SEQ ID NO: 1175
ggaagaaccuuugugguuu

SEQ ID NO: 93351 - RNA, 19 nt, Artificial Sequence
  Description of Artificial Sequence: Synthetic oligonucleotide
  Antisense strand to SEQ ID NO: 93270
aaaccacaaagguucuucc

SEQ ID NO: 93352 - RNA, 19 nt, Artificial Sequence
  Description of Artificial Sequence: Synthetic oligonucleotide
  Sense strand starting at position 105 of SEQ ID NO: 1175
uauggucuccaaggaaagu

SEQ ID NO: 93353 - RNA, 19 nt, Artificial Sequence
  Description of Artificial Sequence: Synthetic oligonucleotide
  Antisense strand to SEQ ID NO: 93272
acuuuccuuggagaccaua

SEQ ID NO: 93354 - RNA, 19 nt, Artificial Sequence
  Description of Artificial Sequence: Synthetic oligonucleotide
  Sense strand starting at position 101 of SEQ ID NO: 1175
aguauauggucuccaagga

SEQ ID NO: 93355 - RNA, 19 nt, Artificial Sequence
  Description of Artificial Sequence: Synthetic oligonucleotide
  Antisense strand to SEQ ID NO: 93274
uccuuggagaccauauacu

SEQ ID NO: 93356 - RNA, 19 nt, Artificial Sequence
  Description of Artificial Sequence: Synthetic oligonucleotide
  Sense strand starting at position 66 of SEQ ID NO: 1175
ggaaauccaugcuguacca

SEQ ID NO: 93357 - RNA, 19 nt, Artificial Sequence
  Description of Artificial Sequence: Synthetic oligonucleotide
  Antisense strand to SEQ ID NO: 93276
ugguacagcauggauuucc

SEQ ID NO: 93358 - RNA, 19 nt, Artificial Sequence
  Description of Artificial Sequence: Synthetic oligonucleotide
  Sense strand starting at position 63 of SEQ ID NO: 1175
gcuggaaauccaugcugua

SEQ ID NO: 93359 - RNA, 19 nt, Artificial Sequence
  Description of Artificial Sequence: Synthetic oligonucleotide
  Antisense strand to SEQ ID NO: 93278
uacagcauggauuuccagc

SEQ ID NO: 93360 - RNA, 19 nt, Artificial Sequence
  Description of Artificial Sequence: Synthetic oligonucleotide
  Sense strand starting at position 3971 of SEQ ID NO: 1174
uggcuucucaaaggagagu

SEQ ID NO: 93361 - RNA, 19 nt, Artificial Sequence
  Description of Artificial Sequence: Synthetic oligonucleotide
  Antisense strand to SEQ ID NO: 93280
acucuccuuugagaagcca

SEQ ID NO: 93362 - RNA, 19 nt, Artificial Sequence
  Description of Artificial Sequence: Synthetic oligonucleotide
  Sense strand starting at position 3853 of SEQ ID NO: 1174
cagcguaguaugucuggua

SEQ ID NO: 93363 - RNA, 19 nt, Artificial Sequence
  Description of Artificial Sequence: Synthetic oligonucleotide
  Antisense strand to SEQ ID NO: 93282
uaccagacauacuacgcug

SEQ ID NO: 93364 - RNA, 19 nt, Artificial Sequence
  Description of Artificial Sequence: Synthetic oligonucleotide
  Sense strand starting at position 3844 of SEQ ID NO: 1174
gaauuaauccagcguagua

SEQ ID NO: 93365 - RNA, 19 nt, Artificial Sequence
  Description of Artificial Sequence: Synthetic oligonucleotide
  Antisense strand to SEQ ID NO: 93284
uacuacgcuggauuaauuc

SEQ ID NO: 93366 - RNA, 19 nt, Artificial Sequence
  Description of Artificial Sequence: Synthetic oligonucleotide
  Sense strand starting at position 3841 of SEQ ID NO: 1174
gcagaauuaauccagcgua

SEQ ID NO: 93367 - RNA, 19 nt, Artificial Sequence
  Description of Artificial Sequence: Synthetic oligonucleotide
  Antisense strand to SEQ ID NO: 93286
uacgcuggauuaauucugc

SEQ ID NO: 93368 - RNA, 19 nt, Artificial Sequence
  Description of Artificial Sequence: Synthetic oligonucleotide
  Sense strand starting at position 3463 of SEQ ID NO: 1174
gaguaucugucucuuuguu

SEQ ID NO: 93369 - RNA, 19 nt, Artificial Sequence
  Description of Artificial Sequence: Synthetic oligonucleotide
  Antisense strand to SEQ ID NO: 93288
aacaaagagacagauacuc

SEQ ID NO: 93370 - RNA, 19 nt, Artificial Sequence
  Description of Artificial Sequence: Synthetic oligonucleotide
  Sense strand starting at position 3459 of SEQ ID NO: 1174
gacugaguaucugucucuu

SEQ ID NO: 93371 - RNA, 19 nt, Artificial Sequence
  Description of Artificial Sequence: Synthetic oligonucleotide
  Antisense strand to SEQ ID NO: 93290
aagagacagauacucaguc

SEQ ID NO: 93372 - RNA, 19 nt, Artificial Sequence
  Description of Artificial Sequence: Synthetic oligonucleotide
  Sense strand starting at position 3337 of SEQ ID NO: 1174
ugcaaagaguuacucagaa

SEQ ID NO: 93373 - RNA, 19 nt, Artificial Sequence
  Description of Artificial Sequence: Synthetic oligonucleotide
  Antisense strand to SEQ ID NO: 93292
uucugaguaacucuuugca

SEQ ID NO: 93374 - RNA, 19 nt, Artificial Sequence
  Description of Artificial Sequence: Synthetic oligonucleotide
  Sense strand starting at position 3210 of SEQ ID NO: 1174
ggacucugccuuuagacaa

SEQ ID NO: 93375 - RNA, 19 nt, Artificial Sequence
  Description of Artificial Sequence: Synthetic oligonucleotide
  Antisense strand to SEQ ID NO: 93294
uugucuaaaggcagagucc

SEQ ID NO: 93376 - RNA, 19 nt, Artificial Sequence
  Description of Artificial Sequence: Synthetic oligonucleotide
  Sense strand starting at position 3207 of SEQ ID NO: 1174
ccaggacucugccuuuaga

SEQ ID NO: 93377 - RNA, 19 nt, Artificial Sequence
  Description of Artificial Sequence: Synthetic oligonucleotide
  Antisense strand to SEQ ID NO: 93296
ucuaaaggcagaguccugg

SEQ ID NO: 93378 - RNA, 19 nt, Artificial Sequence
  Description of Artificial Sequence: Synthetic oligonucleotide
  Sense strand starting at position 3182 of SEQ ID NO: 1174
gacgguucuccagauccuu

SEQ ID NO: 93379 - RNA, 19 nt, Artificial Sequence
  Description of Artificial Sequence: Synthetic oligonucleotide
  Antisense strand to SEQ ID NO: 93298
aaggaucuggagaaccguc

SEQ ID NO: 93380 - RNA, 19 nt, Artificial Sequence
  Description of Artificial Sequence: Synthetic oligonucleotide
  Sense strand starting at position 3178 of SEQ ID NO: 1174
ucgggacgguucuccagau

SEQ ID NO: 93381 - RNA, 19 nt, Artificial Sequence
  Description of Artificial Sequence: Synthetic oligonucleotide
  Antisense strand to SEQ ID NO: 93300
aucuggagaaccgucccga

SEQ ID NO: 93382 - RNA, 19 nt, Artificial Sequence
  Description of Artificial Sequence: Synthetic oligonucleotide
  Sense strand starting at position 3053 of SEQ ID NO: 1174
gucccuagcgcggaaaguu

SEQ ID NO: 93383 - RNA, 19 nt, Artificial Sequence
  Description of Artificial Sequence: Synthetic oligonucleotide
  Antisense strand to SEQ ID NO: 93302
aacuuuccgcgcuagggac

SEQ ID NO: 93384 - RNA, 19 nt, Artificial Sequence
  Description of Artificial Sequence: Synthetic oligonucleotide
  Sense strand starting at position 2948 of SEQ ID NO: 1174
gaguguguucccgugccca

SEQ ID NO: 93385 - RNA, 19 nt, Artificial Sequence
  Description of Artificial Sequence: Synthetic oligonucleotide
  Antisense strand to SEQ ID NO: 93304
ugggcacgggaacacacuc

SEQ ID NO: 93386 - RNA, 19 nt, Artificial Sequence
  Description of Artificial Sequence: Synthetic oligonucleotide
  Sense strand starting at position 2594 of SEQ ID NO: 1174
uuuggagaacuaggauguu

SEQ ID NO: 93387 - RNA, 19 nt, Artificial Sequence
  Description of Artificial Sequence: Synthetic oligonucleotide
  Antisense strand to SEQ ID NO: 93306
aacauccuaguucuccaaa

SEQ ID NO: 93388 - RNA, 19 nt, Artificial Sequence
  Description of Artificial Sequence: Synthetic oligonucleotide
  Sense strand starting at position 2557 of SEQ ID NO: 1174
ucuagugguaucuggaaua

SEQ ID NO: 93389 - RNA, 19 nt, Artificial Sequence
  Description of Artificial Sequence: Synthetic oligonucleotide
  Antisense strand to SEQ ID NO: 93308
uauuccagauaccacuaga

SEQ ID NO: 93390 - RNA, 19 nt, Artificial Sequence
  Description of Artificial Sequence: Synthetic oligonucleotide
  Sense strand starting at position 2381 of SEQ ID NO: 1174
gagggucuaucuuucuauc

SEQ ID NO: 93391 - RNA, 19 nt, Artificial Sequence
  Description of Artificial Sequence: Synthetic oligonucleotide
  Antisense strand to SEQ ID NO: 93310
gauagaaagauagacccuc

SEQ ID NO: 93392 - RNA, 19 nt, Artificial Sequence
  Description of Artificial Sequence: Synthetic oligonucleotide
  Sense strand starting at position 2276 of SEQ ID NO: 1174
gagaucugcuuucuugguu

SEQ ID NO: 93393 - RNA, 19 nt, Artificial Sequence
  Description of Artificial Sequence: Synthetic oligonucleotide
  Antisense strand to SEQ ID NO: 93312
aaccaagaaagcagaucuc

SEQ ID NO: 93394 - RNA, 19 nt, Artificial Sequence
  Description of Artificial Sequence: Synthetic oligonucleotide
  Sense strand starting at position 1804 of SEQ ID NO: 1174
ggcguuagccagcuucaua

SEQ ID NO: 93395 - RNA, 19 nt, Artificial Sequence
  Description of Artificial Sequence: Synthetic oligonucleotide
  Antisense strand to SEQ ID NO: 93314
uaugaagcuggcuaacgcc

SEQ ID NO: 93396 - RNA, 19 nt, Artificial Sequence
  Description of Artificial Sequence: Synthetic oligonucleotide
  Sense strand starting at position 1803 of SEQ ID NO: 1174
cggcguuagccagcuucau

SEQ ID NO: 93397 - RNA, 19 nt, Artificial Sequence
  Description of Artificial Sequence: Synthetic oligonucleotide
  Antisense strand to SEQ ID NO: 93316
augaagcuggcuaacgccg

SEQ ID NO: 93398 - RNA, 19 nt, Artificial Sequence
  Description of Artificial Sequence: Synthetic oligonucleotide
  Sense strand starting at position 1079 of SEQ ID NO: 1174
augagugcuaaaggacaga

SEQ ID NO: 93399 - RNA, 19 nt, Artificial Sequence
  Description of Artificial Sequence: Synthetic oligonucleotide
  Antisense strand to SEQ ID NO: 93318
ucuguccuuuagcacucau

SEQ ID NO: 93400 - RNA, 19 nt, Artificial Sequence
  Description of Artificial Sequence: Synthetic oligonucleotide
  Sense strand starting at position 1072 of SEQ ID NO: 1174
aauuacgaugagugcuaaa

SEQ ID NO: 93401 - RNA, 19 nt, Artificial Sequence
  Description of Artificial Sequence: Synthetic oligonucleotide
  Antisense strand to SEQ ID NO: 93320
uuuagcacucaucguaauu

SEQ ID NO: 93402 - RNA, 19 nt, Artificial Sequence
  Description of Artificial Sequence: Synthetic oligonucleotide
  Sense strand starting at position 1071 of SEQ ID NO: 1174
aaauuacgaugagugcuaa

SEQ ID NO: 93403 - RNA, 19 nt, Artificial Sequence
  Description of Artificial Sequence: Synthetic oligonucleotide
  Antisense strand to SEQ ID NO: 93322
uuagcacucaucguaauuu

SEQ ID NO: 93404 - RNA, 19 nt, Artificial Sequence
  Description of Artificial Sequence: Synthetic oligonucleotide
  Sense strand starting at position 1069 of SEQ ID NO: 1174
ggaaauuacgaugagugcu

SEQ ID NO: 93405 - RNA, 19 nt, Artificial Sequence
  Description of Artificial Sequence: Synthetic oligonucleotide
  Antisense strand to SEQ ID NO: 93324
agcacucaucguaauuucc

SEQ ID NO: 93406 - RNA, 19 nt, Artificial Sequence
  Description of Artificial Sequence: Synthetic oligonucleotide
  Sense strand starting at position 1066 of SEQ ID NO: 1174
aguggaaauuacgaugagu

SEQ ID NO: 93407 - RNA, 19 nt, Artificial Sequence
  Description of Artificial Sequence: Synthetic oligonucleotide
  Antisense strand to SEQ ID NO: 93326
acucaucguaauuuccacu

SEQ ID NO: 93408 - RNA, 19 nt, Artificial Sequence
  Description of Artificial Sequence: Synthetic oligonucleotide
  Sense strand starting at position 777 of SEQ ID NO: 1174
agucucacucugcgaucua

SEQ ID NO: 93409 - RNA, 19 nt, Artificial Sequence
  Description of Artificial Sequence: Synthetic oligonucleotide
  Antisense strand to SEQ ID NO: 93328
uagaucgcagagugagacu

SEQ ID NO: 93410 - RNA, 19 nt, Artificial Sequence
  Description of Artificial Sequence: Synthetic oligonucleotide
  Sense strand starting at position 695 of SEQ ID NO: 1174
caccgaauuuccggaguca

SEQ ID NO: 93411 - RNA, 19 nt, Artificial Sequence
  Description of Artificial Sequence: Synthetic oligonucleotide
  Antisense strand to SEQ ID NO: 93330
ugacuccggaaauucggug

SEQ ID NO: 93412 - RNA, 19 nt, Artificial Sequence
  Description of Artificial Sequence: Synthetic oligonucleotide
  Sense strand starting at position 538 of SEQ ID NO: 1174
uucuucccuugggaaagau

SEQ ID NO: 93413 - RNA, 19 nt, Artificial Sequence
  Description of Artificial Sequence: Synthetic oligonucleotide
  Antisense strand to SEQ ID NO: 93332
aucuuucccaagggaagaa

SEQ ID NO: 93414 - RNA, 19 nt, Artificial Sequence
  Description of Artificial Sequence: Synthetic oligonucleotide
  Sense strand starting at position 535 of SEQ ID NO: 1174
cccuucuucccuugggaaa

SEQ ID NO: 93415 - RNA, 19 nt, Artificial Sequence
  Description of Artificial Sequence: Synthetic oligonucleotide
  Antisense strand to SEQ ID NO: 93334
uuucccaagggaagaaggg

SEQ ID NO: 93416 - RNA, 19 nt, Artificial Sequence
  Description of Artificial Sequence: Synthetic oligonucleotide
  Sense strand starting at position 378 of SEQ ID NO: 1174
gcaggacuuuaucuuacaa

SEQ ID NO: 93417 - RNA, 19 nt, Artificial Sequence
  Description of Artificial Sequence: Synthetic oligonucleotide
  Antisense strand to SEQ ID NO: 93336
uuguaagauaaaguccugc

SEQ ID NO: 93418 - RNA, 19 nt, Artificial Sequence
  Description of Artificial Sequence: Synthetic oligonucleotide
  Sense strand starting at position 375 of SEQ ID NO: 1174
ucagcaggacuuuaucuua

SEQ ID NO: 93419 - RNA, 19 nt, Artificial Sequence
  Description of Artificial Sequence: Synthetic oligonucleotide
  Antisense strand to SEQ ID NO: 93338
uaagauaaaguccugcuga

SEQ ID NO: 93420 - RNA, 19 nt, Artificial Sequence
  Description of Artificial Sequence: Synthetic oligonucleotide
  Sense strand starting at position 334 of SEQ ID NO: 1174
uugcuaagucugugaaguc

SEQ ID NO: 93421 - RNA, 19 nt, Artificial Sequence
  Description of Artificial Sequence: Synthetic oligonucleotide
  Antisense strand to SEQ ID NO: 93340
gacuucacagacuuagcaa

SEQ ID NO: 93422 - RNA, 19 nt, Artificial Sequence
  Description of Artificial Sequence: Synthetic oligonucleotide
  Sense strand starting at position 333 of SEQ ID NO: 1174
auugcuaagucugugaagu

SEQ ID NO: 93423 - RNA, 19 nt, Artificial Sequence
  Description of Artificial Sequence: Synthetic oligonucleotide
  Antisense strand to SEQ ID NO: 93342
acuucacagacuuagcaau

SEQ ID NO: 93424 - RNA, 19 nt, Artificial Sequence
  Description of Artificial Sequence: Synthetic oligonucleotide
  Sense strand starting at position 332 of SEQ ID NO: 1174
cauugcuaagucugugaag

SEQ ID NO: 93425 - RNA, 19 nt, Artificial Sequence
  Description of Artificial Sequence: Synthetic oligonucleotide
  Antisense strand to SEQ ID NO: 93344
cuucacagacuuagcaaug

SEQ ID NO: 93426 - RNA, 19 nt, Artificial Sequence
  Description of Artificial Sequence: Synthetic oligonucleotide
  Sense strand starting at position 253 of SEQ ID NO: 1174
ucccauuagugugcaaauu

SEQ ID NO: 93427 - RNA, 19 nt, Artificial Sequence
  Description of Artificial Sequence: Synthetic oligonucleotide
  Antisense strand to SEQ ID NO: 93346
aauuugcacacuaauggga

SEQ ID NO: 93428 - RNA, 19 nt, Artificial Sequence
  Description of Artificial Sequence: Synthetic oligonucleotide
  Sense strand starting at position 252 of SEQ ID NO: 1174
cucccauuagugugcaaau

SEQ ID NO: 93429 - RNA, 19 nt, Artificial Sequence
  Description of Artificial Sequence: Synthetic oligonucleotide
  Antisense strand to SEQ ID NO: 93348
auuugcacacuaaugggag

SEQ ID NO: 93430 - RNA, 19 nt, Artificial Sequence
  Description of Artificial Sequence: Synthetic oligonucleotide
  Sense strand starting at position 223 of SEQ ID NO: 1174
uucugagauccucagcuca

SEQ ID NO: 93431 - RNA, 19 nt, Artificial Sequence
  Description of Artificial Sequence: Synthetic oligonucleotide
  Antisense strand to SEQ ID NO: 93350
ugagcugaggaucucagaa

SEQ ID NO: 93432 - RNA, 19 nt, Artificial Sequence
  Description of Artificial Sequence: Synthetic oligonucleotide
  Sense strand starting at position 156 of SEQ ID NO: 1174
ggaucuucugccuagcaaa

SEQ ID NO: 93433 - RNA, 19 nt, Artificial Sequence
  Description of Artificial Sequence: Synthetic oligonucleotide
  Antisense strand to SEQ ID NO: 93352
uuugcuaggcagaagaucc

SEQ ID NO: 93434 - RNA, 19 nt, Artificial Sequence
  Description of Artificial Sequence: Synthetic oligonucleotide
  Sense strand starting at position 155 of SEQ ID NO: 1174
uggaucuucugccuagcaa

SEQ ID NO: 93435 - RNA, 19 nt, Artificial Sequence
  Description of Artificial Sequence: Synthetic oligonucleotide
  Antisense strand to SEQ ID NO: 93354
uugcuaggcagaagaucca

SEQ ID NO: 93436 - RNA, 19 nt, Artificial Sequence
  Description of Artificial Sequence: Synthetic oligonucleotide
  Sense strand starting at position 127 of SEQ ID NO: 1174
ggguuccucagucaagguu

SEQ ID NO: 93437 - RNA, 19 nt, Artificial Sequence
  Description of Artificial Sequence: Synthetic oligonucleotide
  Antisense strand to SEQ ID NO: 93356
aaccuugacugaggaaccc

SEQ ID NO: 93438 - RNA, 19 nt, Artificial Sequence
  Description of Artificial Sequence: Synthetic oligonucleotide
  Sense strand starting at position 57 of SEQ ID NO: 1174
agguuuacuguugaucuua

SEQ ID NO: 93439 - RNA, 19 nt, Artificial Sequence
  Description of Artificial Sequence: Synthetic oligonucleotide
  Antisense strand to SEQ ID NO: 93358
uaagaucaacaguaaaccu

SEQ ID NO: 93440 - RNA, 19 nt, Artificial Sequence
  Description of Artificial Sequence: Synthetic oligonucleotide
  Sense strand starting at position 3947 of SEQ ID NO: 1173
uucucaucucagugagggu

SEQ ID NO: 93441 - RNA, 19 nt, Artificial Sequence
  Description of Artificial Sequence: Synthetic oligonucleotide
  Antisense strand to SEQ ID NO: 93360
acccucacugagaugagaa

SEQ ID NO: 93442 - RNA, 19 nt, Artificial Sequence
  Description of Artificial Sequence: Synthetic oligonucleotide
  Sense strand starting at position 3908 of SEQ ID NO: 1173
gcaggaacuuugguuauua

SEQ ID NO: 93443 - RNA, 19 nt, Artificial Sequence
  Description of Artificial Sequence: Synthetic oligonucleotide
  Antisense strand to SEQ ID NO: 93362
uaauaaccaaaguuccugc

SEQ ID NO: 93444 - RNA, 19 nt, Artificial Sequence
  Description of Artificial Sequence: Synthetic oligonucleotide
  Sense strand starting at position 3899 of SEQ ID NO: 1173
gggauuaaggcaggaacuu

SEQ ID NO: 93445 - RNA, 19 nt, Artificial Sequence
  Description of Artificial Sequence: Synthetic oligonucleotide
  Antisense strand to SEQ ID NO: 93364
aaguuccugccuuaauccc

SEQ ID NO: 93446 - RNA, 19 nt, Artificial Sequence
  Description of Artificial Sequence: Synthetic oligonucleotide
  Sense strand starting at position 3785 of SEQ ID NO: 1173
cuuguacagcuccaagaua

SEQ ID NO: 93447 - RNA, 19 nt, Artificial Sequence
  Description of Artificial Sequence: Synthetic oligonucleotide
  Antisense strand to SEQ ID NO: 93366
uaucuuggagcuguacaag

SEQ ID NO: 93448 - RNA, 19 nt, Artificial Sequence
  Description of Artificial Sequence: Synthetic oligonucleotide
  Sense strand starting at position 3740 of SEQ ID NO: 1173
cuuauccuccgaugagcaa

SEQ ID NO: 93449 - RNA, 19 nt, Artificial Sequence
  Description of Artificial Sequence: Synthetic oligonucleotide
  Antisense strand to SEQ ID NO: 93368
uugcucaucggaggauaag

SEQ ID NO: 93450 - RNA, 19 nt, Artificial Sequence
  Description of Artificial Sequence: Synthetic oligonucleotide
  Sense strand starting at position 3368 of SEQ ID NO: 1173
gagauuaagucuugcucuc

SEQ ID NO: 93451 - RNA, 19 nt, Artificial Sequence
  Description of Artificial Sequence: Synthetic oligonucleotide
  Antisense strand to SEQ ID NO: 93370
gagagcaagacuuaaucuc

SEQ ID NO: 93452 - RNA, 19 nt, Artificial Sequence
  Description of Artificial Sequence: Synthetic oligonucleotide
  Sense strand starting at position 2987 of SEQ ID NO: 1173
agccaauauugggucucua

SEQ ID NO: 93453 - RNA, 19 nt, Artificial Sequence
  Description of Artificial Sequence: Synthetic oligonucleotide
  Antisense strand to SEQ ID NO: 93372
uagagacccaauauuggcu

SEQ ID NO: 93454 - RNA, 19 nt, Artificial Sequence
  Description of Artificial Sequence: Synthetic oligonucleotide
  Sense strand starting at position 2926 of SEQ ID NO: 1173
gucccagauuucugugguu

SEQ ID NO: 93455 - RNA, 19 nt, Artificial Sequence
  Description of Artificial Sequence: Synthetic oligonucleotide
  Antisense strand to SEQ ID NO: 93374
aaccacagaaaucugggac

SEQ ID NO: 93456 - RNA, 19 nt, Artificial Sequence
  Description of Artificial Sequence: Synthetic oligonucleotide
  Sense strand starting at position 2918 of SEQ ID NO: 1173
gacacuaggucccagauuu

SEQ ID NO: 93457 - RNA, 19 nt, Artificial Sequence
  Description of Artificial Sequence: Synthetic oligonucleotide
  Antisense strand to SEQ ID NO: 93376
aaaucugggaccuaguguc

SEQ ID NO: 93458 - RNA, 19 nt, Artificial Sequence
  Description of Artificial Sequence: Synthetic oligonucleotide
  Sense strand starting at position 2906 of SEQ ID NO: 1173
uuacguugccaagacacua

SEQ ID NO: 93459 - RNA, 19 nt, Artificial Sequence
  Description of Artificial Sequence: Synthetic oligonucleotide
  Antisense strand to SEQ ID NO: 93378
uagugucuuggcaacguaa

SEQ ID NO: 93460 - RNA, 19 nt, Artificial Sequence
  Description of Artificial Sequence: Synthetic oligonucleotide
  Sense strand starting at position 2903 of SEQ ID NO: 1173
ucauuacguugccaagaca

SEQ ID NO: 93461 - RNA, 19 nt, Artificial Sequence
  Description of Artificial Sequence: Synthetic oligonucleotide
  Antisense strand to SEQ ID NO: 93380
ugucuuggcaacguaauga

SEQ ID NO: 93462 - RNA, 19 nt, Artificial Sequence
  Description of Artificial Sequence: Synthetic oligonucleotide
  Sense strand starting at position 2546 of SEQ ID NO: 1173
gaaccugaguuccuuuaug

SEQ ID NO: 93463 - RNA, 19 nt, Artificial Sequence
  Description of Artificial Sequence: Synthetic oligonucleotide
  Antisense strand to SEQ ID NO: 93382
cauaaaggaacucagguuc

SEQ ID NO: 93464 - RNA, 19 nt, Artificial Sequence
  Description of Artificial Sequence: Synthetic oligonucleotide
  Sense strand starting at position 2533 of SEQ ID NO: 1173
gagcaaaguucuggaaccu

SEQ ID NO: 93465 - RNA, 19 nt, Artificial Sequence
  Description of Artificial Sequence: Synthetic oligonucleotide
  Antisense strand to SEQ ID NO: 93384
agguuccagaacuuugcuc

SEQ ID NO: 93466 - RNA, 19 nt, Artificial Sequence
  Description of Artificial Sequence: Synthetic oligonucleotide
  Sense strand starting at position 2410 of SEQ ID NO: 1173
cuguccucccaguaguaau

SEQ ID NO: 93467 - RNA, 19 nt, Artificial Sequence
  Description of Artificial Sequence: Synthetic oligonucleotide
  Antisense strand to SEQ ID NO: 93386
auuacuacugggaggacag

SEQ ID NO: 93468 - RNA, 19 nt, Artificial Sequence
  Description of Artificial Sequence: Synthetic oligonucleotide
  Sense strand starting at position 1273 of SEQ ID NO: 1173
aggagacuauggcaaaguu

SEQ ID NO: 93469 - RNA, 19 nt, Artificial Sequence
  Description of Artificial Sequence: Synthetic oligonucleotide
  Antisense strand to SEQ ID NO: 93388
aacuuugccauagucuccu

SEQ ID NO: 93470 - RNA, 19 nt, Artificial Sequence
  Description of Artificial Sequence: Synthetic oligonucleotide
  Sense strand starting at position 1208 of SEQ ID NO: 1173
cuguccugucuugacaauu

SEQ ID NO: 93471 - RNA, 19 nt, Artificial Sequence
  Description of Artificial Sequence: Synthetic oligonucleotide
  Antisense strand to SEQ ID NO: 93390
aauugucaagacaggacag

SEQ ID NO: 93472 - RNA, 19 nt, Artificial Sequence
  Description of Artificial Sequence: Synthetic oligonucleotide
  Sense strand starting at position 1207 of SEQ ID NO: 1173
ucuguccugucuugacaau

SEQ ID NO: 93473 - RNA, 19 nt, Artificial Sequence
  Description of Artificial Sequence: Synthetic oligonucleotide
  Antisense strand to SEQ ID NO: 93392
auugucaagacaggacaga

SEQ ID NO: 93474 - RNA, 19 nt, Artificial Sequence
  Description of Artificial Sequence: Synthetic oligonucleotide
  Sense strand starting at position 1099 of SEQ ID NO: 1173
aucccaaucugaccgaauu

SEQ ID NO: 93475 - RNA, 19 nt, Artificial Sequence
  Description of Artificial Sequence: Synthetic oligonucleotide
  Antisense strand to SEQ ID NO: 93394
aauucggucagauugggau

SEQ ID NO: 93476 - RNA, 19 nt, Artificial Sequence
  Description of Artificial Sequence: Synthetic oligonucleotide
  Sense strand starting at position 1082 of SEQ ID NO: 1173
cuccaaauaguuggcaaau

SEQ ID NO: 93477 - RNA, 19 nt, Artificial Sequence
  Description of Artificial Sequence: Synthetic oligonucleotide
  Antisense strand to SEQ ID NO: 93396
auuugccaacuauuuggag

SEQ ID NO: 93478 - RNA, 19 nt, Artificial Sequence
  Description of Artificial Sequence: Synthetic oligonucleotide
  Sense strand starting at position 918 of SEQ ID NO: 1173
ugggcaucauguguucaga

SEQ ID NO: 93479 - RNA, 19 nt, Artificial Sequence
  Description of Artificial Sequence: Synthetic oligonucleotide
  Antisense strand to SEQ ID NO: 93398
ucugaacacaugaugccca

SEQ ID NO: 93480 - RNA, 19 nt, Artificial Sequence
  Description of Artificial Sequence: Synthetic oligonucleotide
  Sense strand starting at position 909 of SEQ ID NO: 1173
augucuuagugggcaucau

SEQ ID NO: 93481 - RNA, 19 nt, Artificial Sequence
  Description of Artificial Sequence: Synthetic oligonucleotide
  Antisense strand to SEQ ID NO: 93400
augaugcccacuaagacau

SEQ ID NO: 93482 - RNA, 19 nt, Artificial Sequence
  Description of Artificial Sequence: Synthetic oligonucleotide
  Sense strand starting at position 905 of SEQ ID NO: 1173
aguuaugucuuagugggca

SEQ ID NO: 93483 - RNA, 19 nt, Artificial Sequence
  Description of Artificial Sequence: Synthetic oligonucleotide
  Antisense strand to SEQ ID NO: 93402
ugcccacuaagacauaacu

SEQ ID NO: 93484 - RNA, 19 nt, Artificial Sequence
  Description of Artificial Sequence: Synthetic oligonucleotide
  Sense strand starting at position 898 of SEQ ID NO: 1173
acuugagaguuaugucuua

SEQ ID NO: 93485 - RNA, 19 nt, Artificial Sequence
  Description of Artificial Sequence: Synthetic oligonucleotide
  Antisense strand to SEQ ID NO: 93404
uaagacauaacucucaagu

SEQ ID NO: 93486 - RNA, 19 nt, Artificial Sequence
  Description of Artificial Sequence: Synthetic oligonucleotide
  Sense strand starting at position 892 of SEQ ID NO: 1173
augccaacuugagaguuau

SEQ ID NO: 93487 - RNA, 19 nt, Artificial Sequence
  Description of Artificial Sequence: Synthetic oligonucleotide
  Antisense strand to SEQ ID NO: 93406
auaacucucaaguuggcau

SEQ ID NO: 93488 - RNA, 19 nt, Artificial Sequence
  Description of Artificial Sequence: Synthetic oligonucleotide
  Sense strand starting at position 767 of SEQ ID NO: 1173
gggagaacuucccaacccu

SEQ ID NO: 93489 - RNA, 19 nt, Artificial Sequence
  Description of Artificial Sequence: Synthetic oligonucleotide
  Antisense strand to SEQ ID NO: 93408
aggguugggaaguucuccc

SEQ ID NO: 93490 - RNA, 19 nt, Artificial Sequence
  Description of Artificial Sequence: Synthetic oligonucleotide
  Sense strand starting at position 351 of SEQ ID NO: 1173
gugggaguggccugaaucu

SEQ ID NO: 93491 - RNA, 19 nt, Artificial Sequence
  Description of Artificial Sequence: Synthetic oligonucleotide
  Antisense strand to SEQ ID NO: 93410
agauucaggccacucccac

SEQ ID NO: 93492 - RNA, 19 nt, Artificial Sequence
  Description of Artificial Sequence: Synthetic oligonucleotide
  Sense strand starting at position 102 of SEQ ID NO: 1173
agcagaaguuuggaguaga

SEQ ID NO: 93493 - RNA, 19 nt, Artificial Sequence
  Description of Artificial Sequence: Synthetic oligonucleotide
  Antisense strand to SEQ ID NO: 93412
ucuacuccaaacuucugcu

SEQ ID NO: 93494 - RNA, 19 nt, Artificial Sequence
  Description of Artificial Sequence: Synthetic oligonucleotide
  Sense strand starting at position 100 of SEQ ID NO: 1173
agagcagaaguuuggagua

SEQ ID NO: 93495 - RNA, 19 nt, Artificial Sequence
  Description of Artificial Sequence: Synthetic oligonucleotide
  Antisense strand to SEQ ID NO: 93414
uacuccaaacuucugcucu

SEQ ID NO: 93496 - RNA, 19 nt, Artificial Sequence
  Description of Artificial Sequence: Synthetic oligonucleotide
  Sense strand starting at position 3978 of SEQ ID NO: 1176
aucauugagugauuaucca

SEQ ID NO: 93497 - RNA, 19 nt, Artificial Sequence
  Description of Artificial Sequence: Synthetic oligonucleotide
  Antisense strand to SEQ ID NO: 93416
uggauaaucacucaaugau

SEQ ID NO: 93498 - RNA, 19 nt, Artificial Sequence
  Description of Artificial Sequence: Synthetic oligonucleotide
  Sense strand starting at position 3974 of SEQ ID NO: 1176
agcuaucauugagugauua

SEQ ID NO: 93499 - RNA, 19 nt, Artificial Sequence
  Description of Artificial Sequence: Synthetic oligonucleotide
  Antisense strand to SEQ ID NO: 93418
uaaucacucaaugauagcu

SEQ ID NO: 93500 - RNA, 19 nt, Artificial Sequence
  Description of Artificial Sequence: Synthetic oligonucleotide
  Sense strand starting at position 3921 of SEQ ID NO: 1176
acgaaaucuuaauuccuga

SEQ ID NO: 93501 - RNA, 19 nt, Artificial Sequence
  Description of Artificial Sequence: Synthetic oligonucleotide
  Antisense strand to SEQ ID NO: 93420
ucaggaauuaagauuucgu

SEQ ID NO: 93502 - RNA, 19 nt, Artificial Sequence
  Description of Artificial Sequence: Synthetic oligonucleotide
  Sense strand starting at position 3859 of SEQ ID NO: 1176
ugcauagauguauaacgaa

SEQ ID NO: 93503 - RNA, 19 nt, Artificial Sequence
  Description of Artificial Sequence: Synthetic oligonucleotide
  Antisense strand to SEQ ID NO: 93422
uucguuauacaucuaugca

SEQ ID NO: 93504 - RNA, 19 nt, Artificial Sequence
  Description of Artificial Sequence: Synthetic oligonucleotide
  Sense strand starting at position 3851 of SEQ ID NO: 1176
gcacauaaugcauagaugu

SEQ ID NO: 93505 - RNA, 19 nt, Artificial Sequence
  Description of Artificial Sequence: Synthetic oligonucleotide
  Antisense strand to SEQ ID NO: 93424
acaucuaugcauuaugugc

SEQ ID NO: 93506 - RNA, 19 nt, Artificial Sequence
  Description of Artificial Sequence: Synthetic oligonucleotide
  Sense strand starting at position 3732 of SEQ ID NO: 1176
ugauuugucaugugcaagu

SEQ ID NO: 93507 - RNA, 19 nt, Artificial Sequence
  Description of Artificial Sequence: Synthetic oligonucleotide
  Antisense strand to SEQ ID NO: 93426
acuugcacaugacaaauca

SEQ ID NO: 93508 - RNA, 19 nt, Artificial Sequence
  Description of Artificial Sequence: Synthetic oligonucleotide
  Sense strand starting at position 3716 of SEQ ID NO: 1176
ggcuacaauuaaguuauga

SEQ ID NO: 93509 - RNA, 19 nt, Artificial Sequence
  Description of Artificial Sequence: Synthetic oligonucleotide
  Antisense strand to SEQ ID NO: 93428
ucauaacuuaauuguagcc

SEQ ID NO: 93510 - RNA, 19 nt, Artificial Sequence
  Description of Artificial Sequence: Synthetic oligonucleotide
  Sense strand starting at position 3713 of SEQ ID NO: 1176
gugggcuacaauuaaguua

SEQ ID NO: 93511 - RNA, 19 nt, Artificial Sequence
  Description of Artificial Sequence: Synthetic oligonucleotide
  Antisense strand to SEQ ID NO: 93430
uaacuuaauuguagcccac

SEQ ID NO: 93512 - RNA, 19 nt, Artificial Sequence
  Description of Artificial Sequence: Synthetic oligonucleotide
  Sense strand starting at position 3707 of SEQ ID NO: 1176
aucuuagugggcuacaauu

SEQ ID NO: 93513 - RNA, 19 nt, Artificial Sequence
  Description of Artificial Sequence: Synthetic oligonucleotide
  Antisense strand to SEQ ID NO: 93432
aauuguagcccacuaagau

SEQ ID NO: 93514 - RNA, 19 nt, Artificial Sequence
  Description of Artificial Sequence: Synthetic oligonucleotide
  Sense strand starting at position 3705 of SEQ ID NO: 1176
agaucuuagugggcuacaa

SEQ ID NO: 93515 - RNA, 19 nt, Artificial Sequence
  Description of Artificial Sequence: Synthetic oligonucleotide
  Antisense strand to SEQ ID NO: 93434
uuguagcccacuaagaucu

SEQ ID NO: 93516 - RNA, 19 nt, Artificial Sequence
  Description of Artificial Sequence: Synthetic oligonucleotide
  Sense strand starting at position 3577 of SEQ ID NO: 1176
cuugaagguuagucaagaa

SEQ ID NO: 93517 - RNA, 19 nt, Artificial Sequence
  Description of Artificial Sequence: Synthetic oligonucleotide
  Antisense strand to SEQ ID NO: 93436
uucuugacuaaccuucaag

SEQ ID NO: 93518 - RNA, 19 nt, Artificial Sequence
  Description of Artificial Sequence: Synthetic oligonucleotide
  Sense strand starting at position 3576 of SEQ ID NO: 1176
gcuugaagguuagucaaga

SEQ ID NO: 93519 - RNA, 19 nt, Artificial Sequence
  Description of Artificial Sequence: Synthetic oligonucleotide
  Antisense strand to SEQ ID NO: 93438
ucuugacuaaccuucaagc

SEQ ID NO: 93520 - RNA, 19 nt, Artificial Sequence
  Description of Artificial Sequence: Synthetic oligonucleotide
  Sense strand starting at position 3574 of SEQ ID NO: 1176
cugcuugaagguuagucaa

SEQ ID NO: 93521 - RNA, 19 nt, Artificial Sequence
  Description of Artificial Sequence: Synthetic oligonucleotide
  Antisense strand to SEQ ID NO: 93440
uugacuaaccuucaagcag

SEQ ID NO: 93522 - RNA, 19 nt, Artificial Sequence
  Description of Artificial Sequence: Synthetic oligonucleotide
  Sense strand starting at position 3527 of SEQ ID NO: 1176
uacagaugggcaugauuaa

SEQ ID NO: 93523 - RNA, 19 nt, Artificial Sequence
  Description of Artificial Sequence: Synthetic oligonucleotide
  Antisense strand to SEQ ID NO: 93442
uuaaucaugcccaucugua

SEQ ID NO: 93524 - RNA, 19 nt, Artificial Sequence
  Description of Artificial Sequence: Synthetic oligonucleotide
  Sense strand starting at position 3525 of SEQ ID NO: 1176
gcuacagaugggcaugauu

SEQ ID NO: 93525 - RNA, 19 nt, Artificial Sequence
  Description of Artificial Sequence: Synthetic oligonucleotide
  Antisense strand to SEQ ID NO: 93444
aaucaugcccaucuguagc

SEQ ID NO: 93526 - RNA, 19 nt, Artificial Sequence
  Description of Artificial Sequence: Synthetic oligonucleotide
  Sense strand starting at position 3281 of SEQ ID NO: 1176
uuaauaaggcugcauaaga

SEQ ID NO: 93527 - RNA, 19 nt, Artificial Sequence
  Description of Artificial Sequence: Synthetic oligonucleotide
  Antisense strand to SEQ ID NO: 93446
ucuuaugcagccuuauuaa

SEQ ID NO: 93528 - RNA, 19 nt, Artificial Sequence
  Description of Artificial Sequence: Synthetic oligonucleotide
  Sense strand starting at position 3212 of SEQ ID NO: 1176
aaugcagauguugaacauu

SEQ ID NO: 93529 - RNA, 19 nt, Artificial Sequence
  Description of Artificial Sequence: Synthetic oligonucleotide
  Antisense strand to SEQ ID NO: 93448
aauguucaacaucugcauu

SEQ ID NO: 93530 - RNA, 19 nt, Artificial Sequence
  Description of Artificial Sequence: Synthetic oligonucleotide
  Sense strand starting at position 3208 of SEQ ID NO: 1176
agacaaugcagauguugaa

SEQ ID NO: 93531 - RNA, 19 nt, Artificial Sequence
  Description of Artificial Sequence: Synthetic oligonucleotide
  Antisense strand to SEQ ID NO: 93450
uucaacaucugcauugucu

SEQ ID NO: 93532 - RNA, 19 nt, Artificial Sequence
  Description of Artificial Sequence: Synthetic oligonucleotide
  Sense strand starting at position 3020 of SEQ ID NO: 1176
ggcuaauauuaggccugau

SEQ ID NO: 93533 - RNA, 19 nt, Artificial Sequence
  Description of Artificial Sequence: Synthetic oligonucleotide
  Antisense strand to SEQ ID NO: 93452
aucaggccuaauauuagcc

SEQ ID NO: 93534 - RNA, 19 nt, Artificial Sequence
  Description of Artificial Sequence: Synthetic oligonucleotide
  Sense strand starting at position 2986 of SEQ ID NO: 1176
ucugccaaauagguuaaau

SEQ ID NO: 93535 - RNA, 19 nt, Artificial Sequence
  Description of Artificial Sequence: Synthetic oligonucleotide
  Antisense strand to SEQ ID NO: 93454
auuuaaccuauuuggcaga

SEQ ID NO: 93536 - RNA, 19 nt, Artificial Sequence
  Description of Artificial Sequence: Synthetic oligonucleotide
  Sense strand starting at position 2945 of SEQ ID NO: 1176
agccuagaugcuugaauac

SEQ ID NO: 93537 - RNA, 19 nt, Artificial Sequence
  Description of Artificial Sequence: Synthetic oligonucleotide
  Antisense strand to SEQ ID NO: 93456
guauucaagcaucuaggcu

SEQ ID NO: 93538 - RNA, 19 nt, Artificial Sequence
  Description of Artificial Sequence: Synthetic oligonucleotide
  Sense strand starting at position 2741 of SEQ ID NO: 1176
gagaaagccuuucccgacu

SEQ ID NO: 93539 - RNA, 19 nt, Artificial Sequence
  Description of Artificial Sequence: Synthetic oligonucleotide
  Antisense strand to SEQ ID NO: 93458
agucgggaaaggcuuucuc

SEQ ID NO: 93540 - RNA, 19 nt, Artificial Sequence
  Description of Artificial Sequence: Synthetic oligonucleotide
  Sense strand starting at position 2669 of SEQ ID NO: 1176
ccuggauccuugucaauug

SEQ ID NO: 93541 - RNA, 19 nt, Artificial Sequence
  Description of Artificial Sequence: Synthetic oligonucleotide
  Antisense strand to SEQ ID NO: 93460
caauugacaaggauccagg

SEQ ID NO: 93542 - RNA, 19 nt, Artificial Sequence
  Description of Artificial Sequence: Synthetic oligonucleotide
  Sense strand starting at position 2666 of SEQ ID NO: 1176
uuuccuggauccuugucaa

SEQ ID NO: 93543 - RNA, 19 nt, Artificial Sequence
  Description of Artificial Sequence: Synthetic oligonucleotide
  Antisense strand to SEQ ID NO: 93462
uugacaaggauccaggaaa

SEQ ID NO: 93544 - RNA, 19 nt, Artificial Sequence
  Description of Artificial Sequence: Synthetic oligonucleotide
  Sense strand starting at position 2555 of SEQ ID NO: 1176
cuuaguuaacaagguagaa

SEQ ID NO: 93545 - RNA, 19 nt, Artificial Sequence
  Description of Artificial Sequence: Synthetic oligonucleotide
  Antisense strand to SEQ ID NO: 93464
uucuaccuuguuaacuaag

SEQ ID NO: 93546 - RNA, 19 nt, Artificial Sequence
  Description of Artificial Sequence: Synthetic oligonucleotide
  Sense strand starting at position 2548 of SEQ ID NO: 1176
guggaagcuuaguuaacaa

SEQ ID NO: 93547 - RNA, 19 nt, Artificial Sequence
  Description of Artificial Sequence: Synthetic oligonucleotide
  Antisense strand to SEQ ID NO: 93466
uuguuaacuaagcuuccac

SEQ ID NO: 93548 - RNA, 19 nt, Artificial Sequence
  Description of Artificial Sequence: Synthetic oligonucleotide
  Sense strand starting at position 2547 of SEQ ID NO: 1176
aguggaagcuuaguuaaca

SEQ ID NO: 93549 - RNA, 19 nt, Artificial Sequence
  Description of Artificial Sequence: Synthetic oligonucleotide
  Antisense strand to SEQ ID NO: 93468
uguuaacuaagcuuccacu

SEQ ID NO: 93550 - RNA, 19 nt, Artificial Sequence
  Description of Artificial Sequence: Synthetic oligonucleotide
  Sense strand starting at position 2433 of SEQ ID NO: 1176
agauaaguccugcaucuua

SEQ ID NO: 93551 - RNA, 19 nt, Artificial Sequence
  Description of Artificial Sequence: Synthetic oligonucleotide
  Antisense strand to SEQ ID NO: 93470
uaagaugcaggacuuaucu

SEQ ID NO: 93552 - RNA, 19 nt, Artificial Sequence
  Description of Artificial Sequence: Synthetic oligonucleotide
  Sense strand starting at position 2422 of SEQ ID NO: 1176
ccuguuugggaagauaagu

SEQ ID NO: 93553 - RNA, 19 nt, Artificial Sequence
  Description of Artificial Sequence: Synthetic oligonucleotide
  Antisense strand to SEQ ID NO: 93472
acuuaucuucccaaacagg

SEQ ID NO: 93554 - RNA, 19 nt, Artificial Sequence
  Description of Artificial Sequence: Synthetic oligonucleotide
  Sense strand starting at position 1986 of SEQ ID NO: 1176
guguuacugacagagcaaa

SEQ ID NO: 93555 - RNA, 19 nt, Artificial Sequence
  Description of Artificial Sequence: Synthetic oligonucleotide
  Antisense strand to SEQ ID NO: 93474
uuugcucugucaguaacac

SEQ ID NO: 93556 - RNA, 19 nt, Artificial Sequence
  Description of Artificial Sequence: Synthetic oligonucleotide
  Sense strand starting at position 702 of SEQ ID NO: 1176
caccguauuucuccuggau

SEQ ID NO: 93557 - RNA, 19 nt, Artificial Sequence
  Description of Artificial Sequence: Synthetic oligonucleotide
  Antisense strand to SEQ ID NO: 93476
auccaggagaaauacggug

SEQ ID NO: 93558 - RNA, 19 nt, Artificial Sequence
  Description of Artificial Sequence: Synthetic oligonucleotide
  Sense strand starting at position 527 of SEQ ID NO: 1176
ugggauagucagugaaaua

SEQ ID NO: 93559 - RNA, 19 nt, Artificial Sequence
  Description of Artificial Sequence: Synthetic oligonucleotide
  Antisense strand to SEQ ID NO: 93478
uauuucacugacuauccca

SEQ ID NO: 93560 - RNA, 19 nt, Artificial Sequence
  Description of Artificial Sequence: Synthetic oligonucleotide
  Sense strand starting at position 526 of SEQ ID NO: 1176
cugggauagucagugaaau

SEQ ID NO: 93561 - RNA, 19 nt, Artificial Sequence
  Description of Artificial Sequence: Synthetic oligonucleotide
  Antisense strand to SEQ ID NO: 93480
auuucacugacuaucccag

SEQ ID NO: 93562 - RNA, 19 nt, Artificial Sequence
  Description of Artificial Sequence: Synthetic oligonucleotide
  Sense strand starting at position 484 of SEQ ID NO: 1176
aggcuuauacucuaguaau

SEQ ID NO: 93563 - RNA, 19 nt, Artificial Sequence
  Description of Artificial Sequence: Synthetic oligonucleotide
  Antisense strand to SEQ ID NO: 93482
auuacuagaguauaagccu

SEQ ID NO: 93564 - RNA, 19 nt, Artificial Sequence
  Description of Artificial Sequence: Synthetic oligonucleotide
  Sense strand starting at position 482 of SEQ ID NO: 1176
auaggcuuauacucuagua

SEQ ID NO: 93565 - RNA, 19 nt, Artificial Sequence
  Description of Artificial Sequence: Synthetic oligonucleotide
  Antisense strand to SEQ ID NO: 93484
uacuagaguauaagccuau

SEQ ID NO: 93566 - RNA, 19 nt, Artificial Sequence
  Description of Artificial Sequence: Synthetic oligonucleotide
  Sense strand starting at position 477 of SEQ ID NO: 1176
guuaaauaggcuuauacuc

SEQ ID NO: 93567 - RNA, 19 nt, Artificial Sequence
  Description of Artificial Sequence: Synthetic oligonucleotide
  Antisense strand to SEQ ID NO: 93486
gaguauaagccuauuuaac

SEQ ID NO: 93568 - RNA, 19 nt, Artificial Sequence
  Description of Artificial Sequence: Synthetic oligonucleotide
  Sense strand starting at position 232 of SEQ ID NO: 1176
ucuuuagugagagguaaau

SEQ ID NO: 93569 - RNA, 19 nt, Artificial Sequence
  Description of Artificial Sequence: Synthetic oligonucleotide
  Antisense strand to SEQ ID NO: 93488
auuuaccucucacuaaaga

SEQ ID NO: 93570 - RNA, 19 nt, Artificial Sequence
  Description of Artificial Sequence: Synthetic oligonucleotide
  Sense strand starting at position 131 of SEQ ID NO: 1176
gcccuagaucuuuaaacug

SEQ ID NO: 93571 - RNA, 19 nt, Artificial Sequence
  Description of Artificial Sequence: Synthetic oligonucleotide
  Antisense strand to SEQ ID NO: 93490
caguuuaaagaucuagggc

SEQ ID NO: 93572 - RNA, 19 nt, Artificial Sequence
  Description of Artificial Sequence: Synthetic oligonucleotide
  Sense strand starting at position 121 of SEQ ID NO: 1176
ugcauuuccugcccuagau

SEQ ID NO: 93573 - RNA, 19 nt, Artificial Sequence
  Description of Artificial Sequence: Synthetic oligonucleotide
  Antisense strand to SEQ ID NO: 93492
aucuagggcaggaaaugca

SEQ ID NO: 93574 - RNA, 19 nt, Artificial Sequence
  Description of Artificial Sequence: Synthetic oligonucleotide
  Sense strand starting at position 52 of SEQ ID NO: 1176
ugauuuaucugaugcauuu

SEQ ID NO: 93575 - RNA, 19 nt, Artificial Sequence
  Description of Artificial Sequence: Synthetic oligonucleotide
  Antisense strand to SEQ ID NO: 93494
aaaugcaucagauaaauca

SEQ ID NO: 93576 - RNA, 19 nt, Artificial Sequence
  Description of Artificial Sequence: Synthetic oligonucleotide
  Sense strand starting at position 114 of SEQ ID NO: 1177
uuggcaaaggcuuaaacau

SEQ ID NO: 93577 - RNA, 19 nt, Artificial Sequence
  Description of Artificial Sequence: Synthetic oligonucleotide
  Antisense strand to SEQ ID NO: 93496
auguuuaagccuuugccaa

SEQ ID NO: 93578 - RNA, 19 nt, Artificial Sequence
  Description of Artificial Sequence: Synthetic oligonucleotide
  Sense strand starting at position 246 of SEQ ID NO: 1177
ggcuguguccaccaauaug

SEQ ID NO: 93579 - RNA, 19 nt, Artificial Sequence
  Description of Artificial Sequence: Synthetic oligonucleotide
  Antisense strand to SEQ ID NO: 93498
cauauugguggacacagcc

SEQ ID NO: 93580 - RNA, 19 nt, Artificial Sequence
  Description of Artificial Sequence: Synthetic oligonucleotide
  Sense strand starting at position 254 of SEQ ID NO: 1177
ccaccaauaugcucuguga

SEQ ID NO: 93581 - RNA, 19 nt, Artificial Sequence
  Description of Artificial Sequence: Synthetic oligonucleotide
  Antisense strand to SEQ ID NO: 93500
ucacagagcauauuggugg

SEQ ID NO: 93582 - RNA, 19 nt, Artificial Sequence
  Description of Artificial Sequence: Synthetic oligonucleotide
  Sense strand starting at position 256 of SEQ ID NO: 1177
accaauaugcucugugacu

SEQ ID NO: 93583 - RNA, 19 nt, Artificial Sequence
  Description of Artificial Sequence: Synthetic oligonucleotide
  Antisense strand to SEQ ID NO: 93502
agucacagagcauauuggu

SEQ ID NO: 93584 - RNA, 19 nt, Artificial Sequence
  Description of Artificial Sequence: Synthetic oligonucleotide
  Sense strand starting at position 257 of SEQ ID NO: 1177
ccaauaugcucugugacua

SEQ ID NO: 93585 - RNA, 19 nt, Artificial Sequence
  Description of Artificial Sequence: Synthetic oligonucleotide
  Antisense strand to SEQ ID NO: 93504
uagucacagagcauauugg

SEQ ID NO: 93586 - RNA, 19 nt, Artificial Sequence
  Description of Artificial Sequence: Synthetic oligonucleotide
  Sense strand starting at position 258 of SEQ ID NO: 1177
caauaugcucugugacuag

SEQ ID NO: 93587 - RNA, 19 nt, Artificial Sequence
  Description of Artificial Sequence: Synthetic oligonucleotide
  Antisense strand to SEQ ID NO: 93506
cuagucacagagcauauug

SEQ ID NO: 93588 - RNA, 19 nt, Artificial Sequence
  Description of Artificial Sequence: Synthetic oligonucleotide
  Sense strand starting at position 303 of SEQ ID NO: 1177
agucauuccgcaggcauuu

SEQ ID NO: 93589 - RNA, 19 nt, Artificial Sequence
  Description of Artificial Sequence: Synthetic oligonucleotide
  Antisense strand to SEQ ID NO: 93508
aaaugccugcggaaugacu

SEQ ID NO: 93590 - RNA, 19 nt, Artificial Sequence
  Description of Artificial Sequence: Synthetic oligonucleotide
  Sense strand starting at position 323 of SEQ ID NO: 1177
ggaugauaauguucccauu

SEQ ID NO: 93591 - RNA, 19 nt, Artificial Sequence
  Description of Artificial Sequence: Synthetic oligonucleotide
  Antisense strand to SEQ ID NO: 93510
aaugggaacauuaucaucc

SEQ ID NO: 93592 - RNA, 19 nt, Artificial Sequence
  Description of Artificial Sequence: Synthetic oligonucleotide
  Sense strand starting at position 342 of SEQ ID NO: 1177
cucaguuccucugugagaa

SEQ ID NO: 93593 - RNA, 19 nt, Artificial Sequence
  Description of Artificial Sequence: Synthetic oligonucleotide
  Antisense strand to SEQ ID NO: 93512
uucucacagaggaacugag

SEQ ID NO: 93594 - RNA, 19 nt, Artificial Sequence
  Description of Artificial Sequence: Synthetic oligonucleotide
  Sense strand starting at position 343 of SEQ ID NO: 1177
ucaguuccucugugagaau

SEQ ID NO: 93595 - RNA, 19 nt, Artificial Sequence
  Description of Artificial Sequence: Synthetic oligonucleotide
  Antisense strand to SEQ ID NO: 93514
auucucacagaggaacuga

SEQ ID NO: 93596 - RNA, 19 nt, Artificial Sequence
  Description of Artificial Sequence: Synthetic oligonucleotide
  Sense strand starting at position 362 of SEQ ID NO: 1177
gugcaugucauuugaagcu

SEQ ID NO: 93597 - RNA, 19 nt, Artificial Sequence
  Description of Artificial Sequence: Synthetic oligonucleotide
  Antisense strand to SEQ ID NO: 93516
agcuucaaaugacaugcac

SEQ ID NO: 93598 - RNA, 19 nt, Artificial Sequence
  Description of Artificial Sequence: Synthetic oligonucleotide
  Sense strand starting at position 472 of SEQ ID NO: 1177
aagagauguggcugaauaa

SEQ ID NO: 93599 - RNA, 19 nt, Artificial Sequence
  Description of Artificial Sequence: Synthetic oligonucleotide
  Antisense strand to SEQ ID NO: 93518
uuauucagccacaucucuu

SEQ ID NO: 93600 - RNA, 19 nt, Artificial Sequence
  Description of Artificial Sequence: Synthetic oligonucleotide
  Sense strand starting at position 576 of SEQ ID NO: 1177
ggaggcuaguuuguccaaa

SEQ ID NO: 93601 - RNA, 19 nt, Artificial Sequence
  Description of Artificial Sequence: Synthetic oligonucleotide
  Antisense strand to SEQ ID NO: 93520
uuuggacaaacuagccucc

SEQ ID NO: 93602 - RNA, 19 nt, Artificial Sequence
  Description of Artificial Sequence: Synthetic oligonucleotide
  Sense strand starting at position 577 of SEQ ID NO: 1177
gaggcuaguuuguccaaag

SEQ ID NO: 93603 - RNA, 19 nt, Artificial Sequence
  Description of Artificial Sequence: Synthetic oligonucleotide
  Antisense strand to SEQ ID NO: 93522
cuuuggacaaacuagccuc

SEQ ID NO: 93604 - RNA, 19 nt, Artificial Sequence
  Description of Artificial Sequence: Synthetic oligonucleotide
  Sense strand starting at position 578 of SEQ ID NO: 1177
aggcuaguuuguccaaaga

SEQ ID NO: 93605 - RNA, 19 nt, Artificial Sequence
  Description of Artificial Sequence: Synthetic oligonucleotide
  Antisense strand to SEQ ID NO: 93524
ucuuuggacaaacuagccu

SEQ ID NO: 93606 - RNA, 19 nt, Artificial Sequence
  Description of Artificial Sequence: Synthetic oligonucleotide
  Sense strand starting at position 878 of SEQ ID NO: 1177
acaucuucccugggaauaa

SEQ ID NO: 93607 - RNA, 19 nt, Artificial Sequence
  Description of Artificial Sequence: Synthetic oligonucleotide
  Antisense strand to SEQ ID NO: 93526
uuauucccagggaagaugu

SEQ ID NO: 93608 - RNA, 19 nt, Artificial Sequence
  Description of Artificial Sequence: Synthetic oligonucleotide
  Sense strand starting at position 889 of SEQ ID NO: 1177
gggaauaaauuugaagcuu

SEQ ID NO: 93609 - RNA, 19 nt, Artificial Sequence
  Description of Artificial Sequence: Synthetic oligonucleotide
  Antisense strand to SEQ ID NO: 93528
aagcuucaaauuuauuccc

SEQ ID NO: 93610 - RNA, 19 nt, Artificial Sequence
  Description of Artificial Sequence: Synthetic oligonucleotide
  Sense strand starting at position 906 of SEQ ID NO: 1177
uuaucaggucuuuaagcca

SEQ ID NO: 93611 - RNA, 19 nt, Artificial Sequence
  Description of Artificial Sequence: Synthetic oligonucleotide
  Antisense strand to SEQ ID NO: 93530
uggcuuaaagaccugauaa

SEQ ID NO: 93612 - RNA, 19 nt, Artificial Sequence
  Description of Artificial Sequence: Synthetic oligonucleotide
  Sense strand starting at position 957 of SEQ ID NO: 1177
cucccuuugcuuugggaaa

SEQ ID NO: 93613 - RNA, 19 nt, Artificial Sequence
  Description of Artificial Sequence: Synthetic oligonucleotide
  Antisense strand to SEQ ID NO: 93532
uuucccaaagcaaagggag

SEQ ID NO: 93614 - RNA, 19 nt, Artificial Sequence
  Description of Artificial Sequence: Synthetic oligonucleotide
  Sense strand starting at position 1015 of SEQ ID NO: 1177
gugagaugcccauaggguu

SEQ ID NO: 93615 - RNA, 19 nt, Artificial Sequence
  Description of Artificial Sequence: Synthetic oligonucleotide
  Antisense strand to SEQ ID NO: 93534
aacccuaugggcaucucac

SEQ ID NO: 93616 - RNA, 19 nt, Artificial Sequence
  Description of Artificial Sequence: Synthetic oligonucleotide
  Sense strand starting at position 1328 of SEQ ID NO: 1177
gagauucgcaccgcuaguu

SEQ ID NO: 93617 - RNA, 19 nt, Artificial Sequence
  Description of Artificial Sequence: Synthetic oligonucleotide
  Antisense strand to SEQ ID NO: 93536
aacuagcggugcgaaucuc

SEQ ID NO: 93618 - RNA, 19 nt, Artificial Sequence
  Description of Artificial Sequence: Synthetic oligonucleotide
  Sense strand starting at position 1348 of SEQ ID NO: 1177
aguggauaaucaucaguuc

SEQ ID NO: 93619 - RNA, 19 nt, Artificial Sequence
  Description of Artificial Sequence: Synthetic oligonucleotide
  Antisense strand to SEQ ID NO: 93538
gaacugaugauuauccacu

SEQ ID NO: 93620 - RNA, 19 nt, Artificial Sequence
  Description of Artificial Sequence: Synthetic oligonucleotide
  Sense strand starting at position 1349 of SEQ ID NO: 1177
guggauaaucaucaguucu

SEQ ID NO: 93621 - RNA, 19 nt, Artificial Sequence
  Description of Artificial Sequence: Synthetic oligonucleotide
  Antisense strand to SEQ ID NO: 93540
agaacugaugauuauccac

SEQ ID NO: 93622 - RNA, 19 nt, Artificial Sequence
  Description of Artificial Sequence: Synthetic oligonucleotide
  Sense strand starting at position 1351 of SEQ ID NO: 1177
ggauaaucaucaguucuga

SEQ ID NO: 93623 - RNA, 19 nt, Artificial Sequence
  Description of Artificial Sequence: Synthetic oligonucleotide
  Antisense strand to SEQ ID NO: 93542
ucagaacugaugauuaucc

SEQ ID NO: 93624 - RNA, 19 nt, Artificial Sequence
  Description of Artificial Sequence: Synthetic oligonucleotide
  Sense strand starting at position 1390 of SEQ ID NO: 1177
acaagaacguuucuucuaa

SEQ ID NO: 93625 - RNA, 19 nt, Artificial Sequence
  Description of Artificial Sequence: Synthetic oligonucleotide
  Antisense strand to SEQ ID NO: 93544
uuagaagaaacguucuugu

SEQ ID NO: 93626 - RNA, 19 nt, Artificial Sequence
  Description of Artificial Sequence: Synthetic oligonucleotide
  Sense strand starting at position 1662 of SEQ ID NO: 1177
ccuccaucuccucgggaga

SEQ ID NO: 93627 - RNA, 19 nt, Artificial Sequence
  Description of Artificial Sequence: Synthetic oligonucleotide
  Antisense strand to SEQ ID NO: 93546
ucucccgaggagauggagg

SEQ ID NO: 93628 - RNA, 19 nt, Artificial Sequence
  Description of Artificial Sequence: Synthetic oligonucleotide
  Sense strand starting at position 1728 of SEQ ID NO: 1177
ggcgauauuuggcuacucu

SEQ ID NO: 93629 - RNA, 19 nt, Artificial Sequence
  Description of Artificial Sequence: Synthetic oligonucleotide
  Antisense strand to SEQ ID NO: 93548
agaguagccaaauaucgcc

SEQ ID NO: 93630 - RNA, 19 nt, Artificial Sequence
  Description of Artificial Sequence: Synthetic oligonucleotide
  Sense strand starting at position 1907 of SEQ ID NO: 1177
ugcugaaguguucacugga

SEQ ID NO: 93631 - RNA, 19 nt, Artificial Sequence
  Description of Artificial Sequence: Synthetic oligonucleotide
  Antisense strand to SEQ ID NO: 93550
uccagugaacacuucagca

SEQ ID NO: 93632 - RNA, 19 nt, Artificial Sequence
  Description of Artificial Sequence: Synthetic oligonucleotide
  Sense strand starting at position 2063 of SEQ ID NO: 1177
cuguuugaaacuugaggac

SEQ ID NO: 93633 - RNA, 19 nt, Artificial Sequence
  Description of Artificial Sequence: Synthetic oligonucleotide
  Antisense strand to SEQ ID NO: 93552
guccucaaguuucaaacag

SEQ ID NO: 93634 - RNA, 19 nt, Artificial Sequence
  Description of Artificial Sequence: Synthetic oligonucleotide
  Sense strand starting at position 2387 of SEQ ID NO: 1177
uguauacagcuccaggaaa

SEQ ID NO: 93635 - RNA, 19 nt, Artificial Sequence
  Description of Artificial Sequence: Synthetic oligonucleotide
  Antisense strand to SEQ ID NO: 93554
uuuccuggagcuguauaca

SEQ ID NO: 93636 - RNA, 19 nt, Artificial Sequence
  Description of Artificial Sequence: Synthetic oligonucleotide
  Sense strand starting at position 2389 of SEQ ID NO: 1177
uauacagcuccaggaaagu

SEQ ID NO: 93637 - RNA, 19 nt, Artificial Sequence
  Description of Artificial Sequence: Synthetic oligonucleotide
  Antisense strand to SEQ ID NO: 93556
acuuuccuggagcuguaua

SEQ ID NO: 93638 - RNA, 19 nt, Artificial Sequence
  Description of Artificial Sequence: Synthetic oligonucleotide
  Sense strand starting at position 2642 of SEQ ID NO: 1177
auccuuacuguguaccaaa

SEQ ID NO: 93639 - RNA, 19 nt, Artificial Sequence
  Description of Artificial Sequence: Synthetic oligonucleotide
  Antisense strand to SEQ ID NO: 93558
uuugguacacaguaaggau

SEQ ID NO: 93640 - RNA, 19 nt, Artificial Sequence
  Description of Artificial Sequence: Synthetic oligonucleotide
  Sense strand starting at position 2726 of SEQ ID NO: 1177
ggcugucacuuuccaugaa

SEQ ID NO: 93641 - RNA, 19 nt, Artificial Sequence
  Description of Artificial Sequence: Synthetic oligonucleotide
  Antisense strand to SEQ ID NO: 93560
uucauggaaagugacagcc

SEQ ID NO: 93642 - RNA, 19 nt, Artificial Sequence
  Description of Artificial Sequence: Synthetic oligonucleotide
  Sense strand starting at position 2730 of SEQ ID NO: 1177
gucacuuuccaugaaguuc

SEQ ID NO: 93643 - RNA, 19 nt, Artificial Sequence
  Description of Artificial Sequence: Synthetic oligonucleotide
  Antisense strand to SEQ ID NO: 93562
gaacuucauggaaagugac

SEQ ID NO: 93644 - RNA, 19 nt, Artificial Sequence
  Description of Artificial Sequence: Synthetic oligonucleotide
  Sense strand starting at position 3064 of SEQ ID NO: 1177
gguguaacccaucagggua

SEQ ID NO: 93645 - RNA, 19 nt, Artificial Sequence
  Description of Artificial Sequence: Synthetic oligonucleotide
  Antisense strand to SEQ ID NO: 93564
uacccugauggguuacacc

SEQ ID NO: 93646 - RNA, 19 nt, Artificial Sequence
  Description of Artificial Sequence: Synthetic oligonucleotide
  Sense strand starting at position 3125 of SEQ ID NO: 1177
gagagacagucacuugauc

SEQ ID NO: 93647 - RNA, 19 nt, Artificial Sequence
  Description of Artificial Sequence: Synthetic oligonucleotide
  Antisense strand to SEQ ID NO: 93566
gaucaagugacugucucuc

SEQ ID NO: 93648 - RNA, 19 nt, Artificial Sequence
  Description of Artificial Sequence: Synthetic oligonucleotide
  Sense strand starting at position 3160 of SEQ ID NO: 1177
agggaucgucugggacuaa

SEQ ID NO: 93649 - RNA, 19 nt, Artificial Sequence
  Description of Artificial Sequence: Synthetic oligonucleotide
  Antisense strand to SEQ ID NO: 93568
uuagucccagacgaucccu

SEQ ID NO: 93650 - RNA, 19 nt, Artificial Sequence
  Description of Artificial Sequence: Synthetic oligonucleotide
  Sense strand starting at position 3358 of SEQ ID NO: 1177
uuggucaaaccguagguau

SEQ ID NO: 93651 - RNA, 19 nt, Artificial Sequence
  Description of Artificial Sequence: Synthetic oligonucleotide
  Antisense strand to SEQ ID NO: 93570
auaccuacgguuugaccaa

SEQ ID NO: 93652 - RNA, 19 nt, Artificial Sequence
  Description of Artificial Sequence: Synthetic oligonucleotide
  Sense strand starting at position 3870 of SEQ ID NO: 1177
ggccuuugaggccaauaga

SEQ ID NO: 93653 - RNA, 19 nt, Artificial Sequence
  Description of Artificial Sequence: Synthetic oligonucleotide
  Antisense strand to SEQ ID NO: 93572
ucuauuggccucaaaggcc

SEQ ID NO: 93654 - RNA, 19 nt, Artificial Sequence
  Description of Artificial Sequence: Synthetic oligonucleotide
  Sense strand starting at position 3924 of SEQ ID NO: 1177
augugacuugggcaagcua

SEQ ID NO: 93655 - RNA, 19 nt, Artificial Sequence
  Description of Artificial Sequence: Synthetic oligonucleotide
  Antisense strand to SEQ ID NO: 93574
uagcuugcccaagucacau

SEQ ID NO: 93656 - RNA, 19 nt, Artificial Sequence
  Description of Artificial Sequence: Synthetic oligonucleotide
  Sense strand starting at position 321 of SEQ ID NO: 1179
gcacgugauuucguuucau

SEQ ID NO: 93657 - RNA, 19 nt, Artificial Sequence
  Description of Artificial Sequence: Synthetic oligonucleotide
  Antisense strand to SEQ ID NO: 93576
augaaacgaaaucacgugc

SEQ ID NO: 93658 - RNA, 19 nt, Artificial Sequence
  Description of Artificial Sequence: Synthetic oligonucleotide
  Sense strand starting at position 331 of SEQ ID NO: 1179
ucguuucaucuaggguguu

SEQ ID NO: 93659 - RNA, 19 nt, Artificial Sequence
  Description of Artificial Sequence: Synthetic oligonucleotide
  Antisense strand to SEQ ID NO: 93578
aacacccuagaugaaacga

SEQ ID NO: 93660 - RNA, 19 nt, Artificial Sequence
  Description of Artificial Sequence: Synthetic oligonucleotide
  Sense strand starting at position 358 of SEQ ID NO: 1179
ggagauuccucacuggauu

SEQ ID NO: 93661 - RNA, 19 nt, Artificial Sequence
  Description of Artificial Sequence: Synthetic oligonucleotide
  Antisense strand to SEQ ID NO: 93580
aauccagugaggaaucucc

SEQ ID NO: 93662 - RNA, 19 nt, Artificial Sequence
  Description of Artificial Sequence: Synthetic oligonucleotide
  Sense strand starting at position 377 of SEQ ID NO: 1179
ugguuucuccagcagaacu

SEQ ID NO: 93663 - RNA, 19 nt, Artificial Sequence
  Description of Artificial Sequence: Synthetic oligonucleotide
  Antisense strand to SEQ ID NO: 93582
aguucugcuggagaaacca

SEQ ID NO: 93664 - RNA, 19 nt, Artificial Sequence
  Description of Artificial Sequence: Synthetic oligonucleotide
  Sense strand starting at position 424 of SEQ ID NO: 1179
agcgguuccgagugaaaga

SEQ ID NO: 93665 - RNA, 19 nt, Artificial Sequence
  Description of Artificial Sequence: Synthetic oligonucleotide
  Antisense strand to SEQ ID NO: 93584
ucuuucacucggaaccgcu

SEQ ID NO: 93666 - RNA, 19 nt, Artificial Sequence
  Description of Artificial Sequence: Synthetic oligonucleotide
  Sense strand starting at position 706 of SEQ ID NO: 1179
uuaauuaacgcggagccua

SEQ ID NO: 93667 - RNA, 19 nt, Artificial Sequence
  Description of Artificial Sequence: Synthetic oligonucleotide
  Antisense strand to SEQ ID NO: 93586
uaggcuccgcguuaauuaa

SEQ ID NO: 93668 - RNA, 19 nt, Artificial Sequence
  Description of Artificial Sequence: Synthetic oligonucleotide
  Sense strand starting at position 791 of SEQ ID NO: 1179
cuugcccauggcugaaauu

SEQ ID NO: 93669 - RNA, 19 nt, Artificial Sequence
  Description of Artificial Sequence: Synthetic oligonucleotide
  Antisense strand to SEQ ID NO: 93588
aauuucagccaugggcaag

SEQ ID NO: 93670 - RNA, 19 nt, Artificial Sequence
  Description of Artificial Sequence: Synthetic oligonucleotide
  Sense strand starting at position 830 of SEQ ID NO: 1179
agagaagccuccucgaacu

SEQ ID NO: 93671 - RNA, 19 nt, Artificial Sequence
  Description of Artificial Sequence: Synthetic oligonucleotide
  Antisense strand to SEQ ID NO: 93590
aguucgaggaggcuucucu

SEQ ID NO: 93672 - RNA, 19 nt, Artificial Sequence
  Description of Artificial Sequence: Synthetic oligonucleotide
  Sense strand starting at position 864 of SEQ ID NO: 1179
ucgggucucggaugcuauu

SEQ ID NO: 93673 - RNA, 19 nt, Artificial Sequence
  Description of Artificial Sequence: Synthetic oligonucleotide
  Antisense strand to SEQ ID NO: 93592
aauagcauccgagacccga

SEQ ID NO: 93674 - RNA, 19 nt, Artificial Sequence
  Description of Artificial Sequence: Synthetic oligonucleotide
  Sense strand starting at position 908 of SEQ ID NO: 1179
gcauuuaugagacgucgau

SEQ ID NO: 93675 - RNA, 19 nt, Artificial Sequence
  Description of Artificial Sequence: Synthetic oligonucleotide
  Antisense strand to SEQ ID NO: 93594
aucgacgucucauaaaugc

SEQ ID NO: 93676 - RNA, 19 nt, Artificial Sequence
  Description of Artificial Sequence: Synthetic oligonucleotide
  Sense strand starting at position 921 of SEQ ID NO: 1179
gucgaucagcuccgagauu

SEQ ID NO: 93677 - RNA, 19 nt, Artificial Sequence
  Description of Artificial Sequence: Synthetic oligonucleotide
  Antisense strand to SEQ ID NO: 93596
aaucucggagcugaucgac

SEQ ID NO: 93678 - RNA, 19 nt, Artificial Sequence
  Description of Artificial Sequence: Synthetic oligonucleotide
  Sense strand starting at position 1270 of SEQ ID NO: 1179
ugucgaucgcgcuuuggaa

SEQ ID NO: 93679 - RNA, 19 nt, Artificial Sequence
  Description of Artificial Sequence: Synthetic oligonucleotide
  Antisense strand to SEQ ID NO: 93598
uuccaaagcgcgaucgaca

SEQ ID NO: 93680 - RNA, 19 nt, Artificial Sequence
  Description of Artificial Sequence: Synthetic oligonucleotide
  Sense strand starting at position 1282 of SEQ ID NO: 1179
uuuggaaguucuccuccau

SEQ ID NO: 93681 - RNA, 19 nt, Artificial Sequence
  Description of Artificial Sequence: Synthetic oligonucleotide
  Antisense strand to SEQ ID NO: 93600
auggaggagaacuuccaaa

SEQ ID NO: 93682 - RNA, 19 nt, Artificial Sequence
  Description of Artificial Sequence: Synthetic oligonucleotide
  Sense strand starting at position 1351 of SEQ ID NO: 1179
gaagaaacgaugcgucuga

SEQ ID NO: 93683 - RNA, 19 nt, Artificial Sequence
  Description of Artificial Sequence: Synthetic oligonucleotide
  Antisense strand to SEQ ID NO: 93602
ucagacgcaucguuucuuc

SEQ ID NO: 93684 - RNA, 19 nt, Artificial Sequence
  Description of Artificial Sequence: Synthetic oligonucleotide
  Sense strand starting at position 1404 of SEQ ID NO: 1179
accgcacuccugggaaaga

SEQ ID NO: 93685 - RNA, 19 nt, Artificial Sequence
  Description of Artificial Sequence: Synthetic oligonucleotide
  Antisense strand to SEQ ID NO: 93604
ucuuucccaggagugcggu

SEQ ID NO: 93686 - RNA, 19 nt, Artificial Sequence
  Description of Artificial Sequence: Synthetic oligonucleotide
  Sense strand starting at position 1517 of SEQ ID NO: 1179
ugcucuggcugaucugauu

SEQ ID NO: 93687 - RNA, 19 nt, Artificial Sequence
  Description of Artificial Sequence: Synthetic oligonucleotide
  Antisense strand to SEQ ID NO: 93606
aaucagaucagccagagca

SEQ ID NO: 93688 - RNA, 19 nt, Artificial Sequence
  Description of Artificial Sequence: Synthetic oligonucleotide
  Sense strand starting at position 1538 of SEQ ID NO: 1179
acuugaagucaacacguua

SEQ ID NO: 93689 - RNA, 19 nt, Artificial Sequence
  Description of Artificial Sequence: Synthetic oligonucleotide
  Antisense strand to SEQ ID NO: 93608
uaacguguugacuucaagu

SEQ ID NO: 93690 - RNA, 19 nt, Artificial Sequence
  Description of Artificial Sequence: Synthetic oligonucleotide
  Sense strand starting at position 1974 of SEQ ID NO: 1179
ccgggaaugucugcagaag

SEQ ID NO: 93691 - RNA, 19 nt, Artificial Sequence
  Description of Artificial Sequence: Synthetic oligonucleotide
  Antisense strand to SEQ ID NO: 93610
cuucugcagacauucccgg

SEQ ID NO: 93692 - RNA, 19 nt, Artificial Sequence
  Description of Artificial Sequence: Synthetic oligonucleotide
  Sense strand starting at position 2171 of SEQ ID NO: 1179
ggaagcuucugcccgggaa

SEQ ID NO: 93693 - RNA, 19 nt, Artificial Sequence
  Description of Artificial Sequence: Synthetic oligonucleotide
  Antisense strand to SEQ ID NO: 93612
uucccgggcagaagcuucc

SEQ ID NO: 93694 - RNA, 19 nt, Artificial Sequence
  Description of Artificial Sequence: Synthetic oligonucleotide
  Sense strand starting at position 2944 of SEQ ID NO: 1179
uccuuuaaggucgaaccau

SEQ ID NO: 93695 - RNA, 19 nt, Artificial Sequence
  Description of Artificial Sequence: Synthetic oligonucleotide
  Antisense strand to SEQ ID NO: 93614
augguucgaccuuaaagga

SEQ ID NO: 93696 - RNA, 19 nt, Artificial Sequence
  Description of Artificial Sequence: Synthetic oligonucleotide
  Sense strand starting at position 2992 of SEQ ID NO: 1179
ggacucacggccuaagaau

SEQ ID NO: 93697 - RNA, 19 nt, Artificial Sequence
  Description of Artificial Sequence: Synthetic oligonucleotide
  Antisense strand to SEQ ID NO: 93616
auucuuaggccgugagucc

SEQ ID NO: 93698 - RNA, 19 nt, Artificial Sequence
  Description of Artificial Sequence: Synthetic oligonucleotide
  Sense strand starting at position 3128 of SEQ ID NO: 1179
ugugaauuaucugcaccuc

SEQ ID NO: 93699 - RNA, 19 nt, Artificial Sequence
  Description of Artificial Sequence: Synthetic oligonucleotide
  Antisense strand to SEQ ID NO: 93618
gaggugcagauaauucaca

SEQ ID NO: 93700 - RNA, 19 nt, Artificial Sequence
  Description of Artificial Sequence: Synthetic oligonucleotide
  Sense strand starting at position 3192 of SEQ ID NO: 1179
ggaauaaggccuuauccgu

SEQ ID NO: 93701 - RNA, 19 nt, Artificial Sequence
  Description of Artificial Sequence: Synthetic oligonucleotide
  Antisense strand to SEQ ID NO: 93620
acggauaaggccuuauucc

SEQ ID NO: 93702 - RNA, 19 nt, Artificial Sequence
  Description of Artificial Sequence: Synthetic oligonucleotide
  Sense strand starting at position 3211 of SEQ ID NO: 1179
cuguauagcccaggaggua

SEQ ID NO: 93703 - RNA, 19 nt, Artificial Sequence
  Description of Artificial Sequence: Synthetic oligonucleotide
  Antisense strand to SEQ ID NO: 93622
uaccuccugggcuauacag

SEQ ID NO: 93704 - RNA, 19 nt, Artificial Sequence
  Description of Artificial Sequence: Synthetic oligonucleotide
  Sense strand starting at position 3283 of SEQ ID NO: 1179
uagcguuuaucguuuauuu

SEQ ID NO: 93705 - RNA, 19 nt, Artificial Sequence
  Description of Artificial Sequence: Synthetic oligonucleotide
  Antisense strand to SEQ ID NO: 93624
aaauaaacgauaaacgcua

SEQ ID NO: 93706 - RNA, 19 nt, Artificial Sequence
  Description of Artificial Sequence: Synthetic oligonucleotide
  Sense strand starting at position 3303 of SEQ ID NO: 1179
gugccagcuuuguuacaca

SEQ ID NO: 93707 - RNA, 19 nt, Artificial Sequence
  Description of Artificial Sequence: Synthetic oligonucleotide
  Antisense strand to SEQ ID NO: 93626
uguguaacaaagcuggcac

SEQ ID NO: 93708 - RNA, 19 nt, Artificial Sequence
  Description of Artificial Sequence: Synthetic oligonucleotide
  Sense strand starting at position 3362 of SEQ ID NO: 1179
agacaauuguugucccaau

SEQ ID NO: 93709 - RNA, 19 nt, Artificial Sequence
  Description of Artificial Sequence: Synthetic oligonucleotide
  Antisense strand to SEQ ID NO: 93628
auugggacaacaauugucu

SEQ ID NO: 93710 - RNA, 19 nt, Artificial Sequence
  Description of Artificial Sequence: Synthetic oligonucleotide
  Sense strand starting at position 3419 of SEQ ID NO: 1179
cgagucccaucaucugaau

SEQ ID NO: 93711 - RNA, 19 nt, Artificial Sequence
  Description of Artificial Sequence: Synthetic oligonucleotide
  Antisense strand to SEQ ID NO: 93630
auucagaugaugggacucg

SEQ ID NO: 93712 - RNA, 19 nt, Artificial Sequence
  Description of Artificial Sequence: Synthetic oligonucleotide
  Sense strand starting at position 3524 of SEQ ID NO: 1179
ggccguuugacauggugaa

SEQ ID NO: 93713 - RNA, 19 nt, Artificial Sequence
  Description of Artificial Sequence: Synthetic oligonucleotide
  Antisense strand to SEQ ID NO: 93632
uucaccaugucaaacggcc

SEQ ID NO: 93714 - RNA, 19 nt, Artificial Sequence
  Description of Artificial Sequence: Synthetic oligonucleotide
  Sense strand starting at position 3525 of SEQ ID NO: 1179
gccguuugacauggugaac

SEQ ID NO: 93715 - RNA, 19 nt, Artificial Sequence
  Description of Artificial Sequence: Synthetic oligonucleotide
  Antisense strand to SEQ ID NO: 93634
guucaccaugucaaacggc

SEQ ID NO: 93716 - RNA, 19 nt, Artificial Sequence
  Description of Artificial Sequence: Synthetic oligonucleotide
  Sense strand starting at position 3528 of SEQ ID NO: 1179
guuugacauggugaacuca

SEQ ID NO: 93717 - RNA, 19 nt, Artificial Sequence
  Description of Artificial Sequence: Synthetic oligonucleotide
  Antisense strand to SEQ ID NO: 93636
ugaguucaccaugucaaac

SEQ ID NO: 93718 - RNA, 19 nt, Artificial Sequence
  Description of Artificial Sequence: Synthetic oligonucleotide
  Sense strand starting at position 3633 of SEQ ID NO: 1179
ggcagcaacuugcucuaau

SEQ ID NO: 93719 - RNA, 19 nt, Artificial Sequence
  Description of Artificial Sequence: Synthetic oligonucleotide
  Antisense strand to SEQ ID NO: 93638
auuagagcaaguugcugcc

SEQ ID NO: 93720 - RNA, 19 nt, Artificial Sequence
  Description of Artificial Sequence: Synthetic oligonucleotide
  Sense strand starting at position 3634 of SEQ ID NO: 1179
gcagcaacuugcucuaaug

SEQ ID NO: 93721 - RNA, 19 nt, Artificial Sequence
  Description of Artificial Sequence: Synthetic oligonucleotide
  Antisense strand to SEQ ID NO: 93640
cauuagagcaaguugcugc

SEQ ID NO: 93722 - RNA, 19 nt, Artificial Sequence
  Description of Artificial Sequence: Synthetic oligonucleotide
  Sense strand starting at position 3644 of SEQ ID NO: 1179
gcucuaaugugcuuaggag

SEQ ID NO: 93723 - RNA, 19 nt, Artificial Sequence
  Description of Artificial Sequence: Synthetic oligonucleotide
  Antisense strand to SEQ ID NO: 93642
cuccuaagcacauuagagc

SEQ ID NO: 93724 - RNA, 19 nt, Artificial Sequence
  Description of Artificial Sequence: Synthetic oligonucleotide
  Sense strand starting at position 3767 of SEQ ID NO: 1179
agaggcuaauacguuauau

SEQ ID NO: 93725 - RNA, 19 nt, Artificial Sequence
  Description of Artificial Sequence: Synthetic oligonucleotide
  Antisense strand to SEQ ID NO: 93644
auauaacguauuagccucu

SEQ ID NO: 93726 - RNA, 19 nt, Artificial Sequence
  Description of Artificial Sequence: Synthetic oligonucleotide
  Sense strand starting at position 3769 of SEQ ID NO: 1179
aggcuaauacguuauauuc

SEQ ID NO: 93727 - RNA, 19 nt, Artificial Sequence
  Description of Artificial Sequence: Synthetic oligonucleotide
  Antisense strand to SEQ ID NO: 93646
gaauauaacguauuagccu

SEQ ID NO: 93728 - RNA, 19 nt, Artificial Sequence
  Description of Artificial Sequence: Synthetic oligonucleotide
  Sense strand starting at position 3779 of SEQ ID NO: 1179
guuauauucgaaugcugcu

SEQ ID NO: 93729 - RNA, 19 nt, Artificial Sequence
  Description of Artificial Sequence: Synthetic oligonucleotide
  Antisense strand to SEQ ID NO: 93648
agcagcauucgaauauaac

SEQ ID NO: 93730 - RNA, 19 nt, Artificial Sequence
  Description of Artificial Sequence: Synthetic oligonucleotide
  Sense strand starting at position 3824 of SEQ ID NO: 1179
uugcuugaucuuuacagca

SEQ ID NO: 93731 - RNA, 19 nt, Artificial Sequence
  Description of Artificial Sequence: Synthetic oligonucleotide
  Antisense strand to SEQ ID NO: 93650
ugcuguaaagaucaagcaa

SEQ ID NO: 93732 - RNA, 19 nt, Artificial Sequence
  Description of Artificial Sequence: Synthetic oligonucleotide
  Sense strand starting at position 3837 of SEQ ID NO: 1179
acagcaaaccugugaggua

SEQ ID NO: 93733 - RNA, 19 nt, Artificial Sequence
  Description of Artificial Sequence: Synthetic oligonucleotide
  Antisense strand to SEQ ID NO: 93652
uaccucacagguuugcugu

SEQ ID NO: 93734 - RNA, 19 nt, Artificial Sequence
  Description of Artificial Sequence: Synthetic oligonucleotide
  Sense strand starting at position 3941 of SEQ ID NO: 1179
aguggcaugucuccuaaca

SEQ ID NO: 93735 - RNA, 19 nt, Artificial Sequence
  Description of Artificial Sequence: Synthetic oligonucleotide
  Antisense strand to SEQ ID NO: 93654
uguuaggagacaugccacu

SEQ ID NO: 93736 - RNA, 19 nt, Artificial Sequence
  Description of Artificial Sequence: Synthetic oligonucleotide
  Sense strand starting at position 232 of SEQ ID NO: 1178
uuaauuaacgcggagccua

SEQ ID NO: 93737 - RNA, 19 nt, Artificial Sequence
  Description of Artificial Sequence: Synthetic oligonucleotide
  Antisense strand to SEQ ID NO: 93656
uaggcuccgcguuaauuaa

SEQ ID NO: 93738 - RNA, 19 nt, Artificial Sequence
  Description of Artificial Sequence: Synthetic oligonucleotide
  Sense strand starting at position 317 of SEQ ID NO: 1178
cuugcccauggcugaaauu

SEQ ID NO: 93739 - RNA, 19 nt, Artificial Sequence
  Description of Artificial Sequence: Synthetic oligonucleotide
  Antisense strand to SEQ ID NO: 93658
aauuucagccaugggcaag

SEQ ID NO: 93740 - RNA, 19 nt, Artificial Sequence
  Description of Artificial Sequence: Synthetic oligonucleotide
  Sense strand starting at position 356 of SEQ ID NO: 1178
agagaagccuccucgaacu

SEQ ID NO: 93741 - RNA, 19 nt, Artificial Sequence
  Description of Artificial Sequence: Synthetic oligonucleotide
  Antisense strand to SEQ ID NO: 93660
aguucgaggaggcuucucu

SEQ ID NO: 93742 - RNA, 19 nt, Artificial Sequence
  Description of Artificial Sequence: Synthetic oligonucleotide
  Sense strand starting at position 434 of SEQ ID NO: 1178
gcauuuaugagacgucgau

SEQ ID NO: 93743 - RNA, 19 nt, Artificial Sequence
  Description of Artificial Sequence: Synthetic oligonucleotide
  Antisense strand to SEQ ID NO: 93662
aucgacgucucauaaaugc

SEQ ID NO: 93744 - RNA, 19 nt, Artificial Sequence
  Description of Artificial Sequence: Synthetic oligonucleotide
  Sense strand starting at position 447 of SEQ ID NO: 1178
gucgaucagcuccgagauu

SEQ ID NO: 93745 - RNA, 19 nt, Artificial Sequence
  Description of Artificial Sequence: Synthetic oligonucleotide
  Antisense strand to SEQ ID NO: 93664
aaucucggagcugaucgac

SEQ ID NO: 93746 - RNA, 19 nt, Artificial Sequence
  Description of Artificial Sequence: Synthetic oligonucleotide
  Sense strand starting at position 796 of SEQ ID NO: 1178
ugucgaucgcgcuuuggaa

SEQ ID NO: 93747 - RNA, 19 nt, Artificial Sequence
  Description of Artificial Sequence: Synthetic oligonucleotide
  Antisense strand to SEQ ID NO: 93666
uuccaaagcgcgaucgaca

SEQ ID NO: 93748 - RNA, 19 nt, Artificial Sequence
  Description of Artificial Sequence: Synthetic oligonucleotide
  Sense strand starting at position 808 of SEQ ID NO: 1178
uuuggaaguucuccuccau

SEQ ID NO: 93749 - RNA, 19 nt, Artificial Sequence
  Description of Artificial Sequence: Synthetic oligonucleotide
  Antisense strand to SEQ ID NO: 93668
auggaggagaacuuccaaa

SEQ ID NO: 93750 - RNA, 19 nt, Artificial Sequence
  Description of Artificial Sequence: Synthetic oligonucleotide
  Sense strand starting at position 877 of SEQ ID NO: 1178
gaagaaacgaugcgucuga

SEQ ID NO: 93751 - RNA, 19 nt, Artificial Sequence
  Description of Artificial Sequence: Synthetic oligonucleotide
  Antisense strand to SEQ ID NO: 93670
ucagacgcaucguuucuuc

SEQ ID NO: 93752 - RNA, 19 nt, Artificial Sequence
  Description of Artificial Sequence: Synthetic oligonucleotide
  Sense strand starting at position 930 of SEQ ID NO: 1178
accgcacuccugggaaaga

SEQ ID NO: 93753 - RNA, 19 nt, Artificial Sequence
  Description of Artificial Sequence: Synthetic oligonucleotide
  Antisense strand to SEQ ID NO: 93672
ucuuucccaggagugcggu

SEQ ID NO: 93754 - RNA, 19 nt, Artificial Sequence
  Description of Artificial Sequence: Synthetic oligonucleotide
  Sense strand starting at position 1043 of SEQ ID NO: 1178
ugcucuggcugaucugauu

SEQ ID NO: 93755 - RNA, 19 nt, Artificial Sequence
  Description of Artificial Sequence: Synthetic oligonucleotide
  Antisense strand to SEQ ID NO: 93674
aaucagaucagccagagca

SEQ ID NO: 93756 - RNA, 19 nt, Artificial Sequence
  Description of Artificial Sequence: Synthetic oligonucleotide
  Sense strand starting at position 1064 of SEQ ID NO: 1178
acuugaagucaacacguua

SEQ ID NO: 93757 - RNA, 19 nt, Artificial Sequence
  Description of Artificial Sequence: Synthetic oligonucleotide
  Antisense strand to SEQ ID NO: 93676
uaacguguugacuucaagu

SEQ ID NO: 93758 - RNA, 19 nt, Artificial Sequence
  Description of Artificial Sequence: Synthetic oligonucleotide
  Sense strand starting at position 1500 of SEQ ID NO: 1178
ccgggaaugucugcagaag

SEQ ID NO: 93759 - RNA, 19 nt, Artificial Sequence
  Description of Artificial Sequence: Synthetic oligonucleotide
  Antisense strand to SEQ ID NO: 93678
cuucugcagacauucccgg

SEQ ID NO: 93760 - RNA, 19 nt, Artificial Sequence
  Description of Artificial Sequence: Synthetic oligonucleotide
  Sense strand starting at position 1697 of SEQ ID NO: 1178
ggaagcuucugcccgggaa

SEQ ID NO: 93761 - RNA, 19 nt, Artificial Sequence
  Description of Artificial Sequence: Synthetic oligonucleotide
  Antisense strand to SEQ ID NO: 93680
uucccgggcagaagcuucc

SEQ ID NO: 93762 - RNA, 19 nt, Artificial Sequence
  Description of Artificial Sequence: Synthetic oligonucleotide
  Sense strand starting at position 2470 of SEQ ID NO: 1178
uccuuuaaggucgaaccau

SEQ ID NO: 93763 - RNA, 19 nt, Artificial Sequence
  Description of Artificial Sequence: Synthetic oligonucleotide
  Antisense strand to SEQ ID NO: 93682
augguucgaccuuaaagga

SEQ ID NO: 93764 - RNA, 19 nt, Artificial Sequence
  Description of Artificial Sequence: Synthetic oligonucleotide
  Sense strand starting at position 2518 of SEQ ID NO: 1178
ggacucacggccuaagaau

SEQ ID NO: 93765 - RNA, 19 nt, Artificial Sequence
  Description of Artificial Sequence: Synthetic oligonucleotide
  Antisense strand to SEQ ID NO: 93684
auucuuaggccgugagucc

SEQ ID NO: 93766 - RNA, 19 nt, Artificial Sequence
  Description of Artificial Sequence: Synthetic oligonucleotide
  Sense strand starting at position 2654 of SEQ ID NO: 1178
ugugaauuaucugcaccuc

SEQ ID NO: 93767 - RNA, 19 nt, Artificial Sequence
  Description of Artificial Sequence: Synthetic oligonucleotide
  Antisense strand to SEQ ID NO: 93686
gaggugcagauaauucaca

SEQ ID NO: 93768 - RNA, 19 nt, Artificial Sequence
  Description of Artificial Sequence: Synthetic oligonucleotide
  Sense strand starting at position 2718 of SEQ ID NO: 1178
ggaauaaggccuuauccgu

SEQ ID NO: 93769 - RNA, 19 nt, Artificial Sequence
  Description of Artificial Sequence: Synthetic oligonucleotide
  Antisense strand to SEQ ID NO: 93688
acggauaaggccuuauucc

SEQ ID NO: 93770 - RNA, 19 nt, Artificial Sequence
  Description of Artificial Sequence: Synthetic oligonucleotide
  Sense strand starting at position 2737 of SEQ ID NO: 1178
cuguauagcccaggaggua

SEQ ID NO: 93771 - RNA, 19 nt, Artificial Sequence
  Description of Artificial Sequence: Synthetic oligonucleotide
  Antisense strand to SEQ ID NO: 93690
uaccuccugggcuauacag

SEQ ID NO: 93772 - RNA, 19 nt, Artificial Sequence
  Description of Artificial Sequence: Synthetic oligonucleotide
  Sense strand starting at position 2809 of SEQ ID NO: 1178
uagcguuuaucguuuauuu

SEQ ID NO: 93773 - RNA, 19 nt, Artificial Sequence
  Description of Artificial Sequence: Synthetic oligonucleotide
  Antisense strand to SEQ ID NO: 93692
aaauaaacgauaaacgcua

SEQ ID NO: 93774 - RNA, 19 nt, Artificial Sequence
  Description of Artificial Sequence: Synthetic oligonucleotide
  Sense strand starting at position 2829 of SEQ ID NO: 1178
gugccagcuuuguuacaca

SEQ ID NO: 93775 - RNA, 19 nt, Artificial Sequence
  Description of Artificial Sequence: Synthetic oligonucleotide
  Antisense strand to SEQ ID NO: 93694
uguguaacaaagcuggcac

SEQ ID NO: 93776 - RNA, 19 nt, Artificial Sequence
  Description of Artificial Sequence: Synthetic oligonucleotide
  Sense strand starting at position 2888 of SEQ ID NO: 1178
agacaauuguugucccaau

SEQ ID NO: 93777 - RNA, 19 nt, Artificial Sequence
  Description of Artificial Sequence: Synthetic oligonucleotide
  Antisense strand to SEQ ID NO: 93696
auugggacaacaauugucu

SEQ ID NO: 93778 - RNA, 19 nt, Artificial Sequence
  Description of Artificial Sequence: Synthetic oligonucleotide
  Sense strand starting at position 2945 of SEQ ID NO: 1178
cgagucccaucaucugaau

SEQ ID NO: 93779 - RNA, 19 nt, Artificial Sequence
  Description of Artificial Sequence: Synthetic oligonucleotide
  Antisense strand to SEQ ID NO: 93698
auucagaugaugggacucg

SEQ ID NO: 93780 - RNA, 19 nt, Artificial Sequence
  Description of Artificial Sequence: Synthetic oligonucleotide
  Sense strand starting at position 3050 of SEQ ID NO: 1178
ggccguuugacauggugaa

SEQ ID NO: 93781 - RNA, 19 nt, Artificial Sequence
  Description of Artificial Sequence: Synthetic oligonucleotide
  Antisense strand to SEQ ID NO: 93700
uucaccaugucaaacggcc

SEQ ID NO: 93782 - RNA, 19 nt, Artificial Sequence
  Description of Artificial Sequence: Synthetic oligonucleotide
  Sense strand starting at position 3051 of SEQ ID NO: 1178
gccguuugacauggugaac

SEQ ID NO: 93783 - RNA, 19 nt, Artificial Sequence
  Description of Artificial Sequence: Synthetic oligonucleotide
  Antisense strand to SEQ ID NO: 93702
guucaccaugucaaacggc

SEQ ID NO: 93784 - RNA, 19 nt, Artificial Sequence
  Description of Artificial Sequence: Synthetic oligonucleotide
  Sense strand starting at position 3054 of SEQ ID NO: 1178
guuugacauggugaacuca

SEQ ID NO: 93785 - RNA, 19 nt, Artificial Sequence
  Description of Artificial Sequence: Synthetic oligonucleotide
  Antisense strand to SEQ ID NO: 93704
ugaguucaccaugucaaac

SEQ ID NO: 93786 - RNA, 19 nt, Artificial Sequence
  Description of Artificial Sequence: Synthetic oligonucleotide
  Sense strand starting at position 3159 of SEQ ID NO: 1178
ggcagcaacuugcucuaau

SEQ ID NO: 93787 - RNA, 19 nt, Artificial Sequence
  Description of Artificial Sequence: Synthetic oligonucleotide
  Antisense strand to SEQ ID NO: 93706
auuagagcaaguugcugcc

SEQ ID NO: 93788 - RNA, 19 nt, Artificial Sequence
  Description of Artificial Sequence: Synthetic oligonucleotide
  Sense strand starting at position 3160 of SEQ ID NO: 1178
gcagcaacuugcucuaaug

SEQ ID NO: 93789 - RNA, 19 nt, Artificial Sequence
  Description of Artificial Sequence: Synthetic oligonucleotide
  Antisense strand to SEQ ID NO: 93708
cauuagagcaaguugcugc

SEQ ID NO: 93790 - RNA, 19 nt, Artificial Sequence
  Description of Artificial Sequence: Synthetic oligonucleotide
  Sense strand starting at position 3170 of SEQ ID NO: 1178
gcucuaaugugcuuaggag

SEQ ID NO: 93791 - RNA, 19 nt, Artificial Sequence
  Description of Artificial Sequence: Synthetic oligonucleotide
  Antisense strand to SEQ ID NO: 93710
cuccuaagcacauuagagc

SEQ ID NO: 93792 - RNA, 19 nt, Artificial Sequence
  Description of Artificial Sequence: Synthetic oligonucleotide
  Sense strand starting at position 3293 of SEQ ID NO: 1178
agaggcuaauacguuauau

SEQ ID NO: 93793 - RNA, 19 nt, Artificial Sequence
  Description of Artificial Sequence: Synthetic oligonucleotide
  Antisense strand to SEQ ID NO: 93712
auauaacguauuagccucu

SEQ ID NO: 93794 - RNA, 19 nt, Artificial Sequence
  Description of Artificial Sequence: Synthetic oligonucleotide
  Sense strand starting at position 3295 of SEQ ID NO: 1178
aggcuaauacguuauauuc

SEQ ID NO: 93795 - RNA, 19 nt, Artificial Sequence
  Description of Artificial Sequence: Synthetic oligonucleotide
  Antisense strand to SEQ ID NO: 93714
gaauauaacguauuagccu

SEQ ID NO: 93796 - RNA, 19 nt, Artificial Sequence
  Description of Artificial Sequence: Synthetic oligonucleotide
  Sense strand starting at position 3350 of SEQ ID NO: 1178
uugcuugaucuuuacagca

SEQ ID NO: 93797 - RNA, 19 nt, Artificial Sequence
  Description of Artificial Sequence: Synthetic oligonucleotide
  Antisense strand to SEQ ID NO: 93716
ugcuguaaagaucaagcaa

SEQ ID NO: 93798 - RNA, 19 nt, Artificial Sequence
  Description of Artificial Sequence: Synthetic oligonucleotide
  Sense strand starting at position 3363 of SEQ ID NO: 1178
acagcaaaccugugaggua

SEQ ID NO: 93799 - RNA, 19 nt, Artificial Sequence
  Description of Artificial Sequence: Synthetic oligonucleotide
  Antisense strand to SEQ ID NO: 93718
uaccucacagguuugcugu

SEQ ID NO: 93800 - RNA, 19 nt, Artificial Sequence
  Description of Artificial Sequence: Synthetic oligonucleotide
  Sense strand starting at position 3467 of SEQ ID NO: 1178
aguggcaugucuccuaaca

SEQ ID NO: 93801 - RNA, 19 nt, Artificial Sequence
  Description of Artificial Sequence: Synthetic oligonucleotide
  Antisense strand to SEQ ID NO: 93720
uguuaggagacaugccacu

SEQ ID NO: 93802 - RNA, 19 nt, Artificial Sequence
  Description of Artificial Sequence: Synthetic oligonucleotide
  Sense strand starting at position 3542 of SEQ ID NO: 1178
cuacaaguauuauuaggau

SEQ ID NO: 93803 - RNA, 19 nt, Artificial Sequence
  Description of Artificial Sequence: Synthetic oligonucleotide
  Antisense strand to SEQ ID NO: 93722
auccuaauaauacuuguag

SEQ ID NO: 93804 - RNA, 19 nt, Artificial Sequence
  Description of Artificial Sequence: Synthetic oligonucleotide
  Sense strand starting at position 3556 of SEQ ID NO: 1178
aggauaauaugugaaauag

SEQ ID NO: 93805 - RNA, 19 nt, Artificial Sequence
  Description of Artificial Sequence: Synthetic oligonucleotide
  Antisense strand to SEQ ID NO: 93724
cuauuucacauauuauccu

SEQ ID NO: 93806 - RNA, 19 nt, Artificial Sequence
  Description of Artificial Sequence: Synthetic oligonucleotide
  Sense strand starting at position 3632 of SEQ ID NO: 1178
guaaauacccggcagaauu

SEQ ID NO: 93807 - RNA, 19 nt, Artificial Sequence
  Description of Artificial Sequence: Synthetic oligonucleotide
  Antisense strand to SEQ ID NO: 93726
aauucugccggguauuuac

SEQ ID NO: 93808 - RNA, 19 nt, Artificial Sequence
  Description of Artificial Sequence: Synthetic oligonucleotide
  Sense strand starting at position 3718 of SEQ ID NO: 1178
uuuagugaauauccugaaa

SEQ ID NO: 93809 - RNA, 19 nt, Artificial Sequence
  Description of Artificial Sequence: Synthetic oligonucleotide
  Antisense strand to SEQ ID NO: 93728
uuucaggauauucacuaaa

SEQ ID NO: 93810 - RNA, 19 nt, Artificial Sequence
  Description of Artificial Sequence: Synthetic oligonucleotide
  Sense strand starting at position 3738 of SEQ ID NO: 1178
uagauagauugucauuuga

SEQ ID NO: 93811 - RNA, 19 nt, Artificial Sequence
  Description of Artificial Sequence: Synthetic oligonucleotide
  Antisense strand to SEQ ID NO: 93730
ucaaaugacaaucuaucua

SEQ ID NO: 93812 - RNA, 19 nt, Artificial Sequence
  Description of Artificial Sequence: Synthetic oligonucleotide
  Sense strand starting at position 3805 of SEQ ID NO: 1178
gcuugauuaguguagauca

SEQ ID NO: 93813 - RNA, 19 nt, Artificial Sequence
  Description of Artificial Sequence: Synthetic oligonucleotide
  Antisense strand to SEQ ID NO: 93732
ugaucuacacuaaucaagc

SEQ ID NO: 93814 - RNA, 19 nt, Artificial Sequence
  Description of Artificial Sequence: Synthetic oligonucleotide
  Sense strand starting at position 3807 of SEQ ID NO: 1178
uugauuaguguagaucaca

SEQ ID NO: 93815 - RNA, 19 nt, Artificial Sequence
  Description of Artificial Sequence: Synthetic oligonucleotide
  Antisense strand to SEQ ID NO: 93734
ugugaucuacacuaaucaa

SEQ ID NO: 93816 - RNA, 19 nt, Artificial Sequence
  Description of Artificial Sequence: Synthetic oligonucleotide
  Sense strand starting at position 3955 of SEQ ID NO: 1180
gcgguuuauuuauugccaa

SEQ ID NO: 93817 - RNA, 19 nt, Artificial Sequence
  Description of Artificial Sequence: Synthetic oligonucleotide
  Antisense strand to SEQ ID NO: 93736
uuggcaauaaauaaaccgc

SEQ ID NO: 93818 - RNA, 19 nt, Artificial Sequence
  Description of Artificial Sequence: Synthetic oligonucleotide
  Sense strand starting at position 3920 of SEQ ID NO: 1180
uucuuauggucuuccacuu

SEQ ID NO: 93819 - RNA, 19 nt, Artificial Sequence
  Description of Artificial Sequence: Synthetic oligonucleotide
  Antisense strand to SEQ ID NO: 93738
aaguggaagaccauaagaa

SEQ ID NO: 93820 - RNA, 19 nt, Artificial Sequence
  Description of Artificial Sequence: Synthetic oligonucleotide
  Sense strand starting at position 3745 of SEQ ID NO: 1180
aguuguucuguguuuguua

SEQ ID NO: 93821 - RNA, 19 nt, Artificial Sequence
  Description of Artificial Sequence: Synthetic oligonucleotide
  Antisense strand to SEQ ID NO: 93740
uaacaaacacagaacaacu

SEQ ID NO: 93822 - RNA, 19 nt, Artificial Sequence
  Description of Artificial Sequence: Synthetic oligonucleotide
  Sense strand starting at position 3723 of SEQ ID NO: 1180
caguaugaggccugacaau

SEQ ID NO: 93823 - RNA, 19 nt, Artificial Sequence
  Description of Artificial Sequence: Synthetic oligonucleotide
  Antisense strand to SEQ ID NO: 93742
auugucaggccucauacug

SEQ ID NO: 93824 - RNA, 19 nt, Artificial Sequence
  Description of Artificial Sequence: Synthetic oligonucleotide
  Sense strand starting at position 3671 of SEQ ID NO: 1180
cuggcuuuccuacagggaa

SEQ ID NO: 93825 - RNA, 19 nt, Artificial Sequence
  Description of Artificial Sequence: Synthetic oligonucleotide
  Antisense strand to SEQ ID NO: 93744
uucccuguaggaaagccag

SEQ ID NO: 93826 - RNA, 19 nt, Artificial Sequence
  Description of Artificial Sequence: Synthetic oligonucleotide
  Sense strand starting at position 3613 of SEQ ID NO: 1180
ucuugucuucuugugcuua

SEQ ID NO: 93827 - RNA, 19 nt, Artificial Sequence
  Description of Artificial Sequence: Synthetic oligonucleotide
  Antisense strand to SEQ ID NO: 93746
uaagcacaagaagacaaga

SEQ ID NO: 93828 - RNA, 19 nt, Artificial Sequence
  Description of Artificial Sequence: Synthetic oligonucleotide
  Sense strand starting at position 3544 of SEQ ID NO: 1180
uggugcuccucuuugggaa

SEQ ID NO: 93829 - RNA, 19 nt, Artificial Sequence
  Description of Artificial Sequence: Synthetic oligonucleotide
  Antisense strand to SEQ ID NO: 93748
uucccaaagaggagcacca

SEQ ID NO: 93830 - RNA, 19 nt, Artificial Sequence
  Description of Artificial Sequence: Synthetic oligonucleotide
  Sense strand starting at position 3422 of SEQ ID NO: 1180
cuugaaugcccucaggaug

SEQ ID NO: 93831 - RNA, 19 nt, Artificial Sequence
  Description of Artificial Sequence: Synthetic oligonucleotide
  Antisense strand to SEQ ID NO: 93750
cauccugagggcauucaag

SEQ ID NO: 93832 - RNA, 19 nt, Artificial Sequence
  Description of Artificial Sequence: Synthetic oligonucleotide
  Sense strand starting at position 3230 of SEQ ID NO: 1180
agagaagauuaagaccaaa

SEQ ID NO: 93833 - RNA, 19 nt, Artificial Sequence
  Description of Artificial Sequence: Synthetic oligonucleotide
  Antisense strand to SEQ ID NO: 93752
uuuggucuuaaucuucucu

SEQ ID NO: 93834 - RNA, 19 nt, Artificial Sequence
  Description of Artificial Sequence: Synthetic oligonucleotide
  Sense strand starting at position 3111 of SEQ ID NO: 1180
ugugaaaggauguggaauu

SEQ ID NO: 93835 - RNA, 19 nt, Artificial Sequence
  Description of Artificial Sequence: Synthetic oligonucleotide
  Antisense strand to SEQ ID NO: 93754
aauuccacauccuuucaca

SEQ ID NO: 93836 - RNA, 19 nt, Artificial Sequence
  Description of Artificial Sequence: Synthetic oligonucleotide
  Sense strand starting at position 3109 of SEQ ID NO: 1180
ggugugaaaggauguggaa

SEQ ID NO: 93837 - RNA, 19 nt, Artificial Sequence
  Description of Artificial Sequence: Synthetic oligonucleotide
  Antisense strand to SEQ ID NO: 93756
uuccacauccuuucacacc

SEQ ID NO: 93838 - RNA, 19 nt, Artificial Sequence
  Description of Artificial Sequence: Synthetic oligonucleotide
  Sense strand starting at position 3099 of SEQ ID NO: 1180
acaggucccaggugugaaa

SEQ ID NO: 93839 - RNA, 19 nt, Artificial Sequence
  Description of Artificial Sequence: Synthetic oligonucleotide
  Antisense strand to SEQ ID NO: 93758
uuucacaccugggaccugu

SEQ ID NO: 93840 - RNA, 19 nt, Artificial Sequence
  Description of Artificial Sequence: Synthetic oligonucleotide
  Sense strand starting at position 3018 of SEQ ID NO: 1180
ugacuuguccaguaaaugg

SEQ ID NO: 93841 - RNA, 19 nt, Artificial Sequence
  Description of Artificial Sequence: Synthetic oligonucleotide
  Antisense strand to SEQ ID NO: 93760
ccauuuacuggacaaguca

SEQ ID NO: 93842 - RNA, 19 nt, Artificial Sequence
  Description of Artificial Sequence: Synthetic oligonucleotide
  Sense strand starting at position 3015 of SEQ ID NO: 1180
augugacuuguccaguaaa

SEQ ID NO: 93843 - RNA, 19 nt, Artificial Sequence
  Description of Artificial Sequence: Synthetic oligonucleotide
  Antisense strand to SEQ ID NO: 93762
uuuacuggacaagucacau

SEQ ID NO: 93844 - RNA, 19 nt, Artificial Sequence
  Description of Artificial Sequence: Synthetic oligonucleotide
  Sense strand starting at position 3011 of SEQ ID NO: 1180
aguuaugugacuuguccag

SEQ ID NO: 93845 - RNA, 19 nt, Artificial Sequence
  Description of Artificial Sequence: Synthetic oligonucleotide
  Antisense strand to SEQ ID NO: 93764
cuggacaagucacauaacu

SEQ ID NO: 93846 - RNA, 19 nt, Artificial Sequence
  Description of Artificial Sequence: Synthetic oligonucleotide
  Sense strand starting at position 3006 of SEQ ID NO: 1180
aggagaguuaugugacuug

SEQ ID NO: 93847 - RNA, 19 nt, Artificial Sequence
  Description of Artificial Sequence: Synthetic oligonucleotide
  Antisense strand to SEQ ID NO: 93766
caagucacauaacucuccu

SEQ ID NO: 93848 - RNA, 19 nt, Artificial Sequence
  Description of Artificial Sequence: Synthetic oligonucleotide
  Sense strand starting at position 2967 of SEQ ID NO: 1180
agugguaccuuaucuuaca

SEQ ID NO: 93849 - RNA, 19 nt, Artificial Sequence
  Description of Artificial Sequence: Synthetic oligonucleotide
  Antisense strand to SEQ ID NO: 93768
uguaagauaagguaccacu

SEQ ID NO: 93850 - RNA, 19 nt, Artificial Sequence
  Description of Artificial Sequence: Synthetic oligonucleotide
  Sense strand starting at position 2927 of SEQ ID NO: 1180
gagucucuugcauacaugu

SEQ ID NO: 93851 - RNA, 19 nt, Artificial Sequence
  Description of Artificial Sequence: Synthetic oligonucleotide
  Antisense strand to SEQ ID NO: 93770
acauguaugcaagagacuc

SEQ ID NO: 93852 - RNA, 19 nt, Artificial Sequence
  Description of Artificial Sequence: Synthetic oligonucleotide
  Sense strand starting at position 2921 of SEQ ID NO: 1180
ggaaaugagucucuugcau

SEQ ID NO: 93853 - RNA, 19 nt, Artificial Sequence
  Description of Artificial Sequence: Synthetic oligonucleotide
  Antisense strand to SEQ ID NO: 93772
augcaagagacucauuucc

SEQ ID NO: 93854 - RNA, 19 nt, Artificial Sequence
  Description of Artificial Sequence: Synthetic oligonucleotide
  Sense strand starting at position 2875 of SEQ ID NO: 1180
guagaaaccuuggucccua

SEQ ID NO: 93855 - RNA, 19 nt, Artificial Sequence
  Description of Artificial Sequence: Synthetic oligonucleotide
  Antisense strand to SEQ ID NO: 93774
uagggaccaagguuucuac

SEQ ID NO: 93856 - RNA, 19 nt, Artificial Sequence
  Description of Artificial Sequence: Synthetic oligonucleotide
  Sense strand starting at position 2874 of SEQ ID NO: 1180
gguagaaaccuuggucccu

SEQ ID NO: 93857 - RNA, 19 nt, Artificial Sequence
  Description of Artificial Sequence: Synthetic oligonucleotide
  Antisense strand to SEQ ID NO: 93776
agggaccaagguuucuacc

SEQ ID NO: 93858 - RNA, 19 nt, Artificial Sequence
  Description of Artificial Sequence: Synthetic oligonucleotide
  Sense strand starting at position 2689 of SEQ ID NO: 1180
cccuacuuuccagguaaag

SEQ ID NO: 93859 - RNA, 19 nt, Artificial Sequence
  Description of Artificial Sequence: Synthetic oligonucleotide
  Antisense strand to SEQ ID NO: 93778
cuuuaccuggaaaguaggg

SEQ ID NO: 93860 - RNA, 19 nt, Artificial Sequence
  Description of Artificial Sequence: Synthetic oligonucleotide
  Sense strand starting at position 2249 of SEQ ID NO: 1180
uggucaauugucuacuaua

SEQ ID NO: 93861 - RNA, 19 nt, Artificial Sequence
  Description of Artificial Sequence: Synthetic oligonucleotide
  Antisense strand to SEQ ID NO: 93780
uauaguagacaauugacca

SEQ ID NO: 93862 - RNA, 19 nt, Artificial Sequence
  Description of Artificial Sequence: Synthetic oligonucleotide
  Sense strand starting at position 2248 of SEQ ID NO: 1180
auggucaauugucuacuau

SEQ ID NO: 93863 - RNA, 19 nt, Artificial Sequence
  Description of Artificial Sequence: Synthetic oligonucleotide
  Antisense strand to SEQ ID NO: 93782
auaguagacaauugaccau

SEQ ID NO: 93864 - RNA, 19 nt, Artificial Sequence
  Description of Artificial Sequence: Synthetic oligonucleotide
  Sense strand starting at position 2026 of SEQ ID NO: 1180
agggaaaucugggaaggga

SEQ ID NO: 93865 - RNA, 19 nt, Artificial Sequence
  Description of Artificial Sequence: Synthetic oligonucleotide
  Antisense strand to SEQ ID NO: 93784
ucccuucccagauuucccu

SEQ ID NO: 93866 - RNA, 19 nt, Artificial Sequence
  Description of Artificial Sequence: Synthetic oligonucleotide
  Sense strand starting at position 1869 of SEQ ID NO: 1180
agaguuuaucagggcagca

SEQ ID NO: 93867 - RNA, 19 nt, Artificial Sequence
  Description of Artificial Sequence: Synthetic oligonucleotide
  Antisense strand to SEQ ID NO: 93786
ugcugcccugauaaacucu

SEQ ID NO: 93868 - RNA, 19 nt, Artificial Sequence
  Description of Artificial Sequence: Synthetic oligonucleotide
  Sense strand starting at position 1790 of SEQ ID NO: 1180
gagacaaaccauggucuuu

SEQ ID NO: 93869 - RNA, 19 nt, Artificial Sequence
  Description of Artificial Sequence: Synthetic oligonucleotide
  Antisense strand to SEQ ID NO: 93788
aaagaccaugguuugucuc

SEQ ID NO: 93870 - RNA, 19 nt, Artificial Sequence
  Description of Artificial Sequence: Synthetic oligonucleotide
  Sense strand starting at position 1766 of SEQ ID NO: 1180
gcccaucuggucuggacaa

SEQ ID NO: 93871 - RNA, 19 nt, Artificial Sequence
  Description of Artificial Sequence: Synthetic oligonucleotide
  Antisense strand to SEQ ID NO: 93790
uuguccagaccagaugggc

SEQ ID NO: 93872 - RNA, 19 nt, Artificial Sequence
  Description of Artificial Sequence: Synthetic oligonucleotide
  Sense strand starting at position 1712 of SEQ ID NO: 1180
ggauuaaucucaccuccag

SEQ ID NO: 93873 - RNA, 19 nt, Artificial Sequence
  Description of Artificial Sequence: Synthetic oligonucleotide
  Antisense strand to SEQ ID NO: 93792
cuggaggugagauuaaucc

SEQ ID NO: 93874 - RNA, 19 nt, Artificial Sequence
  Description of Artificial Sequence: Synthetic oligonucleotide
  Sense strand starting at position 1630 of SEQ ID NO: 1180
ccugcacuugagugaaaua

SEQ ID NO: 93875 - RNA, 19 nt, Artificial Sequence
  Description of Artificial Sequence: Synthetic oligonucleotide
  Antisense strand to SEQ ID NO: 93794
uauuucacucaagugcagg

SEQ ID NO: 93876 - RNA, 19 nt, Artificial Sequence
  Description of Artificial Sequence: Synthetic oligonucleotide
  Sense strand starting at position 1629 of SEQ ID NO: 1180
uccugcacuugagugaaau

SEQ ID NO: 93877 - RNA, 19 nt, Artificial Sequence
  Description of Artificial Sequence: Synthetic oligonucleotide
  Antisense strand to SEQ ID NO: 93796
auuucacucaagugcagga

SEQ ID NO: 93878 - RNA, 19 nt, Artificial Sequence
  Description of Artificial Sequence: Synthetic oligonucleotide
  Sense strand starting at position 1627 of SEQ ID NO: 1180
gauccugcacuugagugaa

SEQ ID NO: 93879 - RNA, 19 nt, Artificial Sequence
  Description of Artificial Sequence: Synthetic oligonucleotide
  Antisense strand to SEQ ID NO: 93798
uucacucaagugcaggauc

SEQ ID NO: 93880 - RNA, 19 nt, Artificial Sequence
  Description of Artificial Sequence: Synthetic oligonucleotide
  Sense strand starting at position 1626 of SEQ ID NO: 1180
agauccugcacuugaguga

SEQ ID NO: 93881 - RNA, 19 nt, Artificial Sequence
  Description of Artificial Sequence: Synthetic oligonucleotide
  Antisense strand to SEQ ID NO: 93800
ucacucaagugcaggaucu

SEQ ID NO: 93882 - RNA, 19 nt, Artificial Sequence
  Description of Artificial Sequence: Synthetic oligonucleotide
  Sense strand starting at position 1526 of SEQ ID NO: 1180
cucaaucugcuugagaaac

SEQ ID NO: 93883 - RNA, 19 nt, Artificial Sequence
  Description of Artificial Sequence: Synthetic oligonucleotide
  Antisense strand to SEQ ID NO: 93802
guuucucaagcagauugag

SEQ ID NO: 93884 - RNA, 19 nt, Artificial Sequence
  Description of Artificial Sequence: Synthetic oligonucleotide
  Sense strand starting at position 1525 of SEQ ID NO: 1180
acucaaucugcuugagaaa

SEQ ID NO: 93885 - RNA, 19 nt, Artificial Sequence
  Description of Artificial Sequence: Synthetic oligonucleotide
  Antisense strand to SEQ ID NO: 93804
uuucucaagcagauugagu

SEQ ID NO: 93886 - RNA, 19 nt, Artificial Sequence
  Description of Artificial Sequence: Synthetic oligonucleotide
  Sense strand starting at position 1321 of SEQ ID NO: 1180
gggauauggcagugaacga

SEQ ID NO: 93887 - RNA, 19 nt, Artificial Sequence
  Description of Artificial Sequence: Synthetic oligonucleotide
  Antisense strand to SEQ ID NO: 93806
ucguucacugccauauccc

SEQ ID NO: 93888 - RNA, 19 nt, Artificial Sequence
  Description of Artificial Sequence: Synthetic oligonucleotide
  Sense strand starting at position 1308 of SEQ ID NO: 1180
ggaggaggugugugggaua

SEQ ID NO: 93889 - RNA, 19 nt, Artificial Sequence
  Description of Artificial Sequence: Synthetic oligonucleotide
  Antisense strand to SEQ ID NO: 93808
uaucccacacaccuccucc

SEQ ID NO: 93890 - RNA, 19 nt, Artificial Sequence
  Description of Artificial Sequence: Synthetic oligonucleotide
  Sense strand starting at position 1210 of SEQ ID NO: 1180
ggaagauacuugcucaaag

SEQ ID NO: 93891 - RNA, 19 nt, Artificial Sequence
  Description of Artificial Sequence: Synthetic oligonucleotide
  Antisense strand to SEQ ID NO: 93810
cuuugagcaaguaucuucc

SEQ ID NO: 93892 - RNA, 19 nt, Artificial Sequence
  Description of Artificial Sequence: Synthetic oligonucleotide
  Sense strand starting at position 722 of SEQ ID NO: 1180
gccuacuucccacaaggaa

SEQ ID NO: 93893 - RNA, 19 nt, Artificial Sequence
  Description of Artificial Sequence: Synthetic oligonucleotide
  Antisense strand to SEQ ID NO: 93812
uuccuugugggaaguaggc

SEQ ID NO: 93894 - RNA, 19 nt, Artificial Sequence
  Description of Artificial Sequence: Synthetic oligonucleotide
  Sense strand starting at position 219 of SEQ ID NO: 1180
aaggguucccaagguuaag

SEQ ID NO: 93895 - RNA, 19 nt, Artificial Sequence
  Description of Artificial Sequence: Synthetic oligonucleotide
  Antisense strand to SEQ ID NO: 93814
cuuaaccuugggaacccuu

SEQ ID NO: 93896 - RNA, 19 nt, Artificial Sequence
  Description of Artificial Sequence: Synthetic oligonucleotide
  Sense strand starting at position 3960 of SEQ ID NO: 1181
cuggucuauggguaugaaa

SEQ ID NO: 93897 - RNA, 19 nt, Artificial Sequence
  Description of Artificial Sequence: Synthetic oligonucleotide
  Antisense strand to SEQ ID NO: 93816
uuucauacccauagaccag

SEQ ID NO: 93898 - RNA, 19 nt, Artificial Sequence
  Description of Artificial Sequence: Synthetic oligonucleotide
  Sense strand starting at position 3959 of SEQ ID NO: 1181
ccuggucuauggguaugaa

SEQ ID NO: 93899 - RNA, 19 nt, Artificial Sequence
  Description of Artificial Sequence: Synthetic oligonucleotide
  Antisense strand to SEQ ID NO: 93818
uucauacccauagaccagg

SEQ ID NO: 93900 - RNA, 19 nt, Artificial Sequence
  Description of Artificial Sequence: Synthetic oligonucleotide
  Sense strand starting at position 3624 of SEQ ID NO: 1181
ucuugcugucccuagaaca

SEQ ID NO: 93901 - RNA, 19 nt, Artificial Sequence
  Description of Artificial Sequence: Synthetic oligonucleotide
  Antisense strand to SEQ ID NO: 93820
uguucuagggacagcaaga

SEQ ID NO: 93902 - RNA, 19 nt, Artificial Sequence
  Description of Artificial Sequence: Synthetic oligonucleotide
  Sense strand starting at position 3601 of SEQ ID NO: 1181
guuguucggagaugaaaga

SEQ ID NO: 93903 - RNA, 19 nt, Artificial Sequence
  Description of Artificial Sequence: Synthetic oligonucleotide
  Antisense strand to SEQ ID NO: 93822
ucuuucaucuccgaacaac

SEQ ID NO: 93904 - RNA, 19 nt, Artificial Sequence
  Description of Artificial Sequence: Synthetic oligonucleotide
  Sense strand starting at position 3509 of SEQ ID NO: 1181
cgaacuuguuaaucaacca

SEQ ID NO: 93905 - RNA, 19 nt, Artificial Sequence
  Description of Artificial Sequence: Synthetic oligonucleotide
  Antisense strand to SEQ ID NO: 93824
ugguugauuaacaaguucg

SEQ ID NO: 93906 - RNA, 19 nt, Artificial Sequence
  Description of Artificial Sequence: Synthetic oligonucleotide
  Sense strand starting at position 3384 of SEQ ID NO: 1181
uuuguuacucaguaguaga

SEQ ID NO: 93907 - RNA, 19 nt, Artificial Sequence
  Description of Artificial Sequence: Synthetic oligonucleotide
  Antisense strand to SEQ ID NO: 93826
ucuacuacugaguaacaaa

SEQ ID NO: 93908 - RNA, 19 nt, Artificial Sequence
  Description of Artificial Sequence: Synthetic oligonucleotide
  Sense strand starting at position 3156 of SEQ ID NO: 1181
acccucuguccaugaggaa

SEQ ID NO: 93909 - RNA, 19 nt, Artificial Sequence
  Description of Artificial Sequence: Synthetic oligonucleotide
  Antisense strand to SEQ ID NO: 93828
uuccucauggacagagggu

SEQ ID NO: 93910 - RNA, 19 nt, Artificial Sequence
  Description of Artificial Sequence: Synthetic oligonucleotide
  Sense strand starting at position 3134 of SEQ ID NO: 1181
cccuuuguccuagaggaac

SEQ ID NO: 93911 - RNA, 19 nt, Artificial Sequence
  Description of Artificial Sequence: Synthetic oligonucleotide
  Antisense strand to SEQ ID NO: 93830
guuccucuaggacaaaggg

SEQ ID NO: 93912 - RNA, 19 nt, Artificial Sequence
  Description of Artificial Sequence: Synthetic oligonucleotide
  Sense strand starting at position 3070 of SEQ ID NO: 1181
uaaguugucccaugaugag

SEQ ID NO: 93913 - RNA, 19 nt, Artificial Sequence
  Description of Artificial Sequence: Synthetic oligonucleotide
  Antisense strand to SEQ ID NO: 93832
cucaucaugggacaacuua

SEQ ID NO: 93914 - RNA, 19 nt, Artificial Sequence
  Description of Artificial Sequence: Synthetic oligonucleotide
  Sense strand starting at position 2947 of SEQ ID NO: 1181
uagaauaccguacaaguga

SEQ ID NO: 93915 - RNA, 19 nt, Artificial Sequence
  Description of Artificial Sequence: Synthetic oligonucleotide
  Antisense strand to SEQ ID NO: 93834
ucacuuguacgguauucua

SEQ ID NO: 93916 - RNA, 19 nt, Artificial Sequence
  Description of Artificial Sequence: Synthetic oligonucleotide
  Sense strand starting at position 2945 of SEQ ID NO: 1181
gguagaauaccguacaagu

SEQ ID NO: 93917 - RNA, 19 nt, Artificial Sequence
  Description of Artificial Sequence: Synthetic oligonucleotide
  Antisense strand to SEQ ID NO: 93836
acuuguacgguauucuacc

SEQ ID NO: 93918 - RNA, 19 nt, Artificial Sequence
  Description of Artificial Sequence: Synthetic oligonucleotide
  Sense strand starting at position 2889 of SEQ ID NO: 1181
cagaaaugguaacagaaga

SEQ ID NO: 93919 - RNA, 19 nt, Artificial Sequence
  Description of Artificial Sequence: Synthetic oligonucleotide
  Antisense strand to SEQ ID NO: 93838
ucuucuguuaccauuucug

SEQ ID NO: 93920 - RNA, 19 nt, Artificial Sequence
  Description of Artificial Sequence: Synthetic oligonucleotide
  Sense strand starting at position 2789 of SEQ ID NO: 1181
gaggcaggcccucauacua

SEQ ID NO: 93921 - RNA, 19 nt, Artificial Sequence
  Description of Artificial Sequence: Synthetic oligonucleotide
  Antisense strand to SEQ ID NO: 93840
uaguaugagggccugccuc

SEQ ID NO: 93922 - RNA, 19 nt, Artificial Sequence
  Description of Artificial Sequence: Synthetic oligonucleotide
  Sense strand starting at position 2436 of SEQ ID NO: 1181
ggaccuugcccucacagau

SEQ ID NO: 93923 - RNA, 19 nt, Artificial Sequence
  Description of Artificial Sequence: Synthetic oligonucleotide
  Antisense strand to SEQ ID NO: 93842
aucugugagggcaaggucc

SEQ ID NO: 93924 - RNA, 19 nt, Artificial Sequence
  Description of Artificial Sequence: Synthetic oligonucleotide
  Sense strand starting at position 2398 of SEQ ID NO: 1181
gugccuggugccuaaggaa

SEQ ID NO: 93925 - RNA, 19 nt, Artificial Sequence
  Description of Artificial Sequence: Synthetic oligonucleotide
  Antisense strand to SEQ ID NO: 93844
uuccuuaggcaccaggcac

SEQ ID NO: 93926 - RNA, 19 nt, Artificial Sequence
  Description of Artificial Sequence: Synthetic oligonucleotide
  Sense strand starting at position 2241 of SEQ ID NO: 1181
uugaaaguccaguauucuu

SEQ ID NO: 93927 - RNA, 19 nt, Artificial Sequence
  Description of Artificial Sequence: Synthetic oligonucleotide
  Antisense strand to SEQ ID NO: 93846
aagaauacuggacuuucaa

SEQ ID NO: 93928 - RNA, 19 nt, Artificial Sequence
  Description of Artificial Sequence: Synthetic oligonucleotide
  Sense strand starting at position 2022 of SEQ ID NO: 1181
ugcguuuccaaagaaagac

SEQ ID NO: 93929 - RNA, 19 nt, Artificial Sequence
  Description of Artificial Sequence: Synthetic oligonucleotide
  Antisense strand to SEQ ID NO: 93848
gucuuucuuuggaaacgca

SEQ ID NO: 93930 - RNA, 19 nt, Artificial Sequence
  Description of Artificial Sequence: Synthetic oligonucleotide
  Sense strand starting at position 2015 of SEQ ID NO: 1181
ugguuugugcguuuccaaa

SEQ ID NO: 93931 - RNA, 19 nt, Artificial Sequence
  Description of Artificial Sequence: Synthetic oligonucleotide
  Antisense strand to SEQ ID NO: 93850
uuuggaaacgcacaaacca

SEQ ID NO: 93932 - RNA, 19 nt, Artificial Sequence
  Description of Artificial Sequence: Synthetic oligonucleotide
  Sense strand starting at position 2014 of SEQ ID NO: 1181
augguuugugcguuuccaa

SEQ ID NO: 93933 - RNA, 19 nt, Artificial Sequence
  Description of Artificial Sequence: Synthetic oligonucleotide
  Antisense strand to SEQ ID NO: 93852
uuggaaacgcacaaaccau

SEQ ID NO: 93934 - RNA, 19 nt, Artificial Sequence
  Description of Artificial Sequence: Synthetic oligonucleotide
  Sense strand starting at position 1994 of SEQ ID NO: 1181
gagguaaugucugugguga

SEQ ID NO: 93935 - RNA, 19 nt, Artificial Sequence
  Description of Artificial Sequence: Synthetic oligonucleotide
  Antisense strand to SEQ ID NO: 93854
ucaccacagacauuaccuc

SEQ ID NO: 93936 - RNA, 19 nt, Artificial Sequence
  Description of Artificial Sequence: Synthetic oligonucleotide
  Sense strand starting at position 1669 of SEQ ID NO: 1181
aggcuuaccagauggcaaa

SEQ ID NO: 93937 - RNA, 19 nt, Artificial Sequence
  Description of Artificial Sequence: Synthetic oligonucleotide
  Antisense strand to SEQ ID NO: 93856
uuugccaucugguaagccu

SEQ ID NO: 93938 - RNA, 19 nt, Artificial Sequence
  Description of Artificial Sequence: Synthetic oligonucleotide
  Sense strand starting at position 1642 of SEQ ID NO: 1181
uccauuacuuuacugagga

SEQ ID NO: 93939 - RNA, 19 nt, Artificial Sequence
  Description of Artificial Sequence: Synthetic oligonucleotide
  Antisense strand to SEQ ID NO: 93858
uccucaguaaaguaaugga

SEQ ID NO: 93940 - RNA, 19 nt, Artificial Sequence
  Description of Artificial Sequence: Synthetic oligonucleotide
  Sense strand starting at position 1539 of SEQ ID NO: 1181
uuaaauuugucucauggaa

SEQ ID NO: 93941 - RNA, 19 nt, Artificial Sequence
  Description of Artificial Sequence: Synthetic oligonucleotide
  Antisense strand to SEQ ID NO: 93860
uuccaugagacaaauuuaa

SEQ ID NO: 93942 - RNA, 19 nt, Artificial Sequence
  Description of Artificial Sequence: Synthetic oligonucleotide
  Sense strand starting at position 1286 of SEQ ID NO: 1181
uaauaaugaugcucuguag

SEQ ID NO: 93943 - RNA, 19 nt, Artificial Sequence
  Description of Artificial Sequence: Synthetic oligonucleotide
  Antisense strand to SEQ ID NO: 93862
cuacagagcaucauuauua

SEQ ID NO: 93944 - RNA, 19 nt, Artificial Sequence
  Description of Artificial Sequence: Synthetic oligonucleotide
  Sense strand starting at position 774 of SEQ ID NO: 1181
cucugagaaagaugagcua

SEQ ID NO: 93945 - RNA, 19 nt, Artificial Sequence
  Description of Artificial Sequence: Synthetic oligonucleotide
  Antisense strand to SEQ ID NO: 93864
uagcucaucuuucucagag

SEQ ID NO: 93946 - RNA, 19 nt, Artificial Sequence
  Description of Artificial Sequence: Synthetic oligonucleotide
  Sense strand starting at position 768 of SEQ ID NO: 1181
ugauuucucugagaaagau

SEQ ID NO: 93947 - RNA, 19 nt, Artificial Sequence
  Description of Artificial Sequence: Synthetic oligonucleotide
  Antisense strand to SEQ ID NO: 93866
aucuuucucagagaaauca

SEQ ID NO: 93948 - RNA, 19 nt, Artificial Sequence
  Description of Artificial Sequence: Synthetic oligonucleotide
  Sense strand starting at position 766 of SEQ ID NO: 1181
ccugauuucucugagaaag

SEQ ID NO: 93949 - RNA, 19 nt, Artificial Sequence
  Description of Artificial Sequence: Synthetic oligonucleotide
  Antisense strand to SEQ ID NO: 93868
cuuucucagagaaaucagg

SEQ ID NO: 93950 - RNA, 19 nt, Artificial Sequence
  Description of Artificial Sequence: Synthetic oligonucleotide
  Sense strand starting at position 731 of SEQ ID NO: 1181
uccaaaugccuggauguau

SEQ ID NO: 93951 - RNA, 19 nt, Artificial Sequence
  Description of Artificial Sequence: Synthetic oligonucleotide
  Antisense strand to SEQ ID NO: 93870
auacauccaggcauuugga

SEQ ID NO: 93952 - RNA, 19 nt, Artificial Sequence
  Description of Artificial Sequence: Synthetic oligonucleotide
  Sense strand starting at position 639 of SEQ ID NO: 1181
cuaaauguugauugaaugu

SEQ ID NO: 93953 - RNA, 19 nt, Artificial Sequence
  Description of Artificial Sequence: Synthetic oligonucleotide
  Antisense strand to SEQ ID NO: 93872
acauucaaucaacauuuag

SEQ ID NO: 93954 - RNA, 19 nt, Artificial Sequence
  Description of Artificial Sequence: Synthetic oligonucleotide
  Sense strand starting at position 638 of SEQ ID NO: 1181
acuaaauguugauugaaug

SEQ ID NO: 93955 - RNA, 19 nt, Artificial Sequence
  Description of Artificial Sequence: Synthetic oligonucleotide
  Antisense strand to SEQ ID NO: 93874
cauucaaucaacauuuagu

SEQ ID NO: 93956 - RNA, 19 nt, Artificial Sequence
  Description of Artificial Sequence: Synthetic oligonucleotide
  Sense strand starting at position 619 of SEQ ID NO: 1181
augaucuccuaagaagaga

SEQ ID NO: 93957 - RNA, 19 nt, Artificial Sequence
  Description of Artificial Sequence: Synthetic oligonucleotide
  Antisense strand to SEQ ID NO: 93876
ucucuucuuaggagaucau

SEQ ID NO: 93958 - RNA, 19 nt, Artificial Sequence
  Description of Artificial Sequence: Synthetic oligonucleotide
  Sense strand starting at position 608 of SEQ ID NO: 1181
aguuauuagggaugaucuc

SEQ ID NO: 93959 - RNA, 19 nt, Artificial Sequence
  Description of Artificial Sequence: Synthetic oligonucleotide
  Antisense strand to SEQ ID NO: 93878
gagaucaucccuaauaacu

SEQ ID NO: 93960 - RNA, 19 nt, Artificial Sequence
  Description of Artificial Sequence: Synthetic oligonucleotide
  Sense strand starting at position 601 of SEQ ID NO: 1181
cgaauagaguuauuaggga

SEQ ID NO: 93961 - RNA, 19 nt, Artificial Sequence
  Description of Artificial Sequence: Synthetic oligonucleotide
  Antisense strand to SEQ ID NO: 93880
ucccuaauaacucuauucg

SEQ ID NO: 93962 - RNA, 19 nt, Artificial Sequence
  Description of Artificial Sequence: Synthetic oligonucleotide
  Sense strand starting at position 488 of SEQ ID NO: 1181
ugcauucuccuggagcuau

SEQ ID NO: 93963 - RNA, 19 nt, Artificial Sequence
  Description of Artificial Sequence: Synthetic oligonucleotide
  Antisense strand to SEQ ID NO: 93882
auagcuccaggagaaugca

SEQ ID NO: 93964 - RNA, 19 nt, Artificial Sequence
  Description of Artificial Sequence: Synthetic oligonucleotide
  Sense strand starting at position 464 of SEQ ID NO: 1181
cuugauauugcagagcaag

SEQ ID NO: 93965 - RNA, 19 nt, Artificial Sequence
  Description of Artificial Sequence: Synthetic oligonucleotide
  Antisense strand to SEQ ID NO: 93884
cuugcucugcaauaucaag

SEQ ID NO: 93966 - RNA, 19 nt, Artificial Sequence
  Description of Artificial Sequence: Synthetic oligonucleotide
  Sense strand starting at position 372 of SEQ ID NO: 1181
acugacuucuccuuguuua

SEQ ID NO: 93967 - RNA, 19 nt, Artificial Sequence
  Description of Artificial Sequence: Synthetic oligonucleotide
  Antisense strand to SEQ ID NO: 93886
uaaacaaggagaagucagu

SEQ ID NO: 93968 - RNA, 19 nt, Artificial Sequence
  Description of Artificial Sequence: Synthetic oligonucleotide
  Sense strand starting at position 202 of SEQ ID NO: 1181
uuagauaaugccugauagc

SEQ ID NO: 93969 - RNA, 19 nt, Artificial Sequence
  Description of Artificial Sequence: Synthetic oligonucleotide
  Antisense strand to SEQ ID NO: 93888
gcuaucaggcauuaucuaa

SEQ ID NO: 93970 - RNA, 19 nt, Artificial Sequence
  Description of Artificial Sequence: Synthetic oligonucleotide
  Sense strand starting at position 201 of SEQ ID NO: 1181
uuuagauaaugccugauag

SEQ ID NO: 93971 - RNA, 19 nt, Artificial Sequence
  Description of Artificial Sequence: Synthetic oligonucleotide
  Antisense strand to SEQ ID NO: 93890
cuaucaggcauuaucuaaa

SEQ ID NO: 93972 - RNA, 19 nt, Artificial Sequence
  Description of Artificial Sequence: Synthetic oligonucleotide
  Sense strand starting at position 77 of SEQ ID NO: 1181
aggcuucgaucucugacau

SEQ ID NO: 93973 - RNA, 19 nt, Artificial Sequence
  Description of Artificial Sequence: Synthetic oligonucleotide
  Antisense strand to SEQ ID NO: 93892
augucagagaucgaagccu

SEQ ID NO: 93974 - RNA, 19 nt, Artificial Sequence
  Description of Artificial Sequence: Synthetic oligonucleotide
  Sense strand starting at position 57 of SEQ ID NO: 1181
aagcaaugggcuugagacu

SEQ ID NO: 93975 - RNA, 19 nt, Artificial Sequence
  Description of Artificial Sequence: Synthetic oligonucleotide
  Antisense strand to SEQ ID NO: 93894
agucucaagcccauugcuu

SEQ ID NO: 93976 - RNA, 19 nt, Artificial Sequence
  Description of Artificial Sequence: Synthetic oligonucleotide
  Sense strand starting at position 35 of SEQ ID NO: 1182
gcacuaugucuggaacauu

SEQ ID NO: 93977 - RNA, 19 nt, Artificial Sequence
  Description of Artificial Sequence: Synthetic oligonucleotide
  Antisense strand to SEQ ID NO: 93896
aauguuccagacauagugc

SEQ ID NO: 93978 - RNA, 19 nt, Artificial Sequence
  Description of Artificial Sequence: Synthetic oligonucleotide
  Sense strand starting at position 76 of SEQ ID NO: 1182
ggaggaugugacggucauu

SEQ ID NO: 93979 - RNA, 19 nt, Artificial Sequence
  Description of Artificial Sequence: Synthetic oligonucleotide
  Antisense strand to SEQ ID NO: 93898
aaugaccgucacauccucc

SEQ ID NO: 93980 - RNA, 19 nt, Artificial Sequence
  Description of Artificial Sequence: Synthetic oligonucleotide
  Sense strand starting at position 136 of SEQ ID NO: 1182
ggcugaucuggcuaacuag

SEQ ID NO: 93981 - RNA, 19 nt, Artificial Sequence
  Description of Artificial Sequence: Synthetic oligonucleotide
  Antisense strand to SEQ ID NO: 93900
cuaguuagccagaucagcc

SEQ ID NO: 93982 - RNA, 19 nt, Artificial Sequence
  Description of Artificial Sequence: Synthetic oligonucleotide
  Sense strand starting at position 366 of SEQ ID NO: 1182
cuccaaucgguuuauaaca

SEQ ID NO: 93983 - RNA, 19 nt, Artificial Sequence
  Description of Artificial Sequence: Synthetic oligonucleotide
  Antisense strand to SEQ ID NO: 93902
uguuauaaaccgauuggag

SEQ ID NO: 93984 - RNA, 19 nt, Artificial Sequence
  Description of Artificial Sequence: Synthetic oligonucleotide
  Sense strand starting at position 457 of SEQ ID NO: 1182
uuuagaaaguaagcauuga

SEQ ID NO: 93985 - RNA, 19 nt, Artificial Sequence
  Description of Artificial Sequence: Synthetic oligonucleotide
  Antisense strand to SEQ ID NO: 93904
ucaaugcuuacuuucuaaa

SEQ ID NO: 93986 - RNA, 19 nt, Artificial Sequence
  Description of Artificial Sequence: Synthetic oligonucleotide
  Sense strand starting at position 482 of SEQ ID NO: 1182
aggaauugauugucuucuu

SEQ ID NO: 93987 - RNA, 19 nt, Artificial Sequence
  Description of Artificial Sequence: Synthetic oligonucleotide
  Antisense strand to SEQ ID NO: 93906
aagaagacaaucaauuccu

SEQ ID NO: 93988 - RNA, 19 nt, Artificial Sequence
  Description of Artificial Sequence: Synthetic oligonucleotide
  Sense strand starting at position 535 of SEQ ID NO: 1182
gucccaugacuccauuaug

SEQ ID NO: 93989 - RNA, 19 nt, Artificial Sequence
  Description of Artificial Sequence: Synthetic oligonucleotide
  Antisense strand to SEQ ID NO: 93908
cauaauggagucaugggac

SEQ ID NO: 93990 - RNA, 19 nt, Artificial Sequence
  Description of Artificial Sequence: Synthetic oligonucleotide
  Sense strand starting at position 543 of SEQ ID NO: 1182
acuccauuaugggcacaau

SEQ ID NO: 93991 - RNA, 19 nt, Artificial Sequence
  Description of Artificial Sequence: Synthetic oligonucleotide
  Antisense strand to SEQ ID NO: 93910
auugugcccauaauggagu

SEQ ID NO: 93992 - RNA, 19 nt, Artificial Sequence
  Description of Artificial Sequence: Synthetic oligonucleotide
  Sense strand starting at position 544 of SEQ ID NO: 1182
cuccauuaugggcacaauu

SEQ ID NO: 93993 - RNA, 19 nt, Artificial Sequence
  Description of Artificial Sequence: Synthetic oligonucleotide
  Antisense strand to SEQ ID NO: 93912
aauugugcccauaauggag

SEQ ID NO: 93994 - RNA, 19 nt, Artificial Sequence
  Description of Artificial Sequence: Synthetic oligonucleotide
  Sense strand starting at position 623 of SEQ ID NO: 1182
gugguaaccuuucccaaga

SEQ ID NO: 93995 - RNA, 19 nt, Artificial Sequence
  Description of Artificial Sequence: Synthetic oligonucleotide
  Antisense strand to SEQ ID NO: 93914
ucuugggaaagguuaccac

SEQ ID NO: 93996 - RNA, 19 nt, Artificial Sequence
  Description of Artificial Sequence: Synthetic oligonucleotide
  Sense strand starting at position 624 of SEQ ID NO: 1182
ugguaaccuuucccaagaa

SEQ ID NO: 93997 - RNA, 19 nt, Artificial Sequence
  Description of Artificial Sequence: Synthetic oligonucleotide
  Antisense strand to SEQ ID NO: 93916
uucuugggaaagguuacca

SEQ ID NO: 93998 - RNA, 19 nt, Artificial Sequence
  Description of Artificial Sequence: Synthetic oligonucleotide
  Sense strand starting at position 753 of SEQ ID NO: 1182
gcuauacuuggucaaucuu

SEQ ID NO: 93999 - RNA, 19 nt, Artificial Sequence
  Description of Artificial Sequence: Synthetic oligonucleotide
  Antisense strand to SEQ ID NO: 93918
aagauugaccaaguauagc

SEQ ID NO: 94000 - RNA, 19 nt, Artificial Sequence
  Description of Artificial Sequence: Synthetic oligonucleotide
  Sense strand starting at position 1146 of SEQ ID NO: 1182
ggcucuaccuaucugauau

SEQ ID NO: 94001 - RNA, 19 nt, Artificial Sequence
  Description of Artificial Sequence: Synthetic oligonucleotide
  Antisense strand to SEQ ID NO: 93920
auaucagauagguagagcc

SEQ ID NO: 94002 - RNA, 19 nt, Artificial Sequence
  Description of Artificial Sequence: Synthetic oligonucleotide
  Sense strand starting at position 1336 of SEQ ID NO: 1182
ucugguucuccagacugua

SEQ ID NO: 94003 - RNA, 19 nt, Artificial Sequence
  Description of Artificial Sequence: Synthetic oligonucleotide
  Antisense strand to SEQ ID NO: 93922
uacagucuggagaaccaga

SEQ ID NO: 94004 - RNA, 19 nt, Artificial Sequence
  Description of Artificial Sequence: Synthetic oligonucleotide
  Sense strand starting at position 1720 of SEQ ID NO: 1182
cugccauuucugcgaaaug

SEQ ID NO: 94005 - RNA, 19 nt, Artificial Sequence
  Description of Artificial Sequence: Synthetic oligonucleotide
  Antisense strand to SEQ ID NO: 93924
cauuucgcagaaauggcag

SEQ ID NO: 94006 - RNA, 19 nt, Artificial Sequence
  Description of Artificial Sequence: Synthetic oligonucleotide
  Sense strand starting at position 1762 of SEQ ID NO: 1182
cugcuaaaugccuacugau

SEQ ID NO: 94007 - RNA, 19 nt, Artificial Sequence
  Description of Artificial Sequence: Synthetic oligonucleotide
  Antisense strand to SEQ ID NO: 93926
aucaguaggcauuuagcag

SEQ ID NO: 94008 - RNA, 19 nt, Artificial Sequence
  Description of Artificial Sequence: Synthetic oligonucleotide
  Sense strand starting at position 1836 of SEQ ID NO: 1182
cuacaauggugucuaauga

SEQ ID NO: 94009 - RNA, 19 nt, Artificial Sequence
  Description of Artificial Sequence: Synthetic oligonucleotide
  Antisense strand to SEQ ID NO: 93928
ucauuagacaccauuguag

SEQ ID NO: 94010 - RNA, 19 nt, Artificial Sequence
  Description of Artificial Sequence: Synthetic oligonucleotide
  Sense strand starting at position 1843 of SEQ ID NO: 1182
ggugucuaaugaguugaca

SEQ ID NO: 94011 - RNA, 19 nt, Artificial Sequence
  Description of Artificial Sequence: Synthetic oligonucleotide
  Antisense strand to SEQ ID NO: 93930
ugucaacucauuagacacc

SEQ ID NO: 94012 - RNA, 19 nt, Artificial Sequence
  Description of Artificial Sequence: Synthetic oligonucleotide
  Sense strand starting at position 1845 of SEQ ID NO: 1182
ugucuaaugaguugacaga

SEQ ID NO: 94013 - RNA, 19 nt, Artificial Sequence
  Description of Artificial Sequence: Synthetic oligonucleotide
  Antisense strand to SEQ ID NO: 93932
ucugucaacucauuagaca

SEQ ID NO: 94014 - RNA, 19 nt, Artificial Sequence
  Description of Artificial Sequence: Synthetic oligonucleotide
  Sense strand starting at position 2220 of SEQ ID NO: 1182
ucgugaguccucuuguccu

SEQ ID NO: 94015 - RNA, 19 nt, Artificial Sequence
  Description of Artificial Sequence: Synthetic oligonucleotide
  Antisense strand to SEQ ID NO: 93934
aggacaagaggacucacga

SEQ ID NO: 94016 - RNA, 19 nt, Artificial Sequence
  Description of Artificial Sequence: Synthetic oligonucleotide
  Sense strand starting at position 2428 of SEQ ID NO: 1182
ggcgcaguucucgcgagaa

SEQ ID NO: 94017 - RNA, 19 nt, Artificial Sequence
  Description of Artificial Sequence: Synthetic oligonucleotide
  Antisense strand to SEQ ID NO: 93936
uucucgcgagaacugcgcc

SEQ ID NO: 94018 - RNA, 19 nt, Artificial Sequence
  Description of Artificial Sequence: Synthetic oligonucleotide
  Sense strand starting at position 2431 of SEQ ID NO: 1182
gcaguucucgcgagaaggu

SEQ ID NO: 94019 - RNA, 19 nt, Artificial Sequence
  Description of Artificial Sequence: Synthetic oligonucleotide
  Antisense strand to SEQ ID NO: 93938
accuucucgcgagaacugc

SEQ ID NO: 94020 - RNA, 19 nt, Artificial Sequence
  Description of Artificial Sequence: Synthetic oligonucleotide
  Sense strand starting at position 2451 of SEQ ID NO: 1182
acuuucuuucucgguauuu

SEQ ID NO: 94021 - RNA, 19 nt, Artificial Sequence
  Description of Artificial Sequence: Synthetic oligonucleotide
  Antisense strand to SEQ ID NO: 93940
aaauaccgagaaagaaagu

SEQ ID NO: 94022 - RNA, 19 nt, Artificial Sequence
  Description of Artificial Sequence: Synthetic oligonucleotide
  Sense strand starting at position 2810 of SEQ ID NO: 1182
gaaggcauuugggaaguga

SEQ ID NO: 94023 - RNA, 19 nt, Artificial Sequence
  Description of Artificial Sequence: Synthetic oligonucleotide
  Antisense strand to SEQ ID NO: 93942
ucacuucccaaaugccuuc

SEQ ID NO: 94024 - RNA, 19 nt, Artificial Sequence
  Description of Artificial Sequence: Synthetic oligonucleotide
  Sense strand starting at position 2840 of SEQ ID NO: 1182
gagcgcugacaagaguaaa

SEQ ID NO: 94025 - RNA, 19 nt, Artificial Sequence
  Description of Artificial Sequence: Synthetic oligonucleotide
  Antisense strand to SEQ ID NO: 93944
uuuacucuugucagcgcuc

SEQ ID NO: 94026 - RNA, 19 nt, Artificial Sequence
  Description of Artificial Sequence: Synthetic oligonucleotide
  Sense strand starting at position 2873 of SEQ ID NO: 1182
ggaagauggacuuguguga

SEQ ID NO: 94027 - RNA, 19 nt, Artificial Sequence
  Description of Artificial Sequence: Synthetic oligonucleotide
  Antisense strand to SEQ ID NO: 93946
ucacacaaguccaucuucc

SEQ ID NO: 94028 - RNA, 19 nt, Artificial Sequence
  Description of Artificial Sequence: Synthetic oligonucleotide
  Sense strand starting at position 2877 of SEQ ID NO: 1182
gauggacuugugugaugag

SEQ ID NO: 94029 - RNA, 19 nt, Artificial Sequence
  Description of Artificial Sequence: Synthetic oligonucleotide
  Antisense strand to SEQ ID NO: 93948
cucaucacacaaguccauc

SEQ ID NO: 94030 - RNA, 19 nt, Artificial Sequence
  Description of Artificial Sequence: Synthetic oligonucleotide
  Sense strand starting at position 2960 of SEQ ID NO: 1182
ucgagucuggauuagucau

SEQ ID NO: 94031 - RNA, 19 nt, Artificial Sequence
  Description of Artificial Sequence: Synthetic oligonucleotide
  Antisense strand to SEQ ID NO: 93950
augacuaauccagacucga

SEQ ID NO: 94032 - RNA, 19 nt, Artificial Sequence
  Description of Artificial Sequence: Synthetic oligonucleotide
  Sense strand starting at position 3020 of SEQ ID NO: 1182
aauggaaauuagcuuaguu

SEQ ID NO: 94033 - RNA, 19 nt, Artificial Sequence
  Description of Artificial Sequence: Synthetic oligonucleotide
  Antisense strand to SEQ ID NO: 93952
aacuaagcuaauuuccauu

SEQ ID NO: 94034 - RNA, 19 nt, Artificial Sequence
  Description of Artificial Sequence: Synthetic oligonucleotide
  Sense strand starting at position 3022 of SEQ ID NO: 1182
uggaaauuagcuuaguuau

SEQ ID NO: 94035 - RNA, 19 nt, Artificial Sequence
  Description of Artificial Sequence: Synthetic oligonucleotide
  Antisense strand to SEQ ID NO: 93954
auaacuaagcuaauuucca

SEQ ID NO: 94036 - RNA, 19 nt, Artificial Sequence
  Description of Artificial Sequence: Synthetic oligonucleotide
  Sense strand starting at position 3059 of SEQ ID NO: 1182
uccugagagccucacaacu

SEQ ID NO: 94037 - RNA, 19 nt, Artificial Sequence
  Description of Artificial Sequence: Synthetic oligonucleotide
  Antisense strand to SEQ ID NO: 93956
aguugugaggcucucagga

SEQ ID NO: 94038 - RNA, 19 nt, Artificial Sequence
  Description of Artificial Sequence: Synthetic oligonucleotide
  Sense strand starting at position 3313 of SEQ ID NO: 1182
aagaguaccuguguaggaa

SEQ ID NO: 94039 - RNA, 19 nt, Artificial Sequence
  Description of Artificial Sequence: Synthetic oligonucleotide
  Antisense strand to SEQ ID NO: 93958
uuccuacacagguacucuu

SEQ ID NO: 94040 - RNA, 19 nt, Artificial Sequence
  Description of Artificial Sequence: Synthetic oligonucleotide
  Sense strand starting at position 3314 of SEQ ID NO: 1182
agaguaccuguguaggaau

SEQ ID NO: 94041 - RNA, 19 nt, Artificial Sequence
  Description of Artificial Sequence: Synthetic oligonucleotide
  Antisense strand to SEQ ID NO: 93960
auuccuacacagguacucu

SEQ ID NO: 94042 - RNA, 19 nt, Artificial Sequence
  Description of Artificial Sequence: Synthetic oligonucleotide
  Sense strand starting at position 3468 of SEQ ID NO: 1182
aguugagaguuacugaauu

SEQ ID NO: 94043 - RNA, 19 nt, Artificial Sequence
  Description of Artificial Sequence: Synthetic oligonucleotide
  Antisense strand to SEQ ID NO: 93962
aauucaguaacucucaacu

SEQ ID NO: 94044 - RNA, 19 nt, Artificial Sequence
  Description of Artificial Sequence: Synthetic oligonucleotide
  Sense strand starting at position 3576 of SEQ ID NO: 1182
caggucaucguguaucaga

SEQ ID NO: 94045 - RNA, 19 nt, Artificial Sequence
  Description of Artificial Sequence: Synthetic oligonucleotide
  Antisense strand to SEQ ID NO: 93964
ucugauacacgaugaccug

SEQ ID NO: 94046 - RNA, 19 nt, Artificial Sequence
  Description of Artificial Sequence: Synthetic oligonucleotide
  Sense strand starting at position 3584 of SEQ ID NO: 1182
cguguaucagauuagacaa

SEQ ID NO: 94047 - RNA, 19 nt, Artificial Sequence
  Description of Artificial Sequence: Synthetic oligonucleotide
  Antisense strand to SEQ ID NO: 93966
uugucuaaucugauacacg

SEQ ID NO: 94048 - RNA, 19 nt, Artificial Sequence
  Description of Artificial Sequence: Synthetic oligonucleotide
  Sense strand starting at position 3602 of SEQ ID NO: 1182
aaauuagaaugugcgauau

SEQ ID NO: 94049 - RNA, 19 nt, Artificial Sequence
  Description of Artificial Sequence: Synthetic oligonucleotide
  Antisense strand to SEQ ID NO: 93968
auaucgcacauucuaauuu

SEQ ID NO: 94050 - RNA, 19 nt, Artificial Sequence
  Description of Artificial Sequence: Synthetic oligonucleotide
  Sense strand starting at position 3606 of SEQ ID NO: 1182
uagaaugugcgauauaauu

SEQ ID NO: 94051 - RNA, 19 nt, Artificial Sequence
  Description of Artificial Sequence: Synthetic oligonucleotide
  Antisense strand to SEQ ID NO: 93970
aauuauaucgcacauucua

SEQ ID NO: 94052 - RNA, 19 nt, Artificial Sequence
  Description of Artificial Sequence: Synthetic oligonucleotide
  Sense strand starting at position 3654 of SEQ ID NO: 1182
agagcucuuccuuagcaua

SEQ ID NO: 94053 - RNA, 19 nt, Artificial Sequence
  Description of Artificial Sequence: Synthetic oligonucleotide
  Antisense strand to SEQ ID NO: 93972
uaugcuaaggaagagcucu

SEQ ID NO: 94054 - RNA, 19 nt, Artificial Sequence
  Description of Artificial Sequence: Synthetic oligonucleotide
  Sense strand starting at position 3806 of SEQ ID NO: 1182
gaacgauuucucuguuggu

SEQ ID NO: 94055 - RNA, 19 nt, Artificial Sequence
  Description of Artificial Sequence: Synthetic oligonucleotide
  Antisense strand to SEQ ID NO: 93974
accaacagagaaaucguuc

SEQ ID NO: 94056 - RNA, 19 nt, Artificial Sequence
  Description of Artificial Sequence: Synthetic oligonucleotide
  Sense strand starting at position 219 of SEQ ID NO: 1183
cuagcuuccuaguaugaca

SEQ ID NO: 94057 - RNA, 19 nt, Artificial Sequence
  Description of Artificial Sequence: Synthetic oligonucleotide
  Antisense strand to SEQ ID NO: 93976
ugucauacuaggaagcuag

SEQ ID NO: 94058 - RNA, 19 nt, Artificial Sequence
  Description of Artificial Sequence: Synthetic oligonucleotide
  Sense strand starting at position 590 of SEQ ID NO: 1183
gcgagagacauccauguga

SEQ ID NO: 94059 - RNA, 19 nt, Artificial Sequence
  Description of Artificial Sequence: Synthetic oligonucleotide
  Antisense strand to SEQ ID NO: 93978
ucacauggaugucucucgc

SEQ ID NO: 94060 - RNA, 19 nt, Artificial Sequence
  Description of Artificial Sequence: Synthetic oligonucleotide
  Sense strand starting at position 2320 of SEQ ID NO: 1183
auuacugauuacucaaggu

SEQ ID NO: 94061 - RNA, 19 nt, Artificial Sequence
  Description of Artificial Sequence: Synthetic oligonucleotide
  Antisense strand to SEQ ID NO: 93980
accuugaguaaucaguaau

SEQ ID NO: 94062 - RNA, 19 nt, Artificial Sequence
  Description of Artificial Sequence: Synthetic oligonucleotide
  Sense strand starting at position 2324 of SEQ ID NO: 1183
cugauuacucaagguucua

SEQ ID NO: 94063 - RNA, 19 nt, Artificial Sequence
  Description of Artificial Sequence: Synthetic oligonucleotide
  Antisense strand to SEQ ID NO: 93982
uagaaccuugaguaaucag

SEQ ID NO: 94064 - RNA, 19 nt, Artificial Sequence
  Description of Artificial Sequence: Synthetic oligonucleotide
  Sense strand starting at position 2397 of SEQ ID NO: 1183
caaauaaguuuguugggaa

SEQ ID NO: 94065 - RNA, 19 nt, Artificial Sequence
  Description of Artificial Sequence: Synthetic oligonucleotide
  Antisense strand to SEQ ID NO: 93984
uucccaacaaacuuauuug

SEQ ID NO: 94066 - RNA, 19 nt, Artificial Sequence
  Description of Artificial Sequence: Synthetic oligonucleotide
  Sense strand starting at position 2398 of SEQ ID NO: 1183
aaauaaguuuguugggaac

SEQ ID NO: 94067 - RNA, 19 nt, Artificial Sequence
  Description of Artificial Sequence: Synthetic oligonucleotide
  Antisense strand to SEQ ID NO: 93986
guucccaacaaacuuauuu

SEQ ID NO: 94068 - RNA, 19 nt, Artificial Sequence
  Description of Artificial Sequence: Synthetic oligonucleotide
  Sense strand starting at position 2400 of SEQ ID NO: 1183
auaaguuuguugggaacau

SEQ ID NO: 94069 - RNA, 19 nt, Artificial Sequence
  Description of Artificial Sequence: Synthetic oligonucleotide
  Antisense strand to SEQ ID NO: 93988
auguucccaacaaacuuau

SEQ ID NO: 94070 - RNA, 19 nt, Artificial Sequence
  Description of Artificial Sequence: Synthetic oligonucleotide
  Sense strand starting at position 2401 of SEQ ID NO: 1183
uaaguuuguugggaacauu

SEQ ID NO: 94071 - RNA, 19 nt, Artificial Sequence
  Description of Artificial Sequence: Synthetic oligonucleotide
  Antisense strand to SEQ ID NO: 93990
aauguucccaacaaacuua

SEQ ID NO: 94072 - RNA, 19 nt, Artificial Sequence
  Description of Artificial Sequence: Synthetic oligonucleotide
  Sense strand starting at position 3263 of SEQ ID NO: 1183
gugagcugacauuauacua

SEQ ID NO: 94073 - RNA, 19 nt, Artificial Sequence
  Description of Artificial Sequence: Synthetic oligonucleotide
  Antisense strand to SEQ ID NO: 93992
uaguauaaugucagcucac

SEQ ID NO: 94074 - RNA, 19 nt, Artificial Sequence
  Description of Artificial Sequence: Synthetic oligonucleotide
  Sense strand starting at position 3405 of SEQ ID NO: 1183
cugaucgaauuagauauua

SEQ ID NO: 94075 - RNA, 19 nt, Artificial Sequence
  Description of Artificial Sequence: Synthetic oligonucleotide
  Antisense strand to SEQ ID NO: 93994
uaauaucuaauucgaucag

SEQ ID NO: 94076 - RNA, 19 nt, Artificial Sequence
  Description of Artificial Sequence: Synthetic oligonucleotide
  Sense strand starting at position 3410 of SEQ ID NO: 1183
cgaauuagauauuaaucca

SEQ ID NO: 94077 - RNA, 19 nt, Artificial Sequence
  Description of Artificial Sequence: Synthetic oligonucleotide
  Antisense strand to SEQ ID NO: 93996
uggauuaauaucuaauucg

SEQ ID NO: 94078 - RNA, 19 nt, Artificial Sequence
  Description of Artificial Sequence: Synthetic oligonucleotide
  Sense strand starting at position 3716 of SEQ ID NO: 1184
gaugaucaccugggucaua

SEQ ID NO: 94079 - RNA, 19 nt, Artificial Sequence
  Description of Artificial Sequence: Synthetic oligonucleotide
  Antisense strand to SEQ ID NO: 93998
uaugacccaggugaucauc

SEQ ID NO: 94080 - RNA, 19 nt, Artificial Sequence
  Description of Artificial Sequence: Synthetic oligonucleotide
  Sense strand starting at position 3715 of SEQ ID NO: 1184
cgaugaucaccugggucau

SEQ ID NO: 94081 - RNA, 19 nt, Artificial Sequence
  Description of Artificial Sequence: Synthetic oligonucleotide
  Antisense strand to SEQ ID NO: 94000
augacccaggugaucaucg

SEQ ID NO: 94082 - RNA, 19 nt, Artificial Sequence
  Description of Artificial Sequence: Synthetic oligonucleotide
  Sense strand starting at position 3706 of SEQ ID NO: 1184
ucauguauccgaugaucac

SEQ ID NO: 94083 - RNA, 19 nt, Artificial Sequence
  Description of Artificial Sequence: Synthetic oligonucleotide
  Antisense strand to SEQ ID NO: 94002
gugaucaucggauacauga

SEQ ID NO: 94084 - RNA, 19 nt, Artificial Sequence
  Description of Artificial Sequence: Synthetic oligonucleotide
  Sense strand starting at position 3264 of SEQ ID NO: 1184
gugagcugacauuauacua

SEQ ID NO: 94085 - RNA, 19 nt, Artificial Sequence
  Description of Artificial Sequence: Synthetic oligonucleotide
  Antisense strand to SEQ ID NO: 94004
uaguauaaugucagcucac

SEQ ID NO: 94086 - RNA, 19 nt, Artificial Sequence
  Description of Artificial Sequence: Synthetic oligonucleotide
  Sense strand starting at position 2402 of SEQ ID NO: 1184
uaaguuuguugggaacauu

SEQ ID NO: 94087 - RNA, 19 nt, Artificial Sequence
  Description of Artificial Sequence: Synthetic oligonucleotide
  Antisense strand to SEQ ID NO: 94006
aauguucccaacaaacuua

SEQ ID NO: 94088 - RNA, 19 nt, Artificial Sequence
  Description of Artificial Sequence: Synthetic oligonucleotide
  Sense strand starting at position 2401 of SEQ ID NO: 1184
auaaguuuguugggaacau

SEQ ID NO: 94089 - RNA, 19 nt, Artificial Sequence
  Description of Artificial Sequence: Synthetic oligonucleotide
  Antisense strand to SEQ ID NO: 94008
auguucccaacaaacuuau

SEQ ID NO: 94090 - RNA, 19 nt, Artificial Sequence
  Description of Artificial Sequence: Synthetic oligonucleotide
  Sense strand starting at position 2399 of SEQ ID NO: 1184
aaauaaguuuguugggaac

SEQ ID NO: 94091 - RNA, 19 nt, Artificial Sequence
  Description of Artificial Sequence: Synthetic oligonucleotide
  Antisense strand to SEQ ID NO: 94010
guucccaacaaacuuauuu

SEQ ID NO: 94092 - RNA, 19 nt, Artificial Sequence
  Description of Artificial Sequence: Synthetic oligonucleotide
  Sense strand starting at position 2398 of SEQ ID NO: 1184
caaauaaguuuguugggaa

SEQ ID NO: 94093 - RNA, 19 nt, Artificial Sequence
  Description of Artificial Sequence: Synthetic oligonucleotide
  Antisense strand to SEQ ID NO: 94012
uucccaacaaacuuauuug

SEQ ID NO: 94094 - RNA, 19 nt, Artificial Sequence
  Description of Artificial Sequence: Synthetic oligonucleotide
  Sense strand starting at position 2325 of SEQ ID NO: 1184
cugauuacucaagguucua

SEQ ID NO: 94095 - RNA, 19 nt, Artificial Sequence
  Description of Artificial Sequence: Synthetic oligonucleotide
  Antisense strand to SEQ ID NO: 94014
uagaaccuugaguaaucag

SEQ ID NO: 94096 - RNA, 19 nt, Artificial Sequence
  Description of Artificial Sequence: Synthetic oligonucleotide
  Sense strand starting at position 2321 of SEQ ID NO: 1184
auuacugauuacucaaggu

SEQ ID NO: 94097 - RNA, 19 nt, Artificial Sequence
  Description of Artificial Sequence: Synthetic oligonucleotide
  Antisense strand to SEQ ID NO: 94016
accuugaguaaucaguaau

SEQ ID NO: 94098 - RNA, 19 nt, Artificial Sequence
  Description of Artificial Sequence: Synthetic oligonucleotide
  Sense strand starting at position 220 of SEQ ID NO: 1184
cuagcuuccuaguaugaca

SEQ ID NO: 94099 - RNA, 19 nt, Artificial Sequence
  Description of Artificial Sequence: Synthetic oligonucleotide
  Antisense strand to SEQ ID NO: 94018
ugucauacuaggaagcuag

SEQ ID NO: 94100 - RNA, 19 nt, Artificial Sequence
  Description of Artificial Sequence: Synthetic oligonucleotide
  Sense strand starting at position 122 of SEQ ID NO: 1185
cggucaaguagauaaguaa

SEQ ID NO: 94101 - RNA, 19 nt, Artificial Sequence
  Description of Artificial Sequence: Synthetic oligonucleotide
  Antisense strand to SEQ ID NO: 94020
uuacuuaucuacuugaccg

SEQ ID NO: 94102 - RNA, 19 nt, Artificial Sequence
  Description of Artificial Sequence: Synthetic oligonucleotide
  Sense strand starting at position 125 of SEQ ID NO: 1185
ucaaguagauaaguaacua

SEQ ID NO: 94103 - RNA, 19 nt, Artificial Sequence
  Description of Artificial Sequence: Synthetic oligonucleotide
  Antisense strand to SEQ ID NO: 94022
uaguuacuuaucuacuuga

SEQ ID NO: 94104 - RNA, 19 nt, Artificial Sequence
  Description of Artificial Sequence: Synthetic oligonucleotide
  Sense strand starting at position 294 of SEQ ID NO: 1185
acuggagaugagugugaua

SEQ ID NO: 94105 - RNA, 19 nt, Artificial Sequence
  Description of Artificial Sequence: Synthetic oligonucleotide
  Antisense strand to SEQ ID NO: 94024
uaucacacucaucuccagu

SEQ ID NO: 94106 - RNA, 19 nt, Artificial Sequence
  Description of Artificial Sequence: Synthetic oligonucleotide
  Sense strand starting at position 296 of SEQ ID NO: 1185
uggagaugagugugauaaa

SEQ ID NO: 94107 - RNA, 19 nt, Artificial Sequence
  Description of Artificial Sequence: Synthetic oligonucleotide
  Antisense strand to SEQ ID NO: 94026
uuuaucacacucaucucca

SEQ ID NO: 94108 - RNA, 19 nt, Artificial Sequence
  Description of Artificial Sequence: Synthetic oligonucleotide
  Sense strand starting at position 362 of SEQ ID NO: 1185
ggaggugggucuucuggaa

SEQ ID NO: 94109 - RNA, 19 nt, Artificial Sequence
  Description of Artificial Sequence: Synthetic oligonucleotide
  Antisense strand to SEQ ID NO: 94028
uuccagaagacccaccucc

SEQ ID NO: 94110 - RNA, 19 nt, Artificial Sequence
  Description of Artificial Sequence: Synthetic oligonucleotide
  Sense strand starting at position 366 of SEQ ID NO: 1185
gugggucuucuggaagaua

SEQ ID NO: 94111 - RNA, 19 nt, Artificial Sequence
  Description of Artificial Sequence: Synthetic oligonucleotide
  Antisense strand to SEQ ID NO: 94030
uaucuuccagaagacccac

SEQ ID NO: 94112 - RNA, 19 nt, Artificial Sequence
  Description of Artificial Sequence: Synthetic oligonucleotide
  Sense strand starting at position 369 of SEQ ID NO: 1185
ggucuucuggaagauaggu

SEQ ID NO: 94113 - RNA, 19 nt, Artificial Sequence
  Description of Artificial Sequence: Synthetic oligonucleotide
  Antisense strand to SEQ ID NO: 94032
accuaucuuccagaagacc

SEQ ID NO: 94114 - RNA, 19 nt, Artificial Sequence
  Description of Artificial Sequence: Synthetic oligonucleotide
  Sense strand starting at position 483 of SEQ ID NO: 1185
gaaugaauacaucggugaa

SEQ ID NO: 94115 - RNA, 19 nt, Artificial Sequence
  Description of Artificial Sequence: Synthetic oligonucleotide
  Antisense strand to SEQ ID NO: 94034
uucaccgauguauucauuc

SEQ ID NO: 94116 - RNA, 19 nt, Artificial Sequence
  Description of Artificial Sequence: Synthetic oligonucleotide
  Sense strand starting at position 485 of SEQ ID NO: 1185
augaauacaucggugaaug

SEQ ID NO: 94117 - RNA, 19 nt, Artificial Sequence
  Description of Artificial Sequence: Synthetic oligonucleotide
  Antisense strand to SEQ ID NO: 94036
cauucaccgauguauucau

SEQ ID NO: 94118 - RNA, 19 nt, Artificial Sequence
  Description of Artificial Sequence: Synthetic oligonucleotide
  Sense strand starting at position 565 of SEQ ID NO: 1185
uggaacucuugagcccaaa

SEQ ID NO: 94119 - RNA, 19 nt, Artificial Sequence
  Description of Artificial Sequence: Synthetic oligonucleotide
  Antisense strand to SEQ ID NO: 94038
uuugggcucaagaguucca

SEQ ID NO: 94120 - RNA, 19 nt, Artificial Sequence
  Description of Artificial Sequence: Synthetic oligonucleotide
  Sense strand starting at position 792 of SEQ ID NO: 1185
agaaauauaucgucucacu

SEQ ID NO: 94121 - RNA, 19 nt, Artificial Sequence
  Description of Artificial Sequence: Synthetic oligonucleotide
  Antisense strand to SEQ ID NO: 94040
agugagacgauauauuucu

SEQ ID NO: 94122 - RNA, 19 nt, Artificial Sequence
  Description of Artificial Sequence: Synthetic oligonucleotide
  Sense strand starting at position 1150 of SEQ ID NO: 1185
gaggcugguccaggauaca

SEQ ID NO: 94123 - RNA, 19 nt, Artificial Sequence
  Description of Artificial Sequence: Synthetic oligonucleotide
  Antisense strand to SEQ ID NO: 94042
uguauccuggaccagccuc

SEQ ID NO: 94124 - RNA, 19 nt, Artificial Sequence
  Description of Artificial Sequence: Synthetic oligonucleotide
  Sense strand starting at position 1811 of SEQ ID NO: 1185
cuguucugccaacagauga

SEQ ID NO: 94125 - RNA, 19 nt, Artificial Sequence
  Description of Artificial Sequence: Synthetic oligonucleotide
  Antisense strand to SEQ ID NO: 94044
ucaucuguuggcagaacag

SEQ ID NO: 94126 - RNA, 19 nt, Artificial Sequence
  Description of Artificial Sequence: Synthetic oligonucleotide
  Sense strand starting at position 2258 of SEQ ID NO: 1185
agaugaaagcuuggcugau

SEQ ID NO: 94127 - RNA, 19 nt, Artificial Sequence
  Description of Artificial Sequence: Synthetic oligonucleotide
  Antisense strand to SEQ ID NO: 94046
aucagccaagcuuucaucu

SEQ ID NO: 94128 - RNA, 19 nt, Artificial Sequence
  Description of Artificial Sequence: Synthetic oligonucleotide
  Sense strand starting at position 2302 of SEQ ID NO: 1185
ggaucucccuuccuagaga

SEQ ID NO: 94129 - RNA, 19 nt, Artificial Sequence
  Description of Artificial Sequence: Synthetic oligonucleotide
  Antisense strand to SEQ ID NO: 94048
ucucuaggaagggagaucc

SEQ ID NO: 94130 - RNA, 19 nt, Artificial Sequence
  Description of Artificial Sequence: Synthetic oligonucleotide
  Sense strand starting at position 2421 of SEQ ID NO: 1185
cagagacaucuuugugaga

SEQ ID NO: 94131 - RNA, 19 nt, Artificial Sequence
  Description of Artificial Sequence: Synthetic oligonucleotide
  Antisense strand to SEQ ID NO: 94050
ucucacaaagaugucucug

SEQ ID NO: 94132 - RNA, 19 nt, Artificial Sequence
  Description of Artificial Sequence: Synthetic oligonucleotide
  Sense strand starting at position 2436 of SEQ ID NO: 1185
gagagcgugaucuaugacu

SEQ ID NO: 94133 - RNA, 19 nt, Artificial Sequence
  Description of Artificial Sequence: Synthetic oligonucleotide
  Antisense strand to SEQ ID NO: 94052
agucauagaucacgcucuc

SEQ ID NO: 94134 - RNA, 19 nt, Artificial Sequence
  Description of Artificial Sequence: Synthetic oligonucleotide
  Sense strand starting at position 2743 of SEQ ID NO: 1185
ggagcuugggucugaugaa

SEQ ID NO: 94135 - RNA, 19 nt, Artificial Sequence
  Description of Artificial Sequence: Synthetic oligonucleotide
  Antisense strand to SEQ ID NO: 94054
uucaucagacccaagcucc

SEQ ID NO: 94136 - RNA, 19 nt, Artificial Sequence
  Description of Artificial Sequence: Synthetic oligonucleotide
  Sense strand starting at position 2758 of SEQ ID NO: 1185
ugaaaccaucauuggcaga

SEQ ID NO: 94137 - RNA, 19 nt, Artificial Sequence
  Description of Artificial Sequence: Synthetic oligonucleotide
  Antisense strand to SEQ ID NO: 94056
ucugccaaugaugguuuca

SEQ ID NO: 94138 - RNA, 19 nt, Artificial Sequence
  Description of Artificial Sequence: Synthetic oligonucleotide
  Sense strand starting at position 2998 of SEQ ID NO: 1185
uugaguccuggccacacua

SEQ ID NO: 94139 - RNA, 19 nt, Artificial Sequence
  Description of Artificial Sequence: Synthetic oligonucleotide
  Antisense strand to SEQ ID NO: 94058
uaguguggccaggacucaa

SEQ ID NO: 94140 - RNA, 19 nt, Artificial Sequence
  Description of Artificial Sequence: Synthetic oligonucleotide
  Sense strand starting at position 3123 of SEQ ID NO: 1185
agauaaauucggcauguaa

SEQ ID NO: 94141 - RNA, 19 nt, Artificial Sequence
  Description of Artificial Sequence: Synthetic oligonucleotide
  Antisense strand to SEQ ID NO: 94060
uuacaugccgaauuuaucu

SEQ ID NO: 94142 - RNA, 19 nt, Artificial Sequence
  Description of Artificial Sequence: Synthetic oligonucleotide
  Sense strand starting at position 3157 of SEQ ID NO: 1185
gcaagcugucgguuguuau

SEQ ID NO: 94143 - RNA, 19 nt, Artificial Sequence
  Description of Artificial Sequence: Synthetic oligonucleotide
  Antisense strand to SEQ ID NO: 94062
auaacaaccgacagcuugc

SEQ ID NO: 94144 - RNA, 19 nt, Artificial Sequence
  Description of Artificial Sequence: Synthetic oligonucleotide
  Sense strand starting at position 3180 of SEQ ID NO: 1185
auugcuauuaaugggaagu

SEQ ID NO: 94145 - RNA, 19 nt, Artificial Sequence
  Description of Artificial Sequence: Synthetic oligonucleotide
  Antisense strand to SEQ ID NO: 94064
acuucccauuaauagcaau

SEQ ID NO: 94146 - RNA, 19 nt, Artificial Sequence
  Description of Artificial Sequence: Synthetic oligonucleotide
  Sense strand starting at position 3262 of SEQ ID NO: 1185
cuggguucgggcagucaga

SEQ ID NO: 94147 - RNA, 19 nt, Artificial Sequence
  Description of Artificial Sequence: Synthetic oligonucleotide
  Antisense strand to SEQ ID NO: 94066
ucugacugcccgaacccag

SEQ ID NO: 94148 - RNA, 19 nt, Artificial Sequence
  Description of Artificial Sequence: Synthetic oligonucleotide
  Sense strand starting at position 3303 of SEQ ID NO: 1185
ugacauuguucuccacaag

SEQ ID NO: 94149 - RNA, 19 nt, Artificial Sequence
  Description of Artificial Sequence: Synthetic oligonucleotide
  Antisense strand to SEQ ID NO: 94068
cuuguggagaacaauguca

SEQ ID NO: 94150 - RNA, 19 nt, Artificial Sequence
  Description of Artificial Sequence: Synthetic oligonucleotide
  Sense strand starting at position 3377 of SEQ ID NO: 1185
gauggaucuuguccugaga

SEQ ID NO: 94151 - RNA, 19 nt, Artificial Sequence
  Description of Artificial Sequence: Synthetic oligonucleotide
  Antisense strand to SEQ ID NO: 94070
ucucaggacaagauccauc

SEQ ID NO: 94152 - RNA, 19 nt, Artificial Sequence
  Description of Artificial Sequence: Synthetic oligonucleotide
  Sense strand starting at position 3504 of SEQ ID NO: 1185
ggaugcgacacuggauaaa

SEQ ID NO: 94153 - RNA, 19 nt, Artificial Sequence
  Description of Artificial Sequence: Synthetic oligonucleotide
  Antisense strand to SEQ ID NO: 94072
uuuauccagugucgcaucc

SEQ ID NO: 94154 - RNA, 19 nt, Artificial Sequence
  Description of Artificial Sequence: Synthetic oligonucleotide
  Sense strand starting at position 3516 of SEQ ID NO: 1185
ggauaaauccaacgugacu

SEQ ID NO: 94155 - RNA, 19 nt, Artificial Sequence
  Description of Artificial Sequence: Synthetic oligonucleotide
  Antisense strand to SEQ ID NO: 94074
agucacguuggauuuaucc

SEQ ID NO: 94156 - RNA, 19 nt, Artificial Sequence
  Description of Artificial Sequence: Synthetic oligonucleotide
  Sense strand starting at position 3558 of SEQ ID NO: 1185
gcagcagacauugaacagu

SEQ ID NO: 94157 - RNA, 19 nt, Artificial Sequence
  Description of Artificial Sequence: Synthetic oligonucleotide
  Antisense strand to SEQ ID NO: 94076
acuguucaaugucugcugc

SEQ ID NO: 94158 - RNA, 19 nt, Artificial Sequence
  Description of Artificial Sequence: Synthetic oligonucleotide
  Sense strand starting at position 3584 of SEQ ID NO: 1185
ccacaugugaaaugagguu

SEQ ID NO: 94159 - RNA, 19 nt, Artificial Sequence
  Description of Artificial Sequence: Synthetic oligonucleotide
  Antisense strand to SEQ ID NO: 94078
aaccucauuucacaugugg

SEQ ID NO: 94160 - RNA, 19 nt, Artificial Sequence
  Description of Artificial Sequence: Synthetic oligonucleotide
  Sense strand starting at position 3658 of SEQ ID NO: 1185
ggacgacauccauaucuuu

SEQ ID NO: 94161 - RNA, 19 nt, Artificial Sequence
  Description of Artificial Sequence: Synthetic oligonucleotide
  Antisense strand to SEQ ID NO: 94080
aaagauauggaugucgucc

SEQ ID NO: 94162 - RNA, 19 nt, Artificial Sequence
  Description of Artificial Sequence: Synthetic oligonucleotide
  Sense strand starting at position 3695 of SEQ ID NO: 1185
aggugaauguuaccuuaca

SEQ ID NO: 94163 - RNA, 19 nt, Artificial Sequence
  Description of Artificial Sequence: Synthetic oligonucleotide
  Antisense strand to SEQ ID NO: 94082
uguaagguaacauucaccu

SEQ ID NO: 94164 - RNA, 19 nt, Artificial Sequence
  Description of Artificial Sequence: Synthetic oligonucleotide
  Sense strand starting at position 3733 of SEQ ID NO: 1185
augugauaaaugugaugaa

SEQ ID NO: 94165 - RNA, 19 nt, Artificial Sequence
  Description of Artificial Sequence: Synthetic oligonucleotide
  Antisense strand to SEQ ID NO: 94084
uucaucacauuuaucacau

SEQ ID NO: 94166 - RNA, 19 nt, Artificial Sequence
  Description of Artificial Sequence: Synthetic oligonucleotide
  Sense strand starting at position 3742 of SEQ ID NO: 1185
augugaugaaguuaagcau

SEQ ID NO: 94167 - RNA, 19 nt, Artificial Sequence
  Description of Artificial Sequence: Synthetic oligonucleotide
  Antisense strand to SEQ ID NO: 94086
augcuuaacuucaucacau

SEQ ID NO: 94168 - RNA, 19 nt, Artificial Sequence
  Description of Artificial Sequence: Synthetic oligonucleotide
  Sense strand starting at position 3794 of SEQ ID NO: 1185
acaaucauuguggguccaa

SEQ ID NO: 94169 - RNA, 19 nt, Artificial Sequence
  Description of Artificial Sequence: Synthetic oligonucleotide
  Antisense strand to SEQ ID NO: 94088
uuggacccacaaugauugu

SEQ ID NO: 94170 - RNA, 19 nt, Artificial Sequence
  Description of Artificial Sequence: Synthetic oligonucleotide
  Sense strand starting at position 3806 of SEQ ID NO: 1185
gguccaaugucaccagaaa

SEQ ID NO: 94171 - RNA, 19 nt, Artificial Sequence
  Description of Artificial Sequence: Synthetic oligonucleotide
  Antisense strand to SEQ ID NO: 94090
uuucuggugacauuggacc

SEQ ID NO: 94172 - RNA, 19 nt, Artificial Sequence
  Description of Artificial Sequence: Synthetic oligonucleotide
  Sense strand starting at position 3818 of SEQ ID NO: 1185
ccagaaagguucuuguaag

SEQ ID NO: 94173 - RNA, 19 nt, Artificial Sequence
  Description of Artificial Sequence: Synthetic oligonucleotide
  Antisense strand to SEQ ID NO: 94092
cuuacaagaaccuuucugg

SEQ ID NO: 94174 - RNA, 19 nt, Artificial Sequence
  Description of Artificial Sequence: Synthetic oligonucleotide
  Sense strand starting at position 3849 of SEQ ID NO: 1185
ggaucagaguuagucauag

SEQ ID NO: 94175 - RNA, 19 nt, Artificial Sequence
  Description of Artificial Sequence: Synthetic oligonucleotide
  Antisense strand to SEQ ID NO: 94094
cuaugacuaacucugaucc

SEQ ID NO: 94176 - RNA, 19 nt, Artificial Sequence
  Description of Artificial Sequence: Synthetic oligonucleotide
  Sense strand starting at position 3855 of SEQ ID NO: 1185
gaguuagucauaggagaug

SEQ ID NO: 94177 - RNA, 19 nt, Artificial Sequence
  Description of Artificial Sequence: Synthetic oligonucleotide
  Antisense strand to SEQ ID NO: 94096
caucuccuaugacuaacuc

SEQ ID NO: 94178 - RNA, 19 nt, Artificial Sequence
  Description of Artificial Sequence: Synthetic oligonucleotide
  Sense strand starting at position 3877 of SEQ ID NO: 1185
auggaagcaagaugucuua

SEQ ID NO: 94179 - RNA, 19 nt, Artificial Sequence
  Description of Artificial Sequence: Synthetic oligonucleotide
  Antisense strand to SEQ ID NO: 94098
uaagacaucuugcuuccau

SEQ ID NO: 94180 - RNA, 19 nt, Artificial Sequence
  Description of Artificial Sequence: Synthetic oligonucleotide
  Sense strand starting at position 201 of SEQ ID NO: 1186
acgcauuucccaugucacu

SEQ ID NO: 94181 - RNA, 19 nt, Artificial Sequence
  Description of Artificial Sequence: Synthetic oligonucleotide
  Antisense strand to SEQ ID NO: 94100
agugacaugggaaaugcgu

SEQ ID NO: 94182 - RNA, 19 nt, Artificial Sequence
  Description of Artificial Sequence: Synthetic oligonucleotide
  Sense strand starting at position 217 of SEQ ID NO: 1186
acuuaccuuuccuggaguu

SEQ ID NO: 94183 - RNA, 19 nt, Artificial Sequence
  Description of Artificial Sequence: Synthetic oligonucleotide
  Antisense strand to SEQ ID NO: 94102
aacuccaggaaagguaagu

SEQ ID NO: 94184 - RNA, 19 nt, Artificial Sequence
  Description of Artificial Sequence: Synthetic oligonucleotide
  Sense strand starting at position 303 of SEQ ID NO: 1186
gagcuuccucugugaaaca

SEQ ID NO: 94185 - RNA, 19 nt, Artificial Sequence
  Description of Artificial Sequence: Synthetic oligonucleotide
  Antisense strand to SEQ ID NO: 94104
uguuucacagaggaagcuc

SEQ ID NO: 94186 - RNA, 19 nt, Artificial Sequence
  Description of Artificial Sequence: Synthetic oligonucleotide
  Sense strand starting at position 625 of SEQ ID NO: 1186
gaugcugauugguguuuau

SEQ ID NO: 94187 - RNA, 19 nt, Artificial Sequence
  Description of Artificial Sequence: Synthetic oligonucleotide
  Antisense strand to SEQ ID NO: 94106
auaaacaccaaucagcauc

SEQ ID NO: 94188 - RNA, 19 nt, Artificial Sequence
  Description of Artificial Sequence: Synthetic oligonucleotide
  Sense strand starting at position 628 of SEQ ID NO: 1186
gcugauugguguuuauugu

SEQ ID NO: 94189 - RNA, 19 nt, Artificial Sequence
  Description of Artificial Sequence: Synthetic oligonucleotide
  Antisense strand to SEQ ID NO: 94108
acaauaaacaccaaucagc

SEQ ID NO: 94190 - RNA, 19 nt, Artificial Sequence
  Description of Artificial Sequence: Synthetic oligonucleotide
  Sense strand starting at position 629 of SEQ ID NO: 1186
cugauugguguuuauugua

SEQ ID NO: 94191 - RNA, 19 nt, Artificial Sequence
  Description of Artificial Sequence: Synthetic oligonucleotide
  Antisense strand to SEQ ID NO: 94110
uacaauaaacaccaaucag

SEQ ID NO: 94192 - RNA, 19 nt, Artificial Sequence
  Description of Artificial Sequence: Synthetic oligonucleotide
  Sense strand starting at position 632 of SEQ ID NO: 1186
auugguguuuauuguaaca

SEQ ID NO: 94193 - RNA, 19 nt, Artificial Sequence
  Description of Artificial Sequence: Synthetic oligonucleotide
  Antisense strand to SEQ ID NO: 94112
uguuacaauaaacaccaau

SEQ ID NO: 94194 - RNA, 19 nt, Artificial Sequence
  Description of Artificial Sequence: Synthetic oligonucleotide
  Sense strand starting at position 634 of SEQ ID NO: 1186
ugguguuuauuguaacaaa

SEQ ID NO: 94195 - RNA, 19 nt, Artificial Sequence
  Description of Artificial Sequence: Synthetic oligonucleotide
  Antisense strand to SEQ ID NO: 94114
uuuguuacaauaaacacca

SEQ ID NO: 94196 - RNA, 19 nt, Artificial Sequence
  Description of Artificial Sequence: Synthetic oligonucleotide
  Sense strand starting at position 714 of SEQ ID NO: 1186
ccagguggccucugaagaa

SEQ ID NO: 94197 - RNA, 19 nt, Artificial Sequence
  Description of Artificial Sequence: Synthetic oligonucleotide
  Antisense strand to SEQ ID NO: 94116
uucuucagaggccaccugg

SEQ ID NO: 94198 - RNA, 19 nt, Artificial Sequence
  Description of Artificial Sequence: Synthetic oligonucleotide
  Sense strand starting at position 804 of SEQ ID NO: 1186
acuguucuuggcugucaga

SEQ ID NO: 94199 - RNA, 19 nt, Artificial Sequence
  Description of Artificial Sequence: Synthetic oligonucleotide
  Antisense strand to SEQ ID NO: 94118
ucugacagccaagaacagu

SEQ ID NO: 94200 - RNA, 19 nt, Artificial Sequence
  Description of Artificial Sequence: Synthetic oligonucleotide
  Sense strand starting at position 817 of SEQ ID NO: 1186
gucagagcuuagcagguaa

SEQ ID NO: 94201 - RNA, 19 nt, Artificial Sequence
  Description of Artificial Sequence: Synthetic oligonucleotide
  Antisense strand to SEQ ID NO: 94120
uuaccugcuaagcucugac

SEQ ID NO: 94202 - RNA, 19 nt, Artificial Sequence
  Description of Artificial Sequence: Synthetic oligonucleotide
  Sense strand starting at position 850 of SEQ ID NO: 1186
gaugaagaguuugcgaaga

SEQ ID NO: 94203 - RNA, 19 nt, Artificial Sequence
  Description of Artificial Sequence: Synthetic oligonucleotide
  Antisense strand to SEQ ID NO: 94122
ucuucgcaaacucuucauc

SEQ ID NO: 94204 - RNA, 19 nt, Artificial Sequence
  Description of Artificial Sequence: Synthetic oligonucleotide
  Sense strand starting at position 852 of SEQ ID NO: 1186
ugaagaguuugcgaagauu

SEQ ID NO: 94205 - RNA, 19 nt, Artificial Sequence
  Description of Artificial Sequence: Synthetic oligonucleotide
  Antisense strand to SEQ ID NO: 94124
aaucuucgcaaacucuuca

SEQ ID NO: 94206 - RNA, 19 nt, Artificial Sequence
  Description of Artificial Sequence: Synthetic oligonucleotide
  Sense strand starting at position 855 of SEQ ID NO: 1186
agaguuugcgaagauuccu

SEQ ID NO: 94207 - RNA, 19 nt, Artificial Sequence
  Description of Artificial Sequence: Synthetic oligonucleotide
  Antisense strand to SEQ ID NO: 94126
aggaaucuucgcaaacucu

SEQ ID NO: 94208 - RNA, 19 nt, Artificial Sequence
  Description of Artificial Sequence: Synthetic oligonucleotide
  Sense strand starting at position 860 of SEQ ID NO: 1186
uugcgaagauuccucaucu

SEQ ID NO: 94209 - RNA, 19 nt, Artificial Sequence
  Description of Artificial Sequence: Synthetic oligonucleotide
  Antisense strand to SEQ ID NO: 94128
agaugaggaaucuucgcaa

SEQ ID NO: 94210 - RNA, 19 nt, Artificial Sequence
  Description of Artificial Sequence: Synthetic oligonucleotide
  Sense strand starting at position 861 of SEQ ID NO: 1186
ugcgaagauuccucaucug

SEQ ID NO: 94211 - RNA, 19 nt, Artificial Sequence
  Description of Artificial Sequence: Synthetic oligonucleotide
  Antisense strand to SEQ ID NO: 94130
cagaugaggaaucuucgca

SEQ ID NO: 94212 - RNA, 19 nt, Artificial Sequence
  Description of Artificial Sequence: Synthetic oligonucleotide
  Sense strand starting at position 955 of SEQ ID NO: 1186
uggguauacuguuuccaau

SEQ ID NO: 94213 - RNA, 19 nt, Artificial Sequence
  Description of Artificial Sequence: Synthetic oligonucleotide
  Antisense strand to SEQ ID NO: 94132
auuggaaacaguauaccca

SEQ ID NO: 94214 - RNA, 19 nt, Artificial Sequence
  Description of Artificial Sequence: Synthetic oligonucleotide
  Sense strand starting at position 957 of SEQ ID NO: 1186
gguauacuguuuccaauau

SEQ ID NO: 94215 - RNA, 19 nt, Artificial Sequence
  Description of Artificial Sequence: Synthetic oligonucleotide
  Antisense strand to SEQ ID NO: 94134
auauuggaaacaguauacc

SEQ ID NO: 94216 - RNA, 19 nt, Artificial Sequence
  Description of Artificial Sequence: Synthetic oligonucleotide
  Sense strand starting at position 958 of SEQ ID NO: 1186
guauacuguuuccaauaug

SEQ ID NO: 94217 - RNA, 19 nt, Artificial Sequence
  Description of Artificial Sequence: Synthetic oligonucleotide
  Antisense strand to SEQ ID NO: 94136
cauauuggaaacaguauac

SEQ ID NO: 94218 - RNA, 19 nt, Artificial Sequence
  Description of Artificial Sequence: Synthetic oligonucleotide
  Sense strand starting at position 978 of SEQ ID NO: 1186
uucugaaauuuagaaugcu

SEQ ID NO: 94219 - RNA, 19 nt, Artificial Sequence
  Description of Artificial Sequence: Synthetic oligonucleotide
  Antisense strand to SEQ ID NO: 94138
agcauucuaaauuucagaa

SEQ ID NO: 94220 - RNA, 19 nt, Artificial Sequence
  Description of Artificial Sequence: Synthetic oligonucleotide
  Sense strand starting at position 987 of SEQ ID NO: 1186
uuagaaugcucauugaaua

SEQ ID NO: 94221 - RNA, 19 nt, Artificial Sequence
  Description of Artificial Sequence: Synthetic oligonucleotide
  Antisense strand to SEQ ID NO: 94140
uauucaaugagcauucuaa

SEQ ID NO: 94222 - RNA, 19 nt, Artificial Sequence
  Description of Artificial Sequence: Synthetic oligonucleotide
  Sense strand starting at position 1617 of SEQ ID NO: 1186
gcuguuuagucccuggaca

SEQ ID NO: 94223 - RNA, 19 nt, Artificial Sequence
  Description of Artificial Sequence: Synthetic oligonucleotide
  Antisense strand to SEQ ID NO: 94142
uguccagggacuaaacagc

SEQ ID NO: 94224 - RNA, 19 nt, Artificial Sequence
  Description of Artificial Sequence: Synthetic oligonucleotide
  Sense strand starting at position 1805 of SEQ ID NO: 1186
cgcagcgucugcuagugaa

SEQ ID NO: 94225 - RNA, 19 nt, Artificial Sequence
  Description of Artificial Sequence: Synthetic oligonucleotide
  Antisense strand to SEQ ID NO: 94144
uucacuagcagacgcugcg

SEQ ID NO: 94226 - RNA, 19 nt, Artificial Sequence
  Description of Artificial Sequence: Synthetic oligonucleotide
  Sense strand starting at position 2044 of SEQ ID NO: 1186
uacucuggcaggugugaaa

SEQ ID NO: 94227 - RNA, 19 nt, Artificial Sequence
  Description of Artificial Sequence: Synthetic oligonucleotide
  Antisense strand to SEQ ID NO: 94146
uuucacaccugccagagua

SEQ ID NO: 94228 - RNA, 19 nt, Artificial Sequence
  Description of Artificial Sequence: Synthetic oligonucleotide
  Sense strand starting at position 2055 of SEQ ID NO: 1186
gugugaaaguccuuaguuu

SEQ ID NO: 94229 - RNA, 19 nt, Artificial Sequence
  Description of Artificial Sequence: Synthetic oligonucleotide
  Antisense strand to SEQ ID NO: 94148
aaacuaaggacuuucacac

SEQ ID NO: 94230 - RNA, 19 nt, Artificial Sequence
  Description of Artificial Sequence: Synthetic oligonucleotide
  Sense strand starting at position 2056 of SEQ ID NO: 1186
ugugaaaguccuuaguuua

SEQ ID NO: 94231 - RNA, 19 nt, Artificial Sequence
  Description of Artificial Sequence: Synthetic oligonucleotide
  Antisense strand to SEQ ID NO: 94150
uaaacuaaggacuuucaca

SEQ ID NO: 94232 - RNA, 19 nt, Artificial Sequence
  Description of Artificial Sequence: Synthetic oligonucleotide
  Sense strand starting at position 2224 of SEQ ID NO: 1186
ugggaaguguuaccaagaa

SEQ ID NO: 94233 - RNA, 19 nt, Artificial Sequence
  Description of Artificial Sequence: Synthetic oligonucleotide
  Antisense strand to SEQ ID NO: 94152
uucuugguaacacuuccca

SEQ ID NO: 94234 - RNA, 19 nt, Artificial Sequence
  Description of Artificial Sequence: Synthetic oligonucleotide
  Sense strand starting at position 2294 of SEQ ID NO: 1186
gaucuaaagcaauggucau

SEQ ID NO: 94235 - RNA, 19 nt, Artificial Sequence
  Description of Artificial Sequence: Synthetic oligonucleotide
  Antisense strand to SEQ ID NO: 94154
augaccauugcuuuagauc

SEQ ID NO: 94236 - RNA, 19 nt, Artificial Sequence
  Description of Artificial Sequence: Synthetic oligonucleotide
  Sense strand starting at position 2626 of SEQ ID NO: 1186
aaacaaugguaaugggagu

SEQ ID NO: 94237 - RNA, 19 nt, Artificial Sequence
  Description of Artificial Sequence: Synthetic oligonucleotide
  Antisense strand to SEQ ID NO: 94156
acucccauuaccauuguuu

SEQ ID NO: 94238 - RNA, 19 nt, Artificial Sequence
  Description of Artificial Sequence: Synthetic oligonucleotide
  Sense strand starting at position 2686 of SEQ ID NO: 1186
ugaacuuggcugggagaga

SEQ ID NO: 94239 - RNA, 19 nt, Artificial Sequence
  Description of Artificial Sequence: Synthetic oligonucleotide
  Antisense strand to SEQ ID NO: 94158
ucucucccagccaaguuca

SEQ ID NO: 94240 - RNA, 19 nt, Artificial Sequence
  Description of Artificial Sequence: Synthetic oligonucleotide
  Sense strand starting at position 2956 of SEQ ID NO: 1186
gauggcuugugucugugaa

SEQ ID NO: 94241 - RNA, 19 nt, Artificial Sequence
  Description of Artificial Sequence: Synthetic oligonucleotide
  Antisense strand to SEQ ID NO: 94160
uucacagacacaagccauc

SEQ ID NO: 94242 - RNA, 19 nt, Artificial Sequence
  Description of Artificial Sequence: Synthetic oligonucleotide
  Sense strand starting at position 2957 of SEQ ID NO: 1186
auggcuugugucugugaag

SEQ ID NO: 94243 - RNA, 19 nt, Artificial Sequence
  Description of Artificial Sequence: Synthetic oligonucleotide
  Antisense strand to SEQ ID NO: 94162
cuucacagacacaagccau

SEQ ID NO: 94244 - RNA, 19 nt, Artificial Sequence
  Description of Artificial Sequence: Synthetic oligonucleotide
  Sense strand starting at position 2960 of SEQ ID NO: 1186
gcuugugucugugaagcag

SEQ ID NO: 94245 - RNA, 19 nt, Artificial Sequence
  Description of Artificial Sequence: Synthetic oligonucleotide
  Antisense strand to SEQ ID NO: 94164
cugcuucacagacacaagc

SEQ ID NO: 94246 - RNA, 19 nt, Artificial Sequence
  Description of Artificial Sequence: Synthetic oligonucleotide
  Sense strand starting at position 2964 of SEQ ID NO: 1186
gugucugugaagcagaagu

SEQ ID NO: 94247 - RNA, 19 nt, Artificial Sequence
  Description of Artificial Sequence: Synthetic oligonucleotide
  Antisense strand to SEQ ID NO: 94166
acuucugcuucacagacac

SEQ ID NO: 94248 - RNA, 19 nt, Artificial Sequence
  Description of Artificial Sequence: Synthetic oligonucleotide
  Sense strand starting at position 2966 of SEQ ID NO: 1186
gucugugaagcagaaguua

SEQ ID NO: 94249 - RNA, 19 nt, Artificial Sequence
  Description of Artificial Sequence: Synthetic oligonucleotide
  Antisense strand to SEQ ID NO: 94168
uaacuucugcuucacagac

SEQ ID NO: 94250 - RNA, 19 nt, Artificial Sequence
  Description of Artificial Sequence: Synthetic oligonucleotide
  Sense strand starting at position 2992 of SEQ ID NO: 1186
cugagacucugccacugua

SEQ ID NO: 94251 - RNA, 19 nt, Artificial Sequence
  Description of Artificial Sequence: Synthetic oligonucleotide
  Antisense strand to SEQ ID NO: 94170
uacaguggcagagucucag

SEQ ID NO: 94252 - RNA, 19 nt, Artificial Sequence
  Description of Artificial Sequence: Synthetic oligonucleotide
  Sense strand starting at position 3146 of SEQ ID NO: 1186
gguguaugagaccagucau

SEQ ID NO: 94253 - RNA, 19 nt, Artificial Sequence
  Description of Artificial Sequence: Synthetic oligonucleotide
  Antisense strand to SEQ ID NO: 94172
augacuggucucauacacc

SEQ ID NO: 94254 - RNA, 19 nt, Artificial Sequence
  Description of Artificial Sequence: Synthetic oligonucleotide
  Sense strand starting at position 3352 of SEQ ID NO: 1186
gccugaguuugggaguuua

SEQ ID NO: 94255 - RNA, 19 nt, Artificial Sequence
  Description of Artificial Sequence: Synthetic oligonucleotide
  Antisense strand to SEQ ID NO: 94174
uaaacucccaaacucaggc

SEQ ID NO: 94256 - RNA, 19 nt, Artificial Sequence
  Description of Artificial Sequence: Synthetic oligonucleotide
  Sense strand starting at position 3622 of SEQ ID NO: 1186
acuagugcaugccugaauu

SEQ ID NO: 94257 - RNA, 19 nt, Artificial Sequence
  Description of Artificial Sequence: Synthetic oligonucleotide
  Antisense strand to SEQ ID NO: 94176
aauucaggcaugcacuagu

SEQ ID NO: 94258 - RNA, 19 nt, Artificial Sequence
  Description of Artificial Sequence: Synthetic oligonucleotide
  Sense strand starting at position 181 of SEQ ID NO: 1187
ccugauagaucugcaagga

SEQ ID NO: 94259 - RNA, 19 nt, Artificial Sequence
  Description of Artificial Sequence: Synthetic oligonucleotide
  Antisense strand to SEQ ID NO: 94178
uccuugcagaucuaucagg

SEQ ID NO: 94260 - RNA, 19 nt, Artificial Sequence
  Description of Artificial Sequence: Synthetic oligonucleotide
  Sense strand starting at position 1528 of SEQ ID NO: 1187
uugagauugcuguguggga

SEQ ID NO: 94261 - RNA, 19 nt, Artificial Sequence
  Description of Artificial Sequence: Synthetic oligonucleotide
  Antisense strand to SEQ ID NO: 94180
ucccacacagcaaucucaa

SEQ ID NO: 94262 - RNA, 19 nt, Artificial Sequence
  Description of Artificial Sequence: Synthetic oligonucleotide
  Sense strand starting at position 1529 of SEQ ID NO: 1187
ugagauugcugugugggau

SEQ ID NO: 94263 - RNA, 19 nt, Artificial Sequence
  Description of Artificial Sequence: Synthetic oligonucleotide
  Antisense strand to SEQ ID NO: 94182
aucccacacagcaaucuca

SEQ ID NO: 94264 - RNA, 19 nt, Artificial Sequence
  Description of Artificial Sequence: Synthetic oligonucleotide
  Sense strand starting at position 1530 of SEQ ID NO: 1187
gagauugcugugugggaua

SEQ ID NO: 94265 - RNA, 19 nt, Artificial Sequence
  Description of Artificial Sequence: Synthetic oligonucleotide
  Antisense strand to SEQ ID NO: 94184
uaucccacacagcaaucuc

SEQ ID NO: 94266 - RNA, 19 nt, Artificial Sequence
  Description of Artificial Sequence: Synthetic oligonucleotide
  Sense strand starting at position 2139 of SEQ ID NO: 1187
cuuucuucugacuaaucga

SEQ ID NO: 94267 - RNA, 19 nt, Artificial Sequence
  Description of Artificial Sequence: Synthetic oligonucleotide
  Antisense strand to SEQ ID NO: 94186
ucgauuagucagaagaaag

SEQ ID NO: 94268 - RNA, 19 nt, Artificial Sequence
  Description of Artificial Sequence: Synthetic oligonucleotide
  Sense strand starting at position 2147 of SEQ ID NO: 1187
ugacuaaucgauugaauua

SEQ ID NO: 94269 - RNA, 19 nt, Artificial Sequence
  Description of Artificial Sequence: Synthetic oligonucleotide
  Antisense strand to SEQ ID NO: 94188
uaauucaaucgauuaguca

SEQ ID NO: 94270 - RNA, 19 nt, Artificial Sequence
  Description of Artificial Sequence: Synthetic oligonucleotide
  Sense strand starting at position 2166 of SEQ ID NO: 1187
gauacacauuuauggaagu

SEQ ID NO: 94271 - RNA, 19 nt, Artificial Sequence
  Description of Artificial Sequence: Synthetic oligonucleotide
  Antisense strand to SEQ ID NO: 94190
acuuccauaaauguguauc

SEQ ID NO: 94272 - RNA, 19 nt, Artificial Sequence
  Description of Artificial Sequence: Synthetic oligonucleotide
  Sense strand starting at position 2167 of SEQ ID NO: 1187
auacacauuuauggaagua

SEQ ID NO: 94273 - RNA, 19 nt, Artificial Sequence
  Description of Artificial Sequence: Synthetic oligonucleotide
  Antisense strand to SEQ ID NO: 94192
uacuuccauaaauguguau

SEQ ID NO: 94274 - RNA, 19 nt, Artificial Sequence
  Description of Artificial Sequence: Synthetic oligonucleotide
  Sense strand starting at position 2236 of SEQ ID NO: 1187
cccaaauacugaugaaguu

SEQ ID NO: 94275 - RNA, 19 nt, Artificial Sequence
  Description of Artificial Sequence: Synthetic oligonucleotide
  Antisense strand to SEQ ID NO: 94194
aacuucaucaguauuuggg

SEQ ID NO: 94276 - RNA, 19 nt, Artificial Sequence
  Description of Artificial Sequence: Synthetic oligonucleotide
  Sense strand starting at position 2391 of SEQ ID NO: 1187
gcuacaauagccugaagaa

SEQ ID NO: 94277 - RNA, 19 nt, Artificial Sequence
  Description of Artificial Sequence: Synthetic oligonucleotide
  Antisense strand to SEQ ID NO: 94196
uucuucaggcuauuguagc

SEQ ID NO: 94278 - RNA, 19 nt, Artificial Sequence
  Description of Artificial Sequence: Synthetic oligonucleotide
  Sense strand starting at position 3352 of SEQ ID NO: 1187
ggguccauauguccaucau

SEQ ID NO: 94279 - RNA, 19 nt, Artificial Sequence
  Description of Artificial Sequence: Synthetic oligonucleotide
  Antisense strand to SEQ ID NO: 94198
augauggacauauggaccc

SEQ ID NO: 94280 - RNA, 19 nt, Artificial Sequence
  Description of Artificial Sequence: Synthetic oligonucleotide
  Sense strand starting at position 3353 of SEQ ID NO: 1187
gguccauauguccaucauu

SEQ ID NO: 94281 - RNA, 19 nt, Artificial Sequence
  Description of Artificial Sequence: Synthetic oligonucleotide
  Antisense strand to SEQ ID NO: 94200
aaugauggacauauggacc

SEQ ID NO: 94282 - RNA, 19 nt, Artificial Sequence
  Description of Artificial Sequence: Synthetic oligonucleotide
  Sense strand starting at position 3362 of SEQ ID NO: 1187
guccaucauuguucuauca

SEQ ID NO: 94283 - RNA, 19 nt, Artificial Sequence
  Description of Artificial Sequence: Synthetic oligonucleotide
  Antisense strand to SEQ ID NO: 94202
ugauagaacaaugauggac

SEQ ID NO: 94284 - RNA, 19 nt, Artificial Sequence
  Description of Artificial Sequence: Synthetic oligonucleotide
  Sense strand starting at position 3383 of SEQ ID NO: 1187
uggagaccuuuccuguaga

SEQ ID NO: 94285 - RNA, 19 nt, Artificial Sequence
  Description of Artificial Sequence: Synthetic oligonucleotide
  Antisense strand to SEQ ID NO: 94204
ucuacaggaaaggucucca

SEQ ID NO: 94286 - RNA, 19 nt, Artificial Sequence
  Description of Artificial Sequence: Synthetic oligonucleotide
  Sense strand starting at position 3384 of SEQ ID NO: 1187
ggagaccuuuccuguagac

SEQ ID NO: 94287 - RNA, 19 nt, Artificial Sequence
  Description of Artificial Sequence: Synthetic oligonucleotide
  Antisense strand to SEQ ID NO: 94206
gucuacaggaaaggucucc

SEQ ID NO: 94288 - RNA, 19 nt, Artificial Sequence
  Description of Artificial Sequence: Synthetic oligonucleotide
  Sense strand starting at position 3386 of SEQ ID NO: 1187
agaccuuuccuguagacuc

SEQ ID NO: 94289 - RNA, 19 nt, Artificial Sequence
  Description of Artificial Sequence: Synthetic oligonucleotide
  Antisense strand to SEQ ID NO: 94208
gagucuacaggaaaggucu

SEQ ID NO: 94290 - RNA, 19 nt, Artificial Sequence
  Description of Artificial Sequence: Synthetic oligonucleotide
  Sense strand starting at position 3538 of SEQ ID NO: 1187
gaguccuuuccugucgcua

SEQ ID NO: 94291 - RNA, 19 nt, Artificial Sequence
  Description of Artificial Sequence: Synthetic oligonucleotide
  Antisense strand to SEQ ID NO: 94210
uagcgacaggaaaggacuc

SEQ ID NO: 94292 - RNA, 19 nt, Artificial Sequence
  Description of Artificial Sequence: Synthetic oligonucleotide
  Sense strand starting at position 3540 of SEQ ID NO: 1187
guccuuuccugucgcuaau

SEQ ID NO: 94293 - RNA, 19 nt, Artificial Sequence
  Description of Artificial Sequence: Synthetic oligonucleotide
  Antisense strand to SEQ ID NO: 94212
auuagcgacaggaaaggac

SEQ ID NO: 94294 - RNA, 19 nt, Artificial Sequence
  Description of Artificial Sequence: Synthetic oligonucleotide
  Sense strand starting at position 3542 of SEQ ID NO: 1187
ccuuuccugucgcuaauau

SEQ ID NO: 94295 - RNA, 19 nt, Artificial Sequence
  Description of Artificial Sequence: Synthetic oligonucleotide
  Antisense strand to SEQ ID NO: 94214
auauuagcgacaggaaagg

SEQ ID NO: 94296 - RNA, 19 nt, Artificial Sequence
  Description of Artificial Sequence: Synthetic oligonucleotide
  Sense strand starting at position 3543 of SEQ ID NO: 1187
cuuuccugucgcuaauauu

SEQ ID NO: 94297 - RNA, 19 nt, Artificial Sequence
  Description of Artificial Sequence: Synthetic oligonucleotide
  Antisense strand to SEQ ID NO: 94216
aauauuagcgacaggaaag

SEQ ID NO: 94298 - RNA, 19 nt, Artificial Sequence
  Description of Artificial Sequence: Synthetic oligonucleotide
  Sense strand starting at position 3546 of SEQ ID NO: 1187
uccugucgcuaauauugaa

SEQ ID NO: 94299 - RNA, 19 nt, Artificial Sequence
  Description of Artificial Sequence: Synthetic oligonucleotide
  Antisense strand to SEQ ID NO: 94218
uucaauauuagcgacagga

SEQ ID NO: 94300 - RNA, 19 nt, Artificial Sequence
  Description of Artificial Sequence: Synthetic oligonucleotide
  Sense strand starting at position 3549 of SEQ ID NO: 1187
ugucgcuaauauugaacau

SEQ ID NO: 94301 - RNA, 19 nt, Artificial Sequence
  Description of Artificial Sequence: Synthetic oligonucleotide
  Antisense strand to SEQ ID NO: 94220
auguucaauauuagcgaca

SEQ ID NO: 94302 - RNA, 19 nt, Artificial Sequence
  Description of Artificial Sequence: Synthetic oligonucleotide
  Sense strand starting at position 3876 of SEQ ID NO: 1187
acggcaugacacugucaaa

SEQ ID NO: 94303 - RNA, 19 nt, Artificial Sequence
  Description of Artificial Sequence: Synthetic oligonucleotide
  Antisense strand to SEQ ID NO: 94222
uuugacagugucaugccgu

SEQ ID NO: 94304 - RNA, 19 nt, Artificial Sequence
  Description of Artificial Sequence: Synthetic oligonucleotide
  Sense strand starting at position 3978 of SEQ ID NO: 1188
guuuacugucuguagaaag

SEQ ID NO: 94305 - RNA, 19 nt, Artificial Sequence
  Description of Artificial Sequence: Synthetic oligonucleotide
  Antisense strand to SEQ ID NO: 94224
cuuucuacagacaguaaac

SEQ ID NO: 94306 - RNA, 19 nt, Artificial Sequence
  Description of Artificial Sequence: Synthetic oligonucleotide
  Sense strand starting at position 3977 of SEQ ID NO: 1188
uguuuacugucuguagaaa

SEQ ID NO: 94307 - RNA, 19 nt, Artificial Sequence
  Description of Artificial Sequence: Synthetic oligonucleotide
  Antisense strand to SEQ ID NO: 94226
uuucuacagacaguaaaca

SEQ ID NO: 94308 - RNA, 19 nt, Artificial Sequence
  Description of Artificial Sequence: Synthetic oligonucleotide
  Sense strand starting at position 3976 of SEQ ID NO: 1188
auguuuacugucuguagaa

SEQ ID NO: 94309 - RNA, 19 nt, Artificial Sequence
  Description of Artificial Sequence: Synthetic oligonucleotide
  Antisense strand to SEQ ID NO: 94228
uucuacagacaguaaacau

SEQ ID NO: 94310 - RNA, 19 nt, Artificial Sequence
  Description of Artificial Sequence: Synthetic oligonucleotide
  Sense strand starting at position 3975 of SEQ ID NO: 1188
uauguuuacugucuguaga

SEQ ID NO: 94311 - RNA, 19 nt, Artificial Sequence
  Description of Artificial Sequence: Synthetic oligonucleotide
  Antisense strand to SEQ ID NO: 94230
ucuacagacaguaaacaua

SEQ ID NO: 94312 - RNA, 19 nt, Artificial Sequence
  Description of Artificial Sequence: Synthetic oligonucleotide
  Sense strand starting at position 3924 of SEQ ID NO: 1188
guacgugauggucaaaugu

SEQ ID NO: 94313 - RNA, 19 nt, Artificial Sequence
  Description of Artificial Sequence: Synthetic oligonucleotide
  Antisense strand to SEQ ID NO: 94232
acauuugaccaucacguac

SEQ ID NO: 94314 - RNA, 19 nt, Artificial Sequence
  Description of Artificial Sequence: Synthetic oligonucleotide
  Sense strand starting at position 3921 of SEQ ID NO: 1188
aauguacgugauggucaaa

SEQ ID NO: 94315 - RNA, 19 nt, Artificial Sequence
  Description of Artificial Sequence: Synthetic oligonucleotide
  Antisense strand to SEQ ID NO: 94234
uuugaccaucacguacauu

SEQ ID NO: 94316 - RNA, 19 nt, Artificial Sequence
  Description of Artificial Sequence: Synthetic oligonucleotide
  Sense strand starting at position 3917 of SEQ ID NO: 1188
caugaauguacgugauggu

SEQ ID NO: 94317 - RNA, 19 nt, Artificial Sequence
  Description of Artificial Sequence: Synthetic oligonucleotide
  Antisense strand to SEQ ID NO: 94236
accaucacguacauucaug

SEQ ID NO: 94318 - RNA, 19 nt, Artificial Sequence
  Description of Artificial Sequence: Synthetic oligonucleotide
  Sense strand starting at position 3875 of SEQ ID NO: 1188
ugcgaucuguuuguaagac

SEQ ID NO: 94319 - RNA, 19 nt, Artificial Sequence
  Description of Artificial Sequence: Synthetic oligonucleotide
  Antisense strand to SEQ ID NO: 94238
gucuuacaaacagaucgca

SEQ ID NO: 94320 - RNA, 19 nt, Artificial Sequence
  Description of Artificial Sequence: Synthetic oligonucleotide
  Sense strand starting at position 3874 of SEQ ID NO: 1188
augcgaucuguuuguaaga

SEQ ID NO: 94321 - RNA, 19 nt, Artificial Sequence
  Description of Artificial Sequence: Synthetic oligonucleotide
  Antisense strand to SEQ ID NO: 94240
ucuuacaaacagaucgcau

SEQ ID NO: 94322 - RNA, 19 nt, Artificial Sequence
  Description of Artificial Sequence: Synthetic oligonucleotide
  Sense strand starting at position 3822 of SEQ ID NO: 1188
guccguauuucuuaagaga

SEQ ID NO: 94323 - RNA, 19 nt, Artificial Sequence
  Description of Artificial Sequence: Synthetic oligonucleotide
  Antisense strand to SEQ ID NO: 94242
ucucuuaagaaauacggac

SEQ ID NO: 94324 - RNA, 19 nt, Artificial Sequence
  Description of Artificial Sequence: Synthetic oligonucleotide
  Sense strand starting at position 3799 of SEQ ID NO: 1188
gaaaucgcacugcaagaaa

SEQ ID NO: 94325 - RNA, 19 nt, Artificial Sequence
  Description of Artificial Sequence: Synthetic oligonucleotide
  Antisense strand to SEQ ID NO: 94244
uuucuugcagugcgauuuc

SEQ ID NO: 94326 - RNA, 19 nt, Artificial Sequence
  Description of Artificial Sequence: Synthetic oligonucleotide
  Sense strand starting at position 3797 of SEQ ID NO: 1188
cugaaaucgcacugcaaga

SEQ ID NO: 94327 - RNA, 19 nt, Artificial Sequence
  Description of Artificial Sequence: Synthetic oligonucleotide
  Antisense strand to SEQ ID NO: 94246
ucuugcagugcgauuucag

SEQ ID NO: 94328 - RNA, 19 nt, Artificial Sequence
  Description of Artificial Sequence: Synthetic oligonucleotide
  Sense strand starting at position 3763 of SEQ ID NO: 1188
ccugauaugucagcaacag

SEQ ID NO: 94329 - RNA, 19 nt, Artificial Sequence
  Description of Artificial Sequence: Synthetic oligonucleotide
  Antisense strand to SEQ ID NO: 94248
cuguugcugacauaucagg

SEQ ID NO: 94330 - RNA, 19 nt, Artificial Sequence
  Description of Artificial Sequence: Synthetic oligonucleotide
  Sense strand starting at position 3723 of SEQ ID NO: 1188
ugaauaggauccgagaugu

SEQ ID NO: 94331 - RNA, 19 nt, Artificial Sequence
  Description of Artificial Sequence: Synthetic oligonucleotide
  Antisense strand to SEQ ID NO: 94250
acaucucggauccuauuca

SEQ ID NO: 94332 - RNA, 19 nt, Artificial Sequence
  Description of Artificial Sequence: Synthetic oligonucleotide
  Sense strand starting at position 3670 of SEQ ID NO: 1188
ggcaaaguuaccuggacuc

SEQ ID NO: 94333 - RNA, 19 nt, Artificial Sequence
  Description of Artificial Sequence: Synthetic oligonucleotide
  Antisense strand to SEQ ID NO: 94252
gaguccagguaacuuugcc

SEQ ID NO: 94334 - RNA, 19 nt, Artificial Sequence
  Description of Artificial Sequence: Synthetic oligonucleotide
  Sense strand starting at position 3561 of SEQ ID NO: 1188
gggaaaggucucuacguga

SEQ ID NO: 94335 - RNA, 19 nt, Artificial Sequence
  Description of Artificial Sequence: Synthetic oligonucleotide
  Antisense strand to SEQ ID NO: 94254
ucacguagagaccuuuccc

SEQ ID NO: 94336 - RNA, 19 nt, Artificial Sequence
  Description of Artificial Sequence: Synthetic oligonucleotide
  Sense strand starting at position 3486 of SEQ ID NO: 1188
cggcggugugucuaccaga

SEQ ID NO: 94337 - RNA, 19 nt, Artificial Sequence
  Description of Artificial Sequence: Synthetic oligonucleotide
  Antisense strand to SEQ ID NO: 94256
ucugguagacacaccgccg

SEQ ID NO: 94338 - RNA, 19 nt, Artificial Sequence
  Description of Artificial Sequence: Synthetic oligonucleotide
  Sense strand starting at position 3049 of SEQ ID NO: 1188
gcuggcuucgcggaaggua

SEQ ID NO: 94339 - RNA, 19 nt, Artificial Sequence
  Description of Artificial Sequence: Synthetic oligonucleotide
  Antisense strand to SEQ ID NO: 94258
uaccuuccgcgaagccagc

SEQ ID NO: 94340 - RNA, 19 nt, Artificial Sequence
  Description of Artificial Sequence: Synthetic oligonucleotide
  Sense strand starting at position 2005 of SEQ ID NO: 1188
uggacagucagcgagaaau

SEQ ID NO: 94341 - RNA, 19 nt, Artificial Sequence
  Description of Artificial Sequence: Synthetic oligonucleotide
  Antisense strand to SEQ ID NO: 94260
auuucucgcugacugucca

SEQ ID NO: 94342 - RNA, 19 nt, Artificial Sequence
  Description of Artificial Sequence: Synthetic oligonucleotide
  Sense strand starting at position 2004 of SEQ ID NO: 1188
guggacagucagcgagaaa

SEQ ID NO: 94343 - RNA, 19 nt, Artificial Sequence
  Description of Artificial Sequence: Synthetic oligonucleotide
  Antisense strand to SEQ ID NO: 94262
uuucucgcugacuguccac

SEQ ID NO: 94344 - RNA, 19 nt, Artificial Sequence
  Description of Artificial Sequence: Synthetic oligonucleotide
  Sense strand starting at position 1298 of SEQ ID NO: 1188
uguccuagggucuagaaca

SEQ ID NO: 94345 - RNA, 19 nt, Artificial Sequence
  Description of Artificial Sequence: Synthetic oligonucleotide
  Antisense strand to SEQ ID NO: 94264
uguucuagacccuaggaca

SEQ ID NO: 94346 - RNA, 19 nt, Artificial Sequence
  Description of Artificial Sequence: Synthetic oligonucleotide
  Sense strand starting at position 1293 of SEQ ID NO: 1188
acaauuguccuagggucua

SEQ ID NO: 94347 - RNA, 19 nt, Artificial Sequence
  Description of Artificial Sequence: Synthetic oligonucleotide
  Antisense strand to SEQ ID NO: 94266
uagacccuaggacaauugu

SEQ ID NO: 94348 - RNA, 19 nt, Artificial Sequence
  Description of Artificial Sequence: Synthetic oligonucleotide
  Sense strand starting at position 1081 of SEQ ID NO: 1188
gggccaauuguguaccuuu

SEQ ID NO: 94349 - RNA, 19 nt, Artificial Sequence
  Description of Artificial Sequence: Synthetic oligonucleotide
  Antisense strand to SEQ ID NO: 94268
aaagguacacaauuggccc

SEQ ID NO: 94350 - RNA, 19 nt, Artificial Sequence
  Description of Artificial Sequence: Synthetic oligonucleotide
  Sense strand starting at position 986 of SEQ ID NO: 1188
guggcaguguuguuaauca

SEQ ID NO: 94351 - RNA, 19 nt, Artificial Sequence
  Description of Artificial Sequence: Synthetic oligonucleotide
  Antisense strand to SEQ ID NO: 94270
ugauuaacaacacugccac

SEQ ID NO: 94352 - RNA, 19 nt, Artificial Sequence
  Description of Artificial Sequence: Synthetic oligonucleotide
  Sense strand starting at position 795 of SEQ ID NO: 1188
uggaguacugaaggaaagu

SEQ ID NO: 94353 - RNA, 19 nt, Artificial Sequence
  Description of Artificial Sequence: Synthetic oligonucleotide
  Antisense strand to SEQ ID NO: 94272
acuuuccuucaguacucca

SEQ ID NO: 94354 - RNA, 19 nt, Artificial Sequence
  Description of Artificial Sequence: Synthetic oligonucleotide
  Sense strand starting at position 714 of SEQ ID NO: 1188
aaacaacagugagaaugua

SEQ ID NO: 94355 - RNA, 19 nt, Artificial Sequence
  Description of Artificial Sequence: Synthetic oligonucleotide
  Antisense strand to SEQ ID NO: 94274
uacauucucacuguuguuu

SEQ ID NO: 94356 - RNA, 19 nt, Artificial Sequence
  Description of Artificial Sequence: Synthetic oligonucleotide
  Sense strand starting at position 711 of SEQ ID NO: 1188
gcuaaacaacagugagaau

SEQ ID NO: 94357 - RNA, 19 nt, Artificial Sequence
  Description of Artificial Sequence: Synthetic oligonucleotide
  Antisense strand to SEQ ID NO: 94276
auucucacuguuguuuagc

SEQ ID NO: 94358 - RNA, 19 nt, Artificial Sequence
  Description of Artificial Sequence: Synthetic oligonucleotide
  Sense strand starting at position 635 of SEQ ID NO: 1188
aaaugaugugcccaacugu

SEQ ID NO: 94359 - RNA, 19 nt, Artificial Sequence
  Description of Artificial Sequence: Synthetic oligonucleotide
  Antisense strand to SEQ ID NO: 94278
acaguugggcacaucauuu

SEQ ID NO: 94360 - RNA, 19 nt, Artificial Sequence
  Description of Artificial Sequence: Synthetic oligonucleotide
  Sense strand starting at position 631 of SEQ ID NO: 1188
ggagaaaugaugugcccaa

SEQ ID NO: 94361 - RNA, 19 nt, Artificial Sequence
  Description of Artificial Sequence: Synthetic oligonucleotide
  Antisense strand to SEQ ID NO: 94280
uugggcacaucauuucucc

SEQ ID NO: 94362 - RNA, 19 nt, Artificial Sequence
  Description of Artificial Sequence: Synthetic oligonucleotide
  Sense strand starting at position 619 of SEQ ID NO: 1188
uugacuuucugaggagaaa

SEQ ID NO: 94363 - RNA, 19 nt, Artificial Sequence
  Description of Artificial Sequence: Synthetic oligonucleotide
  Antisense strand to SEQ ID NO: 94282
uuucuccucagaaagucaa

SEQ ID NO: 94364 - RNA, 19 nt, Artificial Sequence
  Description of Artificial Sequence: Synthetic oligonucleotide
  Sense strand starting at position 617 of SEQ ID NO: 1188
aguugacuuucugaggaga

SEQ ID NO: 94365 - RNA, 19 nt, Artificial Sequence
  Description of Artificial Sequence: Synthetic oligonucleotide
  Antisense strand to SEQ ID NO: 94284
ucuccucagaaagucaacu

SEQ ID NO: 94366 - RNA, 19 nt, Artificial Sequence
  Description of Artificial Sequence: Synthetic oligonucleotide
  Sense strand starting at position 615 of SEQ ID NO: 1188
uuaguugacuuucugagga

SEQ ID NO: 94367 - RNA, 19 nt, Artificial Sequence
  Description of Artificial Sequence: Synthetic oligonucleotide
  Antisense strand to SEQ ID NO: 94286
uccucagaaagucaacuaa

SEQ ID NO: 94368 - RNA, 19 nt, Artificial Sequence
  Description of Artificial Sequence: Synthetic oligonucleotide
  Sense strand starting at position 505 of SEQ ID NO: 1188
acacuuaagcaaugaguua

SEQ ID NO: 94369 - RNA, 19 nt, Artificial Sequence
  Description of Artificial Sequence: Synthetic oligonucleotide
  Antisense strand to SEQ ID NO: 94288
uaacucauugcuuaagugu

SEQ ID NO: 94370 - RNA, 19 nt, Artificial Sequence
  Description of Artificial Sequence: Synthetic oligonucleotide
  Sense strand starting at position 485 of SEQ ID NO: 1188
gagaauagucuacagcuac

SEQ ID NO: 94371 - RNA, 19 nt, Artificial Sequence
  Description of Artificial Sequence: Synthetic oligonucleotide
  Antisense strand to SEQ ID NO: 94290
guagcuguagacuauucuc

SEQ ID NO: 94372 - RNA, 19 nt, Artificial Sequence
  Description of Artificial Sequence: Synthetic oligonucleotide
  Sense strand starting at position 462 of SEQ ID NO: 1188
cuagaugguuaagacagaa

SEQ ID NO: 94373 - RNA, 19 nt, Artificial Sequence
  Description of Artificial Sequence: Synthetic oligonucleotide
  Antisense strand to SEQ ID NO: 94292
uucugucuuaaccaucuag

SEQ ID NO: 94374 - RNA, 19 nt, Artificial Sequence
  Description of Artificial Sequence: Synthetic oligonucleotide
  Sense strand starting at position 379 of SEQ ID NO: 1188
ugcagaucaccugguugua

SEQ ID NO: 94375 - RNA, 19 nt, Artificial Sequence
  Description of Artificial Sequence: Synthetic oligonucleotide
  Antisense strand to SEQ ID NO: 94294
uacaaccaggugaucugca

SEQ ID NO: 94376 - RNA, 19 nt, Artificial Sequence
  Description of Artificial Sequence: Synthetic oligonucleotide
  Sense strand starting at position 250 of SEQ ID NO: 1188
caggcagugcuggaaagau

SEQ ID NO: 94377 - RNA, 19 nt, Artificial Sequence
  Description of Artificial Sequence: Synthetic oligonucleotide
  Antisense strand to SEQ ID NO: 94296
aucuuuccagcacugccug

SEQ ID NO: 94378 - RNA, 19 nt, Artificial Sequence
  Description of Artificial Sequence: Synthetic oligonucleotide
  Sense strand starting at position 148 of SEQ ID NO: 1188
aauagaagcugagaguuaa

SEQ ID NO: 94379 - RNA, 19 nt, Artificial Sequence
  Description of Artificial Sequence: Synthetic oligonucleotide
  Antisense strand to SEQ ID NO: 94298
uuaacucucagcuucuauu

SEQ ID NO: 94380 - RNA, 19 nt, Artificial Sequence
  Description of Artificial Sequence: Synthetic oligonucleotide
  Sense strand starting at position 145 of SEQ ID NO: 1188
uuaaauagaagcugagagu

SEQ ID NO: 94381 - RNA, 19 nt, Artificial Sequence
  Description of Artificial Sequence: Synthetic oligonucleotide
  Antisense strand to SEQ ID NO: 94300
acucucagcuucuauuuaa

SEQ ID NO: 94382 - RNA, 19 nt, Artificial Sequence
  Description of Artificial Sequence: Synthetic oligonucleotide
  Sense strand starting at position 21 of SEQ ID NO: 1188
gaacaaaugccucagcugu

SEQ ID NO: 94383 - RNA, 19 nt, Artificial Sequence
  Description of Artificial Sequence: Synthetic oligonucleotide
  Antisense strand to SEQ ID NO: 94302
acagcugaggcauuuguuc

SEQ ID NO: 94384 - RNA, 19 nt, Artificial Sequence
  Description of Artificial Sequence: Synthetic oligonucleotide
  Sense strand starting at position 3921 of SEQ ID NO: 1189
acaugaguagccugguauu

SEQ ID NO: 94385 - RNA, 19 nt, Artificial Sequence
  Description of Artificial Sequence: Synthetic oligonucleotide
  Antisense strand to SEQ ID NO: 94304
aauaccaggcuacucaugu

SEQ ID NO: 94386 - RNA, 19 nt, Artificial Sequence
  Description of Artificial Sequence: Synthetic oligonucleotide
  Sense strand starting at position 3885 of SEQ ID NO: 1189
cucugugaaguagaccaua

SEQ ID NO: 94387 - RNA, 19 nt, Artificial Sequence
  Description of Artificial Sequence: Synthetic oligonucleotide
  Antisense strand to SEQ ID NO: 94306
uauggucuacuucacagag

SEQ ID NO: 94388 - RNA, 19 nt, Artificial Sequence
  Description of Artificial Sequence: Synthetic oligonucleotide
  Sense strand starting at position 3753 of SEQ ID NO: 1189
guauguaauucuccugauu

SEQ ID NO: 94389 - RNA, 19 nt, Artificial Sequence
  Description of Artificial Sequence: Synthetic oligonucleotide
  Antisense strand to SEQ ID NO: 94308
aaucaggagaauuacauac

SEQ ID NO: 94390 - RNA, 19 nt, Artificial Sequence
  Description of Artificial Sequence: Synthetic oligonucleotide
  Sense strand starting at position 3716 of SEQ ID NO: 1189
ugauacuugugaccaagaa

SEQ ID NO: 94391 - RNA, 19 nt, Artificial Sequence
  Description of Artificial Sequence: Synthetic oligonucleotide
  Antisense strand to SEQ ID NO: 94310
uucuuggucacaaguauca

SEQ ID NO: 94392 - RNA, 19 nt, Artificial Sequence
  Description of Artificial Sequence: Synthetic oligonucleotide
  Sense strand starting at position 3492 of SEQ ID NO: 1189
agaauauuaguaugcuacu

SEQ ID NO: 94393 - RNA, 19 nt, Artificial Sequence
  Description of Artificial Sequence: Synthetic oligonucleotide
  Antisense strand to SEQ ID NO: 94312
aguagcauacuaauauucu

SEQ ID NO: 94394 - RNA, 19 nt, Artificial Sequence
  Description of Artificial Sequence: Synthetic oligonucleotide
  Sense strand starting at position 3484 of SEQ ID NO: 1189
gcugucucagaauauuagu

SEQ ID NO: 94395 - RNA, 19 nt, Artificial Sequence
  Description of Artificial Sequence: Synthetic oligonucleotide
  Antisense strand to SEQ ID NO: 94314
acuaauauucugagacagc

SEQ ID NO: 94396 - RNA, 19 nt, Artificial Sequence
  Description of Artificial Sequence: Synthetic oligonucleotide
  Sense strand starting at position 3450 of SEQ ID NO: 1189
cccugugaucguuaaacuc

SEQ ID NO: 94397 - RNA, 19 nt, Artificial Sequence
  Description of Artificial Sequence: Synthetic oligonucleotide
  Antisense strand to SEQ ID NO: 94316
gaguuuaacgaucacaggg

SEQ ID NO: 94398 - RNA, 19 nt, Artificial Sequence
  Description of Artificial Sequence: Synthetic oligonucleotide
  Sense strand starting at position 3228 of SEQ ID NO: 1189
cugcaugucagugaagcua

SEQ ID NO: 94399 - RNA, 19 nt, Artificial Sequence
  Description of Artificial Sequence: Synthetic oligonucleotide
  Antisense strand to SEQ ID NO: 94318
uagcuucacugacaugcag

SEQ ID NO: 94400 - RNA, 19 nt, Artificial Sequence
  Description of Artificial Sequence: Synthetic oligonucleotide
  Sense strand starting at position 3140 of SEQ ID NO: 1189
agauuacaguugcccuuaa

SEQ ID NO: 94401 - RNA, 19 nt, Artificial Sequence
  Description of Artificial Sequence: Synthetic oligonucleotide
  Antisense strand to SEQ ID NO: 94320
uuaagggcaacuguaaucu

SEQ ID NO: 94402 - RNA, 19 nt, Artificial Sequence
  Description of Artificial Sequence: Synthetic oligonucleotide
  Sense strand starting at position 2945 of SEQ ID NO: 1189
gguuaagguuacucuggaa

SEQ ID NO: 94403 - RNA, 19 nt, Artificial Sequence
  Description of Artificial Sequence: Synthetic oligonucleotide
  Antisense strand to SEQ ID NO: 94322
uuccagaguaaccuuaacc

SEQ ID NO: 94404 - RNA, 19 nt, Artificial Sequence
  Description of Artificial Sequence: Synthetic oligonucleotide
  Sense strand starting at position 2836 of SEQ ID NO: 1189
ccauguauugaauggucuu

SEQ ID NO: 94405 - RNA, 19 nt, Artificial Sequence
  Description of Artificial Sequence: Synthetic oligonucleotide
  Antisense strand to SEQ ID NO: 94324
aagaccauucaauacaugg

SEQ ID NO: 94406 - RNA, 19 nt, Artificial Sequence
  Description of Artificial Sequence: Synthetic oligonucleotide
  Sense strand starting at position 2724 of SEQ ID NO: 1189
aguaguauuguugggagau

SEQ ID NO: 94407 - RNA, 19 nt, Artificial Sequence
  Description of Artificial Sequence: Synthetic oligonucleotide
  Antisense strand to SEQ ID NO: 94326
aucucccaacaauacuacu

SEQ ID NO: 94408 - RNA, 19 nt, Artificial Sequence
  Description of Artificial Sequence: Synthetic oligonucleotide
  Sense strand starting at position 2680 of SEQ ID NO: 1189
ggucuaaucuuucccagau

SEQ ID NO: 94409 - RNA, 19 nt, Artificial Sequence
  Description of Artificial Sequence: Synthetic oligonucleotide
  Antisense strand to SEQ ID NO: 94328
aucugggaaagauuagacc

SEQ ID NO: 94410 - RNA, 19 nt, Artificial Sequence
  Description of Artificial Sequence: Synthetic oligonucleotide
  Sense strand starting at position 2363 of SEQ ID NO: 1189
ugggucaccugaguucaga

SEQ ID NO: 94411 - RNA, 19 nt, Artificial Sequence
  Description of Artificial Sequence: Synthetic oligonucleotide
  Antisense strand to SEQ ID NO: 94330
ucugaacucaggugaccca

SEQ ID NO: 94412 - RNA, 19 nt, Artificial Sequence
  Description of Artificial Sequence: Synthetic oligonucleotide
  Sense strand starting at position 2018 of SEQ ID NO: 1189
ugaagacuuugggucucuu

SEQ ID NO: 94413 - RNA, 19 nt, Artificial Sequence
  Description of Artificial Sequence: Synthetic oligonucleotide
  Antisense strand to SEQ ID NO: 94332
aagagacccaaagucuuca

SEQ ID NO: 94414 - RNA, 19 nt, Artificial Sequence
  Description of Artificial Sequence: Synthetic oligonucleotide
  Sense strand starting at position 1919 of SEQ ID NO: 1189
uugggaguguccuuacaga

SEQ ID NO: 94415 - RNA, 19 nt, Artificial Sequence
  Description of Artificial Sequence: Synthetic oligonucleotide
  Antisense strand to SEQ ID NO: 94334
ucuguaaggacacucccaa

SEQ ID NO: 94416 - RNA, 19 nt, Artificial Sequence
  Description of Artificial Sequence: Synthetic oligonucleotide
  Sense strand starting at position 1459 of SEQ ID NO: 1189
uuggcaguuggauguaaua

SEQ ID NO: 94417 - RNA, 19 nt, Artificial Sequence
  Description of Artificial Sequence: Synthetic oligonucleotide
  Antisense strand to SEQ ID NO: 94336
uauuacauccaacugccaa

SEQ ID NO: 94418 - RNA, 19 nt, Artificial Sequence
  Description of Artificial Sequence: Synthetic oligonucleotide
  Sense strand starting at position 1108 of SEQ ID NO: 1189
auccucuuugguuaagauu

SEQ ID NO: 94419 - RNA, 19 nt, Artificial Sequence
  Description of Artificial Sequence: Synthetic oligonucleotide
  Antisense strand to SEQ ID NO: 94338
aaucuuaaccaaagaggau

SEQ ID NO: 94420 - RNA, 19 nt, Artificial Sequence
  Description of Artificial Sequence: Synthetic oligonucleotide
  Sense strand starting at position 1107 of SEQ ID NO: 1189
gauccucuuugguuaagau

SEQ ID NO: 94421 - RNA, 19 nt, Artificial Sequence
  Description of Artificial Sequence: Synthetic oligonucleotide
  Antisense strand to SEQ ID NO: 94340
aucuuaaccaaagaggauc

SEQ ID NO: 94422 - RNA, 19 nt, Artificial Sequence
  Description of Artificial Sequence: Synthetic oligonucleotide
  Sense strand starting at position 1106 of SEQ ID NO: 1189
agauccucuuugguuaaga

SEQ ID NO: 94423 - RNA, 19 nt, Artificial Sequence
  Description of Artificial Sequence: Synthetic oligonucleotide
  Antisense strand to SEQ ID NO: 94342
ucuuaaccaaagaggaucu

SEQ ID NO: 94424 - RNA, 19 nt, Artificial Sequence
  Description of Artificial Sequence: Synthetic oligonucleotide
  Sense strand starting at position 1050 of SEQ ID NO: 1189
uccguuuggguggaagagu

SEQ ID NO: 94425 - RNA, 19 nt, Artificial Sequence
  Description of Artificial Sequence: Synthetic oligonucleotide
  Antisense strand to SEQ ID NO: 94344
acucuuccacccaaacgga

SEQ ID NO: 94426 - RNA, 19 nt, Artificial Sequence
  Description of Artificial Sequence: Synthetic oligonucleotide
  Sense strand starting at position 748 of SEQ ID NO: 1189
gagagauccuuggccacau

SEQ ID NO: 94427 - RNA, 19 nt, Artificial Sequence
  Description of Artificial Sequence: Synthetic oligonucleotide
  Antisense strand to SEQ ID NO: 94346
auguggccaaggaucucuc

SEQ ID NO: 94428 - RNA, 19 nt, Artificial Sequence
  Description of Artificial Sequence: Synthetic oligonucleotide
  Sense strand starting at position 746 of SEQ ID NO: 1189
uugagagauccuuggccac

SEQ ID NO: 94429 - RNA, 19 nt, Artificial Sequence
  Description of Artificial Sequence: Synthetic oligonucleotide
  Antisense strand to SEQ ID NO: 94348
guggccaaggaucucucaa

SEQ ID NO: 94430 - RNA, 19 nt, Artificial Sequence
  Description of Artificial Sequence: Synthetic oligonucleotide
  Sense strand starting at position 736 of SEQ ID NO: 1189
aguaucuuuguugagagau

SEQ ID NO: 94431 - RNA, 19 nt, Artificial Sequence
  Description of Artificial Sequence: Synthetic oligonucleotide
  Antisense strand to SEQ ID NO: 94350
aucucucaacaaagauacu

SEQ ID NO: 94432 - RNA, 19 nt, Artificial Sequence
  Description of Artificial Sequence: Synthetic oligonucleotide
  Sense strand starting at position 734 of SEQ ID NO: 1189
aaaguaucuuuguugagag

SEQ ID NO: 94433 - RNA, 19 nt, Artificial Sequence
  Description of Artificial Sequence: Synthetic oligonucleotide
  Antisense strand to SEQ ID NO: 94352
cucucaacaaagauacuuu

SEQ ID NO: 94434 - RNA, 19 nt, Artificial Sequence
  Description of Artificial Sequence: Synthetic oligonucleotide
  Sense strand starting at position 733 of SEQ ID NO: 1189
gaaaguaucuuuguugaga

SEQ ID NO: 94435 - RNA, 19 nt, Artificial Sequence
  Description of Artificial Sequence: Synthetic oligonucleotide
  Antisense strand to SEQ ID NO: 94354
ucucaacaaagauacuuuc

SEQ ID NO: 94436 - RNA, 19 nt, Artificial Sequence
  Description of Artificial Sequence: Synthetic oligonucleotide
  Sense strand starting at position 731 of SEQ ID NO: 1189
ucgaaaguaucuuuguuga

SEQ ID NO: 94437 - RNA, 19 nt, Artificial Sequence
  Description of Artificial Sequence: Synthetic oligonucleotide
  Antisense strand to SEQ ID NO: 94356
ucaacaaagauacuuucga

SEQ ID NO: 94438 - RNA, 19 nt, Artificial Sequence
  Description of Artificial Sequence: Synthetic oligonucleotide
  Sense strand starting at position 691 of SEQ ID NO: 1189
aguugaaucucuuccugac

SEQ ID NO: 94439 - RNA, 19 nt, Artificial Sequence
  Description of Artificial Sequence: Synthetic oligonucleotide
  Antisense strand to SEQ ID NO: 94358
gucaggaagagauucaacu

SEQ ID NO: 94440 - RNA, 19 nt, Artificial Sequence
  Description of Artificial Sequence: Synthetic oligonucleotide
  Sense strand starting at position 648 of SEQ ID NO: 1189
aguaauaugugaccuuugu

SEQ ID NO: 94441 - RNA, 19 nt, Artificial Sequence
  Description of Artificial Sequence: Synthetic oligonucleotide
  Antisense strand to SEQ ID NO: 94360
acaaaggucacauauuacu

SEQ ID NO: 94442 - RNA, 19 nt, Artificial Sequence
  Description of Artificial Sequence: Synthetic oligonucleotide
  Sense strand starting at position 579 of SEQ ID NO: 1189
ugaaauauuuagggauaug

SEQ ID NO: 94443 - RNA, 19 nt, Artificial Sequence
  Description of Artificial Sequence: Synthetic oligonucleotide
  Antisense strand to SEQ ID NO: 94362
cauaucccuaaauauuuca

SEQ ID NO: 94444 - RNA, 19 nt, Artificial Sequence
  Description of Artificial Sequence: Synthetic oligonucleotide
  Sense strand starting at position 578 of SEQ ID NO: 1189
gugaaauauuuagggauau

SEQ ID NO: 94445 - RNA, 19 nt, Artificial Sequence
  Description of Artificial Sequence: Synthetic oligonucleotide
  Antisense strand to SEQ ID NO: 94364
auaucccuaaauauuucac

SEQ ID NO: 94446 - RNA, 19 nt, Artificial Sequence
  Description of Artificial Sequence: Synthetic oligonucleotide
  Sense strand starting at position 510 of SEQ ID NO: 1189
aguuaaucaugauuggauu

SEQ ID NO: 94447 - RNA, 19 nt, Artificial Sequence
  Description of Artificial Sequence: Synthetic oligonucleotide
  Antisense strand to SEQ ID NO: 94366
aauccaaucaugauuaacu

SEQ ID NO: 94448 - RNA, 19 nt, Artificial Sequence
  Description of Artificial Sequence: Synthetic oligonucleotide
  Sense strand starting at position 485 of SEQ ID NO: 1189
ggauuagacuucuuaagcu

SEQ ID NO: 94449 - RNA, 19 nt, Artificial Sequence
  Description of Artificial Sequence: Synthetic oligonucleotide
  Antisense strand to SEQ ID NO: 94368
agcuuaagaagucuaaucc

SEQ ID NO: 94450 - RNA, 19 nt, Artificial Sequence
  Description of Artificial Sequence: Synthetic oligonucleotide
  Sense strand starting at position 474 of SEQ ID NO: 1189
agaacuacauuggauuaga

SEQ ID NO: 94451 - RNA, 19 nt, Artificial Sequence
  Description of Artificial Sequence: Synthetic oligonucleotide
  Antisense strand to SEQ ID NO: 94370
ucuaauccaauguaguucu

SEQ ID NO: 94452 - RNA, 19 nt, Artificial Sequence
  Description of Artificial Sequence: Synthetic oligonucleotide
  Sense strand starting at position 433 of SEQ ID NO: 1189
cugggaaauuggcuagauu

SEQ ID NO: 94453 - RNA, 19 nt, Artificial Sequence
  Description of Artificial Sequence: Synthetic oligonucleotide
  Antisense strand to SEQ ID NO: 94372
aaucuagccaauuucccag

SEQ ID NO: 94454 - RNA, 19 nt, Artificial Sequence
  Description of Artificial Sequence: Synthetic oligonucleotide
  Sense strand starting at position 423 of SEQ ID NO: 1189
acaauccagccugggaaau

SEQ ID NO: 94455 - RNA, 19 nt, Artificial Sequence
  Description of Artificial Sequence: Synthetic oligonucleotide
  Antisense strand to SEQ ID NO: 94374
auuucccaggcuggauugu

SEQ ID NO: 94456 - RNA, 19 nt, Artificial Sequence
  Description of Artificial Sequence: Synthetic oligonucleotide
  Sense strand starting at position 223 of SEQ ID NO: 1189
ggcagaggcauuggauuau

SEQ ID NO: 94457 - RNA, 19 nt, Artificial Sequence
  Description of Artificial Sequence: Synthetic oligonucleotide
  Antisense strand to SEQ ID NO: 94376
auaauccaaugccucugcc

SEQ ID NO: 94458 - RNA, 19 nt, Artificial Sequence
  Description of Artificial Sequence: Synthetic oligonucleotide
  Sense strand starting at position 124 of SEQ ID NO: 1189
agacacagauguuuccaau

SEQ ID NO: 94459 - RNA, 19 nt, Artificial Sequence
  Description of Artificial Sequence: Synthetic oligonucleotide
  Antisense strand to SEQ ID NO: 94378
auuggaaacaucugugucu

SEQ ID NO: 94460 - RNA, 19 nt, Artificial Sequence
  Description of Artificial Sequence: Synthetic oligonucleotide
  Sense strand starting at position 119 of SEQ ID NO: 1189
ucgcaagacacagauguuu

SEQ ID NO: 94461 - RNA, 19 nt, Artificial Sequence
  Description of Artificial Sequence: Synthetic oligonucleotide
  Antisense strand to SEQ ID NO: 94380
aaacaucugugucuugcga

SEQ ID NO: 94462 - RNA, 19 nt, Artificial Sequence
  Description of Artificial Sequence: Synthetic oligonucleotide
  Sense strand starting at position 86 of SEQ ID NO: 1189
cuuugaaagcugugugaca

SEQ ID NO: 94463 - RNA, 19 nt, Artificial Sequence
  Description of Artificial Sequence: Synthetic oligonucleotide
  Antisense strand to SEQ ID NO: 94382
ugucacacagcuuucaaag

SEQ ID NO: 94464 - RNA, 19 nt, Artificial Sequence
  Description of Artificial Sequence: Synthetic oligonucleotide
  Sense strand starting at position 3272 of SEQ ID NO: 1190
cuggaugaucagugauguu

SEQ ID NO: 94465 - RNA, 19 nt, Artificial Sequence
  Description of Artificial Sequence: Synthetic oligonucleotide
  Antisense strand to SEQ ID NO: 94384
aacaucacugaucauccag

SEQ ID NO: 94466 - RNA, 19 nt, Artificial Sequence
  Description of Artificial Sequence: Synthetic oligonucleotide
  Sense strand starting at position 3271 of SEQ ID NO: 1190
ucuggaugaucagugaugu

SEQ ID NO: 94467 - RNA, 19 nt, Artificial Sequence
  Description of Artificial Sequence: Synthetic oligonucleotide
  Antisense strand to SEQ ID NO: 94386
acaucacugaucauccaga

SEQ ID NO: 94468 - RNA, 19 nt, Artificial Sequence
  Description of Artificial Sequence: Synthetic oligonucleotide
  Sense strand starting at position 3232 of SEQ ID NO: 1190
ggugauaugauaugucauu

SEQ ID NO: 94469 - RNA, 19 nt, Artificial Sequence
  Description of Artificial Sequence: Synthetic oligonucleotide
  Antisense strand to SEQ ID NO: 94388
aaugacauaucauaucacc

SEQ ID NO: 94470 - RNA, 19 nt, Artificial Sequence
  Description of Artificial Sequence: Synthetic oligonucleotide
  Sense strand starting at position 3223 of SEQ ID NO: 1190
gagugcuauggugauauga

SEQ ID NO: 94471 - RNA, 19 nt, Artificial Sequence
  Description of Artificial Sequence: Synthetic oligonucleotide
  Antisense strand to SEQ ID NO: 94390
ucauaucaccauagcacuc

SEQ ID NO: 94472 - RNA, 19 nt, Artificial Sequence
  Description of Artificial Sequence: Synthetic oligonucleotide
  Sense strand starting at position 3158 of SEQ ID NO: 1190
uacuuucuaguagggagau

SEQ ID NO: 94473 - RNA, 19 nt, Artificial Sequence
  Description of Artificial Sequence: Synthetic oligonucleotide
  Antisense strand to SEQ ID NO: 94392
aucucccuacuagaaagua

SEQ ID NO: 94474 - RNA, 19 nt, Artificial Sequence
  Description of Artificial Sequence: Synthetic oligonucleotide
  Sense strand starting at position 3152 of SEQ ID NO: 1190
ggaguuuacuuucuaguag

SEQ ID NO: 94475 - RNA, 19 nt, Artificial Sequence
  Description of Artificial Sequence: Synthetic oligonucleotide
  Antisense strand to SEQ ID NO: 94394
cuacuagaaaguaaacucc

SEQ ID NO: 94476 - RNA, 19 nt, Artificial Sequence
  Description of Artificial Sequence: Synthetic oligonucleotide
  Sense strand starting at position 3093 of SEQ ID NO: 1190
uguucuaggagcugagaau

SEQ ID NO: 94477 - RNA, 19 nt, Artificial Sequence
  Description of Artificial Sequence: Synthetic oligonucleotide
  Antisense strand to SEQ ID NO: 94396
auucucagcuccuagaaca

SEQ ID NO: 94478 - RNA, 19 nt, Artificial Sequence
  Description of Artificial Sequence: Synthetic oligonucleotide
  Sense strand starting at position 3084 of SEQ ID NO: 1190
gcuaaacauuguucuagga

SEQ ID NO: 94479 - RNA, 19 nt, Artificial Sequence
  Description of Artificial Sequence: Synthetic oligonucleotide
  Antisense strand to SEQ ID NO: 94398
uccuagaacaauguuuagc

SEQ ID NO: 94480 - RNA, 19 nt, Artificial Sequence
  Description of Artificial Sequence: Synthetic oligonucleotide
  Sense strand starting at position 3059 of SEQ ID NO: 1190
aauauuugcugagugcuga

SEQ ID NO: 94481 - RNA, 19 nt, Artificial Sequence
  Description of Artificial Sequence: Synthetic oligonucleotide
  Antisense strand to SEQ ID NO: 94400
ucagcacucagcaaauauu

SEQ ID NO: 94482 - RNA, 19 nt, Artificial Sequence
  Description of Artificial Sequence: Synthetic oligonucleotide
  Sense strand starting at position 2945 of SEQ ID NO: 1190
gugaguaggcuuugaagaa

SEQ ID NO: 94483 - RNA, 19 nt, Artificial Sequence
  Description of Artificial Sequence: Synthetic oligonucleotide
  Antisense strand to SEQ ID NO: 94402
uucuucaaagccuacucac

SEQ ID NO: 94484 - RNA, 19 nt, Artificial Sequence
  Description of Artificial Sequence: Synthetic oligonucleotide
  Sense strand starting at position 2938 of SEQ ID NO: 1190
aagauaugugaguaggcuu

SEQ ID NO: 94485 - RNA, 19 nt, Artificial Sequence
  Description of Artificial Sequence: Synthetic oligonucleotide
  Antisense strand to SEQ ID NO: 94404
aagccuacucacauaucuu

SEQ ID NO: 94486 - RNA, 19 nt, Artificial Sequence
  Description of Artificial Sequence: Synthetic oligonucleotide
  Sense strand starting at position 2736 of SEQ ID NO: 1190
guguacaaucuagagguaa

SEQ ID NO: 94487 - RNA, 19 nt, Artificial Sequence
  Description of Artificial Sequence: Synthetic oligonucleotide
  Antisense strand to SEQ ID NO: 94406
uuaccucuagauuguacac

SEQ ID NO: 94488 - RNA, 19 nt, Artificial Sequence
  Description of Artificial Sequence: Synthetic oligonucleotide
  Sense strand starting at position 2734 of SEQ ID NO: 1190
gaguguacaaucuagaggu

SEQ ID NO: 94489 - RNA, 19 nt, Artificial Sequence
  Description of Artificial Sequence: Synthetic oligonucleotide
  Antisense strand to SEQ ID NO: 94408
accucuagauuguacacuc

SEQ ID NO: 94490 - RNA, 19 nt, Artificial Sequence
  Description of Artificial Sequence: Synthetic oligonucleotide
  Sense strand starting at position 2712 of SEQ ID NO: 1190
ggacauagaccuugccuuu

SEQ ID NO: 94491 - RNA, 19 nt, Artificial Sequence
  Description of Artificial Sequence: Synthetic oligonucleotide
  Antisense strand to SEQ ID NO: 94410
aaaggcaaggucuaugucc

SEQ ID NO: 94492 - RNA, 19 nt, Artificial Sequence
  Description of Artificial Sequence: Synthetic oligonucleotide
  Sense strand starting at position 2687 of SEQ ID NO: 1190
uggcaugguauaugauaaa

SEQ ID NO: 94493 - RNA, 19 nt, Artificial Sequence
  Description of Artificial Sequence: Synthetic oligonucleotide
  Antisense strand to SEQ ID NO: 94412
uuuaucauauaccaugcca

SEQ ID NO: 94494 - RNA, 19 nt, Artificial Sequence
  Description of Artificial Sequence: Synthetic oligonucleotide
  Sense strand starting at position 2685 of SEQ ID NO: 1190
gguggcaugguauaugaua

SEQ ID NO: 94495 - RNA, 19 nt, Artificial Sequence
  Description of Artificial Sequence: Synthetic oligonucleotide
  Antisense strand to SEQ ID NO: 94414
uaucauauaccaugccacc

SEQ ID NO: 94496 - RNA, 19 nt, Artificial Sequence
  Description of Artificial Sequence: Synthetic oligonucleotide
  Sense strand starting at position 2286 of SEQ ID NO: 1190
ggugucaccugaccaauca

SEQ ID NO: 94497 - RNA, 19 nt, Artificial Sequence
  Description of Artificial Sequence: Synthetic oligonucleotide
  Antisense strand to SEQ ID NO: 94416
ugauuggucaggugacacc

SEQ ID NO: 94498 - RNA, 19 nt, Artificial Sequence
  Description of Artificial Sequence: Synthetic oligonucleotide
  Sense strand starting at position 2241 of SEQ ID NO: 1190
gggauaaguucagugacau

SEQ ID NO: 94499 - RNA, 19 nt, Artificial Sequence
  Description of Artificial Sequence: Synthetic oligonucleotide
  Antisense strand to SEQ ID NO: 94418
augucacugaacuuauccc

SEQ ID NO: 94500 - RNA, 19 nt, Artificial Sequence
  Description of Artificial Sequence: Synthetic oligonucleotide
  Sense strand starting at position 2227 of SEQ ID NO: 1190
gucauagugacucagggau

SEQ ID NO: 94501 - RNA, 19 nt, Artificial Sequence
  Description of Artificial Sequence: Synthetic oligonucleotide
  Antisense strand to SEQ ID NO: 94420
aucccugagucacuaugac

SEQ ID NO: 94502 - RNA, 19 nt, Artificial Sequence
  Description of Artificial Sequence: Synthetic oligonucleotide
  Sense strand starting at position 2215 of SEQ ID NO: 1190
guaacaucaucagucauag

SEQ ID NO: 94503 - RNA, 19 nt, Artificial Sequence
  Description of Artificial Sequence: Synthetic oligonucleotide
  Antisense strand to SEQ ID NO: 94422
cuaugacugaugauguuac

SEQ ID NO: 94504 - RNA, 19 nt, Artificial Sequence
  Description of Artificial Sequence: Synthetic oligonucleotide
  Sense strand starting at position 2213 of SEQ ID NO: 1190
uuguaacaucaucagucau

SEQ ID NO: 94505 - RNA, 19 nt, Artificial Sequence
  Description of Artificial Sequence: Synthetic oligonucleotide
  Antisense strand to SEQ ID NO: 94424
augacugaugauguuacaa

SEQ ID NO: 94506 - RNA, 19 nt, Artificial Sequence
  Description of Artificial Sequence: Synthetic oligonucleotide
  Sense strand starting at position 2212 of SEQ ID NO: 1190
auuguaacaucaucaguca

SEQ ID NO: 94507 - RNA, 19 nt, Artificial Sequence
  Description of Artificial Sequence: Synthetic oligonucleotide
  Antisense strand to SEQ ID NO: 94426
ugacugaugauguuacaau

SEQ ID NO: 94508 - RNA, 19 nt, Artificial Sequence
  Description of Artificial Sequence: Synthetic oligonucleotide
  Sense strand starting at position 2202 of SEQ ID NO: 1190
agugaugaucauuguaaca

SEQ ID NO: 94509 - RNA, 19 nt, Artificial Sequence
  Description of Artificial Sequence: Synthetic oligonucleotide
  Antisense strand to SEQ ID NO: 94428
uguuacaaugaucaucacu

SEQ ID NO: 94510 - RNA, 19 nt, Artificial Sequence
  Description of Artificial Sequence: Synthetic oligonucleotide
  Sense strand starting at position 2201 of SEQ ID NO: 1190
cagugaugaucauuguaac

SEQ ID NO: 94511 - RNA, 19 nt, Artificial Sequence
  Description of Artificial Sequence: Synthetic oligonucleotide
  Antisense strand to SEQ ID NO: 94430
guuacaaugaucaucacug

SEQ ID NO: 94512 - RNA, 19 nt, Artificial Sequence
  Description of Artificial Sequence: Synthetic oligonucleotide
  Sense strand starting at position 2199 of SEQ ID NO: 1190
uacagugaugaucauugua

SEQ ID NO: 94513 - RNA, 19 nt, Artificial Sequence
  Description of Artificial Sequence: Synthetic oligonucleotide
  Antisense strand to SEQ ID NO: 94432
uacaaugaucaucacugua

SEQ ID NO: 94514 - RNA, 19 nt, Artificial Sequence
  Description of Artificial Sequence: Synthetic oligonucleotide
  Sense strand starting at position 1510 of SEQ ID NO: 1190
caccuaguaugagcaagau

SEQ ID NO: 94515 - RNA, 19 nt, Artificial Sequence
  Description of Artificial Sequence: Synthetic oligonucleotide
  Antisense strand to SEQ ID NO: 94434
aucuugcucauacuaggug

SEQ ID NO: 94516 - RNA, 19 nt, Artificial Sequence
  Description of Artificial Sequence: Synthetic oligonucleotide
  Sense strand starting at position 1307 of SEQ ID NO: 1190
agagaucucuuguuacaga

SEQ ID NO: 94517 - RNA, 19 nt, Artificial Sequence
  Description of Artificial Sequence: Synthetic oligonucleotide
  Antisense strand to SEQ ID NO: 94436
ucuguaacaagagaucucu

SEQ ID NO: 94518 - RNA, 19 nt, Artificial Sequence
  Description of Artificial Sequence: Synthetic oligonucleotide
  Sense strand starting at position 1205 of SEQ ID NO: 1190
ucagaaaguuguucuaaua

SEQ ID NO: 94519 - RNA, 19 nt, Artificial Sequence
  Description of Artificial Sequence: Synthetic oligonucleotide
  Antisense strand to SEQ ID NO: 94438
uauuagaacaacuuucuga

SEQ ID NO: 94520 - RNA, 19 nt, Artificial Sequence
  Description of Artificial Sequence: Synthetic oligonucleotide
  Sense strand starting at position 1204 of SEQ ID NO: 1190
cucagaaaguuguucuaau

SEQ ID NO: 94521 - RNA, 19 nt, Artificial Sequence
  Description of Artificial Sequence: Synthetic oligonucleotide
  Antisense strand to SEQ ID NO: 94440
auuagaacaacuuucugag

SEQ ID NO: 94522 - RNA, 19 nt, Artificial Sequence
  Description of Artificial Sequence: Synthetic oligonucleotide
  Sense strand starting at position 1169 of SEQ ID NO: 1190
gugggaaauuauguaauag

SEQ ID NO: 94523 - RNA, 19 nt, Artificial Sequence
  Description of Artificial Sequence: Synthetic oligonucleotide
  Antisense strand to SEQ ID NO: 94442
cuauuacauaauuucccac

SEQ ID NO: 94524 - RNA, 19 nt, Artificial Sequence
  Description of Artificial Sequence: Synthetic oligonucleotide
  Sense strand starting at position 1083 of SEQ ID NO: 1190
ucugaaggucaaugagguu

SEQ ID NO: 94525 - RNA, 19 nt, Artificial Sequence
  Description of Artificial Sequence: Synthetic oligonucleotide
  Antisense strand to SEQ ID NO: 94444
aaccucauugaccuucaga

SEQ ID NO: 94526 - RNA, 19 nt, Artificial Sequence
  Description of Artificial Sequence: Synthetic oligonucleotide
  Sense strand starting at position 956 of SEQ ID NO: 1190
ggguacucucuugggagaa

SEQ ID NO: 94527 - RNA, 19 nt, Artificial Sequence
  Description of Artificial Sequence: Synthetic oligonucleotide
  Antisense strand to SEQ ID NO: 94446
uucucccaagagaguaccc

SEQ ID NO: 94528 - RNA, 19 nt, Artificial Sequence
  Description of Artificial Sequence: Synthetic oligonucleotide
  Sense strand starting at position 908 of SEQ ID NO: 1190
guaugauccuuaucaccau

SEQ ID NO: 94529 - RNA, 19 nt, Artificial Sequence
  Description of Artificial Sequence: Synthetic oligonucleotide
  Antisense strand to SEQ ID NO: 94448
auggugauaaggaucauac

SEQ ID NO: 94530 - RNA, 19 nt, Artificial Sequence
  Description of Artificial Sequence: Synthetic oligonucleotide
  Sense strand starting at position 902 of SEQ ID NO: 1190
ccacauguaugauccuuau

SEQ ID NO: 94531 - RNA, 19 nt, Artificial Sequence
  Description of Artificial Sequence: Synthetic oligonucleotide
  Antisense strand to SEQ ID NO: 94450
auaaggaucauacaugugg

SEQ ID NO: 94532 - RNA, 19 nt, Artificial Sequence
  Description of Artificial Sequence: Synthetic oligonucleotide
  Sense strand starting at position 893 of SEQ ID NO: 1190
aucuauaugccacauguau

SEQ ID NO: 94533 - RNA, 19 nt, Artificial Sequence
  Description of Artificial Sequence: Synthetic oligonucleotide
  Antisense strand to SEQ ID NO: 94452
auacauguggcauauagau

SEQ ID NO: 94534 - RNA, 19 nt, Artificial Sequence
  Description of Artificial Sequence: Synthetic oligonucleotide
  Sense strand starting at position 883 of SEQ ID NO: 1190
aggaaauguuaucuauaug

SEQ ID NO: 94535 - RNA, 19 nt, Artificial Sequence
  Description of Artificial Sequence: Synthetic oligonucleotide
  Antisense strand to SEQ ID NO: 94454
cauauagauaacauuuccu

SEQ ID NO: 94536 - RNA, 19 nt, Artificial Sequence
  Description of Artificial Sequence: Synthetic oligonucleotide
  Sense strand starting at position 882 of SEQ ID NO: 1190
gaggaaauguuaucuauau

SEQ ID NO: 94537 - RNA, 19 nt, Artificial Sequence
  Description of Artificial Sequence: Synthetic oligonucleotide
  Antisense strand to SEQ ID NO: 94456
auauagauaacauuuccuc

SEQ ID NO: 94538 - RNA, 19 nt, Artificial Sequence
  Description of Artificial Sequence: Synthetic oligonucleotide
  Sense strand starting at position 286 of SEQ ID NO: 1190
ucucuaguacuuuaguaag

SEQ ID NO: 94539 - RNA, 19 nt, Artificial Sequence
  Description of Artificial Sequence: Synthetic oligonucleotide
  Antisense strand to SEQ ID NO: 94458
cuuacuaaaguacuagaga

SEQ ID NO: 94540 - RNA, 19 nt, Artificial Sequence
  Description of Artificial Sequence: Synthetic oligonucleotide
  Sense strand starting at position 217 of SEQ ID NO: 1190
gaauuagacugggaggaau

SEQ ID NO: 94541 - RNA, 19 nt, Artificial Sequence
  Description of Artificial Sequence: Synthetic oligonucleotide
  Antisense strand to SEQ ID NO: 94460
auuccucccagucuaauuc

SEQ ID NO: 94542 - RNA, 19 nt, Artificial Sequence
  Description of Artificial Sequence: Synthetic oligonucleotide
  Sense strand starting at position 82 of SEQ ID NO: 1190
ggcaaauaccuaugcuaaa

SEQ ID NO: 94543 - RNA, 19 nt, Artificial Sequence
  Description of Artificial Sequence: Synthetic oligonucleotide
  Antisense strand to SEQ ID NO: 94462
uuuagcauagguauuugcc

SEQ ID NO: 94544 - RNA, 19 nt, Artificial Sequence
  Description of Artificial Sequence: Synthetic oligonucleotide
  Sense strand starting at position 3928 of SEQ ID NO: 1191
gggagauauuacuucucca

SEQ ID NO: 94545 - RNA, 19 nt, Artificial Sequence
  Description of Artificial Sequence: Synthetic oligonucleotide
  Antisense strand to SEQ ID NO: 94464
uggagaaguaauaucuccc

SEQ ID NO: 94546 - RNA, 19 nt, Artificial Sequence
  Description of Artificial Sequence: Synthetic oligonucleotide
  Sense strand starting at position 3902 of SEQ ID NO: 1191
guguaaugauuaccacuuu

SEQ ID NO: 94547 - RNA, 19 nt, Artificial Sequence
  Description of Artificial Sequence: Synthetic oligonucleotide
  Antisense strand to SEQ ID NO: 94466
aaagugguaaucauuacac

SEQ ID NO: 94548 - RNA, 19 nt, Artificial Sequence
  Description of Artificial Sequence: Synthetic oligonucleotide
  Sense strand starting at position 3900 of SEQ ID NO: 1191
ugguguaaugauuaccacu

SEQ ID NO: 94549 - RNA, 19 nt, Artificial Sequence
  Description of Artificial Sequence: Synthetic oligonucleotide
  Antisense strand to SEQ ID NO: 94468
agugguaaucauuacacca

SEQ ID NO: 94550 - RNA, 19 nt, Artificial Sequence
  Description of Artificial Sequence: Synthetic oligonucleotide
  Sense strand starting at position 3893 of SEQ ID NO: 1191
uuggcuaugguguaaugau

SEQ ID NO: 94551 - RNA, 19 nt, Artificial Sequence
  Description of Artificial Sequence: Synthetic oligonucleotide
  Antisense strand to SEQ ID NO: 94470
aucauuacaccauagccaa

SEQ ID NO: 94552 - RNA, 19 nt, Artificial Sequence
  Description of Artificial Sequence: Synthetic oligonucleotide
  Sense strand starting at position 3766 of SEQ ID NO: 1191
caggguauucuugggaaag

SEQ ID NO: 94553 - RNA, 19 nt, Artificial Sequence
  Description of Artificial Sequence: Synthetic oligonucleotide
  Antisense strand to SEQ ID NO: 94472
cuuucccaagaauacccug

SEQ ID NO: 94554 - RNA, 19 nt, Artificial Sequence
  Description of Artificial Sequence: Synthetic oligonucleotide
  Sense strand starting at position 3673 of SEQ ID NO: 1191
gacgguucccaguacugau

SEQ ID NO: 94555 - RNA, 19 nt, Artificial Sequence
  Description of Artificial Sequence: Synthetic oligonucleotide
  Antisense strand to SEQ ID NO: 94474
aucaguacugggaaccguc

SEQ ID NO: 94556 - RNA, 19 nt, Artificial Sequence
  Description of Artificial Sequence: Synthetic oligonucleotide
  Sense strand starting at position 3602 of SEQ ID NO: 1191
gauugcuguggguauaaga

SEQ ID NO: 94557 - RNA, 19 nt, Artificial Sequence
  Description of Artificial Sequence: Synthetic oligonucleotide
  Antisense strand to SEQ ID NO: 94476
ucuuauacccacagcaauc

SEQ ID NO: 94558 - RNA, 19 nt, Artificial Sequence
  Description of Artificial Sequence: Synthetic oligonucleotide
  Sense strand starting at position 3558 of SEQ ID NO: 1191
ugaggcaguguggagaauu

SEQ ID NO: 94559 - RNA, 19 nt, Artificial Sequence
  Description of Artificial Sequence: Synthetic oligonucleotide
  Antisense strand to SEQ ID NO: 94478
aauucuccacacugccuca

SEQ ID NO: 94560 - RNA, 19 nt, Artificial Sequence
  Description of Artificial Sequence: Synthetic oligonucleotide
  Sense strand starting at position 3403 of SEQ ID NO: 1191
gacuguggccaucagaaac

SEQ ID NO: 94561 - RNA, 19 nt, Artificial Sequence
  Description of Artificial Sequence: Synthetic oligonucleotide
  Antisense strand to SEQ ID NO: 94480
guuucugauggccacaguc

SEQ ID NO: 94562 - RNA, 19 nt, Artificial Sequence
  Description of Artificial Sequence: Synthetic oligonucleotide
  Sense strand starting at position 3396 of SEQ ID NO: 1191
cugauuagacuguggccau

SEQ ID NO: 94563 - RNA, 19 nt, Artificial Sequence
  Description of Artificial Sequence: Synthetic oligonucleotide
  Antisense strand to SEQ ID NO: 94482
auggccacagucuaaucag

SEQ ID NO: 94564 - RNA, 19 nt, Artificial Sequence
  Description of Artificial Sequence: Synthetic oligonucleotide
  Sense strand starting at position 3314 of SEQ ID NO: 1191
uguucugcccaguuauguu

SEQ ID NO: 94565 - RNA, 19 nt, Artificial Sequence
  Description of Artificial Sequence: Synthetic oligonucleotide
  Antisense strand to SEQ ID NO: 94484
aacauaacugggcagaaca

SEQ ID NO: 94566 - RNA, 19 nt, Artificial Sequence
  Description of Artificial Sequence: Synthetic oligonucleotide
  Sense strand starting at position 3313 of SEQ ID NO: 1191
uuguucugcccaguuaugu

SEQ ID NO: 94567 - RNA, 19 nt, Artificial Sequence
  Description of Artificial Sequence: Synthetic oligonucleotide
  Antisense strand to SEQ ID NO: 94486
acauaacugggcagaacaa

SEQ ID NO: 94568 - RNA, 19 nt, Artificial Sequence
  Description of Artificial Sequence: Synthetic oligonucleotide
  Sense strand starting at position 3273 of SEQ ID NO: 1191
ggaagucaauugguauugu

SEQ ID NO: 94569 - RNA, 19 nt, Artificial Sequence
  Description of Artificial Sequence: Synthetic oligonucleotide
  Antisense strand to SEQ ID NO: 94488
acaauaccaauugacuucc

SEQ ID NO: 94570 - RNA, 19 nt, Artificial Sequence
  Description of Artificial Sequence: Synthetic oligonucleotide
  Sense strand starting at position 3271 of SEQ ID NO: 1191
ccggaagucaauugguauu

SEQ ID NO: 94571 - RNA, 19 nt, Artificial Sequence
  Description of Artificial Sequence: Synthetic oligonucleotide
  Antisense strand to SEQ ID NO: 94490
aauaccaauugacuuccgg

SEQ ID NO: 94572 - RNA, 19 nt, Artificial Sequence
  Description of Artificial Sequence: Synthetic oligonucleotide
  Sense strand starting at position 3173 of SEQ ID NO: 1191
auucuucuccuaggagaau

SEQ ID NO: 94573 - RNA, 19 nt, Artificial Sequence
  Description of Artificial Sequence: Synthetic oligonucleotide
  Antisense strand to SEQ ID NO: 94492
auucuccuaggagaagaau

SEQ ID NO: 94574 - RNA, 19 nt, Artificial Sequence
  Description of Artificial Sequence: Synthetic oligonucleotide
  Sense strand starting at position 3038 of SEQ ID NO: 1191
aguuauguuaaguguagaa

SEQ ID NO: 94575 - RNA, 19 nt, Artificial Sequence
  Description of Artificial Sequence: Synthetic oligonucleotide
  Antisense strand to SEQ ID NO: 94494
uucuacacuuaacauaacu

SEQ ID NO: 94576 - RNA, 19 nt, Artificial Sequence
  Description of Artificial Sequence: Synthetic oligonucleotide
  Sense strand starting at position 3028 of SEQ ID NO: 1191
aagggagaauaguuauguu

SEQ ID NO: 94577 - RNA, 19 nt, Artificial Sequence
  Description of Artificial Sequence: Synthetic oligonucleotide
  Antisense strand to SEQ ID NO: 94496
aacauaacuauucucccuu

SEQ ID NO: 94578 - RNA, 19 nt, Artificial Sequence
  Description of Artificial Sequence: Synthetic oligonucleotide
  Sense strand starting at position 3019 of SEQ ID NO: 1191
aggcaugugaagggagaau

SEQ ID NO: 94579 - RNA, 19 nt, Artificial Sequence
  Description of Artificial Sequence: Synthetic oligonucleotide
  Antisense strand to SEQ ID NO: 94498
auucucccuucacaugccu

SEQ ID NO: 94580 - RNA, 19 nt, Artificial Sequence
  Description of Artificial Sequence: Synthetic oligonucleotide
  Sense strand starting at position 2976 of SEQ ID NO: 1191
aguuaccuugucuaucaaa

SEQ ID NO: 94581 - RNA, 19 nt, Artificial Sequence
  Description of Artificial Sequence: Synthetic oligonucleotide
  Antisense strand to SEQ ID NO: 94500
uuugauagacaagguaacu

SEQ ID NO: 94582 - RNA, 19 nt, Artificial Sequence
  Description of Artificial Sequence: Synthetic oligonucleotide
  Sense strand starting at position 2943 of SEQ ID NO: 1191
uugacuguggaaugaucaa

SEQ ID NO: 94583 - RNA, 19 nt, Artificial Sequence
  Description of Artificial Sequence: Synthetic oligonucleotide
  Antisense strand to SEQ ID NO: 94502
uugaucauuccacagucaa

SEQ ID NO: 94584 - RNA, 19 nt, Artificial Sequence
  Description of Artificial Sequence: Synthetic oligonucleotide
  Sense strand starting at position 2938 of SEQ ID NO: 1191
acuuauugacuguggaaug

SEQ ID NO: 94585 - RNA, 19 nt, Artificial Sequence
  Description of Artificial Sequence: Synthetic oligonucleotide
  Antisense strand to SEQ ID NO: 94504
cauuccacagucaauaagu

SEQ ID NO: 94586 - RNA, 19 nt, Artificial Sequence
  Description of Artificial Sequence: Synthetic oligonucleotide
  Sense strand starting at position 2936 of SEQ ID NO: 1191
guacuuauugacuguggaa

SEQ ID NO: 94587 - RNA, 19 nt, Artificial Sequence
  Description of Artificial Sequence: Synthetic oligonucleotide
  Antisense strand to SEQ ID NO: 94506
uuccacagucaauaaguac

SEQ ID NO: 94588 - RNA, 19 nt, Artificial Sequence
  Description of Artificial Sequence: Synthetic oligonucleotide
  Sense strand starting at position 2804 of SEQ ID NO: 1191
gcagucauugaaugggaua

SEQ ID NO: 94589 - RNA, 19 nt, Artificial Sequence
  Description of Artificial Sequence: Synthetic oligonucleotide
  Antisense strand to SEQ ID NO: 94508
uaucccauucaaugacugc

SEQ ID NO: 94590 - RNA, 19 nt, Artificial Sequence
  Description of Artificial Sequence: Synthetic oligonucleotide
  Sense strand starting at position 2664 of SEQ ID NO: 1191
acagucugagaaggguaau

SEQ ID NO: 94591 - RNA, 19 nt, Artificial Sequence
  Description of Artificial Sequence: Synthetic oligonucleotide
  Antisense strand to SEQ ID NO: 94510
auuacccuucucagacugu

SEQ ID NO: 94592 - RNA, 19 nt, Artificial Sequence
  Description of Artificial Sequence: Synthetic oligonucleotide
  Sense strand starting at position 2618 of SEQ ID NO: 1191
gugggaagcuacuuugauu

SEQ ID NO: 94593 - RNA, 19 nt, Artificial Sequence
  Description of Artificial Sequence: Synthetic oligonucleotide
  Antisense strand to SEQ ID NO: 94512
aaucaaaguagcuucccac

SEQ ID NO: 94594 - RNA, 19 nt, Artificial Sequence
  Description of Artificial Sequence: Synthetic oligonucleotide
  Sense strand starting at position 2607 of SEQ ID NO: 1191
acuaaugugacgugggaag

SEQ ID NO: 94595 - RNA, 19 nt, Artificial Sequence
  Description of Artificial Sequence: Synthetic oligonucleotide
  Antisense strand to SEQ ID NO: 94514
cuucccacgucacauuagu

SEQ ID NO: 94596 - RNA, 19 nt, Artificial Sequence
  Description of Artificial Sequence: Synthetic oligonucleotide
  Sense strand starting at position 2593 of SEQ ID NO: 1191
uagacagugcuguaacuaa

SEQ ID NO: 94597 - RNA, 19 nt, Artificial Sequence
  Description of Artificial Sequence: Synthetic oligonucleotide
  Antisense strand to SEQ ID NO: 94516
uuaguuacagcacugucua

SEQ ID NO: 94598 - RNA, 19 nt, Artificial Sequence
  Description of Artificial Sequence: Synthetic oligonucleotide
  Sense strand starting at position 2392 of SEQ ID NO: 1191
gcuuuauccaaggaguagg

SEQ ID NO: 94599 - RNA, 19 nt, Artificial Sequence
  Description of Artificial Sequence: Synthetic oligonucleotide
  Antisense strand to SEQ ID NO: 94518
ccuacuccuuggauaaagc

SEQ ID NO: 94600 - RNA, 19 nt, Artificial Sequence
  Description of Artificial Sequence: Synthetic oligonucleotide
  Sense strand starting at position 2391 of SEQ ID NO: 1191
ugcuuuauccaaggaguag

SEQ ID NO: 94601 - RNA, 19 nt, Artificial Sequence
  Description of Artificial Sequence: Synthetic oligonucleotide
  Antisense strand to SEQ ID NO: 94520
cuacuccuuggauaaagca

SEQ ID NO: 94602 - RNA, 19 nt, Artificial Sequence
  Description of Artificial Sequence: Synthetic oligonucleotide
  Sense strand starting at position 2379 of SEQ ID NO: 1191
ugaagaucucagugcuuua

SEQ ID NO: 94603 - RNA, 19 nt, Artificial Sequence
  Description of Artificial Sequence: Synthetic oligonucleotide
  Antisense strand to SEQ ID NO: 94522
uaaagcacugagaucuuca

SEQ ID NO: 94604 - RNA, 19 nt, Artificial Sequence
  Description of Artificial Sequence: Synthetic oligonucleotide
  Sense strand starting at position 2270 of SEQ ID NO: 1191
ggcagacauuguuuccaaa

SEQ ID NO: 94605 - RNA, 19 nt, Artificial Sequence
  Description of Artificial Sequence: Synthetic oligonucleotide
  Antisense strand to SEQ ID NO: 94524
uuuggaaacaaugucugcc

SEQ ID NO: 94606 - RNA, 19 nt, Artificial Sequence
  Description of Artificial Sequence: Synthetic oligonucleotide
  Sense strand starting at position 2048 of SEQ ID NO: 1191
agagcucucccugacucau

SEQ ID NO: 94607 - RNA, 19 nt, Artificial Sequence
  Description of Artificial Sequence: Synthetic oligonucleotide
  Antisense strand to SEQ ID NO: 94526
augagucagggagagcucu

SEQ ID NO: 94608 - RNA, 19 nt, Artificial Sequence
  Description of Artificial Sequence: Synthetic oligonucleotide
  Sense strand starting at position 2029 of SEQ ID NO: 1191
aucuccugagguuauauau

SEQ ID NO: 94609 - RNA, 19 nt, Artificial Sequence
  Description of Artificial Sequence: Synthetic oligonucleotide
  Antisense strand to SEQ ID NO: 94528
auauauaaccucaggagau

SEQ ID NO: 94610 - RNA, 19 nt, Artificial Sequence
  Description of Artificial Sequence: Synthetic oligonucleotide
  Sense strand starting at position 2024 of SEQ ID NO: 1191
cacugaucuccugagguua

SEQ ID NO: 94611 - RNA, 19 nt, Artificial Sequence
  Description of Artificial Sequence: Synthetic oligonucleotide
  Antisense strand to SEQ ID NO: 94530
uaaccucaggagaucagug

SEQ ID NO: 94612 - RNA, 19 nt, Artificial Sequence
  Description of Artificial Sequence: Synthetic oligonucleotide
  Sense strand starting at position 1474 of SEQ ID NO: 1191
cuuugacuaguaggaaguu

SEQ ID NO: 94613 - RNA, 19 nt, Artificial Sequence
  Description of Artificial Sequence: Synthetic oligonucleotide
  Antisense strand to SEQ ID NO: 94532
aacuuccuacuagucaaag

SEQ ID NO: 94614 - RNA, 19 nt, Artificial Sequence
  Description of Artificial Sequence: Synthetic oligonucleotide
  Sense strand starting at position 1323 of SEQ ID NO: 1191
aagggcuagucacuagaaa

SEQ ID NO: 94615 - RNA, 19 nt, Artificial Sequence
  Description of Artificial Sequence: Synthetic oligonucleotide
  Antisense strand to SEQ ID NO: 94534
uuucuagugacuagcccuu

SEQ ID NO: 94616 - RNA, 19 nt, Artificial Sequence
  Description of Artificial Sequence: Synthetic oligonucleotide
  Sense strand starting at position 1215 of SEQ ID NO: 1191
gagagagguuugucggacu

SEQ ID NO: 94617 - RNA, 19 nt, Artificial Sequence
  Description of Artificial Sequence: Synthetic oligonucleotide
  Antisense strand to SEQ ID NO: 94536
aguccgacaaaccucucuc

SEQ ID NO: 94618 - RNA, 19 nt, Artificial Sequence
  Description of Artificial Sequence: Synthetic oligonucleotide
  Sense strand starting at position 1137 of SEQ ID NO: 1191
ugauucucugagugcaaau

SEQ ID NO: 94619 - RNA, 19 nt, Artificial Sequence
  Description of Artificial Sequence: Synthetic oligonucleotide
  Antisense strand to SEQ ID NO: 94538
auuugcacucagagaauca

SEQ ID NO: 94620 - RNA, 19 nt, Artificial Sequence
  Description of Artificial Sequence: Synthetic oligonucleotide
  Sense strand starting at position 1136 of SEQ ID NO: 1191
cugauucucugagugcaaa

SEQ ID NO: 94621 - RNA, 19 nt, Artificial Sequence
  Description of Artificial Sequence: Synthetic oligonucleotide
  Antisense strand to SEQ ID NO: 94540
uuugcacucagagaaucag

SEQ ID NO: 94622 - RNA, 19 nt, Artificial Sequence
  Description of Artificial Sequence: Synthetic oligonucleotide
  Sense strand starting at position 1022 of SEQ ID NO: 1191
gaccacuguugugugauuu

SEQ ID NO: 94623 - RNA, 19 nt, Artificial Sequence
  Description of Artificial Sequence: Synthetic oligonucleotide
  Antisense strand to SEQ ID NO: 94542
aaaucacacaacagugguc

SEQ ID NO: 94624 - RNA, 19 nt, Artificial Sequence
  Description of Artificial Sequence: Synthetic oligonucleotide
  Sense strand starting at position 99 of SEQ ID NO: 1192
agugacaaucaauguaagu

SEQ ID NO: 94625 - RNA, 19 nt, Artificial Sequence
  Description of Artificial Sequence: Synthetic oligonucleotide
  Antisense strand to SEQ ID NO: 94544
acuuacauugauugucacu

SEQ ID NO: 94626 - RNA, 19 nt, Artificial Sequence
  Description of Artificial Sequence: Synthetic oligonucleotide
  Sense strand starting at position 110 of SEQ ID NO: 1192
auguaaguguuguccaaau

SEQ ID NO: 94627 - RNA, 19 nt, Artificial Sequence
  Description of Artificial Sequence: Synthetic oligonucleotide
  Antisense strand to SEQ ID NO: 94546
auuuggacaacacuuacau

SEQ ID NO: 94628 - RNA, 19 nt, Artificial Sequence
  Description of Artificial Sequence: Synthetic oligonucleotide
  Sense strand starting at position 112 of SEQ ID NO: 1192
guaaguguuguccaaauag

SEQ ID NO: 94629 - RNA, 19 nt, Artificial Sequence
  Description of Artificial Sequence: Synthetic oligonucleotide
  Antisense strand to SEQ ID NO: 94548
cuauuuggacaacacuuac

SEQ ID NO: 94630 - RNA, 19 nt, Artificial Sequence
  Description of Artificial Sequence: Synthetic oligonucleotide
  Sense strand starting at position 128 of SEQ ID NO: 1192
uaguuagacguccagaucu

SEQ ID NO: 94631 - RNA, 19 nt, Artificial Sequence
  Description of Artificial Sequence: Synthetic oligonucleotide
  Antisense strand to SEQ ID NO: 94550
agaucuggacgucuaacua

SEQ ID NO: 94632 - RNA, 19 nt, Artificial Sequence
  Description of Artificial Sequence: Synthetic oligonucleotide
  Sense strand starting at position 193 of SEQ ID NO: 1192
ucuggaagcuuaucucaag

SEQ ID NO: 94633 - RNA, 19 nt, Artificial Sequence
  Description of Artificial Sequence: Synthetic oligonucleotide
  Antisense strand to SEQ ID NO: 94552
cuugagauaagcuuccaga

SEQ ID NO: 94634 - RNA, 19 nt, Artificial Sequence
  Description of Artificial Sequence: Synthetic oligonucleotide
  Sense strand starting at position 194 of SEQ ID NO: 1192
cuggaagcuuaucucaagu

SEQ ID NO: 94635 - RNA, 19 nt, Artificial Sequence
  Description of Artificial Sequence: Synthetic oligonucleotide
  Antisense strand to SEQ ID NO: 94554
acuugagauaagcuuccag

SEQ ID NO: 94636 - RNA, 19 nt, Artificial Sequence
  Description of Artificial Sequence: Synthetic oligonucleotide
  Sense strand starting at position 258 of SEQ ID NO: 1192
aguccaguuuguuuagaca

SEQ ID NO: 94637 - RNA, 19 nt, Artificial Sequence
  Description of Artificial Sequence: Synthetic oligonucleotide
  Antisense strand to SEQ ID NO: 94556
ugucuaaacaaacuggacu

SEQ ID NO: 94638 - RNA, 19 nt, Artificial Sequence
  Description of Artificial Sequence: Synthetic oligonucleotide
  Sense strand starting at position 305 of SEQ ID NO: 1192
uguuucuaaccguaucacu

SEQ ID NO: 94639 - RNA, 19 nt, Artificial Sequence
  Description of Artificial Sequence: Synthetic oligonucleotide
  Antisense strand to SEQ ID NO: 94558
agugauacgguuagaaaca

SEQ ID NO: 94640 - RNA, 19 nt, Artificial Sequence
  Description of Artificial Sequence: Synthetic oligonucleotide
  Sense strand starting at position 399 of SEQ ID NO: 1192
aggguuagcaacuguugau

SEQ ID NO: 94641 - RNA, 19 nt, Artificial Sequence
  Description of Artificial Sequence: Synthetic oligonucleotide
  Antisense strand to SEQ ID NO: 94560
aucaacaguugcuaacccu

SEQ ID NO: 94642 - RNA, 19 nt, Artificial Sequence
  Description of Artificial Sequence: Synthetic oligonucleotide
  Sense strand starting at position 406 of SEQ ID NO: 1192
gcaacuguugauggaucaa

SEQ ID NO: 94643 - RNA, 19 nt, Artificial Sequence
  Description of Artificial Sequence: Synthetic oligonucleotide
  Antisense strand to SEQ ID NO: 94562
uugauccaucaacaguugc

SEQ ID NO: 94644 - RNA, 19 nt, Artificial Sequence
  Description of Artificial Sequence: Synthetic oligonucleotide
  Sense strand starting at position 507 of SEQ ID NO: 1192
ggagauugauugucugucu

SEQ ID NO: 94645 - RNA, 19 nt, Artificial Sequence
  Description of Artificial Sequence: Synthetic oligonucleotide
  Antisense strand to SEQ ID NO: 94564
agacagacaaucaaucucc

SEQ ID NO: 94646 - RNA, 19 nt, Artificial Sequence
  Description of Artificial Sequence: Synthetic oligonucleotide
  Sense strand starting at position 515 of SEQ ID NO: 1192
auugucugucuguaauuga

SEQ ID NO: 94647 - RNA, 19 nt, Artificial Sequence
  Description of Artificial Sequence: Synthetic oligonucleotide
  Antisense strand to SEQ ID NO: 94566
ucaauuacagacagacaau

SEQ ID NO: 94648 - RNA, 19 nt, Artificial Sequence
  Description of Artificial Sequence: Synthetic oligonucleotide
  Sense strand starting at position 559 of SEQ ID NO: 1192
cuaaguuggaaccgugaga

SEQ ID NO: 94649 - RNA, 19 nt, Artificial Sequence
  Description of Artificial Sequence: Synthetic oligonucleotide
  Antisense strand to SEQ ID NO: 94568
ucucacgguuccaacuuag

SEQ ID NO: 94650 - RNA, 19 nt, Artificial Sequence
  Description of Artificial Sequence: Synthetic oligonucleotide
  Sense strand starting at position 611 of SEQ ID NO: 1192
agguaaugcuacuuucgga

SEQ ID NO: 94651 - RNA, 19 nt, Artificial Sequence
  Description of Artificial Sequence: Synthetic oligonucleotide
  Antisense strand to SEQ ID NO: 94570
uccgaaaguagcauuaccu

SEQ ID NO: 94652 - RNA, 19 nt, Artificial Sequence
  Description of Artificial Sequence: Synthetic oligonucleotide
  Sense strand starting at position 677 of SEQ ID NO: 1192
ggaaacauuucguggaaau

SEQ ID NO: 94653 - RNA, 19 nt, Artificial Sequence
  Description of Artificial Sequence: Synthetic oligonucleotide
  Antisense strand to SEQ ID NO: 94572
auuuccacgaaauguuucc

SEQ ID NO: 94654 - RNA, 19 nt, Artificial Sequence
  Description of Artificial Sequence: Synthetic oligonucleotide
  Sense strand starting at position 687 of SEQ ID NO: 1192
cguggaaauuacucaguuu

SEQ ID NO: 94655 - RNA, 19 nt, Artificial Sequence
  Description of Artificial Sequence: Synthetic oligonucleotide
  Antisense strand to SEQ ID NO: 94574
aaacugaguaauuuccacg

SEQ ID NO: 94656 - RNA, 19 nt, Artificial Sequence
  Description of Artificial Sequence: Synthetic oligonucleotide
  Sense strand starting at position 1202 of SEQ ID NO: 1192
guaacucugcuacagaaca

SEQ ID NO: 94657 - RNA, 19 nt, Artificial Sequence
  Description of Artificial Sequence: Synthetic oligonucleotide
  Antisense strand to SEQ ID NO: 94576
uguucuguagcagaguuac

SEQ ID NO: 94658 - RNA, 19 nt, Artificial Sequence
  Description of Artificial Sequence: Synthetic oligonucleotide
  Sense strand starting at position 1288 of SEQ ID NO: 1192
uuacuaguucccgaaucuc

SEQ ID NO: 94659 - RNA, 19 nt, Artificial Sequence
  Description of Artificial Sequence: Synthetic oligonucleotide
  Antisense strand to SEQ ID NO: 94578
gagauucgggaacuaguaa

SEQ ID NO: 94660 - RNA, 19 nt, Artificial Sequence
  Description of Artificial Sequence: Synthetic oligonucleotide
  Sense strand starting at position 1348 of SEQ ID NO: 1192
agcacaguaccagauguaa

SEQ ID NO: 94661 - RNA, 19 nt, Artificial Sequence
  Description of Artificial Sequence: Synthetic oligonucleotide
  Antisense strand to SEQ ID NO: 94580
uuacaucugguacugugcu

SEQ ID NO: 94662 - RNA, 19 nt, Artificial Sequence
  Description of Artificial Sequence: Synthetic oligonucleotide
  Sense strand starting at position 1381 of SEQ ID NO: 1192
auguuauaucccuaggcuu

SEQ ID NO: 94663 - RNA, 19 nt, Artificial Sequence
  Description of Artificial Sequence: Synthetic oligonucleotide
  Antisense strand to SEQ ID NO: 94582
aagccuagggauauaacau

SEQ ID NO: 94664 - RNA, 19 nt, Artificial Sequence
  Description of Artificial Sequence: Synthetic oligonucleotide
  Sense strand starting at position 1428 of SEQ ID NO: 1192
caucgauggcaaugagacu

SEQ ID NO: 94665 - RNA, 19 nt, Artificial Sequence
  Description of Artificial Sequence: Synthetic oligonucleotide
  Antisense strand to SEQ ID NO: 94584
agucucauugccaucgaug

SEQ ID NO: 94666 - RNA, 19 nt, Artificial Sequence
  Description of Artificial Sequence: Synthetic oligonucleotide
  Sense strand starting at position 1434 of SEQ ID NO: 1192
uggcaaugagacugaguuu

SEQ ID NO: 94667 - RNA, 19 nt, Artificial Sequence
  Description of Artificial Sequence: Synthetic oligonucleotide
  Antisense strand to SEQ ID NO: 94586
aaacucagucucauugcca

SEQ ID NO: 94668 - RNA, 19 nt, Artificial Sequence
  Description of Artificial Sequence: Synthetic oligonucleotide
  Sense strand starting at position 2270 of SEQ ID NO: 1192
cucggagcuccguauuaga

SEQ ID NO: 94669 - RNA, 19 nt, Artificial Sequence
  Description of Artificial Sequence: Synthetic oligonucleotide
  Antisense strand to SEQ ID NO: 94588
ucuaauacggagcuccgag

SEQ ID NO: 94670 - RNA, 19 nt, Artificial Sequence
  Description of Artificial Sequence: Synthetic oligonucleotide
  Sense strand starting at position 2504 of SEQ ID NO: 1192
gcaaauaguccuggauacu

SEQ ID NO: 94671 - RNA, 19 nt, Artificial Sequence
  Description of Artificial Sequence: Synthetic oligonucleotide
  Antisense strand to SEQ ID NO: 94590
aguauccaggacuauuugc

SEQ ID NO: 94672 - RNA, 19 nt, Artificial Sequence
  Description of Artificial Sequence: Synthetic oligonucleotide
  Sense strand starting at position 2606 of SEQ ID NO: 1192
aaggcauuguucucucuga

SEQ ID NO: 94673 - RNA, 19 nt, Artificial Sequence
  Description of Artificial Sequence: Synthetic oligonucleotide
  Antisense strand to SEQ ID NO: 94592
ucagagagaacaaugccuu

SEQ ID NO: 94674 - RNA, 19 nt, Artificial Sequence
  Description of Artificial Sequence: Synthetic oligonucleotide
  Sense strand starting at position 2607 of SEQ ID NO: 1192
aggcauuguucucucugaa

SEQ ID NO: 94675 - RNA, 19 nt, Artificial Sequence
  Description of Artificial Sequence: Synthetic oligonucleotide
  Antisense strand to SEQ ID NO: 94594
uucagagagaacaaugccu

SEQ ID NO: 94676 - RNA, 19 nt, Artificial Sequence
  Description of Artificial Sequence: Synthetic oligonucleotide
  Sense strand starting at position 2619 of SEQ ID NO: 1192
cucugaauucugcaaagca

SEQ ID NO: 94677 - RNA, 19 nt, Artificial Sequence
  Description of Artificial Sequence: Synthetic oligonucleotide
  Antisense strand to SEQ ID NO: 94596
ugcuuugcagaauucagag

SEQ ID NO: 94678 - RNA, 19 nt, Artificial Sequence
  Description of Artificial Sequence: Synthetic oligonucleotide
  Sense strand starting at position 2859 of SEQ ID NO: 1192
ggaaccucauccuugcaaa

SEQ ID NO: 94679 - RNA, 19 nt, Artificial Sequence
  Description of Artificial Sequence: Synthetic oligonucleotide
  Antisense strand to SEQ ID NO: 94598
uuugcaaggaugagguucc

SEQ ID NO: 94680 - RNA, 19 nt, Artificial Sequence
  Description of Artificial Sequence: Synthetic oligonucleotide
  Sense strand starting at position 2969 of SEQ ID NO: 1192
ggucuuauccuauagacca

SEQ ID NO: 94681 - RNA, 19 nt, Artificial Sequence
  Description of Artificial Sequence: Synthetic oligonucleotide
  Antisense strand to SEQ ID NO: 94600
uggucuauaggauaagacc

SEQ ID NO: 94682 - RNA, 19 nt, Artificial Sequence
  Description of Artificial Sequence: Synthetic oligonucleotide
  Sense strand starting at position 3144 of SEQ ID NO: 1192
gaaagaucauguguuuacu

SEQ ID NO: 94683 - RNA, 19 nt, Artificial Sequence
  Description of Artificial Sequence: Synthetic oligonucleotide
  Antisense strand to SEQ ID NO: 94602
aguaaacacaugaucuuuc

SEQ ID NO: 94684 - RNA, 19 nt, Artificial Sequence
  Description of Artificial Sequence: Synthetic oligonucleotide
  Sense strand starting at position 3169 of SEQ ID NO: 1192
agcagaagcuuugcauaug

SEQ ID NO: 94685 - RNA, 19 nt, Artificial Sequence
  Description of Artificial Sequence: Synthetic oligonucleotide
  Antisense strand to SEQ ID NO: 94604
cauaugcaaagcuucugcu

SEQ ID NO: 94686 - RNA, 19 nt, Artificial Sequence
  Description of Artificial Sequence: Synthetic oligonucleotide
  Sense strand starting at position 3172 of SEQ ID NO: 1192
agaagcuuugcauaugaua

SEQ ID NO: 94687 - RNA, 19 nt, Artificial Sequence
  Description of Artificial Sequence: Synthetic oligonucleotide
  Antisense strand to SEQ ID NO: 94606
uaucauaugcaaagcuucu

SEQ ID NO: 94688 - RNA, 19 nt, Artificial Sequence
  Description of Artificial Sequence: Synthetic oligonucleotide
  Sense strand starting at position 3200 of SEQ ID NO: 1192
gguggcaaacauggugaaa

SEQ ID NO: 94689 - RNA, 19 nt, Artificial Sequence
  Description of Artificial Sequence: Synthetic oligonucleotide
  Antisense strand to SEQ ID NO: 94608
uuucaccauguuugccacc

SEQ ID NO: 94690 - RNA, 19 nt, Artificial Sequence
  Description of Artificial Sequence: Synthetic oligonucleotide
  Sense strand starting at position 3446 of SEQ ID NO: 1192
caaacaucacggugcugaa

SEQ ID NO: 94691 - RNA, 19 nt, Artificial Sequence
  Description of Artificial Sequence: Synthetic oligonucleotide
  Antisense strand to SEQ ID NO: 94610
uucagcaccgugauguuug

SEQ ID NO: 94692 - RNA, 19 nt, Artificial Sequence
  Description of Artificial Sequence: Synthetic oligonucleotide
  Sense strand starting at position 3532 of SEQ ID NO: 1192
guaguauguugaguaagau

SEQ ID NO: 94693 - RNA, 19 nt, Artificial Sequence
  Description of Artificial Sequence: Synthetic oligonucleotide
  Antisense strand to SEQ ID NO: 94612
aucuuacucaacauacuac

SEQ ID NO: 94694 - RNA, 19 nt, Artificial Sequence
  Description of Artificial Sequence: Synthetic oligonucleotide
  Sense strand starting at position 3533 of SEQ ID NO: 1192
uaguauguugaguaagaug

SEQ ID NO: 94695 - RNA, 19 nt, Artificial Sequence
  Description of Artificial Sequence: Synthetic oligonucleotide
  Antisense strand to SEQ ID NO: 94614
caucuuacucaacauacua

SEQ ID NO: 94696 - RNA, 19 nt, Artificial Sequence
  Description of Artificial Sequence: Synthetic oligonucleotide
  Sense strand starting at position 3545 of SEQ ID NO: 1192
uaagauguugcaggcuaga

SEQ ID NO: 94697 - RNA, 19 nt, Artificial Sequence
  Description of Artificial Sequence: Synthetic oligonucleotide
  Antisense strand to SEQ ID NO: 94616
ucuagccugcaacaucuua

SEQ ID NO: 94698 - RNA, 19 nt, Artificial Sequence
  Description of Artificial Sequence: Synthetic oligonucleotide
  Sense strand starting at position 3662 of SEQ ID NO: 1192
uauguuguaccuugggaac

SEQ ID NO: 94699 - RNA, 19 nt, Artificial Sequence
  Description of Artificial Sequence: Synthetic oligonucleotide
  Antisense strand to SEQ ID NO: 94618
guucccaagguacaacaua

SEQ ID NO: 94700 - RNA, 19 nt, Artificial Sequence
  Description of Artificial Sequence: Synthetic oligonucleotide
  Sense strand starting at position 3680 of SEQ ID NO: 1192
cuuccugaacucgagguaa

SEQ ID NO: 94701 - RNA, 19 nt, Artificial Sequence
  Description of Artificial Sequence: Synthetic oligonucleotide
  Antisense strand to SEQ ID NO: 94620
uuaccucgaguucaggaag

SEQ ID NO: 94702 - RNA, 19 nt, Artificial Sequence
  Description of Artificial Sequence: Synthetic oligonucleotide
  Sense strand starting at position 3682 of SEQ ID NO: 1192
uccugaacucgagguaauu

SEQ ID NO: 94703 - RNA, 19 nt, Artificial Sequence
  Description of Artificial Sequence: Synthetic oligonucleotide
  Antisense strand to SEQ ID NO: 94622
aauuaccucgaguucagga

SEQ ID NO: 94704 - RNA, 19 nt, Artificial Sequence
  Description of Artificial Sequence: Synthetic oligonucleotide
  Sense strand starting at position 118 of SEQ ID NO: 1193
auuggucuuccugagauuc

SEQ ID NO: 94705 - RNA, 19 nt, Artificial Sequence
  Description of Artificial Sequence: Synthetic oligonucleotide
  Antisense strand to SEQ ID NO: 94624
gaaucucaggaagaccaau

SEQ ID NO: 94706 - RNA, 19 nt, Artificial Sequence
  Description of Artificial Sequence: Synthetic oligonucleotide
  Sense strand starting at position 287 of SEQ ID NO: 1193
cuguauauccagcauacca

SEQ ID NO: 94707 - RNA, 19 nt, Artificial Sequence
  Description of Artificial Sequence: Synthetic oligonucleotide
  Antisense strand to SEQ ID NO: 94626
ugguaugcuggauauacag

SEQ ID NO: 94708 - RNA, 19 nt, Artificial Sequence
  Description of Artificial Sequence: Synthetic oligonucleotide
  Sense strand starting at position 339 of SEQ ID NO: 1193
auacaugauuccuucgaua

SEQ ID NO: 94709 - RNA, 19 nt, Artificial Sequence
  Description of Artificial Sequence: Synthetic oligonucleotide
  Antisense strand to SEQ ID NO: 94628
uaucgaaggaaucauguau

SEQ ID NO: 94710 - RNA, 19 nt, Artificial Sequence
  Description of Artificial Sequence: Synthetic oligonucleotide
  Sense strand starting at position 341 of SEQ ID NO: 1193
acaugauuccuucgauaua

SEQ ID NO: 94711 - RNA, 19 nt, Artificial Sequence
  Description of Artificial Sequence: Synthetic oligonucleotide
  Antisense strand to SEQ ID NO: 94630
uauaucgaaggaaucaugu

SEQ ID NO: 94712 - RNA, 19 nt, Artificial Sequence
  Description of Artificial Sequence: Synthetic oligonucleotide
  Sense strand starting at position 344 of SEQ ID NO: 1193
ugauuccuucgauauacca

SEQ ID NO: 94713 - RNA, 19 nt, Artificial Sequence
  Description of Artificial Sequence: Synthetic oligonucleotide
  Antisense strand to SEQ ID NO: 94632
ugguauaucgaaggaauca

SEQ ID NO: 94714 - RNA, 19 nt, Artificial Sequence
  Description of Artificial Sequence: Synthetic oligonucleotide
  Sense strand starting at position 392 of SEQ ID NO: 1193
gcugaaguauaauuacaua

SEQ ID NO: 94715 - RNA, 19 nt, Artificial Sequence
  Description of Artificial Sequence: Synthetic oligonucleotide
  Antisense strand to SEQ ID NO: 94634
uauguaauuauacuucagc

SEQ ID NO: 94716 - RNA, 19 nt, Artificial Sequence
  Description of Artificial Sequence: Synthetic oligonucleotide
  Sense strand starting at position 411 of SEQ ID NO: 1193
gcagauguaggauggaaua

SEQ ID NO: 94717 - RNA, 19 nt, Artificial Sequence
  Description of Artificial Sequence: Synthetic oligonucleotide
  Antisense strand to SEQ ID NO: 94636
uauuccauccuacaucugc

SEQ ID NO: 94718 - RNA, 19 nt, Artificial Sequence
  Description of Artificial Sequence: Synthetic oligonucleotide
  Sense strand starting at position 925 of SEQ ID NO: 1193
aagugacaugaccgaaaca

SEQ ID NO: 94719 - RNA, 19 nt, Artificial Sequence
  Description of Artificial Sequence: Synthetic oligonucleotide
  Antisense strand to SEQ ID NO: 94638
uguuucggucaugucacuu

SEQ ID NO: 94720 - RNA, 19 nt, Artificial Sequence
  Description of Artificial Sequence: Synthetic oligonucleotide
  Sense strand starting at position 1011 of SEQ ID NO: 1193
accgaugcauuccuuuaaa

SEQ ID NO: 94721 - RNA, 19 nt, Artificial Sequence
  Description of Artificial Sequence: Synthetic oligonucleotide
  Antisense strand to SEQ ID NO: 94640
uuuaaaggaaugcaucggu

SEQ ID NO: 94722 - RNA, 19 nt, Artificial Sequence
  Description of Artificial Sequence: Synthetic oligonucleotide
  Sense strand starting at position 1044 of SEQ ID NO: 1193
agcgaagaguuacccucaa

SEQ ID NO: 94723 - RNA, 19 nt, Artificial Sequence
  Description of Artificial Sequence: Synthetic oligonucleotide
  Antisense strand to SEQ ID NO: 94642
uugaggguaacucuucgcu

SEQ ID NO: 94724 - RNA, 19 nt, Artificial Sequence
  Description of Artificial Sequence: Synthetic oligonucleotide
  Sense strand starting at position 1257 of SEQ ID NO: 1193
gaaugagauuuccgaccag

SEQ ID NO: 94725 - RNA, 19 nt, Artificial Sequence
  Description of Artificial Sequence: Synthetic oligonucleotide
  Antisense strand to SEQ ID NO: 94644
cuggucggaaaucucauuc

SEQ ID NO: 94726 - RNA, 19 nt, Artificial Sequence
  Description of Artificial Sequence: Synthetic oligonucleotide
  Sense strand starting at position 2346 of SEQ ID NO: 1193
cuccuugacggcuaaaugu

SEQ ID NO: 94727 - RNA, 19 nt, Artificial Sequence
  Description of Artificial Sequence: Synthetic oligonucleotide
  Antisense strand to SEQ ID NO: 94646
acauuuagccgucaaggag

SEQ ID NO: 94728 - RNA, 19 nt, Artificial Sequence
  Description of Artificial Sequence: Synthetic oligonucleotide
  Sense strand starting at position 2416 of SEQ ID NO: 1193
accucugcaguguauuauu

SEQ ID NO: 94729 - RNA, 19 nt, Artificial Sequence
  Description of Artificial Sequence: Synthetic oligonucleotide
  Antisense strand to SEQ ID NO: 94648
aauaauacacugcagaggu

SEQ ID NO: 94730 - RNA, 19 nt, Artificial Sequence
  Description of Artificial Sequence: Synthetic oligonucleotide
  Sense strand starting at position 2424 of SEQ ID NO: 1193
aguguauuauugucuagag

SEQ ID NO: 94731 - RNA, 19 nt, Artificial Sequence
  Description of Artificial Sequence: Synthetic oligonucleotide
  Antisense strand to SEQ ID NO: 94650
cucuagacaauaauacacu

SEQ ID NO: 94732 - RNA, 19 nt, Artificial Sequence
  Description of Artificial Sequence: Synthetic oligonucleotide
  Sense strand starting at position 2426 of SEQ ID NO: 1193
uguauuauugucuagaguu

SEQ ID NO: 94733 - RNA, 19 nt, Artificial Sequence
  Description of Artificial Sequence: Synthetic oligonucleotide
  Antisense strand to SEQ ID NO: 94652
aacucuagacaauaauaca

SEQ ID NO: 94734 - RNA, 19 nt, Artificial Sequence
  Description of Artificial Sequence: Synthetic oligonucleotide
  Sense strand starting at position 2554 of SEQ ID NO: 1193
gaaacucagugggaaugaa

SEQ ID NO: 94735 - RNA, 19 nt, Artificial Sequence
  Description of Artificial Sequence: Synthetic oligonucleotide
  Antisense strand to SEQ ID NO: 94654
uucauucccacugaguuuc

SEQ ID NO: 94736 - RNA, 19 nt, Artificial Sequence
  Description of Artificial Sequence: Synthetic oligonucleotide
  Sense strand starting at position 2589 of SEQ ID NO: 1193
acugaaaucugguuaguca

SEQ ID NO: 94737 - RNA, 19 nt, Artificial Sequence
  Description of Artificial Sequence: Synthetic oligonucleotide
  Antisense strand to SEQ ID NO: 94656
ugacuaaccagauuucagu

SEQ ID NO: 94738 - RNA, 19 nt, Artificial Sequence
  Description of Artificial Sequence: Synthetic oligonucleotide
  Sense strand starting at position 2590 of SEQ ID NO: 1193
cugaaaucugguuagucaa

SEQ ID NO: 94739 - RNA, 19 nt, Artificial Sequence
  Description of Artificial Sequence: Synthetic oligonucleotide
  Antisense strand to SEQ ID NO: 94658
uugacuaaccagauuucag

SEQ ID NO: 94740 - RNA, 19 nt, Artificial Sequence
  Description of Artificial Sequence: Synthetic oligonucleotide
  Sense strand starting at position 2592 of SEQ ID NO: 1193
gaaaucugguuagucaaga

SEQ ID NO: 94741 - RNA, 19 nt, Artificial Sequence
  Description of Artificial Sequence: Synthetic oligonucleotide
  Antisense strand to SEQ ID NO: 94660
ucuugacuaaccagauuuc

SEQ ID NO: 94742 - RNA, 19 nt, Artificial Sequence
  Description of Artificial Sequence: Synthetic oligonucleotide
  Sense strand starting at position 2593 of SEQ ID NO: 1193
aaaucugguuagucaagaa

SEQ ID NO: 94743 - RNA, 19 nt, Artificial Sequence
  Description of Artificial Sequence: Synthetic oligonucleotide
  Antisense strand to SEQ ID NO: 94662
uucuugacuaaccagauuu

SEQ ID NO: 94744 - RNA, 19 nt, Artificial Sequence
  Description of Artificial Sequence: Synthetic oligonucleotide
  Sense strand starting at position 2626 of SEQ ID NO: 1193
agugccuggcauuaaguaa

SEQ ID NO: 94745 - RNA, 19 nt, Artificial Sequence
  Description of Artificial Sequence: Synthetic oligonucleotide
  Antisense strand to SEQ ID NO: 94664
uuacuuaaugccaggcacu

SEQ ID NO: 94746 - RNA, 19 nt, Artificial Sequence
  Description of Artificial Sequence: Synthetic oligonucleotide
  Sense strand starting at position 2633 of SEQ ID NO: 1193
ggcauuaaguaaguacuca

SEQ ID NO: 94747 - RNA, 19 nt, Artificial Sequence
  Description of Artificial Sequence: Synthetic oligonucleotide
  Antisense strand to SEQ ID NO: 94666
ugaguacuuacuuaaugcc

SEQ ID NO: 94748 - RNA, 19 nt, Artificial Sequence
  Description of Artificial Sequence: Synthetic oligonucleotide
  Sense strand starting at position 2735 of SEQ ID NO: 1193
cgucacuugggauacuaua

SEQ ID NO: 94749 - RNA, 19 nt, Artificial Sequence
  Description of Artificial Sequence: Synthetic oligonucleotide
  Antisense strand to SEQ ID NO: 94668
uauaguaucccaagugacg

SEQ ID NO: 94750 - RNA, 19 nt, Artificial Sequence
  Description of Artificial Sequence: Synthetic oligonucleotide
  Sense strand starting at position 2743 of SEQ ID NO: 1193
gggauacuauagcugcauu

SEQ ID NO: 94751 - RNA, 19 nt, Artificial Sequence
  Description of Artificial Sequence: Synthetic oligonucleotide
  Antisense strand to SEQ ID NO: 94670
aaugcagcuauaguauccc

SEQ ID NO: 94752 - RNA, 19 nt, Artificial Sequence
  Description of Artificial Sequence: Synthetic oligonucleotide
  Sense strand starting at position 2820 of SEQ ID NO: 1193
ccuugagcauucuuaaaug

SEQ ID NO: 94753 - RNA, 19 nt, Artificial Sequence
  Description of Artificial Sequence: Synthetic oligonucleotide
  Antisense strand to SEQ ID NO: 94672
cauuuaagaaugcucaagg

SEQ ID NO: 94754 - RNA, 19 nt, Artificial Sequence
  Description of Artificial Sequence: Synthetic oligonucleotide
  Sense strand starting at position 3104 of SEQ ID NO: 1193
cuuuauugacaagguagua

SEQ ID NO: 94755 - RNA, 19 nt, Artificial Sequence
  Description of Artificial Sequence: Synthetic oligonucleotide
  Antisense strand to SEQ ID NO: 94674
uacuaccuugucaauaaag

SEQ ID NO: 94756 - RNA, 19 nt, Artificial Sequence
  Description of Artificial Sequence: Synthetic oligonucleotide
  Sense strand starting at position 3195 of SEQ ID NO: 1193
caguaagauaggugaggua

SEQ ID NO: 94757 - RNA, 19 nt, Artificial Sequence
  Description of Artificial Sequence: Synthetic oligonucleotide
  Antisense strand to SEQ ID NO: 94676
uaccucaccuaucuuacug

SEQ ID NO: 94758 - RNA, 19 nt, Artificial Sequence
  Description of Artificial Sequence: Synthetic oligonucleotide
  Sense strand starting at position 3253 of SEQ ID NO: 1193
ccaucugguccaugcaauu

SEQ ID NO: 94759 - RNA, 19 nt, Artificial Sequence
  Description of Artificial Sequence: Synthetic oligonucleotide
  Antisense strand to SEQ ID NO: 94678
aauugcauggaccagaugg

SEQ ID NO: 94760 - RNA, 19 nt, Artificial Sequence
  Description of Artificial Sequence: Synthetic oligonucleotide
  Sense strand starting at position 3340 of SEQ ID NO: 1193
acgugauuccuggaucagg

SEQ ID NO: 94761 - RNA, 19 nt, Artificial Sequence
  Description of Artificial Sequence: Synthetic oligonucleotide
  Antisense strand to SEQ ID NO: 94680
ccugauccaggaaucacgu

SEQ ID NO: 94762 - RNA, 19 nt, Artificial Sequence
  Description of Artificial Sequence: Synthetic oligonucleotide
  Sense strand starting at position 3382 of SEQ ID NO: 1193
acagcagcacuugaugaaa

SEQ ID NO: 94763 - RNA, 19 nt, Artificial Sequence
  Description of Artificial Sequence: Synthetic oligonucleotide
  Antisense strand to SEQ ID NO: 94682
uuucaucaagugcugcugu

SEQ ID NO: 94764 - RNA, 19 nt, Artificial Sequence
  Description of Artificial Sequence: Synthetic oligonucleotide
  Sense strand starting at position 3494 of SEQ ID NO: 1193
acuugaagugucuaccaaa

SEQ ID NO: 94765 - RNA, 19 nt, Artificial Sequence
  Description of Artificial Sequence: Synthetic oligonucleotide
  Antisense strand to SEQ ID NO: 94684
uuugguagacacuucaagu

SEQ ID NO: 94766 - RNA, 19 nt, Artificial Sequence
  Description of Artificial Sequence: Synthetic oligonucleotide
  Sense strand starting at position 3546 of SEQ ID NO: 1193
uuaauaaucuagguccagu

SEQ ID NO: 94767 - RNA, 19 nt, Artificial Sequence
  Description of Artificial Sequence: Synthetic oligonucleotide
  Antisense strand to SEQ ID NO: 94686
acuggaccuagauuauuaa

SEQ ID NO: 94768 - RNA, 19 nt, Artificial Sequence
  Description of Artificial Sequence: Synthetic oligonucleotide
  Sense strand starting at position 3592 of SEQ ID NO: 1193
cgucauaggugauucugau

SEQ ID NO: 94769 - RNA, 19 nt, Artificial Sequence
  Description of Artificial Sequence: Synthetic oligonucleotide
  Antisense strand to SEQ ID NO: 94688
aucagaaucaccuaugacg

SEQ ID NO: 94770 - RNA, 19 nt, Artificial Sequence
  Description of Artificial Sequence: Synthetic oligonucleotide
  Sense strand starting at position 3654 of SEQ ID NO: 1193
gguauucugagaugaucac

SEQ ID NO: 94771 - RNA, 19 nt, Artificial Sequence
  Description of Artificial Sequence: Synthetic oligonucleotide
  Antisense strand to SEQ ID NO: 94690
gugaucaucucagaauacc

SEQ ID NO: 94772 - RNA, 19 nt, Artificial Sequence
  Description of Artificial Sequence: Synthetic oligonucleotide
  Sense strand starting at position 3707 of SEQ ID NO: 1193
uugaucauauguguucuca

SEQ ID NO: 94773 - RNA, 19 nt, Artificial Sequence
  Description of Artificial Sequence: Synthetic oligonucleotide
  Antisense strand to SEQ ID NO: 94692
ugagaacacauaugaucaa

SEQ ID NO: 94774 - RNA, 19 nt, Artificial Sequence
  Description of Artificial Sequence: Synthetic oligonucleotide
  Sense strand starting at position 3709 of SEQ ID NO: 1193
gaucauauguguucucaug

SEQ ID NO: 94775 - RNA, 19 nt, Artificial Sequence
  Description of Artificial Sequence: Synthetic oligonucleotide
  Antisense strand to SEQ ID NO: 94694
caugagaacacauaugauc

SEQ ID NO: 94776 - RNA, 19 nt, Artificial Sequence
  Description of Artificial Sequence: Synthetic oligonucleotide
  Sense strand starting at position 3715 of SEQ ID NO: 1193
auguguucucauguguguu

SEQ ID NO: 94777 - RNA, 19 nt, Artificial Sequence
  Description of Artificial Sequence: Synthetic oligonucleotide
  Antisense strand to SEQ ID NO: 94696
aacacacaugagaacacau

SEQ ID NO: 94778 - RNA, 19 nt, Artificial Sequence
  Description of Artificial Sequence: Synthetic oligonucleotide
  Sense strand starting at position 3841 of SEQ ID NO: 1193
gaggucugguuucuucuga

SEQ ID NO: 94779 - RNA, 19 nt, Artificial Sequence
  Description of Artificial Sequence: Synthetic oligonucleotide
  Antisense strand to SEQ ID NO: 94698
ucagaagaaaccagaccuc

SEQ ID NO: 94780 - RNA, 19 nt, Artificial Sequence
  Description of Artificial Sequence: Synthetic oligonucleotide
  Sense strand starting at position 3914 of SEQ ID NO: 1193
ucaguaccuccuuauggaa

SEQ ID NO: 94781 - RNA, 19 nt, Artificial Sequence
  Description of Artificial Sequence: Synthetic oligonucleotide
  Antisense strand to SEQ ID NO: 94700
uuccauaaggagguacuga

SEQ ID NO: 94782 - RNA, 19 nt, Artificial Sequence
  Description of Artificial Sequence: Synthetic oligonucleotide
  Sense strand starting at position 3939 of SEQ ID NO: 1193
gggaauaccuaaucuccuu

SEQ ID NO: 94783 - RNA, 19 nt, Artificial Sequence
  Description of Artificial Sequence: Synthetic oligonucleotide
  Antisense strand to SEQ ID NO: 94702
aaggagauuagguauuccc

SEQ ID NO: 94784 - RNA, 19 nt, Artificial Sequence
  Description of Artificial Sequence: Synthetic oligonucleotide
  Sense strand starting at position 3825 of SEQ ID NO: 1195
ugaaauguggucuaauuau

SEQ ID NO: 94785 - RNA, 19 nt, Artificial Sequence
  Description of Artificial Sequence: Synthetic oligonucleotide
  Antisense strand to SEQ ID NO: 94704
auaauuagaccacauuuca

SEQ ID NO: 94786 - RNA, 19 nt, Artificial Sequence
  Description of Artificial Sequence: Synthetic oligonucleotide
  Sense strand starting at position 3804 of SEQ ID NO: 1195
gucagaacugaaugcacua

SEQ ID NO: 94787 - RNA, 19 nt, Artificial Sequence
  Description of Artificial Sequence: Synthetic oligonucleotide
  Antisense strand to SEQ ID NO: 94706
uagugcauucaguucugac

SEQ ID NO: 94788 - RNA, 19 nt, Artificial Sequence
  Description of Artificial Sequence: Synthetic oligonucleotide
  Sense strand starting at position 3747 of SEQ ID NO: 1195
ugccuaucaccauauugga

SEQ ID NO: 94789 - RNA, 19 nt, Artificial Sequence
  Description of Artificial Sequence: Synthetic oligonucleotide
  Antisense strand to SEQ ID NO: 94708
uccaauauggugauaggca

SEQ ID NO: 94790 - RNA, 19 nt, Artificial Sequence
  Description of Artificial Sequence: Synthetic oligonucleotide
  Sense strand starting at position 3454 of SEQ ID NO: 1195
guaaucauuggccaaguaa

SEQ ID NO: 94791 - RNA, 19 nt, Artificial Sequence
  Description of Artificial Sequence: Synthetic oligonucleotide
  Antisense strand to SEQ ID NO: 94710
uuacuuggccaaugauuac

SEQ ID NO: 94792 - RNA, 19 nt, Artificial Sequence
  Description of Artificial Sequence: Synthetic oligonucleotide
  Sense strand starting at position 3443 of SEQ ID NO: 1195
acaugugagcaguaaucau

SEQ ID NO: 94793 - RNA, 19 nt, Artificial Sequence
  Description of Artificial Sequence: Synthetic oligonucleotide
  Antisense strand to SEQ ID NO: 94712
augauuacugcucacaugu

SEQ ID NO: 94794 - RNA, 19 nt, Artificial Sequence
  Description of Artificial Sequence: Synthetic oligonucleotide
  Sense strand starting at position 3440 of SEQ ID NO: 1195
cauacaugugagcaguaau

SEQ ID NO: 94795 - RNA, 19 nt, Artificial Sequence
  Description of Artificial Sequence: Synthetic oligonucleotide
  Antisense strand to SEQ ID NO: 94714
auuacugcucacauguaug

SEQ ID NO: 94796 - RNA, 19 nt, Artificial Sequence
  Description of Artificial Sequence: Synthetic oligonucleotide
  Sense strand starting at position 3271 of SEQ ID NO: 1195
ucacaucuggcacaagauu

SEQ ID NO: 94797 - RNA, 19 nt, Artificial Sequence
  Description of Artificial Sequence: Synthetic oligonucleotide
  Antisense strand to SEQ ID NO: 94716
aaucuugugccagauguga

SEQ ID NO: 94798 - RNA, 19 nt, Artificial Sequence
  Description of Artificial Sequence: Synthetic oligonucleotide
  Sense strand starting at position 3096 of SEQ ID NO: 1195
guacucuagaggugggauu

SEQ ID NO: 94799 - RNA, 19 nt, Artificial Sequence
  Description of Artificial Sequence: Synthetic oligonucleotide
  Antisense strand to SEQ ID NO: 94718
aaucccaccucuagaguac

SEQ ID NO: 94800 - RNA, 19 nt, Artificial Sequence
  Description of Artificial Sequence: Synthetic oligonucleotide
  Sense strand starting at position 3056 of SEQ ID NO: 1195
gcauuugacuuguaauuuc

SEQ ID NO: 94801 - RNA, 19 nt, Artificial Sequence
  Description of Artificial Sequence: Synthetic oligonucleotide
  Antisense strand to SEQ ID NO: 94720
gaaauuacaagucaaaugc

SEQ ID NO: 94802 - RNA, 19 nt, Artificial Sequence
  Description of Artificial Sequence: Synthetic oligonucleotide
  Sense strand starting at position 2977 of SEQ ID NO: 1195
auguauuauuugucaugca

SEQ ID NO: 94803 - RNA, 19 nt, Artificial Sequence
  Description of Artificial Sequence: Synthetic oligonucleotide
  Antisense strand to SEQ ID NO: 94722
ugcaugacaaauaauacau

SEQ ID NO: 94804 - RNA, 19 nt, Artificial Sequence
  Description of Artificial Sequence: Synthetic oligonucleotide
  Sense strand starting at position 2787 of SEQ ID NO: 1195
ucuguaaacuuauuaagga

SEQ ID NO: 94805 - RNA, 19 nt, Artificial Sequence
  Description of Artificial Sequence: Synthetic oligonucleotide
  Antisense strand to SEQ ID NO: 94724
uccuuaauaaguuuacaga

SEQ ID NO: 94806 - RNA, 19 nt, Artificial Sequence
  Description of Artificial Sequence: Synthetic oligonucleotide
  Sense strand starting at position 2779 of SEQ ID NO: 1195
agaagcuuucuguaaacuu

SEQ ID NO: 94807 - RNA, 19 nt, Artificial Sequence
  Description of Artificial Sequence: Synthetic oligonucleotide
  Antisense strand to SEQ ID NO: 94726
aaguuuacagaaagcuucu

SEQ ID NO: 94808 - RNA, 19 nt, Artificial Sequence
  Description of Artificial Sequence: Synthetic oligonucleotide
  Sense strand starting at position 2776 of SEQ ID NO: 1195
aggagaagcuuucuguaaa

SEQ ID NO: 94809 - RNA, 19 nt, Artificial Sequence
  Description of Artificial Sequence: Synthetic oligonucleotide
  Antisense strand to SEQ ID NO: 94728
uuuacagaaagcuucuccu

SEQ ID NO: 94810 - RNA, 19 nt, Artificial Sequence
  Description of Artificial Sequence: Synthetic oligonucleotide
  Sense strand starting at position 2726 of SEQ ID NO: 1195
acauguguuaguuaugauc

SEQ ID NO: 94811 - RNA, 19 nt, Artificial Sequence
  Description of Artificial Sequence: Synthetic oligonucleotide
  Antisense strand to SEQ ID NO: 94730
gaucauaacuaacacaugu

SEQ ID NO: 94812 - RNA, 19 nt, Artificial Sequence
  Description of Artificial Sequence: Synthetic oligonucleotide
  Sense strand starting at position 2564 of SEQ ID NO: 1195
caucgagaaugacuguauu

SEQ ID NO: 94813 - RNA, 19 nt, Artificial Sequence
  Description of Artificial Sequence: Synthetic oligonucleotide
  Antisense strand to SEQ ID NO: 94732
aauacagucauucucgaug

SEQ ID NO: 94814 - RNA, 19 nt, Artificial Sequence
  Description of Artificial Sequence: Synthetic oligonucleotide
  Sense strand starting at position 2334 of SEQ ID NO: 1195
gggaacaguaucgaguuaa

SEQ ID NO: 94815 - RNA, 19 nt, Artificial Sequence
  Description of Artificial Sequence: Synthetic oligonucleotide
  Antisense strand to SEQ ID NO: 94734
uuaacucgauacuguuccc

SEQ ID NO: 94816 - RNA, 19 nt, Artificial Sequence
  Description of Artificial Sequence: Synthetic oligonucleotide
  Sense strand starting at position 2123 of SEQ ID NO: 1195
guguuucgucaggaauuuc

SEQ ID NO: 94817 - RNA, 19 nt, Artificial Sequence
  Description of Artificial Sequence: Synthetic oligonucleotide
  Antisense strand to SEQ ID NO: 94736
gaaauuccugacgaaacac

SEQ ID NO: 94818 - RNA, 19 nt, Artificial Sequence
  Description of Artificial Sequence: Synthetic oligonucleotide
  Sense strand starting at position 2025 of SEQ ID NO: 1195
cuggcaaacaagugagaaa

SEQ ID NO: 94819 - RNA, 19 nt, Artificial Sequence
  Description of Artificial Sequence: Synthetic oligonucleotide
  Antisense strand to SEQ ID NO: 94738
uuucucacuuguuugccag

SEQ ID NO: 94820 - RNA, 19 nt, Artificial Sequence
  Description of Artificial Sequence: Synthetic oligonucleotide
  Sense strand starting at position 1623 of SEQ ID NO: 1195
gaauaaagguggcuacuaa

SEQ ID NO: 94821 - RNA, 19 nt, Artificial Sequence
  Description of Artificial Sequence: Synthetic oligonucleotide
  Antisense strand to SEQ ID NO: 94740
uuaguagccaccuuuauuc

SEQ ID NO: 94822 - RNA, 19 nt, Artificial Sequence
  Description of Artificial Sequence: Synthetic oligonucleotide
  Sense strand starting at position 1532 of SEQ ID NO: 1195
aaggaaaucuuccugugac

SEQ ID NO: 94823 - RNA, 19 nt, Artificial Sequence
  Description of Artificial Sequence: Synthetic oligonucleotide
  Antisense strand to SEQ ID NO: 94742
gucacaggaagauuuccuu

SEQ ID NO: 94824 - RNA, 19 nt, Artificial Sequence
  Description of Artificial Sequence: Synthetic oligonucleotide
  Sense strand starting at position 1455 of SEQ ID NO: 1195
uguuaacuucuaggacaga

SEQ ID NO: 94825 - RNA, 19 nt, Artificial Sequence
  Description of Artificial Sequence: Synthetic oligonucleotide
  Antisense strand to SEQ ID NO: 94744
ucuguccuagaaguuaaca

SEQ ID NO: 94826 - RNA, 19 nt, Artificial Sequence
  Description of Artificial Sequence: Synthetic oligonucleotide
  Sense strand starting at position 1439 of SEQ ID NO: 1195
cagagagauccguaaaugu

SEQ ID NO: 94827 - RNA, 19 nt, Artificial Sequence
  Description of Artificial Sequence: Synthetic oligonucleotide
  Antisense strand to SEQ ID NO: 94746
acauuuacggaucucucug

SEQ ID NO: 94828 - RNA, 19 nt, Artificial Sequence
  Description of Artificial Sequence: Synthetic oligonucleotide
  Sense strand starting at position 1369 of SEQ ID NO: 1195
gcuagauucgauuaagacu

SEQ ID NO: 94829 - RNA, 19 nt, Artificial Sequence
  Description of Artificial Sequence: Synthetic oligonucleotide
  Antisense strand to SEQ ID NO: 94748
agucuuaaucgaaucuagc

SEQ ID NO: 94830 - RNA, 19 nt, Artificial Sequence
  Description of Artificial Sequence: Synthetic oligonucleotide
  Sense strand starting at position 1361 of SEQ ID NO: 1195
caaugacugcuagauucga

SEQ ID NO: 94831 - RNA, 19 nt, Artificial Sequence
  Description of Artificial Sequence: Synthetic oligonucleotide
  Antisense strand to SEQ ID NO: 94750
ucgaaucuagcagucauug

SEQ ID NO: 94832 - RNA, 19 nt, Artificial Sequence
  Description of Artificial Sequence: Synthetic oligonucleotide
  Sense strand starting at position 1334 of SEQ ID NO: 1195
cagggagauuaggaaagaa

SEQ ID NO: 94833 - RNA, 19 nt, Artificial Sequence
  Description of Artificial Sequence: Synthetic oligonucleotide
  Antisense strand to SEQ ID NO: 94752
uucuuuccuaaucucccug

SEQ ID NO: 94834 - RNA, 19 nt, Artificial Sequence
  Description of Artificial Sequence: Synthetic oligonucleotide
  Sense strand starting at position 876 of SEQ ID NO: 1195
cugcaaacuggucauaucu

SEQ ID NO: 94835 - RNA, 19 nt, Artificial Sequence
  Description of Artificial Sequence: Synthetic oligonucleotide
  Antisense strand to SEQ ID NO: 94754
agauaugaccaguuugcag

SEQ ID NO: 94836 - RNA, 19 nt, Artificial Sequence
  Description of Artificial Sequence: Synthetic oligonucleotide
  Sense strand starting at position 590 of SEQ ID NO: 1195
agguaugccaccgaugaaa

SEQ ID NO: 94837 - RNA, 19 nt, Artificial Sequence
  Description of Artificial Sequence: Synthetic oligonucleotide
  Antisense strand to SEQ ID NO: 94756
uuucaucgguggcauaccu

SEQ ID NO: 94838 - RNA, 19 nt, Artificial Sequence
  Description of Artificial Sequence: Synthetic oligonucleotide
  Sense strand starting at position 498 of SEQ ID NO: 1195
augguuauaaaucaguguu

SEQ ID NO: 94839 - RNA, 19 nt, Artificial Sequence
  Description of Artificial Sequence: Synthetic oligonucleotide
  Antisense strand to SEQ ID NO: 94758
aacacugauuuauaaccau

SEQ ID NO: 94840 - RNA, 19 nt, Artificial Sequence
  Description of Artificial Sequence: Synthetic oligonucleotide
  Sense strand starting at position 491 of SEQ ID NO: 1195
ggcaucaaugguuauaaau

SEQ ID NO: 94841 - RNA, 19 nt, Artificial Sequence
  Description of Artificial Sequence: Synthetic oligonucleotide
  Antisense strand to SEQ ID NO: 94760
auuuauaaccauugaugcc

SEQ ID NO: 94842 - RNA, 19 nt, Artificial Sequence
  Description of Artificial Sequence: Synthetic oligonucleotide
  Sense strand starting at position 490 of SEQ ID NO: 1195
uggcaucaaugguuauaaa

SEQ ID NO: 94843 - RNA, 19 nt, Artificial Sequence
  Description of Artificial Sequence: Synthetic oligonucleotide
  Antisense strand to SEQ ID NO: 94762
uuuauaaccauugaugcca

SEQ ID NO: 94844 - RNA, 19 nt, Artificial Sequence
  Description of Artificial Sequence: Synthetic oligonucleotide
  Sense strand starting at position 437 of SEQ ID NO: 1195
auaugaucaguuuggacaa

SEQ ID NO: 94845 - RNA, 19 nt, Artificial Sequence
  Description of Artificial Sequence: Synthetic oligonucleotide
  Antisense strand to SEQ ID NO: 94764
uuguccaaacugaucauau

SEQ ID NO: 94846 - RNA, 19 nt, Artificial Sequence
  Description of Artificial Sequence: Synthetic oligonucleotide
  Sense strand starting at position 385 of SEQ ID NO: 1195
gggauuuaaucauaaacuu

SEQ ID NO: 94847 - RNA, 19 nt, Artificial Sequence
  Description of Artificial Sequence: Synthetic oligonucleotide
  Antisense strand to SEQ ID NO: 94766
aaguuuaugauuaaauccc

SEQ ID NO: 94848 - RNA, 19 nt, Artificial Sequence
  Description of Artificial Sequence: Synthetic oligonucleotide
  Sense strand starting at position 308 of SEQ ID NO: 1195
gccaaugcugacuacaaga

SEQ ID NO: 94849 - RNA, 19 nt, Artificial Sequence
  Description of Artificial Sequence: Synthetic oligonucleotide
  Antisense strand to SEQ ID NO: 94768
ucuuguagucagcauuggc

SEQ ID NO: 94850 - RNA, 19 nt, Artificial Sequence
  Description of Artificial Sequence: Synthetic oligonucleotide
  Sense strand starting at position 171 of SEQ ID NO: 1195
uguccagauaguugggaau

SEQ ID NO: 94851 - RNA, 19 nt, Artificial Sequence
  Description of Artificial Sequence: Synthetic oligonucleotide
  Antisense strand to SEQ ID NO: 94770
auucccaacuaucuggaca

SEQ ID NO: 94852 - RNA, 19 nt, Artificial Sequence
  Description of Artificial Sequence: Synthetic oligonucleotide
  Sense strand starting at position 163 of SEQ ID NO: 1195
uaggguguuguccagauag

SEQ ID NO: 94853 - RNA, 19 nt, Artificial Sequence
  Description of Artificial Sequence: Synthetic oligonucleotide
  Antisense strand to SEQ ID NO: 94772
cuaucuggacaacacccua

SEQ ID NO: 94854 - RNA, 19 nt, Artificial Sequence
  Description of Artificial Sequence: Synthetic oligonucleotide
  Sense strand starting at position 98 of SEQ ID NO: 1195
ugggcaaauuccuuaauaa

SEQ ID NO: 94855 - RNA, 19 nt, Artificial Sequence
  Description of Artificial Sequence: Synthetic oligonucleotide
  Antisense strand to SEQ ID NO: 94774
uuauuaaggaauuugccca

SEQ ID NO: 94856 - RNA, 19 nt, Artificial Sequence
  Description of Artificial Sequence: Synthetic oligonucleotide
  Sense strand starting at position 97 of SEQ ID NO: 1195
uugggcaaauuccuuaaua

SEQ ID NO: 94857 - RNA, 19 nt, Artificial Sequence
  Description of Artificial Sequence: Synthetic oligonucleotide
  Antisense strand to SEQ ID NO: 94776
uauuaaggaauuugcccaa

SEQ ID NO: 94858 - RNA, 19 nt, Artificial Sequence
  Description of Artificial Sequence: Synthetic oligonucleotide
  Sense strand starting at position 59 of SEQ ID NO: 1195
aacagacagcauugauagu

SEQ ID NO: 94859 - RNA, 19 nt, Artificial Sequence
  Description of Artificial Sequence: Synthetic oligonucleotide
  Antisense strand to SEQ ID NO: 94778
acuaucaaugcugucuguu

SEQ ID NO: 94860 - RNA, 19 nt, Artificial Sequence
  Description of Artificial Sequence: Synthetic oligonucleotide
  Sense strand starting at position 40 of SEQ ID NO: 1195
auugaaauguuggcaagaa

SEQ ID NO: 94861 - RNA, 19 nt, Artificial Sequence
  Description of Artificial Sequence: Synthetic oligonucleotide
  Antisense strand to SEQ ID NO: 94780
uucuugccaacauuucaau

SEQ ID NO: 94862 - RNA, 19 nt, Artificial Sequence
  Description of Artificial Sequence: Synthetic oligonucleotide
  Sense strand starting at position 39 of SEQ ID NO: 1195
cauugaaauguuggcaaga

SEQ ID NO: 94863 - RNA, 19 nt, Artificial Sequence
  Description of Artificial Sequence: Synthetic oligonucleotide
  Antisense strand to SEQ ID NO: 94782
ucuugccaacauuucaaug

SEQ ID NO: 94864 - RNA, 19 nt, Artificial Sequence
  Description of Artificial Sequence: Synthetic oligonucleotide
  Sense strand starting at position 3958 of SEQ ID NO: 1194
gcuuguguaagacaauguu

SEQ ID NO: 94865 - RNA, 19 nt, Artificial Sequence
  Description of Artificial Sequence: Synthetic oligonucleotide
  Antisense strand to SEQ ID NO: 94784
aacauugucuuacacaagc

SEQ ID NO: 94866 - RNA, 19 nt, Artificial Sequence
  Description of Artificial Sequence: Synthetic oligonucleotide
  Sense strand starting at position 3949 of SEQ ID NO: 1194
aagaauacugcuuguguaa

SEQ ID NO: 94867 - RNA, 19 nt, Artificial Sequence
  Description of Artificial Sequence: Synthetic oligonucleotide
  Antisense strand to SEQ ID NO: 94786
uuacacaagcaguauucuu

SEQ ID NO: 94868 - RNA, 19 nt, Artificial Sequence
  Description of Artificial Sequence: Synthetic oligonucleotide
  Sense strand starting at position 3948 of SEQ ID NO: 1194
uaagaauacugcuugugua

SEQ ID NO: 94869 - RNA, 19 nt, Artificial Sequence
  Description of Artificial Sequence: Synthetic oligonucleotide
  Antisense strand to SEQ ID NO: 94788
uacacaagcaguauucuua

SEQ ID NO: 94870 - RNA, 19 nt, Artificial Sequence
  Description of Artificial Sequence: Synthetic oligonucleotide
  Sense strand starting at position 3916 of SEQ ID NO: 1194
auaauagacuugcuauguu

SEQ ID NO: 94871 - RNA, 19 nt, Artificial Sequence
  Description of Artificial Sequence: Synthetic oligonucleotide
  Antisense strand to SEQ ID NO: 94790
aacauagcaagucuauuau

SEQ ID NO: 94872 - RNA, 19 nt, Artificial Sequence
  Description of Artificial Sequence: Synthetic oligonucleotide
  Sense strand starting at position 3867 of SEQ ID NO: 1194
auguguauucuauagaguu

SEQ ID NO: 94873 - RNA, 19 nt, Artificial Sequence
  Description of Artificial Sequence: Synthetic oligonucleotide
  Antisense strand to SEQ ID NO: 94792
aacucuauagaauacacau

SEQ ID NO: 94874 - RNA, 19 nt, Artificial Sequence
  Description of Artificial Sequence: Synthetic oligonucleotide
  Sense strand starting at position 3863 of SEQ ID NO: 1194
uaggauguguauucuauag

SEQ ID NO: 94875 - RNA, 19 nt, Artificial Sequence
  Description of Artificial Sequence: Synthetic oligonucleotide
  Antisense strand to SEQ ID NO: 94794
cuauagaauacacauccua

SEQ ID NO: 94876 - RNA, 19 nt, Artificial Sequence
  Description of Artificial Sequence: Synthetic oligonucleotide
  Sense strand starting at position 3699 of SEQ ID NO: 1194
uucuuugaugcucaggaca

SEQ ID NO: 94877 - RNA, 19 nt, Artificial Sequence
  Description of Artificial Sequence: Synthetic oligonucleotide
  Antisense strand to SEQ ID NO: 94796
uguccugagcaucaaagaa

SEQ ID NO: 94878 - RNA, 19 nt, Artificial Sequence
  Description of Artificial Sequence: Synthetic oligonucleotide
  Sense strand starting at position 3608 of SEQ ID NO: 1194
gccauauguuggcucauuu

SEQ ID NO: 94879 - RNA, 19 nt, Artificial Sequence
  Description of Artificial Sequence: Synthetic oligonucleotide
  Antisense strand to SEQ ID NO: 94798
aaaugagccaacauauggc

SEQ ID NO: 94880 - RNA, 19 nt, Artificial Sequence
  Description of Artificial Sequence: Synthetic oligonucleotide
  Sense strand starting at position 3607 of SEQ ID NO: 1194
ggccauauguuggcucauu

SEQ ID NO: 94881 - RNA, 19 nt, Artificial Sequence
  Description of Artificial Sequence: Synthetic oligonucleotide
  Antisense strand to SEQ ID NO: 94800
aaugagccaacauauggcc

SEQ ID NO: 94882 - RNA, 19 nt, Artificial Sequence
  Description of Artificial Sequence: Synthetic oligonucleotide
  Sense strand starting at position 3597 of SEQ ID NO: 1194
gaauuaagcuggccauaug

SEQ ID NO: 94883 - RNA, 19 nt, Artificial Sequence
  Description of Artificial Sequence: Synthetic oligonucleotide
  Antisense strand to SEQ ID NO: 94802
cauauggccagcuuaauuc

SEQ ID NO: 94884 - RNA, 19 nt, Artificial Sequence
  Description of Artificial Sequence: Synthetic oligonucleotide
  Sense strand starting at position 3595 of SEQ ID NO: 1194
cugaauuaagcuggccaua

SEQ ID NO: 94885 - RNA, 19 nt, Artificial Sequence
  Description of Artificial Sequence: Synthetic oligonucleotide
  Antisense strand to SEQ ID NO: 94804
uauggccagcuuaauucag

SEQ ID NO: 94886 - RNA, 19 nt, Artificial Sequence
  Description of Artificial Sequence: Synthetic oligonucleotide
  Sense strand starting at position 3566 of SEQ ID NO: 1194
cuuaguaaguaaucaauag

SEQ ID NO: 94887 - RNA, 19 nt, Artificial Sequence
  Description of Artificial Sequence: Synthetic oligonucleotide
  Antisense strand to SEQ ID NO: 94806
cuauugauuacuuacuaag

SEQ ID NO: 94888 - RNA, 19 nt, Artificial Sequence
  Description of Artificial Sequence: Synthetic oligonucleotide
  Sense strand starting at position 3562 of SEQ ID NO: 1194
ugagcuuaguaaguaauca

SEQ ID NO: 94889 - RNA, 19 nt, Artificial Sequence
  Description of Artificial Sequence: Synthetic oligonucleotide
  Antisense strand to SEQ ID NO: 94808
ugauuacuuacuaagcuca

SEQ ID NO: 94890 - RNA, 19 nt, Artificial Sequence
  Description of Artificial Sequence: Synthetic oligonucleotide
  Sense strand starting at position 3496 of SEQ ID NO: 1194
gugcaugcaucagucuaau

SEQ ID NO: 94891 - RNA, 19 nt, Artificial Sequence
  Description of Artificial Sequence: Synthetic oligonucleotide
  Antisense strand to SEQ ID NO: 94810
auuagacugaugcaugcac

SEQ ID NO: 94892 - RNA, 19 nt, Artificial Sequence
  Description of Artificial Sequence: Synthetic oligonucleotide
  Sense strand starting at position 3494 of SEQ ID NO: 1194
gagugcaugcaucagucua

SEQ ID NO: 94893 - RNA, 19 nt, Artificial Sequence
  Description of Artificial Sequence: Synthetic oligonucleotide
  Antisense strand to SEQ ID NO: 94812
uagacugaugcaugcacuc

SEQ ID NO: 94894 - RNA, 19 nt, Artificial Sequence
  Description of Artificial Sequence: Synthetic oligonucleotide
  Sense strand starting at position 3339 of SEQ ID NO: 1194
ugaucuucuuaggaauaua

SEQ ID NO: 94895 - RNA, 19 nt, Artificial Sequence
  Description of Artificial Sequence: Synthetic oligonucleotide
  Antisense strand to SEQ ID NO: 94814
uauauuccuaagaagauca

SEQ ID NO: 94896 - RNA, 19 nt, Artificial Sequence
  Description of Artificial Sequence: Synthetic oligonucleotide
  Sense strand starting at position 3150 of SEQ ID NO: 1194
gauauaaacuagucuggau

SEQ ID NO: 94897 - RNA, 19 nt, Artificial Sequence
  Description of Artificial Sequence: Synthetic oligonucleotide
  Antisense strand to SEQ ID NO: 94816
auccagacuaguuuauauc

SEQ ID NO: 94898 - RNA, 19 nt, Artificial Sequence
  Description of Artificial Sequence: Synthetic oligonucleotide
  Sense strand starting at position 3071 of SEQ ID NO: 1194
gagcauuggugcuuuaaac

SEQ ID NO: 94899 - RNA, 19 nt, Artificial Sequence
  Description of Artificial Sequence: Synthetic oligonucleotide
  Antisense strand to SEQ ID NO: 94818
guuuaaagcaccaaugcuc

SEQ ID NO: 94900 - RNA, 19 nt, Artificial Sequence
  Description of Artificial Sequence: Synthetic oligonucleotide
  Sense strand starting at position 3004 of SEQ ID NO: 1194
uuucuucuaccugauguau

SEQ ID NO: 94901 - RNA, 19 nt, Artificial Sequence
  Description of Artificial Sequence: Synthetic oligonucleotide
  Antisense strand to SEQ ID NO: 94820
auacaucagguagaagaaa

SEQ ID NO: 94902 - RNA, 19 nt, Artificial Sequence
  Description of Artificial Sequence: Synthetic oligonucleotide
  Sense strand starting at position 2917 of SEQ ID NO: 1194
auguacguguguccaaaua

SEQ ID NO: 94903 - RNA, 19 nt, Artificial Sequence
  Description of Artificial Sequence: Synthetic oligonucleotide
  Antisense strand to SEQ ID NO: 94822
uauuuggacacacguacau

SEQ ID NO: 94904 - RNA, 19 nt, Artificial Sequence
  Description of Artificial Sequence: Synthetic oligonucleotide
  Sense strand starting at position 2915 of SEQ ID NO: 1194
aaauguacguguguccaaa

SEQ ID NO: 94905 - RNA, 19 nt, Artificial Sequence
  Description of Artificial Sequence: Synthetic oligonucleotide
  Antisense strand to SEQ ID NO: 94824
uuuggacacacguacauuu

SEQ ID NO: 94906 - RNA, 19 nt, Artificial Sequence
  Description of Artificial Sequence: Synthetic oligonucleotide
  Sense strand starting at position 2889 of SEQ ID NO: 1194
ucuugacuuguaggaaauc

SEQ ID NO: 94907 - RNA, 19 nt, Artificial Sequence
  Description of Artificial Sequence: Synthetic oligonucleotide
  Antisense strand to SEQ ID NO: 94826
gauuuccuacaagucaaga

SEQ ID NO: 94908 - RNA, 19 nt, Artificial Sequence
  Description of Artificial Sequence: Synthetic oligonucleotide
  Sense strand starting at position 2883 of SEQ ID NO: 1194
guuuguucuugacuuguag

SEQ ID NO: 94909 - RNA, 19 nt, Artificial Sequence
  Description of Artificial Sequence: Synthetic oligonucleotide
  Antisense strand to SEQ ID NO: 94828
cuacaagucaagaacaaac

SEQ ID NO: 94910 - RNA, 19 nt, Artificial Sequence
  Description of Artificial Sequence: Synthetic oligonucleotide
  Sense strand starting at position 2881 of SEQ ID NO: 1194
aaguuuguucuugacuugu

SEQ ID NO: 94911 - RNA, 19 nt, Artificial Sequence
  Description of Artificial Sequence: Synthetic oligonucleotide
  Antisense strand to SEQ ID NO: 94830
acaagucaagaacaaacuu

SEQ ID NO: 94912 - RNA, 19 nt, Artificial Sequence
  Description of Artificial Sequence: Synthetic oligonucleotide
  Sense strand starting at position 2879 of SEQ ID NO: 1194
ucaaguuuguucuugacuu

SEQ ID NO: 94913 - RNA, 19 nt, Artificial Sequence
  Description of Artificial Sequence: Synthetic oligonucleotide
  Antisense strand to SEQ ID NO: 94832
aagucaagaacaaacuuga

SEQ ID NO: 94914 - RNA, 19 nt, Artificial Sequence
  Description of Artificial Sequence: Synthetic oligonucleotide
  Sense strand starting at position 2877 of SEQ ID NO: 1194
ggucaaguuuguucuugac

SEQ ID NO: 94915 - RNA, 19 nt, Artificial Sequence
  Description of Artificial Sequence: Synthetic oligonucleotide
  Antisense strand to SEQ ID NO: 94834
gucaagaacaaacuugacc

SEQ ID NO: 94916 - RNA, 19 nt, Artificial Sequence
  Description of Artificial Sequence: Synthetic oligonucleotide
  Sense strand starting at position 2876 of SEQ ID NO: 1194
uggucaaguuuguucuuga

SEQ ID NO: 94917 - RNA, 19 nt, Artificial Sequence
  Description of Artificial Sequence: Synthetic oligonucleotide
  Antisense strand to SEQ ID NO: 94836
ucaagaacaaacuugacca

SEQ ID NO: 94918 - RNA, 19 nt, Artificial Sequence
  Description of Artificial Sequence: Synthetic oligonucleotide
  Sense strand starting at position 2868 of SEQ ID NO: 1194
ccaacuacuggucaaguuu

SEQ ID NO: 94919 - RNA, 19 nt, Artificial Sequence
  Description of Artificial Sequence: Synthetic oligonucleotide
  Antisense strand to SEQ ID NO: 94838
aaacuugaccaguaguugg

SEQ ID NO: 94920 - RNA, 19 nt, Artificial Sequence
  Description of Artificial Sequence: Synthetic oligonucleotide
  Sense strand starting at position 2867 of SEQ ID NO: 1194
uccaacuacuggucaaguu

SEQ ID NO: 94921 - RNA, 19 nt, Artificial Sequence
  Description of Artificial Sequence: Synthetic oligonucleotide
  Antisense strand to SEQ ID NO: 94840
aacuugaccaguaguugga

SEQ ID NO: 94922 - RNA, 19 nt, Artificial Sequence
  Description of Artificial Sequence: Synthetic oligonucleotide
  Sense strand starting at position 2835 of SEQ ID NO: 1194
gccagauagguguaguacu

SEQ ID NO: 94923 - RNA, 19 nt, Artificial Sequence
  Description of Artificial Sequence: Synthetic oligonucleotide
  Antisense strand to SEQ ID NO: 94842
aguacuacaccuaucuggc

SEQ ID NO: 94924 - RNA, 19 nt, Artificial Sequence
  Description of Artificial Sequence: Synthetic oligonucleotide
  Sense strand starting at position 2833 of SEQ ID NO: 1194
aagccagauagguguagua

SEQ ID NO: 94925 - RNA, 19 nt, Artificial Sequence
  Description of Artificial Sequence: Synthetic oligonucleotide
  Antisense strand to SEQ ID NO: 94844
uacuacaccuaucuggcuu

SEQ ID NO: 94926 - RNA, 19 nt, Artificial Sequence
  Description of Artificial Sequence: Synthetic oligonucleotide
  Sense strand starting at position 2827 of SEQ ID NO: 1194
gucagaaagccagauaggu

SEQ ID NO: 94927 - RNA, 19 nt, Artificial Sequence
  Description of Artificial Sequence: Synthetic oligonucleotide
  Antisense strand to SEQ ID NO: 94846
accuaucuggcuuucugac

SEQ ID NO: 94928 - RNA, 19 nt, Artificial Sequence
  Description of Artificial Sequence: Synthetic oligonucleotide
  Sense strand starting at position 2765 of SEQ ID NO: 1194
uuaauaugucaacagcaga

SEQ ID NO: 94929 - RNA, 19 nt, Artificial Sequence
  Description of Artificial Sequence: Synthetic oligonucleotide
  Antisense strand to SEQ ID NO: 94848
ucugcuguugacauauuaa

SEQ ID NO: 94930 - RNA, 19 nt, Artificial Sequence
  Description of Artificial Sequence: Synthetic oligonucleotide
  Sense strand starting at position 2526 of SEQ ID NO: 1194
gcuggaagcagcuauguuu

SEQ ID NO: 94931 - RNA, 19 nt, Artificial Sequence
  Description of Artificial Sequence: Synthetic oligonucleotide
  Antisense strand to SEQ ID NO: 94850
aaacauagcugcuuccagc

SEQ ID NO: 94932 - RNA, 19 nt, Artificial Sequence
  Description of Artificial Sequence: Synthetic oligonucleotide
  Sense strand starting at position 2320 of SEQ ID NO: 1194
gcucuuguccucugaacac

SEQ ID NO: 94933 - RNA, 19 nt, Artificial Sequence
  Description of Artificial Sequence: Synthetic oligonucleotide
  Antisense strand to SEQ ID NO: 94852
guguucagaggacaagagc

SEQ ID NO: 94934 - RNA, 19 nt, Artificial Sequence
  Description of Artificial Sequence: Synthetic oligonucleotide
  Sense strand starting at position 2280 of SEQ ID NO: 1194
aggucuguuucccucauuu

SEQ ID NO: 94935 - RNA, 19 nt, Artificial Sequence
  Description of Artificial Sequence: Synthetic oligonucleotide
  Antisense strand to SEQ ID NO: 94854
aaaugagggaaacagaccu

SEQ ID NO: 94936 - RNA, 19 nt, Artificial Sequence
  Description of Artificial Sequence: Synthetic oligonucleotide
  Sense strand starting at position 2137 of SEQ ID NO: 1194
cguagagccagcuaaacuu

SEQ ID NO: 94937 - RNA, 19 nt, Artificial Sequence
  Description of Artificial Sequence: Synthetic oligonucleotide
  Antisense strand to SEQ ID NO: 94856
aaguuuagcuggcucuacg

SEQ ID NO: 94938 - RNA, 19 nt, Artificial Sequence
  Description of Artificial Sequence: Synthetic oligonucleotide
  Sense strand starting at position 2052 of SEQ ID NO: 1194
cgucuuugauaccugagau

SEQ ID NO: 94939 - RNA, 19 nt, Artificial Sequence
  Description of Artificial Sequence: Synthetic oligonucleotide
  Antisense strand to SEQ ID NO: 94858
aucucagguaucaaagacg

SEQ ID NO: 94940 - RNA, 19 nt, Artificial Sequence
  Description of Artificial Sequence: Synthetic oligonucleotide
  Sense strand starting at position 1725 of SEQ ID NO: 1194
ggagugggugaagaguauu

SEQ ID NO: 94941 - RNA, 19 nt, Artificial Sequence
  Description of Artificial Sequence: Synthetic oligonucleotide
  Antisense strand to SEQ ID NO: 94860
aauacucuucacccacucc

SEQ ID NO: 94942 - RNA, 19 nt, Artificial Sequence
  Description of Artificial Sequence: Synthetic oligonucleotide
  Sense strand starting at position 1724 of SEQ ID NO: 1194
uggagugggugaagaguau

SEQ ID NO: 94943 - RNA, 19 nt, Artificial Sequence
  Description of Artificial Sequence: Synthetic oligonucleotide
  Antisense strand to SEQ ID NO: 94862
auacucuucacccacucca

SEQ ID NO: 94944 - RNA, 19 nt, Artificial Sequence
  Description of Artificial Sequence: Synthetic oligonucleotide
  Sense strand starting at position 3917 of SEQ ID NO: 1196
uagugaacucuguaaaguc

SEQ ID NO: 94945 - RNA, 19 nt, Artificial Sequence
  Description of Artificial Sequence: Synthetic oligonucleotide
  Antisense strand to SEQ ID NO: 94864
gacuuuacagaguucacua

SEQ ID NO: 94946 - RNA, 19 nt, Artificial Sequence
  Description of Artificial Sequence: Synthetic oligonucleotide
  Sense strand starting at position 3915 of SEQ ID NO: 1196
acuagugaacucuguaaag

SEQ ID NO: 94947 - RNA, 19 nt, Artificial Sequence
  Description of Artificial Sequence: Synthetic oligonucleotide
  Antisense strand to SEQ ID NO: 94866
cuuuacagaguucacuagu

SEQ ID NO: 94948 - RNA, 19 nt, Artificial Sequence
  Description of Artificial Sequence: Synthetic oligonucleotide
  Sense strand starting at position 3873 of SEQ ID NO: 1196
ucaaguauuucuguguccu

SEQ ID NO: 94949 - RNA, 19 nt, Artificial Sequence
  Description of Artificial Sequence: Synthetic oligonucleotide
  Antisense strand to SEQ ID NO: 94868
aggacacagaaauacuuga

SEQ ID NO: 94950 - RNA, 19 nt, Artificial Sequence
  Description of Artificial Sequence: Synthetic oligonucleotide
  Sense strand starting at position 3857 of SEQ ID NO: 1196
accauuugauaguauauca

SEQ ID NO: 94951 - RNA, 19 nt, Artificial Sequence
  Description of Artificial Sequence: Synthetic oligonucleotide
  Antisense strand to SEQ ID NO: 94870
ugauauacuaucaaauggu

SEQ ID NO: 94952 - RNA, 19 nt, Artificial Sequence
  Description of Artificial Sequence: Synthetic oligonucleotide
  Sense strand starting at position 3799 of SEQ ID NO: 1196
agaccucuguuacucuuua

SEQ ID NO: 94953 - RNA, 19 nt, Artificial Sequence
  Description of Artificial Sequence: Synthetic oligonucleotide
  Antisense strand to SEQ ID NO: 94872
uaaagaguaacagaggucu

SEQ ID NO: 94954 - RNA, 19 nt, Artificial Sequence
  Description of Artificial Sequence: Synthetic oligonucleotide
  Sense strand starting at position 3794 of SEQ ID NO: 1196
aucucagaccucuguuacu

SEQ ID NO: 94955 - RNA, 19 nt, Artificial Sequence
  Description of Artificial Sequence: Synthetic oligonucleotide
  Antisense strand to SEQ ID NO: 94874
aguaacagaggucugagau

SEQ ID NO: 94956 - RNA, 19 nt, Artificial Sequence
  Description of Artificial Sequence: Synthetic oligonucleotide
  Sense strand starting at position 3769 of SEQ ID NO: 1196
guuugaugcaccgaguaga

SEQ ID NO: 94957 - RNA, 19 nt, Artificial Sequence
  Description of Artificial Sequence: Synthetic oligonucleotide
  Antisense strand to SEQ ID NO: 94876
ucuacucggugcaucaaac

SEQ ID NO: 94958 - RNA, 19 nt, Artificial Sequence
  Description of Artificial Sequence: Synthetic oligonucleotide
  Sense strand starting at position 3757 of SEQ ID NO: 1196
cagggaaguuguguuugau

SEQ ID NO: 94959 - RNA, 19 nt, Artificial Sequence
  Description of Artificial Sequence: Synthetic oligonucleotide
  Antisense strand to SEQ ID NO: 94878
aucaaacacaacuucccug

SEQ ID NO: 94960 - RNA, 19 nt, Artificial Sequence
  Description of Artificial Sequence: Synthetic oligonucleotide
  Sense strand starting at position 3748 of SEQ ID NO: 1196
uuaacuccucagggaaguu

SEQ ID NO: 94961 - RNA, 19 nt, Artificial Sequence
  Description of Artificial Sequence: Synthetic oligonucleotide
  Antisense strand to SEQ ID NO: 94880
aacuucccugaggaguuaa

SEQ ID NO: 94962 - RNA, 19 nt, Artificial Sequence
  Description of Artificial Sequence: Synthetic oligonucleotide
  Sense strand starting at position 3445 of SEQ ID NO: 1196
ccagaaagguccuuuggaa

SEQ ID NO: 94963 - RNA, 19 nt, Artificial Sequence
  Description of Artificial Sequence: Synthetic oligonucleotide
  Antisense strand to SEQ ID NO: 94882
uuccaaaggaccuuucugg

SEQ ID NO: 94964 - RNA, 19 nt, Artificial Sequence
  Description of Artificial Sequence: Synthetic oligonucleotide
  Sense strand starting at position 3011 of SEQ ID NO: 1196
ugauaauaucccggcuuag

SEQ ID NO: 94965 - RNA, 19 nt, Artificial Sequence
  Description of Artificial Sequence: Synthetic oligonucleotide
  Antisense strand to SEQ ID NO: 94884
cuaagccgggauauuauca

SEQ ID NO: 94966 - RNA, 19 nt, Artificial Sequence
  Description of Artificial Sequence: Synthetic oligonucleotide
  Sense strand starting at position 2977 of SEQ ID NO: 1196
gcuuguuuccgccucccaa

SEQ ID NO: 94967 - RNA, 19 nt, Artificial Sequence
  Description of Artificial Sequence: Synthetic oligonucleotide
  Antisense strand to SEQ ID NO: 94886
uugggaggcggaaacaagc

SEQ ID NO: 94968 - RNA, 19 nt, Artificial Sequence
  Description of Artificial Sequence: Synthetic oligonucleotide
  Sense strand starting at position 2952 of SEQ ID NO: 1196
gguuccaaagucuagcaau

SEQ ID NO: 94969 - RNA, 19 nt, Artificial Sequence
  Description of Artificial Sequence: Synthetic oligonucleotide
  Antisense strand to SEQ ID NO: 94888
auugcuagacuuuggaacc

SEQ ID NO: 94970 - RNA, 19 nt, Artificial Sequence
  Description of Artificial Sequence: Synthetic oligonucleotide
  Sense strand starting at position 2860 of SEQ ID NO: 1196
ggucuuuggcaguauggga

SEQ ID NO: 94971 - RNA, 19 nt, Artificial Sequence
  Description of Artificial Sequence: Synthetic oligonucleotide
  Antisense strand to SEQ ID NO: 94890
ucccauacugccaaagacc

SEQ ID NO: 94972 - RNA, 19 nt, Artificial Sequence
  Description of Artificial Sequence: Synthetic oligonucleotide
  Sense strand starting at position 2647 of SEQ ID NO: 1196
gugauuacuuuggcaacca

SEQ ID NO: 94973 - RNA, 19 nt, Artificial Sequence
  Description of Artificial Sequence: Synthetic oligonucleotide
  Antisense strand to SEQ ID NO: 94892
ugguugccaaaguaaucac

SEQ ID NO: 94974 - RNA, 19 nt, Artificial Sequence
  Description of Artificial Sequence: Synthetic oligonucleotide
  Sense strand starting at position 2625 of SEQ ID NO: 1196
auacauggcuagucucaau

SEQ ID NO: 94975 - RNA, 19 nt, Artificial Sequence
  Description of Artificial Sequence: Synthetic oligonucleotide
  Antisense strand to SEQ ID NO: 94894
auugagacuagccauguau

SEQ ID NO: 94976 - RNA, 19 nt, Artificial Sequence
  Description of Artificial Sequence: Synthetic oligonucleotide
  Sense strand starting at position 2612 of SEQ ID NO: 1196
ucuuguuggcaguauacau

SEQ ID NO: 94977 - RNA, 19 nt, Artificial Sequence
  Description of Artificial Sequence: Synthetic oligonucleotide
  Antisense strand to SEQ ID NO: 94896
auguauacugccaacaaga

SEQ ID NO: 94978 - RNA, 19 nt, Artificial Sequence
  Description of Artificial Sequence: Synthetic oligonucleotide
  Sense strand starting at position 2359 of SEQ ID NO: 1196
cuaggagacuccuuaucuc

SEQ ID NO: 94979 - RNA, 19 nt, Artificial Sequence
  Description of Artificial Sequence: Synthetic oligonucleotide
  Antisense strand to SEQ ID NO: 94898
gagauaaggagucuccuag

SEQ ID NO: 94980 - RNA, 19 nt, Artificial Sequence
  Description of Artificial Sequence: Synthetic oligonucleotide
  Sense strand starting at position 2348 of SEQ ID NO: 1196
ggauucucugccuaggaga

SEQ ID NO: 94981 - RNA, 19 nt, Artificial Sequence
  Description of Artificial Sequence: Synthetic oligonucleotide
  Antisense strand to SEQ ID NO: 94900
ucuccuaggcagagaaucc

SEQ ID NO: 94982 - RNA, 19 nt, Artificial Sequence
  Description of Artificial Sequence: Synthetic oligonucleotide
  Sense strand starting at position 2316 of SEQ ID NO: 1196
uguugcuacccaggaauga

SEQ ID NO: 94983 - RNA, 19 nt, Artificial Sequence
  Description of Artificial Sequence: Synthetic oligonucleotide
  Antisense strand to SEQ ID NO: 94902
ucauuccuggguagcaaca

SEQ ID NO: 94984 - RNA, 19 nt, Artificial Sequence
  Description of Artificial Sequence: Synthetic oligonucleotide
  Sense strand starting at position 2177 of SEQ ID NO: 1196
gcuauuaaagaaugcuaag

SEQ ID NO: 94985 - RNA, 19 nt, Artificial Sequence
  Description of Artificial Sequence: Synthetic oligonucleotide
  Antisense strand to SEQ ID NO: 94904
cuuagcauucuuuaauagc

SEQ ID NO: 94986 - RNA, 19 nt, Artificial Sequence
  Description of Artificial Sequence: Synthetic oligonucleotide
  Sense strand starting at position 2059 of SEQ ID NO: 1196
ggagcuugacgucaagaau

SEQ ID NO: 94987 - RNA, 19 nt, Artificial Sequence
  Description of Artificial Sequence: Synthetic oligonucleotide
  Antisense strand to SEQ ID NO: 94906
auucuugacgucaagcucc

SEQ ID NO: 94988 - RNA, 19 nt, Artificial Sequence
  Description of Artificial Sequence: Synthetic oligonucleotide
  Sense strand starting at position 1613 of SEQ ID NO: 1196
ccaacucaccucgacgaaa

SEQ ID NO: 94989 - RNA, 19 nt, Artificial Sequence
  Description of Artificial Sequence: Synthetic oligonucleotide
  Antisense strand to SEQ ID NO: 94908
uuucgucgaggugaguugg

SEQ ID NO: 94990 - RNA, 19 nt, Artificial Sequence
  Description of Artificial Sequence: Synthetic oligonucleotide
  Sense strand starting at position 1584 of SEQ ID NO: 1196
gaggaucugcauuaugcca

SEQ ID NO: 94991 - RNA, 19 nt, Artificial Sequence
  Description of Artificial Sequence: Synthetic oligonucleotide
  Antisense strand to SEQ ID NO: 94910
uggcauaaugcagauccuc

SEQ ID NO: 94992 - RNA, 19 nt, Artificial Sequence
  Description of Artificial Sequence: Synthetic oligonucleotide
  Sense strand starting at position 1580 of SEQ ID NO: 1196
cccagaggaucugcauuau

SEQ ID NO: 94993 - RNA, 19 nt, Artificial Sequence
  Description of Artificial Sequence: Synthetic oligonucleotide
  Antisense strand to SEQ ID NO: 94912
auaaugcagauccucuggg

SEQ ID NO: 94994 - RNA, 19 nt, Artificial Sequence
  Description of Artificial Sequence: Synthetic oligonucleotide
  Sense strand starting at position 1559 of SEQ ID NO: 1196
ccugaauucgcucaggaga

SEQ ID NO: 94995 - RNA, 19 nt, Artificial Sequence
  Description of Artificial Sequence: Synthetic oligonucleotide
  Antisense strand to SEQ ID NO: 94914
ucuccugagcgaauucagg

SEQ ID NO: 94996 - RNA, 19 nt, Artificial Sequence
  Description of Artificial Sequence: Synthetic oligonucleotide
  Sense strand starting at position 1275 of SEQ ID NO: 1196
ccgaaauaugggcaucaug

SEQ ID NO: 94997 - RNA, 19 nt, Artificial Sequence
  Description of Artificial Sequence: Synthetic oligonucleotide
  Antisense strand to SEQ ID NO: 94916
caugaugcccauauuucgg

SEQ ID NO: 94998 - RNA, 19 nt, Artificial Sequence
  Description of Artificial Sequence: Synthetic oligonucleotide
  Sense strand starting at position 1274 of SEQ ID NO: 1196
cccgaaauaugggcaucau

SEQ ID NO: 94999 - RNA, 19 nt, Artificial Sequence
  Description of Artificial Sequence: Synthetic oligonucleotide
  Antisense strand to SEQ ID NO: 94918
augaugcccauauuucggg

SEQ ID NO: 95000 - RNA, 19 nt, Artificial Sequence
  Description of Artificial Sequence: Synthetic oligonucleotide
  Sense strand starting at position 1201 of SEQ ID NO: 1196
ccucauaugcccuaggcau

SEQ ID NO: 95001 - RNA, 19 nt, Artificial Sequence
  Description of Artificial Sequence: Synthetic oligonucleotide
  Antisense strand to SEQ ID NO: 94920
augccuagggcauaugagg

SEQ ID NO: 95002 - RNA, 19 nt, Artificial Sequence
  Description of Artificial Sequence: Synthetic oligonucleotide
  Sense strand starting at position 1052 of SEQ ID NO: 1196
uacauugaugauugauguu

SEQ ID NO: 95003 - RNA, 19 nt, Artificial Sequence
  Description of Artificial Sequence: Synthetic oligonucleotide
  Antisense strand to SEQ ID NO: 94922
aacaucaaucaucaaugua

SEQ ID NO: 95004 - RNA, 19 nt, Artificial Sequence
  Description of Artificial Sequence: Synthetic oligonucleotide
  Sense strand starting at position 1051 of SEQ ID NO: 1196
guacauugaugauugaugu

SEQ ID NO: 95005 - RNA, 19 nt, Artificial Sequence
  Description of Artificial Sequence: Synthetic oligonucleotide
  Antisense strand to SEQ ID NO: 94924
acaucaaucaucaauguac

SEQ ID NO: 95006 - RNA, 19 nt, Artificial Sequence
  Description of Artificial Sequence: Synthetic oligonucleotide
  Sense strand starting at position 1045 of SEQ ID NO: 1196
aggccaguacauugaugau

SEQ ID NO: 95007 - RNA, 19 nt, Artificial Sequence
  Description of Artificial Sequence: Synthetic oligonucleotide
  Antisense strand to SEQ ID NO: 94926
aucaucaauguacuggccu

SEQ ID NO: 95008 - RNA, 19 nt, Artificial Sequence
  Description of Artificial Sequence: Synthetic oligonucleotide
  Sense strand starting at position 880 of SEQ ID NO: 1196
ggucauuacggauacaucu

SEQ ID NO: 95009 - RNA, 19 nt, Artificial Sequence
  Description of Artificial Sequence: Synthetic oligonucleotide
  Antisense strand to SEQ ID NO: 94928
agauguauccguaaugacc

SEQ ID NO: 95010 - RNA, 19 nt, Artificial Sequence
  Description of Artificial Sequence: Synthetic oligonucleotide
  Sense strand starting at position 873 of SEQ ID NO: 1196
guuagagggucauuacgga

SEQ ID NO: 95011 - RNA, 19 nt, Artificial Sequence
  Description of Artificial Sequence: Synthetic oligonucleotide
  Antisense strand to SEQ ID NO: 94930
uccguaaugacccucuaac

SEQ ID NO: 95012 - RNA, 19 nt, Artificial Sequence
  Description of Artificial Sequence: Synthetic oligonucleotide
  Sense strand starting at position 867 of SEQ ID NO: 1196
ugguaaguuagagggucau

SEQ ID NO: 95013 - RNA, 19 nt, Artificial Sequence
  Description of Artificial Sequence: Synthetic oligonucleotide
  Antisense strand to SEQ ID NO: 94932
augacccucuaacuuacca

SEQ ID NO: 95014 - RNA, 19 nt, Artificial Sequence
  Description of Artificial Sequence: Synthetic oligonucleotide
  Sense strand starting at position 501 of SEQ ID NO: 1196
cagugacuauuccucagga

SEQ ID NO: 95015 - RNA, 19 nt, Artificial Sequence
  Description of Artificial Sequence: Synthetic oligonucleotide
  Antisense strand to SEQ ID NO: 94934
uccugaggaauagucacug

SEQ ID NO: 95016 - RNA, 19 nt, Artificial Sequence
  Description of Artificial Sequence: Synthetic oligonucleotide
  Sense strand starting at position 459 of SEQ ID NO: 1196
auaagaacaguccgacaau

SEQ ID NO: 95017 - RNA, 19 nt, Artificial Sequence
  Description of Artificial Sequence: Synthetic oligonucleotide
  Antisense strand to SEQ ID NO: 94936
auugucggacuguucuuau

SEQ ID NO: 95018 - RNA, 19 nt, Artificial Sequence
  Description of Artificial Sequence: Synthetic oligonucleotide
  Sense strand starting at position 198 of SEQ ID NO: 1196
ugagaaagcucuuuauuau

SEQ ID NO: 95019 - RNA, 19 nt, Artificial Sequence
  Description of Artificial Sequence: Synthetic oligonucleotide
  Antisense strand to SEQ ID NO: 94938
auaauaaagagcuuucuca

SEQ ID NO: 95020 - RNA, 19 nt, Artificial Sequence
  Description of Artificial Sequence: Synthetic oligonucleotide
  Sense strand starting at position 99 of SEQ ID NO: 1196
cgacaaguggucugaugga

SEQ ID NO: 95021 - RNA, 19 nt, Artificial Sequence
  Description of Artificial Sequence: Synthetic oligonucleotide
  Antisense strand to SEQ ID NO: 94940
uccaucagaccacuugucg

SEQ ID NO: 95022 - RNA, 19 nt, Artificial Sequence
  Description of Artificial Sequence: Synthetic oligonucleotide
  Sense strand starting at position 32 of SEQ ID NO: 1196
agacaaaugucauugauuc

SEQ ID NO: 95023 - RNA, 19 nt, Artificial Sequence
  Description of Artificial Sequence: Synthetic oligonucleotide
  Antisense strand to SEQ ID NO: 94942
gaaucaaugacauuugucu

SEQ ID NO: 95024 - RNA, 19 nt, Artificial Sequence
  Description of Artificial Sequence: Synthetic oligonucleotide
  Sense strand starting at position 286 of SEQ ID NO: 1197
gugauaaaguuacuuuaag

SEQ ID NO: 95025 - RNA, 19 nt, Artificial Sequence
  Description of Artificial Sequence: Synthetic oligonucleotide
  Antisense strand to SEQ ID NO: 94944
cuuaaaguaacuuuaucac

SEQ ID NO: 95026 - RNA, 19 nt, Artificial Sequence
  Description of Artificial Sequence: Synthetic oligonucleotide
  Sense strand starting at position 339 of SEQ ID NO: 1197
ucuaucuuauguguuagga

SEQ ID NO: 95027 - RNA, 19 nt, Artificial Sequence
  Description of Artificial Sequence: Synthetic oligonucleotide
  Antisense strand to SEQ ID NO: 94946
uccuaacacauaagauaga

SEQ ID NO: 95028 - RNA, 19 nt, Artificial Sequence
  Description of Artificial Sequence: Synthetic oligonucleotide
  Sense strand starting at position 381 of SEQ ID NO: 1197
guaagucauugcuccuaaa

SEQ ID NO: 95029 - RNA, 19 nt, Artificial Sequence
  Description of Artificial Sequence: Synthetic oligonucleotide
  Antisense strand to SEQ ID NO: 94948
uuuaggagcaaugacuuac

SEQ ID NO: 95030 - RNA, 19 nt, Artificial Sequence
  Description of Artificial Sequence: Synthetic oligonucleotide
  Sense strand starting at position 516 of SEQ ID NO: 1197
uuauuucccguuuguuauc

SEQ ID NO: 95031 - RNA, 19 nt, Artificial Sequence
  Description of Artificial Sequence: Synthetic oligonucleotide
  Antisense strand to SEQ ID NO: 94950
gauaacaaacgggaaauaa

SEQ ID NO: 95032 - RNA, 19 nt, Artificial Sequence
  Description of Artificial Sequence: Synthetic oligonucleotide
  Sense strand starting at position 530 of SEQ ID NO: 1197
uuaucuguugagggagaga

SEQ ID NO: 95033 - RNA, 19 nt, Artificial Sequence
  Description of Artificial Sequence: Synthetic oligonucleotide
  Antisense strand to SEQ ID NO: 94952
ucucucccucaacagauaa

SEQ ID NO: 95034 - RNA, 19 nt, Artificial Sequence
  Description of Artificial Sequence: Synthetic oligonucleotide
  Sense strand starting at position 766 of SEQ ID NO: 1197
aguguaucuguauagucau

SEQ ID NO: 95035 - RNA, 19 nt, Artificial Sequence
  Description of Artificial Sequence: Synthetic oligonucleotide
  Antisense strand to SEQ ID NO: 94954
augacuauacagauacacu

SEQ ID NO: 95036 - RNA, 19 nt, Artificial Sequence
  Description of Artificial Sequence: Synthetic oligonucleotide
  Sense strand starting at position 854 of SEQ ID NO: 1197
gacuuaaauugcccaggga

SEQ ID NO: 95037 - RNA, 19 nt, Artificial Sequence
  Description of Artificial Sequence: Synthetic oligonucleotide
  Antisense strand to SEQ ID NO: 94956
ucccugggcaauuuaaguc

SEQ ID NO: 95038 - RNA, 19 nt, Artificial Sequence
  Description of Artificial Sequence: Synthetic oligonucleotide
  Sense strand starting at position 874 of SEQ ID NO: 1197
cggagcagccuuuaaauaa

SEQ ID NO: 95039 - RNA, 19 nt, Artificial Sequence
  Description of Artificial Sequence: Synthetic oligonucleotide
  Antisense strand to SEQ ID NO: 94958
uuauuuaaaggcugcuccg

SEQ ID NO: 95040 - RNA, 19 nt, Artificial Sequence
  Description of Artificial Sequence: Synthetic oligonucleotide
  Sense strand starting at position 906 of SEQ ID NO: 1197
uuguaauugagguacagcu

SEQ ID NO: 95041 - RNA, 19 nt, Artificial Sequence
  Description of Artificial Sequence: Synthetic oligonucleotide
  Antisense strand to SEQ ID NO: 94960
agcuguaccucaauuacaa

SEQ ID NO: 95042 - RNA, 19 nt, Artificial Sequence
  Description of Artificial Sequence: Synthetic oligonucleotide
  Sense strand starting at position 2382 of SEQ ID NO: 1197
cgcgucuuccgagcgcaaa

SEQ ID NO: 95043 - RNA, 19 nt, Artificial Sequence
  Description of Artificial Sequence: Synthetic oligonucleotide
  Antisense strand to SEQ ID NO: 94962
uuugcgcucggaagacgcg

SEQ ID NO: 95044 - RNA, 19 nt, Artificial Sequence
  Description of Artificial Sequence: Synthetic oligonucleotide
  Sense strand starting at position 2466 of SEQ ID NO: 1197
ccucgaauuccuugaccca

SEQ ID NO: 95045 - RNA, 19 nt, Artificial Sequence
  Description of Artificial Sequence: Synthetic oligonucleotide
  Antisense strand to SEQ ID NO: 94964
ugggucaaggaauucgagg

SEQ ID NO: 95046 - RNA, 19 nt, Artificial Sequence
  Description of Artificial Sequence: Synthetic oligonucleotide
  Sense strand starting at position 2568 of SEQ ID NO: 1197
uagggcuuuguguauauau

SEQ ID NO: 95047 - RNA, 19 nt, Artificial Sequence
  Description of Artificial Sequence: Synthetic oligonucleotide
  Antisense strand to SEQ ID NO: 94966
auauauacacaaagcccua

SEQ ID NO: 95048 - RNA, 19 nt, Artificial Sequence
  Description of Artificial Sequence: Synthetic oligonucleotide
  Sense strand starting at position 2808 of SEQ ID NO: 1197
cccugaauuccagggaacu

SEQ ID NO: 95049 - RNA, 19 nt, Artificial Sequence
  Description of Artificial Sequence: Synthetic oligonucleotide
  Antisense strand to SEQ ID NO: 94968
aguucccuggaauucaggg

SEQ ID NO: 95050 - RNA, 19 nt, Artificial Sequence
  Description of Artificial Sequence: Synthetic oligonucleotide
  Sense strand starting at position 2930 of SEQ ID NO: 1197
guggguauguaacuaacua

SEQ ID NO: 95051 - RNA, 19 nt, Artificial Sequence
  Description of Artificial Sequence: Synthetic oligonucleotide
  Antisense strand to SEQ ID NO: 94970
uaguuaguuacauacccac

SEQ ID NO: 95052 - RNA, 19 nt, Artificial Sequence
  Description of Artificial Sequence: Synthetic oligonucleotide
  Sense strand starting at position 2934 of SEQ ID NO: 1197
guauguaacuaacuaugga

SEQ ID NO: 95053 - RNA, 19 nt, Artificial Sequence
  Description of Artificial Sequence: Synthetic oligonucleotide
  Antisense strand to SEQ ID NO: 94972
uccauaguuaguuacauac

SEQ ID NO: 95054 - RNA, 19 nt, Artificial Sequence
  Description of Artificial Sequence: Synthetic oligonucleotide
  Sense strand starting at position 3004 of SEQ ID NO: 1197
caagcuuagucagcagacu

SEQ ID NO: 95055 - RNA, 19 nt, Artificial Sequence
  Description of Artificial Sequence: Synthetic oligonucleotide
  Antisense strand to SEQ ID NO: 94974
agucugcugacuaagcuug

SEQ ID NO: 95056 - RNA, 19 nt, Artificial Sequence
  Description of Artificial Sequence: Synthetic oligonucleotide
  Sense strand starting at position 3189 of SEQ ID NO: 1197
uaggcuguagcuugaugaa

SEQ ID NO: 95057 - RNA, 19 nt, Artificial Sequence
  Description of Artificial Sequence: Synthetic oligonucleotide
  Antisense strand to SEQ ID NO: 94976
uucaucaagcuacagccua

SEQ ID NO: 95058 - RNA, 19 nt, Artificial Sequence
  Description of Artificial Sequence: Synthetic oligonucleotide
  Sense strand starting at position 3218 of SEQ ID NO: 1197
gggccuuuaucaucaggaa

SEQ ID NO: 95059 - RNA, 19 nt, Artificial Sequence
  Description of Artificial Sequence: Synthetic oligonucleotide
  Antisense strand to SEQ ID NO: 94978
uuccugaugauaaaggccc

SEQ ID NO: 95060 - RNA, 19 nt, Artificial Sequence
  Description of Artificial Sequence: Synthetic oligonucleotide
  Sense strand starting at position 3278 of SEQ ID NO: 1197
uuggcaaaugauugguagu

SEQ ID NO: 95061 - RNA, 19 nt, Artificial Sequence
  Description of Artificial Sequence: Synthetic oligonucleotide
  Antisense strand to SEQ ID NO: 94980
acuaccaaucauuugccaa

SEQ ID NO: 95062 - RNA, 19 nt, Artificial Sequence
  Description of Artificial Sequence: Synthetic oligonucleotide
  Sense strand starting at position 3279 of SEQ ID NO: 1197
uggcaaaugauugguaguu

SEQ ID NO: 95063 - RNA, 19 nt, Artificial Sequence
  Description of Artificial Sequence: Synthetic oligonucleotide
  Antisense strand to SEQ ID NO: 94982
aacuaccaaucauuugcca

SEQ ID NO: 95064 - RNA, 19 nt, Artificial Sequence
  Description of Artificial Sequence: Synthetic oligonucleotide
  Sense strand starting at position 3280 of SEQ ID NO: 1197
ggcaaaugauugguaguuu

SEQ ID NO: 95065 - RNA, 19 nt, Artificial Sequence
  Description of Artificial Sequence: Synthetic oligonucleotide
  Antisense strand to SEQ ID NO: 94984
aaacuaccaaucauuugcc

SEQ ID NO: 95066 - RNA, 19 nt, Artificial Sequence
  Description of Artificial Sequence: Synthetic oligonucleotide
  Sense strand starting at position 3318 of SEQ ID NO: 1197
cagugugaguuucuuuaau

SEQ ID NO: 95067 - RNA, 19 nt, Artificial Sequence
  Description of Artificial Sequence: Synthetic oligonucleotide
  Antisense strand to SEQ ID NO: 94986
auuaaagaaacucacacug

SEQ ID NO: 95068 - RNA, 19 nt, Artificial Sequence
  Description of Artificial Sequence: Synthetic oligonucleotide
  Sense strand starting at position 3420 of SEQ ID NO: 1197
cuaagcaauguguauaaca

SEQ ID NO: 95069 - RNA, 19 nt, Artificial Sequence
  Description of Artificial Sequence: Synthetic oligonucleotide
  Antisense strand to SEQ ID NO: 94988
uguuauacacauugcuuag

SEQ ID NO: 95070 - RNA, 19 nt, Artificial Sequence
  Description of Artificial Sequence: Synthetic oligonucleotide
  Sense strand starting at position 3422 of SEQ ID NO: 1197
aagcaauguguauaacaag

SEQ ID NO: 95071 - RNA, 19 nt, Artificial Sequence
  Description of Artificial Sequence: Synthetic oligonucleotide
  Antisense strand to SEQ ID NO: 94990
cuuguuauacacauugcuu

SEQ ID NO: 95072 - RNA, 19 nt, Artificial Sequence
  Description of Artificial Sequence: Synthetic oligonucleotide
  Sense strand starting at position 3478 of SEQ ID NO: 1197
acaugagcagcuuauauua

SEQ ID NO: 95073 - RNA, 19 nt, Artificial Sequence
  Description of Artificial Sequence: Synthetic oligonucleotide
  Antisense strand to SEQ ID NO: 94992
uaauauaagcugcucaugu

SEQ ID NO: 95074 - RNA, 19 nt, Artificial Sequence
  Description of Artificial Sequence: Synthetic oligonucleotide
  Sense strand starting at position 3576 of SEQ ID NO: 1197
cugguacucugguucuaag

SEQ ID NO: 95075 - RNA, 19 nt, Artificial Sequence
  Description of Artificial Sequence: Synthetic oligonucleotide
  Antisense strand to SEQ ID NO: 94994
cuuagaaccagaguaccag

SEQ ID NO: 95076 - RNA, 19 nt, Artificial Sequence
  Description of Artificial Sequence: Synthetic oligonucleotide
  Sense strand starting at position 3583 of SEQ ID NO: 1197
ucugguucuaaguaggaau

SEQ ID NO: 95077 - RNA, 19 nt, Artificial Sequence
  Description of Artificial Sequence: Synthetic oligonucleotide
  Antisense strand to SEQ ID NO: 94996
auuccuacuuagaaccaga

SEQ ID NO: 95078 - RNA, 19 nt, Artificial Sequence
  Description of Artificial Sequence: Synthetic oligonucleotide
  Sense strand starting at position 3611 of SEQ ID NO: 1197
cuaucucauucgcugagga

SEQ ID NO: 95079 - RNA, 19 nt, Artificial Sequence
  Description of Artificial Sequence: Synthetic oligonucleotide
  Antisense strand to SEQ ID NO: 94998
uccucagcgaaugagauag

SEQ ID NO: 95080 - RNA, 19 nt, Artificial Sequence
  Description of Artificial Sequence: Synthetic oligonucleotide
  Sense strand starting at position 3612 of SEQ ID NO: 1197
uaucucauucgcugaggaa

SEQ ID NO: 95081 - RNA, 19 nt, Artificial Sequence
  Description of Artificial Sequence: Synthetic oligonucleotide
  Antisense strand to SEQ ID NO: 95000
uuccucagcgaaugagaua

SEQ ID NO: 95082 - RNA, 19 nt, Artificial Sequence
  Description of Artificial Sequence: Synthetic oligonucleotide
  Sense strand starting at position 3613 of SEQ ID NO: 1197
aucucauucgcugaggaau

SEQ ID NO: 95083 - RNA, 19 nt, Artificial Sequence
  Description of Artificial Sequence: Synthetic oligonucleotide
  Antisense strand to SEQ ID NO: 95002
auuccucagcgaaugagau

SEQ ID NO: 95084 - RNA, 19 nt, Artificial Sequence
  Description of Artificial Sequence: Synthetic oligonucleotide
  Sense strand starting at position 3635 of SEQ ID NO: 1197
ccugaagucuuguuuauag

SEQ ID NO: 95085 - RNA, 19 nt, Artificial Sequence
  Description of Artificial Sequence: Synthetic oligonucleotide
  Antisense strand to SEQ ID NO: 95004
cuauaaacaagacuucagg

SEQ ID NO: 95086 - RNA, 19 nt, Artificial Sequence
  Description of Artificial Sequence: Synthetic oligonucleotide
  Sense strand starting at position 3637 of SEQ ID NO: 1197
ugaagucuuguuuauagac

SEQ ID NO: 95087 - RNA, 19 nt, Artificial Sequence
  Description of Artificial Sequence: Synthetic oligonucleotide
  Antisense strand to SEQ ID NO: 95006
gucuauaaacaagacuuca

SEQ ID NO: 95088 - RNA, 19 nt, Artificial Sequence
  Description of Artificial Sequence: Synthetic oligonucleotide
  Sense strand starting at position 3712 of SEQ ID NO: 1197
gucuaaugaaagugagcau

SEQ ID NO: 95089 - RNA, 19 nt, Artificial Sequence
  Description of Artificial Sequence: Synthetic oligonucleotide
  Antisense strand to SEQ ID NO: 95008
augcucacuuucauuagac

SEQ ID NO: 95090 - RNA, 19 nt, Artificial Sequence
  Description of Artificial Sequence: Synthetic oligonucleotide
  Sense strand starting at position 3750 of SEQ ID NO: 1197
cauuguauugcguuguuaa

SEQ ID NO: 95091 - RNA, 19 nt, Artificial Sequence
  Description of Artificial Sequence: Synthetic oligonucleotide
  Antisense strand to SEQ ID NO: 95010
uuaacaacgcaauacaaug

SEQ ID NO: 95092 - RNA, 19 nt, Artificial Sequence
  Description of Artificial Sequence: Synthetic oligonucleotide
  Sense strand starting at position 3752 of SEQ ID NO: 1197
uuguauugcguuguuaaug

SEQ ID NO: 95093 - RNA, 19 nt, Artificial Sequence
  Description of Artificial Sequence: Synthetic oligonucleotide
  Antisense strand to SEQ ID NO: 95012
cauuaacaacgcaauacaa

SEQ ID NO: 95094 - RNA, 19 nt, Artificial Sequence
  Description of Artificial Sequence: Synthetic oligonucleotide
  Sense strand starting at position 3864 of SEQ ID NO: 1197
ugcacauuaugguuacuua

SEQ ID NO: 95095 - RNA, 19 nt, Artificial Sequence
  Description of Artificial Sequence: Synthetic oligonucleotide
  Antisense strand to SEQ ID NO: 95014
uaaguaaccauaaugugca

SEQ ID NO: 95096 - RNA, 19 nt, Artificial Sequence
  Description of Artificial Sequence: Synthetic oligonucleotide
  Sense strand starting at position 3865 of SEQ ID NO: 1197
gcacauuaugguuacuuaa

SEQ ID NO: 95097 - RNA, 19 nt, Artificial Sequence
  Description of Artificial Sequence: Synthetic oligonucleotide
  Antisense strand to SEQ ID NO: 95016
uuaaguaaccauaaugugc

SEQ ID NO: 95098 - RNA, 19 nt, Artificial Sequence
  Description of Artificial Sequence: Synthetic oligonucleotide
  Sense strand starting at position 3867 of SEQ ID NO: 1197
acauuaugguuacuuaaga

SEQ ID NO: 95099 - RNA, 19 nt, Artificial Sequence
  Description of Artificial Sequence: Synthetic oligonucleotide
  Antisense strand to SEQ ID NO: 95018
ucuuaaguaaccauaaugu

SEQ ID NO: 95100 - RNA, 19 nt, Artificial Sequence
  Description of Artificial Sequence: Synthetic oligonucleotide
  Sense strand starting at position 3907 of SEQ ID NO: 1197
cgaacugacuccucuaagu

SEQ ID NO: 95101 - RNA, 19 nt, Artificial Sequence
  Description of Artificial Sequence: Synthetic oligonucleotide
  Antisense strand to SEQ ID NO: 95020
acuuagaggagucaguucg

SEQ ID NO: 95102 - RNA, 19 nt, Artificial Sequence
  Description of Artificial Sequence: Synthetic oligonucleotide
  Sense strand starting at position 3970 of SEQ ID NO: 1197
ggagucagaauccggauaa

SEQ ID NO: 95103 - RNA, 19 nt, Artificial Sequence
  Description of Artificial Sequence: Synthetic oligonucleotide
  Antisense strand to SEQ ID NO: 95022
uuauccggauucugacucc

SEQ ID NO: 95104 - RNA, 19 nt, Artificial Sequence
  Description of Artificial Sequence: Synthetic oligonucleotide
  Sense strand starting at position 227 of SEQ ID NO: 1198
gucagaagucaguaaguau

SEQ ID NO: 95105 - RNA, 19 nt, Artificial Sequence
  Description of Artificial Sequence: Synthetic oligonucleotide
  Antisense strand to SEQ ID NO: 95024
auacuuacugacuucugac

SEQ ID NO: 95106 - RNA, 19 nt, Artificial Sequence
  Description of Artificial Sequence: Synthetic oligonucleotide
  Sense strand starting at position 427 of SEQ ID NO: 1198
ugguucuaucuugacaguu

SEQ ID NO: 95107 - RNA, 19 nt, Artificial Sequence
  Description of Artificial Sequence: Synthetic oligonucleotide
  Antisense strand to SEQ ID NO: 95026
aacugucaagauagaacca

SEQ ID NO: 95108 - RNA, 19 nt, Artificial Sequence
  Description of Artificial Sequence: Synthetic oligonucleotide
  Sense strand starting at position 525 of SEQ ID NO: 1198
ucuuuauugcaauggaguu

SEQ ID NO: 95109 - RNA, 19 nt, Artificial Sequence
  Description of Artificial Sequence: Synthetic oligonucleotide
  Antisense strand to SEQ ID NO: 95028
aacuccauugcaauaaaga

SEQ ID NO: 95110 - RNA, 19 nt, Artificial Sequence
  Description of Artificial Sequence: Synthetic oligonucleotide
  Sense strand starting at position 734 of SEQ ID NO: 1198
gguaccuggccucacaaau

SEQ ID NO: 95111 - RNA, 19 nt, Artificial Sequence
  Description of Artificial Sequence: Synthetic oligonucleotide
  Antisense strand to SEQ ID NO: 95030
auuugugaggccagguacc

SEQ ID NO: 95112 - RNA, 19 nt, Artificial Sequence
  Description of Artificial Sequence: Synthetic oligonucleotide
  Sense strand starting at position 888 of SEQ ID NO: 1198
aucuacuaaccaugugaga

SEQ ID NO: 95113 - RNA, 19 nt, Artificial Sequence
  Description of Artificial Sequence: Synthetic oligonucleotide
  Antisense strand to SEQ ID NO: 95032
ucucacaugguuaguagau

SEQ ID NO: 95114 - RNA, 19 nt, Artificial Sequence
  Description of Artificial Sequence: Synthetic oligonucleotide
  Sense strand starting at position 1128 of SEQ ID NO: 1198
acugacuuuacacgaggau

SEQ ID NO: 95115 - RNA, 19 nt, Artificial Sequence
  Description of Artificial Sequence: Synthetic oligonucleotide
  Antisense strand to SEQ ID NO: 95034
auccucguguaaagucagu

SEQ ID NO: 95116 - RNA, 19 nt, Artificial Sequence
  Description of Artificial Sequence: Synthetic oligonucleotide
  Sense strand starting at position 1307 of SEQ ID NO: 1198
uugcuaauccgugcugacu

SEQ ID NO: 95117 - RNA, 19 nt, Artificial Sequence
  Description of Artificial Sequence: Synthetic oligonucleotide
  Antisense strand to SEQ ID NO: 95036
agucagcacggauuagcaa

SEQ ID NO: 95118 - RNA, 19 nt, Artificial Sequence
  Description of Artificial Sequence: Synthetic oligonucleotide
  Sense strand starting at position 1343 of SEQ ID NO: 1198
gcgugagaaucuuccagaa

SEQ ID NO: 95119 - RNA, 19 nt, Artificial Sequence
  Description of Artificial Sequence: Synthetic oligonucleotide
  Antisense strand to SEQ ID NO: 95038
uucuggaagauucucacgc

SEQ ID NO: 95120 - RNA, 19 nt, Artificial Sequence
  Description of Artificial Sequence: Synthetic oligonucleotide
  Sense strand starting at position 1363 of SEQ ID NO: 1198
guuugagucacauaagagc

SEQ ID NO: 95121 - RNA, 19 nt, Artificial Sequence
  Description of Artificial Sequence: Synthetic oligonucleotide
  Antisense strand to SEQ ID NO: 95040
gcucuuaugugacucaaac

SEQ ID NO: 95122 - RNA, 19 nt, Artificial Sequence
  Description of Artificial Sequence: Synthetic oligonucleotide
  Sense strand starting at position 1463 of SEQ ID NO: 1198
cgcugugucaggcucuaaa

SEQ ID NO: 95123 - RNA, 19 nt, Artificial Sequence
  Description of Artificial Sequence: Synthetic oligonucleotide
  Antisense strand to SEQ ID NO: 95042
uuuagagccugacacagcg

SEQ ID NO: 95124 - RNA, 19 nt, Artificial Sequence
  Description of Artificial Sequence: Synthetic oligonucleotide
  Sense strand starting at position 1682 of SEQ ID NO: 1198
cgaggcguugccugaauuu

SEQ ID NO: 95125 - RNA, 19 nt, Artificial Sequence
  Description of Artificial Sequence: Synthetic oligonucleotide
  Antisense strand to SEQ ID NO: 95044
aaauucaggcaacgccucg

SEQ ID NO: 95126 - RNA, 19 nt, Artificial Sequence
  Description of Artificial Sequence: Synthetic oligonucleotide
  Sense strand starting at position 1717 of SEQ ID NO: 1198
ggaagacccuccguagguu

SEQ ID NO: 95127 - RNA, 19 nt, Artificial Sequence
  Description of Artificial Sequence: Synthetic oligonucleotide
  Antisense strand to SEQ ID NO: 95046
aaccuacggagggucuucc

SEQ ID NO: 95128 - RNA, 19 nt, Artificial Sequence
  Description of Artificial Sequence: Synthetic oligonucleotide
  Sense strand starting at position 1725 of SEQ ID NO: 1198
cuccguagguuauuugaca

SEQ ID NO: 95129 - RNA, 19 nt, Artificial Sequence
  Description of Artificial Sequence: Synthetic oligonucleotide
  Antisense strand to SEQ ID NO: 95048
ugucaaauaaccuacggag

SEQ ID NO: 95130 - RNA, 19 nt, Artificial Sequence
  Description of Artificial Sequence: Synthetic oligonucleotide
  Sense strand starting at position 1726 of SEQ ID NO: 1198
uccguagguuauuugacau

SEQ ID NO: 95131 - RNA, 19 nt, Artificial Sequence
  Description of Artificial Sequence: Synthetic oligonucleotide
  Antisense strand to SEQ ID NO: 95050
augucaaauaaccuacgga

SEQ ID NO: 95132 - RNA, 19 nt, Artificial Sequence
  Description of Artificial Sequence: Synthetic oligonucleotide
  Sense strand starting at position 2159 of SEQ ID NO: 1198
agccgauagcuggagcaaa

SEQ ID NO: 95133 - RNA, 19 nt, Artificial Sequence
  Description of Artificial Sequence: Synthetic oligonucleotide
  Antisense strand to SEQ ID NO: 95052
uuugcuccagcuaucggcu

SEQ ID NO: 95134 - RNA, 19 nt, Artificial Sequence
  Description of Artificial Sequence: Synthetic oligonucleotide
  Sense strand starting at position 2455 of SEQ ID NO: 1198
augcacuucuggccugaga

SEQ ID NO: 95135 - RNA, 19 nt, Artificial Sequence
  Description of Artificial Sequence: Synthetic oligonucleotide
  Antisense strand to SEQ ID NO: 95054
ucucaggccagaagugcau

SEQ ID NO: 95136 - RNA, 19 nt, Artificial Sequence
  Description of Artificial Sequence: Synthetic oligonucleotide
  Sense strand starting at position 2457 of SEQ ID NO: 1198
gcacuucuggccugagaaa

SEQ ID NO: 95137 - RNA, 19 nt, Artificial Sequence
  Description of Artificial Sequence: Synthetic oligonucleotide
  Antisense strand to SEQ ID NO: 95056
uuucucaggccagaagugc

SEQ ID NO: 95138 - RNA, 19 nt, Artificial Sequence
  Description of Artificial Sequence: Synthetic oligonucleotide
  Sense strand starting at position 2500 of SEQ ID NO: 1198
gcgauuauuguugcugcuu

SEQ ID NO: 95139 - RNA, 19 nt, Artificial Sequence
  Description of Artificial Sequence: Synthetic oligonucleotide
  Antisense strand to SEQ ID NO: 95058
aagcagcaacaauaaucgc

SEQ ID NO: 95140 - RNA, 19 nt, Artificial Sequence
  Description of Artificial Sequence: Synthetic oligonucleotide
  Sense strand starting at position 2600 of SEQ ID NO: 1198
ucgaaacuaucacuuauug

SEQ ID NO: 95141 - RNA, 19 nt, Artificial Sequence
  Description of Artificial Sequence: Synthetic oligonucleotide
  Antisense strand to SEQ ID NO: 95060
caauaagugauaguuucga

SEQ ID NO: 95142 - RNA, 19 nt, Artificial Sequence
  Description of Artificial Sequence: Synthetic oligonucleotide
  Sense strand starting at position 2627 of SEQ ID NO: 1198
accuuuauuucugaaggga

SEQ ID NO: 95143 - RNA, 19 nt, Artificial Sequence
  Description of Artificial Sequence: Synthetic oligonucleotide
  Antisense strand to SEQ ID NO: 95062
ucccuucagaaauaaaggu

SEQ ID NO: 95144 - RNA, 19 nt, Artificial Sequence
  Description of Artificial Sequence: Synthetic oligonucleotide
  Sense strand starting at position 2711 of SEQ ID NO: 1198
guugaugcucuuuaucuca

SEQ ID NO: 95145 - RNA, 19 nt, Artificial Sequence
  Description of Artificial Sequence: Synthetic oligonucleotide
  Antisense strand to SEQ ID NO: 95064
ugagauaaagagcaucaac

SEQ ID NO: 95146 - RNA, 19 nt, Artificial Sequence
  Description of Artificial Sequence: Synthetic oligonucleotide
  Sense strand starting at position 2782 of SEQ ID NO: 1198
cgccauuggcaauauacuu

SEQ ID NO: 95147 - RNA, 19 nt, Artificial Sequence
  Description of Artificial Sequence: Synthetic oligonucleotide
  Antisense strand to SEQ ID NO: 95066
aaguauauugccaauggcg

SEQ ID NO: 95148 - RNA, 19 nt, Artificial Sequence
  Description of Artificial Sequence: Synthetic oligonucleotide
  Sense strand starting at position 2888 of SEQ ID NO: 1198
aucacugauucucuuaugu

SEQ ID NO: 95149 - RNA, 19 nt, Artificial Sequence
  Description of Artificial Sequence: Synthetic oligonucleotide
  Antisense strand to SEQ ID NO: 95068
acauaagagaaucagugau

SEQ ID NO: 95150 - RNA, 19 nt, Artificial Sequence
  Description of Artificial Sequence: Synthetic oligonucleotide
  Sense strand starting at position 2943 of SEQ ID NO: 1198
augcuccuggauugaauua

SEQ ID NO: 95151 - RNA, 19 nt, Artificial Sequence
  Description of Artificial Sequence: Synthetic oligonucleotide
  Antisense strand to SEQ ID NO: 95070
uaauucaauccaggagcau

SEQ ID NO: 95152 - RNA, 19 nt, Artificial Sequence
  Description of Artificial Sequence: Synthetic oligonucleotide
  Sense strand starting at position 2999 of SEQ ID NO: 1198
uguccuuggcacugauuua

SEQ ID NO: 95153 - RNA, 19 nt, Artificial Sequence
  Description of Artificial Sequence: Synthetic oligonucleotide
  Antisense strand to SEQ ID NO: 95072
uaaaucagugccaaggaca

SEQ ID NO: 95154 - RNA, 19 nt, Artificial Sequence
  Description of Artificial Sequence: Synthetic oligonucleotide
  Sense strand starting at position 3079 of SEQ ID NO: 1198
aguaacugaugcucagaga

SEQ ID NO: 95155 - RNA, 19 nt, Artificial Sequence
  Description of Artificial Sequence: Synthetic oligonucleotide
  Antisense strand to SEQ ID NO: 95074
ucucugagcaucaguuacu

SEQ ID NO: 95156 - RNA, 19 nt, Artificial Sequence
  Description of Artificial Sequence: Synthetic oligonucleotide
  Sense strand starting at position 3123 of SEQ ID NO: 1198
agagcuugugagugaugga

SEQ ID NO: 95157 - RNA, 19 nt, Artificial Sequence
  Description of Artificial Sequence: Synthetic oligonucleotide
  Antisense strand to SEQ ID NO: 95076
uccaucacucacaagcucu

SEQ ID NO: 95158 - RNA, 19 nt, Artificial Sequence
  Description of Artificial Sequence: Synthetic oligonucleotide
  Sense strand starting at position 3157 of SEQ ID NO: 1198
cagguugucuggcuaaaca

SEQ ID NO: 95159 - RNA, 19 nt, Artificial Sequence
  Description of Artificial Sequence: Synthetic oligonucleotide
  Antisense strand to SEQ ID NO: 95078
uguuuagccagacaaccug

SEQ ID NO: 95160 - RNA, 19 nt, Artificial Sequence
  Description of Artificial Sequence: Synthetic oligonucleotide
  Sense strand starting at position 3231 of SEQ ID NO: 1198
ucugauuucucugagaucu

SEQ ID NO: 95161 - RNA, 19 nt, Artificial Sequence
  Description of Artificial Sequence: Synthetic oligonucleotide
  Antisense strand to SEQ ID NO: 95080
agaucucagagaaaucaga

SEQ ID NO: 95162 - RNA, 19 nt, Artificial Sequence
  Description of Artificial Sequence: Synthetic oligonucleotide
  Sense strand starting at position 3233 of SEQ ID NO: 1198
ugauuucucugagaucuau

SEQ ID NO: 95163 - RNA, 19 nt, Artificial Sequence
  Description of Artificial Sequence: Synthetic oligonucleotide
  Antisense strand to SEQ ID NO: 95082
auagaucucagagaaauca

SEQ ID NO: 95164 - RNA, 19 nt, Artificial Sequence
  Description of Artificial Sequence: Synthetic oligonucleotide
  Sense strand starting at position 3244 of SEQ ID NO: 1198
agaucuauaccuggauguu

SEQ ID NO: 95165 - RNA, 19 nt, Artificial Sequence
  Description of Artificial Sequence: Synthetic oligonucleotide
  Antisense strand to SEQ ID NO: 95084
aacauccagguauagaucu

SEQ ID NO: 95166 - RNA, 19 nt, Artificial Sequence
  Description of Artificial Sequence: Synthetic oligonucleotide
  Sense strand starting at position 3245 of SEQ ID NO: 1198
gaucuauaccuggauguuc

SEQ ID NO: 95167 - RNA, 19 nt, Artificial Sequence
  Description of Artificial Sequence: Synthetic oligonucleotide
  Antisense strand to SEQ ID NO: 95086
gaacauccagguauagauc

SEQ ID NO: 95168 - RNA, 19 nt, Artificial Sequence
  Description of Artificial Sequence: Synthetic oligonucleotide
  Sense strand starting at position 3262 of SEQ ID NO: 1198
ucaagugaauuguugagau

SEQ ID NO: 95169 - RNA, 19 nt, Artificial Sequence
  Description of Artificial Sequence: Synthetic oligonucleotide
  Antisense strand to SEQ ID NO: 95088
aucucaacaauucacuuga

SEQ ID NO: 95170 - RNA, 19 nt, Artificial Sequence
  Description of Artificial Sequence: Synthetic oligonucleotide
  Sense strand starting at position 3429 of SEQ ID NO: 1198
ccuaaaucccagugucauc

SEQ ID NO: 95171 - RNA, 19 nt, Artificial Sequence
  Description of Artificial Sequence: Synthetic oligonucleotide
  Antisense strand to SEQ ID NO: 95090
gaugacacugggauuuagg

SEQ ID NO: 95172 - RNA, 19 nt, Artificial Sequence
  Description of Artificial Sequence: Synthetic oligonucleotide
  Sense strand starting at position 3434 of SEQ ID NO: 1198
aucccagugucauccuuaa

SEQ ID NO: 95173 - RNA, 19 nt, Artificial Sequence
  Description of Artificial Sequence: Synthetic oligonucleotide
  Antisense strand to SEQ ID NO: 95092
uuaaggaugacacugggau

SEQ ID NO: 95174 - RNA, 19 nt, Artificial Sequence
  Description of Artificial Sequence: Synthetic oligonucleotide
  Sense strand starting at position 3564 of SEQ ID NO: 1198
gcuuacuuggucuaguaaa

SEQ ID NO: 95175 - RNA, 19 nt, Artificial Sequence
  Description of Artificial Sequence: Synthetic oligonucleotide
  Antisense strand to SEQ ID NO: 95094
uuuacuagaccaaguaagc

SEQ ID NO: 95176 - RNA, 19 nt, Artificial Sequence
  Description of Artificial Sequence: Synthetic oligonucleotide
  Sense strand starting at position 3575 of SEQ ID NO: 1198
cuaguaaagcuuuaacgga

SEQ ID NO: 95177 - RNA, 19 nt, Artificial Sequence
  Description of Artificial Sequence: Synthetic oligonucleotide
  Antisense strand to SEQ ID NO: 95096
uccguuaaagcuuuacuag

SEQ ID NO: 95178 - RNA, 19 nt, Artificial Sequence
  Description of Artificial Sequence: Synthetic oligonucleotide
  Sense strand starting at position 3908 of SEQ ID NO: 1198
acucuuguauuccuguaaa

SEQ ID NO: 95179 - RNA, 19 nt, Artificial Sequence
  Description of Artificial Sequence: Synthetic oligonucleotide
  Antisense strand to SEQ ID NO: 95098
uuuacaggaauacaagagu

SEQ ID NO: 95180 - RNA, 19 nt, Artificial Sequence
  Description of Artificial Sequence: Synthetic oligonucleotide
  Sense strand starting at position 3911 of SEQ ID NO: 1198
cuuguauuccuguaaaugc

SEQ ID NO: 95181 - RNA, 19 nt, Artificial Sequence
  Description of Artificial Sequence: Synthetic oligonucleotide
  Antisense strand to SEQ ID NO: 95100
gcauuuacaggaauacaag

SEQ ID NO: 95182 - RNA, 19 nt, Artificial Sequence
  Description of Artificial Sequence: Synthetic oligonucleotide
  Sense strand starting at position 3955 of SEQ ID NO: 1198
cacaaaucugaugguguca

SEQ ID NO: 95183 - RNA, 19 nt, Artificial Sequence
  Description of Artificial Sequence: Synthetic oligonucleotide
  Antisense strand to SEQ ID NO: 95102
ugacaccaucagauuugug

SEQ ID NO: 95184 - RNA, 19 nt, Artificial Sequence
  Description of Artificial Sequence: Synthetic oligonucleotide
  Sense strand starting at position 3459 of SEQ ID NO: 1199
ugccguauucaagcgauuc

SEQ ID NO: 95185 - RNA, 19 nt, Artificial Sequence
  Description of Artificial Sequence: Synthetic oligonucleotide
  Antisense strand to SEQ ID NO: 95104
gaaucgcuugaauacggca

SEQ ID NO: 95186 - RNA, 19 nt, Artificial Sequence
  Description of Artificial Sequence: Synthetic oligonucleotide
  Sense strand starting at position 3362 of SEQ ID NO: 1199
agagcuuuccuaugaaacu

SEQ ID NO: 95187 - RNA, 19 nt, Artificial Sequence
  Description of Artificial Sequence: Synthetic oligonucleotide
  Antisense strand to SEQ ID NO: 95106
aguuucauaggaaagcucu

SEQ ID NO: 95188 - RNA, 19 nt, Artificial Sequence
  Description of Artificial Sequence: Synthetic oligonucleotide
  Sense strand starting at position 3283 of SEQ ID NO: 1199
ugguaagaaauccggcaua

SEQ ID NO: 95189 - RNA, 19 nt, Artificial Sequence
  Description of Artificial Sequence: Synthetic oligonucleotide
  Antisense strand to SEQ ID NO: 95108
uaugccggauuucuuacca

SEQ ID NO: 95190 - RNA, 19 nt, Artificial Sequence
  Description of Artificial Sequence: Synthetic oligonucleotide
  Sense strand starting at position 3257 of SEQ ID NO: 1199
agcuguugagcagacuuaa

SEQ ID NO: 95191 - RNA, 19 nt, Artificial Sequence
  Description of Artificial Sequence: Synthetic oligonucleotide
  Antisense strand to SEQ ID NO: 95110
uuaagucugcucaacagcu

SEQ ID NO: 95192 - RNA, 19 nt, Artificial Sequence
  Description of Artificial Sequence: Synthetic oligonucleotide
  Sense strand starting at position 3175 of SEQ ID NO: 1199
ggccauauccaaugcuaca

SEQ ID NO: 95193 - RNA, 19 nt, Artificial Sequence
  Description of Artificial Sequence: Synthetic oligonucleotide
  Antisense strand to SEQ ID NO: 95112
uguagcauuggauauggcc

SEQ ID NO: 95194 - RNA, 19 nt, Artificial Sequence
  Description of Artificial Sequence: Synthetic oligonucleotide
  Sense strand starting at position 3047 of SEQ ID NO: 1199
agguuaggguucucauaga

SEQ ID NO: 95195 - RNA, 19 nt, Artificial Sequence
  Description of Artificial Sequence: Synthetic oligonucleotide
  Antisense strand to SEQ ID NO: 95114
ucuaugagaacccuaaccu

SEQ ID NO: 95196 - RNA, 19 nt, Artificial Sequence
  Description of Artificial Sequence: Synthetic oligonucleotide
  Sense strand starting at position 3034 of SEQ ID NO: 1199
aaugauaaugccuagguua

SEQ ID NO: 95197 - RNA, 19 nt, Artificial Sequence
  Description of Artificial Sequence: Synthetic oligonucleotide
  Antisense strand to SEQ ID NO: 95116
uaaccuaggcauuaucauu

SEQ ID NO: 95198 - RNA, 19 nt, Artificial Sequence
  Description of Artificial Sequence: Synthetic oligonucleotide
  Sense strand starting at position 2979 of SEQ ID NO: 1199
ucgacauuaacauggguuu

SEQ ID NO: 95199 - RNA, 19 nt, Artificial Sequence
  Description of Artificial Sequence: Synthetic oligonucleotide
  Antisense strand to SEQ ID NO: 95118
aaacccauguuaaugucga

SEQ ID NO: 95200 - RNA, 19 nt, Artificial Sequence
  Description of Artificial Sequence: Synthetic oligonucleotide
  Sense strand starting at position 2908 of SEQ ID NO: 1199
agacaauuauugcugauga

SEQ ID NO: 95201 - RNA, 19 nt, Artificial Sequence
  Description of Artificial Sequence: Synthetic oligonucleotide
  Antisense strand to SEQ ID NO: 95120
ucaucagcaauaauugucu

SEQ ID NO: 95202 - RNA, 19 nt, Artificial Sequence
  Description of Artificial Sequence: Synthetic oligonucleotide
  Sense strand starting at position 2905 of SEQ ID NO: 1199
gcaagacaauuauugcuga

SEQ ID NO: 95203 - RNA, 19 nt, Artificial Sequence
  Description of Artificial Sequence: Synthetic oligonucleotide
  Antisense strand to SEQ ID NO: 95122
ucagcaauaauugucuugc

SEQ ID NO: 95204 - RNA, 19 nt, Artificial Sequence
  Description of Artificial Sequence: Synthetic oligonucleotide
  Sense strand starting at position 2855 of SEQ ID NO: 1199
gggcguuugcaucuguuau

SEQ ID NO: 95205 - RNA, 19 nt, Artificial Sequence
  Description of Artificial Sequence: Synthetic oligonucleotide
  Antisense strand to SEQ ID NO: 95124
auaacagaugcaaacgccc

SEQ ID NO: 95206 - RNA, 19 nt, Artificial Sequence
  Description of Artificial Sequence: Synthetic oligonucleotide
  Sense strand starting at position 2826 of SEQ ID NO: 1199
guucacuuauacguaguga

SEQ ID NO: 95207 - RNA, 19 nt, Artificial Sequence
  Description of Artificial Sequence: Synthetic oligonucleotide
  Antisense strand to SEQ ID NO: 95126
ucacuacguauaagugaac

SEQ ID NO: 95208 - RNA, 19 nt, Artificial Sequence
  Description of Artificial Sequence: Synthetic oligonucleotide
  Sense strand starting at position 2783 of SEQ ID NO: 1199
gccauccaagguuguaaau

SEQ ID NO: 95209 - RNA, 19 nt, Artificial Sequence
  Description of Artificial Sequence: Synthetic oligonucleotide
  Antisense strand to SEQ ID NO: 95128
auuuacaaccuuggauggc

SEQ ID NO: 95210 - RNA, 19 nt, Artificial Sequence
  Description of Artificial Sequence: Synthetic oligonucleotide
  Sense strand starting at position 2753 of SEQ ID NO: 1199
agugaagucuggccaucuu

SEQ ID NO: 95211 - RNA, 19 nt, Artificial Sequence
  Description of Artificial Sequence: Synthetic oligonucleotide
  Antisense strand to SEQ ID NO: 95130
aagauggccagacuucacu

SEQ ID NO: 95212 - RNA, 19 nt, Artificial Sequence
  Description of Artificial Sequence: Synthetic oligonucleotide
  Sense strand starting at position 2664 of SEQ ID NO: 1199
gaggguguugagcagucaa

SEQ ID NO: 95213 - RNA, 19 nt, Artificial Sequence
  Description of Artificial Sequence: Synthetic oligonucleotide
  Antisense strand to SEQ ID NO: 95132
uugacugcucaacacccuc

SEQ ID NO: 95214 - RNA, 19 nt, Artificial Sequence
  Description of Artificial Sequence: Synthetic oligonucleotide
  Sense strand starting at position 2583 of SEQ ID NO: 1199
ccugcaugucuauauaaag

SEQ ID NO: 95215 - RNA, 19 nt, Artificial Sequence
  Description of Artificial Sequence: Synthetic oligonucleotide
  Antisense strand to SEQ ID NO: 95134
cuuuauauagacaugcagg

SEQ ID NO: 95216 - RNA, 19 nt, Artificial Sequence
  Description of Artificial Sequence: Synthetic oligonucleotide
  Sense strand starting at position 2580 of SEQ ID NO: 1199
gcaccugcaugucuauaua

SEQ ID NO: 95217 - RNA, 19 nt, Artificial Sequence
  Description of Artificial Sequence: Synthetic oligonucleotide
  Antisense strand to SEQ ID NO: 95136
uauauagacaugcaggugc

SEQ ID NO: 95218 - RNA, 19 nt, Artificial Sequence
  Description of Artificial Sequence: Synthetic oligonucleotide
  Sense strand starting at position 2267 of SEQ ID NO: 1199
ugcucugggcuuuaagaaa

SEQ ID NO: 95219 - RNA, 19 nt, Artificial Sequence
  Description of Artificial Sequence: Synthetic oligonucleotide
  Antisense strand to SEQ ID NO: 95138
uuucuuaaagcccagagca

SEQ ID NO: 95220 - RNA, 19 nt, Artificial Sequence
  Description of Artificial Sequence: Synthetic oligonucleotide
  Sense strand starting at position 2262 of SEQ ID NO: 1199
uuauuugcucugggcuuua

SEQ ID NO: 95221 - RNA, 19 nt, Artificial Sequence
  Description of Artificial Sequence: Synthetic oligonucleotide
  Antisense strand to SEQ ID NO: 95140
uaaagcccagagcaaauaa

SEQ ID NO: 95222 - RNA, 19 nt, Artificial Sequence
  Description of Artificial Sequence: Synthetic oligonucleotide
  Sense strand starting at position 2233 of SEQ ID NO: 1199
guauaucuacuguaguaga

SEQ ID NO: 95223 - RNA, 19 nt, Artificial Sequence
  Description of Artificial Sequence: Synthetic oligonucleotide
  Antisense strand to SEQ ID NO: 95142
ucuacuacaguagauauac

SEQ ID NO: 95224 - RNA, 19 nt, Artificial Sequence
  Description of Artificial Sequence: Synthetic oligonucleotide
  Sense strand starting at position 2197 of SEQ ID NO: 1199
cggcgaauagcugugaguu

SEQ ID NO: 95225 - RNA, 19 nt, Artificial Sequence
  Description of Artificial Sequence: Synthetic oligonucleotide
  Antisense strand to SEQ ID NO: 95144
aacucacagcuauucgccg

SEQ ID NO: 95226 - RNA, 19 nt, Artificial Sequence
  Description of Artificial Sequence: Synthetic oligonucleotide
  Sense strand starting at position 2170 of SEQ ID NO: 1199
gcaguaguuccuuaagagg

SEQ ID NO: 95227 - RNA, 19 nt, Artificial Sequence
  Description of Artificial Sequence: Synthetic oligonucleotide
  Antisense strand to SEQ ID NO: 95146
ccucuuaaggaacuacugc

SEQ ID NO: 95228 - RNA, 19 nt, Artificial Sequence
  Description of Artificial Sequence: Synthetic oligonucleotide
  Sense strand starting at position 2169 of SEQ ID NO: 1199
cgcaguaguuccuuaagag

SEQ ID NO: 95229 - RNA, 19 nt, Artificial Sequence
  Description of Artificial Sequence: Synthetic oligonucleotide
  Antisense strand to SEQ ID NO: 95148
cucuuaaggaacuacugcg

SEQ ID NO: 95230 - RNA, 19 nt, Artificial Sequence
  Description of Artificial Sequence: Synthetic oligonucleotide
  Sense strand starting at position 2104 of SEQ ID NO: 1199
cuuuaaagcguucagggau

SEQ ID NO: 95231 - RNA, 19 nt, Artificial Sequence
  Description of Artificial Sequence: Synthetic oligonucleotide
  Antisense strand to SEQ ID NO: 95150
aucccugaacgcuuuaaag

SEQ ID NO: 95232 - RNA, 19 nt, Artificial Sequence
  Description of Artificial Sequence: Synthetic oligonucleotide
  Sense strand starting at position 1225 of SEQ ID NO: 1199
acccgugaguccuuaccau

SEQ ID NO: 95233 - RNA, 19 nt, Artificial Sequence
  Description of Artificial Sequence: Synthetic oligonucleotide
  Antisense strand to SEQ ID NO: 95152
augguaaggacucacgggu

SEQ ID NO: 95234 - RNA, 19 nt, Artificial Sequence
  Description of Artificial Sequence: Synthetic oligonucleotide
  Sense strand starting at position 1106 of SEQ ID NO: 1199
gaccacuaagucugaggua

SEQ ID NO: 95235 - RNA, 19 nt, Artificial Sequence
  Description of Artificial Sequence: Synthetic oligonucleotide
  Antisense strand to SEQ ID NO: 95154
uaccucagacuuagugguc

SEQ ID NO: 95236 - RNA, 19 nt, Artificial Sequence
  Description of Artificial Sequence: Synthetic oligonucleotide
  Sense strand starting at position 1073 of SEQ ID NO: 1199
uggcgauugugauuauaaa

SEQ ID NO: 95237 - RNA, 19 nt, Artificial Sequence
  Description of Artificial Sequence: Synthetic oligonucleotide
  Antisense strand to SEQ ID NO: 95156
uuuauaaucacaaucgcca

SEQ ID NO: 95238 - RNA, 19 nt, Artificial Sequence
  Description of Artificial Sequence: Synthetic oligonucleotide
  Sense strand starting at position 958 of SEQ ID NO: 1199
auuacaggaucuccugauu

SEQ ID NO: 95239 - RNA, 19 nt, Artificial Sequence
  Description of Artificial Sequence: Synthetic oligonucleotide
  Antisense strand to SEQ ID NO: 95158
aaucaggagauccuguaau

SEQ ID NO: 95240 - RNA, 19 nt, Artificial Sequence
  Description of Artificial Sequence: Synthetic oligonucleotide
  Sense strand starting at position 900 of SEQ ID NO: 1199
uccucuuuacagugaaguu

SEQ ID NO: 95241 - RNA, 19 nt, Artificial Sequence
  Description of Artificial Sequence: Synthetic oligonucleotide
  Antisense strand to SEQ ID NO: 95160
aacuucacuguaaagagga

SEQ ID NO: 95242 - RNA, 19 nt, Artificial Sequence
  Description of Artificial Sequence: Synthetic oligonucleotide
  Sense strand starting at position 847 of SEQ ID NO: 1199
acaagaagaugcgcugaaa

SEQ ID NO: 95243 - RNA, 19 nt, Artificial Sequence
  Description of Artificial Sequence: Synthetic oligonucleotide
  Antisense strand to SEQ ID NO: 95162
uuucagcgcaucuucuugu

SEQ ID NO: 95244 - RNA, 19 nt, Artificial Sequence
  Description of Artificial Sequence: Synthetic oligonucleotide
  Sense strand starting at position 836 of SEQ ID NO: 1199
gguucuuugccacaagaag

SEQ ID NO: 95245 - RNA, 19 nt, Artificial Sequence
  Description of Artificial Sequence: Synthetic oligonucleotide
  Antisense strand to SEQ ID NO: 95164
cuucuuguggcaaagaacc

SEQ ID NO: 95246 - RNA, 19 nt, Artificial Sequence
  Description of Artificial Sequence: Synthetic oligonucleotide
  Sense strand starting at position 722 of SEQ ID NO: 1199
aguuccacugucuaauaaa

SEQ ID NO: 95247 - RNA, 19 nt, Artificial Sequence
  Description of Artificial Sequence: Synthetic oligonucleotide
  Antisense strand to SEQ ID NO: 95166
uuuauuagacaguggaacu

SEQ ID NO: 95248 - RNA, 19 nt, Artificial Sequence
  Description of Artificial Sequence: Synthetic oligonucleotide
  Sense strand starting at position 628 of SEQ ID NO: 1199
uauguuagugguuaagaag

SEQ ID NO: 95249 - RNA, 19 nt, Artificial Sequence
  Description of Artificial Sequence: Synthetic oligonucleotide
  Antisense strand to SEQ ID NO: 95168
cuucuuaaccacuaacaua

SEQ ID NO: 95250 - RNA, 19 nt, Artificial Sequence
  Description of Artificial Sequence: Synthetic oligonucleotide
  Sense strand starting at position 627 of SEQ ID NO: 1199
guauguuagugguuaagaa

SEQ ID NO: 95251 - RNA, 19 nt, Artificial Sequence
  Description of Artificial Sequence: Synthetic oligonucleotide
  Antisense strand to SEQ ID NO: 95170
uucuuaaccacuaacauac

SEQ ID NO: 95252 - RNA, 19 nt, Artificial Sequence
  Description of Artificial Sequence: Synthetic oligonucleotide
  Sense strand starting at position 625 of SEQ ID NO: 1199
cuguauguuagugguuaag

SEQ ID NO: 95253 - RNA, 19 nt, Artificial Sequence
  Description of Artificial Sequence: Synthetic oligonucleotide
  Antisense strand to SEQ ID NO: 95172
cuuaaccacuaacauacag

SEQ ID NO: 95254 - RNA, 19 nt, Artificial Sequence
  Description of Artificial Sequence: Synthetic oligonucleotide
  Sense strand starting at position 623 of SEQ ID NO: 1199
aacuguauguuagugguua

SEQ ID NO: 95255 - RNA, 19 nt, Artificial Sequence
  Description of Artificial Sequence: Synthetic oligonucleotide
  Antisense strand to SEQ ID NO: 95174
uaaccacuaacauacaguu

SEQ ID NO: 95256 - RNA, 19 nt, Artificial Sequence
  Description of Artificial Sequence: Synthetic oligonucleotide
  Sense strand starting at position 614 of SEQ ID NO: 1199
acgagaaauaacuguaugu

SEQ ID NO: 95257 - RNA, 19 nt, Artificial Sequence
  Description of Artificial Sequence: Synthetic oligonucleotide
  Antisense strand to SEQ ID NO: 95176
acauacaguuauuucucgu

SEQ ID NO: 95258 - RNA, 19 nt, Artificial Sequence
  Description of Artificial Sequence: Synthetic oligonucleotide
  Sense strand starting at position 604 of SEQ ID NO: 1199
ucaguuagugacgagaaau

SEQ ID NO: 95259 - RNA, 19 nt, Artificial Sequence
  Description of Artificial Sequence: Synthetic oligonucleotide
  Antisense strand to SEQ ID NO: 95178
auuucucgucacuaacuga

SEQ ID NO: 95260 - RNA, 19 nt, Artificial Sequence
  Description of Artificial Sequence: Synthetic oligonucleotide
  Sense strand starting at position 596 of SEQ ID NO: 1199
cgugcugcucaguuaguga

SEQ ID NO: 95261 - RNA, 19 nt, Artificial Sequence
  Description of Artificial Sequence: Synthetic oligonucleotide
  Antisense strand to SEQ ID NO: 95180
ucacuaacugagcagcacg

SEQ ID NO: 95262 - RNA, 19 nt, Artificial Sequence
  Description of Artificial Sequence: Synthetic oligonucleotide
  Sense strand starting at position 575 of SEQ ID NO: 1199
agaaaucugucaguuaaua

SEQ ID NO: 95263 - RNA, 19 nt, Artificial Sequence
  Description of Artificial Sequence: Synthetic oligonucleotide
  Antisense strand to SEQ ID NO: 95182
uauuaacugacagauuucu

SEQ ID NO: 95264 - RNA, 19 nt, Artificial Sequence
  Description of Artificial Sequence: Synthetic oligonucleotide
  Sense strand starting at position 50 of SEQ ID NO: 1200
cacugugacucggcagaaa

SEQ ID NO: 95265 - RNA, 19 nt, Artificial Sequence
  Description of Artificial Sequence: Synthetic oligonucleotide
  Antisense strand to SEQ ID NO: 95184
uuucugccgagucacagug

SEQ ID NO: 95266 - RNA, 19 nt, Artificial Sequence
  Description of Artificial Sequence: Synthetic oligonucleotide
  Sense strand starting at position 189 of SEQ ID NO: 1200
auccgucugcuccgcgauu

SEQ ID NO: 95267 - RNA, 19 nt, Artificial Sequence
  Description of Artificial Sequence: Synthetic oligonucleotide
  Antisense strand to SEQ ID NO: 95186
aaucgcggagcagacggau

SEQ ID NO: 95268 - RNA, 19 nt, Artificial Sequence
  Description of Artificial Sequence: Synthetic oligonucleotide
  Sense strand starting at position 382 of SEQ ID NO: 1200
ggccguguuucgggaagcu

SEQ ID NO: 95269 - RNA, 19 nt, Artificial Sequence
  Description of Artificial Sequence: Synthetic oligonucleotide
  Antisense strand to SEQ ID NO: 95188
agcuucccgaaacacggcc

SEQ ID NO: 95270 - RNA, 19 nt, Artificial Sequence
  Description of Artificial Sequence: Synthetic oligonucleotide
  Sense strand starting at position 383 of SEQ ID NO: 1200
gccguguuucgggaagcua

SEQ ID NO: 95271 - RNA, 19 nt, Artificial Sequence
  Description of Artificial Sequence: Synthetic oligonucleotide
  Antisense strand to SEQ ID NO: 95190
uagcuucccgaaacacggc

SEQ ID NO: 95272 - RNA, 19 nt, Artificial Sequence
  Description of Artificial Sequence: Synthetic oligonucleotide
  Sense strand starting at position 384 of SEQ ID NO: 1200
ccguguuucgggaagcuag

SEQ ID NO: 95273 - RNA, 19 nt, Artificial Sequence
  Description of Artificial Sequence: Synthetic oligonucleotide
  Antisense strand to SEQ ID NO: 95192
cuagcuucccgaaacacgg

SEQ ID NO: 95274 - RNA, 19 nt, Artificial Sequence
  Description of Artificial Sequence: Synthetic oligonucleotide
  Sense strand starting at position 385 of SEQ ID NO: 1200
cguguuucgggaagcuaga

SEQ ID NO: 95275 - RNA, 19 nt, Artificial Sequence
  Description of Artificial Sequence: Synthetic oligonucleotide
  Antisense strand to SEQ ID NO: 95194
ucuagcuucccgaaacacg

SEQ ID NO: 95276 - RNA, 19 nt, Artificial Sequence
  Description of Artificial Sequence: Synthetic oligonucleotide
  Sense strand starting at position 1119 of SEQ ID NO: 1200
gacccauagucagagaucu

SEQ ID NO: 95277 - RNA, 19 nt, Artificial Sequence
  Description of Artificial Sequence: Synthetic oligonucleotide
  Antisense strand to SEQ ID NO: 95196
agaucucugacuauggguc

SEQ ID NO: 95278 - RNA, 19 nt, Artificial Sequence
  Description of Artificial Sequence: Synthetic oligonucleotide
  Sense strand starting at position 1131 of SEQ ID NO: 1200
gagaucugcucagauacag

SEQ ID NO: 95279 - RNA, 19 nt, Artificial Sequence
  Description of Artificial Sequence: Synthetic oligonucleotide
  Antisense strand to SEQ ID NO: 95198
cuguaucugagcagaucuc

SEQ ID NO: 95280 - RNA, 19 nt, Artificial Sequence
  Description of Artificial Sequence: Synthetic oligonucleotide
  Sense strand starting at position 1251 of SEQ ID NO: 1200
gcggaaacgcauugucaag

SEQ ID NO: 95281 - RNA, 19 nt, Artificial Sequence
  Description of Artificial Sequence: Synthetic oligonucleotide
  Antisense strand to SEQ ID NO: 95200
cuugacaaugcguuuccgc

SEQ ID NO: 95282 - RNA, 19 nt, Artificial Sequence
  Description of Artificial Sequence: Synthetic oligonucleotide
  Sense strand starting at position 1258 of SEQ ID NO: 1200
cgcauugucaagcggagaa

SEQ ID NO: 95283 - RNA, 19 nt, Artificial Sequence
  Description of Artificial Sequence: Synthetic oligonucleotide
  Antisense strand to SEQ ID NO: 95202
uucuccgcuugacaaugcg

SEQ ID NO: 95284 - RNA, 19 nt, Artificial Sequence
  Description of Artificial Sequence: Synthetic oligonucleotide
  Sense strand starting at position 1305 of SEQ ID NO: 1200
ggagcgcgcgugucaaaua

SEQ ID NO: 95285 - RNA, 19 nt, Artificial Sequence
  Description of Artificial Sequence: Synthetic oligonucleotide
  Antisense strand to SEQ ID NO: 95204
uauuugacacgcgcgcucc

SEQ ID NO: 95286 - RNA, 19 nt, Artificial Sequence
  Description of Artificial Sequence: Synthetic oligonucleotide
  Sense strand starting at position 1306 of SEQ ID NO: 1200
gagcgcgcgugucaaauaa

SEQ ID NO: 95287 - RNA, 19 nt, Artificial Sequence
  Description of Artificial Sequence: Synthetic oligonucleotide
  Antisense strand to SEQ ID NO: 95206
uuauuugacacgcgcgcuc

SEQ ID NO: 95288 - RNA, 19 nt, Artificial Sequence
  Description of Artificial Sequence: Synthetic oligonucleotide
  Sense strand starting at position 1308 of SEQ ID NO: 1200
gcgcgcgugucaaauaaac

SEQ ID NO: 95289 - RNA, 19 nt, Artificial Sequence
  Description of Artificial Sequence: Synthetic oligonucleotide
  Antisense strand to SEQ ID NO: 95208
guuuauuugacacgcgcgc

SEQ ID NO: 95290 - RNA, 19 nt, Artificial Sequence
  Description of Artificial Sequence: Synthetic oligonucleotide
  Sense strand starting at position 1334 of SEQ ID NO: 1200
gcgagaaucacacagcuca

SEQ ID NO: 95291 - RNA, 19 nt, Artificial Sequence
  Description of Artificial Sequence: Synthetic oligonucleotide
  Antisense strand to SEQ ID NO: 95210
ugagcugugugauucucgc

SEQ ID NO: 95292 - RNA, 19 nt, Artificial Sequence
  Description of Artificial Sequence: Synthetic oligonucleotide
  Sense strand starting at position 2248 of SEQ ID NO: 1200
gagggaugucuaggaguga

SEQ ID NO: 95293 - RNA, 19 nt, Artificial Sequence
  Description of Artificial Sequence: Synthetic oligonucleotide
  Antisense strand to SEQ ID NO: 95212
ucacuccuagacaucccuc

SEQ ID NO: 95294 - RNA, 19 nt, Artificial Sequence
  Description of Artificial Sequence: Synthetic oligonucleotide
  Sense strand starting at position 2434 of SEQ ID NO: 1200
auuauaaaucccuguggcu

SEQ ID NO: 95295 - RNA, 19 nt, Artificial Sequence
  Description of Artificial Sequence: Synthetic oligonucleotide
  Antisense strand to SEQ ID NO: 95214
agccacagggauuuauaau

SEQ ID NO: 95296 - RNA, 19 nt, Artificial Sequence
  Description of Artificial Sequence: Synthetic oligonucleotide
  Sense strand starting at position 2486 of SEQ ID NO: 1200
guugcacgcucaugugauc

SEQ ID NO: 95297 - RNA, 19 nt, Artificial Sequence
  Description of Artificial Sequence: Synthetic oligonucleotide
  Antisense strand to SEQ ID NO: 95216
gaucacaugagcgugcaac

SEQ ID NO: 95298 - RNA, 19 nt, Artificial Sequence
  Description of Artificial Sequence: Synthetic oligonucleotide
  Sense strand starting at position 2617 of SEQ ID NO: 1200
aaggaauccucgcugugau

SEQ ID NO: 95299 - RNA, 19 nt, Artificial Sequence
  Description of Artificial Sequence: Synthetic oligonucleotide
  Antisense strand to SEQ ID NO: 95218
aucacagcgaggauuccuu

SEQ ID NO: 95300 - RNA, 19 nt, Artificial Sequence
  Description of Artificial Sequence: Synthetic oligonucleotide
  Sense strand starting at position 2618 of SEQ ID NO: 1200
aggaauccucgcugugaug

SEQ ID NO: 95301 - RNA, 19 nt, Artificial Sequence
  Description of Artificial Sequence: Synthetic oligonucleotide
  Antisense strand to SEQ ID NO: 95220
caucacagcgaggauuccu

SEQ ID NO: 95302 - RNA, 19 nt, Artificial Sequence
  Description of Artificial Sequence: Synthetic oligonucleotide
  Sense strand starting at position 2620 of SEQ ID NO: 1200
gaauccucgcugugaugga

SEQ ID NO: 95303 - RNA, 19 nt, Artificial Sequence
  Description of Artificial Sequence: Synthetic oligonucleotide
  Antisense strand to SEQ ID NO: 95222
uccaucacagcgaggauuc

SEQ ID NO: 95304 - RNA, 19 nt, Artificial Sequence
  Description of Artificial Sequence: Synthetic oligonucleotide
  Sense strand starting at position 2624 of SEQ ID NO: 1200
ccucgcugugauggagaaa

SEQ ID NO: 95305 - RNA, 19 nt, Artificial Sequence
  Description of Artificial Sequence: Synthetic oligonucleotide
  Antisense strand to SEQ ID NO: 95224
uuucuccaucacagcgagg

SEQ ID NO: 95306 - RNA, 19 nt, Artificial Sequence
  Description of Artificial Sequence: Synthetic oligonucleotide
  Sense strand starting at position 2864 of SEQ ID NO: 1200
acuugugagccggguccaa

SEQ ID NO: 95307 - RNA, 19 nt, Artificial Sequence
  Description of Artificial Sequence: Synthetic oligonucleotide
  Antisense strand to SEQ ID NO: 95226
uuggacccggcucacaagu

SEQ ID NO: 95308 - RNA, 19 nt, Artificial Sequence
  Description of Artificial Sequence: Synthetic oligonucleotide
  Sense strand starting at position 2905 of SEQ ID NO: 1200
augagauuccagggcauug

SEQ ID NO: 95309 - RNA, 19 nt, Artificial Sequence
  Description of Artificial Sequence: Synthetic oligonucleotide
  Antisense strand to SEQ ID NO: 95228
caaugcccuggaaucucau

SEQ ID NO: 95310 - RNA, 19 nt, Artificial Sequence
  Description of Artificial Sequence: Synthetic oligonucleotide
  Sense strand starting at position 3421 of SEQ ID NO: 1200
ccugcucuccugcaguuau

SEQ ID NO: 95311 - RNA, 19 nt, Artificial Sequence
  Description of Artificial Sequence: Synthetic oligonucleotide
  Antisense strand to SEQ ID NO: 95230
auaacugcaggagagcagg

SEQ ID NO: 95312 - RNA, 19 nt, Artificial Sequence
  Description of Artificial Sequence: Synthetic oligonucleotide
  Sense strand starting at position 3434 of SEQ ID NO: 1200
aguuaugucuuaguuggaa

SEQ ID NO: 95313 - RNA, 19 nt, Artificial Sequence
  Description of Artificial Sequence: Synthetic oligonucleotide
  Antisense strand to SEQ ID NO: 95232
uuccaacuaagacauaacu

SEQ ID NO: 95314 - RNA, 19 nt, Artificial Sequence
  Description of Artificial Sequence: Synthetic oligonucleotide
  Sense strand starting at position 3436 of SEQ ID NO: 1200
uuaugucuuaguuggaaga

SEQ ID NO: 95315 - RNA, 19 nt, Artificial Sequence
  Description of Artificial Sequence: Synthetic oligonucleotide
  Antisense strand to SEQ ID NO: 95234
ucuuccaacuaagacauaa

SEQ ID NO: 95316 - RNA, 19 nt, Artificial Sequence
  Description of Artificial Sequence: Synthetic oligonucleotide
  Sense strand starting at position 3438 of SEQ ID NO: 1200
augucuuaguuggaagaga

SEQ ID NO: 95317 - RNA, 19 nt, Artificial Sequence
  Description of Artificial Sequence: Synthetic oligonucleotide
  Antisense strand to SEQ ID NO: 95236
ucucuuccaacuaagacau

SEQ ID NO: 95318 - RNA, 19 nt, Artificial Sequence
  Description of Artificial Sequence: Synthetic oligonucleotide
  Sense strand starting at position 3545 of SEQ ID NO: 1200
ggguaacuguagaggugau

SEQ ID NO: 95319 - RNA, 19 nt, Artificial Sequence
  Description of Artificial Sequence: Synthetic oligonucleotide
  Antisense strand to SEQ ID NO: 95238
aucaccucuacaguuaccc

SEQ ID NO: 95320 - RNA, 19 nt, Artificial Sequence
  Description of Artificial Sequence: Synthetic oligonucleotide
  Sense strand starting at position 3773 of SEQ ID NO: 1200
gaguuuggauucuguguca

SEQ ID NO: 95321 - RNA, 19 nt, Artificial Sequence
  Description of Artificial Sequence: Synthetic oligonucleotide
  Antisense strand to SEQ ID NO: 95240
ugacacagaauccaaacuc

SEQ ID NO: 95322 - RNA, 19 nt, Artificial Sequence
  Description of Artificial Sequence: Synthetic oligonucleotide
  Sense strand starting at position 3922 of SEQ ID NO: 1200
ucacuuucuuaucugggaa

SEQ ID NO: 95323 - RNA, 19 nt, Artificial Sequence
  Description of Artificial Sequence: Synthetic oligonucleotide
  Antisense strand to SEQ ID NO: 95242
uucccagauaagaaaguga

SEQ ID NO: 95324 - RNA, 19 nt, Artificial Sequence
  Description of Artificial Sequence: Synthetic oligonucleotide
  Sense strand starting at position 3924 of SEQ ID NO: 1200
acuuucuuaucugggaaau

SEQ ID NO: 95325 - RNA, 19 nt, Artificial Sequence
  Description of Artificial Sequence: Synthetic oligonucleotide
  Antisense strand to SEQ ID NO: 95244
auuucccagauaagaaagu

SEQ ID NO: 95326 - RNA, 19 nt, Artificial Sequence
  Description of Artificial Sequence: Synthetic oligonucleotide
  Sense strand starting at position 3925 of SEQ ID NO: 1200
cuuucuuaucugggaaaug

SEQ ID NO: 95327 - RNA, 19 nt, Artificial Sequence
  Description of Artificial Sequence: Synthetic oligonucleotide
  Antisense strand to SEQ ID NO: 95246
cauuucccagauaagaaag

SEQ ID NO: 95328 - RNA, 19 nt, Artificial Sequence
  Description of Artificial Sequence: Synthetic oligonucleotide
  Sense strand starting at position 3951 of SEQ ID NO: 1200
uaaggaauuucugagguuc

SEQ ID NO: 95329 - RNA, 19 nt, Artificial Sequence
  Description of Artificial Sequence: Synthetic oligonucleotide
  Antisense strand to SEQ ID NO: 95248
gaaccucagaaauuccuua

SEQ ID NO: 95330 - RNA, 19 nt, Artificial Sequence
  Description of Artificial Sequence: Synthetic oligonucleotide
  Sense strand starting at position 123 of SEQ ID NO: 1201
uuugaugacaguugggaau

SEQ ID NO: 95331 - RNA, 19 nt, Artificial Sequence
  Description of Artificial Sequence: Synthetic oligonucleotide
  Antisense strand to SEQ ID NO: 95250
auucccaacugucaucaaa

SEQ ID NO: 95332 - RNA, 19 nt, Artificial Sequence
  Description of Artificial Sequence: Synthetic oligonucleotide
  Sense strand starting at position 126 of SEQ ID NO: 1201
gaugacaguugggaaugaa

SEQ ID NO: 95333 - RNA, 19 nt, Artificial Sequence
  Description of Artificial Sequence: Synthetic oligonucleotide
  Antisense strand to SEQ ID NO: 95252
uucauucccaacugucauc

SEQ ID NO: 95334 - RNA, 19 nt, Artificial Sequence
  Description of Artificial Sequence: Synthetic oligonucleotide
  Sense strand starting at position 138 of SEQ ID NO: 1201
gaaugaagauaugaaugca

SEQ ID NO: 95335 - RNA, 19 nt, Artificial Sequence
  Description of Artificial Sequence: Synthetic oligonucleotide
  Antisense strand to SEQ ID NO: 95254
ugcauucauaucuucauuc

SEQ ID NO: 95336 - RNA, 19 nt, Artificial Sequence
  Description of Artificial Sequence: Synthetic oligonucleotide
  Sense strand starting at position 220 of SEQ ID NO: 1201
gaagcuaaaucugcaugua

SEQ ID NO: 95337 - RNA, 19 nt, Artificial Sequence
  Description of Artificial Sequence: Synthetic oligonucleotide
  Antisense strand to SEQ ID NO: 95256
uacaugcagauuuagcuuc

SEQ ID NO: 95338 - RNA, 19 nt, Artificial Sequence
  Description of Artificial Sequence: Synthetic oligonucleotide
  Sense strand starting at position 223 of SEQ ID NO: 1201
gcuaaaucugcauguaugu

SEQ ID NO: 95339 - RNA, 19 nt, Artificial Sequence
  Description of Artificial Sequence: Synthetic oligonucleotide
  Antisense strand to SEQ ID NO: 95258
acauacaugcagauuuagc

SEQ ID NO: 95340 - RNA, 19 nt, Artificial Sequence
  Description of Artificial Sequence: Synthetic oligonucleotide
  Sense strand starting at position 232 of SEQ ID NO: 1201
gcauguaugucaccuuuga

SEQ ID NO: 95341 - RNA, 19 nt, Artificial Sequence
  Description of Artificial Sequence: Synthetic oligonucleotide
  Antisense strand to SEQ ID NO: 95260
ucaaaggugacauacaugc

SEQ ID NO: 95342 - RNA, 19 nt, Artificial Sequence
  Description of Artificial Sequence: Synthetic oligonucleotide
  Sense strand starting at position 236 of SEQ ID NO: 1201
guaugucaccuuugaugau

SEQ ID NO: 95343 - RNA, 19 nt, Artificial Sequence
  Description of Artificial Sequence: Synthetic oligonucleotide
  Antisense strand to SEQ ID NO: 95262
aucaucaaaggugacauac

SEQ ID NO: 95344 - RNA, 19 nt, Artificial Sequence
  Description of Artificial Sequence: Synthetic oligonucleotide
  Sense strand starting at position 272 of SEQ ID NO: 1201
ggucccaauucugcugaaa

SEQ ID NO: 95345 - RNA, 19 nt, Artificial Sequence
  Description of Artificial Sequence: Synthetic oligonucleotide
  Antisense strand to SEQ ID NO: 95264
uuucagcagaauugggacc

SEQ ID NO: 95346 - RNA, 19 nt, Artificial Sequence
  Description of Artificial Sequence: Synthetic oligonucleotide
  Sense strand starting at position 283 of SEQ ID NO: 1201
ugcugaaaucuugggagca

SEQ ID NO: 95347 - RNA, 19 nt, Artificial Sequence
  Description of Artificial Sequence: Synthetic oligonucleotide
  Antisense strand to SEQ ID NO: 95266
ugcucccaagauuucagca

SEQ ID NO: 95348 - RNA, 19 nt, Artificial Sequence
  Description of Artificial Sequence: Synthetic oligonucleotide
  Sense strand starting at position 426 of SEQ ID NO: 1201
ggugcucaucccuguggau

SEQ ID NO: 95349 - RNA, 19 nt, Artificial Sequence
  Description of Artificial Sequence: Synthetic oligonucleotide
  Antisense strand to SEQ ID NO: 95268
auccacagggaugagcacc

SEQ ID NO: 95350 - RNA, 19 nt, Artificial Sequence
  Description of Artificial Sequence: Synthetic oligonucleotide
  Sense strand starting at position 671 of SEQ ID NO: 1201
cugcaucauuggcucuuaa

SEQ ID NO: 95351 - RNA, 19 nt, Artificial Sequence
  Description of Artificial Sequence: Synthetic oligonucleotide
  Antisense strand to SEQ ID NO: 95270
uuaagagccaaugaugcag

SEQ ID NO: 95352 - RNA, 19 nt, Artificial Sequence
  Description of Artificial Sequence: Synthetic oligonucleotide
  Sense strand starting at position 824 of SEQ ID NO: 1201
gugcacgguacugagaaua

SEQ ID NO: 95353 - RNA, 19 nt, Artificial Sequence
  Description of Artificial Sequence: Synthetic oligonucleotide
  Antisense strand to SEQ ID NO: 95272
uauucucaguaccgugcac

SEQ ID NO: 95354 - RNA, 19 nt, Artificial Sequence
  Description of Artificial Sequence: Synthetic oligonucleotide
  Sense strand starting at position 844 of SEQ ID NO: 1201
ggccguuucccauagagua

SEQ ID NO: 95355 - RNA, 19 nt, Artificial Sequence
  Description of Artificial Sequence: Synthetic oligonucleotide
  Antisense strand to SEQ ID NO: 95274
uacucuaugggaaacggcc

SEQ ID NO: 95356 - RNA, 19 nt, Artificial Sequence
  Description of Artificial Sequence: Synthetic oligonucleotide
  Sense strand starting at position 931 of SEQ ID NO: 1201
ggagaugauccugggcauc

SEQ ID NO: 95357 - RNA, 19 nt, Artificial Sequence
  Description of Artificial Sequence: Synthetic oligonucleotide
  Antisense strand to SEQ ID NO: 95276
gaugcccaggaucaucucc

SEQ ID NO: 95358 - RNA, 19 nt, Artificial Sequence
  Description of Artificial Sequence: Synthetic oligonucleotide
  Sense strand starting at position 964 of SEQ ID NO: 1201
gucccuaacuugguaaagu

SEQ ID NO: 95359 - RNA, 19 nt, Artificial Sequence
  Description of Artificial Sequence: Synthetic oligonucleotide
  Antisense strand to SEQ ID NO: 95278
acuuuaccaaguuagggac

SEQ ID NO: 95360 - RNA, 19 nt, Artificial Sequence
  Description of Artificial Sequence: Synthetic oligonucleotide
  Sense strand starting at position 975 of SEQ ID NO: 1201
gguaaagugaguuacugga

SEQ ID NO: 95361 - RNA, 19 nt, Artificial Sequence
  Description of Artificial Sequence: Synthetic oligonucleotide
  Antisense strand to SEQ ID NO: 95280
uccaguaacucacuuuacc

SEQ ID NO: 95362 - RNA, 19 nt, Artificial Sequence
  Description of Artificial Sequence: Synthetic oligonucleotide
  Sense strand starting at position 977 of SEQ ID NO: 1201
uaaagugaguuacuggaga

SEQ ID NO: 95363 - RNA, 19 nt, Artificial Sequence
  Description of Artificial Sequence: Synthetic oligonucleotide
  Antisense strand to SEQ ID NO: 95282
ucuccaguaacucacuuua

SEQ ID NO: 95364 - RNA, 19 nt, Artificial Sequence
  Description of Artificial Sequence: Synthetic oligonucleotide
  Sense strand starting at position 1034 of SEQ ID NO: 1201
caaagaauuccagaugcgu

SEQ ID NO: 95365 - RNA, 19 nt, Artificial Sequence
  Description of Artificial Sequence: Synthetic oligonucleotide
  Antisense strand to SEQ ID NO: 95284
acgcaucuggaauucuuug

SEQ ID NO: 95366 - RNA, 19 nt, Artificial Sequence
  Description of Artificial Sequence: Synthetic oligonucleotide
  Sense strand starting at position 1231 of SEQ ID NO: 1201
augcguucuccuggaucca

SEQ ID NO: 95367 - RNA, 19 nt, Artificial Sequence
  Description of Artificial Sequence: Synthetic oligonucleotide
  Antisense strand to SEQ ID NO: 95286
uggauccaggagaacgcau

SEQ ID NO: 95368 - RNA, 19 nt, Artificial Sequence
  Description of Artificial Sequence: Synthetic oligonucleotide
  Sense strand starting at position 1430 of SEQ ID NO: 1201
guuguuguuagccaggcua

SEQ ID NO: 95369 - RNA, 19 nt, Artificial Sequence
  Description of Artificial Sequence: Synthetic oligonucleotide
  Antisense strand to SEQ ID NO: 95288
uagccuggcuaacaacaac

SEQ ID NO: 95370 - RNA, 19 nt, Artificial Sequence
  Description of Artificial Sequence: Synthetic oligonucleotide
  Sense strand starting at position 1600 of SEQ ID NO: 1201
ccaggucgccguagaagau

SEQ ID NO: 95371 - RNA, 19 nt, Artificial Sequence
  Description of Artificial Sequence: Synthetic oligonucleotide
  Antisense strand to SEQ ID NO: 95290
aucuucuacggcgaccugg

SEQ ID NO: 95372 - RNA, 19 nt, Artificial Sequence
  Description of Artificial Sequence: Synthetic oligonucleotide
  Sense strand starting at position 2076 of SEQ ID NO: 1201
ggacucaccaaaggguuua

SEQ ID NO: 95373 - RNA, 19 nt, Artificial Sequence
  Description of Artificial Sequence: Synthetic oligonucleotide
  Antisense strand to SEQ ID NO: 95292
uaaacccuuuggugagucc

SEQ ID NO: 95374 - RNA, 19 nt, Artificial Sequence
  Description of Artificial Sequence: Synthetic oligonucleotide
  Sense strand starting at position 2191 of SEQ ID NO: 1201
ggcagcugauuuccgagau

SEQ ID NO: 95375 - RNA, 19 nt, Artificial Sequence
  Description of Artificial Sequence: Synthetic oligonucleotide
  Antisense strand to SEQ ID NO: 95294
aucucggaaaucagcugcc

SEQ ID NO: 95376 - RNA, 19 nt, Artificial Sequence
  Description of Artificial Sequence: Synthetic oligonucleotide
  Sense strand starting at position 2240 of SEQ ID NO: 1201
ggcugcacucgacgucuaa

SEQ ID NO: 95377 - RNA, 19 nt, Artificial Sequence
  Description of Artificial Sequence: Synthetic oligonucleotide
  Antisense strand to SEQ ID NO: 95296
uuagacgucgagugcagcc

SEQ ID NO: 95378 - RNA, 19 nt, Artificial Sequence
  Description of Artificial Sequence: Synthetic oligonucleotide
  Sense strand starting at position 2242 of SEQ ID NO: 1201
cugcacucgacgucuaagu

SEQ ID NO: 95379 - RNA, 19 nt, Artificial Sequence
  Description of Artificial Sequence: Synthetic oligonucleotide
  Antisense strand to SEQ ID NO: 95298
acuuagacgucgagugcag

SEQ ID NO: 95380 - RNA, 19 nt, Artificial Sequence
  Description of Artificial Sequence: Synthetic oligonucleotide
  Sense strand starting at position 2446 of SEQ ID NO: 1201
agggucugcuggucugaau

SEQ ID NO: 95381 - RNA, 19 nt, Artificial Sequence
  Description of Artificial Sequence: Synthetic oligonucleotide
  Antisense strand to SEQ ID NO: 95300
auucagaccagcagacccu

SEQ ID NO: 95382 - RNA, 19 nt, Artificial Sequence
  Description of Artificial Sequence: Synthetic oligonucleotide
  Sense strand starting at position 2625 of SEQ ID NO: 1201
cgaacuucuggauggaacu

SEQ ID NO: 95383 - RNA, 19 nt, Artificial Sequence
  Description of Artificial Sequence: Synthetic oligonucleotide
  Antisense strand to SEQ ID NO: 95302
aguuccauccagaaguucg

SEQ ID NO: 95384 - RNA, 19 nt, Artificial Sequence
  Description of Artificial Sequence: Synthetic oligonucleotide
  Sense strand starting at position 2642 of SEQ ID NO: 1201
cuggcauccaugcaaggau

SEQ ID NO: 95385 - RNA, 19 nt, Artificial Sequence
  Description of Artificial Sequence: Synthetic oligonucleotide
  Antisense strand to SEQ ID NO: 95304
auccuugcauggaugccag

SEQ ID NO: 95386 - RNA, 19 nt, Artificial Sequence
  Description of Artificial Sequence: Synthetic oligonucleotide
  Sense strand starting at position 2771 of SEQ ID NO: 1201
guagcuccauuugugaaau

SEQ ID NO: 95387 - RNA, 19 nt, Artificial Sequence
  Description of Artificial Sequence: Synthetic oligonucleotide
  Antisense strand to SEQ ID NO: 95306
auuucacaaauggagcuac

SEQ ID NO: 95388 - RNA, 19 nt, Artificial Sequence
  Description of Artificial Sequence: Synthetic oligonucleotide
  Sense strand starting at position 2772 of SEQ ID NO: 1201
uagcuccauuugugaaaug

SEQ ID NO: 95389 - RNA, 19 nt, Artificial Sequence
  Description of Artificial Sequence: Synthetic oligonucleotide
  Antisense strand to SEQ ID NO: 95308
cauuucacaaauggagcua

SEQ ID NO: 95390 - RNA, 19 nt, Artificial Sequence
  Description of Artificial Sequence: Synthetic oligonucleotide
  Sense strand starting at position 3111 of SEQ ID NO: 1201
guccaaaugcccuagaauu

SEQ ID NO: 95391 - RNA, 19 nt, Artificial Sequence
  Description of Artificial Sequence: Synthetic oligonucleotide
  Antisense strand to SEQ ID NO: 95310
aauucuagggcauuuggac

SEQ ID NO: 95392 - RNA, 19 nt, Artificial Sequence
  Description of Artificial Sequence: Synthetic oligonucleotide
  Sense strand starting at position 3290 of SEQ ID NO: 1201
acuugaugccucugagcca

SEQ ID NO: 95393 - RNA, 19 nt, Artificial Sequence
  Description of Artificial Sequence: Synthetic oligonucleotide
  Antisense strand to SEQ ID NO: 95312
uggcucagaggcaucaagu

SEQ ID NO: 95394 - RNA, 19 nt, Artificial Sequence
  Description of Artificial Sequence: Synthetic oligonucleotide
  Sense strand starting at position 3299 of SEQ ID NO: 1201
cucugagccaugggaugaa

SEQ ID NO: 95395 - RNA, 19 nt, Artificial Sequence
  Description of Artificial Sequence: Synthetic oligonucleotide
  Antisense strand to SEQ ID NO: 95314
uucaucccauggcucagag

SEQ ID NO: 95396 - RNA, 19 nt, Artificial Sequence
  Description of Artificial Sequence: Synthetic oligonucleotide
  Sense strand starting at position 3345 of SEQ ID NO: 1201
gggcucaacagaugagcau

SEQ ID NO: 95397 - RNA, 19 nt, Artificial Sequence
  Description of Artificial Sequence: Synthetic oligonucleotide
  Antisense strand to SEQ ID NO: 95316
augcucaucuguugagccc

SEQ ID NO: 95398 - RNA, 19 nt, Artificial Sequence
  Description of Artificial Sequence: Synthetic oligonucleotide
  Sense strand starting at position 3420 of SEQ ID NO: 1201
ccuggaguccugcagcuuu

SEQ ID NO: 95399 - RNA, 19 nt, Artificial Sequence
  Description of Artificial Sequence: Synthetic oligonucleotide
  Antisense strand to SEQ ID NO: 95318
aaagcugcaggacuccagg

SEQ ID NO: 95400 - RNA, 19 nt, Artificial Sequence
  Description of Artificial Sequence: Synthetic oligonucleotide
  Sense strand starting at position 3563 of SEQ ID NO: 1201
ccagucucaugcucuugaa

SEQ ID NO: 95401 - RNA, 19 nt, Artificial Sequence
  Description of Artificial Sequence: Synthetic oligonucleotide
  Antisense strand to SEQ ID NO: 95320
uucaagagcaugagacugg

SEQ ID NO: 95402 - RNA, 19 nt, Artificial Sequence
  Description of Artificial Sequence: Synthetic oligonucleotide
  Sense strand starting at position 3595 of SEQ ID NO: 1201
ggaggaguggucugaaugc

SEQ ID NO: 95403 - RNA, 19 nt, Artificial Sequence
  Description of Artificial Sequence: Synthetic oligonucleotide
  Antisense strand to SEQ ID NO: 95322
gcauucagaccacuccucc

SEQ ID NO: 95404 - RNA, 19 nt, Artificial Sequence
  Description of Artificial Sequence: Synthetic oligonucleotide
  Sense strand starting at position 3602 of SEQ ID NO: 1201
uggucugaaugcucccaga

SEQ ID NO: 95405 - RNA, 19 nt, Artificial Sequence
  Description of Artificial Sequence: Synthetic oligonucleotide
  Antisense strand to SEQ ID NO: 95324
ucugggagcauucagacca

SEQ ID NO: 95406 - RNA, 19 nt, Artificial Sequence
  Description of Artificial Sequence: Synthetic oligonucleotide
  Sense strand starting at position 3663 of SEQ ID NO: 1201
auugaagagucacacaaag

SEQ ID NO: 95407 - RNA, 19 nt, Artificial Sequence
  Description of Artificial Sequence: Synthetic oligonucleotide
  Antisense strand to SEQ ID NO: 95326
cuuugugugacucuucaau

SEQ ID NO: 95408 - RNA, 19 nt, Artificial Sequence
  Description of Artificial Sequence: Synthetic oligonucleotide
  Sense strand starting at position 3897 of SEQ ID NO: 1201
cuguaugucugggugugua

SEQ ID NO: 95409 - RNA, 19 nt, Artificial Sequence
  Description of Artificial Sequence: Synthetic oligonucleotide
  Antisense strand to SEQ ID NO: 95328
uacacacccagacauacag

SEQ ID NO: 95410 - RNA, 19 nt, Artificial Sequence
  Description of Artificial Sequence: Synthetic oligonucleotide
  Sense strand starting at position 232 of SEQ ID NO: 1202
cugugugacauuggagaua

SEQ ID NO: 95411 - RNA, 19 nt, Artificial Sequence
  Description of Artificial Sequence: Synthetic oligonucleotide
  Antisense strand to SEQ ID NO: 95330
uaucuccaaugucacacag

SEQ ID NO: 95412 - RNA, 19 nt, Artificial Sequence
  Description of Artificial Sequence: Synthetic oligonucleotide
  Sense strand starting at position 557 of SEQ ID NO: 1202
agacuuauugaggguuaca

SEQ ID NO: 95413 - RNA, 19 nt, Artificial Sequence
  Description of Artificial Sequence: Synthetic oligonucleotide
  Antisense strand to SEQ ID NO: 95332
uguaacccucaauaagucu

SEQ ID NO: 95414 - RNA, 19 nt, Artificial Sequence
  Description of Artificial Sequence: Synthetic oligonucleotide
  Sense strand starting at position 712 of SEQ ID NO: 1202
agauacugucuguaccuua

SEQ ID NO: 95415 - RNA, 19 nt, Artificial Sequence
  Description of Artificial Sequence: Synthetic oligonucleotide
  Antisense strand to SEQ ID NO: 95334
uaagguacagacaguaucu

SEQ ID NO: 95416 - RNA, 19 nt, Artificial Sequence
  Description of Artificial Sequence: Synthetic oligonucleotide
  Sense strand starting at position 717 of SEQ ID NO: 1202
cugucuguaccuuauggaa

SEQ ID NO: 95417 - RNA, 19 nt, Artificial Sequence
  Description of Artificial Sequence: Synthetic oligonucleotide
  Antisense strand to SEQ ID NO: 95336
uuccauaagguacagacag

SEQ ID NO: 95418 - RNA, 19 nt, Artificial Sequence
  Description of Artificial Sequence: Synthetic oligonucleotide
  Sense strand starting at position 803 of SEQ ID NO: 1202
gauauaacucuauggcagu

SEQ ID NO: 95419 - RNA, 19 nt, Artificial Sequence
  Description of Artificial Sequence: Synthetic oligonucleotide
  Antisense strand to SEQ ID NO: 95338
acugccauagaguuauauc

SEQ ID NO: 95420 - RNA, 19 nt, Artificial Sequence
  Description of Artificial Sequence: Synthetic oligonucleotide
  Sense strand starting at position 816 of SEQ ID NO: 1202
ggcaguguaagggaacuua

SEQ ID NO: 95421 - RNA, 19 nt, Artificial Sequence
  Description of Artificial Sequence: Synthetic oligonucleotide
  Antisense strand to SEQ ID NO: 95340
uaaguucccuuacacugcc

SEQ ID NO: 95422 - RNA, 19 nt, Artificial Sequence
  Description of Artificial Sequence: Synthetic oligonucleotide
  Sense strand starting at position 857 of SEQ ID NO: 1202
cuccacagauguuuaaagu

SEQ ID NO: 95423 - RNA, 19 nt, Artificial Sequence
  Description of Artificial Sequence: Synthetic oligonucleotide
  Antisense strand to SEQ ID NO: 95342
acuuuaaacaucuguggag

SEQ ID NO: 95424 - RNA, 19 nt, Artificial Sequence
  Description of Artificial Sequence: Synthetic oligonucleotide
  Sense strand starting at position 858 of SEQ ID NO: 1202
uccacagauguuuaaaguu

SEQ ID NO: 95425 - RNA, 19 nt, Artificial Sequence
  Description of Artificial Sequence: Synthetic oligonucleotide
  Antisense strand to SEQ ID NO: 95344
aacuuuaaacaucugugga

SEQ ID NO: 95426 - RNA, 19 nt, Artificial Sequence
  Description of Artificial Sequence: Synthetic oligonucleotide
  Sense strand starting at position 982 of SEQ ID NO: 1202
gggagcaggacuggugaua

SEQ ID NO: 95427 - RNA, 19 nt, Artificial Sequence
  Description of Artificial Sequence: Synthetic oligonucleotide
  Antisense strand to SEQ ID NO: 95346
uaucaccaguccugcuccc

SEQ ID NO: 95428 - RNA, 19 nt, Artificial Sequence
  Description of Artificial Sequence: Synthetic oligonucleotide
  Sense strand starting at position 1162 of SEQ ID NO: 1202
uuggcauaggcaggaaauu

SEQ ID NO: 95429 - RNA, 19 nt, Artificial Sequence
  Description of Artificial Sequence: Synthetic oligonucleotide
  Antisense strand to SEQ ID NO: 95348
aauuuccugccuaugccaa

SEQ ID NO: 95430 - RNA, 19 nt, Artificial Sequence
  Description of Artificial Sequence: Synthetic oligonucleotide
  Sense strand starting at position 1182 of SEQ ID NO: 1202
uugagagaaucucuaagca

SEQ ID NO: 95431 - RNA, 19 nt, Artificial Sequence
  Description of Artificial Sequence: Synthetic oligonucleotide
  Antisense strand to SEQ ID NO: 95350
ugcuuagagauucucucaa

SEQ ID NO: 95432 - RNA, 19 nt, Artificial Sequence
  Description of Artificial Sequence: Synthetic oligonucleotide
  Sense strand starting at position 1223 of SEQ ID NO: 1202
aacagaaugcgagaucucu

SEQ ID NO: 95433 - RNA, 19 nt, Artificial Sequence
  Description of Artificial Sequence: Synthetic oligonucleotide
  Antisense strand to SEQ ID NO: 95352
agagaucucgcauucuguu

SEQ ID NO: 95434 - RNA, 19 nt, Artificial Sequence
  Description of Artificial Sequence: Synthetic oligonucleotide
  Sense strand starting at position 1261 of SEQ ID NO: 1202
ggauacauacacugguaau

SEQ ID NO: 95435 - RNA, 19 nt, Artificial Sequence
  Description of Artificial Sequence: Synthetic oligonucleotide
  Antisense strand to SEQ ID NO: 95354
auuaccaguguauguaucc

SEQ ID NO: 95436 - RNA, 19 nt, Artificial Sequence
  Description of Artificial Sequence: Synthetic oligonucleotide
  Sense strand starting at position 1347 of SEQ ID NO: 1202
uuugcuaaauacucgaaua

SEQ ID NO: 95437 - RNA, 19 nt, Artificial Sequence
  Description of Artificial Sequence: Synthetic oligonucleotide
  Antisense strand to SEQ ID NO: 95356
uauucgaguauuuagcaaa

SEQ ID NO: 95438 - RNA, 19 nt, Artificial Sequence
  Description of Artificial Sequence: Synthetic oligonucleotide
  Sense strand starting at position 1564 of SEQ ID NO: 1202
ucucuacucugauuaguac

SEQ ID NO: 95439 - RNA, 19 nt, Artificial Sequence
  Description of Artificial Sequence: Synthetic oligonucleotide
  Antisense strand to SEQ ID NO: 95358
guacuaaucagaguagaga

SEQ ID NO: 95440 - RNA, 19 nt, Artificial Sequence
  Description of Artificial Sequence: Synthetic oligonucleotide
  Sense strand starting at position 1603 of SEQ ID NO: 1202
uaaugugacaagugaggua

SEQ ID NO: 95441 - RNA, 19 nt, Artificial Sequence
  Description of Artificial Sequence: Synthetic oligonucleotide
  Antisense strand to SEQ ID NO: 95360
uaccucacuugucacauua

SEQ ID NO: 95442 - RNA, 19 nt, Artificial Sequence
  Description of Artificial Sequence: Synthetic oligonucleotide
  Sense strand starting at position 1608 of SEQ ID NO: 1202
ugacaagugagguaagcau

SEQ ID NO: 95443 - RNA, 19 nt, Artificial Sequence
  Description of Artificial Sequence: Synthetic oligonucleotide
  Antisense strand to SEQ ID NO: 95362
augcuuaccucacuuguca

SEQ ID NO: 95444 - RNA, 19 nt, Artificial Sequence
  Description of Artificial Sequence: Synthetic oligonucleotide
  Sense strand starting at position 1638 of SEQ ID NO: 1202
gcagaagaauuguuucuua

SEQ ID NO: 95445 - RNA, 19 nt, Artificial Sequence
  Description of Artificial Sequence: Synthetic oligonucleotide
  Antisense strand to SEQ ID NO: 95364
uaagaaacaauucuucugc

SEQ ID NO: 95446 - RNA, 19 nt, Artificial Sequence
  Description of Artificial Sequence: Synthetic oligonucleotide
  Sense strand starting at position 1691 of SEQ ID NO: 1202
uuauaugagugaccaugaa

SEQ ID NO: 95447 - RNA, 19 nt, Artificial Sequence
  Description of Artificial Sequence: Synthetic oligonucleotide
  Antisense strand to SEQ ID NO: 95366
uucauggucacucauauaa

SEQ ID NO: 95448 - RNA, 19 nt, Artificial Sequence
  Description of Artificial Sequence: Synthetic oligonucleotide
  Sense strand starting at position 1780 of SEQ ID NO: 1202
agguaucagcagcaaucua

SEQ ID NO: 95449 - RNA, 19 nt, Artificial Sequence
  Description of Artificial Sequence: Synthetic oligonucleotide
  Antisense strand to SEQ ID NO: 95368
uagauugcugcugauaccu

SEQ ID NO: 95450 - RNA, 19 nt, Artificial Sequence
  Description of Artificial Sequence: Synthetic oligonucleotide
  Sense strand starting at position 1873 of SEQ ID NO: 1202
aaaguuagcgacuaucagu

SEQ ID NO: 95451 - RNA, 19 nt, Artificial Sequence
  Description of Artificial Sequence: Synthetic oligonucleotide
  Antisense strand to SEQ ID NO: 95370
acugauagucgcuaacuuu

SEQ ID NO: 95452 - RNA, 19 nt, Artificial Sequence
  Description of Artificial Sequence: Synthetic oligonucleotide
  Sense strand starting at position 1950 of SEQ ID NO: 1202
cccagucagcuguaaccaa

SEQ ID NO: 95453 - RNA, 19 nt, Artificial Sequence
  Description of Artificial Sequence: Synthetic oligonucleotide
  Antisense strand to SEQ ID NO: 95372
uugguuacagcugacuggg

SEQ ID NO: 95454 - RNA, 19 nt, Artificial Sequence
  Description of Artificial Sequence: Synthetic oligonucleotide
  Sense strand starting at position 1958 of SEQ ID NO: 1202
gcuguaaccaagugaaaug

SEQ ID NO: 95455 - RNA, 19 nt, Artificial Sequence
  Description of Artificial Sequence: Synthetic oligonucleotide
  Antisense strand to SEQ ID NO: 95374
cauuucacuugguuacagc

SEQ ID NO: 95456 - RNA, 19 nt, Artificial Sequence
  Description of Artificial Sequence: Synthetic oligonucleotide
  Sense strand starting at position 2240 of SEQ ID NO: 1202
uuggaauauguugauguau

SEQ ID NO: 95457 - RNA, 19 nt, Artificial Sequence
  Description of Artificial Sequence: Synthetic oligonucleotide
  Antisense strand to SEQ ID NO: 95376
auacaucaacauauuccaa

SEQ ID NO: 95458 - RNA, 19 nt, Artificial Sequence
  Description of Artificial Sequence: Synthetic oligonucleotide
  Sense strand starting at position 2251 of SEQ ID NO: 1202
ugauguaugccacaacaaa

SEQ ID NO: 95459 - RNA, 19 nt, Artificial Sequence
  Description of Artificial Sequence: Synthetic oligonucleotide
  Antisense strand to SEQ ID NO: 95378
uuuguuguggcauacauca

SEQ ID NO: 95460 - RNA, 19 nt, Artificial Sequence
  Description of Artificial Sequence: Synthetic oligonucleotide
  Sense strand starting at position 2313 of SEQ ID NO: 1202
agacccagaugcuuuagaa

SEQ ID NO: 95461 - RNA, 19 nt, Artificial Sequence
  Description of Artificial Sequence: Synthetic oligonucleotide
  Antisense strand to SEQ ID NO: 95380
uucuaaagcaucugggucu

SEQ ID NO: 95462 - RNA, 19 nt, Artificial Sequence
  Description of Artificial Sequence: Synthetic oligonucleotide
  Sense strand starting at position 2348 of SEQ ID NO: 1202
uguggauaagcaugaguaa

SEQ ID NO: 95463 - RNA, 19 nt, Artificial Sequence
  Description of Artificial Sequence: Synthetic oligonucleotide
  Antisense strand to SEQ ID NO: 95382
uuacucaugcuuauccaca

SEQ ID NO: 95464 - RNA, 19 nt, Artificial Sequence
  Description of Artificial Sequence: Synthetic oligonucleotide
  Sense strand starting at position 2647 of SEQ ID NO: 1202
uuacaaagauggucuauga

SEQ ID NO: 95465 - RNA, 19 nt, Artificial Sequence
  Description of Artificial Sequence: Synthetic oligonucleotide
  Antisense strand to SEQ ID NO: 95384
ucauagaccaucuuuguaa

SEQ ID NO: 95466 - RNA, 19 nt, Artificial Sequence
  Description of Artificial Sequence: Synthetic oligonucleotide
  Sense strand starting at position 2813 of SEQ ID NO: 1202
uauuuagagcagcgucauu

SEQ ID NO: 95467 - RNA, 19 nt, Artificial Sequence
  Description of Artificial Sequence: Synthetic oligonucleotide
  Antisense strand to SEQ ID NO: 95386
aaugacgcugcucuaaaua

SEQ ID NO: 95468 - RNA, 19 nt, Artificial Sequence
  Description of Artificial Sequence: Synthetic oligonucleotide
  Sense strand starting at position 2858 of SEQ ID NO: 1202
gcguguagguggaucauaa

SEQ ID NO: 95469 - RNA, 19 nt, Artificial Sequence
  Description of Artificial Sequence: Synthetic oligonucleotide
  Antisense strand to SEQ ID NO: 95388
uuaugauccaccuacacgc

SEQ ID NO: 95470 - RNA, 19 nt, Artificial Sequence
  Description of Artificial Sequence: Synthetic oligonucleotide
  Sense strand starting at position 2890 of SEQ ID NO: 1202
uuggacaucucagcaauau

SEQ ID NO: 95471 - RNA, 19 nt, Artificial Sequence
  Description of Artificial Sequence: Synthetic oligonucleotide
  Antisense strand to SEQ ID NO: 95390
auauugcugagauguccaa

SEQ ID NO: 95472 - RNA, 19 nt, Artificial Sequence
  Description of Artificial Sequence: Synthetic oligonucleotide
  Sense strand starting at position 2891 of SEQ ID NO: 1202
uggacaucucagcaauauu

SEQ ID NO: 95473 - RNA, 19 nt, Artificial Sequence
  Description of Artificial Sequence: Synthetic oligonucleotide
  Antisense strand to SEQ ID NO: 95392
aauauugcugagaugucca

SEQ ID NO: 95474 - RNA, 19 nt, Artificial Sequence
  Description of Artificial Sequence: Synthetic oligonucleotide
  Sense strand starting at position 2974 of SEQ ID NO: 1202
aguucuaagaguuguggga

SEQ ID NO: 95475 - RNA, 19 nt, Artificial Sequence
  Description of Artificial Sequence: Synthetic oligonucleotide
  Antisense strand to SEQ ID NO: 95394
ucccacaacucuuagaacu

SEQ ID NO: 95476 - RNA, 19 nt, Artificial Sequence
  Description of Artificial Sequence: Synthetic oligonucleotide
  Sense strand starting at position 3521 of SEQ ID NO: 1202
aguauauuguuaccuugga

SEQ ID NO: 95477 - RNA, 19 nt, Artificial Sequence
  Description of Artificial Sequence: Synthetic oligonucleotide
  Antisense strand to SEQ ID NO: 95396
uccaagguaacaauauacu

SEQ ID NO: 95478 - RNA, 19 nt, Artificial Sequence
  Description of Artificial Sequence: Synthetic oligonucleotide
  Sense strand starting at position 3525 of SEQ ID NO: 1202
uauuguuaccuuggagaaa

SEQ ID NO: 95479 - RNA, 19 nt, Artificial Sequence
  Description of Artificial Sequence: Synthetic oligonucleotide
  Antisense strand to SEQ ID NO: 95398
uuucuccaagguaacaaua

SEQ ID NO: 95480 - RNA, 19 nt, Artificial Sequence
  Description of Artificial Sequence: Synthetic oligonucleotide
  Sense strand starting at position 3691 of SEQ ID NO: 1202
aagaaaugcccgggaggau

SEQ ID NO: 95481 - RNA, 19 nt, Artificial Sequence
  Description of Artificial Sequence: Synthetic oligonucleotide
  Antisense strand to SEQ ID NO: 95400
auccucccgggcauuucuu

SEQ ID NO: 95482 - RNA, 19 nt, Artificial Sequence
  Description of Artificial Sequence: Synthetic oligonucleotide
  Sense strand starting at position 3718 of SEQ ID NO: 1202
ugaauagaugccugagcua

SEQ ID NO: 95483 - RNA, 19 nt, Artificial Sequence
  Description of Artificial Sequence: Synthetic oligonucleotide
  Antisense strand to SEQ ID NO: 95402
uagcucaggcaucuauuca

SEQ ID NO: 95484 - RNA, 19 nt, Artificial Sequence
  Description of Artificial Sequence: Synthetic oligonucleotide
  Sense strand starting at position 3765 of SEQ ID NO: 1202
gugacuuuggagggaugua

SEQ ID NO: 95485 - RNA, 19 nt, Artificial Sequence
  Description of Artificial Sequence: Synthetic oligonucleotide
  Antisense strand to SEQ ID NO: 95404
uacaucccuccaaagucac

SEQ ID NO: 95486 - RNA, 19 nt, Artificial Sequence
  Description of Artificial Sequence: Synthetic oligonucleotide
  Sense strand starting at position 3830 of SEQ ID NO: 1202
gucauuuacgacuguccaa

SEQ ID NO: 95487 - RNA, 19 nt, Artificial Sequence
  Description of Artificial Sequence: Synthetic oligonucleotide
  Antisense strand to SEQ ID NO: 95406
uuggacagucguaaaugac

SEQ ID NO: 95488 - RNA, 19 nt, Artificial Sequence
  Description of Artificial Sequence: Synthetic oligonucleotide
  Sense strand starting at position 3898 of SEQ ID NO: 1202
cuaccuuuccaagguagaa

SEQ ID NO: 95489 - RNA, 19 nt, Artificial Sequence
  Description of Artificial Sequence: Synthetic oligonucleotide
  Antisense strand to SEQ ID NO: 95408
uucuaccuuggaaagguag

SEQ ID NO: 95490 - RNA, 19 nt, Artificial Sequence
  Description of Artificial Sequence: Synthetic oligonucleotide
  Sense strand starting at position 32 of SEQ ID NO: 1203
uagggcacagagugauuaa

SEQ ID NO: 95491 - RNA, 19 nt, Artificial Sequence
  Description of Artificial Sequence: Synthetic oligonucleotide
  Antisense strand to SEQ ID NO: 95410
uuaaucacucugugcccua

SEQ ID NO: 95492 - RNA, 19 nt, Artificial Sequence
  Description of Artificial Sequence: Synthetic oligonucleotide
  Sense strand starting at position 35 of SEQ ID NO: 1203
ggcacagagugauuaacca

SEQ ID NO: 95493 - RNA, 19 nt, Artificial Sequence
  Description of Artificial Sequence: Synthetic oligonucleotide
  Antisense strand to SEQ ID NO: 95412
ugguuaaucacucugugcc

SEQ ID NO: 95494 - RNA, 19 nt, Artificial Sequence
  Description of Artificial Sequence: Synthetic oligonucleotide
  Sense strand starting at position 58 of SEQ ID NO: 1203
aauguuaugugagcaaaga

SEQ ID NO: 95495 - RNA, 19 nt, Artificial Sequence
  Description of Artificial Sequence: Synthetic oligonucleotide
  Antisense strand to SEQ ID NO: 95414
ucuuugcucacauaacauu

SEQ ID NO: 95496 - RNA, 19 nt, Artificial Sequence
  Description of Artificial Sequence: Synthetic oligonucleotide
  Sense strand starting at position 59 of SEQ ID NO: 1203
auguuaugugagcaaagau

SEQ ID NO: 95497 - RNA, 19 nt, Artificial Sequence
  Description of Artificial Sequence: Synthetic oligonucleotide
  Antisense strand to SEQ ID NO: 95416
aucuuugcucacauaacau

SEQ ID NO: 95498 - RNA, 19 nt, Artificial Sequence
  Description of Artificial Sequence: Synthetic oligonucleotide
  Sense strand starting at position 254 of SEQ ID NO: 1203
ccaugaguuucugccauuu

SEQ ID NO: 95499 - RNA, 19 nt, Artificial Sequence
  Description of Artificial Sequence: Synthetic oligonucleotide
  Antisense strand to SEQ ID NO: 95418
aaauggcagaaacucaugg

SEQ ID NO: 95500 - RNA, 19 nt, Artificial Sequence
  Description of Artificial Sequence: Synthetic oligonucleotide
  Sense strand starting at position 323 of SEQ ID NO: 1203
uuauguaccagguaaagug

SEQ ID NO: 95501 - RNA, 19 nt, Artificial Sequence
  Description of Artificial Sequence: Synthetic oligonucleotide
  Antisense strand to SEQ ID NO: 95420
cacuuuaccugguacauaa

SEQ ID NO: 95502 - RNA, 19 nt, Artificial Sequence
  Description of Artificial Sequence: Synthetic oligonucleotide
  Sense strand starting at position 342 of SEQ ID NO: 1203
uuagguucugguuauauaa

SEQ ID NO: 95503 - RNA, 19 nt, Artificial Sequence
  Description of Artificial Sequence: Synthetic oligonucleotide
  Antisense strand to SEQ ID NO: 95422
uuauauaaccagaaccuaa

SEQ ID NO: 95504 - RNA, 19 nt, Artificial Sequence
  Description of Artificial Sequence: Synthetic oligonucleotide
  Sense strand starting at position 383 of SEQ ID NO: 1203
ccauaucaucacggaccua

SEQ ID NO: 95505 - RNA, 19 nt, Artificial Sequence
  Description of Artificial Sequence: Synthetic oligonucleotide
  Antisense strand to SEQ ID NO: 95424
uagguccgugaugauaugg

SEQ ID NO: 95506 - RNA, 19 nt, Artificial Sequence
  Description of Artificial Sequence: Synthetic oligonucleotide
  Sense strand starting at position 388 of SEQ ID NO: 1203
ucaucacggaccuaagagu

SEQ ID NO: 95507 - RNA, 19 nt, Artificial Sequence
  Description of Artificial Sequence: Synthetic oligonucleotide
  Antisense strand to SEQ ID NO: 95426
acucuuagguccgugauga

SEQ ID NO: 95508 - RNA, 19 nt, Artificial Sequence
  Description of Artificial Sequence: Synthetic oligonucleotide
  Sense strand starting at position 447 of SEQ ID NO: 1203
accugagucuagucaauaa

SEQ ID NO: 95509 - RNA, 19 nt, Artificial Sequence
  Description of Artificial Sequence: Synthetic oligonucleotide
  Antisense strand to SEQ ID NO: 95428
uuauugacuagacucaggu

SEQ ID NO: 95510 - RNA, 19 nt, Artificial Sequence
  Description of Artificial Sequence: Synthetic oligonucleotide
  Sense strand starting at position 451 of SEQ ID NO: 1203
gagucuagucaauaaguac

SEQ ID NO: 95511 - RNA, 19 nt, Artificial Sequence
  Description of Artificial Sequence: Synthetic oligonucleotide
  Antisense strand to SEQ ID NO: 95430
guacuuauugacuagacuc

SEQ ID NO: 95512 - RNA, 19 nt, Artificial Sequence
  Description of Artificial Sequence: Synthetic oligonucleotide
  Sense strand starting at position 454 of SEQ ID NO: 1203
ucuagucaauaaguacauu

SEQ ID NO: 95513 - RNA, 19 nt, Artificial Sequence
  Description of Artificial Sequence: Synthetic oligonucleotide
  Antisense strand to SEQ ID NO: 95432
aauguacuuauugacuaga

SEQ ID NO: 95514 - RNA, 19 nt, Artificial Sequence
  Description of Artificial Sequence: Synthetic oligonucleotide
  Sense strand starting at position 714 of SEQ ID NO: 1203
aacagaauguuagcaugau

SEQ ID NO: 95515 - RNA, 19 nt, Artificial Sequence
  Description of Artificial Sequence: Synthetic oligonucleotide
  Antisense strand to SEQ ID NO: 95434
aucaugcuaacauucuguu

SEQ ID NO: 95516 - RNA, 19 nt, Artificial Sequence
  Description of Artificial Sequence: Synthetic oligonucleotide
  Sense strand starting at position 718 of SEQ ID NO: 1203
gaauguuagcaugauaggu

SEQ ID NO: 95517 - RNA, 19 nt, Artificial Sequence
  Description of Artificial Sequence: Synthetic oligonucleotide
  Antisense strand to SEQ ID NO: 95436
accuaucaugcuaacauuc

SEQ ID NO: 95518 - RNA, 19 nt, Artificial Sequence
  Description of Artificial Sequence: Synthetic oligonucleotide
  Sense strand starting at position 728 of SEQ ID NO: 1203
augauagguaugcaaguuu

SEQ ID NO: 95519 - RNA, 19 nt, Artificial Sequence
  Description of Artificial Sequence: Synthetic oligonucleotide
  Antisense strand to SEQ ID NO: 95438
aaacuugcauaccuaucau

SEQ ID NO: 95520 - RNA, 19 nt, Artificial Sequence
  Description of Artificial Sequence: Synthetic oligonucleotide
  Sense strand starting at position 884 of SEQ ID NO: 1203
agaagcauuugcuugccua

SEQ ID NO: 95521 - RNA, 19 nt, Artificial Sequence
  Description of Artificial Sequence: Synthetic oligonucleotide
  Antisense strand to SEQ ID NO: 95440
uaggcaagcaaaugcuucu

SEQ ID NO: 95522 - RNA, 19 nt, Artificial Sequence
  Description of Artificial Sequence: Synthetic oligonucleotide
  Sense strand starting at position 887 of SEQ ID NO: 1203
agcauuugcuugccuaauc

SEQ ID NO: 95523 - RNA, 19 nt, Artificial Sequence
  Description of Artificial Sequence: Synthetic oligonucleotide
  Antisense strand to SEQ ID NO: 95442
gauuaggcaagcaaaugcu

SEQ ID NO: 95524 - RNA, 19 nt, Artificial Sequence
  Description of Artificial Sequence: Synthetic oligonucleotide
  Sense strand starting at position 1143 of SEQ ID NO: 1203
uuaacagguuucucaggau

SEQ ID NO: 95525 - RNA, 19 nt, Artificial Sequence
  Description of Artificial Sequence: Synthetic oligonucleotide
  Antisense strand to SEQ ID NO: 95444
auccugagaaaccuguuaa

SEQ ID NO: 95526 - RNA, 19 nt, Artificial Sequence
  Description of Artificial Sequence: Synthetic oligonucleotide
  Sense strand starting at position 1332 of SEQ ID NO: 1203
guaauugcccuugaagauu

SEQ ID NO: 95527 - RNA, 19 nt, Artificial Sequence
  Description of Artificial Sequence: Synthetic oligonucleotide
  Antisense strand to SEQ ID NO: 95446
aaucuucaagggcaauuac

SEQ ID NO: 95528 - RNA, 19 nt, Artificial Sequence
  Description of Artificial Sequence: Synthetic oligonucleotide
  Sense strand starting at position 1398 of SEQ ID NO: 1203
gugauuugauagcugguuu

SEQ ID NO: 95529 - RNA, 19 nt, Artificial Sequence
  Description of Artificial Sequence: Synthetic oligonucleotide
  Antisense strand to SEQ ID NO: 95448
aaaccagcuaucaaaucac

SEQ ID NO: 95530 - RNA, 19 nt, Artificial Sequence
  Description of Artificial Sequence: Synthetic oligonucleotide
  Sense strand starting at position 1431 of SEQ ID NO: 1203
uugcuuaucccacagaaug

SEQ ID NO: 95531 - RNA, 19 nt, Artificial Sequence
  Description of Artificial Sequence: Synthetic oligonucleotide
  Antisense strand to SEQ ID NO: 95450
cauucugugggauaagcaa

SEQ ID NO: 95532 - RNA, 19 nt, Artificial Sequence
  Description of Artificial Sequence: Synthetic oligonucleotide
  Sense strand starting at position 1592 of SEQ ID NO: 1203
cagaaauucuggcuagcag

SEQ ID NO: 95533 - RNA, 19 nt, Artificial Sequence
  Description of Artificial Sequence: Synthetic oligonucleotide
  Antisense strand to SEQ ID NO: 95452
cugcuagccagaauuucug

SEQ ID NO: 95534 - RNA, 19 nt, Artificial Sequence
  Description of Artificial Sequence: Synthetic oligonucleotide
  Sense strand starting at position 1593 of SEQ ID NO: 1203
agaaauucuggcuagcagu

SEQ ID NO: 95535 - RNA, 19 nt, Artificial Sequence
  Description of Artificial Sequence: Synthetic oligonucleotide
  Antisense strand to SEQ ID NO: 95454
acugcuagccagaauuucu

SEQ ID NO: 95536 - RNA, 19 nt, Artificial Sequence
  Description of Artificial Sequence: Synthetic oligonucleotide
  Sense strand starting at position 1666 of SEQ ID NO: 1203
ggcuuucugacaggagaca

SEQ ID NO: 95537 - RNA, 19 nt, Artificial Sequence
  Description of Artificial Sequence: Synthetic oligonucleotide
  Antisense strand to SEQ ID NO: 95456
ugucuccugucagaaagcc

SEQ ID NO: 95538 - RNA, 19 nt, Artificial Sequence
  Description of Artificial Sequence: Synthetic oligonucleotide
  Sense strand starting at position 2403 of SEQ ID NO: 1203
uuguauugaggguauauag

SEQ ID NO: 95539 - RNA, 19 nt, Artificial Sequence
  Description of Artificial Sequence: Synthetic oligonucleotide
  Antisense strand to SEQ ID NO: 95458
cuauauacccucaauacaa

SEQ ID NO: 95540 - RNA, 19 nt, Artificial Sequence
  Description of Artificial Sequence: Synthetic oligonucleotide
  Sense strand starting at position 2501 of SEQ ID NO: 1203
aaauguucuguguaucaga

SEQ ID NO: 95541 - RNA, 19 nt, Artificial Sequence
  Description of Artificial Sequence: Synthetic oligonucleotide
  Antisense strand to SEQ ID NO: 95460
ucugauacacagaacauuu

SEQ ID NO: 95542 - RNA, 19 nt, Artificial Sequence
  Description of Artificial Sequence: Synthetic oligonucleotide
  Sense strand starting at position 2508 of SEQ ID NO: 1203
cuguguaucagacaguuua

SEQ ID NO: 95543 - RNA, 19 nt, Artificial Sequence
  Description of Artificial Sequence: Synthetic oligonucleotide
  Antisense strand to SEQ ID NO: 95462
uaaacugucugauacacag

SEQ ID NO: 95544 - RNA, 19 nt, Artificial Sequence
  Description of Artificial Sequence: Synthetic oligonucleotide
  Sense strand starting at position 2529 of SEQ ID NO: 1203
gagacaaguagugguacau

SEQ ID NO: 95545 - RNA, 19 nt, Artificial Sequence
  Description of Artificial Sequence: Synthetic oligonucleotide
  Antisense strand to SEQ ID NO: 95464
auguaccacuacuugucuc

SEQ ID NO: 95546 - RNA, 19 nt, Artificial Sequence
  Description of Artificial Sequence: Synthetic oligonucleotide
  Sense strand starting at position 2540 of SEQ ID NO: 1203
ugguacaugcuuuagugaa

SEQ ID NO: 95547 - RNA, 19 nt, Artificial Sequence
  Description of Artificial Sequence: Synthetic oligonucleotide
  Antisense strand to SEQ ID NO: 95466
uucacuaaagcauguacca

SEQ ID NO: 95548 - RNA, 19 nt, Artificial Sequence
  Description of Artificial Sequence: Synthetic oligonucleotide
  Sense strand starting at position 2947 of SEQ ID NO: 1203
aagcauaugccagggaaua

SEQ ID NO: 95549 - RNA, 19 nt, Artificial Sequence
  Description of Artificial Sequence: Synthetic oligonucleotide
  Antisense strand to SEQ ID NO: 95468
uauucccuggcauaugcuu

SEQ ID NO: 95550 - RNA, 19 nt, Artificial Sequence
  Description of Artificial Sequence: Synthetic oligonucleotide
  Sense strand starting at position 2986 of SEQ ID NO: 1203
ucuacugaggauugguaga

SEQ ID NO: 95551 - RNA, 19 nt, Artificial Sequence
  Description of Artificial Sequence: Synthetic oligonucleotide
  Antisense strand to SEQ ID NO: 95470
ucuaccaauccucaguaga

SEQ ID NO: 95552 - RNA, 19 nt, Artificial Sequence
  Description of Artificial Sequence: Synthetic oligonucleotide
  Sense strand starting at position 2997 of SEQ ID NO: 1203
uugguagaauaguugaaag

SEQ ID NO: 95553 - RNA, 19 nt, Artificial Sequence
  Description of Artificial Sequence: Synthetic oligonucleotide
  Antisense strand to SEQ ID NO: 95472
cuuucaacuauucuaccaa

SEQ ID NO: 95554 - RNA, 19 nt, Artificial Sequence
  Description of Artificial Sequence: Synthetic oligonucleotide
  Sense strand starting at position 3007 of SEQ ID NO: 1203
aguugaaagcuaggaugaa

SEQ ID NO: 95555 - RNA, 19 nt, Artificial Sequence
  Description of Artificial Sequence: Synthetic oligonucleotide
  Antisense strand to SEQ ID NO: 95474
uucauccuagcuuucaacu

SEQ ID NO: 95556 - RNA, 19 nt, Artificial Sequence
  Description of Artificial Sequence: Synthetic oligonucleotide
  Sense strand starting at position 3115 of SEQ ID NO: 1203
guucuuauuucuguggagu

SEQ ID NO: 95557 - RNA, 19 nt, Artificial Sequence
  Description of Artificial Sequence: Synthetic oligonucleotide
  Antisense strand to SEQ ID NO: 95476
acuccacagaaauaagaac

SEQ ID NO: 95558 - RNA, 19 nt, Artificial Sequence
  Description of Artificial Sequence: Synthetic oligonucleotide
  Sense strand starting at position 3116 of SEQ ID NO: 1203
uucuuauuucuguggaguc

SEQ ID NO: 95559 - RNA, 19 nt, Artificial Sequence
  Description of Artificial Sequence: Synthetic oligonucleotide
  Antisense strand to SEQ ID NO: 95478
gacuccacagaaauaagaa

SEQ ID NO: 95560 - RNA, 19 nt, Artificial Sequence
  Description of Artificial Sequence: Synthetic oligonucleotide
  Sense strand starting at position 3126 of SEQ ID NO: 1203
uguggaguccuuuacacua

SEQ ID NO: 95561 - RNA, 19 nt, Artificial Sequence
  Description of Artificial Sequence: Synthetic oligonucleotide
  Antisense strand to SEQ ID NO: 95480
uaguguaaaggacuccaca

SEQ ID NO: 95562 - RNA, 19 nt, Artificial Sequence
  Description of Artificial Sequence: Synthetic oligonucleotide
  Sense strand starting at position 3158 of SEQ ID NO: 1203
gaaaguuaccaauaguugu

SEQ ID NO: 95563 - RNA, 19 nt, Artificial Sequence
  Description of Artificial Sequence: Synthetic oligonucleotide
  Antisense strand to SEQ ID NO: 95482
acaacuauugguaacuuuc

SEQ ID NO: 95564 - RNA, 19 nt, Artificial Sequence
  Description of Artificial Sequence: Synthetic oligonucleotide
  Sense strand starting at position 3644 of SEQ ID NO: 1203
ucuguuugcuauuucuuau

SEQ ID NO: 95565 - RNA, 19 nt, Artificial Sequence
  Description of Artificial Sequence: Synthetic oligonucleotide
  Antisense strand to SEQ ID NO: 95484
auaagaaauagcaaacaga

SEQ ID NO: 95566 - RNA, 19 nt, Artificial Sequence
  Description of Artificial Sequence: Synthetic oligonucleotide
  Sense strand starting at position 3973 of SEQ ID NO: 1203
ggagaauugaauugcucga

SEQ ID NO: 95567 - RNA, 19 nt, Artificial Sequence
  Description of Artificial Sequence: Synthetic oligonucleotide
  Antisense strand to SEQ ID NO: 95486
ucgagcaauucaauucucc

SEQ ID NO: 95568 - RNA, 19 nt, Artificial Sequence
  Description of Artificial Sequence: Synthetic oligonucleotide
  Sense strand starting at position 3978 of SEQ ID NO: 1203
auugaauugcucgaguaca

SEQ ID NO: 95569 - RNA, 19 nt, Artificial Sequence
  Description of Artificial Sequence: Synthetic oligonucleotide
  Antisense strand to SEQ ID NO: 95488
uguacucgagcaauucaau

SEQ ID NO: 95570 - RNA, 19 nt, Artificial Sequence
  Description of Artificial Sequence: Synthetic oligonucleotide
  Sense strand starting at position 238 of SEQ ID NO: 1204
ccagcuuaucccggagcuu

SEQ ID NO: 95571 - RNA, 19 nt, Artificial Sequence
  Description of Artificial Sequence: Synthetic oligonucleotide
  Antisense strand to SEQ ID NO: 95490
aagcuccgggauaagcugg

SEQ ID NO: 95572 - RNA, 19 nt, Artificial Sequence
  Description of Artificial Sequence: Synthetic oligonucleotide
  Sense strand starting at position 329 of SEQ ID NO: 1204
aaccucgaguccucaaagu

SEQ ID NO: 95573 - RNA, 19 nt, Artificial Sequence
  Description of Artificial Sequence: Synthetic oligonucleotide
  Antisense strand to SEQ ID NO: 95492
acuuugaggacucgagguu

SEQ ID NO: 95574 - RNA, 19 nt, Artificial Sequence
  Description of Artificial Sequence: Synthetic oligonucleotide
  Sense strand starting at position 951 of SEQ ID NO: 1204
gccucccucgcuuguuuaa

SEQ ID NO: 95575 - RNA, 19 nt, Artificial Sequence
  Description of Artificial Sequence: Synthetic oligonucleotide
  Antisense strand to SEQ ID NO: 95494
uuaaacaagcgagggaggc

SEQ ID NO: 95576 - RNA, 19 nt, Artificial Sequence
  Description of Artificial Sequence: Synthetic oligonucleotide
  Sense strand starting at position 1076 of SEQ ID NO: 1204
ucgcuuagucaguuuggca

SEQ ID NO: 95577 - RNA, 19 nt, Artificial Sequence
  Description of Artificial Sequence: Synthetic oligonucleotide
  Antisense strand to SEQ ID NO: 95496
ugccaaacugacuaagcga

SEQ ID NO: 95578 - RNA, 19 nt, Artificial Sequence
  Description of Artificial Sequence: Synthetic oligonucleotide
  Sense strand starting at position 2076 of SEQ ID NO: 1204
cgaagaaauuagcacacuu

SEQ ID NO: 95579 - RNA, 19 nt, Artificial Sequence
  Description of Artificial Sequence: Synthetic oligonucleotide
  Antisense strand to SEQ ID NO: 95498
aagugugcuaauuucuucg

SEQ ID NO: 95580 - RNA, 19 nt, Artificial Sequence
  Description of Artificial Sequence: Synthetic oligonucleotide
  Sense strand starting at position 2140 of SEQ ID NO: 1204
auuauacuuggguguggua

SEQ ID NO: 95581 - RNA, 19 nt, Artificial Sequence
  Description of Artificial Sequence: Synthetic oligonucleotide
  Antisense strand to SEQ ID NO: 95500
uaccacacccaaguauaau

SEQ ID NO: 95582 - RNA, 19 nt, Artificial Sequence
  Description of Artificial Sequence: Synthetic oligonucleotide
  Sense strand starting at position 2147 of SEQ ID NO: 1204
uugggugugguaugacuaa

SEQ ID NO: 95583 - RNA, 19 nt, Artificial Sequence
  Description of Artificial Sequence: Synthetic oligonucleotide
  Antisense strand to SEQ ID NO: 95502
uuagucauaccacacccaa

SEQ ID NO: 95584 - RNA, 19 nt, Artificial Sequence
  Description of Artificial Sequence: Synthetic oligonucleotide
  Sense strand starting at position 2168 of SEQ ID NO: 1204
ggauguuucuuagcaaagc

SEQ ID NO: 95585 - RNA, 19 nt, Artificial Sequence
  Description of Artificial Sequence: Synthetic oligonucleotide
  Antisense strand to SEQ ID NO: 95504
gcuuugcuaagaaacaucc

SEQ ID NO: 95586 - RNA, 19 nt, Artificial Sequence
  Description of Artificial Sequence: Synthetic oligonucleotide
  Sense strand starting at position 2439 of SEQ ID NO: 1204
cggagauccugaggaggua

SEQ ID NO: 95587 - RNA, 19 nt, Artificial Sequence
  Description of Artificial Sequence: Synthetic oligonucleotide
  Antisense strand to SEQ ID NO: 95506
uaccuccucaggaucuccg

SEQ ID NO: 95588 - RNA, 19 nt, Artificial Sequence
  Description of Artificial Sequence: Synthetic oligonucleotide
  Sense strand starting at position 2599 of SEQ ID NO: 1204
ccagaauucguccggugac

SEQ ID NO: 95589 - RNA, 19 nt, Artificial Sequence
  Description of Artificial Sequence: Synthetic oligonucleotide
  Antisense strand to SEQ ID NO: 95508
gucaccggacgaauucugg

SEQ ID NO: 95590 - RNA, 19 nt, Artificial Sequence
  Description of Artificial Sequence: Synthetic oligonucleotide
  Sense strand starting at position 2602 of SEQ ID NO: 1204
gaauucguccggugacuuu

SEQ ID NO: 95591 - RNA, 19 nt, Artificial Sequence
  Description of Artificial Sequence: Synthetic oligonucleotide
  Antisense strand to SEQ ID NO: 95510
aaagucaccggacgaauuc

SEQ ID NO: 95592 - RNA, 19 nt, Artificial Sequence
  Description of Artificial Sequence: Synthetic oligonucleotide
  Sense strand starting at position 2609 of SEQ ID NO: 1204
uccggugacuuuggacaga

SEQ ID NO: 95593 - RNA, 19 nt, Artificial Sequence
  Description of Artificial Sequence: Synthetic oligonucleotide
  Antisense strand to SEQ ID NO: 95512
ucuguccaaagucaccgga

SEQ ID NO: 95594 - RNA, 19 nt, Artificial Sequence
  Description of Artificial Sequence: Synthetic oligonucleotide
  Sense strand starting at position 2623 of SEQ ID NO: 1204
acagauagaugacuaguuu

SEQ ID NO: 95595 - RNA, 19 nt, Artificial Sequence
  Description of Artificial Sequence: Synthetic oligonucleotide
  Antisense strand to SEQ ID NO: 95514
aaacuagucaucuaucugu

SEQ ID NO: 95596 - RNA, 19 nt, Artificial Sequence
  Description of Artificial Sequence: Synthetic oligonucleotide
  Sense strand starting at position 2654 of SEQ ID NO: 1204
cggcuucugcauucuguga

SEQ ID NO: 95597 - RNA, 19 nt, Artificial Sequence
  Description of Artificial Sequence: Synthetic oligonucleotide
  Antisense strand to SEQ ID NO: 95516
ucacagaaugcagaagccg

SEQ ID NO: 95598 - RNA, 19 nt, Artificial Sequence
  Description of Artificial Sequence: Synthetic oligonucleotide
  Sense strand starting at position 2658 of SEQ ID NO: 1204
uucugcauucugugaaugu

SEQ ID NO: 95599 - RNA, 19 nt, Artificial Sequence
  Description of Artificial Sequence: Synthetic oligonucleotide
  Antisense strand to SEQ ID NO: 95518
acauucacagaaugcagaa

SEQ ID NO: 95600 - RNA, 19 nt, Artificial Sequence
  Description of Artificial Sequence: Synthetic oligonucleotide
  Sense strand starting at position 2668 of SEQ ID NO: 1204
ugugaauguagugaagguu

SEQ ID NO: 95601 - RNA, 19 nt, Artificial Sequence
  Description of Artificial Sequence: Synthetic oligonucleotide
  Antisense strand to SEQ ID NO: 95520
aaccuucacuacauucaca

SEQ ID NO: 95602 - RNA, 19 nt, Artificial Sequence
  Description of Artificial Sequence: Synthetic oligonucleotide
  Sense strand starting at position 2671 of SEQ ID NO: 1204
gaauguagugaagguuuga

SEQ ID NO: 95603 - RNA, 19 nt, Artificial Sequence
  Description of Artificial Sequence: Synthetic oligonucleotide
  Antisense strand to SEQ ID NO: 95522
ucaaaccuucacuacauuc

SEQ ID NO: 95604 - RNA, 19 nt, Artificial Sequence
  Description of Artificial Sequence: Synthetic oligonucleotide
  Sense strand starting at position 2729 of SEQ ID NO: 1204
ugaccuauguuugcaguca

SEQ ID NO: 95605 - RNA, 19 nt, Artificial Sequence
  Description of Artificial Sequence: Synthetic oligonucleotide
  Antisense strand to SEQ ID NO: 95524
ugacugcaaacauagguca

SEQ ID NO: 95606 - RNA, 19 nt, Artificial Sequence
  Description of Artificial Sequence: Synthetic oligonucleotide
  Sense strand starting at position 2763 of SEQ ID NO: 1204
gcccgcguuucacagauuu

SEQ ID NO: 95607 - RNA, 19 nt, Artificial Sequence
  Description of Artificial Sequence: Synthetic oligonucleotide
  Antisense strand to SEQ ID NO: 95526
aaaucugugaaacgcgggc

SEQ ID NO: 95608 - RNA, 19 nt, Artificial Sequence
  Description of Artificial Sequence: Synthetic oligonucleotide
  Sense strand starting at position 2908 of SEQ ID NO: 1204
gaaagaauguacgauguga

SEQ ID NO: 95609 - RNA, 19 nt, Artificial Sequence
  Description of Artificial Sequence: Synthetic oligonucleotide
  Antisense strand to SEQ ID NO: 95528
ucacaucguacauucuuuc

SEQ ID NO: 95610 - RNA, 19 nt, Artificial Sequence
  Description of Artificial Sequence: Synthetic oligonucleotide
  Sense strand starting at position 2910 of SEQ ID NO: 1204
aagaauguacgaugugauu

SEQ ID NO: 95611 - RNA, 19 nt, Artificial Sequence
  Description of Artificial Sequence: Synthetic oligonucleotide
  Antisense strand to SEQ ID NO: 95530
aaucacaucguacauucuu

SEQ ID NO: 95612 - RNA, 19 nt, Artificial Sequence
  Description of Artificial Sequence: Synthetic oligonucleotide
  Sense strand starting at position 2912 of SEQ ID NO: 1204
gaauguacgaugugauucu

SEQ ID NO: 95613 - RNA, 19 nt, Artificial Sequence
  Description of Artificial Sequence: Synthetic oligonucleotide
  Antisense strand to SEQ ID NO: 95532
agaaucacaucguacauuc

SEQ ID NO: 95614 - RNA, 19 nt, Artificial Sequence
  Description of Artificial Sequence: Synthetic oligonucleotide
  Sense strand starting at position 2921 of SEQ ID NO: 1204
augugauucugugauggaa

SEQ ID NO: 95615 - RNA, 19 nt, Artificial Sequence
  Description of Artificial Sequence: Synthetic oligonucleotide
  Antisense strand to SEQ ID NO: 95534
uuccaucacagaaucacau

SEQ ID NO: 95616 - RNA, 19 nt, Artificial Sequence
  Description of Artificial Sequence: Synthetic oligonucleotide
  Sense strand starting at position 2923 of SEQ ID NO: 1204
gugauucugugauggaaga

SEQ ID NO: 95617 - RNA, 19 nt, Artificial Sequence
  Description of Artificial Sequence: Synthetic oligonucleotide
  Antisense strand to SEQ ID NO: 95536
ucuuccaucacagaaucac

SEQ ID NO: 95618 - RNA, 19 nt, Artificial Sequence
  Description of Artificial Sequence: Synthetic oligonucleotide
  Sense strand starting at position 2942 of SEQ ID NO: 1204
gggagcucuuucccagaga

SEQ ID NO: 95619 - RNA, 19 nt, Artificial Sequence
  Description of Artificial Sequence: Synthetic oligonucleotide
  Antisense strand to SEQ ID NO: 95538
ucucugggaaagagcuccc

SEQ ID NO: 95620 - RNA, 19 nt, Artificial Sequence
  Description of Artificial Sequence: Synthetic oligonucleotide
  Sense strand starting at position 2943 of SEQ ID NO: 1204
ggagcucuuucccagagaa

SEQ ID NO: 95621 - RNA, 19 nt, Artificial Sequence
  Description of Artificial Sequence: Synthetic oligonucleotide
  Antisense strand to SEQ ID NO: 95540
uucucugggaaagagcucc

SEQ ID NO: 95622 - RNA, 19 nt, Artificial Sequence
  Description of Artificial Sequence: Synthetic oligonucleotide
  Sense strand starting at position 2957 of SEQ ID NO: 1204
gagaaagagugcugcuaua

SEQ ID NO: 95623 - RNA, 19 nt, Artificial Sequence
  Description of Artificial Sequence: Synthetic oligonucleotide
  Antisense strand to SEQ ID NO: 95542
uauagcagcacucuuucuc

SEQ ID NO: 95624 - RNA, 19 nt, Artificial Sequence
  Description of Artificial Sequence: Synthetic oligonucleotide
  Sense strand starting at position 2976 of SEQ ID NO: 1204
auuauugacugcuugcuau

SEQ ID NO: 95625 - RNA, 19 nt, Artificial Sequence
  Description of Artificial Sequence: Synthetic oligonucleotide
  Antisense strand to SEQ ID NO: 95544
auagcaagcagucaauaau

SEQ ID NO: 95626 - RNA, 19 nt, Artificial Sequence
  Description of Artificial Sequence: Synthetic oligonucleotide
  Sense strand starting at position 2999 of SEQ ID NO: 1204
agugcuuuauaugcacuaa

SEQ ID NO: 95627 - RNA, 19 nt, Artificial Sequence
  Description of Artificial Sequence: Synthetic oligonucleotide
  Antisense strand to SEQ ID NO: 95546
uuagugcauauaaagcacu

SEQ ID NO: 95628 - RNA, 19 nt, Artificial Sequence
  Description of Artificial Sequence: Synthetic oligonucleotide
  Sense strand starting at position 3350 of SEQ ID NO: 1204
gaaguaaguguuggguacu

SEQ ID NO: 95629 - RNA, 19 nt, Artificial Sequence
  Description of Artificial Sequence: Synthetic oligonucleotide
  Antisense strand to SEQ ID NO: 95548
aguacccaacacuuacuuc

SEQ ID NO: 95630 - RNA, 19 nt, Artificial Sequence
  Description of Artificial Sequence: Synthetic oligonucleotide
  Sense strand starting at position 3353 of SEQ ID NO: 1204
guaaguguuggguacuauu

SEQ ID NO: 95631 - RNA, 19 nt, Artificial Sequence
  Description of Artificial Sequence: Synthetic oligonucleotide
  Antisense strand to SEQ ID NO: 95550
aauaguacccaacacuuac

SEQ ID NO: 95632 - RNA, 19 nt, Artificial Sequence
  Description of Artificial Sequence: Synthetic oligonucleotide
  Sense strand starting at position 3356 of SEQ ID NO: 1204
aguguuggguacuauuagu

SEQ ID NO: 95633 - RNA, 19 nt, Artificial Sequence
  Description of Artificial Sequence: Synthetic oligonucleotide
  Antisense strand to SEQ ID NO: 95552
acuaauaguacccaacacu

SEQ ID NO: 95634 - RNA, 19 nt, Artificial Sequence
  Description of Artificial Sequence: Synthetic oligonucleotide
  Sense strand starting at position 3514 of SEQ ID NO: 1204
agcuacuaguuguuucuaa

SEQ ID NO: 95635 - RNA, 19 nt, Artificial Sequence
  Description of Artificial Sequence: Synthetic oligonucleotide
  Antisense strand to SEQ ID NO: 95554
uuagaaacaacuaguagcu

SEQ ID NO: 95636 - RNA, 19 nt, Artificial Sequence
  Description of Artificial Sequence: Synthetic oligonucleotide
  Sense strand starting at position 3515 of SEQ ID NO: 1204
gcuacuaguuguuucuaau

SEQ ID NO: 95637 - RNA, 19 nt, Artificial Sequence
  Description of Artificial Sequence: Synthetic oligonucleotide
  Antisense strand to SEQ ID NO: 95556
auuagaaacaacuaguagc

SEQ ID NO: 95638 - RNA, 19 nt, Artificial Sequence
  Description of Artificial Sequence: Synthetic oligonucleotide
  Sense strand starting at position 3521 of SEQ ID NO: 1204
aguuguuucuaaucucauu

SEQ ID NO: 95639 - RNA, 19 nt, Artificial Sequence
  Description of Artificial Sequence: Synthetic oligonucleotide
  Antisense strand to SEQ ID NO: 95558
aaugagauuagaaacaacu

SEQ ID NO: 95640 - RNA, 19 nt, Artificial Sequence
  Description of Artificial Sequence: Synthetic oligonucleotide
  Sense strand starting at position 3593 of SEQ ID NO: 1204
ucagaauaauuggagacuu

SEQ ID NO: 95641 - RNA, 19 nt, Artificial Sequence
  Description of Artificial Sequence: Synthetic oligonucleotide
  Antisense strand to SEQ ID NO: 95560
aagucuccaauuauucuga

SEQ ID NO: 95642 - RNA, 19 nt, Artificial Sequence
  Description of Artificial Sequence: Synthetic oligonucleotide
  Sense strand starting at position 3729 of SEQ ID NO: 1204
guagcaugaguccaggagu

SEQ ID NO: 95643 - RNA, 19 nt, Artificial Sequence
  Description of Artificial Sequence: Synthetic oligonucleotide
  Antisense strand to SEQ ID NO: 95562
acuccuggacucaugcuac

SEQ ID NO: 95644 - RNA, 19 nt, Artificial Sequence
  Description of Artificial Sequence: Synthetic oligonucleotide
  Sense strand starting at position 3831 of SEQ ID NO: 1204
ucucaacugcucgggaguu

SEQ ID NO: 95645 - RNA, 19 nt, Artificial Sequence
  Description of Artificial Sequence: Synthetic oligonucleotide
  Antisense strand to SEQ ID NO: 95564
aacucccgagcaguugaga

SEQ ID NO: 95646 - RNA, 19 nt, Artificial Sequence
  Description of Artificial Sequence: Synthetic oligonucleotide
  Sense strand starting at position 3971 of SEQ ID NO: 1204
gagccugccucagaaaggu

SEQ ID NO: 95647 - RNA, 19 nt, Artificial Sequence
  Description of Artificial Sequence: Synthetic oligonucleotide
  Antisense strand to SEQ ID NO: 95566
accuuucugaggcaggcuc

SEQ ID NO: 95648 - RNA, 19 nt, Artificial Sequence
  Description of Artificial Sequence: Synthetic oligonucleotide
  Sense strand starting at position 3980 of SEQ ID NO: 1204
ucagaaaggucagcaagau

SEQ ID NO: 95649 - RNA, 19 nt, Artificial Sequence
  Description of Artificial Sequence: Synthetic oligonucleotide
  Antisense strand to SEQ ID NO: 95568
aucuugcugaccuuucuga

SEQ ID NO: 95650 - RNA, 19 nt, Artificial Sequence
  Description of Artificial Sequence: Synthetic oligonucleotide
  Sense strand starting at position 3615 of SEQ ID NO: 1205
aggaaauugccuugcucua

SEQ ID NO: 95651 - RNA, 19 nt, Artificial Sequence
  Description of Artificial Sequence: Synthetic oligonucleotide
  Antisense strand to SEQ ID NO: 95570
uagagcaaggcaauuuccu

SEQ ID NO: 95652 - RNA, 19 nt, Artificial Sequence
  Description of Artificial Sequence: Synthetic oligonucleotide
  Sense strand starting at position 3585 of SEQ ID NO: 1205
guguaccaccuuugguaaa

SEQ ID NO: 95653 - RNA, 19 nt, Artificial Sequence
  Description of Artificial Sequence: Synthetic oligonucleotide
  Antisense strand to SEQ ID NO: 95572
uuuaccaaaggugguacac

SEQ ID NO: 95654 - RNA, 19 nt, Artificial Sequence
  Description of Artificial Sequence: Synthetic oligonucleotide
  Sense strand starting at position 3502 of SEQ ID NO: 1205
ggcacugguuuagaagaca

SEQ ID NO: 95655 - RNA, 19 nt, Artificial Sequence
  Description of Artificial Sequence: Synthetic oligonucleotide
  Antisense strand to SEQ ID NO: 95574
ugucuucuaaaccagugcc

SEQ ID NO: 95656 - RNA, 19 nt, Artificial Sequence
  Description of Artificial Sequence: Synthetic oligonucleotide
  Sense strand starting at position 3500 of SEQ ID NO: 1205
guggcacugguuuagaaga

SEQ ID NO: 95657 - RNA, 19 nt, Artificial Sequence
  Description of Artificial Sequence: Synthetic oligonucleotide
  Antisense strand to SEQ ID NO: 95576
ucuucuaaaccagugccac

SEQ ID NO: 95658 - RNA, 19 nt, Artificial Sequence
  Description of Artificial Sequence: Synthetic oligonucleotide
  Sense strand starting at position 3459 of SEQ ID NO: 1205
augugagcuagcgaugaaa

SEQ ID NO: 95659 - RNA, 19 nt, Artificial Sequence
  Description of Artificial Sequence: Synthetic oligonucleotide
  Antisense strand to SEQ ID NO: 95578
uuucaucgcuagcucacau

SEQ ID NO: 95660 - RNA, 19 nt, Artificial Sequence
  Description of Artificial Sequence: Synthetic oligonucleotide
  Sense strand starting at position 3455 of SEQ ID NO: 1205
gggcaugugagcuagcgau

SEQ ID NO: 95661 - RNA, 19 nt, Artificial Sequence
  Description of Artificial Sequence: Synthetic oligonucleotide
  Antisense strand to SEQ ID NO: 95580
aucgcuagcucacaugccc

SEQ ID NO: 95662 - RNA, 19 nt, Artificial Sequence
  Description of Artificial Sequence: Synthetic oligonucleotide
  Sense strand starting at position 3319 of SEQ ID NO: 1205
ccacguucccaauggauga

SEQ ID NO: 95663 - RNA, 19 nt, Artificial Sequence
  Description of Artificial Sequence: Synthetic oligonucleotide
  Antisense strand to SEQ ID NO: 95582
ucauccauugggaacgugg

SEQ ID NO: 95664 - RNA, 19 nt, Artificial Sequence
  Description of Artificial Sequence: Synthetic oligonucleotide
  Sense strand starting at position 3167 of SEQ ID NO: 1205
ccacaagucugaggcuuua

SEQ ID NO: 95665 - RNA, 19 nt, Artificial Sequence
  Description of Artificial Sequence: Synthetic oligonucleotide
  Antisense strand to SEQ ID NO: 95584
uaaagccucagacuugugg

SEQ ID NO: 95666 - RNA, 19 nt, Artificial Sequence
  Description of Artificial Sequence: Synthetic oligonucleotide
  Sense strand starting at position 2615 of SEQ ID NO: 1205
gcgcgaagauuucagaguu

SEQ ID NO: 95667 - RNA, 19 nt, Artificial Sequence
  Description of Artificial Sequence: Synthetic oligonucleotide
  Antisense strand to SEQ ID NO: 95586
aacucugaaaucuucgcgc

SEQ ID NO: 95668 - RNA, 19 nt, Artificial Sequence
  Description of Artificial Sequence: Synthetic oligonucleotide
  Sense strand starting at position 2607 of SEQ ID NO: 1205
gaggcguggcgcgaagauu

SEQ ID NO: 95669 - RNA, 19 nt, Artificial Sequence
  Description of Artificial Sequence: Synthetic oligonucleotide
  Antisense strand to SEQ ID NO: 95588
aaucuucgcgccacgccuc

SEQ ID NO: 95670 - RNA, 19 nt, Artificial Sequence
  Description of Artificial Sequence: Synthetic oligonucleotide
  Sense strand starting at position 2504 of SEQ ID NO: 1205
gugggagucguggcgcaaa

SEQ ID NO: 95671 - RNA, 19 nt, Artificial Sequence
  Description of Artificial Sequence: Synthetic oligonucleotide
  Antisense strand to SEQ ID NO: 95590
uuugcgccacgacucccac

SEQ ID NO: 95672 - RNA, 19 nt, Artificial Sequence
  Description of Artificial Sequence: Synthetic oligonucleotide
  Sense strand starting at position 2230 of SEQ ID NO: 1205
caucuuggcccgcgaagua

SEQ ID NO: 95673 - RNA, 19 nt, Artificial Sequence
  Description of Artificial Sequence: Synthetic oligonucleotide
  Antisense strand to SEQ ID NO: 95592
uacuucgcgggccaagaug

SEQ ID NO: 95674 - RNA, 19 nt, Artificial Sequence
  Description of Artificial Sequence: Synthetic oligonucleotide
  Sense strand starting at position 2217 of SEQ ID NO: 1205
aggagugguuucgcaucuu

SEQ ID NO: 95675 - RNA, 19 nt, Artificial Sequence
  Description of Artificial Sequence: Synthetic oligonucleotide
  Antisense strand to SEQ ID NO: 95594
aagaugcgaaaccacuccu

SEQ ID NO: 95676 - RNA, 19 nt, Artificial Sequence
  Description of Artificial Sequence: Synthetic oligonucleotide
  Sense strand starting at position 999 of SEQ ID NO: 1205
acgugacacucuuaccaau

SEQ ID NO: 95677 - RNA, 19 nt, Artificial Sequence
  Description of Artificial Sequence: Synthetic oligonucleotide
  Antisense strand to SEQ ID NO: 95596
auugguaagagugucacgu

SEQ ID NO: 95678 - RNA, 19 nt, Artificial Sequence
  Description of Artificial Sequence: Synthetic oligonucleotide
  Sense strand starting at position 812 of SEQ ID NO: 1205
aacuauggguaguucuaaa

SEQ ID NO: 95679 - RNA, 19 nt, Artificial Sequence
  Description of Artificial Sequence: Synthetic oligonucleotide
  Antisense strand to SEQ ID NO: 95598
uuuagaacuacccauaguu

SEQ ID NO: 95680 - RNA, 19 nt, Artificial Sequence
  Description of Artificial Sequence: Synthetic oligonucleotide
  Sense strand starting at position 433 of SEQ ID NO: 1205
gcuguuucucaagacuaaa

SEQ ID NO: 95681 - RNA, 19 nt, Artificial Sequence
  Description of Artificial Sequence: Synthetic oligonucleotide
  Antisense strand to SEQ ID NO: 95600
uuuagucuugagaaacagc

SEQ ID NO: 95682 - RNA, 19 nt, Artificial Sequence
  Description of Artificial Sequence: Synthetic oligonucleotide
  Sense strand starting at position 430 of SEQ ID NO: 1205
gaugcuguuucucaagacu

SEQ ID NO: 95683 - RNA, 19 nt, Artificial Sequence
  Description of Artificial Sequence: Synthetic oligonucleotide
  Antisense strand to SEQ ID NO: 95602
agucuugagaaacagcauc

SEQ ID NO: 95684 - RNA, 19 nt, Artificial Sequence
  Description of Artificial Sequence: Synthetic oligonucleotide
  Sense strand starting at position 426 of SEQ ID NO: 1205
gcaugaugcuguuucucaa

SEQ ID NO: 95685 - RNA, 19 nt, Artificial Sequence
  Description of Artificial Sequence: Synthetic oligonucleotide
  Antisense strand to SEQ ID NO: 95604
uugagaaacagcaucaugc

SEQ ID NO: 95686 - RNA, 19 nt, Artificial Sequence
  Description of Artificial Sequence: Synthetic oligonucleotide
  Sense strand starting at position 414 of SEQ ID NO: 1205
gcucuuuccuuggcaugau

SEQ ID NO: 95687 - RNA, 19 nt, Artificial Sequence
  Description of Artificial Sequence: Synthetic oligonucleotide
  Antisense strand to SEQ ID NO: 95606
aucaugccaaggaaagagc

SEQ ID NO: 95688 - RNA, 19 nt, Artificial Sequence
  Description of Artificial Sequence: Synthetic oligonucleotide
  Sense strand starting at position 413 of SEQ ID NO: 1205
agcucuuuccuuggcauga

SEQ ID NO: 95689 - RNA, 19 nt, Artificial Sequence
  Description of Artificial Sequence: Synthetic oligonucleotide
  Antisense strand to SEQ ID NO: 95608
ucaugccaaggaaagagcu

SEQ ID NO: 95690 - RNA, 19 nt, Artificial Sequence
  Description of Artificial Sequence: Synthetic oligonucleotide
  Sense strand starting at position 392 of SEQ ID NO: 1205
gccgcauuacuccaaagcu

SEQ ID NO: 95691 - RNA, 19 nt, Artificial Sequence
  Description of Artificial Sequence: Synthetic oligonucleotide
  Antisense strand to SEQ ID NO: 95610
agcuuuggaguaaugcggc

SEQ ID NO: 95692 - RNA, 19 nt, Artificial Sequence
  Description of Artificial Sequence: Synthetic oligonucleotide
  Sense strand starting at position 278 of SEQ ID NO: 1205
uaaugauccuaugagguca

SEQ ID NO: 95693 - RNA, 19 nt, Artificial Sequence
  Description of Artificial Sequence: Synthetic oligonucleotide
  Antisense strand to SEQ ID NO: 95612
ugaccucauaggaucauua

SEQ ID NO: 95694 - RNA, 19 nt, Artificial Sequence
  Description of Artificial Sequence: Synthetic oligonucleotide
  Sense strand starting at position 275 of SEQ ID NO: 1205
cuuuaaugauccuaugagg

SEQ ID NO: 95695 - RNA, 19 nt, Artificial Sequence
  Description of Artificial Sequence: Synthetic oligonucleotide
  Antisense strand to SEQ ID NO: 95614
ccucauaggaucauuaaag

SEQ ID NO: 95696 - RNA, 19 nt, Artificial Sequence
  Description of Artificial Sequence: Synthetic oligonucleotide
  Sense strand starting at position 240 of SEQ ID NO: 1205
uguguuagguacuauauaa

SEQ ID NO: 95697 - RNA, 19 nt, Artificial Sequence
  Description of Artificial Sequence: Synthetic oligonucleotide
  Antisense strand to SEQ ID NO: 95616
uuauauaguaccuaacaca

SEQ ID NO: 95698 - RNA, 19 nt, Artificial Sequence
  Description of Artificial Sequence: Synthetic oligonucleotide
  Sense strand starting at position 235 of SEQ ID NO: 1205
agcacuguguuagguacua

SEQ ID NO: 95699 - RNA, 19 nt, Artificial Sequence
  Description of Artificial Sequence: Synthetic oligonucleotide
  Antisense strand to SEQ ID NO: 95618
uaguaccuaacacagugcu

SEQ ID NO: 95700 - RNA, 19 nt, Artificial Sequence
  Description of Artificial Sequence: Synthetic oligonucleotide
  Sense strand starting at position 196 of SEQ ID NO: 1205
gaugauggcuaccauuuau

SEQ ID NO: 95701 - RNA, 19 nt, Artificial Sequence
  Description of Artificial Sequence: Synthetic oligonucleotide
  Antisense strand to SEQ ID NO: 95620
auaaaugguagccaucauc

SEQ ID NO: 95702 - RNA, 19 nt, Artificial Sequence
  Description of Artificial Sequence: Synthetic oligonucleotide
  Sense strand starting at position 193 of SEQ ID NO: 1205
cuggaugauggcuaccauu

SEQ ID NO: 95703 - RNA, 19 nt, Artificial Sequence
  Description of Artificial Sequence: Synthetic oligonucleotide
  Antisense strand to SEQ ID NO: 95622
aaugguagccaucauccag

SEQ ID NO: 95704 - RNA, 19 nt, Artificial Sequence
  Description of Artificial Sequence: Synthetic oligonucleotide
  Sense strand starting at position 182 of SEQ ID NO: 1205
guuuaaugauacuggauga

SEQ ID NO: 95705 - RNA, 19 nt, Artificial Sequence
  Description of Artificial Sequence: Synthetic oligonucleotide
  Antisense strand to SEQ ID NO: 95624
ucauccaguaucauuaaac

SEQ ID NO: 95706 - RNA, 19 nt, Artificial Sequence
  Description of Artificial Sequence: Synthetic oligonucleotide
  Sense strand starting at position 179 of SEQ ID NO: 1205
gauguuuaaugauacugga

SEQ ID NO: 95707 - RNA, 19 nt, Artificial Sequence
  Description of Artificial Sequence: Synthetic oligonucleotide
  Antisense strand to SEQ ID NO: 95626
uccaguaucauuaaacauc

SEQ ID NO: 95708 - RNA, 19 nt, Artificial Sequence
  Description of Artificial Sequence: Synthetic oligonucleotide
  Sense strand starting at position 167 of SEQ ID NO: 1205
agcaguaacuaugauguuu

SEQ ID NO: 95709 - RNA, 19 nt, Artificial Sequence
  Description of Artificial Sequence: Synthetic oligonucleotide
  Antisense strand to SEQ ID NO: 95628
aaacaucauaguuacugcu

SEQ ID NO: 95710 - RNA, 19 nt, Artificial Sequence
  Description of Artificial Sequence: Synthetic oligonucleotide
  Sense strand starting at position 81 of SEQ ID NO: 1205
uacggcuaauuugaagaga

SEQ ID NO: 95711 - RNA, 19 nt, Artificial Sequence
  Description of Artificial Sequence: Synthetic oligonucleotide
  Antisense strand to SEQ ID NO: 95630
ucucuucaaauuagccgua

SEQ ID NO: 95712 - RNA, 19 nt, Artificial Sequence
  Description of Artificial Sequence: Synthetic oligonucleotide
  Sense strand starting at position 72 of SEQ ID NO: 1205
agcugaaucuacggcuaau

SEQ ID NO: 95713 - RNA, 19 nt, Artificial Sequence
  Description of Artificial Sequence: Synthetic oligonucleotide
  Antisense strand to SEQ ID NO: 95632
auuagccguagauucagcu

SEQ ID NO: 95714 - RNA, 19 nt, Artificial Sequence
  Description of Artificial Sequence: Synthetic oligonucleotide
  Sense strand starting at position 131 of SEQ ID NO: 1206
cggccaggguuugucuaua

SEQ ID NO: 95715 - RNA, 19 nt, Artificial Sequence
  Description of Artificial Sequence: Synthetic oligonucleotide
  Antisense strand to SEQ ID NO: 95634
uauagacaaacccuggccg

SEQ ID NO: 95716 - RNA, 19 nt, Artificial Sequence
  Description of Artificial Sequence: Synthetic oligonucleotide
  Sense strand starting at position 183 of SEQ ID NO: 1206
guugcaaugucuugaggaa

SEQ ID NO: 95717 - RNA, 19 nt, Artificial Sequence
  Description of Artificial Sequence: Synthetic oligonucleotide
  Antisense strand to SEQ ID NO: 95636
uuccucaagacauugcaac

SEQ ID NO: 95718 - RNA, 19 nt, Artificial Sequence
  Description of Artificial Sequence: Synthetic oligonucleotide
  Sense strand starting at position 184 of SEQ ID NO: 1206
uugcaaugucuugaggaau

SEQ ID NO: 95719 - RNA, 19 nt, Artificial Sequence
  Description of Artificial Sequence: Synthetic oligonucleotide
  Antisense strand to SEQ ID NO: 95638
auuccucaagacauugcaa

SEQ ID NO: 95720 - RNA, 19 nt, Artificial Sequence
  Description of Artificial Sequence: Synthetic oligonucleotide
  Sense strand starting at position 228 of SEQ ID NO: 1206
ugcuaaaguguauacguau

SEQ ID NO: 95721 - RNA, 19 nt, Artificial Sequence
  Description of Artificial Sequence: Synthetic oligonucleotide
  Antisense strand to SEQ ID NO: 95640
auacguauacacuuuagca

SEQ ID NO: 95722 - RNA, 19 nt, Artificial Sequence
  Description of Artificial Sequence: Synthetic oligonucleotide
  Sense strand starting at position 614 of SEQ ID NO: 1206
gcaggacugccuuaaggau

SEQ ID NO: 95723 - RNA, 19 nt, Artificial Sequence
  Description of Artificial Sequence: Synthetic oligonucleotide
  Antisense strand to SEQ ID NO: 95642
auccuuaaggcaguccugc

SEQ ID NO: 95724 - RNA, 19 nt, Artificial Sequence
  Description of Artificial Sequence: Synthetic oligonucleotide
  Sense strand starting at position 656 of SEQ ID NO: 1206
gaacaucuggcuggguuua

SEQ ID NO: 95725 - RNA, 19 nt, Artificial Sequence
  Description of Artificial Sequence: Synthetic oligonucleotide
  Antisense strand to SEQ ID NO: 95644
uaaacccagccagauguuc

SEQ ID NO: 95726 - RNA, 19 nt, Artificial Sequence
  Description of Artificial Sequence: Synthetic oligonucleotide
  Sense strand starting at position 734 of SEQ ID NO: 1206
ccuguuauaggccaagcau

SEQ ID NO: 95727 - RNA, 19 nt, Artificial Sequence
  Description of Artificial Sequence: Synthetic oligonucleotide
  Antisense strand to SEQ ID NO: 95646
augcuuggccuauaacagg

SEQ ID NO: 95728 - RNA, 19 nt, Artificial Sequence
  Description of Artificial Sequence: Synthetic oligonucleotide
  Sense strand starting at position 800 of SEQ ID NO: 1206
acaauauagucuggagaaa

SEQ ID NO: 95729 - RNA, 19 nt, Artificial Sequence
  Description of Artificial Sequence: Synthetic oligonucleotide
  Antisense strand to SEQ ID NO: 95648
uuucuccagacuauauugu

SEQ ID NO: 95730 - RNA, 19 nt, Artificial Sequence
  Description of Artificial Sequence: Synthetic oligonucleotide
  Sense strand starting at position 852 of SEQ ID NO: 1206
cccuuuggcuuucuguaaa

SEQ ID NO: 95731 - RNA, 19 nt, Artificial Sequence
  Description of Artificial Sequence: Synthetic oligonucleotide
  Antisense strand to SEQ ID NO: 95650
uuuacagaaagccaaaggg

SEQ ID NO: 95732 - RNA, 19 nt, Artificial Sequence
  Description of Artificial Sequence: Synthetic oligonucleotide
  Sense strand starting at position 1031 of SEQ ID NO: 1206
ggucucuacgcucgaucua

SEQ ID NO: 95733 - RNA, 19 nt, Artificial Sequence
  Description of Artificial Sequence: Synthetic oligonucleotide
  Antisense strand to SEQ ID NO: 95652
uagaucgagcguagagacc

SEQ ID NO: 95734 - RNA, 19 nt, Artificial Sequence
  Description of Artificial Sequence: Synthetic oligonucleotide
  Sense strand starting at position 1040 of SEQ ID NO: 1206
gcucgaucuacaggagaag

SEQ ID NO: 95735 - RNA, 19 nt, Artificial Sequence
  Description of Artificial Sequence: Synthetic oligonucleotide
  Antisense strand to SEQ ID NO: 95654
cuucuccuguagaucgagc

SEQ ID NO: 95736 - RNA, 19 nt, Artificial Sequence
  Description of Artificial Sequence: Synthetic oligonucleotide
  Sense strand starting at position 1387 of SEQ ID NO: 1206
ggcugaguucucggaggca

SEQ ID NO: 95737 - RNA, 19 nt, Artificial Sequence
  Description of Artificial Sequence: Synthetic oligonucleotide
  Antisense strand to SEQ ID NO: 95656
ugccuccgagaacucagcc

SEQ ID NO: 95738 - RNA, 19 nt, Artificial Sequence
  Description of Artificial Sequence: Synthetic oligonucleotide
  Sense strand starting at position 1389 of SEQ ID NO: 1206
cugaguucucggaggcagu

SEQ ID NO: 95739 - RNA, 19 nt, Artificial Sequence
  Description of Artificial Sequence: Synthetic oligonucleotide
  Antisense strand to SEQ ID NO: 95658
acugccuccgagaacucag

SEQ ID NO: 95740 - RNA, 19 nt, Artificial Sequence
  Description of Artificial Sequence: Synthetic oligonucleotide
  Sense strand starting at position 1390 of SEQ ID NO: 1206
ugaguucucggaggcaguu

SEQ ID NO: 95741 - RNA, 19 nt, Artificial Sequence
  Description of Artificial Sequence: Synthetic oligonucleotide
  Antisense strand to SEQ ID NO: 95660
aacugccuccgagaacuca

SEQ ID NO: 95742 - RNA, 19 nt, Artificial Sequence
  Description of Artificial Sequence: Synthetic oligonucleotide
  Sense strand starting at position 1453 of SEQ ID NO: 1206
gaaagagcucggcgggaaa

SEQ ID NO: 95743 - RNA, 19 nt, Artificial Sequence
  Description of Artificial Sequence: Synthetic oligonucleotide
  Antisense strand to SEQ ID NO: 95662
uuucccgccgagcucuuuc

SEQ ID NO: 95744 - RNA, 19 nt, Artificial Sequence
  Description of Artificial Sequence: Synthetic oligonucleotide
  Sense strand starting at position 1480 of SEQ ID NO: 1206
ggcaauugccggugagguu

SEQ ID NO: 95745 - RNA, 19 nt, Artificial Sequence
  Description of Artificial Sequence: Synthetic oligonucleotide
  Antisense strand to SEQ ID NO: 95664
aaccucaccggcaauugcc

SEQ ID NO: 95746 - RNA, 19 nt, Artificial Sequence
  Description of Artificial Sequence: Synthetic oligonucleotide
  Sense strand starting at position 2365 of SEQ ID NO: 1206
gcgaguguaccuugguuca

SEQ ID NO: 95747 - RNA, 19 nt, Artificial Sequence
  Description of Artificial Sequence: Synthetic oligonucleotide
  Antisense strand to SEQ ID NO: 95666
ugaaccaagguacacucgc

SEQ ID NO: 95748 - RNA, 19 nt, Artificial Sequence
  Description of Artificial Sequence: Synthetic oligonucleotide
  Sense strand starting at position 2385 of SEQ ID NO: 1206
cccagaaaggcuggacaau

SEQ ID NO: 95749 - RNA, 19 nt, Artificial Sequence
  Description of Artificial Sequence: Synthetic oligonucleotide
  Antisense strand to SEQ ID NO: 95668
auuguccagccuuucuggg

SEQ ID NO: 95750 - RNA, 19 nt, Artificial Sequence
  Description of Artificial Sequence: Synthetic oligonucleotide
  Sense strand starting at position 2394 of SEQ ID NO: 1206
gcuggacaauuccaggaga

SEQ ID NO: 95751 - RNA, 19 nt, Artificial Sequence
  Description of Artificial Sequence: Synthetic oligonucleotide
  Antisense strand to SEQ ID NO: 95670
ucuccuggaauuguccagc

SEQ ID NO: 95752 - RNA, 19 nt, Artificial Sequence
  Description of Artificial Sequence: Synthetic oligonucleotide
  Sense strand starting at position 2495 of SEQ ID NO: 1206
uuauuaugcaugugagacg

SEQ ID NO: 95753 - RNA, 19 nt, Artificial Sequence
  Description of Artificial Sequence: Synthetic oligonucleotide
  Antisense strand to SEQ ID NO: 95672
cgucucacaugcauaauaa

SEQ ID NO: 95754 - RNA, 19 nt, Artificial Sequence
  Description of Artificial Sequence: Synthetic oligonucleotide
  Sense strand starting at position 2520 of SEQ ID NO: 1206
gaggaauagucgcuuaugc

SEQ ID NO: 95755 - RNA, 19 nt, Artificial Sequence
  Description of Artificial Sequence: Synthetic oligonucleotide
  Antisense strand to SEQ ID NO: 95674
gcauaagcgacuauuccuc

SEQ ID NO: 95756 - RNA, 19 nt, Artificial Sequence
  Description of Artificial Sequence: Synthetic oligonucleotide
  Sense strand starting at position 2522 of SEQ ID NO: 1206
ggaauagucgcuuaugcuu

SEQ ID NO: 95757 - RNA, 19 nt, Artificial Sequence
  Description of Artificial Sequence: Synthetic oligonucleotide
  Antisense strand to SEQ ID NO: 95676
aagcauaagcgacuauucc

SEQ ID NO: 95758 - RNA, 19 nt, Artificial Sequence
  Description of Artificial Sequence: Synthetic oligonucleotide
  Sense strand starting at position 2524 of SEQ ID NO: 1206
aauagucgcuuaugcuuua

SEQ ID NO: 95759 - RNA, 19 nt, Artificial Sequence
  Description of Artificial Sequence: Synthetic oligonucleotide
  Antisense strand to SEQ ID NO: 95678
uaaagcauaagcgacuauu

SEQ ID NO: 95760 - RNA, 19 nt, Artificial Sequence
  Description of Artificial Sequence: Synthetic oligonucleotide
  Sense strand starting at position 2539 of SEQ ID NO: 1206
uuuagucuggcuuacugaa

SEQ ID NO: 95761 - RNA, 19 nt, Artificial Sequence
  Description of Artificial Sequence: Synthetic oligonucleotide
  Antisense strand to SEQ ID NO: 95680
uucaguaagccagacuaaa

SEQ ID NO: 95762 - RNA, 19 nt, Artificial Sequence
  Description of Artificial Sequence: Synthetic oligonucleotide
  Sense strand starting at position 2664 of SEQ ID NO: 1206
aagggaagcuaucaauuug

SEQ ID NO: 95763 - RNA, 19 nt, Artificial Sequence
  Description of Artificial Sequence: Synthetic oligonucleotide
  Antisense strand to SEQ ID NO: 95682
caaauugauagcuucccuu

SEQ ID NO: 95764 - RNA, 19 nt, Artificial Sequence
  Description of Artificial Sequence: Synthetic oligonucleotide
  Sense strand starting at position 2768 of SEQ ID NO: 1206
ggagguguguagcuuuaaa

SEQ ID NO: 95765 - RNA, 19 nt, Artificial Sequence
  Description of Artificial Sequence: Synthetic oligonucleotide
  Antisense strand to SEQ ID NO: 95684
uuuaaagcuacacaccucc

SEQ ID NO: 95766 - RNA, 19 nt, Artificial Sequence
  Description of Artificial Sequence: Synthetic oligonucleotide
  Sense strand starting at position 2828 of SEQ ID NO: 1206
ggccgauuugcccgaagca

SEQ ID NO: 95767 - RNA, 19 nt, Artificial Sequence
  Description of Artificial Sequence: Synthetic oligonucleotide
  Antisense strand to SEQ ID NO: 95686
ugcuucgggcaaaucggcc

SEQ ID NO: 95768 - RNA, 19 nt, Artificial Sequence
  Description of Artificial Sequence: Synthetic oligonucleotide
  Sense strand starting at position 2865 of SEQ ID NO: 1206
uccuuugacuuagugauug

SEQ ID NO: 95769 - RNA, 19 nt, Artificial Sequence
  Description of Artificial Sequence: Synthetic oligonucleotide
  Antisense strand to SEQ ID NO: 95688
caaucacuaagucaaagga

SEQ ID NO: 95770 - RNA, 19 nt, Artificial Sequence
  Description of Artificial Sequence: Synthetic oligonucleotide
  Sense strand starting at position 2939 of SEQ ID NO: 1206
gccagagucugugcucuac

SEQ ID NO: 95771 - RNA, 19 nt, Artificial Sequence
  Description of Artificial Sequence: Synthetic oligonucleotide
  Antisense strand to SEQ ID NO: 95690
guagagcacagacucuggc

SEQ ID NO: 95772 - RNA, 19 nt, Artificial Sequence
  Description of Artificial Sequence: Synthetic oligonucleotide
  Sense strand starting at position 3752 of SEQ ID NO: 1207
gcuuccuuuccaugagaaa

SEQ ID NO: 95773 - RNA, 19 nt, Artificial Sequence
  Description of Artificial Sequence: Synthetic oligonucleotide
  Antisense strand to SEQ ID NO: 95692
uuucucauggaaaggaagc

SEQ ID NO: 95774 - RNA, 19 nt, Artificial Sequence
  Description of Artificial Sequence: Synthetic oligonucleotide
  Sense strand starting at position 3716 of SEQ ID NO: 1207
gggauacuuuguuuggaag

SEQ ID NO: 95775 - RNA, 19 nt, Artificial Sequence
  Description of Artificial Sequence: Synthetic oligonucleotide
  Antisense strand to SEQ ID NO: 95694
cuuccaaacaaaguauccc

SEQ ID NO: 95776 - RNA, 19 nt, Artificial Sequence
  Description of Artificial Sequence: Synthetic oligonucleotide
  Sense strand starting at position 3715 of SEQ ID NO: 1207
agggauacuuuguuuggaa

SEQ ID NO: 95777 - RNA, 19 nt, Artificial Sequence
  Description of Artificial Sequence: Synthetic oligonucleotide
  Antisense strand to SEQ ID NO: 95696
uuccaaacaaaguaucccu

SEQ ID NO: 95778 - RNA, 19 nt, Artificial Sequence
  Description of Artificial Sequence: Synthetic oligonucleotide
  Sense strand starting at position 3714 of SEQ ID NO: 1207
cagggauacuuuguuugga

SEQ ID NO: 95779 - RNA, 19 nt, Artificial Sequence
  Description of Artificial Sequence: Synthetic oligonucleotide
  Antisense strand to SEQ ID NO: 95698
uccaaacaaaguaucccug

SEQ ID NO: 95780 - RNA, 19 nt, Artificial Sequence
  Description of Artificial Sequence: Synthetic oligonucleotide
  Sense strand starting at position 3706 of SEQ ID NO: 1207
gaguguggcagggauacuu

SEQ ID NO: 95781 - RNA, 19 nt, Artificial Sequence
  Description of Artificial Sequence: Synthetic oligonucleotide
  Antisense strand to SEQ ID NO: 95700
aaguaucccugccacacuc

SEQ ID NO: 95782 - RNA, 19 nt, Artificial Sequence
  Description of Artificial Sequence: Synthetic oligonucleotide
  Sense strand starting at position 3659 of SEQ ID NO: 1207
caaagugacugcucuggga

SEQ ID NO: 95783 - RNA, 19 nt, Artificial Sequence
  Description of Artificial Sequence: Synthetic oligonucleotide
  Antisense strand to SEQ ID NO: 95702
ucccagagcagucacuuug

SEQ ID NO: 95784 - RNA, 19 nt, Artificial Sequence
  Description of Artificial Sequence: Synthetic oligonucleotide
  Sense strand starting at position 3647 of SEQ ID NO: 1207
agaauuaauuuccaaagug

SEQ ID NO: 95785 - RNA, 19 nt, Artificial Sequence
  Description of Artificial Sequence: Synthetic oligonucleotide
  Antisense strand to SEQ ID NO: 95704
cacuuuggaaauuaauucu

SEQ ID NO: 95786 - RNA, 19 nt, Artificial Sequence
  Description of Artificial Sequence: Synthetic oligonucleotide
  Sense strand starting at position 3603 of SEQ ID NO: 1207
gugauugccgaggagagaa

SEQ ID NO: 95787 - RNA, 19 nt, Artificial Sequence
  Description of Artificial Sequence: Synthetic oligonucleotide
  Antisense strand to SEQ ID NO: 95706
uucucuccucggcaaucac

SEQ ID NO: 95788 - RNA, 19 nt, Artificial Sequence
  Description of Artificial Sequence: Synthetic oligonucleotide
  Sense strand starting at position 3591 of SEQ ID NO: 1207
ucuagaucuuaugugauug

SEQ ID NO: 95789 - RNA, 19 nt, Artificial Sequence
  Description of Artificial Sequence: Synthetic oligonucleotide
  Antisense strand to SEQ ID NO: 95708
caaucacauaagaucuaga

SEQ ID NO: 95790 - RNA, 19 nt, Artificial Sequence
  Description of Artificial Sequence: Synthetic oligonucleotide
  Sense strand starting at position 3583 of SEQ ID NO: 1207
aguuccuuucuagaucuua

SEQ ID NO: 95791 - RNA, 19 nt, Artificial Sequence
  Description of Artificial Sequence: Synthetic oligonucleotide
  Antisense strand to SEQ ID NO: 95710
uaagaucuagaaaggaacu

SEQ ID NO: 95792 - RNA, 19 nt, Artificial Sequence
  Description of Artificial Sequence: Synthetic oligonucleotide
  Sense strand starting at position 3523 of SEQ ID NO: 1207
acuuaauugauagggcaga

SEQ ID NO: 95793 - RNA, 19 nt, Artificial Sequence
  Description of Artificial Sequence: Synthetic oligonucleotide
  Antisense strand to SEQ ID NO: 95712
ucugcccuaucaauuaagu

SEQ ID NO: 95794 - RNA, 19 nt, Artificial Sequence
  Description of Artificial Sequence: Synthetic oligonucleotide
  Sense strand starting at position 3512 of SEQ ID NO: 1207
auugaagcaugacuuaauu

SEQ ID NO: 95795 - RNA, 19 nt, Artificial Sequence
  Description of Artificial Sequence: Synthetic oligonucleotide
  Antisense strand to SEQ ID NO: 95714
aauuaagucaugcuucaau

SEQ ID NO: 95796 - RNA, 19 nt, Artificial Sequence
  Description of Artificial Sequence: Synthetic oligonucleotide
  Sense strand starting at position 3509 of SEQ ID NO: 1207
cuaauugaagcaugacuua

SEQ ID NO: 95797 - RNA, 19 nt, Artificial Sequence
  Description of Artificial Sequence: Synthetic oligonucleotide
  Antisense strand to SEQ ID NO: 95716
uaagucaugcuucaauuag

SEQ ID NO: 95798 - RNA, 19 nt, Artificial Sequence
  Description of Artificial Sequence: Synthetic oligonucleotide
  Sense strand starting at position 3401 of SEQ ID NO: 1207
cuggcugugaauuaauaug

SEQ ID NO: 95799 - RNA, 19 nt, Artificial Sequence
  Description of Artificial Sequence: Synthetic oligonucleotide
  Antisense strand to SEQ ID NO: 95718
cauauuaauucacagccag

SEQ ID NO: 95800 - RNA, 19 nt, Artificial Sequence
  Description of Artificial Sequence: Synthetic oligonucleotide
  Sense strand starting at position 3344 of SEQ ID NO: 1207
auuuguggcuaguuagcua

SEQ ID NO: 95801 - RNA, 19 nt, Artificial Sequence
  Description of Artificial Sequence: Synthetic oligonucleotide
  Antisense strand to SEQ ID NO: 95720
uagcuaacuagccacaaau

SEQ ID NO: 95802 - RNA, 19 nt, Artificial Sequence
  Description of Artificial Sequence: Synthetic oligonucleotide
  Sense strand starting at position 3335 of SEQ ID NO: 1207
gucagauggauuuguggcu

SEQ ID NO: 95803 - RNA, 19 nt, Artificial Sequence
  Description of Artificial Sequence: Synthetic oligonucleotide
  Antisense strand to SEQ ID NO: 95722
agccacaaauccaucugac

SEQ ID NO: 95804 - RNA, 19 nt, Artificial Sequence
  Description of Artificial Sequence: Synthetic oligonucleotide
  Sense strand starting at position 3271 of SEQ ID NO: 1207
gugagaauguuucugaugg

SEQ ID NO: 95805 - RNA, 19 nt, Artificial Sequence
  Description of Artificial Sequence: Synthetic oligonucleotide
  Antisense strand to SEQ ID NO: 95724
ccaucagaaacauucucac

SEQ ID NO: 95806 - RNA, 19 nt, Artificial Sequence
  Description of Artificial Sequence: Synthetic oligonucleotide
  Sense strand starting at position 3269 of SEQ ID NO: 1207
augugagaauguuucugau

SEQ ID NO: 95807 - RNA, 19 nt, Artificial Sequence
  Description of Artificial Sequence: Synthetic oligonucleotide
  Antisense strand to SEQ ID NO: 95726
aucagaaacauucucacau

SEQ ID NO: 95808 - RNA, 19 nt, Artificial Sequence
  Description of Artificial Sequence: Synthetic oligonucleotide
  Sense strand starting at position 3251 of SEQ ID NO: 1207
auguauagugaaugaacaa

SEQ ID NO: 95809 - RNA, 19 nt, Artificial Sequence
  Description of Artificial Sequence: Synthetic oligonucleotide
  Antisense strand to SEQ ID NO: 95728
uuguucauucacuauacau

SEQ ID NO: 95810 - RNA, 19 nt, Artificial Sequence
  Description of Artificial Sequence: Synthetic oligonucleotide
  Sense strand starting at position 3185 of SEQ ID NO: 1207
cugaguugugaauauuagu

SEQ ID NO: 95811 - RNA, 19 nt, Artificial Sequence
  Description of Artificial Sequence: Synthetic oligonucleotide
  Antisense strand to SEQ ID NO: 95730
acuaauauucacaacucag

SEQ ID NO: 95812 - RNA, 19 nt, Artificial Sequence
  Description of Artificial Sequence: Synthetic oligonucleotide
  Sense strand starting at position 3177 of SEQ ID NO: 1207
cauauauacugaguuguga

SEQ ID NO: 95813 - RNA, 19 nt, Artificial Sequence
  Description of Artificial Sequence: Synthetic oligonucleotide
  Antisense strand to SEQ ID NO: 95732
ucacaacucaguauauaug

SEQ ID NO: 95814 - RNA, 19 nt, Artificial Sequence
  Description of Artificial Sequence: Synthetic oligonucleotide
  Sense strand starting at position 2838 of SEQ ID NO: 1207
uuugaauaaguguaagcua

SEQ ID NO: 95815 - RNA, 19 nt, Artificial Sequence
  Description of Artificial Sequence: Synthetic oligonucleotide
  Antisense strand to SEQ ID NO: 95734
uagcuuacacuuauucaaa

SEQ ID NO: 95816 - RNA, 19 nt, Artificial Sequence
  Description of Artificial Sequence: Synthetic oligonucleotide
  Sense strand starting at position 2767 of SEQ ID NO: 1207
acuuuauuccuaggaugua

SEQ ID NO: 95817 - RNA, 19 nt, Artificial Sequence
  Description of Artificial Sequence: Synthetic oligonucleotide
  Antisense strand to SEQ ID NO: 95736
uacauccuaggaauaaagu

SEQ ID NO: 95818 - RNA, 19 nt, Artificial Sequence
  Description of Artificial Sequence: Synthetic oligonucleotide
  Sense strand starting at position 2514 of SEQ ID NO: 1207
guaguagauuaggugacau

SEQ ID NO: 95819 - RNA, 19 nt, Artificial Sequence
  Description of Artificial Sequence: Synthetic oligonucleotide
  Antisense strand to SEQ ID NO: 95738
augucaccuaaucuacuac

SEQ ID NO: 95820 - RNA, 19 nt, Artificial Sequence
  Description of Artificial Sequence: Synthetic oligonucleotide
  Sense strand starting at position 2255 of SEQ ID NO: 1207
gccacaugacaaugagguu

SEQ ID NO: 95821 - RNA, 19 nt, Artificial Sequence
  Description of Artificial Sequence: Synthetic oligonucleotide
  Antisense strand to SEQ ID NO: 95740
aaccucauugucauguggc

SEQ ID NO: 95822 - RNA, 19 nt, Artificial Sequence
  Description of Artificial Sequence: Synthetic oligonucleotide
  Sense strand starting at position 925 of SEQ ID NO: 1207
agaauacagugucccuaua

SEQ ID NO: 95823 - RNA, 19 nt, Artificial Sequence
  Description of Artificial Sequence: Synthetic oligonucleotide
  Antisense strand to SEQ ID NO: 95742
uauagggacacuguauucu

SEQ ID NO: 95824 - RNA, 19 nt, Artificial Sequence
  Description of Artificial Sequence: Synthetic oligonucleotide
  Sense strand starting at position 666 of SEQ ID NO: 1207
ggacccuuucuccauugau

SEQ ID NO: 95825 - RNA, 19 nt, Artificial Sequence
  Description of Artificial Sequence: Synthetic oligonucleotide
  Antisense strand to SEQ ID NO: 95744
aucaauggagaaagggucc

SEQ ID NO: 95826 - RNA, 19 nt, Artificial Sequence
  Description of Artificial Sequence: Synthetic oligonucleotide
  Sense strand starting at position 603 of SEQ ID NO: 1207
guaagagcugagcaucuau

SEQ ID NO: 95827 - RNA, 19 nt, Artificial Sequence
  Description of Artificial Sequence: Synthetic oligonucleotide
  Antisense strand to SEQ ID NO: 95746
auagaugcucagcucuuac

SEQ ID NO: 95828 - RNA, 19 nt, Artificial Sequence
  Description of Artificial Sequence: Synthetic oligonucleotide
  Sense strand starting at position 577 of SEQ ID NO: 1207
uggcaaggagcuuggaaau

SEQ ID NO: 95829 - RNA, 19 nt, Artificial Sequence
  Description of Artificial Sequence: Synthetic oligonucleotide
  Antisense strand to SEQ ID NO: 95748
auuuccaagcuccuugcca

SEQ ID NO: 95830 - RNA, 19 nt, Artificial Sequence
  Description of Artificial Sequence: Synthetic oligonucleotide
  Sense strand starting at position 499 of SEQ ID NO: 1207
acaguaaagucccuaagau

SEQ ID NO: 95831 - RNA, 19 nt, Artificial Sequence
  Description of Artificial Sequence: Synthetic oligonucleotide
  Antisense strand to SEQ ID NO: 95750
aucuuagggacuuuacugu

SEQ ID NO: 95832 - RNA, 19 nt, Artificial Sequence
  Description of Artificial Sequence: Synthetic oligonucleotide
  Sense strand starting at position 458 of SEQ ID NO: 1207
gcuauuauugguggagaga

SEQ ID NO: 95833 - RNA, 19 nt, Artificial Sequence
  Description of Artificial Sequence: Synthetic oligonucleotide
  Antisense strand to SEQ ID NO: 95752
ucucuccaccaauaauagc

SEQ ID NO: 95834 - RNA, 19 nt, Artificial Sequence
  Description of Artificial Sequence: Synthetic oligonucleotide
  Sense strand starting at position 456 of SEQ ID NO: 1207
augcuauuauugguggaga

SEQ ID NO: 95835 - RNA, 19 nt, Artificial Sequence
  Description of Artificial Sequence: Synthetic oligonucleotide
  Antisense strand to SEQ ID NO: 95754
ucuccaccaauaauagcau

SEQ ID NO: 95836 - RNA, 19 nt, Artificial Sequence
  Description of Artificial Sequence: Synthetic oligonucleotide
  Sense strand starting at position 436 of SEQ ID NO: 1207
ucugacuuuccuggguaaa

SEQ ID NO: 95837 - RNA, 19 nt, Artificial Sequence
  Description of Artificial Sequence: Synthetic oligonucleotide
  Antisense strand to SEQ ID NO: 95756
uuuacccaggaaagucaga

SEQ ID NO: 95838 - RNA, 19 nt, Artificial Sequence
  Description of Artificial Sequence: Synthetic oligonucleotide
  Sense strand starting at position 399 of SEQ ID NO: 1207
acuuucugugaggaguuau

SEQ ID NO: 95839 - RNA, 19 nt, Artificial Sequence
  Description of Artificial Sequence: Synthetic oligonucleotide
  Antisense strand to SEQ ID NO: 95758
auaacuccucacagaaagu

SEQ ID NO: 95840 - RNA, 19 nt, Artificial Sequence
  Description of Artificial Sequence: Synthetic oligonucleotide
  Sense strand starting at position 395 of SEQ ID NO: 1207
ccagacuuucugugaggag

SEQ ID NO: 95841 - RNA, 19 nt, Artificial Sequence
  Description of Artificial Sequence: Synthetic oligonucleotide
  Antisense strand to SEQ ID NO: 95760
cuccucacagaaagucugg

SEQ ID NO: 95842 - RNA, 19 nt, Artificial Sequence
  Description of Artificial Sequence: Synthetic oligonucleotide
  Sense strand starting at position 394 of SEQ ID NO: 1207
uccagacuuucugugagga

SEQ ID NO: 95843 - RNA, 19 nt, Artificial Sequence
  Description of Artificial Sequence: Synthetic oligonucleotide
  Antisense strand to SEQ ID NO: 95762
uccucacagaaagucugga

SEQ ID NO: 95844 - RNA, 19 nt, Artificial Sequence
  Description of Artificial Sequence: Synthetic oligonucleotide
  Sense strand starting at position 197 of SEQ ID NO: 1207
cauucuggccaggauuauu

SEQ ID NO: 95845 - RNA, 19 nt, Artificial Sequence
  Description of Artificial Sequence: Synthetic oligonucleotide
  Antisense strand to SEQ ID NO: 95764
aauaauccuggccagaaug

SEQ ID NO: 95846 - RNA, 19 nt, Artificial Sequence
  Description of Artificial Sequence: Synthetic oligonucleotide
  Sense strand starting at position 196 of SEQ ID NO: 1207
ucauucuggccaggauuau

SEQ ID NO: 95847 - RNA, 19 nt, Artificial Sequence
  Description of Artificial Sequence: Synthetic oligonucleotide
  Antisense strand to SEQ ID NO: 95766
auaauccuggccagaauga

SEQ ID NO: 95848 - RNA, 19 nt, Artificial Sequence
  Description of Artificial Sequence: Synthetic oligonucleotide
  Sense strand starting at position 194 of SEQ ID NO: 1207
ugucauucuggccaggauu

SEQ ID NO: 95849 - RNA, 19 nt, Artificial Sequence
  Description of Artificial Sequence: Synthetic oligonucleotide
  Antisense strand to SEQ ID NO: 95768
aauccuggccagaaugaca

SEQ ID NO: 95850 - RNA, 19 nt, Artificial Sequence
  Description of Artificial Sequence: Synthetic oligonucleotide
  Sense strand starting at position 176 of SEQ ID NO: 1207
ccaguucuccuugaagucu

SEQ ID NO: 95851 - RNA, 19 nt, Artificial Sequence
  Description of Artificial Sequence: Synthetic oligonucleotide
  Antisense strand to SEQ ID NO: 95770
agacuucaaggagaacugg

SEQ ID NO: 95852 - RNA, 19 nt, Artificial Sequence
  Description of Artificial Sequence: Synthetic oligonucleotide
  Sense strand starting at position 3976 of SEQ ID NO: 1208
gaaauucuugauuguagga

SEQ ID NO: 95853 - RNA, 19 nt, Artificial Sequence
  Description of Artificial Sequence: Synthetic oligonucleotide
  Antisense strand to SEQ ID NO: 95772
uccuacaaucaagaauuuc

SEQ ID NO: 95854 - RNA, 19 nt, Artificial Sequence
  Description of Artificial Sequence: Synthetic oligonucleotide
  Sense strand starting at position 3973 of SEQ ID NO: 1208
cuugaaauucuugauugua

SEQ ID NO: 95855 - RNA, 19 nt, Artificial Sequence
  Description of Artificial Sequence: Synthetic oligonucleotide
  Antisense strand to SEQ ID NO: 95774
uacaaucaagaauuucaag

SEQ ID NO: 95856 - RNA, 19 nt, Artificial Sequence
  Description of Artificial Sequence: Synthetic oligonucleotide
  Sense strand starting at position 3836 of SEQ ID NO: 1208
ucuguagaaggcugaauaa

SEQ ID NO: 95857 - RNA, 19 nt, Artificial Sequence
  Description of Artificial Sequence: Synthetic oligonucleotide
  Antisense strand to SEQ ID NO: 95776
uuauucagccuucuacaga

SEQ ID NO: 95858 - RNA, 19 nt, Artificial Sequence
  Description of Artificial Sequence: Synthetic oligonucleotide
  Sense strand starting at position 3830 of SEQ ID NO: 1208
ugguaaucuguagaaggcu

SEQ ID NO: 95859 - RNA, 19 nt, Artificial Sequence
  Description of Artificial Sequence: Synthetic oligonucleotide
  Antisense strand to SEQ ID NO: 95778
agccuucuacagauuacca

SEQ ID NO: 95860 - RNA, 19 nt, Artificial Sequence
  Description of Artificial Sequence: Synthetic oligonucleotide
  Sense strand starting at position 3805 of SEQ ID NO: 1208
auacuuauagacgauuguu

SEQ ID NO: 95861 - RNA, 19 nt, Artificial Sequence
  Description of Artificial Sequence: Synthetic oligonucleotide
  Antisense strand to SEQ ID NO: 95780
aacaaucgucuauaaguau

SEQ ID NO: 95862 - RNA, 19 nt, Artificial Sequence
  Description of Artificial Sequence: Synthetic oligonucleotide
  Sense strand starting at position 3695 of SEQ ID NO: 1208
aguagaacaugcuuuaaga

SEQ ID NO: 95863 - RNA, 19 nt, Artificial Sequence
  Description of Artificial Sequence: Synthetic oligonucleotide
  Antisense strand to SEQ ID NO: 95782
ucuuaaagcauguucuacu

SEQ ID NO: 95864 - RNA, 19 nt, Artificial Sequence
  Description of Artificial Sequence: Synthetic oligonucleotide
  Sense strand starting at position 3610 of SEQ ID NO: 1208
acaauuuacccguguaacc

SEQ ID NO: 95865 - RNA, 19 nt, Artificial Sequence
  Description of Artificial Sequence: Synthetic oligonucleotide
  Antisense strand to SEQ ID NO: 95784
gguuacacggguaaauugu

SEQ ID NO: 95866 - RNA, 19 nt, Artificial Sequence
  Description of Artificial Sequence: Synthetic oligonucleotide
  Sense strand starting at position 3562 of SEQ ID NO: 1208
ucauuaucugggugaugaa

SEQ ID NO: 95867 - RNA, 19 nt, Artificial Sequence
  Description of Artificial Sequence: Synthetic oligonucleotide
  Antisense strand to SEQ ID NO: 95786
uucaucacccagauaauga

SEQ ID NO: 95868 - RNA, 19 nt, Artificial Sequence
  Description of Artificial Sequence: Synthetic oligonucleotide
  Sense strand starting at position 3515 of SEQ ID NO: 1208
guggaaugagggugaggau

SEQ ID NO: 95869 - RNA, 19 nt, Artificial Sequence
  Description of Artificial Sequence: Synthetic oligonucleotide
  Antisense strand to SEQ ID NO: 95788
auccucacccucauuccac

SEQ ID NO: 95870 - RNA, 19 nt, Artificial Sequence
  Description of Artificial Sequence: Synthetic oligonucleotide
  Sense strand starting at position 3246 of SEQ ID NO: 1208
gcauuuaacuugcuaaugu

SEQ ID NO: 95871 - RNA, 19 nt, Artificial Sequence
  Description of Artificial Sequence: Synthetic oligonucleotide
  Antisense strand to SEQ ID NO: 95790
acauuagcaaguuaaaugc

SEQ ID NO: 95872 - RNA, 19 nt, Artificial Sequence
  Description of Artificial Sequence: Synthetic oligonucleotide
  Sense strand starting at position 3138 of SEQ ID NO: 1208
aggcaaguucucugaggag

SEQ ID NO: 95873 - RNA, 19 nt, Artificial Sequence
  Description of Artificial Sequence: Synthetic oligonucleotide
  Antisense strand to SEQ ID NO: 95792
cuccucagagaacuugccu

SEQ ID NO: 95874 - RNA, 19 nt, Artificial Sequence
  Description of Artificial Sequence: Synthetic oligonucleotide
  Sense strand starting at position 3137 of SEQ ID NO: 1208
caggcaaguucucugagga

SEQ ID NO: 95875 - RNA, 19 nt, Artificial Sequence
  Description of Artificial Sequence: Synthetic oligonucleotide
  Antisense strand to SEQ ID NO: 95794
uccucagagaacuugccug

SEQ ID NO: 95876 - RNA, 19 nt, Artificial Sequence
  Description of Artificial Sequence: Synthetic oligonucleotide
  Sense strand starting at position 3108 of SEQ ID NO: 1208
cuaauugugugggcuauuu

SEQ ID NO: 95877 - RNA, 19 nt, Artificial Sequence
  Description of Artificial Sequence: Synthetic oligonucleotide
  Antisense strand to SEQ ID NO: 95796
aaauagcccacacaauuag

SEQ ID NO: 95878 - RNA, 19 nt, Artificial Sequence
  Description of Artificial Sequence: Synthetic oligonucleotide
  Sense strand starting at position 3040 of SEQ ID NO: 1208
aaugucuuccuaggaaaga

SEQ ID NO: 95879 - RNA, 19 nt, Artificial Sequence
  Description of Artificial Sequence: Synthetic oligonucleotide
  Antisense strand to SEQ ID NO: 95798
ucuuuccuaggaagacauu

SEQ ID NO: 95880 - RNA, 19 nt, Artificial Sequence
  Description of Artificial Sequence: Synthetic oligonucleotide
  Sense strand starting at position 3037 of SEQ ID NO: 1208
gugaaugucuuccuaggaa

SEQ ID NO: 95881 - RNA, 19 nt, Artificial Sequence
  Description of Artificial Sequence: Synthetic oligonucleotide
  Antisense strand to SEQ ID NO: 95800
uuccuaggaagacauucac

SEQ ID NO: 95882 - RNA, 19 nt, Artificial Sequence
  Description of Artificial Sequence: Synthetic oligonucleotide
  Sense strand starting at position 3023 of SEQ ID NO: 1208
aggucacuaucucugugaa

SEQ ID NO: 95883 - RNA, 19 nt, Artificial Sequence
  Description of Artificial Sequence: Synthetic oligonucleotide
  Antisense strand to SEQ ID NO: 95802
uucacagagauagugaccu

SEQ ID NO: 95884 - RNA, 19 nt, Artificial Sequence
  Description of Artificial Sequence: Synthetic oligonucleotide
  Sense strand starting at position 2873 of SEQ ID NO: 1208
uuaucuugguacuugauau

SEQ ID NO: 95885 - RNA, 19 nt, Artificial Sequence
  Description of Artificial Sequence: Synthetic oligonucleotide
  Antisense strand to SEQ ID NO: 95804
auaucaaguaccaagauaa

SEQ ID NO: 95886 - RNA, 19 nt, Artificial Sequence
  Description of Artificial Sequence: Synthetic oligonucleotide
  Sense strand starting at position 2868 of SEQ ID NO: 1208
uguauuuaucuugguacuu

SEQ ID NO: 95887 - RNA, 19 nt, Artificial Sequence
  Description of Artificial Sequence: Synthetic oligonucleotide
  Antisense strand to SEQ ID NO: 95806
aaguaccaagauaaauaca

SEQ ID NO: 95888 - RNA, 19 nt, Artificial Sequence
  Description of Artificial Sequence: Synthetic oligonucleotide
  Sense strand starting at position 2865 of SEQ ID NO: 1208
ucuuguauuuaucuuggua

SEQ ID NO: 95889 - RNA, 19 nt, Artificial Sequence
  Description of Artificial Sequence: Synthetic oligonucleotide
  Antisense strand to SEQ ID NO: 95808
uaccaagauaaauacaaga

SEQ ID NO: 95890 - RNA, 19 nt, Artificial Sequence
  Description of Artificial Sequence: Synthetic oligonucleotide
  Sense strand starting at position 2711 of SEQ ID NO: 1208
cuccuauuccucuagguua

SEQ ID NO: 95891 - RNA, 19 nt, Artificial Sequence
  Description of Artificial Sequence: Synthetic oligonucleotide
  Antisense strand to SEQ ID NO: 95810
uaaccuagaggaauaggag

SEQ ID NO: 95892 - RNA, 19 nt, Artificial Sequence
  Description of Artificial Sequence: Synthetic oligonucleotide
  Sense strand starting at position 2688 of SEQ ID NO: 1208
ugugacacuccugacacau

SEQ ID NO: 95893 - RNA, 19 nt, Artificial Sequence
  Description of Artificial Sequence: Synthetic oligonucleotide
  Antisense strand to SEQ ID NO: 95812
augugucaggagugucaca

SEQ ID NO: 95894 - RNA, 19 nt, Artificial Sequence
  Description of Artificial Sequence: Synthetic oligonucleotide
  Sense strand starting at position 2523 of SEQ ID NO: 1208
aguggagacagugaugcau

SEQ ID NO: 95895 - RNA, 19 nt, Artificial Sequence
  Description of Artificial Sequence: Synthetic oligonucleotide
  Antisense strand to SEQ ID NO: 95814
augcaucacugucuccacu

SEQ ID NO: 95896 - RNA, 19 nt, Artificial Sequence
  Description of Artificial Sequence: Synthetic oligonucleotide
  Sense strand starting at position 2081 of SEQ ID NO: 1208
guauacagucuagaauacu

SEQ ID NO: 95897 - RNA, 19 nt, Artificial Sequence
  Description of Artificial Sequence: Synthetic oligonucleotide
  Antisense strand to SEQ ID NO: 95816
aguauucuagacuguauac

SEQ ID NO: 95898 - RNA, 19 nt, Artificial Sequence
  Description of Artificial Sequence: Synthetic oligonucleotide
  Sense strand starting at position 1685 of SEQ ID NO: 1208
uagauaggagcccauaguu

SEQ ID NO: 95899 - RNA, 19 nt, Artificial Sequence
  Description of Artificial Sequence: Synthetic oligonucleotide
  Antisense strand to SEQ ID NO: 95818
aacuaugggcuccuaucua

SEQ ID NO: 95900 - RNA, 19 nt, Artificial Sequence
  Description of Artificial Sequence: Synthetic oligonucleotide
  Sense strand starting at position 1554 of SEQ ID NO: 1208
aucaaauggugguuuccau

SEQ ID NO: 95901 - RNA, 19 nt, Artificial Sequence
  Description of Artificial Sequence: Synthetic oligonucleotide
  Antisense strand to SEQ ID NO: 95820
auggaaaccaccauuugau

SEQ ID NO: 95902 - RNA, 19 nt, Artificial Sequence
  Description of Artificial Sequence: Synthetic oligonucleotide
  Sense strand starting at position 1532 of SEQ ID NO: 1208
ugaagauaacgaggcauaa

SEQ ID NO: 95903 - RNA, 19 nt, Artificial Sequence
  Description of Artificial Sequence: Synthetic oligonucleotide
  Antisense strand to SEQ ID NO: 95822
uuaugccucguuaucuuca

SEQ ID NO: 95904 - RNA, 19 nt, Artificial Sequence
  Description of Artificial Sequence: Synthetic oligonucleotide
  Sense strand starting at position 1018 of SEQ ID NO: 1208
cuguuaggaucccuugauu

SEQ ID NO: 95905 - RNA, 19 nt, Artificial Sequence
  Description of Artificial Sequence: Synthetic oligonucleotide
  Antisense strand to SEQ ID NO: 95824
aaucaagggauccuaacag

SEQ ID NO: 95906 - RNA, 19 nt, Artificial Sequence
  Description of Artificial Sequence: Synthetic oligonucleotide
  Sense strand starting at position 999 of SEQ ID NO: 1208
ggguuacuuacuuagguga

SEQ ID NO: 95907 - RNA, 19 nt, Artificial Sequence
  Description of Artificial Sequence: Synthetic oligonucleotide
  Antisense strand to SEQ ID NO: 95826
ucaccuaaguaaguaaccc

SEQ ID NO: 95908 - RNA, 19 nt, Artificial Sequence
  Description of Artificial Sequence: Synthetic oligonucleotide
  Sense strand starting at position 988 of SEQ ID NO: 1208
cuacuuaaucuggguuacu

SEQ ID NO: 95909 - RNA, 19 nt, Artificial Sequence
  Description of Artificial Sequence: Synthetic oligonucleotide
  Antisense strand to SEQ ID NO: 95828
aguaacccagauuaaguag

SEQ ID NO: 95910 - RNA, 19 nt, Artificial Sequence
  Description of Artificial Sequence: Synthetic oligonucleotide
  Sense strand starting at position 970 of SEQ ID NO: 1208
agguaaauaccaugcuaac

SEQ ID NO: 95911 - RNA, 19 nt, Artificial Sequence
  Description of Artificial Sequence: Synthetic oligonucleotide
  Antisense strand to SEQ ID NO: 95830
guuagcaugguauuuaccu

SEQ ID NO: 95912 - RNA, 19 nt, Artificial Sequence
  Description of Artificial Sequence: Synthetic oligonucleotide
  Sense strand starting at position 915 of SEQ ID NO: 1208
acagaaauugagugcauga

SEQ ID NO: 95913 - RNA, 19 nt, Artificial Sequence
  Description of Artificial Sequence: Synthetic oligonucleotide
  Antisense strand to SEQ ID NO: 95832
ucaugcacucaauuucugu

SEQ ID NO: 95914 - RNA, 19 nt, Artificial Sequence
  Description of Artificial Sequence: Synthetic oligonucleotide
  Sense strand starting at position 846 of SEQ ID NO: 1208
uuuauuguggaagauucuu

SEQ ID NO: 95915 - RNA, 19 nt, Artificial Sequence
  Description of Artificial Sequence: Synthetic oligonucleotide
  Antisense strand to SEQ ID NO: 95834
aagaaucuuccacaauaaa

SEQ ID NO: 95916 - RNA, 19 nt, Artificial Sequence
  Description of Artificial Sequence: Synthetic oligonucleotide
  Sense strand starting at position 693 of SEQ ID NO: 1208
guguuauguaaacagcaca

SEQ ID NO: 95917 - RNA, 19 nt, Artificial Sequence
  Description of Artificial Sequence: Synthetic oligonucleotide
  Antisense strand to SEQ ID NO: 95836
ugugcuguuuacauaacac

SEQ ID NO: 95918 - RNA, 19 nt, Artificial Sequence
  Description of Artificial Sequence: Synthetic oligonucleotide
  Sense strand starting at position 689 of SEQ ID NO: 1208
ugaaguguuauguaaacag

SEQ ID NO: 95919 - RNA, 19 nt, Artificial Sequence
  Description of Artificial Sequence: Synthetic oligonucleotide
  Antisense strand to SEQ ID NO: 95838
cuguuuacauaacacuuca

SEQ ID NO: 95920 - RNA, 19 nt, Artificial Sequence
  Description of Artificial Sequence: Synthetic oligonucleotide
  Sense strand starting at position 575 of SEQ ID NO: 1208
acacuauaccuguguauag

SEQ ID NO: 95921 - RNA, 19 nt, Artificial Sequence
  Description of Artificial Sequence: Synthetic oligonucleotide
  Antisense strand to SEQ ID NO: 95840
cuauacacagguauagugu

SEQ ID NO: 95922 - RNA, 19 nt, Artificial Sequence
  Description of Artificial Sequence: Synthetic oligonucleotide
  Sense strand starting at position 526 of SEQ ID NO: 1208
ccauguagucaauaauauu

SEQ ID NO: 95923 - RNA, 19 nt, Artificial Sequence
  Description of Artificial Sequence: Synthetic oligonucleotide
  Antisense strand to SEQ ID NO: 95842
aauauuauugacuacaugg

SEQ ID NO: 95924 - RNA, 19 nt, Artificial Sequence
  Description of Artificial Sequence: Synthetic oligonucleotide
  Sense strand starting at position 258 of SEQ ID NO: 1208
uagaauggguuaccacauu

SEQ ID NO: 95925 - RNA, 19 nt, Artificial Sequence
  Description of Artificial Sequence: Synthetic oligonucleotide
  Antisense strand to SEQ ID NO: 95844
aaugugguaacccauucua

SEQ ID NO: 95926 - RNA, 19 nt, Artificial Sequence
  Description of Artificial Sequence: Synthetic oligonucleotide
  Sense strand starting at position 251 of SEQ ID NO: 1208
ccuaaauuagaauggguua

SEQ ID NO: 95927 - RNA, 19 nt, Artificial Sequence
  Description of Artificial Sequence: Synthetic oligonucleotide
  Antisense strand to SEQ ID NO: 95846
uaacccauucuaauuuagg

SEQ ID NO: 95928 - RNA, 19 nt, Artificial Sequence
  Description of Artificial Sequence: Synthetic oligonucleotide
  Sense strand starting at position 204 of SEQ ID NO: 1208
ccuagauuggccugaccua

SEQ ID NO: 95929 - RNA, 19 nt, Artificial Sequence
  Description of Artificial Sequence: Synthetic oligonucleotide
  Antisense strand to SEQ ID NO: 95848
uaggucaggccaaucuagg

SEQ ID NO: 95930 - RNA, 19 nt, Artificial Sequence
  Description of Artificial Sequence: Synthetic oligonucleotide
  Sense strand starting at position 1 of SEQ ID NO: 1208
accagauuggccuaggguu

SEQ ID NO: 95931 - RNA, 19 nt, Artificial Sequence
  Description of Artificial Sequence: Synthetic oligonucleotide
  Antisense strand to SEQ ID NO: 95850
aacccuaggccaaucuggu

SEQ ID NO: 95932 - RNA, 19 nt, Artificial Sequence
  Description of Artificial Sequence: Synthetic oligonucleotide
  Sense strand starting at position 3977 of SEQ ID NO: 1209
agucgaaauuacuccucaa

SEQ ID NO: 95933 - RNA, 19 nt, Artificial Sequence
  Description of Artificial Sequence: Synthetic oligonucleotide
  Antisense strand to SEQ ID NO: 95852
uugaggaguaauuucgacu

SEQ ID NO: 95934 - RNA, 19 nt, Artificial Sequence
  Description of Artificial Sequence: Synthetic oligonucleotide
  Sense strand starting at position 3929 of SEQ ID NO: 1209
ggcaacucaugcuuuacaa

SEQ ID NO: 95935 - RNA, 19 nt, Artificial Sequence
  Description of Artificial Sequence: Synthetic oligonucleotide
  Antisense strand to SEQ ID NO: 95854
uuguaaagcaugaguugcc

SEQ ID NO: 95936 - RNA, 19 nt, Artificial Sequence
  Description of Artificial Sequence: Synthetic oligonucleotide
  Sense strand starting at position 3866 of SEQ ID NO: 1209
ggugaaucuuauccagguu

SEQ ID NO: 95937 - RNA, 19 nt, Artificial Sequence
  Description of Artificial Sequence: Synthetic oligonucleotide
  Antisense strand to SEQ ID NO: 95856
aaccuggauaagauucacc

SEQ ID NO: 95938 - RNA, 19 nt, Artificial Sequence
  Description of Artificial Sequence: Synthetic oligonucleotide
  Sense strand starting at position 3865 of SEQ ID NO: 1209
uggugaaucuuauccaggu

SEQ ID NO: 95939 - RNA, 19 nt, Artificial Sequence
  Description of Artificial Sequence: Synthetic oligonucleotide
  Antisense strand to SEQ ID NO: 95858
accuggauaagauucacca

SEQ ID NO: 95940 - RNA, 19 nt, Artificial Sequence
  Description of Artificial Sequence: Synthetic oligonucleotide
  Sense strand starting at position 3797 of SEQ ID NO: 1209
uccuguuagcaugaauauu

SEQ ID NO: 95941 - RNA, 19 nt, Artificial Sequence
  Description of Artificial Sequence: Synthetic oligonucleotide
  Antisense strand to SEQ ID NO: 95860
aauauucaugcuaacagga

SEQ ID NO: 95942 - RNA, 19 nt, Artificial Sequence
  Description of Artificial Sequence: Synthetic oligonucleotide
  Sense strand starting at position 2854 of SEQ ID NO: 1209
gcauuaugucuagaaaugc

SEQ ID NO: 95943 - RNA, 19 nt, Artificial Sequence
  Description of Artificial Sequence: Synthetic oligonucleotide
  Antisense strand to SEQ ID NO: 95862
gcauuucuagacauaaugc

SEQ ID NO: 95944 - RNA, 19 nt, Artificial Sequence
  Description of Artificial Sequence: Synthetic oligonucleotide
  Sense strand starting at position 2763 of SEQ ID NO: 1209
auggcauuaaagugaguca

SEQ ID NO: 95945 - RNA, 19 nt, Artificial Sequence
  Description of Artificial Sequence: Synthetic oligonucleotide
  Antisense strand to SEQ ID NO: 95864
ugacucacuuuaaugccau

SEQ ID NO: 95946 - RNA, 19 nt, Artificial Sequence
  Description of Artificial Sequence: Synthetic oligonucleotide
  Sense strand starting at position 2758 of SEQ ID NO: 1209
cuaauauggcauuaaagug

SEQ ID NO: 95947 - RNA, 19 nt, Artificial Sequence
  Description of Artificial Sequence: Synthetic oligonucleotide
  Antisense strand to SEQ ID NO: 95866
cacuuuaaugccauauuag

SEQ ID NO: 95948 - RNA, 19 nt, Artificial Sequence
  Description of Artificial Sequence: Synthetic oligonucleotide
  Sense strand starting at position 2661 of SEQ ID NO: 1209
acucuagacccugaugguu

SEQ ID NO: 95949 - RNA, 19 nt, Artificial Sequence
  Description of Artificial Sequence: Synthetic oligonucleotide
  Antisense strand to SEQ ID NO: 95868
aaccaucagggucuagagu

SEQ ID NO: 95950 - RNA, 19 nt, Artificial Sequence
  Description of Artificial Sequence: Synthetic oligonucleotide
  Sense strand starting at position 2583 of SEQ ID NO: 1209
caguuaauccucuaacgag

SEQ ID NO: 95951 - RNA, 19 nt, Artificial Sequence
  Description of Artificial Sequence: Synthetic oligonucleotide
  Antisense strand to SEQ ID NO: 95870
cucguuagaggauuaacug

SEQ ID NO: 95952 - RNA, 19 nt, Artificial Sequence
  Description of Artificial Sequence: Synthetic oligonucleotide
  Sense strand starting at position 2578 of SEQ ID NO: 1209
ggacucaguuaauccucua

SEQ ID NO: 95953 - RNA, 19 nt, Artificial Sequence
  Description of Artificial Sequence: Synthetic oligonucleotide
  Antisense strand to SEQ ID NO: 95872
uagaggauuaacugagucc

SEQ ID NO: 95954 - RNA, 19 nt, Artificial Sequence
  Description of Artificial Sequence: Synthetic oligonucleotide
  Sense strand starting at position 2529 of SEQ ID NO: 1209
agguuuauauucucgaccu

SEQ ID NO: 95955 - RNA, 19 nt, Artificial Sequence
  Description of Artificial Sequence: Synthetic oligonucleotide
  Antisense strand to SEQ ID NO: 95874
aggucgagaauauaaaccu

SEQ ID NO: 95956 - RNA, 19 nt, Artificial Sequence
  Description of Artificial Sequence: Synthetic oligonucleotide
  Sense strand starting at position 2517 of SEQ ID NO: 1209
ugguguggugcuagguuua

SEQ ID NO: 95957 - RNA, 19 nt, Artificial Sequence
  Description of Artificial Sequence: Synthetic oligonucleotide
  Antisense strand to SEQ ID NO: 95876
uaaaccuagcaccacacca

SEQ ID NO: 95958 - RNA, 19 nt, Artificial Sequence
  Description of Artificial Sequence: Synthetic oligonucleotide
  Sense strand starting at position 2487 of SEQ ID NO: 1209
gugaaaggcgucuagagaa

SEQ ID NO: 95959 - RNA, 19 nt, Artificial Sequence
  Description of Artificial Sequence: Synthetic oligonucleotide
  Antisense strand to SEQ ID NO: 95878
uucucuagacgccuuucac

SEQ ID NO: 95960 - RNA, 19 nt, Artificial Sequence
  Description of Artificial Sequence: Synthetic oligonucleotide
  Sense strand starting at position 2474 of SEQ ID NO: 1209
gagagagcaccuggugaaa

SEQ ID NO: 95961 - RNA, 19 nt, Artificial Sequence
  Description of Artificial Sequence: Synthetic oligonucleotide
  Antisense strand to SEQ ID NO: 95880
uuucaccaggugcucucuc

SEQ ID NO: 95962 - RNA, 19 nt, Artificial Sequence
  Description of Artificial Sequence: Synthetic oligonucleotide
  Sense strand starting at position 2405 of SEQ ID NO: 1209
ggaggauacuagggagaau

SEQ ID NO: 95963 - RNA, 19 nt, Artificial Sequence
  Description of Artificial Sequence: Synthetic oligonucleotide
  Antisense strand to SEQ ID NO: 95882
auucucccuaguauccucc

SEQ ID NO: 95964 - RNA, 19 nt, Artificial Sequence
  Description of Artificial Sequence: Synthetic oligonucleotide
  Sense strand starting at position 2337 of SEQ ID NO: 1209
caaagucauccuggaacug

SEQ ID NO: 95965 - RNA, 19 nt, Artificial Sequence
  Description of Artificial Sequence: Synthetic oligonucleotide
  Antisense strand to SEQ ID NO: 95884
caguuccaggaugacuuug

SEQ ID NO: 95966 - RNA, 19 nt, Artificial Sequence
  Description of Artificial Sequence: Synthetic oligonucleotide
  Sense strand starting at position 1505 of SEQ ID NO: 1209
guucuuuaagaucaaguuc

SEQ ID NO: 95967 - RNA, 19 nt, Artificial Sequence
  Description of Artificial Sequence: Synthetic oligonucleotide
  Antisense strand to SEQ ID NO: 95886
gaacuugaucuuaaagaac

SEQ ID NO: 95968 - RNA, 19 nt, Artificial Sequence
  Description of Artificial Sequence: Synthetic oligonucleotide
  Sense strand starting at position 1497 of SEQ ID NO: 1209
gaguguggguucuuuaaga

SEQ ID NO: 95969 - RNA, 19 nt, Artificial Sequence
  Description of Artificial Sequence: Synthetic oligonucleotide
  Antisense strand to SEQ ID NO: 95888
ucuuaaagaacccacacuc

SEQ ID NO: 95970 - RNA, 19 nt, Artificial Sequence
  Description of Artificial Sequence: Synthetic oligonucleotide
  Sense strand starting at position 1346 of SEQ ID NO: 1209
uuggaaaguaauuguugaa

SEQ ID NO: 95971 - RNA, 19 nt, Artificial Sequence
  Description of Artificial Sequence: Synthetic oligonucleotide
  Antisense strand to SEQ ID NO: 95890
uucaacaauuacuuuccaa

SEQ ID NO: 95972 - RNA, 19 nt, Artificial Sequence
  Description of Artificial Sequence: Synthetic oligonucleotide
  Sense strand starting at position 1345 of SEQ ID NO: 1209
uuuggaaaguaauuguuga

SEQ ID NO: 95973 - RNA, 19 nt, Artificial Sequence
  Description of Artificial Sequence: Synthetic oligonucleotide
  Antisense strand to SEQ ID NO: 95892
ucaacaauuacuuuccaaa

SEQ ID NO: 95974 - RNA, 19 nt, Artificial Sequence
  Description of Artificial Sequence: Synthetic oligonucleotide
  Sense strand starting at position 1319 of SEQ ID NO: 1209
ugacauaucuggccucaug

SEQ ID NO: 95975 - RNA, 19 nt, Artificial Sequence
  Description of Artificial Sequence: Synthetic oligonucleotide
  Antisense strand to SEQ ID NO: 95894
caugaggccagauauguca

SEQ ID NO: 95976 - RNA, 19 nt, Artificial Sequence
  Description of Artificial Sequence: Synthetic oligonucleotide
  Sense strand starting at position 1308 of SEQ ID NO: 1209
guucuccuccgugacauau

SEQ ID NO: 95977 - RNA, 19 nt, Artificial Sequence
  Description of Artificial Sequence: Synthetic oligonucleotide
  Antisense strand to SEQ ID NO: 95896
auaugucacggaggagaac

SEQ ID NO: 95978 - RNA, 19 nt, Artificial Sequence
  Description of Artificial Sequence: Synthetic oligonucleotide
  Sense strand starting at position 1223 of SEQ ID NO: 1209
gggccauaccucuacuuau

SEQ ID NO: 95979 - RNA, 19 nt, Artificial Sequence
  Description of Artificial Sequence: Synthetic oligonucleotide
  Antisense strand to SEQ ID NO: 95898
auaaguagagguauggccc

SEQ ID NO: 95980 - RNA, 19 nt, Artificial Sequence
  Description of Artificial Sequence: Synthetic oligonucleotide
  Sense strand starting at position 1153 of SEQ ID NO: 1209
ucaagaagacuucggauac

SEQ ID NO: 95981 - RNA, 19 nt, Artificial Sequence
  Description of Artificial Sequence: Synthetic oligonucleotide
  Antisense strand to SEQ ID NO: 95900
guauccgaagucuucuuga

SEQ ID NO: 95982 - RNA, 19 nt, Artificial Sequence
  Description of Artificial Sequence: Synthetic oligonucleotide
  Sense strand starting at position 1142 of SEQ ID NO: 1209
gcagauuuguaucaagaag

SEQ ID NO: 95983 - RNA, 19 nt, Artificial Sequence
  Description of Artificial Sequence: Synthetic oligonucleotide
  Antisense strand to SEQ ID NO: 95902
cuucuugauacaaaucugc

SEQ ID NO: 95984 - RNA, 19 nt, Artificial Sequence
  Description of Artificial Sequence: Synthetic oligonucleotide
  Sense strand starting at position 1139 of SEQ ID NO: 1209
cuggcagauuuguaucaag

SEQ ID NO: 95985 - RNA, 19 nt, Artificial Sequence
  Description of Artificial Sequence: Synthetic oligonucleotide
  Antisense strand to SEQ ID NO: 95904
cuugauacaaaucugccag

SEQ ID NO: 95986 - RNA, 19 nt, Artificial Sequence
  Description of Artificial Sequence: Synthetic oligonucleotide
  Sense strand starting at position 1138 of SEQ ID NO: 1209
gcuggcagauuuguaucaa

SEQ ID NO: 95987 - RNA, 19 nt, Artificial Sequence
  Description of Artificial Sequence: Synthetic oligonucleotide
  Antisense strand to SEQ ID NO: 95906
uugauacaaaucugccagc

SEQ ID NO: 95988 - RNA, 19 nt, Artificial Sequence
  Description of Artificial Sequence: Synthetic oligonucleotide
  Sense strand starting at position 1051 of SEQ ID NO: 1209
uggcuaaugcuggaugauc

SEQ ID NO: 95989 - RNA, 19 nt, Artificial Sequence
  Description of Artificial Sequence: Synthetic oligonucleotide
  Antisense strand to SEQ ID NO: 95908
gaucauccagcauuagcca

SEQ ID NO: 95990 - RNA, 19 nt, Artificial Sequence
  Description of Artificial Sequence: Synthetic oligonucleotide
  Sense strand starting at position 1050 of SEQ ID NO: 1209
cuggcuaaugcuggaugau

SEQ ID NO: 95991 - RNA, 19 nt, Artificial Sequence
  Description of Artificial Sequence: Synthetic oligonucleotide
  Antisense strand to SEQ ID NO: 95910
aucauccagcauuagccag

SEQ ID NO: 95992 - RNA, 19 nt, Artificial Sequence
  Description of Artificial Sequence: Synthetic oligonucleotide
  Sense strand starting at position 1040 of SEQ ID NO: 1209
gagauaguaccuggcuaau

SEQ ID NO: 95993 - RNA, 19 nt, Artificial Sequence
  Description of Artificial Sequence: Synthetic oligonucleotide
  Antisense strand to SEQ ID NO: 95912
auuagccagguacuaucuc

SEQ ID NO: 95994 - RNA, 19 nt, Artificial Sequence
  Description of Artificial Sequence: Synthetic oligonucleotide
  Sense strand starting at position 1039 of SEQ ID NO: 1209
agagauaguaccuggcuaa

SEQ ID NO: 95995 - RNA, 19 nt, Artificial Sequence
  Description of Artificial Sequence: Synthetic oligonucleotide
  Antisense strand to SEQ ID NO: 95914
uuagccagguacuaucucu

SEQ ID NO: 95996 - RNA, 19 nt, Artificial Sequence
  Description of Artificial Sequence: Synthetic oligonucleotide
  Sense strand starting at position 1038 of SEQ ID NO: 1209
aagagauaguaccuggcua

SEQ ID NO: 95997 - RNA, 19 nt, Artificial Sequence
  Description of Artificial Sequence: Synthetic oligonucleotide
  Antisense strand to SEQ ID NO: 95916
uagccagguacuaucucuu

SEQ ID NO: 95998 - RNA, 19 nt, Artificial Sequence
  Description of Artificial Sequence: Synthetic oligonucleotide
  Sense strand starting at position 924 of SEQ ID NO: 1209
gaauguaacuggcuucgua

SEQ ID NO: 95999 - RNA, 19 nt, Artificial Sequence
  Description of Artificial Sequence: Synthetic oligonucleotide
  Antisense strand to SEQ ID NO: 95918
uacgaagccaguuacauuc

SEQ ID NO: 96000 - RNA, 19 nt, Artificial Sequence
  Description of Artificial Sequence: Synthetic oligonucleotide
  Sense strand starting at position 843 of SEQ ID NO: 1209
cccuguauucuauacagca

SEQ ID NO: 96001 - RNA, 19 nt, Artificial Sequence
  Description of Artificial Sequence: Synthetic oligonucleotide
  Antisense strand to SEQ ID NO: 95920
ugcuguauagaauacaggg

SEQ ID NO: 96002 - RNA, 19 nt, Artificial Sequence
  Description of Artificial Sequence: Synthetic oligonucleotide
  Sense strand starting at position 806 of SEQ ID NO: 1209
gaaauaguccgguaacuca

SEQ ID NO: 96003 - RNA, 19 nt, Artificial Sequence
  Description of Artificial Sequence: Synthetic oligonucleotide
  Antisense strand to SEQ ID NO: 95922
ugaguuaccggacuauuuc

SEQ ID NO: 96004 - RNA, 19 nt, Artificial Sequence
  Description of Artificial Sequence: Synthetic oligonucleotide
  Sense strand starting at position 803 of SEQ ID NO: 1209
guugaaauaguccgguaac

SEQ ID NO: 96005 - RNA, 19 nt, Artificial Sequence
  Description of Artificial Sequence: Synthetic oligonucleotide
  Antisense strand to SEQ ID NO: 95924
guuaccggacuauuucaac

SEQ ID NO: 96006 - RNA, 19 nt, Artificial Sequence
  Description of Artificial Sequence: Synthetic oligonucleotide
  Sense strand starting at position 428 of SEQ ID NO: 1209
ggacuuaauuaugccagaa

SEQ ID NO: 96007 - RNA, 19 nt, Artificial Sequence
  Description of Artificial Sequence: Synthetic oligonucleotide
  Antisense strand to SEQ ID NO: 95926
uucuggcauaauuaagucc

SEQ ID NO: 96008 - RNA, 19 nt, Artificial Sequence
  Description of Artificial Sequence: Synthetic oligonucleotide
  Sense strand starting at position 26 of SEQ ID NO: 1209
agcagauaguuaccuguca

SEQ ID NO: 96009 - RNA, 19 nt, Artificial Sequence
  Description of Artificial Sequence: Synthetic oligonucleotide
  Antisense strand to SEQ ID NO: 95928
ugacagguaacuaucugcu

SEQ ID NO: 96010 - RNA, 19 nt, Artificial Sequence
  Description of Artificial Sequence: Synthetic oligonucleotide
  Sense strand starting at position 18 of SEQ ID NO: 1209
ugcacuuuagcagauaguu

SEQ ID NO: 96011 - RNA, 19 nt, Artificial Sequence
  Description of Artificial Sequence: Synthetic oligonucleotide
  Antisense strand to SEQ ID NO: 95930
aacuaucugcuaaagugca

SEQ ID NO: 96012 - RNA, 19 nt, Artificial Sequence
  Description of Artificial Sequence: Synthetic oligonucleotide
  Sense strand starting at position 3883 of SEQ ID NO: 1211
auuagugcccagugaauuc

SEQ ID NO: 96013 - RNA, 19 nt, Artificial Sequence
  Description of Artificial Sequence: Synthetic oligonucleotide
  Antisense strand to SEQ ID NO: 95932
gaauucacugggcacuaau

SEQ ID NO: 96014 - RNA, 19 nt, Artificial Sequence
  Description of Artificial Sequence: Synthetic oligonucleotide
  Sense strand starting at position 3880 of SEQ ID NO: 1211
uugauuagugcccagugaa

SEQ ID NO: 96015 - RNA, 19 nt, Artificial Sequence
  Description of Artificial Sequence: Synthetic oligonucleotide
  Antisense strand to SEQ ID NO: 95934
uucacugggcacuaaucaa

SEQ ID NO: 96016 - RNA, 19 nt, Artificial Sequence
  Description of Artificial Sequence: Synthetic oligonucleotide
  Sense strand starting at position 3879 of SEQ ID NO: 1211
uuugauuagugcccaguga

SEQ ID NO: 96017 - RNA, 19 nt, Artificial Sequence
  Description of Artificial Sequence: Synthetic oligonucleotide
  Antisense strand to SEQ ID NO: 95936
ucacugggcacuaaucaaa

SEQ ID NO: 96018 - RNA, 19 nt, Artificial Sequence
  Description of Artificial Sequence: Synthetic oligonucleotide
  Sense strand starting at position 3515 of SEQ ID NO: 1211
gggacuuucugauuaauua

SEQ ID NO: 96019 - RNA, 19 nt, Artificial Sequence
  Description of Artificial Sequence: Synthetic oligonucleotide
  Antisense strand to SEQ ID NO: 95938
uaauuaaucagaaaguccc

SEQ ID NO: 96020 - RNA, 19 nt, Artificial Sequence
  Description of Artificial Sequence: Synthetic oligonucleotide
  Sense strand starting at position 3422 of SEQ ID NO: 1211
aguuuauaugugugagaca

SEQ ID NO: 96021 - RNA, 19 nt, Artificial Sequence
  Description of Artificial Sequence: Synthetic oligonucleotide
  Antisense strand to SEQ ID NO: 95940
ugucucacacauauaaacu

SEQ ID NO: 96022 - RNA, 19 nt, Artificial Sequence
  Description of Artificial Sequence: Synthetic oligonucleotide
  Sense strand starting at position 3421 of SEQ ID NO: 1211
gaguuuauaugugugagac

SEQ ID NO: 96023 - RNA, 19 nt, Artificial Sequence
  Description of Artificial Sequence: Synthetic oligonucleotide
  Antisense strand to SEQ ID NO: 95942
gucucacacauauaaacuc

SEQ ID NO: 96024 - RNA, 19 nt, Artificial Sequence
  Description of Artificial Sequence: Synthetic oligonucleotide
  Sense strand starting at position 3420 of SEQ ID NO: 1211
ugaguuuauaugugugaga

SEQ ID NO: 96025 - RNA, 19 nt, Artificial Sequence
  Description of Artificial Sequence: Synthetic oligonucleotide
  Antisense strand to SEQ ID NO: 95944
ucucacacauauaaacuca

SEQ ID NO: 96026 - RNA, 19 nt, Artificial Sequence
  Description of Artificial Sequence: Synthetic oligonucleotide
  Sense strand starting at position 3291 of SEQ ID NO: 1211
cuuugugucacugaucugu

SEQ ID NO: 96027 - RNA, 19 nt, Artificial Sequence
  Description of Artificial Sequence: Synthetic oligonucleotide
  Antisense strand to SEQ ID NO: 95946
acagaucagugacacaaag

SEQ ID NO: 96028 - RNA, 19 nt, Artificial Sequence
  Description of Artificial Sequence: Synthetic oligonucleotide
  Sense strand starting at position 3204 of SEQ ID NO: 1211
gaguuaauaugagacaaga

SEQ ID NO: 96029 - RNA, 19 nt, Artificial Sequence
  Description of Artificial Sequence: Synthetic oligonucleotide
  Antisense strand to SEQ ID NO: 95948
ucuugucucauauuaacuc

SEQ ID NO: 96030 - RNA, 19 nt, Artificial Sequence
  Description of Artificial Sequence: Synthetic oligonucleotide
  Sense strand starting at position 3196 of SEQ ID NO: 1211
gcccuaucgaguuaauaug

SEQ ID NO: 96031 - RNA, 19 nt, Artificial Sequence
  Description of Artificial Sequence: Synthetic oligonucleotide
  Antisense strand to SEQ ID NO: 95950
cauauuaacucgauagggc

SEQ ID NO: 96032 - RNA, 19 nt, Artificial Sequence
  Description of Artificial Sequence: Synthetic oligonucleotide
  Sense strand starting at position 3174 of SEQ ID NO: 1211
uguaaaugggaguauagca

SEQ ID NO: 96033 - RNA, 19 nt, Artificial Sequence
  Description of Artificial Sequence: Synthetic oligonucleotide
  Antisense strand to SEQ ID NO: 95952
ugcuauacucccauuuaca

SEQ ID NO: 96034 - RNA, 19 nt, Artificial Sequence
  Description of Artificial Sequence: Synthetic oligonucleotide
  Sense strand starting at position 3169 of SEQ ID NO: 1211
guuuguguaaaugggagua

SEQ ID NO: 96035 - RNA, 19 nt, Artificial Sequence
  Description of Artificial Sequence: Synthetic oligonucleotide
  Antisense strand to SEQ ID NO: 95954
uacucccauuuacacaaac

SEQ ID NO: 96036 - RNA, 19 nt, Artificial Sequence
  Description of Artificial Sequence: Synthetic oligonucleotide
  Sense strand starting at position 3158 of SEQ ID NO: 1211
gcaucugagcaguuugugu

SEQ ID NO: 96037 - RNA, 19 nt, Artificial Sequence
  Description of Artificial Sequence: Synthetic oligonucleotide
  Antisense strand to SEQ ID NO: 95956
acacaaacugcucagaugc

SEQ ID NO: 96038 - RNA, 19 nt, Artificial Sequence
  Description of Artificial Sequence: Synthetic oligonucleotide
  Sense strand starting at position 3006 of SEQ ID NO: 1211
uuaucuugagcacacugau

SEQ ID NO: 96039 - RNA, 19 nt, Artificial Sequence
  Description of Artificial Sequence: Synthetic oligonucleotide
  Antisense strand to SEQ ID NO: 95958
aucagugugcucaagauaa

SEQ ID NO: 96040 - RNA, 19 nt, Artificial Sequence
  Description of Artificial Sequence: Synthetic oligonucleotide
  Sense strand starting at position 3001 of SEQ ID NO: 1211
ggcuauuaucuugagcaca

SEQ ID NO: 96041 - RNA, 19 nt, Artificial Sequence
  Description of Artificial Sequence: Synthetic oligonucleotide
  Antisense strand to SEQ ID NO: 95960
ugugcucaagauaauagcc

SEQ ID NO: 96042 - RNA, 19 nt, Artificial Sequence
  Description of Artificial Sequence: Synthetic oligonucleotide
  Sense strand starting at position 2728 of SEQ ID NO: 1211
ugucguuauccucaggaua

SEQ ID NO: 96043 - RNA, 19 nt, Artificial Sequence
  Description of Artificial Sequence: Synthetic oligonucleotide
  Antisense strand to SEQ ID NO: 95962
uauccugaggauaacgaca

SEQ ID NO: 96044 - RNA, 19 nt, Artificial Sequence
  Description of Artificial Sequence: Synthetic oligonucleotide
  Sense strand starting at position 2655 of SEQ ID NO: 1211
aggguuuacaguuguacca

SEQ ID NO: 96045 - RNA, 19 nt, Artificial Sequence
  Description of Artificial Sequence: Synthetic oligonucleotide
  Antisense strand to SEQ ID NO: 95964
ugguacaacuguaaacccu

SEQ ID NO: 96046 - RNA, 19 nt, Artificial Sequence
  Description of Artificial Sequence: Synthetic oligonucleotide
  Sense strand starting at position 2509 of SEQ ID NO: 1211
ugaguaacuuggcauuuau

SEQ ID NO: 96047 - RNA, 19 nt, Artificial Sequence
  Description of Artificial Sequence: Synthetic oligonucleotide
  Antisense strand to SEQ ID NO: 95966
auaaaugccaaguuacuca

SEQ ID NO: 96048 - RNA, 19 nt, Artificial Sequence
  Description of Artificial Sequence: Synthetic oligonucleotide
  Sense strand starting at position 2450 of SEQ ID NO: 1211
cggugacuucggcacuaca

SEQ ID NO: 96049 - RNA, 19 nt, Artificial Sequence
  Description of Artificial Sequence: Synthetic oligonucleotide
  Antisense strand to SEQ ID NO: 95968
uguagugccgaagucaccg

SEQ ID NO: 96050 - RNA, 19 nt, Artificial Sequence
  Description of Artificial Sequence: Synthetic oligonucleotide
  Sense strand starting at position 2239 of SEQ ID NO: 1211
gccagugacucaccuauca

SEQ ID NO: 96051 - RNA, 19 nt, Artificial Sequence
  Description of Artificial Sequence: Synthetic oligonucleotide
  Antisense strand to SEQ ID NO: 95970
ugauaggugagucacuggc

SEQ ID NO: 96052 - RNA, 19 nt, Artificial Sequence
  Description of Artificial Sequence: Synthetic oligonucleotide
  Sense strand starting at position 2173 of SEQ ID NO: 1211
cugcuccugcugugaauuu

SEQ ID NO: 96053 - RNA, 19 nt, Artificial Sequence
  Description of Artificial Sequence: Synthetic oligonucleotide
  Antisense strand to SEQ ID NO: 95972
aaauucacagcaggagcag

SEQ ID NO: 96054 - RNA, 19 nt, Artificial Sequence
  Description of Artificial Sequence: Synthetic oligonucleotide
  Sense strand starting at position 2172 of SEQ ID NO: 1211
gcugcuccugcugugaauu

SEQ ID NO: 96055 - RNA, 19 nt, Artificial Sequence
  Description of Artificial Sequence: Synthetic oligonucleotide
  Antisense strand to SEQ ID NO: 95974
aauucacagcaggagcagc

SEQ ID NO: 96056 - RNA, 19 nt, Artificial Sequence
  Description of Artificial Sequence: Synthetic oligonucleotide
  Sense strand starting at position 1301 of SEQ ID NO: 1211
acgcguauccaacagcaua

SEQ ID NO: 96057 - RNA, 19 nt, Artificial Sequence
  Description of Artificial Sequence: Synthetic oligonucleotide
  Antisense strand to SEQ ID NO: 95976
uaugcuguuggauacgcgu

SEQ ID NO: 96058 - RNA, 19 nt, Artificial Sequence
  Description of Artificial Sequence: Synthetic oligonucleotide
  Sense strand starting at position 1209 of SEQ ID NO: 1211
acucuugagucuucuucuu

SEQ ID NO: 96059 - RNA, 19 nt, Artificial Sequence
  Description of Artificial Sequence: Synthetic oligonucleotide
  Antisense strand to SEQ ID NO: 95978
aagaagaagacucaagagu

SEQ ID NO: 96060 - RNA, 19 nt, Artificial Sequence
  Description of Artificial Sequence: Synthetic oligonucleotide
  Sense strand starting at position 1123 of SEQ ID NO: 1211
gucaguugagcacacagau

SEQ ID NO: 96061 - RNA, 19 nt, Artificial Sequence
  Description of Artificial Sequence: Synthetic oligonucleotide
  Antisense strand to SEQ ID NO: 95980
aucugugugcucaacugac

SEQ ID NO: 96062 - RNA, 19 nt, Artificial Sequence
  Description of Artificial Sequence: Synthetic oligonucleotide
  Sense strand starting at position 981 of SEQ ID NO: 1211
aagucuuuaggcgaaguga

SEQ ID NO: 96063 - RNA, 19 nt, Artificial Sequence
  Description of Artificial Sequence: Synthetic oligonucleotide
  Antisense strand to SEQ ID NO: 95982
ucacuucgccuaaagacuu

SEQ ID NO: 96064 - RNA, 19 nt, Artificial Sequence
  Description of Artificial Sequence: Synthetic oligonucleotide
  Sense strand starting at position 979 of SEQ ID NO: 1211
ugaagucuuuaggcgaagu

SEQ ID NO: 96065 - RNA, 19 nt, Artificial Sequence
  Description of Artificial Sequence: Synthetic oligonucleotide
  Antisense strand to SEQ ID NO: 95984
acuucgccuaaagacuuca

SEQ ID NO: 96066 - RNA, 19 nt, Artificial Sequence
  Description of Artificial Sequence: Synthetic oligonucleotide
  Sense strand starting at position 976 of SEQ ID NO: 1211
guuugaagucuuuaggcga

SEQ ID NO: 96067 - RNA, 19 nt, Artificial Sequence
  Description of Artificial Sequence: Synthetic oligonucleotide
  Antisense strand to SEQ ID NO: 95986
ucgccuaaagacuucaaac

SEQ ID NO: 96068 - RNA, 19 nt, Artificial Sequence
  Description of Artificial Sequence: Synthetic oligonucleotide
  Sense strand starting at position 870 of SEQ ID NO: 1211
cuuaauauacgcugaacaa

SEQ ID NO: 96069 - RNA, 19 nt, Artificial Sequence
  Description of Artificial Sequence: Synthetic oligonucleotide
  Antisense strand to SEQ ID NO: 95988
uuguucagcguauauuaag

SEQ ID NO: 96070 - RNA, 19 nt, Artificial Sequence
  Description of Artificial Sequence: Synthetic oligonucleotide
  Sense strand starting at position 859 of SEQ ID NO: 1211
cguaaugucuucuuaauau

SEQ ID NO: 96071 - RNA, 19 nt, Artificial Sequence
  Description of Artificial Sequence: Synthetic oligonucleotide
  Antisense strand to SEQ ID NO: 95990
auauuaagaagacauuacg

SEQ ID NO: 96072 - RNA, 19 nt, Artificial Sequence
  Description of Artificial Sequence: Synthetic oligonucleotide
  Sense strand starting at position 848 of SEQ ID NO: 1211
aaaucaugcuacguaaugu

SEQ ID NO: 96073 - RNA, 19 nt, Artificial Sequence
  Description of Artificial Sequence: Synthetic oligonucleotide
  Antisense strand to SEQ ID NO: 95992
acauuacguagcaugauuu

SEQ ID NO: 96074 - RNA, 19 nt, Artificial Sequence
  Description of Artificial Sequence: Synthetic oligonucleotide
  Sense strand starting at position 755 of SEQ ID NO: 1211
agaaccaucugauaaagau

SEQ ID NO: 96075 - RNA, 19 nt, Artificial Sequence
  Description of Artificial Sequence: Synthetic oligonucleotide
  Antisense strand to SEQ ID NO: 95994
aucuuuaucagaugguucu

SEQ ID NO: 96076 - RNA, 19 nt, Artificial Sequence
  Description of Artificial Sequence: Synthetic oligonucleotide
  Sense strand starting at position 753 of SEQ ID NO: 1211
acagaaccaucugauaaag

SEQ ID NO: 96077 - RNA, 19 nt, Artificial Sequence
  Description of Artificial Sequence: Synthetic oligonucleotide
  Antisense strand to SEQ ID NO: 95996
cuuuaucagaugguucugu

SEQ ID NO: 96078 - RNA, 19 nt, Artificial Sequence
  Description of Artificial Sequence: Synthetic oligonucleotide
  Sense strand starting at position 675 of SEQ ID NO: 1211
ggguacuggaauuguuuaa

SEQ ID NO: 96079 - RNA, 19 nt, Artificial Sequence
  Description of Artificial Sequence: Synthetic oligonucleotide
  Antisense strand to SEQ ID NO: 95998
uuaaacaauuccaguaccc

SEQ ID NO: 96080 - RNA, 19 nt, Artificial Sequence
  Description of Artificial Sequence: Synthetic oligonucleotide
  Sense strand starting at position 653 of SEQ ID NO: 1211
agguguagccuguacacau

SEQ ID NO: 96081 - RNA, 19 nt, Artificial Sequence
  Description of Artificial Sequence: Synthetic oligonucleotide
  Antisense strand to SEQ ID NO: 96000
auguguacaggcuacaccu

SEQ ID NO: 96082 - RNA, 19 nt, Artificial Sequence
  Description of Artificial Sequence: Synthetic oligonucleotide
  Sense strand starting at position 255 of SEQ ID NO: 1211
auauucucugaguagagcu

SEQ ID NO: 96083 - RNA, 19 nt, Artificial Sequence
  Description of Artificial Sequence: Synthetic oligonucleotide
  Antisense strand to SEQ ID NO: 96002
agcucuacucagagaauau

SEQ ID NO: 96084 - RNA, 19 nt, Artificial Sequence
  Description of Artificial Sequence: Synthetic oligonucleotide
  Sense strand starting at position 251 of SEQ ID NO: 1211
cuuuauauucucugaguag

SEQ ID NO: 96085 - RNA, 19 nt, Artificial Sequence
  Description of Artificial Sequence: Synthetic oligonucleotide
  Antisense strand to SEQ ID NO: 96004
cuacucagagaauauaaag

SEQ ID NO: 96086 - RNA, 19 nt, Artificial Sequence
  Description of Artificial Sequence: Synthetic oligonucleotide
  Sense strand starting at position 191 of SEQ ID NO: 1211
cauguuagggcuuauauuc

SEQ ID NO: 96087 - RNA, 19 nt, Artificial Sequence
  Description of Artificial Sequence: Synthetic oligonucleotide
  Antisense strand to SEQ ID NO: 96006
gaauauaagcccuaacaug

SEQ ID NO: 96088 - RNA, 19 nt, Artificial Sequence
  Description of Artificial Sequence: Synthetic oligonucleotide
  Sense strand starting at position 177 of SEQ ID NO: 1211
acagaaauaucagacaugu

SEQ ID NO: 96089 - RNA, 19 nt, Artificial Sequence
  Description of Artificial Sequence: Synthetic oligonucleotide
  Antisense strand to SEQ ID NO: 96008
acaugucugauauuucugu

SEQ ID NO: 96090 - RNA, 19 nt, Artificial Sequence
  Description of Artificial Sequence: Synthetic oligonucleotide
  Sense strand starting at position 54 of SEQ ID NO: 1211
acuuaauuccgacaugcag

SEQ ID NO: 96091 - RNA, 19 nt, Artificial Sequence
  Description of Artificial Sequence: Synthetic oligonucleotide
  Antisense strand to SEQ ID NO: 96010
cugcaugucggaauuaagu

SEQ ID NO: 96092 - RNA, 19 nt, Artificial Sequence
  Description of Artificial Sequence: Synthetic oligonucleotide
  Sense strand starting at position 3436 of SEQ ID NO: 1210
uugcaaagacauugacauu

SEQ ID NO: 96093 - RNA, 19 nt, Artificial Sequence
  Description of Artificial Sequence: Synthetic oligonucleotide
  Antisense strand to SEQ ID NO: 96012
aaugucaaugucuuugcaa

SEQ ID NO: 96094 - RNA, 19 nt, Artificial Sequence
  Description of Artificial Sequence: Synthetic oligonucleotide
  Sense strand starting at position 3394 of SEQ ID NO: 1210
uauuuaugccacugugguu

SEQ ID NO: 96095 - RNA, 19 nt, Artificial Sequence
  Description of Artificial Sequence: Synthetic oligonucleotide
  Antisense strand to SEQ ID NO: 96014
aaccacaguggcauaaaua

SEQ ID NO: 96096 - RNA, 19 nt, Artificial Sequence
  Description of Artificial Sequence: Synthetic oligonucleotide
  Sense strand starting at position 3351 of SEQ ID NO: 1210
uugggaugguaucuuugaa

SEQ ID NO: 96097 - RNA, 19 nt, Artificial Sequence
  Description of Artificial Sequence: Synthetic oligonucleotide
  Antisense strand to SEQ ID NO: 96016
uucaaagauaccaucccaa

SEQ ID NO: 96098 - RNA, 19 nt, Artificial Sequence
  Description of Artificial Sequence: Synthetic oligonucleotide
  Sense strand starting at position 3282 of SEQ ID NO: 1210
agagaacucuuauaaagaa

SEQ ID NO: 96099 - RNA, 19 nt, Artificial Sequence
  Description of Artificial Sequence: Synthetic oligonucleotide
  Antisense strand to SEQ ID NO: 96018
uucuuuauaagaguucucu

SEQ ID NO: 96100 - RNA, 19 nt, Artificial Sequence
  Description of Artificial Sequence: Synthetic oligonucleotide
  Sense strand starting at position 3248 of SEQ ID NO: 1210
cucugaaaucauugcagua

SEQ ID NO: 96101 - RNA, 19 nt, Artificial Sequence
  Description of Artificial Sequence: Synthetic oligonucleotide
  Antisense strand to SEQ ID NO: 96020
uacugcaaugauuucagag

SEQ ID NO: 96102 - RNA, 19 nt, Artificial Sequence
  Description of Artificial Sequence: Synthetic oligonucleotide
  Sense strand starting at position 3239 of SEQ ID NO: 1210
auggaagcacucugaaauc

SEQ ID NO: 96103 - RNA, 19 nt, Artificial Sequence
  Description of Artificial Sequence: Synthetic oligonucleotide
  Antisense strand to SEQ ID NO: 96022
gauuucagagugcuuccau

SEQ ID NO: 96104 - RNA, 19 nt, Artificial Sequence
  Description of Artificial Sequence: Synthetic oligonucleotide
  Sense strand starting at position 3137 of SEQ ID NO: 1210
gggcuuaaaucacucacua

SEQ ID NO: 96105 - RNA, 19 nt, Artificial Sequence
  Description of Artificial Sequence: Synthetic oligonucleotide
  Antisense strand to SEQ ID NO: 96024
uagugagugauuuaagccc

SEQ ID NO: 96106 - RNA, 19 nt, Artificial Sequence
  Description of Artificial Sequence: Synthetic oligonucleotide
  Sense strand starting at position 3130 of SEQ ID NO: 1210
ucugcaugggcuuaaauca

SEQ ID NO: 96107 - RNA, 19 nt, Artificial Sequence
  Description of Artificial Sequence: Synthetic oligonucleotide
  Antisense strand to SEQ ID NO: 96026
ugauuuaagcccaugcaga

SEQ ID NO: 96108 - RNA, 19 nt, Artificial Sequence
  Description of Artificial Sequence: Synthetic oligonucleotide
  Sense strand starting at position 2842 of SEQ ID NO: 1210
cuguguaaauguucuagag

SEQ ID NO: 96109 - RNA, 19 nt, Artificial Sequence
  Description of Artificial Sequence: Synthetic oligonucleotide
  Antisense strand to SEQ ID NO: 96028
cucuagaacauuuacacag

SEQ ID NO: 96110 - RNA, 19 nt, Artificial Sequence
  Description of Artificial Sequence: Synthetic oligonucleotide
  Sense strand starting at position 2790 of SEQ ID NO: 1210
gagagucaacccugcacau

SEQ ID NO: 96111 - RNA, 19 nt, Artificial Sequence
  Description of Artificial Sequence: Synthetic oligonucleotide
  Antisense strand to SEQ ID NO: 96030
augugcaggguugacucuc

SEQ ID NO: 96112 - RNA, 19 nt, Artificial Sequence
  Description of Artificial Sequence: Synthetic oligonucleotide
  Sense strand starting at position 2714 of SEQ ID NO: 1210
ggugucuaugcuuacagau

SEQ ID NO: 96113 - RNA, 19 nt, Artificial Sequence
  Description of Artificial Sequence: Synthetic oligonucleotide
  Antisense strand to SEQ ID NO: 96032
aucuguaagcauagacacc

SEQ ID NO: 96114 - RNA, 19 nt, Artificial Sequence
  Description of Artificial Sequence: Synthetic oligonucleotide
  Sense strand starting at position 2490 of SEQ ID NO: 1210
ugaucacagugaucacuga

SEQ ID NO: 96115 - RNA, 19 nt, Artificial Sequence
  Description of Artificial Sequence: Synthetic oligonucleotide
  Antisense strand to SEQ ID NO: 96034
ucagugaucacugugauca

SEQ ID NO: 96116 - RNA, 19 nt, Artificial Sequence
  Description of Artificial Sequence: Synthetic oligonucleotide
  Sense strand starting at position 2487 of SEQ ID NO: 1210
cugugaucacagugaucac

SEQ ID NO: 96117 - RNA, 19 nt, Artificial Sequence
  Description of Artificial Sequence: Synthetic oligonucleotide
  Antisense strand to SEQ ID NO: 96036
gugaucacugugaucacag

SEQ ID NO: 96118 - RNA, 19 nt, Artificial Sequence
  Description of Artificial Sequence: Synthetic oligonucleotide
  Sense strand starting at position 2481 of SEQ ID NO: 1210
ugaauucugugaucacagu

SEQ ID NO: 96119 - RNA, 19 nt, Artificial Sequence
  Description of Artificial Sequence: Synthetic oligonucleotide
  Antisense strand to SEQ ID NO: 96038
acugugaucacagaauuca

SEQ ID NO: 96120 - RNA, 19 nt, Artificial Sequence
  Description of Artificial Sequence: Synthetic oligonucleotide
  Sense strand starting at position 2478 of SEQ ID NO: 1210
uuaugaauucugugaucac

SEQ ID NO: 96121 - RNA, 19 nt, Artificial Sequence
  Description of Artificial Sequence: Synthetic oligonucleotide
  Antisense strand to SEQ ID NO: 96040
gugaucacagaauucauaa

SEQ ID NO: 96122 - RNA, 19 nt, Artificial Sequence
  Description of Artificial Sequence: Synthetic oligonucleotide
  Sense strand starting at position 2326 of SEQ ID NO: 1210
ugaugucucagggaggguu

SEQ ID NO: 96123 - RNA, 19 nt, Artificial Sequence
  Description of Artificial Sequence: Synthetic oligonucleotide
  Antisense strand to SEQ ID NO: 96042
aacccucccugagacauca

SEQ ID NO: 96124 - RNA, 19 nt, Artificial Sequence
  Description of Artificial Sequence: Synthetic oligonucleotide
  Sense strand starting at position 2325 of SEQ ID NO: 1210
gugaugucucagggagggu

SEQ ID NO: 96125 - RNA, 19 nt, Artificial Sequence
  Description of Artificial Sequence: Synthetic oligonucleotide
  Antisense strand to SEQ ID NO: 96044
acccucccugagacaucac

SEQ ID NO: 96126 - RNA, 19 nt, Artificial Sequence
  Description of Artificial Sequence: Synthetic oligonucleotide
  Sense strand starting at position 2201 of SEQ ID NO: 1210
gcuggacgacucugaaauu

SEQ ID NO: 96127 - RNA, 19 nt, Artificial Sequence
  Description of Artificial Sequence: Synthetic oligonucleotide
  Antisense strand to SEQ ID NO: 96046
aauuucagagucguccagc

SEQ ID NO: 96128 - RNA, 19 nt, Artificial Sequence
  Description of Artificial Sequence: Synthetic oligonucleotide
  Sense strand starting at position 1995 of SEQ ID NO: 1210
ucuccagagcugugaggaa

SEQ ID NO: 96129 - RNA, 19 nt, Artificial Sequence
  Description of Artificial Sequence: Synthetic oligonucleotide
  Antisense strand to SEQ ID NO: 96048
uuccucacagcucuggaga

SEQ ID NO: 96130 - RNA, 19 nt, Artificial Sequence
  Description of Artificial Sequence: Synthetic oligonucleotide
  Sense strand starting at position 1601 of SEQ ID NO: 1210
ccgagauguguggaagcaa

SEQ ID NO: 96131 - RNA, 19 nt, Artificial Sequence
  Description of Artificial Sequence: Synthetic oligonucleotide
  Antisense strand to SEQ ID NO: 96050
uugcuuccacacaucucgg

SEQ ID NO: 96132 - RNA, 19 nt, Artificial Sequence
  Description of Artificial Sequence: Synthetic oligonucleotide
  Sense strand starting at position 1591 of SEQ ID NO: 1210
uggcuauauaccgagaugu

SEQ ID NO: 96133 - RNA, 19 nt, Artificial Sequence
  Description of Artificial Sequence: Synthetic oligonucleotide
  Antisense strand to SEQ ID NO: 96052
acaucucgguauauagcca

SEQ ID NO: 96134 - RNA, 19 nt, Artificial Sequence
  Description of Artificial Sequence: Synthetic oligonucleotide
  Sense strand starting at position 1495 of SEQ ID NO: 1210
gagcauuaugcuuaagguu

SEQ ID NO: 96135 - RNA, 19 nt, Artificial Sequence
  Description of Artificial Sequence: Synthetic oligonucleotide
  Antisense strand to SEQ ID NO: 96054
aaccuuaagcauaaugcuc

SEQ ID NO: 96136 - RNA, 19 nt, Artificial Sequence
  Description of Artificial Sequence: Synthetic oligonucleotide
  Sense strand starting at position 1485 of SEQ ID NO: 1210
gugacauccugagcauuau

SEQ ID NO: 96137 - RNA, 19 nt, Artificial Sequence
  Description of Artificial Sequence: Synthetic oligonucleotide
  Antisense strand to SEQ ID NO: 96056
auaaugcucaggaugucac

SEQ ID NO: 96138 - RNA, 19 nt, Artificial Sequence
  Description of Artificial Sequence: Synthetic oligonucleotide
  Sense strand starting at position 1483 of SEQ ID NO: 1210
gggugacauccugagcauu

SEQ ID NO: 96139 - RNA, 19 nt, Artificial Sequence
  Description of Artificial Sequence: Synthetic oligonucleotide
  Antisense strand to SEQ ID NO: 96058
aaugcucaggaugucaccc

SEQ ID NO: 96140 - RNA, 19 nt, Artificial Sequence
  Description of Artificial Sequence: Synthetic oligonucleotide
  Sense strand starting at position 1393 of SEQ ID NO: 1210
cauggaagguuccuaauac

SEQ ID NO: 96141 - RNA, 19 nt, Artificial Sequence
  Description of Artificial Sequence: Synthetic oligonucleotide
  Antisense strand to SEQ ID NO: 96060
guauuaggaaccuuccaug

SEQ ID NO: 96142 - RNA, 19 nt, Artificial Sequence
  Description of Artificial Sequence: Synthetic oligonucleotide
  Sense strand starting at position 1268 of SEQ ID NO: 1210
gcugaaacuccuggacaca

SEQ ID NO: 96143 - RNA, 19 nt, Artificial Sequence
  Description of Artificial Sequence: Synthetic oligonucleotide
  Antisense strand to SEQ ID NO: 96062
uguguccaggaguuucagc

SEQ ID NO: 96144 - RNA, 19 nt, Artificial Sequence
  Description of Artificial Sequence: Synthetic oligonucleotide
  Sense strand starting at position 1128 of SEQ ID NO: 1210
ugucauuuagcugagugca

SEQ ID NO: 96145 - RNA, 19 nt, Artificial Sequence
  Description of Artificial Sequence: Synthetic oligonucleotide
  Antisense strand to SEQ ID NO: 96064
ugcacucagcuaaaugaca

SEQ ID NO: 96146 - RNA, 19 nt, Artificial Sequence
  Description of Artificial Sequence: Synthetic oligonucleotide
  Sense strand starting at position 1125 of SEQ ID NO: 1210
cucugucauuuagcugagu

SEQ ID NO: 96147 - RNA, 19 nt, Artificial Sequence
  Description of Artificial Sequence: Synthetic oligonucleotide
  Antisense strand to SEQ ID NO: 96066
acucagcuaaaugacagag

SEQ ID NO: 96148 - RNA, 19 nt, Artificial Sequence
  Description of Artificial Sequence: Synthetic oligonucleotide
  Sense strand starting at position 851 of SEQ ID NO: 1210
auaaacuggucucuuugaa

SEQ ID NO: 96149 - RNA, 19 nt, Artificial Sequence
  Description of Artificial Sequence: Synthetic oligonucleotide
  Antisense strand to SEQ ID NO: 96068
uucaaagagaccaguuuau

SEQ ID NO: 96150 - RNA, 19 nt, Artificial Sequence
  Description of Artificial Sequence: Synthetic oligonucleotide
  Sense strand starting at position 826 of SEQ ID NO: 1210
guacaaugucuacaauugu

SEQ ID NO: 96151 - RNA, 19 nt, Artificial Sequence
  Description of Artificial Sequence: Synthetic oligonucleotide
  Antisense strand to SEQ ID NO: 96070
acaauuguagacauuguac

SEQ ID NO: 96152 - RNA, 19 nt, Artificial Sequence
  Description of Artificial Sequence: Synthetic oligonucleotide
  Sense strand starting at position 823 of SEQ ID NO: 1210
ggaguacaaugucuacaau

SEQ ID NO: 96153 - RNA, 19 nt, Artificial Sequence
  Description of Artificial Sequence: Synthetic oligonucleotide
  Antisense strand to SEQ ID NO: 96072
auuguagacauuguacucc

SEQ ID NO: 96154 - RNA, 19 nt, Artificial Sequence
  Description of Artificial Sequence: Synthetic oligonucleotide
  Sense strand starting at position 735 of SEQ ID NO: 1210
gaaagacuccucuggagug

SEQ ID NO: 96155 - RNA, 19 nt, Artificial Sequence
  Description of Artificial Sequence: Synthetic oligonucleotide
  Antisense strand to SEQ ID NO: 96074
cacuccagaggagucuuuc

SEQ ID NO: 96156 - RNA, 19 nt, Artificial Sequence
  Description of Artificial Sequence: Synthetic oligonucleotide
  Sense strand starting at position 701 of SEQ ID NO: 1210
uuaacugugauuggagcua

SEQ ID NO: 96157 - RNA, 19 nt, Artificial Sequence
  Description of Artificial Sequence: Synthetic oligonucleotide
  Antisense strand to SEQ ID NO: 96076
uagcuccaaucacaguuaa

SEQ ID NO: 96158 - RNA, 19 nt, Artificial Sequence
  Description of Artificial Sequence: Synthetic oligonucleotide
  Sense strand starting at position 693 of SEQ ID NO: 1210
ugaguuuauuaacugugau

SEQ ID NO: 96159 - RNA, 19 nt, Artificial Sequence
  Description of Artificial Sequence: Synthetic oligonucleotide
  Antisense strand to SEQ ID NO: 96078
aucacaguuaauaaacuca

SEQ ID NO: 96160 - RNA, 19 nt, Artificial Sequence
  Description of Artificial Sequence: Synthetic oligonucleotide
  Sense strand starting at position 687 of SEQ ID NO: 1210
augcuaugaguuuauuaac

SEQ ID NO: 96161 - RNA, 19 nt, Artificial Sequence
  Description of Artificial Sequence: Synthetic oligonucleotide
  Antisense strand to SEQ ID NO: 96080
guuaauaaacucauagcau

SEQ ID NO: 96162 - RNA, 19 nt, Artificial Sequence
  Description of Artificial Sequence: Synthetic oligonucleotide
  Sense strand starting at position 542 of SEQ ID NO: 1210
uuaggaaacccacguucua

SEQ ID NO: 96163 - RNA, 19 nt, Artificial Sequence
  Description of Artificial Sequence: Synthetic oligonucleotide
  Antisense strand to SEQ ID NO: 96082
uagaacguggguuuccuaa

SEQ ID NO: 96164 - RNA, 19 nt, Artificial Sequence
  Description of Artificial Sequence: Synthetic oligonucleotide
  Sense strand starting at position 505 of SEQ ID NO: 1210
gcagcaugaccugaucaaa

SEQ ID NO: 96165 - RNA, 19 nt, Artificial Sequence
  Description of Artificial Sequence: Synthetic oligonucleotide
  Antisense strand to SEQ ID NO: 96084
uuugaucaggucaugcugc

SEQ ID NO: 96166 - RNA, 19 nt, Artificial Sequence
  Description of Artificial Sequence: Synthetic oligonucleotide
  Sense strand starting at position 504 of SEQ ID NO: 1210
ggcagcaugaccugaucaa

SEQ ID NO: 96167 - RNA, 19 nt, Artificial Sequence
  Description of Artificial Sequence: Synthetic oligonucleotide
  Antisense strand to SEQ ID NO: 96086
uugaucaggucaugcugcc

SEQ ID NO: 96168 - RNA, 19 nt, Artificial Sequence
  Description of Artificial Sequence: Synthetic oligonucleotide
  Sense strand starting at position 431 of SEQ ID NO: 1210
uaguaaugugauuagaugu

SEQ ID NO: 96169 - RNA, 19 nt, Artificial Sequence
  Description of Artificial Sequence: Synthetic oligonucleotide
  Antisense strand to SEQ ID NO: 96088
acaucuaaucacauuacua

SEQ ID NO: 96170 - RNA, 19 nt, Artificial Sequence
  Description of Artificial Sequence: Synthetic oligonucleotide
  Sense strand starting at position 430 of SEQ ID NO: 1210
guaguaaugugauuagaug

SEQ ID NO: 96171 - RNA, 19 nt, Artificial Sequence
  Description of Artificial Sequence: Synthetic oligonucleotide
  Antisense strand to SEQ ID NO: 96090
caucuaaucacauuacuac

SEQ ID NO: 96172 - RNA, 19 nt, Artificial Sequence
  Description of Artificial Sequence: Synthetic oligonucleotide
  Sense strand starting at position 3935 of SEQ ID NO: 1212
guaaguagucaguaaauga

SEQ ID NO: 96173 - RNA, 19 nt, Artificial Sequence
  Description of Artificial Sequence: Synthetic oligonucleotide
  Antisense strand to SEQ ID NO: 96092
ucauuuacugacuacuuac

SEQ ID NO: 96174 - RNA, 19 nt, Artificial Sequence
  Description of Artificial Sequence: Synthetic oligonucleotide
  Sense strand starting at position 3932 of SEQ ID NO: 1212
uuuguaaguagucaguaaa

SEQ ID NO: 96175 - RNA, 19 nt, Artificial Sequence
  Description of Artificial Sequence: Synthetic oligonucleotide
  Antisense strand to SEQ ID NO: 96094
uuuacugacuacuuacaaa

SEQ ID NO: 96176 - RNA, 19 nt, Artificial Sequence
  Description of Artificial Sequence: Synthetic oligonucleotide
  Sense strand starting at position 3893 of SEQ ID NO: 1212
agcuaauaugcucaaagca

SEQ ID NO: 96177 - RNA, 19 nt, Artificial Sequence
  Description of Artificial Sequence: Synthetic oligonucleotide
  Antisense strand to SEQ ID NO: 96096
ugcuuugagcauauuagcu

SEQ ID NO: 96178 - RNA, 19 nt, Artificial Sequence
  Description of Artificial Sequence: Synthetic oligonucleotide
  Sense strand starting at position 3882 of SEQ ID NO: 1212
cugugagaauuagcuaaua

SEQ ID NO: 96179 - RNA, 19 nt, Artificial Sequence
  Description of Artificial Sequence: Synthetic oligonucleotide
  Antisense strand to SEQ ID NO: 96098
uauuagcuaauucucacag

SEQ ID NO: 96180 - RNA, 19 nt, Artificial Sequence
  Description of Artificial Sequence: Synthetic oligonucleotide
  Sense strand starting at position 3743 of SEQ ID NO: 1212
agacuuuguacucagguga

SEQ ID NO: 96181 - RNA, 19 nt, Artificial Sequence
  Description of Artificial Sequence: Synthetic oligonucleotide
  Antisense strand to SEQ ID NO: 96100
ucaccugaguacaaagucu

SEQ ID NO: 96182 - RNA, 19 nt, Artificial Sequence
  Description of Artificial Sequence: Synthetic oligonucleotide
  Sense strand starting at position 3738 of SEQ ID NO: 1212
accuuagacuuuguacuca

SEQ ID NO: 96183 - RNA, 19 nt, Artificial Sequence
  Description of Artificial Sequence: Synthetic oligonucleotide
  Antisense strand to SEQ ID NO: 96102
ugaguacaaagucuaaggu

SEQ ID NO: 96184 - RNA, 19 nt, Artificial Sequence
  Description of Artificial Sequence: Synthetic oligonucleotide
  Sense strand starting at position 3521 of SEQ ID NO: 1212
agcaauacucucuaaggua

SEQ ID NO: 96185 - RNA, 19 nt, Artificial Sequence
  Description of Artificial Sequence: Synthetic oligonucleotide
  Antisense strand to SEQ ID NO: 96104
uaccuuagagaguauugcu

SEQ ID NO: 96186 - RNA, 19 nt, Artificial Sequence
  Description of Artificial Sequence: Synthetic oligonucleotide
  Sense strand starting at position 3500 of SEQ ID NO: 1212
guaagucaccaggguagau

SEQ ID NO: 96187 - RNA, 19 nt, Artificial Sequence
  Description of Artificial Sequence: Synthetic oligonucleotide
  Antisense strand to SEQ ID NO: 96106
aucuacccuggugacuuac

SEQ ID NO: 96188 - RNA, 19 nt, Artificial Sequence
  Description of Artificial Sequence: Synthetic oligonucleotide
  Sense strand starting at position 3497 of SEQ ID NO: 1212
cuuguaagucaccagggua

SEQ ID NO: 96189 - RNA, 19 nt, Artificial Sequence
  Description of Artificial Sequence: Synthetic oligonucleotide
  Antisense strand to SEQ ID NO: 96108
uacccuggugacuuacaag

SEQ ID NO: 96190 - RNA, 19 nt, Artificial Sequence
  Description of Artificial Sequence: Synthetic oligonucleotide
  Sense strand starting at position 3426 of SEQ ID NO: 1212
ccuagagagucucugggaa

SEQ ID NO: 96191 - RNA, 19 nt, Artificial Sequence
  Description of Artificial Sequence: Synthetic oligonucleotide
  Antisense strand to SEQ ID NO: 96110
uucccagagacucucuagg

SEQ ID NO: 96192 - RNA, 19 nt, Artificial Sequence
  Description of Artificial Sequence: Synthetic oligonucleotide
  Sense strand starting at position 3329 of SEQ ID NO: 1212
gccuuaggagcugaaucua

SEQ ID NO: 96193 - RNA, 19 nt, Artificial Sequence
  Description of Artificial Sequence: Synthetic oligonucleotide
  Antisense strand to SEQ ID NO: 96112
uagauucagcuccuaaggc

SEQ ID NO: 96194 - RNA, 19 nt, Artificial Sequence
  Description of Artificial Sequence: Synthetic oligonucleotide
  Sense strand starting at position 3328 of SEQ ID NO: 1212
ggccuuaggagcugaaucu

SEQ ID NO: 96195 - RNA, 19 nt, Artificial Sequence
  Description of Artificial Sequence: Synthetic oligonucleotide
  Antisense strand to SEQ ID NO: 96114
agauucagcuccuaaggcc

SEQ ID NO: 96196 - RNA, 19 nt, Artificial Sequence
  Description of Artificial Sequence: Synthetic oligonucleotide
  Sense strand starting at position 3293 of SEQ ID NO: 1212
guguccuucccagaagaca

SEQ ID NO: 96197 - RNA, 19 nt, Artificial Sequence
  Description of Artificial Sequence: Synthetic oligonucleotide
  Antisense strand to SEQ ID NO: 96116
ugucuucugggaaggacac

SEQ ID NO: 96198 - RNA, 19 nt, Artificial Sequence
  Description of Artificial Sequence: Synthetic oligonucleotide
  Sense strand starting at position 3206 of SEQ ID NO: 1212
agauauucucuugggcuuu

SEQ ID NO: 96199 - RNA, 19 nt, Artificial Sequence
  Description of Artificial Sequence: Synthetic oligonucleotide
  Antisense strand to SEQ ID NO: 96118
aaagcccaagagaauaucu

SEQ ID NO: 96200 - RNA, 19 nt, Artificial Sequence
  Description of Artificial Sequence: Synthetic oligonucleotide
  Sense strand starting at position 3063 of SEQ ID NO: 1212
agauguaugugaguagaga

SEQ ID NO: 96201 - RNA, 19 nt, Artificial Sequence
  Description of Artificial Sequence: Synthetic oligonucleotide
  Antisense strand to SEQ ID NO: 96120
ucucuacucacauacaucu

SEQ ID NO: 96202 - RNA, 19 nt, Artificial Sequence
  Description of Artificial Sequence: Synthetic oligonucleotide
  Sense strand starting at position 2981 of SEQ ID NO: 1212
cugggaaugccuuaucaau

SEQ ID NO: 96203 - RNA, 19 nt, Artificial Sequence
  Description of Artificial Sequence: Synthetic oligonucleotide
  Antisense strand to SEQ ID NO: 96122
auugauaaggcauucccag

SEQ ID NO: 96204 - RNA, 19 nt, Artificial Sequence
  Description of Artificial Sequence: Synthetic oligonucleotide
  Sense strand starting at position 2952 of SEQ ID NO: 1212
ccgacaagauuacuaagua

SEQ ID NO: 96205 - RNA, 19 nt, Artificial Sequence
  Description of Artificial Sequence: Synthetic oligonucleotide
  Antisense strand to SEQ ID NO: 96124
uacuuaguaaucuugucgg

SEQ ID NO: 96206 - RNA, 19 nt, Artificial Sequence
  Description of Artificial Sequence: Synthetic oligonucleotide
  Sense strand starting at position 2889 of SEQ ID NO: 1212
cucugacgucuugaaagcu

SEQ ID NO: 96207 - RNA, 19 nt, Artificial Sequence
  Description of Artificial Sequence: Synthetic oligonucleotide
  Antisense strand to SEQ ID NO: 96126
agcuuucaagacgucagag

SEQ ID NO: 96208 - RNA, 19 nt, Artificial Sequence
  Description of Artificial Sequence: Synthetic oligonucleotide
  Sense strand starting at position 2820 of SEQ ID NO: 1212
cucauugauugaucugaac

SEQ ID NO: 96209 - RNA, 19 nt, Artificial Sequence
  Description of Artificial Sequence: Synthetic oligonucleotide
  Antisense strand to SEQ ID NO: 96128
guucagaucaaucaaugag

SEQ ID NO: 96210 - RNA, 19 nt, Artificial Sequence
  Description of Artificial Sequence: Synthetic oligonucleotide
  Sense strand starting at position 2704 of SEQ ID NO: 1212
ggcagauuccagggagacu

SEQ ID NO: 96211 - RNA, 19 nt, Artificial Sequence
  Description of Artificial Sequence: Synthetic oligonucleotide
  Antisense strand to SEQ ID NO: 96130
agucucccuggaaucugcc

SEQ ID NO: 96212 - RNA, 19 nt, Artificial Sequence
  Description of Artificial Sequence: Synthetic oligonucleotide
  Sense strand starting at position 1267 of SEQ ID NO: 1212
acguuucuucgagaaaccu

SEQ ID NO: 96213 - RNA, 19 nt, Artificial Sequence
  Description of Artificial Sequence: Synthetic oligonucleotide
  Antisense strand to SEQ ID NO: 96132
agguuucucgaagaaacgu

SEQ ID NO: 96214 - RNA, 19 nt, Artificial Sequence
  Description of Artificial Sequence: Synthetic oligonucleotide
  Sense strand starting at position 958 of SEQ ID NO: 1212
gaagaaacuguuuggacuu

SEQ ID NO: 96215 - RNA, 19 nt, Artificial Sequence
  Description of Artificial Sequence: Synthetic oligonucleotide
  Antisense strand to SEQ ID NO: 96134
aaguccaaacaguuucuuc

SEQ ID NO: 96216 - RNA, 19 nt, Artificial Sequence
  Description of Artificial Sequence: Synthetic oligonucleotide
  Sense strand starting at position 944 of SEQ ID NO: 1212
ggaugcgagguuuggaaga

SEQ ID NO: 96217 - RNA, 19 nt, Artificial Sequence
  Description of Artificial Sequence: Synthetic oligonucleotide
  Antisense strand to SEQ ID NO: 96136
ucuuccaaaccucgcaucc

SEQ ID NO: 96218 - RNA, 19 nt, Artificial Sequence
  Description of Artificial Sequence: Synthetic oligonucleotide
  Sense strand starting at position 888 of SEQ ID NO: 1212
cugaaauauccgcauuagg

SEQ ID NO: 96219 - RNA, 19 nt, Artificial Sequence
  Description of Artificial Sequence: Synthetic oligonucleotide
  Antisense strand to SEQ ID NO: 96138
ccuaaugcggauauuucag

SEQ ID NO: 96220 - RNA, 19 nt, Artificial Sequence
  Description of Artificial Sequence: Synthetic oligonucleotide
  Sense strand starting at position 887 of SEQ ID NO: 1212
ucugaaauauccgcauuag

SEQ ID NO: 96221 - RNA, 19 nt, Artificial Sequence
  Description of Artificial Sequence: Synthetic oligonucleotide
  Antisense strand to SEQ ID NO: 96140
cuaaugcggauauuucaga

SEQ ID NO: 96222 - RNA, 19 nt, Artificial Sequence
  Description of Artificial Sequence: Synthetic oligonucleotide
  Sense strand starting at position 869 of SEQ ID NO: 1212
gaaguuuagccguaauacu

SEQ ID NO: 96223 - RNA, 19 nt, Artificial Sequence
  Description of Artificial Sequence: Synthetic oligonucleotide
  Antisense strand to SEQ ID NO: 96142
aguauuacggcuaaacuuc

SEQ ID NO: 96224 - RNA, 19 nt, Artificial Sequence
  Description of Artificial Sequence: Synthetic oligonucleotide
  Sense strand starting at position 865 of SEQ ID NO: 1212
aagggaaguuuagccguaa

SEQ ID NO: 96225 - RNA, 19 nt, Artificial Sequence
  Description of Artificial Sequence: Synthetic oligonucleotide
  Antisense strand to SEQ ID NO: 96144
uuacggcuaaacuucccuu

SEQ ID NO: 96226 - RNA, 19 nt, Artificial Sequence
  Description of Artificial Sequence: Synthetic oligonucleotide
  Sense strand starting at position 836 of SEQ ID NO: 1212
gcuuuaacauguuuaagga

SEQ ID NO: 96227 - RNA, 19 nt, Artificial Sequence
  Description of Artificial Sequence: Synthetic oligonucleotide
  Antisense strand to SEQ ID NO: 96146
uccuuaaacauguuaaagc

SEQ ID NO: 96228 - RNA, 19 nt, Artificial Sequence
  Description of Artificial Sequence: Synthetic oligonucleotide
  Sense strand starting at position 766 of SEQ ID NO: 1212
aaagauggauugguucuua

SEQ ID NO: 96229 - RNA, 19 nt, Artificial Sequence
  Description of Artificial Sequence: Synthetic oligonucleotide
  Antisense strand to SEQ ID NO: 96148
uaagaaccaauccaucuuu

SEQ ID NO: 96230 - RNA, 19 nt, Artificial Sequence
  Description of Artificial Sequence: Synthetic oligonucleotide
  Sense strand starting at position 713 of SEQ ID NO: 1212
gcuuuaaauggagguaauu

SEQ ID NO: 96231 - RNA, 19 nt, Artificial Sequence
  Description of Artificial Sequence: Synthetic oligonucleotide
  Antisense strand to SEQ ID NO: 96150
aauuaccuccauuuaaagc

SEQ ID NO: 96232 - RNA, 19 nt, Artificial Sequence
  Description of Artificial Sequence: Synthetic oligonucleotide
  Sense strand starting at position 711 of SEQ ID NO: 1212
cugcuuuaaauggagguaa

SEQ ID NO: 96233 - RNA, 19 nt, Artificial Sequence
  Description of Artificial Sequence: Synthetic oligonucleotide
  Antisense strand to SEQ ID NO: 96152
uuaccuccauuuaaagcag

SEQ ID NO: 96234 - RNA, 19 nt, Artificial Sequence
  Description of Artificial Sequence: Synthetic oligonucleotide
  Sense strand starting at position 653 of SEQ ID NO: 1212
agaaguaugugacuuacaa

SEQ ID NO: 96235 - RNA, 19 nt, Artificial Sequence
  Description of Artificial Sequence: Synthetic oligonucleotide
  Antisense strand to SEQ ID NO: 96154
uuguaagucacauacuucu

SEQ ID NO: 96236 - RNA, 19 nt, Artificial Sequence
  Description of Artificial Sequence: Synthetic oligonucleotide
  Sense strand starting at position 646 of SEQ ID NO: 1212
ccgcgaaagaaguauguga

SEQ ID NO: 96237 - RNA, 19 nt, Artificial Sequence
  Description of Artificial Sequence: Synthetic oligonucleotide
  Antisense strand to SEQ ID NO: 96156
ucacauacuucuuucgcgg

SEQ ID NO: 96238 - RNA, 19 nt, Artificial Sequence
  Description of Artificial Sequence: Synthetic oligonucleotide
  Sense strand starting at position 605 of SEQ ID NO: 1212
gggaaaugugacuguuggu

SEQ ID NO: 96239 - RNA, 19 nt, Artificial Sequence
  Description of Artificial Sequence: Synthetic oligonucleotide
  Antisense strand to SEQ ID NO: 96158
accaacagucacauuuccc

SEQ ID NO: 96240 - RNA, 19 nt, Artificial Sequence
  Description of Artificial Sequence: Synthetic oligonucleotide
  Sense strand starting at position 595 of SEQ ID NO: 1212
cauaccugucgggaaaugu

SEQ ID NO: 96241 - RNA, 19 nt, Artificial Sequence
  Description of Artificial Sequence: Synthetic oligonucleotide
  Antisense strand to SEQ ID NO: 96160
acauuucccgacagguaug

SEQ ID NO: 96242 - RNA, 19 nt, Artificial Sequence
  Description of Artificial Sequence: Synthetic oligonucleotide
  Sense strand starting at position 593 of SEQ ID NO: 1212
cacauaccugucgggaaau

SEQ ID NO: 96243 - RNA, 19 nt, Artificial Sequence
  Description of Artificial Sequence: Synthetic oligonucleotide
  Antisense strand to SEQ ID NO: 96162
auuucccgacagguaugug

SEQ ID NO: 96244 - RNA, 19 nt, Artificial Sequence
  Description of Artificial Sequence: Synthetic oligonucleotide
  Sense strand starting at position 320 of SEQ ID NO: 1212
agacuagagcuguauacau

SEQ ID NO: 96245 - RNA, 19 nt, Artificial Sequence
  Description of Artificial Sequence: Synthetic oligonucleotide
  Antisense strand to SEQ ID NO: 96164
auguauacagcucuagucu

SEQ ID NO: 96246 - RNA, 19 nt, Artificial Sequence
  Description of Artificial Sequence: Synthetic oligonucleotide
  Sense strand starting at position 155 of SEQ ID NO: 1212
uuaugugaaccauggcaaa

SEQ ID NO: 96247 - RNA, 19 nt, Artificial Sequence
  Description of Artificial Sequence: Synthetic oligonucleotide
  Antisense strand to SEQ ID NO: 96166
uuugccaugguucacauaa

SEQ ID NO: 96248 - RNA, 19 nt, Artificial Sequence
  Description of Artificial Sequence: Synthetic oligonucleotide
  Sense strand starting at position 112 of SEQ ID NO: 1212
gauacaauuguuggguuga

SEQ ID NO: 96249 - RNA, 19 nt, Artificial Sequence
  Description of Artificial Sequence: Synthetic oligonucleotide
  Antisense strand to SEQ ID NO: 96168
ucaacccaacaauuguauc

SEQ ID NO: 96250 - RNA, 19 nt, Artificial Sequence
  Description of Artificial Sequence: Synthetic oligonucleotide
  Sense strand starting at position 19 of SEQ ID NO: 1212
uaaagugcuuaaucugaga

SEQ ID NO: 96251 - RNA, 19 nt, Artificial Sequence
  Description of Artificial Sequence: Synthetic oligonucleotide
  Antisense strand to SEQ ID NO: 96170
ucucagauuaagcacuuua

SEQ ID NO: 96252 - RNA, 19 nt, Artificial Sequence
  Description of Artificial Sequence: Synthetic oligonucleotide
  Sense strand starting at position 3875 of SEQ ID NO: 1213
auugguauaaaucgagaaa

SEQ ID NO: 96253 - RNA, 19 nt, Artificial Sequence
  Description of Artificial Sequence: Synthetic oligonucleotide
  Antisense strand to SEQ ID NO: 96172
uuucucgauuuauaccaau

SEQ ID NO: 96254 - RNA, 19 nt, Artificial Sequence
  Description of Artificial Sequence: Synthetic oligonucleotide
  Sense strand starting at position 3818 of SEQ ID NO: 1213
uuugaucuucccuggguuu

SEQ ID NO: 96255 - RNA, 19 nt, Artificial Sequence
  Description of Artificial Sequence: Synthetic oligonucleotide
  Antisense strand to SEQ ID NO: 96174
aaacccagggaagaucaaa

SEQ ID NO: 96256 - RNA, 19 nt, Artificial Sequence
  Description of Artificial Sequence: Synthetic oligonucleotide
  Sense strand starting at position 3403 of SEQ ID NO: 1213
caacuaguggugugauauu

SEQ ID NO: 96257 - RNA, 19 nt, Artificial Sequence
  Description of Artificial Sequence: Synthetic oligonucleotide
  Antisense strand to SEQ ID NO: 96176
aauaucacaccacuaguug

SEQ ID NO: 96258 - RNA, 19 nt, Artificial Sequence
  Description of Artificial Sequence: Synthetic oligonucleotide
  Sense strand starting at position 3356 of SEQ ID NO: 1213
gugucagauuugcugaucu

SEQ ID NO: 96259 - RNA, 19 nt, Artificial Sequence
  Description of Artificial Sequence: Synthetic oligonucleotide
  Antisense strand to SEQ ID NO: 96178
agaucagcaaaucugacac

SEQ ID NO: 96260 - RNA, 19 nt, Artificial Sequence
  Description of Artificial Sequence: Synthetic oligonucleotide
  Sense strand starting at position 3348 of SEQ ID NO: 1213
ucuaaucagugucagauuu

SEQ ID NO: 96261 - RNA, 19 nt, Artificial Sequence
  Description of Artificial Sequence: Synthetic oligonucleotide
  Antisense strand to SEQ ID NO: 96180
aaaucugacacugauuaga

SEQ ID NO: 96262 - RNA, 19 nt, Artificial Sequence
  Description of Artificial Sequence: Synthetic oligonucleotide
  Sense strand starting at position 3345 of SEQ ID NO: 1213
ugaucuaaucagugucaga

SEQ ID NO: 96263 - RNA, 19 nt, Artificial Sequence
  Description of Artificial Sequence: Synthetic oligonucleotide
  Antisense strand to SEQ ID NO: 96182
ucugacacugauuagauca

SEQ ID NO: 96264 - RNA, 19 nt, Artificial Sequence
  Description of Artificial Sequence: Synthetic oligonucleotide
  Sense strand starting at position 3338 of SEQ ID NO: 1213
guguaagugaucuaaucag

SEQ ID NO: 96265 - RNA, 19 nt, Artificial Sequence
  Description of Artificial Sequence: Synthetic oligonucleotide
  Antisense strand to SEQ ID NO: 96184
cugauuagaucacuuacac

SEQ ID NO: 96266 - RNA, 19 nt, Artificial Sequence
  Description of Artificial Sequence: Synthetic oligonucleotide
  Sense strand starting at position 3126 of SEQ ID NO: 1213
aggcauuggacgugaagaa

SEQ ID NO: 96267 - RNA, 19 nt, Artificial Sequence
  Description of Artificial Sequence: Synthetic oligonucleotide
  Antisense strand to SEQ ID NO: 96186
uucuucacguccaaugccu

SEQ ID NO: 96268 - RNA, 19 nt, Artificial Sequence
  Description of Artificial Sequence: Synthetic oligonucleotide
  Sense strand starting at position 3043 of SEQ ID NO: 1213
gagaaugauuguccagggu

SEQ ID NO: 96269 - RNA, 19 nt, Artificial Sequence
  Description of Artificial Sequence: Synthetic oligonucleotide
  Antisense strand to SEQ ID NO: 96188
acccuggacaaucauucuc

SEQ ID NO: 96270 - RNA, 19 nt, Artificial Sequence
  Description of Artificial Sequence: Synthetic oligonucleotide
  Sense strand starting at position 2947 of SEQ ID NO: 1213
acguuuacccagcaucuaa

SEQ ID NO: 96271 - RNA, 19 nt, Artificial Sequence
  Description of Artificial Sequence: Synthetic oligonucleotide
  Antisense strand to SEQ ID NO: 96190
uuagaugcuggguaaacgu

SEQ ID NO: 96272 - RNA, 19 nt, Artificial Sequence
  Description of Artificial Sequence: Synthetic oligonucleotide
  Sense strand starting at position 2921 of SEQ ID NO: 1213
ucuccaugucagcaaaugu

SEQ ID NO: 96273 - RNA, 19 nt, Artificial Sequence
  Description of Artificial Sequence: Synthetic oligonucleotide
  Antisense strand to SEQ ID NO: 96192
acauuugcugacauggaga

SEQ ID NO: 96274 - RNA, 19 nt, Artificial Sequence
  Description of Artificial Sequence: Synthetic oligonucleotide
  Sense strand starting at position 2895 of SEQ ID NO: 1213
agucuaaucugucuucuac

SEQ ID NO: 96275 - RNA, 19 nt, Artificial Sequence
  Description of Artificial Sequence: Synthetic oligonucleotide
  Antisense strand to SEQ ID NO: 96194
guagaagacagauuagacu

SEQ ID NO: 96276 - RNA, 19 nt, Artificial Sequence
  Description of Artificial Sequence: Synthetic oligonucleotide
  Sense strand starting at position 2879 of SEQ ID NO: 1213
ucuguaaaccaucggaagu

SEQ ID NO: 96277 - RNA, 19 nt, Artificial Sequence
  Description of Artificial Sequence: Synthetic oligonucleotide
  Antisense strand to SEQ ID NO: 96196
acuuccgaugguuuacaga

SEQ ID NO: 96278 - RNA, 19 nt, Artificial Sequence
  Description of Artificial Sequence: Synthetic oligonucleotide
  Sense strand starting at position 2868 of SEQ ID NO: 1213
auccauguguuucuguaaa

SEQ ID NO: 96279 - RNA, 19 nt, Artificial Sequence
  Description of Artificial Sequence: Synthetic oligonucleotide
  Antisense strand to SEQ ID NO: 96198
uuuacagaaacacauggau

SEQ ID NO: 96280 - RNA, 19 nt, Artificial Sequence
  Description of Artificial Sequence: Synthetic oligonucleotide
  Sense strand starting at position 2866 of SEQ ID NO: 1213
gaauccauguguuucugua

SEQ ID NO: 96281 - RNA, 19 nt, Artificial Sequence
  Description of Artificial Sequence: Synthetic oligonucleotide
  Antisense strand to SEQ ID NO: 96200
uacagaaacacauggauuc

SEQ ID NO: 96282 - RNA, 19 nt, Artificial Sequence
  Description of Artificial Sequence: Synthetic oligonucleotide
  Sense strand starting at position 2800 of SEQ ID NO: 1213
uuuggaguuauuugguugu

SEQ ID NO: 96283 - RNA, 19 nt, Artificial Sequence
  Description of Artificial Sequence: Synthetic oligonucleotide
  Antisense strand to SEQ ID NO: 96202
acaaccaaauaacuccaaa

SEQ ID NO: 96284 - RNA, 19 nt, Artificial Sequence
  Description of Artificial Sequence: Synthetic oligonucleotide
  Sense strand starting at position 2783 of SEQ ID NO: 1213
uaaauuaaggcgggauauu

SEQ ID NO: 96285 - RNA, 19 nt, Artificial Sequence
  Description of Artificial Sequence: Synthetic oligonucleotide
  Antisense strand to SEQ ID NO: 96204
aauaucccgccuuaauuua

SEQ ID NO: 96286 - RNA, 19 nt, Artificial Sequence
  Description of Artificial Sequence: Synthetic oligonucleotide
  Sense strand starting at position 2782 of SEQ ID NO: 1213
auaaauuaaggcgggauau

SEQ ID NO: 96287 - RNA, 19 nt, Artificial Sequence
  Description of Artificial Sequence: Synthetic oligonucleotide
  Antisense strand to SEQ ID NO: 96206
auaucccgccuuaauuuau

SEQ ID NO: 96288 - RNA, 19 nt, Artificial Sequence
  Description of Artificial Sequence: Synthetic oligonucleotide
  Sense strand starting at position 2659 of SEQ ID NO: 1213
agauuauucuaugcuaaga

SEQ ID NO: 96289 - RNA, 19 nt, Artificial Sequence
  Description of Artificial Sequence: Synthetic oligonucleotide
  Antisense strand to SEQ ID NO: 96208
ucuuagcauagaauaaucu

SEQ ID NO: 96290 - RNA, 19 nt, Artificial Sequence
  Description of Artificial Sequence: Synthetic oligonucleotide
  Sense strand starting at position 2560 of SEQ ID NO: 1213
gcuguauuggaaagucggu

SEQ ID NO: 96291 - RNA, 19 nt, Artificial Sequence
  Description of Artificial Sequence: Synthetic oligonucleotide
  Antisense strand to SEQ ID NO: 96210
accgacuuuccaauacagc

SEQ ID NO: 96292 - RNA, 19 nt, Artificial Sequence
  Description of Artificial Sequence: Synthetic oligonucleotide
  Sense strand starting at position 2556 of SEQ ID NO: 1213
ugaagcuguauuggaaagu

SEQ ID NO: 96293 - RNA, 19 nt, Artificial Sequence
  Description of Artificial Sequence: Synthetic oligonucleotide
  Antisense strand to SEQ ID NO: 96212
acuuuccaauacagcuuca

SEQ ID NO: 96294 - RNA, 19 nt, Artificial Sequence
  Description of Artificial Sequence: Synthetic oligonucleotide
  Sense strand starting at position 2540 of SEQ ID NO: 1213
guguuccgucuguuauuga

SEQ ID NO: 96295 - RNA, 19 nt, Artificial Sequence
  Description of Artificial Sequence: Synthetic oligonucleotide
  Antisense strand to SEQ ID NO: 96214
ucaauaacagacggaacac

SEQ ID NO: 96296 - RNA, 19 nt, Artificial Sequence
  Description of Artificial Sequence: Synthetic oligonucleotide
  Sense strand starting at position 2536 of SEQ ID NO: 1213
ucauguguuccgucuguua

SEQ ID NO: 96297 - RNA, 19 nt, Artificial Sequence
  Description of Artificial Sequence: Synthetic oligonucleotide
  Antisense strand to SEQ ID NO: 96216
uaacagacggaacacauga

SEQ ID NO: 96298 - RNA, 19 nt, Artificial Sequence
  Description of Artificial Sequence: Synthetic oligonucleotide
  Sense strand starting at position 2508 of SEQ ID NO: 1213
acuacuuggcauggagagu

SEQ ID NO: 96299 - RNA, 19 nt, Artificial Sequence
  Description of Artificial Sequence: Synthetic oligonucleotide
  Antisense strand to SEQ ID NO: 96218
acucuccaugccaaguagu

SEQ ID NO: 96300 - RNA, 19 nt, Artificial Sequence
  Description of Artificial Sequence: Synthetic oligonucleotide
  Sense strand starting at position 2472 of SEQ ID NO: 1213
agaaguacuuaucugagcu

SEQ ID NO: 96301 - RNA, 19 nt, Artificial Sequence
  Description of Artificial Sequence: Synthetic oligonucleotide
  Antisense strand to SEQ ID NO: 96220
agcucagauaaguacuucu

SEQ ID NO: 96302 - RNA, 19 nt, Artificial Sequence
  Description of Artificial Sequence: Synthetic oligonucleotide
  Sense strand starting at position 2260 of SEQ ID NO: 1213
gccguaaugcucucgcaag

SEQ ID NO: 96303 - RNA, 19 nt, Artificial Sequence
  Description of Artificial Sequence: Synthetic oligonucleotide
  Antisense strand to SEQ ID NO: 96222
cuugcgagagcauuacggc

SEQ ID NO: 96304 - RNA, 19 nt, Artificial Sequence
  Description of Artificial Sequence: Synthetic oligonucleotide
  Sense strand starting at position 2259 of SEQ ID NO: 1213
cgccguaaugcucucgcaa

SEQ ID NO: 96305 - RNA, 19 nt, Artificial Sequence
  Description of Artificial Sequence: Synthetic oligonucleotide
  Antisense strand to SEQ ID NO: 96224
uugcgagagcauuacggcg

SEQ ID NO: 96306 - RNA, 19 nt, Artificial Sequence
  Description of Artificial Sequence: Synthetic oligonucleotide
  Sense strand starting at position 2101 of SEQ ID NO: 1213
augugauugcgagcgcuuu

SEQ ID NO: 96307 - RNA, 19 nt, Artificial Sequence
  Description of Artificial Sequence: Synthetic oligonucleotide
  Antisense strand to SEQ ID NO: 96226
aaagcgcucgcaaucacau

SEQ ID NO: 96308 - RNA, 19 nt, Artificial Sequence
  Description of Artificial Sequence: Synthetic oligonucleotide
  Sense strand starting at position 1259 of SEQ ID NO: 1213
ggcgauucuggagaaguua

SEQ ID NO: 96309 - RNA, 19 nt, Artificial Sequence
  Description of Artificial Sequence: Synthetic oligonucleotide
  Antisense strand to SEQ ID NO: 96228
uaacuucuccagaaucgcc

SEQ ID NO: 96310 - RNA, 19 nt, Artificial Sequence
  Description of Artificial Sequence: Synthetic oligonucleotide
  Sense strand starting at position 1088 of SEQ ID NO: 1213
ggauuauaccgguacccaa

SEQ ID NO: 96311 - RNA, 19 nt, Artificial Sequence
  Description of Artificial Sequence: Synthetic oligonucleotide
  Antisense strand to SEQ ID NO: 96230
uuggguaccgguauaaucc

SEQ ID NO: 96312 - RNA, 19 nt, Artificial Sequence
  Description of Artificial Sequence: Synthetic oligonucleotide
  Sense strand starting at position 1077 of SEQ ID NO: 1213
aagcuagaagcggauuaua

SEQ ID NO: 96313 - RNA, 19 nt, Artificial Sequence
  Description of Artificial Sequence: Synthetic oligonucleotide
  Antisense strand to SEQ ID NO: 96232
uauaauccgcuucuagcuu

SEQ ID NO: 96314 - RNA, 19 nt, Artificial Sequence
  Description of Artificial Sequence: Synthetic oligonucleotide
  Sense strand starting at position 643 of SEQ ID NO: 1213
cccacauuccgcuaggacu

SEQ ID NO: 96315 - RNA, 19 nt, Artificial Sequence
  Description of Artificial Sequence: Synthetic oligonucleotide
  Antisense strand to SEQ ID NO: 96234
aguccuagcggaauguggg

SEQ ID NO: 96316 - RNA, 19 nt, Artificial Sequence
  Description of Artificial Sequence: Synthetic oligonucleotide
  Sense strand starting at position 431 of SEQ ID NO: 1213
cgguacaaaccacguaaua

SEQ ID NO: 96317 - RNA, 19 nt, Artificial Sequence
  Description of Artificial Sequence: Synthetic oligonucleotide
  Antisense strand to SEQ ID NO: 96236
uauuacgugguuuguaccg

SEQ ID NO: 96318 - RNA, 19 nt, Artificial Sequence
  Description of Artificial Sequence: Synthetic oligonucleotide
  Sense strand starting at position 410 of SEQ ID NO: 1213
uguccagacucuuccaaag

SEQ ID NO: 96319 - RNA, 19 nt, Artificial Sequence
  Description of Artificial Sequence: Synthetic oligonucleotide
  Antisense strand to SEQ ID NO: 96238
cuuuggaagagucuggaca

SEQ ID NO: 96320 - RNA, 19 nt, Artificial Sequence
  Description of Artificial Sequence: Synthetic oligonucleotide
  Sense strand starting at position 368 of SEQ ID NO: 1213
guagacagcccucaucauu

SEQ ID NO: 96321 - RNA, 19 nt, Artificial Sequence
  Description of Artificial Sequence: Synthetic oligonucleotide
  Antisense strand to SEQ ID NO: 96240
aaugaugagggcugucuac

SEQ ID NO: 96322 - RNA, 19 nt, Artificial Sequence
  Description of Artificial Sequence: Synthetic oligonucleotide
  Sense strand starting at position 266 of SEQ ID NO: 1213
ucccacaggucuguaagaa

SEQ ID NO: 96323 - RNA, 19 nt, Artificial Sequence
  Description of Artificial Sequence: Synthetic oligonucleotide
  Antisense strand to SEQ ID NO: 96242
uucuuacagaccuguggga

SEQ ID NO: 96324 - RNA, 19 nt, Artificial Sequence
  Description of Artificial Sequence: Synthetic oligonucleotide
  Sense strand starting at position 265 of SEQ ID NO: 1213
uucccacaggucuguaaga

SEQ ID NO: 96325 - RNA, 19 nt, Artificial Sequence
  Description of Artificial Sequence: Synthetic oligonucleotide
  Antisense strand to SEQ ID NO: 96244
ucuuacagaccugugggaa

SEQ ID NO: 96326 - RNA, 19 nt, Artificial Sequence
  Description of Artificial Sequence: Synthetic oligonucleotide
  Sense strand starting at position 217 of SEQ ID NO: 1213
aauaaaugcugccugagga

SEQ ID NO: 96327 - RNA, 19 nt, Artificial Sequence
  Description of Artificial Sequence: Synthetic oligonucleotide
  Antisense strand to SEQ ID NO: 96246
uccucaggcagcauuuauu

SEQ ID NO: 96328 - RNA, 19 nt, Artificial Sequence
  Description of Artificial Sequence: Synthetic oligonucleotide
  Sense strand starting at position 180 of SEQ ID NO: 1213
gacaguagguguuugguca

SEQ ID NO: 96329 - RNA, 19 nt, Artificial Sequence
  Description of Artificial Sequence: Synthetic oligonucleotide
  Antisense strand to SEQ ID NO: 96248
ugaccaaacaccuacuguc

SEQ ID NO: 96330 - RNA, 19 nt, Artificial Sequence
  Description of Artificial Sequence: Synthetic oligonucleotide
  Sense strand starting at position 122 of SEQ ID NO: 1213
ggauuuaguuaguuggugu

SEQ ID NO: 96331 - RNA, 19 nt, Artificial Sequence
  Description of Artificial Sequence: Synthetic oligonucleotide
  Antisense strand to SEQ ID NO: 96250
acaccaacuaacuaaaucc

SEQ ID NO: 96332 - RNA, 19 nt, Artificial Sequence
  Description of Artificial Sequence: Synthetic oligonucleotide
  Sense strand starting at position 3950 of SEQ ID NO: 1214
gagaaugauuguccagggu

SEQ ID NO: 96333 - RNA, 19 nt, Artificial Sequence
  Description of Artificial Sequence: Synthetic oligonucleotide
  Antisense strand to SEQ ID NO: 96252
acccuggacaaucauucuc

SEQ ID NO: 96334 - RNA, 19 nt, Artificial Sequence
  Description of Artificial Sequence: Synthetic oligonucleotide
  Sense strand starting at position 3854 of SEQ ID NO: 1214
acguuuacccagcaucuaa

SEQ ID NO: 96335 - RNA, 19 nt, Artificial Sequence
  Description of Artificial Sequence: Synthetic oligonucleotide
  Antisense strand to SEQ ID NO: 96254
uuagaugcuggguaaacgu

SEQ ID NO: 96336 - RNA, 19 nt, Artificial Sequence
  Description of Artificial Sequence: Synthetic oligonucleotide
  Sense strand starting at position 3828 of SEQ ID NO: 1214
ucuccaugucagcaaaugu

SEQ ID NO: 96337 - RNA, 19 nt, Artificial Sequence
  Description of Artificial Sequence: Synthetic oligonucleotide
  Antisense strand to SEQ ID NO: 96256
acauuugcugacauggaga

SEQ ID NO: 96338 - RNA, 19 nt, Artificial Sequence
  Description of Artificial Sequence: Synthetic oligonucleotide
  Sense strand starting at position 3802 of SEQ ID NO: 1214
agucuaaucugucuucuac

SEQ ID NO: 96339 - RNA, 19 nt, Artificial Sequence
  Description of Artificial Sequence: Synthetic oligonucleotide
  Antisense strand to SEQ ID NO: 96258
guagaagacagauuagacu

SEQ ID NO: 96340 - RNA, 19 nt, Artificial Sequence
  Description of Artificial Sequence: Synthetic oligonucleotide
  Sense strand starting at position 3786 of SEQ ID NO: 1214
ucuguaaaccaucggaagu

SEQ ID NO: 96341 - RNA, 19 nt, Artificial Sequence
  Description of Artificial Sequence: Synthetic oligonucleotide
  Antisense strand to SEQ ID NO: 96260
acuuccgaugguuuacaga

SEQ ID NO: 96342 - RNA, 19 nt, Artificial Sequence
  Description of Artificial Sequence: Synthetic oligonucleotide
  Sense strand starting at position 3775 of SEQ ID NO: 1214
auccauguguuucuguaaa

SEQ ID NO: 96343 - RNA, 19 nt, Artificial Sequence
  Description of Artificial Sequence: Synthetic oligonucleotide
  Antisense strand to SEQ ID NO: 96262
uuuacagaaacacauggau

SEQ ID NO: 96344 - RNA, 19 nt, Artificial Sequence
  Description of Artificial Sequence: Synthetic oligonucleotide
  Sense strand starting at position 3773 of SEQ ID NO: 1214
gaauccauguguuucugua

SEQ ID NO: 96345 - RNA, 19 nt, Artificial Sequence
  Description of Artificial Sequence: Synthetic oligonucleotide
  Antisense strand to SEQ ID NO: 96264
uacagaaacacauggauuc

SEQ ID NO: 96346 - RNA, 19 nt, Artificial Sequence
  Description of Artificial Sequence: Synthetic oligonucleotide
  Sense strand starting at position 3707 of SEQ ID NO: 1214
uuuggaguuauuugguugu

SEQ ID NO: 96347 - RNA, 19 nt, Artificial Sequence
  Description of Artificial Sequence: Synthetic oligonucleotide
  Antisense strand to SEQ ID NO: 96266
acaaccaaauaacuccaaa

SEQ ID NO: 96348 - RNA, 19 nt, Artificial Sequence
  Description of Artificial Sequence: Synthetic oligonucleotide
  Sense strand starting at position 3690 of SEQ ID NO: 1214
uaaauuaaggcgggauauu

SEQ ID NO: 96349 - RNA, 19 nt, Artificial Sequence
  Description of Artificial Sequence: Synthetic oligonucleotide
  Antisense strand to SEQ ID NO: 96268
aauaucccgccuuaauuua

SEQ ID NO: 96350 - RNA, 19 nt, Artificial Sequence
  Description of Artificial Sequence: Synthetic oligonucleotide
  Sense strand starting at position 3689 of SEQ ID NO: 1214
auaaauuaaggcgggauau

SEQ ID NO: 96351 - RNA, 19 nt, Artificial Sequence
  Description of Artificial Sequence: Synthetic oligonucleotide
  Antisense strand to SEQ ID NO: 96270
auaucccgccuuaauuuau

SEQ ID NO: 96352 - RNA, 19 nt, Artificial Sequence
  Description of Artificial Sequence: Synthetic oligonucleotide
  Sense strand starting at position 3566 of SEQ ID NO: 1214
agauuauucuaugcuaaga

SEQ ID NO: 96353 - RNA, 19 nt, Artificial Sequence
  Description of Artificial Sequence: Synthetic oligonucleotide
  Antisense strand to SEQ ID NO: 96272
ucuuagcauagaauaaucu

SEQ ID NO: 96354 - RNA, 19 nt, Artificial Sequence
  Description of Artificial Sequence: Synthetic oligonucleotide
  Sense strand starting at position 3467 of SEQ ID NO: 1214
gcuguauuggaaagucggu

SEQ ID NO: 96355 - RNA, 19 nt, Artificial Sequence
  Description of Artificial Sequence: Synthetic oligonucleotide
  Antisense strand to SEQ ID NO: 96274
accgacuuuccaauacagc

SEQ ID NO: 96356 - RNA, 19 nt, Artificial Sequence
  Description of Artificial Sequence: Synthetic oligonucleotide
  Sense strand starting at position 3463 of SEQ ID NO: 1214
ugaagcuguauuggaaagu

SEQ ID NO: 96357 - RNA, 19 nt, Artificial Sequence
  Description of Artificial Sequence: Synthetic oligonucleotide
  Antisense strand to SEQ ID NO: 96276
acuuuccaauacagcuuca

SEQ ID NO: 96358 - RNA, 19 nt, Artificial Sequence
  Description of Artificial Sequence: Synthetic oligonucleotide
  Sense strand starting at position 3447 of SEQ ID NO: 1214
guguuccgucuguuauuga

SEQ ID NO: 96359 - RNA, 19 nt, Artificial Sequence
  Description of Artificial Sequence: Synthetic oligonucleotide
  Antisense strand to SEQ ID NO: 96278
ucaauaacagacggaacac

SEQ ID NO: 96360 - RNA, 19 nt, Artificial Sequence
  Description of Artificial Sequence: Synthetic oligonucleotide
  Sense strand starting at position 3443 of SEQ ID NO: 1214
ucauguguuccgucuguua

SEQ ID NO: 96361 - RNA, 19 nt, Artificial Sequence
  Description of Artificial Sequence: Synthetic oligonucleotide
  Antisense strand to SEQ ID NO: 96280
uaacagacggaacacauga

SEQ ID NO: 96362 - RNA, 19 nt, Artificial Sequence
  Description of Artificial Sequence: Synthetic oligonucleotide
  Sense strand starting at position 3415 of SEQ ID NO: 1214
acuacuuggcauggagagu

SEQ ID NO: 96363 - RNA, 19 nt, Artificial Sequence
  Description of Artificial Sequence: Synthetic oligonucleotide
  Antisense strand to SEQ ID NO: 96282
acucuccaugccaaguagu

SEQ ID NO: 96364 - RNA, 19 nt, Artificial Sequence
  Description of Artificial Sequence: Synthetic oligonucleotide
  Sense strand starting at position 3379 of SEQ ID NO: 1214
agaaguacuuaucugagcu

SEQ ID NO: 96365 - RNA, 19 nt, Artificial Sequence
  Description of Artificial Sequence: Synthetic oligonucleotide
  Antisense strand to SEQ ID NO: 96284
agcucagauaaguacuucu

SEQ ID NO: 96366 - RNA, 19 nt, Artificial Sequence
  Description of Artificial Sequence: Synthetic oligonucleotide
  Sense strand starting at position 3167 of SEQ ID NO: 1214
gccguaaugcucucgcaag

SEQ ID NO: 96367 - RNA, 19 nt, Artificial Sequence
  Description of Artificial Sequence: Synthetic oligonucleotide
  Antisense strand to SEQ ID NO: 96286
cuugcgagagcauuacggc

SEQ ID NO: 96368 - RNA, 19 nt, Artificial Sequence
  Description of Artificial Sequence: Synthetic oligonucleotide
  Sense strand starting at position 3166 of SEQ ID NO: 1214
cgccguaaugcucucgcaa

SEQ ID NO: 96369 - RNA, 19 nt, Artificial Sequence
  Description of Artificial Sequence: Synthetic oligonucleotide
  Antisense strand to SEQ ID NO: 96288
uugcgagagcauuacggcg

SEQ ID NO: 96370 - RNA, 19 nt, Artificial Sequence
  Description of Artificial Sequence: Synthetic oligonucleotide
  Sense strand starting at position 3008 of SEQ ID NO: 1214
augugauugcgagcgcuuu

SEQ ID NO: 96371 - RNA, 19 nt, Artificial Sequence
  Description of Artificial Sequence: Synthetic oligonucleotide
  Antisense strand to SEQ ID NO: 96290
aaagcgcucgcaaucacau

SEQ ID NO: 96372 - RNA, 19 nt, Artificial Sequence
  Description of Artificial Sequence: Synthetic oligonucleotide
  Sense strand starting at position 2166 of SEQ ID NO: 1214
ggcgauucuggagaaguua

SEQ ID NO: 96373 - RNA, 19 nt, Artificial Sequence
  Description of Artificial Sequence: Synthetic oligonucleotide
  Antisense strand to SEQ ID NO: 96292
uaacuucuccagaaucgcc

SEQ ID NO: 96374 - RNA, 19 nt, Artificial Sequence
  Description of Artificial Sequence: Synthetic oligonucleotide
  Sense strand starting at position 1995 of SEQ ID NO: 1214
ggauuauaccgguacccaa

SEQ ID NO: 96375 - RNA, 19 nt, Artificial Sequence
  Description of Artificial Sequence: Synthetic oligonucleotide
  Antisense strand to SEQ ID NO: 96294
uuggguaccgguauaaucc

SEQ ID NO: 96376 - RNA, 19 nt, Artificial Sequence
  Description of Artificial Sequence: Synthetic oligonucleotide
  Sense strand starting at position 1984 of SEQ ID NO: 1214
aagcuagaagcggauuaua

SEQ ID NO: 96377 - RNA, 19 nt, Artificial Sequence
  Description of Artificial Sequence: Synthetic oligonucleotide
  Antisense strand to SEQ ID NO: 96296
uauaauccgcuucuagcuu

SEQ ID NO: 96378 - RNA, 19 nt, Artificial Sequence
  Description of Artificial Sequence: Synthetic oligonucleotide
  Sense strand starting at position 1550 of SEQ ID NO: 1214
cccacauuccgcuaggacu

SEQ ID NO: 96379 - RNA, 19 nt, Artificial Sequence
  Description of Artificial Sequence: Synthetic oligonucleotide
  Antisense strand to SEQ ID NO: 96298
aguccuagcggaauguggg

SEQ ID NO: 96380 - RNA, 19 nt, Artificial Sequence
  Description of Artificial Sequence: Synthetic oligonucleotide
  Sense strand starting at position 1338 of SEQ ID NO: 1214
cgguacaaaccacguaaua

SEQ ID NO: 96381 - RNA, 19 nt, Artificial Sequence
  Description of Artificial Sequence: Synthetic oligonucleotide
  Antisense strand to SEQ ID NO: 96300
uauuacgugguuuguaccg

SEQ ID NO: 96382 - RNA, 19 nt, Artificial Sequence
  Description of Artificial Sequence: Synthetic oligonucleotide
  Sense strand starting at position 1317 of SEQ ID NO: 1214
uguccagacucuuccaaag

SEQ ID NO: 96383 - RNA, 19 nt, Artificial Sequence
  Description of Artificial Sequence: Synthetic oligonucleotide
  Antisense strand to SEQ ID NO: 96302
cuuuggaagagucuggaca

SEQ ID NO: 96384 - RNA, 19 nt, Artificial Sequence
  Description of Artificial Sequence: Synthetic oligonucleotide
  Sense strand starting at position 1275 of SEQ ID NO: 1214
guagacagcccucaucauu

SEQ ID NO: 96385 - RNA, 19 nt, Artificial Sequence
  Description of Artificial Sequence: Synthetic oligonucleotide
  Antisense strand to SEQ ID NO: 96304
aaugaugagggcugucuac

SEQ ID NO: 96386 - RNA, 19 nt, Artificial Sequence
  Description of Artificial Sequence: Synthetic oligonucleotide
  Sense strand starting at position 1173 of SEQ ID NO: 1214
ucccacaggucuguaagaa

SEQ ID NO: 96387 - RNA, 19 nt, Artificial Sequence
  Description of Artificial Sequence: Synthetic oligonucleotide
  Antisense strand to SEQ ID NO: 96306
uucuuacagaccuguggga

SEQ ID NO: 96388 - RNA, 19 nt, Artificial Sequence
  Description of Artificial Sequence: Synthetic oligonucleotide
  Sense strand starting at position 1172 of SEQ ID NO: 1214
uucccacaggucuguaaga

SEQ ID NO: 96389 - RNA, 19 nt, Artificial Sequence
  Description of Artificial Sequence: Synthetic oligonucleotide
  Antisense strand to SEQ ID NO: 96308
ucuuacagaccugugggaa

SEQ ID NO: 96390 - RNA, 19 nt, Artificial Sequence
  Description of Artificial Sequence: Synthetic oligonucleotide
  Sense strand starting at position 1124 of SEQ ID NO: 1214
aauaaaugcugccugagga

SEQ ID NO: 96391 - RNA, 19 nt, Artificial Sequence
  Description of Artificial Sequence: Synthetic oligonucleotide
  Antisense strand to SEQ ID NO: 96310
uccucaggcagcauuuauu

SEQ ID NO: 96392 - RNA, 19 nt, Artificial Sequence
  Description of Artificial Sequence: Synthetic oligonucleotide
  Sense strand starting at position 1087 of SEQ ID NO: 1214
gacaguagguguuugguca

SEQ ID NO: 96393 - RNA, 19 nt, Artificial Sequence
  Description of Artificial Sequence: Synthetic oligonucleotide
  Antisense strand to SEQ ID NO: 96312
ugaccaaacaccuacuguc

SEQ ID NO: 96394 - RNA, 19 nt, Artificial Sequence
  Description of Artificial Sequence: Synthetic oligonucleotide
  Sense strand starting at position 1029 of SEQ ID NO: 1214
ggauuuaguuaguuggugu

SEQ ID NO: 96395 - RNA, 19 nt, Artificial Sequence
  Description of Artificial Sequence: Synthetic oligonucleotide
  Antisense strand to SEQ ID NO: 96314
acaccaacuaacuaaaucc

SEQ ID NO: 96396 - RNA, 19 nt, Artificial Sequence
  Description of Artificial Sequence: Synthetic oligonucleotide
  Sense strand starting at position 880 of SEQ ID NO: 1214
ggcuccauagauuaccuaa

SEQ ID NO: 96397 - RNA, 19 nt, Artificial Sequence
  Description of Artificial Sequence: Synthetic oligonucleotide
  Antisense strand to SEQ ID NO: 96316
uuagguaaucuauggagcc

SEQ ID NO: 96398 - RNA, 19 nt, Artificial Sequence
  Description of Artificial Sequence: Synthetic oligonucleotide
  Sense strand starting at position 725 of SEQ ID NO: 1214
gggucaucuaaggacaguu

SEQ ID NO: 96399 - RNA, 19 nt, Artificial Sequence
  Description of Artificial Sequence: Synthetic oligonucleotide
  Antisense strand to SEQ ID NO: 96318
aacuguccuuagaugaccc

SEQ ID NO: 96400 - RNA, 19 nt, Artificial Sequence
  Description of Artificial Sequence: Synthetic oligonucleotide
  Sense strand starting at position 670 of SEQ ID NO: 1214
ggcucaauacuuuaagugu

SEQ ID NO: 96401 - RNA, 19 nt, Artificial Sequence
  Description of Artificial Sequence: Synthetic oligonucleotide
  Antisense strand to SEQ ID NO: 96320
acacuuaaaguauugagcc

SEQ ID NO: 96402 - RNA, 19 nt, Artificial Sequence
  Description of Artificial Sequence: Synthetic oligonucleotide
  Sense strand starting at position 660 of SEQ ID NO: 1214
auaugaauauggcucaaua

SEQ ID NO: 96403 - RNA, 19 nt, Artificial Sequence
  Description of Artificial Sequence: Synthetic oligonucleotide
  Antisense strand to SEQ ID NO: 96322
uauugagccauauucauau

SEQ ID NO: 96404 - RNA, 19 nt, Artificial Sequence
  Description of Artificial Sequence: Synthetic oligonucleotide
  Sense strand starting at position 572 of SEQ ID NO: 1214
uccauuaaacuuuagcgau

SEQ ID NO: 96405 - RNA, 19 nt, Artificial Sequence
  Description of Artificial Sequence: Synthetic oligonucleotide
  Antisense strand to SEQ ID NO: 96324
aucgcuaaaguuuaaugga

SEQ ID NO: 96406 - RNA, 19 nt, Artificial Sequence
  Description of Artificial Sequence: Synthetic oligonucleotide
  Sense strand starting at position 274 of SEQ ID NO: 1214
uguuucuuagaaugucaaa

SEQ ID NO: 96407 - RNA, 19 nt, Artificial Sequence
  Description of Artificial Sequence: Synthetic oligonucleotide
  Antisense strand to SEQ ID NO: 96326
uuugacauucuaagaaaca

SEQ ID NO: 96408 - RNA, 19 nt, Artificial Sequence
  Description of Artificial Sequence: Synthetic oligonucleotide
  Sense strand starting at position 176 of SEQ ID NO: 1214
cugugauuacuacgagaau

SEQ ID NO: 96409 - RNA, 19 nt, Artificial Sequence
  Description of Artificial Sequence: Synthetic oligonucleotide
  Antisense strand to SEQ ID NO: 96328
auucucguaguaaucacag

SEQ ID NO: 96410 - RNA, 19 nt, Artificial Sequence
  Description of Artificial Sequence: Synthetic oligonucleotide
  Sense strand starting at position 150 of SEQ ID NO: 1214
ucaugugugccugucuuau

SEQ ID NO: 96411 - RNA, 19 nt, Artificial Sequence
  Description of Artificial Sequence: Synthetic oligonucleotide
  Antisense strand to SEQ ID NO: 96330
auaagacaggcacacauga

SEQ ID NO: 96412 - RNA, 19 nt, Artificial Sequence
  Description of Artificial Sequence: Synthetic oligonucleotide
  Sense strand starting at position 427 of SEQ ID NO: 1215
ucggaaacuuacccaucuu

SEQ ID NO: 96413 - RNA, 19 nt, Artificial Sequence
  Description of Artificial Sequence: Synthetic oligonucleotide
  Antisense strand to SEQ ID NO: 96332
aagauggguaaguuuccga

SEQ ID NO: 96414 - RNA, 19 nt, Artificial Sequence
  Description of Artificial Sequence: Synthetic oligonucleotide
  Sense strand starting at position 441 of SEQ ID NO: 1215
aucuuaauugauggccaau

SEQ ID NO: 96415 - RNA, 19 nt, Artificial Sequence
  Description of Artificial Sequence: Synthetic oligonucleotide
  Antisense strand to SEQ ID NO: 96334
auuggccaucaauuaagau

SEQ ID NO: 96416 - RNA, 19 nt, Artificial Sequence
  Description of Artificial Sequence: Synthetic oligonucleotide
  Sense strand starting at position 635 of SEQ ID NO: 1215
ugcaguaaccuccaaagaa

SEQ ID NO: 96417 - RNA, 19 nt, Artificial Sequence
  Description of Artificial Sequence: Synthetic oligonucleotide
  Antisense strand to SEQ ID NO: 96336
uucuuuggagguuacugca

SEQ ID NO: 96418 - RNA, 19 nt, Artificial Sequence
  Description of Artificial Sequence: Synthetic oligonucleotide
  Sense strand starting at position 759 of SEQ ID NO: 1215
cuuuguuucccucaagagu

SEQ ID NO: 96419 - RNA, 19 nt, Artificial Sequence
  Description of Artificial Sequence: Synthetic oligonucleotide
  Antisense strand to SEQ ID NO: 96338
acucuugagggaaacaaag

SEQ ID NO: 96420 - RNA, 19 nt, Artificial Sequence
  Description of Artificial Sequence: Synthetic oligonucleotide
  Sense strand starting at position 762 of SEQ ID NO: 1215
uguuucccucaagaguaaa

SEQ ID NO: 96421 - RNA, 19 nt, Artificial Sequence
  Description of Artificial Sequence: Synthetic oligonucleotide
  Antisense strand to SEQ ID NO: 96340
uuuacucuugagggaaaca

SEQ ID NO: 96422 - RNA, 19 nt, Artificial Sequence
  Description of Artificial Sequence: Synthetic oligonucleotide
  Sense strand starting at position 937 of SEQ ID NO: 1215
agaguaaucuaaucugcca

SEQ ID NO: 96423 - RNA, 19 nt, Artificial Sequence
  Description of Artificial Sequence: Synthetic oligonucleotide
  Antisense strand to SEQ ID NO: 96342
uggcagauuagauuacucu

SEQ ID NO: 96424 - RNA, 19 nt, Artificial Sequence
  Description of Artificial Sequence: Synthetic oligonucleotide
  Sense strand starting at position 975 of SEQ ID NO: 1215
cuauuagaacacgauugua

SEQ ID NO: 96425 - RNA, 19 nt, Artificial Sequence
  Description of Artificial Sequence: Synthetic oligonucleotide
  Antisense strand to SEQ ID NO: 96344
uacaaucguguucuaauag

SEQ ID NO: 96426 - RNA, 19 nt, Artificial Sequence
  Description of Artificial Sequence: Synthetic oligonucleotide
  Sense strand starting at position 978 of SEQ ID NO: 1215
uuagaacacgauuguauaa

SEQ ID NO: 96427 - RNA, 19 nt, Artificial Sequence
  Description of Artificial Sequence: Synthetic oligonucleotide
  Antisense strand to SEQ ID NO: 96346
uuauacaaucguguucuaa

SEQ ID NO: 96428 - RNA, 19 nt, Artificial Sequence
  Description of Artificial Sequence: Synthetic oligonucleotide
  Sense strand starting at position 991 of SEQ ID NO: 1215
guauaacaagucugagaag

SEQ ID NO: 96429 - RNA, 19 nt, Artificial Sequence
  Description of Artificial Sequence: Synthetic oligonucleotide
  Antisense strand to SEQ ID NO: 96348
cuucucagacuuguuauac

SEQ ID NO: 96430 - RNA, 19 nt, Artificial Sequence
  Description of Artificial Sequence: Synthetic oligonucleotide
  Sense strand starting at position 1019 of SEQ ID NO: 1215
guaaauuuaugacaagagu

SEQ ID NO: 96431 - RNA, 19 nt, Artificial Sequence
  Description of Artificial Sequence: Synthetic oligonucleotide
  Antisense strand to SEQ ID NO: 96350
acucuugucauaaauuuac

SEQ ID NO: 96432 - RNA, 19 nt, Artificial Sequence
  Description of Artificial Sequence: Synthetic oligonucleotide
  Sense strand starting at position 1062 of SEQ ID NO: 1215
accuaaugaagacguugau

SEQ ID NO: 96433 - RNA, 19 nt, Artificial Sequence
  Description of Artificial Sequence: Synthetic oligonucleotide
  Antisense strand to SEQ ID NO: 96352
aucaacgucuucauuaggu

SEQ ID NO: 96434 - RNA, 19 nt, Artificial Sequence
  Description of Artificial Sequence: Synthetic oligonucleotide
  Sense strand starting at position 1065 of SEQ ID NO: 1215
uaaugaagacguugauaca

SEQ ID NO: 96435 - RNA, 19 nt, Artificial Sequence
  Description of Artificial Sequence: Synthetic oligonucleotide
  Antisense strand to SEQ ID NO: 96354
uguaucaacgucuucauua

SEQ ID NO: 96436 - RNA, 19 nt, Artificial Sequence
  Description of Artificial Sequence: Synthetic oligonucleotide
  Sense strand starting at position 1127 of SEQ ID NO: 1215
aaguucuggguuugggauu

SEQ ID NO: 96437 - RNA, 19 nt, Artificial Sequence
  Description of Artificial Sequence: Synthetic oligonucleotide
  Antisense strand to SEQ ID NO: 96356
aaucccaaacccagaacuu

SEQ ID NO: 96438 - RNA, 19 nt, Artificial Sequence
  Description of Artificial Sequence: Synthetic oligonucleotide
  Sense strand starting at position 1133 of SEQ ID NO: 1215
uggguuugggauugaaaua

SEQ ID NO: 96439 - RNA, 19 nt, Artificial Sequence
  Description of Artificial Sequence: Synthetic oligonucleotide
  Antisense strand to SEQ ID NO: 96358
uauuucaaucccaaaccca

SEQ ID NO: 96440 - RNA, 19 nt, Artificial Sequence
  Description of Artificial Sequence: Synthetic oligonucleotide
  Sense strand starting at position 1181 of SEQ ID NO: 1215
uugugauaccuugacuaac

SEQ ID NO: 96441 - RNA, 19 nt, Artificial Sequence
  Description of Artificial Sequence: Synthetic oligonucleotide
  Antisense strand to SEQ ID NO: 96360
guuagucaagguaucacaa

SEQ ID NO: 96442 - RNA, 19 nt, Artificial Sequence
  Description of Artificial Sequence: Synthetic oligonucleotide
  Sense strand starting at position 1183 of SEQ ID NO: 1215
gugauaccuugacuaacuc

SEQ ID NO: 96443 - RNA, 19 nt, Artificial Sequence
  Description of Artificial Sequence: Synthetic oligonucleotide
  Antisense strand to SEQ ID NO: 96362
gaguuagucaagguaucac

SEQ ID NO: 96444 - RNA, 19 nt, Artificial Sequence
  Description of Artificial Sequence: Synthetic oligonucleotide
  Sense strand starting at position 1320 of SEQ ID NO: 1215
gcugacuuauuccuaagag

SEQ ID NO: 96445 - RNA, 19 nt, Artificial Sequence
  Description of Artificial Sequence: Synthetic oligonucleotide
  Antisense strand to SEQ ID NO: 96364
cucuuaggaauaagucagc

SEQ ID NO: 96446 - RNA, 19 nt, Artificial Sequence
  Description of Artificial Sequence: Synthetic oligonucleotide
  Sense strand starting at position 1332 of SEQ ID NO: 1215
cuaagaguguuauugaaca

SEQ ID NO: 96447 - RNA, 19 nt, Artificial Sequence
  Description of Artificial Sequence: Synthetic oligonucleotide
  Antisense strand to SEQ ID NO: 96366
uguucaauaacacucuuag

SEQ ID NO: 96448 - RNA, 19 nt, Artificial Sequence
  Description of Artificial Sequence: Synthetic oligonucleotide
  Sense strand starting at position 1337 of SEQ ID NO: 1215
aguguuauugaacauucua

SEQ ID NO: 96449 - RNA, 19 nt, Artificial Sequence
  Description of Artificial Sequence: Synthetic oligonucleotide
  Antisense strand to SEQ ID NO: 96368
uagaauguucaauaacacu

SEQ ID NO: 96450 - RNA, 19 nt, Artificial Sequence
  Description of Artificial Sequence: Synthetic oligonucleotide
  Sense strand starting at position 1583 of SEQ ID NO: 1215
uguaucaugacccaggguu

SEQ ID NO: 96451 - RNA, 19 nt, Artificial Sequence
  Description of Artificial Sequence: Synthetic oligonucleotide
  Antisense strand to SEQ ID NO: 96370
aacccugggucaugauaca

SEQ ID NO: 96452 - RNA, 19 nt, Artificial Sequence
  Description of Artificial Sequence: Synthetic oligonucleotide
  Sense strand starting at position 1670 of SEQ ID NO: 1215
ggaacugcuccaggcugaa

SEQ ID NO: 96453 - RNA, 19 nt, Artificial Sequence
  Description of Artificial Sequence: Synthetic oligonucleotide
  Antisense strand to SEQ ID NO: 96372
uucagccuggagcaguucc

SEQ ID NO: 96454 - RNA, 19 nt, Artificial Sequence
  Description of Artificial Sequence: Synthetic oligonucleotide
  Sense strand starting at position 1743 of SEQ ID NO: 1215
uguaguuucgccuuauccu

SEQ ID NO: 96455 - RNA, 19 nt, Artificial Sequence
  Description of Artificial Sequence: Synthetic oligonucleotide
  Antisense strand to SEQ ID NO: 96374
aggauaaggcgaaacuaca

SEQ ID NO: 96456 - RNA, 19 nt, Artificial Sequence
  Description of Artificial Sequence: Synthetic oligonucleotide
  Sense strand starting at position 1829 of SEQ ID NO: 1215
cccuuaugaguuggagaca

SEQ ID NO: 96457 - RNA, 19 nt, Artificial Sequence
  Description of Artificial Sequence: Synthetic oligonucleotide
  Antisense strand to SEQ ID NO: 96376
ugucuccaacucauaaggg

SEQ ID NO: 96458 - RNA, 19 nt, Artificial Sequence
  Description of Artificial Sequence: Synthetic oligonucleotide
  Sense strand starting at position 1904 of SEQ ID NO: 1215
accguugcuagagaaacaa

SEQ ID NO: 96459 - RNA, 19 nt, Artificial Sequence
  Description of Artificial Sequence: Synthetic oligonucleotide
  Antisense strand to SEQ ID NO: 96378
uuguuucucuagcaacggu

SEQ ID NO: 96460 - RNA, 19 nt, Artificial Sequence
  Description of Artificial Sequence: Synthetic oligonucleotide
  Sense strand starting at position 2297 of SEQ ID NO: 1215
aggaguagcuagcuaauaa

SEQ ID NO: 96461 - RNA, 19 nt, Artificial Sequence
  Description of Artificial Sequence: Synthetic oligonucleotide
  Antisense strand to SEQ ID NO: 96380
uuauuagcuagcuacuccu

SEQ ID NO: 96462 - RNA, 19 nt, Artificial Sequence
  Description of Artificial Sequence: Synthetic oligonucleotide
  Sense strand starting at position 2298 of SEQ ID NO: 1215
ggaguagcuagcuaauaau

SEQ ID NO: 96463 - RNA, 19 nt, Artificial Sequence
  Description of Artificial Sequence: Synthetic oligonucleotide
  Antisense strand to SEQ ID NO: 96382
auuauuagcuagcuacucc

SEQ ID NO: 96464 - RNA, 19 nt, Artificial Sequence
  Description of Artificial Sequence: Synthetic oligonucleotide
  Sense strand starting at position 2433 of SEQ ID NO: 1215
agugaaguuaugcauugau

SEQ ID NO: 96465 - RNA, 19 nt, Artificial Sequence
  Description of Artificial Sequence: Synthetic oligonucleotide
  Antisense strand to SEQ ID NO: 96384
aucaaugcauaacuucacu

SEQ ID NO: 96466 - RNA, 19 nt, Artificial Sequence
  Description of Artificial Sequence: Synthetic oligonucleotide
  Sense strand starting at position 2436 of SEQ ID NO: 1215
gaaguuaugcauugauuag

SEQ ID NO: 96467 - RNA, 19 nt, Artificial Sequence
  Description of Artificial Sequence: Synthetic oligonucleotide
  Antisense strand to SEQ ID NO: 96386
cuaaucaaugcauaacuuc

SEQ ID NO: 96468 - RNA, 19 nt, Artificial Sequence
  Description of Artificial Sequence: Synthetic oligonucleotide
  Sense strand starting at position 2509 of SEQ ID NO: 1215
ugaacuuuaugaguagaug

SEQ ID NO: 96469 - RNA, 19 nt, Artificial Sequence
  Description of Artificial Sequence: Synthetic oligonucleotide
  Antisense strand to SEQ ID NO: 96388
caucuacucauaaaguuca

SEQ ID NO: 96470 - RNA, 19 nt, Artificial Sequence
  Description of Artificial Sequence: Synthetic oligonucleotide
  Sense strand starting at position 2681 of SEQ ID NO: 1215
cuguacaccugucuaauaa

SEQ ID NO: 96471 - RNA, 19 nt, Artificial Sequence
  Description of Artificial Sequence: Synthetic oligonucleotide
  Antisense strand to SEQ ID NO: 96390
uuauuagacagguguacag

SEQ ID NO: 96472 - RNA, 19 nt, Artificial Sequence
  Description of Artificial Sequence: Synthetic oligonucleotide
  Sense strand starting at position 2682 of SEQ ID NO: 1215
uguacaccugucuaauaaa

SEQ ID NO: 96473 - RNA, 19 nt, Artificial Sequence
  Description of Artificial Sequence: Synthetic oligonucleotide
  Antisense strand to SEQ ID NO: 96392
uuuauuagacagguguaca

SEQ ID NO: 96474 - RNA, 19 nt, Artificial Sequence
  Description of Artificial Sequence: Synthetic oligonucleotide
  Sense strand starting at position 2780 of SEQ ID NO: 1215
auuagauucuagcugacaa

SEQ ID NO: 96475 - RNA, 19 nt, Artificial Sequence
  Description of Artificial Sequence: Synthetic oligonucleotide
  Antisense strand to SEQ ID NO: 96394
uugucagcuagaaucuaau

SEQ ID NO: 96476 - RNA, 19 nt, Artificial Sequence
  Description of Artificial Sequence: Synthetic oligonucleotide
  Sense strand starting at position 2782 of SEQ ID NO: 1215
uagauucuagcugacaagu

SEQ ID NO: 96477 - RNA, 19 nt, Artificial Sequence
  Description of Artificial Sequence: Synthetic oligonucleotide
  Antisense strand to SEQ ID NO: 96396
acuugucagcuagaaucua

SEQ ID NO: 96478 - RNA, 19 nt, Artificial Sequence
  Description of Artificial Sequence: Synthetic oligonucleotide
  Sense strand starting at position 3071 of SEQ ID NO: 1215
guguccgugauacauaaga

SEQ ID NO: 96479 - RNA, 19 nt, Artificial Sequence
  Description of Artificial Sequence: Synthetic oligonucleotide
  Antisense strand to SEQ ID NO: 96398
ucuuauguaucacggacac

SEQ ID NO: 96480 - RNA, 19 nt, Artificial Sequence
  Description of Artificial Sequence: Synthetic oligonucleotide
  Sense strand starting at position 3073 of SEQ ID NO: 1215
guccgugauacauaagaau

SEQ ID NO: 96481 - RNA, 19 nt, Artificial Sequence
  Description of Artificial Sequence: Synthetic oligonucleotide
  Antisense strand to SEQ ID NO: 96400
auucuuauguaucacggac

SEQ ID NO: 96482 - RNA, 19 nt, Artificial Sequence
  Description of Artificial Sequence: Synthetic oligonucleotide
  Sense strand starting at position 3103 of SEQ ID NO: 1215
gcuggagauuuguuuaugu

SEQ ID NO: 96483 - RNA, 19 nt, Artificial Sequence
  Description of Artificial Sequence: Synthetic oligonucleotide
  Antisense strand to SEQ ID NO: 96402
acauaaacaaaucuccagc

SEQ ID NO: 96484 - RNA, 19 nt, Artificial Sequence
  Description of Artificial Sequence: Synthetic oligonucleotide
  Sense strand starting at position 3219 of SEQ ID NO: 1215
auuaaauuggauugcaaac

SEQ ID NO: 96485 - RNA, 19 nt, Artificial Sequence
  Description of Artificial Sequence: Synthetic oligonucleotide
  Antisense strand to SEQ ID NO: 96404
guuugcaauccaauuuaau

SEQ ID NO: 96486 - RNA, 19 nt, Artificial Sequence
  Description of Artificial Sequence: Synthetic oligonucleotide
  Sense strand starting at position 3272 of SEQ ID NO: 1215
ggaacuugugaacagucuu

SEQ ID NO: 96487 - RNA, 19 nt, Artificial Sequence
  Description of Artificial Sequence: Synthetic oligonucleotide
  Antisense strand to SEQ ID NO: 96406
aagacuguucacaaguucc

SEQ ID NO: 96488 - RNA, 19 nt, Artificial Sequence
  Description of Artificial Sequence: Synthetic oligonucleotide
  Sense strand starting at position 3817 of SEQ ID NO: 1215
guucuuacccauuaugacu

SEQ ID NO: 96489 - RNA, 19 nt, Artificial Sequence
  Description of Artificial Sequence: Synthetic oligonucleotide
  Antisense strand to SEQ ID NO: 96408
agucauaauggguaagaac

SEQ ID NO: 96490 - RNA, 19 nt, Artificial Sequence
  Description of Artificial Sequence: Synthetic oligonucleotide
  Sense strand starting at position 3911 of SEQ ID NO: 1215
ggaauacuccuuuggaccu

SEQ ID NO: 96491 - RNA, 19 nt, Artificial Sequence
  Description of Artificial Sequence: Synthetic oligonucleotide
  Antisense strand to SEQ ID NO: 96410
agguccaaaggaguauucc

SEQ ID NO: 96492 - RNA, 19 nt, Artificial Sequence
  Description of Artificial Sequence: Synthetic oligonucleotide
  Sense strand starting at position 57 of SEQ ID NO: 1217
ggaagugaagaguguuaga

SEQ ID NO: 96493 - RNA, 19 nt, Artificial Sequence
  Description of Artificial Sequence: Synthetic oligonucleotide
  Antisense strand to SEQ ID NO: 96412
ucuaacacucuucacuucc

SEQ ID NO: 96494 - RNA, 19 nt, Artificial Sequence
  Description of Artificial Sequence: Synthetic oligonucleotide
  Sense strand starting at position 60 of SEQ ID NO: 1217
agugaagaguguuagagga

SEQ ID NO: 96495 - RNA, 19 nt, Artificial Sequence
  Description of Artificial Sequence: Synthetic oligonucleotide
  Antisense strand to SEQ ID NO: 96414
uccucuaacacucuucacu

SEQ ID NO: 96496 - RNA, 19 nt, Artificial Sequence
  Description of Artificial Sequence: Synthetic oligonucleotide
  Sense strand starting at position 67 of SEQ ID NO: 1217
aguguuagaggaggaaagu

SEQ ID NO: 96497 - RNA, 19 nt, Artificial Sequence
  Description of Artificial Sequence: Synthetic oligonucleotide
  Antisense strand to SEQ ID NO: 96416
acuuuccuccucuaacacu

SEQ ID NO: 96498 - RNA, 19 nt, Artificial Sequence
  Description of Artificial Sequence: Synthetic oligonucleotide
  Sense strand starting at position 163 of SEQ ID NO: 1217
gaagaacuguguugaauua

SEQ ID NO: 96499 - RNA, 19 nt, Artificial Sequence
  Description of Artificial Sequence: Synthetic oligonucleotide
  Antisense strand to SEQ ID NO: 96418
uaauucaacacaguucuuc

SEQ ID NO: 96500 - RNA, 19 nt, Artificial Sequence
  Description of Artificial Sequence: Synthetic oligonucleotide
  Sense strand starting at position 184 of SEQ ID NO: 1217
gagggaaccugcuguacua

SEQ ID NO: 96501 - RNA, 19 nt, Artificial Sequence
  Description of Artificial Sequence: Synthetic oligonucleotide
  Antisense strand to SEQ ID NO: 96420
uaguacagcagguucccuc

SEQ ID NO: 96502 - RNA, 19 nt, Artificial Sequence
  Description of Artificial Sequence: Synthetic oligonucleotide
  Sense strand starting at position 196 of SEQ ID NO: 1217
uguacuagccuggauggaa

SEQ ID NO: 96503 - RNA, 19 nt, Artificial Sequence
  Description of Artificial Sequence: Synthetic oligonucleotide
  Antisense strand to SEQ ID NO: 96422
uuccauccaggcuaguaca

SEQ ID NO: 96504 - RNA, 19 nt, Artificial Sequence
  Description of Artificial Sequence: Synthetic oligonucleotide
  Sense strand starting at position 215 of SEQ ID NO: 1217
uuagcagaucucugagauc

SEQ ID NO: 96505 - RNA, 19 nt, Artificial Sequence
  Description of Artificial Sequence: Synthetic oligonucleotide
  Antisense strand to SEQ ID NO: 96424
gaucucagagaucugcuaa

SEQ ID NO: 96506 - RNA, 19 nt, Artificial Sequence
  Description of Artificial Sequence: Synthetic oligonucleotide
  Sense strand starting at position 218 of SEQ ID NO: 1217
gcagaucucugagaucuua

SEQ ID NO: 96507 - RNA, 19 nt, Artificial Sequence
  Description of Artificial Sequence: Synthetic oligonucleotide
  Antisense strand to SEQ ID NO: 96426
uaagaucucagagaucugc

SEQ ID NO: 96508 - RNA, 19 nt, Artificial Sequence
  Description of Artificial Sequence: Synthetic oligonucleotide
  Sense strand starting at position 226 of SEQ ID NO: 1217
cugagaucuuacugccacu

SEQ ID NO: 96509 - RNA, 19 nt, Artificial Sequence
  Description of Artificial Sequence: Synthetic oligonucleotide
  Antisense strand to SEQ ID NO: 96428
aguggcaguaagaucucag

SEQ ID NO: 96510 - RNA, 19 nt, Artificial Sequence
  Description of Artificial Sequence: Synthetic oligonucleotide
  Sense strand starting at position 353 of SEQ ID NO: 1217
aguuccaugcuuugcaaau

SEQ ID NO: 96511 - RNA, 19 nt, Artificial Sequence
  Description of Artificial Sequence: Synthetic oligonucleotide
  Antisense strand to SEQ ID NO: 96430
auuugcaaagcauggaacu

SEQ ID NO: 96512 - RNA, 19 nt, Artificial Sequence
  Description of Artificial Sequence: Synthetic oligonucleotide
  Sense strand starting at position 354 of SEQ ID NO: 1217
guuccaugcuuugcaaaua

SEQ ID NO: 96513 - RNA, 19 nt, Artificial Sequence
  Description of Artificial Sequence: Synthetic oligonucleotide
  Antisense strand to SEQ ID NO: 96432
uauuugcaaagcauggaac

SEQ ID NO: 96514 - RNA, 19 nt, Artificial Sequence
  Description of Artificial Sequence: Synthetic oligonucleotide
  Sense strand starting at position 395 of SEQ ID NO: 1217
gagagagcccuccgcaaga

SEQ ID NO: 96515 - RNA, 19 nt, Artificial Sequence
  Description of Artificial Sequence: Synthetic oligonucleotide
  Antisense strand to SEQ ID NO: 96434
ucuugcggagggcucucuc

SEQ ID NO: 96516 - RNA, 19 nt, Artificial Sequence
  Description of Artificial Sequence: Synthetic oligonucleotide
  Sense strand starting at position 412 of SEQ ID NO: 1217
gaaggagaagccugaguca

SEQ ID NO: 96517 - RNA, 19 nt, Artificial Sequence
  Description of Artificial Sequence: Synthetic oligonucleotide
  Antisense strand to SEQ ID NO: 96436
ugacucaggcuucuccuuc

SEQ ID NO: 96518 - RNA, 19 nt, Artificial Sequence
  Description of Artificial Sequence: Synthetic oligonucleotide
  Sense strand starting at position 973 of SEQ ID NO: 1217
cugcguuggcuccaacaga

SEQ ID NO: 96519 - RNA, 19 nt, Artificial Sequence
  Description of Artificial Sequence: Synthetic oligonucleotide
  Antisense strand to SEQ ID NO: 96438
ucuguuggagccaacgcag

SEQ ID NO: 96520 - RNA, 19 nt, Artificial Sequence
  Description of Artificial Sequence: Synthetic oligonucleotide
  Sense strand starting at position 2542 of SEQ ID NO: 1217
ugagcuguccuugugccua

SEQ ID NO: 96521 - RNA, 19 nt, Artificial Sequence
  Description of Artificial Sequence: Synthetic oligonucleotide
  Antisense strand to SEQ ID NO: 96440
uaggcacaaggacagcuca

SEQ ID NO: 96522 - RNA, 19 nt, Artificial Sequence
  Description of Artificial Sequence: Synthetic oligonucleotide
  Sense strand starting at position 2546 of SEQ ID NO: 1217
cuguccuugugccuagaga

SEQ ID NO: 96523 - RNA, 19 nt, Artificial Sequence
  Description of Artificial Sequence: Synthetic oligonucleotide
  Antisense strand to SEQ ID NO: 96442
ucucuaggcacaaggacag

SEQ ID NO: 96524 - RNA, 19 nt, Artificial Sequence
  Description of Artificial Sequence: Synthetic oligonucleotide
  Sense strand starting at position 2567 of SEQ ID NO: 1217
caaggcuuggcugagagaa

SEQ ID NO: 96525 - RNA, 19 nt, Artificial Sequence
  Description of Artificial Sequence: Synthetic oligonucleotide
  Antisense strand to SEQ ID NO: 96444
uucucucagccaagccuug

SEQ ID NO: 96526 - RNA, 19 nt, Artificial Sequence
  Description of Artificial Sequence: Synthetic oligonucleotide
  Sense strand starting at position 2615 of SEQ ID NO: 1217
aggguuggcuucucucaua

SEQ ID NO: 96527 - RNA, 19 nt, Artificial Sequence
  Description of Artificial Sequence: Synthetic oligonucleotide
  Antisense strand to SEQ ID NO: 96446
uaugagagaagccaacccu

SEQ ID NO: 96528 - RNA, 19 nt, Artificial Sequence
  Description of Artificial Sequence: Synthetic oligonucleotide
  Sense strand starting at position 2763 of SEQ ID NO: 1217
cgaaguuaacaguggacua

SEQ ID NO: 96529 - RNA, 19 nt, Artificial Sequence
  Description of Artificial Sequence: Synthetic oligonucleotide
  Antisense strand to SEQ ID NO: 96448
uaguccacuguuaacuucg

SEQ ID NO: 96530 - RNA, 19 nt, Artificial Sequence
  Description of Artificial Sequence: Synthetic oligonucleotide
  Sense strand starting at position 2857 of SEQ ID NO: 1217
cccuuuaguugucaugcuu

SEQ ID NO: 96531 - RNA, 19 nt, Artificial Sequence
  Description of Artificial Sequence: Synthetic oligonucleotide
  Antisense strand to SEQ ID NO: 96450
aagcaugacaacuaaaggg

SEQ ID NO: 96532 - RNA, 19 nt, Artificial Sequence
  Description of Artificial Sequence: Synthetic oligonucleotide
  Sense strand starting at position 2903 of SEQ ID NO: 1217
gcucuagcauucuggaaga

SEQ ID NO: 96533 - RNA, 19 nt, Artificial Sequence
  Description of Artificial Sequence: Synthetic oligonucleotide
  Antisense strand to SEQ ID NO: 96452
ucuuccagaaugcuagagc

SEQ ID NO: 96534 - RNA, 19 nt, Artificial Sequence
  Description of Artificial Sequence: Synthetic oligonucleotide
  Sense strand starting at position 2905 of SEQ ID NO: 1217
ucuagcauucuggaagauu

SEQ ID NO: 96535 - RNA, 19 nt, Artificial Sequence
  Description of Artificial Sequence: Synthetic oligonucleotide
  Antisense strand to SEQ ID NO: 96454
aaucuuccagaaugcuaga

SEQ ID NO: 96536 - RNA, 19 nt, Artificial Sequence
  Description of Artificial Sequence: Synthetic oligonucleotide
  Sense strand starting at position 2925 of SEQ ID NO: 1217
cguccuggcucucaaugaa

SEQ ID NO: 96537 - RNA, 19 nt, Artificial Sequence
  Description of Artificial Sequence: Synthetic oligonucleotide
  Antisense strand to SEQ ID NO: 96456
uucauugagagccaggacg

SEQ ID NO: 96538 - RNA, 19 nt, Artificial Sequence
  Description of Artificial Sequence: Synthetic oligonucleotide
  Sense strand starting at position 2928 of SEQ ID NO: 1217
ccuggcucucaaugaagga

SEQ ID NO: 96539 - RNA, 19 nt, Artificial Sequence
  Description of Artificial Sequence: Synthetic oligonucleotide
  Antisense strand to SEQ ID NO: 96458
uccuucauugagagccagg

SEQ ID NO: 96540 - RNA, 19 nt, Artificial Sequence
  Description of Artificial Sequence: Synthetic oligonucleotide
  Sense strand starting at position 3287 of SEQ ID NO: 1217
uguggaguccugugaggag

SEQ ID NO: 96541 - RNA, 19 nt, Artificial Sequence
  Description of Artificial Sequence: Synthetic oligonucleotide
  Antisense strand to SEQ ID NO: 96460
cuccucacaggacuccaca

SEQ ID NO: 96542 - RNA, 19 nt, Artificial Sequence
  Description of Artificial Sequence: Synthetic oligonucleotide
  Sense strand starting at position 3288 of SEQ ID NO: 1217
guggaguccugugaggagu

SEQ ID NO: 96543 - RNA, 19 nt, Artificial Sequence
  Description of Artificial Sequence: Synthetic oligonucleotide
  Antisense strand to SEQ ID NO: 96462
acuccucacaggacuccac

SEQ ID NO: 96544 - RNA, 19 nt, Artificial Sequence
  Description of Artificial Sequence: Synthetic oligonucleotide
  Sense strand starting at position 3325 of SEQ ID NO: 1217
gccgucauccagugcuuga

SEQ ID NO: 96545 - RNA, 19 nt, Artificial Sequence
  Description of Artificial Sequence: Synthetic oligonucleotide
  Antisense strand to SEQ ID NO: 96464
ucaagcacuggaugacggc

SEQ ID NO: 96546 - RNA, 19 nt, Artificial Sequence
  Description of Artificial Sequence: Synthetic oligonucleotide
  Sense strand starting at position 3404 of SEQ ID NO: 1217
uugugaaguuggcuugaag

SEQ ID NO: 96547 - RNA, 19 nt, Artificial Sequence
  Description of Artificial Sequence: Synthetic oligonucleotide
  Antisense strand to SEQ ID NO: 96466
cuucaagccaacuucacaa

SEQ ID NO: 96548 - RNA, 19 nt, Artificial Sequence
  Description of Artificial Sequence: Synthetic oligonucleotide
  Sense strand starting at position 3415 of SEQ ID NO: 1217
gcuugaaggucugaguucu

SEQ ID NO: 96549 - RNA, 19 nt, Artificial Sequence
  Description of Artificial Sequence: Synthetic oligonucleotide
  Antisense strand to SEQ ID NO: 96468
agaacucagaccuucaagc

SEQ ID NO: 96550 - RNA, 19 nt, Artificial Sequence
  Description of Artificial Sequence: Synthetic oligonucleotide
  Sense strand starting at position 3423 of SEQ ID NO: 1217
gucugaguucuguaugcac

SEQ ID NO: 96551 - RNA, 19 nt, Artificial Sequence
  Description of Artificial Sequence: Synthetic oligonucleotide
  Antisense strand to SEQ ID NO: 96470
gugcauacagaacucagac

SEQ ID NO: 96552 - RNA, 19 nt, Artificial Sequence
  Description of Artificial Sequence: Synthetic oligonucleotide
  Sense strand starting at position 3425 of SEQ ID NO: 1217
cugaguucuguaugcacag

SEQ ID NO: 96553 - RNA, 19 nt, Artificial Sequence
  Description of Artificial Sequence: Synthetic oligonucleotide
  Antisense strand to SEQ ID NO: 96472
cugugcauacagaacucag

SEQ ID NO: 96554 - RNA, 19 nt, Artificial Sequence
  Description of Artificial Sequence: Synthetic oligonucleotide
  Sense strand starting at position 3426 of SEQ ID NO: 1217
ugaguucuguaugcacaga

SEQ ID NO: 96555 - RNA, 19 nt, Artificial Sequence
  Description of Artificial Sequence: Synthetic oligonucleotide
  Antisense strand to SEQ ID NO: 96474
ucugugcauacagaacuca

SEQ ID NO: 96556 - RNA, 19 nt, Artificial Sequence
  Description of Artificial Sequence: Synthetic oligonucleotide
  Sense strand starting at position 3557 of SEQ ID NO: 1217
gagugacagguuggaacua

SEQ ID NO: 96557 - RNA, 19 nt, Artificial Sequence
  Description of Artificial Sequence: Synthetic oligonucleotide
  Antisense strand to SEQ ID NO: 96476
uaguuccaaccugucacuc

SEQ ID NO: 96558 - RNA, 19 nt, Artificial Sequence
  Description of Artificial Sequence: Synthetic oligonucleotide
  Sense strand starting at position 3637 of SEQ ID NO: 1217
accuuaauggacuagcauu

SEQ ID NO: 96559 - RNA, 19 nt, Artificial Sequence
  Description of Artificial Sequence: Synthetic oligonucleotide
  Antisense strand to SEQ ID NO: 96478
aaugcuaguccauuaaggu

SEQ ID NO: 96560 - RNA, 19 nt, Artificial Sequence
  Description of Artificial Sequence: Synthetic oligonucleotide
  Sense strand starting at position 3779 of SEQ ID NO: 1217
auggguugucuggagggua

SEQ ID NO: 96561 - RNA, 19 nt, Artificial Sequence
  Description of Artificial Sequence: Synthetic oligonucleotide
  Antisense strand to SEQ ID NO: 96480
uacccuccagacaacccau

SEQ ID NO: 96562 - RNA, 19 nt, Artificial Sequence
  Description of Artificial Sequence: Synthetic oligonucleotide
  Sense strand starting at position 3848 of SEQ ID NO: 1217
ucaucucugucaucuuaga

SEQ ID NO: 96563 - RNA, 19 nt, Artificial Sequence
  Description of Artificial Sequence: Synthetic oligonucleotide
  Antisense strand to SEQ ID NO: 96482
ucuaagaugacagagauga

SEQ ID NO: 96564 - RNA, 19 nt, Artificial Sequence
  Description of Artificial Sequence: Synthetic oligonucleotide
  Sense strand starting at position 3859 of SEQ ID NO: 1217
aucuuagacucugaguuga

SEQ ID NO: 96565 - RNA, 19 nt, Artificial Sequence
  Description of Artificial Sequence: Synthetic oligonucleotide
  Antisense strand to SEQ ID NO: 96484
ucaacucagagucuaagau

SEQ ID NO: 96566 - RNA, 19 nt, Artificial Sequence
  Description of Artificial Sequence: Synthetic oligonucleotide
  Sense strand starting at position 3861 of SEQ ID NO: 1217
cuuagacucugaguugacu

SEQ ID NO: 96567 - RNA, 19 nt, Artificial Sequence
  Description of Artificial Sequence: Synthetic oligonucleotide
  Antisense strand to SEQ ID NO: 96486
agucaacucagagucuaag

SEQ ID NO: 96568 - RNA, 19 nt, Artificial Sequence
  Description of Artificial Sequence: Synthetic oligonucleotide
  Sense strand starting at position 3867 of SEQ ID NO: 1217
cucugaguugacuaauauc

SEQ ID NO: 96569 - RNA, 19 nt, Artificial Sequence
  Description of Artificial Sequence: Synthetic oligonucleotide
  Antisense strand to SEQ ID NO: 96488
gauauuagucaacucagag

SEQ ID NO: 96570 - RNA, 19 nt, Artificial Sequence
  Description of Artificial Sequence: Synthetic oligonucleotide
  Sense strand starting at position 3948 of SEQ ID NO: 1217
ggcagaaugugagaccuca

SEQ ID NO: 96571 - RNA, 19 nt, Artificial Sequence
  Description of Artificial Sequence: Synthetic oligonucleotide
  Antisense strand to SEQ ID NO: 96490
ugaggucucacauucugcc

SEQ ID NO: 96572 - RNA, 19 nt, Artificial Sequence
  Description of Artificial Sequence: Synthetic oligonucleotide
  Sense strand starting at position 47 of SEQ ID NO: 1216
gaagaacuguguugaauua

SEQ ID NO: 96573 - RNA, 19 nt, Artificial Sequence
  Description of Artificial Sequence: Synthetic oligonucleotide
  Antisense strand to SEQ ID NO: 96492
uaauucaacacaguucuuc

SEQ ID NO: 96574 - RNA, 19 nt, Artificial Sequence
  Description of Artificial Sequence: Synthetic oligonucleotide
  Sense strand starting at position 68 of SEQ ID NO: 1216
gagggaaccugcuguacua

SEQ ID NO: 96575 - RNA, 19 nt, Artificial Sequence
  Description of Artificial Sequence: Synthetic oligonucleotide
  Antisense strand to SEQ ID NO: 96494
uaguacagcagguucccuc

SEQ ID NO: 96576 - RNA, 19 nt, Artificial Sequence
  Description of Artificial Sequence: Synthetic oligonucleotide
  Sense strand starting at position 80 of SEQ ID NO: 1216
uguacuagccuggauggaa

SEQ ID NO: 96577 - RNA, 19 nt, Artificial Sequence
  Description of Artificial Sequence: Synthetic oligonucleotide
  Antisense strand to SEQ ID NO: 96496
uuccauccaggcuaguaca

SEQ ID NO: 96578 - RNA, 19 nt, Artificial Sequence
  Description of Artificial Sequence: Synthetic oligonucleotide
  Sense strand starting at position 99 of SEQ ID NO: 1216
uuagcagaucucugagauc

SEQ ID NO: 96579 - RNA, 19 nt, Artificial Sequence
  Description of Artificial Sequence: Synthetic oligonucleotide
  Antisense strand to SEQ ID NO: 96498
gaucucagagaucugcuaa

SEQ ID NO: 96580 - RNA, 19 nt, Artificial Sequence
  Description of Artificial Sequence: Synthetic oligonucleotide
  Sense strand starting at position 102 of SEQ ID NO: 1216
gcagaucucugagaucuua

SEQ ID NO: 96581 - RNA, 19 nt, Artificial Sequence
  Description of Artificial Sequence: Synthetic oligonucleotide
  Antisense strand to SEQ ID NO: 96500
uaagaucucagagaucugc

SEQ ID NO: 96582 - RNA, 19 nt, Artificial Sequence
  Description of Artificial Sequence: Synthetic oligonucleotide
  Sense strand starting at position 110 of SEQ ID NO: 1216
cugagaucuuacugccacu

SEQ ID NO: 96583 - RNA, 19 nt, Artificial Sequence
  Description of Artificial Sequence: Synthetic oligonucleotide
  Antisense strand to SEQ ID NO: 96502
aguggcaguaagaucucag

SEQ ID NO: 96584 - RNA, 19 nt, Artificial Sequence
  Description of Artificial Sequence: Synthetic oligonucleotide
  Sense strand starting at position 237 of SEQ ID NO: 1216
aguuccaugcuuugcaaau

SEQ ID NO: 96585 - RNA, 19 nt, Artificial Sequence
  Description of Artificial Sequence: Synthetic oligonucleotide
  Antisense strand to SEQ ID NO: 96504
auuugcaaagcauggaacu

SEQ ID NO: 96586 - RNA, 19 nt, Artificial Sequence
  Description of Artificial Sequence: Synthetic oligonucleotide
  Sense strand starting at position 238 of SEQ ID NO: 1216
guuccaugcuuugcaaaua

SEQ ID NO: 96587 - RNA, 19 nt, Artificial Sequence
  Description of Artificial Sequence: Synthetic oligonucleotide
  Antisense strand to SEQ ID NO: 96506
uauuugcaaagcauggaac

SEQ ID NO: 96588 - RNA, 19 nt, Artificial Sequence
  Description of Artificial Sequence: Synthetic oligonucleotide
  Sense strand starting at position 279 of SEQ ID NO: 1216
gagagagcccuccgcaaga

SEQ ID NO: 96589 - RNA, 19 nt, Artificial Sequence
  Description of Artificial Sequence: Synthetic oligonucleotide
  Antisense strand to SEQ ID NO: 96508
ucuugcggagggcucucuc

SEQ ID NO: 96590 - RNA, 19 nt, Artificial Sequence
  Description of Artificial Sequence: Synthetic oligonucleotide
  Sense strand starting at position 296 of SEQ ID NO: 1216
gaaggagaagccugaguca

SEQ ID NO: 96591 - RNA, 19 nt, Artificial Sequence
  Description of Artificial Sequence: Synthetic oligonucleotide
  Antisense strand to SEQ ID NO: 96510
ugacucaggcuucuccuuc

SEQ ID NO: 96592 - RNA, 19 nt, Artificial Sequence
  Description of Artificial Sequence: Synthetic oligonucleotide
  Sense strand starting at position 857 of SEQ ID NO: 1216
cugcguuggcuccaacaga

SEQ ID NO: 96593 - RNA, 19 nt, Artificial Sequence
  Description of Artificial Sequence: Synthetic oligonucleotide
  Antisense strand to SEQ ID NO: 96512
ucuguuggagccaacgcag

SEQ ID NO: 96594 - RNA, 19 nt, Artificial Sequence
  Description of Artificial Sequence: Synthetic oligonucleotide
  Sense strand starting at position 2426 of SEQ ID NO: 1216
ugagcuguccuugugccua

SEQ ID NO: 96595 - RNA, 19 nt, Artificial Sequence
  Description of Artificial Sequence: Synthetic oligonucleotide
  Antisense strand to SEQ ID NO: 96514
uaggcacaaggacagcuca

SEQ ID NO: 96596 - RNA, 19 nt, Artificial Sequence
  Description of Artificial Sequence: Synthetic oligonucleotide
  Sense strand starting at position 2430 of SEQ ID NO: 1216
cuguccuugugccuagaga

SEQ ID NO: 96597 - RNA, 19 nt, Artificial Sequence
  Description of Artificial Sequence: Synthetic oligonucleotide
  Antisense strand to SEQ ID NO: 96516
ucucuaggcacaaggacag

SEQ ID NO: 96598 - RNA, 19 nt, Artificial Sequence
  Description of Artificial Sequence: Synthetic oligonucleotide
  Sense strand starting at position 2451 of SEQ ID NO: 1216
caaggcuuggcugagagaa

SEQ ID NO: 96599 - RNA, 19 nt, Artificial Sequence
  Description of Artificial Sequence: Synthetic oligonucleotide
  Antisense strand to SEQ ID NO: 96518
uucucucagccaagccuug

SEQ ID NO: 96600 - RNA, 19 nt, Artificial Sequence
  Description of Artificial Sequence: Synthetic oligonucleotide
  Sense strand starting at position 2499 of SEQ ID NO: 1216
aggguuggcuucucucaua

SEQ ID NO: 96601 - RNA, 19 nt, Artificial Sequence
  Description of Artificial Sequence: Synthetic oligonucleotide
  Antisense strand to SEQ ID NO: 96520
uaugagagaagccaacccu

SEQ ID NO: 96602 - RNA, 19 nt, Artificial Sequence
  Description of Artificial Sequence: Synthetic oligonucleotide
  Sense strand starting at position 2647 of SEQ ID NO: 1216
cgaaguuaacaguggacua

SEQ ID NO: 96603 - RNA, 19 nt, Artificial Sequence
  Description of Artificial Sequence: Synthetic oligonucleotide
  Antisense strand to SEQ ID NO: 96522
uaguccacuguuaacuucg

SEQ ID NO: 96604 - RNA, 19 nt, Artificial Sequence
  Description of Artificial Sequence: Synthetic oligonucleotide
  Sense strand starting at position 2787 of SEQ ID NO: 1216
gcucuagcauucuggaaga

SEQ ID NO: 96605 - RNA, 19 nt, Artificial Sequence
  Description of Artificial Sequence: Synthetic oligonucleotide
  Antisense strand to SEQ ID NO: 96524
ucuuccagaaugcuagagc

SEQ ID NO: 96606 - RNA, 19 nt, Artificial Sequence
  Description of Artificial Sequence: Synthetic oligonucleotide
  Sense strand starting at position 2789 of SEQ ID NO: 1216
ucuagcauucuggaagauu

SEQ ID NO: 96607 - RNA, 19 nt, Artificial Sequence
  Description of Artificial Sequence: Synthetic oligonucleotide
  Antisense strand to SEQ ID NO: 96526
aaucuuccagaaugcuaga

SEQ ID NO: 96608 - RNA, 19 nt, Artificial Sequence
  Description of Artificial Sequence: Synthetic oligonucleotide
  Sense strand starting at position 2812 of SEQ ID NO: 1216
ccuggcucucaaugaagga

SEQ ID NO: 96609 - RNA, 19 nt, Artificial Sequence
  Description of Artificial Sequence: Synthetic oligonucleotide
  Antisense strand to SEQ ID NO: 96528
uccuucauugagagccagg

SEQ ID NO: 96610 - RNA, 19 nt, Artificial Sequence
  Description of Artificial Sequence: Synthetic oligonucleotide
  Sense strand starting at position 3171 of SEQ ID NO: 1216
uguggaguccugugaggag

SEQ ID NO: 96611 - RNA, 19 nt, Artificial Sequence
  Description of Artificial Sequence: Synthetic oligonucleotide
  Antisense strand to SEQ ID NO: 96530
cuccucacaggacuccaca

SEQ ID NO: 96612 - RNA, 19 nt, Artificial Sequence
  Description of Artificial Sequence: Synthetic oligonucleotide
  Sense strand starting at position 3172 of SEQ ID NO: 1216
guggaguccugugaggagu

SEQ ID NO: 96613 - RNA, 19 nt, Artificial Sequence
  Description of Artificial Sequence: Synthetic oligonucleotide
  Antisense strand to SEQ ID NO: 96532
acuccucacaggacuccac

SEQ ID NO: 96614 - RNA, 19 nt, Artificial Sequence
  Description of Artificial Sequence: Synthetic oligonucleotide
  Sense strand starting at position 3209 of SEQ ID NO: 1216
gccgucauccagugcuuga

SEQ ID NO: 96615 - RNA, 19 nt, Artificial Sequence
  Description of Artificial Sequence: Synthetic oligonucleotide
  Antisense strand to SEQ ID NO: 96534
ucaagcacuggaugacggc

SEQ ID NO: 96616 - RNA, 19 nt, Artificial Sequence
  Description of Artificial Sequence: Synthetic oligonucleotide
  Sense strand starting at position 3288 of SEQ ID NO: 1216
uugugaaguuggcuugaag

SEQ ID NO: 96617 - RNA, 19 nt, Artificial Sequence
  Description of Artificial Sequence: Synthetic oligonucleotide
  Antisense strand to SEQ ID NO: 96536
cuucaagccaacuucacaa

SEQ ID NO: 96618 - RNA, 19 nt, Artificial Sequence
  Description of Artificial Sequence: Synthetic oligonucleotide
  Sense strand starting at position 3299 of SEQ ID NO: 1216
gcuugaaggucugaguucu

SEQ ID NO: 96619 - RNA, 19 nt, Artificial Sequence
  Description of Artificial Sequence: Synthetic oligonucleotide
  Antisense strand to SEQ ID NO: 96538
agaacucagaccuucaagc

SEQ ID NO: 96620 - RNA, 19 nt, Artificial Sequence
  Description of Artificial Sequence: Synthetic oligonucleotide
  Sense strand starting at position 3307 of SEQ ID NO: 1216
gucugaguucuguaugcac

SEQ ID NO: 96621 - RNA, 19 nt, Artificial Sequence
  Description of Artificial Sequence: Synthetic oligonucleotide
  Antisense strand to SEQ ID NO: 96540
gugcauacagaacucagac

SEQ ID NO: 96622 - RNA, 19 nt, Artificial Sequence
  Description of Artificial Sequence: Synthetic oligonucleotide
  Sense strand starting at position 3309 of SEQ ID NO: 1216
cugaguucuguaugcacag

SEQ ID NO: 96623 - RNA, 19 nt, Artificial Sequence
  Description of Artificial Sequence: Synthetic oligonucleotide
  Antisense strand to SEQ ID NO: 96542
cugugcauacagaacucag

SEQ ID NO: 96624 - RNA, 19 nt, Artificial Sequence
  Description of Artificial Sequence: Synthetic oligonucleotide
  Sense strand starting at position 3310 of SEQ ID NO: 1216
ugaguucuguaugcacaga

SEQ ID NO: 96625 - RNA, 19 nt, Artificial Sequence
  Description of Artificial Sequence: Synthetic oligonucleotide
  Antisense strand to SEQ ID NO: 96544
ucugugcauacagaacuca

SEQ ID NO: 96626 - RNA, 19 nt, Artificial Sequence
  Description of Artificial Sequence: Synthetic oligonucleotide
  Sense strand starting at position 3441 of SEQ ID NO: 1216
gagugacagguuggaacua

SEQ ID NO: 96627 - RNA, 19 nt, Artificial Sequence
  Description of Artificial Sequence: Synthetic oligonucleotide
  Antisense strand to SEQ ID NO: 96546
uaguuccaaccugucacuc

SEQ ID NO: 96628 - RNA, 19 nt, Artificial Sequence
  Description of Artificial Sequence: Synthetic oligonucleotide
  Sense strand starting at position 3521 of SEQ ID NO: 1216
accuuaauggacuagcauu

SEQ ID NO: 96629 - RNA, 19 nt, Artificial Sequence
  Description of Artificial Sequence: Synthetic oligonucleotide
  Antisense strand to SEQ ID NO: 96548
aaugcuaguccauuaaggu

SEQ ID NO: 96630 - RNA, 19 nt, Artificial Sequence
  Description of Artificial Sequence: Synthetic oligonucleotide
  Sense strand starting at position 3663 of SEQ ID NO: 1216
auggguugucuggagggua

SEQ ID NO: 96631 - RNA, 19 nt, Artificial Sequence
  Description of Artificial Sequence: Synthetic oligonucleotide
  Antisense strand to SEQ ID NO: 96550
uacccuccagacaacccau

SEQ ID NO: 96632 - RNA, 19 nt, Artificial Sequence
  Description of Artificial Sequence: Synthetic oligonucleotide
  Sense strand starting at position 3732 of SEQ ID NO: 1216
ucaucucugucaucuuaga

SEQ ID NO: 96633 - RNA, 19 nt, Artificial Sequence
  Description of Artificial Sequence: Synthetic oligonucleotide
  Antisense strand to SEQ ID NO: 96552
ucuaagaugacagagauga

SEQ ID NO: 96634 - RNA, 19 nt, Artificial Sequence
  Description of Artificial Sequence: Synthetic oligonucleotide
  Sense strand starting at position 3743 of SEQ ID NO: 1216
aucuuagacucugaguuga

SEQ ID NO: 96635 - RNA, 19 nt, Artificial Sequence
  Description of Artificial Sequence: Synthetic oligonucleotide
  Antisense strand to SEQ ID NO: 96554
ucaacucagagucuaagau

SEQ ID NO: 96636 - RNA, 19 nt, Artificial Sequence
  Description of Artificial Sequence: Synthetic oligonucleotide
  Sense strand starting at position 3745 of SEQ ID NO: 1216
cuuagacucugaguugacu

SEQ ID NO: 96637 - RNA, 19 nt, Artificial Sequence
  Description of Artificial Sequence: Synthetic oligonucleotide
  Antisense strand to SEQ ID NO: 96556
agucaacucagagucuaag

SEQ ID NO: 96638 - RNA, 19 nt, Artificial Sequence
  Description of Artificial Sequence: Synthetic oligonucleotide
  Sense strand starting at position 3751 of SEQ ID NO: 1216
cucugaguugacuaauauc

SEQ ID NO: 96639 - RNA, 19 nt, Artificial Sequence
  Description of Artificial Sequence: Synthetic oligonucleotide
  Antisense strand to SEQ ID NO: 96558
gauauuagucaacucagag

SEQ ID NO: 96640 - RNA, 19 nt, Artificial Sequence
  Description of Artificial Sequence: Synthetic oligonucleotide
  Sense strand starting at position 3832 of SEQ ID NO: 1216
ggcagaaugugagaccuca

SEQ ID NO: 96641 - RNA, 19 nt, Artificial Sequence
  Description of Artificial Sequence: Synthetic oligonucleotide
  Antisense strand to SEQ ID NO: 96560
ugaggucucacauucugcc

SEQ ID NO: 96642 - RNA, 19 nt, Artificial Sequence
  Description of Artificial Sequence: Synthetic oligonucleotide
  Sense strand starting at position 3928 of SEQ ID NO: 1216
caguuuaucuguggaccca

SEQ ID NO: 96643 - RNA, 19 nt, Artificial Sequence
  Description of Artificial Sequence: Synthetic oligonucleotide
  Antisense strand to SEQ ID NO: 96562
uggguccacagauaaacug

SEQ ID NO: 96644 - RNA, 19 nt, Artificial Sequence
  Description of Artificial Sequence: Synthetic oligonucleotide
  Sense strand starting at position 3929 of SEQ ID NO: 1216
aguuuaucuguggacccau

SEQ ID NO: 96645 - RNA, 19 nt, Artificial Sequence
  Description of Artificial Sequence: Synthetic oligonucleotide
  Antisense strand to SEQ ID NO: 96564
auggguccacagauaaacu

SEQ ID NO: 96646 - RNA, 19 nt, Artificial Sequence
  Description of Artificial Sequence: Synthetic oligonucleotide
  Sense strand starting at position 3941 of SEQ ID NO: 1216
gacccauccucaggugauu

SEQ ID NO: 96647 - RNA, 19 nt, Artificial Sequence
  Description of Artificial Sequence: Synthetic oligonucleotide
  Antisense strand to SEQ ID NO: 96566
aaucaccugaggauggguc

SEQ ID NO: 96648 - RNA, 19 nt, Artificial Sequence
  Description of Artificial Sequence: Synthetic oligonucleotide
  Sense strand starting at position 3950 of SEQ ID NO: 1216
ucaggugauuugggaugaa

SEQ ID NO: 96649 - RNA, 19 nt, Artificial Sequence
  Description of Artificial Sequence: Synthetic oligonucleotide
  Antisense strand to SEQ ID NO: 96568
uucaucccaaaucaccuga

SEQ ID NO: 96650 - RNA, 19 nt, Artificial Sequence
  Description of Artificial Sequence: Synthetic oligonucleotide
  Sense strand starting at position 3981 of SEQ ID NO: 1216
augggagacuauugaggua

SEQ ID NO: 96651 - RNA, 19 nt, Artificial Sequence
  Description of Artificial Sequence: Synthetic oligonucleotide
  Antisense strand to SEQ ID NO: 96570
uaccucaauagucucccau

SEQ ID NO: 96652 - RNA, 19 nt, Artificial Sequence
  Description of Artificial Sequence: Synthetic oligonucleotide
  Sense strand starting at position 525 of SEQ ID NO: 1218
acgugaauuagauacacgu

SEQ ID NO: 96653 - RNA, 19 nt, Artificial Sequence
  Description of Artificial Sequence: Synthetic oligonucleotide
  Antisense strand to SEQ ID NO: 96572
acguguaucuaauucacgu

SEQ ID NO: 96654 - RNA, 19 nt, Artificial Sequence
  Description of Artificial Sequence: Synthetic oligonucleotide
  Sense strand starting at position 527 of SEQ ID NO: 1218
gugaauuagauacacguua

SEQ ID NO: 96655 - RNA, 19 nt, Artificial Sequence
  Description of Artificial Sequence: Synthetic oligonucleotide
  Antisense strand to SEQ ID NO: 96574
uaacguguaucuaauucac

SEQ ID NO: 96656 - RNA, 19 nt, Artificial Sequence
  Description of Artificial Sequence: Synthetic oligonucleotide
  Sense strand starting at position 532 of SEQ ID NO: 1218
uuagauacacguuaagguu

SEQ ID NO: 96657 - RNA, 19 nt, Artificial Sequence
  Description of Artificial Sequence: Synthetic oligonucleotide
  Antisense strand to SEQ ID NO: 96576
aaccuuaacguguaucuaa

SEQ ID NO: 96658 - RNA, 19 nt, Artificial Sequence
  Description of Artificial Sequence: Synthetic oligonucleotide
  Sense strand starting at position 539 of SEQ ID NO: 1218
cacguuaagguuugagaau

SEQ ID NO: 96659 - RNA, 19 nt, Artificial Sequence
  Description of Artificial Sequence: Synthetic oligonucleotide
  Antisense strand to SEQ ID NO: 96578
auucucaaaccuuaacgug

SEQ ID NO: 96660 - RNA, 19 nt, Artificial Sequence
  Description of Artificial Sequence: Synthetic oligonucleotide
  Sense strand starting at position 546 of SEQ ID NO: 1218
agguuugagaaucauuggu

SEQ ID NO: 96661 - RNA, 19 nt, Artificial Sequence
  Description of Artificial Sequence: Synthetic oligonucleotide
  Antisense strand to SEQ ID NO: 96580
accaaugauucucaaaccu

SEQ ID NO: 96662 - RNA, 19 nt, Artificial Sequence
  Description of Artificial Sequence: Synthetic oligonucleotide
  Sense strand starting at position 548 of SEQ ID NO: 1218
guuugagaaucauugguug

SEQ ID NO: 96663 - RNA, 19 nt, Artificial Sequence
  Description of Artificial Sequence: Synthetic oligonucleotide
  Antisense strand to SEQ ID NO: 96582
caaccaaugauucucaaac

SEQ ID NO: 96664 - RNA, 19 nt, Artificial Sequence
  Description of Artificial Sequence: Synthetic oligonucleotide
  Sense strand starting at position 550 of SEQ ID NO: 1218
uugagaaucauugguugac

SEQ ID NO: 96665 - RNA, 19 nt, Artificial Sequence
  Description of Artificial Sequence: Synthetic oligonucleotide
  Antisense strand to SEQ ID NO: 96584
gucaaccaaugauucucaa

SEQ ID NO: 96666 - RNA, 19 nt, Artificial Sequence
  Description of Artificial Sequence: Synthetic oligonucleotide
  Sense strand starting at position 551 of SEQ ID NO: 1218
ugagaaucauugguugaca

SEQ ID NO: 96667 - RNA, 19 nt, Artificial Sequence
  Description of Artificial Sequence: Synthetic oligonucleotide
  Antisense strand to SEQ ID NO: 96586
ugucaaccaaugauucuca

SEQ ID NO: 96668 - RNA, 19 nt, Artificial Sequence
  Description of Artificial Sequence: Synthetic oligonucleotide
  Sense strand starting at position 552 of SEQ ID NO: 1218
gagaaucauugguugacac

SEQ ID NO: 96669 - RNA, 19 nt, Artificial Sequence
  Description of Artificial Sequence: Synthetic oligonucleotide
  Antisense strand to SEQ ID NO: 96588
gugucaaccaaugauucuc

SEQ ID NO: 96670 - RNA, 19 nt, Artificial Sequence
  Description of Artificial Sequence: Synthetic oligonucleotide
  Sense strand starting at position 562 of SEQ ID NO: 1218
gguugacaccaguaguucu

SEQ ID NO: 96671 - RNA, 19 nt, Artificial Sequence
  Description of Artificial Sequence: Synthetic oligonucleotide
  Antisense strand to SEQ ID NO: 96590
agaacuacuggugucaacc

SEQ ID NO: 96672 - RNA, 19 nt, Artificial Sequence
  Description of Artificial Sequence: Synthetic oligonucleotide
  Sense strand starting at position 583 of SEQ ID NO: 1218
aacauuaguguguaucaga

SEQ ID NO: 96673 - RNA, 19 nt, Artificial Sequence
  Description of Artificial Sequence: Synthetic oligonucleotide
  Antisense strand to SEQ ID NO: 96592
ucugauacacacuaauguu

SEQ ID NO: 96674 - RNA, 19 nt, Artificial Sequence
  Description of Artificial Sequence: Synthetic oligonucleotide
  Sense strand starting at position 741 of SEQ ID NO: 1218
ugggaacuauuggucuaca

SEQ ID NO: 96675 - RNA, 19 nt, Artificial Sequence
  Description of Artificial Sequence: Synthetic oligonucleotide
  Antisense strand to SEQ ID NO: 96594
uguagaccaauaguuccca

SEQ ID NO: 96676 - RNA, 19 nt, Artificial Sequence
  Description of Artificial Sequence: Synthetic oligonucleotide
  Sense strand starting at position 742 of SEQ ID NO: 1218
gggaacuauuggucuacac

SEQ ID NO: 96677 - RNA, 19 nt, Artificial Sequence
  Description of Artificial Sequence: Synthetic oligonucleotide
  Antisense strand to SEQ ID NO: 96596
guguagaccaauaguuccc

SEQ ID NO: 96678 - RNA, 19 nt, Artificial Sequence
  Description of Artificial Sequence: Synthetic oligonucleotide
  Sense strand starting at position 767 of SEQ ID NO: 1218
gcuguuauguaaguagaaa

SEQ ID NO: 96679 - RNA, 19 nt, Artificial Sequence
  Description of Artificial Sequence: Synthetic oligonucleotide
  Antisense strand to SEQ ID NO: 96598
uuucuacuuacauaacagc

SEQ ID NO: 96680 - RNA, 19 nt, Artificial Sequence
  Description of Artificial Sequence: Synthetic oligonucleotide
  Sense strand starting at position 1126 of SEQ ID NO: 1218
accgguauuauauaaggua

SEQ ID NO: 96681 - RNA, 19 nt, Artificial Sequence
  Description of Artificial Sequence: Synthetic oligonucleotide
  Antisense strand to SEQ ID NO: 96600
uaccuuauauaauaccggu

SEQ ID NO: 96682 - RNA, 19 nt, Artificial Sequence
  Description of Artificial Sequence: Synthetic oligonucleotide
  Sense strand starting at position 1215 of SEQ ID NO: 1218
aguuaaugucucugaaccu

SEQ ID NO: 96683 - RNA, 19 nt, Artificial Sequence
  Description of Artificial Sequence: Synthetic oligonucleotide
  Antisense strand to SEQ ID NO: 96602
agguucagagacauuaacu

SEQ ID NO: 96684 - RNA, 19 nt, Artificial Sequence
  Description of Artificial Sequence: Synthetic oligonucleotide
  Sense strand starting at position 1310 of SEQ ID NO: 1218
ucaacaugcccugauaaug

SEQ ID NO: 96685 - RNA, 19 nt, Artificial Sequence
  Description of Artificial Sequence: Synthetic oligonucleotide
  Antisense strand to SEQ ID NO: 96604
cauuaucagggcauguuga

SEQ ID NO: 96686 - RNA, 19 nt, Artificial Sequence
  Description of Artificial Sequence: Synthetic oligonucleotide
  Sense strand starting at position 1535 of SEQ ID NO: 1218
ccugaugaaucugcgauca

SEQ ID NO: 96687 - RNA, 19 nt, Artificial Sequence
  Description of Artificial Sequence: Synthetic oligonucleotide
  Antisense strand to SEQ ID NO: 96606
ugaucgcagauucaucagg

SEQ ID NO: 96688 - RNA, 19 nt, Artificial Sequence
  Description of Artificial Sequence: Synthetic oligonucleotide
  Sense strand starting at position 1540 of SEQ ID NO: 1218
ugaaucugcgaucaagcaa

SEQ ID NO: 96689 - RNA, 19 nt, Artificial Sequence
  Description of Artificial Sequence: Synthetic oligonucleotide
  Antisense strand to SEQ ID NO: 96608
uugcuugaucgcagauuca

SEQ ID NO: 96690 - RNA, 19 nt, Artificial Sequence
  Description of Artificial Sequence: Synthetic oligonucleotide
  Sense strand starting at position 1754 of SEQ ID NO: 1218
aggagcuauacucgguaaa

SEQ ID NO: 96691 - RNA, 19 nt, Artificial Sequence
  Description of Artificial Sequence: Synthetic oligonucleotide
  Antisense strand to SEQ ID NO: 96610
uuuaccgaguauagcuccu

SEQ ID NO: 96692 - RNA, 19 nt, Artificial Sequence
  Description of Artificial Sequence: Synthetic oligonucleotide
  Sense strand starting at position 1755 of SEQ ID NO: 1218
ggagcuauacucgguaaau

SEQ ID NO: 96693 - RNA, 19 nt, Artificial Sequence
  Description of Artificial Sequence: Synthetic oligonucleotide
  Antisense strand to SEQ ID NO: 96612
auuuaccgaguauagcucc

SEQ ID NO: 96694 - RNA, 19 nt, Artificial Sequence
  Description of Artificial Sequence: Synthetic oligonucleotide
  Sense strand starting at position 1756 of SEQ ID NO: 1218
gagcuauacucgguaaaug

SEQ ID NO: 96695 - RNA, 19 nt, Artificial Sequence
  Description of Artificial Sequence: Synthetic oligonucleotide
  Antisense strand to SEQ ID NO: 96614
cauuuaccgaguauagcuc

SEQ ID NO: 96696 - RNA, 19 nt, Artificial Sequence
  Description of Artificial Sequence: Synthetic oligonucleotide
  Sense strand starting at position 1878 of SEQ ID NO: 1218
gcgacauuccuuccgcuuu

SEQ ID NO: 96697 - RNA, 19 nt, Artificial Sequence
  Description of Artificial Sequence: Synthetic oligonucleotide
  Antisense strand to SEQ ID NO: 96616
aaagcggaaggaaugucgc

SEQ ID NO: 96698 - RNA, 19 nt, Artificial Sequence
  Description of Artificial Sequence: Synthetic oligonucleotide
  Sense strand starting at position 2253 of SEQ ID NO: 1218
gggagagagucuuaagaaa

SEQ ID NO: 96699 - RNA, 19 nt, Artificial Sequence
  Description of Artificial Sequence: Synthetic oligonucleotide
  Antisense strand to SEQ ID NO: 96618
uuucuuaagacucucuccc

SEQ ID NO: 96700 - RNA, 19 nt, Artificial Sequence
  Description of Artificial Sequence: Synthetic oligonucleotide
  Sense strand starting at position 2304 of SEQ ID NO: 1218
gaagauuaaaggugugaug

SEQ ID NO: 96701 - RNA, 19 nt, Artificial Sequence
  Description of Artificial Sequence: Synthetic oligonucleotide
  Antisense strand to SEQ ID NO: 96620
caucacaccuuuaaucuuc

SEQ ID NO: 96702 - RNA, 19 nt, Artificial Sequence
  Description of Artificial Sequence: Synthetic oligonucleotide
  Sense strand starting at position 2306 of SEQ ID NO: 1218
agauuaaaggugugaugug

SEQ ID NO: 96703 - RNA, 19 nt, Artificial Sequence
  Description of Artificial Sequence: Synthetic oligonucleotide
  Antisense strand to SEQ ID NO: 96622
cacaucacaccuuuaaucu

SEQ ID NO: 96704 - RNA, 19 nt, Artificial Sequence
  Description of Artificial Sequence: Synthetic oligonucleotide
  Sense strand starting at position 2401 of SEQ ID NO: 1218
ugaagccaagcuugugaaa

SEQ ID NO: 96705 - RNA, 19 nt, Artificial Sequence
  Description of Artificial Sequence: Synthetic oligonucleotide
  Antisense strand to SEQ ID NO: 96624
uuucacaagcuuggcuuca

SEQ ID NO: 96706 - RNA, 19 nt, Artificial Sequence
  Description of Artificial Sequence: Synthetic oligonucleotide
  Sense strand starting at position 2436 of SEQ ID NO: 1218
ugcaauuagcgggaacagu

SEQ ID NO: 96707 - RNA, 19 nt, Artificial Sequence
  Description of Artificial Sequence: Synthetic oligonucleotide
  Antisense strand to SEQ ID NO: 96626
acuguucccgcuaauugca

SEQ ID NO: 96708 - RNA, 19 nt, Artificial Sequence
  Description of Artificial Sequence: Synthetic oligonucleotide
  Sense strand starting at position 2446 of SEQ ID NO: 1218
gggaacaguuuguuaagua

SEQ ID NO: 96709 - RNA, 19 nt, Artificial Sequence
  Description of Artificial Sequence: Synthetic oligonucleotide
  Antisense strand to SEQ ID NO: 96628
uacuuaacaaacuguuccc

SEQ ID NO: 96710 - RNA, 19 nt, Artificial Sequence
  Description of Artificial Sequence: Synthetic oligonucleotide
  Sense strand starting at position 2867 of SEQ ID NO: 1218
aguggaaacuaaguuguuu

SEQ ID NO: 96711 - RNA, 19 nt, Artificial Sequence
  Description of Artificial Sequence: Synthetic oligonucleotide
  Antisense strand to SEQ ID NO: 96630
aaacaacuuaguuuccacu

SEQ ID NO: 96712 - RNA, 19 nt, Artificial Sequence
  Description of Artificial Sequence: Synthetic oligonucleotide
  Sense strand starting at position 2875 of SEQ ID NO: 1218
cuaaguuguuuaucugaua

SEQ ID NO: 96713 - RNA, 19 nt, Artificial Sequence
  Description of Artificial Sequence: Synthetic oligonucleotide
  Antisense strand to SEQ ID NO: 96632
uaucagauaaacaacuuag

SEQ ID NO: 96714 - RNA, 19 nt, Artificial Sequence
  Description of Artificial Sequence: Synthetic oligonucleotide
  Sense strand starting at position 2883 of SEQ ID NO: 1218
uuuaucugauauuccgaua

SEQ ID NO: 96715 - RNA, 19 nt, Artificial Sequence
  Description of Artificial Sequence: Synthetic oligonucleotide
  Antisense strand to SEQ ID NO: 96634
uaucggaauaucagauaaa

SEQ ID NO: 96716 - RNA, 19 nt, Artificial Sequence
  Description of Artificial Sequence: Synthetic oligonucleotide
  Sense strand starting at position 3345 of SEQ ID NO: 1218
ggcuuugugagccaaggua

SEQ ID NO: 96717 - RNA, 19 nt, Artificial Sequence
  Description of Artificial Sequence: Synthetic oligonucleotide
  Antisense strand to SEQ ID NO: 96636
uaccuuggcucacaaagcc

SEQ ID NO: 96718 - RNA, 19 nt, Artificial Sequence
  Description of Artificial Sequence: Synthetic oligonucleotide
  Sense strand starting at position 3534 of SEQ ID NO: 1218
uugauuuacuuguagagac

SEQ ID NO: 96719 - RNA, 19 nt, Artificial Sequence
  Description of Artificial Sequence: Synthetic oligonucleotide
  Antisense strand to SEQ ID NO: 96638
gucucuacaaguaaaucaa

SEQ ID NO: 96720 - RNA, 19 nt, Artificial Sequence
  Description of Artificial Sequence: Synthetic oligonucleotide
  Sense strand starting at position 3753 of SEQ ID NO: 1218
agccucaauuugcuuguua

SEQ ID NO: 96721 - RNA, 19 nt, Artificial Sequence
  Description of Artificial Sequence: Synthetic oligonucleotide
  Antisense strand to SEQ ID NO: 96640
uaacaagcaaauugaggcu

SEQ ID NO: 96722 - RNA, 19 nt, Artificial Sequence
  Description of Artificial Sequence: Synthetic oligonucleotide
  Sense strand starting at position 3754 of SEQ ID NO: 1218
gccucaauuugcuuguuau

SEQ ID NO: 96723 - RNA, 19 nt, Artificial Sequence
  Description of Artificial Sequence: Synthetic oligonucleotide
  Antisense strand to SEQ ID NO: 96642
auaacaagcaaauugaggc

SEQ ID NO: 96724 - RNA, 19 nt, Artificial Sequence
  Description of Artificial Sequence: Synthetic oligonucleotide
  Sense strand starting at position 3755 of SEQ ID NO: 1218
ccucaauuugcuuguuaug

SEQ ID NO: 96725 - RNA, 19 nt, Artificial Sequence
  Description of Artificial Sequence: Synthetic oligonucleotide
  Antisense strand to SEQ ID NO: 96644
cauaacaagcaaauugagg

SEQ ID NO: 96726 - RNA, 19 nt, Artificial Sequence
  Description of Artificial Sequence: Synthetic oligonucleotide
  Sense strand starting at position 3798 of SEQ ID NO: 1218
agagaacuguaagauuuaa

SEQ ID NO: 96727 - RNA, 19 nt, Artificial Sequence
  Description of Artificial Sequence: Synthetic oligonucleotide
  Antisense strand to SEQ ID NO: 96646
uuaaaucuuacaguucucu

SEQ ID NO: 96728 - RNA, 19 nt, Artificial Sequence
  Description of Artificial Sequence: Synthetic oligonucleotide
  Sense strand starting at position 3853 of SEQ ID NO: 1218
agaagaagcucaguaaauu

SEQ ID NO: 96729 - RNA, 19 nt, Artificial Sequence
  Description of Artificial Sequence: Synthetic oligonucleotide
  Antisense strand to SEQ ID NO: 96648
aauuuacugagcuucuucu

SEQ ID NO: 96730 - RNA, 19 nt, Artificial Sequence
  Description of Artificial Sequence: Synthetic oligonucleotide
  Sense strand starting at position 3930 of SEQ ID NO: 1218
aggcaagaggacuguuuaa

SEQ ID NO: 96731 - RNA, 19 nt, Artificial Sequence
  Description of Artificial Sequence: Synthetic oligonucleotide
  Antisense strand to SEQ ID NO: 96650
uuaaacaguccucuugccu

SEQ ID NO: 96732 - RNA, 19 nt, Artificial Sequence
  Description of Artificial Sequence: Synthetic oligonucleotide
  Sense strand starting at position 3510 of SEQ ID NO: 1219
ugcuguuuauuguccuauu

SEQ ID NO: 96733 - RNA, 19 nt, Artificial Sequence
  Description of Artificial Sequence: Synthetic oligonucleotide
  Antisense strand to SEQ ID NO: 96652
aauaggacaauaaacagca

SEQ ID NO: 96734 - RNA, 19 nt, Artificial Sequence
  Description of Artificial Sequence: Synthetic oligonucleotide
  Sense strand starting at position 3320 of SEQ ID NO: 1219
aggaguaacuauccucuua

SEQ ID NO: 96735 - RNA, 19 nt, Artificial Sequence
  Description of Artificial Sequence: Synthetic oligonucleotide
  Antisense strand to SEQ ID NO: 96654
uaagaggauaguuacuccu

SEQ ID NO: 96736 - RNA, 19 nt, Artificial Sequence
  Description of Artificial Sequence: Synthetic oligonucleotide
  Sense strand starting at position 3292 of SEQ ID NO: 1219
ugggccuagaggugugaaa

SEQ ID NO: 96737 - RNA, 19 nt, Artificial Sequence
  Description of Artificial Sequence: Synthetic oligonucleotide
  Antisense strand to SEQ ID NO: 96656
uuucacaccucuaggccca

SEQ ID NO: 96738 - RNA, 19 nt, Artificial Sequence
  Description of Artificial Sequence: Synthetic oligonucleotide
  Sense strand starting at position 3247 of SEQ ID NO: 1219
aacguuauuguuuagaguu

SEQ ID NO: 96739 - RNA, 19 nt, Artificial Sequence
  Description of Artificial Sequence: Synthetic oligonucleotide
  Antisense strand to SEQ ID NO: 96658
aacucuaaacaauaacguu

SEQ ID NO: 96740 - RNA, 19 nt, Artificial Sequence
  Description of Artificial Sequence: Synthetic oligonucleotide
  Sense strand starting at position 3246 of SEQ ID NO: 1219
uaacguuauuguuuagagu

SEQ ID NO: 96741 - RNA, 19 nt, Artificial Sequence
  Description of Artificial Sequence: Synthetic oligonucleotide
  Antisense strand to SEQ ID NO: 96660
acucuaaacaauaacguua

SEQ ID NO: 96742 - RNA, 19 nt, Artificial Sequence
  Description of Artificial Sequence: Synthetic oligonucleotide
  Sense strand starting at position 3242 of SEQ ID NO: 1219
cccauaacguuauuguuua

SEQ ID NO: 96743 - RNA, 19 nt, Artificial Sequence
  Description of Artificial Sequence: Synthetic oligonucleotide
  Antisense strand to SEQ ID NO: 96662
uaaacaauaacguuauggg

SEQ ID NO: 96744 - RNA, 19 nt, Artificial Sequence
  Description of Artificial Sequence: Synthetic oligonucleotide
  Sense strand starting at position 3029 of SEQ ID NO: 1219
uucugagauguuuggguuu

SEQ ID NO: 96745 - RNA, 19 nt, Artificial Sequence
  Description of Artificial Sequence: Synthetic oligonucleotide
  Antisense strand to SEQ ID NO: 96664
aaacccaaacaucucagaa

SEQ ID NO: 96746 - RNA, 19 nt, Artificial Sequence
  Description of Artificial Sequence: Synthetic oligonucleotide
  Sense strand starting at position 2539 of SEQ ID NO: 1219
gaauuaucugcggaucuug

SEQ ID NO: 96747 - RNA, 19 nt, Artificial Sequence
  Description of Artificial Sequence: Synthetic oligonucleotide
  Antisense strand to SEQ ID NO: 96666
caagauccgcagauaauuc

SEQ ID NO: 96748 - RNA, 19 nt, Artificial Sequence
  Description of Artificial Sequence: Synthetic oligonucleotide
  Sense strand starting at position 2537 of SEQ ID NO: 1219
augaauuaucugcggaucu

SEQ ID NO: 96749 - RNA, 19 nt, Artificial Sequence
  Description of Artificial Sequence: Synthetic oligonucleotide
  Antisense strand to SEQ ID NO: 96668
agauccgcagauaauucau

SEQ ID NO: 96750 - RNA, 19 nt, Artificial Sequence
  Description of Artificial Sequence: Synthetic oligonucleotide
  Sense strand starting at position 2536 of SEQ ID NO: 1219
uaugaauuaucugcggauc

SEQ ID NO: 96751 - RNA, 19 nt, Artificial Sequence
  Description of Artificial Sequence: Synthetic oligonucleotide
  Antisense strand to SEQ ID NO: 96670
gauccgcagauaauucaua

SEQ ID NO: 96752 - RNA, 19 nt, Artificial Sequence
  Description of Artificial Sequence: Synthetic oligonucleotide
  Sense strand starting at position 2535 of SEQ ID NO: 1219
guaugaauuaucugcggau

SEQ ID NO: 96753 - RNA, 19 nt, Artificial Sequence
  Description of Artificial Sequence: Synthetic oligonucleotide
  Antisense strand to SEQ ID NO: 96672
auccgcagauaauucauac

SEQ ID NO: 96754 - RNA, 19 nt, Artificial Sequence
  Description of Artificial Sequence: Synthetic oligonucleotide
  Sense strand starting at position 2524 of SEQ ID NO: 1219
cuugacugugcguaugaau

SEQ ID NO: 96755 - RNA, 19 nt, Artificial Sequence
  Description of Artificial Sequence: Synthetic oligonucleotide
  Antisense strand to SEQ ID NO: 96674
auucauacgcacagucaag

SEQ ID NO: 96756 - RNA, 19 nt, Artificial Sequence
  Description of Artificial Sequence: Synthetic oligonucleotide
  Sense strand starting at position 2507 of SEQ ID NO: 1219
gcaagaugcuccuuaagcu

SEQ ID NO: 96757 - RNA, 19 nt, Artificial Sequence
  Description of Artificial Sequence: Synthetic oligonucleotide
  Antisense strand to SEQ ID NO: 96676
agcuuaaggagcaucuugc

SEQ ID NO: 96758 - RNA, 19 nt, Artificial Sequence
  Description of Artificial Sequence: Synthetic oligonucleotide
  Sense strand starting at position 2334 of SEQ ID NO: 1219
agcagaggaauuggguaua

SEQ ID NO: 96759 - RNA, 19 nt, Artificial Sequence
  Description of Artificial Sequence: Synthetic oligonucleotide
  Antisense strand to SEQ ID NO: 96678
uauacccaauuccucugcu

SEQ ID NO: 96760 - RNA, 19 nt, Artificial Sequence
  Description of Artificial Sequence: Synthetic oligonucleotide
  Sense strand starting at position 2266 of SEQ ID NO: 1219
gucagagaugugggaguuu

SEQ ID NO: 96761 - RNA, 19 nt, Artificial Sequence
  Description of Artificial Sequence: Synthetic oligonucleotide
  Antisense strand to SEQ ID NO: 96680
aaacucccacaucucugac

SEQ ID NO: 96762 - RNA, 19 nt, Artificial Sequence
  Description of Artificial Sequence: Synthetic oligonucleotide
  Sense strand starting at position 2264 of SEQ ID NO: 1219
cagucagagaugugggagu

SEQ ID NO: 96763 - RNA, 19 nt, Artificial Sequence
  Description of Artificial Sequence: Synthetic oligonucleotide
  Antisense strand to SEQ ID NO: 96682
acucccacaucucugacug

SEQ ID NO: 96764 - RNA, 19 nt, Artificial Sequence
  Description of Artificial Sequence: Synthetic oligonucleotide
  Sense strand starting at position 2228 of SEQ ID NO: 1219
ccaauacauguuugcagaa

SEQ ID NO: 96765 - RNA, 19 nt, Artificial Sequence
  Description of Artificial Sequence: Synthetic oligonucleotide
  Antisense strand to SEQ ID NO: 96684
uucugcaaacauguauugg

SEQ ID NO: 96766 - RNA, 19 nt, Artificial Sequence
  Description of Artificial Sequence: Synthetic oligonucleotide
  Sense strand starting at position 2227 of SEQ ID NO: 1219
cccaauacauguuugcaga

SEQ ID NO: 96767 - RNA, 19 nt, Artificial Sequence
  Description of Artificial Sequence: Synthetic oligonucleotide
  Antisense strand to SEQ ID NO: 96686
ucugcaaacauguauuggg

SEQ ID NO: 96768 - RNA, 19 nt, Artificial Sequence
  Description of Artificial Sequence: Synthetic oligonucleotide
  Sense strand starting at position 2133 of SEQ ID NO: 1219
gggcgauucuggaguugga

SEQ ID NO: 96769 - RNA, 19 nt, Artificial Sequence
  Description of Artificial Sequence: Synthetic oligonucleotide
  Antisense strand to SEQ ID NO: 96688
uccaacuccagaaucgccc

SEQ ID NO: 96770 - RNA, 19 nt, Artificial Sequence
  Description of Artificial Sequence: Synthetic oligonucleotide
  Sense strand starting at position 1628 of SEQ ID NO: 1219
agcuuaacucugggagcau

SEQ ID NO: 96771 - RNA, 19 nt, Artificial Sequence
  Description of Artificial Sequence: Synthetic oligonucleotide
  Antisense strand to SEQ ID NO: 96690
augcucccagaguuaagcu

SEQ ID NO: 96772 - RNA, 19 nt, Artificial Sequence
  Description of Artificial Sequence: Synthetic oligonucleotide
  Sense strand starting at position 1592 of SEQ ID NO: 1219
agcaguuagguggagaguu

SEQ ID NO: 96773 - RNA, 19 nt, Artificial Sequence
  Description of Artificial Sequence: Synthetic oligonucleotide
  Antisense strand to SEQ ID NO: 96692
aacucuccaccuaacugcu

SEQ ID NO: 96774 - RNA, 19 nt, Artificial Sequence
  Description of Artificial Sequence: Synthetic oligonucleotide
  Sense strand starting at position 1581 of SEQ ID NO: 1219
gagggauucugagcaguua

SEQ ID NO: 96775 - RNA, 19 nt, Artificial Sequence
  Description of Artificial Sequence: Synthetic oligonucleotide
  Antisense strand to SEQ ID NO: 96694
uaacugcucagaaucccuc

SEQ ID NO: 96776 - RNA, 19 nt, Artificial Sequence
  Description of Artificial Sequence: Synthetic oligonucleotide
  Sense strand starting at position 1561 of SEQ ID NO: 1219
gcguuuacggauugaucug

SEQ ID NO: 96777 - RNA, 19 nt, Artificial Sequence
  Description of Artificial Sequence: Synthetic oligonucleotide
  Antisense strand to SEQ ID NO: 96696
cagaucaauccguaaacgc

SEQ ID NO: 96778 - RNA, 19 nt, Artificial Sequence
  Description of Artificial Sequence: Synthetic oligonucleotide
  Sense strand starting at position 1528 of SEQ ID NO: 1219
acaaguaauggacgucacu

SEQ ID NO: 96779 - RNA, 19 nt, Artificial Sequence
  Description of Artificial Sequence: Synthetic oligonucleotide
  Antisense strand to SEQ ID NO: 96698
agugacguccauuacuugu

SEQ ID NO: 96780 - RNA, 19 nt, Artificial Sequence
  Description of Artificial Sequence: Synthetic oligonucleotide
  Sense strand starting at position 1441 of SEQ ID NO: 1219
ccaauuauuuggcaggaau

SEQ ID NO: 96781 - RNA, 19 nt, Artificial Sequence
  Description of Artificial Sequence: Synthetic oligonucleotide
  Antisense strand to SEQ ID NO: 96700
auuccugccaaauaauugg

SEQ ID NO: 96782 - RNA, 19 nt, Artificial Sequence
  Description of Artificial Sequence: Synthetic oligonucleotide
  Sense strand starting at position 1397 of SEQ ID NO: 1219
cugcguuggguucucagua

SEQ ID NO: 96783 - RNA, 19 nt, Artificial Sequence
  Description of Artificial Sequence: Synthetic oligonucleotide
  Antisense strand to SEQ ID NO: 96702
uacugagaacccaacgcag

SEQ ID NO: 96784 - RNA, 19 nt, Artificial Sequence
  Description of Artificial Sequence: Synthetic oligonucleotide
  Sense strand starting at position 1140 of SEQ ID NO: 1219
cugcuaugggucuaggaac

SEQ ID NO: 96785 - RNA, 19 nt, Artificial Sequence
  Description of Artificial Sequence: Synthetic oligonucleotide
  Antisense strand to SEQ ID NO: 96704
guuccuagacccauagcag

SEQ ID NO: 96786 - RNA, 19 nt, Artificial Sequence
  Description of Artificial Sequence: Synthetic oligonucleotide
  Sense strand starting at position 1056 of SEQ ID NO: 1219
uccaguuuaccuggaagac

SEQ ID NO: 96787 - RNA, 19 nt, Artificial Sequence
  Description of Artificial Sequence: Synthetic oligonucleotide
  Antisense strand to SEQ ID NO: 96706
gucuuccagguaaacugga

SEQ ID NO: 96788 - RNA, 19 nt, Artificial Sequence
  Description of Artificial Sequence: Synthetic oligonucleotide
  Sense strand starting at position 899 of SEQ ID NO: 1219
agguguaaaucacccacuu

SEQ ID NO: 96789 - RNA, 19 nt, Artificial Sequence
  Description of Artificial Sequence: Synthetic oligonucleotide
  Antisense strand to SEQ ID NO: 96708
aagugggugauuuacaccu

SEQ ID NO: 96790 - RNA, 19 nt, Artificial Sequence
  Description of Artificial Sequence: Synthetic oligonucleotide
  Sense strand starting at position 890 of SEQ ID NO: 1219
aguaguggcagguguaaau

SEQ ID NO: 96791 - RNA, 19 nt, Artificial Sequence
  Description of Artificial Sequence: Synthetic oligonucleotide
  Antisense strand to SEQ ID NO: 96710
auuuacaccugccacuacu

SEQ ID NO: 96792 - RNA, 19 nt, Artificial Sequence
  Description of Artificial Sequence: Synthetic oligonucleotide
  Sense strand starting at position 888 of SEQ ID NO: 1219
aaaguaguggcagguguaa

SEQ ID NO: 96793 - RNA, 19 nt, Artificial Sequence
  Description of Artificial Sequence: Synthetic oligonucleotide
  Antisense strand to SEQ ID NO: 96712
uuacaccugccacuacuuu

SEQ ID NO: 96794 - RNA, 19 nt, Artificial Sequence
  Description of Artificial Sequence: Synthetic oligonucleotide
  Sense strand starting at position 799 of SEQ ID NO: 1219
ggaagacuuuagcugacgu

SEQ ID NO: 96795 - RNA, 19 nt, Artificial Sequence
  Description of Artificial Sequence: Synthetic oligonucleotide
  Antisense strand to SEQ ID NO: 96714
acgucagcuaaagucuucc

SEQ ID NO: 96796 - RNA, 19 nt, Artificial Sequence
  Description of Artificial Sequence: Synthetic oligonucleotide
  Sense strand starting at position 576 of SEQ ID NO: 1219
agccuugcucuggagaauu

SEQ ID NO: 96797 - RNA, 19 nt, Artificial Sequence
  Description of Artificial Sequence: Synthetic oligonucleotide
  Antisense strand to SEQ ID NO: 96716
aauucuccagagcaaggcu

SEQ ID NO: 96798 - RNA, 19 nt, Artificial Sequence
  Description of Artificial Sequence: Synthetic oligonucleotide
  Sense strand starting at position 574 of SEQ ID NO: 1219
acagccuugcucuggagaa

SEQ ID NO: 96799 - RNA, 19 nt, Artificial Sequence
  Description of Artificial Sequence: Synthetic oligonucleotide
  Antisense strand to SEQ ID NO: 96718
uucuccagagcaaggcugu

SEQ ID NO: 96800 - RNA, 19 nt, Artificial Sequence
  Description of Artificial Sequence: Synthetic oligonucleotide
  Sense strand starting at position 518 of SEQ ID NO: 1219
gagcuaaaguuuguacagu

SEQ ID NO: 96801 - RNA, 19 nt, Artificial Sequence
  Description of Artificial Sequence: Synthetic oligonucleotide
  Antisense strand to SEQ ID NO: 96720
acuguacaaacuuuagcuc

SEQ ID NO: 96802 - RNA, 19 nt, Artificial Sequence
  Description of Artificial Sequence: Synthetic oligonucleotide
  Sense strand starting at position 506 of SEQ ID NO: 1219
uuacuaggccuugagcuaa

SEQ ID NO: 96803 - RNA, 19 nt, Artificial Sequence
  Description of Artificial Sequence: Synthetic oligonucleotide
  Antisense strand to SEQ ID NO: 96722
uuagcucaaggccuaguaa

SEQ ID NO: 96804 - RNA, 19 nt, Artificial Sequence
  Description of Artificial Sequence: Synthetic oligonucleotide
  Sense strand starting at position 505 of SEQ ID NO: 1219
cuuacuaggccuugagcua

SEQ ID NO: 96805 - RNA, 19 nt, Artificial Sequence
  Description of Artificial Sequence: Synthetic oligonucleotide
  Antisense strand to SEQ ID NO: 96724
uagcucaaggccuaguaag

SEQ ID NO: 96806 - RNA, 19 nt, Artificial Sequence
  Description of Artificial Sequence: Synthetic oligonucleotide
  Sense strand starting at position 453 of SEQ ID NO: 1219
gcacaugcacugggugaaa

SEQ ID NO: 96807 - RNA, 19 nt, Artificial Sequence
  Description of Artificial Sequence: Synthetic oligonucleotide
  Antisense strand to SEQ ID NO: 96726
uuucacccagugcaugugc

SEQ ID NO: 96808 - RNA, 19 nt, Artificial Sequence
  Description of Artificial Sequence: Synthetic oligonucleotide
  Sense strand starting at position 418 of SEQ ID NO: 1219
gagagcaucauguaaagug

SEQ ID NO: 96809 - RNA, 19 nt, Artificial Sequence
  Description of Artificial Sequence: Synthetic oligonucleotide
  Antisense strand to SEQ ID NO: 96728
cacuuuacaugaugcucuc

SEQ ID NO: 96810 - RNA, 19 nt, Artificial Sequence
  Description of Artificial Sequence: Synthetic oligonucleotide
  Sense strand starting at position 399 of SEQ ID NO: 1219
ggguuacuguggagaugaa

SEQ ID NO: 96811 - RNA, 19 nt, Artificial Sequence
  Description of Artificial Sequence: Synthetic oligonucleotide
  Antisense strand to SEQ ID NO: 96730
uucaucuccacaguaaccc

SEQ ID NO: 96812 - RNA, 19 nt, Artificial Sequence
  Description of Artificial Sequence: Synthetic oligonucleotide
  Sense strand starting at position 17 of SEQ ID NO: 1220
caaugaaccuguguuugcu

SEQ ID NO: 96813 - RNA, 19 nt, Artificial Sequence
  Description of Artificial Sequence: Synthetic oligonucleotide
  Antisense strand to SEQ ID NO: 96732
agcaaacacagguucauug

SEQ ID NO: 96814 - RNA, 19 nt, Artificial Sequence
  Description of Artificial Sequence: Synthetic oligonucleotide
  Sense strand starting at position 151 of SEQ ID NO: 1220
ggaguaaauucuucuagga

SEQ ID NO: 96815 - RNA, 19 nt, Artificial Sequence
  Description of Artificial Sequence: Synthetic oligonucleotide
  Antisense strand to SEQ ID NO: 96734
uccuagaagaauuuacucc

SEQ ID NO: 96816 - RNA, 19 nt, Artificial Sequence
  Description of Artificial Sequence: Synthetic oligonucleotide
  Sense strand starting at position 153 of SEQ ID NO: 1220
aguaaauucuucuaggagu

SEQ ID NO: 96817 - RNA, 19 nt, Artificial Sequence
  Description of Artificial Sequence: Synthetic oligonucleotide
  Antisense strand to SEQ ID NO: 96736
acuccuagaagaauuuacu

SEQ ID NO: 96818 - RNA, 19 nt, Artificial Sequence
  Description of Artificial Sequence: Synthetic oligonucleotide
  Sense strand starting at position 164 of SEQ ID NO: 1220
cuaggaguaaauugagcaa

SEQ ID NO: 96819 - RNA, 19 nt, Artificial Sequence
  Description of Artificial Sequence: Synthetic oligonucleotide
  Antisense strand to SEQ ID NO: 96738
uugcucaauuuacuccuag

SEQ ID NO: 96820 - RNA, 19 nt, Artificial Sequence
  Description of Artificial Sequence: Synthetic oligonucleotide
  Sense strand starting at position 391 of SEQ ID NO: 1220
agucaaaucuuauuaggug

SEQ ID NO: 96821 - RNA, 19 nt, Artificial Sequence
  Description of Artificial Sequence: Synthetic oligonucleotide
  Antisense strand to SEQ ID NO: 96740
caccuaauaagauuugacu

SEQ ID NO: 96822 - RNA, 19 nt, Artificial Sequence
  Description of Artificial Sequence: Synthetic oligonucleotide
  Sense strand starting at position 392 of SEQ ID NO: 1220
gucaaaucuuauuagguga

SEQ ID NO: 96823 - RNA, 19 nt, Artificial Sequence
  Description of Artificial Sequence: Synthetic oligonucleotide
  Antisense strand to SEQ ID NO: 96742
ucaccuaauaagauuugac

SEQ ID NO: 96824 - RNA, 19 nt, Artificial Sequence
  Description of Artificial Sequence: Synthetic oligonucleotide
  Sense strand starting at position 399 of SEQ ID NO: 1220
cuuauuaggugaucugaau

SEQ ID NO: 96825 - RNA, 19 nt, Artificial Sequence
  Description of Artificial Sequence: Synthetic oligonucleotide
  Antisense strand to SEQ ID NO: 96744
auucagaucaccuaauaag

SEQ ID NO: 96826 - RNA, 19 nt, Artificial Sequence
  Description of Artificial Sequence: Synthetic oligonucleotide
  Sense strand starting at position 581 of SEQ ID NO: 1220
gcgcaauccuucucccaag

SEQ ID NO: 96827 - RNA, 19 nt, Artificial Sequence
  Description of Artificial Sequence: Synthetic oligonucleotide
  Antisense strand to SEQ ID NO: 96746
cuugggagaaggauugcgc

SEQ ID NO: 96828 - RNA, 19 nt, Artificial Sequence
  Description of Artificial Sequence: Synthetic oligonucleotide
  Sense strand starting at position 727 of SEQ ID NO: 1220
cucggcauucccgaaacaa

SEQ ID NO: 96829 - RNA, 19 nt, Artificial Sequence
  Description of Artificial Sequence: Synthetic oligonucleotide
  Antisense strand to SEQ ID NO: 96748
uuguuucgggaaugccgag

SEQ ID NO: 96830 - RNA, 19 nt, Artificial Sequence
  Description of Artificial Sequence: Synthetic oligonucleotide
  Sense strand starting at position 776 of SEQ ID NO: 1220
ggguugacgcgaugaagaa

SEQ ID NO: 96831 - RNA, 19 nt, Artificial Sequence
  Description of Artificial Sequence: Synthetic oligonucleotide
  Antisense strand to SEQ ID NO: 96750
uucuucaucgcgucaaccc

SEQ ID NO: 96832 - RNA, 19 nt, Artificial Sequence
  Description of Artificial Sequence: Synthetic oligonucleotide
  Sense strand starting at position 777 of SEQ ID NO: 1220
gguugacgcgaugaagaaa

SEQ ID NO: 96833 - RNA, 19 nt, Artificial Sequence
  Description of Artificial Sequence: Synthetic oligonucleotide
  Antisense strand to SEQ ID NO: 96752
uuucuucaucgcgucaacc

SEQ ID NO: 96834 - RNA, 19 nt, Artificial Sequence
  Description of Artificial Sequence: Synthetic oligonucleotide
  Sense strand starting at position 815 of SEQ ID NO: 1220
uggucuuucucggcucaca

SEQ ID NO: 96835 - RNA, 19 nt, Artificial Sequence
  Description of Artificial Sequence: Synthetic oligonucleotide
  Antisense strand to SEQ ID NO: 96754
ugugagccgagaaagacca

SEQ ID NO: 96836 - RNA, 19 nt, Artificial Sequence
  Description of Artificial Sequence: Synthetic oligonucleotide
  Sense strand starting at position 1145 of SEQ ID NO: 1220
auuaauuaguccuaaggac

SEQ ID NO: 96837 - RNA, 19 nt, Artificial Sequence
  Description of Artificial Sequence: Synthetic oligonucleotide
  Antisense strand to SEQ ID NO: 96756
guccuuaggacuaauuaau

SEQ ID NO: 96838 - RNA, 19 nt, Artificial Sequence
  Description of Artificial Sequence: Synthetic oligonucleotide
  Sense strand starting at position 1185 of SEQ ID NO: 1220
aagcgaaugccucgaauuc

SEQ ID NO: 96839 - RNA, 19 nt, Artificial Sequence
  Description of Artificial Sequence: Synthetic oligonucleotide
  Antisense strand to SEQ ID NO: 96758
gaauucgaggcauucgcuu

SEQ ID NO: 96840 - RNA, 19 nt, Artificial Sequence
  Description of Artificial Sequence: Synthetic oligonucleotide
  Sense strand starting at position 1398 of SEQ ID NO: 1220
ggcccuuccugucugauca

SEQ ID NO: 96841 - RNA, 19 nt, Artificial Sequence
  Description of Artificial Sequence: Synthetic oligonucleotide
  Antisense strand to SEQ ID NO: 96760
ugaucagacaggaagggcc

SEQ ID NO: 96842 - RNA, 19 nt, Artificial Sequence
  Description of Artificial Sequence: Synthetic oligonucleotide
  Sense strand starting at position 2014 of SEQ ID NO: 1220
caaauugugacgucagcgu

SEQ ID NO: 96843 - RNA, 19 nt, Artificial Sequence
  Description of Artificial Sequence: Synthetic oligonucleotide
  Antisense strand to SEQ ID NO: 96762
acgcugacgucacaauuug

SEQ ID NO: 96844 - RNA, 19 nt, Artificial Sequence
  Description of Artificial Sequence: Synthetic oligonucleotide
  Sense strand starting at position 2280 of SEQ ID NO: 1220
cgcuuaaacucagaaguuc

SEQ ID NO: 96845 - RNA, 19 nt, Artificial Sequence
  Description of Artificial Sequence: Synthetic oligonucleotide
  Antisense strand to SEQ ID NO: 96764
gaacuucugaguuuaagcg

SEQ ID NO: 96846 - RNA, 19 nt, Artificial Sequence
  Description of Artificial Sequence: Synthetic oligonucleotide
  Sense strand starting at position 2548 of SEQ ID NO: 1220
uggaaaggugcuuagccua

SEQ ID NO: 96847 - RNA, 19 nt, Artificial Sequence
  Description of Artificial Sequence: Synthetic oligonucleotide
  Antisense strand to SEQ ID NO: 96766
uaggcuaagcaccuuucca

SEQ ID NO: 96848 - RNA, 19 nt, Artificial Sequence
  Description of Artificial Sequence: Synthetic oligonucleotide
  Sense strand starting at position 2551 of SEQ ID NO: 1220
aaaggugcuuagccuagaa

SEQ ID NO: 96849 - RNA, 19 nt, Artificial Sequence
  Description of Artificial Sequence: Synthetic oligonucleotide
  Antisense strand to SEQ ID NO: 96768
uucuaggcuaagcaccuuu

SEQ ID NO: 96850 - RNA, 19 nt, Artificial Sequence
  Description of Artificial Sequence: Synthetic oligonucleotide
  Sense strand starting at position 2563 of SEQ ID NO: 1220
ccuagaaccugauauggaa

SEQ ID NO: 96851 - RNA, 19 nt, Artificial Sequence
  Description of Artificial Sequence: Synthetic oligonucleotide
  Antisense strand to SEQ ID NO: 96770
uuccauaucagguucuagg

SEQ ID NO: 96852 - RNA, 19 nt, Artificial Sequence
  Description of Artificial Sequence: Synthetic oligonucleotide
  Sense strand starting at position 2566 of SEQ ID NO: 1220
agaaccugauauggaauaa

SEQ ID NO: 96853 - RNA, 19 nt, Artificial Sequence
  Description of Artificial Sequence: Synthetic oligonucleotide
  Antisense strand to SEQ ID NO: 96772
uuauuccauaucagguucu

SEQ ID NO: 96854 - RNA, 19 nt, Artificial Sequence
  Description of Artificial Sequence: Synthetic oligonucleotide
  Sense strand starting at position 2675 of SEQ ID NO: 1220
ugcuauuaauucuuugugu

SEQ ID NO: 96855 - RNA, 19 nt, Artificial Sequence
  Description of Artificial Sequence: Synthetic oligonucleotide
  Antisense strand to SEQ ID NO: 96774
acacaaagaauuaauagca

SEQ ID NO: 96856 - RNA, 19 nt, Artificial Sequence
  Description of Artificial Sequence: Synthetic oligonucleotide
  Sense strand starting at position 2676 of SEQ ID NO: 1220
gcuauuaauucuuugugug

SEQ ID NO: 96857 - RNA, 19 nt, Artificial Sequence
  Description of Artificial Sequence: Synthetic oligonucleotide
  Antisense strand to SEQ ID NO: 96776
cacacaaagaauuaauagc

SEQ ID NO: 96858 - RNA, 19 nt, Artificial Sequence
  Description of Artificial Sequence: Synthetic oligonucleotide
  Sense strand starting at position 2677 of SEQ ID NO: 1220
cuauuaauucuuuguguga

SEQ ID NO: 96859 - RNA, 19 nt, Artificial Sequence
  Description of Artificial Sequence: Synthetic oligonucleotide
  Antisense strand to SEQ ID NO: 96778
ucacacaaagaauuaauag

SEQ ID NO: 96860 - RNA, 19 nt, Artificial Sequence
  Description of Artificial Sequence: Synthetic oligonucleotide
  Sense strand starting at position 2681 of SEQ ID NO: 1220
uaauucuuugugugaugcu

SEQ ID NO: 96861 - RNA, 19 nt, Artificial Sequence
  Description of Artificial Sequence: Synthetic oligonucleotide
  Antisense strand to SEQ ID NO: 96780
agcaucacacaaagaauua

SEQ ID NO: 96862 - RNA, 19 nt, Artificial Sequence
  Description of Artificial Sequence: Synthetic oligonucleotide
  Sense strand starting at position 2714 of SEQ ID NO: 1220
ccaucuauguucccgauuu

SEQ ID NO: 96863 - RNA, 19 nt, Artificial Sequence
  Description of Artificial Sequence: Synthetic oligonucleotide
  Antisense strand to SEQ ID NO: 96782
aaaucgggaacauagaugg

SEQ ID NO: 96864 - RNA, 19 nt, Artificial Sequence
  Description of Artificial Sequence: Synthetic oligonucleotide
  Sense strand starting at position 2832 of SEQ ID NO: 1220
caccuagugcccugagaag

SEQ ID NO: 96865 - RNA, 19 nt, Artificial Sequence
  Description of Artificial Sequence: Synthetic oligonucleotide
  Antisense strand to SEQ ID NO: 96784
cuucucagggcacuaggug

SEQ ID NO: 96866 - RNA, 19 nt, Artificial Sequence
  Description of Artificial Sequence: Synthetic oligonucleotide
  Sense strand starting at position 2993 of SEQ ID NO: 1220
gcugcuuccucucugacua

SEQ ID NO: 96867 - RNA, 19 nt, Artificial Sequence
  Description of Artificial Sequence: Synthetic oligonucleotide
  Antisense strand to SEQ ID NO: 96786
uagucagagaggaagcagc

SEQ ID NO: 96868 - RNA, 19 nt, Artificial Sequence
  Description of Artificial Sequence: Synthetic oligonucleotide
  Sense strand starting at position 3018 of SEQ ID NO: 1220
caugguuggucucuugaga

SEQ ID NO: 96869 - RNA, 19 nt, Artificial Sequence
  Description of Artificial Sequence: Synthetic oligonucleotide
  Antisense strand to SEQ ID NO: 96788
ucucaagagaccaaccaug

SEQ ID NO: 96870 - RNA, 19 nt, Artificial Sequence
  Description of Artificial Sequence: Synthetic oligonucleotide
  Sense strand starting at position 3035 of SEQ ID NO: 1220
gacaucucuuguguaagcu

SEQ ID NO: 96871 - RNA, 19 nt, Artificial Sequence
  Description of Artificial Sequence: Synthetic oligonucleotide
  Antisense strand to SEQ ID NO: 96790
agcuuacacaagagauguc

SEQ ID NO: 96872 - RNA, 19 nt, Artificial Sequence
  Description of Artificial Sequence: Synthetic oligonucleotide
  Sense strand starting at position 3047 of SEQ ID NO: 1220
guaagcucuuuauugccua

SEQ ID NO: 96873 - RNA, 19 nt, Artificial Sequence
  Description of Artificial Sequence: Synthetic oligonucleotide
  Antisense strand to SEQ ID NO: 96792
uaggcaauaaagagcuuac

SEQ ID NO: 96874 - RNA, 19 nt, Artificial Sequence
  Description of Artificial Sequence: Synthetic oligonucleotide
  Sense strand starting at position 3051 of SEQ ID NO: 1220
gcucuuuauugccuaugga

SEQ ID NO: 96875 - RNA, 19 nt, Artificial Sequence
  Description of Artificial Sequence: Synthetic oligonucleotide
  Antisense strand to SEQ ID NO: 96794
uccauaggcaauaaagagc

SEQ ID NO: 96876 - RNA, 19 nt, Artificial Sequence
  Description of Artificial Sequence: Synthetic oligonucleotide
  Sense strand starting at position 3052 of SEQ ID NO: 1220
cucuuuauugccuauggaa

SEQ ID NO: 96877 - RNA, 19 nt, Artificial Sequence
  Description of Artificial Sequence: Synthetic oligonucleotide
  Antisense strand to SEQ ID NO: 96796
uuccauaggcaauaaagag

SEQ ID NO: 96878 - RNA, 19 nt, Artificial Sequence
  Description of Artificial Sequence: Synthetic oligonucleotide
  Sense strand starting at position 3090 of SEQ ID NO: 1220
cugguaugaucacuuccua

SEQ ID NO: 96879 - RNA, 19 nt, Artificial Sequence
  Description of Artificial Sequence: Synthetic oligonucleotide
  Antisense strand to SEQ ID NO: 96798
uaggaagugaucauaccag

SEQ ID NO: 96880 - RNA, 19 nt, Artificial Sequence
  Description of Artificial Sequence: Synthetic oligonucleotide
  Sense strand starting at position 3334 of SEQ ID NO: 1220
ucccauuuguuucuuagca

SEQ ID NO: 96881 - RNA, 19 nt, Artificial Sequence
  Description of Artificial Sequence: Synthetic oligonucleotide
  Antisense strand to SEQ ID NO: 96800
ugcuaagaaacaaauggga

SEQ ID NO: 96882 - RNA, 19 nt, Artificial Sequence
  Description of Artificial Sequence: Synthetic oligonucleotide
  Sense strand starting at position 3336 of SEQ ID NO: 1220
ccauuuguuucuuagcacu

SEQ ID NO: 96883 - RNA, 19 nt, Artificial Sequence
  Description of Artificial Sequence: Synthetic oligonucleotide
  Antisense strand to SEQ ID NO: 96802
agugcuaagaaacaaaugg

SEQ ID NO: 96884 - RNA, 19 nt, Artificial Sequence
  Description of Artificial Sequence: Synthetic oligonucleotide
  Sense strand starting at position 3350 of SEQ ID NO: 1220
gcacuuccuggaggucaga

SEQ ID NO: 96885 - RNA, 19 nt, Artificial Sequence
  Description of Artificial Sequence: Synthetic oligonucleotide
  Antisense strand to SEQ ID NO: 96804
ucugaccuccaggaagugc

SEQ ID NO: 96886 - RNA, 19 nt, Artificial Sequence
  Description of Artificial Sequence: Synthetic oligonucleotide
  Sense strand starting at position 3543 of SEQ ID NO: 1220
ggcacaguguuccacaaac

SEQ ID NO: 96887 - RNA, 19 nt, Artificial Sequence
  Description of Artificial Sequence: Synthetic oligonucleotide
  Antisense strand to SEQ ID NO: 96806
guuuguggaacacugugcc

SEQ ID NO: 96888 - RNA, 19 nt, Artificial Sequence
  Description of Artificial Sequence: Synthetic oligonucleotide
  Sense strand starting at position 3566 of SEQ ID NO: 1220
ugaacaauaugauugucau

SEQ ID NO: 96889 - RNA, 19 nt, Artificial Sequence
  Description of Artificial Sequence: Synthetic oligonucleotide
  Antisense strand to SEQ ID NO: 96808
augacaaucauauuguuca

SEQ ID NO: 96890 - RNA, 19 nt, Artificial Sequence
  Description of Artificial Sequence: Synthetic oligonucleotide
  Sense strand starting at position 3928 of SEQ ID NO: 1220
guaguauuauauugaccag

SEQ ID NO: 96891 - RNA, 19 nt, Artificial Sequence
  Description of Artificial Sequence: Synthetic oligonucleotide
  Antisense strand to SEQ ID NO: 96810
cuggucaauauaauacuac

SEQ ID NO: 96892 - RNA, 19 nt, Artificial Sequence
  Description of Artificial Sequence: Synthetic oligonucleotide
  Sense strand starting at position 3967 of SEQ ID NO: 1221
uuuggaugauacuccaauu

SEQ ID NO: 96893 - RNA, 19 nt, Artificial Sequence
  Description of Artificial Sequence: Synthetic oligonucleotide
  Antisense strand to SEQ ID NO: 96812
aauuggaguaucauccaaa

SEQ ID NO: 96894 - RNA, 19 nt, Artificial Sequence
  Description of Artificial Sequence: Synthetic oligonucleotide
  Sense strand starting at position 3959 of SEQ ID NO: 1221
agacccuauuuggaugaua

SEQ ID NO: 96895 - RNA, 19 nt, Artificial Sequence
  Description of Artificial Sequence: Synthetic oligonucleotide
  Antisense strand to SEQ ID NO: 96814
uaucauccaaauagggucu

SEQ ID NO: 96896 - RNA, 19 nt, Artificial Sequence
  Description of Artificial Sequence: Synthetic oligonucleotide
  Sense strand starting at position 3891 of SEQ ID NO: 1221
ggguaauuacuaugaguga

SEQ ID NO: 96897 - RNA, 19 nt, Artificial Sequence
  Description of Artificial Sequence: Synthetic oligonucleotide
  Antisense strand to SEQ ID NO: 96816
ucacucauaguaauuaccc

SEQ ID NO: 96898 - RNA, 19 nt, Artificial Sequence
  Description of Artificial Sequence: Synthetic oligonucleotide
  Sense strand starting at position 3775 of SEQ ID NO: 1221
gaaggagucuggguacaga

SEQ ID NO: 96899 - RNA, 19 nt, Artificial Sequence
  Description of Artificial Sequence: Synthetic oligonucleotide
  Antisense strand to SEQ ID NO: 96818
ucuguacccagacuccuuc

SEQ ID NO: 96900 - RNA, 19 nt, Artificial Sequence
  Description of Artificial Sequence: Synthetic oligonucleotide
  Sense strand starting at position 3565 of SEQ ID NO: 1221
ugguccugugacuagaaca

SEQ ID NO: 96901 - RNA, 19 nt, Artificial Sequence
  Description of Artificial Sequence: Synthetic oligonucleotide
  Antisense strand to SEQ ID NO: 96820
uguucuagucacaggacca

SEQ ID NO: 96902 - RNA, 19 nt, Artificial Sequence
  Description of Artificial Sequence: Synthetic oligonucleotide
  Sense strand starting at position 3480 of SEQ ID NO: 1221
gauguugcacaauauugaa

SEQ ID NO: 96903 - RNA, 19 nt, Artificial Sequence
  Description of Artificial Sequence: Synthetic oligonucleotide
  Antisense strand to SEQ ID NO: 96822
uucaauauugugcaacauc

SEQ ID NO: 96904 - RNA, 19 nt, Artificial Sequence
  Description of Artificial Sequence: Synthetic oligonucleotide
  Sense strand starting at position 3477 of SEQ ID NO: 1221
ucugauguugcacaauauu

SEQ ID NO: 96905 - RNA, 19 nt, Artificial Sequence
  Description of Artificial Sequence: Synthetic oligonucleotide
  Antisense strand to SEQ ID NO: 96824
aauauugugcaacaucaga

SEQ ID NO: 96906 - RNA, 19 nt, Artificial Sequence
  Description of Artificial Sequence: Synthetic oligonucleotide
  Sense strand starting at position 3459 of SEQ ID NO: 1221
uuuagaggcuggucaugau

SEQ ID NO: 96907 - RNA, 19 nt, Artificial Sequence
  Description of Artificial Sequence: Synthetic oligonucleotide
  Antisense strand to SEQ ID NO: 96826
aucaugaccagccucuaaa

SEQ ID NO: 96908 - RNA, 19 nt, Artificial Sequence
  Description of Artificial Sequence: Synthetic oligonucleotide
  Sense strand starting at position 3436 of SEQ ID NO: 1221
ggcuuauguccauggaaag

SEQ ID NO: 96909 - RNA, 19 nt, Artificial Sequence
  Description of Artificial Sequence: Synthetic oligonucleotide
  Antisense strand to SEQ ID NO: 96828
cuuuccauggacauaagcc

SEQ ID NO: 96910 - RNA, 19 nt, Artificial Sequence
  Description of Artificial Sequence: Synthetic oligonucleotide
  Sense strand starting at position 3434 of SEQ ID NO: 1221
caggcuuauguccauggaa

SEQ ID NO: 96911 - RNA, 19 nt, Artificial Sequence
  Description of Artificial Sequence: Synthetic oligonucleotide
  Antisense strand to SEQ ID NO: 96830
uuccauggacauaagccug

SEQ ID NO: 96912 - RNA, 19 nt, Artificial Sequence
  Description of Artificial Sequence: Synthetic oligonucleotide
  Sense strand starting at position 3377 of SEQ ID NO: 1221
ccaggaagucuggguucaa

SEQ ID NO: 96913 - RNA, 19 nt, Artificial Sequence
  Description of Artificial Sequence: Synthetic oligonucleotide
  Antisense strand to SEQ ID NO: 96832
uugaacccagacuuccugg

SEQ ID NO: 96914 - RNA, 19 nt, Artificial Sequence
  Description of Artificial Sequence: Synthetic oligonucleotide
  Sense strand starting at position 3331 of SEQ ID NO: 1221
gguuaaauagcuuacuaua

SEQ ID NO: 96915 - RNA, 19 nt, Artificial Sequence
  Description of Artificial Sequence: Synthetic oligonucleotide
  Antisense strand to SEQ ID NO: 96834
uauaguaagcuauuuaacc

SEQ ID NO: 96916 - RNA, 19 nt, Artificial Sequence
  Description of Artificial Sequence: Synthetic oligonucleotide
  Sense strand starting at position 3192 of SEQ ID NO: 1221
cuaauauucgaugaaagcu

SEQ ID NO: 96917 - RNA, 19 nt, Artificial Sequence
  Description of Artificial Sequence: Synthetic oligonucleotide
  Antisense strand to SEQ ID NO: 96836
agcuuucaucgaauauuag

SEQ ID NO: 96918 - RNA, 19 nt, Artificial Sequence
  Description of Artificial Sequence: Synthetic oligonucleotide
  Sense strand starting at position 3124 of SEQ ID NO: 1221
uuacuuaggcuguaacauu

SEQ ID NO: 96919 - RNA, 19 nt, Artificial Sequence
  Description of Artificial Sequence: Synthetic oligonucleotide
  Antisense strand to SEQ ID NO: 96838
aauguuacagccuaaguaa

SEQ ID NO: 96920 - RNA, 19 nt, Artificial Sequence
  Description of Artificial Sequence: Synthetic oligonucleotide
  Sense strand starting at position 3111 of SEQ ID NO: 1221
ucaggucauuuguuuacuu

SEQ ID NO: 96921 - RNA, 19 nt, Artificial Sequence
  Description of Artificial Sequence: Synthetic oligonucleotide
  Antisense strand to SEQ ID NO: 96840
aaguaaacaaaugaccuga

SEQ ID NO: 96922 - RNA, 19 nt, Artificial Sequence
  Description of Artificial Sequence: Synthetic oligonucleotide
  Sense strand starting at position 3019 of SEQ ID NO: 1221
ccuauauccugacuuggga

SEQ ID NO: 96923 - RNA, 19 nt, Artificial Sequence
  Description of Artificial Sequence: Synthetic oligonucleotide
  Antisense strand to SEQ ID NO: 96842
ucccaagucaggauauagg

SEQ ID NO: 96924 - RNA, 19 nt, Artificial Sequence
  Description of Artificial Sequence: Synthetic oligonucleotide
  Sense strand starting at position 3007 of SEQ ID NO: 1221
auggcaugauucccuauau

SEQ ID NO: 96925 - RNA, 19 nt, Artificial Sequence
  Description of Artificial Sequence: Synthetic oligonucleotide
  Antisense strand to SEQ ID NO: 96844
auauagggaaucaugccau

SEQ ID NO: 96926 - RNA, 19 nt, Artificial Sequence
  Description of Artificial Sequence: Synthetic oligonucleotide
  Sense strand starting at position 2877 of SEQ ID NO: 1221
uugugcuagcuuucuguca

SEQ ID NO: 96927 - RNA, 19 nt, Artificial Sequence
  Description of Artificial Sequence: Synthetic oligonucleotide
  Antisense strand to SEQ ID NO: 96846
ugacagaaagcuagcacaa

SEQ ID NO: 96928 - RNA, 19 nt, Artificial Sequence
  Description of Artificial Sequence: Synthetic oligonucleotide
  Sense strand starting at position 2600 of SEQ ID NO: 1221
ccaggagguccuugaaaug

SEQ ID NO: 96929 - RNA, 19 nt, Artificial Sequence
  Description of Artificial Sequence: Synthetic oligonucleotide
  Antisense strand to SEQ ID NO: 96848
cauuucaaggaccuccugg

SEQ ID NO: 96930 - RNA, 19 nt, Artificial Sequence
  Description of Artificial Sequence: Synthetic oligonucleotide
  Sense strand starting at position 2282 of SEQ ID NO: 1221
ugggaugggucacuucuga

SEQ ID NO: 96931 - RNA, 19 nt, Artificial Sequence
  Description of Artificial Sequence: Synthetic oligonucleotide
  Antisense strand to SEQ ID NO: 96850
ucagaagugacccauccca

SEQ ID NO: 96932 - RNA, 19 nt, Artificial Sequence
  Description of Artificial Sequence: Synthetic oligonucleotide
  Sense strand starting at position 2259 of SEQ ID NO: 1221
gugaauagaauguggcaga

SEQ ID NO: 96933 - RNA, 19 nt, Artificial Sequence
  Description of Artificial Sequence: Synthetic oligonucleotide
  Antisense strand to SEQ ID NO: 96852
ucugccacauucuauucac

SEQ ID NO: 96934 - RNA, 19 nt, Artificial Sequence
  Description of Artificial Sequence: Synthetic oligonucleotide
  Sense strand starting at position 2225 of SEQ ID NO: 1221
uuuaguguggccuggauuu

SEQ ID NO: 96935 - RNA, 19 nt, Artificial Sequence
  Description of Artificial Sequence: Synthetic oligonucleotide
  Antisense strand to SEQ ID NO: 96854
aaauccaggccacacuaaa

SEQ ID NO: 96936 - RNA, 19 nt, Artificial Sequence
  Description of Artificial Sequence: Synthetic oligonucleotide
  Sense strand starting at position 2161 of SEQ ID NO: 1221
ccuaaaggugacugcuaaa

SEQ ID NO: 96937 - RNA, 19 nt, Artificial Sequence
  Description of Artificial Sequence: Synthetic oligonucleotide
  Antisense strand to SEQ ID NO: 96856
uuuagcagucaccuuuagg

SEQ ID NO: 96938 - RNA, 19 nt, Artificial Sequence
  Description of Artificial Sequence: Synthetic oligonucleotide
  Sense strand starting at position 2146 of SEQ ID NO: 1221
guucuaaauuuggcuccua

SEQ ID NO: 96939 - RNA, 19 nt, Artificial Sequence
  Description of Artificial Sequence: Synthetic oligonucleotide
  Antisense strand to SEQ ID NO: 96858
uaggagccaaauuuagaac

SEQ ID NO: 96940 - RNA, 19 nt, Artificial Sequence
  Description of Artificial Sequence: Synthetic oligonucleotide
  Sense strand starting at position 2125 of SEQ ID NO: 1221
cuuugacaucaagggacuu

SEQ ID NO: 96941 - RNA, 19 nt, Artificial Sequence
  Description of Artificial Sequence: Synthetic oligonucleotide
  Antisense strand to SEQ ID NO: 96860
aagucccuugaugucaaag

SEQ ID NO: 96942 - RNA, 19 nt, Artificial Sequence
  Description of Artificial Sequence: Synthetic oligonucleotide
  Sense strand starting at position 2014 of SEQ ID NO: 1221
gagggaggguuguuuauac

SEQ ID NO: 96943 - RNA, 19 nt, Artificial Sequence
  Description of Artificial Sequence: Synthetic oligonucleotide
  Antisense strand to SEQ ID NO: 96862
guauaaacaacccucccuc

SEQ ID NO: 96944 - RNA, 19 nt, Artificial Sequence
  Description of Artificial Sequence: Synthetic oligonucleotide
  Sense strand starting at position 1363 of SEQ ID NO: 1221
ggagaugaguuucccgauu

SEQ ID NO: 96945 - RNA, 19 nt, Artificial Sequence
  Description of Artificial Sequence: Synthetic oligonucleotide
  Antisense strand to SEQ ID NO: 96864
aaucgggaaacucaucucc

SEQ ID NO: 96946 - RNA, 19 nt, Artificial Sequence
  Description of Artificial Sequence: Synthetic oligonucleotide
  Sense strand starting at position 1256 of SEQ ID NO: 1221
gggcaagagaaauguaguu

SEQ ID NO: 96947 - RNA, 19 nt, Artificial Sequence
  Description of Artificial Sequence: Synthetic oligonucleotide
  Antisense strand to SEQ ID NO: 96866
aacuacauuucucuugccc

SEQ ID NO: 96948 - RNA, 19 nt, Artificial Sequence
  Description of Artificial Sequence: Synthetic oligonucleotide
  Sense strand starting at position 1054 of SEQ ID NO: 1221
agugaaaccucaguaauaa

SEQ ID NO: 96949 - RNA, 19 nt, Artificial Sequence
  Description of Artificial Sequence: Synthetic oligonucleotide
  Antisense strand to SEQ ID NO: 96868
uuauuacugagguuucacu

SEQ ID NO: 96950 - RNA, 19 nt, Artificial Sequence
  Description of Artificial Sequence: Synthetic oligonucleotide
  Sense strand starting at position 944 of SEQ ID NO: 1221
agauguuucccaggaguug

SEQ ID NO: 96951 - RNA, 19 nt, Artificial Sequence
  Description of Artificial Sequence: Synthetic oligonucleotide
  Antisense strand to SEQ ID NO: 96870
caacuccugggaaacaucu

SEQ ID NO: 96952 - RNA, 19 nt, Artificial Sequence
  Description of Artificial Sequence: Synthetic oligonucleotide
  Sense strand starting at position 812 of SEQ ID NO: 1221
cccugaagcccuggagaaa

SEQ ID NO: 96953 - RNA, 19 nt, Artificial Sequence
  Description of Artificial Sequence: Synthetic oligonucleotide
  Antisense strand to SEQ ID NO: 96872
uuucuccagggcuucaggg

SEQ ID NO: 96954 - RNA, 19 nt, Artificial Sequence
  Description of Artificial Sequence: Synthetic oligonucleotide
  Sense strand starting at position 561 of SEQ ID NO: 1221
agguuugcucaacacaauc

SEQ ID NO: 96955 - RNA, 19 nt, Artificial Sequence
  Description of Artificial Sequence: Synthetic oligonucleotide
  Antisense strand to SEQ ID NO: 96874
gauuguguugagcaaaccu

SEQ ID NO: 96956 - RNA, 19 nt, Artificial Sequence
  Description of Artificial Sequence: Synthetic oligonucleotide
  Sense strand starting at position 541 of SEQ ID NO: 1221
ccuugaauguagcuuauuu

SEQ ID NO: 96957 - RNA, 19 nt, Artificial Sequence
  Description of Artificial Sequence: Synthetic oligonucleotide
  Antisense strand to SEQ ID NO: 96876
aaauaagcuacauucaagg

SEQ ID NO: 96958 - RNA, 19 nt, Artificial Sequence
  Description of Artificial Sequence: Synthetic oligonucleotide
  Sense strand starting at position 522 of SEQ ID NO: 1221
ucauuugcggcuuggauga

SEQ ID NO: 96959 - RNA, 19 nt, Artificial Sequence
  Description of Artificial Sequence: Synthetic oligonucleotide
  Antisense strand to SEQ ID NO: 96878
ucauccaagccgcaaauga

SEQ ID NO: 96960 - RNA, 19 nt, Artificial Sequence
  Description of Artificial Sequence: Synthetic oligonucleotide
  Sense strand starting at position 492 of SEQ ID NO: 1221
cucugaacuguuugaaauu

SEQ ID NO: 96961 - RNA, 19 nt, Artificial Sequence
  Description of Artificial Sequence: Synthetic oligonucleotide
  Antisense strand to SEQ ID NO: 96880
aauuucaaacaguucagag

SEQ ID NO: 96962 - RNA, 19 nt, Artificial Sequence
  Description of Artificial Sequence: Synthetic oligonucleotide
  Sense strand starting at position 326 of SEQ ID NO: 1221
ucagauguuccugauacua

SEQ ID NO: 96963 - RNA, 19 nt, Artificial Sequence
  Description of Artificial Sequence: Synthetic oligonucleotide
  Antisense strand to SEQ ID NO: 96882
uaguaucaggaacaucuga

SEQ ID NO: 96964 - RNA, 19 nt, Artificial Sequence
  Description of Artificial Sequence: Synthetic oligonucleotide
  Sense strand starting at position 220 of SEQ ID NO: 1221
aucuacaaucuguaagagu

SEQ ID NO: 96965 - RNA, 19 nt, Artificial Sequence
  Description of Artificial Sequence: Synthetic oligonucleotide
  Antisense strand to SEQ ID NO: 96884
acucuuacagauuguagau

SEQ ID NO: 96966 - RNA, 19 nt, Artificial Sequence
  Description of Artificial Sequence: Synthetic oligonucleotide
  Sense strand starting at position 209 of SEQ ID NO: 1221
guguauagaucaucuacaa

SEQ ID NO: 96967 - RNA, 19 nt, Artificial Sequence
  Description of Artificial Sequence: Synthetic oligonucleotide
  Antisense strand to SEQ ID NO: 96886
uuguagaugaucuauacac

SEQ ID NO: 96968 - RNA, 19 nt, Artificial Sequence
  Description of Artificial Sequence: Synthetic oligonucleotide
  Sense strand starting at position 207 of SEQ ID NO: 1221
guguguauagaucaucuac

SEQ ID NO: 96969 - RNA, 19 nt, Artificial Sequence
  Description of Artificial Sequence: Synthetic oligonucleotide
  Antisense strand to SEQ ID NO: 96888
guagaugaucuauacacac

SEQ ID NO: 96970 - RNA, 19 nt, Artificial Sequence
  Description of Artificial Sequence: Synthetic oligonucleotide
  Sense strand starting at position 33 of SEQ ID NO: 1221
ugaauugcaccguaggaca

SEQ ID NO: 96971 - RNA, 19 nt, Artificial Sequence
  Description of Artificial Sequence: Synthetic oligonucleotide
  Antisense strand to SEQ ID NO: 96890
uguccuacggugcaauuca

SEQ ID NO: 96972 - RNA, 19 nt, Artificial Sequence
  Description of Artificial Sequence: Synthetic oligonucleotide
  Sense strand starting at position 873 of SEQ ID NO: 1222
cugguugacuuauuagaga

SEQ ID NO: 96973 - RNA, 19 nt, Artificial Sequence
  Description of Artificial Sequence: Synthetic oligonucleotide
  Antisense strand to SEQ ID NO: 96892
ucucuaauaagucaaccag

SEQ ID NO: 96974 - RNA, 19 nt, Artificial Sequence
  Description of Artificial Sequence: Synthetic oligonucleotide
  Sense strand starting at position 876 of SEQ ID NO: 1222
guugacuuauuagagauug

SEQ ID NO: 96975 - RNA, 19 nt, Artificial Sequence
  Description of Artificial Sequence: Synthetic oligonucleotide
  Antisense strand to SEQ ID NO: 96894
caaucucuaauaagucaac

SEQ ID NO: 96976 - RNA, 19 nt, Artificial Sequence
  Description of Artificial Sequence: Synthetic oligonucleotide
  Sense strand starting at position 881 of SEQ ID NO: 1222
cuuauuagagauugguaaa

SEQ ID NO: 96977 - RNA, 19 nt, Artificial Sequence
  Description of Artificial Sequence: Synthetic oligonucleotide
  Antisense strand to SEQ ID NO: 96896
uuuaccaaucucuaauaag

SEQ ID NO: 96978 - RNA, 19 nt, Artificial Sequence
  Description of Artificial Sequence: Synthetic oligonucleotide
  Sense strand starting at position 1162 of SEQ ID NO: 1222
ggucuuacagugugaugga

SEQ ID NO: 96979 - RNA, 19 nt, Artificial Sequence
  Description of Artificial Sequence: Synthetic oligonucleotide
  Antisense strand to SEQ ID NO: 96898
uccaucacacuguaagacc

SEQ ID NO: 96980 - RNA, 19 nt, Artificial Sequence
  Description of Artificial Sequence: Synthetic oligonucleotide
  Sense strand starting at position 1493 of SEQ ID NO: 1222
gguacuucccacuggcaaa

SEQ ID NO: 96981 - RNA, 19 nt, Artificial Sequence
  Description of Artificial Sequence: Synthetic oligonucleotide
  Antisense strand to SEQ ID NO: 96900
uuugccagugggaaguacc

SEQ ID NO: 96982 - RNA, 19 nt, Artificial Sequence
  Description of Artificial Sequence: Synthetic oligonucleotide
  Sense strand starting at position 1550 of SEQ ID NO: 1222
cugcuauaauugcugucau

SEQ ID NO: 96983 - RNA, 19 nt, Artificial Sequence
  Description of Artificial Sequence: Synthetic oligonucleotide
  Antisense strand to SEQ ID NO: 96902
augacagcaauuauagcag

SEQ ID NO: 96984 - RNA, 19 nt, Artificial Sequence
  Description of Artificial Sequence: Synthetic oligonucleotide
  Sense strand starting at position 1797 of SEQ ID NO: 1222
gagcaagagccgcaagaau

SEQ ID NO: 96985 - RNA, 19 nt, Artificial Sequence
  Description of Artificial Sequence: Synthetic oligonucleotide
  Antisense strand to SEQ ID NO: 96904
auucuugcggcucuugcuc

SEQ ID NO: 96986 - RNA, 19 nt, Artificial Sequence
  Description of Artificial Sequence: Synthetic oligonucleotide
  Sense strand starting at position 1809 of SEQ ID NO: 1222
caagaauguccuggacuug

SEQ ID NO: 96987 - RNA, 19 nt, Artificial Sequence
  Description of Artificial Sequence: Synthetic oligonucleotide
  Antisense strand to SEQ ID NO: 96906
caaguccaggacauucuug

SEQ ID NO: 96988 - RNA, 19 nt, Artificial Sequence
  Description of Artificial Sequence: Synthetic oligonucleotide
  Sense strand starting at position 1933 of SEQ ID NO: 1222
uggugacuguccuacagaa

SEQ ID NO: 96989 - RNA, 19 nt, Artificial Sequence
  Description of Artificial Sequence: Synthetic oligonucleotide
  Antisense strand to SEQ ID NO: 96908
uucuguaggacagucacca

SEQ ID NO: 96990 - RNA, 19 nt, Artificial Sequence
  Description of Artificial Sequence: Synthetic oligonucleotide
  Sense strand starting at position 2139 of SEQ ID NO: 1222
gcucgugcccucucugaga

SEQ ID NO: 96991 - RNA, 19 nt, Artificial Sequence
  Description of Artificial Sequence: Synthetic oligonucleotide
  Antisense strand to SEQ ID NO: 96910
ucucagagagggcacgagc

SEQ ID NO: 96992 - RNA, 19 nt, Artificial Sequence
  Description of Artificial Sequence: Synthetic oligonucleotide
  Sense strand starting at position 2169 of SEQ ID NO: 1222
ugggaacaacuuuggucaa

SEQ ID NO: 96993 - RNA, 19 nt, Artificial Sequence
  Description of Artificial Sequence: Synthetic oligonucleotide
  Antisense strand to SEQ ID NO: 96912
uugaccaaaguuguuccca

SEQ ID NO: 96994 - RNA, 19 nt, Artificial Sequence
  Description of Artificial Sequence: Synthetic oligonucleotide
  Sense strand starting at position 2214 of SEQ ID NO: 1222
ggaguaagguaucuuccag

SEQ ID NO: 96995 - RNA, 19 nt, Artificial Sequence
  Description of Artificial Sequence: Synthetic oligonucleotide
  Antisense strand to SEQ ID NO: 96914
cuggaagauaccuuacucc

SEQ ID NO: 96996 - RNA, 19 nt, Artificial Sequence
  Description of Artificial Sequence: Synthetic oligonucleotide
  Sense strand starting at position 2241 of SEQ ID NO: 1222
guggccuucuaagucaauu

SEQ ID NO: 96997 - RNA, 19 nt, Artificial Sequence
  Description of Artificial Sequence: Synthetic oligonucleotide
  Antisense strand to SEQ ID NO: 96916
aauugacuuagaaggccac

SEQ ID NO: 96998 - RNA, 19 nt, Artificial Sequence
  Description of Artificial Sequence: Synthetic oligonucleotide
  Sense strand starting at position 2293 of SEQ ID NO: 1222
ugcuaacagucaccaugau

SEQ ID NO: 96999 - RNA, 19 nt, Artificial Sequence
  Description of Artificial Sequence: Synthetic oligonucleotide
  Antisense strand to SEQ ID NO: 96918
aucauggugacuguuagca

SEQ ID NO: 97000 - RNA, 19 nt, Artificial Sequence
  Description of Artificial Sequence: Synthetic oligonucleotide
  Sense strand starting at position 2294 of SEQ ID NO: 1222
gcuaacagucaccaugauu

SEQ ID NO: 97001 - RNA, 19 nt, Artificial Sequence
  Description of Artificial Sequence: Synthetic oligonucleotide
  Antisense strand to SEQ ID NO: 96920
aaucauggugacuguuagc

SEQ ID NO: 97002 - RNA, 19 nt, Artificial Sequence
  Description of Artificial Sequence: Synthetic oligonucleotide
  Sense strand starting at position 2428 of SEQ ID NO: 1222
gucugugcaacucaggaaa

SEQ ID NO: 97003 - RNA, 19 nt, Artificial Sequence
  Description of Artificial Sequence: Synthetic oligonucleotide
  Antisense strand to SEQ ID NO: 96922
uuuccugaguugcacagac

SEQ ID NO: 97004 - RNA, 19 nt, Artificial Sequence
  Description of Artificial Sequence: Synthetic oligonucleotide
  Sense strand starting at position 2451 of SEQ ID NO: 1222
cucaguuucccacaggcaa

SEQ ID NO: 97005 - RNA, 19 nt, Artificial Sequence
  Description of Artificial Sequence: Synthetic oligonucleotide
  Antisense strand to SEQ ID NO: 96924
uugccugugggaaacugag

SEQ ID NO: 97006 - RNA, 19 nt, Artificial Sequence
  Description of Artificial Sequence: Synthetic oligonucleotide
  Sense strand starting at position 2470 of SEQ ID NO: 1222
gugucuuaaccuuguuaga

SEQ ID NO: 97007 - RNA, 19 nt, Artificial Sequence
  Description of Artificial Sequence: Synthetic oligonucleotide
  Antisense strand to SEQ ID NO: 96926
ucuaacaagguuaagacac

SEQ ID NO: 97008 - RNA, 19 nt, Artificial Sequence
  Description of Artificial Sequence: Synthetic oligonucleotide
  Sense strand starting at position 2472 of SEQ ID NO: 1222
gucuuaaccuuguuagauu

SEQ ID NO: 97009 - RNA, 19 nt, Artificial Sequence
  Description of Artificial Sequence: Synthetic oligonucleotide
  Antisense strand to SEQ ID NO: 96928
aaucuaacaagguuaagac

SEQ ID NO: 97010 - RNA, 19 nt, Artificial Sequence
  Description of Artificial Sequence: Synthetic oligonucleotide
  Sense strand starting at position 2475 of SEQ ID NO: 1222
uuaaccuuguuagauuuga

SEQ ID NO: 97011 - RNA, 19 nt, Artificial Sequence
  Description of Artificial Sequence: Synthetic oligonucleotide
  Antisense strand to SEQ ID NO: 96930
ucaaaucuaacaagguuaa

SEQ ID NO: 97012 - RNA, 19 nt, Artificial Sequence
  Description of Artificial Sequence: Synthetic oligonucleotide
  Sense strand starting at position 2503 of SEQ ID NO: 1222
aaccaagaugaguguaaac

SEQ ID NO: 97013 - RNA, 19 nt, Artificial Sequence
  Description of Artificial Sequence: Synthetic oligonucleotide
  Antisense strand to SEQ ID NO: 96932
guuuacacucaucuugguu

SEQ ID NO: 97014 - RNA, 19 nt, Artificial Sequence
  Description of Artificial Sequence: Synthetic oligonucleotide
  Sense strand starting at position 2513 of SEQ ID NO: 1222
aguguaaacucacugugca

SEQ ID NO: 97015 - RNA, 19 nt, Artificial Sequence
  Description of Artificial Sequence: Synthetic oligonucleotide
  Antisense strand to SEQ ID NO: 96934
ugcacagugaguuuacacu

SEQ ID NO: 97016 - RNA, 19 nt, Artificial Sequence
  Description of Artificial Sequence: Synthetic oligonucleotide
  Sense strand starting at position 2531 of SEQ ID NO: 1222
agccucauagugugguaga

SEQ ID NO: 97017 - RNA, 19 nt, Artificial Sequence
  Description of Artificial Sequence: Synthetic oligonucleotide
  Antisense strand to SEQ ID NO: 96936
ucuaccacacuaugaggcu

SEQ ID NO: 97018 - RNA, 19 nt, Artificial Sequence
  Description of Artificial Sequence: Synthetic oligonucleotide
  Sense strand starting at position 2619 of SEQ ID NO: 1222
gagagagucuuucuggcca

SEQ ID NO: 97019 - RNA, 19 nt, Artificial Sequence
  Description of Artificial Sequence: Synthetic oligonucleotide
  Antisense strand to SEQ ID NO: 96938
uggccagaaagacucucuc

SEQ ID NO: 97020 - RNA, 19 nt, Artificial Sequence
  Description of Artificial Sequence: Synthetic oligonucleotide
  Sense strand starting at position 2623 of SEQ ID NO: 1222
gagucuuucuggccaagug

SEQ ID NO: 97021 - RNA, 19 nt, Artificial Sequence
  Description of Artificial Sequence: Synthetic oligonucleotide
  Antisense strand to SEQ ID NO: 96940
cacuuggccagaaagacuc

SEQ ID NO: 97022 - RNA, 19 nt, Artificial Sequence
  Description of Artificial Sequence: Synthetic oligonucleotide
  Sense strand starting at position 2624 of SEQ ID NO: 1222
agucuuucuggccaaguga

SEQ ID NO: 97023 - RNA, 19 nt, Artificial Sequence
  Description of Artificial Sequence: Synthetic oligonucleotide
  Antisense strand to SEQ ID NO: 96942
ucacuuggccagaaagacu

SEQ ID NO: 97024 - RNA, 19 nt, Artificial Sequence
  Description of Artificial Sequence: Synthetic oligonucleotide
  Sense strand starting at position 2633 of SEQ ID NO: 1222
ggccaagugaucugagcag

SEQ ID NO: 97025 - RNA, 19 nt, Artificial Sequence
  Description of Artificial Sequence: Synthetic oligonucleotide
  Antisense strand to SEQ ID NO: 96944
cugcucagaucacuuggcc

SEQ ID NO: 97026 - RNA, 19 nt, Artificial Sequence
  Description of Artificial Sequence: Synthetic oligonucleotide
  Sense strand starting at position 2682 of SEQ ID NO: 1222
gaggccucucuguauuagu

SEQ ID NO: 97027 - RNA, 19 nt, Artificial Sequence
  Description of Artificial Sequence: Synthetic oligonucleotide
  Antisense strand to SEQ ID NO: 96946
acuaauacagagaggccuc

SEQ ID NO: 97028 - RNA, 19 nt, Artificial Sequence
  Description of Artificial Sequence: Synthetic oligonucleotide
  Sense strand starting at position 2705 of SEQ ID NO: 1222
uucucuguccucuagagaa

SEQ ID NO: 97029 - RNA, 19 nt, Artificial Sequence
  Description of Artificial Sequence: Synthetic oligonucleotide
  Antisense strand to SEQ ID NO: 96948
uucucuagaggacagagaa

SEQ ID NO: 97030 - RNA, 19 nt, Artificial Sequence
  Description of Artificial Sequence: Synthetic oligonucleotide
  Sense strand starting at position 2717 of SEQ ID NO: 1222
uagagaaggugaguuuaua

SEQ ID NO: 97031 - RNA, 19 nt, Artificial Sequence
  Description of Artificial Sequence: Synthetic oligonucleotide
  Antisense strand to SEQ ID NO: 96950
uauaaacucaccuucucua

SEQ ID NO: 97032 - RNA, 19 nt, Artificial Sequence
  Description of Artificial Sequence: Synthetic oligonucleotide
  Sense strand starting at position 2804 of SEQ ID NO: 1222
cugucugugaccugaagac

SEQ ID NO: 97033 - RNA, 19 nt, Artificial Sequence
  Description of Artificial Sequence: Synthetic oligonucleotide
  Antisense strand to SEQ ID NO: 96952
gucuucaggucacagacag

SEQ ID NO: 97034 - RNA, 19 nt, Artificial Sequence
  Description of Artificial Sequence: Synthetic oligonucleotide
  Sense strand starting at position 3213 of SEQ ID NO: 1222
cacggacucgaguguuaau

SEQ ID NO: 97035 - RNA, 19 nt, Artificial Sequence
  Description of Artificial Sequence: Synthetic oligonucleotide
  Antisense strand to SEQ ID NO: 96954
auuaacacucgaguccgug

SEQ ID NO: 97036 - RNA, 19 nt, Artificial Sequence
  Description of Artificial Sequence: Synthetic oligonucleotide
  Sense strand starting at position 3370 of SEQ ID NO: 1222
gaguguggacuugaguuau

SEQ ID NO: 97037 - RNA, 19 nt, Artificial Sequence
  Description of Artificial Sequence: Synthetic oligonucleotide
  Antisense strand to SEQ ID NO: 96956
auaacucaaguccacacuc

SEQ ID NO: 97038 - RNA, 19 nt, Artificial Sequence
  Description of Artificial Sequence: Synthetic oligonucleotide
  Sense strand starting at position 3512 of SEQ ID NO: 1222
gcauuuaaaccuugcaguu

SEQ ID NO: 97039 - RNA, 19 nt, Artificial Sequence
  Description of Artificial Sequence: Synthetic oligonucleotide
  Antisense strand to SEQ ID NO: 96958
aacugcaagguuuaaaugc

SEQ ID NO: 97040 - RNA, 19 nt, Artificial Sequence
  Description of Artificial Sequence: Synthetic oligonucleotide
  Sense strand starting at position 3525 of SEQ ID NO: 1222
gcaguucccugcucuugaa

SEQ ID NO: 97041 - RNA, 19 nt, Artificial Sequence
  Description of Artificial Sequence: Synthetic oligonucleotide
  Antisense strand to SEQ ID NO: 96960
uucaagagcagggaacugc

SEQ ID NO: 97042 - RNA, 19 nt, Artificial Sequence
  Description of Artificial Sequence: Synthetic oligonucleotide
  Sense strand starting at position 3642 of SEQ ID NO: 1222
cugucuuaggccuacugua

SEQ ID NO: 97043 - RNA, 19 nt, Artificial Sequence
  Description of Artificial Sequence: Synthetic oligonucleotide
  Antisense strand to SEQ ID NO: 96962
uacaguaggccuaagacag

SEQ ID NO: 97044 - RNA, 19 nt, Artificial Sequence
  Description of Artificial Sequence: Synthetic oligonucleotide
  Sense strand starting at position 3669 of SEQ ID NO: 1222
ggagguauuugugagcaaa

SEQ ID NO: 97045 - RNA, 19 nt, Artificial Sequence
  Description of Artificial Sequence: Synthetic oligonucleotide
  Antisense strand to SEQ ID NO: 96964
uuugcucacaaauaccucc

SEQ ID NO: 97046 - RNA, 19 nt, Artificial Sequence
  Description of Artificial Sequence: Synthetic oligonucleotide
  Sense strand starting at position 3762 of SEQ ID NO: 1222
agcaaaucacagggaaagu

SEQ ID NO: 97047 - RNA, 19 nt, Artificial Sequence
  Description of Artificial Sequence: Synthetic oligonucleotide
  Antisense strand to SEQ ID NO: 96966
acuuucccugugauuugcu

SEQ ID NO: 97048 - RNA, 19 nt, Artificial Sequence
  Description of Artificial Sequence: Synthetic oligonucleotide
  Sense strand starting at position 3809 of SEQ ID NO: 1222
gacaaagaguaggauaagu

SEQ ID NO: 97049 - RNA, 19 nt, Artificial Sequence
  Description of Artificial Sequence: Synthetic oligonucleotide
  Antisense strand to SEQ ID NO: 96968
acuuauccuacucuuuguc

SEQ ID NO: 97050 - RNA, 19 nt, Artificial Sequence
  Description of Artificial Sequence: Synthetic oligonucleotide
  Sense strand starting at position 3871 of SEQ ID NO: 1222
caaugaggagguuguagua

SEQ ID NO: 97051 - RNA, 19 nt, Artificial Sequence
  Description of Artificial Sequence: Synthetic oligonucleotide
  Antisense strand to SEQ ID NO: 96970
uacuacaaccuccucauug

SEQ ID NO: 97052 - RNA, 19 nt, Artificial Sequence
  Description of Artificial Sequence: Synthetic oligonucleotide
  Sense strand starting at position 3971 of SEQ ID NO: 1223
gggagagaauacugaccau

SEQ ID NO: 97053 - RNA, 19 nt, Artificial Sequence
  Description of Artificial Sequence: Synthetic oligonucleotide
  Antisense strand to SEQ ID NO: 96972
auggucaguauucucuccc

SEQ ID NO: 97054 - RNA, 19 nt, Artificial Sequence
  Description of Artificial Sequence: Synthetic oligonucleotide
  Sense strand starting at position 3889 of SEQ ID NO: 1223
gggccaaugccucagagga

SEQ ID NO: 97055 - RNA, 19 nt, Artificial Sequence
  Description of Artificial Sequence: Synthetic oligonucleotide
  Antisense strand to SEQ ID NO: 96974
uccucugaggcauuggccc

SEQ ID NO: 97056 - RNA, 19 nt, Artificial Sequence
  Description of Artificial Sequence: Synthetic oligonucleotide
  Sense strand starting at position 3862 of SEQ ID NO: 1223
guggcuauauccuccaaac

SEQ ID NO: 97057 - RNA, 19 nt, Artificial Sequence
  Description of Artificial Sequence: Synthetic oligonucleotide
  Antisense strand to SEQ ID NO: 96976
guuuggaggauauagccac

SEQ ID NO: 97058 - RNA, 19 nt, Artificial Sequence
  Description of Artificial Sequence: Synthetic oligonucleotide
  Sense strand starting at position 3854 of SEQ ID NO: 1223
gagaaacaguggcuauauc

SEQ ID NO: 97059 - RNA, 19 nt, Artificial Sequence
  Description of Artificial Sequence: Synthetic oligonucleotide
  Antisense strand to SEQ ID NO: 96978
gauauagccacuguuucuc

SEQ ID NO: 97060 - RNA, 19 nt, Artificial Sequence
  Description of Artificial Sequence: Synthetic oligonucleotide
  Sense strand starting at position 3852 of SEQ ID NO: 1223
uggagaaacaguggcuaua

SEQ ID NO: 97061 - RNA, 19 nt, Artificial Sequence
  Description of Artificial Sequence: Synthetic oligonucleotide
  Antisense strand to SEQ ID NO: 96980
uauagccacuguuucucca

SEQ ID NO: 97062 - RNA, 19 nt, Artificial Sequence
  Description of Artificial Sequence: Synthetic oligonucleotide
  Sense strand starting at position 3830 of SEQ ID NO: 1223
gcagaccuuuccuaggaca

SEQ ID NO: 97063 - RNA, 19 nt, Artificial Sequence
  Description of Artificial Sequence: Synthetic oligonucleotide
  Antisense strand to SEQ ID NO: 96982
uguccuaggaaaggucugc

SEQ ID NO: 97064 - RNA, 19 nt, Artificial Sequence
  Description of Artificial Sequence: Synthetic oligonucleotide
  Sense strand starting at position 3718 of SEQ ID NO: 1223
ggcuguggcugagugaaua

SEQ ID NO: 97065 - RNA, 19 nt, Artificial Sequence
  Description of Artificial Sequence: Synthetic oligonucleotide
  Antisense strand to SEQ ID NO: 96984
uauucacucagccacagcc

SEQ ID NO: 97066 - RNA, 19 nt, Artificial Sequence
  Description of Artificial Sequence: Synthetic oligonucleotide
  Sense strand starting at position 3617 of SEQ ID NO: 1223
gcuagucugcucuaagauu

SEQ ID NO: 97067 - RNA, 19 nt, Artificial Sequence
  Description of Artificial Sequence: Synthetic oligonucleotide
  Antisense strand to SEQ ID NO: 96986
aaucuuagagcagacuagc

SEQ ID NO: 97068 - RNA, 19 nt, Artificial Sequence
  Description of Artificial Sequence: Synthetic oligonucleotide
  Sense strand starting at position 3615 of SEQ ID NO: 1223
gggcuagucugcucuaaga

SEQ ID NO: 97069 - RNA, 19 nt, Artificial Sequence
  Description of Artificial Sequence: Synthetic oligonucleotide
  Antisense strand to SEQ ID NO: 96988
ucuuagagcagacuagccc

SEQ ID NO: 97070 - RNA, 19 nt, Artificial Sequence
  Description of Artificial Sequence: Synthetic oligonucleotide
  Sense strand starting at position 3613 of SEQ ID NO: 1223
aagggcuagucugcucuaa

SEQ ID NO: 97071 - RNA, 19 nt, Artificial Sequence
  Description of Artificial Sequence: Synthetic oligonucleotide
  Antisense strand to SEQ ID NO: 96990
uuagagcagacuagcccuu

SEQ ID NO: 97072 - RNA, 19 nt, Artificial Sequence
  Description of Artificial Sequence: Synthetic oligonucleotide
  Sense strand starting at position 3604 of SEQ ID NO: 1223
gaauuagugaagggcuagu

SEQ ID NO: 97073 - RNA, 19 nt, Artificial Sequence
  Description of Artificial Sequence: Synthetic oligonucleotide
  Antisense strand to SEQ ID NO: 96992
acuagcccuucacuaauuc

SEQ ID NO: 97074 - RNA, 19 nt, Artificial Sequence
  Description of Artificial Sequence: Synthetic oligonucleotide
  Sense strand starting at position 3338 of SEQ ID NO: 1223
cuaaguacucaacagguca

SEQ ID NO: 97075 - RNA, 19 nt, Artificial Sequence
  Description of Artificial Sequence: Synthetic oligonucleotide
  Antisense strand to SEQ ID NO: 96994
ugaccuguugaguacuuag

SEQ ID NO: 97076 - RNA, 19 nt, Artificial Sequence
  Description of Artificial Sequence: Synthetic oligonucleotide
  Sense strand starting at position 2859 of SEQ ID NO: 1223
ggaaaugagucacacuuga

SEQ ID NO: 97077 - RNA, 19 nt, Artificial Sequence
  Description of Artificial Sequence: Synthetic oligonucleotide
  Antisense strand to SEQ ID NO: 96996
ucaagugugacucauuucc

SEQ ID NO: 97078 - RNA, 19 nt, Artificial Sequence
  Description of Artificial Sequence: Synthetic oligonucleotide
  Sense strand starting at position 2852 of SEQ ID NO: 1223
gcaaauaggaaaugaguca

SEQ ID NO: 97079 - RNA, 19 nt, Artificial Sequence
  Description of Artificial Sequence: Synthetic oligonucleotide
  Antisense strand to SEQ ID NO: 96998
ugacucauuuccuauuugc

SEQ ID NO: 97080 - RNA, 19 nt, Artificial Sequence
  Description of Artificial Sequence: Synthetic oligonucleotide
  Sense strand starting at position 2821 of SEQ ID NO: 1223
ggagcaugucccugagaau

SEQ ID NO: 97081 - RNA, 19 nt, Artificial Sequence
  Description of Artificial Sequence: Synthetic oligonucleotide
  Antisense strand to SEQ ID NO: 97000
auucucagggacaugcucc

SEQ ID NO: 97082 - RNA, 19 nt, Artificial Sequence
  Description of Artificial Sequence: Synthetic oligonucleotide
  Sense strand starting at position 2820 of SEQ ID NO: 1223
aggagcaugucccugagaa

SEQ ID NO: 97083 - RNA, 19 nt, Artificial Sequence
  Description of Artificial Sequence: Synthetic oligonucleotide
  Antisense strand to SEQ ID NO: 97002
uucucagggacaugcuccu

SEQ ID NO: 97084 - RNA, 19 nt, Artificial Sequence
  Description of Artificial Sequence: Synthetic oligonucleotide
  Sense strand starting at position 2621 of SEQ ID NO: 1223
ugagguguuaaucacgcaa

SEQ ID NO: 97085 - RNA, 19 nt, Artificial Sequence
  Description of Artificial Sequence: Synthetic oligonucleotide
  Antisense strand to SEQ ID NO: 97004
uugcgugauuaacaccuca

SEQ ID NO: 97086 - RNA, 19 nt, Artificial Sequence
  Description of Artificial Sequence: Synthetic oligonucleotide
  Sense strand starting at position 2614 of SEQ ID NO: 1223
cacagcgugagguguuaau

SEQ ID NO: 97087 - RNA, 19 nt, Artificial Sequence
  Description of Artificial Sequence: Synthetic oligonucleotide
  Antisense strand to SEQ ID NO: 97006
auuaacaccucacgcugug

SEQ ID NO: 97088 - RNA, 19 nt, Artificial Sequence
  Description of Artificial Sequence: Synthetic oligonucleotide
  Sense strand starting at position 2591 of SEQ ID NO: 1223
gaacaugguuuauacagua

SEQ ID NO: 97089 - RNA, 19 nt, Artificial Sequence
  Description of Artificial Sequence: Synthetic oligonucleotide
  Antisense strand to SEQ ID NO: 97008
uacuguauaaaccauguuc

SEQ ID NO: 97090 - RNA, 19 nt, Artificial Sequence
  Description of Artificial Sequence: Synthetic oligonucleotide
  Sense strand starting at position 2587 of SEQ ID NO: 1223
gugugaacaugguuuauac

SEQ ID NO: 97091 - RNA, 19 nt, Artificial Sequence
  Description of Artificial Sequence: Synthetic oligonucleotide
  Antisense strand to SEQ ID NO: 97010
guauaaaccauguucacac

SEQ ID NO: 97092 - RNA, 19 nt, Artificial Sequence
  Description of Artificial Sequence: Synthetic oligonucleotide
  Sense strand starting at position 2574 of SEQ ID NO: 1223
cuuaaaugagguuguguga

SEQ ID NO: 97093 - RNA, 19 nt, Artificial Sequence
  Description of Artificial Sequence: Synthetic oligonucleotide
  Antisense strand to SEQ ID NO: 97012
ucacacaaccucauuuaag

SEQ ID NO: 97094 - RNA, 19 nt, Artificial Sequence
  Description of Artificial Sequence: Synthetic oligonucleotide
  Sense strand starting at position 2561 of SEQ ID NO: 1223
cuuuguugguaggcuuaaa

SEQ ID NO: 97095 - RNA, 19 nt, Artificial Sequence
  Description of Artificial Sequence: Synthetic oligonucleotide
  Antisense strand to SEQ ID NO: 97014
uuuaagccuaccaacaaag

SEQ ID NO: 97096 - RNA, 19 nt, Artificial Sequence
  Description of Artificial Sequence: Synthetic oligonucleotide
  Sense strand starting at position 2507 of SEQ ID NO: 1223
uggaucugcuuccugauau

SEQ ID NO: 97097 - RNA, 19 nt, Artificial Sequence
  Description of Artificial Sequence: Synthetic oligonucleotide
  Antisense strand to SEQ ID NO: 97016
auaucaggaagcagaucca

SEQ ID NO: 97098 - RNA, 19 nt, Artificial Sequence
  Description of Artificial Sequence: Synthetic oligonucleotide
  Sense strand starting at position 2420 of SEQ ID NO: 1223
guucuccagccuugaagau

SEQ ID NO: 97099 - RNA, 19 nt, Artificial Sequence
  Description of Artificial Sequence: Synthetic oligonucleotide
  Antisense strand to SEQ ID NO: 97018
aucuucaaggcuggagaac

SEQ ID NO: 97100 - RNA, 19 nt, Artificial Sequence
  Description of Artificial Sequence: Synthetic oligonucleotide
  Sense strand starting at position 2404 of SEQ ID NO: 1223
ccuuacagaucaucuaguu

SEQ ID NO: 97101 - RNA, 19 nt, Artificial Sequence
  Description of Artificial Sequence: Synthetic oligonucleotide
  Antisense strand to SEQ ID NO: 97020
aacuagaugaucuguaagg

SEQ ID NO: 97102 - RNA, 19 nt, Artificial Sequence
  Description of Artificial Sequence: Synthetic oligonucleotide
  Sense strand starting at position 2355 of SEQ ID NO: 1223
gcccuauuccaggaucaug

SEQ ID NO: 97103 - RNA, 19 nt, Artificial Sequence
  Description of Artificial Sequence: Synthetic oligonucleotide
  Antisense strand to SEQ ID NO: 97022
caugauccuggaauagggc

SEQ ID NO: 97104 - RNA, 19 nt, Artificial Sequence
  Description of Artificial Sequence: Synthetic oligonucleotide
  Sense strand starting at position 2354 of SEQ ID NO: 1223
ugcccuauuccaggaucau

SEQ ID NO: 97105 - RNA, 19 nt, Artificial Sequence
  Description of Artificial Sequence: Synthetic oligonucleotide
  Antisense strand to SEQ ID NO: 97024
augauccuggaauagggca

SEQ ID NO: 97106 - RNA, 19 nt, Artificial Sequence
  Description of Artificial Sequence: Synthetic oligonucleotide
  Sense strand starting at position 2266 of SEQ ID NO: 1223
ucacacuauuguuugcaua

SEQ ID NO: 97107 - RNA, 19 nt, Artificial Sequence
  Description of Artificial Sequence: Synthetic oligonucleotide
  Antisense strand to SEQ ID NO: 97026
uaugcaaacaauaguguga

SEQ ID NO: 97108 - RNA, 19 nt, Artificial Sequence
  Description of Artificial Sequence: Synthetic oligonucleotide
  Sense strand starting at position 2255 of SEQ ID NO: 1223
agaggcaucccucacacua

SEQ ID NO: 97109 - RNA, 19 nt, Artificial Sequence
  Description of Artificial Sequence: Synthetic oligonucleotide
  Antisense strand to SEQ ID NO: 97028
uagugugagggaugccucu

SEQ ID NO: 97110 - RNA, 19 nt, Artificial Sequence
  Description of Artificial Sequence: Synthetic oligonucleotide
  Sense strand starting at position 2079 of SEQ ID NO: 1223
cggcuucgcuggauagaag

SEQ ID NO: 97111 - RNA, 19 nt, Artificial Sequence
  Description of Artificial Sequence: Synthetic oligonucleotide
  Antisense strand to SEQ ID NO: 97030
cuucuauccagcgaagccg

SEQ ID NO: 97112 - RNA, 19 nt, Artificial Sequence
  Description of Artificial Sequence: Synthetic oligonucleotide
  Sense strand starting at position 2078 of SEQ ID NO: 1223
ccggcuucgcuggauagaa

SEQ ID NO: 97113 - RNA, 19 nt, Artificial Sequence
  Description of Artificial Sequence: Synthetic oligonucleotide
  Antisense strand to SEQ ID NO: 97032
uucuauccagcgaagccgg

SEQ ID NO: 97114 - RNA, 19 nt, Artificial Sequence
  Description of Artificial Sequence: Synthetic oligonucleotide
  Sense strand starting at position 2077 of SEQ ID NO: 1223
cccggcuucgcuggauaga

SEQ ID NO: 97115 - RNA, 19 nt, Artificial Sequence
  Description of Artificial Sequence: Synthetic oligonucleotide
  Antisense strand to SEQ ID NO: 97034
ucuauccagcgaagccggg

SEQ ID NO: 97116 - RNA, 19 nt, Artificial Sequence
  Description of Artificial Sequence: Synthetic oligonucleotide
  Sense strand starting at position 1715 of SEQ ID NO: 1223
gucucuuuauacucagaca

SEQ ID NO: 97117 - RNA, 19 nt, Artificial Sequence
  Description of Artificial Sequence: Synthetic oligonucleotide
  Antisense strand to SEQ ID NO: 97036
ugucugaguauaaagagac

SEQ ID NO: 97118 - RNA, 19 nt, Artificial Sequence
  Description of Artificial Sequence: Synthetic oligonucleotide
  Sense strand starting at position 1707 of SEQ ID NO: 1223
ugaagucugucucuuuaua

SEQ ID NO: 97119 - RNA, 19 nt, Artificial Sequence
  Description of Artificial Sequence: Synthetic oligonucleotide
  Antisense strand to SEQ ID NO: 97038
uauaaagagacagacuuca

SEQ ID NO: 97120 - RNA, 19 nt, Artificial Sequence
  Description of Artificial Sequence: Synthetic oligonucleotide
  Sense strand starting at position 1705 of SEQ ID NO: 1223
ccugaagucugucucuuua

SEQ ID NO: 97121 - RNA, 19 nt, Artificial Sequence
  Description of Artificial Sequence: Synthetic oligonucleotide
  Antisense strand to SEQ ID NO: 97040
uaaagagacagacuucagg

SEQ ID NO: 97122 - RNA, 19 nt, Artificial Sequence
  Description of Artificial Sequence: Synthetic oligonucleotide
  Sense strand starting at position 1568 of SEQ ID NO: 1223
uucuguucugaccaaaggu

SEQ ID NO: 97123 - RNA, 19 nt, Artificial Sequence
  Description of Artificial Sequence: Synthetic oligonucleotide
  Antisense strand to SEQ ID NO: 97042
accuuuggucagaacagaa

SEQ ID NO: 97124 - RNA, 19 nt, Artificial Sequence
  Description of Artificial Sequence: Synthetic oligonucleotide
  Sense strand starting at position 1560 of SEQ ID NO: 1223
augggaacuucuguucuga

SEQ ID NO: 97125 - RNA, 19 nt, Artificial Sequence
  Description of Artificial Sequence: Synthetic oligonucleotide
  Antisense strand to SEQ ID NO: 97044
ucagaacagaaguucccau

SEQ ID NO: 97126 - RNA, 19 nt, Artificial Sequence
  Description of Artificial Sequence: Synthetic oligonucleotide
  Sense strand starting at position 1354 of SEQ ID NO: 1223
ugggaucguucaccuguga

SEQ ID NO: 97127 - RNA, 19 nt, Artificial Sequence
  Description of Artificial Sequence: Synthetic oligonucleotide
  Antisense strand to SEQ ID NO: 97046
ucacaggugaacgauccca

SEQ ID NO: 97128 - RNA, 19 nt, Artificial Sequence
  Description of Artificial Sequence: Synthetic oligonucleotide
  Sense strand starting at position 650 of SEQ ID NO: 1223
gaagaagucugccucaguu

SEQ ID NO: 97129 - RNA, 19 nt, Artificial Sequence
  Description of Artificial Sequence: Synthetic oligonucleotide
  Antisense strand to SEQ ID NO: 97048
aacugaggcagacuucuuc

SEQ ID NO: 97130 - RNA, 19 nt, Artificial Sequence
  Description of Artificial Sequence: Synthetic oligonucleotide
  Sense strand starting at position 277 of SEQ ID NO: 1223
gccugcuggccucaggaua

SEQ ID NO: 97131 - RNA, 19 nt, Artificial Sequence
  Description of Artificial Sequence: Synthetic oligonucleotide
  Antisense strand to SEQ ID NO: 97050
uauccugaggccagcaggc

SEQ ID NO: 97132 - RNA, 19 nt, Artificial Sequence
  Description of Artificial Sequence: Synthetic oligonucleotide
  Sense strand starting at position 3665 of SEQ ID NO: 1224
guaugaguucuagauaacc

SEQ ID NO: 97133 - RNA, 19 nt, Artificial Sequence
  Description of Artificial Sequence: Synthetic oligonucleotide
  Antisense strand to SEQ ID NO: 97052
gguuaucuagaacucauac

SEQ ID NO: 97134 - RNA, 19 nt, Artificial Sequence
  Description of Artificial Sequence: Synthetic oligonucleotide
  Sense strand starting at position 3558 of SEQ ID NO: 1224
cagagaguuguauaaguga

SEQ ID NO: 97135 - RNA, 19 nt, Artificial Sequence
  Description of Artificial Sequence: Synthetic oligonucleotide
  Antisense strand to SEQ ID NO: 97054
ucacuuauacaacucucug

SEQ ID NO: 97136 - RNA, 19 nt, Artificial Sequence
  Description of Artificial Sequence: Synthetic oligonucleotide
  Sense strand starting at position 3543 of SEQ ID NO: 1224
cccauagaucugcagcaga

SEQ ID NO: 97137 - RNA, 19 nt, Artificial Sequence
  Description of Artificial Sequence: Synthetic oligonucleotide
  Antisense strand to SEQ ID NO: 97056
ucugcugcagaucuauggg

SEQ ID NO: 97138 - RNA, 19 nt, Artificial Sequence
  Description of Artificial Sequence: Synthetic oligonucleotide
  Sense strand starting at position 3404 of SEQ ID NO: 1224
guuuacuaucaacauuagu

SEQ ID NO: 97139 - RNA, 19 nt, Artificial Sequence
  Description of Artificial Sequence: Synthetic oligonucleotide
  Antisense strand to SEQ ID NO: 97058
acuaauguugauaguaaac

SEQ ID NO: 97140 - RNA, 19 nt, Artificial Sequence
  Description of Artificial Sequence: Synthetic oligonucleotide
  Sense strand starting at position 3397 of SEQ ID NO: 1224
guaaacuguuuacuaucaa

SEQ ID NO: 97141 - RNA, 19 nt, Artificial Sequence
  Description of Artificial Sequence: Synthetic oligonucleotide
  Antisense strand to SEQ ID NO: 97060
uugauaguaaacaguuuac

SEQ ID NO: 97142 - RNA, 19 nt, Artificial Sequence
  Description of Artificial Sequence: Synthetic oligonucleotide
  Sense strand starting at position 3242 of SEQ ID NO: 1224
guugcucuugccucaugua

SEQ ID NO: 97143 - RNA, 19 nt, Artificial Sequence
  Description of Artificial Sequence: Synthetic oligonucleotide
  Antisense strand to SEQ ID NO: 97062
uacaugaggcaagagcaac

SEQ ID NO: 97144 - RNA, 19 nt, Artificial Sequence
  Description of Artificial Sequence: Synthetic oligonucleotide
  Sense strand starting at position 3033 of SEQ ID NO: 1224
agaguuucugcuuagauag

SEQ ID NO: 97145 - RNA, 19 nt, Artificial Sequence
  Description of Artificial Sequence: Synthetic oligonucleotide
  Antisense strand to SEQ ID NO: 97064
cuaucuaagcagaaacucu

SEQ ID NO: 97146 - RNA, 19 nt, Artificial Sequence
  Description of Artificial Sequence: Synthetic oligonucleotide
  Sense strand starting at position 3019 of SEQ ID NO: 1224
guuuaaugaguacaagagu

SEQ ID NO: 97147 - RNA, 19 nt, Artificial Sequence
  Description of Artificial Sequence: Synthetic oligonucleotide
  Antisense strand to SEQ ID NO: 97066
acucuuguacucauuaaac

SEQ ID NO: 97148 - RNA, 19 nt, Artificial Sequence
  Description of Artificial Sequence: Synthetic oligonucleotide
  Sense strand starting at position 3010 of SEQ ID NO: 1224
gagguuguuguuuaaugag

SEQ ID NO: 97149 - RNA, 19 nt, Artificial Sequence
  Description of Artificial Sequence: Synthetic oligonucleotide
  Antisense strand to SEQ ID NO: 97068
cucauuaaacaacaaccuc

SEQ ID NO: 97150 - RNA, 19 nt, Artificial Sequence
  Description of Artificial Sequence: Synthetic oligonucleotide
  Sense strand starting at position 2781 of SEQ ID NO: 1224
gugcuauguacauauugga

SEQ ID NO: 97151 - RNA, 19 nt, Artificial Sequence
  Description of Artificial Sequence: Synthetic oligonucleotide
  Antisense strand to SEQ ID NO: 97070
uccaauauguacauagcac

SEQ ID NO: 97152 - RNA, 19 nt, Artificial Sequence
  Description of Artificial Sequence: Synthetic oligonucleotide
  Sense strand starting at position 2695 of SEQ ID NO: 1224
caguguucuguagcagcau

SEQ ID NO: 97153 - RNA, 19 nt, Artificial Sequence
  Description of Artificial Sequence: Synthetic oligonucleotide
  Antisense strand to SEQ ID NO: 97072
augcugcuacagaacacug

SEQ ID NO: 97154 - RNA, 19 nt, Artificial Sequence
  Description of Artificial Sequence: Synthetic oligonucleotide
  Sense strand starting at position 2600 of SEQ ID NO: 1224
guuaaacauugacuuagca

SEQ ID NO: 97155 - RNA, 19 nt, Artificial Sequence
  Description of Artificial Sequence: Synthetic oligonucleotide
  Antisense strand to SEQ ID NO: 97074
ugcuaagucaauguuuaac

SEQ ID NO: 97156 - RNA, 19 nt, Artificial Sequence
  Description of Artificial Sequence: Synthetic oligonucleotide
  Sense strand starting at position 2503 of SEQ ID NO: 1224
uaguaaagauguguagaaa

SEQ ID NO: 97157 - RNA, 19 nt, Artificial Sequence
  Description of Artificial Sequence: Synthetic oligonucleotide
  Antisense strand to SEQ ID NO: 97076
uuucuacacaucuuuacua

SEQ ID NO: 97158 - RNA, 19 nt, Artificial Sequence
  Description of Artificial Sequence: Synthetic oligonucleotide
  Sense strand starting at position 2502 of SEQ ID NO: 1224
uuaguaaagauguguagaa

SEQ ID NO: 97159 - RNA, 19 nt, Artificial Sequence
  Description of Artificial Sequence: Synthetic oligonucleotide
  Antisense strand to SEQ ID NO: 97078
uucuacacaucuuuacuaa

SEQ ID NO: 97160 - RNA, 19 nt, Artificial Sequence
  Description of Artificial Sequence: Synthetic oligonucleotide
  Sense strand starting at position 2498 of SEQ ID NO: 1224
aguauuaguaaagaugugu

SEQ ID NO: 97161 - RNA, 19 nt, Artificial Sequence
  Description of Artificial Sequence: Synthetic oligonucleotide
  Antisense strand to SEQ ID NO: 97080
acacaucuuuacuaauacu

SEQ ID NO: 97162 - RNA, 19 nt, Artificial Sequence
  Description of Artificial Sequence: Synthetic oligonucleotide
  Sense strand starting at position 2462 of SEQ ID NO: 1224
ccauuagaauggcucuuau

SEQ ID NO: 97163 - RNA, 19 nt, Artificial Sequence
  Description of Artificial Sequence: Synthetic oligonucleotide
  Antisense strand to SEQ ID NO: 97082
auaagagccauucuaaugg

SEQ ID NO: 97164 - RNA, 19 nt, Artificial Sequence
  Description of Artificial Sequence: Synthetic oligonucleotide
  Sense strand starting at position 2441 of SEQ ID NO: 1224
augagauucugcuuuauau

SEQ ID NO: 97165 - RNA, 19 nt, Artificial Sequence
  Description of Artificial Sequence: Synthetic oligonucleotide
  Antisense strand to SEQ ID NO: 97084
auauaaagcagaaucucau

SEQ ID NO: 97166 - RNA, 19 nt, Artificial Sequence
  Description of Artificial Sequence: Synthetic oligonucleotide
  Sense strand starting at position 2386 of SEQ ID NO: 1224
guucucuucgugucucuua

SEQ ID NO: 97167 - RNA, 19 nt, Artificial Sequence
  Description of Artificial Sequence: Synthetic oligonucleotide
  Antisense strand to SEQ ID NO: 97086
uaagagacacgaagagaac

SEQ ID NO: 97168 - RNA, 19 nt, Artificial Sequence
  Description of Artificial Sequence: Synthetic oligonucleotide
  Sense strand starting at position 2363 of SEQ ID NO: 1224
guaagcgaagcauauaaua

SEQ ID NO: 97169 - RNA, 19 nt, Artificial Sequence
  Description of Artificial Sequence: Synthetic oligonucleotide
  Antisense strand to SEQ ID NO: 97088
uauuauaugcuucgcuuac

SEQ ID NO: 97170 - RNA, 19 nt, Artificial Sequence
  Description of Artificial Sequence: Synthetic oligonucleotide
  Sense strand starting at position 2361 of SEQ ID NO: 1224
ggguaagcgaagcauauaa

SEQ ID NO: 97171 - RNA, 19 nt, Artificial Sequence
  Description of Artificial Sequence: Synthetic oligonucleotide
  Antisense strand to SEQ ID NO: 97090
uuauaugcuucgcuuaccc

SEQ ID NO: 97172 - RNA, 19 nt, Artificial Sequence
  Description of Artificial Sequence: Synthetic oligonucleotide
  Sense strand starting at position 2349 of SEQ ID NO: 1224
ucuugauauacaggguaag

SEQ ID NO: 97173 - RNA, 19 nt, Artificial Sequence
  Description of Artificial Sequence: Synthetic oligonucleotide
  Antisense strand to SEQ ID NO: 97092
cuuacccuguauaucaaga

SEQ ID NO: 97174 - RNA, 19 nt, Artificial Sequence
  Description of Artificial Sequence: Synthetic oligonucleotide
  Sense strand starting at position 2347 of SEQ ID NO: 1224
gcucuugauauacagggua

SEQ ID NO: 97175 - RNA, 19 nt, Artificial Sequence
  Description of Artificial Sequence: Synthetic oligonucleotide
  Antisense strand to SEQ ID NO: 97094
uacccuguauaucaagagc

SEQ ID NO: 97176 - RNA, 19 nt, Artificial Sequence
  Description of Artificial Sequence: Synthetic oligonucleotide
  Sense strand starting at position 2252 of SEQ ID NO: 1224
uuaccuuauuuggagaaau

SEQ ID NO: 97177 - RNA, 19 nt, Artificial Sequence
  Description of Artificial Sequence: Synthetic oligonucleotide
  Antisense strand to SEQ ID NO: 97096
auuucuccaaauaagguaa

SEQ ID NO: 97178 - RNA, 19 nt, Artificial Sequence
  Description of Artificial Sequence: Synthetic oligonucleotide
  Sense strand starting at position 2167 of SEQ ID NO: 1224
uguggacuucuguaaugac

SEQ ID NO: 97179 - RNA, 19 nt, Artificial Sequence
  Description of Artificial Sequence: Synthetic oligonucleotide
  Antisense strand to SEQ ID NO: 97098
gucauuacagaaguccaca

SEQ ID NO: 97180 - RNA, 19 nt, Artificial Sequence
  Description of Artificial Sequence: Synthetic oligonucleotide
  Sense strand starting at position 2110 of SEQ ID NO: 1224
uguaacuguacugaguuua

SEQ ID NO: 97181 - RNA, 19 nt, Artificial Sequence
  Description of Artificial Sequence: Synthetic oligonucleotide
  Antisense strand to SEQ ID NO: 97100
uaaacucaguacaguuaca

SEQ ID NO: 97182 - RNA, 19 nt, Artificial Sequence
  Description of Artificial Sequence: Synthetic oligonucleotide
  Sense strand starting at position 1515 of SEQ ID NO: 1224
gcagaagacuuaccuuacu

SEQ ID NO: 97183 - RNA, 19 nt, Artificial Sequence
  Description of Artificial Sequence: Synthetic oligonucleotide
  Antisense strand to SEQ ID NO: 97102
aguaagguaagucuucugc

SEQ ID NO: 97184 - RNA, 19 nt, Artificial Sequence
  Description of Artificial Sequence: Synthetic oligonucleotide
  Sense strand starting at position 1410 of SEQ ID NO: 1224
cucaauugucuacauuagu

SEQ ID NO: 97185 - RNA, 19 nt, Artificial Sequence
  Description of Artificial Sequence: Synthetic oligonucleotide
  Antisense strand to SEQ ID NO: 97104
acuaauguagacaauugag

SEQ ID NO: 97186 - RNA, 19 nt, Artificial Sequence
  Description of Artificial Sequence: Synthetic oligonucleotide
  Sense strand starting at position 1351 of SEQ ID NO: 1224
ggcacaguggcuuacagaa

SEQ ID NO: 97187 - RNA, 19 nt, Artificial Sequence
  Description of Artificial Sequence: Synthetic oligonucleotide
  Antisense strand to SEQ ID NO: 97106
uucuguaagccacugugcc

SEQ ID NO: 97188 - RNA, 19 nt, Artificial Sequence
  Description of Artificial Sequence: Synthetic oligonucleotide
  Sense strand starting at position 1173 of SEQ ID NO: 1224
guguuaaguaacgauacag

SEQ ID NO: 97189 - RNA, 19 nt, Artificial Sequence
  Description of Artificial Sequence: Synthetic oligonucleotide
  Antisense strand to SEQ ID NO: 97108
cuguaucguuacuuaacac

SEQ ID NO: 97190 - RNA, 19 nt, Artificial Sequence
  Description of Artificial Sequence: Synthetic oligonucleotide
  Sense strand starting at position 1169 of SEQ ID NO: 1224
augaguguuaaguaacgau

SEQ ID NO: 97191 - RNA, 19 nt, Artificial Sequence
  Description of Artificial Sequence: Synthetic oligonucleotide
  Antisense strand to SEQ ID NO: 97110
aucguuacuuaacacucau

SEQ ID NO: 97192 - RNA, 19 nt, Artificial Sequence
  Description of Artificial Sequence: Synthetic oligonucleotide
  Sense strand starting at position 1162 of SEQ ID NO: 1224
auuacagaugaguguuaag

SEQ ID NO: 97193 - RNA, 19 nt, Artificial Sequence
  Description of Artificial Sequence: Synthetic oligonucleotide
  Antisense strand to SEQ ID NO: 97112
cuuaacacucaucuguaau

SEQ ID NO: 97194 - RNA, 19 nt, Artificial Sequence
  Description of Artificial Sequence: Synthetic oligonucleotide
  Sense strand starting at position 1161 of SEQ ID NO: 1224
gauuacagaugaguguuaa

SEQ ID NO: 97195 - RNA, 19 nt, Artificial Sequence
  Description of Artificial Sequence: Synthetic oligonucleotide
  Antisense strand to SEQ ID NO: 97114
uuaacacucaucuguaauc

SEQ ID NO: 97196 - RNA, 19 nt, Artificial Sequence
  Description of Artificial Sequence: Synthetic oligonucleotide
  Sense strand starting at position 1159 of SEQ ID NO: 1224
gugauuacagaugaguguu

SEQ ID NO: 97197 - RNA, 19 nt, Artificial Sequence
  Description of Artificial Sequence: Synthetic oligonucleotide
  Antisense strand to SEQ ID NO: 97116
aacacucaucuguaaucac

SEQ ID NO: 97198 - RNA, 19 nt, Artificial Sequence
  Description of Artificial Sequence: Synthetic oligonucleotide
  Sense strand starting at position 1111 of SEQ ID NO: 1224
ucauaauccagugggaagu

SEQ ID NO: 97199 - RNA, 19 nt, Artificial Sequence
  Description of Artificial Sequence: Synthetic oligonucleotide
  Antisense strand to SEQ ID NO: 97118
acuucccacuggauuauga

SEQ ID NO: 97200 - RNA, 19 nt, Artificial Sequence
  Description of Artificial Sequence: Synthetic oligonucleotide
  Sense strand starting at position 1019 of SEQ ID NO: 1224
ggcugcaucucauuucuuu

SEQ ID NO: 97201 - RNA, 19 nt, Artificial Sequence
  Description of Artificial Sequence: Synthetic oligonucleotide
  Antisense strand to SEQ ID NO: 97120
aaagaaaugagaugcagcc

SEQ ID NO: 97202 - RNA, 19 nt, Artificial Sequence
  Description of Artificial Sequence: Synthetic oligonucleotide
  Sense strand starting at position 612 of SEQ ID NO: 1224
guuugaggucggagagcuu

SEQ ID NO: 97203 - RNA, 19 nt, Artificial Sequence
  Description of Artificial Sequence: Synthetic oligonucleotide
  Antisense strand to SEQ ID NO: 97122
aagcucuccgaccucaaac

SEQ ID NO: 97204 - RNA, 19 nt, Artificial Sequence
  Description of Artificial Sequence: Synthetic oligonucleotide
  Sense strand starting at position 335 of SEQ ID NO: 1224
gaacauagucuaggaguuc

SEQ ID NO: 97205 - RNA, 19 nt, Artificial Sequence
  Description of Artificial Sequence: Synthetic oligonucleotide
  Antisense strand to SEQ ID NO: 97124
gaacuccuagacuauguuc

SEQ ID NO: 97206 - RNA, 19 nt, Artificial Sequence
  Description of Artificial Sequence: Synthetic oligonucleotide
  Sense strand starting at position 173 of SEQ ID NO: 1224
ggcagaauucuuugaauaa

SEQ ID NO: 97207 - RNA, 19 nt, Artificial Sequence
  Description of Artificial Sequence: Synthetic oligonucleotide
  Antisense strand to SEQ ID NO: 97126
uuauucaaagaauucugcc

SEQ ID NO: 97208 - RNA, 19 nt, Artificial Sequence
  Description of Artificial Sequence: Synthetic oligonucleotide
  Sense strand starting at position 171 of SEQ ID NO: 1224
uuggcagaauucuuugaau

SEQ ID NO: 97209 - RNA, 19 nt, Artificial Sequence
  Description of Artificial Sequence: Synthetic oligonucleotide
  Antisense strand to SEQ ID NO: 97128
auucaaagaauucugccaa

SEQ ID NO: 97210 - RNA, 19 nt, Artificial Sequence
  Description of Artificial Sequence: Synthetic oligonucleotide
  Sense strand starting at position 165 of SEQ ID NO: 1224
gcauacuuggcagaauucu

SEQ ID NO: 97211 - RNA, 19 nt, Artificial Sequence
  Description of Artificial Sequence: Synthetic oligonucleotide
  Antisense strand to SEQ ID NO: 97130
agaauucugccaaguaugc

SEQ ID NO: 97212 - RNA, 19 nt, Artificial Sequence
  Description of Artificial Sequence: Synthetic oligonucleotide
  Sense strand starting at position 3898 of SEQ ID NO: 1226
cagagaguuguauaaguga

SEQ ID NO: 97213 - RNA, 19 nt, Artificial Sequence
  Description of Artificial Sequence: Synthetic oligonucleotide
  Antisense strand to SEQ ID NO: 97132
ucacuuauacaacucucug

SEQ ID NO: 97214 - RNA, 19 nt, Artificial Sequence
  Description of Artificial Sequence: Synthetic oligonucleotide
  Sense strand starting at position 3883 of SEQ ID NO: 1226
cccauagaucugcagcaga

SEQ ID NO: 97215 - RNA, 19 nt, Artificial Sequence
  Description of Artificial Sequence: Synthetic oligonucleotide
  Antisense strand to SEQ ID NO: 97134
ucugcugcagaucuauggg

SEQ ID NO: 97216 - RNA, 19 nt, Artificial Sequence
  Description of Artificial Sequence: Synthetic oligonucleotide
  Sense strand starting at position 3744 of SEQ ID NO: 1226
guuuacuaucaacauuagu

SEQ ID NO: 97217 - RNA, 19 nt, Artificial Sequence
  Description of Artificial Sequence: Synthetic oligonucleotide
  Antisense strand to SEQ ID NO: 97136
acuaauguugauaguaaac

SEQ ID NO: 97218 - RNA, 19 nt, Artificial Sequence
  Description of Artificial Sequence: Synthetic oligonucleotide
  Sense strand starting at position 3737 of SEQ ID NO: 1226
guaaacuguuuacuaucaa

SEQ ID NO: 97219 - RNA, 19 nt, Artificial Sequence
  Description of Artificial Sequence: Synthetic oligonucleotide
  Antisense strand to SEQ ID NO: 97138
uugauaguaaacaguuuac

SEQ ID NO: 97220 - RNA, 19 nt, Artificial Sequence
  Description of Artificial Sequence: Synthetic oligonucleotide
  Sense strand starting at position 3582 of SEQ ID NO: 1226
guugcucuugccucaugua

SEQ ID NO: 97221 - RNA, 19 nt, Artificial Sequence
  Description of Artificial Sequence: Synthetic oligonucleotide
  Antisense strand to SEQ ID NO: 97140
uacaugaggcaagagcaac

SEQ ID NO: 97222 - RNA, 19 nt, Artificial Sequence
  Description of Artificial Sequence: Synthetic oligonucleotide
  Sense strand starting at position 3373 of SEQ ID NO: 1226
agaguuucugcuuagauag

SEQ ID NO: 97223 - RNA, 19 nt, Artificial Sequence
  Description of Artificial Sequence: Synthetic oligonucleotide
  Antisense strand to SEQ ID NO: 97142
cuaucuaagcagaaacucu

SEQ ID NO: 97224 - RNA, 19 nt, Artificial Sequence
  Description of Artificial Sequence: Synthetic oligonucleotide
  Sense strand starting at position 3359 of SEQ ID NO: 1226
guuuaaugaguacaagagu

SEQ ID NO: 97225 - RNA, 19 nt, Artificial Sequence
  Description of Artificial Sequence: Synthetic oligonucleotide
  Antisense strand to SEQ ID NO: 97144
acucuuguacucauuaaac

SEQ ID NO: 97226 - RNA, 19 nt, Artificial Sequence
  Description of Artificial Sequence: Synthetic oligonucleotide
  Sense strand starting at position 3350 of SEQ ID NO: 1226
gagguuguuguuuaaugag

SEQ ID NO: 97227 - RNA, 19 nt, Artificial Sequence
  Description of Artificial Sequence: Synthetic oligonucleotide
  Antisense strand to SEQ ID NO: 97146
cucauuaaacaacaaccuc

SEQ ID NO: 97228 - RNA, 19 nt, Artificial Sequence
  Description of Artificial Sequence: Synthetic oligonucleotide
  Sense strand starting at position 3035 of SEQ ID NO: 1226
caguguucuguagcagcau

SEQ ID NO: 97229 - RNA, 19 nt, Artificial Sequence
  Description of Artificial Sequence: Synthetic oligonucleotide
  Antisense strand to SEQ ID NO: 97148
augcugcuacagaacacug

SEQ ID NO: 97230 - RNA, 19 nt, Artificial Sequence
  Description of Artificial Sequence: Synthetic oligonucleotide
  Sense strand starting at position 2940 of SEQ ID NO: 1226
guuaaacauugacuuagca

SEQ ID NO: 97231 - RNA, 19 nt, Artificial Sequence
  Description of Artificial Sequence: Synthetic oligonucleotide
  Antisense strand to SEQ ID NO: 97150
ugcuaagucaauguuuaac

SEQ ID NO: 97232 - RNA, 19 nt, Artificial Sequence
  Description of Artificial Sequence: Synthetic oligonucleotide
  Sense strand starting at position 2843 of SEQ ID NO: 1226
uaguaaagauguguagaaa

SEQ ID NO: 97233 - RNA, 19 nt, Artificial Sequence
  Description of Artificial Sequence: Synthetic oligonucleotide
  Antisense strand to SEQ ID NO: 97152
uuucuacacaucuuuacua

SEQ ID NO: 97234 - RNA, 19 nt, Artificial Sequence
  Description of Artificial Sequence: Synthetic oligonucleotide
  Sense strand starting at position 2842 of SEQ ID NO: 1226
uuaguaaagauguguagaa

SEQ ID NO: 97235 - RNA, 19 nt, Artificial Sequence
  Description of Artificial Sequence: Synthetic oligonucleotide
  Antisense strand to SEQ ID NO: 97154
uucuacacaucuuuacuaa

SEQ ID NO: 97236 - RNA, 19 nt, Artificial Sequence
  Description of Artificial Sequence: Synthetic oligonucleotide
  Sense strand starting at position 2838 of SEQ ID NO: 1226
aguauuaguaaagaugugu

SEQ ID NO: 97237 - RNA, 19 nt, Artificial Sequence
  Description of Artificial Sequence: Synthetic oligonucleotide
  Antisense strand to SEQ ID NO: 97156
acacaucuuuacuaauacu

SEQ ID NO: 97238 - RNA, 19 nt, Artificial Sequence
  Description of Artificial Sequence: Synthetic oligonucleotide
  Sense strand starting at position 2802 of SEQ ID NO: 1226
ccauuagaauggcucuuau

SEQ ID NO: 97239 - RNA, 19 nt, Artificial Sequence
  Description of Artificial Sequence: Synthetic oligonucleotide
  Antisense strand to SEQ ID NO: 97158
auaagagccauucuaaugg

SEQ ID NO: 97240 - RNA, 19 nt, Artificial Sequence
  Description of Artificial Sequence: Synthetic oligonucleotide
  Sense strand starting at position 2781 of SEQ ID NO: 1226
augagauucugcuuuauau

SEQ ID NO: 97241 - RNA, 19 nt, Artificial Sequence
  Description of Artificial Sequence: Synthetic oligonucleotide
  Antisense strand to SEQ ID NO: 97160
auauaaagcagaaucucau

SEQ ID NO: 97242 - RNA, 19 nt, Artificial Sequence
  Description of Artificial Sequence: Synthetic oligonucleotide
  Sense strand starting at position 2726 of SEQ ID NO: 1226
guucucuucgugucucuua

SEQ ID NO: 97243 - RNA, 19 nt, Artificial Sequence
  Description of Artificial Sequence: Synthetic oligonucleotide
  Antisense strand to SEQ ID NO: 97162
uaagagacacgaagagaac

SEQ ID NO: 97244 - RNA, 19 nt, Artificial Sequence
  Description of Artificial Sequence: Synthetic oligonucleotide
  Sense strand starting at position 2703 of SEQ ID NO: 1226
guaagcgaagcauauaaua

SEQ ID NO: 97245 - RNA, 19 nt, Artificial Sequence
  Description of Artificial Sequence: Synthetic oligonucleotide
  Antisense strand to SEQ ID NO: 97164
uauuauaugcuucgcuuac

SEQ ID NO: 97246 - RNA, 19 nt, Artificial Sequence
  Description of Artificial Sequence: Synthetic oligonucleotide
  Sense strand starting at position 2701 of SEQ ID NO: 1226
ggguaagcgaagcauauaa

SEQ ID NO: 97247 - RNA, 19 nt, Artificial Sequence
  Description of Artificial Sequence: Synthetic oligonucleotide
  Antisense strand to SEQ ID NO: 97166
uuauaugcuucgcuuaccc

SEQ ID NO: 97248 - RNA, 19 nt, Artificial Sequence
  Description of Artificial Sequence: Synthetic oligonucleotide
  Sense strand starting at position 2689 of SEQ ID NO: 1226
ucuugauauacaggguaag

SEQ ID NO: 97249 - RNA, 19 nt, Artificial Sequence
  Description of Artificial Sequence: Synthetic oligonucleotide
  Antisense strand to SEQ ID NO: 97168
cuuacccuguauaucaaga

SEQ ID NO: 97250 - RNA, 19 nt, Artificial Sequence
  Description of Artificial Sequence: Synthetic oligonucleotide
  Sense strand starting at position 2687 of SEQ ID NO: 1226
gcucuugauauacagggua

SEQ ID NO: 97251 - RNA, 19 nt, Artificial Sequence
  Description of Artificial Sequence: Synthetic oligonucleotide
  Antisense strand to SEQ ID NO: 97170
uacccuguauaucaagagc

SEQ ID NO: 97252 - RNA, 19 nt, Artificial Sequence
  Description of Artificial Sequence: Synthetic oligonucleotide
  Sense strand starting at position 2592 of SEQ ID NO: 1226
uuaccuuauuuggagaaau

SEQ ID NO: 97253 - RNA, 19 nt, Artificial Sequence
  Description of Artificial Sequence: Synthetic oligonucleotide
  Antisense strand to SEQ ID NO: 97172
auuucuccaaauaagguaa

SEQ ID NO: 97254 - RNA, 19 nt, Artificial Sequence
  Description of Artificial Sequence: Synthetic oligonucleotide
  Sense strand starting at position 2507 of SEQ ID NO: 1226
uguggacuucuguaaugac

SEQ ID NO: 97255 - RNA, 19 nt, Artificial Sequence
  Description of Artificial Sequence: Synthetic oligonucleotide
  Antisense strand to SEQ ID NO: 97174
gucauuacagaaguccaca

SEQ ID NO: 97256 - RNA, 19 nt, Artificial Sequence
  Description of Artificial Sequence: Synthetic oligonucleotide
  Sense strand starting at position 2450 of SEQ ID NO: 1226
uguaacuguacugaguuua

SEQ ID NO: 97257 - RNA, 19 nt, Artificial Sequence
  Description of Artificial Sequence: Synthetic oligonucleotide
  Antisense strand to SEQ ID NO: 97176
uaaacucaguacaguuaca

SEQ ID NO: 97258 - RNA, 19 nt, Artificial Sequence
  Description of Artificial Sequence: Synthetic oligonucleotide
  Sense strand starting at position 1855 of SEQ ID NO: 1226
gcagaagacuuaccuuacu

SEQ ID NO: 97259 - RNA, 19 nt, Artificial Sequence
  Description of Artificial Sequence: Synthetic oligonucleotide
  Antisense strand to SEQ ID NO: 97178
aguaagguaagucuucugc

SEQ ID NO: 97260 - RNA, 19 nt, Artificial Sequence
  Description of Artificial Sequence: Synthetic oligonucleotide
  Sense strand starting at position 1750 of SEQ ID NO: 1226
cucaauugucuacauuagu

SEQ ID NO: 97261 - RNA, 19 nt, Artificial Sequence
  Description of Artificial Sequence: Synthetic oligonucleotide
  Antisense strand to SEQ ID NO: 97180
acuaauguagacaauugag

SEQ ID NO: 97262 - RNA, 19 nt, Artificial Sequence
  Description of Artificial Sequence: Synthetic oligonucleotide
  Sense strand starting at position 1691 of SEQ ID NO: 1226
ggcacaguggcuuacagaa

SEQ ID NO: 97263 - RNA, 19 nt, Artificial Sequence
  Description of Artificial Sequence: Synthetic oligonucleotide
  Antisense strand to SEQ ID NO: 97182
uucuguaagccacugugcc

SEQ ID NO: 97264 - RNA, 19 nt, Artificial Sequence
  Description of Artificial Sequence: Synthetic oligonucleotide
  Sense strand starting at position 1513 of SEQ ID NO: 1226
guguuaaguaacgauacag

SEQ ID NO: 97265 - RNA, 19 nt, Artificial Sequence
  Description of Artificial Sequence: Synthetic oligonucleotide
  Antisense strand to SEQ ID NO: 97184
cuguaucguuacuuaacac

SEQ ID NO: 97266 - RNA, 19 nt, Artificial Sequence
  Description of Artificial Sequence: Synthetic oligonucleotide
  Sense strand starting at position 1509 of SEQ ID NO: 1226
augaguguuaaguaacgau

SEQ ID NO: 97267 - RNA, 19 nt, Artificial Sequence
  Description of Artificial Sequence: Synthetic oligonucleotide
  Antisense strand to SEQ ID NO: 97186
aucguuacuuaacacucau

SEQ ID NO: 97268 - RNA, 19 nt, Artificial Sequence
  Description of Artificial Sequence: Synthetic oligonucleotide
  Sense strand starting at position 1502 of SEQ ID NO: 1226
auuacagaugaguguuaag

SEQ ID NO: 97269 - RNA, 19 nt, Artificial Sequence
  Description of Artificial Sequence: Synthetic oligonucleotide
  Antisense strand to SEQ ID NO: 97188
cuuaacacucaucuguaau

SEQ ID NO: 97270 - RNA, 19 nt, Artificial Sequence
  Description of Artificial Sequence: Synthetic oligonucleotide
  Sense strand starting at position 1501 of SEQ ID NO: 1226
gauuacagaugaguguuaa

SEQ ID NO: 97271 - RNA, 19 nt, Artificial Sequence
  Description of Artificial Sequence: Synthetic oligonucleotide
  Antisense strand to SEQ ID NO: 97190
uuaacacucaucuguaauc

SEQ ID NO: 97272 - RNA, 19 nt, Artificial Sequence
  Description of Artificial Sequence: Synthetic oligonucleotide
  Sense strand starting at position 1499 of SEQ ID NO: 1226
gugauuacagaugaguguu

SEQ ID NO: 97273 - RNA, 19 nt, Artificial Sequence
  Description of Artificial Sequence: Synthetic oligonucleotide
  Antisense strand to SEQ ID NO: 97192
aacacucaucuguaaucac

SEQ ID NO: 97274 - RNA, 19 nt, Artificial Sequence
  Description of Artificial Sequence: Synthetic oligonucleotide
  Sense strand starting at position 1451 of SEQ ID NO: 1226
ucauaauccagugggaagu

SEQ ID NO: 97275 - RNA, 19 nt, Artificial Sequence
  Description of Artificial Sequence: Synthetic oligonucleotide
  Antisense strand to SEQ ID NO: 97194
acuucccacuggauuauga

SEQ ID NO: 97276 - RNA, 19 nt, Artificial Sequence
  Description of Artificial Sequence: Synthetic oligonucleotide
  Sense strand starting at position 1359 of SEQ ID NO: 1226
ggcugcaucucauuucuuu

SEQ ID NO: 97277 - RNA, 19 nt, Artificial Sequence
  Description of Artificial Sequence: Synthetic oligonucleotide
  Antisense strand to SEQ ID NO: 97196
aaagaaaugagaugcagcc

SEQ ID NO: 97278 - RNA, 19 nt, Artificial Sequence
  Description of Artificial Sequence: Synthetic oligonucleotide
  Sense strand starting at position 952 of SEQ ID NO: 1226
guuugaggucggagagcuu

SEQ ID NO: 97279 - RNA, 19 nt, Artificial Sequence
  Description of Artificial Sequence: Synthetic oligonucleotide
  Antisense strand to SEQ ID NO: 97198
aagcucuccgaccucaaac

SEQ ID NO: 97280 - RNA, 19 nt, Artificial Sequence
  Description of Artificial Sequence: Synthetic oligonucleotide
  Sense strand starting at position 675 of SEQ ID NO: 1226
gaacauagucuaggaguuc

SEQ ID NO: 97281 - RNA, 19 nt, Artificial Sequence
  Description of Artificial Sequence: Synthetic oligonucleotide
  Antisense strand to SEQ ID NO: 97200
gaacuccuagacuauguuc

SEQ ID NO: 97282 - RNA, 19 nt, Artificial Sequence
  Description of Artificial Sequence: Synthetic oligonucleotide
  Sense strand starting at position 513 of SEQ ID NO: 1226
ggcagaauucuuugaauaa

SEQ ID NO: 97283 - RNA, 19 nt, Artificial Sequence
  Description of Artificial Sequence: Synthetic oligonucleotide
  Antisense strand to SEQ ID NO: 97202
uuauucaaagaauucugcc

SEQ ID NO: 97284 - RNA, 19 nt, Artificial Sequence
  Description of Artificial Sequence: Synthetic oligonucleotide
  Sense strand starting at position 511 of SEQ ID NO: 1226
uuggcagaauucuuugaau

SEQ ID NO: 97285 - RNA, 19 nt, Artificial Sequence
  Description of Artificial Sequence: Synthetic oligonucleotide
  Antisense strand to SEQ ID NO: 97204
auucaaagaauucugccaa

SEQ ID NO: 97286 - RNA, 19 nt, Artificial Sequence
  Description of Artificial Sequence: Synthetic oligonucleotide
  Sense strand starting at position 505 of SEQ ID NO: 1226
gcauacuuggcagaauucu

SEQ ID NO: 97287 - RNA, 19 nt, Artificial Sequence
  Description of Artificial Sequence: Synthetic oligonucleotide
  Antisense strand to SEQ ID NO: 97206
agaauucugccaaguaugc

SEQ ID NO: 97288 - RNA, 19 nt, Artificial Sequence
  Description of Artificial Sequence: Synthetic oligonucleotide
  Sense strand starting at position 310 of SEQ ID NO: 1226
ucuaguuaagcagaaacca

SEQ ID NO: 97289 - RNA, 19 nt, Artificial Sequence
  Description of Artificial Sequence: Synthetic oligonucleotide
  Antisense strand to SEQ ID NO: 97208
ugguuucugcuuaacuaga

SEQ ID NO: 97290 - RNA, 19 nt, Artificial Sequence
  Description of Artificial Sequence: Synthetic oligonucleotide
  Sense strand starting at position 152 of SEQ ID NO: 1226
agccucgaagaguaagaau

SEQ ID NO: 97291 - RNA, 19 nt, Artificial Sequence
  Description of Artificial Sequence: Synthetic oligonucleotide
  Antisense strand to SEQ ID NO: 97210
auucuuacucuucgaggcu

SEQ ID NO: 97292 - RNA, 19 nt, Artificial Sequence
  Description of Artificial Sequence: Synthetic oligonucleotide
  Sense strand starting at position 3833 of SEQ ID NO: 1225
caguguucuguagcagcau

SEQ ID NO: 97293 - RNA, 19 nt, Artificial Sequence
  Description of Artificial Sequence: Synthetic oligonucleotide
  Antisense strand to SEQ ID NO: 97212
augcugcuacagaacacug

SEQ ID NO: 97294 - RNA, 19 nt, Artificial Sequence
  Description of Artificial Sequence: Synthetic oligonucleotide
  Sense strand starting at position 3641 of SEQ ID NO: 1225
uaguaaagauguguagaaa

SEQ ID NO: 97295 - RNA, 19 nt, Artificial Sequence
  Description of Artificial Sequence: Synthetic oligonucleotide
  Antisense strand to SEQ ID NO: 97214
uuucuacacaucuuuacua

SEQ ID NO: 97296 - RNA, 19 nt, Artificial Sequence
  Description of Artificial Sequence: Synthetic oligonucleotide
  Sense strand starting at position 3640 of SEQ ID NO: 1225
uuaguaaagauguguagaa

SEQ ID NO: 97297 - RNA, 19 nt, Artificial Sequence
  Description of Artificial Sequence: Synthetic oligonucleotide
  Antisense strand to SEQ ID NO: 97216
uucuacacaucuuuacuaa

SEQ ID NO: 97298 - RNA, 19 nt, Artificial Sequence
  Description of Artificial Sequence: Synthetic oligonucleotide
  Sense strand starting at position 3636 of SEQ ID NO: 1225
aguauuaguaaagaugugu

SEQ ID NO: 97299 - RNA, 19 nt, Artificial Sequence
  Description of Artificial Sequence: Synthetic oligonucleotide
  Antisense strand to SEQ ID NO: 97218
acacaucuuuacuaauacu

SEQ ID NO: 97300 - RNA, 19 nt, Artificial Sequence
  Description of Artificial Sequence: Synthetic oligonucleotide
  Sense strand starting at position 3524 of SEQ ID NO: 1225
guucucuucgugucucuua

SEQ ID NO: 97301 - RNA, 19 nt, Artificial Sequence
  Description of Artificial Sequence: Synthetic oligonucleotide
  Antisense strand to SEQ ID NO: 97220
uaagagacacgaagagaac

SEQ ID NO: 97302 - RNA, 19 nt, Artificial Sequence
  Description of Artificial Sequence: Synthetic oligonucleotide
  Sense strand starting at position 3501 of SEQ ID NO: 1225
guaagcgaagcauauaaua

SEQ ID NO: 97303 - RNA, 19 nt, Artificial Sequence
  Description of Artificial Sequence: Synthetic oligonucleotide
  Antisense strand to SEQ ID NO: 97222
uauuauaugcuucgcuuac

SEQ ID NO: 97304 - RNA, 19 nt, Artificial Sequence
  Description of Artificial Sequence: Synthetic oligonucleotide
  Sense strand starting at position 3499 of SEQ ID NO: 1225
ggguaagcgaagcauauaa

SEQ ID NO: 97305 - RNA, 19 nt, Artificial Sequence
  Description of Artificial Sequence: Synthetic oligonucleotide
  Antisense strand to SEQ ID NO: 97224
uuauaugcuucgcuuaccc

SEQ ID NO: 97306 - RNA, 19 nt, Artificial Sequence
  Description of Artificial Sequence: Synthetic oligonucleotide
  Sense strand starting at position 3487 of SEQ ID NO: 1225
ucuugauauacaggguaag

SEQ ID NO: 97307 - RNA, 19 nt, Artificial Sequence
  Description of Artificial Sequence: Synthetic oligonucleotide
  Antisense strand to SEQ ID NO: 97226
cuuacccuguauaucaaga

SEQ ID NO: 97308 - RNA, 19 nt, Artificial Sequence
  Description of Artificial Sequence: Synthetic oligonucleotide
  Sense strand starting at position 3485 of SEQ ID NO: 1225
gcucuugauauacagggua

SEQ ID NO: 97309 - RNA, 19 nt, Artificial Sequence
  Description of Artificial Sequence: Synthetic oligonucleotide
  Antisense strand to SEQ ID NO: 97228
uacccuguauaucaagagc

SEQ ID NO: 97310 - RNA, 19 nt, Artificial Sequence
  Description of Artificial Sequence: Synthetic oligonucleotide
  Sense strand starting at position 3390 of SEQ ID NO: 1225
uuaccuuauuuggagaaau

SEQ ID NO: 97311 - RNA, 19 nt, Artificial Sequence
  Description of Artificial Sequence: Synthetic oligonucleotide
  Antisense strand to SEQ ID NO: 97230
auuucuccaaauaagguaa

SEQ ID NO: 97312 - RNA, 19 nt, Artificial Sequence
  Description of Artificial Sequence: Synthetic oligonucleotide
  Sense strand starting at position 3305 of SEQ ID NO: 1225
uguggacuucuguaaugac

SEQ ID NO: 97313 - RNA, 19 nt, Artificial Sequence
  Description of Artificial Sequence: Synthetic oligonucleotide
  Antisense strand to SEQ ID NO: 97232
gucauuacagaaguccaca

SEQ ID NO: 97314 - RNA, 19 nt, Artificial Sequence
  Description of Artificial Sequence: Synthetic oligonucleotide
  Sense strand starting at position 2653 of SEQ ID NO: 1225
gcagaagacuuaccuuacu

SEQ ID NO: 97315 - RNA, 19 nt, Artificial Sequence
  Description of Artificial Sequence: Synthetic oligonucleotide
  Antisense strand to SEQ ID NO: 97234
aguaagguaagucuucugc

SEQ ID NO: 97316 - RNA, 19 nt, Artificial Sequence
  Description of Artificial Sequence: Synthetic oligonucleotide
  Sense strand starting at position 2548 of SEQ ID NO: 1225
cucaauugucuacauuagu

SEQ ID NO: 97317 - RNA, 19 nt, Artificial Sequence
  Description of Artificial Sequence: Synthetic oligonucleotide
  Antisense strand to SEQ ID NO: 97236
acuaauguagacaauugag

SEQ ID NO: 97318 - RNA, 19 nt, Artificial Sequence
  Description of Artificial Sequence: Synthetic oligonucleotide
  Sense strand starting at position 2489 of SEQ ID NO: 1225
ggcacaguggcuuacagaa

SEQ ID NO: 97319 - RNA, 19 nt, Artificial Sequence
  Description of Artificial Sequence: Synthetic oligonucleotide
  Antisense strand to SEQ ID NO: 97238
uucuguaagccacugugcc

SEQ ID NO: 97320 - RNA, 19 nt, Artificial Sequence
  Description of Artificial Sequence: Synthetic oligonucleotide
  Sense strand starting at position 2311 of SEQ ID NO: 1225
guguuaaguaacgauacag

SEQ ID NO: 97321 - RNA, 19 nt, Artificial Sequence
  Description of Artificial Sequence: Synthetic oligonucleotide
  Antisense strand to SEQ ID NO: 97240
cuguaucguuacuuaacac

SEQ ID NO: 97322 - RNA, 19 nt, Artificial Sequence
  Description of Artificial Sequence: Synthetic oligonucleotide
  Sense strand starting at position 2307 of SEQ ID NO: 1225
augaguguuaaguaacgau

SEQ ID NO: 97323 - RNA, 19 nt, Artificial Sequence
  Description of Artificial Sequence: Synthetic oligonucleotide
  Antisense strand to SEQ ID NO: 97242
aucguuacuuaacacucau

SEQ ID NO: 97324 - RNA, 19 nt, Artificial Sequence
  Description of Artificial Sequence: Synthetic oligonucleotide
  Sense strand starting at position 2300 of SEQ ID NO: 1225
auuacagaugaguguuaag

SEQ ID NO: 97325 - RNA, 19 nt, Artificial Sequence
  Description of Artificial Sequence: Synthetic oligonucleotide
  Antisense strand to SEQ ID NO: 97244
cuuaacacucaucuguaau

SEQ ID NO: 97326 - RNA, 19 nt, Artificial Sequence
  Description of Artificial Sequence: Synthetic oligonucleotide
  Sense strand starting at position 2299 of SEQ ID NO: 1225
gauuacagaugaguguuaa

SEQ ID NO: 97327 - RNA, 19 nt, Artificial Sequence
  Description of Artificial Sequence: Synthetic oligonucleotide
  Antisense strand to SEQ ID NO: 97246
uuaacacucaucuguaauc

SEQ ID NO: 97328 - RNA, 19 nt, Artificial Sequence
  Description of Artificial Sequence: Synthetic oligonucleotide
  Sense strand starting at position 2297 of SEQ ID NO: 1225
gugauuacagaugaguguu

SEQ ID NO: 97329 - RNA, 19 nt, Artificial Sequence
  Description of Artificial Sequence: Synthetic oligonucleotide
  Antisense strand to SEQ ID NO: 97248
aacacucaucuguaaucac

SEQ ID NO: 97330 - RNA, 19 nt, Artificial Sequence
  Description of Artificial Sequence: Synthetic oligonucleotide
  Sense strand starting at position 2249 of SEQ ID NO: 1225
ucauaauccagugggaagu

SEQ ID NO: 97331 - RNA, 19 nt, Artificial Sequence
  Description of Artificial Sequence: Synthetic oligonucleotide
  Antisense strand to SEQ ID NO: 97250
acuucccacuggauuauga

SEQ ID NO: 97332 - RNA, 19 nt, Artificial Sequence
  Description of Artificial Sequence: Synthetic oligonucleotide
  Sense strand starting at position 2157 of SEQ ID NO: 1225
ggcugcaucucauuucuuu

SEQ ID NO: 97333 - RNA, 19 nt, Artificial Sequence
  Description of Artificial Sequence: Synthetic oligonucleotide
  Antisense strand to SEQ ID NO: 97252
aaagaaaugagaugcagcc

SEQ ID NO: 97334 - RNA, 19 nt, Artificial Sequence
  Description of Artificial Sequence: Synthetic oligonucleotide
  Sense strand starting at position 1750 of SEQ ID NO: 1225
guuugaggucggagagcuu

SEQ ID NO: 97335 - RNA, 19 nt, Artificial Sequence
  Description of Artificial Sequence: Synthetic oligonucleotide
  Antisense strand to SEQ ID NO: 97254
aagcucuccgaccucaaac

SEQ ID NO: 97336 - RNA, 19 nt, Artificial Sequence
  Description of Artificial Sequence: Synthetic oligonucleotide
  Sense strand starting at position 1473 of SEQ ID NO: 1225
gaacauagucuaggaguuc

SEQ ID NO: 97337 - RNA, 19 nt, Artificial Sequence
  Description of Artificial Sequence: Synthetic oligonucleotide
  Antisense strand to SEQ ID NO: 97256
gaacuccuagacuauguuc

SEQ ID NO: 97338 - RNA, 19 nt, Artificial Sequence
  Description of Artificial Sequence: Synthetic oligonucleotide
  Sense strand starting at position 1311 of SEQ ID NO: 1225
ggcagaauucuuugaauaa

SEQ ID NO: 97339 - RNA, 19 nt, Artificial Sequence
  Description of Artificial Sequence: Synthetic oligonucleotide
  Antisense strand to SEQ ID NO: 97258
uuauucaaagaauucugcc

SEQ ID NO: 97340 - RNA, 19 nt, Artificial Sequence
  Description of Artificial Sequence: Synthetic oligonucleotide
  Sense strand starting at position 1309 of SEQ ID NO: 1225
uuggcagaauucuuugaau

SEQ ID NO: 97341 - RNA, 19 nt, Artificial Sequence
  Description of Artificial Sequence: Synthetic oligonucleotide
  Antisense strand to SEQ ID NO: 97260
auucaaagaauucugccaa

SEQ ID NO: 97342 - RNA, 19 nt, Artificial Sequence
  Description of Artificial Sequence: Synthetic oligonucleotide
  Sense strand starting at position 1108 of SEQ ID NO: 1225
ucuaguuaagcagaaacca

SEQ ID NO: 97343 - RNA, 19 nt, Artificial Sequence
  Description of Artificial Sequence: Synthetic oligonucleotide
  Antisense strand to SEQ ID NO: 97262
ugguuucugcuuaacuaga

SEQ ID NO: 97344 - RNA, 19 nt, Artificial Sequence
  Description of Artificial Sequence: Synthetic oligonucleotide
  Sense strand starting at position 950 of SEQ ID NO: 1225
agccucgaagaguaagaau

SEQ ID NO: 97345 - RNA, 19 nt, Artificial Sequence
  Description of Artificial Sequence: Synthetic oligonucleotide
  Antisense strand to SEQ ID NO: 97264
auucuuacucuucgaggcu

SEQ ID NO: 97346 - RNA, 19 nt, Artificial Sequence
  Description of Artificial Sequence: Synthetic oligonucleotide
  Sense strand starting at position 700 of SEQ ID NO: 1225
agcaaauaagagugaauua

SEQ ID NO: 97347 - RNA, 19 nt, Artificial Sequence
  Description of Artificial Sequence: Synthetic oligonucleotide
  Antisense strand to SEQ ID NO: 97266
uaauucacucuuauuugcu

SEQ ID NO: 97348 - RNA, 19 nt, Artificial Sequence
  Description of Artificial Sequence: Synthetic oligonucleotide
  Sense strand starting at position 616 of SEQ ID NO: 1225
uagcuuaguguggaauaca

SEQ ID NO: 97349 - RNA, 19 nt, Artificial Sequence
  Description of Artificial Sequence: Synthetic oligonucleotide
  Antisense strand to SEQ ID NO: 97268
uguauuccacacuaagcua

SEQ ID NO: 97350 - RNA, 19 nt, Artificial Sequence
  Description of Artificial Sequence: Synthetic oligonucleotide
  Sense strand starting at position 508 of SEQ ID NO: 1225
gagcuuacuggugacuuua

SEQ ID NO: 97351 - RNA, 19 nt, Artificial Sequence
  Description of Artificial Sequence: Synthetic oligonucleotide
  Antisense strand to SEQ ID NO: 97270
uaaagucaccaguaagcuc

SEQ ID NO: 97352 - RNA, 19 nt, Artificial Sequence
  Description of Artificial Sequence: Synthetic oligonucleotide
  Sense strand starting at position 496 of SEQ ID NO: 1225
gacauagagccugagcuua

SEQ ID NO: 97353 - RNA, 19 nt, Artificial Sequence
  Description of Artificial Sequence: Synthetic oligonucleotide
  Antisense strand to SEQ ID NO: 97272
uaagcucaggcucuauguc

SEQ ID NO: 97354 - RNA, 19 nt, Artificial Sequence
  Description of Artificial Sequence: Synthetic oligonucleotide
  Sense strand starting at position 431 of SEQ ID NO: 1225
aagaaagcugaaugcagau

SEQ ID NO: 97355 - RNA, 19 nt, Artificial Sequence
  Description of Artificial Sequence: Synthetic oligonucleotide
  Antisense strand to SEQ ID NO: 97274
aucugcauucagcuuucuu

SEQ ID NO: 97356 - RNA, 19 nt, Artificial Sequence
  Description of Artificial Sequence: Synthetic oligonucleotide
  Sense strand starting at position 276 of SEQ ID NO: 1225
gugauuagccuagggagaa

SEQ ID NO: 97357 - RNA, 19 nt, Artificial Sequence
  Description of Artificial Sequence: Synthetic oligonucleotide
  Antisense strand to SEQ ID NO: 97276
uucucccuaggcuaaucac

SEQ ID NO: 97358 - RNA, 19 nt, Artificial Sequence
  Description of Artificial Sequence: Synthetic oligonucleotide
  Sense strand starting at position 274 of SEQ ID NO: 1225
cugugauuagccuagggag

SEQ ID NO: 97359 - RNA, 19 nt, Artificial Sequence
  Description of Artificial Sequence: Synthetic oligonucleotide
  Antisense strand to SEQ ID NO: 97278
cucccuaggcuaaucacag

SEQ ID NO: 97360 - RNA, 19 nt, Artificial Sequence
  Description of Artificial Sequence: Synthetic oligonucleotide
  Sense strand starting at position 265 of SEQ ID NO: 1225
aggagacuucugugauuag

SEQ ID NO: 97361 - RNA, 19 nt, Artificial Sequence
  Description of Artificial Sequence: Synthetic oligonucleotide
  Antisense strand to SEQ ID NO: 97280
cuaaucacagaagucuccu

SEQ ID NO: 97362 - RNA, 19 nt, Artificial Sequence
  Description of Artificial Sequence: Synthetic oligonucleotide
  Sense strand starting at position 254 of SEQ ID NO: 1225
uggguaucucuaggagacu

SEQ ID NO: 97363 - RNA, 19 nt, Artificial Sequence
  Description of Artificial Sequence: Synthetic oligonucleotide
  Antisense strand to SEQ ID NO: 97282
agucuccuagagauaccca

SEQ ID NO: 97364 - RNA, 19 nt, Artificial Sequence
  Description of Artificial Sequence: Synthetic oligonucleotide
  Sense strand starting at position 166 of SEQ ID NO: 1225
ugaacuugucuagagcuca

SEQ ID NO: 97365 - RNA, 19 nt, Artificial Sequence
  Description of Artificial Sequence: Synthetic oligonucleotide
  Antisense strand to SEQ ID NO: 97284
ugagcucuagacaaguuca

SEQ ID NO: 97366 - RNA, 19 nt, Artificial Sequence
  Description of Artificial Sequence: Synthetic oligonucleotide
  Sense strand starting at position 164 of SEQ ID NO: 1225
gaugaacuugucuagagcu

SEQ ID NO: 97367 - RNA, 19 nt, Artificial Sequence
  Description of Artificial Sequence: Synthetic oligonucleotide
  Antisense strand to SEQ ID NO: 97286
agcucuagacaaguucauc

SEQ ID NO: 97368 - RNA, 19 nt, Artificial Sequence
  Description of Artificial Sequence: Synthetic oligonucleotide
  Sense strand starting at position 150 of SEQ ID NO: 1225
cuaucaggcaguuagauga

SEQ ID NO: 97369 - RNA, 19 nt, Artificial Sequence
  Description of Artificial Sequence: Synthetic oligonucleotide
  Antisense strand to SEQ ID NO: 97288
ucaucuaacugccugauag

SEQ ID NO: 97370 - RNA, 19 nt, Artificial Sequence
  Description of Artificial Sequence: Synthetic oligonucleotide
  Sense strand starting at position 97 of SEQ ID NO: 1225
acacauggaggcugugaua

SEQ ID NO: 97371 - RNA, 19 nt, Artificial Sequence
  Description of Artificial Sequence: Synthetic oligonucleotide
  Antisense strand to SEQ ID NO: 97290
uaucacagccuccaugugu

SEQ ID NO: 97372 - RNA, 19 nt, Artificial Sequence
  Description of Artificial Sequence: Synthetic oligonucleotide
  Sense strand starting at position 285 of SEQ ID NO: 1227
ugucacuuguaaucauuau

SEQ ID NO: 97373 - RNA, 19 nt, Artificial Sequence
  Description of Artificial Sequence: Synthetic oligonucleotide
  Antisense strand to SEQ ID NO: 97292
auaaugauuacaagugaca

SEQ ID NO: 97374 - RNA, 19 nt, Artificial Sequence
  Description of Artificial Sequence: Synthetic oligonucleotide
  Sense strand starting at position 351 of SEQ ID NO: 1227
gcaaccauauaguuuaagu

SEQ ID NO: 97375 - RNA, 19 nt, Artificial Sequence
  Description of Artificial Sequence: Synthetic oligonucleotide
  Antisense strand to SEQ ID NO: 97294
acuuaaacuauaugguugc

SEQ ID NO: 97376 - RNA, 19 nt, Artificial Sequence
  Description of Artificial Sequence: Synthetic oligonucleotide
  Sense strand starting at position 444 of SEQ ID NO: 1227
guuugagugagauggaaca

SEQ ID NO: 97377 - RNA, 19 nt, Artificial Sequence
  Description of Artificial Sequence: Synthetic oligonucleotide
  Antisense strand to SEQ ID NO: 97296
uguuccaucucacucaaac

SEQ ID NO: 97378 - RNA, 19 nt, Artificial Sequence
  Description of Artificial Sequence: Synthetic oligonucleotide
  Sense strand starting at position 550 of SEQ ID NO: 1227
ccugaaauacuugguguag

SEQ ID NO: 97379 - RNA, 19 nt, Artificial Sequence
  Description of Artificial Sequence: Synthetic oligonucleotide
  Antisense strand to SEQ ID NO: 97298
cuacaccaaguauuucagg

SEQ ID NO: 97380 - RNA, 19 nt, Artificial Sequence
  Description of Artificial Sequence: Synthetic oligonucleotide
  Sense strand starting at position 551 of SEQ ID NO: 1227
cugaaauacuugguguaga

SEQ ID NO: 97381 - RNA, 19 nt, Artificial Sequence
  Description of Artificial Sequence: Synthetic oligonucleotide
  Antisense strand to SEQ ID NO: 97300
ucuacaccaaguauuucag

SEQ ID NO: 97382 - RNA, 19 nt, Artificial Sequence
  Description of Artificial Sequence: Synthetic oligonucleotide
  Sense strand starting at position 554 of SEQ ID NO: 1227
aaauacuugguguagagua

SEQ ID NO: 97383 - RNA, 19 nt, Artificial Sequence
  Description of Artificial Sequence: Synthetic oligonucleotide
  Antisense strand to SEQ ID NO: 97302
uacucuacaccaaguauuu

SEQ ID NO: 97384 - RNA, 19 nt, Artificial Sequence
  Description of Artificial Sequence: Synthetic oligonucleotide
  Sense strand starting at position 694 of SEQ ID NO: 1227
gcuguaaacguuuaaucac

SEQ ID NO: 97385 - RNA, 19 nt, Artificial Sequence
  Description of Artificial Sequence: Synthetic oligonucleotide
  Antisense strand to SEQ ID NO: 97304
gugauuaaacguuuacagc

SEQ ID NO: 97386 - RNA, 19 nt, Artificial Sequence
  Description of Artificial Sequence: Synthetic oligonucleotide
  Sense strand starting at position 746 of SEQ ID NO: 1227
gucagacagaccuguuuga

SEQ ID NO: 97387 - RNA, 19 nt, Artificial Sequence
  Description of Artificial Sequence: Synthetic oligonucleotide
  Antisense strand to SEQ ID NO: 97306
ucaaacaggucugucugac

SEQ ID NO: 97388 - RNA, 19 nt, Artificial Sequence
  Description of Artificial Sequence: Synthetic oligonucleotide
  Sense strand starting at position 868 of SEQ ID NO: 1227
uacagaugugagggugaaa

SEQ ID NO: 97389 - RNA, 19 nt, Artificial Sequence
  Description of Artificial Sequence: Synthetic oligonucleotide
  Antisense strand to SEQ ID NO: 97308
uuucacccucacaucugua

SEQ ID NO: 97390 - RNA, 19 nt, Artificial Sequence
  Description of Artificial Sequence: Synthetic oligonucleotide
  Sense strand starting at position 880 of SEQ ID NO: 1227
ggugaaaugagcuaacgua

SEQ ID NO: 97391 - RNA, 19 nt, Artificial Sequence
  Description of Artificial Sequence: Synthetic oligonucleotide
  Antisense strand to SEQ ID NO: 97310
uacguuagcucauuucacc

SEQ ID NO: 97392 - RNA, 19 nt, Artificial Sequence
  Description of Artificial Sequence: Synthetic oligonucleotide
  Sense strand starting at position 887 of SEQ ID NO: 1227
ugagcuaacguaugugaag

SEQ ID NO: 97393 - RNA, 19 nt, Artificial Sequence
  Description of Artificial Sequence: Synthetic oligonucleotide
  Antisense strand to SEQ ID NO: 97312
cuucacauacguuagcuca

SEQ ID NO: 97394 - RNA, 19 nt, Artificial Sequence
  Description of Artificial Sequence: Synthetic oligonucleotide
  Sense strand starting at position 915 of SEQ ID NO: 1227
cagugucuggcauaauaaa

SEQ ID NO: 97395 - RNA, 19 nt, Artificial Sequence
  Description of Artificial Sequence: Synthetic oligonucleotide
  Antisense strand to SEQ ID NO: 97314
uuuauuaugccagacacug

SEQ ID NO: 97396 - RNA, 19 nt, Artificial Sequence
  Description of Artificial Sequence: Synthetic oligonucleotide
  Sense strand starting at position 967 of SEQ ID NO: 1227
gcaggacuugugcaacacu

SEQ ID NO: 97397 - RNA, 19 nt, Artificial Sequence
  Description of Artificial Sequence: Synthetic oligonucleotide
  Antisense strand to SEQ ID NO: 97316
aguguugcacaaguccugc

SEQ ID NO: 97398 - RNA, 19 nt, Artificial Sequence
  Description of Artificial Sequence: Synthetic oligonucleotide
  Sense strand starting at position 1137 of SEQ ID NO: 1227
cccauauuugagugcuagu

SEQ ID NO: 97399 - RNA, 19 nt, Artificial Sequence
  Description of Artificial Sequence: Synthetic oligonucleotide
  Antisense strand to SEQ ID NO: 97318
acuagcacucaaauauggg

SEQ ID NO: 97400 - RNA, 19 nt, Artificial Sequence
  Description of Artificial Sequence: Synthetic oligonucleotide
  Sense strand starting at position 1374 of SEQ ID NO: 1227
aggccugaagucugggaau

SEQ ID NO: 97401 - RNA, 19 nt, Artificial Sequence
  Description of Artificial Sequence: Synthetic oligonucleotide
  Antisense strand to SEQ ID NO: 97320
auucccagacuucaggccu

SEQ ID NO: 97402 - RNA, 19 nt, Artificial Sequence
  Description of Artificial Sequence: Synthetic oligonucleotide
  Sense strand starting at position 1376 of SEQ ID NO: 1227
gccugaagucugggaauga

SEQ ID NO: 97403 - RNA, 19 nt, Artificial Sequence
  Description of Artificial Sequence: Synthetic oligonucleotide
  Antisense strand to SEQ ID NO: 97322
ucauucccagacuucaggc

SEQ ID NO: 97404 - RNA, 19 nt, Artificial Sequence
  Description of Artificial Sequence: Synthetic oligonucleotide
  Sense strand starting at position 1502 of SEQ ID NO: 1227
acaaaucugucccuugagu

SEQ ID NO: 97405 - RNA, 19 nt, Artificial Sequence
  Description of Artificial Sequence: Synthetic oligonucleotide
  Antisense strand to SEQ ID NO: 97324
acucaagggacagauuugu

SEQ ID NO: 97406 - RNA, 19 nt, Artificial Sequence
  Description of Artificial Sequence: Synthetic oligonucleotide
  Sense strand starting at position 1704 of SEQ ID NO: 1227
guuuguuugcuagagucag

SEQ ID NO: 97407 - RNA, 19 nt, Artificial Sequence
  Description of Artificial Sequence: Synthetic oligonucleotide
  Antisense strand to SEQ ID NO: 97326
cugacucuagcaaacaaac

SEQ ID NO: 97408 - RNA, 19 nt, Artificial Sequence
  Description of Artificial Sequence: Synthetic oligonucleotide
  Sense strand starting at position 1761 of SEQ ID NO: 1227
gacgaagagcgugaggauu

SEQ ID NO: 97409 - RNA, 19 nt, Artificial Sequence
  Description of Artificial Sequence: Synthetic oligonucleotide
  Antisense strand to SEQ ID NO: 97328
aauccucacgcucuucguc

SEQ ID NO: 97410 - RNA, 19 nt, Artificial Sequence
  Description of Artificial Sequence: Synthetic oligonucleotide
  Sense strand starting at position 1767 of SEQ ID NO: 1227
gagcgugaggauugcaaga

SEQ ID NO: 97411 - RNA, 19 nt, Artificial Sequence
  Description of Artificial Sequence: Synthetic oligonucleotide
  Antisense strand to SEQ ID NO: 97330
ucuugcaauccucacgcuc

SEQ ID NO: 97412 - RNA, 19 nt, Artificial Sequence
  Description of Artificial Sequence: Synthetic oligonucleotide
  Sense strand starting at position 1829 of SEQ ID NO: 1227
ccgcauaagauaggucaca

SEQ ID NO: 97413 - RNA, 19 nt, Artificial Sequence
  Description of Artificial Sequence: Synthetic oligonucleotide
  Antisense strand to SEQ ID NO: 97332
ugugaccuaucuuaugcgg

SEQ ID NO: 97414 - RNA, 19 nt, Artificial Sequence
  Description of Artificial Sequence: Synthetic oligonucleotide
  Sense strand starting at position 1934 of SEQ ID NO: 1227
cggcaaggucuuugagaaa

SEQ ID NO: 97415 - RNA, 19 nt, Artificial Sequence
  Description of Artificial Sequence: Synthetic oligonucleotide
  Antisense strand to SEQ ID NO: 97334
uuucucaaagaccuugccg

SEQ ID NO: 97416 - RNA, 19 nt, Artificial Sequence
  Description of Artificial Sequence: Synthetic oligonucleotide
  Sense strand starting at position 2355 of SEQ ID NO: 1227
gagagaaccaggcgacuua

SEQ ID NO: 97417 - RNA, 19 nt, Artificial Sequence
  Description of Artificial Sequence: Synthetic oligonucleotide
  Antisense strand to SEQ ID NO: 97336
uaagucgccugguucucuc

SEQ ID NO: 97418 - RNA, 19 nt, Artificial Sequence
  Description of Artificial Sequence: Synthetic oligonucleotide
  Sense strand starting at position 2484 of SEQ ID NO: 1227
cgcugaucccguccggauu

SEQ ID NO: 97419 - RNA, 19 nt, Artificial Sequence
  Description of Artificial Sequence: Synthetic oligonucleotide
  Antisense strand to SEQ ID NO: 97338
aauccggacgggaucagcg

SEQ ID NO: 97420 - RNA, 19 nt, Artificial Sequence
  Description of Artificial Sequence: Synthetic oligonucleotide
  Sense strand starting at position 2630 of SEQ ID NO: 1227
cgguuagaggcucaauaga

SEQ ID NO: 97421 - RNA, 19 nt, Artificial Sequence
  Description of Artificial Sequence: Synthetic oligonucleotide
  Antisense strand to SEQ ID NO: 97340
ucuauugagccucuaaccg

SEQ ID NO: 97422 - RNA, 19 nt, Artificial Sequence
  Description of Artificial Sequence: Synthetic oligonucleotide
  Sense strand starting at position 2841 of SEQ ID NO: 1227
gccagugaggacuggaaga

SEQ ID NO: 97423 - RNA, 19 nt, Artificial Sequence
  Description of Artificial Sequence: Synthetic oligonucleotide
  Antisense strand to SEQ ID NO: 97342
ucuuccaguccucacuggc

SEQ ID NO: 97424 - RNA, 19 nt, Artificial Sequence
  Description of Artificial Sequence: Synthetic oligonucleotide
  Sense strand starting at position 3060 of SEQ ID NO: 1227
agaaacaucuguccaguaa

SEQ ID NO: 97425 - RNA, 19 nt, Artificial Sequence
  Description of Artificial Sequence: Synthetic oligonucleotide
  Antisense strand to SEQ ID NO: 97344
uuacuggacagauguuucu

SEQ ID NO: 97426 - RNA, 19 nt, Artificial Sequence
  Description of Artificial Sequence: Synthetic oligonucleotide
  Sense strand starting at position 3064 of SEQ ID NO: 1227
acaucuguccaguaaguua

SEQ ID NO: 97427 - RNA, 19 nt, Artificial Sequence
  Description of Artificial Sequence: Synthetic oligonucleotide
  Antisense strand to SEQ ID NO: 97346
uaacuuacuggacagaugu

SEQ ID NO: 97428 - RNA, 19 nt, Artificial Sequence
  Description of Artificial Sequence: Synthetic oligonucleotide
  Sense strand starting at position 3109 of SEQ ID NO: 1227
ccucgaaaucucugcacac

SEQ ID NO: 97429 - RNA, 19 nt, Artificial Sequence
  Description of Artificial Sequence: Synthetic oligonucleotide
  Antisense strand to SEQ ID NO: 97348
gugugcagagauuucgagg

SEQ ID NO: 97430 - RNA, 19 nt, Artificial Sequence
  Description of Artificial Sequence: Synthetic oligonucleotide
  Sense strand starting at position 3111 of SEQ ID NO: 1227
ucgaaaucucugcacacca

SEQ ID NO: 97431 - RNA, 19 nt, Artificial Sequence
  Description of Artificial Sequence: Synthetic oligonucleotide
  Antisense strand to SEQ ID NO: 97350
uggugugcagagauuucga

SEQ ID NO: 97432 - RNA, 19 nt, Artificial Sequence
  Description of Artificial Sequence: Synthetic oligonucleotide
  Sense strand starting at position 3287 of SEQ ID NO: 1227
gaguguguucuaggcaaga

SEQ ID NO: 97433 - RNA, 19 nt, Artificial Sequence
  Description of Artificial Sequence: Synthetic oligonucleotide
  Antisense strand to SEQ ID NO: 97352
ucuugccuagaacacacuc

SEQ ID NO: 97434 - RNA, 19 nt, Artificial Sequence
  Description of Artificial Sequence: Synthetic oligonucleotide
  Sense strand starting at position 3339 of SEQ ID NO: 1227
ggcugaaggcucugacucu

SEQ ID NO: 97435 - RNA, 19 nt, Artificial Sequence
  Description of Artificial Sequence: Synthetic oligonucleotide
  Antisense strand to SEQ ID NO: 97354
agagucagagccuucagcc

SEQ ID NO: 97436 - RNA, 19 nt, Artificial Sequence
  Description of Artificial Sequence: Synthetic oligonucleotide
  Sense strand starting at position 3537 of SEQ ID NO: 1227
guguauucugaggaauacu

SEQ ID NO: 97437 - RNA, 19 nt, Artificial Sequence
  Description of Artificial Sequence: Synthetic oligonucleotide
  Antisense strand to SEQ ID NO: 97356
aguauuccucagaauacac

SEQ ID NO: 97438 - RNA, 19 nt, Artificial Sequence
  Description of Artificial Sequence: Synthetic oligonucleotide
  Sense strand starting at position 3553 of SEQ ID NO: 1227
acuaguguucuggagaugu

SEQ ID NO: 97439 - RNA, 19 nt, Artificial Sequence
  Description of Artificial Sequence: Synthetic oligonucleotide
  Antisense strand to SEQ ID NO: 97358
acaucuccagaacacuagu

SEQ ID NO: 97440 - RNA, 19 nt, Artificial Sequence
  Description of Artificial Sequence: Synthetic oligonucleotide
  Sense strand starting at position 3555 of SEQ ID NO: 1227
uaguguucuggagauguua

SEQ ID NO: 97441 - RNA, 19 nt, Artificial Sequence
  Description of Artificial Sequence: Synthetic oligonucleotide
  Antisense strand to SEQ ID NO: 97360
uaacaucuccagaacacua

SEQ ID NO: 97442 - RNA, 19 nt, Artificial Sequence
  Description of Artificial Sequence: Synthetic oligonucleotide
  Sense strand starting at position 3557 of SEQ ID NO: 1227
guguucuggagauguuacu

SEQ ID NO: 97443 - RNA, 19 nt, Artificial Sequence
  Description of Artificial Sequence: Synthetic oligonucleotide
  Antisense strand to SEQ ID NO: 97362
aguaacaucuccagaacac

SEQ ID NO: 97444 - RNA, 19 nt, Artificial Sequence
  Description of Artificial Sequence: Synthetic oligonucleotide
  Sense strand starting at position 3563 of SEQ ID NO: 1227
uggagauguuacuuagugu

SEQ ID NO: 97445 - RNA, 19 nt, Artificial Sequence
  Description of Artificial Sequence: Synthetic oligonucleotide
  Antisense strand to SEQ ID NO: 97364
acacuaaguaacaucucca

SEQ ID NO: 97446 - RNA, 19 nt, Artificial Sequence
  Description of Artificial Sequence: Synthetic oligonucleotide
  Sense strand starting at position 3564 of SEQ ID NO: 1227
ggagauguuacuuaguguu

SEQ ID NO: 97447 - RNA, 19 nt, Artificial Sequence
  Description of Artificial Sequence: Synthetic oligonucleotide
  Antisense strand to SEQ ID NO: 97366
aacacuaaguaacaucucc

SEQ ID NO: 97448 - RNA, 19 nt, Artificial Sequence
  Description of Artificial Sequence: Synthetic oligonucleotide
  Sense strand starting at position 3951 of SEQ ID NO: 1227
ggcacuuuguaauucuacu

SEQ ID NO: 97449 - RNA, 19 nt, Artificial Sequence
  Description of Artificial Sequence: Synthetic oligonucleotide
  Antisense strand to SEQ ID NO: 97368
aguagaauuacaaagugcc

SEQ ID NO: 97450 - RNA, 19 nt, Artificial Sequence
  Description of Artificial Sequence: Synthetic oligonucleotide
  Sense strand starting at position 3957 of SEQ ID NO: 1227
uuguaauucuacuugaaga

SEQ ID NO: 97451 - RNA, 19 nt, Artificial Sequence
  Description of Artificial Sequence: Synthetic oligonucleotide
  Antisense strand to SEQ ID NO: 97370
ucuucaaguagaauuacaa

SEQ ID NO: 97452 - RNA, 19 nt, Artificial Sequence
  Description of Artificial Sequence: Synthetic oligonucleotide
  Sense strand starting at position 306 of SEQ ID NO: 1228
cguuguuaauaccuuuaca

SEQ ID NO: 97453 - RNA, 19 nt, Artificial Sequence
  Description of Artificial Sequence: Synthetic oligonucleotide
  Antisense strand to SEQ ID NO: 97372
uguaaagguauuaacaacg

SEQ ID NO: 97454 - RNA, 19 nt, Artificial Sequence
  Description of Artificial Sequence: Synthetic oligonucleotide
  Sense strand starting at position 339 of SEQ ID NO: 1228
ugucacuuguaaucauuau

SEQ ID NO: 97455 - RNA, 19 nt, Artificial Sequence
  Description of Artificial Sequence: Synthetic oligonucleotide
  Antisense strand to SEQ ID NO: 97374
auaaugauuacaagugaca

SEQ ID NO: 97456 - RNA, 19 nt, Artificial Sequence
  Description of Artificial Sequence: Synthetic oligonucleotide
  Sense strand starting at position 405 of SEQ ID NO: 1228
gcaaccauauaguuuaagu

SEQ ID NO: 97457 - RNA, 19 nt, Artificial Sequence
  Description of Artificial Sequence: Synthetic oligonucleotide
  Antisense strand to SEQ ID NO: 97376
acuuaaacuauaugguugc

SEQ ID NO: 97458 - RNA, 19 nt, Artificial Sequence
  Description of Artificial Sequence: Synthetic oligonucleotide
  Sense strand starting at position 498 of SEQ ID NO: 1228
guuugagugagauggaaca

SEQ ID NO: 97459 - RNA, 19 nt, Artificial Sequence
  Description of Artificial Sequence: Synthetic oligonucleotide
  Antisense strand to SEQ ID NO: 97378
uguuccaucucacucaaac

SEQ ID NO: 97460 - RNA, 19 nt, Artificial Sequence
  Description of Artificial Sequence: Synthetic oligonucleotide
  Sense strand starting at position 604 of SEQ ID NO: 1228
ccugaaauacuugguguag

SEQ ID NO: 97461 - RNA, 19 nt, Artificial Sequence
  Description of Artificial Sequence: Synthetic oligonucleotide
  Antisense strand to SEQ ID NO: 97380
cuacaccaaguauuucagg

SEQ ID NO: 97462 - RNA, 19 nt, Artificial Sequence
  Description of Artificial Sequence: Synthetic oligonucleotide
  Sense strand starting at position 605 of SEQ ID NO: 1228
cugaaauacuugguguaga

SEQ ID NO: 97463 - RNA, 19 nt, Artificial Sequence
  Description of Artificial Sequence: Synthetic oligonucleotide
  Antisense strand to SEQ ID NO: 97382
ucuacaccaaguauuucag

SEQ ID NO: 97464 - RNA, 19 nt, Artificial Sequence
  Description of Artificial Sequence: Synthetic oligonucleotide
  Sense strand starting at position 608 of SEQ ID NO: 1228
aaauacuugguguagagua

SEQ ID NO: 97465 - RNA, 19 nt, Artificial Sequence
  Description of Artificial Sequence: Synthetic oligonucleotide
  Antisense strand to SEQ ID NO: 97384
uacucuacaccaaguauuu

SEQ ID NO: 97466 - RNA, 19 nt, Artificial Sequence
  Description of Artificial Sequence: Synthetic oligonucleotide
  Sense strand starting at position 748 of SEQ ID NO: 1228
gcuguaaacguuuaaucac

SEQ ID NO: 97467 - RNA, 19 nt, Artificial Sequence
  Description of Artificial Sequence: Synthetic oligonucleotide
  Antisense strand to SEQ ID NO: 97386
gugauuaaacguuuacagc

SEQ ID NO: 97468 - RNA, 19 nt, Artificial Sequence
  Description of Artificial Sequence: Synthetic oligonucleotide
  Sense strand starting at position 800 of SEQ ID NO: 1228
gucagacagaccuguuuga

SEQ ID NO: 97469 - RNA, 19 nt, Artificial Sequence
  Description of Artificial Sequence: Synthetic oligonucleotide
  Antisense strand to SEQ ID NO: 97388
ucaaacaggucugucugac

SEQ ID NO: 97470 - RNA, 19 nt, Artificial Sequence
  Description of Artificial Sequence: Synthetic oligonucleotide
  Sense strand starting at position 922 of SEQ ID NO: 1228
uacagaugugagggugaaa

SEQ ID NO: 97471 - RNA, 19 nt, Artificial Sequence
  Description of Artificial Sequence: Synthetic oligonucleotide
  Antisense strand to SEQ ID NO: 97390
uuucacccucacaucugua

SEQ ID NO: 97472 - RNA, 19 nt, Artificial Sequence
  Description of Artificial Sequence: Synthetic oligonucleotide
  Sense strand starting at position 934 of SEQ ID NO: 1228
ggugaaaugagcuaacgua

SEQ ID NO: 97473 - RNA, 19 nt, Artificial Sequence
  Description of Artificial Sequence: Synthetic oligonucleotide
  Antisense strand to SEQ ID NO: 97392
uacguuagcucauuucacc

SEQ ID NO: 97474 - RNA, 19 nt, Artificial Sequence
  Description of Artificial Sequence: Synthetic oligonucleotide
  Sense strand starting at position 941 of SEQ ID NO: 1228
ugagcuaacguaugugaag

SEQ ID NO: 97475 - RNA, 19 nt, Artificial Sequence
  Description of Artificial Sequence: Synthetic oligonucleotide
  Antisense strand to SEQ ID NO: 97394
cuucacauacguuagcuca

SEQ ID NO: 97476 - RNA, 19 nt, Artificial Sequence
  Description of Artificial Sequence: Synthetic oligonucleotide
  Sense strand starting at position 969 of SEQ ID NO: 1228
cagugucuggcauaauaaa

SEQ ID NO: 97477 - RNA, 19 nt, Artificial Sequence
  Description of Artificial Sequence: Synthetic oligonucleotide
  Antisense strand to SEQ ID NO: 97396
uuuauuaugccagacacug

SEQ ID NO: 97478 - RNA, 19 nt, Artificial Sequence
  Description of Artificial Sequence: Synthetic oligonucleotide
  Sense strand starting at position 1021 of SEQ ID NO: 1228
gcaggacuugugcaacacu

SEQ ID NO: 97479 - RNA, 19 nt, Artificial Sequence
  Description of Artificial Sequence: Synthetic oligonucleotide
  Antisense strand to SEQ ID NO: 97398
aguguugcacaaguccugc

SEQ ID NO: 97480 - RNA, 19 nt, Artificial Sequence
  Description of Artificial Sequence: Synthetic oligonucleotide
  Sense strand starting at position 1191 of SEQ ID NO: 1228
cccauauuugagugcuagu

SEQ ID NO: 97481 - RNA, 19 nt, Artificial Sequence
  Description of Artificial Sequence: Synthetic oligonucleotide
  Antisense strand to SEQ ID NO: 97400
acuagcacucaaauauggg

SEQ ID NO: 97482 - RNA, 19 nt, Artificial Sequence
  Description of Artificial Sequence: Synthetic oligonucleotide
  Sense strand starting at position 1428 of SEQ ID NO: 1228
aggccugaagucugggaau

SEQ ID NO: 97483 - RNA, 19 nt, Artificial Sequence
  Description of Artificial Sequence: Synthetic oligonucleotide
  Antisense strand to SEQ ID NO: 97402
auucccagacuucaggccu

SEQ ID NO: 97484 - RNA, 19 nt, Artificial Sequence
  Description of Artificial Sequence: Synthetic oligonucleotide
  Sense strand starting at position 1430 of SEQ ID NO: 1228
gccugaagucugggaauga

SEQ ID NO: 97485 - RNA, 19 nt, Artificial Sequence
  Description of Artificial Sequence: Synthetic oligonucleotide
  Antisense strand to SEQ ID NO: 97404
ucauucccagacuucaggc

SEQ ID NO: 97486 - RNA, 19 nt, Artificial Sequence
  Description of Artificial Sequence: Synthetic oligonucleotide
  Sense strand starting at position 1556 of SEQ ID NO: 1228
acaaaucugucccuugagu

SEQ ID NO: 97487 - RNA, 19 nt, Artificial Sequence
  Description of Artificial Sequence: Synthetic oligonucleotide
  Antisense strand to SEQ ID NO: 97406
acucaagggacagauuugu

SEQ ID NO: 97488 - RNA, 19 nt, Artificial Sequence
  Description of Artificial Sequence: Synthetic oligonucleotide
  Sense strand starting at position 1758 of SEQ ID NO: 1228
guuuguuugcuagagucag

SEQ ID NO: 97489 - RNA, 19 nt, Artificial Sequence
  Description of Artificial Sequence: Synthetic oligonucleotide
  Antisense strand to SEQ ID NO: 97408
cugacucuagcaaacaaac

SEQ ID NO: 97490 - RNA, 19 nt, Artificial Sequence
  Description of Artificial Sequence: Synthetic oligonucleotide
  Sense strand starting at position 1815 of SEQ ID NO: 1228
gacgaagagcgugaggauu

SEQ ID NO: 97491 - RNA, 19 nt, Artificial Sequence
  Description of Artificial Sequence: Synthetic oligonucleotide
  Antisense strand to SEQ ID NO: 97410
aauccucacgcucuucguc

SEQ ID NO: 97492 - RNA, 19 nt, Artificial Sequence
  Description of Artificial Sequence: Synthetic oligonucleotide
  Sense strand starting at position 1821 of SEQ ID NO: 1228
gagcgugaggauugcaaga

SEQ ID NO: 97493 - RNA, 19 nt, Artificial Sequence
  Description of Artificial Sequence: Synthetic oligonucleotide
  Antisense strand to SEQ ID NO: 97412
ucuugcaauccucacgcuc

SEQ ID NO: 97494 - RNA, 19 nt, Artificial Sequence
  Description of Artificial Sequence: Synthetic oligonucleotide
  Sense strand starting at position 1883 of SEQ ID NO: 1228
ccgcauaagauaggucaca

SEQ ID NO: 97495 - RNA, 19 nt, Artificial Sequence
  Description of Artificial Sequence: Synthetic oligonucleotide
  Antisense strand to SEQ ID NO: 97414
ugugaccuaucuuaugcgg

SEQ ID NO: 97496 - RNA, 19 nt, Artificial Sequence
  Description of Artificial Sequence: Synthetic oligonucleotide
  Sense strand starting at position 1987 of SEQ ID NO: 1228
gcggcaaggucuuugagaa

SEQ ID NO: 97497 - RNA, 19 nt, Artificial Sequence
  Description of Artificial Sequence: Synthetic oligonucleotide
  Antisense strand to SEQ ID NO: 97416
uucucaaagaccuugccgc

SEQ ID NO: 97498 - RNA, 19 nt, Artificial Sequence
  Description of Artificial Sequence: Synthetic oligonucleotide
  Sense strand starting at position 1988 of SEQ ID NO: 1228
cggcaaggucuuugagaaa

SEQ ID NO: 97499 - RNA, 19 nt, Artificial Sequence
  Description of Artificial Sequence: Synthetic oligonucleotide
  Antisense strand to SEQ ID NO: 97418
uuucucaaagaccuugccg

SEQ ID NO: 97500 - RNA, 19 nt, Artificial Sequence
  Description of Artificial Sequence: Synthetic oligonucleotide
  Sense strand starting at position 2409 of SEQ ID NO: 1228
gagagaaccaggcgacuua

SEQ ID NO: 97501 - RNA, 19 nt, Artificial Sequence
  Description of Artificial Sequence: Synthetic oligonucleotide
  Antisense strand to SEQ ID NO: 97420
uaagucgccugguucucuc

SEQ ID NO: 97502 - RNA, 19 nt, Artificial Sequence
  Description of Artificial Sequence: Synthetic oligonucleotide
  Sense strand starting at position 2538 of SEQ ID NO: 1228
cgcugaucccguccggauu

SEQ ID NO: 97503 - RNA, 19 nt, Artificial Sequence
  Description of Artificial Sequence: Synthetic oligonucleotide
  Antisense strand to SEQ ID NO: 97422
aauccggacgggaucagcg

SEQ ID NO: 97504 - RNA, 19 nt, Artificial Sequence
  Description of Artificial Sequence: Synthetic oligonucleotide
  Sense strand starting at position 2684 of SEQ ID NO: 1228
cgguuagaggcucaauaga

SEQ ID NO: 97505 - RNA, 19 nt, Artificial Sequence
  Description of Artificial Sequence: Synthetic oligonucleotide
  Antisense strand to SEQ ID NO: 97424
ucuauugagccucuaaccg

SEQ ID NO: 97506 - RNA, 19 nt, Artificial Sequence
  Description of Artificial Sequence: Synthetic oligonucleotide
  Sense strand starting at position 2895 of SEQ ID NO: 1228
gccagugaggacuggaaga

SEQ ID NO: 97507 - RNA, 19 nt, Artificial Sequence
  Description of Artificial Sequence: Synthetic oligonucleotide
  Antisense strand to SEQ ID NO: 97426
ucuuccaguccucacuggc

SEQ ID NO: 97508 - RNA, 19 nt, Artificial Sequence
  Description of Artificial Sequence: Synthetic oligonucleotide
  Sense strand starting at position 3114 of SEQ ID NO: 1228
agaaacaucuguccaguaa

SEQ ID NO: 97509 - RNA, 19 nt, Artificial Sequence
  Description of Artificial Sequence: Synthetic oligonucleotide
  Antisense strand to SEQ ID NO: 97428
uuacuggacagauguuucu

SEQ ID NO: 97510 - RNA, 19 nt, Artificial Sequence
  Description of Artificial Sequence: Synthetic oligonucleotide
  Sense strand starting at position 3118 of SEQ ID NO: 1228
acaucuguccaguaaguua

SEQ ID NO: 97511 - RNA, 19 nt, Artificial Sequence
  Description of Artificial Sequence: Synthetic oligonucleotide
  Antisense strand to SEQ ID NO: 97430
uaacuuacuggacagaugu

SEQ ID NO: 97512 - RNA, 19 nt, Artificial Sequence
  Description of Artificial Sequence: Synthetic oligonucleotide
  Sense strand starting at position 3163 of SEQ ID NO: 1228
ccucgaaaucucugcacac

SEQ ID NO: 97513 - RNA, 19 nt, Artificial Sequence
  Description of Artificial Sequence: Synthetic oligonucleotide
  Antisense strand to SEQ ID NO: 97432
gugugcagagauuucgagg

SEQ ID NO: 97514 - RNA, 19 nt, Artificial Sequence
  Description of Artificial Sequence: Synthetic oligonucleotide
  Sense strand starting at position 3165 of SEQ ID NO: 1228
ucgaaaucucugcacacca

SEQ ID NO: 97515 - RNA, 19 nt, Artificial Sequence
  Description of Artificial Sequence: Synthetic oligonucleotide
  Antisense strand to SEQ ID NO: 97434
uggugugcagagauuucga

SEQ ID NO: 97516 - RNA, 19 nt, Artificial Sequence
  Description of Artificial Sequence: Synthetic oligonucleotide
  Sense strand starting at position 3341 of SEQ ID NO: 1228
gaguguguucuaggcaaga

SEQ ID NO: 97517 - RNA, 19 nt, Artificial Sequence
  Description of Artificial Sequence: Synthetic oligonucleotide
  Antisense strand to SEQ ID NO: 97436
ucuugccuagaacacacuc

SEQ ID NO: 97518 - RNA, 19 nt, Artificial Sequence
  Description of Artificial Sequence: Synthetic oligonucleotide
  Sense strand starting at position 3393 of SEQ ID NO: 1228
ggcugaaggcucugacucu

SEQ ID NO: 97519 - RNA, 19 nt, Artificial Sequence
  Description of Artificial Sequence: Synthetic oligonucleotide
  Antisense strand to SEQ ID NO: 97438
agagucagagccuucagcc

SEQ ID NO: 97520 - RNA, 19 nt, Artificial Sequence
  Description of Artificial Sequence: Synthetic oligonucleotide
  Sense strand starting at position 3591 of SEQ ID NO: 1228
guguauucugaggaauacu

SEQ ID NO: 97521 - RNA, 19 nt, Artificial Sequence
  Description of Artificial Sequence: Synthetic oligonucleotide
  Antisense strand to SEQ ID NO: 97440
aguauuccucagaauacac

SEQ ID NO: 97522 - RNA, 19 nt, Artificial Sequence
  Description of Artificial Sequence: Synthetic oligonucleotide
  Sense strand starting at position 3607 of SEQ ID NO: 1228
acuaguguucuggagaugu

SEQ ID NO: 97523 - RNA, 19 nt, Artificial Sequence
  Description of Artificial Sequence: Synthetic oligonucleotide
  Antisense strand to SEQ ID NO: 97442
acaucuccagaacacuagu

SEQ ID NO: 97524 - RNA, 19 nt, Artificial Sequence
  Description of Artificial Sequence: Synthetic oligonucleotide
  Sense strand starting at position 3609 of SEQ ID NO: 1228
uaguguucuggagauguua

SEQ ID NO: 97525 - RNA, 19 nt, Artificial Sequence
  Description of Artificial Sequence: Synthetic oligonucleotide
  Antisense strand to SEQ ID NO: 97444
uaacaucuccagaacacua

SEQ ID NO: 97526 - RNA, 19 nt, Artificial Sequence
  Description of Artificial Sequence: Synthetic oligonucleotide
  Sense strand starting at position 3611 of SEQ ID NO: 1228
guguucuggagauguuacu

SEQ ID NO: 97527 - RNA, 19 nt, Artificial Sequence
  Description of Artificial Sequence: Synthetic oligonucleotide
  Antisense strand to SEQ ID NO: 97446
aguaacaucuccagaacac

SEQ ID NO: 97528 - RNA, 19 nt, Artificial Sequence
  Description of Artificial Sequence: Synthetic oligonucleotide
  Sense strand starting at position 3617 of SEQ ID NO: 1228
uggagauguuacuuagugu

SEQ ID NO: 97529 - RNA, 19 nt, Artificial Sequence
  Description of Artificial Sequence: Synthetic oligonucleotide
  Antisense strand to SEQ ID NO: 97448
acacuaaguaacaucucca

SEQ ID NO: 97530 - RNA, 19 nt, Artificial Sequence
  Description of Artificial Sequence: Synthetic oligonucleotide
  Sense strand starting at position 3618 of SEQ ID NO: 1228
ggagauguuacuuaguguu

SEQ ID NO: 97531 - RNA, 19 nt, Artificial Sequence
  Description of Artificial Sequence: Synthetic oligonucleotide
  Antisense strand to SEQ ID NO: 97450
aacacuaaguaacaucucc

SEQ ID NO: 97532 - RNA, 19 nt, Artificial Sequence
  Description of Artificial Sequence: Synthetic oligonucleotide
  Sense strand starting at position 17 of SEQ ID NO: 1229
agguaagguucuuuacuca

SEQ ID NO: 97533 - RNA, 19 nt, Artificial Sequence
  Description of Artificial Sequence: Synthetic oligonucleotide
  Antisense strand to SEQ ID NO: 97452
ugaguaaagaaccuuaccu

SEQ ID NO: 97534 - RNA, 19 nt, Artificial Sequence
  Description of Artificial Sequence: Synthetic oligonucleotide
  Sense strand starting at position 299 of SEQ ID NO: 1229
cuggucuuggcucaaauga

SEQ ID NO: 97535 - RNA, 19 nt, Artificial Sequence
  Description of Artificial Sequence: Synthetic oligonucleotide
  Antisense strand to SEQ ID NO: 97454
ucauuugagccaagaccag

SEQ ID NO: 97536 - RNA, 19 nt, Artificial Sequence
  Description of Artificial Sequence: Synthetic oligonucleotide
  Sense strand starting at position 339 of SEQ ID NO: 1229
ccuggcugccucuaguuaa

SEQ ID NO: 97537 - RNA, 19 nt, Artificial Sequence
  Description of Artificial Sequence: Synthetic oligonucleotide
  Antisense strand to SEQ ID NO: 97456
uuaacuagaggcagccagg

SEQ ID NO: 97538 - RNA, 19 nt, Artificial Sequence
  Description of Artificial Sequence: Synthetic oligonucleotide
  Sense strand starting at position 663 of SEQ ID NO: 1229
uucuccaaucuuuguagua

SEQ ID NO: 97539 - RNA, 19 nt, Artificial Sequence
  Description of Artificial Sequence: Synthetic oligonucleotide
  Antisense strand to SEQ ID NO: 97458
uacuacaaagauuggagaa

SEQ ID NO: 97540 - RNA, 19 nt, Artificial Sequence
  Description of Artificial Sequence: Synthetic oligonucleotide
  Sense strand starting at position 664 of SEQ ID NO: 1229
ucuccaaucuuuguaguaa

SEQ ID NO: 97541 - RNA, 19 nt, Artificial Sequence
  Description of Artificial Sequence: Synthetic oligonucleotide
  Antisense strand to SEQ ID NO: 97460
uuacuacaaagauuggaga

SEQ ID NO: 97542 - RNA, 19 nt, Artificial Sequence
  Description of Artificial Sequence: Synthetic oligonucleotide
  Sense strand starting at position 676 of SEQ ID NO: 1229
guaguaacaauauggauga

SEQ ID NO: 97543 - RNA, 19 nt, Artificial Sequence
  Description of Artificial Sequence: Synthetic oligonucleotide
  Antisense strand to SEQ ID NO: 97462
ucauccauauuguuacuac

SEQ ID NO: 97544 - RNA, 19 nt, Artificial Sequence
  Description of Artificial Sequence: Synthetic oligonucleotide
  Sense strand starting at position 715 of SEQ ID NO: 1229
aagaguuguuggccacuua

SEQ ID NO: 97545 - RNA, 19 nt, Artificial Sequence
  Description of Artificial Sequence: Synthetic oligonucleotide
  Antisense strand to SEQ ID NO: 97464
uaaguggccaacaacucuu

SEQ ID NO: 97546 - RNA, 19 nt, Artificial Sequence
  Description of Artificial Sequence: Synthetic oligonucleotide
  Sense strand starting at position 716 of SEQ ID NO: 1229
agaguuguuggccacuuaa

SEQ ID NO: 97547 - RNA, 19 nt, Artificial Sequence
  Description of Artificial Sequence: Synthetic oligonucleotide
  Antisense strand to SEQ ID NO: 97466
uuaaguggccaacaacucu

SEQ ID NO: 97548 - RNA, 19 nt, Artificial Sequence
  Description of Artificial Sequence: Synthetic oligonucleotide
  Sense strand starting at position 804 of SEQ ID NO: 1229
ucuuuauuagcauagauga

SEQ ID NO: 97549 - RNA, 19 nt, Artificial Sequence
  Description of Artificial Sequence: Synthetic oligonucleotide
  Antisense strand to SEQ ID NO: 97468
ucaucuaugcuaauaaaga

SEQ ID NO: 97550 - RNA, 19 nt, Artificial Sequence
  Description of Artificial Sequence: Synthetic oligonucleotide
  Sense strand starting at position 817 of SEQ ID NO: 1229
agaugaaucuaggcgugga

SEQ ID NO: 97551 - RNA, 19 nt, Artificial Sequence
  Description of Artificial Sequence: Synthetic oligonucleotide
  Antisense strand to SEQ ID NO: 97470
uccacgccuagauucaucu

SEQ ID NO: 97552 - RNA, 19 nt, Artificial Sequence
  Description of Artificial Sequence: Synthetic oligonucleotide
  Sense strand starting at position 818 of SEQ ID NO: 1229
gaugaaucuaggcguggaa

SEQ ID NO: 97553 - RNA, 19 nt, Artificial Sequence
  Description of Artificial Sequence: Synthetic oligonucleotide
  Antisense strand to SEQ ID NO: 97472
uuccacgccuagauucauc

SEQ ID NO: 97554 - RNA, 19 nt, Artificial Sequence
  Description of Artificial Sequence: Synthetic oligonucleotide
  Sense strand starting at position 820 of SEQ ID NO: 1229
ugaaucuaggcguggaauu

SEQ ID NO: 97555 - RNA, 19 nt, Artificial Sequence
  Description of Artificial Sequence: Synthetic oligonucleotide
  Antisense strand to SEQ ID NO: 97474
aauuccacgccuagauuca

SEQ ID NO: 97556 - RNA, 19 nt, Artificial Sequence
  Description of Artificial Sequence: Synthetic oligonucleotide
  Sense strand starting at position 1117 of SEQ ID NO: 1229
ccagauaagaauuagcguu

SEQ ID NO: 97557 - RNA, 19 nt, Artificial Sequence
  Description of Artificial Sequence: Synthetic oligonucleotide
  Antisense strand to SEQ ID NO: 97476
aacgcuaauucuuaucugg

SEQ ID NO: 97558 - RNA, 19 nt, Artificial Sequence
  Description of Artificial Sequence: Synthetic oligonucleotide
  Sense strand starting at position 1119 of SEQ ID NO: 1229
agauaagaauuagcguuaa

SEQ ID NO: 97559 - RNA, 19 nt, Artificial Sequence
  Description of Artificial Sequence: Synthetic oligonucleotide
  Antisense strand to SEQ ID NO: 97478
uuaacgcuaauucuuaucu

SEQ ID NO: 97560 - RNA, 19 nt, Artificial Sequence
  Description of Artificial Sequence: Synthetic oligonucleotide
  Sense strand starting at position 1222 of SEQ ID NO: 1229
ucggguaauuucccagcuu

SEQ ID NO: 97561 - RNA, 19 nt, Artificial Sequence
  Description of Artificial Sequence: Synthetic oligonucleotide
  Antisense strand to SEQ ID NO: 97480
aagcugggaaauuacccga

SEQ ID NO: 97562 - RNA, 19 nt, Artificial Sequence
  Description of Artificial Sequence: Synthetic oligonucleotide
  Sense strand starting at position 1280 of SEQ ID NO: 1229
uccagugauaccggagaca

SEQ ID NO: 97563 - RNA, 19 nt, Artificial Sequence
  Description of Artificial Sequence: Synthetic oligonucleotide
  Antisense strand to SEQ ID NO: 97482
ugucuccgguaucacugga

SEQ ID NO: 97564 - RNA, 19 nt, Artificial Sequence
  Description of Artificial Sequence: Synthetic oligonucleotide
  Sense strand starting at position 2326 of SEQ ID NO: 1229
gugcgagcaccguuugaga

SEQ ID NO: 97565 - RNA, 19 nt, Artificial Sequence
  Description of Artificial Sequence: Synthetic oligonucleotide
  Antisense strand to SEQ ID NO: 97484
ucucaaacggugcucgcac

SEQ ID NO: 97566 - RNA, 19 nt, Artificial Sequence
  Description of Artificial Sequence: Synthetic oligonucleotide
  Sense strand starting at position 2403 of SEQ ID NO: 1229
cccauuguguaggucuaga

SEQ ID NO: 97567 - RNA, 19 nt, Artificial Sequence
  Description of Artificial Sequence: Synthetic oligonucleotide
  Antisense strand to SEQ ID NO: 97486
ucuagaccuacacaauggg

SEQ ID NO: 97568 - RNA, 19 nt, Artificial Sequence
  Description of Artificial Sequence: Synthetic oligonucleotide
  Sense strand starting at position 2648 of SEQ ID NO: 1229
cgcacugucagugucauau

SEQ ID NO: 97569 - RNA, 19 nt, Artificial Sequence
  Description of Artificial Sequence: Synthetic oligonucleotide
  Antisense strand to SEQ ID NO: 97488
auaugacacugacagugcg

SEQ ID NO: 97570 - RNA, 19 nt, Artificial Sequence
  Description of Artificial Sequence: Synthetic oligonucleotide
  Sense strand starting at position 2657 of SEQ ID NO: 1229
agugucauaugcccuaaua

SEQ ID NO: 97571 - RNA, 19 nt, Artificial Sequence
  Description of Artificial Sequence: Synthetic oligonucleotide
  Antisense strand to SEQ ID NO: 97490
uauuagggcauaugacacu

SEQ ID NO: 97572 - RNA, 19 nt, Artificial Sequence
  Description of Artificial Sequence: Synthetic oligonucleotide
  Sense strand starting at position 2659 of SEQ ID NO: 1229
ugucauaugcccuaauaga

SEQ ID NO: 97573 - RNA, 19 nt, Artificial Sequence
  Description of Artificial Sequence: Synthetic oligonucleotide
  Antisense strand to SEQ ID NO: 97492
ucuauuagggcauaugaca

SEQ ID NO: 97574 - RNA, 19 nt, Artificial Sequence
  Description of Artificial Sequence: Synthetic oligonucleotide
  Sense strand starting at position 2811 of SEQ ID NO: 1229
ccuccuagucacugagaca

SEQ ID NO: 97575 - RNA, 19 nt, Artificial Sequence
  Description of Artificial Sequence: Synthetic oligonucleotide
  Antisense strand to SEQ ID NO: 97494
ugucucagugacuaggagg

SEQ ID NO: 97576 - RNA, 19 nt, Artificial Sequence
  Description of Artificial Sequence: Synthetic oligonucleotide
  Sense strand starting at position 2924 of SEQ ID NO: 1229
ucuacaaauugacaggaau

SEQ ID NO: 97577 - RNA, 19 nt, Artificial Sequence
  Description of Artificial Sequence: Synthetic oligonucleotide
  Antisense strand to SEQ ID NO: 97496
auuccugucaauuuguaga

SEQ ID NO: 97578 - RNA, 19 nt, Artificial Sequence
  Description of Artificial Sequence: Synthetic oligonucleotide
  Sense strand starting at position 2936 of SEQ ID NO: 1229
caggaauugcuguagaauc

SEQ ID NO: 97579 - RNA, 19 nt, Artificial Sequence
  Description of Artificial Sequence: Synthetic oligonucleotide
  Antisense strand to SEQ ID NO: 97498
gauucuacagcaauuccug

SEQ ID NO: 97580 - RNA, 19 nt, Artificial Sequence
  Description of Artificial Sequence: Synthetic oligonucleotide
  Sense strand starting at position 3002 of SEQ ID NO: 1229
ucaggauauuaugucccaa

SEQ ID NO: 97581 - RNA, 19 nt, Artificial Sequence
  Description of Artificial Sequence: Synthetic oligonucleotide
  Antisense strand to SEQ ID NO: 97500
uugggacauaauauccuga

SEQ ID NO: 97582 - RNA, 19 nt, Artificial Sequence
  Description of Artificial Sequence: Synthetic oligonucleotide
  Sense strand starting at position 3086 of SEQ ID NO: 1229
cguuaaguugcccacugau

SEQ ID NO: 97583 - RNA, 19 nt, Artificial Sequence
  Description of Artificial Sequence: Synthetic oligonucleotide
  Antisense strand to SEQ ID NO: 97502
aucagugggcaacuuaacg

SEQ ID NO: 97584 - RNA, 19 nt, Artificial Sequence
  Description of Artificial Sequence: Synthetic oligonucleotide
  Sense strand starting at position 3160 of SEQ ID NO: 1229
gacgucugauguuuaacca

SEQ ID NO: 97585 - RNA, 19 nt, Artificial Sequence
  Description of Artificial Sequence: Synthetic oligonucleotide
  Antisense strand to SEQ ID NO: 97504
ugguuaaacaucagacguc

SEQ ID NO: 97586 - RNA, 19 nt, Artificial Sequence
  Description of Artificial Sequence: Synthetic oligonucleotide
  Sense strand starting at position 3161 of SEQ ID NO: 1229
acgucugauguuuaaccau

SEQ ID NO: 97587 - RNA, 19 nt, Artificial Sequence
  Description of Artificial Sequence: Synthetic oligonucleotide
  Antisense strand to SEQ ID NO: 97506
augguuaaacaucagacgu

SEQ ID NO: 97588 - RNA, 19 nt, Artificial Sequence
  Description of Artificial Sequence: Synthetic oligonucleotide
  Sense strand starting at position 3168 of SEQ ID NO: 1229
auguuuaaccauuagcagu

SEQ ID NO: 97589 - RNA, 19 nt, Artificial Sequence
  Description of Artificial Sequence: Synthetic oligonucleotide
  Antisense strand to SEQ ID NO: 97508
acugcuaaugguuaaacau

SEQ ID NO: 97590 - RNA, 19 nt, Artificial Sequence
  Description of Artificial Sequence: Synthetic oligonucleotide
  Sense strand starting at position 3187 of SEQ ID NO: 1229
ucauaucuuuaggcgaaga

SEQ ID NO: 97591 - RNA, 19 nt, Artificial Sequence
  Description of Artificial Sequence: Synthetic oligonucleotide
  Antisense strand to SEQ ID NO: 97510
ucuucgccuaaagauauga

SEQ ID NO: 97592 - RNA, 19 nt, Artificial Sequence
  Description of Artificial Sequence: Synthetic oligonucleotide
  Sense strand starting at position 3189 of SEQ ID NO: 1229
auaucuuuaggcgaagauu

SEQ ID NO: 97593 - RNA, 19 nt, Artificial Sequence
  Description of Artificial Sequence: Synthetic oligonucleotide
  Antisense strand to SEQ ID NO: 97512
aaucuucgccuaaagauau

SEQ ID NO: 97594 - RNA, 19 nt, Artificial Sequence
  Description of Artificial Sequence: Synthetic oligonucleotide
  Sense strand starting at position 3306 of SEQ ID NO: 1229
cggauaucggcucacugaa

SEQ ID NO: 97595 - RNA, 19 nt, Artificial Sequence
  Description of Artificial Sequence: Synthetic oligonucleotide
  Antisense strand to SEQ ID NO: 97514
uucagugagccgauauccg

SEQ ID NO: 97596 - RNA, 19 nt, Artificial Sequence
  Description of Artificial Sequence: Synthetic oligonucleotide
  Sense strand starting at position 3327 of SEQ ID NO: 1229
cuaacaagugcaggaaaua

SEQ ID NO: 97597 - RNA, 19 nt, Artificial Sequence
  Description of Artificial Sequence: Synthetic oligonucleotide
  Antisense strand to SEQ ID NO: 97516
uauuuccugcacuuguuag

SEQ ID NO: 97598 - RNA, 19 nt, Artificial Sequence
  Description of Artificial Sequence: Synthetic oligonucleotide
  Sense strand starting at position 3393 of SEQ ID NO: 1229
ccuacaaugcgcuaaguau

SEQ ID NO: 97599 - RNA, 19 nt, Artificial Sequence
  Description of Artificial Sequence: Synthetic oligonucleotide
  Antisense strand to SEQ ID NO: 97518
auacuuagcgcauuguagg

SEQ ID NO: 97600 - RNA, 19 nt, Artificial Sequence
  Description of Artificial Sequence: Synthetic oligonucleotide
  Sense strand starting at position 3595 of SEQ ID NO: 1229
uucuguuaaccuugaguag

SEQ ID NO: 97601 - RNA, 19 nt, Artificial Sequence
  Description of Artificial Sequence: Synthetic oligonucleotide
  Antisense strand to SEQ ID NO: 97520
cuacucaagguuaacagaa

SEQ ID NO: 97602 - RNA, 19 nt, Artificial Sequence
  Description of Artificial Sequence: Synthetic oligonucleotide
  Sense strand starting at position 3596 of SEQ ID NO: 1229
ucuguuaaccuugaguaga

SEQ ID NO: 97603 - RNA, 19 nt, Artificial Sequence
  Description of Artificial Sequence: Synthetic oligonucleotide
  Antisense strand to SEQ ID NO: 97522
ucuacucaagguuaacaga

SEQ ID NO: 97604 - RNA, 19 nt, Artificial Sequence
  Description of Artificial Sequence: Synthetic oligonucleotide
  Sense strand starting at position 3598 of SEQ ID NO: 1229
uguuaaccuugaguagaaa

SEQ ID NO: 97605 - RNA, 19 nt, Artificial Sequence
  Description of Artificial Sequence: Synthetic oligonucleotide
  Antisense strand to SEQ ID NO: 97524
uuucuacucaagguuaaca

SEQ ID NO: 97606 - RNA, 19 nt, Artificial Sequence
  Description of Artificial Sequence: Synthetic oligonucleotide
  Sense strand starting at position 3667 of SEQ ID NO: 1229
agaugauaaugguauacaa

SEQ ID NO: 97607 - RNA, 19 nt, Artificial Sequence
  Description of Artificial Sequence: Synthetic oligonucleotide
  Antisense strand to SEQ ID NO: 97526
uuguauaccauuaucaucu

SEQ ID NO: 97608 - RNA, 19 nt, Artificial Sequence
  Description of Artificial Sequence: Synthetic oligonucleotide
  Sense strand starting at position 3682 of SEQ ID NO: 1229
acaauuggcccucaaagua

SEQ ID NO: 97609 - RNA, 19 nt, Artificial Sequence
  Description of Artificial Sequence: Synthetic oligonucleotide
  Antisense strand to SEQ ID NO: 97528
uacuuugagggccaauugu

SEQ ID NO: 97610 - RNA, 19 nt, Artificial Sequence
  Description of Artificial Sequence: Synthetic oligonucleotide
  Sense strand starting at position 3729 of SEQ ID NO: 1229
ugccauuugugacuauuau

SEQ ID NO: 97611 - RNA, 19 nt, Artificial Sequence
  Description of Artificial Sequence: Synthetic oligonucleotide
  Antisense strand to SEQ ID NO: 97530
auaauagucacaaauggca

SEQ ID NO: 97612 - RNA, 19 nt, Artificial Sequence
  Description of Artificial Sequence: Synthetic oligonucleotide
  Sense strand starting at position 166 of SEQ ID NO: 1230
aggaguuaguguucaaugg

SEQ ID NO: 97613 - RNA, 19 nt, Artificial Sequence
  Description of Artificial Sequence: Synthetic oligonucleotide
  Antisense strand to SEQ ID NO: 97532
ccauugaacacuaacuccu

SEQ ID NO: 97614 - RNA, 19 nt, Artificial Sequence
  Description of Artificial Sequence: Synthetic oligonucleotide
  Sense strand starting at position 515 of SEQ ID NO: 1230
aaagauauuccaggcugag

SEQ ID NO: 97615 - RNA, 19 nt, Artificial Sequence
  Description of Artificial Sequence: Synthetic oligonucleotide
  Antisense strand to SEQ ID NO: 97534
cucagccuggaauaucuuu

SEQ ID NO: 97616 - RNA, 19 nt, Artificial Sequence
  Description of Artificial Sequence: Synthetic oligonucleotide
  Sense strand starting at position 555 of SEQ ID NO: 1230
aggcaauuccaaggucaua

SEQ ID NO: 97617 - RNA, 19 nt, Artificial Sequence
  Description of Artificial Sequence: Synthetic oligonucleotide
  Antisense strand to SEQ ID NO: 97536
uaugaccuuggaauugccu

SEQ ID NO: 97618 - RNA, 19 nt, Artificial Sequence
  Description of Artificial Sequence: Synthetic oligonucleotide
  Sense strand starting at position 725 of SEQ ID NO: 1230
uccauuaagcuggauauau

SEQ ID NO: 97619 - RNA, 19 nt, Artificial Sequence
  Description of Artificial Sequence: Synthetic oligonucleotide
  Antisense strand to SEQ ID NO: 97538
auauauccagcuuaaugga

SEQ ID NO: 97620 - RNA, 19 nt, Artificial Sequence
  Description of Artificial Sequence: Synthetic oligonucleotide
  Sense strand starting at position 735 of SEQ ID NO: 1230
uggauauaugcccaagcuu

SEQ ID NO: 97621 - RNA, 19 nt, Artificial Sequence
  Description of Artificial Sequence: Synthetic oligonucleotide
  Antisense strand to SEQ ID NO: 97540
aagcuugggcauauaucca

SEQ ID NO: 97622 - RNA, 19 nt, Artificial Sequence
  Description of Artificial Sequence: Synthetic oligonucleotide
  Sense strand starting at position 943 of SEQ ID NO: 1230
ggaagcuaacgaugugaga

SEQ ID NO: 97623 - RNA, 19 nt, Artificial Sequence
  Description of Artificial Sequence: Synthetic oligonucleotide
  Antisense strand to SEQ ID NO: 97542
ucucacaucguuagcuucc

SEQ ID NO: 97624 - RNA, 19 nt, Artificial Sequence
  Description of Artificial Sequence: Synthetic oligonucleotide
  Sense strand starting at position 956 of SEQ ID NO: 1230
gugagauagccuuagcaua

SEQ ID NO: 97625 - RNA, 19 nt, Artificial Sequence
  Description of Artificial Sequence: Synthetic oligonucleotide
  Antisense strand to SEQ ID NO: 97544
uaugcuaaggcuaucucac

SEQ ID NO: 97626 - RNA, 19 nt, Artificial Sequence
  Description of Artificial Sequence: Synthetic oligonucleotide
  Sense strand starting at position 958 of SEQ ID NO: 1230
gagauagccuuagcauaga

SEQ ID NO: 97627 - RNA, 19 nt, Artificial Sequence
  Description of Artificial Sequence: Synthetic oligonucleotide
  Antisense strand to SEQ ID NO: 97546
ucuaugcuaaggcuaucuc

SEQ ID NO: 97628 - RNA, 19 nt, Artificial Sequence
  Description of Artificial Sequence: Synthetic oligonucleotide
  Sense strand starting at position 1041 of SEQ ID NO: 1230
agaauaaguccauguugga

SEQ ID NO: 97629 - RNA, 19 nt, Artificial Sequence
  Description of Artificial Sequence: Synthetic oligonucleotide
  Antisense strand to SEQ ID NO: 97548
uccaacauggacuuauucu

SEQ ID NO: 97630 - RNA, 19 nt, Artificial Sequence
  Description of Artificial Sequence: Synthetic oligonucleotide
  Sense strand starting at position 1068 of SEQ ID NO: 1230
guuucaugugccuugugua

SEQ ID NO: 97631 - RNA, 19 nt, Artificial Sequence
  Description of Artificial Sequence: Synthetic oligonucleotide
  Antisense strand to SEQ ID NO: 97550
uacacaaggcacaugaaac

SEQ ID NO: 97632 - RNA, 19 nt, Artificial Sequence
  Description of Artificial Sequence: Synthetic oligonucleotide
  Sense strand starting at position 1122 of SEQ ID NO: 1230
uugagugaguccuuauaac

SEQ ID NO: 97633 - RNA, 19 nt, Artificial Sequence
  Description of Artificial Sequence: Synthetic oligonucleotide
  Antisense strand to SEQ ID NO: 97552
guuauaaggacucacucaa

SEQ ID NO: 97634 - RNA, 19 nt, Artificial Sequence
  Description of Artificial Sequence: Synthetic oligonucleotide
  Sense strand starting at position 1143 of SEQ ID NO: 1230
cgccaugacccagacaaau

SEQ ID NO: 97635 - RNA, 19 nt, Artificial Sequence
  Description of Artificial Sequence: Synthetic oligonucleotide
  Antisense strand to SEQ ID NO: 97554
auuugucugggucauggcg

SEQ ID NO: 97636 - RNA, 19 nt, Artificial Sequence
  Description of Artificial Sequence: Synthetic oligonucleotide
  Sense strand starting at position 1634 of SEQ ID NO: 1230
gcugacuuaggguaggauu

SEQ ID NO: 97637 - RNA, 19 nt, Artificial Sequence
  Description of Artificial Sequence: Synthetic oligonucleotide
  Antisense strand to SEQ ID NO: 97556
aauccuacccuaagucagc

SEQ ID NO: 97638 - RNA, 19 nt, Artificial Sequence
  Description of Artificial Sequence: Synthetic oligonucleotide
  Sense strand starting at position 1636 of SEQ ID NO: 1230
ugacuuaggguaggauuau

SEQ ID NO: 97639 - RNA, 19 nt, Artificial Sequence
  Description of Artificial Sequence: Synthetic oligonucleotide
  Antisense strand to SEQ ID NO: 97558
auaauccuacccuaaguca

SEQ ID NO: 97640 - RNA, 19 nt, Artificial Sequence
  Description of Artificial Sequence: Synthetic oligonucleotide
  Sense strand starting at position 1735 of SEQ ID NO: 1230
ucugaugucacccgaggaa

SEQ ID NO: 97641 - RNA, 19 nt, Artificial Sequence
  Description of Artificial Sequence: Synthetic oligonucleotide
  Antisense strand to SEQ ID NO: 97560
uuccucgggugacaucaga

SEQ ID NO: 97642 - RNA, 19 nt, Artificial Sequence
  Description of Artificial Sequence: Synthetic oligonucleotide
  Sense strand starting at position 1810 of SEQ ID NO: 1230
acaacuuucccacguaaga

SEQ ID NO: 97643 - RNA, 19 nt, Artificial Sequence
  Description of Artificial Sequence: Synthetic oligonucleotide
  Antisense strand to SEQ ID NO: 97562
ucuuacgugggaaaguugu

SEQ ID NO: 97644 - RNA, 19 nt, Artificial Sequence
  Description of Artificial Sequence: Synthetic oligonucleotide
  Sense strand starting at position 1906 of SEQ ID NO: 1230
ugggauggcuucuuagaag

SEQ ID NO: 97645 - RNA, 19 nt, Artificial Sequence
  Description of Artificial Sequence: Synthetic oligonucleotide
  Antisense strand to SEQ ID NO: 97564
cuucuaagaagccauccca

SEQ ID NO: 97646 - RNA, 19 nt, Artificial Sequence
  Description of Artificial Sequence: Synthetic oligonucleotide
  Sense strand starting at position 1958 of SEQ ID NO: 1230
uaggaaaucucugugucac

SEQ ID NO: 97647 - RNA, 19 nt, Artificial Sequence
  Description of Artificial Sequence: Synthetic oligonucleotide
  Antisense strand to SEQ ID NO: 97566
gugacacagagauuuccua

SEQ ID NO: 97648 - RNA, 19 nt, Artificial Sequence
  Description of Artificial Sequence: Synthetic oligonucleotide
  Sense strand starting at position 1960 of SEQ ID NO: 1230
ggaaaucucugugucacca

SEQ ID NO: 97649 - RNA, 19 nt, Artificial Sequence
  Description of Artificial Sequence: Synthetic oligonucleotide
  Antisense strand to SEQ ID NO: 97568
uggugacacagagauuucc

SEQ ID NO: 97650 - RNA, 19 nt, Artificial Sequence
  Description of Artificial Sequence: Synthetic oligonucleotide
  Sense strand starting at position 1964 of SEQ ID NO: 1230
aucucugugucaccaggaa

SEQ ID NO: 97651 - RNA, 19 nt, Artificial Sequence
  Description of Artificial Sequence: Synthetic oligonucleotide
  Antisense strand to SEQ ID NO: 97570
uuccuggugacacagagau

SEQ ID NO: 97652 - RNA, 19 nt, Artificial Sequence
  Description of Artificial Sequence: Synthetic oligonucleotide
  Sense strand starting at position 2138 of SEQ ID NO: 1230
cugauucuucugcagagag

SEQ ID NO: 97653 - RNA, 19 nt, Artificial Sequence
  Description of Artificial Sequence: Synthetic oligonucleotide
  Antisense strand to SEQ ID NO: 97572
cucucugcagaagaaucag

SEQ ID NO: 97654 - RNA, 19 nt, Artificial Sequence
  Description of Artificial Sequence: Synthetic oligonucleotide
  Sense strand starting at position 2174 of SEQ ID NO: 1230
ccuugugaggaccaucauu

SEQ ID NO: 97655 - RNA, 19 nt, Artificial Sequence
  Description of Artificial Sequence: Synthetic oligonucleotide
  Antisense strand to SEQ ID NO: 97574
aaugaugguccucacaagg

SEQ ID NO: 97656 - RNA, 19 nt, Artificial Sequence
  Description of Artificial Sequence: Synthetic oligonucleotide
  Sense strand starting at position 2187 of SEQ ID NO: 1230
aucauuacucuugguuuga

SEQ ID NO: 97657 - RNA, 19 nt, Artificial Sequence
  Description of Artificial Sequence: Synthetic oligonucleotide
  Antisense strand to SEQ ID NO: 97576
ucaaaccaagaguaaugau

SEQ ID NO: 97658 - RNA, 19 nt, Artificial Sequence
  Description of Artificial Sequence: Synthetic oligonucleotide
  Sense strand starting at position 2188 of SEQ ID NO: 1230
ucauuacucuugguuugag

SEQ ID NO: 97659 - RNA, 19 nt, Artificial Sequence
  Description of Artificial Sequence: Synthetic oligonucleotide
  Antisense strand to SEQ ID NO: 97578
cucaaaccaagaguaauga

SEQ ID NO: 97660 - RNA, 19 nt, Artificial Sequence
  Description of Artificial Sequence: Synthetic oligonucleotide
  Sense strand starting at position 2189 of SEQ ID NO: 1230
cauuacucuugguuugaga

SEQ ID NO: 97661 - RNA, 19 nt, Artificial Sequence
  Description of Artificial Sequence: Synthetic oligonucleotide
  Antisense strand to SEQ ID NO: 97580
ucucaaaccaagaguaaug

SEQ ID NO: 97662 - RNA, 19 nt, Artificial Sequence
  Description of Artificial Sequence: Synthetic oligonucleotide
  Sense strand starting at position 2191 of SEQ ID NO: 1230
uuacucuugguuugagaag

SEQ ID NO: 97663 - RNA, 19 nt, Artificial Sequence
  Description of Artificial Sequence: Synthetic oligonucleotide
  Antisense strand to SEQ ID NO: 97582
cuucucaaaccaagaguaa

SEQ ID NO: 97664 - RNA, 19 nt, Artificial Sequence
  Description of Artificial Sequence: Synthetic oligonucleotide
  Sense strand starting at position 2213 of SEQ ID NO: 1230
gcaguccuuggaggacaua

SEQ ID NO: 97665 - RNA, 19 nt, Artificial Sequence
  Description of Artificial Sequence: Synthetic oligonucleotide
  Antisense strand to SEQ ID NO: 97584
uauguccuccaaggacugc

SEQ ID NO: 97666 - RNA, 19 nt, Artificial Sequence
  Description of Artificial Sequence: Synthetic oligonucleotide
  Sense strand starting at position 2824 of SEQ ID NO: 1230
cccacaauaugaguuugaa

SEQ ID NO: 97667 - RNA, 19 nt, Artificial Sequence
  Description of Artificial Sequence: Synthetic oligonucleotide
  Antisense strand to SEQ ID NO: 97586
uucaaacucauauuguggg

SEQ ID NO: 97668 - RNA, 19 nt, Artificial Sequence
  Description of Artificial Sequence: Synthetic oligonucleotide
  Sense strand starting at position 2827 of SEQ ID NO: 1230
acaauaugaguuugaagca

SEQ ID NO: 97669 - RNA, 19 nt, Artificial Sequence
  Description of Artificial Sequence: Synthetic oligonucleotide
  Antisense strand to SEQ ID NO: 97588
ugcuucaaacucauauugu

SEQ ID NO: 97670 - RNA, 19 nt, Artificial Sequence
  Description of Artificial Sequence: Synthetic oligonucleotide
  Sense strand starting at position 2834 of SEQ ID NO: 1230
gaguuugaagcauggauac

SEQ ID NO: 97671 - RNA, 19 nt, Artificial Sequence
  Description of Artificial Sequence: Synthetic oligonucleotide
  Antisense strand to SEQ ID NO: 97590
guauccaugcuucaaacuc

SEQ ID NO: 97672 - RNA, 19 nt, Artificial Sequence
  Description of Artificial Sequence: Synthetic oligonucleotide
  Sense strand starting at position 3661 of SEQ ID NO: 1230
augacuauucuguagugua

SEQ ID NO: 97673 - RNA, 19 nt, Artificial Sequence
  Description of Artificial Sequence: Synthetic oligonucleotide
  Antisense strand to SEQ ID NO: 97592
uacacuacagaauagucau

SEQ ID NO: 97674 - RNA, 19 nt, Artificial Sequence
  Description of Artificial Sequence: Synthetic oligonucleotide
  Sense strand starting at position 3668 of SEQ ID NO: 1230
uucuguaguguauguauuu

SEQ ID NO: 97675 - RNA, 19 nt, Artificial Sequence
  Description of Artificial Sequence: Synthetic oligonucleotide
  Antisense strand to SEQ ID NO: 97594
aaauacauacacuacagaa

SEQ ID NO: 97676 - RNA, 19 nt, Artificial Sequence
  Description of Artificial Sequence: Synthetic oligonucleotide
  Sense strand starting at position 3673 of SEQ ID NO: 1230
uaguguauguauuugcuca

SEQ ID NO: 97677 - RNA, 19 nt, Artificial Sequence
  Description of Artificial Sequence: Synthetic oligonucleotide
  Antisense strand to SEQ ID NO: 97596
ugagcaaauacauacacua

SEQ ID NO: 97678 - RNA, 19 nt, Artificial Sequence
  Description of Artificial Sequence: Synthetic oligonucleotide
  Sense strand starting at position 3675 of SEQ ID NO: 1230
guguauguauuugcucaga

SEQ ID NO: 97679 - RNA, 19 nt, Artificial Sequence
  Description of Artificial Sequence: Synthetic oligonucleotide
  Antisense strand to SEQ ID NO: 97598
ucugagcaaauacauacac

SEQ ID NO: 97680 - RNA, 19 nt, Artificial Sequence
  Description of Artificial Sequence: Synthetic oligonucleotide
  Sense strand starting at position 3677 of SEQ ID NO: 1230
guauguauuugcucagaac

SEQ ID NO: 97681 - RNA, 19 nt, Artificial Sequence
  Description of Artificial Sequence: Synthetic oligonucleotide
  Antisense strand to SEQ ID NO: 97600
guucugagcaaauacauac

SEQ ID NO: 97682 - RNA, 19 nt, Artificial Sequence
  Description of Artificial Sequence: Synthetic oligonucleotide
  Sense strand starting at position 3792 of SEQ ID NO: 1230
agcccagaacaaugaguau

SEQ ID NO: 97683 - RNA, 19 nt, Artificial Sequence
  Description of Artificial Sequence: Synthetic oligonucleotide
  Antisense strand to SEQ ID NO: 97602
auacucauuguucugggcu

SEQ ID NO: 97684 - RNA, 19 nt, Artificial Sequence
  Description of Artificial Sequence: Synthetic oligonucleotide
  Sense strand starting at position 3811 of SEQ ID NO: 1230
uaaagugagugcuuagaua

SEQ ID NO: 97685 - RNA, 19 nt, Artificial Sequence
  Description of Artificial Sequence: Synthetic oligonucleotide
  Antisense strand to SEQ ID NO: 97604
uaucuaagcacucacuuua

SEQ ID NO: 97686 - RNA, 19 nt, Artificial Sequence
  Description of Artificial Sequence: Synthetic oligonucleotide
  Sense strand starting at position 3907 of SEQ ID NO: 1230
cuggaauagucuuuauaau

SEQ ID NO: 97687 - RNA, 19 nt, Artificial Sequence
  Description of Artificial Sequence: Synthetic oligonucleotide
  Antisense strand to SEQ ID NO: 97606
auuauaaagacuauuccag

SEQ ID NO: 97688 - RNA, 19 nt, Artificial Sequence
  Description of Artificial Sequence: Synthetic oligonucleotide
  Sense strand starting at position 3965 of SEQ ID NO: 1230
uuagguaccauguagguau

SEQ ID NO: 97689 - RNA, 19 nt, Artificial Sequence
  Description of Artificial Sequence: Synthetic oligonucleotide
  Antisense strand to SEQ ID NO: 97608
auaccuacaugguaccuaa

SEQ ID NO: 97690 - RNA, 19 nt, Artificial Sequence
  Description of Artificial Sequence: Synthetic oligonucleotide
  Sense strand starting at position 3979 of SEQ ID NO: 1230
gguauuagguucuugauaa

SEQ ID NO: 97691 - RNA, 19 nt, Artificial Sequence
  Description of Artificial Sequence: Synthetic oligonucleotide
  Antisense strand to SEQ ID NO: 97610
uuaucaagaaccuaauacc

SEQ ID NO: 97692 - RNA, 19 nt, Artificial Sequence
  Description of Artificial Sequence: Synthetic oligonucleotide
  Sense strand starting at position 35 of SEQ ID NO: 1231
guauuauacccagaagugu

SEQ ID NO: 97693 - RNA, 19 nt, Artificial Sequence
  Description of Artificial Sequence: Synthetic oligonucleotide
  Antisense strand to SEQ ID NO: 97612
acacuucuggguauaauac

SEQ ID NO: 97694 - RNA, 19 nt, Artificial Sequence
  Description of Artificial Sequence: Synthetic oligonucleotide
  Sense strand starting at position 76 of SEQ ID NO: 1231
uguauaauaguuuagugga

SEQ ID NO: 97695 - RNA, 19 nt, Artificial Sequence
  Description of Artificial Sequence: Synthetic oligonucleotide
  Antisense strand to SEQ ID NO: 97614
uccacuaaacuauuauaca

SEQ ID NO: 97696 - RNA, 19 nt, Artificial Sequence
  Description of Artificial Sequence: Synthetic oligonucleotide
  Sense strand starting at position 124 of SEQ ID NO: 1231
uucucuuaagucuguggaa

SEQ ID NO: 97697 - RNA, 19 nt, Artificial Sequence
  Description of Artificial Sequence: Synthetic oligonucleotide
  Antisense strand to SEQ ID NO: 97616
uuccacagacuuaagagaa

SEQ ID NO: 97698 - RNA, 19 nt, Artificial Sequence
  Description of Artificial Sequence: Synthetic oligonucleotide
  Sense strand starting at position 125 of SEQ ID NO: 1231
ucucuuaagucuguggaau

SEQ ID NO: 97699 - RNA, 19 nt, Artificial Sequence
  Description of Artificial Sequence: Synthetic oligonucleotide
  Antisense strand to SEQ ID NO: 97618
auuccacagacuuaagaga

SEQ ID NO: 97700 - RNA, 19 nt, Artificial Sequence
  Description of Artificial Sequence: Synthetic oligonucleotide
  Sense strand starting at position 126 of SEQ ID NO: 1231
cucuuaagucuguggaauu

SEQ ID NO: 97701 - RNA, 19 nt, Artificial Sequence
  Description of Artificial Sequence: Synthetic oligonucleotide
  Antisense strand to SEQ ID NO: 97620
aauuccacagacuuaagag

SEQ ID NO: 97702 - RNA, 19 nt, Artificial Sequence
  Description of Artificial Sequence: Synthetic oligonucleotide
  Sense strand starting at position 194 of SEQ ID NO: 1231
cagaguuaguuuccuacag

SEQ ID NO: 97703 - RNA, 19 nt, Artificial Sequence
  Description of Artificial Sequence: Synthetic oligonucleotide
  Antisense strand to SEQ ID NO: 97622
cuguaggaaacuaacucug

SEQ ID NO: 97704 - RNA, 19 nt, Artificial Sequence
  Description of Artificial Sequence: Synthetic oligonucleotide
  Sense strand starting at position 195 of SEQ ID NO: 1231
agaguuaguuuccuacagu

SEQ ID NO: 97705 - RNA, 19 nt, Artificial Sequence
  Description of Artificial Sequence: Synthetic oligonucleotide
  Antisense strand to SEQ ID NO: 97624
acuguaggaaacuaacucu

SEQ ID NO: 97706 - RNA, 19 nt, Artificial Sequence
  Description of Artificial Sequence: Synthetic oligonucleotide
  Sense strand starting at position 198 of SEQ ID NO: 1231
guuaguuuccuacagucua

SEQ ID NO: 97707 - RNA, 19 nt, Artificial Sequence
  Description of Artificial Sequence: Synthetic oligonucleotide
  Antisense strand to SEQ ID NO: 97626
uagacuguaggaaacuaac

SEQ ID NO: 97708 - RNA, 19 nt, Artificial Sequence
  Description of Artificial Sequence: Synthetic oligonucleotide
  Sense strand starting at position 321 of SEQ ID NO: 1231
agugucaccuucucuacaa

SEQ ID NO: 97709 - RNA, 19 nt, Artificial Sequence
  Description of Artificial Sequence: Synthetic oligonucleotide
  Antisense strand to SEQ ID NO: 97628
uuguagagaaggugacacu

SEQ ID NO: 97710 - RNA, 19 nt, Artificial Sequence
  Description of Artificial Sequence: Synthetic oligonucleotide
  Sense strand starting at position 360 of SEQ ID NO: 1231
caaucacuagguugugaau

SEQ ID NO: 97711 - RNA, 19 nt, Artificial Sequence
  Description of Artificial Sequence: Synthetic oligonucleotide
  Antisense strand to SEQ ID NO: 97630
auucacaaccuagugauug

SEQ ID NO: 97712 - RNA, 19 nt, Artificial Sequence
  Description of Artificial Sequence: Synthetic oligonucleotide
  Sense strand starting at position 705 of SEQ ID NO: 1231
guguaagcuaucgugccua

SEQ ID NO: 97713 - RNA, 19 nt, Artificial Sequence
  Description of Artificial Sequence: Synthetic oligonucleotide
  Antisense strand to SEQ ID NO: 97632
uaggcacgauagcuuacac

SEQ ID NO: 97714 - RNA, 19 nt, Artificial Sequence
  Description of Artificial Sequence: Synthetic oligonucleotide
  Sense strand starting at position 1085 of SEQ ID NO: 1231
cgaauaaacaacugguaga

SEQ ID NO: 97715 - RNA, 19 nt, Artificial Sequence
  Description of Artificial Sequence: Synthetic oligonucleotide
  Antisense strand to SEQ ID NO: 97634
ucuaccaguuguuuauucg

SEQ ID NO: 97716 - RNA, 19 nt, Artificial Sequence
  Description of Artificial Sequence: Synthetic oligonucleotide
  Sense strand starting at position 1102 of SEQ ID NO: 1231
gaugaauaaugagaauuga

SEQ ID NO: 97717 - RNA, 19 nt, Artificial Sequence
  Description of Artificial Sequence: Synthetic oligonucleotide
  Antisense strand to SEQ ID NO: 97636
ucaauucucauuauucauc

SEQ ID NO: 97718 - RNA, 19 nt, Artificial Sequence
  Description of Artificial Sequence: Synthetic oligonucleotide
  Sense strand starting at position 1110 of SEQ ID NO: 1231
augagaauugauugcuucu

SEQ ID NO: 97719 - RNA, 19 nt, Artificial Sequence
  Description of Artificial Sequence: Synthetic oligonucleotide
  Antisense strand to SEQ ID NO: 97638
agaagcaaucaauucucau

SEQ ID NO: 97720 - RNA, 19 nt, Artificial Sequence
  Description of Artificial Sequence: Synthetic oligonucleotide
  Sense strand starting at position 1546 of SEQ ID NO: 1231
auaugagucugauuccucu

SEQ ID NO: 97721 - RNA, 19 nt, Artificial Sequence
  Description of Artificial Sequence: Synthetic oligonucleotide
  Antisense strand to SEQ ID NO: 97640
agaggaaucagacucauau

SEQ ID NO: 97722 - RNA, 19 nt, Artificial Sequence
  Description of Artificial Sequence: Synthetic oligonucleotide
  Sense strand starting at position 1589 of SEQ ID NO: 1231
agaauagaacgucgauaau

SEQ ID NO: 97723 - RNA, 19 nt, Artificial Sequence
  Description of Artificial Sequence: Synthetic oligonucleotide
  Antisense strand to SEQ ID NO: 97642
auuaucgacguucuauucu

SEQ ID NO: 97724 - RNA, 19 nt, Artificial Sequence
  Description of Artificial Sequence: Synthetic oligonucleotide
  Sense strand starting at position 1600 of SEQ ID NO: 1231
ucgauaauuuggucacgua

SEQ ID NO: 97725 - RNA, 19 nt, Artificial Sequence
  Description of Artificial Sequence: Synthetic oligonucleotide
  Antisense strand to SEQ ID NO: 97644
uacgugaccaaauuaucga

SEQ ID NO: 97726 - RNA, 19 nt, Artificial Sequence
  Description of Artificial Sequence: Synthetic oligonucleotide
  Sense strand starting at position 1607 of SEQ ID NO: 1231
uuuggucacguauauaaag

SEQ ID NO: 97727 - RNA, 19 nt, Artificial Sequence
  Description of Artificial Sequence: Synthetic oligonucleotide
  Antisense strand to SEQ ID NO: 97646
cuuuauauacgugaccaaa

SEQ ID NO: 97728 - RNA, 19 nt, Artificial Sequence
  Description of Artificial Sequence: Synthetic oligonucleotide
  Sense strand starting at position 1644 of SEQ ID NO: 1231
agcuaaagcuauucugaau

SEQ ID NO: 97729 - RNA, 19 nt, Artificial Sequence
  Description of Artificial Sequence: Synthetic oligonucleotide
  Antisense strand to SEQ ID NO: 97648
auucagaauagcuuuagcu

SEQ ID NO: 97730 - RNA, 19 nt, Artificial Sequence
  Description of Artificial Sequence: Synthetic oligonucleotide
  Sense strand starting at position 1704 of SEQ ID NO: 1231
gguacuacauuaguugaga

SEQ ID NO: 97731 - RNA, 19 nt, Artificial Sequence
  Description of Artificial Sequence: Synthetic oligonucleotide
  Antisense strand to SEQ ID NO: 97650
ucucaacuaauguaguacc

SEQ ID NO: 97732 - RNA, 19 nt, Artificial Sequence
  Description of Artificial Sequence: Synthetic oligonucleotide
  Sense strand starting at position 1705 of SEQ ID NO: 1231
guacuacauuaguugagau

SEQ ID NO: 97733 - RNA, 19 nt, Artificial Sequence
  Description of Artificial Sequence: Synthetic oligonucleotide
  Antisense strand to SEQ ID NO: 97652
aucucaacuaauguaguac

SEQ ID NO: 97734 - RNA, 19 nt, Artificial Sequence
  Description of Artificial Sequence: Synthetic oligonucleotide
  Sense strand starting at position 1734 of SEQ ID NO: 1231
aagauuaacucguuggcac

SEQ ID NO: 97735 - RNA, 19 nt, Artificial Sequence
  Description of Artificial Sequence: Synthetic oligonucleotide
  Antisense strand to SEQ ID NO: 97654
gugccaacgaguuaaucuu

SEQ ID NO: 97736 - RNA, 19 nt, Artificial Sequence
  Description of Artificial Sequence: Synthetic oligonucleotide
  Sense strand starting at position 1755 of SEQ ID NO: 1231
ccuaguagucacuaaaugu

SEQ ID NO: 97737 - RNA, 19 nt, Artificial Sequence
  Description of Artificial Sequence: Synthetic oligonucleotide
  Antisense strand to SEQ ID NO: 97656
acauuuagugacuacuagg

SEQ ID NO: 97738 - RNA, 19 nt, Artificial Sequence
  Description of Artificial Sequence: Synthetic oligonucleotide
  Sense strand starting at position 1934 of SEQ ID NO: 1231
gugucauaaacuugaggaa

SEQ ID NO: 97739 - RNA, 19 nt, Artificial Sequence
  Description of Artificial Sequence: Synthetic oligonucleotide
  Antisense strand to SEQ ID NO: 97658
uuccucaaguuuaugacac

SEQ ID NO: 97740 - RNA, 19 nt, Artificial Sequence
  Description of Artificial Sequence: Synthetic oligonucleotide
  Sense strand starting at position 2071 of SEQ ID NO: 1231
uaaggcaguccagauaacu

SEQ ID NO: 97741 - RNA, 19 nt, Artificial Sequence
  Description of Artificial Sequence: Synthetic oligonucleotide
  Antisense strand to SEQ ID NO: 97660
aguuaucuggacugccuua

SEQ ID NO: 97742 - RNA, 19 nt, Artificial Sequence
  Description of Artificial Sequence: Synthetic oligonucleotide
  Sense strand starting at position 2297 of SEQ ID NO: 1231
ggguuuggcccagaaccaa

SEQ ID NO: 97743 - RNA, 19 nt, Artificial Sequence
  Description of Artificial Sequence: Synthetic oligonucleotide
  Antisense strand to SEQ ID NO: 97662
uugguucugggccaaaccc

SEQ ID NO: 97744 - RNA, 19 nt, Artificial Sequence
  Description of Artificial Sequence: Synthetic oligonucleotide
  Sense strand starting at position 2827 of SEQ ID NO: 1231
agucuuuagagucgaauau

SEQ ID NO: 97745 - RNA, 19 nt, Artificial Sequence
  Description of Artificial Sequence: Synthetic oligonucleotide
  Antisense strand to SEQ ID NO: 97664
auauucgacucuaaagacu

SEQ ID NO: 97746 - RNA, 19 nt, Artificial Sequence
  Description of Artificial Sequence: Synthetic oligonucleotide
  Sense strand starting at position 2828 of SEQ ID NO: 1231
gucuuuagagucgaauaug

SEQ ID NO: 97747 - RNA, 19 nt, Artificial Sequence
  Description of Artificial Sequence: Synthetic oligonucleotide
  Antisense strand to SEQ ID NO: 97666
cauauucgacucuaaagac

SEQ ID NO: 97748 - RNA, 19 nt, Artificial Sequence
  Description of Artificial Sequence: Synthetic oligonucleotide
  Sense strand starting at position 2839 of SEQ ID NO: 1231
cgaauaugacccgaggcaa

SEQ ID NO: 97749 - RNA, 19 nt, Artificial Sequence
  Description of Artificial Sequence: Synthetic oligonucleotide
  Antisense strand to SEQ ID NO: 97668
uugccucgggucauauucg

SEQ ID NO: 97750 - RNA, 19 nt, Artificial Sequence
  Description of Artificial Sequence: Synthetic oligonucleotide
  Sense strand starting at position 2881 of SEQ ID NO: 1231
ggagcuuugauugacccuu

SEQ ID NO: 97751 - RNA, 19 nt, Artificial Sequence
  Description of Artificial Sequence: Synthetic oligonucleotide
  Antisense strand to SEQ ID NO: 97670
aagggucaaucaaagcucc

SEQ ID NO: 97752 - RNA, 19 nt, Artificial Sequence
  Description of Artificial Sequence: Synthetic oligonucleotide
  Sense strand starting at position 2883 of SEQ ID NO: 1231
agcuuugauugacccuuaa

SEQ ID NO: 97753 - RNA, 19 nt, Artificial Sequence
  Description of Artificial Sequence: Synthetic oligonucleotide
  Antisense strand to SEQ ID NO: 97672
uuaagggucaaucaaagcu

SEQ ID NO: 97754 - RNA, 19 nt, Artificial Sequence
  Description of Artificial Sequence: Synthetic oligonucleotide
  Sense strand starting at position 2936 of SEQ ID NO: 1231
gcuucugaccuucggaaca

SEQ ID NO: 97755 - RNA, 19 nt, Artificial Sequence
  Description of Artificial Sequence: Synthetic oligonucleotide
  Antisense strand to SEQ ID NO: 97674
uguuccgaaggucagaagc

SEQ ID NO: 97756 - RNA, 19 nt, Artificial Sequence
  Description of Artificial Sequence: Synthetic oligonucleotide
  Sense strand starting at position 2982 of SEQ ID NO: 1231
cucuuucuagaagagucuu

SEQ ID NO: 97757 - RNA, 19 nt, Artificial Sequence
  Description of Artificial Sequence: Synthetic oligonucleotide
  Antisense strand to SEQ ID NO: 97676
aagacucuucuagaaagag

SEQ ID NO: 97758 - RNA, 19 nt, Artificial Sequence
  Description of Artificial Sequence: Synthetic oligonucleotide
  Sense strand starting at position 3145 of SEQ ID NO: 1231
acucaugcuccuugagaag

SEQ ID NO: 97759 - RNA, 19 nt, Artificial Sequence
  Description of Artificial Sequence: Synthetic oligonucleotide
  Antisense strand to SEQ ID NO: 97678
cuucucaaggagcaugagu

SEQ ID NO: 97760 - RNA, 19 nt, Artificial Sequence
  Description of Artificial Sequence: Synthetic oligonucleotide
  Sense strand starting at position 3166 of SEQ ID NO: 1231
gguaaugagcuguagggca

SEQ ID NO: 97761 - RNA, 19 nt, Artificial Sequence
  Description of Artificial Sequence: Synthetic oligonucleotide
  Antisense strand to SEQ ID NO: 97680
ugcccuacagcucauuacc

SEQ ID NO: 97762 - RNA, 19 nt, Artificial Sequence
  Description of Artificial Sequence: Synthetic oligonucleotide
  Sense strand starting at position 3521 of SEQ ID NO: 1231
cgcggugugacaccuguaa

SEQ ID NO: 97763 - RNA, 19 nt, Artificial Sequence
  Description of Artificial Sequence: Synthetic oligonucleotide
  Antisense strand to SEQ ID NO: 97682
uuacaggugucacaccgcg

SEQ ID NO: 97764 - RNA, 19 nt, Artificial Sequence
  Description of Artificial Sequence: Synthetic oligonucleotide
  Sense strand starting at position 3637 of SEQ ID NO: 1231
ccagaaacugguuggaacu

SEQ ID NO: 97765 - RNA, 19 nt, Artificial Sequence
  Description of Artificial Sequence: Synthetic oligonucleotide
  Antisense strand to SEQ ID NO: 97684
aguuccaaccaguuucugg

SEQ ID NO: 97766 - RNA, 19 nt, Artificial Sequence
  Description of Artificial Sequence: Synthetic oligonucleotide
  Sense strand starting at position 3709 of SEQ ID NO: 1231
guguucaugguagaauugu

SEQ ID NO: 97767 - RNA, 19 nt, Artificial Sequence
  Description of Artificial Sequence: Synthetic oligonucleotide
  Antisense strand to SEQ ID NO: 97686
acaauucuaccaugaacac

SEQ ID NO: 97768 - RNA, 19 nt, Artificial Sequence
  Description of Artificial Sequence: Synthetic oligonucleotide
  Sense strand starting at position 3912 of SEQ ID NO: 1231
ggagucugaaguuaguuau

SEQ ID NO: 97769 - RNA, 19 nt, Artificial Sequence
  Description of Artificial Sequence: Synthetic oligonucleotide
  Antisense strand to SEQ ID NO: 97688
auaacuaacuucagacucc

SEQ ID NO: 97770 - RNA, 19 nt, Artificial Sequence
  Description of Artificial Sequence: Synthetic oligonucleotide
  Sense strand starting at position 3915 of SEQ ID NO: 1231
gucugaaguuaguuauauu

SEQ ID NO: 97771 - RNA, 19 nt, Artificial Sequence
  Description of Artificial Sequence: Synthetic oligonucleotide
  Antisense strand to SEQ ID NO: 97690
aauauaacuaacuucagac

SEQ ID NO: 97772 - RNA, 19 nt, Artificial Sequence
  Description of Artificial Sequence: Synthetic oligonucleotide
  Sense strand starting at position 3952 of SEQ ID NO: 1232
ugaaucugacaaugcagaa

SEQ ID NO: 97773 - RNA, 19 nt, Artificial Sequence
  Description of Artificial Sequence: Synthetic oligonucleotide
  Antisense strand to SEQ ID NO: 97692
uucugcauugucagauuca

SEQ ID NO: 97774 - RNA, 19 nt, Artificial Sequence
  Description of Artificial Sequence: Synthetic oligonucleotide
  Sense strand starting at position 3886 of SEQ ID NO: 1232
ccauauuagccaggaacaa

SEQ ID NO: 97775 - RNA, 19 nt, Artificial Sequence
  Description of Artificial Sequence: Synthetic oligonucleotide
  Antisense strand to SEQ ID NO: 97694
uuguuccuggcuaauaugg

SEQ ID NO: 97776 - RNA, 19 nt, Artificial Sequence
  Description of Artificial Sequence: Synthetic oligonucleotide
  Sense strand starting at position 3661 of SEQ ID NO: 1232
uaaaguuugcaggauuaca

SEQ ID NO: 97777 - RNA, 19 nt, Artificial Sequence
  Description of Artificial Sequence: Synthetic oligonucleotide
  Antisense strand to SEQ ID NO: 97696
uguaauccugcaaacuuua

SEQ ID NO: 97778 - RNA, 19 nt, Artificial Sequence
  Description of Artificial Sequence: Synthetic oligonucleotide
  Sense strand starting at position 3614 of SEQ ID NO: 1232
gaggaagguuagcuugauc

SEQ ID NO: 97779 - RNA, 19 nt, Artificial Sequence
  Description of Artificial Sequence: Synthetic oligonucleotide
  Antisense strand to SEQ ID NO: 97698
gaucaagcuaaccuuccuc

SEQ ID NO: 97780 - RNA, 19 nt, Artificial Sequence
  Description of Artificial Sequence: Synthetic oligonucleotide
  Sense strand starting at position 3613 of SEQ ID NO: 1232
ggaggaagguuagcuugau

SEQ ID NO: 97781 - RNA, 19 nt, Artificial Sequence
  Description of Artificial Sequence: Synthetic oligonucleotide
  Antisense strand to SEQ ID NO: 97700
aucaagcuaaccuuccucc

SEQ ID NO: 97782 - RNA, 19 nt, Artificial Sequence
  Description of Artificial Sequence: Synthetic oligonucleotide
  Sense strand starting at position 3568 of SEQ ID NO: 1232
guuuguuacugauuuacuu

SEQ ID NO: 97783 - RNA, 19 nt, Artificial Sequence
  Description of Artificial Sequence: Synthetic oligonucleotide
  Antisense strand to SEQ ID NO: 97702
aaguaaaucaguaacaaac

SEQ ID NO: 97784 - RNA, 19 nt, Artificial Sequence
  Description of Artificial Sequence: Synthetic oligonucleotide
  Sense strand starting at position 3564 of SEQ ID NO: 1232
aaguguuuguuacugauuu

SEQ ID NO: 97785 - RNA, 19 nt, Artificial Sequence
  Description of Artificial Sequence: Synthetic oligonucleotide
  Antisense strand to SEQ ID NO: 97704
aaaucaguaacaaacacuu

SEQ ID NO: 97786 - RNA, 19 nt, Artificial Sequence
  Description of Artificial Sequence: Synthetic oligonucleotide
  Sense strand starting at position 3549 of SEQ ID NO: 1232
cugguuuaccagcagaagu

SEQ ID NO: 97787 - RNA, 19 nt, Artificial Sequence
  Description of Artificial Sequence: Synthetic oligonucleotide
  Antisense strand to SEQ ID NO: 97706
acuucugcugguaaaccag

SEQ ID NO: 97788 - RNA, 19 nt, Artificial Sequence
  Description of Artificial Sequence: Synthetic oligonucleotide
  Sense strand starting at position 3257 of SEQ ID NO: 1232
auaucuggguaauuggaua

SEQ ID NO: 97789 - RNA, 19 nt, Artificial Sequence
  Description of Artificial Sequence: Synthetic oligonucleotide
  Antisense strand to SEQ ID NO: 97708
uauccaauuacccagauau

SEQ ID NO: 97790 - RNA, 19 nt, Artificial Sequence
  Description of Artificial Sequence: Synthetic oligonucleotide
  Sense strand starting at position 3253 of SEQ ID NO: 1232
guagauaucuggguaauug

SEQ ID NO: 97791 - RNA, 19 nt, Artificial Sequence
  Description of Artificial Sequence: Synthetic oligonucleotide
  Antisense strand to SEQ ID NO: 97710
caauuacccagauaucuac

SEQ ID NO: 97792 - RNA, 19 nt, Artificial Sequence
  Description of Artificial Sequence: Synthetic oligonucleotide
  Sense strand starting at position 3252 of SEQ ID NO: 1232
uguagauaucuggguaauu

SEQ ID NO: 97793 - RNA, 19 nt, Artificial Sequence
  Description of Artificial Sequence: Synthetic oligonucleotide
  Antisense strand to SEQ ID NO: 97712
aauuacccagauaucuaca

SEQ ID NO: 97794 - RNA, 19 nt, Artificial Sequence
  Description of Artificial Sequence: Synthetic oligonucleotide
  Sense strand starting at position 3250 of SEQ ID NO: 1232
gauguagauaucuggguaa

SEQ ID NO: 97795 - RNA, 19 nt, Artificial Sequence
  Description of Artificial Sequence: Synthetic oligonucleotide
  Antisense strand to SEQ ID NO: 97714
uuacccagauaucuacauc

SEQ ID NO: 97796 - RNA, 19 nt, Artificial Sequence
  Description of Artificial Sequence: Synthetic oligonucleotide
  Sense strand starting at position 3249 of SEQ ID NO: 1232
agauguagauaucugggua

SEQ ID NO: 97797 - RNA, 19 nt, Artificial Sequence
  Description of Artificial Sequence: Synthetic oligonucleotide
  Antisense strand to SEQ ID NO: 97716
uacccagauaucuacaucu

SEQ ID NO: 97798 - RNA, 19 nt, Artificial Sequence
  Description of Artificial Sequence: Synthetic oligonucleotide
  Sense strand starting at position 3225 of SEQ ID NO: 1232
guuugaugaagacaagcuu

SEQ ID NO: 97799 - RNA, 19 nt, Artificial Sequence
  Description of Artificial Sequence: Synthetic oligonucleotide
  Antisense strand to SEQ ID NO: 97718
aagcuugucuucaucaaac

SEQ ID NO: 97800 - RNA, 19 nt, Artificial Sequence
  Description of Artificial Sequence: Synthetic oligonucleotide
  Sense strand starting at position 3161 of SEQ ID NO: 1232
gggcaaaugcucugaaaua

SEQ ID NO: 97801 - RNA, 19 nt, Artificial Sequence
  Description of Artificial Sequence: Synthetic oligonucleotide
  Antisense strand to SEQ ID NO: 97720
uauuucagagcauuugccc

SEQ ID NO: 97802 - RNA, 19 nt, Artificial Sequence
  Description of Artificial Sequence: Synthetic oligonucleotide
  Sense strand starting at position 3159 of SEQ ID NO: 1232
augggcaaaugcucugaaa

SEQ ID NO: 97803 - RNA, 19 nt, Artificial Sequence
  Description of Artificial Sequence: Synthetic oligonucleotide
  Antisense strand to SEQ ID NO: 97722
uuucagagcauuugcccau

SEQ ID NO: 97804 - RNA, 19 nt, Artificial Sequence
  Description of Artificial Sequence: Synthetic oligonucleotide
  Sense strand starting at position 3090 of SEQ ID NO: 1232
ugucauauccagggaauag

SEQ ID NO: 97805 - RNA, 19 nt, Artificial Sequence
  Description of Artificial Sequence: Synthetic oligonucleotide
  Antisense strand to SEQ ID NO: 97724
cuauucccuggauaugaca

SEQ ID NO: 97806 - RNA, 19 nt, Artificial Sequence
  Description of Artificial Sequence: Synthetic oligonucleotide
  Sense strand starting at position 3089 of SEQ ID NO: 1232
augucauauccagggaaua

SEQ ID NO: 97807 - RNA, 19 nt, Artificial Sequence
  Description of Artificial Sequence: Synthetic oligonucleotide
  Antisense strand to SEQ ID NO: 97726
uauucccuggauaugacau

SEQ ID NO: 97808 - RNA, 19 nt, Artificial Sequence
  Description of Artificial Sequence: Synthetic oligonucleotide
  Sense strand starting at position 3045 of SEQ ID NO: 1232
auaaucaugugcucaggga

SEQ ID NO: 97809 - RNA, 19 nt, Artificial Sequence
  Description of Artificial Sequence: Synthetic oligonucleotide
  Antisense strand to SEQ ID NO: 97728
ucccugagcacaugauuau

SEQ ID NO: 97810 - RNA, 19 nt, Artificial Sequence
  Description of Artificial Sequence: Synthetic oligonucleotide
  Sense strand starting at position 2784 of SEQ ID NO: 1232
uguaaucauuaacuuguga

SEQ ID NO: 97811 - RNA, 19 nt, Artificial Sequence
  Description of Artificial Sequence: Synthetic oligonucleotide
  Antisense strand to SEQ ID NO: 97730
ucacaaguuaaugauuaca

SEQ ID NO: 97812 - RNA, 19 nt, Artificial Sequence
  Description of Artificial Sequence: Synthetic oligonucleotide
  Sense strand starting at position 2323 of SEQ ID NO: 1232
gggccucagcguuugcaua

SEQ ID NO: 97813 - RNA, 19 nt, Artificial Sequence
  Description of Artificial Sequence: Synthetic oligonucleotide
  Antisense strand to SEQ ID NO: 97732
uaugcaaacgcugaggccc

SEQ ID NO: 97814 - RNA, 19 nt, Artificial Sequence
  Description of Artificial Sequence: Synthetic oligonucleotide
  Sense strand starting at position 2196 of SEQ ID NO: 1232
gcuaucagauaaucuaaag

SEQ ID NO: 97815 - RNA, 19 nt, Artificial Sequence
  Description of Artificial Sequence: Synthetic oligonucleotide
  Antisense strand to SEQ ID NO: 97734
cuuuagauuaucugauagc

SEQ ID NO: 97816 - RNA, 19 nt, Artificial Sequence
  Description of Artificial Sequence: Synthetic oligonucleotide
  Sense strand starting at position 2155 of SEQ ID NO: 1232
auggucugaucuccuugaa

SEQ ID NO: 97817 - RNA, 19 nt, Artificial Sequence
  Description of Artificial Sequence: Synthetic oligonucleotide
  Antisense strand to SEQ ID NO: 97736
uucaaggagaucagaccau

SEQ ID NO: 97818 - RNA, 19 nt, Artificial Sequence
  Description of Artificial Sequence: Synthetic oligonucleotide
  Sense strand starting at position 2021 of SEQ ID NO: 1232
cccuuuagagucgagggaa

SEQ ID NO: 97819 - RNA, 19 nt, Artificial Sequence
  Description of Artificial Sequence: Synthetic oligonucleotide
  Antisense strand to SEQ ID NO: 97738
uucccucgacucuaaaggg

SEQ ID NO: 97820 - RNA, 19 nt, Artificial Sequence
  Description of Artificial Sequence: Synthetic oligonucleotide
  Sense strand starting at position 2011 of SEQ ID NO: 1232
guaaacaggucccuuuaga

SEQ ID NO: 97821 - RNA, 19 nt, Artificial Sequence
  Description of Artificial Sequence: Synthetic oligonucleotide
  Antisense strand to SEQ ID NO: 97740
ucuaaagggaccuguuuac

SEQ ID NO: 97822 - RNA, 19 nt, Artificial Sequence
  Description of Artificial Sequence: Synthetic oligonucleotide
  Sense strand starting at position 1914 of SEQ ID NO: 1232
aggaauggcuggucaggaa

SEQ ID NO: 97823 - RNA, 19 nt, Artificial Sequence
  Description of Artificial Sequence: Synthetic oligonucleotide
  Antisense strand to SEQ ID NO: 97742
uuccugaccagccauuccu

SEQ ID NO: 97824 - RNA, 19 nt, Artificial Sequence
  Description of Artificial Sequence: Synthetic oligonucleotide
  Sense strand starting at position 1609 of SEQ ID NO: 1232
ccuuauccuguugacagua

SEQ ID NO: 97825 - RNA, 19 nt, Artificial Sequence
  Description of Artificial Sequence: Synthetic oligonucleotide
  Antisense strand to SEQ ID NO: 97744
uacugucaacaggauaagg

SEQ ID NO: 97826 - RNA, 19 nt, Artificial Sequence
  Description of Artificial Sequence: Synthetic oligonucleotide
  Sense strand starting at position 1582 of SEQ ID NO: 1232
ggaacucaguaucuuauau

SEQ ID NO: 97827 - RNA, 19 nt, Artificial Sequence
  Description of Artificial Sequence: Synthetic oligonucleotide
  Antisense strand to SEQ ID NO: 97746
auauaagauacugaguucc

SEQ ID NO: 97828 - RNA, 19 nt, Artificial Sequence
  Description of Artificial Sequence: Synthetic oligonucleotide
  Sense strand starting at position 1579 of SEQ ID NO: 1232
cguggaacucaguaucuua

SEQ ID NO: 97829 - RNA, 19 nt, Artificial Sequence
  Description of Artificial Sequence: Synthetic oligonucleotide
  Antisense strand to SEQ ID NO: 97748
uaagauacugaguuccacg

SEQ ID NO: 97830 - RNA, 19 nt, Artificial Sequence
  Description of Artificial Sequence: Synthetic oligonucleotide
  Sense strand starting at position 998 of SEQ ID NO: 1232
uuagaaagagccugagauc

SEQ ID NO: 97831 - RNA, 19 nt, Artificial Sequence
  Description of Artificial Sequence: Synthetic oligonucleotide
  Antisense strand to SEQ ID NO: 97750
gaucucaggcucuuucuaa

SEQ ID NO: 97832 - RNA, 19 nt, Artificial Sequence
  Description of Artificial Sequence: Synthetic oligonucleotide
  Sense strand starting at position 790 of SEQ ID NO: 1232
cagguuaagugacucacaa

SEQ ID NO: 97833 - RNA, 19 nt, Artificial Sequence
  Description of Artificial Sequence: Synthetic oligonucleotide
  Antisense strand to SEQ ID NO: 97752
uugugagucacuuaaccug

SEQ ID NO: 97834 - RNA, 19 nt, Artificial Sequence
  Description of Artificial Sequence: Synthetic oligonucleotide
  Sense strand starting at position 633 of SEQ ID NO: 1232
uuaacugauguguacuaaa

SEQ ID NO: 97835 - RNA, 19 nt, Artificial Sequence
  Description of Artificial Sequence: Synthetic oligonucleotide
  Antisense strand to SEQ ID NO: 97754
uuuaguacacaucaguuaa

SEQ ID NO: 97836 - RNA, 19 nt, Artificial Sequence
  Description of Artificial Sequence: Synthetic oligonucleotide
  Sense strand starting at position 549 of SEQ ID NO: 1232
ggcuuaaacuagguaauau

SEQ ID NO: 97837 - RNA, 19 nt, Artificial Sequence
  Description of Artificial Sequence: Synthetic oligonucleotide
  Antisense strand to SEQ ID NO: 97756
auauuaccuaguuuaagcc

SEQ ID NO: 97838 - RNA, 19 nt, Artificial Sequence
  Description of Artificial Sequence: Synthetic oligonucleotide
  Sense strand starting at position 548 of SEQ ID NO: 1232
aggcuuaaacuagguaaua

SEQ ID NO: 97839 - RNA, 19 nt, Artificial Sequence
  Description of Artificial Sequence: Synthetic oligonucleotide
  Antisense strand to SEQ ID NO: 97758
uauuaccuaguuuaagccu

SEQ ID NO: 97840 - RNA, 19 nt, Artificial Sequence
  Description of Artificial Sequence: Synthetic oligonucleotide
  Sense strand starting at position 320 of SEQ ID NO: 1232
ggaaaucacuuuguuuacu

SEQ ID NO: 97841 - RNA, 19 nt, Artificial Sequence
  Description of Artificial Sequence: Synthetic oligonucleotide
  Antisense strand to SEQ ID NO: 97760
aguaaacaaagugauuucc

SEQ ID NO: 97842 - RNA, 19 nt, Artificial Sequence
  Description of Artificial Sequence: Synthetic oligonucleotide
  Sense strand starting at position 319 of SEQ ID NO: 1232
gggaaaucacuuuguuuac

SEQ ID NO: 97843 - RNA, 19 nt, Artificial Sequence
  Description of Artificial Sequence: Synthetic oligonucleotide
  Antisense strand to SEQ ID NO: 97762
guaaacaaagugauuuccc

SEQ ID NO: 97844 - RNA, 19 nt, Artificial Sequence
  Description of Artificial Sequence: Synthetic oligonucleotide
  Sense strand starting at position 194 of SEQ ID NO: 1232
aguugaaguuacuugaaca

SEQ ID NO: 97845 - RNA, 19 nt, Artificial Sequence
  Description of Artificial Sequence: Synthetic oligonucleotide
  Antisense strand to SEQ ID NO: 97764
uguucaaguaacuucaacu

SEQ ID NO: 97846 - RNA, 19 nt, Artificial Sequence
  Description of Artificial Sequence: Synthetic oligonucleotide
  Sense strand starting at position 186 of SEQ ID NO: 1232
gauagagcaguugaaguua

SEQ ID NO: 97847 - RNA, 19 nt, Artificial Sequence
  Description of Artificial Sequence: Synthetic oligonucleotide
  Antisense strand to SEQ ID NO: 97766
uaacuucaacugcucuauc

SEQ ID NO: 97848 - RNA, 19 nt, Artificial Sequence
  Description of Artificial Sequence: Synthetic oligonucleotide
  Sense strand starting at position 137 of SEQ ID NO: 1232
uguuuaggauuucugcuau

SEQ ID NO: 97849 - RNA, 19 nt, Artificial Sequence
  Description of Artificial Sequence: Synthetic oligonucleotide
  Antisense strand to SEQ ID NO: 97768
auagcagaaauccuaaaca

SEQ ID NO: 97850 - RNA, 19 nt, Artificial Sequence
  Description of Artificial Sequence: Synthetic oligonucleotide
  Sense strand starting at position 129 of SEQ ID NO: 1232
ucgaacacuguuuaggauu

SEQ ID NO: 97851 - RNA, 19 nt, Artificial Sequence
  Description of Artificial Sequence: Synthetic oligonucleotide
  Antisense strand to SEQ ID NO: 97770
aauccuaaacaguguucga

SEQ ID NO: 97852 - RNA, 19 nt, Artificial Sequence
  Description of Artificial Sequence: Synthetic oligonucleotide
  Sense strand starting at position 3870 of SEQ ID NO: 1233
aggccuccucccggagaaa

SEQ ID NO: 97853 - RNA, 19 nt, Artificial Sequence
  Description of Artificial Sequence: Synthetic oligonucleotide
  Antisense strand to SEQ ID NO: 97772
uuucuccgggaggaggccu

SEQ ID NO: 97854 - RNA, 19 nt, Artificial Sequence
  Description of Artificial Sequence: Synthetic oligonucleotide
  Sense strand starting at position 3716 of SEQ ID NO: 1233
agccucaaccucugggaaa

SEQ ID NO: 97855 - RNA, 19 nt, Artificial Sequence
  Description of Artificial Sequence: Synthetic oligonucleotide
  Antisense strand to SEQ ID NO: 97774
uuucccagagguugaggcu

SEQ ID NO: 97856 - RNA, 19 nt, Artificial Sequence
  Description of Artificial Sequence: Synthetic oligonucleotide
  Sense strand starting at position 3382 of SEQ ID NO: 1233
ucucgaaucugagccuaga

SEQ ID NO: 97857 - RNA, 19 nt, Artificial Sequence
  Description of Artificial Sequence: Synthetic oligonucleotide
  Antisense strand to SEQ ID NO: 97776
ucuaggcucagauucgaga

SEQ ID NO: 97858 - RNA, 19 nt, Artificial Sequence
  Description of Artificial Sequence: Synthetic oligonucleotide
  Sense strand starting at position 3262 of SEQ ID NO: 1233
gagggcaagagcuguugau

SEQ ID NO: 97859 - RNA, 19 nt, Artificial Sequence
  Description of Artificial Sequence: Synthetic oligonucleotide
  Antisense strand to SEQ ID NO: 97778
aucaacagcucuugcccuc

SEQ ID NO: 97860 - RNA, 19 nt, Artificial Sequence
  Description of Artificial Sequence: Synthetic oligonucleotide
  Sense strand starting at position 3158 of SEQ ID NO: 1233
gcuccaucagagcacaaau

SEQ ID NO: 97861 - RNA, 19 nt, Artificial Sequence
  Description of Artificial Sequence: Synthetic oligonucleotide
  Antisense strand to SEQ ID NO: 97780
auuugugcucugauggagc

SEQ ID NO: 97862 - RNA, 19 nt, Artificial Sequence
  Description of Artificial Sequence: Synthetic oligonucleotide
  Sense strand starting at position 3024 of SEQ ID NO: 1233
uggagagaguugagugaaa

SEQ ID NO: 97863 - RNA, 19 nt, Artificial Sequence
  Description of Artificial Sequence: Synthetic oligonucleotide
  Antisense strand to SEQ ID NO: 97782
uuucacucaacucucucca

SEQ ID NO: 97864 - RNA, 19 nt, Artificial Sequence
  Description of Artificial Sequence: Synthetic oligonucleotide
  Sense strand starting at position 2901 of SEQ ID NO: 1233
caggcauuagauuaaaugu

SEQ ID NO: 97865 - RNA, 19 nt, Artificial Sequence
  Description of Artificial Sequence: Synthetic oligonucleotide
  Antisense strand to SEQ ID NO: 97784
acauuuaaucuaaugccug

SEQ ID NO: 97866 - RNA, 19 nt, Artificial Sequence
  Description of Artificial Sequence: Synthetic oligonucleotide
  Sense strand starting at position 2896 of SEQ ID NO: 1233
cccagcaggcauuagauua

SEQ ID NO: 97867 - RNA, 19 nt, Artificial Sequence
  Description of Artificial Sequence: Synthetic oligonucleotide
  Antisense strand to SEQ ID NO: 97786
uaaucuaaugccugcuggg

SEQ ID NO: 97868 - RNA, 19 nt, Artificial Sequence
  Description of Artificial Sequence: Synthetic oligonucleotide
  Sense strand starting at position 2710 of SEQ ID NO: 1233
guaagacagaccuggguau

SEQ ID NO: 97869 - RNA, 19 nt, Artificial Sequence
  Description of Artificial Sequence: Synthetic oligonucleotide
  Antisense strand to SEQ ID NO: 97788
auacccaggucugucuuac

SEQ ID NO: 97870 - RNA, 19 nt, Artificial Sequence
  Description of Artificial Sequence: Synthetic oligonucleotide
  Sense strand starting at position 2669 of SEQ ID NO: 1233
cugucuccagcagauauau

SEQ ID NO: 97871 - RNA, 19 nt, Artificial Sequence
  Description of Artificial Sequence: Synthetic oligonucleotide
  Antisense strand to SEQ ID NO: 97790
auauaucugcuggagacag

SEQ ID NO: 97872 - RNA, 19 nt, Artificial Sequence
  Description of Artificial Sequence: Synthetic oligonucleotide
  Sense strand starting at position 2667 of SEQ ID NO: 1233
cucugucuccagcagauau

SEQ ID NO: 97873 - RNA, 19 nt, Artificial Sequence
  Description of Artificial Sequence: Synthetic oligonucleotide
  Antisense strand to SEQ ID NO: 97792
auaucugcuggagacagag

SEQ ID NO: 97874 - RNA, 19 nt, Artificial Sequence
  Description of Artificial Sequence: Synthetic oligonucleotide
  Sense strand starting at position 2591 of SEQ ID NO: 1233
gcuaaagcaugaucucaau

SEQ ID NO: 97875 - RNA, 19 nt, Artificial Sequence
  Description of Artificial Sequence: Synthetic oligonucleotide
  Antisense strand to SEQ ID NO: 97794
auugagaucaugcuuuagc

SEQ ID NO: 97876 - RNA, 19 nt, Artificial Sequence
  Description of Artificial Sequence: Synthetic oligonucleotide
  Sense strand starting at position 2454 of SEQ ID NO: 1233
auguaaagugcuuaauagu

SEQ ID NO: 97877 - RNA, 19 nt, Artificial Sequence
  Description of Artificial Sequence: Synthetic oligonucleotide
  Antisense strand to SEQ ID NO: 97796
acuauuaagcacuuuacau

SEQ ID NO: 97878 - RNA, 19 nt, Artificial Sequence
  Description of Artificial Sequence: Synthetic oligonucleotide
  Sense strand starting at position 2453 of SEQ ID NO: 1233
cauguaaagugcuuaauag

SEQ ID NO: 97879 - RNA, 19 nt, Artificial Sequence
  Description of Artificial Sequence: Synthetic oligonucleotide
  Antisense strand to SEQ ID NO: 97798
cuauuaagcacuuuacaug

SEQ ID NO: 97880 - RNA, 19 nt, Artificial Sequence
  Description of Artificial Sequence: Synthetic oligonucleotide
  Sense strand starting at position 2443 of SEQ ID NO: 1233
cuuaauccugcauguaaag

SEQ ID NO: 97881 - RNA, 19 nt, Artificial Sequence
  Description of Artificial Sequence: Synthetic oligonucleotide
  Antisense strand to SEQ ID NO: 97800
cuuuacaugcaggauuaag

SEQ ID NO: 97882 - RNA, 19 nt, Artificial Sequence
  Description of Artificial Sequence: Synthetic oligonucleotide
  Sense strand starting at position 2433 of SEQ ID NO: 1233
auguaaagugcuuaauccu

SEQ ID NO: 97883 - RNA, 19 nt, Artificial Sequence
  Description of Artificial Sequence: Synthetic oligonucleotide
  Antisense strand to SEQ ID NO: 97802
aggauuaagcacuuuacau

SEQ ID NO: 97884 - RNA, 19 nt, Artificial Sequence
  Description of Artificial Sequence: Synthetic oligonucleotide
  Sense strand starting at position 2400 of SEQ ID NO: 1233
guuagaaccuagcccuaua

SEQ ID NO: 97885 - RNA, 19 nt, Artificial Sequence
  Description of Artificial Sequence: Synthetic oligonucleotide
  Antisense strand to SEQ ID NO: 97804
uauagggcuagguucuaac

SEQ ID NO: 97886 - RNA, 19 nt, Artificial Sequence
  Description of Artificial Sequence: Synthetic oligonucleotide
  Sense strand starting at position 2175 of SEQ ID NO: 1233
ugugaugaugucuauaaau

SEQ ID NO: 97887 - RNA, 19 nt, Artificial Sequence
  Description of Artificial Sequence: Synthetic oligonucleotide
  Antisense strand to SEQ ID NO: 97806
auuuauagacaucaucaca

SEQ ID NO: 97888 - RNA, 19 nt, Artificial Sequence
  Description of Artificial Sequence: Synthetic oligonucleotide
  Sense strand starting at position 2174 of SEQ ID NO: 1233
augugaugaugucuauaaa

SEQ ID NO: 97889 - RNA, 19 nt, Artificial Sequence
  Description of Artificial Sequence: Synthetic oligonucleotide
  Antisense strand to SEQ ID NO: 97808
uuuauagacaucaucacau

SEQ ID NO: 97890 - RNA, 19 nt, Artificial Sequence
  Description of Artificial Sequence: Synthetic oligonucleotide
  Sense strand starting at position 2165 of SEQ ID NO: 1233
ggauauuauaugugaugau

SEQ ID NO: 97891 - RNA, 19 nt, Artificial Sequence
  Description of Artificial Sequence: Synthetic oligonucleotide
  Antisense strand to SEQ ID NO: 97810
aucaucacauauaauaucc

SEQ ID NO: 97892 - RNA, 19 nt, Artificial Sequence
  Description of Artificial Sequence: Synthetic oligonucleotide
  Sense strand starting at position 2016 of SEQ ID NO: 1233
ggugaaugugagcagacaa

SEQ ID NO: 97893 - RNA, 19 nt, Artificial Sequence
  Description of Artificial Sequence: Synthetic oligonucleotide
  Antisense strand to SEQ ID NO: 97812
uugucugcucacauucacc

SEQ ID NO: 97894 - RNA, 19 nt, Artificial Sequence
  Description of Artificial Sequence: Synthetic oligonucleotide
  Sense strand starting at position 2015 of SEQ ID NO: 1233
gggugaaugugagcagaca

SEQ ID NO: 97895 - RNA, 19 nt, Artificial Sequence
  Description of Artificial Sequence: Synthetic oligonucleotide
  Antisense strand to SEQ ID NO: 97814
ugucugcucacauucaccc

SEQ ID NO: 97896 - RNA, 19 nt, Artificial Sequence
  Description of Artificial Sequence: Synthetic oligonucleotide
  Sense strand starting at position 1577 of SEQ ID NO: 1233
acgucuuuccaagaauaau

SEQ ID NO: 97897 - RNA, 19 nt, Artificial Sequence
  Description of Artificial Sequence: Synthetic oligonucleotide
  Antisense strand to SEQ ID NO: 97816
auuauucuuggaaagacgu

SEQ ID NO: 97898 - RNA, 19 nt, Artificial Sequence
  Description of Artificial Sequence: Synthetic oligonucleotide
  Sense strand starting at position 1274 of SEQ ID NO: 1233
agcagcauugucuaauaua

SEQ ID NO: 97899 - RNA, 19 nt, Artificial Sequence
  Description of Artificial Sequence: Synthetic oligonucleotide
  Antisense strand to SEQ ID NO: 97818
uauauuagacaaugcugcu

SEQ ID NO: 97900 - RNA, 19 nt, Artificial Sequence
  Description of Artificial Sequence: Synthetic oligonucleotide
  Sense strand starting at position 1158 of SEQ ID NO: 1233
gugugaaaggucagcaugu

SEQ ID NO: 97901 - RNA, 19 nt, Artificial Sequence
  Description of Artificial Sequence: Synthetic oligonucleotide
  Antisense strand to SEQ ID NO: 97820
acaugcugaccuuucacac

SEQ ID NO: 97902 - RNA, 19 nt, Artificial Sequence
  Description of Artificial Sequence: Synthetic oligonucleotide
  Sense strand starting at position 1146 of SEQ ID NO: 1233
agccuucacgucgugugaa

SEQ ID NO: 97903 - RNA, 19 nt, Artificial Sequence
  Description of Artificial Sequence: Synthetic oligonucleotide
  Antisense strand to SEQ ID NO: 97822
uucacacgacgugaaggcu

SEQ ID NO: 97904 - RNA, 19 nt, Artificial Sequence
  Description of Artificial Sequence: Synthetic oligonucleotide
  Sense strand starting at position 867 of SEQ ID NO: 1233
ggaagcaucuccuuuauug

SEQ ID NO: 97905 - RNA, 19 nt, Artificial Sequence
  Description of Artificial Sequence: Synthetic oligonucleotide
  Antisense strand to SEQ ID NO: 97824
caauaaaggagaugcuucc

SEQ ID NO: 97906 - RNA, 19 nt, Artificial Sequence
  Description of Artificial Sequence: Synthetic oligonucleotide
  Sense strand starting at position 750 of SEQ ID NO: 1233
ggugaugucacugaauuag

SEQ ID NO: 97907 - RNA, 19 nt, Artificial Sequence
  Description of Artificial Sequence: Synthetic oligonucleotide
  Antisense strand to SEQ ID NO: 97826
cuaauucagugacaucacc

SEQ ID NO: 97908 - RNA, 19 nt, Artificial Sequence
  Description of Artificial Sequence: Synthetic oligonucleotide
  Sense strand starting at position 749 of SEQ ID NO: 1233
gggugaugucacugaauua

SEQ ID NO: 97909 - RNA, 19 nt, Artificial Sequence
  Description of Artificial Sequence: Synthetic oligonucleotide
  Antisense strand to SEQ ID NO: 97828
uaauucagugacaucaccc

SEQ ID NO: 97910 - RNA, 19 nt, Artificial Sequence
  Description of Artificial Sequence: Synthetic oligonucleotide
  Sense strand starting at position 635 of SEQ ID NO: 1233
auuaaaugcucauuggaag

SEQ ID NO: 97911 - RNA, 19 nt, Artificial Sequence
  Description of Artificial Sequence: Synthetic oligonucleotide
  Antisense strand to SEQ ID NO: 97830
cuuccaaugagcauuuaau

SEQ ID NO: 97912 - RNA, 19 nt, Artificial Sequence
  Description of Artificial Sequence: Synthetic oligonucleotide
  Sense strand starting at position 633 of SEQ ID NO: 1233
cuauuaaaugcucauugga

SEQ ID NO: 97913 - RNA, 19 nt, Artificial Sequence
  Description of Artificial Sequence: Synthetic oligonucleotide
  Antisense strand to SEQ ID NO: 97832
uccaaugagcauuuaauag

SEQ ID NO: 97914 - RNA, 19 nt, Artificial Sequence
  Description of Artificial Sequence: Synthetic oligonucleotide
  Sense strand starting at position 588 of SEQ ID NO: 1233
cuauuagucacguggagga

SEQ ID NO: 97915 - RNA, 19 nt, Artificial Sequence
  Description of Artificial Sequence: Synthetic oligonucleotide
  Antisense strand to SEQ ID NO: 97834
uccuccacgugacuaauag

SEQ ID NO: 97916 - RNA, 19 nt, Artificial Sequence
  Description of Artificial Sequence: Synthetic oligonucleotide
  Sense strand starting at position 555 of SEQ ID NO: 1233
guucuugagguuuguauuu

SEQ ID NO: 97917 - RNA, 19 nt, Artificial Sequence
  Description of Artificial Sequence: Synthetic oligonucleotide
  Antisense strand to SEQ ID NO: 97836
aaauacaaaccucaagaac

SEQ ID NO: 97918 - RNA, 19 nt, Artificial Sequence
  Description of Artificial Sequence: Synthetic oligonucleotide
  Sense strand starting at position 549 of SEQ ID NO: 1233
auauguguucuugagguuu

SEQ ID NO: 97919 - RNA, 19 nt, Artificial Sequence
  Description of Artificial Sequence: Synthetic oligonucleotide
  Antisense strand to SEQ ID NO: 97838
aaaccucaagaacacauau

SEQ ID NO: 97920 - RNA, 19 nt, Artificial Sequence
  Description of Artificial Sequence: Synthetic oligonucleotide
  Sense strand starting at position 454 of SEQ ID NO: 1233
agccgaguaauagaauuag

SEQ ID NO: 97921 - RNA, 19 nt, Artificial Sequence
  Description of Artificial Sequence: Synthetic oligonucleotide
  Antisense strand to SEQ ID NO: 97840
cuaauucuauuacucggcu

SEQ ID NO: 97922 - RNA, 19 nt, Artificial Sequence
  Description of Artificial Sequence: Synthetic oligonucleotide
  Sense strand starting at position 402 of SEQ ID NO: 1233
ugcugaagccuugauucca

SEQ ID NO: 97923 - RNA, 19 nt, Artificial Sequence
  Description of Artificial Sequence: Synthetic oligonucleotide
  Antisense strand to SEQ ID NO: 97842
uggaaucaaggcuucagca

SEQ ID NO: 97924 - RNA, 19 nt, Artificial Sequence
  Description of Artificial Sequence: Synthetic oligonucleotide
  Sense strand starting at position 246 of SEQ ID NO: 1233
cagcaucuugcagagaaga

SEQ ID NO: 97925 - RNA, 19 nt, Artificial Sequence
  Description of Artificial Sequence: Synthetic oligonucleotide
  Antisense strand to SEQ ID NO: 97844
ucuucucugcaagaugcug

SEQ ID NO: 97926 - RNA, 19 nt, Artificial Sequence
  Description of Artificial Sequence: Synthetic oligonucleotide
  Sense strand starting at position 111 of SEQ ID NO: 1233
gguuaacugcuacauugaa

SEQ ID NO: 97927 - RNA, 19 nt, Artificial Sequence
  Description of Artificial Sequence: Synthetic oligonucleotide
  Antisense strand to SEQ ID NO: 97846
uucaauguagcaguuaacc

SEQ ID NO: 97928 - RNA, 19 nt, Artificial Sequence
  Description of Artificial Sequence: Synthetic oligonucleotide
  Sense strand starting at position 8 of SEQ ID NO: 1233
ugaucucuagcauguacaa

SEQ ID NO: 97929 - RNA, 19 nt, Artificial Sequence
  Description of Artificial Sequence: Synthetic oligonucleotide
  Antisense strand to SEQ ID NO: 97848
uuguacaugcuagagauca

SEQ ID NO: 97930 - RNA, 19 nt, Artificial Sequence
  Description of Artificial Sequence: Synthetic oligonucleotide
  Sense strand starting at position 3 of SEQ ID NO: 1233
ccaauugaucucuagcaug

SEQ ID NO: 97931 - RNA, 19 nt, Artificial Sequence
  Description of Artificial Sequence: Synthetic oligonucleotide
  Antisense strand to SEQ ID NO: 97850
caugcuagagaucaauugg

SEQ ID NO: 97932 - RNA, 19 nt, Artificial Sequence
  Description of Artificial Sequence: Synthetic oligonucleotide
  Sense strand starting at position 83 of SEQ ID NO: 1234
cugugcugucuauggagua

SEQ ID NO: 97933 - RNA, 19 nt, Artificial Sequence
  Description of Artificial Sequence: Synthetic oligonucleotide
  Antisense strand to SEQ ID NO: 97852
uacuccauagacagcacag

SEQ ID NO: 97934 - RNA, 19 nt, Artificial Sequence
  Description of Artificial Sequence: Synthetic oligonucleotide
  Sense strand starting at position 334 of SEQ ID NO: 1234
guggcucuucugcuugcaa

SEQ ID NO: 97935 - RNA, 19 nt, Artificial Sequence
  Description of Artificial Sequence: Synthetic oligonucleotide
  Antisense strand to SEQ ID NO: 97854
uugcaagcagaagagccac

SEQ ID NO: 97936 - RNA, 19 nt, Artificial Sequence
  Description of Artificial Sequence: Synthetic oligonucleotide
  Sense strand starting at position 463 of SEQ ID NO: 1234
ucaugcuuugucuguaaug

SEQ ID NO: 97937 - RNA, 19 nt, Artificial Sequence
  Description of Artificial Sequence: Synthetic oligonucleotide
  Antisense strand to SEQ ID NO: 97856
cauuacagacaaagcauga

SEQ ID NO: 97938 - RNA, 19 nt, Artificial Sequence
  Description of Artificial Sequence: Synthetic oligonucleotide
  Sense strand starting at position 464 of SEQ ID NO: 1234
caugcuuugucuguaaugu

SEQ ID NO: 97939 - RNA, 19 nt, Artificial Sequence
  Description of Artificial Sequence: Synthetic oligonucleotide
  Antisense strand to SEQ ID NO: 97858
acauuacagacaaagcaug

SEQ ID NO: 97940 - RNA, 19 nt, Artificial Sequence
  Description of Artificial Sequence: Synthetic oligonucleotide
  Sense strand starting at position 465 of SEQ ID NO: 1234
augcuuugucuguaaugug

SEQ ID NO: 97941 - RNA, 19 nt, Artificial Sequence
  Description of Artificial Sequence: Synthetic oligonucleotide
  Antisense strand to SEQ ID NO: 97860
cacauuacagacaaagcau

SEQ ID NO: 97942 - RNA, 19 nt, Artificial Sequence
  Description of Artificial Sequence: Synthetic oligonucleotide
  Sense strand starting at position 473 of SEQ ID NO: 1234
ucuguaaugugcuuuacuu

SEQ ID NO: 97943 - RNA, 19 nt, Artificial Sequence
  Description of Artificial Sequence: Synthetic oligonucleotide
  Antisense strand to SEQ ID NO: 97862
aaguaaagcacauuacaga

SEQ ID NO: 97944 - RNA, 19 nt, Artificial Sequence
  Description of Artificial Sequence: Synthetic oligonucleotide
  Sense strand starting at position 585 of SEQ ID NO: 1234
cagggauucuuguccaugu

SEQ ID NO: 97945 - RNA, 19 nt, Artificial Sequence
  Description of Artificial Sequence: Synthetic oligonucleotide
  Antisense strand to SEQ ID NO: 97864
acauggacaagaaucccug

SEQ ID NO: 97946 - RNA, 19 nt, Artificial Sequence
  Description of Artificial Sequence: Synthetic oligonucleotide
  Sense strand starting at position 586 of SEQ ID NO: 1234
agggauucuuguccauguu

SEQ ID NO: 97947 - RNA, 19 nt, Artificial Sequence
  Description of Artificial Sequence: Synthetic oligonucleotide
  Antisense strand to SEQ ID NO: 97866
aacauggacaagaaucccu

SEQ ID NO: 97948 - RNA, 19 nt, Artificial Sequence
  Description of Artificial Sequence: Synthetic oligonucleotide
  Sense strand starting at position 594 of SEQ ID NO: 1234
uuguccauguuguuuacua

SEQ ID NO: 97949 - RNA, 19 nt, Artificial Sequence
  Description of Artificial Sequence: Synthetic oligonucleotide
  Antisense strand to SEQ ID NO: 97868
uaguaaacaacauggacaa

SEQ ID NO: 97950 - RNA, 19 nt, Artificial Sequence
  Description of Artificial Sequence: Synthetic oligonucleotide
  Sense strand starting at position 637 of SEQ ID NO: 1234
guagguguucaauagguau

SEQ ID NO: 97951 - RNA, 19 nt, Artificial Sequence
  Description of Artificial Sequence: Synthetic oligonucleotide
  Antisense strand to SEQ ID NO: 97870
auaccuauugaacaccuac

SEQ ID NO: 97952 - RNA, 19 nt, Artificial Sequence
  Description of Artificial Sequence: Synthetic oligonucleotide
  Sense strand starting at position 650 of SEQ ID NO: 1234
agguauuuaugggauggau

SEQ ID NO: 97953 - RNA, 19 nt, Artificial Sequence
  Description of Artificial Sequence: Synthetic oligonucleotide
  Antisense strand to SEQ ID NO: 97872
auccaucccauaaauaccu

SEQ ID NO: 97954 - RNA, 19 nt, Artificial Sequence
  Description of Artificial Sequence: Synthetic oligonucleotide
  Sense strand starting at position 796 of SEQ ID NO: 1234
uuagaaacguuaucuccuu

SEQ ID NO: 97955 - RNA, 19 nt, Artificial Sequence
  Description of Artificial Sequence: Synthetic oligonucleotide
  Antisense strand to SEQ ID NO: 97874
aaggagauaacguuucuaa

SEQ ID NO: 97956 - RNA, 19 nt, Artificial Sequence
  Description of Artificial Sequence: Synthetic oligonucleotide
  Sense strand starting at position 802 of SEQ ID NO: 1234
acguuaucuccuuacacag

SEQ ID NO: 97957 - RNA, 19 nt, Artificial Sequence
  Description of Artificial Sequence: Synthetic oligonucleotide
  Antisense strand to SEQ ID NO: 97876
cuguguaaggagauaacgu

SEQ ID NO: 97958 - RNA, 19 nt, Artificial Sequence
  Description of Artificial Sequence: Synthetic oligonucleotide
  Sense strand starting at position 834 of SEQ ID NO: 1234
cgccuagaacacugaaauu

SEQ ID NO: 97959 - RNA, 19 nt, Artificial Sequence
  Description of Artificial Sequence: Synthetic oligonucleotide
  Antisense strand to SEQ ID NO: 97878
aauuucaguguucuaggcg

SEQ ID NO: 97960 - RNA, 19 nt, Artificial Sequence
  Description of Artificial Sequence: Synthetic oligonucleotide
  Sense strand starting at position 854 of SEQ ID NO: 1234
agguauaaucaugagcuca

SEQ ID NO: 97961 - RNA, 19 nt, Artificial Sequence
  Description of Artificial Sequence: Synthetic oligonucleotide
  Antisense strand to SEQ ID NO: 97880
ugagcucaugauuauaccu

SEQ ID NO: 97962 - RNA, 19 nt, Artificial Sequence
  Description of Artificial Sequence: Synthetic oligonucleotide
  Sense strand starting at position 856 of SEQ ID NO: 1234
guauaaucaugagcucaga

SEQ ID NO: 97963 - RNA, 19 nt, Artificial Sequence
  Description of Artificial Sequence: Synthetic oligonucleotide
  Antisense strand to SEQ ID NO: 97882
ucugagcucaugauuauac

SEQ ID NO: 97964 - RNA, 19 nt, Artificial Sequence
  Description of Artificial Sequence: Synthetic oligonucleotide
  Sense strand starting at position 859 of SEQ ID NO: 1234
uaaucaugagcucagaggu

SEQ ID NO: 97965 - RNA, 19 nt, Artificial Sequence
  Description of Artificial Sequence: Synthetic oligonucleotide
  Antisense strand to SEQ ID NO: 97884
accucugagcucaugauua

SEQ ID NO: 97966 - RNA, 19 nt, Artificial Sequence
  Description of Artificial Sequence: Synthetic oligonucleotide
  Sense strand starting at position 882 of SEQ ID NO: 1234
cgacuugcucgaggucaua

SEQ ID NO: 97967 - RNA, 19 nt, Artificial Sequence
  Description of Artificial Sequence: Synthetic oligonucleotide
  Antisense strand to SEQ ID NO: 97886
uaugaccucgagcaagucg

SEQ ID NO: 97968 - RNA, 19 nt, Artificial Sequence
  Description of Artificial Sequence: Synthetic oligonucleotide
  Sense strand starting at position 940 of SEQ ID NO: 1234
acggcagaacuguguucua

SEQ ID NO: 97969 - RNA, 19 nt, Artificial Sequence
  Description of Artificial Sequence: Synthetic oligonucleotide
  Antisense strand to SEQ ID NO: 97888
uagaacacaguucugccgu

SEQ ID NO: 97970 - RNA, 19 nt, Artificial Sequence
  Description of Artificial Sequence: Synthetic oligonucleotide
  Sense strand starting at position 1123 of SEQ ID NO: 1234
ucgugaguuaugggaggca

SEQ ID NO: 97971 - RNA, 19 nt, Artificial Sequence
  Description of Artificial Sequence: Synthetic oligonucleotide
  Antisense strand to SEQ ID NO: 97890
ugccucccauaacucacga

SEQ ID NO: 97972 - RNA, 19 nt, Artificial Sequence
  Description of Artificial Sequence: Synthetic oligonucleotide
  Sense strand starting at position 1568 of SEQ ID NO: 1234
gacagucuaggcggaauaa

SEQ ID NO: 97973 - RNA, 19 nt, Artificial Sequence
  Description of Artificial Sequence: Synthetic oligonucleotide
  Antisense strand to SEQ ID NO: 97892
uuauuccgccuagacuguc

SEQ ID NO: 97974 - RNA, 19 nt, Artificial Sequence
  Description of Artificial Sequence: Synthetic oligonucleotide
  Sense strand starting at position 1569 of SEQ ID NO: 1234
acagucuaggcggaauaau

SEQ ID NO: 97975 - RNA, 19 nt, Artificial Sequence
  Description of Artificial Sequence: Synthetic oligonucleotide
  Antisense strand to SEQ ID NO: 97894
auuauuccgccuagacugu

SEQ ID NO: 97976 - RNA, 19 nt, Artificial Sequence
  Description of Artificial Sequence: Synthetic oligonucleotide
  Sense strand starting at position 2674 of SEQ ID NO: 1234
ggaagaagucuucgaagac

SEQ ID NO: 97977 - RNA, 19 nt, Artificial Sequence
  Description of Artificial Sequence: Synthetic oligonucleotide
  Antisense strand to SEQ ID NO: 97896
gucuucgaagacuucuucc

SEQ ID NO: 97978 - RNA, 19 nt, Artificial Sequence
  Description of Artificial Sequence: Synthetic oligonucleotide
  Sense strand starting at position 2675 of SEQ ID NO: 1234
gaagaagucuucgaagacu

SEQ ID NO: 97979 - RNA, 19 nt, Artificial Sequence
  Description of Artificial Sequence: Synthetic oligonucleotide
  Antisense strand to SEQ ID NO: 97898
agucuucgaagacuucuuc

SEQ ID NO: 97980 - RNA, 19 nt, Artificial Sequence
  Description of Artificial Sequence: Synthetic oligonucleotide
  Sense strand starting at position 3144 of SEQ ID NO: 1234
guacuaugcaucuggaguc

SEQ ID NO: 97981 - RNA, 19 nt, Artificial Sequence
  Description of Artificial Sequence: Synthetic oligonucleotide
  Antisense strand to SEQ ID NO: 97900
gacuccagaugcauaguac

SEQ ID NO: 97982 - RNA, 19 nt, Artificial Sequence
  Description of Artificial Sequence: Synthetic oligonucleotide
  Sense strand starting at position 3180 of SEQ ID NO: 1234
gggagugaucucggacaaa

SEQ ID NO: 97983 - RNA, 19 nt, Artificial Sequence
  Description of Artificial Sequence: Synthetic oligonucleotide
  Antisense strand to SEQ ID NO: 97902
uuuguccgagaucacuccc

SEQ ID NO: 97984 - RNA, 19 nt, Artificial Sequence
  Description of Artificial Sequence: Synthetic oligonucleotide
  Sense strand starting at position 3246 of SEQ ID NO: 1234
ggugcuagucccuaccuau

SEQ ID NO: 97985 - RNA, 19 nt, Artificial Sequence
  Description of Artificial Sequence: Synthetic oligonucleotide
  Antisense strand to SEQ ID NO: 97904
auagguagggacuagcacc

SEQ ID NO: 97986 - RNA, 19 nt, Artificial Sequence
  Description of Artificial Sequence: Synthetic oligonucleotide
  Sense strand starting at position 3386 of SEQ ID NO: 1234
agaaauggaucucaaaguc

SEQ ID NO: 97987 - RNA, 19 nt, Artificial Sequence
  Description of Artificial Sequence: Synthetic oligonucleotide
  Antisense strand to SEQ ID NO: 97906
gacuuugagauccauuucu

SEQ ID NO: 97988 - RNA, 19 nt, Artificial Sequence
  Description of Artificial Sequence: Synthetic oligonucleotide
  Sense strand starting at position 3599 of SEQ ID NO: 1234
aaaugagaucaguguggcu

SEQ ID NO: 97989 - RNA, 19 nt, Artificial Sequence
  Description of Artificial Sequence: Synthetic oligonucleotide
  Antisense strand to SEQ ID NO: 97908
agccacacugaucucauuu

SEQ ID NO: 97990 - RNA, 19 nt, Artificial Sequence
  Description of Artificial Sequence: Synthetic oligonucleotide
  Sense strand starting at position 3601 of SEQ ID NO: 1234
augagaucaguguggcuga

SEQ ID NO: 97991 - RNA, 19 nt, Artificial Sequence
  Description of Artificial Sequence: Synthetic oligonucleotide
  Antisense strand to SEQ ID NO: 97910
ucagccacacugaucucau

SEQ ID NO: 97992 - RNA, 19 nt, Artificial Sequence
  Description of Artificial Sequence: Synthetic oligonucleotide
  Sense strand starting at position 3622 of SEQ ID NO: 1234
ugguguugccaacaacuga

SEQ ID NO: 97993 - RNA, 19 nt, Artificial Sequence
  Description of Artificial Sequence: Synthetic oligonucleotide
  Antisense strand to SEQ ID NO: 97912
ucaguuguuggcaacacca

SEQ ID NO: 97994 - RNA, 19 nt, Artificial Sequence
  Description of Artificial Sequence: Synthetic oligonucleotide
  Sense strand starting at position 3683 of SEQ ID NO: 1234
accucagucuuggcuugau

SEQ ID NO: 97995 - RNA, 19 nt, Artificial Sequence
  Description of Artificial Sequence: Synthetic oligonucleotide
  Antisense strand to SEQ ID NO: 97914
aucaagccaagacugaggu

SEQ ID NO: 97996 - RNA, 19 nt, Artificial Sequence
  Description of Artificial Sequence: Synthetic oligonucleotide
  Sense strand starting at position 3692 of SEQ ID NO: 1234
uuggcuugaugccuuuaau

SEQ ID NO: 97997 - RNA, 19 nt, Artificial Sequence
  Description of Artificial Sequence: Synthetic oligonucleotide
  Antisense strand to SEQ ID NO: 97916
auuaaaggcaucaagccaa

SEQ ID NO: 97998 - RNA, 19 nt, Artificial Sequence
  Description of Artificial Sequence: Synthetic oligonucleotide
  Sense strand starting at position 3695 of SEQ ID NO: 1234
gcuugaugccuuuaauagc

SEQ ID NO: 97999 - RNA, 19 nt, Artificial Sequence
  Description of Artificial Sequence: Synthetic oligonucleotide
  Antisense strand to SEQ ID NO: 97918
gcuauuaaaggcaucaagc

SEQ ID NO: 98000 - RNA, 19 nt, Artificial Sequence
  Description of Artificial Sequence: Synthetic oligonucleotide
  Sense strand starting at position 3803 of SEQ ID NO: 1234
cacugucuagguggucaua

SEQ ID NO: 98001 - RNA, 19 nt, Artificial Sequence
  Description of Artificial Sequence: Synthetic oligonucleotide
  Antisense strand to SEQ ID NO: 97920
uaugaccaccuagacagug

SEQ ID NO: 98002 - RNA, 19 nt, Artificial Sequence
  Description of Artificial Sequence: Synthetic oligonucleotide
  Sense strand starting at position 3806 of SEQ ID NO: 1234
ugucuagguggucauaaca

SEQ ID NO: 98003 - RNA, 19 nt, Artificial Sequence
  Description of Artificial Sequence: Synthetic oligonucleotide
  Antisense strand to SEQ ID NO: 97922
uguuaugaccaccuagaca

SEQ ID NO: 98004 - RNA, 19 nt, Artificial Sequence
  Description of Artificial Sequence: Synthetic oligonucleotide
  Sense strand starting at position 3813 of SEQ ID NO: 1234
guggucauaacaugugaca

SEQ ID NO: 98005 - RNA, 19 nt, Artificial Sequence
  Description of Artificial Sequence: Synthetic oligonucleotide
  Antisense strand to SEQ ID NO: 97924
ugucacauguuaugaccac

SEQ ID NO: 98006 - RNA, 19 nt, Artificial Sequence
  Description of Artificial Sequence: Synthetic oligonucleotide
  Sense strand starting at position 3859 of SEQ ID NO: 1234
uggccugagugucuuaaug

SEQ ID NO: 98007 - RNA, 19 nt, Artificial Sequence
  Description of Artificial Sequence: Synthetic oligonucleotide
  Antisense strand to SEQ ID NO: 97926
cauuaagacacucaggcca

SEQ ID NO: 98008 - RNA, 19 nt, Artificial Sequence
  Description of Artificial Sequence: Synthetic oligonucleotide
  Sense strand starting at position 3868 of SEQ ID NO: 1234
ugucuuaaugagggcaacu

SEQ ID NO: 98009 - RNA, 19 nt, Artificial Sequence
  Description of Artificial Sequence: Synthetic oligonucleotide
  Antisense strand to SEQ ID NO: 97928
aguugcccucauuaagaca

SEQ ID NO: 98010 - RNA, 19 nt, Artificial Sequence
  Description of Artificial Sequence: Synthetic oligonucleotide
  Sense strand starting at position 3970 of SEQ ID NO: 1234
uggaaccuuucucuuuaga

SEQ ID NO: 98011 - RNA, 19 nt, Artificial Sequence
  Description of Artificial Sequence: Synthetic oligonucleotide
  Antisense strand to SEQ ID NO: 97930
ucuaaagagaaagguucca

SEQ ID NO: 98012 - RNA, 19 nt, Artificial Sequence
  Description of Artificial Sequence: Synthetic oligonucleotide
  Sense strand starting at position 74 of SEQ ID NO: 1235
cuggauguccuuugagcuu

SEQ ID NO: 98013 - RNA, 19 nt, Artificial Sequence
  Description of Artificial Sequence: Synthetic oligonucleotide
  Antisense strand to SEQ ID NO: 97932
aagcucaaaggacauccag

SEQ ID NO: 98014 - RNA, 19 nt, Artificial Sequence
  Description of Artificial Sequence: Synthetic oligonucleotide
  Sense strand starting at position 191 of SEQ ID NO: 1235
gccuuaacccauugaguuu

SEQ ID NO: 98015 - RNA, 19 nt, Artificial Sequence
  Description of Artificial Sequence: Synthetic oligonucleotide
  Antisense strand to SEQ ID NO: 97934
aaacucaauggguuaaggc

SEQ ID NO: 98016 - RNA, 19 nt, Artificial Sequence
  Description of Artificial Sequence: Synthetic oligonucleotide
  Sense strand starting at position 200 of SEQ ID NO: 1235
cauugaguuuaggauaaau

SEQ ID NO: 98017 - RNA, 19 nt, Artificial Sequence
  Description of Artificial Sequence: Synthetic oligonucleotide
  Antisense strand to SEQ ID NO: 97936
auuuauccuaaacucaaug

SEQ ID NO: 98018 - RNA, 19 nt, Artificial Sequence
  Description of Artificial Sequence: Synthetic oligonucleotide
  Sense strand starting at position 212 of SEQ ID NO: 1235
gauaaaugguagggagaag

SEQ ID NO: 98019 - RNA, 19 nt, Artificial Sequence
  Description of Artificial Sequence: Synthetic oligonucleotide
  Antisense strand to SEQ ID NO: 97938
cuucucccuaccauuuauc

SEQ ID NO: 98020 - RNA, 19 nt, Artificial Sequence
  Description of Artificial Sequence: Synthetic oligonucleotide
  Sense strand starting at position 223 of SEQ ID NO: 1235
gggagaagauuuggagguu

SEQ ID NO: 98021 - RNA, 19 nt, Artificial Sequence
  Description of Artificial Sequence: Synthetic oligonucleotide
  Antisense strand to SEQ ID NO: 97940
aaccuccaaaucuucuccc

SEQ ID NO: 98022 - RNA, 19 nt, Artificial Sequence
  Description of Artificial Sequence: Synthetic oligonucleotide
  Sense strand starting at position 224 of SEQ ID NO: 1235
ggagaagauuuggagguuu

SEQ ID NO: 98023 - RNA, 19 nt, Artificial Sequence
  Description of Artificial Sequence: Synthetic oligonucleotide
  Antisense strand to SEQ ID NO: 97942
aaaccuccaaaucuucucc

SEQ ID NO: 98024 - RNA, 19 nt, Artificial Sequence
  Description of Artificial Sequence: Synthetic oligonucleotide
  Sense strand starting at position 2156 of SEQ ID NO: 1235
guuccauuggaucgcuaca

SEQ ID NO: 98025 - RNA, 19 nt, Artificial Sequence
  Description of Artificial Sequence: Synthetic oligonucleotide
  Antisense strand to SEQ ID NO: 97944
uguagcgauccaauggaac

SEQ ID NO: 98026 - RNA, 19 nt, Artificial Sequence
  Description of Artificial Sequence: Synthetic oligonucleotide
  Sense strand starting at position 2158 of SEQ ID NO: 1235
uccauuggaucgcuacaua

SEQ ID NO: 98027 - RNA, 19 nt, Artificial Sequence
  Description of Artificial Sequence: Synthetic oligonucleotide
  Antisense strand to SEQ ID NO: 97946
uauguagcgauccaaugga

SEQ ID NO: 98028 - RNA, 19 nt, Artificial Sequence
  Description of Artificial Sequence: Synthetic oligonucleotide
  Sense strand starting at position 2161 of SEQ ID NO: 1235
auuggaucgcuacauaucu

SEQ ID NO: 98029 - RNA, 19 nt, Artificial Sequence
  Description of Artificial Sequence: Synthetic oligonucleotide
  Antisense strand to SEQ ID NO: 97948
agauauguagcgauccaau

SEQ ID NO: 98030 - RNA, 19 nt, Artificial Sequence
  Description of Artificial Sequence: Synthetic oligonucleotide
  Sense strand starting at position 2186 of SEQ ID NO: 1235
gagggcauuucucucgcuu

SEQ ID NO: 98031 - RNA, 19 nt, Artificial Sequence
  Description of Artificial Sequence: Synthetic oligonucleotide
  Antisense strand to SEQ ID NO: 97950
aagcgagagaaaugcccuc

SEQ ID NO: 98032 - RNA, 19 nt, Artificial Sequence
  Description of Artificial Sequence: Synthetic oligonucleotide
  Sense strand starting at position 2358 of SEQ ID NO: 1235
gauuguaccgguugucaag

SEQ ID NO: 98033 - RNA, 19 nt, Artificial Sequence
  Description of Artificial Sequence: Synthetic oligonucleotide
  Antisense strand to SEQ ID NO: 97952
cuugacaaccgguacaauc

SEQ ID NO: 98034 - RNA, 19 nt, Artificial Sequence
  Description of Artificial Sequence: Synthetic oligonucleotide
  Sense strand starting at position 2563 of SEQ ID NO: 1235
guguguccguggauuaucu

SEQ ID NO: 98035 - RNA, 19 nt, Artificial Sequence
  Description of Artificial Sequence: Synthetic oligonucleotide
  Antisense strand to SEQ ID NO: 97954
agauaauccacggacacac

SEQ ID NO: 98036 - RNA, 19 nt, Artificial Sequence
  Description of Artificial Sequence: Synthetic oligonucleotide
  Sense strand starting at position 2577 of SEQ ID NO: 1235
uaucucaguccugggagua

SEQ ID NO: 98037 - RNA, 19 nt, Artificial Sequence
  Description of Artificial Sequence: Synthetic oligonucleotide
  Antisense strand to SEQ ID NO: 97956
uacucccaggacugagaua

SEQ ID NO: 98038 - RNA, 19 nt, Artificial Sequence
  Description of Artificial Sequence: Synthetic oligonucleotide
  Sense strand starting at position 2578 of SEQ ID NO: 1235
aucucaguccugggaguaa

SEQ ID NO: 98039 - RNA, 19 nt, Artificial Sequence
  Description of Artificial Sequence: Synthetic oligonucleotide
  Antisense strand to SEQ ID NO: 97958
uuacucccaggacugagau

SEQ ID NO: 98040 - RNA, 19 nt, Artificial Sequence
  Description of Artificial Sequence: Synthetic oligonucleotide
  Sense strand starting at position 2590 of SEQ ID NO: 1235
ggaguaacuccaugaggca

SEQ ID NO: 98041 - RNA, 19 nt, Artificial Sequence
  Description of Artificial Sequence: Synthetic oligonucleotide
  Antisense strand to SEQ ID NO: 97960
ugccucauggaguuacucc

SEQ ID NO: 98042 - RNA, 19 nt, Artificial Sequence
  Description of Artificial Sequence: Synthetic oligonucleotide
  Sense strand starting at position 2613 of SEQ ID NO: 1235
cugugacuguucucuuuau

SEQ ID NO: 98043 - RNA, 19 nt, Artificial Sequence
  Description of Artificial Sequence: Synthetic oligonucleotide
  Antisense strand to SEQ ID NO: 97962
auaaagagaacagucacag

SEQ ID NO: 98044 - RNA, 19 nt, Artificial Sequence
  Description of Artificial Sequence: Synthetic oligonucleotide
  Sense strand starting at position 2614 of SEQ ID NO: 1235
ugugacuguucucuuuaua

SEQ ID NO: 98045 - RNA, 19 nt, Artificial Sequence
  Description of Artificial Sequence: Synthetic oligonucleotide
  Antisense strand to SEQ ID NO: 97964
uauaaagagaacagucaca

SEQ ID NO: 98046 - RNA, 19 nt, Artificial Sequence
  Description of Artificial Sequence: Synthetic oligonucleotide
  Sense strand starting at position 2634 of SEQ ID NO: 1235
agauaagucaagcgaggug

SEQ ID NO: 98047 - RNA, 19 nt, Artificial Sequence
  Description of Artificial Sequence: Synthetic oligonucleotide
  Antisense strand to SEQ ID NO: 97966
caccucgcuugacuuaucu

SEQ ID NO: 98048 - RNA, 19 nt, Artificial Sequence
  Description of Artificial Sequence: Synthetic oligonucleotide
  Sense strand starting at position 2649 of SEQ ID NO: 1235
ggugcagaagggugaauaa

SEQ ID NO: 98049 - RNA, 19 nt, Artificial Sequence
  Description of Artificial Sequence: Synthetic oligonucleotide
  Antisense strand to SEQ ID NO: 97968
uuauucacccuucugcacc

SEQ ID NO: 98050 - RNA, 19 nt, Artificial Sequence
  Description of Artificial Sequence: Synthetic oligonucleotide
  Sense strand starting at position 2756 of SEQ ID NO: 1235
guggacucggucuggaagu

SEQ ID NO: 98051 - RNA, 19 nt, Artificial Sequence
  Description of Artificial Sequence: Synthetic oligonucleotide
  Antisense strand to SEQ ID NO: 97970
acuuccagaccgaguccac

SEQ ID NO: 98052 - RNA, 19 nt, Artificial Sequence
  Description of Artificial Sequence: Synthetic oligonucleotide
  Sense strand starting at position 2783 of SEQ ID NO: 1235
ggcccucagagaugauauu

SEQ ID NO: 98053 - RNA, 19 nt, Artificial Sequence
  Description of Artificial Sequence: Synthetic oligonucleotide
  Antisense strand to SEQ ID NO: 97972
aauaucaucucugagggcc

SEQ ID NO: 98054 - RNA, 19 nt, Artificial Sequence
  Description of Artificial Sequence: Synthetic oligonucleotide
  Sense strand starting at position 2834 of SEQ ID NO: 1235
agcacuucuuaugugucaa

SEQ ID NO: 98055 - RNA, 19 nt, Artificial Sequence
  Description of Artificial Sequence: Synthetic oligonucleotide
  Antisense strand to SEQ ID NO: 97974
uugacacauaagaagugcu

SEQ ID NO: 98056 - RNA, 19 nt, Artificial Sequence
  Description of Artificial Sequence: Synthetic oligonucleotide
  Sense strand starting at position 2914 of SEQ ID NO: 1235
cuuuacagaugguuaaaca

SEQ ID NO: 98057 - RNA, 19 nt, Artificial Sequence
  Description of Artificial Sequence: Synthetic oligonucleotide
  Antisense strand to SEQ ID NO: 97976
uguuuaaccaucuguaaag

SEQ ID NO: 98058 - RNA, 19 nt, Artificial Sequence
  Description of Artificial Sequence: Synthetic oligonucleotide
  Sense strand starting at position 2936 of SEQ ID NO: 1235
ccagaaacguucucuaauu

SEQ ID NO: 98059 - RNA, 19 nt, Artificial Sequence
  Description of Artificial Sequence: Synthetic oligonucleotide
  Antisense strand to SEQ ID NO: 97978
aauuagagaacguuucugg

SEQ ID NO: 98060 - RNA, 19 nt, Artificial Sequence
  Description of Artificial Sequence: Synthetic oligonucleotide
  Sense strand starting at position 2989 of SEQ ID NO: 1235
ucugaugccucuucugaca

SEQ ID NO: 98061 - RNA, 19 nt, Artificial Sequence
  Description of Artificial Sequence: Synthetic oligonucleotide
  Antisense strand to SEQ ID NO: 97980
ugucagaagaggcaucaga

SEQ ID NO: 98062 - RNA, 19 nt, Artificial Sequence
  Description of Artificial Sequence: Synthetic oligonucleotide
  Sense strand starting at position 3077 of SEQ ID NO: 1235
cggaguuagugggcaacaa

SEQ ID NO: 98063 - RNA, 19 nt, Artificial Sequence
  Description of Artificial Sequence: Synthetic oligonucleotide
  Antisense strand to SEQ ID NO: 97982
uuguugcccacuaacuccg

SEQ ID NO: 98064 - RNA, 19 nt, Artificial Sequence
  Description of Artificial Sequence: Synthetic oligonucleotide
  Sense strand starting at position 3110 of SEQ ID NO: 1235
ccaagaggacuuugucugu

SEQ ID NO: 98065 - RNA, 19 nt, Artificial Sequence
  Description of Artificial Sequence: Synthetic oligonucleotide
  Antisense strand to SEQ ID NO: 97984
acagacaaaguccucuugg

SEQ ID NO: 98066 - RNA, 19 nt, Artificial Sequence
  Description of Artificial Sequence: Synthetic oligonucleotide
  Sense strand starting at position 3116 of SEQ ID NO: 1235
ggacuuugucugugaccuc

SEQ ID NO: 98067 - RNA, 19 nt, Artificial Sequence
  Description of Artificial Sequence: Synthetic oligonucleotide
  Antisense strand to SEQ ID NO: 97986
gaggucacagacaaagucc

SEQ ID NO: 98068 - RNA, 19 nt, Artificial Sequence
  Description of Artificial Sequence: Synthetic oligonucleotide
  Sense strand starting at position 3139 of SEQ ID NO: 1235
gacguaagagcuuguuagu

SEQ ID NO: 98069 - RNA, 19 nt, Artificial Sequence
  Description of Artificial Sequence: Synthetic oligonucleotide
  Antisense strand to SEQ ID NO: 97988
acuaacaagcucuuacguc

SEQ ID NO: 98070 - RNA, 19 nt, Artificial Sequence
  Description of Artificial Sequence: Synthetic oligonucleotide
  Sense strand starting at position 3186 of SEQ ID NO: 1235
gccagacuuguuuaucguu

SEQ ID NO: 98071 - RNA, 19 nt, Artificial Sequence
  Description of Artificial Sequence: Synthetic oligonucleotide
  Antisense strand to SEQ ID NO: 97990
aacgauaaacaagucuggc

SEQ ID NO: 98072 - RNA, 19 nt, Artificial Sequence
  Description of Artificial Sequence: Synthetic oligonucleotide
  Sense strand starting at position 3188 of SEQ ID NO: 1235
cagacuuguuuaucguuua

SEQ ID NO: 98073 - RNA, 19 nt, Artificial Sequence
  Description of Artificial Sequence: Synthetic oligonucleotide
  Antisense strand to SEQ ID NO: 97992
uaaacgauaaacaagucug

SEQ ID NO: 98074 - RNA, 19 nt, Artificial Sequence
  Description of Artificial Sequence: Synthetic oligonucleotide
  Sense strand starting at position 3191 of SEQ ID NO: 1235
acuuguuuaucguuuacag

SEQ ID NO: 98075 - RNA, 19 nt, Artificial Sequence
  Description of Artificial Sequence: Synthetic oligonucleotide
  Antisense strand to SEQ ID NO: 97994
cuguaaacgauaaacaagu

SEQ ID NO: 98076 - RNA, 19 nt, Artificial Sequence
  Description of Artificial Sequence: Synthetic oligonucleotide
  Sense strand starting at position 3200 of SEQ ID NO: 1235
ucguuuacagcucauuaua

SEQ ID NO: 98077 - RNA, 19 nt, Artificial Sequence
  Description of Artificial Sequence: Synthetic oligonucleotide
  Antisense strand to SEQ ID NO: 97996
uauaaugagcuguaaacga

SEQ ID NO: 98078 - RNA, 19 nt, Artificial Sequence
  Description of Artificial Sequence: Synthetic oligonucleotide
  Sense strand starting at position 3202 of SEQ ID NO: 1235
guuuacagcucauuauaga

SEQ ID NO: 98079 - RNA, 19 nt, Artificial Sequence
  Description of Artificial Sequence: Synthetic oligonucleotide
  Antisense strand to SEQ ID NO: 97998
ucuauaaugagcuguaaac

SEQ ID NO: 98080 - RNA, 19 nt, Artificial Sequence
  Description of Artificial Sequence: Synthetic oligonucleotide
  Sense strand starting at position 3298 of SEQ ID NO: 1235
accuguaaguaacccauua

SEQ ID NO: 98081 - RNA, 19 nt, Artificial Sequence
  Description of Artificial Sequence: Synthetic oligonucleotide
  Antisense strand to SEQ ID NO: 98000
uaauggguuacuuacaggu

SEQ ID NO: 98082 - RNA, 19 nt, Artificial Sequence
  Description of Artificial Sequence: Synthetic oligonucleotide
  Sense strand starting at position 3310 of SEQ ID NO: 1235
cccauuaagcuaggaaugu

SEQ ID NO: 98083 - RNA, 19 nt, Artificial Sequence
  Description of Artificial Sequence: Synthetic oligonucleotide
  Antisense strand to SEQ ID NO: 98002
acauuccuagcuuaauggg

SEQ ID NO: 98084 - RNA, 19 nt, Artificial Sequence
  Description of Artificial Sequence: Synthetic oligonucleotide
  Sense strand starting at position 3347 of SEQ ID NO: 1235
aaugcaguccuaggaaauc

SEQ ID NO: 98085 - RNA, 19 nt, Artificial Sequence
  Description of Artificial Sequence: Synthetic oligonucleotide
  Antisense strand to SEQ ID NO: 98004
gauuuccuaggacugcauu

SEQ ID NO: 98086 - RNA, 19 nt, Artificial Sequence
  Description of Artificial Sequence: Synthetic oligonucleotide
  Sense strand starting at position 3517 of SEQ ID NO: 1235
uuuggacuguucccagaga

SEQ ID NO: 98087 - RNA, 19 nt, Artificial Sequence
  Description of Artificial Sequence: Synthetic oligonucleotide
  Antisense strand to SEQ ID NO: 98006
ucucugggaacaguccaaa

SEQ ID NO: 98088 - RNA, 19 nt, Artificial Sequence
  Description of Artificial Sequence: Synthetic oligonucleotide
  Sense strand starting at position 3760 of SEQ ID NO: 1235
gagacugacucauugcaga

SEQ ID NO: 98089 - RNA, 19 nt, Artificial Sequence
  Description of Artificial Sequence: Synthetic oligonucleotide
  Antisense strand to SEQ ID NO: 98008
ucugcaaugagucagucuc

SEQ ID NO: 98090 - RNA, 19 nt, Artificial Sequence
  Description of Artificial Sequence: Synthetic oligonucleotide
  Sense strand starting at position 3927 of SEQ ID NO: 1235
aagugacuccugugggaug

SEQ ID NO: 98091 - RNA, 19 nt, Artificial Sequence
  Description of Artificial Sequence: Synthetic oligonucleotide
  Antisense strand to SEQ ID NO: 98010
caucccacaggagucacuu

SEQ ID NO: 98092 - RNA, 19 nt, Artificial Sequence
  Description of Artificial Sequence: Synthetic oligonucleotide
  Sense strand starting at position 3925 of SEQ ID NO: 1237
ccuucuggguugucagaaa

SEQ ID NO: 98093 - RNA, 19 nt, Artificial Sequence
  Description of Artificial Sequence: Synthetic oligonucleotide
  Antisense strand to SEQ ID NO: 98012
uuucugacaacccagaagg

SEQ ID NO: 98094 - RNA, 19 nt, Artificial Sequence
  Description of Artificial Sequence: Synthetic oligonucleotide
  Sense strand starting at position 3923 of SEQ ID NO: 1237
aaccuucuggguugucaga

SEQ ID NO: 98095 - RNA, 19 nt, Artificial Sequence
  Description of Artificial Sequence: Synthetic oligonucleotide
  Antisense strand to SEQ ID NO: 98014
ucugacaacccagaagguu

SEQ ID NO: 98096 - RNA, 19 nt, Artificial Sequence
  Description of Artificial Sequence: Synthetic oligonucleotide
  Sense strand starting at position 3921 of SEQ ID NO: 1237
ggaaccuucuggguuguca

SEQ ID NO: 98097 - RNA, 19 nt, Artificial Sequence
  Description of Artificial Sequence: Synthetic oligonucleotide
  Antisense strand to SEQ ID NO: 98016
ugacaacccagaagguucc

SEQ ID NO: 98098 - RNA, 19 nt, Artificial Sequence
  Description of Artificial Sequence: Synthetic oligonucleotide
  Sense strand starting at position 3798 of SEQ ID NO: 1237
guauacauaggaugugauu

SEQ ID NO: 98099 - RNA, 19 nt, Artificial Sequence
  Description of Artificial Sequence: Synthetic oligonucleotide
  Antisense strand to SEQ ID NO: 98018
aaucacauccuauguauac

SEQ ID NO: 98100 - RNA, 19 nt, Artificial Sequence
  Description of Artificial Sequence: Synthetic oligonucleotide
  Sense strand starting at position 3739 of SEQ ID NO: 1237
ugauauucgacauggauga

SEQ ID NO: 98101 - RNA, 19 nt, Artificial Sequence
  Description of Artificial Sequence: Synthetic oligonucleotide
  Antisense strand to SEQ ID NO: 98020
ucauccaugucgaauauca

SEQ ID NO: 98102 - RNA, 19 nt, Artificial Sequence
  Description of Artificial Sequence: Synthetic oligonucleotide
  Sense strand starting at position 3734 of SEQ ID NO: 1237
gcuauugauauucgacaug

SEQ ID NO: 98103 - RNA, 19 nt, Artificial Sequence
  Description of Artificial Sequence: Synthetic oligonucleotide
  Antisense strand to SEQ ID NO: 98022
caugucgaauaucaauagc

SEQ ID NO: 98104 - RNA, 19 nt, Artificial Sequence
  Description of Artificial Sequence: Synthetic oligonucleotide
  Sense strand starting at position 3733 of SEQ ID NO: 1237
agcuauugauauucgacau

SEQ ID NO: 98105 - RNA, 19 nt, Artificial Sequence
  Description of Artificial Sequence: Synthetic oligonucleotide
  Antisense strand to SEQ ID NO: 98024
augucgaauaucaauagcu

SEQ ID NO: 98106 - RNA, 19 nt, Artificial Sequence
  Description of Artificial Sequence: Synthetic oligonucleotide
  Sense strand starting at position 3588 of SEQ ID NO: 1237
uccacaaagccuuguagau

SEQ ID NO: 98107 - RNA, 19 nt, Artificial Sequence
  Description of Artificial Sequence: Synthetic oligonucleotide
  Antisense strand to SEQ ID NO: 98026
aucuacaaggcuuugugga

SEQ ID NO: 98108 - RNA, 19 nt, Artificial Sequence
  Description of Artificial Sequence: Synthetic oligonucleotide
  Sense strand starting at position 3520 of SEQ ID NO: 1237
guugacaguuucuuauacu

SEQ ID NO: 98109 - RNA, 19 nt, Artificial Sequence
  Description of Artificial Sequence: Synthetic oligonucleotide
  Antisense strand to SEQ ID NO: 98028
aguauaagaaacugucaac

SEQ ID NO: 98110 - RNA, 19 nt, Artificial Sequence
  Description of Artificial Sequence: Synthetic oligonucleotide
  Sense strand starting at position 3519 of SEQ ID NO: 1237
gguugacaguuucuuauac

SEQ ID NO: 98111 - RNA, 19 nt, Artificial Sequence
  Description of Artificial Sequence: Synthetic oligonucleotide
  Antisense strand to SEQ ID NO: 98030
guauaagaaacugucaacc

SEQ ID NO: 98112 - RNA, 19 nt, Artificial Sequence
  Description of Artificial Sequence: Synthetic oligonucleotide
  Sense strand starting at position 3511 of SEQ ID NO: 1237
ggacaacugguugacaguu

SEQ ID NO: 98113 - RNA, 19 nt, Artificial Sequence
  Description of Artificial Sequence: Synthetic oligonucleotide
  Antisense strand to SEQ ID NO: 98032
aacugucaaccaguugucc

SEQ ID NO: 98114 - RNA, 19 nt, Artificial Sequence
  Description of Artificial Sequence: Synthetic oligonucleotide
  Sense strand starting at position 3510 of SEQ ID NO: 1237
gggacaacugguugacagu

SEQ ID NO: 98115 - RNA, 19 nt, Artificial Sequence
  Description of Artificial Sequence: Synthetic oligonucleotide
  Antisense strand to SEQ ID NO: 98034
acugucaaccaguuguccc

SEQ ID NO: 98116 - RNA, 19 nt, Artificial Sequence
  Description of Artificial Sequence: Synthetic oligonucleotide
  Sense strand starting at position 3499 of SEQ ID NO: 1237
acauuauuggugggacaac

SEQ ID NO: 98117 - RNA, 19 nt, Artificial Sequence
  Description of Artificial Sequence: Synthetic oligonucleotide
  Antisense strand to SEQ ID NO: 98036
guugucccaccaauaaugu

SEQ ID NO: 98118 - RNA, 19 nt, Artificial Sequence
  Description of Artificial Sequence: Synthetic oligonucleotide
  Sense strand starting at position 3498 of SEQ ID NO: 1237
uacauuauuggugggacaa

SEQ ID NO: 98119 - RNA, 19 nt, Artificial Sequence
  Description of Artificial Sequence: Synthetic oligonucleotide
  Antisense strand to SEQ ID NO: 98038
uugucccaccaauaaugua

SEQ ID NO: 98120 - RNA, 19 nt, Artificial Sequence
  Description of Artificial Sequence: Synthetic oligonucleotide
  Sense strand starting at position 3445 of SEQ ID NO: 1237
ucuaguguauugguauaaa

SEQ ID NO: 98121 - RNA, 19 nt, Artificial Sequence
  Description of Artificial Sequence: Synthetic oligonucleotide
  Antisense strand to SEQ ID NO: 98040
uuuauaccaauacacuaga

SEQ ID NO: 98122 - RNA, 19 nt, Artificial Sequence
  Description of Artificial Sequence: Synthetic oligonucleotide
  Sense strand starting at position 3264 of SEQ ID NO: 1237
guugguagagcuuauuagu

SEQ ID NO: 98123 - RNA, 19 nt, Artificial Sequence
  Description of Artificial Sequence: Synthetic oligonucleotide
  Antisense strand to SEQ ID NO: 98042
acuaauaagcucuaccaac

SEQ ID NO: 98124 - RNA, 19 nt, Artificial Sequence
  Description of Artificial Sequence: Synthetic oligonucleotide
  Sense strand starting at position 3246 of SEQ ID NO: 1237
uuaucuauuccuugacagg

SEQ ID NO: 98125 - RNA, 19 nt, Artificial Sequence
  Description of Artificial Sequence: Synthetic oligonucleotide
  Antisense strand to SEQ ID NO: 98044
ccugucaaggaauagauaa

SEQ ID NO: 98126 - RNA, 19 nt, Artificial Sequence
  Description of Artificial Sequence: Synthetic oligonucleotide
  Sense strand starting at position 3242 of SEQ ID NO: 1237
ggaauuaucuauuccuuga

SEQ ID NO: 98127 - RNA, 19 nt, Artificial Sequence
  Description of Artificial Sequence: Synthetic oligonucleotide
  Antisense strand to SEQ ID NO: 98046
ucaaggaauagauaauucc

SEQ ID NO: 98128 - RNA, 19 nt, Artificial Sequence
  Description of Artificial Sequence: Synthetic oligonucleotide
  Sense strand starting at position 3212 of SEQ ID NO: 1237
caggguuguguucagauag

SEQ ID NO: 98129 - RNA, 19 nt, Artificial Sequence
  Description of Artificial Sequence: Synthetic oligonucleotide
  Antisense strand to SEQ ID NO: 98048
cuaucugaacacaacccug

SEQ ID NO: 98130 - RNA, 19 nt, Artificial Sequence
  Description of Artificial Sequence: Synthetic oligonucleotide
  Sense strand starting at position 3143 of SEQ ID NO: 1237
ggcuuccuugauuauagua

SEQ ID NO: 98131 - RNA, 19 nt, Artificial Sequence
  Description of Artificial Sequence: Synthetic oligonucleotide
  Antisense strand to SEQ ID NO: 98050
uacuauaaucaaggaagcc

SEQ ID NO: 98132 - RNA, 19 nt, Artificial Sequence
  Description of Artificial Sequence: Synthetic oligonucleotide
  Sense strand starting at position 3140 of SEQ ID NO: 1237
uuuggcuuccuugauuaua

SEQ ID NO: 98133 - RNA, 19 nt, Artificial Sequence
  Description of Artificial Sequence: Synthetic oligonucleotide
  Antisense strand to SEQ ID NO: 98052
uauaaucaaggaagccaaa

SEQ ID NO: 98134 - RNA, 19 nt, Artificial Sequence
  Description of Artificial Sequence: Synthetic oligonucleotide
  Sense strand starting at position 3066 of SEQ ID NO: 1237
agccuaccauucuuaguau

SEQ ID NO: 98135 - RNA, 19 nt, Artificial Sequence
  Description of Artificial Sequence: Synthetic oligonucleotide
  Antisense strand to SEQ ID NO: 98054
auacuaagaaugguaggcu

SEQ ID NO: 98136 - RNA, 19 nt, Artificial Sequence
  Description of Artificial Sequence: Synthetic oligonucleotide
  Sense strand starting at position 2945 of SEQ ID NO: 1237
cacuucugggcucgaggau

SEQ ID NO: 98137 - RNA, 19 nt, Artificial Sequence
  Description of Artificial Sequence: Synthetic oligonucleotide
  Antisense strand to SEQ ID NO: 98056
auccucgagcccagaagug

SEQ ID NO: 98138 - RNA, 19 nt, Artificial Sequence
  Description of Artificial Sequence: Synthetic oligonucleotide
  Sense strand starting at position 2562 of SEQ ID NO: 1237
uaauuacguuucccagaga

SEQ ID NO: 98139 - RNA, 19 nt, Artificial Sequence
  Description of Artificial Sequence: Synthetic oligonucleotide
  Antisense strand to SEQ ID NO: 98058
ucucugggaaacguaauua

SEQ ID NO: 98140 - RNA, 19 nt, Artificial Sequence
  Description of Artificial Sequence: Synthetic oligonucleotide
  Sense strand starting at position 2527 of SEQ ID NO: 1237
aguuuacaucgugcuaguu

SEQ ID NO: 98141 - RNA, 19 nt, Artificial Sequence
  Description of Artificial Sequence: Synthetic oligonucleotide
  Antisense strand to SEQ ID NO: 98060
aacuagcacgauguaaacu

SEQ ID NO: 98142 - RNA, 19 nt, Artificial Sequence
  Description of Artificial Sequence: Synthetic oligonucleotide
  Sense strand starting at position 2450 of SEQ ID NO: 1237
uacuacugaugucuagaga

SEQ ID NO: 98143 - RNA, 19 nt, Artificial Sequence
  Description of Artificial Sequence: Synthetic oligonucleotide
  Antisense strand to SEQ ID NO: 98062
ucucuagacaucaguagua

SEQ ID NO: 98144 - RNA, 19 nt, Artificial Sequence
  Description of Artificial Sequence: Synthetic oligonucleotide
  Sense strand starting at position 2308 of SEQ ID NO: 1237
ggaagagguugagauuuaa

SEQ ID NO: 98145 - RNA, 19 nt, Artificial Sequence
  Description of Artificial Sequence: Synthetic oligonucleotide
  Antisense strand to SEQ ID NO: 98064
uuaaaucucaaccucuucc

SEQ ID NO: 98146 - RNA, 19 nt, Artificial Sequence
  Description of Artificial Sequence: Synthetic oligonucleotide
  Sense strand starting at position 2157 of SEQ ID NO: 1237
uguugaggaacauguauga

SEQ ID NO: 98147 - RNA, 19 nt, Artificial Sequence
  Description of Artificial Sequence: Synthetic oligonucleotide
  Antisense strand to SEQ ID NO: 98066
ucauacauguuccucaaca

SEQ ID NO: 98148 - RNA, 19 nt, Artificial Sequence
  Description of Artificial Sequence: Synthetic oligonucleotide
  Sense strand starting at position 2155 of SEQ ID NO: 1237
aguguugaggaacauguau

SEQ ID NO: 98149 - RNA, 19 nt, Artificial Sequence
  Description of Artificial Sequence: Synthetic oligonucleotide
  Antisense strand to SEQ ID NO: 98068
auacauguuccucaacacu

SEQ ID NO: 98150 - RNA, 19 nt, Artificial Sequence
  Description of Artificial Sequence: Synthetic oligonucleotide
  Sense strand starting at position 2043 of SEQ ID NO: 1237
uacauuauugcguaaugug

SEQ ID NO: 98151 - RNA, 19 nt, Artificial Sequence
  Description of Artificial Sequence: Synthetic oligonucleotide
  Antisense strand to SEQ ID NO: 98070
cacauuacgcaauaaugua

SEQ ID NO: 98152 - RNA, 19 nt, Artificial Sequence
  Description of Artificial Sequence: Synthetic oligonucleotide
  Sense strand starting at position 1380 of SEQ ID NO: 1237
gagaaacagccgugaggau

SEQ ID NO: 98153 - RNA, 19 nt, Artificial Sequence
  Description of Artificial Sequence: Synthetic oligonucleotide
  Antisense strand to SEQ ID NO: 98072
auccucacggcuguuucuc

SEQ ID NO: 98154 - RNA, 19 nt, Artificial Sequence
  Description of Artificial Sequence: Synthetic oligonucleotide
  Sense strand starting at position 1236 of SEQ ID NO: 1237
gcggcucuucucucguuaa

SEQ ID NO: 98155 - RNA, 19 nt, Artificial Sequence
  Description of Artificial Sequence: Synthetic oligonucleotide
  Antisense strand to SEQ ID NO: 98074
uuaacgagagaagagccgc

SEQ ID NO: 98156 - RNA, 19 nt, Artificial Sequence
  Description of Artificial Sequence: Synthetic oligonucleotide
  Sense strand starting at position 1005 of SEQ ID NO: 1237
gucuacagguuuccuaaca

SEQ ID NO: 98157 - RNA, 19 nt, Artificial Sequence
  Description of Artificial Sequence: Synthetic oligonucleotide
  Antisense strand to SEQ ID NO: 98076
uguuaggaaaccuguagac

SEQ ID NO: 98158 - RNA, 19 nt, Artificial Sequence
  Description of Artificial Sequence: Synthetic oligonucleotide
  Sense strand starting at position 996 of SEQ ID NO: 1237
aaguguauugucuacaggu

SEQ ID NO: 98159 - RNA, 19 nt, Artificial Sequence
  Description of Artificial Sequence: Synthetic oligonucleotide
  Antisense strand to SEQ ID NO: 98078
accuguagacaauacacuu

SEQ ID NO: 98160 - RNA, 19 nt, Artificial Sequence
  Description of Artificial Sequence: Synthetic oligonucleotide
  Sense strand starting at position 982 of SEQ ID NO: 1237
cccauuagcgaucaaagug

SEQ ID NO: 98161 - RNA, 19 nt, Artificial Sequence
  Description of Artificial Sequence: Synthetic oligonucleotide
  Antisense strand to SEQ ID NO: 98080
cacuuugaucgcuaauggg

SEQ ID NO: 98162 - RNA, 19 nt, Artificial Sequence
  Description of Artificial Sequence: Synthetic oligonucleotide
  Sense strand starting at position 903 of SEQ ID NO: 1237
cccgccaaggcucauuaau

SEQ ID NO: 98163 - RNA, 19 nt, Artificial Sequence
  Description of Artificial Sequence: Synthetic oligonucleotide
  Antisense strand to SEQ ID NO: 98082
auuaaugagccuuggcggg

SEQ ID NO: 98164 - RNA, 19 nt, Artificial Sequence
  Description of Artificial Sequence: Synthetic oligonucleotide
  Sense strand starting at position 316 of SEQ ID NO: 1237
uggcacuuuccugauacaa

SEQ ID NO: 98165 - RNA, 19 nt, Artificial Sequence
  Description of Artificial Sequence: Synthetic oligonucleotide
  Antisense strand to SEQ ID NO: 98084
uuguaucaggaaagugcca

SEQ ID NO: 98166 - RNA, 19 nt, Artificial Sequence
  Description of Artificial Sequence: Synthetic oligonucleotide
  Sense strand starting at position 149 of SEQ ID NO: 1237
aagaauaaggcuugcaagu

SEQ ID NO: 98167 - RNA, 19 nt, Artificial Sequence
  Description of Artificial Sequence: Synthetic oligonucleotide
  Antisense strand to SEQ ID NO: 98086
acuugcaagccuuauucuu

SEQ ID NO: 98168 - RNA, 19 nt, Artificial Sequence
  Description of Artificial Sequence: Synthetic oligonucleotide
  Sense strand starting at position 78 of SEQ ID NO: 1237
uuauguugucuccaagucu

SEQ ID NO: 98169 - RNA, 19 nt, Artificial Sequence
  Description of Artificial Sequence: Synthetic oligonucleotide
  Antisense strand to SEQ ID NO: 98088
agacuuggagacaacauaa

SEQ ID NO: 98170 - RNA, 19 nt, Artificial Sequence
  Description of Artificial Sequence: Synthetic oligonucleotide
  Sense strand starting at position 75 of SEQ ID NO: 1237
agauuauguugucuccaag

SEQ ID NO: 98171 - RNA, 19 nt, Artificial Sequence
  Description of Artificial Sequence: Synthetic oligonucleotide
  Antisense strand to SEQ ID NO: 98090
cuuggagacaacauaaucu

SEQ ID NO: 98172 - RNA, 19 nt, Artificial Sequence
  Description of Artificial Sequence: Synthetic oligonucleotide
  Sense strand starting at position 3878 of SEQ ID NO: 1236
ucuacucucgguuaucaau

SEQ ID NO: 98173 - RNA, 19 nt, Artificial Sequence
  Description of Artificial Sequence: Synthetic oligonucleotide
  Antisense strand to SEQ ID NO: 98092
auugauaaccgagaguaga

SEQ ID NO: 98174 - RNA, 19 nt, Artificial Sequence
  Description of Artificial Sequence: Synthetic oligonucleotide
  Sense strand starting at position 3786 of SEQ ID NO: 1236
caggguuuggcugauccau

SEQ ID NO: 98175 - RNA, 19 nt, Artificial Sequence
  Description of Artificial Sequence: Synthetic oligonucleotide
  Antisense strand to SEQ ID NO: 98094
auggaucagccaaacccug

SEQ ID NO: 98176 - RNA, 19 nt, Artificial Sequence
  Description of Artificial Sequence: Synthetic oligonucleotide
  Sense strand starting at position 3699 of SEQ ID NO: 1236
aggcauccucagcagaguu

SEQ ID NO: 98177 - RNA, 19 nt, Artificial Sequence
  Description of Artificial Sequence: Synthetic oligonucleotide
  Antisense strand to SEQ ID NO: 98096
aacucugcugaggaugccu

SEQ ID NO: 98178 - RNA, 19 nt, Artificial Sequence
  Description of Artificial Sequence: Synthetic oligonucleotide
  Sense strand starting at position 3295 of SEQ ID NO: 1236
gaggaaugucuggauagcu

SEQ ID NO: 98179 - RNA, 19 nt, Artificial Sequence
  Description of Artificial Sequence: Synthetic oligonucleotide
  Antisense strand to SEQ ID NO: 98098
agcuauccagacauuccuc

SEQ ID NO: 98180 - RNA, 19 nt, Artificial Sequence
  Description of Artificial Sequence: Synthetic oligonucleotide
  Sense strand starting at position 3206 of SEQ ID NO: 1236
uuccgauucccauagggau

SEQ ID NO: 98181 - RNA, 19 nt, Artificial Sequence
  Description of Artificial Sequence: Synthetic oligonucleotide
  Antisense strand to SEQ ID NO: 98100
aucccuaugggaaucggaa

SEQ ID NO: 98182 - RNA, 19 nt, Artificial Sequence
  Description of Artificial Sequence: Synthetic oligonucleotide
  Sense strand starting at position 3051 of SEQ ID NO: 1236
cagagagauuuagaggcau

SEQ ID NO: 98183 - RNA, 19 nt, Artificial Sequence
  Description of Artificial Sequence: Synthetic oligonucleotide
  Antisense strand to SEQ ID NO: 98102
augccucuaaaucucucug

SEQ ID NO: 98184 - RNA, 19 nt, Artificial Sequence
  Description of Artificial Sequence: Synthetic oligonucleotide
  Sense strand starting at position 3001 of SEQ ID NO: 1236
agaagagccuuucuaauag

SEQ ID NO: 98185 - RNA, 19 nt, Artificial Sequence
  Description of Artificial Sequence: Synthetic oligonucleotide
  Antisense strand to SEQ ID NO: 98104
cuauuagaaaggcucuucu

SEQ ID NO: 98186 - RNA, 19 nt, Artificial Sequence
  Description of Artificial Sequence: Synthetic oligonucleotide
  Sense strand starting at position 2949 of SEQ ID NO: 1236
cucucuuacuugguaucau

SEQ ID NO: 98187 - RNA, 19 nt, Artificial Sequence
  Description of Artificial Sequence: Synthetic oligonucleotide
  Antisense strand to SEQ ID NO: 98106
augauaccaaguaagagag

SEQ ID NO: 98188 - RNA, 19 nt, Artificial Sequence
  Description of Artificial Sequence: Synthetic oligonucleotide
  Sense strand starting at position 2802 of SEQ ID NO: 1236
agaggacugucuccuuaau

SEQ ID NO: 98189 - RNA, 19 nt, Artificial Sequence
  Description of Artificial Sequence: Synthetic oligonucleotide
  Antisense strand to SEQ ID NO: 98108
auuaaggagacaguccucu

SEQ ID NO: 98190 - RNA, 19 nt, Artificial Sequence
  Description of Artificial Sequence: Synthetic oligonucleotide
  Sense strand starting at position 2758 of SEQ ID NO: 1236
ggagcugauuaauuaaaug

SEQ ID NO: 98191 - RNA, 19 nt, Artificial Sequence
  Description of Artificial Sequence: Synthetic oligonucleotide
  Antisense strand to SEQ ID NO: 98110
cauuuaauuaaucagcucc

SEQ ID NO: 98192 - RNA, 19 nt, Artificial Sequence
  Description of Artificial Sequence: Synthetic oligonucleotide
  Sense strand starting at position 2751 of SEQ ID NO: 1236
cucagagggagcugauuaa

SEQ ID NO: 98193 - RNA, 19 nt, Artificial Sequence
  Description of Artificial Sequence: Synthetic oligonucleotide
  Antisense strand to SEQ ID NO: 98112
uuaaucagcucccucugag

SEQ ID NO: 98194 - RNA, 19 nt, Artificial Sequence
  Description of Artificial Sequence: Synthetic oligonucleotide
  Sense strand starting at position 2645 of SEQ ID NO: 1236
uguucuuucgaaugcauuu

SEQ ID NO: 98195 - RNA, 19 nt, Artificial Sequence
  Description of Artificial Sequence: Synthetic oligonucleotide
  Antisense strand to SEQ ID NO: 98114
aaaugcauucgaaagaaca

SEQ ID NO: 98196 - RNA, 19 nt, Artificial Sequence
  Description of Artificial Sequence: Synthetic oligonucleotide
  Sense strand starting at position 2350 of SEQ ID NO: 1236
cuggcuaacagguaagagu

SEQ ID NO: 98197 - RNA, 19 nt, Artificial Sequence
  Description of Artificial Sequence: Synthetic oligonucleotide
  Antisense strand to SEQ ID NO: 98116
acucuuaccuguuagccag

SEQ ID NO: 98198 - RNA, 19 nt, Artificial Sequence
  Description of Artificial Sequence: Synthetic oligonucleotide
  Sense strand starting at position 1629 of SEQ ID NO: 1236
aguuaaguccuguaagaag

SEQ ID NO: 98199 - RNA, 19 nt, Artificial Sequence
  Description of Artificial Sequence: Synthetic oligonucleotide
  Antisense strand to SEQ ID NO: 98118
cuucuuacaggacuuaacu

SEQ ID NO: 98200 - RNA, 19 nt, Artificial Sequence
  Description of Artificial Sequence: Synthetic oligonucleotide
  Sense strand starting at position 1602 of SEQ ID NO: 1236
cgaacauucuagccuagag

SEQ ID NO: 98201 - RNA, 19 nt, Artificial Sequence
  Description of Artificial Sequence: Synthetic oligonucleotide
  Antisense strand to SEQ ID NO: 98120
cucuaggcuagaauguucg

SEQ ID NO: 98202 - RNA, 19 nt, Artificial Sequence
  Description of Artificial Sequence: Synthetic oligonucleotide
  Sense strand starting at position 1594 of SEQ ID NO: 1236
cgcagaagcgaacauucua

SEQ ID NO: 98203 - RNA, 19 nt, Artificial Sequence
  Description of Artificial Sequence: Synthetic oligonucleotide
  Antisense strand to SEQ ID NO: 98122
uagaauguucgcuucugcg

SEQ ID NO: 98204 - RNA, 19 nt, Artificial Sequence
  Description of Artificial Sequence: Synthetic oligonucleotide
  Sense strand starting at position 1500 of SEQ ID NO: 1236
gcgagauucccgccuaccu

SEQ ID NO: 98205 - RNA, 19 nt, Artificial Sequence
  Description of Artificial Sequence: Synthetic oligonucleotide
  Antisense strand to SEQ ID NO: 98124
agguaggcgggaaucucgc

SEQ ID NO: 98206 - RNA, 19 nt, Artificial Sequence
  Description of Artificial Sequence: Synthetic oligonucleotide
  Sense strand starting at position 1490 of SEQ ID NO: 1236
aaguaaugacgcgagauuc

SEQ ID NO: 98207 - RNA, 19 nt, Artificial Sequence
  Description of Artificial Sequence: Synthetic oligonucleotide
  Antisense strand to SEQ ID NO: 98126
gaaucucgcgucauuacuu

SEQ ID NO: 98208 - RNA, 19 nt, Artificial Sequence
  Description of Artificial Sequence: Synthetic oligonucleotide
  Sense strand starting at position 1489 of SEQ ID NO: 1236
aaaguaaugacgcgagauu

SEQ ID NO: 98209 - RNA, 19 nt, Artificial Sequence
  Description of Artificial Sequence: Synthetic oligonucleotide
  Antisense strand to SEQ ID NO: 98128
aaucucgcgucauuacuuu

SEQ ID NO: 98210 - RNA, 19 nt, Artificial Sequence
  Description of Artificial Sequence: Synthetic oligonucleotide
  Sense strand starting at position 1376 of SEQ ID NO: 1236
cuauaaaguguuggaugga

SEQ ID NO: 98211 - RNA, 19 nt, Artificial Sequence
  Description of Artificial Sequence: Synthetic oligonucleotide
  Antisense strand to SEQ ID NO: 98130
uccauccaacacuuuauag

SEQ ID NO: 98212 - RNA, 19 nt, Artificial Sequence
  Description of Artificial Sequence: Synthetic oligonucleotide
  Sense strand starting at position 1365 of SEQ ID NO: 1236
cgugcuggaaucuauaaag

SEQ ID NO: 98213 - RNA, 19 nt, Artificial Sequence
  Description of Artificial Sequence: Synthetic oligonucleotide
  Antisense strand to SEQ ID NO: 98132
cuuuauagauuccagcacg

SEQ ID NO: 98214 - RNA, 19 nt, Artificial Sequence
  Description of Artificial Sequence: Synthetic oligonucleotide
  Sense strand starting at position 1360 of SEQ ID NO: 1236
gaaugcgugcuggaaucua

SEQ ID NO: 98215 - RNA, 19 nt, Artificial Sequence
  Description of Artificial Sequence: Synthetic oligonucleotide
  Antisense strand to SEQ ID NO: 98134
uagauuccagcacgcauuc

SEQ ID NO: 98216 - RNA, 19 nt, Artificial Sequence
  Description of Artificial Sequence: Synthetic oligonucleotide
  Sense strand starting at position 1325 of SEQ ID NO: 1236
gacaaauccgucugacaaa

SEQ ID NO: 98217 - RNA, 19 nt, Artificial Sequence
  Description of Artificial Sequence: Synthetic oligonucleotide
  Antisense strand to SEQ ID NO: 98136
uuugucagacggauuuguc

SEQ ID NO: 98218 - RNA, 19 nt, Artificial Sequence
  Description of Artificial Sequence: Synthetic oligonucleotide
  Sense strand starting at position 1141 of SEQ ID NO: 1236
ucuuuaauggucugaccuu

SEQ ID NO: 98219 - RNA, 19 nt, Artificial Sequence
  Description of Artificial Sequence: Synthetic oligonucleotide
  Antisense strand to SEQ ID NO: 98138
aaggucagaccauuaaaga

SEQ ID NO: 98220 - RNA, 19 nt, Artificial Sequence
  Description of Artificial Sequence: Synthetic oligonucleotide
  Sense strand starting at position 1133 of SEQ ID NO: 1236
guaucaugucuuuaauggu

SEQ ID NO: 98221 - RNA, 19 nt, Artificial Sequence
  Description of Artificial Sequence: Synthetic oligonucleotide
  Antisense strand to SEQ ID NO: 98140
accauuaaagacaugauac

SEQ ID NO: 98222 - RNA, 19 nt, Artificial Sequence
  Description of Artificial Sequence: Synthetic oligonucleotide
  Sense strand starting at position 1090 of SEQ ID NO: 1236
cuaugucuccauuauugca

SEQ ID NO: 98223 - RNA, 19 nt, Artificial Sequence
  Description of Artificial Sequence: Synthetic oligonucleotide
  Antisense strand to SEQ ID NO: 98142
ugcaauaauggagacauag

SEQ ID NO: 98224 - RNA, 19 nt, Artificial Sequence
  Description of Artificial Sequence: Synthetic oligonucleotide
  Sense strand starting at position 963 of SEQ ID NO: 1236
ccuugaauggcucaaaucu

SEQ ID NO: 98225 - RNA, 19 nt, Artificial Sequence
  Description of Artificial Sequence: Synthetic oligonucleotide
  Antisense strand to SEQ ID NO: 98144
agauuugagccauucaagg

SEQ ID NO: 98226 - RNA, 19 nt, Artificial Sequence
  Description of Artificial Sequence: Synthetic oligonucleotide
  Sense strand starting at position 961 of SEQ ID NO: 1236
auccuugaauggcucaaau

SEQ ID NO: 98227 - RNA, 19 nt, Artificial Sequence
  Description of Artificial Sequence: Synthetic oligonucleotide
  Antisense strand to SEQ ID NO: 98146
auuugagccauucaaggau

SEQ ID NO: 98228 - RNA, 19 nt, Artificial Sequence
  Description of Artificial Sequence: Synthetic oligonucleotide
  Sense strand starting at position 756 of SEQ ID NO: 1236
agggucuauucuucccauu

SEQ ID NO: 98229 - RNA, 19 nt, Artificial Sequence
  Description of Artificial Sequence: Synthetic oligonucleotide
  Antisense strand to SEQ ID NO: 98148
aaugggaagaauagacccu

SEQ ID NO: 98230 - RNA, 19 nt, Artificial Sequence
  Description of Artificial Sequence: Synthetic oligonucleotide
  Sense strand starting at position 722 of SEQ ID NO: 1236
ugagaugucaggcagccau

SEQ ID NO: 98231 - RNA, 19 nt, Artificial Sequence
  Description of Artificial Sequence: Synthetic oligonucleotide
  Antisense strand to SEQ ID NO: 98150
auggcugccugacaucuca

SEQ ID NO: 98232 - RNA, 19 nt, Artificial Sequence
  Description of Artificial Sequence: Synthetic oligonucleotide
  Sense strand starting at position 695 of SEQ ID NO: 1236
uggaauuucucagaauaag

SEQ ID NO: 98233 - RNA, 19 nt, Artificial Sequence
  Description of Artificial Sequence: Synthetic oligonucleotide
  Antisense strand to SEQ ID NO: 98152
cuuauucugagaaauucca

SEQ ID NO: 98234 - RNA, 19 nt, Artificial Sequence
  Description of Artificial Sequence: Synthetic oligonucleotide
  Sense strand starting at position 693 of SEQ ID NO: 1236
guuggaauuucucagaaua

SEQ ID NO: 98235 - RNA, 19 nt, Artificial Sequence
  Description of Artificial Sequence: Synthetic oligonucleotide
  Antisense strand to SEQ ID NO: 98154
uauucugagaaauuccaac

SEQ ID NO: 98236 - RNA, 19 nt, Artificial Sequence
  Description of Artificial Sequence: Synthetic oligonucleotide
  Sense strand starting at position 394 of SEQ ID NO: 1236
ugaagagccaaguguagaa

SEQ ID NO: 98237 - RNA, 19 nt, Artificial Sequence
  Description of Artificial Sequence: Synthetic oligonucleotide
  Antisense strand to SEQ ID NO: 98156
uucuacacuuggcucuuca

SEQ ID NO: 98238 - RNA, 19 nt, Artificial Sequence
  Description of Artificial Sequence: Synthetic oligonucleotide
  Sense strand starting at position 344 of SEQ ID NO: 1236
gaaagaguuuaugaaagga

SEQ ID NO: 98239 - RNA, 19 nt, Artificial Sequence
  Description of Artificial Sequence: Synthetic oligonucleotide
  Antisense strand to SEQ ID NO: 98158
uccuuucauaaacucuuuc

SEQ ID NO: 98240 - RNA, 19 nt, Artificial Sequence
  Description of Artificial Sequence: Synthetic oligonucleotide
  Sense strand starting at position 196 of SEQ ID NO: 1236
guagaacucugccuagaac

SEQ ID NO: 98241 - RNA, 19 nt, Artificial Sequence
  Description of Artificial Sequence: Synthetic oligonucleotide
  Antisense strand to SEQ ID NO: 98160
guucuaggcagaguucuac

SEQ ID NO: 98242 - RNA, 19 nt, Artificial Sequence
  Description of Artificial Sequence: Synthetic oligonucleotide
  Sense strand starting at position 176 of SEQ ID NO: 1236
ugagaagguuuguuaaaca

SEQ ID NO: 98243 - RNA, 19 nt, Artificial Sequence
  Description of Artificial Sequence: Synthetic oligonucleotide
  Antisense strand to SEQ ID NO: 98162
uguuuaacaaaccuucuca

SEQ ID NO: 98244 - RNA, 19 nt, Artificial Sequence
  Description of Artificial Sequence: Synthetic oligonucleotide
  Sense strand starting at position 175 of SEQ ID NO: 1236
augagaagguuuguuaaac

SEQ ID NO: 98245 - RNA, 19 nt, Artificial Sequence
  Description of Artificial Sequence: Synthetic oligonucleotide
  Antisense strand to SEQ ID NO: 98164
guuuaacaaaccuucucau

SEQ ID NO: 98246 - RNA, 19 nt, Artificial Sequence
  Description of Artificial Sequence: Synthetic oligonucleotide
  Sense strand starting at position 170 of SEQ ID NO: 1236
guuaaaugagaagguuugu

SEQ ID NO: 98247 - RNA, 19 nt, Artificial Sequence
  Description of Artificial Sequence: Synthetic oligonucleotide
  Antisense strand to SEQ ID NO: 98166
acaaaccuucucauuuaac

SEQ ID NO: 98248 - RNA, 19 nt, Artificial Sequence
  Description of Artificial Sequence: Synthetic oligonucleotide
  Sense strand starting at position 125 of SEQ ID NO: 1236
uagagaaguuaguuaaaug

SEQ ID NO: 98249 - RNA, 19 nt, Artificial Sequence
  Description of Artificial Sequence: Synthetic oligonucleotide
  Antisense strand to SEQ ID NO: 98168
cauuuaacuaacuucucua

SEQ ID NO: 98250 - RNA, 19 nt, Artificial Sequence
  Description of Artificial Sequence: Synthetic oligonucleotide
  Sense strand starting at position 64 of SEQ ID NO: 1236
caguauaugcuuuagaguc

SEQ ID NO: 98251 - RNA, 19 nt, Artificial Sequence
  Description of Artificial Sequence: Synthetic oligonucleotide
  Antisense strand to SEQ ID NO: 98170
gacucuaaagcauauacug

SEQ ID NO: 98252 - RNA, 19 nt, Artificial Sequence
  Description of Artificial Sequence: Synthetic oligonucleotide
  Sense strand starting at position 3941 of SEQ ID NO: 1238
gcuccuagaucuguccaau

SEQ ID NO: 98253 - RNA, 19 nt, Artificial Sequence
  Description of Artificial Sequence: Synthetic oligonucleotide
  Antisense strand to SEQ ID NO: 98172
auuggacagaucuaggagc

SEQ ID NO: 98254 - RNA, 19 nt, Artificial Sequence
  Description of Artificial Sequence: Synthetic oligonucleotide
  Sense strand starting at position 3828 of SEQ ID NO: 1238
uuucguugacaccauugua

SEQ ID NO: 98255 - RNA, 19 nt, Artificial Sequence
  Description of Artificial Sequence: Synthetic oligonucleotide
  Antisense strand to SEQ ID NO: 98174
uacaauggugucaacgaaa

SEQ ID NO: 98256 - RNA, 19 nt, Artificial Sequence
  Description of Artificial Sequence: Synthetic oligonucleotide
  Sense strand starting at position 3822 of SEQ ID NO: 1238
cagugauuucguugacacc

SEQ ID NO: 98257 - RNA, 19 nt, Artificial Sequence
  Description of Artificial Sequence: Synthetic oligonucleotide
  Antisense strand to SEQ ID NO: 98176
ggugucaacgaaaucacug

SEQ ID NO: 98258 - RNA, 19 nt, Artificial Sequence
  Description of Artificial Sequence: Synthetic oligonucleotide
  Sense strand starting at position 3820 of SEQ ID NO: 1238
ugcagugauuucguugaca

SEQ ID NO: 98259 - RNA, 19 nt, Artificial Sequence
  Description of Artificial Sequence: Synthetic oligonucleotide
  Antisense strand to SEQ ID NO: 98178
ugucaacgaaaucacugca

SEQ ID NO: 98260 - RNA, 19 nt, Artificial Sequence
  Description of Artificial Sequence: Synthetic oligonucleotide
  Sense strand starting at position 3752 of SEQ ID NO: 1238
cuuuaauaguaggugaaag

SEQ ID NO: 98261 - RNA, 19 nt, Artificial Sequence
  Description of Artificial Sequence: Synthetic oligonucleotide
  Antisense strand to SEQ ID NO: 98180
cuuucaccuacuauuaaag

SEQ ID NO: 98262 - RNA, 19 nt, Artificial Sequence
  Description of Artificial Sequence: Synthetic oligonucleotide
  Sense strand starting at position 3751 of SEQ ID NO: 1238
ccuuuaauaguaggugaaa

SEQ ID NO: 98263 - RNA, 19 nt, Artificial Sequence
  Description of Artificial Sequence: Synthetic oligonucleotide
  Antisense strand to SEQ ID NO: 98182
uuucaccuacuauuaaagg

SEQ ID NO: 98264 - RNA, 19 nt, Artificial Sequence
  Description of Artificial Sequence: Synthetic oligonucleotide
  Sense strand starting at position 3743 of SEQ ID NO: 1238
ccugucucccuuuaauagu

SEQ ID NO: 98265 - RNA, 19 nt, Artificial Sequence
  Description of Artificial Sequence: Synthetic oligonucleotide
  Antisense strand to SEQ ID NO: 98184
acuauuaaagggagacagg

SEQ ID NO: 98266 - RNA, 19 nt, Artificial Sequence
  Description of Artificial Sequence: Synthetic oligonucleotide
  Sense strand starting at position 3723 of SEQ ID NO: 1238
gacauuuauuuguguaguc

SEQ ID NO: 98267 - RNA, 19 nt, Artificial Sequence
  Description of Artificial Sequence: Synthetic oligonucleotide
  Antisense strand to SEQ ID NO: 98186
gacuacacaaauaaauguc

SEQ ID NO: 98268 - RNA, 19 nt, Artificial Sequence
  Description of Artificial Sequence: Synthetic oligonucleotide
  Sense strand starting at position 3691 of SEQ ID NO: 1238
gagcuaugaucuuuguuuc

SEQ ID NO: 98269 - RNA, 19 nt, Artificial Sequence
  Description of Artificial Sequence: Synthetic oligonucleotide
  Antisense strand to SEQ ID NO: 98188
gaaacaaagaucauagcuc

SEQ ID NO: 98270 - RNA, 19 nt, Artificial Sequence
  Description of Artificial Sequence: Synthetic oligonucleotide
  Sense strand starting at position 3685 of SEQ ID NO: 1238
uucucugagcuaugaucuu

SEQ ID NO: 98271 - RNA, 19 nt, Artificial Sequence
  Description of Artificial Sequence: Synthetic oligonucleotide
  Antisense strand to SEQ ID NO: 98190
aagaucauagcucagagaa

SEQ ID NO: 98272 - RNA, 19 nt, Artificial Sequence
  Description of Artificial Sequence: Synthetic oligonucleotide
  Sense strand starting at position 3644 of SEQ ID NO: 1238
gguagcuuucucugauuuc

SEQ ID NO: 98273 - RNA, 19 nt, Artificial Sequence
  Description of Artificial Sequence: Synthetic oligonucleotide
  Antisense strand to SEQ ID NO: 98192
gaaaucagagaaagcuacc

SEQ ID NO: 98274 - RNA, 19 nt, Artificial Sequence
  Description of Artificial Sequence: Synthetic oligonucleotide
  Sense strand starting at position 3642 of SEQ ID NO: 1238
cagguagcuuucucugauu

SEQ ID NO: 98275 - RNA, 19 nt, Artificial Sequence
  Description of Artificial Sequence: Synthetic oligonucleotide
  Antisense strand to SEQ ID NO: 98194
aaucagagaaagcuaccug

SEQ ID NO: 98276 - RNA, 19 nt, Artificial Sequence
  Description of Artificial Sequence: Synthetic oligonucleotide
  Sense strand starting at position 3641 of SEQ ID NO: 1238
ccagguagcuuucucugau

SEQ ID NO: 98277 - RNA, 19 nt, Artificial Sequence
  Description of Artificial Sequence: Synthetic oligonucleotide
  Antisense strand to SEQ ID NO: 98196
aucagagaaagcuaccugg

SEQ ID NO: 98278 - RNA, 19 nt, Artificial Sequence
  Description of Artificial Sequence: Synthetic oligonucleotide
  Sense strand starting at position 3435 of SEQ ID NO: 1238
ggccaaaucucaguuaaag

SEQ ID NO: 98279 - RNA, 19 nt, Artificial Sequence
  Description of Artificial Sequence: Synthetic oligonucleotide
  Antisense strand to SEQ ID NO: 98198
cuuuaacugagauuuggcc

SEQ ID NO: 98280 - RNA, 19 nt, Artificial Sequence
  Description of Artificial Sequence: Synthetic oligonucleotide
  Sense strand starting at position 3346 of SEQ ID NO: 1238
gagguagaagguggauuau

SEQ ID NO: 98281 - RNA, 19 nt, Artificial Sequence
  Description of Artificial Sequence: Synthetic oligonucleotide
  Antisense strand to SEQ ID NO: 98200
auaauccaccuucuaccuc

SEQ ID NO: 98282 - RNA, 19 nt, Artificial Sequence
  Description of Artificial Sequence: Synthetic oligonucleotide
  Sense strand starting at position 3271 of SEQ ID NO: 1238
cgcuauugaggagguuaca

SEQ ID NO: 98283 - RNA, 19 nt, Artificial Sequence
  Description of Artificial Sequence: Synthetic oligonucleotide
  Antisense strand to SEQ ID NO: 98202
uguaaccuccucaauagcg

SEQ ID NO: 98284 - RNA, 19 nt, Artificial Sequence
  Description of Artificial Sequence: Synthetic oligonucleotide
  Sense strand starting at position 3269 of SEQ ID NO: 1238
cccgcuauugaggagguua

SEQ ID NO: 98285 - RNA, 19 nt, Artificial Sequence
  Description of Artificial Sequence: Synthetic oligonucleotide
  Antisense strand to SEQ ID NO: 98204
uaaccuccucaauagcggg

SEQ ID NO: 98286 - RNA, 19 nt, Artificial Sequence
  Description of Artificial Sequence: Synthetic oligonucleotide
  Sense strand starting at position 3045 of SEQ ID NO: 1238
acugcuguaugaccuaaga

SEQ ID NO: 98287 - RNA, 19 nt, Artificial Sequence
  Description of Artificial Sequence: Synthetic oligonucleotide
  Antisense strand to SEQ ID NO: 98206
ucuuaggucauacagcagu

SEQ ID NO: 98288 - RNA, 19 nt, Artificial Sequence
  Description of Artificial Sequence: Synthetic oligonucleotide
  Sense strand starting at position 3003 of SEQ ID NO: 1238
cggaguccgguugaugaaa

SEQ ID NO: 98289 - RNA, 19 nt, Artificial Sequence
  Description of Artificial Sequence: Synthetic oligonucleotide
  Antisense strand to SEQ ID NO: 98208
uuucaucaaccggacuccg

SEQ ID NO: 98290 - RNA, 19 nt, Artificial Sequence
  Description of Artificial Sequence: Synthetic oligonucleotide
  Sense strand starting at position 2928 of SEQ ID NO: 1238
uuugcauugaguggauauu

SEQ ID NO: 98291 - RNA, 19 nt, Artificial Sequence
  Description of Artificial Sequence: Synthetic oligonucleotide
  Antisense strand to SEQ ID NO: 98210
aauauccacucaaugcaaa

SEQ ID NO: 98292 - RNA, 19 nt, Artificial Sequence
  Description of Artificial Sequence: Synthetic oligonucleotide
  Sense strand starting at position 2927 of SEQ ID NO: 1238
guuugcauugaguggauau

SEQ ID NO: 98293 - RNA, 19 nt, Artificial Sequence
  Description of Artificial Sequence: Synthetic oligonucleotide
  Antisense strand to SEQ ID NO: 98212
auauccacucaaugcaaac

SEQ ID NO: 98294 - RNA, 19 nt, Artificial Sequence
  Description of Artificial Sequence: Synthetic oligonucleotide
  Sense strand starting at position 2843 of SEQ ID NO: 1238
gugugcuuagauuggaaga

SEQ ID NO: 98295 - RNA, 19 nt, Artificial Sequence
  Description of Artificial Sequence: Synthetic oligonucleotide
  Antisense strand to SEQ ID NO: 98214
ucuuccaaucuaagcacac

SEQ ID NO: 98296 - RNA, 19 nt, Artificial Sequence
  Description of Artificial Sequence: Synthetic oligonucleotide
  Sense strand starting at position 2589 of SEQ ID NO: 1238
gcacuagaaugacugaagu

SEQ ID NO: 98297 - RNA, 19 nt, Artificial Sequence
  Description of Artificial Sequence: Synthetic oligonucleotide
  Antisense strand to SEQ ID NO: 98216
acuucagucauucuagugc

SEQ ID NO: 98298 - RNA, 19 nt, Artificial Sequence
  Description of Artificial Sequence: Synthetic oligonucleotide
  Sense strand starting at position 2063 of SEQ ID NO: 1238
gcggguuaggcugaagaaa

SEQ ID NO: 98299 - RNA, 19 nt, Artificial Sequence
  Description of Artificial Sequence: Synthetic oligonucleotide
  Antisense strand to SEQ ID NO: 98218
uuucuucagccuaacccgc

SEQ ID NO: 98300 - RNA, 19 nt, Artificial Sequence
  Description of Artificial Sequence: Synthetic oligonucleotide
  Sense strand starting at position 1396 of SEQ ID NO: 1238
uaagauuacccgggacaau

SEQ ID NO: 98301 - RNA, 19 nt, Artificial Sequence
  Description of Artificial Sequence: Synthetic oligonucleotide
  Antisense strand to SEQ ID NO: 98220
auugucccggguaaucuua

SEQ ID NO: 98302 - RNA, 19 nt, Artificial Sequence
  Description of Artificial Sequence: Synthetic oligonucleotide
  Sense strand starting at position 1395 of SEQ ID NO: 1238
cuaagauuacccgggacaa

SEQ ID NO: 98303 - RNA, 19 nt, Artificial Sequence
  Description of Artificial Sequence: Synthetic oligonucleotide
  Antisense strand to SEQ ID NO: 98222
uugucccggguaaucuuag

SEQ ID NO: 98304 - RNA, 19 nt, Artificial Sequence
  Description of Artificial Sequence: Synthetic oligonucleotide
  Sense strand starting at position 1113 of SEQ ID NO: 1238
uuagaagaugcguaagauc

SEQ ID NO: 98305 - RNA, 19 nt, Artificial Sequence
  Description of Artificial Sequence: Synthetic oligonucleotide
  Antisense strand to SEQ ID NO: 98224
gaucuuacgcaucuucuaa

SEQ ID NO: 98306 - RNA, 19 nt, Artificial Sequence
  Description of Artificial Sequence: Synthetic oligonucleotide
  Sense strand starting at position 1112 of SEQ ID NO: 1238
guuagaagaugcguaagau

SEQ ID NO: 98307 - RNA, 19 nt, Artificial Sequence
  Description of Artificial Sequence: Synthetic oligonucleotide
  Antisense strand to SEQ ID NO: 98226
aucuuacgcaucuucuaac

SEQ ID NO: 98308 - RNA, 19 nt, Artificial Sequence
  Description of Artificial Sequence: Synthetic oligonucleotide
  Sense strand starting at position 1010 of SEQ ID NO: 1238
ucugcuagagugcaagaaa

SEQ ID NO: 98309 - RNA, 19 nt, Artificial Sequence
  Description of Artificial Sequence: Synthetic oligonucleotide
  Antisense strand to SEQ ID NO: 98228
uuucuugcacucuagcaga

SEQ ID NO: 98310 - RNA, 19 nt, Artificial Sequence
  Description of Artificial Sequence: Synthetic oligonucleotide
  Sense strand starting at position 1005 of SEQ ID NO: 1238
agaugucugcuagagugca

SEQ ID NO: 98311 - RNA, 19 nt, Artificial Sequence
  Description of Artificial Sequence: Synthetic oligonucleotide
  Antisense strand to SEQ ID NO: 98230
ugcacucuagcagacaucu

SEQ ID NO: 98312 - RNA, 19 nt, Artificial Sequence
  Description of Artificial Sequence: Synthetic oligonucleotide
  Sense strand starting at position 1000 of SEQ ID NO: 1238
cucugagaugucugcuaga

SEQ ID NO: 98313 - RNA, 19 nt, Artificial Sequence
  Description of Artificial Sequence: Synthetic oligonucleotide
  Antisense strand to SEQ ID NO: 98232
ucuagcagacaucucagag

SEQ ID NO: 98314 - RNA, 19 nt, Artificial Sequence
  Description of Artificial Sequence: Synthetic oligonucleotide
  Sense strand starting at position 916 of SEQ ID NO: 1238
accagucugccacauauca

SEQ ID NO: 98315 - RNA, 19 nt, Artificial Sequence
  Description of Artificial Sequence: Synthetic oligonucleotide
  Antisense strand to SEQ ID NO: 98234
ugauauguggcagacuggu

SEQ ID NO: 98316 - RNA, 19 nt, Artificial Sequence
  Description of Artificial Sequence: Synthetic oligonucleotide
  Sense strand starting at position 893 of SEQ ID NO: 1238
ucaacagcucccugcaaga

SEQ ID NO: 98317 - RNA, 19 nt, Artificial Sequence
  Description of Artificial Sequence: Synthetic oligonucleotide
  Antisense strand to SEQ ID NO: 98236
ucuugcagggagcuguuga

SEQ ID NO: 98318 - RNA, 19 nt, Artificial Sequence
  Description of Artificial Sequence: Synthetic oligonucleotide
  Sense strand starting at position 717 of SEQ ID NO: 1238
acgaguaugccauaaacau

SEQ ID NO: 98319 - RNA, 19 nt, Artificial Sequence
  Description of Artificial Sequence: Synthetic oligonucleotide
  Antisense strand to SEQ ID NO: 98238
auguuuauggcauacucgu

SEQ ID NO: 98320 - RNA, 19 nt, Artificial Sequence
  Description of Artificial Sequence: Synthetic oligonucleotide
  Sense strand starting at position 697 of SEQ ID NO: 1238
ugaucaaugcuuugaaacu

SEQ ID NO: 98321 - RNA, 19 nt, Artificial Sequence
  Description of Artificial Sequence: Synthetic oligonucleotide
  Antisense strand to SEQ ID NO: 98240
aguuucaaagcauugauca

SEQ ID NO: 98322 - RNA, 19 nt, Artificial Sequence
  Description of Artificial Sequence: Synthetic oligonucleotide
  Sense strand starting at position 695 of SEQ ID NO: 1238
ucugaucaaugcuuugaaa

SEQ ID NO: 98323 - RNA, 19 nt, Artificial Sequence
  Description of Artificial Sequence: Synthetic oligonucleotide
  Antisense strand to SEQ ID NO: 98242
uuucaaagcauugaucaga

SEQ ID NO: 98324 - RNA, 19 nt, Artificial Sequence
  Description of Artificial Sequence: Synthetic oligonucleotide
  Sense strand starting at position 534 of SEQ ID NO: 1238
acaguuugguuucuaauaa

SEQ ID NO: 98325 - RNA, 19 nt, Artificial Sequence
  Description of Artificial Sequence: Synthetic oligonucleotide
  Antisense strand to SEQ ID NO: 98244
uuauuagaaaccaaacugu

SEQ ID NO: 98326 - RNA, 19 nt, Artificial Sequence
  Description of Artificial Sequence: Synthetic oligonucleotide
  Sense strand starting at position 265 of SEQ ID NO: 1238
guguauacauauccacaau

SEQ ID NO: 98327 - RNA, 19 nt, Artificial Sequence
  Description of Artificial Sequence: Synthetic oligonucleotide
  Antisense strand to SEQ ID NO: 98246
auuguggauauguauacac

SEQ ID NO: 98328 - RNA, 19 nt, Artificial Sequence
  Description of Artificial Sequence: Synthetic oligonucleotide
  Sense strand starting at position 120 of SEQ ID NO: 1238
uguuuaaagucugccaaag

SEQ ID NO: 98329 - RNA, 19 nt, Artificial Sequence
  Description of Artificial Sequence: Synthetic oligonucleotide
  Antisense strand to SEQ ID NO: 98248
cuuuggcagacuuuaaaca

SEQ ID NO: 98330 - RNA, 19 nt, Artificial Sequence
  Description of Artificial Sequence: Synthetic oligonucleotide
  Sense strand starting at position 119 of SEQ ID NO: 1238
cuguuuaaagucugccaaa

SEQ ID NO: 98331 - RNA, 19 nt, Artificial Sequence
  Description of Artificial Sequence: Synthetic oligonucleotide
  Antisense strand to SEQ ID NO: 98250
uuuggcagacuuuaaacag

SEQ ID NO: 98332 - RNA, 19 nt, Artificial Sequence
  Description of Artificial Sequence: Synthetic oligonucleotide
  Sense strand starting at position 148 of SEQ ID NO: 1239
cgaggccugucagauucau

SEQ ID NO: 98333 - RNA, 19 nt, Artificial Sequence
  Description of Artificial Sequence: Synthetic oligonucleotide
  Antisense strand to SEQ ID NO: 98252
augaaucugacaggccucg

SEQ ID NO: 98334 - RNA, 19 nt, Artificial Sequence
  Description of Artificial Sequence: Synthetic oligonucleotide
  Sense strand starting at position 183 of SEQ ID NO: 1239
guggaugucuucugucauc

SEQ ID NO: 98335 - RNA, 19 nt, Artificial Sequence
  Description of Artificial Sequence: Synthetic oligonucleotide
  Antisense strand to SEQ ID NO: 98254
gaugacagaagacauccac

SEQ ID NO: 98336 - RNA, 19 nt, Artificial Sequence
  Description of Artificial Sequence: Synthetic oligonucleotide
  Sense strand starting at position 188 of SEQ ID NO: 1239
ugucuucugucaucuuuga

SEQ ID NO: 98337 - RNA, 19 nt, Artificial Sequence
  Description of Artificial Sequence: Synthetic oligonucleotide
  Antisense strand to SEQ ID NO: 98256
ucaaagaugacagaagaca

SEQ ID NO: 98338 - RNA, 19 nt, Artificial Sequence
  Description of Artificial Sequence: Synthetic oligonucleotide
  Sense strand starting at position 196 of SEQ ID NO: 1239
gucaucuuugauugcucuu

SEQ ID NO: 98339 - RNA, 19 nt, Artificial Sequence
  Description of Artificial Sequence: Synthetic oligonucleotide
  Antisense strand to SEQ ID NO: 98258
aagagcaaucaaagaugac

SEQ ID NO: 98340 - RNA, 19 nt, Artificial Sequence
  Description of Artificial Sequence: Synthetic oligonucleotide
  Sense strand starting at position 269 of SEQ ID NO: 1239
ugguucugccuccaacagu

SEQ ID NO: 98341 - RNA, 19 nt, Artificial Sequence
  Description of Artificial Sequence: Synthetic oligonucleotide
  Antisense strand to SEQ ID NO: 98260
acuguuggaggcagaacca

SEQ ID NO: 98342 - RNA, 19 nt, Artificial Sequence
  Description of Artificial Sequence: Synthetic oligonucleotide
  Sense strand starting at position 644 of SEQ ID NO: 1239
caucuuucgugucuugaca

SEQ ID NO: 98343 - RNA, 19 nt, Artificial Sequence
  Description of Artificial Sequence: Synthetic oligonucleotide
  Antisense strand to SEQ ID NO: 98262
ugucaagacacgaaagaug

SEQ ID NO: 98344 - RNA, 19 nt, Artificial Sequence
  Description of Artificial Sequence: Synthetic oligonucleotide
  Sense strand starting at position 646 of SEQ ID NO: 1239
ucuuucgugucuugacaac

SEQ ID NO: 98345 - RNA, 19 nt, Artificial Sequence
  Description of Artificial Sequence: Synthetic oligonucleotide
  Antisense strand to SEQ ID NO: 98264
guugucaagacacgaaaga

SEQ ID NO: 98346 - RNA, 19 nt, Artificial Sequence
  Description of Artificial Sequence: Synthetic oligonucleotide
  Sense strand starting at position 1106 of SEQ ID NO: 1239
uaccguggucuauaaagac

SEQ ID NO: 98347 - RNA, 19 nt, Artificial Sequence
  Description of Artificial Sequence: Synthetic oligonucleotide
  Antisense strand to SEQ ID NO: 98266
gucuuuauagaccacggua

SEQ ID NO: 98348 - RNA, 19 nt, Artificial Sequence
  Description of Artificial Sequence: Synthetic oligonucleotide
  Sense strand starting at position 1251 of SEQ ID NO: 1239
ugguauucccuuuguguag

SEQ ID NO: 98349 - RNA, 19 nt, Artificial Sequence
  Description of Artificial Sequence: Synthetic oligonucleotide
  Antisense strand to SEQ ID NO: 98268
cuacacaaagggaauacca

SEQ ID NO: 98350 - RNA, 19 nt, Artificial Sequence
  Description of Artificial Sequence: Synthetic oligonucleotide
  Sense strand starting at position 1252 of SEQ ID NO: 1239
gguauucccuuuguguaga

SEQ ID NO: 98351 - RNA, 19 nt, Artificial Sequence
  Description of Artificial Sequence: Synthetic oligonucleotide
  Antisense strand to SEQ ID NO: 98270
ucuacacaaagggaauacc

SEQ ID NO: 98352 - RNA, 19 nt, Artificial Sequence
  Description of Artificial Sequence: Synthetic oligonucleotide
  Sense strand starting at position 1253 of SEQ ID NO: 1239
guauucccuuuguguagaa

SEQ ID NO: 98353 - RNA, 19 nt, Artificial Sequence
  Description of Artificial Sequence: Synthetic oligonucleotide
  Antisense strand to SEQ ID NO: 98272
uucuacacaaagggaauac

SEQ ID NO: 98354 - RNA, 19 nt, Artificial Sequence
  Description of Artificial Sequence: Synthetic oligonucleotide
  Sense strand starting at position 1266 of SEQ ID NO: 1239
guagaauggucuuccuuau

SEQ ID NO: 98355 - RNA, 19 nt, Artificial Sequence
  Description of Artificial Sequence: Synthetic oligonucleotide
  Antisense strand to SEQ ID NO: 98274
auaaggaagaccauucuac

SEQ ID NO: 98356 - RNA, 19 nt, Artificial Sequence
  Description of Artificial Sequence: Synthetic oligonucleotide
  Sense strand starting at position 1272 of SEQ ID NO: 1239
uggucuuccuuaugagcuu

SEQ ID NO: 98357 - RNA, 19 nt, Artificial Sequence
  Description of Artificial Sequence: Synthetic oligonucleotide
  Antisense strand to SEQ ID NO: 98276
aagcucauaaggaagacca

SEQ ID NO: 98358 - RNA, 19 nt, Artificial Sequence
  Description of Artificial Sequence: Synthetic oligonucleotide
  Sense strand starting at position 1298 of SEQ ID NO: 1239
cugagcccuucuuguuaau

SEQ ID NO: 98359 - RNA, 19 nt, Artificial Sequence
  Description of Artificial Sequence: Synthetic oligonucleotide
  Antisense strand to SEQ ID NO: 98278
auuaacaagaagggcucag

SEQ ID NO: 98360 - RNA, 19 nt, Artificial Sequence
  Description of Artificial Sequence: Synthetic oligonucleotide
  Sense strand starting at position 1316 of SEQ ID NO: 1239
uuaggacucggcugcaaua

SEQ ID NO: 98361 - RNA, 19 nt, Artificial Sequence
  Description of Artificial Sequence: Synthetic oligonucleotide
  Antisense strand to SEQ ID NO: 98280
uauugcagccgaguccuaa

SEQ ID NO: 98362 - RNA, 19 nt, Artificial Sequence
  Description of Artificial Sequence: Synthetic oligonucleotide
  Sense strand starting at position 1318 of SEQ ID NO: 1239
aggacucggcugcaauaua

SEQ ID NO: 98363 - RNA, 19 nt, Artificial Sequence
  Description of Artificial Sequence: Synthetic oligonucleotide
  Antisense strand to SEQ ID NO: 98282
uauauugcagccgaguccu

SEQ ID NO: 98364 - RNA, 19 nt, Artificial Sequence
  Description of Artificial Sequence: Synthetic oligonucleotide
  Sense strand starting at position 1347 of SEQ ID NO: 1239
agagcucucuaauggccaa

SEQ ID NO: 98365 - RNA, 19 nt, Artificial Sequence
  Description of Artificial Sequence: Synthetic oligonucleotide
  Antisense strand to SEQ ID NO: 98284
uuggccauuagagagcucu

SEQ ID NO: 98366 - RNA, 19 nt, Artificial Sequence
  Description of Artificial Sequence: Synthetic oligonucleotide
  Sense strand starting at position 1419 of SEQ ID NO: 1239
acucacugcuaucuggaau

SEQ ID NO: 98367 - RNA, 19 nt, Artificial Sequence
  Description of Artificial Sequence: Synthetic oligonucleotide
  Antisense strand to SEQ ID NO: 98286
auuccagauagcagugagu

SEQ ID NO: 98368 - RNA, 19 nt, Artificial Sequence
  Description of Artificial Sequence: Synthetic oligonucleotide
  Sense strand starting at position 1560 of SEQ ID NO: 1239
ucagucaacguuugcugaa

SEQ ID NO: 98369 - RNA, 19 nt, Artificial Sequence
  Description of Artificial Sequence: Synthetic oligonucleotide
  Antisense strand to SEQ ID NO: 98288
uucagcaaacguugacuga

SEQ ID NO: 98370 - RNA, 19 nt, Artificial Sequence
  Description of Artificial Sequence: Synthetic oligonucleotide
  Sense strand starting at position 1561 of SEQ ID NO: 1239
cagucaacguuugcugaau

SEQ ID NO: 98371 - RNA, 19 nt, Artificial Sequence
  Description of Artificial Sequence: Synthetic oligonucleotide
  Antisense strand to SEQ ID NO: 98290
auucagcaaacguugacug

SEQ ID NO: 98372 - RNA, 19 nt, Artificial Sequence
  Description of Artificial Sequence: Synthetic oligonucleotide
  Sense strand starting at position 1806 of SEQ ID NO: 1239
cacguaguaacgcagauaa

SEQ ID NO: 98373 - RNA, 19 nt, Artificial Sequence
  Description of Artificial Sequence: Synthetic oligonucleotide
  Antisense strand to SEQ ID NO: 98292
uuaucugcguuacuacgug

SEQ ID NO: 98374 - RNA, 19 nt, Artificial Sequence
  Description of Artificial Sequence: Synthetic oligonucleotide
  Sense strand starting at position 2732 of SEQ ID NO: 1239
ucaggugagucagaguuga

SEQ ID NO: 98375 - RNA, 19 nt, Artificial Sequence
  Description of Artificial Sequence: Synthetic oligonucleotide
  Antisense strand to SEQ ID NO: 98294
ucaacucugacucaccuga

SEQ ID NO: 98376 - RNA, 19 nt, Artificial Sequence
  Description of Artificial Sequence: Synthetic oligonucleotide
  Sense strand starting at position 2783 of SEQ ID NO: 1239
ggguaaaguuguccucugu

SEQ ID NO: 98377 - RNA, 19 nt, Artificial Sequence
  Description of Artificial Sequence: Synthetic oligonucleotide
  Antisense strand to SEQ ID NO: 98296
acagaggacaacuuuaccc

SEQ ID NO: 98378 - RNA, 19 nt, Artificial Sequence
  Description of Artificial Sequence: Synthetic oligonucleotide
  Sense strand starting at position 2898 of SEQ ID NO: 1239
guuccaggcuuagaaagaa

SEQ ID NO: 98379 - RNA, 19 nt, Artificial Sequence
  Description of Artificial Sequence: Synthetic oligonucleotide
  Antisense strand to SEQ ID NO: 98298
uucuuucuaagccuggaac

SEQ ID NO: 98380 - RNA, 19 nt, Artificial Sequence
  Description of Artificial Sequence: Synthetic oligonucleotide
  Sense strand starting at position 2915 of SEQ ID NO: 1239
aaugaaugguucuagagac

SEQ ID NO: 98381 - RNA, 19 nt, Artificial Sequence
  Description of Artificial Sequence: Synthetic oligonucleotide
  Antisense strand to SEQ ID NO: 98300
gucucuagaaccauucauu

SEQ ID NO: 98382 - RNA, 19 nt, Artificial Sequence
  Description of Artificial Sequence: Synthetic oligonucleotide
  Sense strand starting at position 2938 of SEQ ID NO: 1239
ccgagaugacaucauucuu

SEQ ID NO: 98383 - RNA, 19 nt, Artificial Sequence
  Description of Artificial Sequence: Synthetic oligonucleotide
  Antisense strand to SEQ ID NO: 98302
aagaaugaugucaucucgg

SEQ ID NO: 98384 - RNA, 19 nt, Artificial Sequence
  Description of Artificial Sequence: Synthetic oligonucleotide
  Sense strand starting at position 2966 of SEQ ID NO: 1239
cggcuagaacuguauacga

SEQ ID NO: 98385 - RNA, 19 nt, Artificial Sequence
  Description of Artificial Sequence: Synthetic oligonucleotide
  Antisense strand to SEQ ID NO: 98304
ucguauacaguucuagccg

SEQ ID NO: 98386 - RNA, 19 nt, Artificial Sequence
  Description of Artificial Sequence: Synthetic oligonucleotide
  Sense strand starting at position 2968 of SEQ ID NO: 1239
gcuagaacuguauacgauu

SEQ ID NO: 98387 - RNA, 19 nt, Artificial Sequence
  Description of Artificial Sequence: Synthetic oligonucleotide
  Antisense strand to SEQ ID NO: 98306
aaucguauacaguucuagc

SEQ ID NO: 98388 - RNA, 19 nt, Artificial Sequence
  Description of Artificial Sequence: Synthetic oligonucleotide
  Sense strand starting at position 2976 of SEQ ID NO: 1239
uguauacgauucuguaagu

SEQ ID NO: 98389 - RNA, 19 nt, Artificial Sequence
  Description of Artificial Sequence: Synthetic oligonucleotide
  Antisense strand to SEQ ID NO: 98308
acuuacagaaucguauaca

SEQ ID NO: 98390 - RNA, 19 nt, Artificial Sequence
  Description of Artificial Sequence: Synthetic oligonucleotide
  Sense strand starting at position 2977 of SEQ ID NO: 1239
guauacgauucuguaaguu

SEQ ID NO: 98391 - RNA, 19 nt, Artificial Sequence
  Description of Artificial Sequence: Synthetic oligonucleotide
  Antisense strand to SEQ ID NO: 98310
aacuuacagaaucguauac

SEQ ID NO: 98392 - RNA, 19 nt, Artificial Sequence
  Description of Artificial Sequence: Synthetic oligonucleotide
  Sense strand starting at position 2983 of SEQ ID NO: 1239
gauucuguaaguugggaca

SEQ ID NO: 98393 - RNA, 19 nt, Artificial Sequence
  Description of Artificial Sequence: Synthetic oligonucleotide
  Antisense strand to SEQ ID NO: 98312
ugucccaacuuacagaauc

SEQ ID NO: 98394 - RNA, 19 nt, Artificial Sequence
  Description of Artificial Sequence: Synthetic oligonucleotide
  Sense strand starting at position 3001 of SEQ ID NO: 1239
agcagucucugauuccuau

SEQ ID NO: 98395 - RNA, 19 nt, Artificial Sequence
  Description of Artificial Sequence: Synthetic oligonucleotide
  Antisense strand to SEQ ID NO: 98314
auaggaaucagagacugcu

SEQ ID NO: 98396 - RNA, 19 nt, Artificial Sequence
  Description of Artificial Sequence: Synthetic oligonucleotide
  Sense strand starting at position 3008 of SEQ ID NO: 1239
ucugauuccuauucccagu

SEQ ID NO: 98397 - RNA, 19 nt, Artificial Sequence
  Description of Artificial Sequence: Synthetic oligonucleotide
  Antisense strand to SEQ ID NO: 98316
acugggaauaggaaucaga

SEQ ID NO: 98398 - RNA, 19 nt, Artificial Sequence
  Description of Artificial Sequence: Synthetic oligonucleotide
  Sense strand starting at position 3135 of SEQ ID NO: 1239
ggcaaagucucccuauguu

SEQ ID NO: 98399 - RNA, 19 nt, Artificial Sequence
  Description of Artificial Sequence: Synthetic oligonucleotide
  Antisense strand to SEQ ID NO: 98318
aacauagggagacuuugcc

SEQ ID NO: 98400 - RNA, 19 nt, Artificial Sequence
  Description of Artificial Sequence: Synthetic oligonucleotide
  Sense strand starting at position 3526 of SEQ ID NO: 1239
ggugaaccgacucaacuuu

SEQ ID NO: 98401 - RNA, 19 nt, Artificial Sequence
  Description of Artificial Sequence: Synthetic oligonucleotide
  Antisense strand to SEQ ID NO: 98320
aaaguugagucgguucacc

SEQ ID NO: 98402 - RNA, 19 nt, Artificial Sequence
  Description of Artificial Sequence: Synthetic oligonucleotide
  Sense strand starting at position 3595 of SEQ ID NO: 1239
gcagaacuguuguaagaaa

SEQ ID NO: 98403 - RNA, 19 nt, Artificial Sequence
  Description of Artificial Sequence: Synthetic oligonucleotide
  Antisense strand to SEQ ID NO: 98322
uuucuuacaacaguucugc

SEQ ID NO: 98404 - RNA, 19 nt, Artificial Sequence
  Description of Artificial Sequence: Synthetic oligonucleotide
  Sense strand starting at position 3610 of SEQ ID NO: 1239
gaaacaaugucucggaaac

SEQ ID NO: 98405 - RNA, 19 nt, Artificial Sequence
  Description of Artificial Sequence: Synthetic oligonucleotide
  Antisense strand to SEQ ID NO: 98324
guuuccgagacauuguuuc

SEQ ID NO: 98406 - RNA, 19 nt, Artificial Sequence
  Description of Artificial Sequence: Synthetic oligonucleotide
  Sense strand starting at position 3669 of SEQ ID NO: 1239
acuggauaugggugguaac

SEQ ID NO: 98407 - RNA, 19 nt, Artificial Sequence
  Description of Artificial Sequence: Synthetic oligonucleotide
  Antisense strand to SEQ ID NO: 98326
guuaccacccauauccagu

SEQ ID NO: 98408 - RNA, 19 nt, Artificial Sequence
  Description of Artificial Sequence: Synthetic oligonucleotide
  Sense strand starting at position 3670 of SEQ ID NO: 1239
cuggauaugggugguaaca

SEQ ID NO: 98409 - RNA, 19 nt, Artificial Sequence
  Description of Artificial Sequence: Synthetic oligonucleotide
  Antisense strand to SEQ ID NO: 98328
uguuaccacccauauccag

SEQ ID NO: 98410 - RNA, 19 nt, Artificial Sequence
  Description of Artificial Sequence: Synthetic oligonucleotide
  Sense strand starting at position 3672 of SEQ ID NO: 1239
ggauaugggugguaacaag

SEQ ID NO: 98411 - RNA, 19 nt, Artificial Sequence
  Description of Artificial Sequence: Synthetic oligonucleotide
  Antisense strand to SEQ ID NO: 98330
cuuguuaccacccauaucc

SEQ ID NO: 98412 - RNA, 19 nt, Artificial Sequence
  Description of Artificial Sequence: Synthetic oligonucleotide
  Sense strand starting at position 3956 of SEQ ID NO: 1240
ugagaucauuaguuuccau

SEQ ID NO: 98413 - RNA, 19 nt, Artificial Sequence
  Description of Artificial Sequence: Synthetic oligonucleotide
  Antisense strand to SEQ ID NO: 98332
auggaaacuaaugaucuca

SEQ ID NO: 98414 - RNA, 19 nt, Artificial Sequence
  Description of Artificial Sequence: Synthetic oligonucleotide
  Sense strand starting at position 3953 of SEQ ID NO: 1240
uguugagaucauuaguuuc

SEQ ID NO: 98415 - RNA, 19 nt, Artificial Sequence
  Description of Artificial Sequence: Synthetic oligonucleotide
  Antisense strand to SEQ ID NO: 98334
gaaacuaaugaucucaaca

SEQ ID NO: 98416 - RNA, 19 nt, Artificial Sequence
  Description of Artificial Sequence: Synthetic oligonucleotide
  Sense strand starting at position 3950 of SEQ ID NO: 1240
uacuguugagaucauuagu

SEQ ID NO: 98417 - RNA, 19 nt, Artificial Sequence
  Description of Artificial Sequence: Synthetic oligonucleotide
  Antisense strand to SEQ ID NO: 98336
acuaaugaucucaacagua

SEQ ID NO: 98418 - RNA, 19 nt, Artificial Sequence
  Description of Artificial Sequence: Synthetic oligonucleotide
  Sense strand starting at position 3945 of SEQ ID NO: 1240
uuuccuacuguugagauca

SEQ ID NO: 98419 - RNA, 19 nt, Artificial Sequence
  Description of Artificial Sequence: Synthetic oligonucleotide
  Antisense strand to SEQ ID NO: 98338
ugaucucaacaguaggaaa

SEQ ID NO: 98420 - RNA, 19 nt, Artificial Sequence
  Description of Artificial Sequence: Synthetic oligonucleotide
  Sense strand starting at position 3869 of SEQ ID NO: 1240
agaauaagucucuaauguu

SEQ ID NO: 98421 - RNA, 19 nt, Artificial Sequence
  Description of Artificial Sequence: Synthetic oligonucleotide
  Antisense strand to SEQ ID NO: 98340
aacauuagagacuuauucu

SEQ ID NO: 98422 - RNA, 19 nt, Artificial Sequence
  Description of Artificial Sequence: Synthetic oligonucleotide
  Sense strand starting at position 3858 of SEQ ID NO: 1240
ugccaaauuuaagaauaag

SEQ ID NO: 98423 - RNA, 19 nt, Artificial Sequence
  Description of Artificial Sequence: Synthetic oligonucleotide
  Antisense strand to SEQ ID NO: 98342
cuuauucuuaaauuuggca

SEQ ID NO: 98424 - RNA, 19 nt, Artificial Sequence
  Description of Artificial Sequence: Synthetic oligonucleotide
  Sense strand starting at position 3794 of SEQ ID NO: 1240
uugaacauuugugaagagu

SEQ ID NO: 98425 - RNA, 19 nt, Artificial Sequence
  Description of Artificial Sequence: Synthetic oligonucleotide
  Antisense strand to SEQ ID NO: 98344
acucuucacaaauguucaa

SEQ ID NO: 98426 - RNA, 19 nt, Artificial Sequence
  Description of Artificial Sequence: Synthetic oligonucleotide
  Sense strand starting at position 3793 of SEQ ID NO: 1240
guugaacauuugugaagag

SEQ ID NO: 98427 - RNA, 19 nt, Artificial Sequence
  Description of Artificial Sequence: Synthetic oligonucleotide
  Antisense strand to SEQ ID NO: 98346
cucuucacaaauguucaac

SEQ ID NO: 98428 - RNA, 19 nt, Artificial Sequence
  Description of Artificial Sequence: Synthetic oligonucleotide
  Sense strand starting at position 3783 of SEQ ID NO: 1240
ugagauuuauguugaacau

SEQ ID NO: 98429 - RNA, 19 nt, Artificial Sequence
  Description of Artificial Sequence: Synthetic oligonucleotide
  Antisense strand to SEQ ID NO: 98348
auguucaacauaaaucuca

SEQ ID NO: 98430 - RNA, 19 nt, Artificial Sequence
  Description of Artificial Sequence: Synthetic oligonucleotide
  Sense strand starting at position 3780 of SEQ ID NO: 1240
uagugagauuuauguugaa

SEQ ID NO: 98431 - RNA, 19 nt, Artificial Sequence
  Description of Artificial Sequence: Synthetic oligonucleotide
  Antisense strand to SEQ ID NO: 98350
uucaacauaaaucucacua

SEQ ID NO: 98432 - RNA, 19 nt, Artificial Sequence
  Description of Artificial Sequence: Synthetic oligonucleotide
  Sense strand starting at position 3774 of SEQ ID NO: 1240
ggucccuagugagauuuau

SEQ ID NO: 98433 - RNA, 19 nt, Artificial Sequence
  Description of Artificial Sequence: Synthetic oligonucleotide
  Antisense strand to SEQ ID NO: 98352
auaaaucucacuagggacc

SEQ ID NO: 98434 - RNA, 19 nt, Artificial Sequence
  Description of Artificial Sequence: Synthetic oligonucleotide
  Sense strand starting at position 3674 of SEQ ID NO: 1240
agucauugucauugauccu

SEQ ID NO: 98435 - RNA, 19 nt, Artificial Sequence
  Description of Artificial Sequence: Synthetic oligonucleotide
  Antisense strand to SEQ ID NO: 98354
aggaucaaugacaaugacu

SEQ ID NO: 98436 - RNA, 19 nt, Artificial Sequence
  Description of Artificial Sequence: Synthetic oligonucleotide
  Sense strand starting at position 3636 of SEQ ID NO: 1240
agaagcucugcauaucuaa

SEQ ID NO: 98437 - RNA, 19 nt, Artificial Sequence
  Description of Artificial Sequence: Synthetic oligonucleotide
  Antisense strand to SEQ ID NO: 98356
uuagauaugcagagcuucu

SEQ ID NO: 98438 - RNA, 19 nt, Artificial Sequence
  Description of Artificial Sequence: Synthetic oligonucleotide
  Sense strand starting at position 3634 of SEQ ID NO: 1240
cuagaagcucugcauaucu

SEQ ID NO: 98439 - RNA, 19 nt, Artificial Sequence
  Description of Artificial Sequence: Synthetic oligonucleotide
  Antisense strand to SEQ ID NO: 98358
agauaugcagagcuucuag

SEQ ID NO: 98440 - RNA, 19 nt, Artificial Sequence
  Description of Artificial Sequence: Synthetic oligonucleotide
  Sense strand starting at position 3633 of SEQ ID NO: 1240
ucuagaagcucugcauauc

SEQ ID NO: 98441 - RNA, 19 nt, Artificial Sequence
  Description of Artificial Sequence: Synthetic oligonucleotide
  Antisense strand to SEQ ID NO: 98360
gauaugcagagcuucuaga

SEQ ID NO: 98442 - RNA, 19 nt, Artificial Sequence
  Description of Artificial Sequence: Synthetic oligonucleotide
  Sense strand starting at position 3614 of SEQ ID NO: 1240
ucucccagucugcauuauu

SEQ ID NO: 98443 - RNA, 19 nt, Artificial Sequence
  Description of Artificial Sequence: Synthetic oligonucleotide
  Antisense strand to SEQ ID NO: 98362
aauaaugcagacugggaga

SEQ ID NO: 98444 - RNA, 19 nt, Artificial Sequence
  Description of Artificial Sequence: Synthetic oligonucleotide
  Sense strand starting at position 3541 of SEQ ID NO: 1240
guaagucagccuuagcuua

SEQ ID NO: 98445 - RNA, 19 nt, Artificial Sequence
  Description of Artificial Sequence: Synthetic oligonucleotide
  Antisense strand to SEQ ID NO: 98364
uaagcuaaggcugacuuac

SEQ ID NO: 98446 - RNA, 19 nt, Artificial Sequence
  Description of Artificial Sequence: Synthetic oligonucleotide
  Sense strand starting at position 3483 of SEQ ID NO: 1240
guacacauccuuuacugau

SEQ ID NO: 98447 - RNA, 19 nt, Artificial Sequence
  Description of Artificial Sequence: Synthetic oligonucleotide
  Antisense strand to SEQ ID NO: 98366
aucaguaaaggauguguac

SEQ ID NO: 98448 - RNA, 19 nt, Artificial Sequence
  Description of Artificial Sequence: Synthetic oligonucleotide
  Sense strand starting at position 3472 of SEQ ID NO: 1240
ugucauucccuguacacau

SEQ ID NO: 98449 - RNA, 19 nt, Artificial Sequence
  Description of Artificial Sequence: Synthetic oligonucleotide
  Antisense strand to SEQ ID NO: 98368
auguguacagggaaugaca

SEQ ID NO: 98450 - RNA, 19 nt, Artificial Sequence
  Description of Artificial Sequence: Synthetic oligonucleotide
  Sense strand starting at position 3386 of SEQ ID NO: 1240
uguugugauuaagugcaaa

SEQ ID NO: 98451 - RNA, 19 nt, Artificial Sequence
  Description of Artificial Sequence: Synthetic oligonucleotide
  Antisense strand to SEQ ID NO: 98370
uuugcacuuaaucacaaca

SEQ ID NO: 98452 - RNA, 19 nt, Artificial Sequence
  Description of Artificial Sequence: Synthetic oligonucleotide
  Sense strand starting at position 3363 of SEQ ID NO: 1240
cuccguaguauugaggaga

SEQ ID NO: 98453 - RNA, 19 nt, Artificial Sequence
  Description of Artificial Sequence: Synthetic oligonucleotide
  Antisense strand to SEQ ID NO: 98372
ucuccucaauacuacggag

SEQ ID NO: 98454 - RNA, 19 nt, Artificial Sequence
  Description of Artificial Sequence: Synthetic oligonucleotide
  Sense strand starting at position 2965 of SEQ ID NO: 1240
uacugugauucuuuggaag

SEQ ID NO: 98455 - RNA, 19 nt, Artificial Sequence
  Description of Artificial Sequence: Synthetic oligonucleotide
  Antisense strand to SEQ ID NO: 98374
cuuccaaagaaucacagua

SEQ ID NO: 98456 - RNA, 19 nt, Artificial Sequence
  Description of Artificial Sequence: Synthetic oligonucleotide
  Sense strand starting at position 2958 of SEQ ID NO: 1240
uaacguuuacugugauucu

SEQ ID NO: 98457 - RNA, 19 nt, Artificial Sequence
  Description of Artificial Sequence: Synthetic oligonucleotide
  Antisense strand to SEQ ID NO: 98376
agaaucacaguaaacguua

SEQ ID NO: 98458 - RNA, 19 nt, Artificial Sequence
  Description of Artificial Sequence: Synthetic oligonucleotide
  Sense strand starting at position 2955 of SEQ ID NO: 1240
gguuaacguuuacugugau

SEQ ID NO: 98459 - RNA, 19 nt, Artificial Sequence
  Description of Artificial Sequence: Synthetic oligonucleotide
  Antisense strand to SEQ ID NO: 98378
aucacaguaaacguuaacc

SEQ ID NO: 98460 - RNA, 19 nt, Artificial Sequence
  Description of Artificial Sequence: Synthetic oligonucleotide
  Sense strand starting at position 2929 of SEQ ID NO: 1240
cggaguuaauggcuucuga

SEQ ID NO: 98461 - RNA, 19 nt, Artificial Sequence
  Description of Artificial Sequence: Synthetic oligonucleotide
  Antisense strand to SEQ ID NO: 98380
ucagaagccauuaacuccg

SEQ ID NO: 98462 - RNA, 19 nt, Artificial Sequence
  Description of Artificial Sequence: Synthetic oligonucleotide
  Sense strand starting at position 2916 of SEQ ID NO: 1240
aauguagugucaccggagu

SEQ ID NO: 98463 - RNA, 19 nt, Artificial Sequence
  Description of Artificial Sequence: Synthetic oligonucleotide
  Antisense strand to SEQ ID NO: 98382
acuccggugacacuacauu

SEQ ID NO: 98464 - RNA, 19 nt, Artificial Sequence
  Description of Artificial Sequence: Synthetic oligonucleotide
  Sense strand starting at position 2902 of SEQ ID NO: 1240
gaagguuucgcugaaaugu

SEQ ID NO: 98465 - RNA, 19 nt, Artificial Sequence
  Description of Artificial Sequence: Synthetic oligonucleotide
  Antisense strand to SEQ ID NO: 98384
acauuucagcgaaaccuuc

SEQ ID NO: 98466 - RNA, 19 nt, Artificial Sequence
  Description of Artificial Sequence: Synthetic oligonucleotide
  Sense strand starting at position 2766 of SEQ ID NO: 1240
ccgucugagcgcgaaagaa

SEQ ID NO: 98467 - RNA, 19 nt, Artificial Sequence
  Description of Artificial Sequence: Synthetic oligonucleotide
  Antisense strand to SEQ ID NO: 98386
uucuuucgcgcucagacgg

SEQ ID NO: 98468 - RNA, 19 nt, Artificial Sequence
  Description of Artificial Sequence: Synthetic oligonucleotide
  Sense strand starting at position 946 of SEQ ID NO: 1240
auguuaguaccagaacuuc

SEQ ID NO: 98469 - RNA, 19 nt, Artificial Sequence
  Description of Artificial Sequence: Synthetic oligonucleotide
  Antisense strand to SEQ ID NO: 98388
gaaguucugguacuaacau

SEQ ID NO: 98470 - RNA, 19 nt, Artificial Sequence
  Description of Artificial Sequence: Synthetic oligonucleotide
  Sense strand starting at position 836 of SEQ ID NO: 1240
ucagccagucuugaaguaa

SEQ ID NO: 98471 - RNA, 19 nt, Artificial Sequence
  Description of Artificial Sequence: Synthetic oligonucleotide
  Antisense strand to SEQ ID NO: 98390
uuacuucaagacuggcuga

SEQ ID NO: 98472 - RNA, 19 nt, Artificial Sequence
  Description of Artificial Sequence: Synthetic oligonucleotide
  Sense strand starting at position 792 of SEQ ID NO: 1240
cuaccauagacuggaggua

SEQ ID NO: 98473 - RNA, 19 nt, Artificial Sequence
  Description of Artificial Sequence: Synthetic oligonucleotide
  Antisense strand to SEQ ID NO: 98392
uaccuccagucuaugguag

SEQ ID NO: 98474 - RNA, 19 nt, Artificial Sequence
  Description of Artificial Sequence: Synthetic oligonucleotide
  Sense strand starting at position 781 of SEQ ID NO: 1240
gucuauggacucuaccaua

SEQ ID NO: 98475 - RNA, 19 nt, Artificial Sequence
  Description of Artificial Sequence: Synthetic oligonucleotide
  Antisense strand to SEQ ID NO: 98394
uaugguagaguccauagac

SEQ ID NO: 98476 - RNA, 19 nt, Artificial Sequence
  Description of Artificial Sequence: Synthetic oligonucleotide
  Sense strand starting at position 683 of SEQ ID NO: 1240
uucccagauguccacauua

SEQ ID NO: 98477 - RNA, 19 nt, Artificial Sequence
  Description of Artificial Sequence: Synthetic oligonucleotide
  Antisense strand to SEQ ID NO: 98396
uaauguggacaucugggaa

SEQ ID NO: 98478 - RNA, 19 nt, Artificial Sequence
  Description of Artificial Sequence: Synthetic oligonucleotide
  Sense strand starting at position 647 of SEQ ID NO: 1240
gucaccauuucuuuagguu

SEQ ID NO: 98479 - RNA, 19 nt, Artificial Sequence
  Description of Artificial Sequence: Synthetic oligonucleotide
  Antisense strand to SEQ ID NO: 98398
aaccuaaagaaauggugac

SEQ ID NO: 98480 - RNA, 19 nt, Artificial Sequence
  Description of Artificial Sequence: Synthetic oligonucleotide
  Sense strand starting at position 604 of SEQ ID NO: 1240
gacugacuccaacacguua

SEQ ID NO: 98481 - RNA, 19 nt, Artificial Sequence
  Description of Artificial Sequence: Synthetic oligonucleotide
  Antisense strand to SEQ ID NO: 98400
uaacguguuggagucaguc

SEQ ID NO: 98482 - RNA, 19 nt, Artificial Sequence
  Description of Artificial Sequence: Synthetic oligonucleotide
  Sense strand starting at position 568 of SEQ ID NO: 1240
aagguucgaugcuuugauu

SEQ ID NO: 98483 - RNA, 19 nt, Artificial Sequence
  Description of Artificial Sequence: Synthetic oligonucleotide
  Antisense strand to SEQ ID NO: 98402
aaucaaagcaucgaaccuu

SEQ ID NO: 98484 - RNA, 19 nt, Artificial Sequence
  Description of Artificial Sequence: Synthetic oligonucleotide
  Sense strand starting at position 529 of SEQ ID NO: 1240
acgagagcccucugggaga

SEQ ID NO: 98485 - RNA, 19 nt, Artificial Sequence
  Description of Artificial Sequence: Synthetic oligonucleotide
  Antisense strand to SEQ ID NO: 98404
ucucccagagggcucucgu

SEQ ID NO: 98486 - RNA, 19 nt, Artificial Sequence
  Description of Artificial Sequence: Synthetic oligonucleotide
  Sense strand starting at position 471 of SEQ ID NO: 1240
ccacguuugucauccuaaa

SEQ ID NO: 98487 - RNA, 19 nt, Artificial Sequence
  Description of Artificial Sequence: Synthetic oligonucleotide
  Antisense strand to SEQ ID NO: 98406
uuuaggaugacaaacgugg

SEQ ID NO: 98488 - RNA, 19 nt, Artificial Sequence
  Description of Artificial Sequence: Synthetic oligonucleotide
  Sense strand starting at position 252 of SEQ ID NO: 1240
ccaauaguugcuugacaca

SEQ ID NO: 98489 - RNA, 19 nt, Artificial Sequence
  Description of Artificial Sequence: Synthetic oligonucleotide
  Antisense strand to SEQ ID NO: 98408
ugugucaagcaacuauugg

SEQ ID NO: 98490 - RNA, 19 nt, Artificial Sequence
  Description of Artificial Sequence: Synthetic oligonucleotide
  Sense strand starting at position 250 of SEQ ID NO: 1240
uuccaauaguugcuugaca

SEQ ID NO: 98491 - RNA, 19 nt, Artificial Sequence
  Description of Artificial Sequence: Synthetic oligonucleotide
  Antisense strand to SEQ ID NO: 98410
ugucaagcaacuauuggaa

SEQ ID NO: 98492 - RNA, 19 nt, Artificial Sequence
  Description of Artificial Sequence: Synthetic oligonucleotide
  Sense strand starting at position 3971 of SEQ ID NO: 1241
caguguugacgagacagaa

SEQ ID NO: 98493 - RNA, 19 nt, Artificial Sequence
  Description of Artificial Sequence: Synthetic oligonucleotide
  Antisense strand to SEQ ID NO: 98412
uucugucucgucaacacug

SEQ ID NO: 98494 - RNA, 19 nt, Artificial Sequence
  Description of Artificial Sequence: Synthetic oligonucleotide
  Sense strand starting at position 3912 of SEQ ID NO: 1241
agguuuguaauaggcaaga

SEQ ID NO: 98495 - RNA, 19 nt, Artificial Sequence
  Description of Artificial Sequence: Synthetic oligonucleotide
  Antisense strand to SEQ ID NO: 98414
ucuugccuauuacaaaccu

SEQ ID NO: 98496 - RNA, 19 nt, Artificial Sequence
  Description of Artificial Sequence: Synthetic oligonucleotide
  Sense strand starting at position 3899 of SEQ ID NO: 1241
gagacaaauuaagagguuu

SEQ ID NO: 98497 - RNA, 19 nt, Artificial Sequence
  Description of Artificial Sequence: Synthetic oligonucleotide
  Antisense strand to SEQ ID NO: 98416
aaaccucuuaauuugucuc

SEQ ID NO: 98498 - RNA, 19 nt, Artificial Sequence
  Description of Artificial Sequence: Synthetic oligonucleotide
  Sense strand starting at position 3784 of SEQ ID NO: 1241
ggacuuagucucugcaucu

SEQ ID NO: 98499 - RNA, 19 nt, Artificial Sequence
  Description of Artificial Sequence: Synthetic oligonucleotide
  Antisense strand to SEQ ID NO: 98418
agaugcagagacuaagucc

SEQ ID NO: 98500 - RNA, 19 nt, Artificial Sequence
  Description of Artificial Sequence: Synthetic oligonucleotide
  Sense strand starting at position 3615 of SEQ ID NO: 1241
gugauuauaccacaguaug

SEQ ID NO: 98501 - RNA, 19 nt, Artificial Sequence
  Description of Artificial Sequence: Synthetic oligonucleotide
  Antisense strand to SEQ ID NO: 98420
cauacugugguauaaucac

SEQ ID NO: 98502 - RNA, 19 nt, Artificial Sequence
  Description of Artificial Sequence: Synthetic oligonucleotide
  Sense strand starting at position 3529 of SEQ ID NO: 1241
ggcauagaucuauaugcac

SEQ ID NO: 98503 - RNA, 19 nt, Artificial Sequence
  Description of Artificial Sequence: Synthetic oligonucleotide
  Antisense strand to SEQ ID NO: 98422
gugcauauagaucuaugcc

SEQ ID NO: 98504 - RNA, 19 nt, Artificial Sequence
  Description of Artificial Sequence: Synthetic oligonucleotide
  Sense strand starting at position 3500 of SEQ ID NO: 1241
guguguuuauaugcacaug

SEQ ID NO: 98505 - RNA, 19 nt, Artificial Sequence
  Description of Artificial Sequence: Synthetic oligonucleotide
  Antisense strand to SEQ ID NO: 98424
caugugcauauaaacacac

SEQ ID NO: 98506 - RNA, 19 nt, Artificial Sequence
  Description of Artificial Sequence: Synthetic oligonucleotide
  Sense strand starting at position 3494 of SEQ ID NO: 1241
gccuacguguguuuauaug

SEQ ID NO: 98507 - RNA, 19 nt, Artificial Sequence
  Description of Artificial Sequence: Synthetic oligonucleotide
  Antisense strand to SEQ ID NO: 98426
cauauaaacacacguaggc

SEQ ID NO: 98508 - RNA, 19 nt, Artificial Sequence
  Description of Artificial Sequence: Synthetic oligonucleotide
  Sense strand starting at position 3493 of SEQ ID NO: 1241
ugccuacguguguuuauau

SEQ ID NO: 98509 - RNA, 19 nt, Artificial Sequence
  Description of Artificial Sequence: Synthetic oligonucleotide
  Antisense strand to SEQ ID NO: 98428
auauaaacacacguaggca

SEQ ID NO: 98510 - RNA, 19 nt, Artificial Sequence
  Description of Artificial Sequence: Synthetic oligonucleotide
  Sense strand starting at position 3492 of SEQ ID NO: 1241
augccuacguguguuuaua

SEQ ID NO: 98511 - RNA, 19 nt, Artificial Sequence
  Description of Artificial Sequence: Synthetic oligonucleotide
  Antisense strand to SEQ ID NO: 98430
uauaaacacacguaggcau

SEQ ID NO: 98512 - RNA, 19 nt, Artificial Sequence
  Description of Artificial Sequence: Synthetic oligonucleotide
  Sense strand starting at position 3491 of SEQ ID NO: 1241
gaugccuacguguguuuau

SEQ ID NO: 98513 - RNA, 19 nt, Artificial Sequence
  Description of Artificial Sequence: Synthetic oligonucleotide
  Antisense strand to SEQ ID NO: 98432
auaaacacacguaggcauc

SEQ ID NO: 98514 - RNA, 19 nt, Artificial Sequence
  Description of Artificial Sequence: Synthetic oligonucleotide
  Sense strand starting at position 3490 of SEQ ID NO: 1241
ugaugccuacguguguuua

SEQ ID NO: 98515 - RNA, 19 nt, Artificial Sequence
  Description of Artificial Sequence: Synthetic oligonucleotide
  Antisense strand to SEQ ID NO: 98434
uaaacacacguaggcauca

SEQ ID NO: 98516 - RNA, 19 nt, Artificial Sequence
  Description of Artificial Sequence: Synthetic oligonucleotide
  Sense strand starting at position 3442 of SEQ ID NO: 1241
gggcgugucuacagaagac

SEQ ID NO: 98517 - RNA, 19 nt, Artificial Sequence
  Description of Artificial Sequence: Synthetic oligonucleotide
  Antisense strand to SEQ ID NO: 98436
gucuucuguagacacgccc

SEQ ID NO: 98518 - RNA, 19 nt, Artificial Sequence
  Description of Artificial Sequence: Synthetic oligonucleotide
  Sense strand starting at position 3441 of SEQ ID NO: 1241
cgggcgugucuacagaaga

SEQ ID NO: 98519 - RNA, 19 nt, Artificial Sequence
  Description of Artificial Sequence: Synthetic oligonucleotide
  Antisense strand to SEQ ID NO: 98438
ucuucuguagacacgcccg

SEQ ID NO: 98520 - RNA, 19 nt, Artificial Sequence
  Description of Artificial Sequence: Synthetic oligonucleotide
  Sense strand starting at position 2666 of SEQ ID NO: 1241
ucgggcuuucacugcgaca

SEQ ID NO: 98521 - RNA, 19 nt, Artificial Sequence
  Description of Artificial Sequence: Synthetic oligonucleotide
  Antisense strand to SEQ ID NO: 98440
ugucgcagugaaagcccga

SEQ ID NO: 98522 - RNA, 19 nt, Artificial Sequence
  Description of Artificial Sequence: Synthetic oligonucleotide
  Sense strand starting at position 2255 of SEQ ID NO: 1241
gggacacguccacaacuuu

SEQ ID NO: 98523 - RNA, 19 nt, Artificial Sequence
  Description of Artificial Sequence: Synthetic oligonucleotide
  Antisense strand to SEQ ID NO: 98442
aaaguuguggacguguccc

SEQ ID NO: 98524 - RNA, 19 nt, Artificial Sequence
  Description of Artificial Sequence: Synthetic oligonucleotide
  Sense strand starting at position 1072 of SEQ ID NO: 1241
agggucuucucuccuuaga

SEQ ID NO: 98525 - RNA, 19 nt, Artificial Sequence
  Description of Artificial Sequence: Synthetic oligonucleotide
  Antisense strand to SEQ ID NO: 98444
ucuaaggagagaagacccu

SEQ ID NO: 98526 - RNA, 19 nt, Artificial Sequence
  Description of Artificial Sequence: Synthetic oligonucleotide
  Sense strand starting at position 956 of SEQ ID NO: 1241
gaaagaaggugggacauuu

SEQ ID NO: 98527 - RNA, 19 nt, Artificial Sequence
  Description of Artificial Sequence: Synthetic oligonucleotide
  Antisense strand to SEQ ID NO: 98446
aaaugucccaccuucuuuc

SEQ ID NO: 98528 - RNA, 19 nt, Artificial Sequence
  Description of Artificial Sequence: Synthetic oligonucleotide
  Sense strand starting at position 732 of SEQ ID NO: 1241
uggcucuguguccacaaau

SEQ ID NO: 98529 - RNA, 19 nt, Artificial Sequence
  Description of Artificial Sequence: Synthetic oligonucleotide
  Antisense strand to SEQ ID NO: 98448
auuuguggacacagagcca

SEQ ID NO: 98530 - RNA, 19 nt, Artificial Sequence
  Description of Artificial Sequence: Synthetic oligonucleotide
  Sense strand starting at position 731 of SEQ ID NO: 1241
guggcucuguguccacaaa

SEQ ID NO: 98531 - RNA, 19 nt, Artificial Sequence
  Description of Artificial Sequence: Synthetic oligonucleotide
  Antisense strand to SEQ ID NO: 98450
uuuguggacacagagccac

SEQ ID NO: 98532 - RNA, 19 nt, Artificial Sequence
  Description of Artificial Sequence: Synthetic oligonucleotide
  Sense strand starting at position 605 of SEQ ID NO: 1241
gguugcuuacuagauuaca

SEQ ID NO: 98533 - RNA, 19 nt, Artificial Sequence
  Description of Artificial Sequence: Synthetic oligonucleotide
  Antisense strand to SEQ ID NO: 98452
uguaaucuaguaagcaacc

SEQ ID NO: 98534 - RNA, 19 nt, Artificial Sequence
  Description of Artificial Sequence: Synthetic oligonucleotide
  Sense strand starting at position 602 of SEQ ID NO: 1241
guagguugcuuacuagauu

SEQ ID NO: 98535 - RNA, 19 nt, Artificial Sequence
  Description of Artificial Sequence: Synthetic oligonucleotide
  Antisense strand to SEQ ID NO: 98454
aaucuaguaagcaaccuac

SEQ ID NO: 98536 - RNA, 19 nt, Artificial Sequence
  Description of Artificial Sequence: Synthetic oligonucleotide
  Sense strand starting at position 598 of SEQ ID NO: 1241
guuuguagguugcuuacua

SEQ ID NO: 98537 - RNA, 19 nt, Artificial Sequence
  Description of Artificial Sequence: Synthetic oligonucleotide
  Antisense strand to SEQ ID NO: 98456
uaguaagcaaccuacaaac

SEQ ID NO: 98538 - RNA, 19 nt, Artificial Sequence
  Description of Artificial Sequence: Synthetic oligonucleotide
  Sense strand starting at position 556 of SEQ ID NO: 1241
gcucaauaagcucaauaga

SEQ ID NO: 98539 - RNA, 19 nt, Artificial Sequence
  Description of Artificial Sequence: Synthetic oligonucleotide
  Antisense strand to SEQ ID NO: 98458
ucuauugagcuuauugagc

SEQ ID NO: 98540 - RNA, 19 nt, Artificial Sequence
  Description of Artificial Sequence: Synthetic oligonucleotide
  Sense strand starting at position 538 of SEQ ID NO: 1241
guguacaauuguucugaag

SEQ ID NO: 98541 - RNA, 19 nt, Artificial Sequence
  Description of Artificial Sequence: Synthetic oligonucleotide
  Antisense strand to SEQ ID NO: 98460
cuucagaacaauuguacac

SEQ ID NO: 98542 - RNA, 19 nt, Artificial Sequence
  Description of Artificial Sequence: Synthetic oligonucleotide
  Sense strand starting at position 537 of SEQ ID NO: 1241
uguguacaauuguucugaa

SEQ ID NO: 98543 - RNA, 19 nt, Artificial Sequence
  Description of Artificial Sequence: Synthetic oligonucleotide
  Antisense strand to SEQ ID NO: 98462
uucagaacaauuguacaca

SEQ ID NO: 98544 - RNA, 19 nt, Artificial Sequence
  Description of Artificial Sequence: Synthetic oligonucleotide
  Sense strand starting at position 529 of SEQ ID NO: 1241
uguacaauuguguacaauu

SEQ ID NO: 98545 - RNA, 19 nt, Artificial Sequence
  Description of Artificial Sequence: Synthetic oligonucleotide
  Antisense strand to SEQ ID NO: 98464
aauuguacacaauuguaca

SEQ ID NO: 98546 - RNA, 19 nt, Artificial Sequence
  Description of Artificial Sequence: Synthetic oligonucleotide
  Sense strand starting at position 528 of SEQ ID NO: 1241
auguacaauuguguacaau

SEQ ID NO: 98547 - RNA, 19 nt, Artificial Sequence
  Description of Artificial Sequence: Synthetic oligonucleotide
  Antisense strand to SEQ ID NO: 98466
auuguacacaauuguacau

SEQ ID NO: 98548 - RNA, 19 nt, Artificial Sequence
  Description of Artificial Sequence: Synthetic oligonucleotide
  Sense strand starting at position 469 of SEQ ID NO: 1241
cucggagcuucuguaauau

SEQ ID NO: 98549 - RNA, 19 nt, Artificial Sequence
  Description of Artificial Sequence: Synthetic oligonucleotide
  Antisense strand to SEQ ID NO: 98468
auauuacagaagcuccgag

SEQ ID NO: 98550 - RNA, 19 nt, Artificial Sequence
  Description of Artificial Sequence: Synthetic oligonucleotide
  Sense strand starting at position 460 of SEQ ID NO: 1241
gccaauaaccucggagcuu

SEQ ID NO: 98551 - RNA, 19 nt, Artificial Sequence
  Description of Artificial Sequence: Synthetic oligonucleotide
  Antisense strand to SEQ ID NO: 98470
aagcuccgagguuauuggc

SEQ ID NO: 98552 - RNA, 19 nt, Artificial Sequence
  Description of Artificial Sequence: Synthetic oligonucleotide
  Sense strand starting at position 298 of SEQ ID NO: 1241
cagaauauuuaguggcagu

SEQ ID NO: 98553 - RNA, 19 nt, Artificial Sequence
  Description of Artificial Sequence: Synthetic oligonucleotide
  Antisense strand to SEQ ID NO: 98472
acugccacuaaauauucug

SEQ ID NO: 98554 - RNA, 19 nt, Artificial Sequence
  Description of Artificial Sequence: Synthetic oligonucleotide
  Sense strand starting at position 288 of SEQ ID NO: 1241
agugguccagcagaauauu

SEQ ID NO: 98555 - RNA, 19 nt, Artificial Sequence
  Description of Artificial Sequence: Synthetic oligonucleotide
  Antisense strand to SEQ ID NO: 98474
aauauucugcuggaccacu

SEQ ID NO: 98556 - RNA, 19 nt, Artificial Sequence
  Description of Artificial Sequence: Synthetic oligonucleotide
  Sense strand starting at position 169 of SEQ ID NO: 1241
cucguuucuagggaggaga

SEQ ID NO: 98557 - RNA, 19 nt, Artificial Sequence
  Description of Artificial Sequence: Synthetic oligonucleotide
  Antisense strand to SEQ ID NO: 98476
ucuccucccuagaaacgag

SEQ ID NO: 98558 - RNA, 19 nt, Artificial Sequence
  Description of Artificial Sequence: Synthetic oligonucleotide
  Sense strand starting at position 156 of SEQ ID NO: 1241
gggagagcauccucucguu

SEQ ID NO: 98559 - RNA, 19 nt, Artificial Sequence
  Description of Artificial Sequence: Synthetic oligonucleotide
  Antisense strand to SEQ ID NO: 98478
aacgagaggaugcucuccc

SEQ ID NO: 98560 - RNA, 19 nt, Artificial Sequence
  Description of Artificial Sequence: Synthetic oligonucleotide
  Sense strand starting at position 127 of SEQ ID NO: 1241
cccuuucuuuccuuugagu

SEQ ID NO: 98561 - RNA, 19 nt, Artificial Sequence
  Description of Artificial Sequence: Synthetic oligonucleotide
  Antisense strand to SEQ ID NO: 98480
acucaaaggaaagaaaggg

SEQ ID NO: 98562 - RNA, 19 nt, Artificial Sequence
  Description of Artificial Sequence: Synthetic oligonucleotide
  Sense strand starting at position 88 of SEQ ID NO: 1241
acuucuucgcagcaaauca

SEQ ID NO: 98563 - RNA, 19 nt, Artificial Sequence
  Description of Artificial Sequence: Synthetic oligonucleotide
  Antisense strand to SEQ ID NO: 98482
ugauuugcugcgaagaagu

SEQ ID NO: 98564 - RNA, 19 nt, Artificial Sequence
  Description of Artificial Sequence: Synthetic oligonucleotide
  Sense strand starting at position 84 of SEQ ID NO: 1241
gcugacuucuucgcagcaa

SEQ ID NO: 98565 - RNA, 19 nt, Artificial Sequence
  Description of Artificial Sequence: Synthetic oligonucleotide
  Antisense strand to SEQ ID NO: 98484
uugcugcgaagaagucagc

SEQ ID NO: 98566 - RNA, 19 nt, Artificial Sequence
  Description of Artificial Sequence: Synthetic oligonucleotide
  Sense strand starting at position 63 of SEQ ID NO: 1241
ccuggaaaucagggucgaa

SEQ ID NO: 98567 - RNA, 19 nt, Artificial Sequence
  Description of Artificial Sequence: Synthetic oligonucleotide
  Antisense strand to SEQ ID NO: 98486
uucgacccugauuuccagg

SEQ ID NO: 98568 - RNA, 19 nt, Artificial Sequence
  Description of Artificial Sequence: Synthetic oligonucleotide
  Sense strand starting at position 55 of SEQ ID NO: 1241
cugcucuuccuggaaauca

SEQ ID NO: 98569 - RNA, 19 nt, Artificial Sequence
  Description of Artificial Sequence: Synthetic oligonucleotide
  Antisense strand to SEQ ID NO: 98488
ugauuuccaggaagagcag

SEQ ID NO: 98570 - RNA, 19 nt, Artificial Sequence
  Description of Artificial Sequence: Synthetic oligonucleotide
  Sense strand starting at position 54 of SEQ ID NO: 1241
ccugcucuuccuggaaauc

SEQ ID NO: 98571 - RNA, 19 nt, Artificial Sequence
  Description of Artificial Sequence: Synthetic oligonucleotide
  Antisense strand to SEQ ID NO: 98490
gauuuccaggaagagcagg

SEQ ID NO: 98572 - RNA, 19 nt, Artificial Sequence
  Description of Artificial Sequence: Synthetic oligonucleotide
  Sense strand starting at position 3938 of SEQ ID NO: 1243
aggugacucugggaauaga

SEQ ID NO: 98573 - RNA, 19 nt, Artificial Sequence
  Description of Artificial Sequence: Synthetic oligonucleotide
  Antisense strand to SEQ ID NO: 98492
ucuauucccagagucaccu

SEQ ID NO: 98574 - RNA, 19 nt, Artificial Sequence
  Description of Artificial Sequence: Synthetic oligonucleotide
  Sense strand starting at position 3936 of SEQ ID NO: 1243
ugaggugacucugggaaua

SEQ ID NO: 98575 - RNA, 19 nt, Artificial Sequence
  Description of Artificial Sequence: Synthetic oligonucleotide
  Antisense strand to SEQ ID NO: 98494
uauucccagagucaccuca

SEQ ID NO: 98576 - RNA, 19 nt, Artificial Sequence
  Description of Artificial Sequence: Synthetic oligonucleotide
  Sense strand starting at position 3910 of SEQ ID NO: 1243
gagagaauaccaugucuac

SEQ ID NO: 98577 - RNA, 19 nt, Artificial Sequence
  Description of Artificial Sequence: Synthetic oligonucleotide
  Antisense strand to SEQ ID NO: 98496
guagacaugguauucucuc

SEQ ID NO: 98578 - RNA, 19 nt, Artificial Sequence
  Description of Artificial Sequence: Synthetic oligonucleotide
  Sense strand starting at position 3898 of SEQ ID NO: 1243
gguuaaauguuggagagaa

SEQ ID NO: 98579 - RNA, 19 nt, Artificial Sequence
  Description of Artificial Sequence: Synthetic oligonucleotide
  Antisense strand to SEQ ID NO: 98498
uucucuccaacauuuaacc

SEQ ID NO: 98580 - RNA, 19 nt, Artificial Sequence
  Description of Artificial Sequence: Synthetic oligonucleotide
  Sense strand starting at position 3897 of SEQ ID NO: 1243
ggguuaaauguuggagaga

SEQ ID NO: 98581 - RNA, 19 nt, Artificial Sequence
  Description of Artificial Sequence: Synthetic oligonucleotide
  Antisense strand to SEQ ID NO: 98500
ucucuccaacauuuaaccc

SEQ ID NO: 98582 - RNA, 19 nt, Artificial Sequence
  Description of Artificial Sequence: Synthetic oligonucleotide
  Sense strand starting at position 3889 of SEQ ID NO: 1243
uguggaguggguuaaaugu

SEQ ID NO: 98583 - RNA, 19 nt, Artificial Sequence
  Description of Artificial Sequence: Synthetic oligonucleotide
  Antisense strand to SEQ ID NO: 98502
acauuuaacccacuccaca

SEQ ID NO: 98584 - RNA, 19 nt, Artificial Sequence
  Description of Artificial Sequence: Synthetic oligonucleotide
  Sense strand starting at position 3868 of SEQ ID NO: 1243
augacuagaugagauuaca

SEQ ID NO: 98585 - RNA, 19 nt, Artificial Sequence
  Description of Artificial Sequence: Synthetic oligonucleotide
  Antisense strand to SEQ ID NO: 98504
uguaaucucaucuagucau

SEQ ID NO: 98586 - RNA, 19 nt, Artificial Sequence
  Description of Artificial Sequence: Synthetic oligonucleotide
  Sense strand starting at position 3794 of SEQ ID NO: 1243
ugaaucuccuuggucuaau

SEQ ID NO: 98587 - RNA, 19 nt, Artificial Sequence
  Description of Artificial Sequence: Synthetic oligonucleotide
  Antisense strand to SEQ ID NO: 98506
auuagaccaaggagauuca

SEQ ID NO: 98588 - RNA, 19 nt, Artificial Sequence
  Description of Artificial Sequence: Synthetic oligonucleotide
  Sense strand starting at position 3793 of SEQ ID NO: 1243
uugaaucuccuuggucuaa

SEQ ID NO: 98589 - RNA, 19 nt, Artificial Sequence
  Description of Artificial Sequence: Synthetic oligonucleotide
  Antisense strand to SEQ ID NO: 98508
uuagaccaaggagauucaa

SEQ ID NO: 98590 - RNA, 19 nt, Artificial Sequence
  Description of Artificial Sequence: Synthetic oligonucleotide
  Sense strand starting at position 3792 of SEQ ID NO: 1243
auugaaucuccuuggucua

SEQ ID NO: 98591 - RNA, 19 nt, Artificial Sequence
  Description of Artificial Sequence: Synthetic oligonucleotide
  Antisense strand to SEQ ID NO: 98510
uagaccaaggagauucaau

SEQ ID NO: 98592 - RNA, 19 nt, Artificial Sequence
  Description of Artificial Sequence: Synthetic oligonucleotide
  Sense strand starting at position 3532 of SEQ ID NO: 1243
ggaauaugccaguguauca

SEQ ID NO: 98593 - RNA, 19 nt, Artificial Sequence
  Description of Artificial Sequence: Synthetic oligonucleotide
  Antisense strand to SEQ ID NO: 98512
ugauacacuggcauauucc

SEQ ID NO: 98594 - RNA, 19 nt, Artificial Sequence
  Description of Artificial Sequence: Synthetic oligonucleotide
  Sense strand starting at position 3529 of SEQ ID NO: 1243
uaaggaauaugccagugua

SEQ ID NO: 98595 - RNA, 19 nt, Artificial Sequence
  Description of Artificial Sequence: Synthetic oligonucleotide
  Antisense strand to SEQ ID NO: 98514
uacacuggcauauuccuua

SEQ ID NO: 98596 - RNA, 19 nt, Artificial Sequence
  Description of Artificial Sequence: Synthetic oligonucleotide
  Sense strand starting at position 3465 of SEQ ID NO: 1243
gguaaaugugaaugaagug

SEQ ID NO: 98597 - RNA, 19 nt, Artificial Sequence
  Description of Artificial Sequence: Synthetic oligonucleotide
  Antisense strand to SEQ ID NO: 98516
cacuucauucacauuuacc

SEQ ID NO: 98598 - RNA, 19 nt, Artificial Sequence
  Description of Artificial Sequence: Synthetic oligonucleotide
  Sense strand starting at position 3462 of SEQ ID NO: 1243
ggugguaaaugugaaugaa

SEQ ID NO: 98599 - RNA, 19 nt, Artificial Sequence
  Description of Artificial Sequence: Synthetic oligonucleotide
  Antisense strand to SEQ ID NO: 98518
uucauucacauuuaccacc

SEQ ID NO: 98600 - RNA, 19 nt, Artificial Sequence
  Description of Artificial Sequence: Synthetic oligonucleotide
  Sense strand starting at position 3453 of SEQ ID NO: 1243
agaccuuauggugguaaau

SEQ ID NO: 98601 - RNA, 19 nt, Artificial Sequence
  Description of Artificial Sequence: Synthetic oligonucleotide
  Antisense strand to SEQ ID NO: 98520
auuuaccaccauaaggucu

SEQ ID NO: 98602 - RNA, 19 nt, Artificial Sequence
  Description of Artificial Sequence: Synthetic oligonucleotide
  Sense strand starting at position 3442 of SEQ ID NO: 1243
gugagcuugagagaccuua

SEQ ID NO: 98603 - RNA, 19 nt, Artificial Sequence
  Description of Artificial Sequence: Synthetic oligonucleotide
  Antisense strand to SEQ ID NO: 98522
uaaggucucucaagcucac

SEQ ID NO: 98604 - RNA, 19 nt, Artificial Sequence
  Description of Artificial Sequence: Synthetic oligonucleotide
  Sense strand starting at position 3351 of SEQ ID NO: 1243
guucuuauugguuaaguaa

SEQ ID NO: 98605 - RNA, 19 nt, Artificial Sequence
  Description of Artificial Sequence: Synthetic oligonucleotide
  Antisense strand to SEQ ID NO: 98524
uuacuuaaccaauaagaac

SEQ ID NO: 98606 - RNA, 19 nt, Artificial Sequence
  Description of Artificial Sequence: Synthetic oligonucleotide
  Sense strand starting at position 3350 of SEQ ID NO: 1243
aguucuuauugguuaagua

SEQ ID NO: 98607 - RNA, 19 nt, Artificial Sequence
  Description of Artificial Sequence: Synthetic oligonucleotide
  Antisense strand to SEQ ID NO: 98526
uacuuaaccaauaagaacu

SEQ ID NO: 98608 - RNA, 19 nt, Artificial Sequence
  Description of Artificial Sequence: Synthetic oligonucleotide
  Sense strand starting at position 3349 of SEQ ID NO: 1243
caguucuuauugguuaagu

SEQ ID NO: 98609 - RNA, 19 nt, Artificial Sequence
  Description of Artificial Sequence: Synthetic oligonucleotide
  Antisense strand to SEQ ID NO: 98528
acuuaaccaauaagaacug

SEQ ID NO: 98610 - RNA, 19 nt, Artificial Sequence
  Description of Artificial Sequence: Synthetic oligonucleotide
  Sense strand starting at position 3201 of SEQ ID NO: 1243
guuccuacacugcauuauu

SEQ ID NO: 98611 - RNA, 19 nt, Artificial Sequence
  Description of Artificial Sequence: Synthetic oligonucleotide
  Antisense strand to SEQ ID NO: 98530
aauaaugcaguguaggaac

SEQ ID NO: 98612 - RNA, 19 nt, Artificial Sequence
  Description of Artificial Sequence: Synthetic oligonucleotide
  Sense strand starting at position 3193 of SEQ ID NO: 1243
uugauagaguuccuacacu

SEQ ID NO: 98613 - RNA, 19 nt, Artificial Sequence
  Description of Artificial Sequence: Synthetic oligonucleotide
  Antisense strand to SEQ ID NO: 98532
aguguaggaacucuaucaa

SEQ ID NO: 98614 - RNA, 19 nt, Artificial Sequence
  Description of Artificial Sequence: Synthetic oligonucleotide
  Sense strand starting at position 3156 of SEQ ID NO: 1243
ugugauagucuguagauaa

SEQ ID NO: 98615 - RNA, 19 nt, Artificial Sequence
  Description of Artificial Sequence: Synthetic oligonucleotide
  Antisense strand to SEQ ID NO: 98534
uuaucuacagacuaucaca

SEQ ID NO: 98616 - RNA, 19 nt, Artificial Sequence
  Description of Artificial Sequence: Synthetic oligonucleotide
  Sense strand starting at position 3155 of SEQ ID NO: 1243
gugugauagucuguagaua

SEQ ID NO: 98617 - RNA, 19 nt, Artificial Sequence
  Description of Artificial Sequence: Synthetic oligonucleotide
  Antisense strand to SEQ ID NO: 98536
uaucuacagacuaucacac

SEQ ID NO: 98618 - RNA, 19 nt, Artificial Sequence
  Description of Artificial Sequence: Synthetic oligonucleotide
  Sense strand starting at position 3123 of SEQ ID NO: 1243
ccuagugccguuuaaguga

SEQ ID NO: 98619 - RNA, 19 nt, Artificial Sequence
  Description of Artificial Sequence: Synthetic oligonucleotide
  Antisense strand to SEQ ID NO: 98538
ucacuuaaacggcacuagg

SEQ ID NO: 98620 - RNA, 19 nt, Artificial Sequence
  Description of Artificial Sequence: Synthetic oligonucleotide
  Sense strand starting at position 3121 of SEQ ID NO: 1243
uuccuagugccguuuaagu

SEQ ID NO: 98621 - RNA, 19 nt, Artificial Sequence
  Description of Artificial Sequence: Synthetic oligonucleotide
  Antisense strand to SEQ ID NO: 98540
acuuaaacggcacuaggaa

SEQ ID NO: 98622 - RNA, 19 nt, Artificial Sequence
  Description of Artificial Sequence: Synthetic oligonucleotide
  Sense strand starting at position 3065 of SEQ ID NO: 1243
cgucuuauuuaccuuguua

SEQ ID NO: 98623 - RNA, 19 nt, Artificial Sequence
  Description of Artificial Sequence: Synthetic oligonucleotide
  Antisense strand to SEQ ID NO: 98542
uaacaagguaaauaagacg

SEQ ID NO: 98624 - RNA, 19 nt, Artificial Sequence
  Description of Artificial Sequence: Synthetic oligonucleotide
  Sense strand starting at position 3026 of SEQ ID NO: 1243
gccuuucuuccuggauucu

SEQ ID NO: 98625 - RNA, 19 nt, Artificial Sequence
  Description of Artificial Sequence: Synthetic oligonucleotide
  Antisense strand to SEQ ID NO: 98544
agaauccaggaagaaaggc

SEQ ID NO: 98626 - RNA, 19 nt, Artificial Sequence
  Description of Artificial Sequence: Synthetic oligonucleotide
  Sense strand starting at position 3024 of SEQ ID NO: 1243
gcgccuuucuuccuggauu

SEQ ID NO: 98627 - RNA, 19 nt, Artificial Sequence
  Description of Artificial Sequence: Synthetic oligonucleotide
  Antisense strand to SEQ ID NO: 98546
aauccaggaagaaaggcgc

SEQ ID NO: 98628 - RNA, 19 nt, Artificial Sequence
  Description of Artificial Sequence: Synthetic oligonucleotide
  Sense strand starting at position 2964 of SEQ ID NO: 1243
augagaugguucccguaaa

SEQ ID NO: 98629 - RNA, 19 nt, Artificial Sequence
  Description of Artificial Sequence: Synthetic oligonucleotide
  Antisense strand to SEQ ID NO: 98548
uuuacgggaaccaucucau

SEQ ID NO: 98630 - RNA, 19 nt, Artificial Sequence
  Description of Artificial Sequence: Synthetic oligonucleotide
  Sense strand starting at position 2933 of SEQ ID NO: 1243
gggagaaccuccuagaguc

SEQ ID NO: 98631 - RNA, 19 nt, Artificial Sequence
  Description of Artificial Sequence: Synthetic oligonucleotide
  Antisense strand to SEQ ID NO: 98550
gacucuaggagguucuccc

SEQ ID NO: 98632 - RNA, 19 nt, Artificial Sequence
  Description of Artificial Sequence: Synthetic oligonucleotide
  Sense strand starting at position 2922 of SEQ ID NO: 1243
cggucucuccugggagaac

SEQ ID NO: 98633 - RNA, 19 nt, Artificial Sequence
  Description of Artificial Sequence: Synthetic oligonucleotide
  Antisense strand to SEQ ID NO: 98552
guucucccaggagagaccg

SEQ ID NO: 98634 - RNA, 19 nt, Artificial Sequence
  Description of Artificial Sequence: Synthetic oligonucleotide
  Sense strand starting at position 2684 of SEQ ID NO: 1243
guggcuuagugaguucucu

SEQ ID NO: 98635 - RNA, 19 nt, Artificial Sequence
  Description of Artificial Sequence: Synthetic oligonucleotide
  Antisense strand to SEQ ID NO: 98554
agagaacucacuaagccac

SEQ ID NO: 98636 - RNA, 19 nt, Artificial Sequence
  Description of Artificial Sequence: Synthetic oligonucleotide
  Sense strand starting at position 2680 of SEQ ID NO: 1243
caguguggcuuagugaguu

SEQ ID NO: 98637 - RNA, 19 nt, Artificial Sequence
  Description of Artificial Sequence: Synthetic oligonucleotide
  Antisense strand to SEQ ID NO: 98556
aacucacuaagccacacug

SEQ ID NO: 98638 - RNA, 19 nt, Artificial Sequence
  Description of Artificial Sequence: Synthetic oligonucleotide
  Sense strand starting at position 2375 of SEQ ID NO: 1243
ggauuuccuucuucgucga

SEQ ID NO: 98639 - RNA, 19 nt, Artificial Sequence
  Description of Artificial Sequence: Synthetic oligonucleotide
  Antisense strand to SEQ ID NO: 98558
ucgacgaagaaggaaaucc

SEQ ID NO: 98640 - RNA, 19 nt, Artificial Sequence
  Description of Artificial Sequence: Synthetic oligonucleotide
  Sense strand starting at position 1145 of SEQ ID NO: 1243
ccuggauguuagggaugga

SEQ ID NO: 98641 - RNA, 19 nt, Artificial Sequence
  Description of Artificial Sequence: Synthetic oligonucleotide
  Antisense strand to SEQ ID NO: 98560
uccaucccuaacauccagg

SEQ ID NO: 98642 - RNA, 19 nt, Artificial Sequence
  Description of Artificial Sequence: Synthetic oligonucleotide
  Sense strand starting at position 774 of SEQ ID NO: 1243
agugacgaaauccgaaaua

SEQ ID NO: 98643 - RNA, 19 nt, Artificial Sequence
  Description of Artificial Sequence: Synthetic oligonucleotide
  Antisense strand to SEQ ID NO: 98562
uauuucggauuucgucacu

SEQ ID NO: 98644 - RNA, 19 nt, Artificial Sequence
  Description of Artificial Sequence: Synthetic oligonucleotide
  Sense strand starting at position 244 of SEQ ID NO: 1243
cuuggagacucaccuggau

SEQ ID NO: 98645 - RNA, 19 nt, Artificial Sequence
  Description of Artificial Sequence: Synthetic oligonucleotide
  Antisense strand to SEQ ID NO: 98564
auccaggugagucuccaag

SEQ ID NO: 98646 - RNA, 19 nt, Artificial Sequence
  Description of Artificial Sequence: Synthetic oligonucleotide
  Sense strand starting at position 140 of SEQ ID NO: 1243
uuguuaucccuuugggcua

SEQ ID NO: 98647 - RNA, 19 nt, Artificial Sequence
  Description of Artificial Sequence: Synthetic oligonucleotide
  Antisense strand to SEQ ID NO: 98566
uagcccaaagggauaacaa

SEQ ID NO: 98648 - RNA, 19 nt, Artificial Sequence
  Description of Artificial Sequence: Synthetic oligonucleotide
  Sense strand starting at position 29 of SEQ ID NO: 1243
uucucuugguccuauauuu

SEQ ID NO: 98649 - RNA, 19 nt, Artificial Sequence
  Description of Artificial Sequence: Synthetic oligonucleotide
  Antisense strand to SEQ ID NO: 98568
aaauauaggaccaagagaa

SEQ ID NO: 98650 - RNA, 19 nt, Artificial Sequence
  Description of Artificial Sequence: Synthetic oligonucleotide
  Sense strand starting at position 26 of SEQ ID NO: 1243
gucuucucuugguccuaua

SEQ ID NO: 98651 - RNA, 19 nt, Artificial Sequence
  Description of Artificial Sequence: Synthetic oligonucleotide
  Antisense strand to SEQ ID NO: 98570
uauaggaccaagagaagac

SEQ ID NO: 98652 - RNA, 19 nt, Artificial Sequence
  Description of Artificial Sequence: Synthetic oligonucleotide
  Sense strand starting at position 3761 of SEQ ID NO: 1242
ggauuuccuucuucgucga

SEQ ID NO: 98653 - RNA, 19 nt, Artificial Sequence
  Description of Artificial Sequence: Synthetic oligonucleotide
  Antisense strand to SEQ ID NO: 98572
ucgacgaagaaggaaaucc

SEQ ID NO: 98654 - RNA, 19 nt, Artificial Sequence
  Description of Artificial Sequence: Synthetic oligonucleotide
  Sense strand starting at position 2531 of SEQ ID NO: 1242
ccuggauguuagggaugga

SEQ ID NO: 98655 - RNA, 19 nt, Artificial Sequence
  Description of Artificial Sequence: Synthetic oligonucleotide
  Antisense strand to SEQ ID NO: 98574
uccaucccuaacauccagg

SEQ ID NO: 98656 - RNA, 19 nt, Artificial Sequence
  Description of Artificial Sequence: Synthetic oligonucleotide
  Sense strand starting at position 2493 of SEQ ID NO: 1242
ggugcaaacuccuagcagu

SEQ ID NO: 98657 - RNA, 19 nt, Artificial Sequence
  Description of Artificial Sequence: Synthetic oligonucleotide
  Antisense strand to SEQ ID NO: 98576
acugcuaggaguuugcacc

SEQ ID NO: 98658 - RNA, 19 nt, Artificial Sequence
  Description of Artificial Sequence: Synthetic oligonucleotide
  Sense strand starting at position 2160 of SEQ ID NO: 1242
agugacgaaauccgaaaua

SEQ ID NO: 98659 - RNA, 19 nt, Artificial Sequence
  Description of Artificial Sequence: Synthetic oligonucleotide
  Antisense strand to SEQ ID NO: 98578
uauuucggauuucgucacu

SEQ ID NO: 98660 - RNA, 19 nt, Artificial Sequence
  Description of Artificial Sequence: Synthetic oligonucleotide
  Sense strand starting at position 1630 of SEQ ID NO: 1242
cuuggagacucaccuggau

SEQ ID NO: 98661 - RNA, 19 nt, Artificial Sequence
  Description of Artificial Sequence: Synthetic oligonucleotide
  Antisense strand to SEQ ID NO: 98580
auccaggugagucuccaag

SEQ ID NO: 98662 - RNA, 19 nt, Artificial Sequence
  Description of Artificial Sequence: Synthetic oligonucleotide
  Sense strand starting at position 1526 of SEQ ID NO: 1242
uuguuaucccuuugggcua

SEQ ID NO: 98663 - RNA, 19 nt, Artificial Sequence
  Description of Artificial Sequence: Synthetic oligonucleotide
  Antisense strand to SEQ ID NO: 98582
uagcccaaagggauaacaa

SEQ ID NO: 98664 - RNA, 19 nt, Artificial Sequence
  Description of Artificial Sequence: Synthetic oligonucleotide
  Sense strand starting at position 1415 of SEQ ID NO: 1242
uucucuugguccuauauuu

SEQ ID NO: 98665 - RNA, 19 nt, Artificial Sequence
  Description of Artificial Sequence: Synthetic oligonucleotide
  Antisense strand to SEQ ID NO: 98584
aaauauaggaccaagagaa

SEQ ID NO: 98666 - RNA, 19 nt, Artificial Sequence
  Description of Artificial Sequence: Synthetic oligonucleotide
  Sense strand starting at position 1412 of SEQ ID NO: 1242
gucuucucuugguccuaua

SEQ ID NO: 98667 - RNA, 19 nt, Artificial Sequence
  Description of Artificial Sequence: Synthetic oligonucleotide
  Antisense strand to SEQ ID NO: 98586
uauaggaccaagagaagac

SEQ ID NO: 98668 - RNA, 19 nt, Artificial Sequence
  Description of Artificial Sequence: Synthetic oligonucleotide
  Sense strand starting at position 1310 of SEQ ID NO: 1242
gagaguugagucugcaggu

SEQ ID NO: 98669 - RNA, 19 nt, Artificial Sequence
  Description of Artificial Sequence: Synthetic oligonucleotide
  Antisense strand to SEQ ID NO: 98588
accugcagacucaacucuc

SEQ ID NO: 98670 - RNA, 19 nt, Artificial Sequence
  Description of Artificial Sequence: Synthetic oligonucleotide
  Sense strand starting at position 1233 of SEQ ID NO: 1242
cguccuuccucuugaaagu

SEQ ID NO: 98671 - RNA, 19 nt, Artificial Sequence
  Description of Artificial Sequence: Synthetic oligonucleotide
  Antisense strand to SEQ ID NO: 98590
acuuucaagaggaaggacg

SEQ ID NO: 98672 - RNA, 19 nt, Artificial Sequence
  Description of Artificial Sequence: Synthetic oligonucleotide
  Sense strand starting at position 1230 of SEQ ID NO: 1242
guccguccuuccucuugaa

SEQ ID NO: 98673 - RNA, 19 nt, Artificial Sequence
  Description of Artificial Sequence: Synthetic oligonucleotide
  Antisense strand to SEQ ID NO: 98592
uucaagaggaaggacggac

SEQ ID NO: 98674 - RNA, 19 nt, Artificial Sequence
  Description of Artificial Sequence: Synthetic oligonucleotide
  Sense strand starting at position 1214 of SEQ ID NO: 1242
ggaaaugcuucguccaguc

SEQ ID NO: 98675 - RNA, 19 nt, Artificial Sequence
  Description of Artificial Sequence: Synthetic oligonucleotide
  Antisense strand to SEQ ID NO: 98594
gacuggacgaagcauuucc

SEQ ID NO: 98676 - RNA, 19 nt, Artificial Sequence
  Description of Artificial Sequence: Synthetic oligonucleotide
  Sense strand starting at position 1213 of SEQ ID NO: 1242
gggaaaugcuucguccagu

SEQ ID NO: 98677 - RNA, 19 nt, Artificial Sequence
  Description of Artificial Sequence: Synthetic oligonucleotide
  Antisense strand to SEQ ID NO: 98596
acuggacgaagcauuuccc

SEQ ID NO: 98678 - RNA, 19 nt, Artificial Sequence
  Description of Artificial Sequence: Synthetic oligonucleotide
  Sense strand starting at position 1190 of SEQ ID NO: 1242
gacuuacuugauuggcaca

SEQ ID NO: 98679 - RNA, 19 nt, Artificial Sequence
  Description of Artificial Sequence: Synthetic oligonucleotide
  Antisense strand to SEQ ID NO: 98598
ugugccaaucaaguaaguc

SEQ ID NO: 98680 - RNA, 19 nt, Artificial Sequence
  Description of Artificial Sequence: Synthetic oligonucleotide
  Sense strand starting at position 1096 of SEQ ID NO: 1242
acaugucagugguggaauu

SEQ ID NO: 98681 - RNA, 19 nt, Artificial Sequence
  Description of Artificial Sequence: Synthetic oligonucleotide
  Antisense strand to SEQ ID NO: 98600
aauuccaccacugacaugu

SEQ ID NO: 98682 - RNA, 19 nt, Artificial Sequence
  Description of Artificial Sequence: Synthetic oligonucleotide
  Sense strand starting at position 1094 of SEQ ID NO: 1242
agacaugucagugguggaa

SEQ ID NO: 98683 - RNA, 19 nt, Artificial Sequence
  Description of Artificial Sequence: Synthetic oligonucleotide
  Antisense strand to SEQ ID NO: 98602
uuccaccacugacaugucu

SEQ ID NO: 98684 - RNA, 19 nt, Artificial Sequence
  Description of Artificial Sequence: Synthetic oligonucleotide
  Sense strand starting at position 1093 of SEQ ID NO: 1242
uagacaugucaguggugga

SEQ ID NO: 98685 - RNA, 19 nt, Artificial Sequence
  Description of Artificial Sequence: Synthetic oligonucleotide
  Antisense strand to SEQ ID NO: 98604
uccaccacugacaugucua

SEQ ID NO: 98686 - RNA, 19 nt, Artificial Sequence
  Description of Artificial Sequence: Synthetic oligonucleotide
  Sense strand starting at position 1087 of SEQ ID NO: 1242
aucuguuagacaugucagu

SEQ ID NO: 98687 - RNA, 19 nt, Artificial Sequence
  Description of Artificial Sequence: Synthetic oligonucleotide
  Antisense strand to SEQ ID NO: 98606
acugacaugucuaacagau

SEQ ID NO: 98688 - RNA, 19 nt, Artificial Sequence
  Description of Artificial Sequence: Synthetic oligonucleotide
  Sense strand starting at position 1083 of SEQ ID NO: 1242
ugugaucuguuagacaugu

SEQ ID NO: 98689 - RNA, 19 nt, Artificial Sequence
  Description of Artificial Sequence: Synthetic oligonucleotide
  Antisense strand to SEQ ID NO: 98608
acaugucuaacagaucaca

SEQ ID NO: 98690 - RNA, 19 nt, Artificial Sequence
  Description of Artificial Sequence: Synthetic oligonucleotide
  Sense strand starting at position 1078 of SEQ ID NO: 1242
acugcugugaucuguuaga

SEQ ID NO: 98691 - RNA, 19 nt, Artificial Sequence
  Description of Artificial Sequence: Synthetic oligonucleotide
  Antisense strand to SEQ ID NO: 98610
ucuaacagaucacagcagu

SEQ ID NO: 98692 - RNA, 19 nt, Artificial Sequence
  Description of Artificial Sequence: Synthetic oligonucleotide
  Sense strand starting at position 1059 of SEQ ID NO: 1242
gaagcugugucaguggaaa

SEQ ID NO: 98693 - RNA, 19 nt, Artificial Sequence
  Description of Artificial Sequence: Synthetic oligonucleotide
  Antisense strand to SEQ ID NO: 98612
uuuccacugacacagcuuc

SEQ ID NO: 98694 - RNA, 19 nt, Artificial Sequence
  Description of Artificial Sequence: Synthetic oligonucleotide
  Sense strand starting at position 1046 of SEQ ID NO: 1242
gaauaaguaugcugaagcu

SEQ ID NO: 98695 - RNA, 19 nt, Artificial Sequence
  Description of Artificial Sequence: Synthetic oligonucleotide
  Antisense strand to SEQ ID NO: 98614
agcuucagcauacuuauuc

SEQ ID NO: 98696 - RNA, 19 nt, Artificial Sequence
  Description of Artificial Sequence: Synthetic oligonucleotide
  Sense strand starting at position 1043 of SEQ ID NO: 1242
guggaauaaguaugcugaa

SEQ ID NO: 98697 - RNA, 19 nt, Artificial Sequence
  Description of Artificial Sequence: Synthetic oligonucleotide
  Antisense strand to SEQ ID NO: 98616
uucagcauacuuauuccac

SEQ ID NO: 98698 - RNA, 19 nt, Artificial Sequence
  Description of Artificial Sequence: Synthetic oligonucleotide
  Sense strand starting at position 1033 of SEQ ID NO: 1242
gccugaaacaguggaauaa

SEQ ID NO: 98699 - RNA, 19 nt, Artificial Sequence
  Description of Artificial Sequence: Synthetic oligonucleotide
  Antisense strand to SEQ ID NO: 98618
uuauuccacuguuucaggc

SEQ ID NO: 98700 - RNA, 19 nt, Artificial Sequence
  Description of Artificial Sequence: Synthetic oligonucleotide
  Sense strand starting at position 1024 of SEQ ID NO: 1242
gugcuagcugccugaaaca

SEQ ID NO: 98701 - RNA, 19 nt, Artificial Sequence
  Description of Artificial Sequence: Synthetic oligonucleotide
  Antisense strand to SEQ ID NO: 98620
uguuucaggcagcuagcac

SEQ ID NO: 98702 - RNA, 19 nt, Artificial Sequence
  Description of Artificial Sequence: Synthetic oligonucleotide
  Sense strand starting at position 770 of SEQ ID NO: 1242
ucaggugagugucuaucua

SEQ ID NO: 98703 - RNA, 19 nt, Artificial Sequence
  Description of Artificial Sequence: Synthetic oligonucleotide
  Antisense strand to SEQ ID NO: 98622
uagauagacacucaccuga

SEQ ID NO: 98704 - RNA, 19 nt, Artificial Sequence
  Description of Artificial Sequence: Synthetic oligonucleotide
  Sense strand starting at position 761 of SEQ ID NO: 1242
gaguaauggucaggugagu

SEQ ID NO: 98705 - RNA, 19 nt, Artificial Sequence
  Description of Artificial Sequence: Synthetic oligonucleotide
  Antisense strand to SEQ ID NO: 98624
acucaccugaccauuacuc

SEQ ID NO: 98706 - RNA, 19 nt, Artificial Sequence
  Description of Artificial Sequence: Synthetic oligonucleotide
  Sense strand starting at position 658 of SEQ ID NO: 1242
agcagccuuacgugucaau

SEQ ID NO: 98707 - RNA, 19 nt, Artificial Sequence
  Description of Artificial Sequence: Synthetic oligonucleotide
  Antisense strand to SEQ ID NO: 98626
auugacacguaaggcugcu

SEQ ID NO: 98708 - RNA, 19 nt, Artificial Sequence
  Description of Artificial Sequence: Synthetic oligonucleotide
  Sense strand starting at position 570 of SEQ ID NO: 1242
ggcauuaugcccugugucu

SEQ ID NO: 98709 - RNA, 19 nt, Artificial Sequence
  Description of Artificial Sequence: Synthetic oligonucleotide
  Antisense strand to SEQ ID NO: 98628
agacacagggcauaaugcc

SEQ ID NO: 98710 - RNA, 19 nt, Artificial Sequence
  Description of Artificial Sequence: Synthetic oligonucleotide
  Sense strand starting at position 519 of SEQ ID NO: 1242
ugacuuuaggcccaguacu

SEQ ID NO: 98711 - RNA, 19 nt, Artificial Sequence
  Description of Artificial Sequence: Synthetic oligonucleotide
  Antisense strand to SEQ ID NO: 98630
aguacugggccuaaaguca

SEQ ID NO: 98712 - RNA, 19 nt, Artificial Sequence
  Description of Artificial Sequence: Synthetic oligonucleotide
  Sense strand starting at position 462 of SEQ ID NO: 1242
aggcuugccucaucacaga

SEQ ID NO: 98713 - RNA, 19 nt, Artificial Sequence
  Description of Artificial Sequence: Synthetic oligonucleotide
  Antisense strand to SEQ ID NO: 98632
ucugugaugaggcaagccu

SEQ ID NO: 98714 - RNA, 19 nt, Artificial Sequence
  Description of Artificial Sequence: Synthetic oligonucleotide
  Sense strand starting at position 460 of SEQ ID NO: 1242
agaggcuugccucaucaca

SEQ ID NO: 98715 - RNA, 19 nt, Artificial Sequence
  Description of Artificial Sequence: Synthetic oligonucleotide
  Antisense strand to SEQ ID NO: 98634
ugugaugaggcaagccucu

SEQ ID NO: 98716 - RNA, 19 nt, Artificial Sequence
  Description of Artificial Sequence: Synthetic oligonucleotide
  Sense strand starting at position 455 of SEQ ID NO: 1242
gguuaagaggcuugccuca

SEQ ID NO: 98717 - RNA, 19 nt, Artificial Sequence
  Description of Artificial Sequence: Synthetic oligonucleotide
  Antisense strand to SEQ ID NO: 98636
ugaggcaagccucuuaacc

SEQ ID NO: 98718 - RNA, 19 nt, Artificial Sequence
  Description of Artificial Sequence: Synthetic oligonucleotide
  Sense strand starting at position 432 of SEQ ID NO: 1242
gugugauucucacaagacu

SEQ ID NO: 98719 - RNA, 19 nt, Artificial Sequence
  Description of Artificial Sequence: Synthetic oligonucleotide
  Antisense strand to SEQ ID NO: 98638
agucuugugagaaucacac

SEQ ID NO: 98720 - RNA, 19 nt, Artificial Sequence
  Description of Artificial Sequence: Synthetic oligonucleotide
  Sense strand starting at position 430 of SEQ ID NO: 1242
ucgugugauucucacaaga

SEQ ID NO: 98721 - RNA, 19 nt, Artificial Sequence
  Description of Artificial Sequence: Synthetic oligonucleotide
  Antisense strand to SEQ ID NO: 98640
ucuugugagaaucacacga

SEQ ID NO: 98722 - RNA, 19 nt, Artificial Sequence
  Description of Artificial Sequence: Synthetic oligonucleotide
  Sense strand starting at position 423 of SEQ ID NO: 1242
uauuaauucgugugauucu

SEQ ID NO: 98723 - RNA, 19 nt, Artificial Sequence
  Description of Artificial Sequence: Synthetic oligonucleotide
  Antisense strand to SEQ ID NO: 98642
agaaucacacgaauuaaua

SEQ ID NO: 98724 - RNA, 19 nt, Artificial Sequence
  Description of Artificial Sequence: Synthetic oligonucleotide
  Sense strand starting at position 3883 of SEQ ID NO: 1244
acucuacaugacugguauu

SEQ ID NO: 98725 - RNA, 19 nt, Artificial Sequence
  Description of Artificial Sequence: Synthetic oligonucleotide
  Antisense strand to SEQ ID NO: 98644
aauaccagucauguagagu

SEQ ID NO: 98726 - RNA, 19 nt, Artificial Sequence
  Description of Artificial Sequence: Synthetic oligonucleotide
  Sense strand starting at position 3807 of SEQ ID NO: 1244
cgaagucccucuucuauaa

SEQ ID NO: 98727 - RNA, 19 nt, Artificial Sequence
  Description of Artificial Sequence: Synthetic oligonucleotide
  Antisense strand to SEQ ID NO: 98646
uuauagaagagggacuucg

SEQ ID NO: 98728 - RNA, 19 nt, Artificial Sequence
  Description of Artificial Sequence: Synthetic oligonucleotide
  Sense strand starting at position 3774 of SEQ ID NO: 1244
acuuguaugucucuuacau

SEQ ID NO: 98729 - RNA, 19 nt, Artificial Sequence
  Description of Artificial Sequence: Synthetic oligonucleotide
  Antisense strand to SEQ ID NO: 98648
auguaagagacauacaagu

SEQ ID NO: 98730 - RNA, 19 nt, Artificial Sequence
  Description of Artificial Sequence: Synthetic oligonucleotide
  Sense strand starting at position 3752 of SEQ ID NO: 1244
guuaauagugugcacuagu

SEQ ID NO: 98731 - RNA, 19 nt, Artificial Sequence
  Description of Artificial Sequence: Synthetic oligonucleotide
  Antisense strand to SEQ ID NO: 98650
acuagugcacacuauuaac

SEQ ID NO: 98732 - RNA, 19 nt, Artificial Sequence
  Description of Artificial Sequence: Synthetic oligonucleotide
  Sense strand starting at position 3750 of SEQ ID NO: 1244
aaguuaauagugugcacua

SEQ ID NO: 98733 - RNA, 19 nt, Artificial Sequence
  Description of Artificial Sequence: Synthetic oligonucleotide
  Antisense strand to SEQ ID NO: 98652
uagugcacacuauuaacuu

SEQ ID NO: 98734 - RNA, 19 nt, Artificial Sequence
  Description of Artificial Sequence: Synthetic oligonucleotide
  Sense strand starting at position 3685 of SEQ ID NO: 1244
gcgccagagaaauacagua

SEQ ID NO: 98735 - RNA, 19 nt, Artificial Sequence
  Description of Artificial Sequence: Synthetic oligonucleotide
  Antisense strand to SEQ ID NO: 98654
uacuguauuucucuggcgc

SEQ ID NO: 98736 - RNA, 19 nt, Artificial Sequence
  Description of Artificial Sequence: Synthetic oligonucleotide
  Sense strand starting at position 3679 of SEQ ID NO: 1244
ccaugugcgccagagaaau

SEQ ID NO: 98737 - RNA, 19 nt, Artificial Sequence
  Description of Artificial Sequence: Synthetic oligonucleotide
  Antisense strand to SEQ ID NO: 98656
auuucucuggcgcacaugg

SEQ ID NO: 98738 - RNA, 19 nt, Artificial Sequence
  Description of Artificial Sequence: Synthetic oligonucleotide
  Sense strand starting at position 3567 of SEQ ID NO: 1244
cuugcuauauacuugcaga

SEQ ID NO: 98739 - RNA, 19 nt, Artificial Sequence
  Description of Artificial Sequence: Synthetic oligonucleotide
  Antisense strand to SEQ ID NO: 98658
ucugcaaguauauagcaag

SEQ ID NO: 98740 - RNA, 19 nt, Artificial Sequence
  Description of Artificial Sequence: Synthetic oligonucleotide
  Sense strand starting at position 3559 of SEQ ID NO: 1244
uugagaaucuugcuauaua

SEQ ID NO: 98741 - RNA, 19 nt, Artificial Sequence
  Description of Artificial Sequence: Synthetic oligonucleotide
  Antisense strand to SEQ ID NO: 98660
uauauagcaagauucucaa

SEQ ID NO: 98742 - RNA, 19 nt, Artificial Sequence
  Description of Artificial Sequence: Synthetic oligonucleotide
  Sense strand starting at position 3548 of SEQ ID NO: 1244
uucucuuggcuuugagaau

SEQ ID NO: 98743 - RNA, 19 nt, Artificial Sequence
  Description of Artificial Sequence: Synthetic oligonucleotide
  Antisense strand to SEQ ID NO: 98662
auucucaaagccaagagaa

SEQ ID NO: 98744 - RNA, 19 nt, Artificial Sequence
  Description of Artificial Sequence: Synthetic oligonucleotide
  Sense strand starting at position 3196 of SEQ ID NO: 1244
agagaagucucauugcaau

SEQ ID NO: 98745 - RNA, 19 nt, Artificial Sequence
  Description of Artificial Sequence: Synthetic oligonucleotide
  Antisense strand to SEQ ID NO: 98664
auugcaaugagacuucucu

SEQ ID NO: 98746 - RNA, 19 nt, Artificial Sequence
  Description of Artificial Sequence: Synthetic oligonucleotide
  Sense strand starting at position 3172 of SEQ ID NO: 1244
gaugcuuuagugugaagac

SEQ ID NO: 98747 - RNA, 19 nt, Artificial Sequence
  Description of Artificial Sequence: Synthetic oligonucleotide
  Antisense strand to SEQ ID NO: 98666
gucuucacacuaaagcauc

SEQ ID NO: 98748 - RNA, 19 nt, Artificial Sequence
  Description of Artificial Sequence: Synthetic oligonucleotide
  Sense strand starting at position 3169 of SEQ ID NO: 1244
uaugaugcuuuagugugaa

SEQ ID NO: 98749 - RNA, 19 nt, Artificial Sequence
  Description of Artificial Sequence: Synthetic oligonucleotide
  Antisense strand to SEQ ID NO: 98668
uucacacuaaagcaucaua

SEQ ID NO: 98750 - RNA, 19 nt, Artificial Sequence
  Description of Artificial Sequence: Synthetic oligonucleotide
  Sense strand starting at position 3165 of SEQ ID NO: 1244
gggauaugaugcuuuagug

SEQ ID NO: 98751 - RNA, 19 nt, Artificial Sequence
  Description of Artificial Sequence: Synthetic oligonucleotide
  Antisense strand to SEQ ID NO: 98670
cacuaaagcaucauauccc

SEQ ID NO: 98752 - RNA, 19 nt, Artificial Sequence
  Description of Artificial Sequence: Synthetic oligonucleotide
  Sense strand starting at position 3117 of SEQ ID NO: 1244
cagugcucagaagaacauu

SEQ ID NO: 98753 - RNA, 19 nt, Artificial Sequence
  Description of Artificial Sequence: Synthetic oligonucleotide
  Antisense strand to SEQ ID NO: 98672
aauguucuucugagcacug

SEQ ID NO: 98754 - RNA, 19 nt, Artificial Sequence
  Description of Artificial Sequence: Synthetic oligonucleotide
  Sense strand starting at position 3051 of SEQ ID NO: 1244
gcugcugggcauuauauau

SEQ ID NO: 98755 - RNA, 19 nt, Artificial Sequence
  Description of Artificial Sequence: Synthetic oligonucleotide
  Antisense strand to SEQ ID NO: 98674
auauauaaugcccagcagc

SEQ ID NO: 98756 - RNA, 19 nt, Artificial Sequence
  Description of Artificial Sequence: Synthetic oligonucleotide
  Sense strand starting at position 3029 of SEQ ID NO: 1244
auauguaaagcuugaggua

SEQ ID NO: 98757 - RNA, 19 nt, Artificial Sequence
  Description of Artificial Sequence: Synthetic oligonucleotide
  Antisense strand to SEQ ID NO: 98676
uaccucaagcuuuacauau

SEQ ID NO: 98758 - RNA, 19 nt, Artificial Sequence
  Description of Artificial Sequence: Synthetic oligonucleotide
  Sense strand starting at position 2923 of SEQ ID NO: 1244
uuuggugaaugggaaagaa

SEQ ID NO: 98759 - RNA, 19 nt, Artificial Sequence
  Description of Artificial Sequence: Synthetic oligonucleotide
  Antisense strand to SEQ ID NO: 98678
uucuuucccauucaccaaa

SEQ ID NO: 98760 - RNA, 19 nt, Artificial Sequence
  Description of Artificial Sequence: Synthetic oligonucleotide
  Sense strand starting at position 2895 of SEQ ID NO: 1244
aggcauuugugauggagga

SEQ ID NO: 98761 - RNA, 19 nt, Artificial Sequence
  Description of Artificial Sequence: Synthetic oligonucleotide
  Antisense strand to SEQ ID NO: 98680
uccuccaucacaaaugccu

SEQ ID NO: 98762 - RNA, 19 nt, Artificial Sequence
  Description of Artificial Sequence: Synthetic oligonucleotide
  Sense strand starting at position 2811 of SEQ ID NO: 1244
agacuacugcaguggucua

SEQ ID NO: 98763 - RNA, 19 nt, Artificial Sequence
  Description of Artificial Sequence: Synthetic oligonucleotide
  Antisense strand to SEQ ID NO: 98682
uagaccacugcaguagucu

SEQ ID NO: 98764 - RNA, 19 nt, Artificial Sequence
  Description of Artificial Sequence: Synthetic oligonucleotide
  Sense strand starting at position 2795 of SEQ ID NO: 1244
agagcaaucuauuagaaga

SEQ ID NO: 98765 - RNA, 19 nt, Artificial Sequence
  Description of Artificial Sequence: Synthetic oligonucleotide
  Antisense strand to SEQ ID NO: 98684
ucuucuaauagauugcucu

SEQ ID NO: 98766 - RNA, 19 nt, Artificial Sequence
  Description of Artificial Sequence: Synthetic oligonucleotide
  Sense strand starting at position 2725 of SEQ ID NO: 1244
uagcaauauuuggaaaugu

SEQ ID NO: 98767 - RNA, 19 nt, Artificial Sequence
  Description of Artificial Sequence: Synthetic oligonucleotide
  Antisense strand to SEQ ID NO: 98686
acauuuccaaauauugcua

SEQ ID NO: 98768 - RNA, 19 nt, Artificial Sequence
  Description of Artificial Sequence: Synthetic oligonucleotide
  Sense strand starting at position 2724 of SEQ ID NO: 1244
auagcaauauuuggaaaug

SEQ ID NO: 98769 - RNA, 19 nt, Artificial Sequence
  Description of Artificial Sequence: Synthetic oligonucleotide
  Antisense strand to SEQ ID NO: 98688
cauuuccaaauauugcuau

SEQ ID NO: 98770 - RNA, 19 nt, Artificial Sequence
  Description of Artificial Sequence: Synthetic oligonucleotide
  Sense strand starting at position 2681 of SEQ ID NO: 1244
ggacuauauucuguccaaa

SEQ ID NO: 98771 - RNA, 19 nt, Artificial Sequence
  Description of Artificial Sequence: Synthetic oligonucleotide
  Antisense strand to SEQ ID NO: 98690
uuuggacagaauauagucc

SEQ ID NO: 98772 - RNA, 19 nt, Artificial Sequence
  Description of Artificial Sequence: Synthetic oligonucleotide
  Sense strand starting at position 2669 of SEQ ID NO: 1244
gguaaagaauuuggacuau

SEQ ID NO: 98773 - RNA, 19 nt, Artificial Sequence
  Description of Artificial Sequence: Synthetic oligonucleotide
  Antisense strand to SEQ ID NO: 98692
auaguccaaauucuuuacc

SEQ ID NO: 98774 - RNA, 19 nt, Artificial Sequence
  Description of Artificial Sequence: Synthetic oligonucleotide
  Sense strand starting at position 2657 of SEQ ID NO: 1244
cuugaaugccaugguaaag

SEQ ID NO: 98775 - RNA, 19 nt, Artificial Sequence
  Description of Artificial Sequence: Synthetic oligonucleotide
  Antisense strand to SEQ ID NO: 98694
cuuuaccauggcauucaag

SEQ ID NO: 98776 - RNA, 19 nt, Artificial Sequence
  Description of Artificial Sequence: Synthetic oligonucleotide
  Sense strand starting at position 2656 of SEQ ID NO: 1244
ccuugaaugccaugguaaa

SEQ ID NO: 98777 - RNA, 19 nt, Artificial Sequence
  Description of Artificial Sequence: Synthetic oligonucleotide
  Antisense strand to SEQ ID NO: 98696
uuuaccauggcauucaagg

SEQ ID NO: 98778 - RNA, 19 nt, Artificial Sequence
  Description of Artificial Sequence: Synthetic oligonucleotide
  Sense strand starting at position 2483 of SEQ ID NO: 1244
gaugcaugagaguaauguu

SEQ ID NO: 98779 - RNA, 19 nt, Artificial Sequence
  Description of Artificial Sequence: Synthetic oligonucleotide
  Antisense strand to SEQ ID NO: 98698
aacauuacucucaugcauc

SEQ ID NO: 98780 - RNA, 19 nt, Artificial Sequence
  Description of Artificial Sequence: Synthetic oligonucleotide
  Sense strand starting at position 2477 of SEQ ID NO: 1244
aaucaugaugcaugagagu

SEQ ID NO: 98781 - RNA, 19 nt, Artificial Sequence
  Description of Artificial Sequence: Synthetic oligonucleotide
  Antisense strand to SEQ ID NO: 98700
acucucaugcaucaugauu

SEQ ID NO: 98782 - RNA, 19 nt, Artificial Sequence
  Description of Artificial Sequence: Synthetic oligonucleotide
  Sense strand starting at position 2471 of SEQ ID NO: 1244
cuaagcaaucaugaugcau

SEQ ID NO: 98783 - RNA, 19 nt, Artificial Sequence
  Description of Artificial Sequence: Synthetic oligonucleotide
  Antisense strand to SEQ ID NO: 98702
augcaucaugauugcuuag

SEQ ID NO: 98784 - RNA, 19 nt, Artificial Sequence
  Description of Artificial Sequence: Synthetic oligonucleotide
  Sense strand starting at position 2396 of SEQ ID NO: 1244
aguaguuccugacuacagu

SEQ ID NO: 98785 - RNA, 19 nt, Artificial Sequence
  Description of Artificial Sequence: Synthetic oligonucleotide
  Antisense strand to SEQ ID NO: 98704
acuguagucaggaacuacu

SEQ ID NO: 98786 - RNA, 19 nt, Artificial Sequence
  Description of Artificial Sequence: Synthetic oligonucleotide
  Sense strand starting at position 2394 of SEQ ID NO: 1244
gcaguaguuccugacuaca

SEQ ID NO: 98787 - RNA, 19 nt, Artificial Sequence
  Description of Artificial Sequence: Synthetic oligonucleotide
  Antisense strand to SEQ ID NO: 98706
uguagucaggaacuacugc

SEQ ID NO: 98788 - RNA, 19 nt, Artificial Sequence
  Description of Artificial Sequence: Synthetic oligonucleotide
  Sense strand starting at position 2280 of SEQ ID NO: 1244
aucaguaaguuuccaucca

SEQ ID NO: 98789 - RNA, 19 nt, Artificial Sequence
  Description of Artificial Sequence: Synthetic oligonucleotide
  Antisense strand to SEQ ID NO: 98708
uggauggaaacuuacugau

SEQ ID NO: 98790 - RNA, 19 nt, Artificial Sequence
  Description of Artificial Sequence: Synthetic oligonucleotide
  Sense strand starting at position 2273 of SEQ ID NO: 1244
guucccuaucaguaaguuu

SEQ ID NO: 98791 - RNA, 19 nt, Artificial Sequence
  Description of Artificial Sequence: Synthetic oligonucleotide
  Antisense strand to SEQ ID NO: 98710
aaacuuacugauagggaac

SEQ ID NO: 98792 - RNA, 19 nt, Artificial Sequence
  Description of Artificial Sequence: Synthetic oligonucleotide
  Sense strand starting at position 2267 of SEQ ID NO: 1244
cgugauguucccuaucagu

SEQ ID NO: 98793 - RNA, 19 nt, Artificial Sequence
  Description of Artificial Sequence: Synthetic oligonucleotide
  Antisense strand to SEQ ID NO: 98712
acugauagggaacaucacg

SEQ ID NO: 98794 - RNA, 19 nt, Artificial Sequence
  Description of Artificial Sequence: Synthetic oligonucleotide
  Sense strand starting at position 2232 of SEQ ID NO: 1244
uccuauuaggccugcuuaa

SEQ ID NO: 98795 - RNA, 19 nt, Artificial Sequence
  Description of Artificial Sequence: Synthetic oligonucleotide
  Antisense strand to SEQ ID NO: 98714
uuaagcaggccuaauagga

SEQ ID NO: 98796 - RNA, 19 nt, Artificial Sequence
  Description of Artificial Sequence: Synthetic oligonucleotide
  Sense strand starting at position 2161 of SEQ ID NO: 1244
gucgauaccugaucaaauu

SEQ ID NO: 98797 - RNA, 19 nt, Artificial Sequence
  Description of Artificial Sequence: Synthetic oligonucleotide
  Antisense strand to SEQ ID NO: 98716
aauuugaucagguaucgac

SEQ ID NO: 98798 - RNA, 19 nt, Artificial Sequence
  Description of Artificial Sequence: Synthetic oligonucleotide
  Sense strand starting at position 2158 of SEQ ID NO: 1244
accgucgauaccugaucaa

SEQ ID NO: 98799 - RNA, 19 nt, Artificial Sequence
  Description of Artificial Sequence: Synthetic oligonucleotide
  Antisense strand to SEQ ID NO: 98718
uugaucagguaucgacggu

SEQ ID NO: 98800 - RNA, 19 nt, Artificial Sequence
  Description of Artificial Sequence: Synthetic oligonucleotide
  Sense strand starting at position 2087 of SEQ ID NO: 1244
ggaucaccgaguuguagca

SEQ ID NO: 98801 - RNA, 19 nt, Artificial Sequence
  Description of Artificial Sequence: Synthetic oligonucleotide
  Antisense strand to SEQ ID NO: 98720
ugcuacaacucggugaucc

SEQ ID NO: 98802 - RNA, 19 nt, Artificial Sequence
  Description of Artificial Sequence: Synthetic oligonucleotide
  Sense strand starting at position 2018 of SEQ ID NO: 1244
uuuggucaggcucaucuaa

SEQ ID NO: 98803 - RNA, 19 nt, Artificial Sequence
  Description of Artificial Sequence: Synthetic oligonucleotide
  Antisense strand to SEQ ID NO: 98722
uuagaugagccugaccaaa

SEQ ID NO: 98804 - RNA, 19 nt, Artificial Sequence
  Description of Artificial Sequence: Synthetic oligonucleotide
  Sense strand starting at position 175 of SEQ ID NO: 1245
auguaaguuugccuagaga

SEQ ID NO: 98805 - RNA, 19 nt, Artificial Sequence
  Description of Artificial Sequence: Synthetic oligonucleotide
  Antisense strand to SEQ ID NO: 98724
ucucuaggcaaacuuacau

SEQ ID NO: 98806 - RNA, 19 nt, Artificial Sequence
  Description of Artificial Sequence: Synthetic oligonucleotide
  Sense strand starting at position 195 of SEQ ID NO: 1245
aggaaaucagaaugcucuu

SEQ ID NO: 98807 - RNA, 19 nt, Artificial Sequence
  Description of Artificial Sequence: Synthetic oligonucleotide
  Antisense strand to SEQ ID NO: 98726
aagagcauucugauuuccu

SEQ ID NO: 98808 - RNA, 19 nt, Artificial Sequence
  Description of Artificial Sequence: Synthetic oligonucleotide
  Sense strand starting at position 412 of SEQ ID NO: 1245
aggcgacagagcuaaauaa

SEQ ID NO: 98809 - RNA, 19 nt, Artificial Sequence
  Description of Artificial Sequence: Synthetic oligonucleotide
  Antisense strand to SEQ ID NO: 98728
uuauuuagcucugucgccu

SEQ ID NO: 98810 - RNA, 19 nt, Artificial Sequence
  Description of Artificial Sequence: Synthetic oligonucleotide
  Sense strand starting at position 523 of SEQ ID NO: 1245
aaacuuacucaucggguau

SEQ ID NO: 98811 - RNA, 19 nt, Artificial Sequence
  Description of Artificial Sequence: Synthetic oligonucleotide
  Antisense strand to SEQ ID NO: 98730
auacccgaugaguaaguuu

SEQ ID NO: 98812 - RNA, 19 nt, Artificial Sequence
  Description of Artificial Sequence: Synthetic oligonucleotide
  Sense strand starting at position 630 of SEQ ID NO: 1245
guaccucuggcuuaaccaa

SEQ ID NO: 98813 - RNA, 19 nt, Artificial Sequence
  Description of Artificial Sequence: Synthetic oligonucleotide
  Antisense strand to SEQ ID NO: 98732
uugguuaagccagagguac

SEQ ID NO: 98814 - RNA, 19 nt, Artificial Sequence
  Description of Artificial Sequence: Synthetic oligonucleotide
  Sense strand starting at position 683 of SEQ ID NO: 1245
caguguucugagcagggaa

SEQ ID NO: 98815 - RNA, 19 nt, Artificial Sequence
  Description of Artificial Sequence: Synthetic oligonucleotide
  Antisense strand to SEQ ID NO: 98734
uucccugcucagaacacug

SEQ ID NO: 98816 - RNA, 19 nt, Artificial Sequence
  Description of Artificial Sequence: Synthetic oligonucleotide
  Sense strand starting at position 891 of SEQ ID NO: 1245
ugucguugucugagggauu

SEQ ID NO: 98817 - RNA, 19 nt, Artificial Sequence
  Description of Artificial Sequence: Synthetic oligonucleotide
  Antisense strand to SEQ ID NO: 98736
aaucccucagacaacgaca

SEQ ID NO: 98818 - RNA, 19 nt, Artificial Sequence
  Description of Artificial Sequence: Synthetic oligonucleotide
  Sense strand starting at position 902 of SEQ ID NO: 1245
gagggauucuccuuaccug

SEQ ID NO: 98819 - RNA, 19 nt, Artificial Sequence
  Description of Artificial Sequence: Synthetic oligonucleotide
  Antisense strand to SEQ ID NO: 98738
cagguaaggagaaucccuc

SEQ ID NO: 98820 - RNA, 19 nt, Artificial Sequence
  Description of Artificial Sequence: Synthetic oligonucleotide
  Sense strand starting at position 903 of SEQ ID NO: 1245
agggauucuccuuaccugu

SEQ ID NO: 98821 - RNA, 19 nt, Artificial Sequence
  Description of Artificial Sequence: Synthetic oligonucleotide
  Antisense strand to SEQ ID NO: 98740
acagguaaggagaaucccu

SEQ ID NO: 98822 - RNA, 19 nt, Artificial Sequence
  Description of Artificial Sequence: Synthetic oligonucleotide
  Sense strand starting at position 1545 of SEQ ID NO: 1245
gagugucaguccuuaagaa

SEQ ID NO: 98823 - RNA, 19 nt, Artificial Sequence
  Description of Artificial Sequence: Synthetic oligonucleotide
  Antisense strand to SEQ ID NO: 98742
uucuuaaggacugacacuc

SEQ ID NO: 98824 - RNA, 19 nt, Artificial Sequence
  Description of Artificial Sequence: Synthetic oligonucleotide
  Sense strand starting at position 1546 of SEQ ID NO: 1245
agugucaguccuuaagaau

SEQ ID NO: 98825 - RNA, 19 nt, Artificial Sequence
  Description of Artificial Sequence: Synthetic oligonucleotide
  Antisense strand to SEQ ID NO: 98744
auucuuaaggacugacacu

SEQ ID NO: 98826 - RNA, 19 nt, Artificial Sequence
  Description of Artificial Sequence: Synthetic oligonucleotide
  Sense strand starting at position 1552 of SEQ ID NO: 1245
aguccuuaagaaugugacu

SEQ ID NO: 98827 - RNA, 19 nt, Artificial Sequence
  Description of Artificial Sequence: Synthetic oligonucleotide
  Antisense strand to SEQ ID NO: 98746
agucacauucuuaaggacu

SEQ ID NO: 98828 - RNA, 19 nt, Artificial Sequence
  Description of Artificial Sequence: Synthetic oligonucleotide
  Sense strand starting at position 1579 of SEQ ID NO: 1245
guguuaggaacuuggaaca

SEQ ID NO: 98829 - RNA, 19 nt, Artificial Sequence
  Description of Artificial Sequence: Synthetic oligonucleotide
  Antisense strand to SEQ ID NO: 98748
uguuccaaguuccuaacac

SEQ ID NO: 98830 - RNA, 19 nt, Artificial Sequence
  Description of Artificial Sequence: Synthetic oligonucleotide
  Sense strand starting at position 1682 of SEQ ID NO: 1245
uggugucuuaccgggauuu

SEQ ID NO: 98831 - RNA, 19 nt, Artificial Sequence
  Description of Artificial Sequence: Synthetic oligonucleotide
  Antisense strand to SEQ ID NO: 98750
aaaucccgguaagacacca

SEQ ID NO: 98832 - RNA, 19 nt, Artificial Sequence
  Description of Artificial Sequence: Synthetic oligonucleotide
  Sense strand starting at position 1708 of SEQ ID NO: 1245
gaacuuugcccggauucca

SEQ ID NO: 98833 - RNA, 19 nt, Artificial Sequence
  Description of Artificial Sequence: Synthetic oligonucleotide
  Antisense strand to SEQ ID NO: 98752
uggaauccgggcaaaguuc

SEQ ID NO: 98834 - RNA, 19 nt, Artificial Sequence
  Description of Artificial Sequence: Synthetic oligonucleotide
  Sense strand starting at position 1822 of SEQ ID NO: 1245
cgcuccucucuuuagauaa

SEQ ID NO: 98835 - RNA, 19 nt, Artificial Sequence
  Description of Artificial Sequence: Synthetic oligonucleotide
  Antisense strand to SEQ ID NO: 98754
uuaucuaaagagaggagcg

SEQ ID NO: 98836 - RNA, 19 nt, Artificial Sequence
  Description of Artificial Sequence: Synthetic oligonucleotide
  Sense strand starting at position 1918 of SEQ ID NO: 1245
ggcggcauugcacucagua

SEQ ID NO: 98837 - RNA, 19 nt, Artificial Sequence
  Description of Artificial Sequence: Synthetic oligonucleotide
  Antisense strand to SEQ ID NO: 98756
uacugagugcaaugccgcc

SEQ ID NO: 98838 - RNA, 19 nt, Artificial Sequence
  Description of Artificial Sequence: Synthetic oligonucleotide
  Sense strand starting at position 2116 of SEQ ID NO: 1245
gucaguucugauggaaaug

SEQ ID NO: 98839 - RNA, 19 nt, Artificial Sequence
  Description of Artificial Sequence: Synthetic oligonucleotide
  Antisense strand to SEQ ID NO: 98758
cauuuccaucagaacugac

SEQ ID NO: 98840 - RNA, 19 nt, Artificial Sequence
  Description of Artificial Sequence: Synthetic oligonucleotide
  Sense strand starting at position 2145 of SEQ ID NO: 1245
cugcuugcuggucagagaa

SEQ ID NO: 98841 - RNA, 19 nt, Artificial Sequence
  Description of Artificial Sequence: Synthetic oligonucleotide
  Antisense strand to SEQ ID NO: 98760
uucucugaccagcaagcag

SEQ ID NO: 98842 - RNA, 19 nt, Artificial Sequence
  Description of Artificial Sequence: Synthetic oligonucleotide
  Sense strand starting at position 2186 of SEQ ID NO: 1245
ucaagauguuucuuugcaa

SEQ ID NO: 98843 - RNA, 19 nt, Artificial Sequence
  Description of Artificial Sequence: Synthetic oligonucleotide
  Antisense strand to SEQ ID NO: 98762
uugcaaagaaacaucuuga

SEQ ID NO: 98844 - RNA, 19 nt, Artificial Sequence
  Description of Artificial Sequence: Synthetic oligonucleotide
  Sense strand starting at position 2207 of SEQ ID NO: 1245
gaaauuaggguuuguaaua

SEQ ID NO: 98845 - RNA, 19 nt, Artificial Sequence
  Description of Artificial Sequence: Synthetic oligonucleotide
  Antisense strand to SEQ ID NO: 98764
uauuacaaacccuaauuuc

SEQ ID NO: 98846 - RNA, 19 nt, Artificial Sequence
  Description of Artificial Sequence: Synthetic oligonucleotide
  Sense strand starting at position 2329 of SEQ ID NO: 1245
gccugaagugugcugugua

SEQ ID NO: 98847 - RNA, 19 nt, Artificial Sequence
  Description of Artificial Sequence: Synthetic oligonucleotide
  Antisense strand to SEQ ID NO: 98766
uacacagcacacuucaggc

SEQ ID NO: 98848 - RNA, 19 nt, Artificial Sequence
  Description of Artificial Sequence: Synthetic oligonucleotide
  Sense strand starting at position 2360 of SEQ ID NO: 1245
guccaugcccuuuaucaca

SEQ ID NO: 98849 - RNA, 19 nt, Artificial Sequence
  Description of Artificial Sequence: Synthetic oligonucleotide
  Antisense strand to SEQ ID NO: 98768
ugugauaaagggcauggac

SEQ ID NO: 98850 - RNA, 19 nt, Artificial Sequence
  Description of Artificial Sequence: Synthetic oligonucleotide
  Sense strand starting at position 2382 of SEQ ID NO: 1245
ggaaaccuauacuaagaaa

SEQ ID NO: 98851 - RNA, 19 nt, Artificial Sequence
  Description of Artificial Sequence: Synthetic oligonucleotide
  Antisense strand to SEQ ID NO: 98770
uuucuuaguauagguuucc

SEQ ID NO: 98852 - RNA, 19 nt, Artificial Sequence
  Description of Artificial Sequence: Synthetic oligonucleotide
  Sense strand starting at position 2401 of SEQ ID NO: 1245
ggugaagugauuugcucga

SEQ ID NO: 98853 - RNA, 19 nt, Artificial Sequence
  Description of Artificial Sequence: Synthetic oligonucleotide
  Antisense strand to SEQ ID NO: 98772
ucgagcaaaucacuucacc

SEQ ID NO: 98854 - RNA, 19 nt, Artificial Sequence
  Description of Artificial Sequence: Synthetic oligonucleotide
  Sense strand starting at position 2408 of SEQ ID NO: 1245
ugauuugcucgagggcaca

SEQ ID NO: 98855 - RNA, 19 nt, Artificial Sequence
  Description of Artificial Sequence: Synthetic oligonucleotide
  Antisense strand to SEQ ID NO: 98774
ugugcccucgagcaaauca

SEQ ID NO: 98856 - RNA, 19 nt, Artificial Sequence
  Description of Artificial Sequence: Synthetic oligonucleotide
  Sense strand starting at position 2436 of SEQ ID NO: 1245
agagaagcgguauggauua

SEQ ID NO: 98857 - RNA, 19 nt, Artificial Sequence
  Description of Artificial Sequence: Synthetic oligonucleotide
  Antisense strand to SEQ ID NO: 98776
uaauccauaccgcuucucu

SEQ ID NO: 98858 - RNA, 19 nt, Artificial Sequence
  Description of Artificial Sequence: Synthetic oligonucleotide
  Sense strand starting at position 2753 of SEQ ID NO: 1245
aacccagaguuguuacaag

SEQ ID NO: 98859 - RNA, 19 nt, Artificial Sequence
  Description of Artificial Sequence: Synthetic oligonucleotide
  Antisense strand to SEQ ID NO: 98778
cuuguaacaacucuggguu

SEQ ID NO: 98860 - RNA, 19 nt, Artificial Sequence
  Description of Artificial Sequence: Synthetic oligonucleotide
  Sense strand starting at position 2780 of SEQ ID NO: 1245
aguacuacacuccaguaua

SEQ ID NO: 98861 - RNA, 19 nt, Artificial Sequence
  Description of Artificial Sequence: Synthetic oligonucleotide
  Antisense strand to SEQ ID NO: 98780
uauacuggaguguaguacu

SEQ ID NO: 98862 - RNA, 19 nt, Artificial Sequence
  Description of Artificial Sequence: Synthetic oligonucleotide
  Sense strand starting at position 2880 of SEQ ID NO: 1245
cugggucucuggucauaca

SEQ ID NO: 98863 - RNA, 19 nt, Artificial Sequence
  Description of Artificial Sequence: Synthetic oligonucleotide
  Antisense strand to SEQ ID NO: 98782
uguaugaccagagacccag

SEQ ID NO: 98864 - RNA, 19 nt, Artificial Sequence
  Description of Artificial Sequence: Synthetic oligonucleotide
  Sense strand starting at position 2881 of SEQ ID NO: 1245
ugggucucuggucauacau

SEQ ID NO: 98865 - RNA, 19 nt, Artificial Sequence
  Description of Artificial Sequence: Synthetic oligonucleotide
  Antisense strand to SEQ ID NO: 98784
auguaugaccagagaccca

SEQ ID NO: 98866 - RNA, 19 nt, Artificial Sequence
  Description of Artificial Sequence: Synthetic oligonucleotide
  Sense strand starting at position 3032 of SEQ ID NO: 1245
cuagguguccuccaaucca

SEQ ID NO: 98867 - RNA, 19 nt, Artificial Sequence
  Description of Artificial Sequence: Synthetic oligonucleotide
  Antisense strand to SEQ ID NO: 98786
uggauuggaggacaccuag

SEQ ID NO: 98868 - RNA, 19 nt, Artificial Sequence
  Description of Artificial Sequence: Synthetic oligonucleotide
  Sense strand starting at position 3259 of SEQ ID NO: 1245
gcgauuucucccgaguagc

SEQ ID NO: 98869 - RNA, 19 nt, Artificial Sequence
  Description of Artificial Sequence: Synthetic oligonucleotide
  Antisense strand to SEQ ID NO: 98788
gcuacucgggagaaaucgc

SEQ ID NO: 98870 - RNA, 19 nt, Artificial Sequence
  Description of Artificial Sequence: Synthetic oligonucleotide
  Sense strand starting at position 3461 of SEQ ID NO: 1245
gugcuucugaucuauggga

SEQ ID NO: 98871 - RNA, 19 nt, Artificial Sequence
  Description of Artificial Sequence: Synthetic oligonucleotide
  Antisense strand to SEQ ID NO: 98790
ucccauagaucagaagcac

SEQ ID NO: 98872 - RNA, 19 nt, Artificial Sequence
  Description of Artificial Sequence: Synthetic oligonucleotide
  Sense strand starting at position 3463 of SEQ ID NO: 1245
gcuucugaucuaugggaca

SEQ ID NO: 98873 - RNA, 19 nt, Artificial Sequence
  Description of Artificial Sequence: Synthetic oligonucleotide
  Antisense strand to SEQ ID NO: 98792
ugucccauagaucagaagc

SEQ ID NO: 98874 - RNA, 19 nt, Artificial Sequence
  Description of Artificial Sequence: Synthetic oligonucleotide
  Sense strand starting at position 3564 of SEQ ID NO: 1245
cggcuuauuacagaggaua

SEQ ID NO: 98875 - RNA, 19 nt, Artificial Sequence
  Description of Artificial Sequence: Synthetic oligonucleotide
  Antisense strand to SEQ ID NO: 98794
uauccucuguaauaagccg

SEQ ID NO: 98876 - RNA, 19 nt, Artificial Sequence
  Description of Artificial Sequence: Synthetic oligonucleotide
  Sense strand starting at position 3706 of SEQ ID NO: 1245
uuauguaagcaagauugau

SEQ ID NO: 98877 - RNA, 19 nt, Artificial Sequence
  Description of Artificial Sequence: Synthetic oligonucleotide
  Antisense strand to SEQ ID NO: 98796
aucaaucuugcuuacauaa

SEQ ID NO: 98878 - RNA, 19 nt, Artificial Sequence
  Description of Artificial Sequence: Synthetic oligonucleotide
  Sense strand starting at position 3728 of SEQ ID NO: 1245
accauuggccacugguaau

SEQ ID NO: 98879 - RNA, 19 nt, Artificial Sequence
  Description of Artificial Sequence: Synthetic oligonucleotide
  Antisense strand to SEQ ID NO: 98798
auuaccaguggccaauggu

SEQ ID NO: 98880 - RNA, 19 nt, Artificial Sequence
  Description of Artificial Sequence: Synthetic oligonucleotide
  Sense strand starting at position 3865 of SEQ ID NO: 1245
gacugcuagccgucaguca

SEQ ID NO: 98881 - RNA, 19 nt, Artificial Sequence
  Description of Artificial Sequence: Synthetic oligonucleotide
  Antisense strand to SEQ ID NO: 98800
ugacugacggcuagcaguc

SEQ ID NO: 98882 - RNA, 19 nt, Artificial Sequence
  Description of Artificial Sequence: Synthetic oligonucleotide
  Sense strand starting at position 3874 of SEQ ID NO: 1245
ccgucagucaacugaugaa

SEQ ID NO: 98883 - RNA, 19 nt, Artificial Sequence
  Description of Artificial Sequence: Synthetic oligonucleotide
  Antisense strand to SEQ ID NO: 98802
uucaucaguugacugacgg

SEQ ID NO: 98884 - RNA, 19 nt, Artificial Sequence
  Description of Artificial Sequence: Synthetic oligonucleotide
  Sense strand starting at position 209 of SEQ ID NO: 1246
cagaacugaucucuguagu

SEQ ID NO: 98885 - RNA, 19 nt, Artificial Sequence
  Description of Artificial Sequence: Synthetic oligonucleotide
  Antisense strand to SEQ ID NO: 98804
acuacagagaucaguucug

SEQ ID NO: 98886 - RNA, 19 nt, Artificial Sequence
  Description of Artificial Sequence: Synthetic oligonucleotide
  Sense strand starting at position 210 of SEQ ID NO: 1246
agaacugaucucuguagug

SEQ ID NO: 98887 - RNA, 19 nt, Artificial Sequence
  Description of Artificial Sequence: Synthetic oligonucleotide
  Antisense strand to SEQ ID NO: 98806
cacuacagagaucaguucu

SEQ ID NO: 98888 - RNA, 19 nt, Artificial Sequence
  Description of Artificial Sequence: Synthetic oligonucleotide
  Sense strand starting at position 212 of SEQ ID NO: 1246
aacugaucucuguaguguu

SEQ ID NO: 98889 - RNA, 19 nt, Artificial Sequence
  Description of Artificial Sequence: Synthetic oligonucleotide
  Antisense strand to SEQ ID NO: 98808
aacacuacagagaucaguu

SEQ ID NO: 98890 - RNA, 19 nt, Artificial Sequence
  Description of Artificial Sequence: Synthetic oligonucleotide
  Sense strand starting at position 460 of SEQ ID NO: 1246
auguguauaucugugacau

SEQ ID NO: 98891 - RNA, 19 nt, Artificial Sequence
  Description of Artificial Sequence: Synthetic oligonucleotide
  Antisense strand to SEQ ID NO: 98810
augucacagauauacacau

SEQ ID NO: 98892 - RNA, 19 nt, Artificial Sequence
  Description of Artificial Sequence: Synthetic oligonucleotide
  Sense strand starting at position 461 of SEQ ID NO: 1246
uguguauaucugugacaug

SEQ ID NO: 98893 - RNA, 19 nt, Artificial Sequence
  Description of Artificial Sequence: Synthetic oligonucleotide
  Antisense strand to SEQ ID NO: 98812
caugucacagauauacaca

SEQ ID NO: 98894 - RNA, 19 nt, Artificial Sequence
  Description of Artificial Sequence: Synthetic oligonucleotide
  Sense strand starting at position 470 of SEQ ID NO: 1246
cugugacauguauagcuua

SEQ ID NO: 98895 - RNA, 19 nt, Artificial Sequence
  Description of Artificial Sequence: Synthetic oligonucleotide
  Antisense strand to SEQ ID NO: 98814
uaagcuauacaugucacag

SEQ ID NO: 98896 - RNA, 19 nt, Artificial Sequence
  Description of Artificial Sequence: Synthetic oligonucleotide
  Sense strand starting at position 473 of SEQ ID NO: 1246
ugacauguauagcuuacua

SEQ ID NO: 98897 - RNA, 19 nt, Artificial Sequence
  Description of Artificial Sequence: Synthetic oligonucleotide
  Antisense strand to SEQ ID NO: 98816
uaguaagcuauacauguca

SEQ ID NO: 98898 - RNA, 19 nt, Artificial Sequence
  Description of Artificial Sequence: Synthetic oligonucleotide
  Sense strand starting at position 538 of SEQ ID NO: 1246
ugagucaacauguaugcga

SEQ ID NO: 98899 - RNA, 19 nt, Artificial Sequence
  Description of Artificial Sequence: Synthetic oligonucleotide
  Antisense strand to SEQ ID NO: 98818
ucgcauacauguugacuca

SEQ ID NO: 98900 - RNA, 19 nt, Artificial Sequence
  Description of Artificial Sequence: Synthetic oligonucleotide
  Sense strand starting at position 541 of SEQ ID NO: 1246
gucaacauguaugcgauuu

SEQ ID NO: 98901 - RNA, 19 nt, Artificial Sequence
  Description of Artificial Sequence: Synthetic oligonucleotide
  Antisense strand to SEQ ID NO: 98820
aaaucgcauacauguugac

SEQ ID NO: 98902 - RNA, 19 nt, Artificial Sequence
  Description of Artificial Sequence: Synthetic oligonucleotide
  Sense strand starting at position 554 of SEQ ID NO: 1246
cgauuugugucugucgaua

SEQ ID NO: 98903 - RNA, 19 nt, Artificial Sequence
  Description of Artificial Sequence: Synthetic oligonucleotide
  Antisense strand to SEQ ID NO: 98822
uaucgacagacacaaaucg

SEQ ID NO: 98904 - RNA, 19 nt, Artificial Sequence
  Description of Artificial Sequence: Synthetic oligonucleotide
  Sense strand starting at position 575 of SEQ ID NO: 1246
uguaucuuuguguccgagu

SEQ ID NO: 98905 - RNA, 19 nt, Artificial Sequence
  Description of Artificial Sequence: Synthetic oligonucleotide
  Antisense strand to SEQ ID NO: 98824
acucggacacaaagauaca

SEQ ID NO: 98906 - RNA, 19 nt, Artificial Sequence
  Description of Artificial Sequence: Synthetic oligonucleotide
  Sense strand starting at position 648 of SEQ ID NO: 1246
gcuacuggacucuagcaua

SEQ ID NO: 98907 - RNA, 19 nt, Artificial Sequence
  Description of Artificial Sequence: Synthetic oligonucleotide
  Antisense strand to SEQ ID NO: 98826
uaugcuagaguccaguagc

SEQ ID NO: 98908 - RNA, 19 nt, Artificial Sequence
  Description of Artificial Sequence: Synthetic oligonucleotide
  Sense strand starting at position 653 of SEQ ID NO: 1246
uggacucuagcauaagcaa

SEQ ID NO: 98909 - RNA, 19 nt, Artificial Sequence
  Description of Artificial Sequence: Synthetic oligonucleotide
  Antisense strand to SEQ ID NO: 98828
uugcuuaugcuagagucca

SEQ ID NO: 98910 - RNA, 19 nt, Artificial Sequence
  Description of Artificial Sequence: Synthetic oligonucleotide
  Sense strand starting at position 887 of SEQ ID NO: 1246
cuagcccgauccuuggaaa

SEQ ID NO: 98911 - RNA, 19 nt, Artificial Sequence
  Description of Artificial Sequence: Synthetic oligonucleotide
  Antisense strand to SEQ ID NO: 98830
uuuccaaggaucgggcuag

SEQ ID NO: 98912 - RNA, 19 nt, Artificial Sequence
  Description of Artificial Sequence: Synthetic oligonucleotide
  Sense strand starting at position 888 of SEQ ID NO: 1246
uagcccgauccuuggaaau

SEQ ID NO: 98913 - RNA, 19 nt, Artificial Sequence
  Description of Artificial Sequence: Synthetic oligonucleotide
  Antisense strand to SEQ ID NO: 98832
auuuccaaggaucgggcua

SEQ ID NO: 98914 - RNA, 19 nt, Artificial Sequence
  Description of Artificial Sequence: Synthetic oligonucleotide
  Sense strand starting at position 900 of SEQ ID NO: 1246
uggaaauaguaugcuagga

SEQ ID NO: 98915 - RNA, 19 nt, Artificial Sequence
  Description of Artificial Sequence: Synthetic oligonucleotide
  Antisense strand to SEQ ID NO: 98834
uccuagcauacuauuucca

SEQ ID NO: 98916 - RNA, 19 nt, Artificial Sequence
  Description of Artificial Sequence: Synthetic oligonucleotide
  Sense strand starting at position 961 of SEQ ID NO: 1246
cuccucucccaguaauugu

SEQ ID NO: 98917 - RNA, 19 nt, Artificial Sequence
  Description of Artificial Sequence: Synthetic oligonucleotide
  Antisense strand to SEQ ID NO: 98836
acaauuacugggagaggag

SEQ ID NO: 98918 - RNA, 19 nt, Artificial Sequence
  Description of Artificial Sequence: Synthetic oligonucleotide
  Sense strand starting at position 968 of SEQ ID NO: 1246
cccaguaauuguccucaag

SEQ ID NO: 98919 - RNA, 19 nt, Artificial Sequence
  Description of Artificial Sequence: Synthetic oligonucleotide
  Antisense strand to SEQ ID NO: 98838
cuugaggacaauuacuggg

SEQ ID NO: 98920 - RNA, 19 nt, Artificial Sequence
  Description of Artificial Sequence: Synthetic oligonucleotide
  Sense strand starting at position 970 of SEQ ID NO: 1246
caguaauuguccucaagag

SEQ ID NO: 98921 - RNA, 19 nt, Artificial Sequence
  Description of Artificial Sequence: Synthetic oligonucleotide
  Antisense strand to SEQ ID NO: 98840
cucuugaggacaauuacug

SEQ ID NO: 98922 - RNA, 19 nt, Artificial Sequence
  Description of Artificial Sequence: Synthetic oligonucleotide
  Sense strand starting at position 1259 of SEQ ID NO: 1246
agcuuuagcucacuuuaag

SEQ ID NO: 98923 - RNA, 19 nt, Artificial Sequence
  Description of Artificial Sequence: Synthetic oligonucleotide
  Antisense strand to SEQ ID NO: 98842
cuuaaagugagcuaaagcu

SEQ ID NO: 98924 - RNA, 19 nt, Artificial Sequence
  Description of Artificial Sequence: Synthetic oligonucleotide
  Sense strand starting at position 1794 of SEQ ID NO: 1246
ccggcagaucaggaaucuu

SEQ ID NO: 98925 - RNA, 19 nt, Artificial Sequence
  Description of Artificial Sequence: Synthetic oligonucleotide
  Antisense strand to SEQ ID NO: 98844
aagauuccugaucugccgg

SEQ ID NO: 98926 - RNA, 19 nt, Artificial Sequence
  Description of Artificial Sequence: Synthetic oligonucleotide
  Sense strand starting at position 1818 of SEQ ID NO: 1246
cuggaauccguucggaauc

SEQ ID NO: 98927 - RNA, 19 nt, Artificial Sequence
  Description of Artificial Sequence: Synthetic oligonucleotide
  Antisense strand to SEQ ID NO: 98846
gauuccgaacggauuccag

SEQ ID NO: 98928 - RNA, 19 nt, Artificial Sequence
  Description of Artificial Sequence: Synthetic oligonucleotide
  Sense strand starting at position 1838 of SEQ ID NO: 1246
gagaaucucccacgggauc

SEQ ID NO: 98929 - RNA, 19 nt, Artificial Sequence
  Description of Artificial Sequence: Synthetic oligonucleotide
  Antisense strand to SEQ ID NO: 98848
gaucccgugggagauucuc

SEQ ID NO: 98930 - RNA, 19 nt, Artificial Sequence
  Description of Artificial Sequence: Synthetic oligonucleotide
  Sense strand starting at position 1909 of SEQ ID NO: 1246
gagaaauccuagcucggac

SEQ ID NO: 98931 - RNA, 19 nt, Artificial Sequence
  Description of Artificial Sequence: Synthetic oligonucleotide
  Antisense strand to SEQ ID NO: 98850
guccgagcuaggauuucuc

SEQ ID NO: 98932 - RNA, 19 nt, Artificial Sequence
  Description of Artificial Sequence: Synthetic oligonucleotide
  Sense strand starting at position 1942 of SEQ ID NO: 1246
gguucugaaauccgggauu

SEQ ID NO: 98933 - RNA, 19 nt, Artificial Sequence
  Description of Artificial Sequence: Synthetic oligonucleotide
  Antisense strand to SEQ ID NO: 98852
aaucccggauuucagaacc

SEQ ID NO: 98934 - RNA, 19 nt, Artificial Sequence
  Description of Artificial Sequence: Synthetic oligonucleotide
  Sense strand starting at position 2365 of SEQ ID NO: 1246
augaauggcucucuagaga

SEQ ID NO: 98935 - RNA, 19 nt, Artificial Sequence
  Description of Artificial Sequence: Synthetic oligonucleotide
  Antisense strand to SEQ ID NO: 98854
ucucuagagagccauucau

SEQ ID NO: 98936 - RNA, 19 nt, Artificial Sequence
  Description of Artificial Sequence: Synthetic oligonucleotide
  Sense strand starting at position 2521 of SEQ ID NO: 1246
gcaucugagccuuaacugu

SEQ ID NO: 98937 - RNA, 19 nt, Artificial Sequence
  Description of Artificial Sequence: Synthetic oligonucleotide
  Antisense strand to SEQ ID NO: 98856
acaguuaaggcucagaugc

SEQ ID NO: 98938 - RNA, 19 nt, Artificial Sequence
  Description of Artificial Sequence: Synthetic oligonucleotide
  Sense strand starting at position 2593 of SEQ ID NO: 1246
uuugacuucuaggcagaac

SEQ ID NO: 98939 - RNA, 19 nt, Artificial Sequence
  Description of Artificial Sequence: Synthetic oligonucleotide
  Antisense strand to SEQ ID NO: 98858
guucugccuagaagucaaa

SEQ ID NO: 98940 - RNA, 19 nt, Artificial Sequence
  Description of Artificial Sequence: Synthetic oligonucleotide
  Sense strand starting at position 2749 of SEQ ID NO: 1246
ucuugugugaauuaaugag

SEQ ID NO: 98941 - RNA, 19 nt, Artificial Sequence
  Description of Artificial Sequence: Synthetic oligonucleotide
  Antisense strand to SEQ ID NO: 98860
cucauuaauucacacaaga

SEQ ID NO: 98942 - RNA, 19 nt, Artificial Sequence
  Description of Artificial Sequence: Synthetic oligonucleotide
  Sense strand starting at position 2756 of SEQ ID NO: 1246
ugaauuaaugagugaggca

SEQ ID NO: 98943 - RNA, 19 nt, Artificial Sequence
  Description of Artificial Sequence: Synthetic oligonucleotide
  Antisense strand to SEQ ID NO: 98862
ugccucacucauuaauuca

SEQ ID NO: 98944 - RNA, 19 nt, Artificial Sequence
  Description of Artificial Sequence: Synthetic oligonucleotide
  Sense strand starting at position 2828 of SEQ ID NO: 1246
uugaauaacuuguccagga

SEQ ID NO: 98945 - RNA, 19 nt, Artificial Sequence
  Description of Artificial Sequence: Synthetic oligonucleotide
  Antisense strand to SEQ ID NO: 98864
uccuggacaaguuauucaa

SEQ ID NO: 98946 - RNA, 19 nt, Artificial Sequence
  Description of Artificial Sequence: Synthetic oligonucleotide
  Sense strand starting at position 2829 of SEQ ID NO: 1246
ugaauaacuuguccaggau

SEQ ID NO: 98947 - RNA, 19 nt, Artificial Sequence
  Description of Artificial Sequence: Synthetic oligonucleotide
  Antisense strand to SEQ ID NO: 98866
auccuggacaaguuauuca

SEQ ID NO: 98948 - RNA, 19 nt, Artificial Sequence
  Description of Artificial Sequence: Synthetic oligonucleotide
  Sense strand starting at position 2984 of SEQ ID NO: 1246
uguugccuuguggaagaaa

SEQ ID NO: 98949 - RNA, 19 nt, Artificial Sequence
  Description of Artificial Sequence: Synthetic oligonucleotide
  Antisense strand to SEQ ID NO: 98868
uuucuuccacaaggcaaca

SEQ ID NO: 98950 - RNA, 19 nt, Artificial Sequence
  Description of Artificial Sequence: Synthetic oligonucleotide
  Sense strand starting at position 3062 of SEQ ID NO: 1246
agugguagaguuugagaac

SEQ ID NO: 98951 - RNA, 19 nt, Artificial Sequence
  Description of Artificial Sequence: Synthetic oligonucleotide
  Antisense strand to SEQ ID NO: 98870
guucucaaacucuaccacu

SEQ ID NO: 98952 - RNA, 19 nt, Artificial Sequence
  Description of Artificial Sequence: Synthetic oligonucleotide
  Sense strand starting at position 3073 of SEQ ID NO: 1246
uugagaacuuggccugcaa

SEQ ID NO: 98953 - RNA, 19 nt, Artificial Sequence
  Description of Artificial Sequence: Synthetic oligonucleotide
  Antisense strand to SEQ ID NO: 98872
uugcaggccaaguucucaa

SEQ ID NO: 98954 - RNA, 19 nt, Artificial Sequence
  Description of Artificial Sequence: Synthetic oligonucleotide
  Sense strand starting at position 3075 of SEQ ID NO: 1246
gagaacuuggccugcaaca

SEQ ID NO: 98955 - RNA, 19 nt, Artificial Sequence
  Description of Artificial Sequence: Synthetic oligonucleotide
  Antisense strand to SEQ ID NO: 98874
uguugcaggccaaguucuc

SEQ ID NO: 98956 - RNA, 19 nt, Artificial Sequence
  Description of Artificial Sequence: Synthetic oligonucleotide
  Sense strand starting at position 3077 of SEQ ID NO: 1246
gaacuuggccugcaacaga

SEQ ID NO: 98957 - RNA, 19 nt, Artificial Sequence
  Description of Artificial Sequence: Synthetic oligonucleotide
  Antisense strand to SEQ ID NO: 98876
ucuguugcaggccaaguuc

SEQ ID NO: 98958 - RNA, 19 nt, Artificial Sequence
  Description of Artificial Sequence: Synthetic oligonucleotide
  Sense strand starting at position 3150 of SEQ ID NO: 1246
cugagaaagcugugcaauu

SEQ ID NO: 98959 - RNA, 19 nt, Artificial Sequence
  Description of Artificial Sequence: Synthetic oligonucleotide
  Antisense strand to SEQ ID NO: 98878
aauugcacagcuuucucag

SEQ ID NO: 98960 - RNA, 19 nt, Artificial Sequence
  Description of Artificial Sequence: Synthetic oligonucleotide
  Sense strand starting at position 3151 of SEQ ID NO: 1246
ugagaaagcugugcaauuc

SEQ ID NO: 98961 - RNA, 19 nt, Artificial Sequence
  Description of Artificial Sequence: Synthetic oligonucleotide
  Antisense strand to SEQ ID NO: 98880
gaauugcacagcuuucuca

SEQ ID NO: 98962 - RNA, 19 nt, Artificial Sequence
  Description of Artificial Sequence: Synthetic oligonucleotide
  Sense strand starting at position 3544 of SEQ ID NO: 1246
augcuuggaucuccucuaa

SEQ ID NO: 98963 - RNA, 19 nt, Artificial Sequence
  Description of Artificial Sequence: Synthetic oligonucleotide
  Antisense strand to SEQ ID NO: 98882
uuagaggagauccaagcau

SEQ ID NO: 98964 - RNA, 19 nt, Artificial Sequence
  Description of Artificial Sequence: Synthetic oligonucleotide
  Sense strand starting at position 3721 of SEQ ID NO: 1247
gauccuugaagucaggagu

SEQ ID NO: 98965 - RNA, 19 nt, Artificial Sequence
  Description of Artificial Sequence: Synthetic oligonucleotide
  Antisense strand to SEQ ID NO: 98884
acuccugacuucaaggauc

SEQ ID NO: 98966 - RNA, 19 nt, Artificial Sequence
  Description of Artificial Sequence: Synthetic oligonucleotide
  Sense strand starting at position 3714 of SEQ ID NO: 1247
gugggaggauccuugaagu

SEQ ID NO: 98967 - RNA, 19 nt, Artificial Sequence
  Description of Artificial Sequence: Synthetic oligonucleotide
  Antisense strand to SEQ ID NO: 98886
acuucaaggauccucccac

SEQ ID NO: 98968 - RNA, 19 nt, Artificial Sequence
  Description of Artificial Sequence: Synthetic oligonucleotide
  Sense strand starting at position 3617 of SEQ ID NO: 1247
ggaugggagucgcgagaua

SEQ ID NO: 98969 - RNA, 19 nt, Artificial Sequence
  Description of Artificial Sequence: Synthetic oligonucleotide
  Antisense strand to SEQ ID NO: 98888
uaucucgcgacucccaucc

SEQ ID NO: 98970 - RNA, 19 nt, Artificial Sequence
  Description of Artificial Sequence: Synthetic oligonucleotide
  Sense strand starting at position 3533 of SEQ ID NO: 1247
gagagagcccucuggaaug

SEQ ID NO: 98971 - RNA, 19 nt, Artificial Sequence
  Description of Artificial Sequence: Synthetic oligonucleotide
  Antisense strand to SEQ ID NO: 98890
cauuccagagggcucucuc

SEQ ID NO: 98972 - RNA, 19 nt, Artificial Sequence
  Description of Artificial Sequence: Synthetic oligonucleotide
  Sense strand starting at position 3497 of SEQ ID NO: 1247
ugaccagacucaggagaau

SEQ ID NO: 98973 - RNA, 19 nt, Artificial Sequence
  Description of Artificial Sequence: Synthetic oligonucleotide
  Antisense strand to SEQ ID NO: 98892
auucuccugagucugguca

SEQ ID NO: 98974 - RNA, 19 nt, Artificial Sequence
  Description of Artificial Sequence: Synthetic oligonucleotide
  Sense strand starting at position 3417 of SEQ ID NO: 1247
ucaugacaguccuuuguga

SEQ ID NO: 98975 - RNA, 19 nt, Artificial Sequence
  Description of Artificial Sequence: Synthetic oligonucleotide
  Antisense strand to SEQ ID NO: 98894
ucacaaaggacugucauga

SEQ ID NO: 98976 - RNA, 19 nt, Artificial Sequence
  Description of Artificial Sequence: Synthetic oligonucleotide
  Sense strand starting at position 3365 of SEQ ID NO: 1247
uugugucagucaucuuauc

SEQ ID NO: 98977 - RNA, 19 nt, Artificial Sequence
  Description of Artificial Sequence: Synthetic oligonucleotide
  Antisense strand to SEQ ID NO: 98896
gauaagaugacugacacaa

SEQ ID NO: 98978 - RNA, 19 nt, Artificial Sequence
  Description of Artificial Sequence: Synthetic oligonucleotide
  Sense strand starting at position 3359 of SEQ ID NO: 1247
ccaucuuugugucagucau

SEQ ID NO: 98979 - RNA, 19 nt, Artificial Sequence
  Description of Artificial Sequence: Synthetic oligonucleotide
  Antisense strand to SEQ ID NO: 98898
augacugacacaaagaugg

SEQ ID NO: 98980 - RNA, 19 nt, Artificial Sequence
  Description of Artificial Sequence: Synthetic oligonucleotide
  Sense strand starting at position 3299 of SEQ ID NO: 1247
caaguauaauggugaugaa

SEQ ID NO: 98981 - RNA, 19 nt, Artificial Sequence
  Description of Artificial Sequence: Synthetic oligonucleotide
  Antisense strand to SEQ ID NO: 98900
uucaucaccauuauacuug

SEQ ID NO: 98982 - RNA, 19 nt, Artificial Sequence
  Description of Artificial Sequence: Synthetic oligonucleotide
  Sense strand starting at position 3296 of SEQ ID NO: 1247
aaacaaguauaauggugau

SEQ ID NO: 98983 - RNA, 19 nt, Artificial Sequence
  Description of Artificial Sequence: Synthetic oligonucleotide
  Antisense strand to SEQ ID NO: 98902
aucaccauuauacuuguuu

SEQ ID NO: 98984 - RNA, 19 nt, Artificial Sequence
  Description of Artificial Sequence: Synthetic oligonucleotide
  Sense strand starting at position 3280 of SEQ ID NO: 1247
cuaggaagugcucaguaaa

SEQ ID NO: 98985 - RNA, 19 nt, Artificial Sequence
  Description of Artificial Sequence: Synthetic oligonucleotide
  Antisense strand to SEQ ID NO: 98904
uuuacugagcacuuccuag

SEQ ID NO: 98986 - RNA, 19 nt, Artificial Sequence
  Description of Artificial Sequence: Synthetic oligonucleotide
  Sense strand starting at position 3195 of SEQ ID NO: 1247
auaguagugccaugaggua

SEQ ID NO: 98987 - RNA, 19 nt, Artificial Sequence
  Description of Artificial Sequence: Synthetic oligonucleotide
  Antisense strand to SEQ ID NO: 98906
uaccucauggcacuacuau

SEQ ID NO: 98988 - RNA, 19 nt, Artificial Sequence
  Description of Artificial Sequence: Synthetic oligonucleotide
  Sense strand starting at position 3009 of SEQ ID NO: 1247
cugggaugugugcguaucu

SEQ ID NO: 98989 - RNA, 19 nt, Artificial Sequence
  Description of Artificial Sequence: Synthetic oligonucleotide
  Antisense strand to SEQ ID NO: 98908
agauacgcacacaucccag

SEQ ID NO: 98990 - RNA, 19 nt, Artificial Sequence
  Description of Artificial Sequence: Synthetic oligonucleotide
  Sense strand starting at position 2939 of SEQ ID NO: 1247
gcggccauuuggagggaua

SEQ ID NO: 98991 - RNA, 19 nt, Artificial Sequence
  Description of Artificial Sequence: Synthetic oligonucleotide
  Antisense strand to SEQ ID NO: 98910
uaucccuccaaauggccgc

SEQ ID NO: 98992 - RNA, 19 nt, Artificial Sequence
  Description of Artificial Sequence: Synthetic oligonucleotide
  Sense strand starting at position 2832 of SEQ ID NO: 1247
aggucaguucucuaguucu

SEQ ID NO: 98993 - RNA, 19 nt, Artificial Sequence
  Description of Artificial Sequence: Synthetic oligonucleotide
  Antisense strand to SEQ ID NO: 98912
agaacuagagaacugaccu

SEQ ID NO: 98994 - RNA, 19 nt, Artificial Sequence
  Description of Artificial Sequence: Synthetic oligonucleotide
  Sense strand starting at position 2830 of SEQ ID NO: 1247
gaaggucaguucucuaguu

SEQ ID NO: 98995 - RNA, 19 nt, Artificial Sequence
  Description of Artificial Sequence: Synthetic oligonucleotide
  Antisense strand to SEQ ID NO: 98914
aacuagagaacugaccuuc

SEQ ID NO: 98996 - RNA, 19 nt, Artificial Sequence
  Description of Artificial Sequence: Synthetic oligonucleotide
  Sense strand starting at position 2821 of SEQ ID NO: 1247
ugacuucuagaaggucagu

SEQ ID NO: 98997 - RNA, 19 nt, Artificial Sequence
  Description of Artificial Sequence: Synthetic oligonucleotide
  Antisense strand to SEQ ID NO: 98916
acugaccuucuagaaguca

SEQ ID NO: 98998 - RNA, 19 nt, Artificial Sequence
  Description of Artificial Sequence: Synthetic oligonucleotide
  Sense strand starting at position 2818 of SEQ ID NO: 1247
uccugacuucuagaagguc

SEQ ID NO: 98999 - RNA, 19 nt, Artificial Sequence
  Description of Artificial Sequence: Synthetic oligonucleotide
  Antisense strand to SEQ ID NO: 98918
gaccuucuagaagucagga

SEQ ID NO: 99000 - RNA, 19 nt, Artificial Sequence
  Description of Artificial Sequence: Synthetic oligonucleotide
  Sense strand starting at position 2547 of SEQ ID NO: 1247
cucccaguggucugucgau

SEQ ID NO: 99001 - RNA, 19 nt, Artificial Sequence
  Description of Artificial Sequence: Synthetic oligonucleotide
  Antisense strand to SEQ ID NO: 98920
aucgacagaccacugggag

SEQ ID NO: 99002 - RNA, 19 nt, Artificial Sequence
  Description of Artificial Sequence: Synthetic oligonucleotide
  Sense strand starting at position 2208 of SEQ ID NO: 1247
aguccaaauucucgcucaa

SEQ ID NO: 99003 - RNA, 19 nt, Artificial Sequence
  Description of Artificial Sequence: Synthetic oligonucleotide
  Antisense strand to SEQ ID NO: 98922
uugagcgagaauuuggacu

SEQ ID NO: 99004 - RNA, 19 nt, Artificial Sequence
  Description of Artificial Sequence: Synthetic oligonucleotide
  Sense strand starting at position 2011 of SEQ ID NO: 1247
ccaggaguucgccgcgcua

SEQ ID NO: 99005 - RNA, 19 nt, Artificial Sequence
  Description of Artificial Sequence: Synthetic oligonucleotide
  Antisense strand to SEQ ID NO: 98924
uagcgcggcgaacuccugg

SEQ ID NO: 99006 - RNA, 19 nt, Artificial Sequence
  Description of Artificial Sequence: Synthetic oligonucleotide
  Sense strand starting at position 1142 of SEQ ID NO: 1247
gcccuagcucaguagaaga

SEQ ID NO: 99007 - RNA, 19 nt, Artificial Sequence
  Description of Artificial Sequence: Synthetic oligonucleotide
  Antisense strand to SEQ ID NO: 98926
ucuucuacugagcuagggc

SEQ ID NO: 99008 - RNA, 19 nt, Artificial Sequence
  Description of Artificial Sequence: Synthetic oligonucleotide
  Sense strand starting at position 869 of SEQ ID NO: 1247
gccuuuauccggcggguua

SEQ ID NO: 99009 - RNA, 19 nt, Artificial Sequence
  Description of Artificial Sequence: Synthetic oligonucleotide
  Antisense strand to SEQ ID NO: 98928
uaacccgccggauaaaggc

SEQ ID NO: 99010 - RNA, 19 nt, Artificial Sequence
  Description of Artificial Sequence: Synthetic oligonucleotide
  Sense strand starting at position 678 of SEQ ID NO: 1247
cauucucuagugggagauu

SEQ ID NO: 99011 - RNA, 19 nt, Artificial Sequence
  Description of Artificial Sequence: Synthetic oligonucleotide
  Antisense strand to SEQ ID NO: 98930
aaucucccacuagagaaug

SEQ ID NO: 99012 - RNA, 19 nt, Artificial Sequence
  Description of Artificial Sequence: Synthetic oligonucleotide
  Sense strand starting at position 677 of SEQ ID NO: 1247
ucauucucuagugggagau

SEQ ID NO: 99013 - RNA, 19 nt, Artificial Sequence
  Description of Artificial Sequence: Synthetic oligonucleotide
  Antisense strand to SEQ ID NO: 98932
aucucccacuagagaauga

SEQ ID NO: 99014 - RNA, 19 nt, Artificial Sequence
  Description of Artificial Sequence: Synthetic oligonucleotide
  Sense strand starting at position 676 of SEQ ID NO: 1247
cucauucucuagugggaga

SEQ ID NO: 99015 - RNA, 19 nt, Artificial Sequence
  Description of Artificial Sequence: Synthetic oligonucleotide
  Antisense strand to SEQ ID NO: 98934
ucucccacuagagaaugag

SEQ ID NO: 99016 - RNA, 19 nt, Artificial Sequence
  Description of Artificial Sequence: Synthetic oligonucleotide
  Sense strand starting at position 550 of SEQ ID NO: 1247
gggagcuuugguggucuaa

SEQ ID NO: 99017 - RNA, 19 nt, Artificial Sequence
  Description of Artificial Sequence: Synthetic oligonucleotide
  Antisense strand to SEQ ID NO: 98936
uuagaccaccaaagcuccc

SEQ ID NO: 99018 - RNA, 19 nt, Artificial Sequence
  Description of Artificial Sequence: Synthetic oligonucleotide
  Sense strand starting at position 504 of SEQ ID NO: 1247
ugcagaaguccugagcacu

SEQ ID NO: 99019 - RNA, 19 nt, Artificial Sequence
  Description of Artificial Sequence: Synthetic oligonucleotide
  Antisense strand to SEQ ID NO: 98938
agugcucaggacuucugca

SEQ ID NO: 99020 - RNA, 19 nt, Artificial Sequence
  Description of Artificial Sequence: Synthetic oligonucleotide
  Sense strand starting at position 485 of SEQ ID NO: 1247
cccagauccgaaugggauu

SEQ ID NO: 99021 - RNA, 19 nt, Artificial Sequence
  Description of Artificial Sequence: Synthetic oligonucleotide
  Antisense strand to SEQ ID NO: 98940
aaucccauucggaucuggg

SEQ ID NO: 99022 - RNA, 19 nt, Artificial Sequence
  Description of Artificial Sequence: Synthetic oligonucleotide
  Sense strand starting at position 350 of SEQ ID NO: 1247
cccugagucaaugggaaca

SEQ ID NO: 99023 - RNA, 19 nt, Artificial Sequence
  Description of Artificial Sequence: Synthetic oligonucleotide
  Antisense strand to SEQ ID NO: 98942
uguucccauugacucaggg

SEQ ID NO: 99024 - RNA, 19 nt, Artificial Sequence
  Description of Artificial Sequence: Synthetic oligonucleotide
  Sense strand starting at position 175 of SEQ ID NO: 1247
gaagcauccucgcuggcau

SEQ ID NO: 99025 - RNA, 19 nt, Artificial Sequence
  Description of Artificial Sequence: Synthetic oligonucleotide
  Antisense strand to SEQ ID NO: 98944
augccagcgaggaugcuuc

SEQ ID NO: 99026 - RNA, 19 nt, Artificial Sequence
  Description of Artificial Sequence: Synthetic oligonucleotide
  Sense strand starting at position 3930 of SEQ ID NO: 1248
uggcuugguguugagguau

SEQ ID NO: 99027 - RNA, 19 nt, Artificial Sequence
  Description of Artificial Sequence: Synthetic oligonucleotide
  Antisense strand to SEQ ID NO: 98946
auaccucaacaccaagcca

SEQ ID NO: 99028 - RNA, 19 nt, Artificial Sequence
  Description of Artificial Sequence: Synthetic oligonucleotide
  Sense strand starting at position 3879 of SEQ ID NO: 1248
ggagucugaguuggucuuu

SEQ ID NO: 99029 - RNA, 19 nt, Artificial Sequence
  Description of Artificial Sequence: Synthetic oligonucleotide
  Antisense strand to SEQ ID NO: 98948
aaagaccaacucagacucc

SEQ ID NO: 99030 - RNA, 19 nt, Artificial Sequence
  Description of Artificial Sequence: Synthetic oligonucleotide
  Sense strand starting at position 3878 of SEQ ID NO: 1248
uggagucugaguuggucuu

SEQ ID NO: 99031 - RNA, 19 nt, Artificial Sequence
  Description of Artificial Sequence: Synthetic oligonucleotide
  Antisense strand to SEQ ID NO: 98950
aagaccaacucagacucca

SEQ ID NO: 99032 - RNA, 19 nt, Artificial Sequence
  Description of Artificial Sequence: Synthetic oligonucleotide
  Sense strand starting at position 3639 of SEQ ID NO: 1248
cagcuuccucccgagucua

SEQ ID NO: 99033 - RNA, 19 nt, Artificial Sequence
  Description of Artificial Sequence: Synthetic oligonucleotide
  Antisense strand to SEQ ID NO: 98952
uagacucgggaggaagcug

SEQ ID NO: 99034 - RNA, 19 nt, Artificial Sequence
  Description of Artificial Sequence: Synthetic oligonucleotide
  Sense strand starting at position 3612 of SEQ ID NO: 1248
ggauucucuucugucuaca

SEQ ID NO: 99035 - RNA, 19 nt, Artificial Sequence
  Description of Artificial Sequence: Synthetic oligonucleotide
  Antisense strand to SEQ ID NO: 98954
uguagacagaagagaaucc

SEQ ID NO: 99036 - RNA, 19 nt, Artificial Sequence
  Description of Artificial Sequence: Synthetic oligonucleotide
  Sense strand starting at position 3609 of SEQ ID NO: 1248
cagggauucucuucugucu

SEQ ID NO: 99037 - RNA, 19 nt, Artificial Sequence
  Description of Artificial Sequence: Synthetic oligonucleotide
  Antisense strand to SEQ ID NO: 98956
agacagaagagaaucccug

SEQ ID NO: 99038 - RNA, 19 nt, Artificial Sequence
  Description of Artificial Sequence: Synthetic oligonucleotide
  Sense strand starting at position 3553 of SEQ ID NO: 1248
gacagauaacaguggcaca

SEQ ID NO: 99039 - RNA, 19 nt, Artificial Sequence
  Description of Artificial Sequence: Synthetic oligonucleotide
  Antisense strand to SEQ ID NO: 98958
ugugccacuguuaucuguc

SEQ ID NO: 99040 - RNA, 19 nt, Artificial Sequence
  Description of Artificial Sequence: Synthetic oligonucleotide
  Sense strand starting at position 3482 of SEQ ID NO: 1248
ugcuuagcuccauguacaa

SEQ ID NO: 99041 - RNA, 19 nt, Artificial Sequence
  Description of Artificial Sequence: Synthetic oligonucleotide
  Antisense strand to SEQ ID NO: 98960
uuguacauggagcuaagca

SEQ ID NO: 99042 - RNA, 19 nt, Artificial Sequence
  Description of Artificial Sequence: Synthetic oligonucleotide
  Sense strand starting at position 3296 of SEQ ID NO: 1248
gugcaaaugucucuucccu

SEQ ID NO: 99043 - RNA, 19 nt, Artificial Sequence
  Description of Artificial Sequence: Synthetic oligonucleotide
  Antisense strand to SEQ ID NO: 98962
agggaagagacauuugcac

SEQ ID NO: 99044 - RNA, 19 nt, Artificial Sequence
  Description of Artificial Sequence: Synthetic oligonucleotide
  Sense strand starting at position 3269 of SEQ ID NO: 1248
gauagaacuuagguaggua

SEQ ID NO: 99045 - RNA, 19 nt, Artificial Sequence
  Description of Artificial Sequence: Synthetic oligonucleotide
  Antisense strand to SEQ ID NO: 98964
uaccuaccuaaguucuauc

SEQ ID NO: 99046 - RNA, 19 nt, Artificial Sequence
  Description of Artificial Sequence: Synthetic oligonucleotide
  Sense strand starting at position 3176 of SEQ ID NO: 1248
gagaaugaggcuugaccua

SEQ ID NO: 99047 - RNA, 19 nt, Artificial Sequence
  Description of Artificial Sequence: Synthetic oligonucleotide
  Antisense strand to SEQ ID NO: 98966
uaggucaagccucauucuc

SEQ ID NO: 99048 - RNA, 19 nt, Artificial Sequence
  Description of Artificial Sequence: Synthetic oligonucleotide
  Sense strand starting at position 3089 of SEQ ID NO: 1248
cucugacuggcagaacauu

SEQ ID NO: 99049 - RNA, 19 nt, Artificial Sequence
  Description of Artificial Sequence: Synthetic oligonucleotide
  Antisense strand to SEQ ID NO: 98968
aauguucugccagucagag

SEQ ID NO: 99050 - RNA, 19 nt, Artificial Sequence
  Description of Artificial Sequence: Synthetic oligonucleotide
  Sense strand starting at position 2943 of SEQ ID NO: 1248
auccguaagaaguggguua

SEQ ID NO: 99051 - RNA, 19 nt, Artificial Sequence
  Description of Artificial Sequence: Synthetic oligonucleotide
  Antisense strand to SEQ ID NO: 98970
uaacccacuucuuacggau

SEQ ID NO: 99052 - RNA, 19 nt, Artificial Sequence
  Description of Artificial Sequence: Synthetic oligonucleotide
  Sense strand starting at position 2908 of SEQ ID NO: 1248
gggaauggcuucugauuuc

SEQ ID NO: 99053 - RNA, 19 nt, Artificial Sequence
  Description of Artificial Sequence: Synthetic oligonucleotide
  Antisense strand to SEQ ID NO: 98972
gaaaucagaagccauuccc

SEQ ID NO: 99054 - RNA, 19 nt, Artificial Sequence
  Description of Artificial Sequence: Synthetic oligonucleotide
  Sense strand starting at position 2665 of SEQ ID NO: 1248
aggagcacuuuaguaauua

SEQ ID NO: 99055 - RNA, 19 nt, Artificial Sequence
  Description of Artificial Sequence: Synthetic oligonucleotide
  Antisense strand to SEQ ID NO: 98974
uaauuacuaaagugcuccu

SEQ ID NO: 99056 - RNA, 19 nt, Artificial Sequence
  Description of Artificial Sequence: Synthetic oligonucleotide
  Sense strand starting at position 2663 of SEQ ID NO: 1248
ccaggagcacuuuaguaau

SEQ ID NO: 99057 - RNA, 19 nt, Artificial Sequence
  Description of Artificial Sequence: Synthetic oligonucleotide
  Antisense strand to SEQ ID NO: 98976
auuacuaaagugcuccugg

SEQ ID NO: 99058 - RNA, 19 nt, Artificial Sequence
  Description of Artificial Sequence: Synthetic oligonucleotide
  Sense strand starting at position 2648 of SEQ ID NO: 1248
cguauuauuguguaaccag

SEQ ID NO: 99059 - RNA, 19 nt, Artificial Sequence
  Description of Artificial Sequence: Synthetic oligonucleotide
  Antisense strand to SEQ ID NO: 98978
cugguuacacaauaauacg

SEQ ID NO: 99060 - RNA, 19 nt, Artificial Sequence
  Description of Artificial Sequence: Synthetic oligonucleotide
  Sense strand starting at position 2647 of SEQ ID NO: 1248
acguauuauuguguaacca

SEQ ID NO: 99061 - RNA, 19 nt, Artificial Sequence
  Description of Artificial Sequence: Synthetic oligonucleotide
  Antisense strand to SEQ ID NO: 98980
ugguuacacaauaauacgu

SEQ ID NO: 99062 - RNA, 19 nt, Artificial Sequence
  Description of Artificial Sequence: Synthetic oligonucleotide
  Sense strand starting at position 2643 of SEQ ID NO: 1248
aaagacguauuauugugua

SEQ ID NO: 99063 - RNA, 19 nt, Artificial Sequence
  Description of Artificial Sequence: Synthetic oligonucleotide
  Antisense strand to SEQ ID NO: 98982
uacacaauaauacgucuuu

SEQ ID NO: 99064 - RNA, 19 nt, Artificial Sequence
  Description of Artificial Sequence: Synthetic oligonucleotide
  Sense strand starting at position 2462 of SEQ ID NO: 1248
gcuuguagguauccagcua

SEQ ID NO: 99065 - RNA, 19 nt, Artificial Sequence
  Description of Artificial Sequence: Synthetic oligonucleotide
  Antisense strand to SEQ ID NO: 98984
uagcuggauaccuacaagc

SEQ ID NO: 99066 - RNA, 19 nt, Artificial Sequence
  Description of Artificial Sequence: Synthetic oligonucleotide
  Sense strand starting at position 2397 of SEQ ID NO: 1248
ccaauugucugggcuucuu

SEQ ID NO: 99067 - RNA, 19 nt, Artificial Sequence
  Description of Artificial Sequence: Synthetic oligonucleotide
  Antisense strand to SEQ ID NO: 98986
aagaagcccagacaauugg

SEQ ID NO: 99068 - RNA, 19 nt, Artificial Sequence
  Description of Artificial Sequence: Synthetic oligonucleotide
  Sense strand starting at position 2354 of SEQ ID NO: 1248
ugucaaaggagcugcauaa

SEQ ID NO: 99069 - RNA, 19 nt, Artificial Sequence
  Description of Artificial Sequence: Synthetic oligonucleotide
  Antisense strand to SEQ ID NO: 98988
uuaugcagcuccuuugaca

SEQ ID NO: 99070 - RNA, 19 nt, Artificial Sequence
  Description of Artificial Sequence: Synthetic oligonucleotide
  Sense strand starting at position 1187 of SEQ ID NO: 1248
gagugaaauuagcagaagu

SEQ ID NO: 99071 - RNA, 19 nt, Artificial Sequence
  Description of Artificial Sequence: Synthetic oligonucleotide
  Antisense strand to SEQ ID NO: 98990
acuucugcuaauuucacuc

SEQ ID NO: 99072 - RNA, 19 nt, Artificial Sequence
  Description of Artificial Sequence: Synthetic oligonucleotide
  Sense strand starting at position 687 of SEQ ID NO: 1248
ggauaauguuuccucagac

SEQ ID NO: 99073 - RNA, 19 nt, Artificial Sequence
  Description of Artificial Sequence: Synthetic oligonucleotide
  Antisense strand to SEQ ID NO: 98992
gucugaggaaacauuaucc

SEQ ID NO: 99074 - RNA, 19 nt, Artificial Sequence
  Description of Artificial Sequence: Synthetic oligonucleotide
  Sense strand starting at position 686 of SEQ ID NO: 1248
aggauaauguuuccucaga

SEQ ID NO: 99075 - RNA, 19 nt, Artificial Sequence
  Description of Artificial Sequence: Synthetic oligonucleotide
  Antisense strand to SEQ ID NO: 98994
ucugaggaaacauuauccu

SEQ ID NO: 99076 - RNA, 19 nt, Artificial Sequence
  Description of Artificial Sequence: Synthetic oligonucleotide
  Sense strand starting at position 606 of SEQ ID NO: 1248
ucgauauucucacuugaau

SEQ ID NO: 99077 - RNA, 19 nt, Artificial Sequence
  Description of Artificial Sequence: Synthetic oligonucleotide
  Antisense strand to SEQ ID NO: 98996
auucaagugagaauaucga

SEQ ID NO: 99078 - RNA, 19 nt, Artificial Sequence
  Description of Artificial Sequence: Synthetic oligonucleotide
  Sense strand starting at position 581 of SEQ ID NO: 1248
aguccauuguguuuaacuu

SEQ ID NO: 99079 - RNA, 19 nt, Artificial Sequence
  Description of Artificial Sequence: Synthetic oligonucleotide
  Antisense strand to SEQ ID NO: 98998
aaguuaaacacaauggacu

SEQ ID NO: 99080 - RNA, 19 nt, Artificial Sequence
  Description of Artificial Sequence: Synthetic oligonucleotide
  Sense strand starting at position 576 of SEQ ID NO: 1248
cucccaguccauuguguuu

SEQ ID NO: 99081 - RNA, 19 nt, Artificial Sequence
  Description of Artificial Sequence: Synthetic oligonucleotide
  Antisense strand to SEQ ID NO: 99000
aaacacaauggacugggag

SEQ ID NO: 99082 - RNA, 19 nt, Artificial Sequence
  Description of Artificial Sequence: Synthetic oligonucleotide
  Sense strand starting at position 475 of SEQ ID NO: 1248
agagauugguuugaccuga

SEQ ID NO: 99083 - RNA, 19 nt, Artificial Sequence
  Description of Artificial Sequence: Synthetic oligonucleotide
  Antisense strand to SEQ ID NO: 99002
ucaggucaaaccaaucucu

SEQ ID NO: 99084 - RNA, 19 nt, Artificial Sequence
  Description of Artificial Sequence: Synthetic oligonucleotide
  Sense strand starting at position 474 of SEQ ID NO: 1248
uagagauugguuugaccug

SEQ ID NO: 99085 - RNA, 19 nt, Artificial Sequence
  Description of Artificial Sequence: Synthetic oligonucleotide
  Antisense strand to SEQ ID NO: 99004
caggucaaaccaaucucua

SEQ ID NO: 99086 - RNA, 19 nt, Artificial Sequence
  Description of Artificial Sequence: Synthetic oligonucleotide
  Sense strand starting at position 470 of SEQ ID NO: 1248
ccuuuagagauugguuuga

SEQ ID NO: 99087 - RNA, 19 nt, Artificial Sequence
  Description of Artificial Sequence: Synthetic oligonucleotide
  Antisense strand to SEQ ID NO: 99006
ucaaaccaaucucuaaagg

SEQ ID NO: 99088 - RNA, 19 nt, Artificial Sequence
  Description of Artificial Sequence: Synthetic oligonucleotide
  Sense strand starting at position 462 of SEQ ID NO: 1248
aggcgucaccuuuagagau

SEQ ID NO: 99089 - RNA, 19 nt, Artificial Sequence
  Description of Artificial Sequence: Synthetic oligonucleotide
  Antisense strand to SEQ ID NO: 99008
aucucuaaaggugacgccu

SEQ ID NO: 99090 - RNA, 19 nt, Artificial Sequence
  Description of Artificial Sequence: Synthetic oligonucleotide
  Sense strand starting at position 324 of SEQ ID NO: 1248
auaccacauuucugaguuu

SEQ ID NO: 99091 - RNA, 19 nt, Artificial Sequence
  Description of Artificial Sequence: Synthetic oligonucleotide
  Antisense strand to SEQ ID NO: 99010
aaacucagaaaugugguau

SEQ ID NO: 99092 - RNA, 19 nt, Artificial Sequence
  Description of Artificial Sequence: Synthetic oligonucleotide
  Sense strand starting at position 296 of SEQ ID NO: 1248
cugaucguauauuccaaua

SEQ ID NO: 99093 - RNA, 19 nt, Artificial Sequence
  Description of Artificial Sequence: Synthetic oligonucleotide
  Antisense strand to SEQ ID NO: 99012
uauuggaauauacgaucag

SEQ ID NO: 99094 - RNA, 19 nt, Artificial Sequence
  Description of Artificial Sequence: Synthetic oligonucleotide
  Sense strand starting at position 179 of SEQ ID NO: 1248
cuguaacaggguugaguau

SEQ ID NO: 99095 - RNA, 19 nt, Artificial Sequence
  Description of Artificial Sequence: Synthetic oligonucleotide
  Antisense strand to SEQ ID NO: 99014
auacucaacccuguuacag

SEQ ID NO: 99096 - RNA, 19 nt, Artificial Sequence
  Description of Artificial Sequence: Synthetic oligonucleotide
  Sense strand starting at position 150 of SEQ ID NO: 1248
agcaauaacuuacaguaga

SEQ ID NO: 99097 - RNA, 19 nt, Artificial Sequence
  Description of Artificial Sequence: Synthetic oligonucleotide
  Antisense strand to SEQ ID NO: 99016
ucuacuguaaguuauugcu

SEQ ID NO: 99098 - RNA, 19 nt, Artificial Sequence
  Description of Artificial Sequence: Synthetic oligonucleotide
  Sense strand starting at position 83 of SEQ ID NO: 1248
uguugaaguguugaagaua

SEQ ID NO: 99099 - RNA, 19 nt, Artificial Sequence
  Description of Artificial Sequence: Synthetic oligonucleotide
  Antisense strand to SEQ ID NO: 99018
uaucuucaacacuucaaca

SEQ ID NO: 99100 - RNA, 19 nt, Artificial Sequence
  Description of Artificial Sequence: Synthetic oligonucleotide
  Sense strand starting at position 63 of SEQ ID NO: 1248
agagaagucuaagacacaa

SEQ ID NO: 99101 - RNA, 19 nt, Artificial Sequence
  Description of Artificial Sequence: Synthetic oligonucleotide
  Antisense strand to SEQ ID NO: 99020
uugugucuuagacuucucu

SEQ ID NO: 99102 - RNA, 19 nt, Artificial Sequence
  Description of Artificial Sequence: Synthetic oligonucleotide
  Sense strand starting at position 47 of SEQ ID NO: 1248
aguuaugaguagggaaaga

SEQ ID NO: 99103 - RNA, 19 nt, Artificial Sequence
  Description of Artificial Sequence: Synthetic oligonucleotide
  Antisense strand to SEQ ID NO: 99022
ucuuucccuacucauaacu

SEQ ID NO: 99104 - RNA, 19 nt, Artificial Sequence
  Description of Artificial Sequence: Synthetic oligonucleotide
  Sense strand starting at position 46 of SEQ ID NO: 1248
caguuaugaguagggaaag

SEQ ID NO: 99105 - RNA, 19 nt, Artificial Sequence
  Description of Artificial Sequence: Synthetic oligonucleotide
  Antisense strand to SEQ ID NO: 99024
cuuucccuacucauaacug

SEQ ID NO: 99106 - RNA, 19 nt, Artificial Sequence
  Description of Artificial Sequence: Synthetic oligonucleotide
  Antisense strand to SEQ ID NO: 13-Feb
gaauucaccuacuuacaau

SEQ ID NO: 99107 - RNA, 19 nt, Artificial Sequence
  Description of Artificial Sequence: Synthetic oligonucleotide
  Antisense strand to SEQ ID NO: 15-Feb
aauucaccuacuuacaauu

SEQ ID NO: 99108 - RNA, 19 nt, Artificial Sequence
  Description of Artificial Sequence: Synthetic oligonucleotide
  Antisense strand to SEQ ID NO: 17-Feb
uccagagauacaaucugac

SEQ ID NO: 99109 - RNA, 19 nt, Artificial Sequence
  Description of Artificial Sequence: Synthetic oligonucleotide
  Antisense strand to SEQ ID NO: 19-Feb
acaaucugacuccacaaac

SEQ ID NO: 99110 - RNA, 19 nt, Artificial Sequence
  Description of Artificial Sequence: Synthetic oligonucleotide
  Antisense strand to SEQ ID NO: 21-Feb
ucaggagggagauaaacag

SEQ ID NO: 99111 - RNA, 19 nt, Artificial Sequence
  Description of Artificial Sequence: Synthetic oligonucleotide
  Antisense strand to SEQ ID NO: 23-Feb
aacagaaacgcacauuugg

SEQ ID NO: 99112 - RNA, 19 nt, Artificial Sequence
  Description of Artificial Sequence: Synthetic oligonucleotide
  Antisense strand to SEQ ID NO: 25-Feb
acagaaacgcacauuuggu

SEQ ID NO: 99113 - RNA, 19 nt, Artificial Sequence
  Description of Artificial Sequence: Synthetic oligonucleotide
  Antisense strand to SEQ ID NO: 27-Feb
uuuccgaggaggaucaagu

SEQ ID NO: 99114 - RNA, 19 nt, Artificial Sequence
  Description of Artificial Sequence: Synthetic oligonucleotide
  Antisense strand to SEQ ID NO: 1-Mar
uccuuuacagacaaggugu

SEQ ID NO: 99115 - RNA, 19 nt, Artificial Sequence
  Description of Artificial Sequence: Synthetic oligonucleotide
  Antisense strand to SEQ ID NO: 3-Mar
uuuacagacaaggugugac

SEQ ID NO: 99116 - RNA, 19 nt, Artificial Sequence
  Description of Artificial Sequence: Synthetic oligonucleotide
  Antisense strand to SEQ ID NO: 5-Mar
uuacagacaaggugugacc

SEQ ID NO: 99117 - RNA, 19 nt, Artificial Sequence
  Description of Artificial Sequence: Synthetic oligonucleotide
  Antisense strand to SEQ ID NO: 7-Mar
aaacaggacagauaagugu

SEQ ID NO: 99118 - RNA, 19 nt, Artificial Sequence
  Description of Artificial Sequence: Synthetic oligonucleotide
  Antisense strand to SEQ ID NO: 9-Mar
aguguucaggccaauaaag

SEQ ID NO: 99119 - RNA, 19 nt, Artificial Sequence
  Description of Artificial Sequence: Synthetic oligonucleotide
  Antisense strand to SEQ ID NO: 11-Mar
guguucaggccaauaaaga

SEQ ID NO: 99120 - RNA, 19 nt, Artificial Sequence
  Description of Artificial Sequence: Synthetic oligonucleotide
  Antisense strand to SEQ ID NO: 13-Mar
guucaggccaauaaagaca

SEQ ID NO: 99121 - RNA, 19 nt, Artificial Sequence
  Description of Artificial Sequence: Synthetic oligonucleotide
  Antisense strand to SEQ ID NO: 15-Mar
uucaggccaauaaagacag

SEQ ID NO: 99122 - RNA, 19 nt, Artificial Sequence
  Description of Artificial Sequence: Synthetic oligonucleotide
  Antisense strand to SEQ ID NO: 17-Mar
uaaagacagagccucccug

SEQ ID NO: 99123 - RNA, 19 nt, Artificial Sequence
  Description of Artificial Sequence: Synthetic oligonucleotide
  Antisense strand to SEQ ID NO: 19-Mar
ucucuuggcgaacucccgc

SEQ ID NO: 99124 - RNA, 19 nt, Artificial Sequence
  Description of Artificial Sequence: Synthetic oligonucleotide
  Antisense strand to SEQ ID NO: 21-Mar
uucuggcugagucuugcaa

SEQ ID NO: 99125 - RNA, 19 nt, Artificial Sequence
  Description of Artificial Sequence: Synthetic oligonucleotide
  Antisense strand to SEQ ID NO: 23-Mar
ucuugcaauguacacuccu

SEQ ID NO: 99126 - RNA, 19 nt, Artificial Sequence
  Description of Artificial Sequence: Synthetic oligonucleotide
  Antisense strand to SEQ ID NO: 25-Mar
auaacacagacucuccuug

SEQ ID NO: 99127 - RNA, 19 nt, Artificial Sequence
  Description of Artificial Sequence: Synthetic oligonucleotide
  Antisense strand to SEQ ID NO: 27-Mar
uauucucccauccuuaaua

SEQ ID NO: 99128 - RNA, 19 nt, Artificial Sequence
  Description of Artificial Sequence: Synthetic oligonucleotide
  Antisense strand to SEQ ID NO: 29-Mar
aucacccuugaugucugcu

SEQ ID NO: 99129 - RNA, 19 nt, Artificial Sequence
  Description of Artificial Sequence: Synthetic oligonucleotide
  Antisense strand to SEQ ID NO: 31-Mar
uuaucaagaauccucuaca

SEQ ID NO: 99130 - RNA, 19 nt, Artificial Sequence
  Description of Artificial Sequence: Synthetic oligonucleotide
  Antisense strand to SEQ ID NO: 2-Apr
gucuuugcuguaauacaga

SEQ ID NO: 99131 - RNA, 19 nt, Artificial Sequence
  Description of Artificial Sequence: Synthetic oligonucleotide
  Antisense strand to SEQ ID NO: 4-Apr
uguaauacagaguugagcc

SEQ ID NO: 99132 - RNA, 19 nt, Artificial Sequence
  Description of Artificial Sequence: Synthetic oligonucleotide
  Antisense strand to SEQ ID NO: 6-Apr
uuggaagugacaagugacu

SEQ ID NO: 99133 - RNA, 19 nt, Artificial Sequence
  Description of Artificial Sequence: Synthetic oligonucleotide
  Antisense strand to SEQ ID NO: 8-Apr
aggaccaagugacuuuccc

SEQ ID NO: 99134 - RNA, 19 nt, Artificial Sequence
  Description of Artificial Sequence: Synthetic oligonucleotide
  Antisense strand to SEQ ID NO: 10-Apr
uauucccaggagaggcugc

SEQ ID NO: 99135 - RNA, 19 nt, Artificial Sequence
  Description of Artificial Sequence: Synthetic oligonucleotide
  Antisense strand to SEQ ID NO: 12-Apr
uuccuccuauuacaaagaa

SEQ ID NO: 99136 - RNA, 19 nt, Artificial Sequence
  Description of Artificial Sequence: Synthetic oligonucleotide
  Antisense strand to SEQ ID NO: 14-Apr
cuauuacaaagaaacuggg

SEQ ID NO: 99137 - RNA, 19 nt, Artificial Sequence
  Description of Artificial Sequence: Synthetic oligonucleotide
  Antisense strand to SEQ ID NO: 16-Apr
uuacaaagaaacugggagu

SEQ ID NO: 99138 - RNA, 19 nt, Artificial Sequence
  Description of Artificial Sequence: Synthetic oligonucleotide
  Antisense strand to SEQ ID NO: 18-Apr
ucugccagugagcaaacuu

SEQ ID NO: 99139 - RNA, 19 nt, Artificial Sequence
  Description of Artificial Sequence: Synthetic oligonucleotide
  Antisense strand to SEQ ID NO: 20-Apr
aaacuucuuaaucuccauu

SEQ ID NO: 99140 - RNA, 19 nt, Artificial Sequence
  Description of Artificial Sequence: Synthetic oligonucleotide
  Antisense strand to SEQ ID NO: 22-Apr
caguucaacgaauaccuuc

SEQ ID NO: 99141 - RNA, 19 nt, Artificial Sequence
  Description of Artificial Sequence: Synthetic oligonucleotide
  Antisense strand to SEQ ID NO: 24-Apr
ugcucucaagcacucuugu

SEQ ID NO: 99142 - RNA, 19 nt, Artificial Sequence
  Description of Artificial Sequence: Synthetic oligonucleotide
  Antisense strand to SEQ ID NO: 26-Apr
cucucaagcacucuugugg

SEQ ID NO: 99143 - RNA, 19 nt, Artificial Sequence
  Description of Artificial Sequence: Synthetic oligonucleotide
  Antisense strand to SEQ ID NO: 28-Apr
uugcuucaggaaggaagcc

SEQ ID NO: 99144 - RNA, 19 nt, Artificial Sequence
  Description of Artificial Sequence: Synthetic oligonucleotide
  Antisense strand to SEQ ID NO: 30-Apr
aagaauccuaaauauucca

SEQ ID NO: 99145 - RNA, 19 nt, Artificial Sequence
  Description of Artificial Sequence: Synthetic oligonucleotide
  Antisense strand to SEQ ID NO: 2-May
agaauccuaaauauuccau

SEQ ID NO: 99146 - RNA, 19 nt, Artificial Sequence
  Description of Artificial Sequence: Synthetic oligonucleotide
  Antisense strand to SEQ ID NO: 4-May
uuuacccaucuccaagccc

SEQ ID NO: 99147 - RNA, 19 nt, Artificial Sequence
  Description of Artificial Sequence: Synthetic oligonucleotide
  Antisense strand to SEQ ID NO: 6-May
auguucaagucucagcucc

SEQ ID NO: 99148 - RNA, 19 nt, Artificial Sequence
  Description of Artificial Sequence: Synthetic oligonucleotide
  Antisense strand to SEQ ID NO: 8-May
uauccucuagacuugcagg

SEQ ID NO: 99149 - RNA, 19 nt, Artificial Sequence
  Description of Artificial Sequence: Synthetic oligonucleotide
  Antisense strand to SEQ ID NO: 10-May
uaaucaauaagacauuugc

SEQ ID NO: 99150 - RNA, 19 nt, Artificial Sequence
  Description of Artificial Sequence: Synthetic oligonucleotide
  Antisense strand to SEQ ID NO: 12-May
aaguguacacacaucacau

SEQ ID NO: 99151 - RNA, 19 nt, Artificial Sequence
  Description of Artificial Sequence: Synthetic oligonucleotide
  Antisense strand to SEQ ID NO: 14-May
acuuuccuagaacugugcc

SEQ ID NO: 99152 - RNA, 19 nt, Artificial Sequence
  Description of Artificial Sequence: Synthetic oligonucleotide
  Antisense strand to SEQ ID NO: 16-May
acuguuaacccaauagcuu

SEQ ID NO: 99153 - RNA, 19 nt, Artificial Sequence
  Description of Artificial Sequence: Synthetic oligonucleotide
  Antisense strand to SEQ ID NO: 18-May
ucaguaacuacuuacagua

SEQ ID NO: 99154 - RNA, 19 nt, Artificial Sequence
  Description of Artificial Sequence: Synthetic oligonucleotide
  Antisense strand to SEQ ID NO: 20-May
ucauuugugcauagcagaa

SEQ ID NO: 99155 - RNA, 19 nt, Artificial Sequence
  Description of Artificial Sequence: Synthetic oligonucleotide
  Antisense strand to SEQ ID NO: 22-May
uugagaaagacacuucuga

SEQ ID NO: 99156 - RNA, 19 nt, Artificial Sequence
  Description of Artificial Sequence: Synthetic oligonucleotide
  Antisense strand to SEQ ID NO: 24-May
agguguaggcgauacauau

SEQ ID NO: 99157 - RNA, 19 nt, Artificial Sequence
  Description of Artificial Sequence: Synthetic oligonucleotide
  Antisense strand to SEQ ID NO: 26-May
acauauacaucucaaagca

SEQ ID NO: 99158 - RNA, 19 nt, Artificial Sequence
  Description of Artificial Sequence: Synthetic oligonucleotide
  Antisense strand to SEQ ID NO: 28-May
agcuuucucgggaagacau

SEQ ID NO: 99159 - RNA, 19 nt, Artificial Sequence
  Description of Artificial Sequence: Synthetic oligonucleotide
  Antisense strand to SEQ ID NO: 30-May
agucaugcuccuauaagcc

SEQ ID NO: 99160 - RNA, 19 nt, Artificial Sequence
  Description of Artificial Sequence: Synthetic oligonucleotide
  Antisense strand to SEQ ID NO: 1-Jun
ugugugcagaaaguccugc

SEQ ID NO: 99161 - RNA, 19 nt, Artificial Sequence
  Description of Artificial Sequence: Synthetic oligonucleotide
  Antisense strand to SEQ ID NO: 3-Jun
aaaguccugcaguucucac

SEQ ID NO: 99162 - RNA, 19 nt, Artificial Sequence
  Description of Artificial Sequence: Synthetic oligonucleotide
  Antisense strand to SEQ ID NO: 5-Jun
uugucgagcgacuaagcgu

SEQ ID NO: 99163 - RNA, 19 nt, Artificial Sequence
  Description of Artificial Sequence: Synthetic oligonucleotide
  Antisense strand to SEQ ID NO: 7-Jun
gacuauagagguuugccac

SEQ ID NO: 99164 - RNA, 19 nt, Artificial Sequence
  Description of Artificial Sequence: Synthetic oligonucleotide
  Antisense strand to SEQ ID NO: 9-Jun
ucguuuaucugggaaggcc

SEQ ID NO: 99165 - RNA, 19 nt, Artificial Sequence
  Description of Artificial Sequence: Synthetic oligonucleotide
  Antisense strand to SEQ ID NO: 11-Jun
guuuaucugggaaggccaa

SEQ ID NO: 99166 - RNA, 19 nt, Artificial Sequence
  Description of Artificial Sequence: Synthetic oligonucleotide
  Antisense strand to SEQ ID NO: 13-Jun
uucccuagacgagagauuc

SEQ ID NO: 99167 - RNA, 19 nt, Artificial Sequence
  Description of Artificial Sequence: Synthetic oligonucleotide
  Antisense strand to SEQ ID NO: 15-Jun
aaguuugugauucuauccu

SEQ ID NO: 99168 - RNA, 19 nt, Artificial Sequence
  Description of Artificial Sequence: Synthetic oligonucleotide
  Antisense strand to SEQ ID NO: 17-Jun
ucuauccuaguauaccaaa

SEQ ID NO: 99169 - RNA, 19 nt, Artificial Sequence
  Description of Artificial Sequence: Synthetic oligonucleotide
  Antisense strand to SEQ ID NO: 19-Jun
guuguucaaggacauuggc

SEQ ID NO: 99170 - RNA, 19 nt, Artificial Sequence
  Description of Artificial Sequence: Synthetic oligonucleotide
  Antisense strand to SEQ ID NO: 21-Jun
uuguucaaggacauuggcu

SEQ ID NO: 99171 - RNA, 19 nt, Artificial Sequence
  Description of Artificial Sequence: Synthetic oligonucleotide
  Antisense strand to SEQ ID NO: 23-Jun
cauuaagggaauagugucc

SEQ ID NO: 99172 - RNA, 19 nt, Artificial Sequence
  Description of Artificial Sequence: Synthetic oligonucleotide
  Antisense strand to SEQ ID NO: 25-Jun
auuaagggaauaguguccc

SEQ ID NO: 99173 - RNA, 19 nt, Artificial Sequence
  Description of Artificial Sequence: Synthetic oligonucleotide
  Antisense strand to SEQ ID NO: 27-Jun
ucucccauaggcagaguug

SEQ ID NO: 99174 - RNA, 19 nt, Artificial Sequence
  Description of Artificial Sequence: Synthetic oligonucleotide
  Antisense strand to SEQ ID NO: 29-Jun
auaggcagaguuguucaca

SEQ ID NO: 99175 - RNA, 19 nt, Artificial Sequence
  Description of Artificial Sequence: Synthetic oligonucleotide
  Antisense strand to SEQ ID NO: 1-Jul
ugacacauagacauuucau

SEQ ID NO: 99176 - RNA, 19 nt, Artificial Sequence
  Description of Artificial Sequence: Synthetic oligonucleotide
  Antisense strand to SEQ ID NO: 3-Jul
acacauagacauuucauac

SEQ ID NO: 99177 - RNA, 19 nt, Artificial Sequence
  Description of Artificial Sequence: Synthetic oligonucleotide
  Antisense strand to SEQ ID NO: 5-Jul
aaucucacuucguagcuca

SEQ ID NO: 99178 - RNA, 19 nt, Artificial Sequence
  Description of Artificial Sequence: Synthetic oligonucleotide
  Antisense strand to SEQ ID NO: 7-Jul
ucuuaucuggccgagaugg

SEQ ID NO: 99179 - RNA, 19 nt, Artificial Sequence
  Description of Artificial Sequence: Synthetic oligonucleotide
  Antisense strand to SEQ ID NO: 9-Jul
auuccucuagcagagagcc

SEQ ID NO: 99180 - RNA, 19 nt, Artificial Sequence
  Description of Artificial Sequence: Synthetic oligonucleotide
  Antisense strand to SEQ ID NO: 11-Jul
acuucagagagucuuagag

SEQ ID NO: 99181 - RNA, 19 nt, Artificial Sequence
  Description of Artificial Sequence: Synthetic oligonucleotide
  Antisense strand to SEQ ID NO: 13-Jul
auucccaucccaggacuac

SEQ ID NO: 99182 - RNA, 19 nt, Artificial Sequence
  Description of Artificial Sequence: Synthetic oligonucleotide
  Antisense strand to SEQ ID NO: 15-Jul
acucguguagaauguuuaa

SEQ ID NO: 99183 - RNA, 19 nt, Artificial Sequence
  Description of Artificial Sequence: Synthetic oligonucleotide
  Antisense strand to SEQ ID NO: 17-Jul
ccuauuacuggaaagacuu

SEQ ID NO: 99184 - RNA, 19 nt, Artificial Sequence
  Description of Artificial Sequence: Synthetic oligonucleotide
  Antisense strand to SEQ ID NO: 19-Jul
uuacuggaaagacuucagg

SEQ ID NO: 99185 - RNA, 19 nt, Artificial Sequence
  Description of Artificial Sequence: Synthetic oligonucleotide
  Antisense strand to SEQ ID NO: 21-Jul
ucucacgaugcauguccag

SEQ ID NO: 99186 - RNA, 19 nt, Artificial Sequence
  Description of Artificial Sequence: Synthetic oligonucleotide
  Sense strand starting at position 618 of SEQ ID NO: 1251
uccgauuucucuugaagga

SEQ ID NO: 99187 - RNA, 19 nt, Artificial Sequence
  Description of Artificial Sequence: Synthetic oligonucleotide
  Antisense strand to SEQ ID NO: 99186
uccuucaagagaaaucgga

SEQ ID NO: 99188 - RNA, 19 nt, Artificial Sequence
  Description of Artificial Sequence: Synthetic oligonucleotide
  Sense strand starting at position 650 of SEQ ID NO: 1251
uugaaaggcuucuugaaag

SEQ ID NO: 99189 - RNA, 19 nt, Artificial Sequence
  Description of Artificial Sequence: Synthetic oligonucleotide
  Antisense strand to SEQ ID NO: 99188
cuuucaagaagccuuucaa

SEQ ID NO: 99190 - RNA, 19 nt, Artificial Sequence
  Description of Artificial Sequence: Synthetic oligonucleotide
  Sense strand starting at position 822 of SEQ ID NO: 1251
gggauaagucuccauugcu

SEQ ID NO: 99191 - RNA, 19 nt, Artificial Sequence
  Description of Artificial Sequence: Synthetic oligonucleotide
  Antisense strand to SEQ ID NO: 99190
agcaauggagacuuauccc

SEQ ID NO: 99192 - RNA, 19 nt, Artificial Sequence
  Description of Artificial Sequence: Synthetic oligonucleotide
  Sense strand starting at position 915 of SEQ ID NO: 1251
ucugaucccuucuagagga

SEQ ID NO: 99193 - RNA, 19 nt, Artificial Sequence
  Description of Artificial Sequence: Synthetic oligonucleotide
  Antisense strand to SEQ ID NO: 99192
uccucuagaagggaucaga

SEQ ID NO: 99194 - RNA, 19 nt, Artificial Sequence
  Description of Artificial Sequence: Synthetic oligonucleotide
  Sense strand starting at position 1117 of SEQ ID NO: 1251
cucucuauuccgcgcggaa

SEQ ID NO: 99195 - RNA, 19 nt, Artificial Sequence
  Description of Artificial Sequence: Synthetic oligonucleotide
  Antisense strand to SEQ ID NO: 99194
uuccgcgcggaauagagag

SEQ ID NO: 99196 - RNA, 19 nt, Artificial Sequence
  Description of Artificial Sequence: Synthetic oligonucleotide
  Sense strand starting at position 2005 of SEQ ID NO: 1251
cgccgagcugccuauauau

SEQ ID NO: 99197 - RNA, 19 nt, Artificial Sequence
  Description of Artificial Sequence: Synthetic oligonucleotide
  Antisense strand to SEQ ID NO: 99196
auauauaggcagcucggcg

SEQ ID NO: 99198 - RNA, 19 nt, Artificial Sequence
  Description of Artificial Sequence: Synthetic oligonucleotide
  Sense strand starting at position 2390 of SEQ ID NO: 1251
ucagauggcugguccugaa

SEQ ID NO: 99199 - RNA, 19 nt, Artificial Sequence
  Description of Artificial Sequence: Synthetic oligonucleotide
  Antisense strand to SEQ ID NO: 99198
uucaggaccagccaucuga

SEQ ID NO: 99200 - RNA, 19 nt, Artificial Sequence
  Description of Artificial Sequence: Synthetic oligonucleotide
  Sense strand starting at position 2393 of SEQ ID NO: 1251
gauggcugguccugaauua

SEQ ID NO: 99201 - RNA, 19 nt, Artificial Sequence
  Description of Artificial Sequence: Synthetic oligonucleotide
  Antisense strand to SEQ ID NO: 99200
uaauucaggaccagccauc

SEQ ID NO: 99202 - RNA, 19 nt, Artificial Sequence
  Description of Artificial Sequence: Synthetic oligonucleotide
  Sense strand starting at position 2394 of SEQ ID NO: 1251
auggcugguccugaauuau

SEQ ID NO: 99203 - RNA, 19 nt, Artificial Sequence
  Description of Artificial Sequence: Synthetic oligonucleotide
  Antisense strand to SEQ ID NO: 99202
auaauucaggaccagccau

SEQ ID NO: 99204 - RNA, 19 nt, Artificial Sequence
  Description of Artificial Sequence: Synthetic oligonucleotide
  Sense strand starting at position 2400 of SEQ ID NO: 1251
gguccugaauuauacucua

SEQ ID NO: 99205 - RNA, 19 nt, Artificial Sequence
  Description of Artificial Sequence: Synthetic oligonucleotide
  Antisense strand to SEQ ID NO: 99204
uagaguauaauucaggacc

SEQ ID NO: 99206 - RNA, 19 nt, Artificial Sequence
  Description of Artificial Sequence: Synthetic oligonucleotide
  Sense strand starting at position 2416 of SEQ ID NO: 1251
cuagaaauguggucauaga

SEQ ID NO: 99207 - RNA, 19 nt, Artificial Sequence
  Description of Artificial Sequence: Synthetic oligonucleotide
  Antisense strand to SEQ ID NO: 99206
ucuaugaccacauuucuag

SEQ ID NO: 99208 - RNA, 19 nt, Artificial Sequence
  Description of Artificial Sequence: Synthetic oligonucleotide
  Sense strand starting at position 2703 of SEQ ID NO: 1251
gggacuuugugaccuugaa

SEQ ID NO: 99209 - RNA, 19 nt, Artificial Sequence
  Description of Artificial Sequence: Synthetic oligonucleotide
  Antisense strand to SEQ ID NO: 99208
uucaaggucacaaaguccc

SEQ ID NO: 99210 - RNA, 19 nt, Artificial Sequence
  Description of Artificial Sequence: Synthetic oligonucleotide
  Sense strand starting at position 2763 of SEQ ID NO: 1251
uugacaaccugucugacuu

SEQ ID NO: 99211 - RNA, 19 nt, Artificial Sequence
  Description of Artificial Sequence: Synthetic oligonucleotide
  Antisense strand to SEQ ID NO: 99210
aagucagacagguugucaa

SEQ ID NO: 99212 - RNA, 19 nt, Artificial Sequence
  Description of Artificial Sequence: Synthetic oligonucleotide
  Sense strand starting at position 3177 of SEQ ID NO: 1251
gaagcaaaguguugcaaau

SEQ ID NO: 99213 - RNA, 19 nt, Artificial Sequence
  Description of Artificial Sequence: Synthetic oligonucleotide
  Antisense strand to SEQ ID NO: 99212
auuugcaacacuuugcuuc

SEQ ID NO: 99214 - RNA, 19 nt, Artificial Sequence
  Description of Artificial Sequence: Synthetic oligonucleotide
  Sense strand starting at position 3555 of SEQ ID NO: 1251
cuuggagagguuugauaac

SEQ ID NO: 99215 - RNA, 19 nt, Artificial Sequence
  Description of Artificial Sequence: Synthetic oligonucleotide
  Antisense strand to SEQ ID NO: 99214
guuaucaaaccucuccaag

SEQ ID NO: 99216 - RNA, 19 nt, Artificial Sequence
  Description of Artificial Sequence: Synthetic oligonucleotide
  Sense strand starting at position 3564 of SEQ ID NO: 1251
guuugauaacaugggccaa

SEQ ID NO: 99217 - RNA, 19 nt, Artificial Sequence
  Description of Artificial Sequence: Synthetic oligonucleotide
  Antisense strand to SEQ ID NO: 99216
uuggcccauguuaucaaac

SEQ ID NO: 99218 - RNA, 19 nt, Artificial Sequence
  Description of Artificial Sequence: Synthetic oligonucleotide
  Sense strand starting at position 3690 of SEQ ID NO: 1251
acugcagcucacugaaagu

SEQ ID NO: 99219 - RNA, 19 nt, Artificial Sequence
  Description of Artificial Sequence: Synthetic oligonucleotide
  Antisense strand to SEQ ID NO: 99218
acuuucagugagcugcagu

SEQ ID NO: 99220 - RNA, 19 nt, Artificial Sequence
  Description of Artificial Sequence: Synthetic oligonucleotide
  Sense strand starting at position 3701 of SEQ ID NO: 1251
cugaaaguaccgugacuuc

SEQ ID NO: 99221 - RNA, 19 nt, Artificial Sequence
  Description of Artificial Sequence: Synthetic oligonucleotide
  Antisense strand to SEQ ID NO: 99220
gaagucacgguacuuucag

SEQ ID NO: 99222 - RNA, 19 nt, Artificial Sequence
  Description of Artificial Sequence: Synthetic oligonucleotide
  Sense strand starting at position 3710 of SEQ ID NO: 1251
ccgugacuucuccacagcu

SEQ ID NO: 99223 - RNA, 19 nt, Artificial Sequence
  Description of Artificial Sequence: Synthetic oligonucleotide
  Antisense strand to SEQ ID NO: 99222
agcuguggagaagucacgg

SEQ ID NO: 99224 - RNA, 19 nt, Artificial Sequence
  Description of Artificial Sequence: Synthetic oligonucleotide
  Sense strand starting at position 3928 of SEQ ID NO: 1251
aggcaaaucuucccaagga

SEQ ID NO: 99225 - RNA, 19 nt, Artificial Sequence
  Description of Artificial Sequence: Synthetic oligonucleotide
  Antisense strand to SEQ ID NO: 99224
uccuugggaagauuugccu

SEQ ID NO: 99226 - RNA, 19 nt, Artificial Sequence
  Description of Artificial Sequence: Synthetic oligonucleotide
  Sense strand starting at position 3929 of SEQ ID NO: 1251
ggcaaaucuucccaaggau

SEQ ID NO: 99227 - RNA, 19 nt, Artificial Sequence
  Description of Artificial Sequence: Synthetic oligonucleotide
  Antisense strand to SEQ ID NO: 99226
auccuugggaagauuugcc

SEQ ID NO: 99228 - RNA, 19 nt, Artificial Sequence
  Description of Artificial Sequence: Synthetic oligonucleotide
  Sense strand starting at position 3962 of SEQ ID NO: 1251
cgaagagcaucaggguaaa

SEQ ID NO: 99229 - RNA, 19 nt, Artificial Sequence
  Description of Artificial Sequence: Synthetic oligonucleotide
  Antisense strand to SEQ ID NO: 99228
uuuacccugaugcucuucg

SEQ ID NO: 99230 - RNA, 19 nt, Artificial Sequence
  Description of Artificial Sequence: Synthetic oligonucleotide
  Sense strand starting at position 3952 of SEQ ID NO: 1252
acagaugcaccagguuaau

SEQ ID NO: 99231 - RNA, 19 nt, Artificial Sequence
  Description of Artificial Sequence: Synthetic oligonucleotide
  Antisense strand to SEQ ID NO: 99230
auuaaccuggugcaucugu

SEQ ID NO: 99232 - RNA, 19 nt, Artificial Sequence
  Description of Artificial Sequence: Synthetic oligonucleotide
  Sense strand starting at position 3740 of SEQ ID NO: 1252
gcaauaguaccugaguuaa

SEQ ID NO: 99233 - RNA, 19 nt, Artificial Sequence
  Description of Artificial Sequence: Synthetic oligonucleotide
  Antisense strand to SEQ ID NO: 99232
uuaacucagguacuauugc

SEQ ID NO: 99234 - RNA, 19 nt, Artificial Sequence
  Description of Artificial Sequence: Synthetic oligonucleotide
  Sense strand starting at position 3738 of SEQ ID NO: 1252
uugcaauaguaccugaguu

SEQ ID NO: 99235 - RNA, 19 nt, Artificial Sequence
  Description of Artificial Sequence: Synthetic oligonucleotide
  Antisense strand to SEQ ID NO: 99234
aacucagguacuauugcaa

SEQ ID NO: 99236 - RNA, 19 nt, Artificial Sequence
  Description of Artificial Sequence: Synthetic oligonucleotide
  Sense strand starting at position 3535 of SEQ ID NO: 1252
ugauguguuacugagaaug

SEQ ID NO: 99237 - RNA, 19 nt, Artificial Sequence
  Description of Artificial Sequence: Synthetic oligonucleotide
  Antisense strand to SEQ ID NO: 99236
cauucucaguaacacauca

SEQ ID NO: 99238 - RNA, 19 nt, Artificial Sequence
  Description of Artificial Sequence: Synthetic oligonucleotide
  Sense strand starting at position 3533 of SEQ ID NO: 1252
uaugauguguuacugagaa

SEQ ID NO: 99239 - RNA, 19 nt, Artificial Sequence
  Description of Artificial Sequence: Synthetic oligonucleotide
  Antisense strand to SEQ ID NO: 99238
uucucaguaacacaucaua

SEQ ID NO: 99240 - RNA, 19 nt, Artificial Sequence
  Description of Artificial Sequence: Synthetic oligonucleotide
  Sense strand starting at position 3384 of SEQ ID NO: 1252
guacuuauuucuuuagcau

SEQ ID NO: 99241 - RNA, 19 nt, Artificial Sequence
  Description of Artificial Sequence: Synthetic oligonucleotide
  Antisense strand to SEQ ID NO: 99240
augcuaaagaaauaaguac

SEQ ID NO: 99242 - RNA, 19 nt, Artificial Sequence
  Description of Artificial Sequence: Synthetic oligonucleotide
  Sense strand starting at position 3383 of SEQ ID NO: 1252
uguacuuauuucuuuagca

SEQ ID NO: 99243 - RNA, 19 nt, Artificial Sequence
  Description of Artificial Sequence: Synthetic oligonucleotide
  Antisense strand to SEQ ID NO: 99242
ugcuaaagaaauaaguaca

SEQ ID NO: 99244 - RNA, 19 nt, Artificial Sequence
  Description of Artificial Sequence: Synthetic oligonucleotide
  Sense strand starting at position 3380 of SEQ ID NO: 1252
cuguguacuuauuucuuua

SEQ ID NO: 99245 - RNA, 19 nt, Artificial Sequence
  Description of Artificial Sequence: Synthetic oligonucleotide
  Antisense strand to SEQ ID NO: 99244
uaaagaaauaaguacacag

SEQ ID NO: 99246 - RNA, 19 nt, Artificial Sequence
  Description of Artificial Sequence: Synthetic oligonucleotide
  Sense strand starting at position 3373 of SEQ ID NO: 1252
acaccaucuguguacuuau

SEQ ID NO: 99247 - RNA, 19 nt, Artificial Sequence
  Description of Artificial Sequence: Synthetic oligonucleotide
  Antisense strand to SEQ ID NO: 99246
auaaguacacagauggugu

SEQ ID NO: 99248 - RNA, 19 nt, Artificial Sequence
  Description of Artificial Sequence: Synthetic oligonucleotide
  Sense strand starting at position 3269 of SEQ ID NO: 1252
acacuugacccuugaagca

SEQ ID NO: 99249 - RNA, 19 nt, Artificial Sequence
  Description of Artificial Sequence: Synthetic oligonucleotide
  Antisense strand to SEQ ID NO: 99248
ugcuucaagggucaagugu

SEQ ID NO: 99250 - RNA, 19 nt, Artificial Sequence
  Description of Artificial Sequence: Synthetic oligonucleotide
  Sense strand starting at position 3243 of SEQ ID NO: 1252
cauuaaagguuguuucuga

SEQ ID NO: 99251 - RNA, 19 nt, Artificial Sequence
  Description of Artificial Sequence: Synthetic oligonucleotide
  Antisense strand to SEQ ID NO: 99250
ucagaaacaaccuuuaaug

SEQ ID NO: 99252 - RNA, 19 nt, Artificial Sequence
  Description of Artificial Sequence: Synthetic oligonucleotide
  Sense strand starting at position 3173 of SEQ ID NO: 1252
uuucucgucucuucugaau

SEQ ID NO: 99253 - RNA, 19 nt, Artificial Sequence
  Description of Artificial Sequence: Synthetic oligonucleotide
  Antisense strand to SEQ ID NO: 99252
auucagaagagacgagaaa

SEQ ID NO: 99254 - RNA, 19 nt, Artificial Sequence
  Description of Artificial Sequence: Synthetic oligonucleotide
  Sense strand starting at position 3168 of SEQ ID NO: 1252
ggaaauuucucgucucuuc

SEQ ID NO: 99255 - RNA, 19 nt, Artificial Sequence
  Description of Artificial Sequence: Synthetic oligonucleotide
  Antisense strand to SEQ ID NO: 99254
gaagagacgagaaauuucc

SEQ ID NO: 99256 - RNA, 19 nt, Artificial Sequence
  Description of Artificial Sequence: Synthetic oligonucleotide
  Sense strand starting at position 3165 of SEQ ID NO: 1252
gugggaaauuucucgucuc

SEQ ID NO: 99257 - RNA, 19 nt, Artificial Sequence
  Description of Artificial Sequence: Synthetic oligonucleotide
  Antisense strand to SEQ ID NO: 99256
gagacgagaaauuucccac

SEQ ID NO: 99258 - RNA, 19 nt, Artificial Sequence
  Description of Artificial Sequence: Synthetic oligonucleotide
  Sense strand starting at position 3137 of SEQ ID NO: 1252
guaugccuccaguggaauu

SEQ ID NO: 99259 - RNA, 19 nt, Artificial Sequence
  Description of Artificial Sequence: Synthetic oligonucleotide
  Antisense strand to SEQ ID NO: 99258
aauuccacuggaggcauac

SEQ ID NO: 99260 - RNA, 19 nt, Artificial Sequence
  Description of Artificial Sequence: Synthetic oligonucleotide
  Sense strand starting at position 3134 of SEQ ID NO: 1252
ucaguaugccuccagugga

SEQ ID NO: 99261 - RNA, 19 nt, Artificial Sequence
  Description of Artificial Sequence: Synthetic oligonucleotide
  Antisense strand to SEQ ID NO: 99260
uccacuggaggcauacuga

SEQ ID NO: 99262 - RNA, 19 nt, Artificial Sequence
  Description of Artificial Sequence: Synthetic oligonucleotide
  Sense strand starting at position 3017 of SEQ ID NO: 1252
accuuaucgucucucuauu

SEQ ID NO: 99263 - RNA, 19 nt, Artificial Sequence
  Description of Artificial Sequence: Synthetic oligonucleotide
  Antisense strand to SEQ ID NO: 99262
aauagagagacgauaaggu

SEQ ID NO: 99264 - RNA, 19 nt, Artificial Sequence
  Description of Artificial Sequence: Synthetic oligonucleotide
  Sense strand starting at position 2915 of SEQ ID NO: 1252
gugcauuguccaggaccca

SEQ ID NO: 99265 - RNA, 19 nt, Artificial Sequence
  Description of Artificial Sequence: Synthetic oligonucleotide
  Antisense strand to SEQ ID NO: 99264
uggguccuggacaaugcac

SEQ ID NO: 99266 - RNA, 19 nt, Artificial Sequence
  Description of Artificial Sequence: Synthetic oligonucleotide
  Sense strand starting at position 2813 of SEQ ID NO: 1252
gagagcugugucugauuug

SEQ ID NO: 99267 - RNA, 19 nt, Artificial Sequence
  Description of Artificial Sequence: Synthetic oligonucleotide
  Antisense strand to SEQ ID NO: 99266
caaaucagacacagcucuc

SEQ ID NO: 99268 - RNA, 19 nt, Artificial Sequence
  Description of Artificial Sequence: Synthetic oligonucleotide
  Sense strand starting at position 2776 of SEQ ID NO: 1252
ggaagugucacuuaggcga

SEQ ID NO: 99269 - RNA, 19 nt, Artificial Sequence
  Description of Artificial Sequence: Synthetic oligonucleotide
  Antisense strand to SEQ ID NO: 99268
ucgccuaagugacacuucc

SEQ ID NO: 99270 - RNA, 19 nt, Artificial Sequence
  Description of Artificial Sequence: Synthetic oligonucleotide
  Sense strand starting at position 2548 of SEQ ID NO: 1252
acccucagaguuuggcaaa

SEQ ID NO: 99271 - RNA, 19 nt, Artificial Sequence
  Description of Artificial Sequence: Synthetic oligonucleotide
  Antisense strand to SEQ ID NO: 99270
uuugccaaacucugagggu

SEQ ID NO: 99272 - RNA, 19 nt, Artificial Sequence
  Description of Artificial Sequence: Synthetic oligonucleotide
  Sense strand starting at position 2541 of SEQ ID NO: 1252
cagggucacccucagaguu

SEQ ID NO: 99273 - RNA, 19 nt, Artificial Sequence
  Description of Artificial Sequence: Synthetic oligonucleotide
  Antisense strand to SEQ ID NO: 99272
aacucugagggugacccug

SEQ ID NO: 99274 - RNA, 19 nt, Artificial Sequence
  Description of Artificial Sequence: Synthetic oligonucleotide
  Sense strand starting at position 2507 of SEQ ID NO: 1252
cugucagucuccuucucua

SEQ ID NO: 99275 - RNA, 19 nt, Artificial Sequence
  Description of Artificial Sequence: Synthetic oligonucleotide
  Antisense strand to SEQ ID NO: 99274
uagagaaggagacugacag

SEQ ID NO: 99276 - RNA, 19 nt, Artificial Sequence
  Description of Artificial Sequence: Synthetic oligonucleotide
  Sense strand starting at position 2357 of SEQ ID NO: 1252
uuguccguuucauuggaga

SEQ ID NO: 99277 - RNA, 19 nt, Artificial Sequence
  Description of Artificial Sequence: Synthetic oligonucleotide
  Antisense strand to SEQ ID NO: 99276
ucuccaaugaaacggacaa

SEQ ID NO: 99278 - RNA, 19 nt, Artificial Sequence
  Description of Artificial Sequence: Synthetic oligonucleotide
  Sense strand starting at position 2290 of SEQ ID NO: 1252
ugaugugaaucaguggcuu

SEQ ID NO: 99279 - RNA, 19 nt, Artificial Sequence
  Description of Artificial Sequence: Synthetic oligonucleotide
  Antisense strand to SEQ ID NO: 99278
aagccacugauucacauca

SEQ ID NO: 99280 - RNA, 19 nt, Artificial Sequence
  Description of Artificial Sequence: Synthetic oligonucleotide
  Sense strand starting at position 2209 of SEQ ID NO: 1252
aguuuacggucgucuaaga

SEQ ID NO: 99281 - RNA, 19 nt, Artificial Sequence
  Description of Artificial Sequence: Synthetic oligonucleotide
  Antisense strand to SEQ ID NO: 99280
ucuuagacgaccguaaacu

SEQ ID NO: 99282 - RNA, 19 nt, Artificial Sequence
  Description of Artificial Sequence: Synthetic oligonucleotide
  Sense strand starting at position 2165 of SEQ ID NO: 1252
ccgccugucccuguguuua

SEQ ID NO: 99283 - RNA, 19 nt, Artificial Sequence
  Description of Artificial Sequence: Synthetic oligonucleotide
  Antisense strand to SEQ ID NO: 99282
uaaacacagggacaggcgg

SEQ ID NO: 99284 - RNA, 19 nt, Artificial Sequence
  Description of Artificial Sequence: Synthetic oligonucleotide
  Sense strand starting at position 927 of SEQ ID NO: 1252
gcucgucugcuauuguaaa

SEQ ID NO: 99285 - RNA, 19 nt, Artificial Sequence
  Description of Artificial Sequence: Synthetic oligonucleotide
  Antisense strand to SEQ ID NO: 99284
uuuacaauagcagacgagc

SEQ ID NO: 99286 - RNA, 19 nt, Artificial Sequence
  Description of Artificial Sequence: Synthetic oligonucleotide
  Sense strand starting at position 730 of SEQ ID NO: 1252
gugucacagcaguauaaac

SEQ ID NO: 99287 - RNA, 19 nt, Artificial Sequence
  Description of Artificial Sequence: Synthetic oligonucleotide
  Antisense strand to SEQ ID NO: 99286
guuuauacugcugugacac

SEQ ID NO: 99288 - RNA, 19 nt, Artificial Sequence
  Description of Artificial Sequence: Synthetic oligonucleotide
  Sense strand starting at position 719 of SEQ ID NO: 1252
cccuacuaagagugucaca

SEQ ID NO: 99289 - RNA, 19 nt, Artificial Sequence
  Description of Artificial Sequence: Synthetic oligonucleotide
  Antisense strand to SEQ ID NO: 99288
ugugacacucuuaguaggg

SEQ ID NO: 99290 - RNA, 19 nt, Artificial Sequence
  Description of Artificial Sequence: Synthetic oligonucleotide
  Sense strand starting at position 698 of SEQ ID NO: 1252
ucgugaaauucuucuacuc

SEQ ID NO: 99291 - RNA, 19 nt, Artificial Sequence
  Description of Artificial Sequence: Synthetic oligonucleotide
  Antisense strand to SEQ ID NO: 99290
gaguagaagaauuucacga

SEQ ID NO: 99292 - RNA, 19 nt, Artificial Sequence
  Description of Artificial Sequence: Synthetic oligonucleotide
  Sense strand starting at position 690 of SEQ ID NO: 1252
gaugcuguucgugaaauuc

SEQ ID NO: 99293 - RNA, 19 nt, Artificial Sequence
  Description of Artificial Sequence: Synthetic oligonucleotide
  Antisense strand to SEQ ID NO: 99292
gaauuucacgaacagcauc

SEQ ID NO: 99294 - RNA, 19 nt, Artificial Sequence
  Description of Artificial Sequence: Synthetic oligonucleotide
  Sense strand starting at position 687 of SEQ ID NO: 1252
auagaugcuguucgugaaa

SEQ ID NO: 99295 - RNA, 19 nt, Artificial Sequence
  Description of Artificial Sequence: Synthetic oligonucleotide
  Antisense strand to SEQ ID NO: 99294
uuucacgaacagcaucuau

SEQ ID NO: 99296 - RNA, 19 nt, Artificial Sequence
  Description of Artificial Sequence: Synthetic oligonucleotide
  Sense strand starting at position 686 of SEQ ID NO: 1252
cauagaugcuguucgugaa

SEQ ID NO: 99297 - RNA, 19 nt, Artificial Sequence
  Description of Artificial Sequence: Synthetic oligonucleotide
  Antisense strand to SEQ ID NO: 99296
uucacgaacagcaucuaug

SEQ ID NO: 99298 - RNA, 19 nt, Artificial Sequence
  Description of Artificial Sequence: Synthetic oligonucleotide
  Sense strand starting at position 545 of SEQ ID NO: 1252
agaugugcaccuugugaca

SEQ ID NO: 99299 - RNA, 19 nt, Artificial Sequence
  Description of Artificial Sequence: Synthetic oligonucleotide
  Antisense strand to SEQ ID NO: 99298
ugucacaaggugcacaucu

SEQ ID NO: 99300 - RNA, 19 nt, Artificial Sequence
  Description of Artificial Sequence: Synthetic oligonucleotide
  Sense strand starting at position 203 of SEQ ID NO: 1252
aagucagugguauaucaaa

SEQ ID NO: 99301 - RNA, 19 nt, Artificial Sequence
  Description of Artificial Sequence: Synthetic oligonucleotide
  Antisense strand to SEQ ID NO: 99300
uuugauauaccacugacuu

SEQ ID NO: 99302 - RNA, 19 nt, Artificial Sequence
  Description of Artificial Sequence: Synthetic oligonucleotide
  Sense strand starting at position 198 of SEQ ID NO: 1252
ccaugaagucagugguaua

SEQ ID NO: 99303 - RNA, 19 nt, Artificial Sequence
  Description of Artificial Sequence: Synthetic oligonucleotide
  Antisense strand to SEQ ID NO: 99302
uauaccacugacuucaugg

SEQ ID NO: 99304 - RNA, 19 nt, Artificial Sequence
  Description of Artificial Sequence: Synthetic oligonucleotide
  Sense strand starting at position 164 of SEQ ID NO: 1252
caccaaagcgcuucguuau

SEQ ID NO: 99305 - RNA, 19 nt, Artificial Sequence
  Description of Artificial Sequence: Synthetic oligonucleotide
  Antisense strand to SEQ ID NO: 99304
auaacgaagcgcuuuggug

SEQ ID NO: 99306 - RNA, 19 nt, Artificial Sequence
  Description of Artificial Sequence: Synthetic oligonucleotide
  Sense strand starting at position 40 of SEQ ID NO: 1252
ucucucuuuguauaguuau

SEQ ID NO: 99307 - RNA, 19 nt, Artificial Sequence
  Description of Artificial Sequence: Synthetic oligonucleotide
  Antisense strand to SEQ ID NO: 99306
auaacuauacaaagagaga

SEQ ID NO: 99308 - RNA, 19 nt, Artificial Sequence
  Description of Artificial Sequence: Synthetic oligonucleotide
  Sense strand starting at position 17 of SEQ ID NO: 1252
aauggucucuuaguagaau

SEQ ID NO: 99309 - RNA, 19 nt, Artificial Sequence
  Description of Artificial Sequence: Synthetic oligonucleotide
  Antisense strand to SEQ ID NO: 99308
auucuacuaagagaccauu

SEQ ID NO: 99310 - RNA, 19 nt, Artificial Sequence
  Description of Artificial Sequence: Synthetic oligonucleotide
  Sense strand starting at position 513 of SEQ ID NO: 1253
cuguuaaaccagugggagu

SEQ ID NO: 99311 - RNA, 19 nt, Artificial Sequence
  Description of Artificial Sequence: Synthetic oligonucleotide
  Antisense strand to SEQ ID NO: 99310
acucccacugguuuaacag

SEQ ID NO: 99312 - RNA, 19 nt, Artificial Sequence
  Description of Artificial Sequence: Synthetic oligonucleotide
  Sense strand starting at position 514 of SEQ ID NO: 1253
uguuaaaccagugggaguu

SEQ ID NO: 99313 - RNA, 19 nt, Artificial Sequence
  Description of Artificial Sequence: Synthetic oligonucleotide
  Antisense strand to SEQ ID NO: 99312
aacucccacugguuuaaca

SEQ ID NO: 99314 - RNA, 19 nt, Artificial Sequence
  Description of Artificial Sequence: Synthetic oligonucleotide
  Sense strand starting at position 515 of SEQ ID NO: 1253
guuaaaccagugggaguuu

SEQ ID NO: 99315 - RNA, 19 nt, Artificial Sequence
  Description of Artificial Sequence: Synthetic oligonucleotide
  Antisense strand to SEQ ID NO: 99314
aaacucccacugguuuaac

SEQ ID NO: 99316 - RNA, 19 nt, Artificial Sequence
  Description of Artificial Sequence: Synthetic oligonucleotide
  Sense strand starting at position 730 of SEQ ID NO: 1253
cccacuuugucagcuguaa

SEQ ID NO: 99317 - RNA, 19 nt, Artificial Sequence
  Description of Artificial Sequence: Synthetic oligonucleotide
  Antisense strand to SEQ ID NO: 99316
uuacagcugacaaaguggg

SEQ ID NO: 99318 - RNA, 19 nt, Artificial Sequence
  Description of Artificial Sequence: Synthetic oligonucleotide
  Sense strand starting at position 1091 of SEQ ID NO: 1253
aggcgaugcuguccucaga

SEQ ID NO: 99319 - RNA, 19 nt, Artificial Sequence
  Description of Artificial Sequence: Synthetic oligonucleotide
  Antisense strand to SEQ ID NO: 99318
ucugaggacagcaucgccu

SEQ ID NO: 99320 - RNA, 19 nt, Artificial Sequence
  Description of Artificial Sequence: Synthetic oligonucleotide
  Sense strand starting at position 1127 of SEQ ID NO: 1253
gcacucagcccaugugaau

SEQ ID NO: 99321 - RNA, 19 nt, Artificial Sequence
  Description of Artificial Sequence: Synthetic oligonucleotide
  Antisense strand to SEQ ID NO: 99320
auucacaugggcugagugc

SEQ ID NO: 99322 - RNA, 19 nt, Artificial Sequence
  Description of Artificial Sequence: Synthetic oligonucleotide
  Sense strand starting at position 1163 of SEQ ID NO: 1253
uggucuuugcauuguggau

SEQ ID NO: 99323 - RNA, 19 nt, Artificial Sequence
  Description of Artificial Sequence: Synthetic oligonucleotide
  Antisense strand to SEQ ID NO: 99322
auccacaaugcaaagacca

SEQ ID NO: 99324 - RNA, 19 nt, Artificial Sequence
  Description of Artificial Sequence: Synthetic oligonucleotide
  Sense strand starting at position 1165 of SEQ ID NO: 1253
gucuuugcauuguggauga

SEQ ID NO: 99325 - RNA, 19 nt, Artificial Sequence
  Description of Artificial Sequence: Synthetic oligonucleotide
  Antisense strand to SEQ ID NO: 99324
ucauccacaaugcaaagac

SEQ ID NO: 99326 - RNA, 19 nt, Artificial Sequence
  Description of Artificial Sequence: Synthetic oligonucleotide
  Sense strand starting at position 1350 of SEQ ID NO: 1253
acggcuucucguuggagua

SEQ ID NO: 99327 - RNA, 19 nt, Artificial Sequence
  Description of Artificial Sequence: Synthetic oligonucleotide
  Antisense strand to SEQ ID NO: 99326
uacuccaacgagaagccgu

SEQ ID NO: 99328 - RNA, 19 nt, Artificial Sequence
  Description of Artificial Sequence: Synthetic oligonucleotide
  Sense strand starting at position 1352 of SEQ ID NO: 1253
ggcuucucguuggaguagu

SEQ ID NO: 99329 - RNA, 19 nt, Artificial Sequence
  Description of Artificial Sequence: Synthetic oligonucleotide
  Antisense strand to SEQ ID NO: 99328
acuacuccaacgagaagcc

SEQ ID NO: 99330 - RNA, 19 nt, Artificial Sequence
  Description of Artificial Sequence: Synthetic oligonucleotide
  Sense strand starting at position 1380 of SEQ ID NO: 1253
agguaauguccaggcugga

SEQ ID NO: 99331 - RNA, 19 nt, Artificial Sequence
  Description of Artificial Sequence: Synthetic oligonucleotide
  Antisense strand to SEQ ID NO: 99330
uccagccuggacauuaccu

SEQ ID NO: 99332 - RNA, 19 nt, Artificial Sequence
  Description of Artificial Sequence: Synthetic oligonucleotide
  Sense strand starting at position 1404 of SEQ ID NO: 1253
gcgaguagaaaguguccuu

SEQ ID NO: 99333 - RNA, 19 nt, Artificial Sequence
  Description of Artificial Sequence: Synthetic oligonucleotide
  Antisense strand to SEQ ID NO: 99332
aaggacacuuucuacucgc

SEQ ID NO: 99334 - RNA, 19 nt, Artificial Sequence
  Description of Artificial Sequence: Synthetic oligonucleotide
  Sense strand starting at position 1678 of SEQ ID NO: 1253
gggagagcuccaggucgaa

SEQ ID NO: 99335 - RNA, 19 nt, Artificial Sequence
  Description of Artificial Sequence: Synthetic oligonucleotide
  Antisense strand to SEQ ID NO: 99334
uucgaccuggagcucuccc

SEQ ID NO: 99336 - RNA, 19 nt, Artificial Sequence
  Description of Artificial Sequence: Synthetic oligonucleotide
  Sense strand starting at position 1690 of SEQ ID NO: 1253
ggucgaagugggugaagua

SEQ ID NO: 99337 - RNA, 19 nt, Artificial Sequence
  Description of Artificial Sequence: Synthetic oligonucleotide
  Antisense strand to SEQ ID NO: 99336
uacuucacccacuucgacc

SEQ ID NO: 99338 - RNA, 19 nt, Artificial Sequence
  Description of Artificial Sequence: Synthetic oligonucleotide
  Sense strand starting at position 1753 of SEQ ID NO: 1253
gcuccuggucauuggcaua

SEQ ID NO: 99339 - RNA, 19 nt, Artificial Sequence
  Description of Artificial Sequence: Synthetic oligonucleotide
  Antisense strand to SEQ ID NO: 99338
uaugccaaugaccaggagc

SEQ ID NO: 99340 - RNA, 19 nt, Artificial Sequence
  Description of Artificial Sequence: Synthetic oligonucleotide
  Sense strand starting at position 2025 of SEQ ID NO: 1253
ugaucuguuuguccaguga

SEQ ID NO: 99341 - RNA, 19 nt, Artificial Sequence
  Description of Artificial Sequence: Synthetic oligonucleotide
  Antisense strand to SEQ ID NO: 99340
ucacuggacaaacagauca

SEQ ID NO: 99342 - RNA, 19 nt, Artificial Sequence
  Description of Artificial Sequence: Synthetic oligonucleotide
  Sense strand starting at position 2072 of SEQ ID NO: 1253
cugggauucugggaaucga

SEQ ID NO: 99343 - RNA, 19 nt, Artificial Sequence
  Description of Artificial Sequence: Synthetic oligonucleotide
  Antisense strand to SEQ ID NO: 99342
ucgauucccagaaucccag

SEQ ID NO: 99344 - RNA, 19 nt, Artificial Sequence
  Description of Artificial Sequence: Synthetic oligonucleotide
  Sense strand starting at position 2150 of SEQ ID NO: 1253
aggagucggaccuagguaa

SEQ ID NO: 99345 - RNA, 19 nt, Artificial Sequence
  Description of Artificial Sequence: Synthetic oligonucleotide
  Antisense strand to SEQ ID NO: 99344
uuaccuagguccgacuccu

SEQ ID NO: 99346 - RNA, 19 nt, Artificial Sequence
  Description of Artificial Sequence: Synthetic oligonucleotide
  Sense strand starting at position 2724 of SEQ ID NO: 1253
ggcagcgcgcacuuauaau

SEQ ID NO: 99347 - RNA, 19 nt, Artificial Sequence
  Description of Artificial Sequence: Synthetic oligonucleotide
  Antisense strand to SEQ ID NO: 99346
auuauaagugcgcgcugcc

SEQ ID NO: 99348 - RNA, 19 nt, Artificial Sequence
  Description of Artificial Sequence: Synthetic oligonucleotide
  Sense strand starting at position 2912 of SEQ ID NO: 1253
cuguuuaucuguucuucca

SEQ ID NO: 99349 - RNA, 19 nt, Artificial Sequence
  Description of Artificial Sequence: Synthetic oligonucleotide
  Antisense strand to SEQ ID NO: 99348
uggaagaacagauaaacag

SEQ ID NO: 99350 - RNA, 19 nt, Artificial Sequence
  Description of Artificial Sequence: Synthetic oligonucleotide
  Sense strand starting at position 2966 of SEQ ID NO: 1253
acacucuguccucauggau

SEQ ID NO: 99351 - RNA, 19 nt, Artificial Sequence
  Description of Artificial Sequence: Synthetic oligonucleotide
  Antisense strand to SEQ ID NO: 99350
auccaugaggacagagugu

SEQ ID NO: 99352 - RNA, 19 nt, Artificial Sequence
  Description of Artificial Sequence: Synthetic oligonucleotide
  Sense strand starting at position 3403 of SEQ ID NO: 1253
uguagugacuccugcccau

SEQ ID NO: 99353 - RNA, 19 nt, Artificial Sequence
  Description of Artificial Sequence: Synthetic oligonucleotide
  Antisense strand to SEQ ID NO: 99352
augggcaggagucacuaca

SEQ ID NO: 99354 - RNA, 19 nt, Artificial Sequence
  Description of Artificial Sequence: Synthetic oligonucleotide
  Sense strand starting at position 3406 of SEQ ID NO: 1253
agugacuccugcccauaau

SEQ ID NO: 99355 - RNA, 19 nt, Artificial Sequence
  Description of Artificial Sequence: Synthetic oligonucleotide
  Antisense strand to SEQ ID NO: 99354
auuaugggcaggagucacu

SEQ ID NO: 99356 - RNA, 19 nt, Artificial Sequence
  Description of Artificial Sequence: Synthetic oligonucleotide
  Sense strand starting at position 3407 of SEQ ID NO: 1253
gugacuccugcccauaauc

SEQ ID NO: 99357 - RNA, 19 nt, Artificial Sequence
  Description of Artificial Sequence: Synthetic oligonucleotide
  Antisense strand to SEQ ID NO: 99356
gauuaugggcaggagucac

SEQ ID NO: 99358 - RNA, 19 nt, Artificial Sequence
  Description of Artificial Sequence: Synthetic oligonucleotide
  Sense strand starting at position 3738 of SEQ ID NO: 1253
ugaagaacgugauacugau

SEQ ID NO: 99359 - RNA, 19 nt, Artificial Sequence
  Description of Artificial Sequence: Synthetic oligonucleotide
  Antisense strand to SEQ ID NO: 99358
aucaguaucacguucuuca

SEQ ID NO: 99360 - RNA, 19 nt, Artificial Sequence
  Description of Artificial Sequence: Synthetic oligonucleotide
  Sense strand starting at position 3742 of SEQ ID NO: 1253
gaacgugauacugaucgaa

SEQ ID NO: 99361 - RNA, 19 nt, Artificial Sequence
  Description of Artificial Sequence: Synthetic oligonucleotide
  Antisense strand to SEQ ID NO: 99360
uucgaucaguaucacguuc

SEQ ID NO: 99362 - RNA, 19 nt, Artificial Sequence
  Description of Artificial Sequence: Synthetic oligonucleotide
  Sense strand starting at position 3744 of SEQ ID NO: 1253
acgugauacugaucgaaag

SEQ ID NO: 99363 - RNA, 19 nt, Artificial Sequence
  Description of Artificial Sequence: Synthetic oligonucleotide
  Antisense strand to SEQ ID NO: 99362
cuuucgaucaguaucacgu

SEQ ID NO: 99364 - RNA, 19 nt, Artificial Sequence
  Description of Artificial Sequence: Synthetic oligonucleotide
  Sense strand starting at position 3745 of SEQ ID NO: 1253
cgugauacugaucgaaagu

SEQ ID NO: 99365 - RNA, 19 nt, Artificial Sequence
  Description of Artificial Sequence: Synthetic oligonucleotide
  Antisense strand to SEQ ID NO: 99364
acuuucgaucaguaucacg

SEQ ID NO: 99366 - RNA, 19 nt, Artificial Sequence
  Description of Artificial Sequence: Synthetic oligonucleotide
  Sense strand starting at position 3746 of SEQ ID NO: 1253
gugauacugaucgaaagug

SEQ ID NO: 99367 - RNA, 19 nt, Artificial Sequence
  Description of Artificial Sequence: Synthetic oligonucleotide
  Antisense strand to SEQ ID NO: 99366
cacuuucgaucaguaucac

SEQ ID NO: 99368 - RNA, 19 nt, Artificial Sequence
  Description of Artificial Sequence: Synthetic oligonucleotide
  Sense strand starting at position 3919 of SEQ ID NO: 1253
ggaguuaaaccucaucucu

SEQ ID NO: 99369 - RNA, 19 nt, Artificial Sequence
  Description of Artificial Sequence: Synthetic oligonucleotide
  Antisense strand to SEQ ID NO: 99368
agagaugagguuuaacucc

SEQ ID NO: 99370 - RNA, 19 nt, Artificial Sequence
  Description of Artificial Sequence: Synthetic oligonucleotide
  Sense strand starting at position 3685 of SEQ ID NO: 1254
cugagaacugcaugaaccu

SEQ ID NO: 99371 - RNA, 19 nt, Artificial Sequence
  Description of Artificial Sequence: Synthetic oligonucleotide
  Antisense strand to SEQ ID NO: 99370
agguucaugcaguucucag

SEQ ID NO: 99372 - RNA, 19 nt, Artificial Sequence
  Description of Artificial Sequence: Synthetic oligonucleotide
  Sense strand starting at position 3683 of SEQ ID NO: 1254
ggcugagaacugcaugaac

SEQ ID NO: 99373 - RNA, 19 nt, Artificial Sequence
  Description of Artificial Sequence: Synthetic oligonucleotide
  Antisense strand to SEQ ID NO: 99372
guucaugcaguucucagcc

SEQ ID NO: 99374 - RNA, 19 nt, Artificial Sequence
  Description of Artificial Sequence: Synthetic oligonucleotide
  Sense strand starting at position 3473 of SEQ ID NO: 1254
auguuacuugcuugcuuaa

SEQ ID NO: 99375 - RNA, 19 nt, Artificial Sequence
  Description of Artificial Sequence: Synthetic oligonucleotide
  Antisense strand to SEQ ID NO: 99374
uuaagcaagcaaguaacau

SEQ ID NO: 99376 - RNA, 19 nt, Artificial Sequence
  Description of Artificial Sequence: Synthetic oligonucleotide
  Sense strand starting at position 3460 of SEQ ID NO: 1254
agacucuuccuauauguua

SEQ ID NO: 99377 - RNA, 19 nt, Artificial Sequence
  Description of Artificial Sequence: Synthetic oligonucleotide
  Antisense strand to SEQ ID NO: 99376
uaacauauaggaagagucu

SEQ ID NO: 99378 - RNA, 19 nt, Artificial Sequence
  Description of Artificial Sequence: Synthetic oligonucleotide
  Sense strand starting at position 3419 of SEQ ID NO: 1254
gucucauugucuuuaaacu

SEQ ID NO: 99379 - RNA, 19 nt, Artificial Sequence
  Description of Artificial Sequence: Synthetic oligonucleotide
  Antisense strand to SEQ ID NO: 99378
aguuuaaagacaaugagac

SEQ ID NO: 99380 - RNA, 19 nt, Artificial Sequence
  Description of Artificial Sequence: Synthetic oligonucleotide
  Sense strand starting at position 3416 of SEQ ID NO: 1254
ccagucucauugucuuuaa

SEQ ID NO: 99381 - RNA, 19 nt, Artificial Sequence
  Description of Artificial Sequence: Synthetic oligonucleotide
  Antisense strand to SEQ ID NO: 99380
uuaaagacaaugagacugg

SEQ ID NO: 99382 - RNA, 19 nt, Artificial Sequence
  Description of Artificial Sequence: Synthetic oligonucleotide
  Sense strand starting at position 3413 of SEQ ID NO: 1254
augccagucucauugucuu

SEQ ID NO: 99383 - RNA, 19 nt, Artificial Sequence
  Description of Artificial Sequence: Synthetic oligonucleotide
  Antisense strand to SEQ ID NO: 99382
aagacaaugagacuggcau

SEQ ID NO: 99384 - RNA, 19 nt, Artificial Sequence
  Description of Artificial Sequence: Synthetic oligonucleotide
  Sense strand starting at position 2803 of SEQ ID NO: 1254
cuagaagccuugcuuaaag

SEQ ID NO: 99385 - RNA, 19 nt, Artificial Sequence
  Description of Artificial Sequence: Synthetic oligonucleotide
  Antisense strand to SEQ ID NO: 99384
cuuuaagcaaggcuucuag

SEQ ID NO: 99386 - RNA, 19 nt, Artificial Sequence
  Description of Artificial Sequence: Synthetic oligonucleotide
  Sense strand starting at position 2707 of SEQ ID NO: 1254
ugacucaucugcucagcaa

SEQ ID NO: 99387 - RNA, 19 nt, Artificial Sequence
  Description of Artificial Sequence: Synthetic oligonucleotide
  Antisense strand to SEQ ID NO: 99386
uugcugagcagaugaguca

SEQ ID NO: 99388 - RNA, 19 nt, Artificial Sequence
  Description of Artificial Sequence: Synthetic oligonucleotide
  Sense strand starting at position 2554 of SEQ ID NO: 1254
acaguaagacaguguggaa

SEQ ID NO: 99389 - RNA, 19 nt, Artificial Sequence
  Description of Artificial Sequence: Synthetic oligonucleotide
  Antisense strand to SEQ ID NO: 99388
uuccacacugucuuacugu

SEQ ID NO: 99390 - RNA, 19 nt, Artificial Sequence
  Description of Artificial Sequence: Synthetic oligonucleotide
  Sense strand starting at position 2543 of SEQ ID NO: 1254
gcucuuuccggacaguaag

SEQ ID NO: 99391 - RNA, 19 nt, Artificial Sequence
  Description of Artificial Sequence: Synthetic oligonucleotide
  Antisense strand to SEQ ID NO: 99390
cuuacuguccggaaagagc

SEQ ID NO: 99392 - RNA, 19 nt, Artificial Sequence
  Description of Artificial Sequence: Synthetic oligonucleotide
  Sense strand starting at position 2541 of SEQ ID NO: 1254
uugcucuuuccggacagua

SEQ ID NO: 99393 - RNA, 19 nt, Artificial Sequence
  Description of Artificial Sequence: Synthetic oligonucleotide
  Antisense strand to SEQ ID NO: 99392
uacuguccggaaagagcaa

SEQ ID NO: 99394 - RNA, 19 nt, Artificial Sequence
  Description of Artificial Sequence: Synthetic oligonucleotide
  Sense strand starting at position 2484 of SEQ ID NO: 1254
gcaaaucagugaucaaacu

SEQ ID NO: 99395 - RNA, 19 nt, Artificial Sequence
  Description of Artificial Sequence: Synthetic oligonucleotide
  Antisense strand to SEQ ID NO: 99394
aguuugaucacugauuugc

SEQ ID NO: 99396 - RNA, 19 nt, Artificial Sequence
  Description of Artificial Sequence: Synthetic oligonucleotide
  Sense strand starting at position 2481 of SEQ ID NO: 1254
ccagcaaaucagugaucaa

SEQ ID NO: 99397 - RNA, 19 nt, Artificial Sequence
  Description of Artificial Sequence: Synthetic oligonucleotide
  Antisense strand to SEQ ID NO: 99396
uugaucacugauuugcugg

SEQ ID NO: 99398 - RNA, 19 nt, Artificial Sequence
  Description of Artificial Sequence: Synthetic oligonucleotide
  Sense strand starting at position 2420 of SEQ ID NO: 1254
aucugcgcauucucauauu

SEQ ID NO: 99399 - RNA, 19 nt, Artificial Sequence
  Description of Artificial Sequence: Synthetic oligonucleotide
  Antisense strand to SEQ ID NO: 99398
aauaugagaaugcgcagau

SEQ ID NO: 99400 - RNA, 19 nt, Artificial Sequence
  Description of Artificial Sequence: Synthetic oligonucleotide
  Sense strand starting at position 2412 of SEQ ID NO: 1254
ggaggcaaaucugcgcauu

SEQ ID NO: 99401 - RNA, 19 nt, Artificial Sequence
  Description of Artificial Sequence: Synthetic oligonucleotide
  Antisense strand to SEQ ID NO: 99400
aaugcgcagauuugccucc

SEQ ID NO: 99402 - RNA, 19 nt, Artificial Sequence
  Description of Artificial Sequence: Synthetic oligonucleotide
  Sense strand starting at position 2365 of SEQ ID NO: 1254
uuuauuuagugccugccaa

SEQ ID NO: 99403 - RNA, 19 nt, Artificial Sequence
  Description of Artificial Sequence: Synthetic oligonucleotide
  Antisense strand to SEQ ID NO: 99402
uuggcaggcacuaaauaaa

SEQ ID NO: 99404 - RNA, 19 nt, Artificial Sequence
  Description of Artificial Sequence: Synthetic oligonucleotide
  Sense strand starting at position 2268 of SEQ ID NO: 1254
gucgaucgguguccucaaa

SEQ ID NO: 99405 - RNA, 19 nt, Artificial Sequence
  Description of Artificial Sequence: Synthetic oligonucleotide
  Antisense strand to SEQ ID NO: 99404
uuugaggacaccgaucgac

SEQ ID NO: 99406 - RNA, 19 nt, Artificial Sequence
  Description of Artificial Sequence: Synthetic oligonucleotide
  Sense strand starting at position 2184 of SEQ ID NO: 1254
gcggacucccauugaaucu

SEQ ID NO: 99407 - RNA, 19 nt, Artificial Sequence
  Description of Artificial Sequence: Synthetic oligonucleotide
  Antisense strand to SEQ ID NO: 99406
agauucaaugggaguccgc

SEQ ID NO: 99408 - RNA, 19 nt, Artificial Sequence
  Description of Artificial Sequence: Synthetic oligonucleotide
  Sense strand starting at position 1221 of SEQ ID NO: 1254
cucaacgccucuuuaguaa

SEQ ID NO: 99409 - RNA, 19 nt, Artificial Sequence
  Description of Artificial Sequence: Synthetic oligonucleotide
  Antisense strand to SEQ ID NO: 99408
uuacuaaagaggcguugag

SEQ ID NO: 99410 - RNA, 19 nt, Artificial Sequence
  Description of Artificial Sequence: Synthetic oligonucleotide
  Sense strand starting at position 1113 of SEQ ID NO: 1254
uugggagugucauccguuu

SEQ ID NO: 99411 - RNA, 19 nt, Artificial Sequence
  Description of Artificial Sequence: Synthetic oligonucleotide
  Antisense strand to SEQ ID NO: 99410
aaacggaugacacucccaa

SEQ ID NO: 99412 - RNA, 19 nt, Artificial Sequence
  Description of Artificial Sequence: Synthetic oligonucleotide
  Sense strand starting at position 1085 of SEQ ID NO: 1254
guauaaugauggccaaauc

SEQ ID NO: 99413 - RNA, 19 nt, Artificial Sequence
  Description of Artificial Sequence: Synthetic oligonucleotide
  Antisense strand to SEQ ID NO: 99412
gauuuggccaucauuauac

SEQ ID NO: 99414 - RNA, 19 nt, Artificial Sequence
  Description of Artificial Sequence: Synthetic oligonucleotide
  Sense strand starting at position 1051 of SEQ ID NO: 1254
ccuuaacaaugauugugaa

SEQ ID NO: 99415 - RNA, 19 nt, Artificial Sequence
  Description of Artificial Sequence: Synthetic oligonucleotide
  Antisense strand to SEQ ID NO: 99414
uucacaaucauuguuaagg

SEQ ID NO: 99416 - RNA, 19 nt, Artificial Sequence
  Description of Artificial Sequence: Synthetic oligonucleotide
  Sense strand starting at position 1048 of SEQ ID NO: 1254
gagccuuaacaaugauugu

SEQ ID NO: 99417 - RNA, 19 nt, Artificial Sequence
  Description of Artificial Sequence: Synthetic oligonucleotide
  Antisense strand to SEQ ID NO: 99416
acaaucauuguuaaggcuc

SEQ ID NO: 99418 - RNA, 19 nt, Artificial Sequence
  Description of Artificial Sequence: Synthetic oligonucleotide
  Sense strand starting at position 1026 of SEQ ID NO: 1254
ugaaauagaugguugguaa

SEQ ID NO: 99419 - RNA, 19 nt, Artificial Sequence
  Description of Artificial Sequence: Synthetic oligonucleotide
  Antisense strand to SEQ ID NO: 99418
uuaccaaccaucuauuuca

SEQ ID NO: 99420 - RNA, 19 nt, Artificial Sequence
  Description of Artificial Sequence: Synthetic oligonucleotide
  Sense strand starting at position 1021 of SEQ ID NO: 1254
ucuugugaaauagaugguu

SEQ ID NO: 99421 - RNA, 19 nt, Artificial Sequence
  Description of Artificial Sequence: Synthetic oligonucleotide
  Antisense strand to SEQ ID NO: 99420
aaccaucuauuucacaaga

SEQ ID NO: 99422 - RNA, 19 nt, Artificial Sequence
  Description of Artificial Sequence: Synthetic oligonucleotide
  Sense strand starting at position 982 of SEQ ID NO: 1254
gcuuaacacugcucacaug

SEQ ID NO: 99423 - RNA, 19 nt, Artificial Sequence
  Description of Artificial Sequence: Synthetic oligonucleotide
  Antisense strand to SEQ ID NO: 99422
caugugagcaguguuaagc

SEQ ID NO: 99424 - RNA, 19 nt, Artificial Sequence
  Description of Artificial Sequence: Synthetic oligonucleotide
  Sense strand starting at position 885 of SEQ ID NO: 1254
ugaauauuuguaugcugcu

SEQ ID NO: 99425 - RNA, 19 nt, Artificial Sequence
  Description of Artificial Sequence: Synthetic oligonucleotide
  Antisense strand to SEQ ID NO: 99424
agcagcauacaaauauuca

SEQ ID NO: 99426 - RNA, 19 nt, Artificial Sequence
  Description of Artificial Sequence: Synthetic oligonucleotide
  Sense strand starting at position 781 of SEQ ID NO: 1254
agcuucuccugccugauaa

SEQ ID NO: 99427 - RNA, 19 nt, Artificial Sequence
  Description of Artificial Sequence: Synthetic oligonucleotide
  Antisense strand to SEQ ID NO: 99426
uuaucaggcaggagaagcu

SEQ ID NO: 99428 - RNA, 19 nt, Artificial Sequence
  Description of Artificial Sequence: Synthetic oligonucleotide
  Sense strand starting at position 759 of SEQ ID NO: 1254
acuuauuaccgcuacuagu

SEQ ID NO: 99429 - RNA, 19 nt, Artificial Sequence
  Description of Artificial Sequence: Synthetic oligonucleotide
  Antisense strand to SEQ ID NO: 99428
acuaguagcgguaauaagu

SEQ ID NO: 99430 - RNA, 19 nt, Artificial Sequence
  Description of Artificial Sequence: Synthetic oligonucleotide
  Sense strand starting at position 674 of SEQ ID NO: 1254
gaaagcugucacuagaguu

SEQ ID NO: 99431 - RNA, 19 nt, Artificial Sequence
  Description of Artificial Sequence: Synthetic oligonucleotide
  Antisense strand to SEQ ID NO: 99430
aacucuagugacagcuuuc

SEQ ID NO: 99432 - RNA, 19 nt, Artificial Sequence
  Description of Artificial Sequence: Synthetic oligonucleotide
  Sense strand starting at position 671 of SEQ ID NO: 1254
aaggaaagcugucacuaga

SEQ ID NO: 99433 - RNA, 19 nt, Artificial Sequence
  Description of Artificial Sequence: Synthetic oligonucleotide
  Antisense strand to SEQ ID NO: 99432
ucuagugacagcuuuccuu

SEQ ID NO: 99434 - RNA, 19 nt, Artificial Sequence
  Description of Artificial Sequence: Synthetic oligonucleotide
  Sense strand starting at position 576 of SEQ ID NO: 1254
gcuaauuuaucugagagaa

SEQ ID NO: 99435 - RNA, 19 nt, Artificial Sequence
  Description of Artificial Sequence: Synthetic oligonucleotide
  Antisense strand to SEQ ID NO: 99434
uucucucagauaaauuagc

SEQ ID NO: 99436 - RNA, 19 nt, Artificial Sequence
  Description of Artificial Sequence: Synthetic oligonucleotide
  Sense strand starting at position 319 of SEQ ID NO: 1254
ucccgauuaccugagguca

SEQ ID NO: 99437 - RNA, 19 nt, Artificial Sequence
  Description of Artificial Sequence: Synthetic oligonucleotide
  Antisense strand to SEQ ID NO: 99436
ugaccucagguaaucggga

SEQ ID NO: 99438 - RNA, 19 nt, Artificial Sequence
  Description of Artificial Sequence: Synthetic oligonucleotide
  Sense strand starting at position 314 of SEQ ID NO: 1254
uguaaucccgauuaccuga

SEQ ID NO: 99439 - RNA, 19 nt, Artificial Sequence
  Description of Artificial Sequence: Synthetic oligonucleotide
  Antisense strand to SEQ ID NO: 99438
ucagguaaucgggauuaca

SEQ ID NO: 99440 - RNA, 19 nt, Artificial Sequence
  Description of Artificial Sequence: Synthetic oligonucleotide
  Sense strand starting at position 256 of SEQ ID NO: 1254
ccuagcaugguauauaauu

SEQ ID NO: 99441 - RNA, 19 nt, Artificial Sequence
  Description of Artificial Sequence: Synthetic oligonucleotide
  Antisense strand to SEQ ID NO: 99440
aauuauauaccaugcuagg

SEQ ID NO: 99442 - RNA, 19 nt, Artificial Sequence
  Description of Artificial Sequence: Synthetic oligonucleotide
  Sense strand starting at position 252 of SEQ ID NO: 1254
gcuaccuagcaugguauau

SEQ ID NO: 99443 - RNA, 19 nt, Artificial Sequence
  Description of Artificial Sequence: Synthetic oligonucleotide
  Antisense strand to SEQ ID NO: 99442
auauaccaugcuagguagc

SEQ ID NO: 99444 - RNA, 19 nt, Artificial Sequence
  Description of Artificial Sequence: Synthetic oligonucleotide
  Sense strand starting at position 251 of SEQ ID NO: 1254
ggcuaccuagcaugguaua

SEQ ID NO: 99445 - RNA, 19 nt, Artificial Sequence
  Description of Artificial Sequence: Synthetic oligonucleotide
  Antisense strand to SEQ ID NO: 99444
uauaccaugcuagguagcc

SEQ ID NO: 99446 - RNA, 19 nt, Artificial Sequence
  Description of Artificial Sequence: Synthetic oligonucleotide
  Sense strand starting at position 168 of SEQ ID NO: 1254
ggcagagauggucaauggu

SEQ ID NO: 99447 - RNA, 19 nt, Artificial Sequence
  Description of Artificial Sequence: Synthetic oligonucleotide
  Antisense strand to SEQ ID NO: 99446
accauugaccaucucugcc

SEQ ID NO: 99448 - RNA, 19 nt, Artificial Sequence
  Description of Artificial Sequence: Synthetic oligonucleotide
  Sense strand starting at position 142 of SEQ ID NO: 1254
ggacaaugcucagcagcua

SEQ ID NO: 99449 - RNA, 19 nt, Artificial Sequence
  Description of Artificial Sequence: Synthetic oligonucleotide
  Antisense strand to SEQ ID NO: 99448
uagcugcugagcauugucc

SEQ ID NO: 99450 - RNA, 19 nt, Artificial Sequence
  Description of Artificial Sequence: Synthetic oligonucleotide
  Sense strand starting at position 434 of SEQ ID NO: 1255
ucaucugagcagugagcua

SEQ ID NO: 99451 - RNA, 19 nt, Artificial Sequence
  Description of Artificial Sequence: Synthetic oligonucleotide
  Antisense strand to SEQ ID NO: 99450
uagcucacugcucagauga

SEQ ID NO: 99452 - RNA, 19 nt, Artificial Sequence
  Description of Artificial Sequence: Synthetic oligonucleotide
  Sense strand starting at position 439 of SEQ ID NO: 1255
ugagcagugagcuagcaau

SEQ ID NO: 99453 - RNA, 19 nt, Artificial Sequence
  Description of Artificial Sequence: Synthetic oligonucleotide
  Antisense strand to SEQ ID NO: 99452
auugcuagcucacugcuca

SEQ ID NO: 99454 - RNA, 19 nt, Artificial Sequence
  Description of Artificial Sequence: Synthetic oligonucleotide
  Sense strand starting at position 499 of SEQ ID NO: 1255
gcaagcaaugaguauucca

SEQ ID NO: 99455 - RNA, 19 nt, Artificial Sequence
  Description of Artificial Sequence: Synthetic oligonucleotide
  Antisense strand to SEQ ID NO: 99454
uggaauacucauugcuugc

SEQ ID NO: 99456 - RNA, 19 nt, Artificial Sequence
  Description of Artificial Sequence: Synthetic oligonucleotide
  Sense strand starting at position 590 of SEQ ID NO: 1255
gcagcuauuucuucuagcu

SEQ ID NO: 99457 - RNA, 19 nt, Artificial Sequence
  Description of Artificial Sequence: Synthetic oligonucleotide
  Antisense strand to SEQ ID NO: 99456
agcuagaagaaauagcugc

SEQ ID NO: 99458 - RNA, 19 nt, Artificial Sequence
  Description of Artificial Sequence: Synthetic oligonucleotide
  Sense strand starting at position 847 of SEQ ID NO: 1255
ggagcaauguccuccagag

SEQ ID NO: 99459 - RNA, 19 nt, Artificial Sequence
  Description of Artificial Sequence: Synthetic oligonucleotide
  Antisense strand to SEQ ID NO: 99458
cucuggaggacauugcucc

SEQ ID NO: 99460 - RNA, 19 nt, Artificial Sequence
  Description of Artificial Sequence: Synthetic oligonucleotide
  Sense strand starting at position 849 of SEQ ID NO: 1255
agcaauguccuccagagac

SEQ ID NO: 99461 - RNA, 19 nt, Artificial Sequence
  Description of Artificial Sequence: Synthetic oligonucleotide
  Antisense strand to SEQ ID NO: 99460
gucucuggaggacauugcu

SEQ ID NO: 99462 - RNA, 19 nt, Artificial Sequence
  Description of Artificial Sequence: Synthetic oligonucleotide
  Sense strand starting at position 880 of SEQ ID NO: 1255
cacccugugcugggaagua

SEQ ID NO: 99463 - RNA, 19 nt, Artificial Sequence
  Description of Artificial Sequence: Synthetic oligonucleotide
  Antisense strand to SEQ ID NO: 99462
uacuucccagcacagggug

SEQ ID NO: 99464 - RNA, 19 nt, Artificial Sequence
  Description of Artificial Sequence: Synthetic oligonucleotide
  Sense strand starting at position 984 of SEQ ID NO: 1255
gagccuccgugaucucaca

SEQ ID NO: 99465 - RNA, 19 nt, Artificial Sequence
  Description of Artificial Sequence: Synthetic oligonucleotide
  Antisense strand to SEQ ID NO: 99464
ugugagaucacggaggcuc

SEQ ID NO: 99466 - RNA, 19 nt, Artificial Sequence
  Description of Artificial Sequence: Synthetic oligonucleotide
  Sense strand starting at position 1050 of SEQ ID NO: 1255
ucaggaaggucucacuaca

SEQ ID NO: 99467 - RNA, 19 nt, Artificial Sequence
  Description of Artificial Sequence: Synthetic oligonucleotide
  Antisense strand to SEQ ID NO: 99466
uguagugagaccuuccuga

SEQ ID NO: 99468 - RNA, 19 nt, Artificial Sequence
  Description of Artificial Sequence: Synthetic oligonucleotide
  Sense strand starting at position 1195 of SEQ ID NO: 1255
ggcucuggacaucagaguu

SEQ ID NO: 99469 - RNA, 19 nt, Artificial Sequence
  Description of Artificial Sequence: Synthetic oligonucleotide
  Antisense strand to SEQ ID NO: 99468
aacucugauguccagagcc

SEQ ID NO: 99470 - RNA, 19 nt, Artificial Sequence
  Description of Artificial Sequence: Synthetic oligonucleotide
  Sense strand starting at position 1307 of SEQ ID NO: 1255
gggaauuggccacaccgua

SEQ ID NO: 99471 - RNA, 19 nt, Artificial Sequence
  Description of Artificial Sequence: Synthetic oligonucleotide
  Antisense strand to SEQ ID NO: 99470
uacgguguggccaauuccc

SEQ ID NO: 99472 - RNA, 19 nt, Artificial Sequence
  Description of Artificial Sequence: Synthetic oligonucleotide
  Sense strand starting at position 1328 of SEQ ID NO: 1255
gcaguagaucaauaaccua

SEQ ID NO: 99473 - RNA, 19 nt, Artificial Sequence
  Description of Artificial Sequence: Synthetic oligonucleotide
  Antisense strand to SEQ ID NO: 99472
uagguuauugaucuacugc

SEQ ID NO: 99474 - RNA, 19 nt, Artificial Sequence
  Description of Artificial Sequence: Synthetic oligonucleotide
  Sense strand starting at position 1591 of SEQ ID NO: 1255
ucagccagcucucugagua

SEQ ID NO: 99475 - RNA, 19 nt, Artificial Sequence
  Description of Artificial Sequence: Synthetic oligonucleotide
  Antisense strand to SEQ ID NO: 99474
uacucagagagcuggcuga

SEQ ID NO: 99476 - RNA, 19 nt, Artificial Sequence
  Description of Artificial Sequence: Synthetic oligonucleotide
  Sense strand starting at position 2208 of SEQ ID NO: 1255
ggcuccuuugcuugcagaa

SEQ ID NO: 99477 - RNA, 19 nt, Artificial Sequence
  Description of Artificial Sequence: Synthetic oligonucleotide
  Antisense strand to SEQ ID NO: 99476
uucugcaagcaaaggagcc

SEQ ID NO: 99478 - RNA, 19 nt, Artificial Sequence
  Description of Artificial Sequence: Synthetic oligonucleotide
  Sense strand starting at position 2242 of SEQ ID NO: 1255
gcuggaauuugggaaaucu

SEQ ID NO: 99479 - RNA, 19 nt, Artificial Sequence
  Description of Artificial Sequence: Synthetic oligonucleotide
  Antisense strand to SEQ ID NO: 99478
agauuucccaaauuccagc

SEQ ID NO: 99480 - RNA, 19 nt, Artificial Sequence
  Description of Artificial Sequence: Synthetic oligonucleotide
  Sense strand starting at position 2329 of SEQ ID NO: 1255
aggcauaccugaguccaau

SEQ ID NO: 99481 - RNA, 19 nt, Artificial Sequence
  Description of Artificial Sequence: Synthetic oligonucleotide
  Antisense strand to SEQ ID NO: 99480
auuggacucagguaugccu

SEQ ID NO: 99482 - RNA, 19 nt, Artificial Sequence
  Description of Artificial Sequence: Synthetic oligonucleotide
  Sense strand starting at position 2681 of SEQ ID NO: 1255
guuaccuggguuugcuaua

SEQ ID NO: 99483 - RNA, 19 nt, Artificial Sequence
  Description of Artificial Sequence: Synthetic oligonucleotide
  Antisense strand to SEQ ID NO: 99482
uauagcaaacccagguaac

SEQ ID NO: 99484 - RNA, 19 nt, Artificial Sequence
  Description of Artificial Sequence: Synthetic oligonucleotide
  Sense strand starting at position 2754 of SEQ ID NO: 1255
auugcucaucuggaaacua

SEQ ID NO: 99485 - RNA, 19 nt, Artificial Sequence
  Description of Artificial Sequence: Synthetic oligonucleotide
  Antisense strand to SEQ ID NO: 99484
uaguuuccagaugagcaau

SEQ ID NO: 99486 - RNA, 19 nt, Artificial Sequence
  Description of Artificial Sequence: Synthetic oligonucleotide
  Sense strand starting at position 2812 of SEQ ID NO: 1255
aaaggaguuagaugagguu

SEQ ID NO: 99487 - RNA, 19 nt, Artificial Sequence
  Description of Artificial Sequence: Synthetic oligonucleotide
  Antisense strand to SEQ ID NO: 99486
aaccucaucuaacuccuuu

SEQ ID NO: 99488 - RNA, 19 nt, Artificial Sequence
  Description of Artificial Sequence: Synthetic oligonucleotide
  Sense strand starting at position 2821 of SEQ ID NO: 1255
agaugagguuucucaguua

SEQ ID NO: 99489 - RNA, 19 nt, Artificial Sequence
  Description of Artificial Sequence: Synthetic oligonucleotide
  Antisense strand to SEQ ID NO: 99488
uaacugagaaaccucaucu

SEQ ID NO: 99490 - RNA, 19 nt, Artificial Sequence
  Description of Artificial Sequence: Synthetic oligonucleotide
  Sense strand starting at position 2824 of SEQ ID NO: 1255
ugagguuucucaguuaauc

SEQ ID NO: 99491 - RNA, 19 nt, Artificial Sequence
  Description of Artificial Sequence: Synthetic oligonucleotide
  Antisense strand to SEQ ID NO: 99490
gauuaacugagaaaccuca

SEQ ID NO: 99492 - RNA, 19 nt, Artificial Sequence
  Description of Artificial Sequence: Synthetic oligonucleotide
  Sense strand starting at position 2922 of SEQ ID NO: 1255
guguuauugccaggauaga

SEQ ID NO: 99493 - RNA, 19 nt, Artificial Sequence
  Description of Artificial Sequence: Synthetic oligonucleotide
  Antisense strand to SEQ ID NO: 99492
ucuauccuggcaauaacac

SEQ ID NO: 99494 - RNA, 19 nt, Artificial Sequence
  Description of Artificial Sequence: Synthetic oligonucleotide
  Sense strand starting at position 2923 of SEQ ID NO: 1255
uguuauugccaggauagag

SEQ ID NO: 99495 - RNA, 19 nt, Artificial Sequence
  Description of Artificial Sequence: Synthetic oligonucleotide
  Antisense strand to SEQ ID NO: 99494
cucuauccuggcaauaaca

SEQ ID NO: 99496 - RNA, 19 nt, Artificial Sequence
  Description of Artificial Sequence: Synthetic oligonucleotide
  Sense strand starting at position 2973 of SEQ ID NO: 1255
cucaguguagcuugaugua

SEQ ID NO: 99497 - RNA, 19 nt, Artificial Sequence
  Description of Artificial Sequence: Synthetic oligonucleotide
  Antisense strand to SEQ ID NO: 99496
uacaucaagcuacacugag

SEQ ID NO: 99498 - RNA, 19 nt, Artificial Sequence
  Description of Artificial Sequence: Synthetic oligonucleotide
  Sense strand starting at position 3158 of SEQ ID NO: 1255
ggucaaguaguucaugaga

SEQ ID NO: 99499 - RNA, 19 nt, Artificial Sequence
  Description of Artificial Sequence: Synthetic oligonucleotide
  Antisense strand to SEQ ID NO: 99498
ucucaugaacuacuugacc

SEQ ID NO: 99500 - RNA, 19 nt, Artificial Sequence
  Description of Artificial Sequence: Synthetic oligonucleotide
  Sense strand starting at position 3163 of SEQ ID NO: 1255
aguaguucaugagauagag

SEQ ID NO: 99501 - RNA, 19 nt, Artificial Sequence
  Description of Artificial Sequence: Synthetic oligonucleotide
  Antisense strand to SEQ ID NO: 99500
cucuaucucaugaacuacu

SEQ ID NO: 99502 - RNA, 19 nt, Artificial Sequence
  Description of Artificial Sequence: Synthetic oligonucleotide
  Sense strand starting at position 3305 of SEQ ID NO: 1255
ugggaauggucguucuuga

SEQ ID NO: 99503 - RNA, 19 nt, Artificial Sequence
  Description of Artificial Sequence: Synthetic oligonucleotide
  Antisense strand to SEQ ID NO: 99502
ucaagaacgaccauuccca

SEQ ID NO: 99504 - RNA, 19 nt, Artificial Sequence
  Description of Artificial Sequence: Synthetic oligonucleotide
  Sense strand starting at position 3371 of SEQ ID NO: 1255
gaguuaaaggauugucauu

SEQ ID NO: 99505 - RNA, 19 nt, Artificial Sequence
  Description of Artificial Sequence: Synthetic oligonucleotide
  Antisense strand to SEQ ID NO: 99504
aaugacaauccuuuaacuc

SEQ ID NO: 99506 - RNA, 19 nt, Artificial Sequence
  Description of Artificial Sequence: Synthetic oligonucleotide
  Sense strand starting at position 3377 of SEQ ID NO: 1255
aaggauugucauugcucca

SEQ ID NO: 99507 - RNA, 19 nt, Artificial Sequence
  Description of Artificial Sequence: Synthetic oligonucleotide
  Antisense strand to SEQ ID NO: 99506
uggagcaaugacaauccuu

SEQ ID NO: 99508 - RNA, 19 nt, Artificial Sequence
  Description of Artificial Sequence: Synthetic oligonucleotide
  Sense strand starting at position 3380 of SEQ ID NO: 1255
gauugucauugcuccagga

SEQ ID NO: 99509 - RNA, 19 nt, Artificial Sequence
  Description of Artificial Sequence: Synthetic oligonucleotide
  Antisense strand to SEQ ID NO: 99508
uccuggagcaaugacaauc

SEQ ID NO: 99510 - RNA, 19 nt, Artificial Sequence
  Description of Artificial Sequence: Synthetic oligonucleotide
  Sense strand starting at position 3384 of SEQ ID NO: 1255
gucauugcuccaggaggca

SEQ ID NO: 99511 - RNA, 19 nt, Artificial Sequence
  Description of Artificial Sequence: Synthetic oligonucleotide
  Antisense strand to SEQ ID NO: 99510
ugccuccuggagcaaugac

SEQ ID NO: 99512 - RNA, 19 nt, Artificial Sequence
  Description of Artificial Sequence: Synthetic oligonucleotide
  Sense strand starting at position 3397 of SEQ ID NO: 1255
gaggcagaauccuaagacu

SEQ ID NO: 99513 - RNA, 19 nt, Artificial Sequence
  Description of Artificial Sequence: Synthetic oligonucleotide
  Antisense strand to SEQ ID NO: 99512
agucuuaggauucugccuc

SEQ ID NO: 99514 - RNA, 19 nt, Artificial Sequence
  Description of Artificial Sequence: Synthetic oligonucleotide
  Sense strand starting at position 3406 of SEQ ID NO: 1255
uccuaagacuugggaccua

SEQ ID NO: 99515 - RNA, 19 nt, Artificial Sequence
  Description of Artificial Sequence: Synthetic oligonucleotide
  Antisense strand to SEQ ID NO: 99514
uaggucccaagucuuagga

SEQ ID NO: 99516 - RNA, 19 nt, Artificial Sequence
  Description of Artificial Sequence: Synthetic oligonucleotide
  Sense strand starting at position 3563 of SEQ ID NO: 1255
ggcaguuacucauucuauc

SEQ ID NO: 99517 - RNA, 19 nt, Artificial Sequence
  Description of Artificial Sequence: Synthetic oligonucleotide
  Antisense strand to SEQ ID NO: 99516
gauagaaugaguaacugcc

SEQ ID NO: 99518 - RNA, 19 nt, Artificial Sequence
  Description of Artificial Sequence: Synthetic oligonucleotide
  Sense strand starting at position 3640 of SEQ ID NO: 1255
gcccauuugucagauggag

SEQ ID NO: 99519 - RNA, 19 nt, Artificial Sequence
  Description of Artificial Sequence: Synthetic oligonucleotide
  Antisense strand to SEQ ID NO: 99518
cuccaucugacaaaugggc

SEQ ID NO: 99520 - RNA, 19 nt, Artificial Sequence
  Description of Artificial Sequence: Synthetic oligonucleotide
  Sense strand starting at position 3770 of SEQ ID NO: 1255
ggaggagguuaagagcauu

SEQ ID NO: 99521 - RNA, 19 nt, Artificial Sequence
  Description of Artificial Sequence: Synthetic oligonucleotide
  Antisense strand to SEQ ID NO: 99520
aaugcucuuaaccuccucc

SEQ ID NO: 99522 - RNA, 19 nt, Artificial Sequence
  Description of Artificial Sequence: Synthetic oligonucleotide
  Sense strand starting at position 3897 of SEQ ID NO: 1255
gucgaauucuucuccagag

SEQ ID NO: 99523 - RNA, 19 nt, Artificial Sequence
  Description of Artificial Sequence: Synthetic oligonucleotide
  Antisense strand to SEQ ID NO: 99522
cucuggagaagaauucgac

SEQ ID NO: 99524 - RNA, 19 nt, Artificial Sequence
  Description of Artificial Sequence: Synthetic oligonucleotide
  Sense strand starting at position 3898 of SEQ ID NO: 1255
ucgaauucuucuccagaga

SEQ ID NO: 99525 - RNA, 19 nt, Artificial Sequence
  Description of Artificial Sequence: Synthetic oligonucleotide
  Antisense strand to SEQ ID NO: 99524
ucucuggagaagaauucga

SEQ ID NO: 99526 - RNA, 19 nt, Artificial Sequence
  Description of Artificial Sequence: Synthetic oligonucleotide
  Sense strand starting at position 3899 of SEQ ID NO: 1255
cgaauucuucuccagagau

SEQ ID NO: 99527 - RNA, 19 nt, Artificial Sequence
  Description of Artificial Sequence: Synthetic oligonucleotide
  Antisense strand to SEQ ID NO: 99526
aucucuggagaagaauucg

SEQ ID NO: 99528 - RNA, 19 nt, Artificial Sequence
  Description of Artificial Sequence: Synthetic oligonucleotide
  Sense strand starting at position 3962 of SEQ ID NO: 1255
guguaauuaagguguuacc

SEQ ID NO: 99529 - RNA, 19 nt, Artificial Sequence
  Description of Artificial Sequence: Synthetic oligonucleotide
  Antisense strand to SEQ ID NO: 99528
gguaacaccuuaauuacac

SEQ ID NO: 99530 - RNA, 19 nt, Artificial Sequence
  Description of Artificial Sequence: Synthetic oligonucleotide
  Sense strand starting at position 76 of SEQ ID NO: 1256
gccucaauugcgcagauca

SEQ ID NO: 99531 - RNA, 19 nt, Artificial Sequence
  Description of Artificial Sequence: Synthetic oligonucleotide
  Antisense strand to SEQ ID NO: 99530
ugaucugcgcaauugaggc

SEQ ID NO: 99532 - RNA, 19 nt, Artificial Sequence
  Description of Artificial Sequence: Synthetic oligonucleotide
  Sense strand starting at position 78 of SEQ ID NO: 1256
cucaauugcgcagaucagu

SEQ ID NO: 99533 - RNA, 19 nt, Artificial Sequence
  Description of Artificial Sequence: Synthetic oligonucleotide
  Antisense strand to SEQ ID NO: 99532
acugaucugcgcaauugag

SEQ ID NO: 99534 - RNA, 19 nt, Artificial Sequence
  Description of Artificial Sequence: Synthetic oligonucleotide
  Sense strand starting at position 99 of SEQ ID NO: 1256
uucucaacguaguuaagua

SEQ ID NO: 99535 - RNA, 19 nt, Artificial Sequence
  Description of Artificial Sequence: Synthetic oligonucleotide
  Antisense strand to SEQ ID NO: 99534
uacuuaacuacguugagaa

SEQ ID NO: 99536 - RNA, 19 nt, Artificial Sequence
  Description of Artificial Sequence: Synthetic oligonucleotide
  Sense strand starting at position 124 of SEQ ID NO: 1256
gcaucagaucuggguuugu

SEQ ID NO: 99537 - RNA, 19 nt, Artificial Sequence
  Description of Artificial Sequence: Synthetic oligonucleotide
  Antisense strand to SEQ ID NO: 99536
acaaacccagaucugaugc

SEQ ID NO: 99538 - RNA, 19 nt, Artificial Sequence
  Description of Artificial Sequence: Synthetic oligonucleotide
  Sense strand starting at position 128 of SEQ ID NO: 1256
cagaucuggguuuguuuaa

SEQ ID NO: 99539 - RNA, 19 nt, Artificial Sequence
  Description of Artificial Sequence: Synthetic oligonucleotide
  Antisense strand to SEQ ID NO: 99538
uuaaacaaacccagaucug

SEQ ID NO: 99540 - RNA, 19 nt, Artificial Sequence
  Description of Artificial Sequence: Synthetic oligonucleotide
  Sense strand starting at position 129 of SEQ ID NO: 1256
agaucuggguuuguuuaaa

SEQ ID NO: 99541 - RNA, 19 nt, Artificial Sequence
  Description of Artificial Sequence: Synthetic oligonucleotide
  Antisense strand to SEQ ID NO: 99540
uuuaaacaaacccagaucu

SEQ ID NO: 99542 - RNA, 19 nt, Artificial Sequence
  Description of Artificial Sequence: Synthetic oligonucleotide
  Sense strand starting at position 240 of SEQ ID NO: 1256
guuugaauccacugaagag

SEQ ID NO: 99543 - RNA, 19 nt, Artificial Sequence
  Description of Artificial Sequence: Synthetic oligonucleotide
  Antisense strand to SEQ ID NO: 99542
cucuucaguggauucaaac

SEQ ID NO: 99544 - RNA, 19 nt, Artificial Sequence
  Description of Artificial Sequence: Synthetic oligonucleotide
  Sense strand starting at position 385 of SEQ ID NO: 1256
uuaguuagagccugcaaac

SEQ ID NO: 99545 - RNA, 19 nt, Artificial Sequence
  Description of Artificial Sequence: Synthetic oligonucleotide
  Antisense strand to SEQ ID NO: 99544
guuugcaggcucuaacuaa

SEQ ID NO: 99546 - RNA, 19 nt, Artificial Sequence
  Description of Artificial Sequence: Synthetic oligonucleotide
  Sense strand starting at position 546 of SEQ ID NO: 1256
acgagaacgucugugauac

SEQ ID NO: 99547 - RNA, 19 nt, Artificial Sequence
  Description of Artificial Sequence: Synthetic oligonucleotide
  Antisense strand to SEQ ID NO: 99546
guaucacagacguucucgu

SEQ ID NO: 99548 - RNA, 19 nt, Artificial Sequence
  Description of Artificial Sequence: Synthetic oligonucleotide
  Sense strand starting at position 547 of SEQ ID NO: 1256
cgagaacgucugugauacu

SEQ ID NO: 99549 - RNA, 19 nt, Artificial Sequence
  Description of Artificial Sequence: Synthetic oligonucleotide
  Antisense strand to SEQ ID NO: 99548
aguaucacagacguucucg

SEQ ID NO: 99550 - RNA, 19 nt, Artificial Sequence
  Description of Artificial Sequence: Synthetic oligonucleotide
  Sense strand starting at position 556 of SEQ ID NO: 1256
cugugauacuuucugcuaa

SEQ ID NO: 99551 - RNA, 19 nt, Artificial Sequence
  Description of Artificial Sequence: Synthetic oligonucleotide
  Antisense strand to SEQ ID NO: 99550
uuagcagaaaguaucacag

SEQ ID NO: 99552 - RNA, 19 nt, Artificial Sequence
  Description of Artificial Sequence: Synthetic oligonucleotide
  Sense strand starting at position 558 of SEQ ID NO: 1256
gugauacuuucugcuaaug

SEQ ID NO: 99553 - RNA, 19 nt, Artificial Sequence
  Description of Artificial Sequence: Synthetic oligonucleotide
  Antisense strand to SEQ ID NO: 99552
cauuagcagaaaguaucac

SEQ ID NO: 99554 - RNA, 19 nt, Artificial Sequence
  Description of Artificial Sequence: Synthetic oligonucleotide
  Sense strand starting at position 595 of SEQ ID NO: 1256
gguuuauggucuucaagug

SEQ ID NO: 99555 - RNA, 19 nt, Artificial Sequence
  Description of Artificial Sequence: Synthetic oligonucleotide
  Antisense strand to SEQ ID NO: 99554
cacuugaagaccauaaacc

SEQ ID NO: 99556 - RNA, 19 nt, Artificial Sequence
  Description of Artificial Sequence: Synthetic oligonucleotide
  Sense strand starting at position 596 of SEQ ID NO: 1256
guuuauggucuucaagugu

SEQ ID NO: 99557 - RNA, 19 nt, Artificial Sequence
  Description of Artificial Sequence: Synthetic oligonucleotide
  Antisense strand to SEQ ID NO: 99556
acacuugaagaccauaaac

SEQ ID NO: 99558 - RNA, 19 nt, Artificial Sequence
  Description of Artificial Sequence: Synthetic oligonucleotide
  Sense strand starting at position 607 of SEQ ID NO: 1256
ucaaguguuuagccacaaa

SEQ ID NO: 99559 - RNA, 19 nt, Artificial Sequence
  Description of Artificial Sequence: Synthetic oligonucleotide
  Antisense strand to SEQ ID NO: 99558
uuuguggcuaaacacuuga

SEQ ID NO: 99560 - RNA, 19 nt, Artificial Sequence
  Description of Artificial Sequence: Synthetic oligonucleotide
  Sense strand starting at position 685 of SEQ ID NO: 1256
cauggaucaucacucgaga

SEQ ID NO: 99561 - RNA, 19 nt, Artificial Sequence
  Description of Artificial Sequence: Synthetic oligonucleotide
  Antisense strand to SEQ ID NO: 99560
ucucgagugaugauccaug

SEQ ID NO: 99562 - RNA, 19 nt, Artificial Sequence
  Description of Artificial Sequence: Synthetic oligonucleotide
  Sense strand starting at position 687 of SEQ ID NO: 1256
uggaucaucacucgagaca

SEQ ID NO: 99563 - RNA, 19 nt, Artificial Sequence
  Description of Artificial Sequence: Synthetic oligonucleotide
  Antisense strand to SEQ ID NO: 99562
ugucucgagugaugaucca

SEQ ID NO: 99564 - RNA, 19 nt, Artificial Sequence
  Description of Artificial Sequence: Synthetic oligonucleotide
  Sense strand starting at position 742 of SEQ ID NO: 1256
uccgaagcaugccugagaa

SEQ ID NO: 99565 - RNA, 19 nt, Artificial Sequence
  Description of Artificial Sequence: Synthetic oligonucleotide
  Antisense strand to SEQ ID NO: 99564
uucucaggcaugcuucgga

SEQ ID NO: 99566 - RNA, 19 nt, Artificial Sequence
  Description of Artificial Sequence: Synthetic oligonucleotide
  Sense strand starting at position 744 of SEQ ID NO: 1256
cgaagcaugccugagaaag

SEQ ID NO: 99567 - RNA, 19 nt, Artificial Sequence
  Description of Artificial Sequence: Synthetic oligonucleotide
  Antisense strand to SEQ ID NO: 99566
cuuucucaggcaugcuucg

SEQ ID NO: 99568 - RNA, 19 nt, Artificial Sequence
  Description of Artificial Sequence: Synthetic oligonucleotide
  Sense strand starting at position 794 of SEQ ID NO: 1256
ucuaaaccggcgcaagauu

SEQ ID NO: 99569 - RNA, 19 nt, Artificial Sequence
  Description of Artificial Sequence: Synthetic oligonucleotide
  Antisense strand to SEQ ID NO: 99568
aaucuugcgccgguuuaga

SEQ ID NO: 99570 - RNA, 19 nt, Artificial Sequence
  Description of Artificial Sequence: Synthetic oligonucleotide
  Sense strand starting at position 894 of SEQ ID NO: 1256
cuuuccggucuuugaacaa

SEQ ID NO: 99571 - RNA, 19 nt, Artificial Sequence
  Description of Artificial Sequence: Synthetic oligonucleotide
  Antisense strand to SEQ ID NO: 99570
uuguucaaagaccggaaag

SEQ ID NO: 99572 - RNA, 19 nt, Artificial Sequence
  Description of Artificial Sequence: Synthetic oligonucleotide
  Sense strand starting at position 1074 of SEQ ID NO: 1256
ugaggccuuggcgauuaau

SEQ ID NO: 99573 - RNA, 19 nt, Artificial Sequence
  Description of Artificial Sequence: Synthetic oligonucleotide
  Antisense strand to SEQ ID NO: 99572
auuaaucgccaaggccuca

SEQ ID NO: 99574 - RNA, 19 nt, Artificial Sequence
  Description of Artificial Sequence: Synthetic oligonucleotide
  Sense strand starting at position 1077 of SEQ ID NO: 1256
ggccuuggcgauuaaugaa

SEQ ID NO: 99575 - RNA, 19 nt, Artificial Sequence
  Description of Artificial Sequence: Synthetic oligonucleotide
  Antisense strand to SEQ ID NO: 99574
uucauuaaucgccaaggcc

SEQ ID NO: 99576 - RNA, 19 nt, Artificial Sequence
  Description of Artificial Sequence: Synthetic oligonucleotide
  Sense strand starting at position 1231 of SEQ ID NO: 1256
cccgaagguaccgagagau

SEQ ID NO: 99577 - RNA, 19 nt, Artificial Sequence
  Description of Artificial Sequence: Synthetic oligonucleotide
  Antisense strand to SEQ ID NO: 99576
aucucucgguaccuucggg

SEQ ID NO: 99578 - RNA, 19 nt, Artificial Sequence
  Description of Artificial Sequence: Synthetic oligonucleotide
  Sense strand starting at position 1243 of SEQ ID NO: 1256
gagagauaaucuccagcga

SEQ ID NO: 99579 - RNA, 19 nt, Artificial Sequence
  Description of Artificial Sequence: Synthetic oligonucleotide
  Antisense strand to SEQ ID NO: 99578
ucgcuggagauuaucucuc

SEQ ID NO: 99580 - RNA, 19 nt, Artificial Sequence
  Description of Artificial Sequence: Synthetic oligonucleotide
  Sense strand starting at position 1761 of SEQ ID NO: 1256
ccgauuaccgcguuucuuu

SEQ ID NO: 99581 - RNA, 19 nt, Artificial Sequence
  Description of Artificial Sequence: Synthetic oligonucleotide
  Antisense strand to SEQ ID NO: 99580
aaagaaacgcgguaaucgg

SEQ ID NO: 99582 - RNA, 19 nt, Artificial Sequence
  Description of Artificial Sequence: Synthetic oligonucleotide
  Sense strand starting at position 1872 of SEQ ID NO: 1256
uggcgagcagcuccuuuau

SEQ ID NO: 99583 - RNA, 19 nt, Artificial Sequence
  Description of Artificial Sequence: Synthetic oligonucleotide
  Antisense strand to SEQ ID NO: 99582
auaaaggagcugcucgcca

SEQ ID NO: 99584 - RNA, 19 nt, Artificial Sequence
  Description of Artificial Sequence: Synthetic oligonucleotide
  Sense strand starting at position 2169 of SEQ ID NO: 1256
gagcucuuuccaugagcac

SEQ ID NO: 99585 - RNA, 19 nt, Artificial Sequence
  Description of Artificial Sequence: Synthetic oligonucleotide
  Antisense strand to SEQ ID NO: 99584
gugcucauggaaagagcuc

SEQ ID NO: 99586 - RNA, 19 nt, Artificial Sequence
  Description of Artificial Sequence: Synthetic oligonucleotide
  Sense strand starting at position 2227 of SEQ ID NO: 1256
ccugauuugugagcccuuu

SEQ ID NO: 99587 - RNA, 19 nt, Artificial Sequence
  Description of Artificial Sequence: Synthetic oligonucleotide
  Antisense strand to SEQ ID NO: 99586
aaagggcucacaaaucagg

SEQ ID NO: 99588 - RNA, 19 nt, Artificial Sequence
  Description of Artificial Sequence: Synthetic oligonucleotide
  Sense strand starting at position 2425 of SEQ ID NO: 1256
ucaguccaauguuuggaaa

SEQ ID NO: 99589 - RNA, 19 nt, Artificial Sequence
  Description of Artificial Sequence: Synthetic oligonucleotide
  Antisense strand to SEQ ID NO: 99588
uuuccaaacauuggacuga

SEQ ID NO: 99590 - RNA, 19 nt, Artificial Sequence
  Description of Artificial Sequence: Synthetic oligonucleotide
  Sense strand starting at position 2426 of SEQ ID NO: 1256
caguccaauguuuggaaau

SEQ ID NO: 99591 - RNA, 19 nt, Artificial Sequence
  Description of Artificial Sequence: Synthetic oligonucleotide
  Antisense strand to SEQ ID NO: 99590
auuuccaaacauuggacug

SEQ ID NO: 99592 - RNA, 19 nt, Artificial Sequence
  Description of Artificial Sequence: Synthetic oligonucleotide
  Sense strand starting at position 2545 of SEQ ID NO: 1256
aucucuguuccauagucuu

SEQ ID NO: 99593 - RNA, 19 nt, Artificial Sequence
  Description of Artificial Sequence: Synthetic oligonucleotide
  Antisense strand to SEQ ID NO: 99592
aagacuauggaacagagau

SEQ ID NO: 99594 - RNA, 19 nt, Artificial Sequence
  Description of Artificial Sequence: Synthetic oligonucleotide
  Sense strand starting at position 2593 of SEQ ID NO: 1256
auuagaaucucgucugaga

SEQ ID NO: 99595 - RNA, 19 nt, Artificial Sequence
  Description of Artificial Sequence: Synthetic oligonucleotide
  Antisense strand to SEQ ID NO: 99594
ucucagacgagauucuaau

SEQ ID NO: 99596 - RNA, 19 nt, Artificial Sequence
  Description of Artificial Sequence: Synthetic oligonucleotide
  Sense strand starting at position 2595 of SEQ ID NO: 1256
uagaaucucgucugagagu

SEQ ID NO: 99597 - RNA, 19 nt, Artificial Sequence
  Description of Artificial Sequence: Synthetic oligonucleotide
  Antisense strand to SEQ ID NO: 99596
acucucagacgagauucua

SEQ ID NO: 99598 - RNA, 19 nt, Artificial Sequence
  Description of Artificial Sequence: Synthetic oligonucleotide
  Sense strand starting at position 3057 of SEQ ID NO: 1256
ggugauggauuaucauuag

SEQ ID NO: 99599 - RNA, 19 nt, Artificial Sequence
  Description of Artificial Sequence: Synthetic oligonucleotide
  Antisense strand to SEQ ID NO: 99598
cuaaugauaauccaucacc

SEQ ID NO: 99600 - RNA, 19 nt, Artificial Sequence
  Description of Artificial Sequence: Synthetic oligonucleotide
  Sense strand starting at position 3101 of SEQ ID NO: 1256
ugaaguugagagcaauguu

SEQ ID NO: 99601 - RNA, 19 nt, Artificial Sequence
  Description of Artificial Sequence: Synthetic oligonucleotide
  Antisense strand to SEQ ID NO: 99600
aacauugcucucaacuuca

SEQ ID NO: 99602 - RNA, 19 nt, Artificial Sequence
  Description of Artificial Sequence: Synthetic oligonucleotide
  Sense strand starting at position 3529 of SEQ ID NO: 1256
acucuagagguuuguaaag

SEQ ID NO: 99603 - RNA, 19 nt, Artificial Sequence
  Description of Artificial Sequence: Synthetic oligonucleotide
  Antisense strand to SEQ ID NO: 99602
cuuuacaaaccucuagagu

SEQ ID NO: 99604 - RNA, 19 nt, Artificial Sequence
  Description of Artificial Sequence: Synthetic oligonucleotide
  Sense strand starting at position 3540 of SEQ ID NO: 1256
uuguaaagcccuugagaac

SEQ ID NO: 99605 - RNA, 19 nt, Artificial Sequence
  Description of Artificial Sequence: Synthetic oligonucleotide
  Antisense strand to SEQ ID NO: 99604
guucucaagggcuuuacaa

SEQ ID NO: 99606 - RNA, 19 nt, Artificial Sequence
  Description of Artificial Sequence: Synthetic oligonucleotide
  Sense strand starting at position 3541 of SEQ ID NO: 1256
uguaaagcccuugagaaca

SEQ ID NO: 99607 - RNA, 19 nt, Artificial Sequence
  Description of Artificial Sequence: Synthetic oligonucleotide
  Antisense strand to SEQ ID NO: 99606
uguucucaagggcuuuaca

SEQ ID NO: 99608 - RNA, 19 nt, Artificial Sequence
  Description of Artificial Sequence: Synthetic oligonucleotide
  Sense strand starting at position 3578 of SEQ ID NO: 1256
auguauguuaguuaacguu

SEQ ID NO: 99609 - RNA, 19 nt, Artificial Sequence
  Description of Artificial Sequence: Synthetic oligonucleotide
  Antisense strand to SEQ ID NO: 99608
aacguuaacuaacauacau

SEQ ID NO: 99610 - RNA, 19 nt, Artificial Sequence
  Description of Artificial Sequence: Synthetic oligonucleotide
  Sense strand starting at position 34 of SEQ ID NO: 1257
caucaaagaucagugguca

SEQ ID NO: 99611 - RNA, 19 nt, Artificial Sequence
  Description of Artificial Sequence: Synthetic oligonucleotide
  Antisense strand to SEQ ID NO: 99610
ugaccacugaucuuugaug

SEQ ID NO: 99612 - RNA, 19 nt, Artificial Sequence
  Description of Artificial Sequence: Synthetic oligonucleotide
  Sense strand starting at position 38 of SEQ ID NO: 1257
aaagaucaguggucacaga

SEQ ID NO: 99613 - RNA, 19 nt, Artificial Sequence
  Description of Artificial Sequence: Synthetic oligonucleotide
  Antisense strand to SEQ ID NO: 99612
ucugugaccacugaucuuu

SEQ ID NO: 99614 - RNA, 19 nt, Artificial Sequence
  Description of Artificial Sequence: Synthetic oligonucleotide
  Sense strand starting at position 46 of SEQ ID NO: 1257
guggucacagaucaccaua

SEQ ID NO: 99615 - RNA, 19 nt, Artificial Sequence
  Description of Artificial Sequence: Synthetic oligonucleotide
  Antisense strand to SEQ ID NO: 99614
uauggugaucugugaccac

SEQ ID NO: 99616 - RNA, 19 nt, Artificial Sequence
  Description of Artificial Sequence: Synthetic oligonucleotide
  Sense strand starting at position 101 of SEQ ID NO: 1257
uugagagaauugccacaau

SEQ ID NO: 99617 - RNA, 19 nt, Artificial Sequence
  Description of Artificial Sequence: Synthetic oligonucleotide
  Antisense strand to SEQ ID NO: 99616
auuguggcaauucucucaa

SEQ ID NO: 99618 - RNA, 19 nt, Artificial Sequence
  Description of Artificial Sequence: Synthetic oligonucleotide
  Sense strand starting at position 466 of SEQ ID NO: 1257
cuuugaaagcuauagucac

SEQ ID NO: 99619 - RNA, 19 nt, Artificial Sequence
  Description of Artificial Sequence: Synthetic oligonucleotide
  Antisense strand to SEQ ID NO: 99618
gugacuauagcuuucaaag

SEQ ID NO: 99620 - RNA, 19 nt, Artificial Sequence
  Description of Artificial Sequence: Synthetic oligonucleotide
  Sense strand starting at position 561 of SEQ ID NO: 1257
aagagaucagcuugugaau

SEQ ID NO: 99621 - RNA, 19 nt, Artificial Sequence
  Description of Artificial Sequence: Synthetic oligonucleotide
  Antisense strand to SEQ ID NO: 99620
auucacaagcugaucucuu

SEQ ID NO: 99622 - RNA, 19 nt, Artificial Sequence
  Description of Artificial Sequence: Synthetic oligonucleotide
  Sense strand starting at position 567 of SEQ ID NO: 1257
ucagcuugugaauaugauc

SEQ ID NO: 99623 - RNA, 19 nt, Artificial Sequence
  Description of Artificial Sequence: Synthetic oligonucleotide
  Antisense strand to SEQ ID NO: 99622
gaucauauucacaagcuga

SEQ ID NO: 99624 - RNA, 19 nt, Artificial Sequence
  Description of Artificial Sequence: Synthetic oligonucleotide
  Sense strand starting at position 572 of SEQ ID NO: 1257
uugugaauaugaucauucu

SEQ ID NO: 99625 - RNA, 19 nt, Artificial Sequence
  Description of Artificial Sequence: Synthetic oligonucleotide
  Antisense strand to SEQ ID NO: 99624
agaaugaucauauucacaa

SEQ ID NO: 99626 - RNA, 19 nt, Artificial Sequence
  Description of Artificial Sequence: Synthetic oligonucleotide
  Sense strand starting at position 573 of SEQ ID NO: 1257
ugugaauaugaucauucuu

SEQ ID NO: 99627 - RNA, 19 nt, Artificial Sequence
  Description of Artificial Sequence: Synthetic oligonucleotide
  Antisense strand to SEQ ID NO: 99626
aagaaugaucauauucaca

SEQ ID NO: 99628 - RNA, 19 nt, Artificial Sequence
  Description of Artificial Sequence: Synthetic oligonucleotide
  Sense strand starting at position 776 of SEQ ID NO: 1257
uuuauuacaggagguuaaa

SEQ ID NO: 99629 - RNA, 19 nt, Artificial Sequence
  Description of Artificial Sequence: Synthetic oligonucleotide
  Antisense strand to SEQ ID NO: 99628
uuuaaccuccuguaauaaa

SEQ ID NO: 99630 - RNA, 19 nt, Artificial Sequence
  Description of Artificial Sequence: Synthetic oligonucleotide
  Sense strand starting at position 841 of SEQ ID NO: 1257
uagaguuccggccacagaa

SEQ ID NO: 99631 - RNA, 19 nt, Artificial Sequence
  Description of Artificial Sequence: Synthetic oligonucleotide
  Antisense strand to SEQ ID NO: 99630
uucuguggccggaacucua

SEQ ID NO: 99632 - RNA, 19 nt, Artificial Sequence
  Description of Artificial Sequence: Synthetic oligonucleotide
  Sense strand starting at position 922 of SEQ ID NO: 1257
gaguuugacuccucuuaag

SEQ ID NO: 99633 - RNA, 19 nt, Artificial Sequence
  Description of Artificial Sequence: Synthetic oligonucleotide
  Antisense strand to SEQ ID NO: 99632
cuuaagaggagucaaacuc

SEQ ID NO: 99634 - RNA, 19 nt, Artificial Sequence
  Description of Artificial Sequence: Synthetic oligonucleotide
  Sense strand starting at position 932 of SEQ ID NO: 1257
ccucuuaagguaugaagag

SEQ ID NO: 99635 - RNA, 19 nt, Artificial Sequence
  Description of Artificial Sequence: Synthetic oligonucleotide
  Antisense strand to SEQ ID NO: 99634
cucuucauaccuuaagagg

SEQ ID NO: 99636 - RNA, 19 nt, Artificial Sequence
  Description of Artificial Sequence: Synthetic oligonucleotide
  Sense strand starting at position 1104 of SEQ ID NO: 1257
guugguucccucuacauaa

SEQ ID NO: 99637 - RNA, 19 nt, Artificial Sequence
  Description of Artificial Sequence: Synthetic oligonucleotide
  Antisense strand to SEQ ID NO: 99636
uuauguagagggaaccaac

SEQ ID NO: 99638 - RNA, 19 nt, Artificial Sequence
  Description of Artificial Sequence: Synthetic oligonucleotide
  Sense strand starting at position 1395 of SEQ ID NO: 1257
gagguuugaccacggagga

SEQ ID NO: 99639 - RNA, 19 nt, Artificial Sequence
  Description of Artificial Sequence: Synthetic oligonucleotide
  Antisense strand to SEQ ID NO: 99638
uccuccguggucaaaccuc

SEQ ID NO: 99640 - RNA, 19 nt, Artificial Sequence
  Description of Artificial Sequence: Synthetic oligonucleotide
  Sense strand starting at position 1505 of SEQ ID NO: 1257
gagggaaaggccuguuugu

SEQ ID NO: 99641 - RNA, 19 nt, Artificial Sequence
  Description of Artificial Sequence: Synthetic oligonucleotide
  Antisense strand to SEQ ID NO: 99640
acaaacaggccuuucccuc

SEQ ID NO: 99642 - RNA, 19 nt, Artificial Sequence
  Description of Artificial Sequence: Synthetic oligonucleotide
  Sense strand starting at position 1516 of SEQ ID NO: 1257
cuguuuguucuggaaggca

SEQ ID NO: 99643 - RNA, 19 nt, Artificial Sequence
  Description of Artificial Sequence: Synthetic oligonucleotide
  Antisense strand to SEQ ID NO: 99642
ugccuuccagaacaaacag

SEQ ID NO: 99644 - RNA, 19 nt, Artificial Sequence
  Description of Artificial Sequence: Synthetic oligonucleotide
  Sense strand starting at position 1595 of SEQ ID NO: 1257
caagcucuagucuacgaaa

SEQ ID NO: 99645 - RNA, 19 nt, Artificial Sequence
  Description of Artificial Sequence: Synthetic oligonucleotide
  Antisense strand to SEQ ID NO: 99644
uuucguagacuagagcuug

SEQ ID NO: 99646 - RNA, 19 nt, Artificial Sequence
  Description of Artificial Sequence: Synthetic oligonucleotide
  Sense strand starting at position 1612 of SEQ ID NO: 1257
aaguaaagccaucgacuuu

SEQ ID NO: 99647 - RNA, 19 nt, Artificial Sequence
  Description of Artificial Sequence: Synthetic oligonucleotide
  Antisense strand to SEQ ID NO: 99646
aaagucgauggcuuuacuu

SEQ ID NO: 99648 - RNA, 19 nt, Artificial Sequence
  Description of Artificial Sequence: Synthetic oligonucleotide
  Sense strand starting at position 2861 of SEQ ID NO: 1257
auuaauuuguccguugcuu

SEQ ID NO: 99649 - RNA, 19 nt, Artificial Sequence
  Description of Artificial Sequence: Synthetic oligonucleotide
  Antisense strand to SEQ ID NO: 99648
aagcaacggacaaauuaau

SEQ ID NO: 99650 - RNA, 19 nt, Artificial Sequence
  Description of Artificial Sequence: Synthetic oligonucleotide
  Sense strand starting at position 2945 of SEQ ID NO: 1257
uggucucugggaugacaaa

SEQ ID NO: 99651 - RNA, 19 nt, Artificial Sequence
  Description of Artificial Sequence: Synthetic oligonucleotide
  Antisense strand to SEQ ID NO: 99650
uuugucaucccagagacca

SEQ ID NO: 99652 - RNA, 19 nt, Artificial Sequence
  Description of Artificial Sequence: Synthetic oligonucleotide
  Sense strand starting at position 2969 of SEQ ID NO: 1257
gguccuuucccuugaggac

SEQ ID NO: 99653 - RNA, 19 nt, Artificial Sequence
  Description of Artificial Sequence: Synthetic oligonucleotide
  Antisense strand to SEQ ID NO: 99652
guccucaagggaaaggacc

SEQ ID NO: 99654 - RNA, 19 nt, Artificial Sequence
  Description of Artificial Sequence: Synthetic oligonucleotide
  Sense strand starting at position 2970 of SEQ ID NO: 1257
guccuuucccuugaggacu

SEQ ID NO: 99655 - RNA, 19 nt, Artificial Sequence
  Description of Artificial Sequence: Synthetic oligonucleotide
  Antisense strand to SEQ ID NO: 99654
aguccucaagggaaaggac

SEQ ID NO: 99656 - RNA, 19 nt, Artificial Sequence
  Description of Artificial Sequence: Synthetic oligonucleotide
  Sense strand starting at position 3041 of SEQ ID NO: 1257
ucaugaaagucugugacaa

SEQ ID NO: 99657 - RNA, 19 nt, Artificial Sequence
  Description of Artificial Sequence: Synthetic oligonucleotide
  Antisense strand to SEQ ID NO: 99656
uugucacagacuuucauga

SEQ ID NO: 99658 - RNA, 19 nt, Artificial Sequence
  Description of Artificial Sequence: Synthetic oligonucleotide
  Sense strand starting at position 3042 of SEQ ID NO: 1257
caugaaagucugugacaag

SEQ ID NO: 99659 - RNA, 19 nt, Artificial Sequence
  Description of Artificial Sequence: Synthetic oligonucleotide
  Antisense strand to SEQ ID NO: 99658
cuugucacagacuuucaug

SEQ ID NO: 99660 - RNA, 19 nt, Artificial Sequence
  Description of Artificial Sequence: Synthetic oligonucleotide
  Sense strand starting at position 3063 of SEQ ID NO: 1257
ccauauuucugagauguua

SEQ ID NO: 99661 - RNA, 19 nt, Artificial Sequence
  Description of Artificial Sequence: Synthetic oligonucleotide
  Antisense strand to SEQ ID NO: 99660
uaacaucucagaaauaugg

SEQ ID NO: 99662 - RNA, 19 nt, Artificial Sequence
  Description of Artificial Sequence: Synthetic oligonucleotide
  Sense strand starting at position 3278 of SEQ ID NO: 1257
ggaagacgccugugggaaa

SEQ ID NO: 99663 - RNA, 19 nt, Artificial Sequence
  Description of Artificial Sequence: Synthetic oligonucleotide
  Antisense strand to SEQ ID NO: 99662
uuucccacaggcgucuucc

SEQ ID NO: 99664 - RNA, 19 nt, Artificial Sequence
  Description of Artificial Sequence: Synthetic oligonucleotide
  Sense strand starting at position 3331 of SEQ ID NO: 1257
agagaugagagucgucagu

SEQ ID NO: 99665 - RNA, 19 nt, Artificial Sequence
  Description of Artificial Sequence: Synthetic oligonucleotide
  Antisense strand to SEQ ID NO: 99664
acugacgacucucaucucu

SEQ ID NO: 99666 - RNA, 19 nt, Artificial Sequence
  Description of Artificial Sequence: Synthetic oligonucleotide
  Sense strand starting at position 3333 of SEQ ID NO: 1257
agaugagagucgucaguac

SEQ ID NO: 99667 - RNA, 19 nt, Artificial Sequence
  Description of Artificial Sequence: Synthetic oligonucleotide
  Antisense strand to SEQ ID NO: 99666
guacugacgacucucaucu

SEQ ID NO: 99668 - RNA, 19 nt, Artificial Sequence
  Description of Artificial Sequence: Synthetic oligonucleotide
  Sense strand starting at position 3337 of SEQ ID NO: 1257
gagagucgucaguacauga

SEQ ID NO: 99669 - RNA, 19 nt, Artificial Sequence
  Description of Artificial Sequence: Synthetic oligonucleotide
  Antisense strand to SEQ ID NO: 99668
ucauguacugacgacucuc

SEQ ID NO: 99670 - RNA, 19 nt, Artificial Sequence
  Description of Artificial Sequence: Synthetic oligonucleotide
  Sense strand starting at position 3481 of SEQ ID NO: 1257
gugagucugcaagcguuua

SEQ ID NO: 99671 - RNA, 19 nt, Artificial Sequence
  Description of Artificial Sequence: Synthetic oligonucleotide
  Antisense strand to SEQ ID NO: 99670
uaaacgcuugcagacucac

SEQ ID NO: 99672 - RNA, 19 nt, Artificial Sequence
  Description of Artificial Sequence: Synthetic oligonucleotide
  Sense strand starting at position 3508 of SEQ ID NO: 1257
ccggguuuagcucaggcaa

SEQ ID NO: 99673 - RNA, 19 nt, Artificial Sequence
  Description of Artificial Sequence: Synthetic oligonucleotide
  Antisense strand to SEQ ID NO: 99672
uugccugagcuaaacccgg

SEQ ID NO: 99674 - RNA, 19 nt, Artificial Sequence
  Description of Artificial Sequence: Synthetic oligonucleotide
  Sense strand starting at position 3578 of SEQ ID NO: 1257
uuggacagacgauguauau

SEQ ID NO: 99675 - RNA, 19 nt, Artificial Sequence
  Description of Artificial Sequence: Synthetic oligonucleotide
  Antisense strand to SEQ ID NO: 99674
auauacaucgucuguccaa

SEQ ID NO: 99676 - RNA, 19 nt, Artificial Sequence
  Description of Artificial Sequence: Synthetic oligonucleotide
  Sense strand starting at position 3692 of SEQ ID NO: 1257
aucauccagcuuugugaau

SEQ ID NO: 99677 - RNA, 19 nt, Artificial Sequence
  Description of Artificial Sequence: Synthetic oligonucleotide
  Antisense strand to SEQ ID NO: 99676
auucacaaagcuggaugau

SEQ ID NO: 99678 - RNA, 19 nt, Artificial Sequence
  Description of Artificial Sequence: Synthetic oligonucleotide
  Sense strand starting at position 3693 of SEQ ID NO: 1257
ucauccagcuuugugaaua

SEQ ID NO: 99679 - RNA, 19 nt, Artificial Sequence
  Description of Artificial Sequence: Synthetic oligonucleotide
  Antisense strand to SEQ ID NO: 99678
uauucacaaagcuggauga

SEQ ID NO: 99680 - RNA, 19 nt, Artificial Sequence
  Description of Artificial Sequence: Synthetic oligonucleotide
  Sense strand starting at position 3698 of SEQ ID NO: 1257
cagcuuugugaauaguaac

SEQ ID NO: 99681 - RNA, 19 nt, Artificial Sequence
  Description of Artificial Sequence: Synthetic oligonucleotide
  Antisense strand to SEQ ID NO: 99680
guuacuauucacaaagcug

SEQ ID NO: 99682 - RNA, 19 nt, Artificial Sequence
  Description of Artificial Sequence: Synthetic oligonucleotide
  Sense strand starting at position 3839 of SEQ ID NO: 1257
acuguugcaccuuagauca

SEQ ID NO: 99683 - RNA, 19 nt, Artificial Sequence
  Description of Artificial Sequence: Synthetic oligonucleotide
  Antisense strand to SEQ ID NO: 99682
ugaucuaaggugcaacagu

SEQ ID NO: 99684 - RNA, 19 nt, Artificial Sequence
  Description of Artificial Sequence: Synthetic oligonucleotide
  Sense strand starting at position 3847 of SEQ ID NO: 1257
accuuagaucaguaggcau

SEQ ID NO: 99685 - RNA, 19 nt, Artificial Sequence
  Description of Artificial Sequence: Synthetic oligonucleotide
  Antisense strand to SEQ ID NO: 99684
augccuacugaucuaaggu

SEQ ID NO: 99686 - RNA, 19 nt, Artificial Sequence
  Description of Artificial Sequence: Synthetic oligonucleotide
  Sense strand starting at position 3849 of SEQ ID NO: 1257
cuuagaucaguaggcauua

SEQ ID NO: 99687 - RNA, 19 nt, Artificial Sequence
  Description of Artificial Sequence: Synthetic oligonucleotide
  Antisense strand to SEQ ID NO: 99686
uaaugccuacugaucuaag

SEQ ID NO: 99688 - RNA, 19 nt, Artificial Sequence
  Description of Artificial Sequence: Synthetic oligonucleotide
  Sense strand starting at position 3960 of SEQ ID NO: 1257
cgcugcucucuugcucaau

SEQ ID NO: 99689 - RNA, 19 nt, Artificial Sequence
  Description of Artificial Sequence: Synthetic oligonucleotide
  Antisense strand to SEQ ID NO: 99688
auugagcaagagagcagcg

SEQ ID NO: 99690 - RNA, 19 nt, Artificial Sequence
  Description of Artificial Sequence: Synthetic oligonucleotide
  Sense strand starting at position 8 of SEQ ID NO: 1258
acuuguacucagcaaugaa

SEQ ID NO: 99691 - RNA, 19 nt, Artificial Sequence
  Description of Artificial Sequence: Synthetic oligonucleotide
  Antisense strand to SEQ ID NO: 99690
uucauugcugaguacaagu

SEQ ID NO: 99692 - RNA, 19 nt, Artificial Sequence
  Description of Artificial Sequence: Synthetic oligonucleotide
  Sense strand starting at position 11 of SEQ ID NO: 1258
uguacucagcaaugaagaa

SEQ ID NO: 99693 - RNA, 19 nt, Artificial Sequence
  Description of Artificial Sequence: Synthetic oligonucleotide
  Antisense strand to SEQ ID NO: 99692
uucuucauugcugaguaca

SEQ ID NO: 99694 - RNA, 19 nt, Artificial Sequence
  Description of Artificial Sequence: Synthetic oligonucleotide
  Sense strand starting at position 59 of SEQ ID NO: 1258
ucuuacaagucacugguua

SEQ ID NO: 99695 - RNA, 19 nt, Artificial Sequence
  Description of Artificial Sequence: Synthetic oligonucleotide
  Antisense strand to SEQ ID NO: 99694
uaaccagugacuuguaaga

SEQ ID NO: 99696 - RNA, 19 nt, Artificial Sequence
  Description of Artificial Sequence: Synthetic oligonucleotide
  Sense strand starting at position 63 of SEQ ID NO: 1258
acaagucacugguuagaua

SEQ ID NO: 99697 - RNA, 19 nt, Artificial Sequence
  Description of Artificial Sequence: Synthetic oligonucleotide
  Antisense strand to SEQ ID NO: 99696
uaucuaaccagugacuugu

SEQ ID NO: 99698 - RNA, 19 nt, Artificial Sequence
  Description of Artificial Sequence: Synthetic oligonucleotide
  Sense strand starting at position 142 of SEQ ID NO: 1258
gcccaacaucuccgaacaa

SEQ ID NO: 99699 - RNA, 19 nt, Artificial Sequence
  Description of Artificial Sequence: Synthetic oligonucleotide
  Antisense strand to SEQ ID NO: 99698
uuguucggagauguugggc

SEQ ID NO: 99700 - RNA, 19 nt, Artificial Sequence
  Description of Artificial Sequence: Synthetic oligonucleotide
  Sense strand starting at position 358 of SEQ ID NO: 1258
gcauaaaugcaguaauucu

SEQ ID NO: 99701 - RNA, 19 nt, Artificial Sequence
  Description of Artificial Sequence: Synthetic oligonucleotide
  Antisense strand to SEQ ID NO: 99700
agaauuacugcauuuaugc

SEQ ID NO: 99702 - RNA, 19 nt, Artificial Sequence
  Description of Artificial Sequence: Synthetic oligonucleotide
  Sense strand starting at position 579 of SEQ ID NO: 1258
uggugaguuguauauugac

SEQ ID NO: 99703 - RNA, 19 nt, Artificial Sequence
  Description of Artificial Sequence: Synthetic oligonucleotide
  Antisense strand to SEQ ID NO: 99702
gucaauauacaacucacca

SEQ ID NO: 99704 - RNA, 19 nt, Artificial Sequence
  Description of Artificial Sequence: Synthetic oligonucleotide
  Sense strand starting at position 973 of SEQ ID NO: 1258
aggcuaccgaaguaucuau

SEQ ID NO: 99705 - RNA, 19 nt, Artificial Sequence
  Description of Artificial Sequence: Synthetic oligonucleotide
  Antisense strand to SEQ ID NO: 99704
auagauacuucgguagccu

SEQ ID NO: 99706 - RNA, 19 nt, Artificial Sequence
  Description of Artificial Sequence: Synthetic oligonucleotide
  Sense strand starting at position 1050 of SEQ ID NO: 1258
agaggcuugauuggaguaa

SEQ ID NO: 99707 - RNA, 19 nt, Artificial Sequence
  Description of Artificial Sequence: Synthetic oligonucleotide
  Antisense strand to SEQ ID NO: 99706
uuacuccaaucaagccucu

SEQ ID NO: 99708 - RNA, 19 nt, Artificial Sequence
  Description of Artificial Sequence: Synthetic oligonucleotide
  Sense strand starting at position 1054 of SEQ ID NO: 1258
gcuugauuggaguaagcug

SEQ ID NO: 99709 - RNA, 19 nt, Artificial Sequence
  Description of Artificial Sequence: Synthetic oligonucleotide
  Antisense strand to SEQ ID NO: 99708
cagcuuacuccaaucaagc

SEQ ID NO: 99710 - RNA, 19 nt, Artificial Sequence
  Description of Artificial Sequence: Synthetic oligonucleotide
  Sense strand starting at position 1059 of SEQ ID NO: 1258
auuggaguaagcuguagaa

SEQ ID NO: 99711 - RNA, 19 nt, Artificial Sequence
  Description of Artificial Sequence: Synthetic oligonucleotide
  Antisense strand to SEQ ID NO: 99710
uucuacagcuuacuccaau

SEQ ID NO: 99712 - RNA, 19 nt, Artificial Sequence
  Description of Artificial Sequence: Synthetic oligonucleotide
  Sense strand starting at position 1124 of SEQ ID NO: 1258
uggcgacaaaguuaugcaa

SEQ ID NO: 99713 - RNA, 19 nt, Artificial Sequence
  Description of Artificial Sequence: Synthetic oligonucleotide
  Antisense strand to SEQ ID NO: 99712
uugcauaacuuugucgcca

SEQ ID NO: 99714 - RNA, 19 nt, Artificial Sequence
  Description of Artificial Sequence: Synthetic oligonucleotide
  Sense strand starting at position 2367 of SEQ ID NO: 1258
ugaaaucuugaaugucuua

SEQ ID NO: 99715 - RNA, 19 nt, Artificial Sequence
  Description of Artificial Sequence: Synthetic oligonucleotide
  Antisense strand to SEQ ID NO: 99714
uaagacauucaagauuuca

SEQ ID NO: 99716 - RNA, 19 nt, Artificial Sequence
  Description of Artificial Sequence: Synthetic oligonucleotide
  Sense strand starting at position 2432 of SEQ ID NO: 1258
agacaagugcugugaaaug

SEQ ID NO: 99717 - RNA, 19 nt, Artificial Sequence
  Description of Artificial Sequence: Synthetic oligonucleotide
  Antisense strand to SEQ ID NO: 99716
cauuucacagcacuugucu

SEQ ID NO: 99718 - RNA, 19 nt, Artificial Sequence
  Description of Artificial Sequence: Synthetic oligonucleotide
  Sense strand starting at position 2442 of SEQ ID NO: 1258
ugugaaaugaguggacagu

SEQ ID NO: 99719 - RNA, 19 nt, Artificial Sequence
  Description of Artificial Sequence: Synthetic oligonucleotide
  Antisense strand to SEQ ID NO: 99718
acuguccacucauuucaca

SEQ ID NO: 99720 - RNA, 19 nt, Artificial Sequence
  Description of Artificial Sequence: Synthetic oligonucleotide
  Sense strand starting at position 2461 of SEQ ID NO: 1258
cgacuagacucuucuguag

SEQ ID NO: 99721 - RNA, 19 nt, Artificial Sequence
  Description of Artificial Sequence: Synthetic oligonucleotide
  Antisense strand to SEQ ID NO: 99720
cuacagaagagucuagucg

SEQ ID NO: 99722 - RNA, 19 nt, Artificial Sequence
  Description of Artificial Sequence: Synthetic oligonucleotide
  Sense strand starting at position 2464 of SEQ ID NO: 1258
cuagacucuucuguagauu

SEQ ID NO: 99723 - RNA, 19 nt, Artificial Sequence
  Description of Artificial Sequence: Synthetic oligonucleotide
  Antisense strand to SEQ ID NO: 99722
aaucuacagaagagucuag

SEQ ID NO: 99724 - RNA, 19 nt, Artificial Sequence
  Description of Artificial Sequence: Synthetic oligonucleotide
  Sense strand starting at position 2465 of SEQ ID NO: 1258
uagacucuucuguagauug

SEQ ID NO: 99725 - RNA, 19 nt, Artificial Sequence
  Description of Artificial Sequence: Synthetic oligonucleotide
  Antisense strand to SEQ ID NO: 99724
caaucuacagaagagucua

SEQ ID NO: 99726 - RNA, 19 nt, Artificial Sequence
  Description of Artificial Sequence: Synthetic oligonucleotide
  Sense strand starting at position 2549 of SEQ ID NO: 1258
gacuuugaaccguaaucuu

SEQ ID NO: 99727 - RNA, 19 nt, Artificial Sequence
  Description of Artificial Sequence: Synthetic oligonucleotide
  Antisense strand to SEQ ID NO: 99726
aagauuacgguucaaaguc

SEQ ID NO: 99728 - RNA, 19 nt, Artificial Sequence
  Description of Artificial Sequence: Synthetic oligonucleotide
  Sense strand starting at position 2607 of SEQ ID NO: 1258
ccuuaucaggauuggauca

SEQ ID NO: 99729 - RNA, 19 nt, Artificial Sequence
  Description of Artificial Sequence: Synthetic oligonucleotide
  Antisense strand to SEQ ID NO: 99728
ugauccaauccugauaagg

SEQ ID NO: 99730 - RNA, 19 nt, Artificial Sequence
  Description of Artificial Sequence: Synthetic oligonucleotide
  Sense strand starting at position 2623 of SEQ ID NO: 1258
ucaggaacuuugguuaauu

SEQ ID NO: 99731 - RNA, 19 nt, Artificial Sequence
  Description of Artificial Sequence: Synthetic oligonucleotide
  Antisense strand to SEQ ID NO: 99730
aauuaaccaaaguuccuga

SEQ ID NO: 99732 - RNA, 19 nt, Artificial Sequence
  Description of Artificial Sequence: Synthetic oligonucleotide
  Sense strand starting at position 2715 of SEQ ID NO: 1258
uuguaaaggucacugaauu

SEQ ID NO: 99733 - RNA, 19 nt, Artificial Sequence
  Description of Artificial Sequence: Synthetic oligonucleotide
  Antisense strand to SEQ ID NO: 99732
aauucagugaccuuuacaa

SEQ ID NO: 99734 - RNA, 19 nt, Artificial Sequence
  Description of Artificial Sequence: Synthetic oligonucleotide
  Sense strand starting at position 2729 of SEQ ID NO: 1258
gaauuucccuacuagggua

SEQ ID NO: 99735 - RNA, 19 nt, Artificial Sequence
  Description of Artificial Sequence: Synthetic oligonucleotide
  Antisense strand to SEQ ID NO: 99734
uacccuaguagggaaauuc

SEQ ID NO: 99736 - RNA, 19 nt, Artificial Sequence
  Description of Artificial Sequence: Synthetic oligonucleotide
  Sense strand starting at position 2737 of SEQ ID NO: 1258
cuacuaggguauuccugaa

SEQ ID NO: 99737 - RNA, 19 nt, Artificial Sequence
  Description of Artificial Sequence: Synthetic oligonucleotide
  Antisense strand to SEQ ID NO: 99736
uucaggaauacccuaguag

SEQ ID NO: 99738 - RNA, 19 nt, Artificial Sequence
  Description of Artificial Sequence: Synthetic oligonucleotide
  Sense strand starting at position 2811 of SEQ ID NO: 1258
guaugcauggauuacuaau

SEQ ID NO: 99739 - RNA, 19 nt, Artificial Sequence
  Description of Artificial Sequence: Synthetic oligonucleotide
  Antisense strand to SEQ ID NO: 99738
auuaguaauccaugcauac

SEQ ID NO: 99740 - RNA, 19 nt, Artificial Sequence
  Description of Artificial Sequence: Synthetic oligonucleotide
  Sense strand starting at position 2813 of SEQ ID NO: 1258
augcauggauuacuaauaa

SEQ ID NO: 99741 - RNA, 19 nt, Artificial Sequence
  Description of Artificial Sequence: Synthetic oligonucleotide
  Antisense strand to SEQ ID NO: 99740
uuauuaguaauccaugcau

SEQ ID NO: 99742 - RNA, 19 nt, Artificial Sequence
  Description of Artificial Sequence: Synthetic oligonucleotide
  Sense strand starting at position 2913 of SEQ ID NO: 1258
aggauauaauuggcacagu

SEQ ID NO: 99743 - RNA, 19 nt, Artificial Sequence
  Description of Artificial Sequence: Synthetic oligonucleotide
  Antisense strand to SEQ ID NO: 99742
acugugccaauuauauccu

SEQ ID NO: 99744 - RNA, 19 nt, Artificial Sequence
  Description of Artificial Sequence: Synthetic oligonucleotide
  Sense strand starting at position 2916 of SEQ ID NO: 1258
auauaauuggcacagucaa

SEQ ID NO: 99745 - RNA, 19 nt, Artificial Sequence
  Description of Artificial Sequence: Synthetic oligonucleotide
  Antisense strand to SEQ ID NO: 99744
uugacugugccaauuauau

SEQ ID NO: 99746 - RNA, 19 nt, Artificial Sequence
  Description of Artificial Sequence: Synthetic oligonucleotide
  Sense strand starting at position 2999 of SEQ ID NO: 1258
acgcuaucuccuuacuuga

SEQ ID NO: 99747 - RNA, 19 nt, Artificial Sequence
  Description of Artificial Sequence: Synthetic oligonucleotide
  Antisense strand to SEQ ID NO: 99746
ucaaguaaggagauagcgu

SEQ ID NO: 99748 - RNA, 19 nt, Artificial Sequence
  Description of Artificial Sequence: Synthetic oligonucleotide
  Sense strand starting at position 3007 of SEQ ID NO: 1258
uccuuacuugaugguaaga

SEQ ID NO: 99749 - RNA, 19 nt, Artificial Sequence
  Description of Artificial Sequence: Synthetic oligonucleotide
  Antisense strand to SEQ ID NO: 99748
ucuuaccaucaaguaagga

SEQ ID NO: 99750 - RNA, 19 nt, Artificial Sequence
  Description of Artificial Sequence: Synthetic oligonucleotide
  Sense strand starting at position 3017 of SEQ ID NO: 1258
augguaagaguuugaaaug

SEQ ID NO: 99751 - RNA, 19 nt, Artificial Sequence
  Description of Artificial Sequence: Synthetic oligonucleotide
  Antisense strand to SEQ ID NO: 99750
cauuucaaacucuuaccau

SEQ ID NO: 99752 - RNA, 19 nt, Artificial Sequence
  Description of Artificial Sequence: Synthetic oligonucleotide
  Sense strand starting at position 3078 of SEQ ID NO: 1258
gucauaaaugauggcacuu

SEQ ID NO: 99753 - RNA, 19 nt, Artificial Sequence
  Description of Artificial Sequence: Synthetic oligonucleotide
  Antisense strand to SEQ ID NO: 99752
aagugccaucauuuaugac

SEQ ID NO: 99754 - RNA, 19 nt, Artificial Sequence
  Description of Artificial Sequence: Synthetic oligonucleotide
  Sense strand starting at position 3118 of SEQ ID NO: 1258
aguuauaaggaccggugaa

SEQ ID NO: 99755 - RNA, 19 nt, Artificial Sequence
  Description of Artificial Sequence: Synthetic oligonucleotide
  Antisense strand to SEQ ID NO: 99754
uucaccgguccuuauaacu

SEQ ID NO: 99756 - RNA, 19 nt, Artificial Sequence
  Description of Artificial Sequence: Synthetic oligonucleotide
  Sense strand starting at position 3119 of SEQ ID NO: 1258
guuauaaggaccggugaau

SEQ ID NO: 99757 - RNA, 19 nt, Artificial Sequence
  Description of Artificial Sequence: Synthetic oligonucleotide
  Antisense strand to SEQ ID NO: 99756
auucaccgguccuuauaac

SEQ ID NO: 99758 - RNA, 19 nt, Artificial Sequence
  Description of Artificial Sequence: Synthetic oligonucleotide
  Sense strand starting at position 3194 of SEQ ID NO: 1258
acuuauuggucucuaggga

SEQ ID NO: 99759 - RNA, 19 nt, Artificial Sequence
  Description of Artificial Sequence: Synthetic oligonucleotide
  Antisense strand to SEQ ID NO: 99758
ucccuagagaccaauaagu

SEQ ID NO: 99760 - RNA, 19 nt, Artificial Sequence
  Description of Artificial Sequence: Synthetic oligonucleotide
  Sense strand starting at position 3500 of SEQ ID NO: 1258
agguaaaguuuguuuauac

SEQ ID NO: 99761 - RNA, 19 nt, Artificial Sequence
  Description of Artificial Sequence: Synthetic oligonucleotide
  Antisense strand to SEQ ID NO: 99760
guauaaacaaacuuuaccu

SEQ ID NO: 99762 - RNA, 19 nt, Artificial Sequence
  Description of Artificial Sequence: Synthetic oligonucleotide
  Sense strand starting at position 3575 of SEQ ID NO: 1258
gcagcaagaccugauaggu

SEQ ID NO: 99763 - RNA, 19 nt, Artificial Sequence
  Description of Artificial Sequence: Synthetic oligonucleotide
  Antisense strand to SEQ ID NO: 99762
accuaucaggucuugcugc

SEQ ID NO: 99764 - RNA, 19 nt, Artificial Sequence
  Description of Artificial Sequence: Synthetic oligonucleotide
  Sense strand starting at position 3814 of SEQ ID NO: 1258
cuauaugaggcauauguga

SEQ ID NO: 99765 - RNA, 19 nt, Artificial Sequence
  Description of Artificial Sequence: Synthetic oligonucleotide
  Antisense strand to SEQ ID NO: 99764
ucacauaugccucauauag

SEQ ID NO: 99766 - RNA, 19 nt, Artificial Sequence
  Description of Artificial Sequence: Synthetic oligonucleotide
  Sense strand starting at position 3816 of SEQ ID NO: 1258
auaugaggcauaugugaug

SEQ ID NO: 99767 - RNA, 19 nt, Artificial Sequence
  Description of Artificial Sequence: Synthetic oligonucleotide
  Antisense strand to SEQ ID NO: 99766
caucacauaugccucauau

SEQ ID NO: 99768 - RNA, 19 nt, Artificial Sequence
  Description of Artificial Sequence: Synthetic oligonucleotide
  Sense strand starting at position 3827 of SEQ ID NO: 1258
augugaugugcuuauaaau

SEQ ID NO: 99769 - RNA, 19 nt, Artificial Sequence
  Description of Artificial Sequence: Synthetic oligonucleotide
  Antisense strand to SEQ ID NO: 99768
auuuauaagcacaucacau

SEQ ID NO: 99770 - RNA, 19 nt, Artificial Sequence
  Description of Artificial Sequence: Synthetic oligonucleotide
  Sense strand starting at position 3851 of SEQ ID NO: 1259
gugugagaucaacagguau

SEQ ID NO: 99771 - RNA, 19 nt, Artificial Sequence
  Description of Artificial Sequence: Synthetic oligonucleotide
  Antisense strand to SEQ ID NO: 99770
auaccuguugaucucacac

SEQ ID NO: 99772 - RNA, 19 nt, Artificial Sequence
  Description of Artificial Sequence: Synthetic oligonucleotide
  Sense strand starting at position 3845 of SEQ ID NO: 1259
caguuugugugagaucaac

SEQ ID NO: 99773 - RNA, 19 nt, Artificial Sequence
  Description of Artificial Sequence: Synthetic oligonucleotide
  Antisense strand to SEQ ID NO: 99772
guugaucucacacaaacug

SEQ ID NO: 99774 - RNA, 19 nt, Artificial Sequence
  Description of Artificial Sequence: Synthetic oligonucleotide
  Sense strand starting at position 3810 of SEQ ID NO: 1259
ccuggagccuuggaauaug

SEQ ID NO: 99775 - RNA, 19 nt, Artificial Sequence
  Description of Artificial Sequence: Synthetic oligonucleotide
  Antisense strand to SEQ ID NO: 99774
cauauuccaaggcuccagg

SEQ ID NO: 99776 - RNA, 19 nt, Artificial Sequence
  Description of Artificial Sequence: Synthetic oligonucleotide
  Sense strand starting at position 3788 of SEQ ID NO: 1259
uuuggauccuuuccuaaug

SEQ ID NO: 99777 - RNA, 19 nt, Artificial Sequence
  Description of Artificial Sequence: Synthetic oligonucleotide
  Antisense strand to SEQ ID NO: 99776
cauuaggaaaggauccaaa

SEQ ID NO: 99778 - RNA, 19 nt, Artificial Sequence
  Description of Artificial Sequence: Synthetic oligonucleotide
  Sense strand starting at position 3772 of SEQ ID NO: 1259
aauagcaucugguuaguuu

SEQ ID NO: 99779 - RNA, 19 nt, Artificial Sequence
  Description of Artificial Sequence: Synthetic oligonucleotide
  Antisense strand to SEQ ID NO: 99778
aaacuaaccagaugcuauu

SEQ ID NO: 99780 - RNA, 19 nt, Artificial Sequence
  Description of Artificial Sequence: Synthetic oligonucleotide
  Sense strand starting at position 3770 of SEQ ID NO: 1259
uaaauagcaucugguuagu

SEQ ID NO: 99781 - RNA, 19 nt, Artificial Sequence
  Description of Artificial Sequence: Synthetic oligonucleotide
  Antisense strand to SEQ ID NO: 99780
acuaaccagaugcuauuua

SEQ ID NO: 99782 - RNA, 19 nt, Artificial Sequence
  Description of Artificial Sequence: Synthetic oligonucleotide
  Sense strand starting at position 3350 of SEQ ID NO: 1259
gcuccaucucaguguucuu

SEQ ID NO: 99783 - RNA, 19 nt, Artificial Sequence
  Description of Artificial Sequence: Synthetic oligonucleotide
  Antisense strand to SEQ ID NO: 99782
aagaacacugagauggagc

SEQ ID NO: 99784 - RNA, 19 nt, Artificial Sequence
  Description of Artificial Sequence: Synthetic oligonucleotide
  Sense strand starting at position 3334 of SEQ ID NO: 1259
uguguaacccaagaaagcu

SEQ ID NO: 99785 - RNA, 19 nt, Artificial Sequence
  Description of Artificial Sequence: Synthetic oligonucleotide
  Antisense strand to SEQ ID NO: 99784
agcuuucuuggguuacaca

SEQ ID NO: 99786 - RNA, 19 nt, Artificial Sequence
  Description of Artificial Sequence: Synthetic oligonucleotide
  Sense strand starting at position 3331 of SEQ ID NO: 1259
ggcuguguaacccaagaaa

SEQ ID NO: 99787 - RNA, 19 nt, Artificial Sequence
  Description of Artificial Sequence: Synthetic oligonucleotide
  Antisense strand to SEQ ID NO: 99786
uuucuuggguuacacagcc

SEQ ID NO: 99788 - RNA, 19 nt, Artificial Sequence
  Description of Artificial Sequence: Synthetic oligonucleotide
  Sense strand starting at position 3302 of SEQ ID NO: 1259
gcucuucuauauuaggaaa

SEQ ID NO: 99789 - RNA, 19 nt, Artificial Sequence
  Description of Artificial Sequence: Synthetic oligonucleotide
  Antisense strand to SEQ ID NO: 99788
uuuccuaauauagaagagc

SEQ ID NO: 99790 - RNA, 19 nt, Artificial Sequence
  Description of Artificial Sequence: Synthetic oligonucleotide
  Sense strand starting at position 3295 of SEQ ID NO: 1259
guugaaagcucuucuauau

SEQ ID NO: 99791 - RNA, 19 nt, Artificial Sequence
  Description of Artificial Sequence: Synthetic oligonucleotide
  Antisense strand to SEQ ID NO: 99790
auauagaagagcuuucaac

SEQ ID NO: 99792 - RNA, 19 nt, Artificial Sequence
  Description of Artificial Sequence: Synthetic oligonucleotide
  Sense strand starting at position 3284 of SEQ ID NO: 1259
cugagagguuuguugaaag

SEQ ID NO: 99793 - RNA, 19 nt, Artificial Sequence
  Description of Artificial Sequence: Synthetic oligonucleotide
  Antisense strand to SEQ ID NO: 99792
cuuucaacaaaccucucag

SEQ ID NO: 99794 - RNA, 19 nt, Artificial Sequence
  Description of Artificial Sequence: Synthetic oligonucleotide
  Sense strand starting at position 3282 of SEQ ID NO: 1259
gccugagagguuuguugaa

SEQ ID NO: 99795 - RNA, 19 nt, Artificial Sequence
  Description of Artificial Sequence: Synthetic oligonucleotide
  Antisense strand to SEQ ID NO: 99794
uucaacaaaccucucaggc

SEQ ID NO: 99796 - RNA, 19 nt, Artificial Sequence
  Description of Artificial Sequence: Synthetic oligonucleotide
  Sense strand starting at position 3057 of SEQ ID NO: 1259
gagggaaaggguugagcau

SEQ ID NO: 99797 - RNA, 19 nt, Artificial Sequence
  Description of Artificial Sequence: Synthetic oligonucleotide
  Antisense strand to SEQ ID NO: 99796
augcucaacccuuucccuc

SEQ ID NO: 99798 - RNA, 19 nt, Artificial Sequence
  Description of Artificial Sequence: Synthetic oligonucleotide
  Sense strand starting at position 2699 of SEQ ID NO: 1259
gaaauaguugaaggcucaa

SEQ ID NO: 99799 - RNA, 19 nt, Artificial Sequence
  Description of Artificial Sequence: Synthetic oligonucleotide
  Antisense strand to SEQ ID NO: 99798
uugagccuucaacuauuuc

SEQ ID NO: 99800 - RNA, 19 nt, Artificial Sequence
  Description of Artificial Sequence: Synthetic oligonucleotide
  Sense strand starting at position 2240 of SEQ ID NO: 1259
gagcuaaggucauaaucac

SEQ ID NO: 99801 - RNA, 19 nt, Artificial Sequence
  Description of Artificial Sequence: Synthetic oligonucleotide
  Antisense strand to SEQ ID NO: 99800
gugauuaugaccuuagcuc

SEQ ID NO: 99802 - RNA, 19 nt, Artificial Sequence
  Description of Artificial Sequence: Synthetic oligonucleotide
  Sense strand starting at position 2205 of SEQ ID NO: 1259
cguguauuaggagaucaga

SEQ ID NO: 99803 - RNA, 19 nt, Artificial Sequence
  Description of Artificial Sequence: Synthetic oligonucleotide
  Antisense strand to SEQ ID NO: 99802
ucugaucuccuaauacacg

SEQ ID NO: 99804 - RNA, 19 nt, Artificial Sequence
  Description of Artificial Sequence: Synthetic oligonucleotide
  Sense strand starting at position 2202 of SEQ ID NO: 1259
agacguguauuaggagauc

SEQ ID NO: 99805 - RNA, 19 nt, Artificial Sequence
  Description of Artificial Sequence: Synthetic oligonucleotide
  Antisense strand to SEQ ID NO: 99804
gaucuccuaauacacgucu

SEQ ID NO: 99806 - RNA, 19 nt, Artificial Sequence
  Description of Artificial Sequence: Synthetic oligonucleotide
  Sense strand starting at position 2189 of SEQ ID NO: 1259
uugugauauuuacagacgu

SEQ ID NO: 99807 - RNA, 19 nt, Artificial Sequence
  Description of Artificial Sequence: Synthetic oligonucleotide
  Antisense strand to SEQ ID NO: 99806
acgucuguaaauaucacaa

SEQ ID NO: 99808 - RNA, 19 nt, Artificial Sequence
  Description of Artificial Sequence: Synthetic oligonucleotide
  Sense strand starting at position 2183 of SEQ ID NO: 1259
agggucuugugauauuuac

SEQ ID NO: 99809 - RNA, 19 nt, Artificial Sequence
  Description of Artificial Sequence: Synthetic oligonucleotide
  Antisense strand to SEQ ID NO: 99808
guaaauaucacaagacccu

SEQ ID NO: 99810 - RNA, 19 nt, Artificial Sequence
  Description of Artificial Sequence: Synthetic oligonucleotide
  Sense strand starting at position 2162 of SEQ ID NO: 1259
gauaauaagugagggacuu

SEQ ID NO: 99811 - RNA, 19 nt, Artificial Sequence
  Description of Artificial Sequence: Synthetic oligonucleotide
  Antisense strand to SEQ ID NO: 99810
aagucccucacuuauuauc

SEQ ID NO: 99812 - RNA, 19 nt, Artificial Sequence
  Description of Artificial Sequence: Synthetic oligonucleotide
  Sense strand starting at position 2145 of SEQ ID NO: 1259
gucgucagauuugaagaga

SEQ ID NO: 99813 - RNA, 19 nt, Artificial Sequence
  Description of Artificial Sequence: Synthetic oligonucleotide
  Antisense strand to SEQ ID NO: 99812
ucucuucaaaucugacgac

SEQ ID NO: 99814 - RNA, 19 nt, Artificial Sequence
  Description of Artificial Sequence: Synthetic oligonucleotide
  Sense strand starting at position 2137 of SEQ ID NO: 1259
gguugaaagucgucagauu

SEQ ID NO: 99815 - RNA, 19 nt, Artificial Sequence
  Description of Artificial Sequence: Synthetic oligonucleotide
  Antisense strand to SEQ ID NO: 99814
aaucugacgacuuucaacc

SEQ ID NO: 99816 - RNA, 19 nt, Artificial Sequence
  Description of Artificial Sequence: Synthetic oligonucleotide
  Sense strand starting at position 2135 of SEQ ID NO: 1259
acgguugaaagucgucaga

SEQ ID NO: 99817 - RNA, 19 nt, Artificial Sequence
  Description of Artificial Sequence: Synthetic oligonucleotide
  Antisense strand to SEQ ID NO: 99816
ucugacgacuuucaaccgu

SEQ ID NO: 99818 - RNA, 19 nt, Artificial Sequence
  Description of Artificial Sequence: Synthetic oligonucleotide
  Sense strand starting at position 2082 of SEQ ID NO: 1259
agcucacuaccauagagua

SEQ ID NO: 99819 - RNA, 19 nt, Artificial Sequence
  Description of Artificial Sequence: Synthetic oligonucleotide
  Antisense strand to SEQ ID NO: 99818
uacucuaugguagugagcu

SEQ ID NO: 99820 - RNA, 19 nt, Artificial Sequence
  Description of Artificial Sequence: Synthetic oligonucleotide
  Sense strand starting at position 2077 of SEQ ID NO: 1259
ggcugagcucacuaccaua

SEQ ID NO: 99821 - RNA, 19 nt, Artificial Sequence
  Description of Artificial Sequence: Synthetic oligonucleotide
  Antisense strand to SEQ ID NO: 99820
uaugguagugagcucagcc

SEQ ID NO: 99822 - RNA, 19 nt, Artificial Sequence
  Description of Artificial Sequence: Synthetic oligonucleotide
  Sense strand starting at position 1625 of SEQ ID NO: 1259
ucaccuguuggccaaaguu

SEQ ID NO: 99823 - RNA, 19 nt, Artificial Sequence
  Description of Artificial Sequence: Synthetic oligonucleotide
  Antisense strand to SEQ ID NO: 99822
aacuuuggccaacagguga

SEQ ID NO: 99824 - RNA, 19 nt, Artificial Sequence
  Description of Artificial Sequence: Synthetic oligonucleotide
  Sense strand starting at position 1575 of SEQ ID NO: 1259
aaauguuguguccaguuaa

SEQ ID NO: 99825 - RNA, 19 nt, Artificial Sequence
  Description of Artificial Sequence: Synthetic oligonucleotide
  Antisense strand to SEQ ID NO: 99824
uuaacuggacacaacauuu

SEQ ID NO: 99826 - RNA, 19 nt, Artificial Sequence
  Description of Artificial Sequence: Synthetic oligonucleotide
  Sense strand starting at position 1572 of SEQ ID NO: 1259
cucaaauguuguguccagu

SEQ ID NO: 99827 - RNA, 19 nt, Artificial Sequence
  Description of Artificial Sequence: Synthetic oligonucleotide
  Antisense strand to SEQ ID NO: 99826
acuggacacaacauuugag

SEQ ID NO: 99828 - RNA, 19 nt, Artificial Sequence
  Description of Artificial Sequence: Synthetic oligonucleotide
  Sense strand starting at position 1505 of SEQ ID NO: 1259
acacgucaaugucauucua

SEQ ID NO: 99829 - RNA, 19 nt, Artificial Sequence
  Description of Artificial Sequence: Synthetic oligonucleotide
  Antisense strand to SEQ ID NO: 99828
uagaaugacauugacgugu

SEQ ID NO: 99830 - RNA, 19 nt, Artificial Sequence
  Description of Artificial Sequence: Synthetic oligonucleotide
  Sense strand starting at position 1502 of SEQ ID NO: 1259
aagacacgucaaugucauu

SEQ ID NO: 99831 - RNA, 19 nt, Artificial Sequence
  Description of Artificial Sequence: Synthetic oligonucleotide
  Antisense strand to SEQ ID NO: 99830
aaugacauugacgugucuu

SEQ ID NO: 99832 - RNA, 19 nt, Artificial Sequence
  Description of Artificial Sequence: Synthetic oligonucleotide
  Sense strand starting at position 1078 of SEQ ID NO: 1259
cgauacugucuguagguuu

SEQ ID NO: 99833 - RNA, 19 nt, Artificial Sequence
  Description of Artificial Sequence: Synthetic oligonucleotide
  Antisense strand to SEQ ID NO: 99832
aaaccuacagacaguaucg

SEQ ID NO: 99834 - RNA, 19 nt, Artificial Sequence
  Description of Artificial Sequence: Synthetic oligonucleotide
  Sense strand starting at position 1077 of SEQ ID NO: 1259
ucgauacugucuguagguu

SEQ ID NO: 99835 - RNA, 19 nt, Artificial Sequence
  Description of Artificial Sequence: Synthetic oligonucleotide
  Antisense strand to SEQ ID NO: 99834
aaccuacagacaguaucga

SEQ ID NO: 99836 - RNA, 19 nt, Artificial Sequence
  Description of Artificial Sequence: Synthetic oligonucleotide
  Sense strand starting at position 589 of SEQ ID NO: 1259
ccaaguaucuuugacagau

SEQ ID NO: 99837 - RNA, 19 nt, Artificial Sequence
  Description of Artificial Sequence: Synthetic oligonucleotide
  Antisense strand to SEQ ID NO: 99836
aucugucaaagauacuugg

SEQ ID NO: 99838 - RNA, 19 nt, Artificial Sequence
  Description of Artificial Sequence: Synthetic oligonucleotide
  Sense strand starting at position 418 of SEQ ID NO: 1259
gucgaacuccgagacucaa

SEQ ID NO: 99839 - RNA, 19 nt, Artificial Sequence
  Description of Artificial Sequence: Synthetic oligonucleotide
  Antisense strand to SEQ ID NO: 99838
uugagucucggaguucgac

SEQ ID NO: 99840 - RNA, 19 nt, Artificial Sequence
  Description of Artificial Sequence: Synthetic oligonucleotide
  Sense strand starting at position 346 of SEQ ID NO: 1259
ggaagcucgcucuaugaca

SEQ ID NO: 99841 - RNA, 19 nt, Artificial Sequence
  Description of Artificial Sequence: Synthetic oligonucleotide
  Antisense strand to SEQ ID NO: 99840
ugucauagagcgagcuucc

SEQ ID NO: 99842 - RNA, 19 nt, Artificial Sequence
  Description of Artificial Sequence: Synthetic oligonucleotide
  Sense strand starting at position 237 of SEQ ID NO: 1259
cgcgcugucgccuaagcua

SEQ ID NO: 99843 - RNA, 19 nt, Artificial Sequence
  Description of Artificial Sequence: Synthetic oligonucleotide
  Antisense strand to SEQ ID NO: 99842
uagcuuaggcgacagcgcg

SEQ ID NO: 99844 - RNA, 19 nt, Artificial Sequence
  Description of Artificial Sequence: Synthetic oligonucleotide
  Sense strand starting at position 112 of SEQ ID NO: 1259
gcaggaggaucccuagagu

SEQ ID NO: 99845 - RNA, 19 nt, Artificial Sequence
  Description of Artificial Sequence: Synthetic oligonucleotide
  Antisense strand to SEQ ID NO: 99844
acucuagggauccuccugc

SEQ ID NO: 99846 - RNA, 19 nt, Artificial Sequence
  Description of Artificial Sequence: Synthetic oligonucleotide
  Sense strand starting at position 31 of SEQ ID NO: 1259
uaacgauuguuauagaauc

SEQ ID NO: 99847 - RNA, 19 nt, Artificial Sequence
  Description of Artificial Sequence: Synthetic oligonucleotide
  Antisense strand to SEQ ID NO: 99846
gauucuauaacaaucguua

SEQ ID NO: 99848 - RNA, 19 nt, Artificial Sequence
  Description of Artificial Sequence: Synthetic oligonucleotide
  Sense strand starting at position 28 of SEQ ID NO: 1259
gauuaacgauuguuauaga

SEQ ID NO: 99849 - RNA, 19 nt, Artificial Sequence
  Description of Artificial Sequence: Synthetic oligonucleotide
  Antisense strand to SEQ ID NO: 99848
ucuauaacaaucguuaauc

SEQ ID NO: 99850 - RNA, 19 nt, Artificial Sequence
  Description of Artificial Sequence: Synthetic oligonucleotide
  Sense strand starting at position 399 of SEQ ID NO: 1260
ggcccaacuuucgcuauuu

SEQ ID NO: 99851 - RNA, 19 nt, Artificial Sequence
  Description of Artificial Sequence: Synthetic oligonucleotide
  Antisense strand to SEQ ID NO: 99850
aaauagcgaaaguugggcc

SEQ ID NO: 99852 - RNA, 19 nt, Artificial Sequence
  Description of Artificial Sequence: Synthetic oligonucleotide
  Sense strand starting at position 423 of SEQ ID NO: 1260
augugagccuugucuaaga

SEQ ID NO: 99853 - RNA, 19 nt, Artificial Sequence
  Description of Artificial Sequence: Synthetic oligonucleotide
  Antisense strand to SEQ ID NO: 99852
ucuuagacaaggcucacau

SEQ ID NO: 99854 - RNA, 19 nt, Artificial Sequence
  Description of Artificial Sequence: Synthetic oligonucleotide
  Sense strand starting at position 425 of SEQ ID NO: 1260
gugagccuugucuaagauu

SEQ ID NO: 99855 - RNA, 19 nt, Artificial Sequence
  Description of Artificial Sequence: Synthetic oligonucleotide
  Antisense strand to SEQ ID NO: 99854
aaucuuagacaaggcucac

SEQ ID NO: 99856 - RNA, 19 nt, Artificial Sequence
  Description of Artificial Sequence: Synthetic oligonucleotide
  Sense strand starting at position 434 of SEQ ID NO: 1260
gucuaagauuauucgguga

SEQ ID NO: 99857 - RNA, 19 nt, Artificial Sequence
  Description of Artificial Sequence: Synthetic oligonucleotide
  Antisense strand to SEQ ID NO: 99856
ucaccgaauaaucuuagac

SEQ ID NO: 99858 - RNA, 19 nt, Artificial Sequence
  Description of Artificial Sequence: Synthetic oligonucleotide
  Sense strand starting at position 438 of SEQ ID NO: 1260
aagauuauucggugaggca

SEQ ID NO: 99859 - RNA, 19 nt, Artificial Sequence
  Description of Artificial Sequence: Synthetic oligonucleotide
  Antisense strand to SEQ ID NO: 99858
ugccucaccgaauaaucuu

SEQ ID NO: 99860 - RNA, 19 nt, Artificial Sequence
  Description of Artificial Sequence: Synthetic oligonucleotide
  Sense strand starting at position 439 of SEQ ID NO: 1260
agauuauucggugaggcag

SEQ ID NO: 99861 - RNA, 19 nt, Artificial Sequence
  Description of Artificial Sequence: Synthetic oligonucleotide
  Antisense strand to SEQ ID NO: 99860
cugccucaccgaauaaucu

SEQ ID NO: 99862 - RNA, 19 nt, Artificial Sequence
  Description of Artificial Sequence: Synthetic oligonucleotide
  Sense strand starting at position 634 of SEQ ID NO: 1260
cgaauaauauugccauaca

SEQ ID NO: 99863 - RNA, 19 nt, Artificial Sequence
  Description of Artificial Sequence: Synthetic oligonucleotide
  Antisense strand to SEQ ID NO: 99862
uguauggcaauauuauucg

SEQ ID NO: 99864 - RNA, 19 nt, Artificial Sequence
  Description of Artificial Sequence: Synthetic oligonucleotide
  Sense strand starting at position 646 of SEQ ID NO: 1260
ccauacaucugagugucuu

SEQ ID NO: 99865 - RNA, 19 nt, Artificial Sequence
  Description of Artificial Sequence: Synthetic oligonucleotide
  Antisense strand to SEQ ID NO: 99864
aagacacucagauguaugg

SEQ ID NO: 99866 - RNA, 19 nt, Artificial Sequence
  Description of Artificial Sequence: Synthetic oligonucleotide
  Sense strand starting at position 665 of SEQ ID NO: 1260
ccagguagcuucccucaaa

SEQ ID NO: 99867 - RNA, 19 nt, Artificial Sequence
  Description of Artificial Sequence: Synthetic oligonucleotide
  Antisense strand to SEQ ID NO: 99866
uuugagggaagcuaccugg

SEQ ID NO: 99868 - RNA, 19 nt, Artificial Sequence
  Description of Artificial Sequence: Synthetic oligonucleotide
  Sense strand starting at position 698 of SEQ ID NO: 1260
gcuccaaauuugccaaugu

SEQ ID NO: 99869 - RNA, 19 nt, Artificial Sequence
  Description of Artificial Sequence: Synthetic oligonucleotide
  Antisense strand to SEQ ID NO: 99868
acauuggcaaauuuggagc

SEQ ID NO: 99870 - RNA, 19 nt, Artificial Sequence
  Description of Artificial Sequence: Synthetic oligonucleotide
  Sense strand starting at position 707 of SEQ ID NO: 1260
uugccaauguuuccugaga

SEQ ID NO: 99871 - RNA, 19 nt, Artificial Sequence
  Description of Artificial Sequence: Synthetic oligonucleotide
  Antisense strand to SEQ ID NO: 99870
ucucaggaaacauuggcaa

SEQ ID NO: 99872 - RNA, 19 nt, Artificial Sequence
  Description of Artificial Sequence: Synthetic oligonucleotide
  Sense strand starting at position 708 of SEQ ID NO: 1260
ugccaauguuuccugagag

SEQ ID NO: 99873 - RNA, 19 nt, Artificial Sequence
  Description of Artificial Sequence: Synthetic oligonucleotide
  Antisense strand to SEQ ID NO: 99872
cucucaggaaacauuggca

SEQ ID NO: 99874 - RNA, 19 nt, Artificial Sequence
  Description of Artificial Sequence: Synthetic oligonucleotide
  Sense strand starting at position 864 of SEQ ID NO: 1260
ggaggagccguuuaggacu

SEQ ID NO: 99875 - RNA, 19 nt, Artificial Sequence
  Description of Artificial Sequence: Synthetic oligonucleotide
  Antisense strand to SEQ ID NO: 99874
aguccuaaacggcuccucc

SEQ ID NO: 99876 - RNA, 19 nt, Artificial Sequence
  Description of Artificial Sequence: Synthetic oligonucleotide
  Sense strand starting at position 870 of SEQ ID NO: 1260
gccguuuaggacuaagaca

SEQ ID NO: 99877 - RNA, 19 nt, Artificial Sequence
  Description of Artificial Sequence: Synthetic oligonucleotide
  Antisense strand to SEQ ID NO: 99876
ugucuuaguccuaaacggc

SEQ ID NO: 99878 - RNA, 19 nt, Artificial Sequence
  Description of Artificial Sequence: Synthetic oligonucleotide
  Sense strand starting at position 1277 of SEQ ID NO: 1260
uucugaauucuccggaaug

SEQ ID NO: 99879 - RNA, 19 nt, Artificial Sequence
  Description of Artificial Sequence: Synthetic oligonucleotide
  Antisense strand to SEQ ID NO: 99878
cauuccggagaauucagaa

SEQ ID NO: 99880 - RNA, 19 nt, Artificial Sequence
  Description of Artificial Sequence: Synthetic oligonucleotide
  Sense strand starting at position 1279 of SEQ ID NO: 1260
cugaauucuccggaaugug

SEQ ID NO: 99881 - RNA, 19 nt, Artificial Sequence
  Description of Artificial Sequence: Synthetic oligonucleotide
  Antisense strand to SEQ ID NO: 99880
cacauuccggagaauucag

SEQ ID NO: 99882 - RNA, 19 nt, Artificial Sequence
  Description of Artificial Sequence: Synthetic oligonucleotide
  Sense strand starting at position 2082 of SEQ ID NO: 1260
cucggagagcucuagagau

SEQ ID NO: 99883 - RNA, 19 nt, Artificial Sequence
  Description of Artificial Sequence: Synthetic oligonucleotide
  Antisense strand to SEQ ID NO: 99882
aucucuagagcucuccgag

SEQ ID NO: 99884 - RNA, 19 nt, Artificial Sequence
  Description of Artificial Sequence: Synthetic oligonucleotide
  Sense strand starting at position 2347 of SEQ ID NO: 1260
ggaagagcucgcgaaucca

SEQ ID NO: 99885 - RNA, 19 nt, Artificial Sequence
  Description of Artificial Sequence: Synthetic oligonucleotide
  Antisense strand to SEQ ID NO: 99884
uggauucgcgagcucuucc

SEQ ID NO: 99886 - RNA, 19 nt, Artificial Sequence
  Description of Artificial Sequence: Synthetic oligonucleotide
  Sense strand starting at position 2487 of SEQ ID NO: 1260
gugccaggaucuuccagaa

SEQ ID NO: 99887 - RNA, 19 nt, Artificial Sequence
  Description of Artificial Sequence: Synthetic oligonucleotide
  Antisense strand to SEQ ID NO: 99886
uucuggaagauccuggcac

SEQ ID NO: 99888 - RNA, 19 nt, Artificial Sequence
  Description of Artificial Sequence: Synthetic oligonucleotide
  Sense strand starting at position 2556 of SEQ ID NO: 1260
cccagugcccuuuggagaa

SEQ ID NO: 99889 - RNA, 19 nt, Artificial Sequence
  Description of Artificial Sequence: Synthetic oligonucleotide
  Antisense strand to SEQ ID NO: 99888
uucuccaaagggcacuggg

SEQ ID NO: 99890 - RNA, 19 nt, Artificial Sequence
  Description of Artificial Sequence: Synthetic oligonucleotide
  Sense strand starting at position 2560 of SEQ ID NO: 1260
gugcccuuuggagaaacaa

SEQ ID NO: 99891 - RNA, 19 nt, Artificial Sequence
  Description of Artificial Sequence: Synthetic oligonucleotide
  Antisense strand to SEQ ID NO: 99890
uuguuucuccaaagggcac

SEQ ID NO: 99892 - RNA, 19 nt, Artificial Sequence
  Description of Artificial Sequence: Synthetic oligonucleotide
  Sense strand starting at position 2568 of SEQ ID NO: 1260
uggagaaacaaguaugugu

SEQ ID NO: 99893 - RNA, 19 nt, Artificial Sequence
  Description of Artificial Sequence: Synthetic oligonucleotide
  Antisense strand to SEQ ID NO: 99892
acacauacuuguuucucca

SEQ ID NO: 99894 - RNA, 19 nt, Artificial Sequence
  Description of Artificial Sequence: Synthetic oligonucleotide
  Sense strand starting at position 2632 of SEQ ID NO: 1260
auccuaucgcuacaucgau

SEQ ID NO: 99895 - RNA, 19 nt, Artificial Sequence
  Description of Artificial Sequence: Synthetic oligonucleotide
  Antisense strand to SEQ ID NO: 99894
aucgauguagcgauaggau

SEQ ID NO: 99896 - RNA, 19 nt, Artificial Sequence
  Description of Artificial Sequence: Synthetic oligonucleotide
  Sense strand starting at position 2638 of SEQ ID NO: 1260
ucgcuacaucgauaaagug

SEQ ID NO: 99897 - RNA, 19 nt, Artificial Sequence
  Description of Artificial Sequence: Synthetic oligonucleotide
  Antisense strand to SEQ ID NO: 99896
cacuuuaucgauguagcga

SEQ ID NO: 99898 - RNA, 19 nt, Artificial Sequence
  Description of Artificial Sequence: Synthetic oligonucleotide
  Sense strand starting at position 2657 of SEQ ID NO: 1260
ugcuccuuugggcaaauaa

SEQ ID NO: 99899 - RNA, 19 nt, Artificial Sequence
  Description of Artificial Sequence: Synthetic oligonucleotide
  Antisense strand to SEQ ID NO: 99898
uuauuugcccaaaggagca

SEQ ID NO: 99900 - RNA, 19 nt, Artificial Sequence
  Description of Artificial Sequence: Synthetic oligonucleotide
  Sense strand starting at position 2736 of SEQ ID NO: 1260
ugcugugaggaguaaauca

SEQ ID NO: 99901 - RNA, 19 nt, Artificial Sequence
  Description of Artificial Sequence: Synthetic oligonucleotide
  Antisense strand to SEQ ID NO: 99900
ugauuuacuccucacagca

SEQ ID NO: 99902 - RNA, 19 nt, Artificial Sequence
  Description of Artificial Sequence: Synthetic oligonucleotide
  Sense strand starting at position 2795 of SEQ ID NO: 1260
gcaaguacgaguucgcuuu

SEQ ID NO: 99903 - RNA, 19 nt, Artificial Sequence
  Description of Artificial Sequence: Synthetic oligonucleotide
  Antisense strand to SEQ ID NO: 99902
aaagcgaacucguacuugc

SEQ ID NO: 99904 - RNA, 19 nt, Artificial Sequence
  Description of Artificial Sequence: Synthetic oligonucleotide
  Sense strand starting at position 2858 of SEQ ID NO: 1260
guggauuucuccguccuca

SEQ ID NO: 99905 - RNA, 19 nt, Artificial Sequence
  Description of Artificial Sequence: Synthetic oligonucleotide
  Antisense strand to SEQ ID NO: 99904
ugaggacggagaaauccac

SEQ ID NO: 99906 - RNA, 19 nt, Artificial Sequence
  Description of Artificial Sequence: Synthetic oligonucleotide
  Sense strand starting at position 2911 of SEQ ID NO: 1260
ucauaagucuaagugggau

SEQ ID NO: 99907 - RNA, 19 nt, Artificial Sequence
  Description of Artificial Sequence: Synthetic oligonucleotide
  Antisense strand to SEQ ID NO: 99906
aucccacuuagacuuauga

SEQ ID NO: 99908 - RNA, 19 nt, Artificial Sequence
  Description of Artificial Sequence: Synthetic oligonucleotide
  Sense strand starting at position 2913 of SEQ ID NO: 1260
auaagucuaagugggauau

SEQ ID NO: 99909 - RNA, 19 nt, Artificial Sequence
  Description of Artificial Sequence: Synthetic oligonucleotide
  Antisense strand to SEQ ID NO: 99908
auaucccacuuagacuuau

SEQ ID NO: 99910 - RNA, 19 nt, Artificial Sequence
  Description of Artificial Sequence: Synthetic oligonucleotide
  Sense strand starting at position 2914 of SEQ ID NO: 1260
uaagucuaagugggauauu

SEQ ID NO: 99911 - RNA, 19 nt, Artificial Sequence
  Description of Artificial Sequence: Synthetic oligonucleotide
  Antisense strand to SEQ ID NO: 99910
aauaucccacuuagacuua

SEQ ID NO: 99912 - RNA, 19 nt, Artificial Sequence
  Description of Artificial Sequence: Synthetic oligonucleotide
  Sense strand starting at position 2915 of SEQ ID NO: 1260
aagucuaagugggauauuu

SEQ ID NO: 99913 - RNA, 19 nt, Artificial Sequence
  Description of Artificial Sequence: Synthetic oligonucleotide
  Antisense strand to SEQ ID NO: 99912
aaauaucccacuuagacuu

SEQ ID NO: 99914 - RNA, 19 nt, Artificial Sequence
  Description of Artificial Sequence: Synthetic oligonucleotide
  Sense strand starting at position 2979 of SEQ ID NO: 1260
uauaauauguggguuggua

SEQ ID NO: 99915 - RNA, 19 nt, Artificial Sequence
  Description of Artificial Sequence: Synthetic oligonucleotide
  Antisense strand to SEQ ID NO: 99914
uaccaacccacauauuaua

SEQ ID NO: 99916 - RNA, 19 nt, Artificial Sequence
  Description of Artificial Sequence: Synthetic oligonucleotide
  Sense strand starting at position 3035 of SEQ ID NO: 1260
ucagaugccugucucauuu

SEQ ID NO: 99917 - RNA, 19 nt, Artificial Sequence
  Description of Artificial Sequence: Synthetic oligonucleotide
  Antisense strand to SEQ ID NO: 99916
aaaugagacaggcaucuga

SEQ ID NO: 99918 - RNA, 19 nt, Artificial Sequence
  Description of Artificial Sequence: Synthetic oligonucleotide
  Sense strand starting at position 3152 of SEQ ID NO: 1260
ucgugugcggaucuuguaa

SEQ ID NO: 99919 - RNA, 19 nt, Artificial Sequence
  Description of Artificial Sequence: Synthetic oligonucleotide
  Antisense strand to SEQ ID NO: 99918
uuacaagauccgcacacga

SEQ ID NO: 99920 - RNA, 19 nt, Artificial Sequence
  Description of Artificial Sequence: Synthetic oligonucleotide
  Sense strand starting at position 3212 of SEQ ID NO: 1260
uuguauagauuccuuggaa

SEQ ID NO: 99921 - RNA, 19 nt, Artificial Sequence
  Description of Artificial Sequence: Synthetic oligonucleotide
  Antisense strand to SEQ ID NO: 99920
uuccaaggaaucuauacaa

SEQ ID NO: 99922 - RNA, 19 nt, Artificial Sequence
  Description of Artificial Sequence: Synthetic oligonucleotide
  Sense strand starting at position 3213 of SEQ ID NO: 1260
uguauagauuccuuggaau

SEQ ID NO: 99923 - RNA, 19 nt, Artificial Sequence
  Description of Artificial Sequence: Synthetic oligonucleotide
  Antisense strand to SEQ ID NO: 99922
auuccaaggaaucuauaca

SEQ ID NO: 99924 - RNA, 19 nt, Artificial Sequence
  Description of Artificial Sequence: Synthetic oligonucleotide
  Sense strand starting at position 3323 of SEQ ID NO: 1260
gauuuccaguagucuguua

SEQ ID NO: 99925 - RNA, 19 nt, Artificial Sequence
  Description of Artificial Sequence: Synthetic oligonucleotide
  Antisense strand to SEQ ID NO: 99924
uaacagacuacuggaaauc

SEQ ID NO: 99926 - RNA, 19 nt, Artificial Sequence
  Description of Artificial Sequence: Synthetic oligonucleotide
  Sense strand starting at position 3726 of SEQ ID NO: 1260
uaaguaugacauuaguugu

SEQ ID NO: 99927 - RNA, 19 nt, Artificial Sequence
  Description of Artificial Sequence: Synthetic oligonucleotide
  Antisense strand to SEQ ID NO: 99926
acaacuaaugucauacuua

SEQ ID NO: 99928 - RNA, 19 nt, Artificial Sequence
  Description of Artificial Sequence: Synthetic oligonucleotide
  Sense strand starting at position 3734 of SEQ ID NO: 1260
acauuaguugugggaguuu

SEQ ID NO: 99929 - RNA, 19 nt, Artificial Sequence
  Description of Artificial Sequence: Synthetic oligonucleotide
  Antisense strand to SEQ ID NO: 99928
aaacucccacaacuaaugu

SEQ ID NO: 99930 - RNA, 19 nt, Artificial Sequence
  Description of Artificial Sequence: Synthetic oligonucleotide
  Sense strand starting at position 24 of SEQ ID NO: 1261
ucaucagagcuguaccagu

SEQ ID NO: 99931 - RNA, 19 nt, Artificial Sequence
  Description of Artificial Sequence: Synthetic oligonucleotide
  Antisense strand to SEQ ID NO: 99930
acugguacagcucugauga

SEQ ID NO: 99932 - RNA, 19 nt, Artificial Sequence
  Description of Artificial Sequence: Synthetic oligonucleotide
  Sense strand starting at position 64 of SEQ ID NO: 1261
ugagaugucuucccugaca

SEQ ID NO: 99933 - RNA, 19 nt, Artificial Sequence
  Description of Artificial Sequence: Synthetic oligonucleotide
  Antisense strand to SEQ ID NO: 99932
ugucagggaagacaucuca

SEQ ID NO: 99934 - RNA, 19 nt, Artificial Sequence
  Description of Artificial Sequence: Synthetic oligonucleotide
  Sense strand starting at position 66 of SEQ ID NO: 1261
agaugucuucccugacaca

SEQ ID NO: 99935 - RNA, 19 nt, Artificial Sequence
  Description of Artificial Sequence: Synthetic oligonucleotide
  Antisense strand to SEQ ID NO: 99934
ugugucagggaagacaucu

SEQ ID NO: 99936 - RNA, 19 nt, Artificial Sequence
  Description of Artificial Sequence: Synthetic oligonucleotide
  Sense strand starting at position 117 of SEQ ID NO: 1261
ggaguuuacugacugaugu

SEQ ID NO: 99937 - RNA, 19 nt, Artificial Sequence
  Description of Artificial Sequence: Synthetic oligonucleotide
  Antisense strand to SEQ ID NO: 99936
acaucagucaguaaacucc

SEQ ID NO: 99938 - RNA, 19 nt, Artificial Sequence
  Description of Artificial Sequence: Synthetic oligonucleotide
  Sense strand starting at position 118 of SEQ ID NO: 1261
gaguuuacugacugaugug

SEQ ID NO: 99939 - RNA, 19 nt, Artificial Sequence
  Description of Artificial Sequence: Synthetic oligonucleotide
  Antisense strand to SEQ ID NO: 99938
cacaucagucaguaaacuc

SEQ ID NO: 99940 - RNA, 19 nt, Artificial Sequence
  Description of Artificial Sequence: Synthetic oligonucleotide
  Sense strand starting at position 132 of SEQ ID NO: 1261
augugucuucuugacauuc

SEQ ID NO: 99941 - RNA, 19 nt, Artificial Sequence
  Description of Artificial Sequence: Synthetic oligonucleotide
  Antisense strand to SEQ ID NO: 99940
gaaugucaagaagacacau

SEQ ID NO: 99942 - RNA, 19 nt, Artificial Sequence
  Description of Artificial Sequence: Synthetic oligonucleotide
  Sense strand starting at position 540 of SEQ ID NO: 1261
ccagcucuagccugaauuu

SEQ ID NO: 99943 - RNA, 19 nt, Artificial Sequence
  Description of Artificial Sequence: Synthetic oligonucleotide
  Antisense strand to SEQ ID NO: 99942
aaauucaggcuagagcugg

SEQ ID NO: 99944 - RNA, 19 nt, Artificial Sequence
  Description of Artificial Sequence: Synthetic oligonucleotide
  Sense strand starting at position 638 of SEQ ID NO: 1261
gaagguacugcacaagagu

SEQ ID NO: 99945 - RNA, 19 nt, Artificial Sequence
  Description of Artificial Sequence: Synthetic oligonucleotide
  Antisense strand to SEQ ID NO: 99944
acucuugugcaguaccuuc

SEQ ID NO: 99946 - RNA, 19 nt, Artificial Sequence
  Description of Artificial Sequence: Synthetic oligonucleotide
  Sense strand starting at position 686 of SEQ ID NO: 1261
cauagaucuuaggugauua

SEQ ID NO: 99947 - RNA, 19 nt, Artificial Sequence
  Description of Artificial Sequence: Synthetic oligonucleotide
  Antisense strand to SEQ ID NO: 99946
uaaucaccuaagaucuaug

SEQ ID NO: 99948 - RNA, 19 nt, Artificial Sequence
  Description of Artificial Sequence: Synthetic oligonucleotide
  Sense strand starting at position 883 of SEQ ID NO: 1261
auggcuauuuaugugcaga

SEQ ID NO: 99949 - RNA, 19 nt, Artificial Sequence
  Description of Artificial Sequence: Synthetic oligonucleotide
  Antisense strand to SEQ ID NO: 99948
ucugcacauaaauagccau

SEQ ID NO: 99950 - RNA, 19 nt, Artificial Sequence
  Description of Artificial Sequence: Synthetic oligonucleotide
  Sense strand starting at position 884 of SEQ ID NO: 1261
uggcuauuuaugugcagau

SEQ ID NO: 99951 - RNA, 19 nt, Artificial Sequence
  Description of Artificial Sequence: Synthetic oligonucleotide
  Antisense strand to SEQ ID NO: 99950
aucugcacauaaauagcca

SEQ ID NO: 99952 - RNA, 19 nt, Artificial Sequence
  Description of Artificial Sequence: Synthetic oligonucleotide
  Sense strand starting at position 885 of SEQ ID NO: 1261
ggcuauuuaugugcagauu

SEQ ID NO: 99953 - RNA, 19 nt, Artificial Sequence
  Description of Artificial Sequence: Synthetic oligonucleotide
  Antisense strand to SEQ ID NO: 99952
aaucugcacauaaauagcc

SEQ ID NO: 99954 - RNA, 19 nt, Artificial Sequence
  Description of Artificial Sequence: Synthetic oligonucleotide
  Sense strand starting at position 908 of SEQ ID NO: 1261
augguuggcaacugacaua

SEQ ID NO: 99955 - RNA, 19 nt, Artificial Sequence
  Description of Artificial Sequence: Synthetic oligonucleotide
  Antisense strand to SEQ ID NO: 99954
uaugucaguugccaaccau

SEQ ID NO: 99956 - RNA, 19 nt, Artificial Sequence
  Description of Artificial Sequence: Synthetic oligonucleotide
  Sense strand starting at position 1007 of SEQ ID NO: 1261
cgagaaguugaaugacuuc

SEQ ID NO: 99957 - RNA, 19 nt, Artificial Sequence
  Description of Artificial Sequence: Synthetic oligonucleotide
  Antisense strand to SEQ ID NO: 99956
gaagucauucaacuucucg

SEQ ID NO: 99958 - RNA, 19 nt, Artificial Sequence
  Description of Artificial Sequence: Synthetic oligonucleotide
  Sense strand starting at position 1047 of SEQ ID NO: 1261
agacguugagccuguauuu

SEQ ID NO: 99959 - RNA, 19 nt, Artificial Sequence
  Description of Artificial Sequence: Synthetic oligonucleotide
  Antisense strand to SEQ ID NO: 99958
aaauacaggcucaacgucu

SEQ ID NO: 99960 - RNA, 19 nt, Artificial Sequence
  Description of Artificial Sequence: Synthetic oligonucleotide
  Sense strand starting at position 1074 of SEQ ID NO: 1261
auagauacuugggucugua

SEQ ID NO: 99961 - RNA, 19 nt, Artificial Sequence
  Description of Artificial Sequence: Synthetic oligonucleotide
  Antisense strand to SEQ ID NO: 99960
uacagacccaaguaucuau

SEQ ID NO: 99962 - RNA, 19 nt, Artificial Sequence
  Description of Artificial Sequence: Synthetic oligonucleotide
  Sense strand starting at position 1354 of SEQ ID NO: 1261
aggucagucagacauaggu

SEQ ID NO: 99963 - RNA, 19 nt, Artificial Sequence
  Description of Artificial Sequence: Synthetic oligonucleotide
  Antisense strand to SEQ ID NO: 99962
accuaugucugacugaccu

SEQ ID NO: 99964 - RNA, 19 nt, Artificial Sequence
  Description of Artificial Sequence: Synthetic oligonucleotide
  Sense strand starting at position 1361 of SEQ ID NO: 1261
ucagacauagguuggaauu

SEQ ID NO: 99965 - RNA, 19 nt, Artificial Sequence
  Description of Artificial Sequence: Synthetic oligonucleotide
  Antisense strand to SEQ ID NO: 99964
aauuccaaccuaugucuga

SEQ ID NO: 99966 - RNA, 19 nt, Artificial Sequence
  Description of Artificial Sequence: Synthetic oligonucleotide
  Sense strand starting at position 2218 of SEQ ID NO: 1261
gcaguuugguguuugauuu

SEQ ID NO: 99967 - RNA, 19 nt, Artificial Sequence
  Description of Artificial Sequence: Synthetic oligonucleotide
  Antisense strand to SEQ ID NO: 99966
aaaucaaacaccaaacugc

SEQ ID NO: 99968 - RNA, 19 nt, Artificial Sequence
  Description of Artificial Sequence: Synthetic oligonucleotide
  Sense strand starting at position 2571 of SEQ ID NO: 1261
auaauagaggaaugcuauu

SEQ ID NO: 99969 - RNA, 19 nt, Artificial Sequence
  Description of Artificial Sequence: Synthetic oligonucleotide
  Antisense strand to SEQ ID NO: 99968
aauagcauuccucuauuau

SEQ ID NO: 99970 - RNA, 19 nt, Artificial Sequence
  Description of Artificial Sequence: Synthetic oligonucleotide
  Sense strand starting at position 2647 of SEQ ID NO: 1261
ggagaaggguccucucuca

SEQ ID NO: 99971 - RNA, 19 nt, Artificial Sequence
  Description of Artificial Sequence: Synthetic oligonucleotide
  Antisense strand to SEQ ID NO: 99970
ugagagaggacccuucucc

SEQ ID NO: 99972 - RNA, 19 nt, Artificial Sequence
  Description of Artificial Sequence: Synthetic oligonucleotide
  Sense strand starting at position 2666 of SEQ ID NO: 1261
aaaugcucacaguguagaa

SEQ ID NO: 99973 - RNA, 19 nt, Artificial Sequence
  Description of Artificial Sequence: Synthetic oligonucleotide
  Antisense strand to SEQ ID NO: 99972
uucuacacugugagcauuu

SEQ ID NO: 99974 - RNA, 19 nt, Artificial Sequence
  Description of Artificial Sequence: Synthetic oligonucleotide
  Sense strand starting at position 2833 of SEQ ID NO: 1261
agagaagugcucugggaug

SEQ ID NO: 99975 - RNA, 19 nt, Artificial Sequence
  Description of Artificial Sequence: Synthetic oligonucleotide
  Antisense strand to SEQ ID NO: 99974
caucccagagcacuucucu

SEQ ID NO: 99976 - RNA, 19 nt, Artificial Sequence
  Description of Artificial Sequence: Synthetic oligonucleotide
  Sense strand starting at position 3087 of SEQ ID NO: 1261
agaguuccuuuccuggauu

SEQ ID NO: 99977 - RNA, 19 nt, Artificial Sequence
  Description of Artificial Sequence: Synthetic oligonucleotide
  Antisense strand to SEQ ID NO: 99976
aauccaggaaaggaacucu

SEQ ID NO: 99978 - RNA, 19 nt, Artificial Sequence
  Description of Artificial Sequence: Synthetic oligonucleotide
  Sense strand starting at position 3162 of SEQ ID NO: 1261
aaaguacugugagcuagau

SEQ ID NO: 99979 - RNA, 19 nt, Artificial Sequence
  Description of Artificial Sequence: Synthetic oligonucleotide
  Antisense strand to SEQ ID NO: 99978
aucuagcucacaguacuuu

SEQ ID NO: 99980 - RNA, 19 nt, Artificial Sequence
  Description of Artificial Sequence: Synthetic oligonucleotide
  Sense strand starting at position 3172 of SEQ ID NO: 1261
gagcuagauuuggacaaac

SEQ ID NO: 99981 - RNA, 19 nt, Artificial Sequence
  Description of Artificial Sequence: Synthetic oligonucleotide
  Antisense strand to SEQ ID NO: 99980
guuuguccaaaucuagcuc

SEQ ID NO: 99982 - RNA, 19 nt, Artificial Sequence
  Description of Artificial Sequence: Synthetic oligonucleotide
  Sense strand starting at position 3183 of SEQ ID NO: 1261
ggacaaaccuggcuuuaug

SEQ ID NO: 99983 - RNA, 19 nt, Artificial Sequence
  Description of Artificial Sequence: Synthetic oligonucleotide
  Antisense strand to SEQ ID NO: 99982
cauaaagccagguuugucc

SEQ ID NO: 99984 - RNA, 19 nt, Artificial Sequence
  Description of Artificial Sequence: Synthetic oligonucleotide
  Sense strand starting at position 3223 of SEQ ID NO: 1261
gccauuugauuucggacaa

SEQ ID NO: 99985 - RNA, 19 nt, Artificial Sequence
  Description of Artificial Sequence: Synthetic oligonucleotide
  Antisense strand to SEQ ID NO: 99984
uuguccgaaaucaaauggc

SEQ ID NO: 99986 - RNA, 19 nt, Artificial Sequence
  Description of Artificial Sequence: Synthetic oligonucleotide
  Sense strand starting at position 3224 of SEQ ID NO: 1261
ccauuugauuucggacaag

SEQ ID NO: 99987 - RNA, 19 nt, Artificial Sequence
  Description of Artificial Sequence: Synthetic oligonucleotide
  Antisense strand to SEQ ID NO: 99986
cuuguccgaaaucaaaugg

SEQ ID NO: 99988 - RNA, 19 nt, Artificial Sequence
  Description of Artificial Sequence: Synthetic oligonucleotide
  Sense strand starting at position 3287 of SEQ ID NO: 1261
aaggaauacuaguuaucug

SEQ ID NO: 99989 - RNA, 19 nt, Artificial Sequence
  Description of Artificial Sequence: Synthetic oligonucleotide
  Antisense strand to SEQ ID NO: 99988
cagauaacuaguauuccuu

SEQ ID NO: 99990 - RNA, 19 nt, Artificial Sequence
  Description of Artificial Sequence: Synthetic oligonucleotide
  Sense strand starting at position 3330 of SEQ ID NO: 1261
gugagauauuauccacuug

SEQ ID NO: 99991 - RNA, 19 nt, Artificial Sequence
  Description of Artificial Sequence: Synthetic oligonucleotide
  Antisense strand to SEQ ID NO: 99990
caaguggauaauaucucac

SEQ ID NO: 99992 - RNA, 19 nt, Artificial Sequence
  Description of Artificial Sequence: Synthetic oligonucleotide
  Sense strand starting at position 3376 of SEQ ID NO: 1261
ggaagcauuugauaaauau

SEQ ID NO: 99993 - RNA, 19 nt, Artificial Sequence
  Description of Artificial Sequence: Synthetic oligonucleotide
  Antisense strand to SEQ ID NO: 99992
auauuuaucaaaugcuucc

SEQ ID NO: 99994 - RNA, 19 nt, Artificial Sequence
  Description of Artificial Sequence: Synthetic oligonucleotide
  Sense strand starting at position 3448 of SEQ ID NO: 1261
uagggucuggcuuauagua

SEQ ID NO: 99995 - RNA, 19 nt, Artificial Sequence
  Description of Artificial Sequence: Synthetic oligonucleotide
  Antisense strand to SEQ ID NO: 99994
uacuauaagccagacccua

SEQ ID NO: 99996 - RNA, 19 nt, Artificial Sequence
  Description of Artificial Sequence: Synthetic oligonucleotide
  Sense strand starting at position 3474 of SEQ ID NO: 1261
acuaaaugucuguacuugu

SEQ ID NO: 99997 - RNA, 19 nt, Artificial Sequence
  Description of Artificial Sequence: Synthetic oligonucleotide
  Antisense strand to SEQ ID NO: 99996
acaaguacagacauuuagu

SEQ ID NO: 99998 - RNA, 19 nt, Artificial Sequence
  Description of Artificial Sequence: Synthetic oligonucleotide
  Sense strand starting at position 3612 of SEQ ID NO: 1261
uuacuugaacugggaagua

SEQ ID NO: 99999 - RNA, 19 nt, Artificial Sequence
  Description of Artificial Sequence: Synthetic oligonucleotide
  Antisense strand to SEQ ID NO: 99998
uacuucccaguucaaguaa

SEQ ID NO: 100000 - RNA, 19 nt, Artificial Sequence
  Description of Artificial Sequence: Synthetic oligonucleotide
  Sense strand starting at position 3624 of SEQ ID NO: 1261
ggaaguacaacguaaccuu

SEQ ID NO: 100001 - RNA, 19 nt, Artificial Sequence
  Description of Artificial Sequence: Synthetic oligonucleotide
  Antisense strand to SEQ ID NO: 100000
aagguuacguuguacuucc

SEQ ID NO: 100002 - RNA, 19 nt, Artificial Sequence
  Description of Artificial Sequence: Synthetic oligonucleotide
  Sense strand starting at position 3658 of SEQ ID NO: 1261
cuaggugacauugagaugu

SEQ ID NO: 100003 - RNA, 19 nt, Artificial Sequence
  Description of Artificial Sequence: Synthetic oligonucleotide
  Antisense strand to SEQ ID NO: 100002
acaucucaaugucaccuag

SEQ ID NO: 100004 - RNA, 19 nt, Artificial Sequence
  Description of Artificial Sequence: Synthetic oligonucleotide
  Sense strand starting at position 3666 of SEQ ID NO: 1261
cauugagaugucgacauuc

SEQ ID NO: 100005 - RNA, 19 nt, Artificial Sequence
  Description of Artificial Sequence: Synthetic oligonucleotide
  Antisense strand to SEQ ID NO: 100004
gaaugucgacaucucaaug

SEQ ID NO: 100006 - RNA, 19 nt, Artificial Sequence
  Description of Artificial Sequence: Synthetic oligonucleotide
  Sense strand starting at position 3668 of SEQ ID NO: 1261
uugagaugucgacauucuc

SEQ ID NO: 100007 - RNA, 19 nt, Artificial Sequence
  Description of Artificial Sequence: Synthetic oligonucleotide
  Antisense strand to SEQ ID NO: 100006
gagaaugucgacaucucaa

SEQ ID NO: 100008 - RNA, 19 nt, Artificial Sequence
  Description of Artificial Sequence: Synthetic oligonucleotide
  Sense strand starting at position 3969 of SEQ ID NO: 1261
gccugugauccagcugcau

SEQ ID NO: 100009 - RNA, 19 nt, Artificial Sequence
  Description of Artificial Sequence: Synthetic oligonucleotide
  Antisense strand to SEQ ID NO: 100008
augcagcuggaucacaggc

SEQ ID NO: 100010 - RNA, 19 nt, Artificial Sequence
  Description of Artificial Sequence: Synthetic oligonucleotide
  Sense strand starting at position 3979 of SEQ ID NO: 1262
ucucaagugcuguaaugau

SEQ ID NO: 100011 - RNA, 19 nt, Artificial Sequence
  Description of Artificial Sequence: Synthetic oligonucleotide
  Antisense strand to SEQ ID NO: 100010
aucauuacagcacuugaga

SEQ ID NO: 100012 - RNA, 19 nt, Artificial Sequence
  Description of Artificial Sequence: Synthetic oligonucleotide
  Sense strand starting at position 3953 of SEQ ID NO: 1262
ucacaagauugggcagagu

SEQ ID NO: 100013 - RNA, 19 nt, Artificial Sequence
  Description of Artificial Sequence: Synthetic oligonucleotide
  Antisense strand to SEQ ID NO: 100012
acucugcccaaucuuguga

SEQ ID NO: 100014 - RNA, 19 nt, Artificial Sequence
  Description of Artificial Sequence: Synthetic oligonucleotide
  Sense strand starting at position 3935 of SEQ ID NO: 1262
ccugaucaaccuggugauu

SEQ ID NO: 100015 - RNA, 19 nt, Artificial Sequence
  Description of Artificial Sequence: Synthetic oligonucleotide
  Antisense strand to SEQ ID NO: 100014
aaucaccagguugaucagg

SEQ ID NO: 100016 - RNA, 19 nt, Artificial Sequence
  Description of Artificial Sequence: Synthetic oligonucleotide
  Sense strand starting at position 3906 of SEQ ID NO: 1262
gcguaugcccuaggguuua

SEQ ID NO: 100017 - RNA, 19 nt, Artificial Sequence
  Description of Artificial Sequence: Synthetic oligonucleotide
  Antisense strand to SEQ ID NO: 100016
uaaacccuagggcauacgc

SEQ ID NO: 100018 - RNA, 19 nt, Artificial Sequence
  Description of Artificial Sequence: Synthetic oligonucleotide
  Sense strand starting at position 3886 of SEQ ID NO: 1262
aaagaagauugacaaggau

SEQ ID NO: 100019 - RNA, 19 nt, Artificial Sequence
  Description of Artificial Sequence: Synthetic oligonucleotide
  Antisense strand to SEQ ID NO: 100018
auccuugucaaucuucuuu

SEQ ID NO: 100020 - RNA, 19 nt, Artificial Sequence
  Description of Artificial Sequence: Synthetic oligonucleotide
  Sense strand starting at position 3865 of SEQ ID NO: 1262
gaaagaguguacuaaguag

SEQ ID NO: 100021 - RNA, 19 nt, Artificial Sequence
  Description of Artificial Sequence: Synthetic oligonucleotide
  Antisense strand to SEQ ID NO: 100020
cuacuuaguacacucuuuc

SEQ ID NO: 100022 - RNA, 19 nt, Artificial Sequence
  Description of Artificial Sequence: Synthetic oligonucleotide
  Sense strand starting at position 3862 of SEQ ID NO: 1262
cgugaaagaguguacuaag

SEQ ID NO: 100023 - RNA, 19 nt, Artificial Sequence
  Description of Artificial Sequence: Synthetic oligonucleotide
  Antisense strand to SEQ ID NO: 100022
cuuaguacacucuuucacg

SEQ ID NO: 100024 - RNA, 19 nt, Artificial Sequence
  Description of Artificial Sequence: Synthetic oligonucleotide
  Sense strand starting at position 3852 of SEQ ID NO: 1262
augagaucaucgugaaaga

SEQ ID NO: 100025 - RNA, 19 nt, Artificial Sequence
  Description of Artificial Sequence: Synthetic oligonucleotide
  Antisense strand to SEQ ID NO: 100024
ucuuucacgaugaucucau

SEQ ID NO: 100026 - RNA, 19 nt, Artificial Sequence
  Description of Artificial Sequence: Synthetic oligonucleotide
  Sense strand starting at position 3850 of SEQ ID NO: 1262
gaaugagaucaucgugaaa

SEQ ID NO: 100027 - RNA, 19 nt, Artificial Sequence
  Description of Artificial Sequence: Synthetic oligonucleotide
  Antisense strand to SEQ ID NO: 100026
uuucacgaugaucucauuc

SEQ ID NO: 100028 - RNA, 19 nt, Artificial Sequence
  Description of Artificial Sequence: Synthetic oligonucleotide
  Sense strand starting at position 3818 of SEQ ID NO: 1262
ccucauagaugguagcuaa

SEQ ID NO: 100029 - RNA, 19 nt, Artificial Sequence
  Description of Artificial Sequence: Synthetic oligonucleotide
  Antisense strand to SEQ ID NO: 100028
uuagcuaccaucuaugagg

SEQ ID NO: 100030 - RNA, 19 nt, Artificial Sequence
  Description of Artificial Sequence: Synthetic oligonucleotide
  Sense strand starting at position 3666 of SEQ ID NO: 1262
uucucuaagcuaggaaaca

SEQ ID NO: 100031 - RNA, 19 nt, Artificial Sequence
  Description of Artificial Sequence: Synthetic oligonucleotide
  Antisense strand to SEQ ID NO: 100030
uguuuccuagcuuagagaa

SEQ ID NO: 100032 - RNA, 19 nt, Artificial Sequence
  Description of Artificial Sequence: Synthetic oligonucleotide
  Sense strand starting at position 3634 of SEQ ID NO: 1262
agaugucuuggguggcuau

SEQ ID NO: 100033 - RNA, 19 nt, Artificial Sequence
  Description of Artificial Sequence: Synthetic oligonucleotide
  Antisense strand to SEQ ID NO: 100032
auagccacccaagacaucu

SEQ ID NO: 100034 - RNA, 19 nt, Artificial Sequence
  Description of Artificial Sequence: Synthetic oligonucleotide
  Sense strand starting at position 3552 of SEQ ID NO: 1262
gcaagacucuguccucuau

SEQ ID NO: 100035 - RNA, 19 nt, Artificial Sequence
  Description of Artificial Sequence: Synthetic oligonucleotide
  Antisense strand to SEQ ID NO: 100034
auagaggacagagucuugc

SEQ ID NO: 100036 - RNA, 19 nt, Artificial Sequence
  Description of Artificial Sequence: Synthetic oligonucleotide
  Sense strand starting at position 3455 of SEQ ID NO: 1262
ggcucagguggucaagaga

SEQ ID NO: 100037 - RNA, 19 nt, Artificial Sequence
  Description of Artificial Sequence: Synthetic oligonucleotide
  Antisense strand to SEQ ID NO: 100036
ucucuugaccaccugagcc

SEQ ID NO: 100038 - RNA, 19 nt, Artificial Sequence
  Description of Artificial Sequence: Synthetic oligonucleotide
  Sense strand starting at position 3034 of SEQ ID NO: 1262
ccaguuaggcgcuuuggua

SEQ ID NO: 100039 - RNA, 19 nt, Artificial Sequence
  Description of Artificial Sequence: Synthetic oligonucleotide
  Antisense strand to SEQ ID NO: 100038
uaccaaagcgccuaacugg

SEQ ID NO: 100040 - RNA, 19 nt, Artificial Sequence
  Description of Artificial Sequence: Synthetic oligonucleotide
  Sense strand starting at position 2646 of SEQ ID NO: 1262
gaauacaugugagcuuuaa

SEQ ID NO: 100041 - RNA, 19 nt, Artificial Sequence
  Description of Artificial Sequence: Synthetic oligonucleotide
  Antisense strand to SEQ ID NO: 100040
uuaaagcucacauguauuc

SEQ ID NO: 100042 - RNA, 19 nt, Artificial Sequence
  Description of Artificial Sequence: Synthetic oligonucleotide
  Sense strand starting at position 2622 of SEQ ID NO: 1262
aguacucugcagugccaua

SEQ ID NO: 100043 - RNA, 19 nt, Artificial Sequence
  Description of Artificial Sequence: Synthetic oligonucleotide
  Antisense strand to SEQ ID NO: 100042
uauggcacugcagaguacu

SEQ ID NO: 100044 - RNA, 19 nt, Artificial Sequence
  Description of Artificial Sequence: Synthetic oligonucleotide
  Sense strand starting at position 2228 of SEQ ID NO: 1262
gaaagucucuuggaacuga

SEQ ID NO: 100045 - RNA, 19 nt, Artificial Sequence
  Description of Artificial Sequence: Synthetic oligonucleotide
  Antisense strand to SEQ ID NO: 100044
ucaguuccaagagacuuuc

SEQ ID NO: 100046 - RNA, 19 nt, Artificial Sequence
  Description of Artificial Sequence: Synthetic oligonucleotide
  Sense strand starting at position 2226 of SEQ ID NO: 1262
uagaaagucucuuggaacu

SEQ ID NO: 100047 - RNA, 19 nt, Artificial Sequence
  Description of Artificial Sequence: Synthetic oligonucleotide
  Antisense strand to SEQ ID NO: 100046
aguuccaagagacuuucua

SEQ ID NO: 100048 - RNA, 19 nt, Artificial Sequence
  Description of Artificial Sequence: Synthetic oligonucleotide
  Sense strand starting at position 2170 of SEQ ID NO: 1262
uaggccaugcucuaggaaa

SEQ ID NO: 100049 - RNA, 19 nt, Artificial Sequence
  Description of Artificial Sequence: Synthetic oligonucleotide
  Antisense strand to SEQ ID NO: 100048
uuuccuagagcauggccua

SEQ ID NO: 100050 - RNA, 19 nt, Artificial Sequence
  Description of Artificial Sequence: Synthetic oligonucleotide
  Sense strand starting at position 2165 of SEQ ID NO: 1262
cgucauaggccaugcucua

SEQ ID NO: 100051 - RNA, 19 nt, Artificial Sequence
  Description of Artificial Sequence: Synthetic oligonucleotide
  Antisense strand to SEQ ID NO: 100050
uagagcauggccuaugacg

SEQ ID NO: 100052 - RNA, 19 nt, Artificial Sequence
  Description of Artificial Sequence: Synthetic oligonucleotide
  Sense strand starting at position 2098 of SEQ ID NO: 1262
cgggcugcuguaugaaaga

SEQ ID NO: 100053 - RNA, 19 nt, Artificial Sequence
  Description of Artificial Sequence: Synthetic oligonucleotide
  Antisense strand to SEQ ID NO: 100052
ucuuucauacagcagcccg

SEQ ID NO: 100054 - RNA, 19 nt, Artificial Sequence
  Description of Artificial Sequence: Synthetic oligonucleotide
  Sense strand starting at position 2049 of SEQ ID NO: 1262
cgaagagcuucauugcgga

SEQ ID NO: 100055 - RNA, 19 nt, Artificial Sequence
  Description of Artificial Sequence: Synthetic oligonucleotide
  Antisense strand to SEQ ID NO: 100054
uccgcaaugaagcucuucg

SEQ ID NO: 100056 - RNA, 19 nt, Artificial Sequence
  Description of Artificial Sequence: Synthetic oligonucleotide
  Sense strand starting at position 1761 of SEQ ID NO: 1262
guauauagguccuucuaag

SEQ ID NO: 100057 - RNA, 19 nt, Artificial Sequence
  Description of Artificial Sequence: Synthetic oligonucleotide
  Antisense strand to SEQ ID NO: 100056
cuuagaaggaccuauauac

SEQ ID NO: 100058 - RNA, 19 nt, Artificial Sequence
  Description of Artificial Sequence: Synthetic oligonucleotide
  Sense strand starting at position 1750 of SEQ ID NO: 1262
uuaagaugaugguauauag

SEQ ID NO: 100059 - RNA, 19 nt, Artificial Sequence
  Description of Artificial Sequence: Synthetic oligonucleotide
  Antisense strand to SEQ ID NO: 100058
cuauauaccaucaucuuaa

SEQ ID NO: 100060 - RNA, 19 nt, Artificial Sequence
  Description of Artificial Sequence: Synthetic oligonucleotide
  Sense strand starting at position 1299 of SEQ ID NO: 1262
gggaguuccuagcucacua

SEQ ID NO: 100061 - RNA, 19 nt, Artificial Sequence
  Description of Artificial Sequence: Synthetic oligonucleotide
  Antisense strand to SEQ ID NO: 100060
uagugagcuaggaacuccc

SEQ ID NO: 100062 - RNA, 19 nt, Artificial Sequence
  Description of Artificial Sequence: Synthetic oligonucleotide
  Sense strand starting at position 1208 of SEQ ID NO: 1262
ggcguucuaucucucugaa

SEQ ID NO: 100063 - RNA, 19 nt, Artificial Sequence
  Description of Artificial Sequence: Synthetic oligonucleotide
  Antisense strand to SEQ ID NO: 100062
uucagagagauagaacgcc

SEQ ID NO: 100064 - RNA, 19 nt, Artificial Sequence
  Description of Artificial Sequence: Synthetic oligonucleotide
  Sense strand starting at position 1042 of SEQ ID NO: 1262
ggcuauguggcucaaacga

SEQ ID NO: 100065 - RNA, 19 nt, Artificial Sequence
  Description of Artificial Sequence: Synthetic oligonucleotide
  Antisense strand to SEQ ID NO: 100064
ucguuugagccacauagcc

SEQ ID NO: 100066 - RNA, 19 nt, Artificial Sequence
  Description of Artificial Sequence: Synthetic oligonucleotide
  Sense strand starting at position 946 of SEQ ID NO: 1262
ucaggugauacucagguga

SEQ ID NO: 100067 - RNA, 19 nt, Artificial Sequence
  Description of Artificial Sequence: Synthetic oligonucleotide
  Antisense strand to SEQ ID NO: 100066
ucaccugaguaucaccuga

SEQ ID NO: 100068 - RNA, 19 nt, Artificial Sequence
  Description of Artificial Sequence: Synthetic oligonucleotide
  Sense strand starting at position 638 of SEQ ID NO: 1262
uugagaaaguccuaucuau

SEQ ID NO: 100069 - RNA, 19 nt, Artificial Sequence
  Description of Artificial Sequence: Synthetic oligonucleotide
  Antisense strand to SEQ ID NO: 100068
auagauaggacuuucucaa

SEQ ID NO: 100070 - RNA, 19 nt, Artificial Sequence
  Description of Artificial Sequence: Synthetic oligonucleotide
  Sense strand starting at position 630 of SEQ ID NO: 1262
gugcaaucuugagaaaguc

SEQ ID NO: 100071 - RNA, 19 nt, Artificial Sequence
  Description of Artificial Sequence: Synthetic oligonucleotide
  Antisense strand to SEQ ID NO: 100070
gacuuucucaagauugcac

SEQ ID NO: 100072 - RNA, 19 nt, Artificial Sequence
  Description of Artificial Sequence: Synthetic oligonucleotide
  Sense strand starting at position 628 of SEQ ID NO: 1262
cugugcaaucuugagaaag

SEQ ID NO: 100073 - RNA, 19 nt, Artificial Sequence
  Description of Artificial Sequence: Synthetic oligonucleotide
  Antisense strand to SEQ ID NO: 100072
cuuucucaagauugcacag

SEQ ID NO: 100074 - RNA, 19 nt, Artificial Sequence
  Description of Artificial Sequence: Synthetic oligonucleotide
  Sense strand starting at position 600 of SEQ ID NO: 1262
gucucaaguucugaaaccu

SEQ ID NO: 100075 - RNA, 19 nt, Artificial Sequence
  Description of Artificial Sequence: Synthetic oligonucleotide
  Antisense strand to SEQ ID NO: 100074
agguuucagaacuugagac

SEQ ID NO: 100076 - RNA, 19 nt, Artificial Sequence
  Description of Artificial Sequence: Synthetic oligonucleotide
  Sense strand starting at position 566 of SEQ ID NO: 1262
agaucuggucauggaguua

SEQ ID NO: 100077 - RNA, 19 nt, Artificial Sequence
  Description of Artificial Sequence: Synthetic oligonucleotide
  Antisense strand to SEQ ID NO: 100076
uaacuccaugaccagaucu

SEQ ID NO: 100078 - RNA, 19 nt, Artificial Sequence
  Description of Artificial Sequence: Synthetic oligonucleotide
  Sense strand starting at position 504 of SEQ ID NO: 1262
acguuugaguauuuccuua

SEQ ID NO: 100079 - RNA, 19 nt, Artificial Sequence
  Description of Artificial Sequence: Synthetic oligonucleotide
  Antisense strand to SEQ ID NO: 100078
uaaggaaauacucaaacgu

SEQ ID NO: 100080 - RNA, 19 nt, Artificial Sequence
  Description of Artificial Sequence: Synthetic oligonucleotide
  Sense strand starting at position 197 of SEQ ID NO: 1262
agucucucaucuuaaggga

SEQ ID NO: 100081 - RNA, 19 nt, Artificial Sequence
  Description of Artificial Sequence: Synthetic oligonucleotide
  Antisense strand to SEQ ID NO: 100080
ucccuuaagaugagagacu

SEQ ID NO: 100082 - RNA, 19 nt, Artificial Sequence
  Description of Artificial Sequence: Synthetic oligonucleotide
  Sense strand starting at position 190 of SEQ ID NO: 1262
uguguuaagucucucaucu

SEQ ID NO: 100083 - RNA, 19 nt, Artificial Sequence
  Description of Artificial Sequence: Synthetic oligonucleotide
  Antisense strand to SEQ ID NO: 100082
agaugagagacuuaacaca

SEQ ID NO: 100084 - RNA, 19 nt, Artificial Sequence
  Description of Artificial Sequence: Synthetic oligonucleotide
  Sense strand starting at position 108 of SEQ ID NO: 1262
guauguuuagugcauauaa

SEQ ID NO: 100085 - RNA, 19 nt, Artificial Sequence
  Description of Artificial Sequence: Synthetic oligonucleotide
  Antisense strand to SEQ ID NO: 100084
uuauaugcacuaaacauac

SEQ ID NO: 100086 - RNA, 19 nt, Artificial Sequence
  Description of Artificial Sequence: Synthetic oligonucleotide
  Sense strand starting at position 105 of SEQ ID NO: 1262
uuaguauguuuagugcaua

SEQ ID NO: 100087 - RNA, 19 nt, Artificial Sequence
  Description of Artificial Sequence: Synthetic oligonucleotide
  Antisense strand to SEQ ID NO: 100086
uaugcacuaaacauacuaa

SEQ ID NO: 100088 - RNA, 19 nt, Artificial Sequence
  Description of Artificial Sequence: Synthetic oligonucleotide
  Sense strand starting at position 97 of SEQ ID NO: 1262
uggcaaauuuaguauguuu

SEQ ID NO: 100089 - RNA, 19 nt, Artificial Sequence
  Description of Artificial Sequence: Synthetic oligonucleotide
  Antisense strand to SEQ ID NO: 100088
aaacauacuaaauuugcca

SEQ ID NO: 100090 - RNA, 19 nt, Artificial Sequence
  Description of Artificial Sequence: Synthetic oligonucleotide
  Sense strand starting at position 25 of SEQ ID NO: 1263
uuaugaaacagacguagaa

SEQ ID NO: 100091 - RNA, 19 nt, Artificial Sequence
  Description of Artificial Sequence: Synthetic oligonucleotide
  Antisense strand to SEQ ID NO: 100090
uucuacgucuguuucauaa

SEQ ID NO: 100092 - RNA, 19 nt, Artificial Sequence
  Description of Artificial Sequence: Synthetic oligonucleotide
  Sense strand starting at position 143 of SEQ ID NO: 1263
uccuuuccagccuggaaau

SEQ ID NO: 100093 - RNA, 19 nt, Artificial Sequence
  Description of Artificial Sequence: Synthetic oligonucleotide
  Antisense strand to SEQ ID NO: 100092
auuuccaggcuggaaagga

SEQ ID NO: 100094 - RNA, 19 nt, Artificial Sequence
  Description of Artificial Sequence: Synthetic oligonucleotide
  Sense strand starting at position 144 of SEQ ID NO: 1263
ccuuuccagccuggaaaua

SEQ ID NO: 100095 - RNA, 19 nt, Artificial Sequence
  Description of Artificial Sequence: Synthetic oligonucleotide
  Antisense strand to SEQ ID NO: 100094
uauuuccaggcuggaaagg

SEQ ID NO: 100096 - RNA, 19 nt, Artificial Sequence
  Description of Artificial Sequence: Synthetic oligonucleotide
  Sense strand starting at position 145 of SEQ ID NO: 1263
cuuuccagccuggaaauaa

SEQ ID NO: 100097 - RNA, 19 nt, Artificial Sequence
  Description of Artificial Sequence: Synthetic oligonucleotide
  Antisense strand to SEQ ID NO: 100096
uuauuuccaggcuggaaag

SEQ ID NO: 100098 - RNA, 19 nt, Artificial Sequence
  Description of Artificial Sequence: Synthetic oligonucleotide
  Sense strand starting at position 175 of SEQ ID NO: 1263
cagaguagguuggcucuaa

SEQ ID NO: 100099 - RNA, 19 nt, Artificial Sequence
  Description of Artificial Sequence: Synthetic oligonucleotide
  Antisense strand to SEQ ID NO: 100098
uuagagccaaccuacucug

SEQ ID NO: 100100 - RNA, 19 nt, Artificial Sequence
  Description of Artificial Sequence: Synthetic oligonucleotide
  Sense strand starting at position 176 of SEQ ID NO: 1263
agaguagguuggcucuaaa

SEQ ID NO: 100101 - RNA, 19 nt, Artificial Sequence
  Description of Artificial Sequence: Synthetic oligonucleotide
  Antisense strand to SEQ ID NO: 100100
uuuagagccaaccuacucu

SEQ ID NO: 100102 - RNA, 19 nt, Artificial Sequence
  Description of Artificial Sequence: Synthetic oligonucleotide
  Sense strand starting at position 401 of SEQ ID NO: 1263
acugauaaaugguuacauc

SEQ ID NO: 100103 - RNA, 19 nt, Artificial Sequence
  Description of Artificial Sequence: Synthetic oligonucleotide
  Antisense strand to SEQ ID NO: 100102
gauguaaccauuuaucagu

SEQ ID NO: 100104 - RNA, 19 nt, Artificial Sequence
  Description of Artificial Sequence: Synthetic oligonucleotide
  Sense strand starting at position 631 of SEQ ID NO: 1263
acagguuggucacccagau

SEQ ID NO: 100105 - RNA, 19 nt, Artificial Sequence
  Description of Artificial Sequence: Synthetic oligonucleotide
  Antisense strand to SEQ ID NO: 100104
aucugggugaccaaccugu

SEQ ID NO: 100106 - RNA, 19 nt, Artificial Sequence
  Description of Artificial Sequence: Synthetic oligonucleotide
  Sense strand starting at position 635 of SEQ ID NO: 1263
guuggucacccagauaaac

SEQ ID NO: 100107 - RNA, 19 nt, Artificial Sequence
  Description of Artificial Sequence: Synthetic oligonucleotide
  Antisense strand to SEQ ID NO: 100106
guuuaucugggugaccaac

SEQ ID NO: 100108 - RNA, 19 nt, Artificial Sequence
  Description of Artificial Sequence: Synthetic oligonucleotide
  Sense strand starting at position 736 of SEQ ID NO: 1263
auaggauagccagguuguu

SEQ ID NO: 100109 - RNA, 19 nt, Artificial Sequence
  Description of Artificial Sequence: Synthetic oligonucleotide
  Antisense strand to SEQ ID NO: 100108
aacaaccuggcuauccuau

SEQ ID NO: 100110 - RNA, 19 nt, Artificial Sequence
  Description of Artificial Sequence: Synthetic oligonucleotide
  Sense strand starting at position 766 of SEQ ID NO: 1263
guauuuggguuauagacag

SEQ ID NO: 100111 - RNA, 19 nt, Artificial Sequence
  Description of Artificial Sequence: Synthetic oligonucleotide
  Antisense strand to SEQ ID NO: 100110
cugucuauaacccaaauac

SEQ ID NO: 100112 - RNA, 19 nt, Artificial Sequence
  Description of Artificial Sequence: Synthetic oligonucleotide
  Sense strand starting at position 931 of SEQ ID NO: 1263
gaccuaaugccaggagauc

SEQ ID NO: 100113 - RNA, 19 nt, Artificial Sequence
  Description of Artificial Sequence: Synthetic oligonucleotide
  Antisense strand to SEQ ID NO: 100112
gaucuccuggcauuagguc

SEQ ID NO: 100114 - RNA, 19 nt, Artificial Sequence
  Description of Artificial Sequence: Synthetic oligonucleotide
  Sense strand starting at position 942 of SEQ ID NO: 1263
aggagaucauucucucaug

SEQ ID NO: 100115 - RNA, 19 nt, Artificial Sequence
  Description of Artificial Sequence: Synthetic oligonucleotide
  Antisense strand to SEQ ID NO: 100114
caugagagaaugaucuccu

SEQ ID NO: 100116 - RNA, 19 nt, Artificial Sequence
  Description of Artificial Sequence: Synthetic oligonucleotide
  Sense strand starting at position 1021 of SEQ ID NO: 1263
ucuugucagucucugggaa

SEQ ID NO: 100117 - RNA, 19 nt, Artificial Sequence
  Description of Artificial Sequence: Synthetic oligonucleotide
  Antisense strand to SEQ ID NO: 100116
uucccagagacugacaaga

SEQ ID NO: 100118 - RNA, 19 nt, Artificial Sequence
  Description of Artificial Sequence: Synthetic oligonucleotide
  Sense strand starting at position 1022 of SEQ ID NO: 1263
cuugucagucucugggaaa

SEQ ID NO: 100119 - RNA, 19 nt, Artificial Sequence
  Description of Artificial Sequence: Synthetic oligonucleotide
  Antisense strand to SEQ ID NO: 100118
uuucccagagacugacaag

SEQ ID NO: 100120 - RNA, 19 nt, Artificial Sequence
  Description of Artificial Sequence: Synthetic oligonucleotide
  Sense strand starting at position 1034 of SEQ ID NO: 1263
ugggaaaucugccuacuca

SEQ ID NO: 100121 - RNA, 19 nt, Artificial Sequence
  Description of Artificial Sequence: Synthetic oligonucleotide
  Antisense strand to SEQ ID NO: 100120
ugaguaggcagauuuccca

SEQ ID NO: 100122 - RNA, 19 nt, Artificial Sequence
  Description of Artificial Sequence: Synthetic oligonucleotide
  Sense strand starting at position 1035 of SEQ ID NO: 1263
gggaaaucugccuacucau

SEQ ID NO: 100123 - RNA, 19 nt, Artificial Sequence
  Description of Artificial Sequence: Synthetic oligonucleotide
  Antisense strand to SEQ ID NO: 100122
augaguaggcagauuuccc

SEQ ID NO: 100124 - RNA, 19 nt, Artificial Sequence
  Description of Artificial Sequence: Synthetic oligonucleotide
  Sense strand starting at position 1042 of SEQ ID NO: 1263
cugccuacucaugaagacu

SEQ ID NO: 100125 - RNA, 19 nt, Artificial Sequence
  Description of Artificial Sequence: Synthetic oligonucleotide
  Antisense strand to SEQ ID NO: 100124
agucuucaugaguaggcag

SEQ ID NO: 100126 - RNA, 19 nt, Artificial Sequence
  Description of Artificial Sequence: Synthetic oligonucleotide
  Sense strand starting at position 1175 of SEQ ID NO: 1263
aucuaucucugugucaaua

SEQ ID NO: 100127 - RNA, 19 nt, Artificial Sequence
  Description of Artificial Sequence: Synthetic oligonucleotide
  Antisense strand to SEQ ID NO: 100126
uauugacacagagauagau

SEQ ID NO: 100128 - RNA, 19 nt, Artificial Sequence
  Description of Artificial Sequence: Synthetic oligonucleotide
  Sense strand starting at position 1294 of SEQ ID NO: 1263
gcuucuaagcacuggacaa

SEQ ID NO: 100129 - RNA, 19 nt, Artificial Sequence
  Description of Artificial Sequence: Synthetic oligonucleotide
  Antisense strand to SEQ ID NO: 100128
uuguccagugcuuagaagc

SEQ ID NO: 100130 - RNA, 19 nt, Artificial Sequence
  Description of Artificial Sequence: Synthetic oligonucleotide
  Sense strand starting at position 1538 of SEQ ID NO: 1263
uugggcuucuuuccaauua

SEQ ID NO: 100131 - RNA, 19 nt, Artificial Sequence
  Description of Artificial Sequence: Synthetic oligonucleotide
  Antisense strand to SEQ ID NO: 100130
uaauuggaaagaagcccaa

SEQ ID NO: 100132 - RNA, 19 nt, Artificial Sequence
  Description of Artificial Sequence: Synthetic oligonucleotide
  Sense strand starting at position 1563 of SEQ ID NO: 1263
cugcuauaucggcaaccaa

SEQ ID NO: 100133 - RNA, 19 nt, Artificial Sequence
  Description of Artificial Sequence: Synthetic oligonucleotide
  Antisense strand to SEQ ID NO: 100132
uugguugccgauauagcag

SEQ ID NO: 100134 - RNA, 19 nt, Artificial Sequence
  Description of Artificial Sequence: Synthetic oligonucleotide
  Sense strand starting at position 2016 of SEQ ID NO: 1263
gaaggcuucguccaccaau

SEQ ID NO: 100135 - RNA, 19 nt, Artificial Sequence
  Description of Artificial Sequence: Synthetic oligonucleotide
  Antisense strand to SEQ ID NO: 100134
auugguggacgaagccuuc

SEQ ID NO: 100136 - RNA, 19 nt, Artificial Sequence
  Description of Artificial Sequence: Synthetic oligonucleotide
  Sense strand starting at position 2380 of SEQ ID NO: 1263
gagcuaaaggaguaacugu

SEQ ID NO: 100137 - RNA, 19 nt, Artificial Sequence
  Description of Artificial Sequence: Synthetic oligonucleotide
  Antisense strand to SEQ ID NO: 100136
acaguuacuccuuuagcuc

SEQ ID NO: 100138 - RNA, 19 nt, Artificial Sequence
  Description of Artificial Sequence: Synthetic oligonucleotide
  Sense strand starting at position 2391 of SEQ ID NO: 1263
guaacuguucgcuuuguuu

SEQ ID NO: 100139 - RNA, 19 nt, Artificial Sequence
  Description of Artificial Sequence: Synthetic oligonucleotide
  Antisense strand to SEQ ID NO: 100138
aaacaaagcgaacaguuac

SEQ ID NO: 100140 - RNA, 19 nt, Artificial Sequence
  Description of Artificial Sequence: Synthetic oligonucleotide
  Sense strand starting at position 2515 of SEQ ID NO: 1263
uagauuuacuuugcugguu

SEQ ID NO: 100141 - RNA, 19 nt, Artificial Sequence
  Description of Artificial Sequence: Synthetic oligonucleotide
  Antisense strand to SEQ ID NO: 100140
aaccagcaaaguaaaucua

SEQ ID NO: 100142 - RNA, 19 nt, Artificial Sequence
  Description of Artificial Sequence: Synthetic oligonucleotide
  Sense strand starting at position 2541 of SEQ ID NO: 1263
uucuuuaggcauuggaaua

SEQ ID NO: 100143 - RNA, 19 nt, Artificial Sequence
  Description of Artificial Sequence: Synthetic oligonucleotide
  Antisense strand to SEQ ID NO: 100142
uauuccaaugccuaaagaa

SEQ ID NO: 100144 - RNA, 19 nt, Artificial Sequence
  Description of Artificial Sequence: Synthetic oligonucleotide
  Sense strand starting at position 2787 of SEQ ID NO: 1263
ggugauaugauauauucgu

SEQ ID NO: 100145 - RNA, 19 nt, Artificial Sequence
  Description of Artificial Sequence: Synthetic oligonucleotide
  Antisense strand to SEQ ID NO: 100144
acgaauauaucauaucacc

SEQ ID NO: 100146 - RNA, 19 nt, Artificial Sequence
  Description of Artificial Sequence: Synthetic oligonucleotide
  Sense strand starting at position 2794 of SEQ ID NO: 1263
ugauauauucguuaaaugc

SEQ ID NO: 100147 - RNA, 19 nt, Artificial Sequence
  Description of Artificial Sequence: Synthetic oligonucleotide
  Antisense strand to SEQ ID NO: 100146
gcauuuaacgaauauauca

SEQ ID NO: 100148 - RNA, 19 nt, Artificial Sequence
  Description of Artificial Sequence: Synthetic oligonucleotide
  Sense strand starting at position 2930 of SEQ ID NO: 1263
gccacucauccaggaacua

SEQ ID NO: 100149 - RNA, 19 nt, Artificial Sequence
  Description of Artificial Sequence: Synthetic oligonucleotide
  Antisense strand to SEQ ID NO: 100148
uaguuccuggaugaguggc

SEQ ID NO: 100150 - RNA, 19 nt, Artificial Sequence
  Description of Artificial Sequence: Synthetic oligonucleotide
  Sense strand starting at position 2943 of SEQ ID NO: 1263
gaacuagcaguuuggaguu

SEQ ID NO: 100151 - RNA, 19 nt, Artificial Sequence
  Description of Artificial Sequence: Synthetic oligonucleotide
  Antisense strand to SEQ ID NO: 100150
aacuccaaacugcuaguuc

SEQ ID NO: 100152 - RNA, 19 nt, Artificial Sequence
  Description of Artificial Sequence: Synthetic oligonucleotide
  Sense strand starting at position 2949 of SEQ ID NO: 1263
gcaguuuggaguuagaaga

SEQ ID NO: 100153 - RNA, 19 nt, Artificial Sequence
  Description of Artificial Sequence: Synthetic oligonucleotide
  Antisense strand to SEQ ID NO: 100152
ucuucuaacuccaaacugc

SEQ ID NO: 100154 - RNA, 19 nt, Artificial Sequence
  Description of Artificial Sequence: Synthetic oligonucleotide
  Sense strand starting at position 3039 of SEQ ID NO: 1263
aagggugagagauguguau

SEQ ID NO: 100155 - RNA, 19 nt, Artificial Sequence
  Description of Artificial Sequence: Synthetic oligonucleotide
  Antisense strand to SEQ ID NO: 100154
auacacaucucucacccuu

SEQ ID NO: 100156 - RNA, 19 nt, Artificial Sequence
  Description of Artificial Sequence: Synthetic oligonucleotide
  Sense strand starting at position 3041 of SEQ ID NO: 1263
gggugagagauguguauaa

SEQ ID NO: 100157 - RNA, 19 nt, Artificial Sequence
  Description of Artificial Sequence: Synthetic oligonucleotide
  Antisense strand to SEQ ID NO: 100156
uuauacacaucucucaccc

SEQ ID NO: 100158 - RNA, 19 nt, Artificial Sequence
  Description of Artificial Sequence: Synthetic oligonucleotide
  Sense strand starting at position 3043 of SEQ ID NO: 1263
gugagagauguguauaaug

SEQ ID NO: 100159 - RNA, 19 nt, Artificial Sequence
  Description of Artificial Sequence: Synthetic oligonucleotide
  Antisense strand to SEQ ID NO: 100158
cauuauacacaucucucac

SEQ ID NO: 100160 - RNA, 19 nt, Artificial Sequence
  Description of Artificial Sequence: Synthetic oligonucleotide
  Sense strand starting at position 3588 of SEQ ID NO: 1263
uguucuuaaccauauuguu

SEQ ID NO: 100161 - RNA, 19 nt, Artificial Sequence
  Description of Artificial Sequence: Synthetic oligonucleotide
  Antisense strand to SEQ ID NO: 100160
aacaauaugguuaagaaca

SEQ ID NO: 100162 - RNA, 19 nt, Artificial Sequence
  Description of Artificial Sequence: Synthetic oligonucleotide
  Sense strand starting at position 3617 of SEQ ID NO: 1263
guaauaaaguagccacaga

SEQ ID NO: 100163 - RNA, 19 nt, Artificial Sequence
  Description of Artificial Sequence: Synthetic oligonucleotide
  Antisense strand to SEQ ID NO: 100162
ucuguggcuacuuuauuac

SEQ ID NO: 100164 - RNA, 19 nt, Artificial Sequence
  Description of Artificial Sequence: Synthetic oligonucleotide
  Sense strand starting at position 3695 of SEQ ID NO: 1263
guaggaaacuaugccuuau

SEQ ID NO: 100165 - RNA, 19 nt, Artificial Sequence
  Description of Artificial Sequence: Synthetic oligonucleotide
  Antisense strand to SEQ ID NO: 100164
auaaggcauaguuuccuac

SEQ ID NO: 100166 - RNA, 19 nt, Artificial Sequence
  Description of Artificial Sequence: Synthetic oligonucleotide
  Sense strand starting at position 3739 of SEQ ID NO: 1263
gguagaauagcucaugcau

SEQ ID NO: 100167 - RNA, 19 nt, Artificial Sequence
  Description of Artificial Sequence: Synthetic oligonucleotide
  Antisense strand to SEQ ID NO: 100166
augcaugagcuauucuacc

SEQ ID NO: 100168 - RNA, 19 nt, Artificial Sequence
  Description of Artificial Sequence: Synthetic oligonucleotide
  Sense strand starting at position 3908 of SEQ ID NO: 1263
aacaccguccuguagaaau

SEQ ID NO: 100169 - RNA, 19 nt, Artificial Sequence
  Description of Artificial Sequence: Synthetic oligonucleotide
  Antisense strand to SEQ ID NO: 100168
auuucuacaggacgguguu

SEQ ID NO: 100170 - RNA, 19 nt, Artificial Sequence
  Description of Artificial Sequence: Synthetic oligonucleotide
  Sense strand starting at position 89 of SEQ ID NO: 1265
cuggguaccugagcaauau

SEQ ID NO: 100171 - RNA, 19 nt, Artificial Sequence
  Description of Artificial Sequence: Synthetic oligonucleotide
  Antisense strand to SEQ ID NO: 100170
auauugcucagguacccag

SEQ ID NO: 100172 - RNA, 19 nt, Artificial Sequence
  Description of Artificial Sequence: Synthetic oligonucleotide
  Sense strand starting at position 90 of SEQ ID NO: 1265
uggguaccugagcaauauu

SEQ ID NO: 100173 - RNA, 19 nt, Artificial Sequence
  Description of Artificial Sequence: Synthetic oligonucleotide
  Antisense strand to SEQ ID NO: 100172
aauauugcucagguaccca

SEQ ID NO: 100174 - RNA, 19 nt, Artificial Sequence
  Description of Artificial Sequence: Synthetic oligonucleotide
  Sense strand starting at position 120 of SEQ ID NO: 1265
cggguuucagaaugaugcu

SEQ ID NO: 100175 - RNA, 19 nt, Artificial Sequence
  Description of Artificial Sequence: Synthetic oligonucleotide
  Antisense strand to SEQ ID NO: 100174
agcaucauucugaaacccg

SEQ ID NO: 100176 - RNA, 19 nt, Artificial Sequence
  Description of Artificial Sequence: Synthetic oligonucleotide
  Sense strand starting at position 129 of SEQ ID NO: 1265
gaaugaugcuaucucaguu

SEQ ID NO: 100177 - RNA, 19 nt, Artificial Sequence
  Description of Artificial Sequence: Synthetic oligonucleotide
  Antisense strand to SEQ ID NO: 100176
aacugagauagcaucauuc

SEQ ID NO: 100178 - RNA, 19 nt, Artificial Sequence
  Description of Artificial Sequence: Synthetic oligonucleotide
  Sense strand starting at position 263 of SEQ ID NO: 1265
gggaauuccuuuccgauag

SEQ ID NO: 100179 - RNA, 19 nt, Artificial Sequence
  Description of Artificial Sequence: Synthetic oligonucleotide
  Antisense strand to SEQ ID NO: 100178
cuaucggaaaggaauuccc

SEQ ID NO: 100180 - RNA, 19 nt, Artificial Sequence
  Description of Artificial Sequence: Synthetic oligonucleotide
  Sense strand starting at position 508 of SEQ ID NO: 1265
gcucuuccucauggugaga

SEQ ID NO: 100181 - RNA, 19 nt, Artificial Sequence
  Description of Artificial Sequence: Synthetic oligonucleotide
  Antisense strand to SEQ ID NO: 100180
ucucaccaugaggaagagc

SEQ ID NO: 100182 - RNA, 19 nt, Artificial Sequence
  Description of Artificial Sequence: Synthetic oligonucleotide
  Sense strand starting at position 616 of SEQ ID NO: 1265
gcuggagacagcugucauc

SEQ ID NO: 100183 - RNA, 19 nt, Artificial Sequence
  Description of Artificial Sequence: Synthetic oligonucleotide
  Antisense strand to SEQ ID NO: 100182
gaugacagcugucuccagc

SEQ ID NO: 100184 - RNA, 19 nt, Artificial Sequence
  Description of Artificial Sequence: Synthetic oligonucleotide
  Sense strand starting at position 662 of SEQ ID NO: 1265
ggcugcagggcaugaaaua

SEQ ID NO: 100185 - RNA, 19 nt, Artificial Sequence
  Description of Artificial Sequence: Synthetic oligonucleotide
  Antisense strand to SEQ ID NO: 100184
uauuucaugcccugcagcc

SEQ ID NO: 100186 - RNA, 19 nt, Artificial Sequence
  Description of Artificial Sequence: Synthetic oligonucleotide
  Sense strand starting at position 1438 of SEQ ID NO: 1265
caagaugguccaggaucau

SEQ ID NO: 100187 - RNA, 19 nt, Artificial Sequence
  Description of Artificial Sequence: Synthetic oligonucleotide
  Antisense strand to SEQ ID NO: 100186
augauccuggaccaucuug

SEQ ID NO: 100188 - RNA, 19 nt, Artificial Sequence
  Description of Artificial Sequence: Synthetic oligonucleotide
  Sense strand starting at position 2036 of SEQ ID NO: 1265
gcagucucagcuuaaggga

SEQ ID NO: 100189 - RNA, 19 nt, Artificial Sequence
  Description of Artificial Sequence: Synthetic oligonucleotide
  Antisense strand to SEQ ID NO: 100188
ucccuuaagcugagacugc

SEQ ID NO: 100190 - RNA, 19 nt, Artificial Sequence
  Description of Artificial Sequence: Synthetic oligonucleotide
  Sense strand starting at position 2112 of SEQ ID NO: 1265
ccuagcuuccgcuggacaa

SEQ ID NO: 100191 - RNA, 19 nt, Artificial Sequence
  Description of Artificial Sequence: Synthetic oligonucleotide
  Antisense strand to SEQ ID NO: 100190
uuguccagcggaagcuagg

SEQ ID NO: 100192 - RNA, 19 nt, Artificial Sequence
  Description of Artificial Sequence: Synthetic oligonucleotide
  Sense strand starting at position 2199 of SEQ ID NO: 1265
cuguucucugcccaggaga

SEQ ID NO: 100193 - RNA, 19 nt, Artificial Sequence
  Description of Artificial Sequence: Synthetic oligonucleotide
  Antisense strand to SEQ ID NO: 100192
ucuccugggcagagaacag

SEQ ID NO: 100194 - RNA, 19 nt, Artificial Sequence
  Description of Artificial Sequence: Synthetic oligonucleotide
  Sense strand starting at position 2213 of SEQ ID NO: 1265
ggagaugccucuccaguga

SEQ ID NO: 100195 - RNA, 19 nt, Artificial Sequence
  Description of Artificial Sequence: Synthetic oligonucleotide
  Antisense strand to SEQ ID NO: 100194
ucacuggagaggcaucucc

SEQ ID NO: 100196 - RNA, 19 nt, Artificial Sequence
  Description of Artificial Sequence: Synthetic oligonucleotide
  Sense strand starting at position 2270 of SEQ ID NO: 1265
ccagcuuguucuuccugua

SEQ ID NO: 100197 - RNA, 19 nt, Artificial Sequence
  Description of Artificial Sequence: Synthetic oligonucleotide
  Antisense strand to SEQ ID NO: 100196
uacaggaagaacaagcugg

SEQ ID NO: 100198 - RNA, 19 nt, Artificial Sequence
  Description of Artificial Sequence: Synthetic oligonucleotide
  Sense strand starting at position 2275 of SEQ ID NO: 1265
uuguucuuccuguagucua

SEQ ID NO: 100199 - RNA, 19 nt, Artificial Sequence
  Description of Artificial Sequence: Synthetic oligonucleotide
  Antisense strand to SEQ ID NO: 100198
uagacuacaggaagaacaa

SEQ ID NO: 100200 - RNA, 19 nt, Artificial Sequence
  Description of Artificial Sequence: Synthetic oligonucleotide
  Sense strand starting at position 2283 of SEQ ID NO: 1265
ccuguagucuagcucucau

SEQ ID NO: 100201 - RNA, 19 nt, Artificial Sequence
  Description of Artificial Sequence: Synthetic oligonucleotide
  Antisense strand to SEQ ID NO: 100200
augagagcuagacuacagg

SEQ ID NO: 100202 - RNA, 19 nt, Artificial Sequence
  Description of Artificial Sequence: Synthetic oligonucleotide
  Sense strand starting at position 2462 of SEQ ID NO: 1265
uagccagacuguucucaga

SEQ ID NO: 100203 - RNA, 19 nt, Artificial Sequence
  Description of Artificial Sequence: Synthetic oligonucleotide
  Antisense strand to SEQ ID NO: 100202
ucugagaacagucuggcua

SEQ ID NO: 100204 - RNA, 19 nt, Artificial Sequence
  Description of Artificial Sequence: Synthetic oligonucleotide
  Sense strand starting at position 2464 of SEQ ID NO: 1265
gccagacuguucucagaag

SEQ ID NO: 100205 - RNA, 19 nt, Artificial Sequence
  Description of Artificial Sequence: Synthetic oligonucleotide
  Antisense strand to SEQ ID NO: 100204
cuucugagaacagucuggc

SEQ ID NO: 100206 - RNA, 19 nt, Artificial Sequence
  Description of Artificial Sequence: Synthetic oligonucleotide
  Sense strand starting at position 2542 of SEQ ID NO: 1265
ugaacagcuuagggaaaua

SEQ ID NO: 100207 - RNA, 19 nt, Artificial Sequence
  Description of Artificial Sequence: Synthetic oligonucleotide
  Antisense strand to SEQ ID NO: 100206
uauuucccuaagcuguuca

SEQ ID NO: 100208 - RNA, 19 nt, Artificial Sequence
  Description of Artificial Sequence: Synthetic oligonucleotide
  Sense strand starting at position 2563 of SEQ ID NO: 1265
gggucucuaagcugggauu

SEQ ID NO: 100209 - RNA, 19 nt, Artificial Sequence
  Description of Artificial Sequence: Synthetic oligonucleotide
  Antisense strand to SEQ ID NO: 100208
aaucccagcuuagagaccc

SEQ ID NO: 100210 - RNA, 19 nt, Artificial Sequence
  Description of Artificial Sequence: Synthetic oligonucleotide
  Sense strand starting at position 2581 of SEQ ID NO: 1265
ucuggauaccuggguucua

SEQ ID NO: 100211 - RNA, 19 nt, Artificial Sequence
  Description of Artificial Sequence: Synthetic oligonucleotide
  Antisense strand to SEQ ID NO: 100210
uagaacccagguauccaga

SEQ ID NO: 100212 - RNA, 19 nt, Artificial Sequence
  Description of Artificial Sequence: Synthetic oligonucleotide
  Sense strand starting at position 2608 of SEQ ID NO: 1265
ucuggucuaagaugugauc

SEQ ID NO: 100213 - RNA, 19 nt, Artificial Sequence
  Description of Artificial Sequence: Synthetic oligonucleotide
  Antisense strand to SEQ ID NO: 100212
gaucacaucuuagaccaga

SEQ ID NO: 100214 - RNA, 19 nt, Artificial Sequence
  Description of Artificial Sequence: Synthetic oligonucleotide
  Sense strand starting at position 2610 of SEQ ID NO: 1265
uggucuaagaugugauccu

SEQ ID NO: 100215 - RNA, 19 nt, Artificial Sequence
  Description of Artificial Sequence: Synthetic oligonucleotide
  Antisense strand to SEQ ID NO: 100214
aggaucacaucuuagacca

SEQ ID NO: 100216 - RNA, 19 nt, Artificial Sequence
  Description of Artificial Sequence: Synthetic oligonucleotide
  Sense strand starting at position 2762 of SEQ ID NO: 1265
ggagaucagaauuguguaa

SEQ ID NO: 100217 - RNA, 19 nt, Artificial Sequence
  Description of Artificial Sequence: Synthetic oligonucleotide
  Antisense strand to SEQ ID NO: 100216
uuacacaauucugaucucc

SEQ ID NO: 100218 - RNA, 19 nt, Artificial Sequence
  Description of Artificial Sequence: Synthetic oligonucleotide
  Sense strand starting at position 2766 of SEQ ID NO: 1265
aucagaauuguguaaguca

SEQ ID NO: 100219 - RNA, 19 nt, Artificial Sequence
  Description of Artificial Sequence: Synthetic oligonucleotide
  Antisense strand to SEQ ID NO: 100218
ugacuuacacaauucugau

SEQ ID NO: 100220 - RNA, 19 nt, Artificial Sequence
  Description of Artificial Sequence: Synthetic oligonucleotide
  Sense strand starting at position 2846 of SEQ ID NO: 1265
caaugagggcgcuagaaga

SEQ ID NO: 100221 - RNA, 19 nt, Artificial Sequence
  Description of Artificial Sequence: Synthetic oligonucleotide
  Antisense strand to SEQ ID NO: 100220
ucuucuagcgcccucauug

SEQ ID NO: 100222 - RNA, 19 nt, Artificial Sequence
  Description of Artificial Sequence: Synthetic oligonucleotide
  Sense strand starting at position 2990 of SEQ ID NO: 1265
guggcagaggcucagucau

SEQ ID NO: 100223 - RNA, 19 nt, Artificial Sequence
  Description of Artificial Sequence: Synthetic oligonucleotide
  Antisense strand to SEQ ID NO: 100222
augacugagccucugccac

SEQ ID NO: 100224 - RNA, 19 nt, Artificial Sequence
  Description of Artificial Sequence: Synthetic oligonucleotide
  Sense strand starting at position 2996 of SEQ ID NO: 1265
gaggcucagucaucccaau

SEQ ID NO: 100225 - RNA, 19 nt, Artificial Sequence
  Description of Artificial Sequence: Synthetic oligonucleotide
  Antisense strand to SEQ ID NO: 100224
auugggaugacugagccuc

SEQ ID NO: 100226 - RNA, 19 nt, Artificial Sequence
  Description of Artificial Sequence: Synthetic oligonucleotide
  Sense strand starting at position 3054 of SEQ ID NO: 1265
ugugguuacugagcagcaa

SEQ ID NO: 100227 - RNA, 19 nt, Artificial Sequence
  Description of Artificial Sequence: Synthetic oligonucleotide
  Antisense strand to SEQ ID NO: 100226
uugcugcucaguaaccaca

SEQ ID NO: 100228 - RNA, 19 nt, Artificial Sequence
  Description of Artificial Sequence: Synthetic oligonucleotide
  Sense strand starting at position 3204 of SEQ ID NO: 1265
uagcgucucugaccuuauu

SEQ ID NO: 100229 - RNA, 19 nt, Artificial Sequence
  Description of Artificial Sequence: Synthetic oligonucleotide
  Antisense strand to SEQ ID NO: 100228
aauaaggucagagacgcua

SEQ ID NO: 100230 - RNA, 19 nt, Artificial Sequence
  Description of Artificial Sequence: Synthetic oligonucleotide
  Sense strand starting at position 3364 of SEQ ID NO: 1265
aguaacucccagugauaca

SEQ ID NO: 100231 - RNA, 19 nt, Artificial Sequence
  Description of Artificial Sequence: Synthetic oligonucleotide
  Antisense strand to SEQ ID NO: 100230
uguaucacugggaguuacu

SEQ ID NO: 100232 - RNA, 19 nt, Artificial Sequence
  Description of Artificial Sequence: Synthetic oligonucleotide
  Sense strand starting at position 3414 of SEQ ID NO: 1265
acucuugucuaggcagaga

SEQ ID NO: 100233 - RNA, 19 nt, Artificial Sequence
  Description of Artificial Sequence: Synthetic oligonucleotide
  Antisense strand to SEQ ID NO: 100232
ucucugccuagacaagagu

SEQ ID NO: 100234 - RNA, 19 nt, Artificial Sequence
  Description of Artificial Sequence: Synthetic oligonucleotide
  Sense strand starting at position 3443 of SEQ ID NO: 1265
gugugaaaucacgaggaau

SEQ ID NO: 100235 - RNA, 19 nt, Artificial Sequence
  Description of Artificial Sequence: Synthetic oligonucleotide
  Antisense strand to SEQ ID NO: 100234
auuccucgugauuucacac

SEQ ID NO: 100236 - RNA, 19 nt, Artificial Sequence
  Description of Artificial Sequence: Synthetic oligonucleotide
  Sense strand starting at position 3532 of SEQ ID NO: 1265
ggcgucacaggagaagaau

SEQ ID NO: 100237 - RNA, 19 nt, Artificial Sequence
  Description of Artificial Sequence: Synthetic oligonucleotide
  Antisense strand to SEQ ID NO: 100236
auucuucuccugugacgcc

SEQ ID NO: 100238 - RNA, 19 nt, Artificial Sequence
  Description of Artificial Sequence: Synthetic oligonucleotide
  Sense strand starting at position 3709 of SEQ ID NO: 1265
gaaagaacuucucagggcu

SEQ ID NO: 100239 - RNA, 19 nt, Artificial Sequence
  Description of Artificial Sequence: Synthetic oligonucleotide
  Antisense strand to SEQ ID NO: 100238
agcccugagaaguucuuuc

SEQ ID NO: 100240 - RNA, 19 nt, Artificial Sequence
  Description of Artificial Sequence: Synthetic oligonucleotide
  Sense strand starting at position 3722 of SEQ ID NO: 1265
agggcugaguccuuggacu

SEQ ID NO: 100241 - RNA, 19 nt, Artificial Sequence
  Description of Artificial Sequence: Synthetic oligonucleotide
  Antisense strand to SEQ ID NO: 100240
aguccaaggacucagcccu

SEQ ID NO: 100242 - RNA, 19 nt, Artificial Sequence
  Description of Artificial Sequence: Synthetic oligonucleotide
  Sense strand starting at position 3724 of SEQ ID NO: 1265
ggcugaguccuuggacuca

SEQ ID NO: 100243 - RNA, 19 nt, Artificial Sequence
  Description of Artificial Sequence: Synthetic oligonucleotide
  Antisense strand to SEQ ID NO: 100242
ugaguccaaggacucagcc

SEQ ID NO: 100244 - RNA, 19 nt, Artificial Sequence
  Description of Artificial Sequence: Synthetic oligonucleotide
  Sense strand starting at position 3757 of SEQ ID NO: 1265
gcucaaacuugcuuuguca

SEQ ID NO: 100245 - RNA, 19 nt, Artificial Sequence
  Description of Artificial Sequence: Synthetic oligonucleotide
  Antisense strand to SEQ ID NO: 100244
ugacaaagcaaguuugagc

SEQ ID NO: 100246 - RNA, 19 nt, Artificial Sequence
  Description of Artificial Sequence: Synthetic oligonucleotide
  Sense strand starting at position 3759 of SEQ ID NO: 1265
ucaaacuugcuuugucaga

SEQ ID NO: 100247 - RNA, 19 nt, Artificial Sequence
  Description of Artificial Sequence: Synthetic oligonucleotide
  Antisense strand to SEQ ID NO: 100246
ucugacaaagcaaguuuga

SEQ ID NO: 100248 - RNA, 19 nt, Artificial Sequence
  Description of Artificial Sequence: Synthetic oligonucleotide
  Sense strand starting at position 3761 of SEQ ID NO: 1265
aaacuugcuuugucagaag

SEQ ID NO: 100249 - RNA, 19 nt, Artificial Sequence
  Description of Artificial Sequence: Synthetic oligonucleotide
  Antisense strand to SEQ ID NO: 100248
cuucugacaaagcaaguuu

SEQ ID NO: 100250 - RNA, 19 nt, Artificial Sequence
  Description of Artificial Sequence: Synthetic oligonucleotide
  Sense strand starting at position 149 of SEQ ID NO: 1264
gguggacaucugugaacac

SEQ ID NO: 100251 - RNA, 19 nt, Artificial Sequence
  Description of Artificial Sequence: Synthetic oligonucleotide
  Antisense strand to SEQ ID NO: 100250
guguucacagauguccacc

SEQ ID NO: 100252 - RNA, 19 nt, Artificial Sequence
  Description of Artificial Sequence: Synthetic oligonucleotide
  Sense strand starting at position 334 of SEQ ID NO: 1264
acggcaaacuucccauagu

SEQ ID NO: 100253 - RNA, 19 nt, Artificial Sequence
  Description of Artificial Sequence: Synthetic oligonucleotide
  Antisense strand to SEQ ID NO: 100252
acuaugggaaguuugccgu

SEQ ID NO: 100254 - RNA, 19 nt, Artificial Sequence
  Description of Artificial Sequence: Synthetic oligonucleotide
  Sense strand starting at position 654 of SEQ ID NO: 1264
cugagaggacagcgugauu

SEQ ID NO: 100255 - RNA, 19 nt, Artificial Sequence
  Description of Artificial Sequence: Synthetic oligonucleotide
  Antisense strand to SEQ ID NO: 100254
aaucacgcuguccucucag

SEQ ID NO: 100256 - RNA, 19 nt, Artificial Sequence
  Description of Artificial Sequence: Synthetic oligonucleotide
  Sense strand starting at position 659 of SEQ ID NO: 1264
aggacagcgugauucacua

SEQ ID NO: 100257 - RNA, 19 nt, Artificial Sequence
  Description of Artificial Sequence: Synthetic oligonucleotide
  Antisense strand to SEQ ID NO: 100256
uagugaaucacgcuguccu

SEQ ID NO: 100258 - RNA, 19 nt, Artificial Sequence
  Description of Artificial Sequence: Synthetic oligonucleotide
  Sense strand starting at position 857 of SEQ ID NO: 1264
agagaacucuugcccagau

SEQ ID NO: 100259 - RNA, 19 nt, Artificial Sequence
  Description of Artificial Sequence: Synthetic oligonucleotide
  Antisense strand to SEQ ID NO: 100258
aucugggcaagaguucucu

SEQ ID NO: 100260 - RNA, 19 nt, Artificial Sequence
  Description of Artificial Sequence: Synthetic oligonucleotide
  Sense strand starting at position 858 of SEQ ID NO: 1264
gagaacucuugcccagaug

SEQ ID NO: 100261 - RNA, 19 nt, Artificial Sequence
  Description of Artificial Sequence: Synthetic oligonucleotide
  Antisense strand to SEQ ID NO: 100260
caucugggcaagaguucuc

SEQ ID NO: 100262 - RNA, 19 nt, Artificial Sequence
  Description of Artificial Sequence: Synthetic oligonucleotide
  Sense strand starting at position 859 of SEQ ID NO: 1264
agaacucuugcccagaugu

SEQ ID NO: 100263 - RNA, 19 nt, Artificial Sequence
  Description of Artificial Sequence: Synthetic oligonucleotide
  Antisense strand to SEQ ID NO: 100262
acaucugggcaagaguucu

SEQ ID NO: 100264 - RNA, 19 nt, Artificial Sequence
  Description of Artificial Sequence: Synthetic oligonucleotide
  Sense strand starting at position 887 of SEQ ID NO: 1264
gcaaacuucuggccaggga

SEQ ID NO: 100265 - RNA, 19 nt, Artificial Sequence
  Description of Artificial Sequence: Synthetic oligonucleotide
  Antisense strand to SEQ ID NO: 100264
ucccuggccagaaguuugc

SEQ ID NO: 100266 - RNA, 19 nt, Artificial Sequence
  Description of Artificial Sequence: Synthetic oligonucleotide
  Sense strand starting at position 1081 of SEQ ID NO: 1264
cccggugucaucugaacaa

SEQ ID NO: 100267 - RNA, 19 nt, Artificial Sequence
  Description of Artificial Sequence: Synthetic oligonucleotide
  Antisense strand to SEQ ID NO: 100266
uuguucagaugacaccggg

SEQ ID NO: 100268 - RNA, 19 nt, Artificial Sequence
  Description of Artificial Sequence: Synthetic oligonucleotide
  Sense strand starting at position 1085 of SEQ ID NO: 1264
gugucaucugaacaacauc

SEQ ID NO: 100269 - RNA, 19 nt, Artificial Sequence
  Description of Artificial Sequence: Synthetic oligonucleotide
  Antisense strand to SEQ ID NO: 100268
gauguuguucagaugacac

SEQ ID NO: 100270 - RNA, 19 nt, Artificial Sequence
  Description of Artificial Sequence: Synthetic oligonucleotide
  Sense strand starting at position 1317 of SEQ ID NO: 1264
gcucggaggccgucguaaa

SEQ ID NO: 100271 - RNA, 19 nt, Artificial Sequence
  Description of Artificial Sequence: Synthetic oligonucleotide
  Antisense strand to SEQ ID NO: 100270
uuuacgacggccuccgagc

SEQ ID NO: 100272 - RNA, 19 nt, Artificial Sequence
  Description of Artificial Sequence: Synthetic oligonucleotide
  Sense strand starting at position 1879 of SEQ ID NO: 1264
ucggcuguuguugauauuu

SEQ ID NO: 100273 - RNA, 19 nt, Artificial Sequence
  Description of Artificial Sequence: Synthetic oligonucleotide
  Antisense strand to SEQ ID NO: 100272
aaauaucaacaacagccga

SEQ ID NO: 100274 - RNA, 19 nt, Artificial Sequence
  Description of Artificial Sequence: Synthetic oligonucleotide
  Sense strand starting at position 2447 of SEQ ID NO: 1264
gugggagucuaaguagaua

SEQ ID NO: 100275 - RNA, 19 nt, Artificial Sequence
  Description of Artificial Sequence: Synthetic oligonucleotide
  Antisense strand to SEQ ID NO: 100274
uaucuacuuagacucccac

SEQ ID NO: 100276 - RNA, 19 nt, Artificial Sequence
  Description of Artificial Sequence: Synthetic oligonucleotide
  Sense strand starting at position 2507 of SEQ ID NO: 1264
cccacuuggugugugacaa

SEQ ID NO: 100277 - RNA, 19 nt, Artificial Sequence
  Description of Artificial Sequence: Synthetic oligonucleotide
  Antisense strand to SEQ ID NO: 100276
uugucacacaccaaguggg

SEQ ID NO: 100278 - RNA, 19 nt, Artificial Sequence
  Description of Artificial Sequence: Synthetic oligonucleotide
  Sense strand starting at position 2508 of SEQ ID NO: 1264
ccacuuggugugugacaaa

SEQ ID NO: 100279 - RNA, 19 nt, Artificial Sequence
  Description of Artificial Sequence: Synthetic oligonucleotide
  Antisense strand to SEQ ID NO: 100278
uuugucacacaccaagugg

SEQ ID NO: 100280 - RNA, 19 nt, Artificial Sequence
  Description of Artificial Sequence: Synthetic oligonucleotide
  Sense strand starting at position 2560 of SEQ ID NO: 1264
ggguguuaccuagggagcu

SEQ ID NO: 100281 - RNA, 19 nt, Artificial Sequence
  Description of Artificial Sequence: Synthetic oligonucleotide
  Antisense strand to SEQ ID NO: 100280
agcucccuagguaacaccc

SEQ ID NO: 100282 - RNA, 19 nt, Artificial Sequence
  Description of Artificial Sequence: Synthetic oligonucleotide
  Sense strand starting at position 2663 of SEQ ID NO: 1264
auaguucuugggugaccua

SEQ ID NO: 100283 - RNA, 19 nt, Artificial Sequence
  Description of Artificial Sequence: Synthetic oligonucleotide
  Antisense strand to SEQ ID NO: 100282
uaggucacccaagaacuau

SEQ ID NO: 100284 - RNA, 19 nt, Artificial Sequence
  Description of Artificial Sequence: Synthetic oligonucleotide
  Sense strand starting at position 2664 of SEQ ID NO: 1264
uaguucuugggugaccuaa

SEQ ID NO: 100285 - RNA, 19 nt, Artificial Sequence
  Description of Artificial Sequence: Synthetic oligonucleotide
  Antisense strand to SEQ ID NO: 100284
uuaggucacccaagaacua

SEQ ID NO: 100286 - RNA, 19 nt, Artificial Sequence
  Description of Artificial Sequence: Synthetic oligonucleotide
  Sense strand starting at position 2866 of SEQ ID NO: 1264
auauuuacgugcccuacaa

SEQ ID NO: 100287 - RNA, 19 nt, Artificial Sequence
  Description of Artificial Sequence: Synthetic oligonucleotide
  Antisense strand to SEQ ID NO: 100286
uuguagggcacguaaauau

SEQ ID NO: 100288 - RNA, 19 nt, Artificial Sequence
  Description of Artificial Sequence: Synthetic oligonucleotide
  Sense strand starting at position 2961 of SEQ ID NO: 1264
gcuuucucccaagagcgua

SEQ ID NO: 100289 - RNA, 19 nt, Artificial Sequence
  Description of Artificial Sequence: Synthetic oligonucleotide
  Antisense strand to SEQ ID NO: 100288
uacgcucuugggagaaagc

SEQ ID NO: 100290 - RNA, 19 nt, Artificial Sequence
  Description of Artificial Sequence: Synthetic oligonucleotide
  Sense strand starting at position 2987 of SEQ ID NO: 1264
gauggcaucuggcuuagau

SEQ ID NO: 100291 - RNA, 19 nt, Artificial Sequence
  Description of Artificial Sequence: Synthetic oligonucleotide
  Antisense strand to SEQ ID NO: 100290
aucuaagccagaugccauc

SEQ ID NO: 100292 - RNA, 19 nt, Artificial Sequence
  Description of Artificial Sequence: Synthetic oligonucleotide
  Sense strand starting at position 3006 of SEQ ID NO: 1264
cucaaagaaccuugcagaa

SEQ ID NO: 100293 - RNA, 19 nt, Artificial Sequence
  Description of Artificial Sequence: Synthetic oligonucleotide
  Antisense strand to SEQ ID NO: 100292
uucugcaagguucuuugag

SEQ ID NO: 100294 - RNA, 19 nt, Artificial Sequence
  Description of Artificial Sequence: Synthetic oligonucleotide
  Sense strand starting at position 3441 of SEQ ID NO: 1264
augucauugugguuagaaa

SEQ ID NO: 100295 - RNA, 19 nt, Artificial Sequence
  Description of Artificial Sequence: Synthetic oligonucleotide
  Antisense strand to SEQ ID NO: 100294
uuucuaaccacaaugacau

SEQ ID NO: 100296 - RNA, 19 nt, Artificial Sequence
  Description of Artificial Sequence: Synthetic oligonucleotide
  Sense strand starting at position 3442 of SEQ ID NO: 1264
ugucauugugguuagaaau

SEQ ID NO: 100297 - RNA, 19 nt, Artificial Sequence
  Description of Artificial Sequence: Synthetic oligonucleotide
  Antisense strand to SEQ ID NO: 100296
auuucuaaccacaaugaca

SEQ ID NO: 100298 - RNA, 19 nt, Artificial Sequence
  Description of Artificial Sequence: Synthetic oligonucleotide
  Sense strand starting at position 3448 of SEQ ID NO: 1264
ugugguuagaaaugucaac

SEQ ID NO: 100299 - RNA, 19 nt, Artificial Sequence
  Description of Artificial Sequence: Synthetic oligonucleotide
  Antisense strand to SEQ ID NO: 100298
guugacauuucuaaccaca

SEQ ID NO: 100300 - RNA, 19 nt, Artificial Sequence
  Description of Artificial Sequence: Synthetic oligonucleotide
  Sense strand starting at position 3586 of SEQ ID NO: 1264
guagcuaacucagaaauuu

SEQ ID NO: 100301 - RNA, 19 nt, Artificial Sequence
  Description of Artificial Sequence: Synthetic oligonucleotide
  Antisense strand to SEQ ID NO: 100300
aaauuucugaguuagcuac

SEQ ID NO: 100302 - RNA, 19 nt, Artificial Sequence
  Description of Artificial Sequence: Synthetic oligonucleotide
  Sense strand starting at position 3595 of SEQ ID NO: 1264
ucagaaauuuagugugaag

SEQ ID NO: 100303 - RNA, 19 nt, Artificial Sequence
  Description of Artificial Sequence: Synthetic oligonucleotide
  Antisense strand to SEQ ID NO: 100302
cuucacacuaaauuucuga

SEQ ID NO: 100304 - RNA, 19 nt, Artificial Sequence
  Description of Artificial Sequence: Synthetic oligonucleotide
  Sense strand starting at position 3598 of SEQ ID NO: 1264
gaaauuuagugugaagauu

SEQ ID NO: 100305 - RNA, 19 nt, Artificial Sequence
  Description of Artificial Sequence: Synthetic oligonucleotide
  Antisense strand to SEQ ID NO: 100304
aaucuucacacuaaauuuc

SEQ ID NO: 100306 - RNA, 19 nt, Artificial Sequence
  Description of Artificial Sequence: Synthetic oligonucleotide
  Sense strand starting at position 3629 of SEQ ID NO: 1264
cuaagcagauugcuuagua

SEQ ID NO: 100307 - RNA, 19 nt, Artificial Sequence
  Description of Artificial Sequence: Synthetic oligonucleotide
  Antisense strand to SEQ ID NO: 100306
uacuaagcaaucugcuuag

SEQ ID NO: 100308 - RNA, 19 nt, Artificial Sequence
  Description of Artificial Sequence: Synthetic oligonucleotide
  Sense strand starting at position 3651 of SEQ ID NO: 1264
ugucuuaugcuguauaaua

SEQ ID NO: 100309 - RNA, 19 nt, Artificial Sequence
  Description of Artificial Sequence: Synthetic oligonucleotide
  Antisense strand to SEQ ID NO: 100308
uauuauacagcauaagaca

SEQ ID NO: 100310 - RNA, 19 nt, Artificial Sequence
  Description of Artificial Sequence: Synthetic oligonucleotide
  Sense strand starting at position 3693 of SEQ ID NO: 1264
agggcuggucugcaaagaa

SEQ ID NO: 100311 - RNA, 19 nt, Artificial Sequence
  Description of Artificial Sequence: Synthetic oligonucleotide
  Antisense strand to SEQ ID NO: 100310
uucuuugcagaccagcccu

SEQ ID NO: 100312 - RNA, 19 nt, Artificial Sequence
  Description of Artificial Sequence: Synthetic oligonucleotide
  Sense strand starting at position 3721 of SEQ ID NO: 1264
ccuccauuggcucaugcaa

SEQ ID NO: 100313 - RNA, 19 nt, Artificial Sequence
  Description of Artificial Sequence: Synthetic oligonucleotide
  Antisense strand to SEQ ID NO: 100312
uugcaugagccaauggagg

SEQ ID NO: 100314 - RNA, 19 nt, Artificial Sequence
  Description of Artificial Sequence: Synthetic oligonucleotide
  Sense strand starting at position 3732 of SEQ ID NO: 1264
ucaugcaagccuuaaagga

SEQ ID NO: 100315 - RNA, 19 nt, Artificial Sequence
  Description of Artificial Sequence: Synthetic oligonucleotide
  Antisense strand to SEQ ID NO: 100314
uccuuuaaggcuugcauga

SEQ ID NO: 100316 - RNA, 19 nt, Artificial Sequence
  Description of Artificial Sequence: Synthetic oligonucleotide
  Sense strand starting at position 3750 of SEQ ID NO: 1264
aggugaguucaguggaauu

SEQ ID NO: 100317 - RNA, 19 nt, Artificial Sequence
  Description of Artificial Sequence: Synthetic oligonucleotide
  Antisense strand to SEQ ID NO: 100316
aauuccacugaacucaccu

SEQ ID NO: 100318 - RNA, 19 nt, Artificial Sequence
  Description of Artificial Sequence: Synthetic oligonucleotide
  Sense strand starting at position 3761 of SEQ ID NO: 1264
guggaauugcucugcaaau

SEQ ID NO: 100319 - RNA, 19 nt, Artificial Sequence
  Description of Artificial Sequence: Synthetic oligonucleotide
  Antisense strand to SEQ ID NO: 100318
auuugcagagcaauuccac

SEQ ID NO: 100320 - RNA, 19 nt, Artificial Sequence
  Description of Artificial Sequence: Synthetic oligonucleotide
  Sense strand starting at position 3763 of SEQ ID NO: 1264
ggaauugcucugcaaauag

SEQ ID NO: 100321 - RNA, 19 nt, Artificial Sequence
  Description of Artificial Sequence: Synthetic oligonucleotide
  Antisense strand to SEQ ID NO: 100320
cuauuugcagagcaauucc

SEQ ID NO: 100322 - RNA, 19 nt, Artificial Sequence
  Description of Artificial Sequence: Synthetic oligonucleotide
  Sense strand starting at position 3782 of SEQ ID NO: 1264
guuggagacuuaucuugug

SEQ ID NO: 100323 - RNA, 19 nt, Artificial Sequence
  Description of Artificial Sequence: Synthetic oligonucleotide
  Antisense strand to SEQ ID NO: 100322
cacaagauaagucuccaac

SEQ ID NO: 100324 - RNA, 19 nt, Artificial Sequence
  Description of Artificial Sequence: Synthetic oligonucleotide
  Sense strand starting at position 3790 of SEQ ID NO: 1264
cuuaucuuguguguccuaa

SEQ ID NO: 100325 - RNA, 19 nt, Artificial Sequence
  Description of Artificial Sequence: Synthetic oligonucleotide
  Antisense strand to SEQ ID NO: 100324
uuaggacacacaagauaag

SEQ ID NO: 100326 - RNA, 19 nt, Artificial Sequence
  Description of Artificial Sequence: Synthetic oligonucleotide
  Sense strand starting at position 3792 of SEQ ID NO: 1264
uaucuuguguguccuaaga

SEQ ID NO: 100327 - RNA, 19 nt, Artificial Sequence
  Description of Artificial Sequence: Synthetic oligonucleotide
  Antisense strand to SEQ ID NO: 100326
ucuuaggacacacaagaua

SEQ ID NO: 100328 - RNA, 19 nt, Artificial Sequence
  Description of Artificial Sequence: Synthetic oligonucleotide
  Sense strand starting at position 3914 of SEQ ID NO: 1264
uucucaguuccucauugga

SEQ ID NO: 100329 - RNA, 19 nt, Artificial Sequence
  Description of Artificial Sequence: Synthetic oligonucleotide
  Antisense strand to SEQ ID NO: 100328
uccaaugaggaacugagaa

SEQ ID NO: 100330 - RNA, 19 nt, Artificial Sequence
  Description of Artificial Sequence: Synthetic oligonucleotide
  Sense strand starting at position 90 of SEQ ID NO: 1266
gcaggaugugaaggacaga

SEQ ID NO: 100331 - RNA, 19 nt, Artificial Sequence
  Description of Artificial Sequence: Synthetic oligonucleotide
  Antisense strand to SEQ ID NO: 100330
ucuguccuucacauccugc

SEQ ID NO: 100332 - RNA, 19 nt, Artificial Sequence
  Description of Artificial Sequence: Synthetic oligonucleotide
  Sense strand starting at position 502 of SEQ ID NO: 1266
acuguugugucccuucuga

SEQ ID NO: 100333 - RNA, 19 nt, Artificial Sequence
  Description of Artificial Sequence: Synthetic oligonucleotide
  Antisense strand to SEQ ID NO: 100332
ucagaagggacacaacagu

SEQ ID NO: 100334 - RNA, 19 nt, Artificial Sequence
  Description of Artificial Sequence: Synthetic oligonucleotide
  Sense strand starting at position 525 of SEQ ID NO: 1266
gcagcucuccucggacaaa

SEQ ID NO: 100335 - RNA, 19 nt, Artificial Sequence
  Description of Artificial Sequence: Synthetic oligonucleotide
  Antisense strand to SEQ ID NO: 100334
uuuguccgaggagagcugc

SEQ ID NO: 100336 - RNA, 19 nt, Artificial Sequence
  Description of Artificial Sequence: Synthetic oligonucleotide
  Sense strand starting at position 659 of SEQ ID NO: 1266
gccuccacuuucuggagua

SEQ ID NO: 100337 - RNA, 19 nt, Artificial Sequence
  Description of Artificial Sequence: Synthetic oligonucleotide
  Antisense strand to SEQ ID NO: 100336
uacuccagaaaguggaggc

SEQ ID NO: 100338 - RNA, 19 nt, Artificial Sequence
  Description of Artificial Sequence: Synthetic oligonucleotide
  Sense strand starting at position 660 of SEQ ID NO: 1266
ccuccacuuucuggaguaa

SEQ ID NO: 100339 - RNA, 19 nt, Artificial Sequence
  Description of Artificial Sequence: Synthetic oligonucleotide
  Antisense strand to SEQ ID NO: 100338
uuacuccagaaaguggagg

SEQ ID NO: 100340 - RNA, 19 nt, Artificial Sequence
  Description of Artificial Sequence: Synthetic oligonucleotide
  Sense strand starting at position 661 of SEQ ID NO: 1266
cuccacuuucuggaguaaa

SEQ ID NO: 100341 - RNA, 19 nt, Artificial Sequence
  Description of Artificial Sequence: Synthetic oligonucleotide
  Antisense strand to SEQ ID NO: 100340
uuuacuccagaaaguggag

SEQ ID NO: 100342 - RNA, 19 nt, Artificial Sequence
  Description of Artificial Sequence: Synthetic oligonucleotide
  Sense strand starting at position 739 of SEQ ID NO: 1266
ggcagcuucuucugucagu

SEQ ID NO: 100343 - RNA, 19 nt, Artificial Sequence
  Description of Artificial Sequence: Synthetic oligonucleotide
  Antisense strand to SEQ ID NO: 100342
acugacagaagaagcugcc

SEQ ID NO: 100344 - RNA, 19 nt, Artificial Sequence
  Description of Artificial Sequence: Synthetic oligonucleotide
  Sense strand starting at position 2324 of SEQ ID NO: 1266
cugcucgucucaugcggaa

SEQ ID NO: 100345 - RNA, 19 nt, Artificial Sequence
  Description of Artificial Sequence: Synthetic oligonucleotide
  Antisense strand to SEQ ID NO: 100344
uuccgcaugagacgagcag

SEQ ID NO: 100346 - RNA, 19 nt, Artificial Sequence
  Description of Artificial Sequence: Synthetic oligonucleotide
  Sense strand starting at position 2326 of SEQ ID NO: 1266
gcucgucucaugcggaaag

SEQ ID NO: 100347 - RNA, 19 nt, Artificial Sequence
  Description of Artificial Sequence: Synthetic oligonucleotide
  Antisense strand to SEQ ID NO: 100346
cuuuccgcaugagacgagc

SEQ ID NO: 100348 - RNA, 19 nt, Artificial Sequence
  Description of Artificial Sequence: Synthetic oligonucleotide
  Sense strand starting at position 2327 of SEQ ID NO: 1266
cucgucucaugcggaaagu

SEQ ID NO: 100349 - RNA, 19 nt, Artificial Sequence
  Description of Artificial Sequence: Synthetic oligonucleotide
  Antisense strand to SEQ ID NO: 100348
acuuuccgcaugagacgag

SEQ ID NO: 100350 - RNA, 19 nt, Artificial Sequence
  Description of Artificial Sequence: Synthetic oligonucleotide
  Sense strand starting at position 2654 of SEQ ID NO: 1266
cugcauuguugguucccaa

SEQ ID NO: 100351 - RNA, 19 nt, Artificial Sequence
  Description of Artificial Sequence: Synthetic oligonucleotide
  Antisense strand to SEQ ID NO: 100350
uugggaaccaacaaugcag

SEQ ID NO: 100352 - RNA, 19 nt, Artificial Sequence
  Description of Artificial Sequence: Synthetic oligonucleotide
  Sense strand starting at position 2705 of SEQ ID NO: 1266
ugcugcauguucuuggaca

SEQ ID NO: 100353 - RNA, 19 nt, Artificial Sequence
  Description of Artificial Sequence: Synthetic oligonucleotide
  Antisense strand to SEQ ID NO: 100352
uguccaagaacaugcagca

SEQ ID NO: 100354 - RNA, 19 nt, Artificial Sequence
  Description of Artificial Sequence: Synthetic oligonucleotide
  Sense strand starting at position 2707 of SEQ ID NO: 1266
cugcauguucuuggacagu

SEQ ID NO: 100355 - RNA, 19 nt, Artificial Sequence
  Description of Artificial Sequence: Synthetic oligonucleotide
  Antisense strand to SEQ ID NO: 100354
acuguccaagaacaugcag

SEQ ID NO: 100356 - RNA, 19 nt, Artificial Sequence
  Description of Artificial Sequence: Synthetic oligonucleotide
  Sense strand starting at position 2863 of SEQ ID NO: 1266
gggugaggcuucugcgaag

SEQ ID NO: 100357 - RNA, 19 nt, Artificial Sequence
  Description of Artificial Sequence: Synthetic oligonucleotide
  Antisense strand to SEQ ID NO: 100356
cuucgcagaagccucaccc

SEQ ID NO: 100358 - RNA, 19 nt, Artificial Sequence
  Description of Artificial Sequence: Synthetic oligonucleotide
  Sense strand starting at position 2866 of SEQ ID NO: 1266
ugaggcuucugcgaagcaa

SEQ ID NO: 100359 - RNA, 19 nt, Artificial Sequence
  Description of Artificial Sequence: Synthetic oligonucleotide
  Antisense strand to SEQ ID NO: 100358
uugcuucgcagaagccuca

SEQ ID NO: 100360 - RNA, 19 nt, Artificial Sequence
  Description of Artificial Sequence: Synthetic oligonucleotide
  Sense strand starting at position 2870 of SEQ ID NO: 1266
gcuucugcgaagcaagauu

SEQ ID NO: 100361 - RNA, 19 nt, Artificial Sequence
  Description of Artificial Sequence: Synthetic oligonucleotide
  Antisense strand to SEQ ID NO: 100360
aaucuugcuucgcagaagc

SEQ ID NO: 100362 - RNA, 19 nt, Artificial Sequence
  Description of Artificial Sequence: Synthetic oligonucleotide
  Sense strand starting at position 2965 of SEQ ID NO: 1266
gauggagucucugguguca

SEQ ID NO: 100363 - RNA, 19 nt, Artificial Sequence
  Description of Artificial Sequence: Synthetic oligonucleotide
  Antisense strand to SEQ ID NO: 100362
ugacaccagagacuccauc

SEQ ID NO: 100364 - RNA, 19 nt, Artificial Sequence
  Description of Artificial Sequence: Synthetic oligonucleotide
  Sense strand starting at position 2976 of SEQ ID NO: 1266
uggugucagagcuaccaga

SEQ ID NO: 100365 - RNA, 19 nt, Artificial Sequence
  Description of Artificial Sequence: Synthetic oligonucleotide
  Antisense strand to SEQ ID NO: 100364
ucugguagcucugacacca

SEQ ID NO: 100366 - RNA, 19 nt, Artificial Sequence
  Description of Artificial Sequence: Synthetic oligonucleotide
  Sense strand starting at position 3207 of SEQ ID NO: 1266
ggaggaacuucgcuaauag

SEQ ID NO: 100367 - RNA, 19 nt, Artificial Sequence
  Description of Artificial Sequence: Synthetic oligonucleotide
  Antisense strand to SEQ ID NO: 100366
cuauuagcgaaguuccucc

SEQ ID NO: 100368 - RNA, 19 nt, Artificial Sequence
  Description of Artificial Sequence: Synthetic oligonucleotide
  Sense strand starting at position 3276 of SEQ ID NO: 1266
ccugacugucccgauagga

SEQ ID NO: 100369 - RNA, 19 nt, Artificial Sequence
  Description of Artificial Sequence: Synthetic oligonucleotide
  Antisense strand to SEQ ID NO: 100368
uccuaucgggacagucagg

SEQ ID NO: 100370 - RNA, 19 nt, Artificial Sequence
  Description of Artificial Sequence: Synthetic oligonucleotide
  Sense strand starting at position 3514 of SEQ ID NO: 1266
cgccuaacccuguaaucug

SEQ ID NO: 100371 - RNA, 19 nt, Artificial Sequence
  Description of Artificial Sequence: Synthetic oligonucleotide
  Antisense strand to SEQ ID NO: 100370
cagauuacaggguuaggcg

SEQ ID NO: 100372 - RNA, 19 nt, Artificial Sequence
  Description of Artificial Sequence: Synthetic oligonucleotide
  Sense strand starting at position 3522 of SEQ ID NO: 1266
ccuguaaucugcugcuuau

SEQ ID NO: 100373 - RNA, 19 nt, Artificial Sequence
  Description of Artificial Sequence: Synthetic oligonucleotide
  Antisense strand to SEQ ID NO: 100372
auaagcagcagauuacagg

SEQ ID NO: 100374 - RNA, 19 nt, Artificial Sequence
  Description of Artificial Sequence: Synthetic oligonucleotide
  Sense strand starting at position 3525 of SEQ ID NO: 1266
guaaucugcugcuuauaaa

SEQ ID NO: 100375 - RNA, 19 nt, Artificial Sequence
  Description of Artificial Sequence: Synthetic oligonucleotide
  Antisense strand to SEQ ID NO: 100374
uuuauaagcagcagauuac

SEQ ID NO: 100376 - RNA, 19 nt, Artificial Sequence
  Description of Artificial Sequence: Synthetic oligonucleotide
  Sense strand starting at position 3889 of SEQ ID NO: 1266
cccugagagcuguggaaug

SEQ ID NO: 100377 - RNA, 19 nt, Artificial Sequence
  Description of Artificial Sequence: Synthetic oligonucleotide
  Antisense strand to SEQ ID NO: 100376
cauuccacagcucucaggg

SEQ ID NO: 100378 - RNA, 19 nt, Artificial Sequence
  Description of Artificial Sequence: Synthetic oligonucleotide
  Sense strand starting at position 3925 of SEQ ID NO: 1266
ucugauuccugcucuuuga

SEQ ID NO: 100379 - RNA, 19 nt, Artificial Sequence
  Description of Artificial Sequence: Synthetic oligonucleotide
  Antisense strand to SEQ ID NO: 100378
ucaaagagcaggaaucaga

SEQ ID NO: 100380 - RNA, 19 nt, Artificial Sequence
  Description of Artificial Sequence: Synthetic oligonucleotide
  Sense strand starting at position 3928 of SEQ ID NO: 1266
gauuccugcucuuugagag

SEQ ID NO: 100381 - RNA, 19 nt, Artificial Sequence
  Description of Artificial Sequence: Synthetic oligonucleotide
  Antisense strand to SEQ ID NO: 100380
cucucaaagagcaggaauc

SEQ ID NO: 100382 - RNA, 19 nt, Artificial Sequence
  Description of Artificial Sequence: Synthetic oligonucleotide
  Sense strand starting at position 3980 of SEQ ID NO: 1266
gugucaagugaaugaauua

SEQ ID NO: 100383 - RNA, 19 nt, Artificial Sequence
  Description of Artificial Sequence: Synthetic oligonucleotide
  Antisense strand to SEQ ID NO: 100382
uaauucauucacuugacac

SEQ ID NO: 100384 - RNA, 19 nt, Artificial Sequence
  Description of Artificial Sequence: Synthetic oligonucleotide
  Sense strand starting at position 3942 of SEQ ID NO: 1267
gcugaaguccuaggucaaa

SEQ ID NO: 100385 - RNA, 19 nt, Artificial Sequence
  Description of Artificial Sequence: Synthetic oligonucleotide
  Antisense strand to SEQ ID NO: 100384
uuugaccuaggacuucagc

SEQ ID NO: 100386 - RNA, 19 nt, Artificial Sequence
  Description of Artificial Sequence: Synthetic oligonucleotide
  Sense strand starting at position 3771 of SEQ ID NO: 1267
ggacucaccgcugaagaau

SEQ ID NO: 100387 - RNA, 19 nt, Artificial Sequence
  Description of Artificial Sequence: Synthetic oligonucleotide
  Antisense strand to SEQ ID NO: 100386
auucuucagcggugagucc

SEQ ID NO: 100388 - RNA, 19 nt, Artificial Sequence
  Description of Artificial Sequence: Synthetic oligonucleotide
  Sense strand starting at position 3770 of SEQ ID NO: 1267
aggacucaccgcugaagaa

SEQ ID NO: 100389 - RNA, 19 nt, Artificial Sequence
  Description of Artificial Sequence: Synthetic oligonucleotide
  Antisense strand to SEQ ID NO: 100388
uucuucagcggugaguccu

SEQ ID NO: 100390 - RNA, 19 nt, Artificial Sequence
  Description of Artificial Sequence: Synthetic oligonucleotide
  Sense strand starting at position 3751 of SEQ ID NO: 1267
ugaguauaggcuggacuua

SEQ ID NO: 100391 - RNA, 19 nt, Artificial Sequence
  Description of Artificial Sequence: Synthetic oligonucleotide
  Antisense strand to SEQ ID NO: 100390
uaaguccagccuauacuca

SEQ ID NO: 100392 - RNA, 19 nt, Artificial Sequence
  Description of Artificial Sequence: Synthetic oligonucleotide
  Sense strand starting at position 3499 of SEQ ID NO: 1267
gcucacauggcagagaguu

SEQ ID NO: 100393 - RNA, 19 nt, Artificial Sequence
  Description of Artificial Sequence: Synthetic oligonucleotide
  Antisense strand to SEQ ID NO: 100392
aacucucugccaugugagc

SEQ ID NO: 100394 - RNA, 19 nt, Artificial Sequence
  Description of Artificial Sequence: Synthetic oligonucleotide
  Sense strand starting at position 3360 of SEQ ID NO: 1267
aagacuauguggcuuaaac

SEQ ID NO: 100395 - RNA, 19 nt, Artificial Sequence
  Description of Artificial Sequence: Synthetic oligonucleotide
  Antisense strand to SEQ ID NO: 100394
guuuaagccacauagucuu

SEQ ID NO: 100396 - RNA, 19 nt, Artificial Sequence
  Description of Artificial Sequence: Synthetic oligonucleotide
  Sense strand starting at position 3031 of SEQ ID NO: 1267
ugauguaucaggugacaag

SEQ ID NO: 100397 - RNA, 19 nt, Artificial Sequence
  Description of Artificial Sequence: Synthetic oligonucleotide
  Antisense strand to SEQ ID NO: 100396
cuugucaccugauacauca

SEQ ID NO: 100398 - RNA, 19 nt, Artificial Sequence
  Description of Artificial Sequence: Synthetic oligonucleotide
  Sense strand starting at position 2949 of SEQ ID NO: 1267
ugaccagggucuucucaua

SEQ ID NO: 100399 - RNA, 19 nt, Artificial Sequence
  Description of Artificial Sequence: Synthetic oligonucleotide
  Antisense strand to SEQ ID NO: 100398
uaugagaagacccugguca

SEQ ID NO: 100400 - RNA, 19 nt, Artificial Sequence
  Description of Artificial Sequence: Synthetic oligonucleotide
  Sense strand starting at position 2906 of SEQ ID NO: 1267
augccaugagcugaccaua

SEQ ID NO: 100401 - RNA, 19 nt, Artificial Sequence
  Description of Artificial Sequence: Synthetic oligonucleotide
  Antisense strand to SEQ ID NO: 100400
uauggucagcucauggcau

SEQ ID NO: 100402 - RNA, 19 nt, Artificial Sequence
  Description of Artificial Sequence: Synthetic oligonucleotide
  Sense strand starting at position 2901 of SEQ ID NO: 1267
uggaaaugccaugagcuga

SEQ ID NO: 100403 - RNA, 19 nt, Artificial Sequence
  Description of Artificial Sequence: Synthetic oligonucleotide
  Antisense strand to SEQ ID NO: 100402
ucagcucauggcauuucca

SEQ ID NO: 100404 - RNA, 19 nt, Artificial Sequence
  Description of Artificial Sequence: Synthetic oligonucleotide
  Sense strand starting at position 2888 of SEQ ID NO: 1267
ggcaccuucucuguggaaa

SEQ ID NO: 100405 - RNA, 19 nt, Artificial Sequence
  Description of Artificial Sequence: Synthetic oligonucleotide
  Antisense strand to SEQ ID NO: 100404
uuuccacagagaaggugcc

SEQ ID NO: 100406 - RNA, 19 nt, Artificial Sequence
  Description of Artificial Sequence: Synthetic oligonucleotide
  Sense strand starting at position 2821 of SEQ ID NO: 1267
ggcuuuagccaauggauag

SEQ ID NO: 100407 - RNA, 19 nt, Artificial Sequence
  Description of Artificial Sequence: Synthetic oligonucleotide
  Antisense strand to SEQ ID NO: 100406
cuauccauuggcuaaagcc

SEQ ID NO: 100408 - RNA, 19 nt, Artificial Sequence
  Description of Artificial Sequence: Synthetic oligonucleotide
  Sense strand starting at position 2607 of SEQ ID NO: 1267
ucuagcuugcuguaaacaa

SEQ ID NO: 100409 - RNA, 19 nt, Artificial Sequence
  Description of Artificial Sequence: Synthetic oligonucleotide
  Antisense strand to SEQ ID NO: 100408
uuguuuacagcaagcuaga

SEQ ID NO: 100410 - RNA, 19 nt, Artificial Sequence
  Description of Artificial Sequence: Synthetic oligonucleotide
  Sense strand starting at position 2394 of SEQ ID NO: 1267
uccaucacuccucguagaa

SEQ ID NO: 100411 - RNA, 19 nt, Artificial Sequence
  Description of Artificial Sequence: Synthetic oligonucleotide
  Antisense strand to SEQ ID NO: 100410
uucuacgaggagugaugga

SEQ ID NO: 100412 - RNA, 19 nt, Artificial Sequence
  Description of Artificial Sequence: Synthetic oligonucleotide
  Sense strand starting at position 2375 of SEQ ID NO: 1267
gagaucuuguucccugauu

SEQ ID NO: 100413 - RNA, 19 nt, Artificial Sequence
  Description of Artificial Sequence: Synthetic oligonucleotide
  Antisense strand to SEQ ID NO: 100412
aaucagggaacaagaucuc

SEQ ID NO: 100414 - RNA, 19 nt, Artificial Sequence
  Description of Artificial Sequence: Synthetic oligonucleotide
  Sense strand starting at position 2180 of SEQ ID NO: 1267
gcaggugcuaaguaaggau

SEQ ID NO: 100415 - RNA, 19 nt, Artificial Sequence
  Description of Artificial Sequence: Synthetic oligonucleotide
  Antisense strand to SEQ ID NO: 100414
auccuuacuuagcaccugc

SEQ ID NO: 100416 - RNA, 19 nt, Artificial Sequence
  Description of Artificial Sequence: Synthetic oligonucleotide
  Sense strand starting at position 2022 of SEQ ID NO: 1267
ugaacuugagacugucauu

SEQ ID NO: 100417 - RNA, 19 nt, Artificial Sequence
  Description of Artificial Sequence: Synthetic oligonucleotide
  Antisense strand to SEQ ID NO: 100416
aaugacagucucaaguuca

SEQ ID NO: 100418 - RNA, 19 nt, Artificial Sequence
  Description of Artificial Sequence: Synthetic oligonucleotide
  Sense strand starting at position 1746 of SEQ ID NO: 1267
gucauuucuuguuucuuau

SEQ ID NO: 100419 - RNA, 19 nt, Artificial Sequence
  Description of Artificial Sequence: Synthetic oligonucleotide
  Antisense strand to SEQ ID NO: 100418
auaagaaacaagaaaugac

SEQ ID NO: 100420 - RNA, 19 nt, Artificial Sequence
  Description of Artificial Sequence: Synthetic oligonucleotide
  Sense strand starting at position 1745 of SEQ ID NO: 1267
agucauuucuuguuucuua

SEQ ID NO: 100421 - RNA, 19 nt, Artificial Sequence
  Description of Artificial Sequence: Synthetic oligonucleotide
  Antisense strand to SEQ ID NO: 100420
uaagaaacaagaaaugacu

SEQ ID NO: 100422 - RNA, 19 nt, Artificial Sequence
  Description of Artificial Sequence: Synthetic oligonucleotide
  Sense strand starting at position 1653 of SEQ ID NO: 1267
cagugacauugguugugga

SEQ ID NO: 100423 - RNA, 19 nt, Artificial Sequence
  Description of Artificial Sequence: Synthetic oligonucleotide
  Antisense strand to SEQ ID NO: 100422
uccacaaccaaugucacug

SEQ ID NO: 100424 - RNA, 19 nt, Artificial Sequence
  Description of Artificial Sequence: Synthetic oligonucleotide
  Sense strand starting at position 1491 of SEQ ID NO: 1267
augucugaguuucuacaag

SEQ ID NO: 100425 - RNA, 19 nt, Artificial Sequence
  Description of Artificial Sequence: Synthetic oligonucleotide
  Antisense strand to SEQ ID NO: 100424
cuuguagaaacucagacau

SEQ ID NO: 100426 - RNA, 19 nt, Artificial Sequence
  Description of Artificial Sequence: Synthetic oligonucleotide
  Sense strand starting at position 1484 of SEQ ID NO: 1267
auuaaacaugucugaguuu

SEQ ID NO: 100427 - RNA, 19 nt, Artificial Sequence
  Description of Artificial Sequence: Synthetic oligonucleotide
  Antisense strand to SEQ ID NO: 100426
aaacucagacauguuuaau

SEQ ID NO: 100428 - RNA, 19 nt, Artificial Sequence
  Description of Artificial Sequence: Synthetic oligonucleotide
  Sense strand starting at position 1315 of SEQ ID NO: 1267
auuguaaguguguacacaa

SEQ ID NO: 100429 - RNA, 19 nt, Artificial Sequence
  Description of Artificial Sequence: Synthetic oligonucleotide
  Antisense strand to SEQ ID NO: 100428
uuguguacacacuuacaau

SEQ ID NO: 100430 - RNA, 19 nt, Artificial Sequence
  Description of Artificial Sequence: Synthetic oligonucleotide
  Sense strand starting at position 1311 of SEQ ID NO: 1267
gaggauuguaaguguguac

SEQ ID NO: 100431 - RNA, 19 nt, Artificial Sequence
  Description of Artificial Sequence: Synthetic oligonucleotide
  Antisense strand to SEQ ID NO: 100430
guacacacuuacaauccuc

SEQ ID NO: 100432 - RNA, 19 nt, Artificial Sequence
  Description of Artificial Sequence: Synthetic oligonucleotide
  Sense strand starting at position 1310 of SEQ ID NO: 1267
agaggauuguaagugugua

SEQ ID NO: 100433 - RNA, 19 nt, Artificial Sequence
  Description of Artificial Sequence: Synthetic oligonucleotide
  Antisense strand to SEQ ID NO: 100432
uacacacuuacaauccucu

SEQ ID NO: 100434 - RNA, 19 nt, Artificial Sequence
  Description of Artificial Sequence: Synthetic oligonucleotide
  Sense strand starting at position 1278 of SEQ ID NO: 1267
cucugacuauucuugugau

SEQ ID NO: 100435 - RNA, 19 nt, Artificial Sequence
  Description of Artificial Sequence: Synthetic oligonucleotide
  Antisense strand to SEQ ID NO: 100434
aucacaagaauagucagag

SEQ ID NO: 100436 - RNA, 19 nt, Artificial Sequence
  Description of Artificial Sequence: Synthetic oligonucleotide
  Sense strand starting at position 889 of SEQ ID NO: 1267
gcuugaaugcaauacaaag

SEQ ID NO: 100437 - RNA, 19 nt, Artificial Sequence
  Description of Artificial Sequence: Synthetic oligonucleotide
  Antisense strand to SEQ ID NO: 100436
cuuuguauugcauucaagc

SEQ ID NO: 100438 - RNA, 19 nt, Artificial Sequence
  Description of Artificial Sequence: Synthetic oligonucleotide
  Sense strand starting at position 555 of SEQ ID NO: 1267
ggcagugugaucuaccaaa

SEQ ID NO: 100439 - RNA, 19 nt, Artificial Sequence
  Description of Artificial Sequence: Synthetic oligonucleotide
  Antisense strand to SEQ ID NO: 100438
uuugguagaucacacugcc

SEQ ID NO: 100440 - RNA, 19 nt, Artificial Sequence
  Description of Artificial Sequence: Synthetic oligonucleotide
  Sense strand starting at position 542 of SEQ ID NO: 1267
agaauuacucaugggcagu

SEQ ID NO: 100441 - RNA, 19 nt, Artificial Sequence
  Description of Artificial Sequence: Synthetic oligonucleotide
  Antisense strand to SEQ ID NO: 100440
acugcccaugaguaauucu

SEQ ID NO: 100442 - RNA, 19 nt, Artificial Sequence
  Description of Artificial Sequence: Synthetic oligonucleotide
  Sense strand starting at position 522 of SEQ ID NO: 1267
gauguauuauacguccuaa

SEQ ID NO: 100443 - RNA, 19 nt, Artificial Sequence
  Description of Artificial Sequence: Synthetic oligonucleotide
  Antisense strand to SEQ ID NO: 100442
uuaggacguauaauacauc

SEQ ID NO: 100444 - RNA, 19 nt, Artificial Sequence
  Description of Artificial Sequence: Synthetic oligonucleotide
  Sense strand starting at position 436 of SEQ ID NO: 1267
augcuuugccaguauauga

SEQ ID NO: 100445 - RNA, 19 nt, Artificial Sequence
  Description of Artificial Sequence: Synthetic oligonucleotide
  Antisense strand to SEQ ID NO: 100444
ucauauacuggcaaagcau

SEQ ID NO: 100446 - RNA, 19 nt, Artificial Sequence
  Description of Artificial Sequence: Synthetic oligonucleotide
  Sense strand starting at position 413 of SEQ ID NO: 1267
ugaagagugucuccagaaa

SEQ ID NO: 100447 - RNA, 19 nt, Artificial Sequence
  Description of Artificial Sequence: Synthetic oligonucleotide
  Antisense strand to SEQ ID NO: 100446
uuucuggagacacucuuca

SEQ ID NO: 100448 - RNA, 19 nt, Artificial Sequence
  Description of Artificial Sequence: Synthetic oligonucleotide
  Sense strand starting at position 411 of SEQ ID NO: 1267
ccugaagagugucuccaga

SEQ ID NO: 100449 - RNA, 19 nt, Artificial Sequence
  Description of Artificial Sequence: Synthetic oligonucleotide
  Antisense strand to SEQ ID NO: 100448
ucuggagacacucuucagg

SEQ ID NO: 100450 - RNA, 19 nt, Artificial Sequence
  Description of Artificial Sequence: Synthetic oligonucleotide
  Sense strand starting at position 402 of SEQ ID NO: 1267
gagguauggccugaagagu

SEQ ID NO: 100451 - RNA, 19 nt, Artificial Sequence
  Description of Artificial Sequence: Synthetic oligonucleotide
  Antisense strand to SEQ ID NO: 100450
acucuucaggccauaccuc

SEQ ID NO: 100452 - RNA, 19 nt, Artificial Sequence
  Description of Artificial Sequence: Synthetic oligonucleotide
  Sense strand starting at position 401 of SEQ ID NO: 1267
ugagguauggccugaagag

SEQ ID NO: 100453 - RNA, 19 nt, Artificial Sequence
  Description of Artificial Sequence: Synthetic oligonucleotide
  Antisense strand to SEQ ID NO: 100452
cucuucaggccauaccuca

SEQ ID NO: 100454 - RNA, 19 nt, Artificial Sequence
  Description of Artificial Sequence: Synthetic oligonucleotide
  Sense strand starting at position 351 of SEQ ID NO: 1267
ugauaucuuucuccagucu

SEQ ID NO: 100455 - RNA, 19 nt, Artificial Sequence
  Description of Artificial Sequence: Synthetic oligonucleotide
  Antisense strand to SEQ ID NO: 100454
agacuggagaaagauauca

SEQ ID NO: 100456 - RNA, 19 nt, Artificial Sequence
  Description of Artificial Sequence: Synthetic oligonucleotide
  Sense strand starting at position 350 of SEQ ID NO: 1267
uugauaucuuucuccaguc

SEQ ID NO: 100457 - RNA, 19 nt, Artificial Sequence
  Description of Artificial Sequence: Synthetic oligonucleotide
  Antisense strand to SEQ ID NO: 100456
gacuggagaaagauaucaa

SEQ ID NO: 100458 - RNA, 19 nt, Artificial Sequence
  Description of Artificial Sequence: Synthetic oligonucleotide
  Sense strand starting at position 349 of SEQ ID NO: 1267
auugauaucuuucuccagu

SEQ ID NO: 100459 - RNA, 19 nt, Artificial Sequence
  Description of Artificial Sequence: Synthetic oligonucleotide
  Antisense strand to SEQ ID NO: 100458
acuggagaaagauaucaau

SEQ ID NO: 100460 - RNA, 19 nt, Artificial Sequence
  Description of Artificial Sequence: Synthetic oligonucleotide
  Sense strand starting at position 94 of SEQ ID NO: 1267
uuagcauauuuacaaagga

SEQ ID NO: 100461 - RNA, 19 nt, Artificial Sequence
  Description of Artificial Sequence: Synthetic oligonucleotide
  Antisense strand to SEQ ID NO: 100460
uccuuuguaaauaugcuaa

SEQ ID NO: 100462 - RNA, 19 nt, Artificial Sequence
  Description of Artificial Sequence: Synthetic oligonucleotide
  Sense strand starting at position 11 of SEQ ID NO: 1267
gggcgucaguggaauauuu

SEQ ID NO: 100463 - RNA, 19 nt, Artificial Sequence
  Description of Artificial Sequence: Synthetic oligonucleotide
  Antisense strand to SEQ ID NO: 100462
aaauauuccacugacgccc

SEQ ID NO: 100464 - RNA, 19 nt, Artificial Sequence
  Description of Artificial Sequence: Synthetic oligonucleotide
  Sense strand starting at position 3677 of SEQ ID NO: 1268
cugaaugugcuacacgaua

SEQ ID NO: 100465 - RNA, 19 nt, Artificial Sequence
  Description of Artificial Sequence: Synthetic oligonucleotide
  Antisense strand to SEQ ID NO: 100464
uaucguguagcacauucag

SEQ ID NO: 100466 - RNA, 19 nt, Artificial Sequence
  Description of Artificial Sequence: Synthetic oligonucleotide
  Sense strand starting at position 3627 of SEQ ID NO: 1268
augugaguucuuuaggaag

SEQ ID NO: 100467 - RNA, 19 nt, Artificial Sequence
  Description of Artificial Sequence: Synthetic oligonucleotide
  Antisense strand to SEQ ID NO: 100466
cuuccuaaagaacucacau

SEQ ID NO: 100468 - RNA, 19 nt, Artificial Sequence
  Description of Artificial Sequence: Synthetic oligonucleotide
  Sense strand starting at position 3625 of SEQ ID NO: 1268
aaaugugaguucuuuagga

SEQ ID NO: 100469 - RNA, 19 nt, Artificial Sequence
  Description of Artificial Sequence: Synthetic oligonucleotide
  Antisense strand to SEQ ID NO: 100468
uccuaaagaacucacauuu

SEQ ID NO: 100470 - RNA, 19 nt, Artificial Sequence
  Description of Artificial Sequence: Synthetic oligonucleotide
  Sense strand starting at position 3621 of SEQ ID NO: 1268
ggugaaaugugaguucuuu

SEQ ID NO: 100471 - RNA, 19 nt, Artificial Sequence
  Description of Artificial Sequence: Synthetic oligonucleotide
  Antisense strand to SEQ ID NO: 100470
aaagaacucacauuucacc

SEQ ID NO: 100472 - RNA, 19 nt, Artificial Sequence
  Description of Artificial Sequence: Synthetic oligonucleotide
  Sense strand starting at position 3612 of SEQ ID NO: 1268
uucugaaugggugaaaugu

SEQ ID NO: 100473 - RNA, 19 nt, Artificial Sequence
  Description of Artificial Sequence: Synthetic oligonucleotide
  Antisense strand to SEQ ID NO: 100472
acauuucacccauucagaa

SEQ ID NO: 100474 - RNA, 19 nt, Artificial Sequence
  Description of Artificial Sequence: Synthetic oligonucleotide
  Sense strand starting at position 3610 of SEQ ID NO: 1268
gguucugaaugggugaaau

SEQ ID NO: 100475 - RNA, 19 nt, Artificial Sequence
  Description of Artificial Sequence: Synthetic oligonucleotide
  Antisense strand to SEQ ID NO: 100474
auuucacccauucagaacc

SEQ ID NO: 100476 - RNA, 19 nt, Artificial Sequence
  Description of Artificial Sequence: Synthetic oligonucleotide
  Sense strand starting at position 3609 of SEQ ID NO: 1268
agguucugaaugggugaaa

SEQ ID NO: 100477 - RNA, 19 nt, Artificial Sequence
  Description of Artificial Sequence: Synthetic oligonucleotide
  Antisense strand to SEQ ID NO: 100476
uuucacccauucagaaccu

SEQ ID NO: 100478 - RNA, 19 nt, Artificial Sequence
  Description of Artificial Sequence: Synthetic oligonucleotide
  Sense strand starting at position 3608 of SEQ ID NO: 1268
aagguucugaaugggugaa

SEQ ID NO: 100479 - RNA, 19 nt, Artificial Sequence
  Description of Artificial Sequence: Synthetic oligonucleotide
  Antisense strand to SEQ ID NO: 100478
uucacccauucagaaccuu

SEQ ID NO: 100480 - RNA, 19 nt, Artificial Sequence
  Description of Artificial Sequence: Synthetic oligonucleotide
  Sense strand starting at position 3607 of SEQ ID NO: 1268
caagguucugaauggguga

SEQ ID NO: 100481 - RNA, 19 nt, Artificial Sequence
  Description of Artificial Sequence: Synthetic oligonucleotide
  Antisense strand to SEQ ID NO: 100480
ucacccauucagaaccuug

SEQ ID NO: 100482 - RNA, 19 nt, Artificial Sequence
  Description of Artificial Sequence: Synthetic oligonucleotide
  Sense strand starting at position 3370 of SEQ ID NO: 1268
ugaugauguuggucccgga

SEQ ID NO: 100483 - RNA, 19 nt, Artificial Sequence
  Description of Artificial Sequence: Synthetic oligonucleotide
  Antisense strand to SEQ ID NO: 100482
uccgggaccaacaucauca

SEQ ID NO: 100484 - RNA, 19 nt, Artificial Sequence
  Description of Artificial Sequence: Synthetic oligonucleotide
  Sense strand starting at position 3313 of SEQ ID NO: 1268
ucauuaguucaguggugag

SEQ ID NO: 100485 - RNA, 19 nt, Artificial Sequence
  Description of Artificial Sequence: Synthetic oligonucleotide
  Antisense strand to SEQ ID NO: 100484
cucaccacugaacuaauga

SEQ ID NO: 100486 - RNA, 19 nt, Artificial Sequence
  Description of Artificial Sequence: Synthetic oligonucleotide
  Sense strand starting at position 3206 of SEQ ID NO: 1268
ggacuuaaacauugguuua

SEQ ID NO: 100487 - RNA, 19 nt, Artificial Sequence
  Description of Artificial Sequence: Synthetic oligonucleotide
  Antisense strand to SEQ ID NO: 100486
uaaaccaauguuuaagucc

SEQ ID NO: 100488 - RNA, 19 nt, Artificial Sequence
  Description of Artificial Sequence: Synthetic oligonucleotide
  Sense strand starting at position 3194 of SEQ ID NO: 1268
guagguuagauuggacuua

SEQ ID NO: 100489 - RNA, 19 nt, Artificial Sequence
  Description of Artificial Sequence: Synthetic oligonucleotide
  Antisense strand to SEQ ID NO: 100488
uaaguccaaucuaaccuac

SEQ ID NO: 100490 - RNA, 19 nt, Artificial Sequence
  Description of Artificial Sequence: Synthetic oligonucleotide
  Sense strand starting at position 3186 of SEQ ID NO: 1268
auaguuaaguagguuagau

SEQ ID NO: 100491 - RNA, 19 nt, Artificial Sequence
  Description of Artificial Sequence: Synthetic oligonucleotide
  Antisense strand to SEQ ID NO: 100490
aucuaaccuacuuaacuau

SEQ ID NO: 100492 - RNA, 19 nt, Artificial Sequence
  Description of Artificial Sequence: Synthetic oligonucleotide
  Sense strand starting at position 3185 of SEQ ID NO: 1268
aauaguuaaguagguuaga

SEQ ID NO: 100493 - RNA, 19 nt, Artificial Sequence
  Description of Artificial Sequence: Synthetic oligonucleotide
  Antisense strand to SEQ ID NO: 100492
ucuaaccuacuuaacuauu

SEQ ID NO: 100494 - RNA, 19 nt, Artificial Sequence
  Description of Artificial Sequence: Synthetic oligonucleotide
  Sense strand starting at position 3178 of SEQ ID NO: 1268
gacuguuaauaguuaagua

SEQ ID NO: 100495 - RNA, 19 nt, Artificial Sequence
  Description of Artificial Sequence: Synthetic oligonucleotide
  Antisense strand to SEQ ID NO: 100494
uacuuaacuauuaacaguc

SEQ ID NO: 100496 - RNA, 19 nt, Artificial Sequence
  Description of Artificial Sequence: Synthetic oligonucleotide
  Sense strand starting at position 3102 of SEQ ID NO: 1268
agcagauaggcuuggaauu

SEQ ID NO: 100497 - RNA, 19 nt, Artificial Sequence
  Description of Artificial Sequence: Synthetic oligonucleotide
  Antisense strand to SEQ ID NO: 100496
aauuccaagccuaucugcu

SEQ ID NO: 100498 - RNA, 19 nt, Artificial Sequence
  Description of Artificial Sequence: Synthetic oligonucleotide
  Sense strand starting at position 3082 of SEQ ID NO: 1268
ggaauauacugauugcgga

SEQ ID NO: 100499 - RNA, 19 nt, Artificial Sequence
  Description of Artificial Sequence: Synthetic oligonucleotide
  Antisense strand to SEQ ID NO: 100498
uccgcaaucaguauauucc

SEQ ID NO: 100500 - RNA, 19 nt, Artificial Sequence
  Description of Artificial Sequence: Synthetic oligonucleotide
  Sense strand starting at position 2703 of SEQ ID NO: 1268
augcuaauacccugaggaa

SEQ ID NO: 100501 - RNA, 19 nt, Artificial Sequence
  Description of Artificial Sequence: Synthetic oligonucleotide
  Antisense strand to SEQ ID NO: 100500
uuccucaggguauuagcau

SEQ ID NO: 100502 - RNA, 19 nt, Artificial Sequence
  Description of Artificial Sequence: Synthetic oligonucleotide
  Sense strand starting at position 2644 of SEQ ID NO: 1268
cguuauuuauaacugcuua

SEQ ID NO: 100503 - RNA, 19 nt, Artificial Sequence
  Description of Artificial Sequence: Synthetic oligonucleotide
  Antisense strand to SEQ ID NO: 100502
uaagcaguuauaaauaacg

SEQ ID NO: 100504 - RNA, 19 nt, Artificial Sequence
  Description of Artificial Sequence: Synthetic oligonucleotide
  Sense strand starting at position 2176 of SEQ ID NO: 1268
cucugugagaacuagguca

SEQ ID NO: 100505 - RNA, 19 nt, Artificial Sequence
  Description of Artificial Sequence: Synthetic oligonucleotide
  Antisense strand to SEQ ID NO: 100504
ugaccuaguucucacagag

SEQ ID NO: 100506 - RNA, 19 nt, Artificial Sequence
  Description of Artificial Sequence: Synthetic oligonucleotide
  Sense strand starting at position 2018 of SEQ ID NO: 1268
cugcuuugcguuucuauca

SEQ ID NO: 100507 - RNA, 19 nt, Artificial Sequence
  Description of Artificial Sequence: Synthetic oligonucleotide
  Antisense strand to SEQ ID NO: 100506
ugauagaaacgcaaagcag

SEQ ID NO: 100508 - RNA, 19 nt, Artificial Sequence
  Description of Artificial Sequence: Synthetic oligonucleotide
  Sense strand starting at position 1384 of SEQ ID NO: 1268
gaaauaugcguccaacuag

SEQ ID NO: 100509 - RNA, 19 nt, Artificial Sequence
  Description of Artificial Sequence: Synthetic oligonucleotide
  Antisense strand to SEQ ID NO: 100508
cuaguuggacgcauauuuc

SEQ ID NO: 100510 - RNA, 19 nt, Artificial Sequence
  Description of Artificial Sequence: Synthetic oligonucleotide
  Sense strand starting at position 1338 of SEQ ID NO: 1268
agaauauucuaguuugucu

SEQ ID NO: 100511 - RNA, 19 nt, Artificial Sequence
  Description of Artificial Sequence: Synthetic oligonucleotide
  Antisense strand to SEQ ID NO: 100510
agacaaacuagaauauucu

SEQ ID NO: 100512 - RNA, 19 nt, Artificial Sequence
  Description of Artificial Sequence: Synthetic oligonucleotide
  Sense strand starting at position 1333 of SEQ ID NO: 1268
cugaaagaauauucuaguu

SEQ ID NO: 100513 - RNA, 19 nt, Artificial Sequence
  Description of Artificial Sequence: Synthetic oligonucleotide
  Antisense strand to SEQ ID NO: 100512
aacuagaauauucuuucag

SEQ ID NO: 100514 - RNA, 19 nt, Artificial Sequence
  Description of Artificial Sequence: Synthetic oligonucleotide
  Sense strand starting at position 1011 of SEQ ID NO: 1268
ggaggucuauuaucugaaa

SEQ ID NO: 100515 - RNA, 19 nt, Artificial Sequence
  Description of Artificial Sequence: Synthetic oligonucleotide
  Antisense strand to SEQ ID NO: 100514
uuucagauaauagaccucc

SEQ ID NO: 100516 - RNA, 19 nt, Artificial Sequence
  Description of Artificial Sequence: Synthetic oligonucleotide
  Sense strand starting at position 979 of SEQ ID NO: 1268
uaggguuauuaauccaaga

SEQ ID NO: 100517 - RNA, 19 nt, Artificial Sequence
  Description of Artificial Sequence: Synthetic oligonucleotide
  Antisense strand to SEQ ID NO: 100516
ucuuggauuaauaacccua

SEQ ID NO: 100518 - RNA, 19 nt, Artificial Sequence
  Description of Artificial Sequence: Synthetic oligonucleotide
  Sense strand starting at position 838 of SEQ ID NO: 1268
ugagcagugccugaaacuu

SEQ ID NO: 100519 - RNA, 19 nt, Artificial Sequence
  Description of Artificial Sequence: Synthetic oligonucleotide
  Antisense strand to SEQ ID NO: 100518
aaguuucaggcacugcuca

SEQ ID NO: 100520 - RNA, 19 nt, Artificial Sequence
  Description of Artificial Sequence: Synthetic oligonucleotide
  Sense strand starting at position 791 of SEQ ID NO: 1268
ggaacaugugcaggguuua

SEQ ID NO: 100521 - RNA, 19 nt, Artificial Sequence
  Description of Artificial Sequence: Synthetic oligonucleotide
  Antisense strand to SEQ ID NO: 100520
uaaacccugcacauguucc

SEQ ID NO: 100522 - RNA, 19 nt, Artificial Sequence
  Description of Artificial Sequence: Synthetic oligonucleotide
  Sense strand starting at position 668 of SEQ ID NO: 1268
acauaaggcuuggcacaua

SEQ ID NO: 100523 - RNA, 19 nt, Artificial Sequence
  Description of Artificial Sequence: Synthetic oligonucleotide
  Antisense strand to SEQ ID NO: 100522
uaugugccaagccuuaugu

SEQ ID NO: 100524 - RNA, 19 nt, Artificial Sequence
  Description of Artificial Sequence: Synthetic oligonucleotide
  Sense strand starting at position 616 of SEQ ID NO: 1268
cugaauuuaugaugagaau

SEQ ID NO: 100525 - RNA, 19 nt, Artificial Sequence
  Description of Artificial Sequence: Synthetic oligonucleotide
  Antisense strand to SEQ ID NO: 100524
auucucaucauaaauucag

SEQ ID NO: 100526 - RNA, 19 nt, Artificial Sequence
  Description of Artificial Sequence: Synthetic oligonucleotide
  Sense strand starting at position 614 of SEQ ID NO: 1268
accugaauuuaugaugaga

SEQ ID NO: 100527 - RNA, 19 nt, Artificial Sequence
  Description of Artificial Sequence: Synthetic oligonucleotide
  Antisense strand to SEQ ID NO: 100526
ucucaucauaaauucaggu

SEQ ID NO: 100528 - RNA, 19 nt, Artificial Sequence
  Description of Artificial Sequence: Synthetic oligonucleotide
  Sense strand starting at position 529 of SEQ ID NO: 1268
ggacaugaucuugggcaaa

SEQ ID NO: 100529 - RNA, 19 nt, Artificial Sequence
  Description of Artificial Sequence: Synthetic oligonucleotide
  Antisense strand to SEQ ID NO: 100528
uuugcccaagaucaugucc

SEQ ID NO: 100530 - RNA, 19 nt, Artificial Sequence
  Description of Artificial Sequence: Synthetic oligonucleotide
  Sense strand starting at position 491 of SEQ ID NO: 1268
ccagacaggccugaguuua

SEQ ID NO: 100531 - RNA, 19 nt, Artificial Sequence
  Description of Artificial Sequence: Synthetic oligonucleotide
  Antisense strand to SEQ ID NO: 100530
uaaacucaggccugucugg

SEQ ID NO: 100532 - RNA, 19 nt, Artificial Sequence
  Description of Artificial Sequence: Synthetic oligonucleotide
  Sense strand starting at position 467 of SEQ ID NO: 1268
aagagaugugcauaugcuc

SEQ ID NO: 100533 - RNA, 19 nt, Artificial Sequence
  Description of Artificial Sequence: Synthetic oligonucleotide
  Antisense strand to SEQ ID NO: 100532
gagcauaugcacaucucuu

SEQ ID NO: 100534 - RNA, 19 nt, Artificial Sequence
  Description of Artificial Sequence: Synthetic oligonucleotide
  Sense strand starting at position 166 of SEQ ID NO: 1268
ugcacuuauuacucaggaa

SEQ ID NO: 100535 - RNA, 19 nt, Artificial Sequence
  Description of Artificial Sequence: Synthetic oligonucleotide
  Antisense strand to SEQ ID NO: 100534
uuccugaguaauaagugca

SEQ ID NO: 100536 - RNA, 19 nt, Artificial Sequence
  Description of Artificial Sequence: Synthetic oligonucleotide
  Sense strand starting at position 116 of SEQ ID NO: 1268
cuuuguguugcagaaacaa

SEQ ID NO: 100537 - RNA, 19 nt, Artificial Sequence
  Description of Artificial Sequence: Synthetic oligonucleotide
  Antisense strand to SEQ ID NO: 100536
uuguuucugcaacacaaag

SEQ ID NO: 100538 - RNA, 19 nt, Artificial Sequence
  Description of Artificial Sequence: Synthetic oligonucleotide
  Sense strand starting at position 100 of SEQ ID NO: 1268
guuauaugagaaugggcuu

SEQ ID NO: 100539 - RNA, 19 nt, Artificial Sequence
  Description of Artificial Sequence: Synthetic oligonucleotide
  Antisense strand to SEQ ID NO: 100538
aagcccauucucauauaac

SEQ ID NO: 100540 - RNA, 19 nt, Artificial Sequence
  Description of Artificial Sequence: Synthetic oligonucleotide
  Sense strand starting at position 35 of SEQ ID NO: 1268
gcuagacucuaucuugaaa

SEQ ID NO: 100541 - RNA, 19 nt, Artificial Sequence
  Description of Artificial Sequence: Synthetic oligonucleotide
  Antisense strand to SEQ ID NO: 100540
uuucaagauagagucuagc

SEQ ID NO: 100542 - RNA, 19 nt, Artificial Sequence
  Description of Artificial Sequence: Synthetic oligonucleotide
  Sense strand starting at position 20 of SEQ ID NO: 1268
cauuguagaguugaugcua

SEQ ID NO: 100543 - RNA, 19 nt, Artificial Sequence
  Description of Artificial Sequence: Synthetic oligonucleotide
  Antisense strand to SEQ ID NO: 100542
uagcaucaacucuacaaug

SEQ ID NO: 100544 - RNA, 19 nt, Artificial Sequence
  Description of Artificial Sequence: Synthetic oligonucleotide
  Sense strand starting at position 68 of SEQ ID NO: 1269
aguggaguuagcuacuaca

SEQ ID NO: 100545 - RNA, 19 nt, Artificial Sequence
  Description of Artificial Sequence: Synthetic oligonucleotide
  Antisense strand to SEQ ID NO: 100544
uguaguagcuaacuccacu

SEQ ID NO: 100546 - RNA, 19 nt, Artificial Sequence
  Description of Artificial Sequence: Synthetic oligonucleotide
  Sense strand starting at position 118 of SEQ ID NO: 1269
uguuauaaucuugaaagug

SEQ ID NO: 100547 - RNA, 19 nt, Artificial Sequence
  Description of Artificial Sequence: Synthetic oligonucleotide
  Antisense strand to SEQ ID NO: 100546
cacuuucaagauuauaaca

SEQ ID NO: 100548 - RNA, 19 nt, Artificial Sequence
  Description of Artificial Sequence: Synthetic oligonucleotide
  Sense strand starting at position 143 of SEQ ID NO: 1269
uuuggacccucccuugaau

SEQ ID NO: 100549 - RNA, 19 nt, Artificial Sequence
  Description of Artificial Sequence: Synthetic oligonucleotide
  Antisense strand to SEQ ID NO: 100548
auucaagggaggguccaaa

SEQ ID NO: 100550 - RNA, 19 nt, Artificial Sequence
  Description of Artificial Sequence: Synthetic oligonucleotide
  Sense strand starting at position 224 of SEQ ID NO: 1269
cacuuuggccuuugugaaa

SEQ ID NO: 100551 - RNA, 19 nt, Artificial Sequence
  Description of Artificial Sequence: Synthetic oligonucleotide
  Antisense strand to SEQ ID NO: 100550
uuucacaaaggccaaagug

SEQ ID NO: 100552 - RNA, 19 nt, Artificial Sequence
  Description of Artificial Sequence: Synthetic oligonucleotide
  Sense strand starting at position 409 of SEQ ID NO: 1269
cugguaauguuucuaugac

SEQ ID NO: 100553 - RNA, 19 nt, Artificial Sequence
  Description of Artificial Sequence: Synthetic oligonucleotide
  Antisense strand to SEQ ID NO: 100552
gucauagaaacauuaccag

SEQ ID NO: 100554 - RNA, 19 nt, Artificial Sequence
  Description of Artificial Sequence: Synthetic oligonucleotide
  Sense strand starting at position 508 of SEQ ID NO: 1269
gcuccaaguuccuugaacu

SEQ ID NO: 100555 - RNA, 19 nt, Artificial Sequence
  Description of Artificial Sequence: Synthetic oligonucleotide
  Antisense strand to SEQ ID NO: 100554
aguucaaggaacuuggagc

SEQ ID NO: 100556 - RNA, 19 nt, Artificial Sequence
  Description of Artificial Sequence: Synthetic oligonucleotide
  Sense strand starting at position 544 of SEQ ID NO: 1269
gacugucugugucuugaga

SEQ ID NO: 100557 - RNA, 19 nt, Artificial Sequence
  Description of Artificial Sequence: Synthetic oligonucleotide
  Antisense strand to SEQ ID NO: 100556
ucucaagacacagacaguc

SEQ ID NO: 100558 - RNA, 19 nt, Artificial Sequence
  Description of Artificial Sequence: Synthetic oligonucleotide
  Sense strand starting at position 579 of SEQ ID NO: 1269
auugacuuauguucccaca

SEQ ID NO: 100559 - RNA, 19 nt, Artificial Sequence
  Description of Artificial Sequence: Synthetic oligonucleotide
  Antisense strand to SEQ ID NO: 100558
ugugggaacauaagucaau

SEQ ID NO: 100560 - RNA, 19 nt, Artificial Sequence
  Description of Artificial Sequence: Synthetic oligonucleotide
  Sense strand starting at position 581 of SEQ ID NO: 1269
ugacuuauguucccacaag

SEQ ID NO: 100561 - RNA, 19 nt, Artificial Sequence
  Description of Artificial Sequence: Synthetic oligonucleotide
  Antisense strand to SEQ ID NO: 100560
cuugugggaacauaaguca

SEQ ID NO: 100562 - RNA, 19 nt, Artificial Sequence
  Description of Artificial Sequence: Synthetic oligonucleotide
  Sense strand starting at position 615 of SEQ ID NO: 1269
ucaaauuguucugcagaac

SEQ ID NO: 100563 - RNA, 19 nt, Artificial Sequence
  Description of Artificial Sequence: Synthetic oligonucleotide
  Antisense strand to SEQ ID NO: 100562
guucugcagaacaauuuga

SEQ ID NO: 100564 - RNA, 19 nt, Artificial Sequence
  Description of Artificial Sequence: Synthetic oligonucleotide
  Sense strand starting at position 709 of SEQ ID NO: 1269
caucucuaauggguguuaa

SEQ ID NO: 100565 - RNA, 19 nt, Artificial Sequence
  Description of Artificial Sequence: Synthetic oligonucleotide
  Antisense strand to SEQ ID NO: 100564
uuaacacccauuagagaug

SEQ ID NO: 100566 - RNA, 19 nt, Artificial Sequence
  Description of Artificial Sequence: Synthetic oligonucleotide
  Sense strand starting at position 710 of SEQ ID NO: 1269
aucucuaauggguguuaau

SEQ ID NO: 100567 - RNA, 19 nt, Artificial Sequence
  Description of Artificial Sequence: Synthetic oligonucleotide
  Antisense strand to SEQ ID NO: 100566
auuaacacccauuagagau

SEQ ID NO: 100568 - RNA, 19 nt, Artificial Sequence
  Description of Artificial Sequence: Synthetic oligonucleotide
  Sense strand starting at position 735 of SEQ ID NO: 1269
uccagauggucuucuauag

SEQ ID NO: 100569 - RNA, 19 nt, Artificial Sequence
  Description of Artificial Sequence: Synthetic oligonucleotide
  Antisense strand to SEQ ID NO: 100568
cuauagaagaccaucugga

SEQ ID NO: 100570 - RNA, 19 nt, Artificial Sequence
  Description of Artificial Sequence: Synthetic oligonucleotide
  Sense strand starting at position 739 of SEQ ID NO: 1269
gauggucuucuauagugaa

SEQ ID NO: 100571 - RNA, 19 nt, Artificial Sequence
  Description of Artificial Sequence: Synthetic oligonucleotide
  Antisense strand to SEQ ID NO: 100570
uucacuauagaagaccauc

SEQ ID NO: 100572 - RNA, 19 nt, Artificial Sequence
  Description of Artificial Sequence: Synthetic oligonucleotide
  Sense strand starting at position 763 of SEQ ID NO: 1269
acugaaaggucauccucuu

SEQ ID NO: 100573 - RNA, 19 nt, Artificial Sequence
  Description of Artificial Sequence: Synthetic oligonucleotide
  Antisense strand to SEQ ID NO: 100572
aagaggaugaccuuucagu

SEQ ID NO: 100574 - RNA, 19 nt, Artificial Sequence
  Description of Artificial Sequence: Synthetic oligonucleotide
  Sense strand starting at position 1365 of SEQ ID NO: 1269
acagaagaggugcaguauu

SEQ ID NO: 100575 - RNA, 19 nt, Artificial Sequence
  Description of Artificial Sequence: Synthetic oligonucleotide
  Antisense strand to SEQ ID NO: 100574
aauacugcaccucuucugu

SEQ ID NO: 100576 - RNA, 19 nt, Artificial Sequence
  Description of Artificial Sequence: Synthetic oligonucleotide
  Sense strand starting at position 1392 of SEQ ID NO: 1269
guaagucagcgucccuuua

SEQ ID NO: 100577 - RNA, 19 nt, Artificial Sequence
  Description of Artificial Sequence: Synthetic oligonucleotide
  Antisense strand to SEQ ID NO: 100576
uaaagggacgcugacuuac

SEQ ID NO: 100578 - RNA, 19 nt, Artificial Sequence
  Description of Artificial Sequence: Synthetic oligonucleotide
  Sense strand starting at position 1485 of SEQ ID NO: 1269
cagcccuaaguguauagaa

SEQ ID NO: 100579 - RNA, 19 nt, Artificial Sequence
  Description of Artificial Sequence: Synthetic oligonucleotide
  Antisense strand to SEQ ID NO: 100578
uucuauacacuuagggcug

SEQ ID NO: 100580 - RNA, 19 nt, Artificial Sequence
  Description of Artificial Sequence: Synthetic oligonucleotide
  Sense strand starting at position 1487 of SEQ ID NO: 1269
gcccuaaguguauagaagu

SEQ ID NO: 100581 - RNA, 19 nt, Artificial Sequence
  Description of Artificial Sequence: Synthetic oligonucleotide
  Antisense strand to SEQ ID NO: 100580
acuucuauacacuuagggc

SEQ ID NO: 100582 - RNA, 19 nt, Artificial Sequence
  Description of Artificial Sequence: Synthetic oligonucleotide
  Sense strand starting at position 1516 of SEQ ID NO: 1269
uggcaauaauuaguaaaga

SEQ ID NO: 100583 - RNA, 19 nt, Artificial Sequence
  Description of Artificial Sequence: Synthetic oligonucleotide
  Antisense strand to SEQ ID NO: 100582
ucuuuacuaauuauugcca

SEQ ID NO: 100584 - RNA, 19 nt, Artificial Sequence
  Description of Artificial Sequence: Synthetic oligonucleotide
  Sense strand starting at position 1532 of SEQ ID NO: 1269
agacuaauucgguggcaga

SEQ ID NO: 100585 - RNA, 19 nt, Artificial Sequence
  Description of Artificial Sequence: Synthetic oligonucleotide
  Antisense strand to SEQ ID NO: 100584
ucugccaccgaauuagucu

SEQ ID NO: 100586 - RNA, 19 nt, Artificial Sequence
  Description of Artificial Sequence: Synthetic oligonucleotide
  Sense strand starting at position 1533 of SEQ ID NO: 1269
gacuaauucgguggcagag

SEQ ID NO: 100587 - RNA, 19 nt, Artificial Sequence
  Description of Artificial Sequence: Synthetic oligonucleotide
  Antisense strand to SEQ ID NO: 100586
cucugccaccgaauuaguc

SEQ ID NO: 100588 - RNA, 19 nt, Artificial Sequence
  Description of Artificial Sequence: Synthetic oligonucleotide
  Sense strand starting at position 1680 of SEQ ID NO: 1269
gugggaucuuuguucccuu

SEQ ID NO: 100589 - RNA, 19 nt, Artificial Sequence
  Description of Artificial Sequence: Synthetic oligonucleotide
  Antisense strand to SEQ ID NO: 100588
aagggaacaaagaucccac

SEQ ID NO: 100590 - RNA, 19 nt, Artificial Sequence
  Description of Artificial Sequence: Synthetic oligonucleotide
  Sense strand starting at position 1683 of SEQ ID NO: 1269
ggaucuuuguucccuuuau

SEQ ID NO: 100591 - RNA, 19 nt, Artificial Sequence
  Description of Artificial Sequence: Synthetic oligonucleotide
  Antisense strand to SEQ ID NO: 100590
auaaagggaacaaagaucc

SEQ ID NO: 100592 - RNA, 19 nt, Artificial Sequence
  Description of Artificial Sequence: Synthetic oligonucleotide
  Sense strand starting at position 1876 of SEQ ID NO: 1269
uguuuacagugauccagac

SEQ ID NO: 100593 - RNA, 19 nt, Artificial Sequence
  Description of Artificial Sequence: Synthetic oligonucleotide
  Antisense strand to SEQ ID NO: 100592
gucuggaucacuguaaaca

SEQ ID NO: 100594 - RNA, 19 nt, Artificial Sequence
  Description of Artificial Sequence: Synthetic oligonucleotide
  Sense strand starting at position 2006 of SEQ ID NO: 1269
gcuagagaagcccgacuuu

SEQ ID NO: 100595 - RNA, 19 nt, Artificial Sequence
  Description of Artificial Sequence: Synthetic oligonucleotide
  Antisense strand to SEQ ID NO: 100594
aaagucgggcuucucuagc

SEQ ID NO: 100596 - RNA, 19 nt, Artificial Sequence
  Description of Artificial Sequence: Synthetic oligonucleotide
  Sense strand starting at position 2161 of SEQ ID NO: 1269
agcucuccuguuugacgaa

SEQ ID NO: 100597 - RNA, 19 nt, Artificial Sequence
  Description of Artificial Sequence: Synthetic oligonucleotide
  Antisense strand to SEQ ID NO: 100596
uucgucaaacaggagagcu

SEQ ID NO: 100598 - RNA, 19 nt, Artificial Sequence
  Description of Artificial Sequence: Synthetic oligonucleotide
  Sense strand starting at position 2309 of SEQ ID NO: 1269
ugucacuucuaccuagaga

SEQ ID NO: 100599 - RNA, 19 nt, Artificial Sequence
  Description of Artificial Sequence: Synthetic oligonucleotide
  Antisense strand to SEQ ID NO: 100598
ucucuagguagaagugaca

SEQ ID NO: 100600 - RNA, 19 nt, Artificial Sequence
  Description of Artificial Sequence: Synthetic oligonucleotide
  Sense strand starting at position 2488 of SEQ ID NO: 1269
aggcuuuggcccuggaaag

SEQ ID NO: 100601 - RNA, 19 nt, Artificial Sequence
  Description of Artificial Sequence: Synthetic oligonucleotide
  Antisense strand to SEQ ID NO: 100600
cuuuccagggccaaagccu

SEQ ID NO: 100602 - RNA, 19 nt, Artificial Sequence
  Description of Artificial Sequence: Synthetic oligonucleotide
  Sense strand starting at position 3150 of SEQ ID NO: 1269
uugagagaaucucaauacu

SEQ ID NO: 100603 - RNA, 19 nt, Artificial Sequence
  Description of Artificial Sequence: Synthetic oligonucleotide
  Antisense strand to SEQ ID NO: 100602
aguauugagauucucucaa

SEQ ID NO: 100604 - RNA, 19 nt, Artificial Sequence
  Description of Artificial Sequence: Synthetic oligonucleotide
  Sense strand starting at position 3171 of SEQ ID NO: 1269
acaaauauugugcagcuaa

SEQ ID NO: 100605 - RNA, 19 nt, Artificial Sequence
  Description of Artificial Sequence: Synthetic oligonucleotide
  Antisense strand to SEQ ID NO: 100604
uuagcugcacaauauuugu

SEQ ID NO: 100606 - RNA, 19 nt, Artificial Sequence
  Description of Artificial Sequence: Synthetic oligonucleotide
  Sense strand starting at position 3185 of SEQ ID NO: 1269
gcuaaagcccuauguaauc

SEQ ID NO: 100607 - RNA, 19 nt, Artificial Sequence
  Description of Artificial Sequence: Synthetic oligonucleotide
  Antisense strand to SEQ ID NO: 100606
gauuacauagggcuuuagc

SEQ ID NO: 100608 - RNA, 19 nt, Artificial Sequence
  Description of Artificial Sequence: Synthetic oligonucleotide
  Sense strand starting at position 3217 of SEQ ID NO: 1269
ucaccuaggcauuagcaaa

SEQ ID NO: 100609 - RNA, 19 nt, Artificial Sequence
  Description of Artificial Sequence: Synthetic oligonucleotide
  Antisense strand to SEQ ID NO: 100608
uuugcuaaugccuagguga

SEQ ID NO: 100610 - RNA, 19 nt, Artificial Sequence
  Description of Artificial Sequence: Synthetic oligonucleotide
  Sense strand starting at position 3411 of SEQ ID NO: 1269
gaacgugauuccucuucuu

SEQ ID NO: 100611 - RNA, 19 nt, Artificial Sequence
  Description of Artificial Sequence: Synthetic oligonucleotide
  Antisense strand to SEQ ID NO: 100610
aagaagaggaaucacguuc

SEQ ID NO: 100612 - RNA, 19 nt, Artificial Sequence
  Description of Artificial Sequence: Synthetic oligonucleotide
  Sense strand starting at position 3594 of SEQ ID NO: 1269
cccgaucaguaaguucuau

SEQ ID NO: 100613 - RNA, 19 nt, Artificial Sequence
  Description of Artificial Sequence: Synthetic oligonucleotide
  Antisense strand to SEQ ID NO: 100612
auagaacuuacugaucggg

SEQ ID NO: 100614 - RNA, 19 nt, Artificial Sequence
  Description of Artificial Sequence: Synthetic oligonucleotide
  Sense strand starting at position 3606 of SEQ ID NO: 1269
guucuauuguuucugauuc

SEQ ID NO: 100615 - RNA, 19 nt, Artificial Sequence
  Description of Artificial Sequence: Synthetic oligonucleotide
  Antisense strand to SEQ ID NO: 100614
gaaucagaaacaauagaac

SEQ ID NO: 100616 - RNA, 19 nt, Artificial Sequence
  Description of Artificial Sequence: Synthetic oligonucleotide
  Sense strand starting at position 3636 of SEQ ID NO: 1269
uugaaucaauccguuuauc

SEQ ID NO: 100617 - RNA, 19 nt, Artificial Sequence
  Description of Artificial Sequence: Synthetic oligonucleotide
  Antisense strand to SEQ ID NO: 100616
gauaaacggauugauucaa

SEQ ID NO: 100618 - RNA, 19 nt, Artificial Sequence
  Description of Artificial Sequence: Synthetic oligonucleotide
  Sense strand starting at position 3698 of SEQ ID NO: 1269
ucucacuuggaguauuaau

SEQ ID NO: 100619 - RNA, 19 nt, Artificial Sequence
  Description of Artificial Sequence: Synthetic oligonucleotide
  Antisense strand to SEQ ID NO: 100618
auuaauacuccaagugaga

SEQ ID NO: 100620 - RNA, 19 nt, Artificial Sequence
  Description of Artificial Sequence: Synthetic oligonucleotide
  Sense strand starting at position 3956 of SEQ ID NO: 1269
guuuaugucuuggcccaaa

SEQ ID NO: 100621 - RNA, 19 nt, Artificial Sequence
  Description of Artificial Sequence: Synthetic oligonucleotide
  Antisense strand to SEQ ID NO: 100620
uuugggccaagacauaaac

SEQ ID NO: 100622 - RNA, 19 nt, Artificial Sequence
  Description of Artificial Sequence: Synthetic oligonucleotide
  Sense strand starting at position 3959 of SEQ ID NO: 1269
uaugucuuggcccaaaugu

SEQ ID NO: 100623 - RNA, 19 nt, Artificial Sequence
  Description of Artificial Sequence: Synthetic oligonucleotide
  Antisense strand to SEQ ID NO: 100622
acauuugggccaagacaua

SEQ ID NO: 100624 - RNA, 19 nt, Artificial Sequence
  Description of Artificial Sequence: Synthetic oligonucleotide
  Sense strand starting at position 325 of SEQ ID NO: 1270
ucuggaucucuccgugaaa

SEQ ID NO: 100625 - RNA, 19 nt, Artificial Sequence
  Description of Artificial Sequence: Synthetic oligonucleotide
  Antisense strand to SEQ ID NO: 100624
uuucacggagagauccaga

SEQ ID NO: 100626 - RNA, 19 nt, Artificial Sequence
  Description of Artificial Sequence: Synthetic oligonucleotide
  Sense strand starting at position 326 of SEQ ID NO: 1270
cuggaucucuccgugaaau

SEQ ID NO: 100627 - RNA, 19 nt, Artificial Sequence
  Description of Artificial Sequence: Synthetic oligonucleotide
  Antisense strand to SEQ ID NO: 100626
auuucacggagagauccag

SEQ ID NO: 100628 - RNA, 19 nt, Artificial Sequence
  Description of Artificial Sequence: Synthetic oligonucleotide
  Sense strand starting at position 327 of SEQ ID NO: 1270
uggaucucuccgugaaauc

SEQ ID NO: 100629 - RNA, 19 nt, Artificial Sequence
  Description of Artificial Sequence: Synthetic oligonucleotide
  Antisense strand to SEQ ID NO: 100628
gauuucacggagagaucca

SEQ ID NO: 100630 - RNA, 19 nt, Artificial Sequence
  Description of Artificial Sequence: Synthetic oligonucleotide
  Sense strand starting at position 328 of SEQ ID NO: 1270
ggaucucuccgugaaaucc

SEQ ID NO: 100631 - RNA, 19 nt, Artificial Sequence
  Description of Artificial Sequence: Synthetic oligonucleotide
  Antisense strand to SEQ ID NO: 100630
ggauuucacggagagaucc

SEQ ID NO: 100632 - RNA, 19 nt, Artificial Sequence
  Description of Artificial Sequence: Synthetic oligonucleotide
  Sense strand starting at position 357 of SEQ ID NO: 1270
cagcacucccaguggauaa

SEQ ID NO: 100633 - RNA, 19 nt, Artificial Sequence
  Description of Artificial Sequence: Synthetic oligonucleotide
  Antisense strand to SEQ ID NO: 100632
uuauccacugggagugcug

SEQ ID NO: 100634 - RNA, 19 nt, Artificial Sequence
  Description of Artificial Sequence: Synthetic oligonucleotide
  Sense strand starting at position 521 of SEQ ID NO: 1270
agcccagccucuuugcaau

SEQ ID NO: 100635 - RNA, 19 nt, Artificial Sequence
  Description of Artificial Sequence: Synthetic oligonucleotide
  Antisense strand to SEQ ID NO: 100634
auugcaaagaggcugggcu

SEQ ID NO: 100636 - RNA, 19 nt, Artificial Sequence
  Description of Artificial Sequence: Synthetic oligonucleotide
  Sense strand starting at position 596 of SEQ ID NO: 1270
caagaucccgucugcucaa

SEQ ID NO: 100637 - RNA, 19 nt, Artificial Sequence
  Description of Artificial Sequence: Synthetic oligonucleotide
  Antisense strand to SEQ ID NO: 100636
uugagcagacgggaucuug

SEQ ID NO: 100638 - RNA, 19 nt, Artificial Sequence
  Description of Artificial Sequence: Synthetic oligonucleotide
  Sense strand starting at position 599 of SEQ ID NO: 1270
gaucccgucugcucaauuu

SEQ ID NO: 100639 - RNA, 19 nt, Artificial Sequence
  Description of Artificial Sequence: Synthetic oligonucleotide
  Antisense strand to SEQ ID NO: 100638
aaauugagcagacgggauc

SEQ ID NO: 100640 - RNA, 19 nt, Artificial Sequence
  Description of Artificial Sequence: Synthetic oligonucleotide
  Sense strand starting at position 683 of SEQ ID NO: 1270
gacauacuacgcuggauua

SEQ ID NO: 100641 - RNA, 19 nt, Artificial Sequence
  Description of Artificial Sequence: Synthetic oligonucleotide
  Antisense strand to SEQ ID NO: 100640
uaauccagcguaguauguc

SEQ ID NO: 100642 - RNA, 19 nt, Artificial Sequence
  Description of Artificial Sequence: Synthetic oligonucleotide
  Sense strand starting at position 684 of SEQ ID NO: 1270
acauacuacgcuggauuaa

SEQ ID NO: 100643 - RNA, 19 nt, Artificial Sequence
  Description of Artificial Sequence: Synthetic oligonucleotide
  Antisense strand to SEQ ID NO: 100642
uuaauccagcguaguaugu

SEQ ID NO: 100644 - RNA, 19 nt, Artificial Sequence
  Description of Artificial Sequence: Synthetic oligonucleotide
  Sense strand starting at position 741 of SEQ ID NO: 1270
ccaccaaauuuccagguga

SEQ ID NO: 100645 - RNA, 19 nt, Artificial Sequence
  Description of Artificial Sequence: Synthetic oligonucleotide
  Antisense strand to SEQ ID NO: 100644
ucaccuggaaauuuggugg

SEQ ID NO: 100646 - RNA, 19 nt, Artificial Sequence
  Description of Artificial Sequence: Synthetic oligonucleotide
  Sense strand starting at position 902 of SEQ ID NO: 1270
cguagcacuuccuuggaga

SEQ ID NO: 100647 - RNA, 19 nt, Artificial Sequence
  Description of Artificial Sequence: Synthetic oligonucleotide
  Antisense strand to SEQ ID NO: 100646
ucuccaaggaagugcuacg

SEQ ID NO: 100648 - RNA, 19 nt, Artificial Sequence
  Description of Artificial Sequence: Synthetic oligonucleotide
  Sense strand starting at position 904 of SEQ ID NO: 1270
uagcacuuccuuggagaca

SEQ ID NO: 100649 - RNA, 19 nt, Artificial Sequence
  Description of Artificial Sequence: Synthetic oligonucleotide
  Antisense strand to SEQ ID NO: 100648
ugucuccaaggaagugcua

SEQ ID NO: 100650 - RNA, 19 nt, Artificial Sequence
  Description of Artificial Sequence: Synthetic oligonucleotide
  Sense strand starting at position 1185 of SEQ ID NO: 1270
aguacaggcuucugaguaa

SEQ ID NO: 100651 - RNA, 19 nt, Artificial Sequence
  Description of Artificial Sequence: Synthetic oligonucleotide
  Antisense strand to SEQ ID NO: 100650
uuacucagaagccuguacu

SEQ ID NO: 100652 - RNA, 19 nt, Artificial Sequence
  Description of Artificial Sequence: Synthetic oligonucleotide
  Sense strand starting at position 1189 of SEQ ID NO: 1270
caggcuucugaguaacucu

SEQ ID NO: 100653 - RNA, 19 nt, Artificial Sequence
  Description of Artificial Sequence: Synthetic oligonucleotide
  Antisense strand to SEQ ID NO: 100652
agaguuacucagaagccug

SEQ ID NO: 100654 - RNA, 19 nt, Artificial Sequence
  Description of Artificial Sequence: Synthetic oligonucleotide
  Sense strand starting at position 1196 of SEQ ID NO: 1270
cugaguaacucuuugcaca

SEQ ID NO: 100655 - RNA, 19 nt, Artificial Sequence
  Description of Artificial Sequence: Synthetic oligonucleotide
  Antisense strand to SEQ ID NO: 100654
ugugcaaagaguuacucag

SEQ ID NO: 100656 - RNA, 19 nt, Artificial Sequence
  Description of Artificial Sequence: Synthetic oligonucleotide
  Sense strand starting at position 1197 of SEQ ID NO: 1270
ugaguaacucuuugcacau

SEQ ID NO: 100657 - RNA, 19 nt, Artificial Sequence
  Description of Artificial Sequence: Synthetic oligonucleotide
  Antisense strand to SEQ ID NO: 100656
augugcaaagaguuacuca

SEQ ID NO: 100658 - RNA, 19 nt, Artificial Sequence
  Description of Artificial Sequence: Synthetic oligonucleotide
  Sense strand starting at position 1299 of SEQ ID NO: 1270
cuuccagugcgaggauauu

SEQ ID NO: 100659 - RNA, 19 nt, Artificial Sequence
  Description of Artificial Sequence: Synthetic oligonucleotide
  Antisense strand to SEQ ID NO: 100658
aauauccucgcacuggaag

SEQ ID NO: 100660 - RNA, 19 nt, Artificial Sequence
  Description of Artificial Sequence: Synthetic oligonucleotide
  Sense strand starting at position 1345 of SEQ ID NO: 1270
gaggaaggaucuggagaac

SEQ ID NO: 100661 - RNA, 19 nt, Artificial Sequence
  Description of Artificial Sequence: Synthetic oligonucleotide
  Antisense strand to SEQ ID NO: 100660
guucuccagauccuuccuc

SEQ ID NO: 100662 - RNA, 19 nt, Artificial Sequence
  Description of Artificial Sequence: Synthetic oligonucleotide
  Sense strand starting at position 1396 of SEQ ID NO: 1270
gcacuuugaaaucagggua

SEQ ID NO: 100663 - RNA, 19 nt, Artificial Sequence
  Description of Artificial Sequence: Synthetic oligonucleotide
  Antisense strand to SEQ ID NO: 100662
uacccugauuucaaagugc

SEQ ID NO: 100664 - RNA, 19 nt, Artificial Sequence
  Description of Artificial Sequence: Synthetic oligonucleotide
  Sense strand starting at position 1473 of SEQ ID NO: 1270
aaaugaacuuuccgcgcua

SEQ ID NO: 100665 - RNA, 19 nt, Artificial Sequence
  Description of Artificial Sequence: Synthetic oligonucleotide
  Antisense strand to SEQ ID NO: 100664
uagcgcggaaaguucauuu

SEQ ID NO: 100666 - RNA, 19 nt, Artificial Sequence
  Description of Artificial Sequence: Synthetic oligonucleotide
  Sense strand starting at position 1932 of SEQ ID NO: 1270
cccgaaacauccuaguucu

SEQ ID NO: 100667 - RNA, 19 nt, Artificial Sequence
  Description of Artificial Sequence: Synthetic oligonucleotide
  Antisense strand to SEQ ID NO: 100666
agaacuaggauguuucggg

SEQ ID NO: 100668 - RNA, 19 nt, Artificial Sequence
  Description of Artificial Sequence: Synthetic oligonucleotide
  Sense strand starting at position 3188 of SEQ ID NO: 1270
ugaguuaguucacguccuu

SEQ ID NO: 100669 - RNA, 19 nt, Artificial Sequence
  Description of Artificial Sequence: Synthetic oligonucleotide
  Antisense strand to SEQ ID NO: 100668
aaggacgugaacuaacuca

SEQ ID NO: 100670 - RNA, 19 nt, Artificial Sequence
  Description of Artificial Sequence: Synthetic oligonucleotide
  Sense strand starting at position 3346 of SEQ ID NO: 1270
gggugagggccuugagcuu

SEQ ID NO: 100671 - RNA, 19 nt, Artificial Sequence
  Description of Artificial Sequence: Synthetic oligonucleotide
  Antisense strand to SEQ ID NO: 100670
aagcucaaggcccucaccc

SEQ ID NO: 100672 - RNA, 19 nt, Artificial Sequence
  Description of Artificial Sequence: Synthetic oligonucleotide
  Sense strand starting at position 3353 of SEQ ID NO: 1270
ggccuugagcuuuggauau

SEQ ID NO: 100673 - RNA, 19 nt, Artificial Sequence
  Description of Artificial Sequence: Synthetic oligonucleotide
  Antisense strand to SEQ ID NO: 100672
auauccaaagcucaaggcc

SEQ ID NO: 100674 - RNA, 19 nt, Artificial Sequence
  Description of Artificial Sequence: Synthetic oligonucleotide
  Sense strand starting at position 3355 of SEQ ID NO: 1270
ccuugagcuuuggauauga

SEQ ID NO: 100675 - RNA, 19 nt, Artificial Sequence
  Description of Artificial Sequence: Synthetic oligonucleotide
  Antisense strand to SEQ ID NO: 100674
ucauauccaaagcucaagg

SEQ ID NO: 100676 - RNA, 19 nt, Artificial Sequence
  Description of Artificial Sequence: Synthetic oligonucleotide
  Sense strand starting at position 3447 of SEQ ID NO: 1270
ggugaucuguccuuuagca

SEQ ID NO: 100677 - RNA, 19 nt, Artificial Sequence
  Description of Artificial Sequence: Synthetic oligonucleotide
  Antisense strand to SEQ ID NO: 100676
ugcuaaaggacagaucacc

SEQ ID NO: 100678 - RNA, 19 nt, Artificial Sequence
  Description of Artificial Sequence: Synthetic oligonucleotide
  Sense strand starting at position 3449 of SEQ ID NO: 1270
ugaucuguccuuuagcacu

SEQ ID NO: 100679 - RNA, 19 nt, Artificial Sequence
  Description of Artificial Sequence: Synthetic oligonucleotide
  Antisense strand to SEQ ID NO: 100678
agugcuaaaggacagauca

SEQ ID NO: 100680 - RNA, 19 nt, Artificial Sequence
  Description of Artificial Sequence: Synthetic oligonucleotide
  Sense strand starting at position 3459 of SEQ ID NO: 1270
uuuagcacucaucguaauu

SEQ ID NO: 100681 - RNA, 19 nt, Artificial Sequence
  Description of Artificial Sequence: Synthetic oligonucleotide
  Antisense strand to SEQ ID NO: 100680
aauuacgaugagugcuaaa

SEQ ID NO: 100682 - RNA, 19 nt, Artificial Sequence
  Description of Artificial Sequence: Synthetic oligonucleotide
  Sense strand starting at position 3830 of SEQ ID NO: 1270
cccguuugacuccggaaau

SEQ ID NO: 100683 - RNA, 19 nt, Artificial Sequence
  Description of Artificial Sequence: Synthetic oligonucleotide
  Antisense strand to SEQ ID NO: 100682
auuuccggagucaaacggg

SEQ ID NO: 100684 - RNA, 19 nt, Artificial Sequence
  Description of Artificial Sequence: Synthetic oligonucleotide
  Sense strand starting at position 3831 of SEQ ID NO: 1270
ccguuugacuccggaaauu

SEQ ID NO: 100685 - RNA, 19 nt, Artificial Sequence
  Description of Artificial Sequence: Synthetic oligonucleotide
  Antisense strand to SEQ ID NO: 100684
aauuuccggagucaaacgg

SEQ ID NO: 100686 - RNA, 19 nt, Artificial Sequence
  Description of Artificial Sequence: Synthetic oligonucleotide
  Sense strand starting at position 3840 of SEQ ID NO: 1270
uccggaaauucggugagaa

SEQ ID NO: 100687 - RNA, 19 nt, Artificial Sequence
  Description of Artificial Sequence: Synthetic oligonucleotide
  Antisense strand to SEQ ID NO: 100686
uucucaccgaauuuccgga

SEQ ID NO: 100688 - RNA, 19 nt, Artificial Sequence
  Description of Artificial Sequence: Synthetic oligonucleotide
  Sense strand starting at position 3841 of SEQ ID NO: 1270
ccggaaauucggugagaau

SEQ ID NO: 100689 - RNA, 19 nt, Artificial Sequence
  Description of Artificial Sequence: Synthetic oligonucleotide
  Antisense strand to SEQ ID NO: 100688
auucucaccgaauuuccgg

SEQ ID NO: 100690 - RNA, 19 nt, Artificial Sequence
  Description of Artificial Sequence: Synthetic oligonucleotide
  Sense strand starting at position 3842 of SEQ ID NO: 1270
cggaaauucggugagaaug

SEQ ID NO: 100691 - RNA, 19 nt, Artificial Sequence
  Description of Artificial Sequence: Synthetic oligonucleotide
  Antisense strand to SEQ ID NO: 100690
cauucucaccgaauuuccg

SEQ ID NO: 100692 - RNA, 19 nt, Artificial Sequence
  Description of Artificial Sequence: Synthetic oligonucleotide
  Sense strand starting at position 3844 of SEQ ID NO: 1270
gaaauucggugagaaugaa

SEQ ID NO: 100693 - RNA, 19 nt, Artificial Sequence
  Description of Artificial Sequence: Synthetic oligonucleotide
  Antisense strand to SEQ ID NO: 100692
uucauucucaccgaauuuc

SEQ ID NO: 100694 - RNA, 19 nt, Artificial Sequence
  Description of Artificial Sequence: Synthetic oligonucleotide
  Sense strand starting at position 3896 of SEQ ID NO: 1270
uuuagaguuucaggaaggu

SEQ ID NO: 100695 - RNA, 19 nt, Artificial Sequence
  Description of Artificial Sequence: Synthetic oligonucleotide
  Antisense strand to SEQ ID NO: 100694
accuuccugaaacucuaaa

SEQ ID NO: 100696 - RNA, 19 nt, Artificial Sequence
  Description of Artificial Sequence: Synthetic oligonucleotide
  Sense strand starting at position 3912 of SEQ ID NO: 1270
gguggaguguaaugcaauu

SEQ ID NO: 100697 - RNA, 19 nt, Artificial Sequence
  Description of Artificial Sequence: Synthetic oligonucleotide
  Antisense strand to SEQ ID NO: 100696
aauugcauuacacuccacc

SEQ ID NO: 100698 - RNA, 19 nt, Artificial Sequence
  Description of Artificial Sequence: Synthetic oligonucleotide
  Sense strand starting at position 269 of SEQ ID NO: 1271
gagagaagucaguguggag

SEQ ID NO: 100699 - RNA, 19 nt, Artificial Sequence
  Description of Artificial Sequence: Synthetic oligonucleotide
  Antisense strand to SEQ ID NO: 100698
cuccacacugacuucucuc

SEQ ID NO: 100700 - RNA, 19 nt, Artificial Sequence
  Description of Artificial Sequence: Synthetic oligonucleotide
  Sense strand starting at position 582 of SEQ ID NO: 1271
ggaacaaucagccgcggaa

SEQ ID NO: 100701 - RNA, 19 nt, Artificial Sequence
  Description of Artificial Sequence: Synthetic oligonucleotide
  Antisense strand to SEQ ID NO: 100700
uuccgcggcugauuguucc

SEQ ID NO: 100702 - RNA, 19 nt, Artificial Sequence
  Description of Artificial Sequence: Synthetic oligonucleotide
  Sense strand starting at position 586 of SEQ ID NO: 1271
caaucagccgcggaaacuu

SEQ ID NO: 100703 - RNA, 19 nt, Artificial Sequence
  Description of Artificial Sequence: Synthetic oligonucleotide
  Antisense strand to SEQ ID NO: 100702
aaguuuccgcggcugauug

SEQ ID NO: 100704 - RNA, 19 nt, Artificial Sequence
  Description of Artificial Sequence: Synthetic oligonucleotide
  Sense strand starting at position 1223 of SEQ ID NO: 1271
guccucacgucugugcaaa

SEQ ID NO: 100705 - RNA, 19 nt, Artificial Sequence
  Description of Artificial Sequence: Synthetic oligonucleotide
  Antisense strand to SEQ ID NO: 100704
uuugcacagacgugaggac

SEQ ID NO: 100706 - RNA, 19 nt, Artificial Sequence
  Description of Artificial Sequence: Synthetic oligonucleotide
  Sense strand starting at position 1309 of SEQ ID NO: 1271
guagguguguugcccauuu

SEQ ID NO: 100707 - RNA, 19 nt, Artificial Sequence
  Description of Artificial Sequence: Synthetic oligonucleotide
  Antisense strand to SEQ ID NO: 100706
aaaugggcaacacaccuac

SEQ ID NO: 100708 - RNA, 19 nt, Artificial Sequence
  Description of Artificial Sequence: Synthetic oligonucleotide
  Sense strand starting at position 1382 of SEQ ID NO: 1271
gaaaguaagccucgaucuc

SEQ ID NO: 100709 - RNA, 19 nt, Artificial Sequence
  Description of Artificial Sequence: Synthetic oligonucleotide
  Antisense strand to SEQ ID NO: 100708
gagaucgaggcuuacuuuc

SEQ ID NO: 100710 - RNA, 19 nt, Artificial Sequence
  Description of Artificial Sequence: Synthetic oligonucleotide
  Sense strand starting at position 1604 of SEQ ID NO: 1271
aacuuccggccucgaaauu

SEQ ID NO: 100711 - RNA, 19 nt, Artificial Sequence
  Description of Artificial Sequence: Synthetic oligonucleotide
  Antisense strand to SEQ ID NO: 100710
aauuucgaggccggaaguu

SEQ ID NO: 100712 - RNA, 19 nt, Artificial Sequence
  Description of Artificial Sequence: Synthetic oligonucleotide
  Sense strand starting at position 1727 of SEQ ID NO: 1271
gccuaugugucccacaaau

SEQ ID NO: 100713 - RNA, 19 nt, Artificial Sequence
  Description of Artificial Sequence: Synthetic oligonucleotide
  Antisense strand to SEQ ID NO: 100712
auuugugggacacauaggc

SEQ ID NO: 100714 - RNA, 19 nt, Artificial Sequence
  Description of Artificial Sequence: Synthetic oligonucleotide
  Sense strand starting at position 1729 of SEQ ID NO: 1271
cuaugugucccacaaaugu

SEQ ID NO: 100715 - RNA, 19 nt, Artificial Sequence
  Description of Artificial Sequence: Synthetic oligonucleotide
  Antisense strand to SEQ ID NO: 100714
acauuugugggacacauag

SEQ ID NO: 100716 - RNA, 19 nt, Artificial Sequence
  Description of Artificial Sequence: Synthetic oligonucleotide
  Sense strand starting at position 1970 of SEQ ID NO: 1271
ggccuaagccacugugaga

SEQ ID NO: 100717 - RNA, 19 nt, Artificial Sequence
  Description of Artificial Sequence: Synthetic oligonucleotide
  Antisense strand to SEQ ID NO: 100716
ucucacaguggcuuaggcc

SEQ ID NO: 100718 - RNA, 19 nt, Artificial Sequence
  Description of Artificial Sequence: Synthetic oligonucleotide
  Sense strand starting at position 2018 of SEQ ID NO: 1271
gcucuuucugcuugucaga

SEQ ID NO: 100719 - RNA, 19 nt, Artificial Sequence
  Description of Artificial Sequence: Synthetic oligonucleotide
  Antisense strand to SEQ ID NO: 100718
ucugacaagcagaaagagc

SEQ ID NO: 100720 - RNA, 19 nt, Artificial Sequence
  Description of Artificial Sequence: Synthetic oligonucleotide
  Sense strand starting at position 2124 of SEQ ID NO: 1271
acgccucuugccugaauca

SEQ ID NO: 100721 - RNA, 19 nt, Artificial Sequence
  Description of Artificial Sequence: Synthetic oligonucleotide
  Antisense strand to SEQ ID NO: 100720
ugauucaggcaagaggcgu

SEQ ID NO: 100722 - RNA, 19 nt, Artificial Sequence
  Description of Artificial Sequence: Synthetic oligonucleotide
  Sense strand starting at position 2134 of SEQ ID NO: 1271
ccugaaucacugcauuguu

SEQ ID NO: 100723 - RNA, 19 nt, Artificial Sequence
  Description of Artificial Sequence: Synthetic oligonucleotide
  Antisense strand to SEQ ID NO: 100722
aacaaugcagugauucagg

SEQ ID NO: 100724 - RNA, 19 nt, Artificial Sequence
  Description of Artificial Sequence: Synthetic oligonucleotide
  Sense strand starting at position 2137 of SEQ ID NO: 1271
gaaucacugcauuguuaga

SEQ ID NO: 100725 - RNA, 19 nt, Artificial Sequence
  Description of Artificial Sequence: Synthetic oligonucleotide
  Antisense strand to SEQ ID NO: 100724
ucuaacaaugcagugauuc

SEQ ID NO: 100726 - RNA, 19 nt, Artificial Sequence
  Description of Artificial Sequence: Synthetic oligonucleotide
  Sense strand starting at position 2139 of SEQ ID NO: 1271
aucacugcauuguuagaaa

SEQ ID NO: 100727 - RNA, 19 nt, Artificial Sequence
  Description of Artificial Sequence: Synthetic oligonucleotide
  Antisense strand to SEQ ID NO: 100726
uuucuaacaaugcagugau

SEQ ID NO: 100728 - RNA, 19 nt, Artificial Sequence
  Description of Artificial Sequence: Synthetic oligonucleotide
  Sense strand starting at position 2164 of SEQ ID NO: 1271
guuaaaugauccuggcugu

SEQ ID NO: 100729 - RNA, 19 nt, Artificial Sequence
  Description of Artificial Sequence: Synthetic oligonucleotide
  Antisense strand to SEQ ID NO: 100728
acagccaggaucauuuaac

SEQ ID NO: 100730 - RNA, 19 nt, Artificial Sequence
  Description of Artificial Sequence: Synthetic oligonucleotide
  Sense strand starting at position 2201 of SEQ ID NO: 1271
gauagcaccugacaggauu

SEQ ID NO: 100731 - RNA, 19 nt, Artificial Sequence
  Description of Artificial Sequence: Synthetic oligonucleotide
  Antisense strand to SEQ ID NO: 100730
aauccugucaggugcuauc

SEQ ID NO: 100732 - RNA, 19 nt, Artificial Sequence
  Description of Artificial Sequence: Synthetic oligonucleotide
  Sense strand starting at position 2219 of SEQ ID NO: 1271
ugacgauuaugccucuaua

SEQ ID NO: 100733 - RNA, 19 nt, Artificial Sequence
  Description of Artificial Sequence: Synthetic oligonucleotide
  Antisense strand to SEQ ID NO: 100732
uauagaggcauaaucguca

SEQ ID NO: 100734 - RNA, 19 nt, Artificial Sequence
  Description of Artificial Sequence: Synthetic oligonucleotide
  Sense strand starting at position 2222 of SEQ ID NO: 1271
cgauuaugccucuauaauc

SEQ ID NO: 100735 - RNA, 19 nt, Artificial Sequence
  Description of Artificial Sequence: Synthetic oligonucleotide
  Antisense strand to SEQ ID NO: 100734
gauuauagaggcauaaucg

SEQ ID NO: 100736 - RNA, 19 nt, Artificial Sequence
  Description of Artificial Sequence: Synthetic oligonucleotide
  Sense strand starting at position 2265 of SEQ ID NO: 1271
cccaaaccuuggcgagauu

SEQ ID NO: 100737 - RNA, 19 nt, Artificial Sequence
  Description of Artificial Sequence: Synthetic oligonucleotide
  Antisense strand to SEQ ID NO: 100736
aaucucgccaagguuuggg

SEQ ID NO: 100738 - RNA, 19 nt, Artificial Sequence
  Description of Artificial Sequence: Synthetic oligonucleotide
  Sense strand starting at position 2274 of SEQ ID NO: 1271
uggcgagauuugcacuagu

SEQ ID NO: 100739 - RNA, 19 nt, Artificial Sequence
  Description of Artificial Sequence: Synthetic oligonucleotide
  Antisense strand to SEQ ID NO: 100738
acuagugcaaaucucgcca

SEQ ID NO: 100740 - RNA, 19 nt, Artificial Sequence
  Description of Artificial Sequence: Synthetic oligonucleotide
  Sense strand starting at position 2285 of SEQ ID NO: 1271
gcacuaguguagcuucuga

SEQ ID NO: 100741 - RNA, 19 nt, Artificial Sequence
  Description of Artificial Sequence: Synthetic oligonucleotide
  Antisense strand to SEQ ID NO: 100740
ucagaagcuacacuagugc

SEQ ID NO: 100742 - RNA, 19 nt, Artificial Sequence
  Description of Artificial Sequence: Synthetic oligonucleotide
  Sense strand starting at position 2289 of SEQ ID NO: 1271
uaguguagcuucugaagac

SEQ ID NO: 100743 - RNA, 19 nt, Artificial Sequence
  Description of Artificial Sequence: Synthetic oligonucleotide
  Antisense strand to SEQ ID NO: 100742
gucuucagaagcuacacua

SEQ ID NO: 100744 - RNA, 19 nt, Artificial Sequence
  Description of Artificial Sequence: Synthetic oligonucleotide
  Sense strand starting at position 2290 of SEQ ID NO: 1271
aguguagcuucugaagaca

SEQ ID NO: 100745 - RNA, 19 nt, Artificial Sequence
  Description of Artificial Sequence: Synthetic oligonucleotide
  Antisense strand to SEQ ID NO: 100744
ugucuucagaagcuacacu

SEQ ID NO: 100746 - RNA, 19 nt, Artificial Sequence
  Description of Artificial Sequence: Synthetic oligonucleotide
  Sense strand starting at position 2302 of SEQ ID NO: 1271
gaagacauuugauguaaau

SEQ ID NO: 100747 - RNA, 19 nt, Artificial Sequence
  Description of Artificial Sequence: Synthetic oligonucleotide
  Antisense strand to SEQ ID NO: 100746
auuuacaucaaaugucuuc

SEQ ID NO: 100748 - RNA, 19 nt, Artificial Sequence
  Description of Artificial Sequence: Synthetic oligonucleotide
  Sense strand starting at position 2670 of SEQ ID NO: 1271
ucuaaacugugggcugaaa

SEQ ID NO: 100749 - RNA, 19 nt, Artificial Sequence
  Description of Artificial Sequence: Synthetic oligonucleotide
  Antisense strand to SEQ ID NO: 100748
uuucagcccacaguuuaga

SEQ ID NO: 100750 - RNA, 19 nt, Artificial Sequence
  Description of Artificial Sequence: Synthetic oligonucleotide
  Sense strand starting at position 2739 of SEQ ID NO: 1271
ugcaguccucaguaagacu

SEQ ID NO: 100751 - RNA, 19 nt, Artificial Sequence
  Description of Artificial Sequence: Synthetic oligonucleotide
  Antisense strand to SEQ ID NO: 100750
agucuuacugaggacugca

SEQ ID NO: 100752 - RNA, 19 nt, Artificial Sequence
  Description of Artificial Sequence: Synthetic oligonucleotide
  Sense strand starting at position 2810 of SEQ ID NO: 1271
aauggaguuuaacucuguu

SEQ ID NO: 100753 - RNA, 19 nt, Artificial Sequence
  Description of Artificial Sequence: Synthetic oligonucleotide
  Antisense strand to SEQ ID NO: 100752
aacagaguuaaacuccauu

SEQ ID NO: 100754 - RNA, 19 nt, Artificial Sequence
  Description of Artificial Sequence: Synthetic oligonucleotide
  Sense strand starting at position 3444 of SEQ ID NO: 1271
uugccugggcucugcgaua

SEQ ID NO: 100755 - RNA, 19 nt, Artificial Sequence
  Description of Artificial Sequence: Synthetic oligonucleotide
  Antisense strand to SEQ ID NO: 100754
uaucgcagagcccaggcaa

SEQ ID NO: 100756 - RNA, 19 nt, Artificial Sequence
  Description of Artificial Sequence: Synthetic oligonucleotide
  Sense strand starting at position 3776 of SEQ ID NO: 1271
ugugcuuucuagcuuuacu

SEQ ID NO: 100757 - RNA, 19 nt, Artificial Sequence
  Description of Artificial Sequence: Synthetic oligonucleotide
  Antisense strand to SEQ ID NO: 100756
aguaaagcuagaaagcaca

SEQ ID NO: 100758 - RNA, 19 nt, Artificial Sequence
  Description of Artificial Sequence: Synthetic oligonucleotide
  Sense strand starting at position 3786 of SEQ ID NO: 1271
agcuuuacugcuugcaguu

SEQ ID NO: 100759 - RNA, 19 nt, Artificial Sequence
  Description of Artificial Sequence: Synthetic oligonucleotide
  Antisense strand to SEQ ID NO: 100758
aacugcaagcaguaaagcu

SEQ ID NO: 100760 - RNA, 19 nt, Artificial Sequence
  Description of Artificial Sequence: Synthetic oligonucleotide
  Sense strand starting at position 3812 of SEQ ID NO: 1271
uggccuaugucugugacca

SEQ ID NO: 100761 - RNA, 19 nt, Artificial Sequence
  Description of Artificial Sequence: Synthetic oligonucleotide
  Antisense strand to SEQ ID NO: 100760
uggucacagacauaggcca

SEQ ID NO: 100762 - RNA, 19 nt, Artificial Sequence
  Description of Artificial Sequence: Synthetic oligonucleotide
  Sense strand starting at position 3813 of SEQ ID NO: 1271
ggccuaugucugugaccau

SEQ ID NO: 100763 - RNA, 19 nt, Artificial Sequence
  Description of Artificial Sequence: Synthetic oligonucleotide
  Antisense strand to SEQ ID NO: 100762
auggucacagacauaggcc

SEQ ID NO: 100764 - RNA, 19 nt, Artificial Sequence
  Description of Artificial Sequence: Synthetic oligonucleotide
  Sense strand starting at position 3814 of SEQ ID NO: 1271
gccuaugucugugaccauc

SEQ ID NO: 100765 - RNA, 19 nt, Artificial Sequence
  Description of Artificial Sequence: Synthetic oligonucleotide
  Antisense strand to SEQ ID NO: 100764
gauggucacagacauaggc

SEQ ID NO: 100766 - RNA, 19 nt, Artificial Sequence
  Description of Artificial Sequence: Synthetic oligonucleotide
  Sense strand starting at position 3841 of SEQ ID NO: 1271
gucccucuucccgaugaga

SEQ ID NO: 100767 - RNA, 19 nt, Artificial Sequence
  Description of Artificial Sequence: Synthetic oligonucleotide
  Antisense strand to SEQ ID NO: 100766
ucucaucgggaagagggac

SEQ ID NO: 100768 - RNA, 19 nt, Artificial Sequence
  Description of Artificial Sequence: Synthetic oligonucleotide
  Sense strand starting at position 3843 of SEQ ID NO: 1271
cccucuucccgaugagacu

SEQ ID NO: 100769 - RNA, 19 nt, Artificial Sequence
  Description of Artificial Sequence: Synthetic oligonucleotide
  Antisense strand to SEQ ID NO: 100768
agucucaucgggaagaggg

SEQ ID NO: 100770 - RNA, 19 nt, Artificial Sequence
  Description of Artificial Sequence: Synthetic oligonucleotide
  Sense strand starting at position 3849 of SEQ ID NO: 1271
ucccgaugagacugucauc

SEQ ID NO: 100771 - RNA, 19 nt, Artificial Sequence
  Description of Artificial Sequence: Synthetic oligonucleotide
  Antisense strand to SEQ ID NO: 100770
gaugacagucucaucggga

SEQ ID NO: 100772 - RNA, 19 nt, Artificial Sequence
  Description of Artificial Sequence: Synthetic oligonucleotide
  Sense strand starting at position 3852 of SEQ ID NO: 1271
cgaugagacugucaucuug

SEQ ID NO: 100773 - RNA, 19 nt, Artificial Sequence
  Description of Artificial Sequence: Synthetic oligonucleotide
  Antisense strand to SEQ ID NO: 100772
caagaugacagucucaucg

SEQ ID NO: 100774 - RNA, 19 nt, Artificial Sequence
  Description of Artificial Sequence: Synthetic oligonucleotide
  Sense strand starting at position 3955 of SEQ ID NO: 1271
cagcaaacauugguggaau

SEQ ID NO: 100775 - RNA, 19 nt, Artificial Sequence
  Description of Artificial Sequence: Synthetic oligonucleotide
  Antisense strand to SEQ ID NO: 100774
auuccaccaauguuugcug

SEQ ID NO: 100776 - RNA, 19 nt, Artificial Sequence
  Description of Artificial Sequence: Synthetic oligonucleotide
  Sense strand starting at position 3957 of SEQ ID NO: 1271
gcaaacauugguggaauga

SEQ ID NO: 100777 - RNA, 19 nt, Artificial Sequence
  Description of Artificial Sequence: Synthetic oligonucleotide
  Antisense strand to SEQ ID NO: 100776
ucauuccaccaauguuugc

SEQ ID NO: 100778 - RNA, 19 nt, Artificial Sequence
  Description of Artificial Sequence: Synthetic oligonucleotide
  Sense strand starting at position 18 of SEQ ID NO: 1272
aggcacugacugcgugaau

SEQ ID NO: 100779 - RNA, 19 nt, Artificial Sequence
  Description of Artificial Sequence: Synthetic oligonucleotide
  Antisense strand to SEQ ID NO: 100778
auucacgcagucagugccu

SEQ ID NO: 100780 - RNA, 19 nt, Artificial Sequence
  Description of Artificial Sequence: Synthetic oligonucleotide
  Sense strand starting at position 29 of SEQ ID NO: 1272
gcgugaaucacugaaccca

SEQ ID NO: 100781 - RNA, 19 nt, Artificial Sequence
  Description of Artificial Sequence: Synthetic oligonucleotide
  Antisense strand to SEQ ID NO: 100780
uggguucagugauucacgc

SEQ ID NO: 100782 - RNA, 19 nt, Artificial Sequence
  Description of Artificial Sequence: Synthetic oligonucleotide
  Sense strand starting at position 296 of SEQ ID NO: 1272
ucacgagacccgggcuauu

SEQ ID NO: 100783 - RNA, 19 nt, Artificial Sequence
  Description of Artificial Sequence: Synthetic oligonucleotide
  Antisense strand to SEQ ID NO: 100782
aauagcccgggucucguga

SEQ ID NO: 100784 - RNA, 19 nt, Artificial Sequence
  Description of Artificial Sequence: Synthetic oligonucleotide
  Sense strand starting at position 811 of SEQ ID NO: 1272
uggcuccucucaugcauua

SEQ ID NO: 100785 - RNA, 19 nt, Artificial Sequence
  Description of Artificial Sequence: Synthetic oligonucleotide
  Antisense strand to SEQ ID NO: 100784
uaaugcaugagaggagcca

SEQ ID NO: 100786 - RNA, 19 nt, Artificial Sequence
  Description of Artificial Sequence: Synthetic oligonucleotide
  Sense strand starting at position 1177 of SEQ ID NO: 1272
gagagaagucaguguggag

SEQ ID NO: 100787 - RNA, 19 nt, Artificial Sequence
  Description of Artificial Sequence: Synthetic oligonucleotide
  Antisense strand to SEQ ID NO: 100786
cuccacacugacuucucuc

SEQ ID NO: 100788 - RNA, 19 nt, Artificial Sequence
  Description of Artificial Sequence: Synthetic oligonucleotide
  Sense strand starting at position 1490 of SEQ ID NO: 1272
ggaacaaucagccgcggaa

SEQ ID NO: 100789 - RNA, 19 nt, Artificial Sequence
  Description of Artificial Sequence: Synthetic oligonucleotide
  Antisense strand to SEQ ID NO: 100788
uuccgcggcugauuguucc

SEQ ID NO: 100790 - RNA, 19 nt, Artificial Sequence
  Description of Artificial Sequence: Synthetic oligonucleotide
  Sense strand starting at position 1494 of SEQ ID NO: 1272
caaucagccgcggaaacuu

SEQ ID NO: 100791 - RNA, 19 nt, Artificial Sequence
  Description of Artificial Sequence: Synthetic oligonucleotide
  Antisense strand to SEQ ID NO: 100790
aaguuuccgcggcugauug

SEQ ID NO: 100792 - RNA, 19 nt, Artificial Sequence
  Description of Artificial Sequence: Synthetic oligonucleotide
  Sense strand starting at position 2131 of SEQ ID NO: 1272
guccucacgucugugcaaa

SEQ ID NO: 100793 - RNA, 19 nt, Artificial Sequence
  Description of Artificial Sequence: Synthetic oligonucleotide
  Antisense strand to SEQ ID NO: 100792
uuugcacagacgugaggac

SEQ ID NO: 100794 - RNA, 19 nt, Artificial Sequence
  Description of Artificial Sequence: Synthetic oligonucleotide
  Sense strand starting at position 2217 of SEQ ID NO: 1272
guagguguguugcccauuu

SEQ ID NO: 100795 - RNA, 19 nt, Artificial Sequence
  Description of Artificial Sequence: Synthetic oligonucleotide
  Antisense strand to SEQ ID NO: 100794
aaaugggcaacacaccuac

SEQ ID NO: 100796 - RNA, 19 nt, Artificial Sequence
  Description of Artificial Sequence: Synthetic oligonucleotide
  Sense strand starting at position 2290 of SEQ ID NO: 1272
gaaaguaagccucgaucuc

SEQ ID NO: 100797 - RNA, 19 nt, Artificial Sequence
  Description of Artificial Sequence: Synthetic oligonucleotide
  Antisense strand to SEQ ID NO: 100796
gagaucgaggcuuacuuuc

SEQ ID NO: 100798 - RNA, 19 nt, Artificial Sequence
  Description of Artificial Sequence: Synthetic oligonucleotide
  Sense strand starting at position 2512 of SEQ ID NO: 1272
aacuuccggccucgaaauu

SEQ ID NO: 100799 - RNA, 19 nt, Artificial Sequence
  Description of Artificial Sequence: Synthetic oligonucleotide
  Antisense strand to SEQ ID NO: 100798
aauuucgaggccggaaguu

SEQ ID NO: 100800 - RNA, 19 nt, Artificial Sequence
  Description of Artificial Sequence: Synthetic oligonucleotide
  Sense strand starting at position 2635 of SEQ ID NO: 1272
gccuaugugucccacaaau

SEQ ID NO: 100801 - RNA, 19 nt, Artificial Sequence
  Description of Artificial Sequence: Synthetic oligonucleotide
  Antisense strand to SEQ ID NO: 100800
auuugugggacacauaggc

SEQ ID NO: 100802 - RNA, 19 nt, Artificial Sequence
  Description of Artificial Sequence: Synthetic oligonucleotide
  Sense strand starting at position 2637 of SEQ ID NO: 1272
cuaugugucccacaaaugu

SEQ ID NO: 100803 - RNA, 19 nt, Artificial Sequence
  Description of Artificial Sequence: Synthetic oligonucleotide
  Antisense strand to SEQ ID NO: 100802
acauuugugggacacauag

SEQ ID NO: 100804 - RNA, 19 nt, Artificial Sequence
  Description of Artificial Sequence: Synthetic oligonucleotide
  Sense strand starting at position 2878 of SEQ ID NO: 1272
ggccuaagccacugugaga

SEQ ID NO: 100805 - RNA, 19 nt, Artificial Sequence
  Description of Artificial Sequence: Synthetic oligonucleotide
  Antisense strand to SEQ ID NO: 100804
ucucacaguggcuuaggcc

SEQ ID NO: 100806 - RNA, 19 nt, Artificial Sequence
  Description of Artificial Sequence: Synthetic oligonucleotide
  Sense strand starting at position 2926 of SEQ ID NO: 1272
gcucuuucugcuugucaga

SEQ ID NO: 100807 - RNA, 19 nt, Artificial Sequence
  Description of Artificial Sequence: Synthetic oligonucleotide
  Antisense strand to SEQ ID NO: 100806
ucugacaagcagaaagagc

SEQ ID NO: 100808 - RNA, 19 nt, Artificial Sequence
  Description of Artificial Sequence: Synthetic oligonucleotide
  Sense strand starting at position 3032 of SEQ ID NO: 1272
acgccucuugccugaauca

SEQ ID NO: 100809 - RNA, 19 nt, Artificial Sequence
  Description of Artificial Sequence: Synthetic oligonucleotide
  Antisense strand to SEQ ID NO: 100808
ugauucaggcaagaggcgu

SEQ ID NO: 100810 - RNA, 19 nt, Artificial Sequence
  Description of Artificial Sequence: Synthetic oligonucleotide
  Sense strand starting at position 3042 of SEQ ID NO: 1272
ccugaaucacugcauuguu

SEQ ID NO: 100811 - RNA, 19 nt, Artificial Sequence
  Description of Artificial Sequence: Synthetic oligonucleotide
  Antisense strand to SEQ ID NO: 100810
aacaaugcagugauucagg

SEQ ID NO: 100812 - RNA, 19 nt, Artificial Sequence
  Description of Artificial Sequence: Synthetic oligonucleotide
  Sense strand starting at position 3045 of SEQ ID NO: 1272
gaaucacugcauuguuaga

SEQ ID NO: 100813 - RNA, 19 nt, Artificial Sequence
  Description of Artificial Sequence: Synthetic oligonucleotide
  Antisense strand to SEQ ID NO: 100812
ucuaacaaugcagugauuc

SEQ ID NO: 100814 - RNA, 19 nt, Artificial Sequence
  Description of Artificial Sequence: Synthetic oligonucleotide
  Sense strand starting at position 3047 of SEQ ID NO: 1272
aucacugcauuguuagaaa

SEQ ID NO: 100815 - RNA, 19 nt, Artificial Sequence
  Description of Artificial Sequence: Synthetic oligonucleotide
  Antisense strand to SEQ ID NO: 100814
uuucuaacaaugcagugau

SEQ ID NO: 100816 - RNA, 19 nt, Artificial Sequence
  Description of Artificial Sequence: Synthetic oligonucleotide
  Sense strand starting at position 3072 of SEQ ID NO: 1272
guuaaaugauccuggcugu

SEQ ID NO: 100817 - RNA, 19 nt, Artificial Sequence
  Description of Artificial Sequence: Synthetic oligonucleotide
  Antisense strand to SEQ ID NO: 100816
acagccaggaucauuuaac

SEQ ID NO: 100818 - RNA, 19 nt, Artificial Sequence
  Description of Artificial Sequence: Synthetic oligonucleotide
  Sense strand starting at position 3109 of SEQ ID NO: 1272
gauagcaccugacaggauu

SEQ ID NO: 100819 - RNA, 19 nt, Artificial Sequence
  Description of Artificial Sequence: Synthetic oligonucleotide
  Antisense strand to SEQ ID NO: 100818
aauccugucaggugcuauc

SEQ ID NO: 100820 - RNA, 19 nt, Artificial Sequence
  Description of Artificial Sequence: Synthetic oligonucleotide
  Sense strand starting at position 3127 of SEQ ID NO: 1272
ugacgauuaugccucuaua

SEQ ID NO: 100821 - RNA, 19 nt, Artificial Sequence
  Description of Artificial Sequence: Synthetic oligonucleotide
  Antisense strand to SEQ ID NO: 100820
uauagaggcauaaucguca

SEQ ID NO: 100822 - RNA, 19 nt, Artificial Sequence
  Description of Artificial Sequence: Synthetic oligonucleotide
  Sense strand starting at position 3130 of SEQ ID NO: 1272
cgauuaugccucuauaauc

SEQ ID NO: 100823 - RNA, 19 nt, Artificial Sequence
  Description of Artificial Sequence: Synthetic oligonucleotide
  Antisense strand to SEQ ID NO: 100822
gauuauagaggcauaaucg

SEQ ID NO: 100824 - RNA, 19 nt, Artificial Sequence
  Description of Artificial Sequence: Synthetic oligonucleotide
  Sense strand starting at position 3173 of SEQ ID NO: 1272
cccaaaccuuggcgagauu

SEQ ID NO: 100825 - RNA, 19 nt, Artificial Sequence
  Description of Artificial Sequence: Synthetic oligonucleotide
  Antisense strand to SEQ ID NO: 100824
aaucucgccaagguuuggg

SEQ ID NO: 100826 - RNA, 19 nt, Artificial Sequence
  Description of Artificial Sequence: Synthetic oligonucleotide
  Sense strand starting at position 3182 of SEQ ID NO: 1272
uggcgagauuugcacuagu

SEQ ID NO: 100827 - RNA, 19 nt, Artificial Sequence
  Description of Artificial Sequence: Synthetic oligonucleotide
  Antisense strand to SEQ ID NO: 100826
acuagugcaaaucucgcca

SEQ ID NO: 100828 - RNA, 19 nt, Artificial Sequence
  Description of Artificial Sequence: Synthetic oligonucleotide
  Sense strand starting at position 3193 of SEQ ID NO: 1272
gcacuaguguagcuucuga

SEQ ID NO: 100829 - RNA, 19 nt, Artificial Sequence
  Description of Artificial Sequence: Synthetic oligonucleotide
  Antisense strand to SEQ ID NO: 100828
ucagaagcuacacuagugc

SEQ ID NO: 100830 - RNA, 19 nt, Artificial Sequence
  Description of Artificial Sequence: Synthetic oligonucleotide
  Sense strand starting at position 3197 of SEQ ID NO: 1272
uaguguagcuucugaagac

SEQ ID NO: 100831 - RNA, 19 nt, Artificial Sequence
  Description of Artificial Sequence: Synthetic oligonucleotide
  Antisense strand to SEQ ID NO: 100830
gucuucagaagcuacacua

SEQ ID NO: 100832 - RNA, 19 nt, Artificial Sequence
  Description of Artificial Sequence: Synthetic oligonucleotide
  Sense strand starting at position 3198 of SEQ ID NO: 1272
aguguagcuucugaagaca

SEQ ID NO: 100833 - RNA, 19 nt, Artificial Sequence
  Description of Artificial Sequence: Synthetic oligonucleotide
  Antisense strand to SEQ ID NO: 100832
ugucuucagaagcuacacu

SEQ ID NO: 100834 - RNA, 19 nt, Artificial Sequence
  Description of Artificial Sequence: Synthetic oligonucleotide
  Sense strand starting at position 3210 of SEQ ID NO: 1272
gaagacauuugauguaaau

SEQ ID NO: 100835 - RNA, 19 nt, Artificial Sequence
  Description of Artificial Sequence: Synthetic oligonucleotide
  Antisense strand to SEQ ID NO: 100834
auuuacaucaaaugucuuc

SEQ ID NO: 100836 - RNA, 19 nt, Artificial Sequence
  Description of Artificial Sequence: Synthetic oligonucleotide
  Sense strand starting at position 3578 of SEQ ID NO: 1272
ucuaaacugugggcugaaa

SEQ ID NO: 100837 - RNA, 19 nt, Artificial Sequence
  Description of Artificial Sequence: Synthetic oligonucleotide
  Antisense strand to SEQ ID NO: 100836
uuucagcccacaguuuaga

SEQ ID NO: 100838 - RNA, 19 nt, Artificial Sequence
  Description of Artificial Sequence: Synthetic oligonucleotide
  Sense strand starting at position 3647 of SEQ ID NO: 1272
ugcaguccucaguaagacu

SEQ ID NO: 100839 - RNA, 19 nt, Artificial Sequence
  Description of Artificial Sequence: Synthetic oligonucleotide
  Antisense strand to SEQ ID NO: 100838
agucuuacugaggacugca

SEQ ID NO: 100840 - RNA, 19 nt, Artificial Sequence
  Description of Artificial Sequence: Synthetic oligonucleotide
  Sense strand starting at position 3718 of SEQ ID NO: 1272
aauggaguuuaacucuguu

SEQ ID NO: 100841 - RNA, 19 nt, Artificial Sequence
  Description of Artificial Sequence: Synthetic oligonucleotide
  Antisense strand to SEQ ID NO: 100840
aacagaguuaaacuccauu

SEQ ID NO: 100842 - RNA, 19 nt, Artificial Sequence
  Description of Artificial Sequence: Synthetic oligonucleotide
  Sense strand starting at position 3812 of SEQ ID NO: 1273
gaaagagucucgcucucac

SEQ ID NO: 100843 - RNA, 19 nt, Artificial Sequence
  Description of Artificial Sequence: Synthetic oligonucleotide
  Antisense strand to SEQ ID NO: 100842
gugagagcgagacucuuuc

SEQ ID NO: 100844 - RNA, 19 nt, Artificial Sequence
  Description of Artificial Sequence: Synthetic oligonucleotide
  Sense strand starting at position 3489 of SEQ ID NO: 1273
acugguuuaucagucucau

SEQ ID NO: 100845 - RNA, 19 nt, Artificial Sequence
  Description of Artificial Sequence: Synthetic oligonucleotide
  Antisense strand to SEQ ID NO: 100844
augagacugauaaaccagu

SEQ ID NO: 100846 - RNA, 19 nt, Artificial Sequence
  Description of Artificial Sequence: Synthetic oligonucleotide
  Sense strand starting at position 3486 of SEQ ID NO: 1273
gugacugguuuaucagucu

SEQ ID NO: 100847 - RNA, 19 nt, Artificial Sequence
  Description of Artificial Sequence: Synthetic oligonucleotide
  Antisense strand to SEQ ID NO: 100846
agacugauaaaccagucac

SEQ ID NO: 100848 - RNA, 19 nt, Artificial Sequence
  Description of Artificial Sequence: Synthetic oligonucleotide
  Sense strand starting at position 3484 of SEQ ID NO: 1273
aagugacugguuuaucagu

SEQ ID NO: 100849 - RNA, 19 nt, Artificial Sequence
  Description of Artificial Sequence: Synthetic oligonucleotide
  Antisense strand to SEQ ID NO: 100848
acugauaaaccagucacuu

SEQ ID NO: 100850 - RNA, 19 nt, Artificial Sequence
  Description of Artificial Sequence: Synthetic oligonucleotide
  Sense strand starting at position 3480 of SEQ ID NO: 1273
auagaagugacugguuuau

SEQ ID NO: 100851 - RNA, 19 nt, Artificial Sequence
  Description of Artificial Sequence: Synthetic oligonucleotide
  Antisense strand to SEQ ID NO: 100850
auaaaccagucacuucuau

SEQ ID NO: 100852 - RNA, 19 nt, Artificial Sequence
  Description of Artificial Sequence: Synthetic oligonucleotide
  Sense strand starting at position 3479 of SEQ ID NO: 1273
uauagaagugacugguuua

SEQ ID NO: 100853 - RNA, 19 nt, Artificial Sequence
  Description of Artificial Sequence: Synthetic oligonucleotide
  Antisense strand to SEQ ID NO: 100852
uaaaccagucacuucuaua

SEQ ID NO: 100854 - RNA, 19 nt, Artificial Sequence
  Description of Artificial Sequence: Synthetic oligonucleotide
  Sense strand starting at position 3462 of SEQ ID NO: 1273
gcaaaucaguacucugaua

SEQ ID NO: 100855 - RNA, 19 nt, Artificial Sequence
  Description of Artificial Sequence: Synthetic oligonucleotide
  Antisense strand to SEQ ID NO: 100854
uaucagaguacugauuugc

SEQ ID NO: 100856 - RNA, 19 nt, Artificial Sequence
  Description of Artificial Sequence: Synthetic oligonucleotide
  Sense strand starting at position 3408 of SEQ ID NO: 1273
cucuauaaccaugguagaa

SEQ ID NO: 100857 - RNA, 19 nt, Artificial Sequence
  Description of Artificial Sequence: Synthetic oligonucleotide
  Antisense strand to SEQ ID NO: 100856
uucuaccaugguuauagag

SEQ ID NO: 100858 - RNA, 19 nt, Artificial Sequence
  Description of Artificial Sequence: Synthetic oligonucleotide
  Sense strand starting at position 3407 of SEQ ID NO: 1273
gcucuauaaccaugguaga

SEQ ID NO: 100859 - RNA, 19 nt, Artificial Sequence
  Description of Artificial Sequence: Synthetic oligonucleotide
  Antisense strand to SEQ ID NO: 100858
ucuaccaugguuauagagc

SEQ ID NO: 100860 - RNA, 19 nt, Artificial Sequence
  Description of Artificial Sequence: Synthetic oligonucleotide
  Sense strand starting at position 3401 of SEQ ID NO: 1273
ggugcugcucuauaaccau

SEQ ID NO: 100861 - RNA, 19 nt, Artificial Sequence
  Description of Artificial Sequence: Synthetic oligonucleotide
  Antisense strand to SEQ ID NO: 100860
augguuauagagcagcacc

SEQ ID NO: 100862 - RNA, 19 nt, Artificial Sequence
  Description of Artificial Sequence: Synthetic oligonucleotide
  Sense strand starting at position 3385 of SEQ ID NO: 1273
uguaauucugugggauggu

SEQ ID NO: 100863 - RNA, 19 nt, Artificial Sequence
  Description of Artificial Sequence: Synthetic oligonucleotide
  Antisense strand to SEQ ID NO: 100862
accaucccacagaauuaca

SEQ ID NO: 100864 - RNA, 19 nt, Artificial Sequence
  Description of Artificial Sequence: Synthetic oligonucleotide
  Sense strand starting at position 3383 of SEQ ID NO: 1273
acuguaauucugugggaug

SEQ ID NO: 100865 - RNA, 19 nt, Artificial Sequence
  Description of Artificial Sequence: Synthetic oligonucleotide
  Antisense strand to SEQ ID NO: 100864
caucccacagaauuacagu

SEQ ID NO: 100866 - RNA, 19 nt, Artificial Sequence
  Description of Artificial Sequence: Synthetic oligonucleotide
  Sense strand starting at position 3382 of SEQ ID NO: 1273
aacuguaauucugugggau

SEQ ID NO: 100867 - RNA, 19 nt, Artificial Sequence
  Description of Artificial Sequence: Synthetic oligonucleotide
  Antisense strand to SEQ ID NO: 100866
aucccacagaauuacaguu

SEQ ID NO: 100868 - RNA, 19 nt, Artificial Sequence
  Description of Artificial Sequence: Synthetic oligonucleotide
  Sense strand starting at position 3366 of SEQ ID NO: 1273
uugcauuugugggucaaac

SEQ ID NO: 100869 - RNA, 19 nt, Artificial Sequence
  Description of Artificial Sequence: Synthetic oligonucleotide
  Antisense strand to SEQ ID NO: 100868
guuugacccacaaaugcaa

SEQ ID NO: 100870 - RNA, 19 nt, Artificial Sequence
  Description of Artificial Sequence: Synthetic oligonucleotide
  Sense strand starting at position 3365 of SEQ ID NO: 1273
cuugcauuugugggucaaa

SEQ ID NO: 100871 - RNA, 19 nt, Artificial Sequence
  Description of Artificial Sequence: Synthetic oligonucleotide
  Antisense strand to SEQ ID NO: 100870
uuugacccacaaaugcaag

SEQ ID NO: 100872 - RNA, 19 nt, Artificial Sequence
  Description of Artificial Sequence: Synthetic oligonucleotide
  Sense strand starting at position 3216 of SEQ ID NO: 1273
gggcuauuagcccauuacu

SEQ ID NO: 100873 - RNA, 19 nt, Artificial Sequence
  Description of Artificial Sequence: Synthetic oligonucleotide
  Antisense strand to SEQ ID NO: 100872
aguaaugggcuaauagccc

SEQ ID NO: 100874 - RNA, 19 nt, Artificial Sequence
  Description of Artificial Sequence: Synthetic oligonucleotide
  Sense strand starting at position 2590 of SEQ ID NO: 1273
cgcuauaagacuuaggaca

SEQ ID NO: 100875 - RNA, 19 nt, Artificial Sequence
  Description of Artificial Sequence: Synthetic oligonucleotide
  Antisense strand to SEQ ID NO: 100874
uguccuaagucuuauagcg

SEQ ID NO: 100876 - RNA, 19 nt, Artificial Sequence
  Description of Artificial Sequence: Synthetic oligonucleotide
  Sense strand starting at position 2583 of SEQ ID NO: 1273
ggagaugcgcuauaagacu

SEQ ID NO: 100877 - RNA, 19 nt, Artificial Sequence
  Description of Artificial Sequence: Synthetic oligonucleotide
  Antisense strand to SEQ ID NO: 100876
agucuuauagcgcaucucc

SEQ ID NO: 100878 - RNA, 19 nt, Artificial Sequence
  Description of Artificial Sequence: Synthetic oligonucleotide
  Sense strand starting at position 2313 of SEQ ID NO: 1273
aaucaaugccagugacuga

SEQ ID NO: 100879 - RNA, 19 nt, Artificial Sequence
  Description of Artificial Sequence: Synthetic oligonucleotide
  Antisense strand to SEQ ID NO: 100878
ucagucacuggcauugauu

SEQ ID NO: 100880 - RNA, 19 nt, Artificial Sequence
  Description of Artificial Sequence: Synthetic oligonucleotide
  Sense strand starting at position 2277 of SEQ ID NO: 1273
gucgccuuugaggaaagaa

SEQ ID NO: 100881 - RNA, 19 nt, Artificial Sequence
  Description of Artificial Sequence: Synthetic oligonucleotide
  Antisense strand to SEQ ID NO: 100880
uucuuuccucaaaggcgac

SEQ ID NO: 100882 - RNA, 19 nt, Artificial Sequence
  Description of Artificial Sequence: Synthetic oligonucleotide
  Sense strand starting at position 2228 of SEQ ID NO: 1273
aagugacucaucgggcaga

SEQ ID NO: 100883 - RNA, 19 nt, Artificial Sequence
  Description of Artificial Sequence: Synthetic oligonucleotide
  Antisense strand to SEQ ID NO: 100882
ucugcccgaugagucacuu

SEQ ID NO: 100884 - RNA, 19 nt, Artificial Sequence
  Description of Artificial Sequence: Synthetic oligonucleotide
  Sense strand starting at position 2226 of SEQ ID NO: 1273
ugaagugacucaucgggca

SEQ ID NO: 100885 - RNA, 19 nt, Artificial Sequence
  Description of Artificial Sequence: Synthetic oligonucleotide
  Antisense strand to SEQ ID NO: 100884
ugcccgaugagucacuuca

SEQ ID NO: 100886 - RNA, 19 nt, Artificial Sequence
  Description of Artificial Sequence: Synthetic oligonucleotide
  Sense strand starting at position 2193 of SEQ ID NO: 1273
agaggaguguucucuagag

SEQ ID NO: 100887 - RNA, 19 nt, Artificial Sequence
  Description of Artificial Sequence: Synthetic oligonucleotide
  Antisense strand to SEQ ID NO: 100886
cucuagagaacacuccucu

SEQ ID NO: 100888 - RNA, 19 nt, Artificial Sequence
  Description of Artificial Sequence: Synthetic oligonucleotide
  Sense strand starting at position 2185 of SEQ ID NO: 1273
guaaucuuagaggaguguu

SEQ ID NO: 100889 - RNA, 19 nt, Artificial Sequence
  Description of Artificial Sequence: Synthetic oligonucleotide
  Antisense strand to SEQ ID NO: 100888
aacacuccucuaagauuac

SEQ ID NO: 100890 - RNA, 19 nt, Artificial Sequence
  Description of Artificial Sequence: Synthetic oligonucleotide
  Sense strand starting at position 2184 of SEQ ID NO: 1273
uguaaucuuagaggagugu

SEQ ID NO: 100891 - RNA, 19 nt, Artificial Sequence
  Description of Artificial Sequence: Synthetic oligonucleotide
  Antisense strand to SEQ ID NO: 100890
acacuccucuaagauuaca

SEQ ID NO: 100892 - RNA, 19 nt, Artificial Sequence
  Description of Artificial Sequence: Synthetic oligonucleotide
  Sense strand starting at position 2177 of SEQ ID NO: 1273
ugcauucuguaaucuuaga

SEQ ID NO: 100893 - RNA, 19 nt, Artificial Sequence
  Description of Artificial Sequence: Synthetic oligonucleotide
  Antisense strand to SEQ ID NO: 100892
ucuaagauuacagaaugca

SEQ ID NO: 100894 - RNA, 19 nt, Artificial Sequence
  Description of Artificial Sequence: Synthetic oligonucleotide
  Sense strand starting at position 1370 of SEQ ID NO: 1273
cuaucaggugcugaguaaa

SEQ ID NO: 100895 - RNA, 19 nt, Artificial Sequence
  Description of Artificial Sequence: Synthetic oligonucleotide
  Antisense strand to SEQ ID NO: 100894
uuuacucagcaccugauag

SEQ ID NO: 100896 - RNA, 19 nt, Artificial Sequence
  Description of Artificial Sequence: Synthetic oligonucleotide
  Sense strand starting at position 1266 of SEQ ID NO: 1273
cuuacaguccggugagaag

SEQ ID NO: 100897 - RNA, 19 nt, Artificial Sequence
  Description of Artificial Sequence: Synthetic oligonucleotide
  Antisense strand to SEQ ID NO: 100896
cuucucaccggacuguaag

SEQ ID NO: 100898 - RNA, 19 nt, Artificial Sequence
  Description of Artificial Sequence: Synthetic oligonucleotide
  Sense strand starting at position 1224 of SEQ ID NO: 1273
ccacguuagaaauggauaa

SEQ ID NO: 100899 - RNA, 19 nt, Artificial Sequence
  Description of Artificial Sequence: Synthetic oligonucleotide
  Antisense strand to SEQ ID NO: 100898
uuauccauuucuaacgugg

SEQ ID NO: 100900 - RNA, 19 nt, Artificial Sequence
  Description of Artificial Sequence: Synthetic oligonucleotide
  Sense strand starting at position 1157 of SEQ ID NO: 1273
gccuucgugcgucuuaaca

SEQ ID NO: 100901 - RNA, 19 nt, Artificial Sequence
  Description of Artificial Sequence: Synthetic oligonucleotide
  Antisense strand to SEQ ID NO: 100900
uguuaagacgcacgaaggc

SEQ ID NO: 100902 - RNA, 19 nt, Artificial Sequence
  Description of Artificial Sequence: Synthetic oligonucleotide
  Sense strand starting at position 625 of SEQ ID NO: 1273
cucuauucugugggacaga

SEQ ID NO: 100903 - RNA, 19 nt, Artificial Sequence
  Description of Artificial Sequence: Synthetic oligonucleotide
  Antisense strand to SEQ ID NO: 100902
ucugucccacagaauagag

SEQ ID NO: 100904 - RNA, 19 nt, Artificial Sequence
  Description of Artificial Sequence: Synthetic oligonucleotide
  Sense strand starting at position 623 of SEQ ID NO: 1273
uucucuauucugugggaca

SEQ ID NO: 100905 - RNA, 19 nt, Artificial Sequence
  Description of Artificial Sequence: Synthetic oligonucleotide
  Antisense strand to SEQ ID NO: 100904
ugucccacagaauagagaa

SEQ ID NO: 100906 - RNA, 19 nt, Artificial Sequence
  Description of Artificial Sequence: Synthetic oligonucleotide
  Sense strand starting at position 602 of SEQ ID NO: 1273
acuguaaaguaucucacuu

SEQ ID NO: 100907 - RNA, 19 nt, Artificial Sequence
  Description of Artificial Sequence: Synthetic oligonucleotide
  Antisense strand to SEQ ID NO: 100906
aagugagauacuuuacagu

SEQ ID NO: 100908 - RNA, 19 nt, Artificial Sequence
  Description of Artificial Sequence: Synthetic oligonucleotide
  Sense strand starting at position 543 of SEQ ID NO: 1273
uguggaacagcugacuauu

SEQ ID NO: 100909 - RNA, 19 nt, Artificial Sequence
  Description of Artificial Sequence: Synthetic oligonucleotide
  Antisense strand to SEQ ID NO: 100908
aauagucagcuguuccaca

SEQ ID NO: 100910 - RNA, 19 nt, Artificial Sequence
  Description of Artificial Sequence: Synthetic oligonucleotide
  Sense strand starting at position 531 of SEQ ID NO: 1273
gggcuugaggacuguggaa

SEQ ID NO: 100911 - RNA, 19 nt, Artificial Sequence
  Description of Artificial Sequence: Synthetic oligonucleotide
  Antisense strand to SEQ ID NO: 100910
uuccacaguccucaagccc

SEQ ID NO: 100912 - RNA, 19 nt, Artificial Sequence
  Description of Artificial Sequence: Synthetic oligonucleotide
  Sense strand starting at position 321 of SEQ ID NO: 1273
aagcuuacucauugaggua

SEQ ID NO: 100913 - RNA, 19 nt, Artificial Sequence
  Description of Artificial Sequence: Synthetic oligonucleotide
  Antisense strand to SEQ ID NO: 100912
uaccucaaugaguaagcuu

SEQ ID NO: 100914 - RNA, 19 nt, Artificial Sequence
  Description of Artificial Sequence: Synthetic oligonucleotide
  Sense strand starting at position 320 of SEQ ID NO: 1273
gaagcuuacucauugaggu

SEQ ID NO: 100915 - RNA, 19 nt, Artificial Sequence
  Description of Artificial Sequence: Synthetic oligonucleotide
  Antisense strand to SEQ ID NO: 100914
accucaaugaguaagcuuc

SEQ ID NO: 100916 - RNA, 19 nt, Artificial Sequence
  Description of Artificial Sequence: Synthetic oligonucleotide
  Sense strand starting at position 317 of SEQ ID NO: 1273
agggaagcuuacucauuga

SEQ ID NO: 100917 - RNA, 19 nt, Artificial Sequence
  Description of Artificial Sequence: Synthetic oligonucleotide
  Antisense strand to SEQ ID NO: 100916
ucaaugaguaagcuucccu

SEQ ID NO: 100918 - RNA, 19 nt, Artificial Sequence
  Description of Artificial Sequence: Synthetic oligonucleotide
  Sense strand starting at position 316 of SEQ ID NO: 1273
gagggaagcuuacucauug

SEQ ID NO: 100919 - RNA, 19 nt, Artificial Sequence
  Description of Artificial Sequence: Synthetic oligonucleotide
  Antisense strand to SEQ ID NO: 100918
caaugaguaagcuucccuc

SEQ ID NO: 100920 - RNA, 19 nt, Artificial Sequence
  Description of Artificial Sequence: Synthetic oligonucleotide
  Sense strand starting at position 205 of SEQ ID NO: 1273
aguccugacuuauuagaaa

SEQ ID NO: 100921 - RNA, 19 nt, Artificial Sequence
  Description of Artificial Sequence: Synthetic oligonucleotide
  Antisense strand to SEQ ID NO: 100920
uuucuaauaagucaggacu

SEQ ID NO: 100922 - RNA, 19 nt, Artificial Sequence
  Description of Artificial Sequence: Synthetic oligonucleotide
  Sense strand starting at position 3655 of SEQ ID NO: 1274
aguuaaccucccuguguaa

SEQ ID NO: 100923 - RNA, 19 nt, Artificial Sequence
  Description of Artificial Sequence: Synthetic oligonucleotide
  Antisense strand to SEQ ID NO: 100922
uuacacagggagguuaacu

SEQ ID NO: 100924 - RNA, 19 nt, Artificial Sequence
  Description of Artificial Sequence: Synthetic oligonucleotide
  Sense strand starting at position 3605 of SEQ ID NO: 1274
agcccuaagugucuccauu

SEQ ID NO: 100925 - RNA, 19 nt, Artificial Sequence
  Description of Artificial Sequence: Synthetic oligonucleotide
  Antisense strand to SEQ ID NO: 100924
aauggagacacuuagggcu

SEQ ID NO: 100926 - RNA, 19 nt, Artificial Sequence
  Description of Artificial Sequence: Synthetic oligonucleotide
  Sense strand starting at position 3538 of SEQ ID NO: 1274
guguucagugaaugaaugu

SEQ ID NO: 100927 - RNA, 19 nt, Artificial Sequence
  Description of Artificial Sequence: Synthetic oligonucleotide
  Antisense strand to SEQ ID NO: 100926
acauucauucacugaacac

SEQ ID NO: 100928 - RNA, 19 nt, Artificial Sequence
  Description of Artificial Sequence: Synthetic oligonucleotide
  Sense strand starting at position 3518 of SEQ ID NO: 1274
agcuuagggccugaauuau

SEQ ID NO: 100929 - RNA, 19 nt, Artificial Sequence
  Description of Artificial Sequence: Synthetic oligonucleotide
  Antisense strand to SEQ ID NO: 100928
auaauucaggcccuaagcu

SEQ ID NO: 100930 - RNA, 19 nt, Artificial Sequence
  Description of Artificial Sequence: Synthetic oligonucleotide
  Sense strand starting at position 3517 of SEQ ID NO: 1274
uagcuuagggccugaauua

SEQ ID NO: 100931 - RNA, 19 nt, Artificial Sequence
  Description of Artificial Sequence: Synthetic oligonucleotide
  Antisense strand to SEQ ID NO: 100930
uaauucaggcccuaagcua

SEQ ID NO: 100932 - RNA, 19 nt, Artificial Sequence
  Description of Artificial Sequence: Synthetic oligonucleotide
  Sense strand starting at position 3340 of SEQ ID NO: 1274
gugugacacuguucugucu

SEQ ID NO: 100933 - RNA, 19 nt, Artificial Sequence
  Description of Artificial Sequence: Synthetic oligonucleotide
  Antisense strand to SEQ ID NO: 100932
agacagaacagugucacac

SEQ ID NO: 100934 - RNA, 19 nt, Artificial Sequence
  Description of Artificial Sequence: Synthetic oligonucleotide
  Sense strand starting at position 3260 of SEQ ID NO: 1274
gccauugcugagcagaaga

SEQ ID NO: 100935 - RNA, 19 nt, Artificial Sequence
  Description of Artificial Sequence: Synthetic oligonucleotide
  Antisense strand to SEQ ID NO: 100934
ucuucugcucagcaauggc

SEQ ID NO: 100936 - RNA, 19 nt, Artificial Sequence
  Description of Artificial Sequence: Synthetic oligonucleotide
  Sense strand starting at position 3061 of SEQ ID NO: 1274
caguucucugauuagugaa

SEQ ID NO: 100937 - RNA, 19 nt, Artificial Sequence
  Description of Artificial Sequence: Synthetic oligonucleotide
  Antisense strand to SEQ ID NO: 100936
uucacuaaucagagaacug

SEQ ID NO: 100938 - RNA, 19 nt, Artificial Sequence
  Description of Artificial Sequence: Synthetic oligonucleotide
  Sense strand starting at position 3060 of SEQ ID NO: 1274
ccaguucucugauuaguga

SEQ ID NO: 100939 - RNA, 19 nt, Artificial Sequence
  Description of Artificial Sequence: Synthetic oligonucleotide
  Antisense strand to SEQ ID NO: 100938
ucacuaaucagagaacugg

SEQ ID NO: 100940 - RNA, 19 nt, Artificial Sequence
  Description of Artificial Sequence: Synthetic oligonucleotide
  Sense strand starting at position 3057 of SEQ ID NO: 1274
uuuccaguucucugauuag

SEQ ID NO: 100941 - RNA, 19 nt, Artificial Sequence
  Description of Artificial Sequence: Synthetic oligonucleotide
  Antisense strand to SEQ ID NO: 100940
cuaaucagagaacuggaaa

SEQ ID NO: 100942 - RNA, 19 nt, Artificial Sequence
  Description of Artificial Sequence: Synthetic oligonucleotide
  Sense strand starting at position 3055 of SEQ ID NO: 1274
ucuuuccaguucucugauu

SEQ ID NO: 100943 - RNA, 19 nt, Artificial Sequence
  Description of Artificial Sequence: Synthetic oligonucleotide
  Antisense strand to SEQ ID NO: 100942
aaucagagaacuggaaaga

SEQ ID NO: 100944 - RNA, 19 nt, Artificial Sequence
  Description of Artificial Sequence: Synthetic oligonucleotide
  Sense strand starting at position 3024 of SEQ ID NO: 1274
cucugagucccuuauguca

SEQ ID NO: 100945 - RNA, 19 nt, Artificial Sequence
  Description of Artificial Sequence: Synthetic oligonucleotide
  Antisense strand to SEQ ID NO: 100944
ugacauaagggacucagag

SEQ ID NO: 100946 - RNA, 19 nt, Artificial Sequence
  Description of Artificial Sequence: Synthetic oligonucleotide
  Sense strand starting at position 2961 of SEQ ID NO: 1274
agggcauuaguuuggaaca

SEQ ID NO: 100947 - RNA, 19 nt, Artificial Sequence
  Description of Artificial Sequence: Synthetic oligonucleotide
  Antisense strand to SEQ ID NO: 100946
uguuccaaacuaaugcccu

SEQ ID NO: 100948 - RNA, 19 nt, Artificial Sequence
  Description of Artificial Sequence: Synthetic oligonucleotide
  Sense strand starting at position 2931 of SEQ ID NO: 1274
ccagaaaugugguccucaa

SEQ ID NO: 100949 - RNA, 19 nt, Artificial Sequence
  Description of Artificial Sequence: Synthetic oligonucleotide
  Antisense strand to SEQ ID NO: 100948
uugaggaccacauuucugg

SEQ ID NO: 100950 - RNA, 19 nt, Artificial Sequence
  Description of Artificial Sequence: Synthetic oligonucleotide
  Sense strand starting at position 2887 of SEQ ID NO: 1274
ggcacugaggguugaaaca

SEQ ID NO: 100951 - RNA, 19 nt, Artificial Sequence
  Description of Artificial Sequence: Synthetic oligonucleotide
  Antisense strand to SEQ ID NO: 100950
uguuucaacccucagugcc

SEQ ID NO: 100952 - RNA, 19 nt, Artificial Sequence
  Description of Artificial Sequence: Synthetic oligonucleotide
  Sense strand starting at position 2868 of SEQ ID NO: 1274
ggagauacauggcuccaga

SEQ ID NO: 100953 - RNA, 19 nt, Artificial Sequence
  Description of Artificial Sequence: Synthetic oligonucleotide
  Antisense strand to SEQ ID NO: 100952
ucuggagccauguaucucc

SEQ ID NO: 100954 - RNA, 19 nt, Artificial Sequence
  Description of Artificial Sequence: Synthetic oligonucleotide
  Sense strand starting at position 2839 of SEQ ID NO: 1274
guguaugugucucccaaca

SEQ ID NO: 100955 - RNA, 19 nt, Artificial Sequence
  Description of Artificial Sequence: Synthetic oligonucleotide
  Antisense strand to SEQ ID NO: 100954
uguugggagacacauacac

SEQ ID NO: 100956 - RNA, 19 nt, Artificial Sequence
  Description of Artificial Sequence: Synthetic oligonucleotide
  Sense strand starting at position 2837 of SEQ ID NO: 1274
ggguguaugugucucccaa

SEQ ID NO: 100957 - RNA, 19 nt, Artificial Sequence
  Description of Artificial Sequence: Synthetic oligonucleotide
  Antisense strand to SEQ ID NO: 100956
uugggagacacauacaccc

SEQ ID NO: 100958 - RNA, 19 nt, Artificial Sequence
  Description of Artificial Sequence: Synthetic oligonucleotide
  Sense strand starting at position 2726 of SEQ ID NO: 1274
gcaacuguuauguagcaga

SEQ ID NO: 100959 - RNA, 19 nt, Artificial Sequence
  Description of Artificial Sequence: Synthetic oligonucleotide
  Antisense strand to SEQ ID NO: 100958
ucugcuacauaacaguugc

SEQ ID NO: 100960 - RNA, 19 nt, Artificial Sequence
  Description of Artificial Sequence: Synthetic oligonucleotide
  Sense strand starting at position 2541 of SEQ ID NO: 1274
ucccaagucguggagagaa

SEQ ID NO: 100961 - RNA, 19 nt, Artificial Sequence
  Description of Artificial Sequence: Synthetic oligonucleotide
  Antisense strand to SEQ ID NO: 100960
uucucuccacgacuuggga

SEQ ID NO: 100962 - RNA, 19 nt, Artificial Sequence
  Description of Artificial Sequence: Synthetic oligonucleotide
  Sense strand starting at position 2540 of SEQ ID NO: 1274
cucccaagucguggagaga

SEQ ID NO: 100963 - RNA, 19 nt, Artificial Sequence
  Description of Artificial Sequence: Synthetic oligonucleotide
  Antisense strand to SEQ ID NO: 100962
ucucuccacgacuugggag

SEQ ID NO: 100964 - RNA, 19 nt, Artificial Sequence
  Description of Artificial Sequence: Synthetic oligonucleotide
  Sense strand starting at position 1432 of SEQ ID NO: 1274
ccgcucaacacggaagaau

SEQ ID NO: 100965 - RNA, 19 nt, Artificial Sequence
  Description of Artificial Sequence: Synthetic oligonucleotide
  Antisense strand to SEQ ID NO: 100964
auucuuccguguugagcgg

SEQ ID NO: 100966 - RNA, 19 nt, Artificial Sequence
  Description of Artificial Sequence: Synthetic oligonucleotide
  Sense strand starting at position 1313 of SEQ ID NO: 1274
agaguugaggcgcaagagu

SEQ ID NO: 100967 - RNA, 19 nt, Artificial Sequence
  Description of Artificial Sequence: Synthetic oligonucleotide
  Antisense strand to SEQ ID NO: 100966
acucuugcgccucaacucu

SEQ ID NO: 100968 - RNA, 19 nt, Artificial Sequence
  Description of Artificial Sequence: Synthetic oligonucleotide
  Sense strand starting at position 1278 of SEQ ID NO: 1274
uguucuuaugaaugaacuu

SEQ ID NO: 100969 - RNA, 19 nt, Artificial Sequence
  Description of Artificial Sequence: Synthetic oligonucleotide
  Antisense strand to SEQ ID NO: 100968
aaguucauucauaagaaca

SEQ ID NO: 100970 - RNA, 19 nt, Artificial Sequence
  Description of Artificial Sequence: Synthetic oligonucleotide
  Sense strand starting at position 1271 of SEQ ID NO: 1274
gagcucuuguucuuaugaa

SEQ ID NO: 100971 - RNA, 19 nt, Artificial Sequence
  Description of Artificial Sequence: Synthetic oligonucleotide
  Antisense strand to SEQ ID NO: 100970
uucauaagaacaagagcuc

SEQ ID NO: 100972 - RNA, 19 nt, Artificial Sequence
  Description of Artificial Sequence: Synthetic oligonucleotide
  Sense strand starting at position 1249 of SEQ ID NO: 1274
ggacgcggcuccuuuaaga

SEQ ID NO: 100973 - RNA, 19 nt, Artificial Sequence
  Description of Artificial Sequence: Synthetic oligonucleotide
  Antisense strand to SEQ ID NO: 100972
ucuuaaaggagccgcgucc

SEQ ID NO: 100974 - RNA, 19 nt, Artificial Sequence
  Description of Artificial Sequence: Synthetic oligonucleotide
  Sense strand starting at position 1101 of SEQ ID NO: 1274
guaucuauugccugagauc

SEQ ID NO: 100975 - RNA, 19 nt, Artificial Sequence
  Description of Artificial Sequence: Synthetic oligonucleotide
  Antisense strand to SEQ ID NO: 100974
gaucucaggcaauagauac

SEQ ID NO: 100976 - RNA, 19 nt, Artificial Sequence
  Description of Artificial Sequence: Synthetic oligonucleotide
  Sense strand starting at position 1100 of SEQ ID NO: 1274
gguaucuauugccugagau

SEQ ID NO: 100977 - RNA, 19 nt, Artificial Sequence
  Description of Artificial Sequence: Synthetic oligonucleotide
  Antisense strand to SEQ ID NO: 100976
aucucaggcaauagauacc

SEQ ID NO: 100978 - RNA, 19 nt, Artificial Sequence
  Description of Artificial Sequence: Synthetic oligonucleotide
  Sense strand starting at position 1099 of SEQ ID NO: 1274
agguaucuauugccugaga

SEQ ID NO: 100979 - RNA, 19 nt, Artificial Sequence
  Description of Artificial Sequence: Synthetic oligonucleotide
  Antisense strand to SEQ ID NO: 100978
ucucaggcaauagauaccu

SEQ ID NO: 100980 - RNA, 19 nt, Artificial Sequence
  Description of Artificial Sequence: Synthetic oligonucleotide
  Sense strand starting at position 998 of SEQ ID NO: 1274
aguagauauuacucauaca

SEQ ID NO: 100981 - RNA, 19 nt, Artificial Sequence
  Description of Artificial Sequence: Synthetic oligonucleotide
  Antisense strand to SEQ ID NO: 100980
uguaugaguaauaucuacu

SEQ ID NO: 100982 - RNA, 19 nt, Artificial Sequence
  Description of Artificial Sequence: Synthetic oligonucleotide
  Sense strand starting at position 724 of SEQ ID NO: 1274
cugccuacuccuggugaga

SEQ ID NO: 100983 - RNA, 19 nt, Artificial Sequence
  Description of Artificial Sequence: Synthetic oligonucleotide
  Antisense strand to SEQ ID NO: 100982
ucucaccaggaguaggcag

SEQ ID NO: 100984 - RNA, 19 nt, Artificial Sequence
  Description of Artificial Sequence: Synthetic oligonucleotide
  Sense strand starting at position 510 of SEQ ID NO: 1274
uggagauucuaaggaaacu

SEQ ID NO: 100985 - RNA, 19 nt, Artificial Sequence
  Description of Artificial Sequence: Synthetic oligonucleotide
  Antisense strand to SEQ ID NO: 100984
aguuuccuuagaaucucca

SEQ ID NO: 100986 - RNA, 19 nt, Artificial Sequence
  Description of Artificial Sequence: Synthetic oligonucleotide
  Sense strand starting at position 469 of SEQ ID NO: 1274
uccauacuugugugaaagu

SEQ ID NO: 100987 - RNA, 19 nt, Artificial Sequence
  Description of Artificial Sequence: Synthetic oligonucleotide
  Antisense strand to SEQ ID NO: 100986
acuuucacacaaguaugga

SEQ ID NO: 100988 - RNA, 19 nt, Artificial Sequence
  Description of Artificial Sequence: Synthetic oligonucleotide
  Sense strand starting at position 468 of SEQ ID NO: 1274
auccauacuugugugaaag

SEQ ID NO: 100989 - RNA, 19 nt, Artificial Sequence
  Description of Artificial Sequence: Synthetic oligonucleotide
  Antisense strand to SEQ ID NO: 100988
cuuucacacaaguauggau

SEQ ID NO: 100990 - RNA, 19 nt, Artificial Sequence
  Description of Artificial Sequence: Synthetic oligonucleotide
  Sense strand starting at position 465 of SEQ ID NO: 1274
ggaauccauacuuguguga

SEQ ID NO: 100991 - RNA, 19 nt, Artificial Sequence
  Description of Artificial Sequence: Synthetic oligonucleotide
  Antisense strand to SEQ ID NO: 100990
ucacacaaguauggauucc

SEQ ID NO: 100992 - RNA, 19 nt, Artificial Sequence
  Description of Artificial Sequence: Synthetic oligonucleotide
  Sense strand starting at position 435 of SEQ ID NO: 1274
uguucuccauucuuaggaa

SEQ ID NO: 100993 - RNA, 19 nt, Artificial Sequence
  Description of Artificial Sequence: Synthetic oligonucleotide
  Antisense strand to SEQ ID NO: 100992
uuccuaagaauggagaaca

SEQ ID NO: 100994 - RNA, 19 nt, Artificial Sequence
  Description of Artificial Sequence: Synthetic oligonucleotide
  Sense strand starting at position 426 of SEQ ID NO: 1274
aaagaaagguguucuccau

SEQ ID NO: 100995 - RNA, 19 nt, Artificial Sequence
  Description of Artificial Sequence: Synthetic oligonucleotide
  Antisense strand to SEQ ID NO: 100994
auggagaacaccuuucuuu

SEQ ID NO: 100996 - RNA, 19 nt, Artificial Sequence
  Description of Artificial Sequence: Synthetic oligonucleotide
  Sense strand starting at position 66 of SEQ ID NO: 1274
gccuccauccaagaagguu

SEQ ID NO: 100997 - RNA, 19 nt, Artificial Sequence
  Description of Artificial Sequence: Synthetic oligonucleotide
  Antisense strand to SEQ ID NO: 100996
aaccuucuuggauggaggc

SEQ ID NO: 100998 - RNA, 19 nt, Artificial Sequence
  Description of Artificial Sequence: Synthetic oligonucleotide
  Sense strand starting at position 19 of SEQ ID NO: 1274
gguucuuucugggaagagg

SEQ ID NO: 100999 - RNA, 19 nt, Artificial Sequence
  Description of Artificial Sequence: Synthetic oligonucleotide
  Antisense strand to SEQ ID NO: 100998
ccucuucccagaaagaacc

SEQ ID NO: 101000 - RNA, 19 nt, Artificial Sequence
  Description of Artificial Sequence: Synthetic oligonucleotide
  Sense strand starting at position 18 of SEQ ID NO: 1274
cgguucuuucugggaagag

SEQ ID NO: 101001 - RNA, 19 nt, Artificial Sequence
  Description of Artificial Sequence: Synthetic oligonucleotide
  Antisense strand to SEQ ID NO: 101000
cucuucccagaaagaaccg

SEQ ID NO: 101002 - RNA, 19 nt, Artificial Sequence
  Description of Artificial Sequence: Synthetic oligonucleotide
  Sense strand starting at position 3938 of SEQ ID NO: 1275
acuuauuggucuguagauu

SEQ ID NO: 101003 - RNA, 19 nt, Artificial Sequence
  Description of Artificial Sequence: Synthetic oligonucleotide
  Antisense strand to SEQ ID NO: 101002
aaucuacagaccaauaagu

SEQ ID NO: 101004 - RNA, 19 nt, Artificial Sequence
  Description of Artificial Sequence: Synthetic oligonucleotide
  Sense strand starting at position 3937 of SEQ ID NO: 1275
aacuuauuggucuguagau

SEQ ID NO: 101005 - RNA, 19 nt, Artificial Sequence
  Description of Artificial Sequence: Synthetic oligonucleotide
  Antisense strand to SEQ ID NO: 101004
aucuacagaccaauaaguu

SEQ ID NO: 101006 - RNA, 19 nt, Artificial Sequence
  Description of Artificial Sequence: Synthetic oligonucleotide
  Sense strand starting at position 3911 of SEQ ID NO: 1275
guuacacagguguaaauau

SEQ ID NO: 101007 - RNA, 19 nt, Artificial Sequence
  Description of Artificial Sequence: Synthetic oligonucleotide
  Antisense strand to SEQ ID NO: 101006
auauuuacaccuguguaac

SEQ ID NO: 101008 - RNA, 19 nt, Artificial Sequence
  Description of Artificial Sequence: Synthetic oligonucleotide
  Sense strand starting at position 3907 of SEQ ID NO: 1275
gguaguuacacagguguaa

SEQ ID NO: 101009 - RNA, 19 nt, Artificial Sequence
  Description of Artificial Sequence: Synthetic oligonucleotide
  Antisense strand to SEQ ID NO: 101008
uuacaccuguguaacuacc

SEQ ID NO: 101010 - RNA, 19 nt, Artificial Sequence
  Description of Artificial Sequence: Synthetic oligonucleotide
  Sense strand starting at position 3892 of SEQ ID NO: 1275
aagcuugaucuagguggua

SEQ ID NO: 101011 - RNA, 19 nt, Artificial Sequence
  Description of Artificial Sequence: Synthetic oligonucleotide
  Antisense strand to SEQ ID NO: 101010
uaccaccuagaucaagcuu

SEQ ID NO: 101012 - RNA, 19 nt, Artificial Sequence
  Description of Artificial Sequence: Synthetic oligonucleotide
  Sense strand starting at position 3888 of SEQ ID NO: 1275
ucugaagcuugaucuaggu

SEQ ID NO: 101013 - RNA, 19 nt, Artificial Sequence
  Description of Artificial Sequence: Synthetic oligonucleotide
  Antisense strand to SEQ ID NO: 101012
accuagaucaagcuucaga

SEQ ID NO: 101014 - RNA, 19 nt, Artificial Sequence
  Description of Artificial Sequence: Synthetic oligonucleotide
  Sense strand starting at position 3713 of SEQ ID NO: 1275
augaccuugcccuaaugau

SEQ ID NO: 101015 - RNA, 19 nt, Artificial Sequence
  Description of Artificial Sequence: Synthetic oligonucleotide
  Antisense strand to SEQ ID NO: 101014
aucauuagggcaaggucau

SEQ ID NO: 101016 - RNA, 19 nt, Artificial Sequence
  Description of Artificial Sequence: Synthetic oligonucleotide
  Sense strand starting at position 3600 of SEQ ID NO: 1275
gguuguagaaauggucuua

SEQ ID NO: 101017 - RNA, 19 nt, Artificial Sequence
  Description of Artificial Sequence: Synthetic oligonucleotide
  Antisense strand to SEQ ID NO: 101016
uaagaccauuucuacaacc

SEQ ID NO: 101018 - RNA, 19 nt, Artificial Sequence
  Description of Artificial Sequence: Synthetic oligonucleotide
  Sense strand starting at position 3591 of SEQ ID NO: 1275
augagcucugguuguagaa

SEQ ID NO: 101019 - RNA, 19 nt, Artificial Sequence
  Description of Artificial Sequence: Synthetic oligonucleotide
  Antisense strand to SEQ ID NO: 101018
uucuacaaccagagcucau

SEQ ID NO: 101020 - RNA, 19 nt, Artificial Sequence
  Description of Artificial Sequence: Synthetic oligonucleotide
  Sense strand starting at position 3282 of SEQ ID NO: 1275
guacuuauucgauagugau

SEQ ID NO: 101021 - RNA, 19 nt, Artificial Sequence
  Description of Artificial Sequence: Synthetic oligonucleotide
  Antisense strand to SEQ ID NO: 101020
aucacuaucgaauaaguac

SEQ ID NO: 101022 - RNA, 19 nt, Artificial Sequence
  Description of Artificial Sequence: Synthetic oligonucleotide
  Sense strand starting at position 3278 of SEQ ID NO: 1275
acaaguacuuauucgauag

SEQ ID NO: 101023 - RNA, 19 nt, Artificial Sequence
  Description of Artificial Sequence: Synthetic oligonucleotide
  Antisense strand to SEQ ID NO: 101022
cuaucgaauaaguacuugu

SEQ ID NO: 101024 - RNA, 19 nt, Artificial Sequence
  Description of Artificial Sequence: Synthetic oligonucleotide
  Sense strand starting at position 3260 of SEQ ID NO: 1275
aucacucuguggguaauga

SEQ ID NO: 101025 - RNA, 19 nt, Artificial Sequence
  Description of Artificial Sequence: Synthetic oligonucleotide
  Antisense strand to SEQ ID NO: 101024
ucauuacccacagagugau

SEQ ID NO: 101026 - RNA, 19 nt, Artificial Sequence
  Description of Artificial Sequence: Synthetic oligonucleotide
  Sense strand starting at position 3257 of SEQ ID NO: 1275
cucaucacucuguggguaa

SEQ ID NO: 101027 - RNA, 19 nt, Artificial Sequence
  Description of Artificial Sequence: Synthetic oligonucleotide
  Antisense strand to SEQ ID NO: 101026
uuacccacagagugaugag

SEQ ID NO: 101028 - RNA, 19 nt, Artificial Sequence
  Description of Artificial Sequence: Synthetic oligonucleotide
  Sense strand starting at position 2940 of SEQ ID NO: 1275
guguguucccgcuccuaag

SEQ ID NO: 101029 - RNA, 19 nt, Artificial Sequence
  Description of Artificial Sequence: Synthetic oligonucleotide
  Antisense strand to SEQ ID NO: 101028
cuuaggagcgggaacacac

SEQ ID NO: 101030 - RNA, 19 nt, Artificial Sequence
  Description of Artificial Sequence: Synthetic oligonucleotide
  Sense strand starting at position 2938 of SEQ ID NO: 1275
cuguguguucccgcuccua

SEQ ID NO: 101031 - RNA, 19 nt, Artificial Sequence
  Description of Artificial Sequence: Synthetic oligonucleotide
  Antisense strand to SEQ ID NO: 101030
uaggagcgggaacacacag

SEQ ID NO: 101032 - RNA, 19 nt, Artificial Sequence
  Description of Artificial Sequence: Synthetic oligonucleotide
  Sense strand starting at position 2845 of SEQ ID NO: 1275
guugauuauucucuagacu

SEQ ID NO: 101033 - RNA, 19 nt, Artificial Sequence
  Description of Artificial Sequence: Synthetic oligonucleotide
  Antisense strand to SEQ ID NO: 101032
agucuagagaauaaucaac

SEQ ID NO: 101034 - RNA, 19 nt, Artificial Sequence
  Description of Artificial Sequence: Synthetic oligonucleotide
  Sense strand starting at position 2844 of SEQ ID NO: 1275
gguugauuauucucuagac

SEQ ID NO: 101035 - RNA, 19 nt, Artificial Sequence
  Description of Artificial Sequence: Synthetic oligonucleotide
  Antisense strand to SEQ ID NO: 101034
gucuagagaauaaucaacc

SEQ ID NO: 101036 - RNA, 19 nt, Artificial Sequence
  Description of Artificial Sequence: Synthetic oligonucleotide
  Sense strand starting at position 2819 of SEQ ID NO: 1275
ggauaaaucccuggcagug

SEQ ID NO: 101037 - RNA, 19 nt, Artificial Sequence
  Description of Artificial Sequence: Synthetic oligonucleotide
  Antisense strand to SEQ ID NO: 101036
cacugccagggauuuaucc

SEQ ID NO: 101038 - RNA, 19 nt, Artificial Sequence
  Description of Artificial Sequence: Synthetic oligonucleotide
  Sense strand starting at position 2818 of SEQ ID NO: 1275
uggauaaaucccuggcagu

SEQ ID NO: 101039 - RNA, 19 nt, Artificial Sequence
  Description of Artificial Sequence: Synthetic oligonucleotide
  Antisense strand to SEQ ID NO: 101038
acugccagggauuuaucca

SEQ ID NO: 101040 - RNA, 19 nt, Artificial Sequence
  Description of Artificial Sequence: Synthetic oligonucleotide
  Sense strand starting at position 2691 of SEQ ID NO: 1275
cuucuaacuaguuggagga

SEQ ID NO: 101041 - RNA, 19 nt, Artificial Sequence
  Description of Artificial Sequence: Synthetic oligonucleotide
  Antisense strand to SEQ ID NO: 101040
uccuccaacuaguuagaag

SEQ ID NO: 101042 - RNA, 19 nt, Artificial Sequence
  Description of Artificial Sequence: Synthetic oligonucleotide
  Sense strand starting at position 2653 of SEQ ID NO: 1275
ggaggaugacgcuggucua

SEQ ID NO: 101043 - RNA, 19 nt, Artificial Sequence
  Description of Artificial Sequence: Synthetic oligonucleotide
  Antisense strand to SEQ ID NO: 101042
uagaccagcgucauccucc

SEQ ID NO: 101044 - RNA, 19 nt, Artificial Sequence
  Description of Artificial Sequence: Synthetic oligonucleotide
  Sense strand starting at position 2527 of SEQ ID NO: 1275
ccaagagguuaaucacauu

SEQ ID NO: 101045 - RNA, 19 nt, Artificial Sequence
  Description of Artificial Sequence: Synthetic oligonucleotide
  Antisense strand to SEQ ID NO: 101044
aaugugauuaaccucuugg

SEQ ID NO: 101046 - RNA, 19 nt, Artificial Sequence
  Description of Artificial Sequence: Synthetic oligonucleotide
  Sense strand starting at position 2485 of SEQ ID NO: 1275
uucuccuugggagaguauu

SEQ ID NO: 101047 - RNA, 19 nt, Artificial Sequence
  Description of Artificial Sequence: Synthetic oligonucleotide
  Antisense strand to SEQ ID NO: 101046
aauacucucccaaggagaa

SEQ ID NO: 101048 - RNA, 19 nt, Artificial Sequence
  Description of Artificial Sequence: Synthetic oligonucleotide
  Sense strand starting at position 2480 of SEQ ID NO: 1275
uauguuucuccuugggaga

SEQ ID NO: 101049 - RNA, 19 nt, Artificial Sequence
  Description of Artificial Sequence: Synthetic oligonucleotide
  Antisense strand to SEQ ID NO: 101048
ucucccaaggagaaacaua

SEQ ID NO: 101050 - RNA, 19 nt, Artificial Sequence
  Description of Artificial Sequence: Synthetic oligonucleotide
  Sense strand starting at position 2479 of SEQ ID NO: 1275
auauguuucuccuugggag

SEQ ID NO: 101051 - RNA, 19 nt, Artificial Sequence
  Description of Artificial Sequence: Synthetic oligonucleotide
  Antisense strand to SEQ ID NO: 101050
cucccaaggagaaacauau

SEQ ID NO: 101052 - RNA, 19 nt, Artificial Sequence
  Description of Artificial Sequence: Synthetic oligonucleotide
  Sense strand starting at position 2414 of SEQ ID NO: 1275
auggacuucgagggucuaa

SEQ ID NO: 101053 - RNA, 19 nt, Artificial Sequence
  Description of Artificial Sequence: Synthetic oligonucleotide
  Antisense strand to SEQ ID NO: 101052
uuagacccucgaaguccau

SEQ ID NO: 101054 - RNA, 19 nt, Artificial Sequence
  Description of Artificial Sequence: Synthetic oligonucleotide
  Sense strand starting at position 2413 of SEQ ID NO: 1275
gauggacuucgagggucua

SEQ ID NO: 101055 - RNA, 19 nt, Artificial Sequence
  Description of Artificial Sequence: Synthetic oligonucleotide
  Antisense strand to SEQ ID NO: 101054
uagacccucgaaguccauc

SEQ ID NO: 101056 - RNA, 19 nt, Artificial Sequence
  Description of Artificial Sequence: Synthetic oligonucleotide
  Sense strand starting at position 2316 of SEQ ID NO: 1275
cauccuguaucuccggaua

SEQ ID NO: 101057 - RNA, 19 nt, Artificial Sequence
  Description of Artificial Sequence: Synthetic oligonucleotide
  Antisense strand to SEQ ID NO: 101056
uauccggagauacaggaug

SEQ ID NO: 101058 - RNA, 19 nt, Artificial Sequence
  Description of Artificial Sequence: Synthetic oligonucleotide
  Sense strand starting at position 1452 of SEQ ID NO: 1275
ucagucucuggagagaguu

SEQ ID NO: 101059 - RNA, 19 nt, Artificial Sequence
  Description of Artificial Sequence: Synthetic oligonucleotide
  Antisense strand to SEQ ID NO: 101058
aacucucuccagagacuga

SEQ ID NO: 101060 - RNA, 19 nt, Artificial Sequence
  Description of Artificial Sequence: Synthetic oligonucleotide
  Sense strand starting at position 821 of SEQ ID NO: 1275
gaauaaggcucugcaauag

SEQ ID NO: 101061 - RNA, 19 nt, Artificial Sequence
  Description of Artificial Sequence: Synthetic oligonucleotide
  Antisense strand to SEQ ID NO: 101060
cuauugcagagccuuauuc

SEQ ID NO: 101062 - RNA, 19 nt, Artificial Sequence
  Description of Artificial Sequence: Synthetic oligonucleotide
  Sense strand starting at position 820 of SEQ ID NO: 1275
agaauaaggcucugcaaua

SEQ ID NO: 101063 - RNA, 19 nt, Artificial Sequence
  Description of Artificial Sequence: Synthetic oligonucleotide
  Antisense strand to SEQ ID NO: 101062
uauugcagagccuuauucu

SEQ ID NO: 101064 - RNA, 19 nt, Artificial Sequence
  Description of Artificial Sequence: Synthetic oligonucleotide
  Sense strand starting at position 768 of SEQ ID NO: 1275
gcugucuuuccacaaggga

SEQ ID NO: 101065 - RNA, 19 nt, Artificial Sequence
  Description of Artificial Sequence: Synthetic oligonucleotide
  Antisense strand to SEQ ID NO: 101064
ucccuuguggaaagacagc

SEQ ID NO: 101066 - RNA, 19 nt, Artificial Sequence
  Description of Artificial Sequence: Synthetic oligonucleotide
  Sense strand starting at position 624 of SEQ ID NO: 1275
gacugaguccaugggaucu

SEQ ID NO: 101067 - RNA, 19 nt, Artificial Sequence
  Description of Artificial Sequence: Synthetic oligonucleotide
  Antisense strand to SEQ ID NO: 101066
agaucccauggacucaguc

SEQ ID NO: 101068 - RNA, 19 nt, Artificial Sequence
  Description of Artificial Sequence: Synthetic oligonucleotide
  Sense strand starting at position 568 of SEQ ID NO: 1275
gagguuucucugggauagc

SEQ ID NO: 101069 - RNA, 19 nt, Artificial Sequence
  Description of Artificial Sequence: Synthetic oligonucleotide
  Antisense strand to SEQ ID NO: 101068
gcuaucccagagaaaccuc

SEQ ID NO: 101070 - RNA, 19 nt, Artificial Sequence
  Description of Artificial Sequence: Synthetic oligonucleotide
  Sense strand starting at position 564 of SEQ ID NO: 1275
uccagagguuucucuggga

SEQ ID NO: 101071 - RNA, 19 nt, Artificial Sequence
  Description of Artificial Sequence: Synthetic oligonucleotide
  Antisense strand to SEQ ID NO: 101070
ucccagagaaaccucugga

SEQ ID NO: 101072 - RNA, 19 nt, Artificial Sequence
  Description of Artificial Sequence: Synthetic oligonucleotide
  Sense strand starting at position 351 of SEQ ID NO: 1275
agagaauaauuugguuuac

SEQ ID NO: 101073 - RNA, 19 nt, Artificial Sequence
  Description of Artificial Sequence: Synthetic oligonucleotide
  Antisense strand to SEQ ID NO: 101072
guaaaccaaauuauucucu

SEQ ID NO: 101074 - RNA, 19 nt, Artificial Sequence
  Description of Artificial Sequence: Synthetic oligonucleotide
  Sense strand starting at position 253 of SEQ ID NO: 1275
ugagcuuguccuuaagauu

SEQ ID NO: 101075 - RNA, 19 nt, Artificial Sequence
  Description of Artificial Sequence: Synthetic oligonucleotide
  Antisense strand to SEQ ID NO: 101074
aaucuuaaggacaagcuca

SEQ ID NO: 101076 - RNA, 19 nt, Artificial Sequence
  Description of Artificial Sequence: Synthetic oligonucleotide
  Sense strand starting at position 228 of SEQ ID NO: 1275
uuaaaccucuaggcagaau

SEQ ID NO: 101077 - RNA, 19 nt, Artificial Sequence
  Description of Artificial Sequence: Synthetic oligonucleotide
  Antisense strand to SEQ ID NO: 101076
auucugccuagagguuuaa

SEQ ID NO: 101078 - RNA, 19 nt, Artificial Sequence
  Description of Artificial Sequence: Synthetic oligonucleotide
  Sense strand starting at position 203 of SEQ ID NO: 1275
acagauacuuuaucuuagu

SEQ ID NO: 101079 - RNA, 19 nt, Artificial Sequence
  Description of Artificial Sequence: Synthetic oligonucleotide
  Antisense strand to SEQ ID NO: 101078
acuaagauaaaguaucugu

SEQ ID NO: 101080 - RNA, 19 nt, Artificial Sequence
  Description of Artificial Sequence: Synthetic oligonucleotide
  Sense strand starting at position 112 of SEQ ID NO: 1275
uguucuuugcacuacauau

SEQ ID NO: 101081 - RNA, 19 nt, Artificial Sequence
  Description of Artificial Sequence: Synthetic oligonucleotide
  Antisense strand to SEQ ID NO: 101080
auauguagugcaaagaaca

SEQ ID NO: 101082 - RNA, 19 nt, Artificial Sequence
  Description of Artificial Sequence: Synthetic oligonucleotide
  Sense strand starting at position 3922 of SEQ ID NO: 1276
ugacuuguuccagaggcag

SEQ ID NO: 101083 - RNA, 19 nt, Artificial Sequence
  Description of Artificial Sequence: Synthetic oligonucleotide
  Antisense strand to SEQ ID NO: 101082
cugccucuggaacaaguca

SEQ ID NO: 101084 - RNA, 19 nt, Artificial Sequence
  Description of Artificial Sequence: Synthetic oligonucleotide
  Sense strand starting at position 3917 of SEQ ID NO: 1276
uaggcugacuuguuccaga

SEQ ID NO: 101085 - RNA, 19 nt, Artificial Sequence
  Description of Artificial Sequence: Synthetic oligonucleotide
  Antisense strand to SEQ ID NO: 101084
ucuggaacaagucagccua

SEQ ID NO: 101086 - RNA, 19 nt, Artificial Sequence
  Description of Artificial Sequence: Synthetic oligonucleotide
  Sense strand starting at position 3860 of SEQ ID NO: 1276
ccuauugaggugggaaguu

SEQ ID NO: 101087 - RNA, 19 nt, Artificial Sequence
  Description of Artificial Sequence: Synthetic oligonucleotide
  Antisense strand to SEQ ID NO: 101086
aacuucccaccucaauagg

SEQ ID NO: 101088 - RNA, 19 nt, Artificial Sequence
  Description of Artificial Sequence: Synthetic oligonucleotide
  Sense strand starting at position 3858 of SEQ ID NO: 1276
guccuauugaggugggaag

SEQ ID NO: 101089 - RNA, 19 nt, Artificial Sequence
  Description of Artificial Sequence: Synthetic oligonucleotide
  Antisense strand to SEQ ID NO: 101088
cuucccaccucaauaggac

SEQ ID NO: 101090 - RNA, 19 nt, Artificial Sequence
  Description of Artificial Sequence: Synthetic oligonucleotide
  Sense strand starting at position 3834 of SEQ ID NO: 1276
gucucaggauaauauauuu

SEQ ID NO: 101091 - RNA, 19 nt, Artificial Sequence
  Description of Artificial Sequence: Synthetic oligonucleotide
  Antisense strand to SEQ ID NO: 101090
aaauauauuauccugagac

SEQ ID NO: 101092 - RNA, 19 nt, Artificial Sequence
  Description of Artificial Sequence: Synthetic oligonucleotide
  Sense strand starting at position 3767 of SEQ ID NO: 1276
cucacaaaguuauugugaa

SEQ ID NO: 101093 - RNA, 19 nt, Artificial Sequence
  Description of Artificial Sequence: Synthetic oligonucleotide
  Antisense strand to SEQ ID NO: 101092
uucacaauaacuuugugag

SEQ ID NO: 101094 - RNA, 19 nt, Artificial Sequence
  Description of Artificial Sequence: Synthetic oligonucleotide
  Sense strand starting at position 3627 of SEQ ID NO: 1276
acugaauuccuuugcagag

SEQ ID NO: 101095 - RNA, 19 nt, Artificial Sequence
  Description of Artificial Sequence: Synthetic oligonucleotide
  Antisense strand to SEQ ID NO: 101094
cucugcaaaggaauucagu

SEQ ID NO: 101096 - RNA, 19 nt, Artificial Sequence
  Description of Artificial Sequence: Synthetic oligonucleotide
  Sense strand starting at position 3603 of SEQ ID NO: 1276
acgugcuuaugauuucuuu

SEQ ID NO: 101097 - RNA, 19 nt, Artificial Sequence
  Description of Artificial Sequence: Synthetic oligonucleotide
  Antisense strand to SEQ ID NO: 101096
aaagaaaucauaagcacgu

SEQ ID NO: 101098 - RNA, 19 nt, Artificial Sequence
  Description of Artificial Sequence: Synthetic oligonucleotide
  Sense strand starting at position 3538 of SEQ ID NO: 1276
gcuggaguuagcuugcuuu

SEQ ID NO: 101099 - RNA, 19 nt, Artificial Sequence
  Description of Artificial Sequence: Synthetic oligonucleotide
  Antisense strand to SEQ ID NO: 101098
aaagcaagcuaacuccagc

SEQ ID NO: 101100 - RNA, 19 nt, Artificial Sequence
  Description of Artificial Sequence: Synthetic oligonucleotide
  Sense strand starting at position 3418 of SEQ ID NO: 1276
ucaugcacucaguguauuu

SEQ ID NO: 101101 - RNA, 19 nt, Artificial Sequence
  Description of Artificial Sequence: Synthetic oligonucleotide
  Antisense strand to SEQ ID NO: 101100
aaauacacugagugcauga

SEQ ID NO: 101102 - RNA, 19 nt, Artificial Sequence
  Description of Artificial Sequence: Synthetic oligonucleotide
  Sense strand starting at position 3390 of SEQ ID NO: 1276
aaguauguuguggacuaga

SEQ ID NO: 101103 - RNA, 19 nt, Artificial Sequence
  Description of Artificial Sequence: Synthetic oligonucleotide
  Antisense strand to SEQ ID NO: 101102
ucuaguccacaacauacuu

SEQ ID NO: 101104 - RNA, 19 nt, Artificial Sequence
  Description of Artificial Sequence: Synthetic oligonucleotide
  Sense strand starting at position 3380 of SEQ ID NO: 1276
cugggaaccuaaguauguu

SEQ ID NO: 101105 - RNA, 19 nt, Artificial Sequence
  Description of Artificial Sequence: Synthetic oligonucleotide
  Antisense strand to SEQ ID NO: 101104
aacauacuuagguucccag

SEQ ID NO: 101106 - RNA, 19 nt, Artificial Sequence
  Description of Artificial Sequence: Synthetic oligonucleotide
  Sense strand starting at position 3352 of SEQ ID NO: 1276
accagagugucacuuuauu

SEQ ID NO: 101107 - RNA, 19 nt, Artificial Sequence
  Description of Artificial Sequence: Synthetic oligonucleotide
  Antisense strand to SEQ ID NO: 101106
aauaaagugacacucuggu

SEQ ID NO: 101108 - RNA, 19 nt, Artificial Sequence
  Description of Artificial Sequence: Synthetic oligonucleotide
  Sense strand starting at position 3177 of SEQ ID NO: 1276
gcaguauuccuuuauauua

SEQ ID NO: 101109 - RNA, 19 nt, Artificial Sequence
  Description of Artificial Sequence: Synthetic oligonucleotide
  Antisense strand to SEQ ID NO: 101108
uaauauaaaggaauacugc

SEQ ID NO: 101110 - RNA, 19 nt, Artificial Sequence
  Description of Artificial Sequence: Synthetic oligonucleotide
  Sense strand starting at position 3110 of SEQ ID NO: 1276
aguuaucucugaccacaga

SEQ ID NO: 101111 - RNA, 19 nt, Artificial Sequence
  Description of Artificial Sequence: Synthetic oligonucleotide
  Antisense strand to SEQ ID NO: 101110
ucuguggucagagauaacu

SEQ ID NO: 101112 - RNA, 19 nt, Artificial Sequence
  Description of Artificial Sequence: Synthetic oligonucleotide
  Sense strand starting at position 2977 of SEQ ID NO: 1276
ggcuguucuacguaagaag

SEQ ID NO: 101113 - RNA, 19 nt, Artificial Sequence
  Description of Artificial Sequence: Synthetic oligonucleotide
  Antisense strand to SEQ ID NO: 101112
cuucuuacguagaacagcc

SEQ ID NO: 101114 - RNA, 19 nt, Artificial Sequence
  Description of Artificial Sequence: Synthetic oligonucleotide
  Sense strand starting at position 2947 of SEQ ID NO: 1276
gcauuauugaggcaaguuu

SEQ ID NO: 101115 - RNA, 19 nt, Artificial Sequence
  Description of Artificial Sequence: Synthetic oligonucleotide
  Antisense strand to SEQ ID NO: 101114
aaacuugccucaauaaugc

SEQ ID NO: 101116 - RNA, 19 nt, Artificial Sequence
  Description of Artificial Sequence: Synthetic oligonucleotide
  Sense strand starting at position 2926 of SEQ ID NO: 1276
guaaguuagggagacaguu

SEQ ID NO: 101117 - RNA, 19 nt, Artificial Sequence
  Description of Artificial Sequence: Synthetic oligonucleotide
  Antisense strand to SEQ ID NO: 101116
aacugucucccuaacuuac

SEQ ID NO: 101118 - RNA, 19 nt, Artificial Sequence
  Description of Artificial Sequence: Synthetic oligonucleotide
  Sense strand starting at position 2796 of SEQ ID NO: 1276
uugagagcucauuaaaucu

SEQ ID NO: 101119 - RNA, 19 nt, Artificial Sequence
  Description of Artificial Sequence: Synthetic oligonucleotide
  Antisense strand to SEQ ID NO: 101118
agauuuaaugagcucucaa

SEQ ID NO: 101120 - RNA, 19 nt, Artificial Sequence
  Description of Artificial Sequence: Synthetic oligonucleotide
  Sense strand starting at position 2693 of SEQ ID NO: 1276
caaguuaagguguggaaag

SEQ ID NO: 101121 - RNA, 19 nt, Artificial Sequence
  Description of Artificial Sequence: Synthetic oligonucleotide
  Antisense strand to SEQ ID NO: 101120
cuuuccacaccuuaacuug

SEQ ID NO: 101122 - RNA, 19 nt, Artificial Sequence
  Description of Artificial Sequence: Synthetic oligonucleotide
  Sense strand starting at position 2658 of SEQ ID NO: 1276
ccgagagaaugcuuaggaa

SEQ ID NO: 101123 - RNA, 19 nt, Artificial Sequence
  Description of Artificial Sequence: Synthetic oligonucleotide
  Antisense strand to SEQ ID NO: 101122
uuccuaagcauucucucgg

SEQ ID NO: 101124 - RNA, 19 nt, Artificial Sequence
  Description of Artificial Sequence: Synthetic oligonucleotide
  Sense strand starting at position 2647 of SEQ ID NO: 1276
auuccucaccuccgagaga

SEQ ID NO: 101125 - RNA, 19 nt, Artificial Sequence
  Description of Artificial Sequence: Synthetic oligonucleotide
  Antisense strand to SEQ ID NO: 101124
ucucucggaggugaggaau

SEQ ID NO: 101126 - RNA, 19 nt, Artificial Sequence
  Description of Artificial Sequence: Synthetic oligonucleotide
  Sense strand starting at position 2643 of SEQ ID NO: 1276
gaggauuccucaccuccga

SEQ ID NO: 101127 - RNA, 19 nt, Artificial Sequence
  Description of Artificial Sequence: Synthetic oligonucleotide
  Antisense strand to SEQ ID NO: 101126
ucggaggugaggaauccuc

SEQ ID NO: 101128 - RNA, 19 nt, Artificial Sequence
  Description of Artificial Sequence: Synthetic oligonucleotide
  Sense strand starting at position 2629 of SEQ ID NO: 1276
gagucuccucuuuggagga

SEQ ID NO: 101129 - RNA, 19 nt, Artificial Sequence
  Description of Artificial Sequence: Synthetic oligonucleotide
  Antisense strand to SEQ ID NO: 101128
uccuccaaagaggagacuc

SEQ ID NO: 101130 - RNA, 19 nt, Artificial Sequence
  Description of Artificial Sequence: Synthetic oligonucleotide
  Sense strand starting at position 2524 of SEQ ID NO: 1276
gaaggcacguuuccaauuu

SEQ ID NO: 101131 - RNA, 19 nt, Artificial Sequence
  Description of Artificial Sequence: Synthetic oligonucleotide
  Antisense strand to SEQ ID NO: 101130
aaauuggaaacgugccuuc

SEQ ID NO: 101132 - RNA, 19 nt, Artificial Sequence
  Description of Artificial Sequence: Synthetic oligonucleotide
  Sense strand starting at position 2441 of SEQ ID NO: 1276
uugggugagaccugcagau

SEQ ID NO: 101133 - RNA, 19 nt, Artificial Sequence
  Description of Artificial Sequence: Synthetic oligonucleotide
  Antisense strand to SEQ ID NO: 101132
aucugcaggucucacccaa

SEQ ID NO: 101134 - RNA, 19 nt, Artificial Sequence
  Description of Artificial Sequence: Synthetic oligonucleotide
  Sense strand starting at position 2124 of SEQ ID NO: 1276
uggauuuaucgcuguuagg

SEQ ID NO: 101135 - RNA, 19 nt, Artificial Sequence
  Description of Artificial Sequence: Synthetic oligonucleotide
  Antisense strand to SEQ ID NO: 101134
ccuaacagcgauaaaucca

SEQ ID NO: 101136 - RNA, 19 nt, Artificial Sequence
  Description of Artificial Sequence: Synthetic oligonucleotide
  Sense strand starting at position 2123 of SEQ ID NO: 1276
auggauuuaucgcuguuag

SEQ ID NO: 101137 - RNA, 19 nt, Artificial Sequence
  Description of Artificial Sequence: Synthetic oligonucleotide
  Antisense strand to SEQ ID NO: 101136
cuaacagcgauaaauccau

SEQ ID NO: 101138 - RNA, 19 nt, Artificial Sequence
  Description of Artificial Sequence: Synthetic oligonucleotide
  Sense strand starting at position 1486 of SEQ ID NO: 1276
cucgcauaggcugaaauau

SEQ ID NO: 101139 - RNA, 19 nt, Artificial Sequence
  Description of Artificial Sequence: Synthetic oligonucleotide
  Antisense strand to SEQ ID NO: 101138
auauuucagccuaugcgag

SEQ ID NO: 101140 - RNA, 19 nt, Artificial Sequence
  Description of Artificial Sequence: Synthetic oligonucleotide
  Sense strand starting at position 1433 of SEQ ID NO: 1276
cuaauuuacugauaagggu

SEQ ID NO: 101141 - RNA, 19 nt, Artificial Sequence
  Description of Artificial Sequence: Synthetic oligonucleotide
  Antisense strand to SEQ ID NO: 101140
acccuuaucaguaaauuag

SEQ ID NO: 101142 - RNA, 19 nt, Artificial Sequence
  Description of Artificial Sequence: Synthetic oligonucleotide
  Sense strand starting at position 1222 of SEQ ID NO: 1276
ggguggucuccggaaggca

SEQ ID NO: 101143 - RNA, 19 nt, Artificial Sequence
  Description of Artificial Sequence: Synthetic oligonucleotide
  Antisense strand to SEQ ID NO: 101142
ugccuuccggagaccaccc

SEQ ID NO: 101144 - RNA, 19 nt, Artificial Sequence
  Description of Artificial Sequence: Synthetic oligonucleotide
  Sense strand starting at position 1126 of SEQ ID NO: 1276
uucugaaaccaguguuacu

SEQ ID NO: 101145 - RNA, 19 nt, Artificial Sequence
  Description of Artificial Sequence: Synthetic oligonucleotide
  Antisense strand to SEQ ID NO: 101144
aguaacacugguuucagaa

SEQ ID NO: 101146 - RNA, 19 nt, Artificial Sequence
  Description of Artificial Sequence: Synthetic oligonucleotide
  Sense strand starting at position 972 of SEQ ID NO: 1276
cuaagucagcgguaggaaa

SEQ ID NO: 101147 - RNA, 19 nt, Artificial Sequence
  Description of Artificial Sequence: Synthetic oligonucleotide
  Antisense strand to SEQ ID NO: 101146
uuuccuaccgcugacuuag

SEQ ID NO: 101148 - RNA, 19 nt, Artificial Sequence
  Description of Artificial Sequence: Synthetic oligonucleotide
  Sense strand starting at position 765 of SEQ ID NO: 1276
cgugacucucaaggaaagu

SEQ ID NO: 101149 - RNA, 19 nt, Artificial Sequence
  Description of Artificial Sequence: Synthetic oligonucleotide
  Antisense strand to SEQ ID NO: 101148
acuuuccuugagagucacg

SEQ ID NO: 101150 - RNA, 19 nt, Artificial Sequence
  Description of Artificial Sequence: Synthetic oligonucleotide
  Sense strand starting at position 742 of SEQ ID NO: 1276
cgcuauuauguagcuugua

SEQ ID NO: 101151 - RNA, 19 nt, Artificial Sequence
  Description of Artificial Sequence: Synthetic oligonucleotide
  Antisense strand to SEQ ID NO: 101150
uacaagcuacauaauagcg

SEQ ID NO: 101152 - RNA, 19 nt, Artificial Sequence
  Description of Artificial Sequence: Synthetic oligonucleotide
  Sense strand starting at position 310 of SEQ ID NO: 1276
aagucuucccagggaugaa

SEQ ID NO: 101153 - RNA, 19 nt, Artificial Sequence
  Description of Artificial Sequence: Synthetic oligonucleotide
  Antisense strand to SEQ ID NO: 101152
uucaucccugggaagacuu

SEQ ID NO: 101154 - RNA, 19 nt, Artificial Sequence
  Description of Artificial Sequence: Synthetic oligonucleotide
  Sense strand starting at position 309 of SEQ ID NO: 1276
aaagucuucccagggauga

SEQ ID NO: 101155 - RNA, 19 nt, Artificial Sequence
  Description of Artificial Sequence: Synthetic oligonucleotide
  Antisense strand to SEQ ID NO: 101154
ucaucccugggaagacuuu

SEQ ID NO: 101156 - RNA, 19 nt, Artificial Sequence
  Description of Artificial Sequence: Synthetic oligonucleotide
  Sense strand starting at position 306 of SEQ ID NO: 1276
cggaaagucuucccaggga

SEQ ID NO: 101157 - RNA, 19 nt, Artificial Sequence
  Description of Artificial Sequence: Synthetic oligonucleotide
  Antisense strand to SEQ ID NO: 101156
ucccugggaagacuuuccg

SEQ ID NO: 101158 - RNA, 19 nt, Artificial Sequence
  Description of Artificial Sequence: Synthetic oligonucleotide
  Sense strand starting at position 71 of SEQ ID NO: 1276
ggaucucuuccaggauugu

SEQ ID NO: 101159 - RNA, 19 nt, Artificial Sequence
  Description of Artificial Sequence: Synthetic oligonucleotide
  Antisense strand to SEQ ID NO: 101158
acaauccuggaagagaucc

SEQ ID NO: 101160 - RNA, 19 nt, Artificial Sequence
  Description of Artificial Sequence: Synthetic oligonucleotide
  Sense strand starting at position 4 of SEQ ID NO: 1276
cucugaauaguggguaaag

SEQ ID NO: 101161 - RNA, 19 nt, Artificial Sequence
  Description of Artificial Sequence: Synthetic oligonucleotide
  Antisense strand to SEQ ID NO: 101160
cuuuacccacuauucagag

SEQ ID NO: 101162 - RNA, 19 nt, Artificial Sequence
  Description of Artificial Sequence: Synthetic oligonucleotide
  Sense strand starting at position 3873 of SEQ ID NO: 1278
caaaguauacugugaagcu

SEQ ID NO: 101163 - RNA, 19 nt, Artificial Sequence
  Description of Artificial Sequence: Synthetic oligonucleotide
  Antisense strand to SEQ ID NO: 101162
agcuucacaguauacuuug

SEQ ID NO: 101164 - RNA, 19 nt, Artificial Sequence
  Description of Artificial Sequence: Synthetic oligonucleotide
  Sense strand starting at position 3585 of SEQ ID NO: 1278
acacucuguaggugagaga

SEQ ID NO: 101165 - RNA, 19 nt, Artificial Sequence
  Description of Artificial Sequence: Synthetic oligonucleotide
  Antisense strand to SEQ ID NO: 101164
ucucucaccuacagagugu

SEQ ID NO: 101166 - RNA, 19 nt, Artificial Sequence
  Description of Artificial Sequence: Synthetic oligonucleotide
  Sense strand starting at position 3554 of SEQ ID NO: 1278
uuaucuuggcaagauccaa

SEQ ID NO: 101167 - RNA, 19 nt, Artificial Sequence
  Description of Artificial Sequence: Synthetic oligonucleotide
  Antisense strand to SEQ ID NO: 101166
uuggaucuugccaagauaa

SEQ ID NO: 101168 - RNA, 19 nt, Artificial Sequence
  Description of Artificial Sequence: Synthetic oligonucleotide
  Sense strand starting at position 3550 of SEQ ID NO: 1278
ucacuuaucuuggcaagau

SEQ ID NO: 101169 - RNA, 19 nt, Artificial Sequence
  Description of Artificial Sequence: Synthetic oligonucleotide
  Antisense strand to SEQ ID NO: 101168
aucuugccaagauaaguga

SEQ ID NO: 101170 - RNA, 19 nt, Artificial Sequence
  Description of Artificial Sequence: Synthetic oligonucleotide
  Sense strand starting at position 3549 of SEQ ID NO: 1278
cucacuuaucuuggcaaga

SEQ ID NO: 101171 - RNA, 19 nt, Artificial Sequence
  Description of Artificial Sequence: Synthetic oligonucleotide
  Antisense strand to SEQ ID NO: 101170
ucuugccaagauaagugag

SEQ ID NO: 101172 - RNA, 19 nt, Artificial Sequence
  Description of Artificial Sequence: Synthetic oligonucleotide
  Sense strand starting at position 3483 of SEQ ID NO: 1278
ggaaacaugcucugccuca

SEQ ID NO: 101173 - RNA, 19 nt, Artificial Sequence
  Description of Artificial Sequence: Synthetic oligonucleotide
  Antisense strand to SEQ ID NO: 101172
ugaggcagagcauguuucc

SEQ ID NO: 101174 - RNA, 19 nt, Artificial Sequence
  Description of Artificial Sequence: Synthetic oligonucleotide
  Sense strand starting at position 3437 of SEQ ID NO: 1278
augaacagaucccaggaaa

SEQ ID NO: 101175 - RNA, 19 nt, Artificial Sequence
  Description of Artificial Sequence: Synthetic oligonucleotide
  Antisense strand to SEQ ID NO: 101174
uuuccugggaucuguucau

SEQ ID NO: 101176 - RNA, 19 nt, Artificial Sequence
  Description of Artificial Sequence: Synthetic oligonucleotide
  Sense strand starting at position 3394 of SEQ ID NO: 1278
gaagauagccgcuagcaaa

SEQ ID NO: 101177 - RNA, 19 nt, Artificial Sequence
  Description of Artificial Sequence: Synthetic oligonucleotide
  Antisense strand to SEQ ID NO: 101176
uuugcuagcggcuaucuuc

SEQ ID NO: 101178 - RNA, 19 nt, Artificial Sequence
  Description of Artificial Sequence: Synthetic oligonucleotide
  Sense strand starting at position 3311 of SEQ ID NO: 1278
uggcaaugguaaccuaaga

SEQ ID NO: 101179 - RNA, 19 nt, Artificial Sequence
  Description of Artificial Sequence: Synthetic oligonucleotide
  Antisense strand to SEQ ID NO: 101178
ucuuagguuaccauugcca

SEQ ID NO: 101180 - RNA, 19 nt, Artificial Sequence
  Description of Artificial Sequence: Synthetic oligonucleotide
  Sense strand starting at position 3154 of SEQ ID NO: 1278
agugacugucucuauguau

SEQ ID NO: 101181 - RNA, 19 nt, Artificial Sequence
  Description of Artificial Sequence: Synthetic oligonucleotide
  Antisense strand to SEQ ID NO: 101180
auacauagagacagucacu

SEQ ID NO: 101182 - RNA, 19 nt, Artificial Sequence
  Description of Artificial Sequence: Synthetic oligonucleotide
  Sense strand starting at position 3028 of SEQ ID NO: 1278
gguauuacauaucuagaua

SEQ ID NO: 101183 - RNA, 19 nt, Artificial Sequence
  Description of Artificial Sequence: Synthetic oligonucleotide
  Antisense strand to SEQ ID NO: 101182
uaucuagauauguaauacc

SEQ ID NO: 101184 - RNA, 19 nt, Artificial Sequence
  Description of Artificial Sequence: Synthetic oligonucleotide
  Sense strand starting at position 2976 of SEQ ID NO: 1278
cuggaaauuugcgauacag

SEQ ID NO: 101185 - RNA, 19 nt, Artificial Sequence
  Description of Artificial Sequence: Synthetic oligonucleotide
  Antisense strand to SEQ ID NO: 101184
cuguaucgcaaauuuccag

SEQ ID NO: 101186 - RNA, 19 nt, Artificial Sequence
  Description of Artificial Sequence: Synthetic oligonucleotide
  Sense strand starting at position 2895 of SEQ ID NO: 1278
guaauaacaguaugguacu

SEQ ID NO: 101187 - RNA, 19 nt, Artificial Sequence
  Description of Artificial Sequence: Synthetic oligonucleotide
  Antisense strand to SEQ ID NO: 101186
aguaccauacuguuauuac

SEQ ID NO: 101188 - RNA, 19 nt, Artificial Sequence
  Description of Artificial Sequence: Synthetic oligonucleotide
  Sense strand starting at position 2893 of SEQ ID NO: 1278
cuguaauaacaguauggua

SEQ ID NO: 101189 - RNA, 19 nt, Artificial Sequence
  Description of Artificial Sequence: Synthetic oligonucleotide
  Antisense strand to SEQ ID NO: 101188
uaccauacuguuauuacag

SEQ ID NO: 101190 - RNA, 19 nt, Artificial Sequence
  Description of Artificial Sequence: Synthetic oligonucleotide
  Sense strand starting at position 2883 of SEQ ID NO: 1278
agggcaggaucuguaauaa

SEQ ID NO: 101191 - RNA, 19 nt, Artificial Sequence
  Description of Artificial Sequence: Synthetic oligonucleotide
  Antisense strand to SEQ ID NO: 101190
uuauuacagauccugcccu

SEQ ID NO: 101192 - RNA, 19 nt, Artificial Sequence
  Description of Artificial Sequence: Synthetic oligonucleotide
  Sense strand starting at position 2882 of SEQ ID NO: 1278
gagggcaggaucuguaaua

SEQ ID NO: 101193 - RNA, 19 nt, Artificial Sequence
  Description of Artificial Sequence: Synthetic oligonucleotide
  Antisense strand to SEQ ID NO: 101192
uauuacagauccugcccuc

SEQ ID NO: 101194 - RNA, 19 nt, Artificial Sequence
  Description of Artificial Sequence: Synthetic oligonucleotide
  Sense strand starting at position 2781 of SEQ ID NO: 1278
ucucuucgaguugaauaua

SEQ ID NO: 101195 - RNA, 19 nt, Artificial Sequence
  Description of Artificial Sequence: Synthetic oligonucleotide
  Antisense strand to SEQ ID NO: 101194
uauauucaacucgaagaga

SEQ ID NO: 101196 - RNA, 19 nt, Artificial Sequence
  Description of Artificial Sequence: Synthetic oligonucleotide
  Sense strand starting at position 2636 of SEQ ID NO: 1278
gguuauaugacuuguggaa

SEQ ID NO: 101197 - RNA, 19 nt, Artificial Sequence
  Description of Artificial Sequence: Synthetic oligonucleotide
  Antisense strand to SEQ ID NO: 101196
uuccacaagucauauaacc

SEQ ID NO: 101198 - RNA, 19 nt, Artificial Sequence
  Description of Artificial Sequence: Synthetic oligonucleotide
  Sense strand starting at position 2482 of SEQ ID NO: 1278
ugcacauggguugaguuau

SEQ ID NO: 101199 - RNA, 19 nt, Artificial Sequence
  Description of Artificial Sequence: Synthetic oligonucleotide
  Antisense strand to SEQ ID NO: 101198
auaacucaacccaugugca

SEQ ID NO: 101200 - RNA, 19 nt, Artificial Sequence
  Description of Artificial Sequence: Synthetic oligonucleotide
  Sense strand starting at position 2481 of SEQ ID NO: 1278
augcacauggguugaguua

SEQ ID NO: 101201 - RNA, 19 nt, Artificial Sequence
  Description of Artificial Sequence: Synthetic oligonucleotide
  Antisense strand to SEQ ID NO: 101200
uaacucaacccaugugcau

SEQ ID NO: 101202 - RNA, 19 nt, Artificial Sequence
  Description of Artificial Sequence: Synthetic oligonucleotide
  Sense strand starting at position 2445 of SEQ ID NO: 1278
agucuuacccaggagucau

SEQ ID NO: 101203 - RNA, 19 nt, Artificial Sequence
  Description of Artificial Sequence: Synthetic oligonucleotide
  Antisense strand to SEQ ID NO: 101202
augacuccuggguaagacu

SEQ ID NO: 101204 - RNA, 19 nt, Artificial Sequence
  Description of Artificial Sequence: Synthetic oligonucleotide
  Sense strand starting at position 2444 of SEQ ID NO: 1278
aagucuuacccaggaguca

SEQ ID NO: 101205 - RNA, 19 nt, Artificial Sequence
  Description of Artificial Sequence: Synthetic oligonucleotide
  Antisense strand to SEQ ID NO: 101204
ugacuccuggguaagacuu

SEQ ID NO: 101206 - RNA, 19 nt, Artificial Sequence
  Description of Artificial Sequence: Synthetic oligonucleotide
  Sense strand starting at position 2111 of SEQ ID NO: 1278
agggcuagagcggaagaau

SEQ ID NO: 101207 - RNA, 19 nt, Artificial Sequence
  Description of Artificial Sequence: Synthetic oligonucleotide
  Antisense strand to SEQ ID NO: 101206
auucuuccgcucuagcccu

SEQ ID NO: 101208 - RNA, 19 nt, Artificial Sequence
  Description of Artificial Sequence: Synthetic oligonucleotide
  Sense strand starting at position 1500 of SEQ ID NO: 1278
cuucguaaguacucaauaa

SEQ ID NO: 101209 - RNA, 19 nt, Artificial Sequence
  Description of Artificial Sequence: Synthetic oligonucleotide
  Antisense strand to SEQ ID NO: 101208
uuauugaguacuuacgaag

SEQ ID NO: 101210 - RNA, 19 nt, Artificial Sequence
  Description of Artificial Sequence: Synthetic oligonucleotide
  Sense strand starting at position 1261 of SEQ ID NO: 1278
cggauagcuccugauaacu

SEQ ID NO: 101211 - RNA, 19 nt, Artificial Sequence
  Description of Artificial Sequence: Synthetic oligonucleotide
  Antisense strand to SEQ ID NO: 101210
aguuaucaggagcuauccg

SEQ ID NO: 101212 - RNA, 19 nt, Artificial Sequence
  Description of Artificial Sequence: Synthetic oligonucleotide
  Sense strand starting at position 1160 of SEQ ID NO: 1278
ccaauaugaugauaaugaa

SEQ ID NO: 101213 - RNA, 19 nt, Artificial Sequence
  Description of Artificial Sequence: Synthetic oligonucleotide
  Antisense strand to SEQ ID NO: 101212
uucauuaucaucauauugg

SEQ ID NO: 101214 - RNA, 19 nt, Artificial Sequence
  Description of Artificial Sequence: Synthetic oligonucleotide
  Sense strand starting at position 1041 of SEQ ID NO: 1278
ggaaucucucugcaucaua

SEQ ID NO: 101215 - RNA, 19 nt, Artificial Sequence
  Description of Artificial Sequence: Synthetic oligonucleotide
  Antisense strand to SEQ ID NO: 101214
uaugaugcagagagauucc

SEQ ID NO: 101216 - RNA, 19 nt, Artificial Sequence
  Description of Artificial Sequence: Synthetic oligonucleotide
  Sense strand starting at position 1040 of SEQ ID NO: 1278
uggaaucucucugcaucau

SEQ ID NO: 101217 - RNA, 19 nt, Artificial Sequence
  Description of Artificial Sequence: Synthetic oligonucleotide
  Antisense strand to SEQ ID NO: 101216
augaugcagagagauucca

SEQ ID NO: 101218 - RNA, 19 nt, Artificial Sequence
  Description of Artificial Sequence: Synthetic oligonucleotide
  Sense strand starting at position 1039 of SEQ ID NO: 1278
cuggaaucucucugcauca

SEQ ID NO: 101219 - RNA, 19 nt, Artificial Sequence
  Description of Artificial Sequence: Synthetic oligonucleotide
  Antisense strand to SEQ ID NO: 101218
ugaugcagagagauuccag

SEQ ID NO: 101220 - RNA, 19 nt, Artificial Sequence
  Description of Artificial Sequence: Synthetic oligonucleotide
  Sense strand starting at position 973 of SEQ ID NO: 1278
ucuuuagguugggcauaua

SEQ ID NO: 101221 - RNA, 19 nt, Artificial Sequence
  Description of Artificial Sequence: Synthetic oligonucleotide
  Antisense strand to SEQ ID NO: 101220
uauaugcccaaccuaaaga

SEQ ID NO: 101222 - RNA, 19 nt, Artificial Sequence
  Description of Artificial Sequence: Synthetic oligonucleotide
  Sense strand starting at position 964 of SEQ ID NO: 1278
cucuaaaugucuuuagguu

SEQ ID NO: 101223 - RNA, 19 nt, Artificial Sequence
  Description of Artificial Sequence: Synthetic oligonucleotide
  Antisense strand to SEQ ID NO: 101222
aaccuaaagacauuuagag

SEQ ID NO: 101224 - RNA, 19 nt, Artificial Sequence
  Description of Artificial Sequence: Synthetic oligonucleotide
  Sense strand starting at position 955 of SEQ ID NO: 1278
guacuaugacucuaaaugu

SEQ ID NO: 101225 - RNA, 19 nt, Artificial Sequence
  Description of Artificial Sequence: Synthetic oligonucleotide
  Antisense strand to SEQ ID NO: 101224
acauuuagagucauaguac

SEQ ID NO: 101226 - RNA, 19 nt, Artificial Sequence
  Description of Artificial Sequence: Synthetic oligonucleotide
  Sense strand starting at position 916 of SEQ ID NO: 1278
ggagucucauacuuauugu

SEQ ID NO: 101227 - RNA, 19 nt, Artificial Sequence
  Description of Artificial Sequence: Synthetic oligonucleotide
  Antisense strand to SEQ ID NO: 101226
acaauaaguaugagacucc

SEQ ID NO: 101228 - RNA, 19 nt, Artificial Sequence
  Description of Artificial Sequence: Synthetic oligonucleotide
  Sense strand starting at position 744 of SEQ ID NO: 1278
caacuagcugaauguuaga

SEQ ID NO: 101229 - RNA, 19 nt, Artificial Sequence
  Description of Artificial Sequence: Synthetic oligonucleotide
  Antisense strand to SEQ ID NO: 101228
ucuaacauucagcuaguug

SEQ ID NO: 101230 - RNA, 19 nt, Artificial Sequence
  Description of Artificial Sequence: Synthetic oligonucleotide
  Sense strand starting at position 591 of SEQ ID NO: 1278
gaguuaaaguaugcauuaa

SEQ ID NO: 101231 - RNA, 19 nt, Artificial Sequence
  Description of Artificial Sequence: Synthetic oligonucleotide
  Antisense strand to SEQ ID NO: 101230
uuaaugcauacuuuaacuc

SEQ ID NO: 101232 - RNA, 19 nt, Artificial Sequence
  Description of Artificial Sequence: Synthetic oligonucleotide
  Sense strand starting at position 590 of SEQ ID NO: 1278
ugaguuaaaguaugcauua

SEQ ID NO: 101233 - RNA, 19 nt, Artificial Sequence
  Description of Artificial Sequence: Synthetic oligonucleotide
  Antisense strand to SEQ ID NO: 101232
uaaugcauacuuuaacuca

SEQ ID NO: 101234 - RNA, 19 nt, Artificial Sequence
  Description of Artificial Sequence: Synthetic oligonucleotide
  Sense strand starting at position 491 of SEQ ID NO: 1278
uuacaagguuagcuugaau

SEQ ID NO: 101235 - RNA, 19 nt, Artificial Sequence
  Description of Artificial Sequence: Synthetic oligonucleotide
  Antisense strand to SEQ ID NO: 101234
auucaagcuaaccuuguaa

SEQ ID NO: 101236 - RNA, 19 nt, Artificial Sequence
  Description of Artificial Sequence: Synthetic oligonucleotide
  Sense strand starting at position 341 of SEQ ID NO: 1278
cauccuuugugaguugaaa

SEQ ID NO: 101237 - RNA, 19 nt, Artificial Sequence
  Description of Artificial Sequence: Synthetic oligonucleotide
  Antisense strand to SEQ ID NO: 101236
uuucaacucacaaaggaug

SEQ ID NO: 101238 - RNA, 19 nt, Artificial Sequence
  Description of Artificial Sequence: Synthetic oligonucleotide
  Sense strand starting at position 300 of SEQ ID NO: 1278
cuacuaacaguguacauau

SEQ ID NO: 101239 - RNA, 19 nt, Artificial Sequence
  Description of Artificial Sequence: Synthetic oligonucleotide
  Antisense strand to SEQ ID NO: 101238
auauguacacuguuaguag

SEQ ID NO: 101240 - RNA, 19 nt, Artificial Sequence
  Description of Artificial Sequence: Synthetic oligonucleotide
  Sense strand starting at position 185 of SEQ ID NO: 1278
uaggaucgauuacuagaca

SEQ ID NO: 101241 - RNA, 19 nt, Artificial Sequence
  Description of Artificial Sequence: Synthetic oligonucleotide
  Antisense strand to SEQ ID NO: 101240
ugucuaguaaucgauccua

SEQ ID NO: 101242 - RNA, 19 nt, Artificial Sequence
  Description of Artificial Sequence: Synthetic oligonucleotide
  Sense strand starting at position 3939 of SEQ ID NO: 1277
guuuaaaguguacaaugau

SEQ ID NO: 101243 - RNA, 19 nt, Artificial Sequence
  Description of Artificial Sequence: Synthetic oligonucleotide
  Antisense strand to SEQ ID NO: 101242
aucauuguacacuuuaaac

SEQ ID NO: 101244 - RNA, 19 nt, Artificial Sequence
  Description of Artificial Sequence: Synthetic oligonucleotide
  Sense strand starting at position 3674 of SEQ ID NO: 1277
cuuagaugugucuaauagg

SEQ ID NO: 101245 - RNA, 19 nt, Artificial Sequence
  Description of Artificial Sequence: Synthetic oligonucleotide
  Antisense strand to SEQ ID NO: 101244
ccuauuagacacaucuaag

SEQ ID NO: 101246 - RNA, 19 nt, Artificial Sequence
  Description of Artificial Sequence: Synthetic oligonucleotide
  Sense strand starting at position 3557 of SEQ ID NO: 1277
caaugcugucuugagaaau

SEQ ID NO: 101247 - RNA, 19 nt, Artificial Sequence
  Description of Artificial Sequence: Synthetic oligonucleotide
  Antisense strand to SEQ ID NO: 101246
auuucucaagacagcauug

SEQ ID NO: 101248 - RNA, 19 nt, Artificial Sequence
  Description of Artificial Sequence: Synthetic oligonucleotide
  Sense strand starting at position 3490 of SEQ ID NO: 1277
guaaacagaugcucacaaa

SEQ ID NO: 101249 - RNA, 19 nt, Artificial Sequence
  Description of Artificial Sequence: Synthetic oligonucleotide
  Antisense strand to SEQ ID NO: 101248
uuugugagcaucuguuuac

SEQ ID NO: 101250 - RNA, 19 nt, Artificial Sequence
  Description of Artificial Sequence: Synthetic oligonucleotide
  Sense strand starting at position 3277 of SEQ ID NO: 1277
ccagaagaguggcuacaau

SEQ ID NO: 101251 - RNA, 19 nt, Artificial Sequence
  Description of Artificial Sequence: Synthetic oligonucleotide
  Antisense strand to SEQ ID NO: 101250
auuguagccacucuucugg

SEQ ID NO: 101252 - RNA, 19 nt, Artificial Sequence
  Description of Artificial Sequence: Synthetic oligonucleotide
  Sense strand starting at position 3268 of SEQ ID NO: 1277
caaugcucuccagaagagu

SEQ ID NO: 101253 - RNA, 19 nt, Artificial Sequence
  Description of Artificial Sequence: Synthetic oligonucleotide
  Antisense strand to SEQ ID NO: 101252
acucuucuggagagcauug

SEQ ID NO: 101254 - RNA, 19 nt, Artificial Sequence
  Description of Artificial Sequence: Synthetic oligonucleotide
  Sense strand starting at position 3265 of SEQ ID NO: 1277
cuacaaugcucuccagaag

SEQ ID NO: 101255 - RNA, 19 nt, Artificial Sequence
  Description of Artificial Sequence: Synthetic oligonucleotide
  Antisense strand to SEQ ID NO: 101254
cuucuggagagcauuguag

SEQ ID NO: 101256 - RNA, 19 nt, Artificial Sequence
  Description of Artificial Sequence: Synthetic oligonucleotide
  Sense strand starting at position 3253 of SEQ ID NO: 1277
agagaagaguggcuacaau

SEQ ID NO: 101257 - RNA, 19 nt, Artificial Sequence
  Description of Artificial Sequence: Synthetic oligonucleotide
  Antisense strand to SEQ ID NO: 101256
auuguagccacucuucucu

SEQ ID NO: 101258 - RNA, 19 nt, Artificial Sequence
  Description of Artificial Sequence: Synthetic oligonucleotide
  Sense strand starting at position 3201 of SEQ ID NO: 1277
ugauuuauaugugcaguua

SEQ ID NO: 101259 - RNA, 19 nt, Artificial Sequence
  Description of Artificial Sequence: Synthetic oligonucleotide
  Antisense strand to SEQ ID NO: 101258
uaacugcacauauaaauca

SEQ ID NO: 101260 - RNA, 19 nt, Artificial Sequence
  Description of Artificial Sequence: Synthetic oligonucleotide
  Sense strand starting at position 3052 of SEQ ID NO: 1277
uagugagugauggagcuaa

SEQ ID NO: 101261 - RNA, 19 nt, Artificial Sequence
  Description of Artificial Sequence: Synthetic oligonucleotide
  Antisense strand to SEQ ID NO: 101260
uuagcuccaucacucacua

SEQ ID NO: 101262 - RNA, 19 nt, Artificial Sequence
  Description of Artificial Sequence: Synthetic oligonucleotide
  Sense strand starting at position 3047 of SEQ ID NO: 1277
acaccuagugagugaugga

SEQ ID NO: 101263 - RNA, 19 nt, Artificial Sequence
  Description of Artificial Sequence: Synthetic oligonucleotide
  Antisense strand to SEQ ID NO: 101262
uccaucacucacuaggugu

SEQ ID NO: 101264 - RNA, 19 nt, Artificial Sequence
  Description of Artificial Sequence: Synthetic oligonucleotide
  Sense strand starting at position 2976 of SEQ ID NO: 1277
acaaucgcaccuuagagua

SEQ ID NO: 101265 - RNA, 19 nt, Artificial Sequence
  Description of Artificial Sequence: Synthetic oligonucleotide
  Antisense strand to SEQ ID NO: 101264
uacucuaaggugcgauugu

SEQ ID NO: 101266 - RNA, 19 nt, Artificial Sequence
  Description of Artificial Sequence: Synthetic oligonucleotide
  Sense strand starting at position 2909 of SEQ ID NO: 1277
uuaauaacagugugaugag

SEQ ID NO: 101267 - RNA, 19 nt, Artificial Sequence
  Description of Artificial Sequence: Synthetic oligonucleotide
  Antisense strand to SEQ ID NO: 101266
cucaucacacuguuauuaa

SEQ ID NO: 101268 - RNA, 19 nt, Artificial Sequence
  Description of Artificial Sequence: Synthetic oligonucleotide
  Sense strand starting at position 2855 of SEQ ID NO: 1277
ggcugagaucuugagauuc

SEQ ID NO: 101269 - RNA, 19 nt, Artificial Sequence
  Description of Artificial Sequence: Synthetic oligonucleotide
  Antisense strand to SEQ ID NO: 101268
gaaucucaagaucucagcc

SEQ ID NO: 101270 - RNA, 19 nt, Artificial Sequence
  Description of Artificial Sequence: Synthetic oligonucleotide
  Sense strand starting at position 2828 of SEQ ID NO: 1277
guugauagaaauggguaau

SEQ ID NO: 101271 - RNA, 19 nt, Artificial Sequence
  Description of Artificial Sequence: Synthetic oligonucleotide
  Antisense strand to SEQ ID NO: 101270
auuacccauuucuaucaac

SEQ ID NO: 101272 - RNA, 19 nt, Artificial Sequence
  Description of Artificial Sequence: Synthetic oligonucleotide
  Sense strand starting at position 2827 of SEQ ID NO: 1277
cguugauagaaauggguaa

SEQ ID NO: 101273 - RNA, 19 nt, Artificial Sequence
  Description of Artificial Sequence: Synthetic oligonucleotide
  Antisense strand to SEQ ID NO: 101272
uuacccauuucuaucaacg

SEQ ID NO: 101274 - RNA, 19 nt, Artificial Sequence
  Description of Artificial Sequence: Synthetic oligonucleotide
  Sense strand starting at position 2816 of SEQ ID NO: 1277
gccugcuuggucguugaua

SEQ ID NO: 101275 - RNA, 19 nt, Artificial Sequence
  Description of Artificial Sequence: Synthetic oligonucleotide
  Antisense strand to SEQ ID NO: 101274
uaucaacgaccaagcaggc

SEQ ID NO: 101276 - RNA, 19 nt, Artificial Sequence
  Description of Artificial Sequence: Synthetic oligonucleotide
  Sense strand starting at position 2747 of SEQ ID NO: 1277
ggugcucuuugauuaagaa

SEQ ID NO: 101277 - RNA, 19 nt, Artificial Sequence
  Description of Artificial Sequence: Synthetic oligonucleotide
  Antisense strand to SEQ ID NO: 101276
uucuuaaucaaagagcacc

SEQ ID NO: 101278 - RNA, 19 nt, Artificial Sequence
  Description of Artificial Sequence: Synthetic oligonucleotide
  Sense strand starting at position 2741 of SEQ ID NO: 1277
ucccguggugcucuuugau

SEQ ID NO: 101279 - RNA, 19 nt, Artificial Sequence
  Description of Artificial Sequence: Synthetic oligonucleotide
  Antisense strand to SEQ ID NO: 101278
aucaaagagcaccacggga

SEQ ID NO: 101280 - RNA, 19 nt, Artificial Sequence
  Description of Artificial Sequence: Synthetic oligonucleotide
  Sense strand starting at position 1202 of SEQ ID NO: 1277
uacaaugagugcuuggacu

SEQ ID NO: 101281 - RNA, 19 nt, Artificial Sequence
  Description of Artificial Sequence: Synthetic oligonucleotide
  Antisense strand to SEQ ID NO: 101280
aguccaagcacucauugua

SEQ ID NO: 101282 - RNA, 19 nt, Artificial Sequence
  Description of Artificial Sequence: Synthetic oligonucleotide
  Sense strand starting at position 1186 of SEQ ID NO: 1277
ggcagagaccucggaauac

SEQ ID NO: 101283 - RNA, 19 nt, Artificial Sequence
  Description of Artificial Sequence: Synthetic oligonucleotide
  Antisense strand to SEQ ID NO: 101282
guauuccgaggucucugcc

SEQ ID NO: 101284 - RNA, 19 nt, Artificial Sequence
  Description of Artificial Sequence: Synthetic oligonucleotide
  Sense strand starting at position 1085 of SEQ ID NO: 1277
cggucucugcagagcgaaa

SEQ ID NO: 101285 - RNA, 19 nt, Artificial Sequence
  Description of Artificial Sequence: Synthetic oligonucleotide
  Antisense strand to SEQ ID NO: 101284
uuucgcucugcagagaccg

SEQ ID NO: 101286 - RNA, 19 nt, Artificial Sequence
  Description of Artificial Sequence: Synthetic oligonucleotide
  Sense strand starting at position 962 of SEQ ID NO: 1277
ucaucugagccugaagauc

SEQ ID NO: 101287 - RNA, 19 nt, Artificial Sequence
  Description of Artificial Sequence: Synthetic oligonucleotide
  Antisense strand to SEQ ID NO: 101286
gaucuucaggcucagauga

SEQ ID NO: 101288 - RNA, 19 nt, Artificial Sequence
  Description of Artificial Sequence: Synthetic oligonucleotide
  Sense strand starting at position 938 of SEQ ID NO: 1277
cugucauuccuguaauaac

SEQ ID NO: 101289 - RNA, 19 nt, Artificial Sequence
  Description of Artificial Sequence: Synthetic oligonucleotide
  Antisense strand to SEQ ID NO: 101288
guuauuacaggaaugacag

SEQ ID NO: 101290 - RNA, 19 nt, Artificial Sequence
  Description of Artificial Sequence: Synthetic oligonucleotide
  Sense strand starting at position 915 of SEQ ID NO: 1277
uuaugagacccuuggagua

SEQ ID NO: 101291 - RNA, 19 nt, Artificial Sequence
  Description of Artificial Sequence: Synthetic oligonucleotide
  Antisense strand to SEQ ID NO: 101290
uacuccaagggucucauaa

SEQ ID NO: 101292 - RNA, 19 nt, Artificial Sequence
  Description of Artificial Sequence: Synthetic oligonucleotide
  Sense strand starting at position 904 of SEQ ID NO: 1277
ccaagcuuggcuuaugaga

SEQ ID NO: 101293 - RNA, 19 nt, Artificial Sequence
  Description of Artificial Sequence: Synthetic oligonucleotide
  Antisense strand to SEQ ID NO: 101292
ucucauaagccaagcuugg

SEQ ID NO: 101294 - RNA, 19 nt, Artificial Sequence
  Description of Artificial Sequence: Synthetic oligonucleotide
  Sense strand starting at position 762 of SEQ ID NO: 1277
ugcuuaacaguguaugaaa

SEQ ID NO: 101295 - RNA, 19 nt, Artificial Sequence
  Description of Artificial Sequence: Synthetic oligonucleotide
  Antisense strand to SEQ ID NO: 101294
uuucauacacuguuaagca

SEQ ID NO: 101296 - RNA, 19 nt, Artificial Sequence
  Description of Artificial Sequence: Synthetic oligonucleotide
  Sense strand starting at position 754 of SEQ ID NO: 1277
auaggcauugcuuaacagu

SEQ ID NO: 101297 - RNA, 19 nt, Artificial Sequence
  Description of Artificial Sequence: Synthetic oligonucleotide
  Antisense strand to SEQ ID NO: 101296
acuguuaagcaaugccuau

SEQ ID NO: 101298 - RNA, 19 nt, Artificial Sequence
  Description of Artificial Sequence: Synthetic oligonucleotide
  Sense strand starting at position 706 of SEQ ID NO: 1277
auagcuaaaccauagaguu

SEQ ID NO: 101299 - RNA, 19 nt, Artificial Sequence
  Description of Artificial Sequence: Synthetic oligonucleotide
  Antisense strand to SEQ ID NO: 101298
aacucuaugguuuagcuau

SEQ ID NO: 101300 - RNA, 19 nt, Artificial Sequence
  Description of Artificial Sequence: Synthetic oligonucleotide
  Sense strand starting at position 636 of SEQ ID NO: 1277
auuaguguuguagagauac

SEQ ID NO: 101301 - RNA, 19 nt, Artificial Sequence
  Description of Artificial Sequence: Synthetic oligonucleotide
  Antisense strand to SEQ ID NO: 101300
guaucucuacaacacuaau

SEQ ID NO: 101302 - RNA, 19 nt, Artificial Sequence
  Description of Artificial Sequence: Synthetic oligonucleotide
  Sense strand starting at position 587 of SEQ ID NO: 1277
ggguuaucucuaggaaugg

SEQ ID NO: 101303 - RNA, 19 nt, Artificial Sequence
  Description of Artificial Sequence: Synthetic oligonucleotide
  Antisense strand to SEQ ID NO: 101302
ccauuccuagagauaaccc

SEQ ID NO: 101304 - RNA, 19 nt, Artificial Sequence
  Description of Artificial Sequence: Synthetic oligonucleotide
  Sense strand starting at position 561 of SEQ ID NO: 1277
uguaguguuuauuuacauc

SEQ ID NO: 101305 - RNA, 19 nt, Artificial Sequence
  Description of Artificial Sequence: Synthetic oligonucleotide
  Antisense strand to SEQ ID NO: 101304
gauguaaauaaacacuaca

SEQ ID NO: 101306 - RNA, 19 nt, Artificial Sequence
  Description of Artificial Sequence: Synthetic oligonucleotide
  Sense strand starting at position 507 of SEQ ID NO: 1277
guggcuuugacccaagaaa

SEQ ID NO: 101307 - RNA, 19 nt, Artificial Sequence
  Description of Artificial Sequence: Synthetic oligonucleotide
  Antisense strand to SEQ ID NO: 101306
uuucuugggucaaagccac

SEQ ID NO: 101308 - RNA, 19 nt, Artificial Sequence
  Description of Artificial Sequence: Synthetic oligonucleotide
  Sense strand starting at position 403 of SEQ ID NO: 1277
gaugauucuccagguaacc

SEQ ID NO: 101309 - RNA, 19 nt, Artificial Sequence
  Description of Artificial Sequence: Synthetic oligonucleotide
  Antisense strand to SEQ ID NO: 101308
gguuaccuggagaaucauc

SEQ ID NO: 101310 - RNA, 19 nt, Artificial Sequence
  Description of Artificial Sequence: Synthetic oligonucleotide
  Sense strand starting at position 386 of SEQ ID NO: 1277
agaagcaucagugauguga

SEQ ID NO: 101311 - RNA, 19 nt, Artificial Sequence
  Description of Artificial Sequence: Synthetic oligonucleotide
  Antisense strand to SEQ ID NO: 101310
ucacaucacugaugcuucu

SEQ ID NO: 101312 - RNA, 19 nt, Artificial Sequence
  Description of Artificial Sequence: Synthetic oligonucleotide
  Sense strand starting at position 384 of SEQ ID NO: 1277
gaagaagcaucagugaugu

SEQ ID NO: 101313 - RNA, 19 nt, Artificial Sequence
  Description of Artificial Sequence: Synthetic oligonucleotide
  Antisense strand to SEQ ID NO: 101312
acaucacugaugcuucuuc

SEQ ID NO: 101314 - RNA, 19 nt, Artificial Sequence
  Description of Artificial Sequence: Synthetic oligonucleotide
  Sense strand starting at position 323 of SEQ ID NO: 1277
acguaccauuucucaaguu

SEQ ID NO: 101315 - RNA, 19 nt, Artificial Sequence
  Description of Artificial Sequence: Synthetic oligonucleotide
  Antisense strand to SEQ ID NO: 101314
aacuugagaaaugguacgu

SEQ ID NO: 101316 - RNA, 19 nt, Artificial Sequence
  Description of Artificial Sequence: Synthetic oligonucleotide
  Sense strand starting at position 302 of SEQ ID NO: 1277
uguauuugguuuccucuga

SEQ ID NO: 101317 - RNA, 19 nt, Artificial Sequence
  Description of Artificial Sequence: Synthetic oligonucleotide
  Antisense strand to SEQ ID NO: 101316
ucagaggaaaccaaauaca

SEQ ID NO: 101318 - RNA, 19 nt, Artificial Sequence
  Description of Artificial Sequence: Synthetic oligonucleotide
  Sense strand starting at position 75 of SEQ ID NO: 1277
aauuuaagguugggaauaa

SEQ ID NO: 101319 - RNA, 19 nt, Artificial Sequence
  Description of Artificial Sequence: Synthetic oligonucleotide
  Antisense strand to SEQ ID NO: 101318
uuauucccaaccuuaaauu

SEQ ID NO: 101320 - RNA, 19 nt, Artificial Sequence
  Description of Artificial Sequence: Synthetic oligonucleotide
  Sense strand starting at position 36 of SEQ ID NO: 1277
gauauaauugagugugagg

SEQ ID NO: 101321 - RNA, 19 nt, Artificial Sequence
  Description of Artificial Sequence: Synthetic oligonucleotide
  Antisense strand to SEQ ID NO: 101320
ccucacacucaauuauauc

SEQ ID NO: 101322 - RNA, 19 nt, Artificial Sequence
  Description of Artificial Sequence: Synthetic oligonucleotide
  Sense strand starting at position 3725 of SEQ ID NO: 1279
gcacuaucuugguugacug

SEQ ID NO: 101323 - RNA, 19 nt, Artificial Sequence
  Description of Artificial Sequence: Synthetic oligonucleotide
  Antisense strand to SEQ ID NO: 101322
cagucaaccaagauagugc

SEQ ID NO: 101324 - RNA, 19 nt, Artificial Sequence
  Description of Artificial Sequence: Synthetic oligonucleotide
  Sense strand starting at position 3724 of SEQ ID NO: 1279
ggcacuaucuugguugacu

SEQ ID NO: 101325 - RNA, 19 nt, Artificial Sequence
  Description of Artificial Sequence: Synthetic oligonucleotide
  Antisense strand to SEQ ID NO: 101324
agucaaccaagauagugcc

SEQ ID NO: 101326 - RNA, 19 nt, Artificial Sequence
  Description of Artificial Sequence: Synthetic oligonucleotide
  Sense strand starting at position 3613 of SEQ ID NO: 1279
ggauucccuguguaaacga

SEQ ID NO: 101327 - RNA, 19 nt, Artificial Sequence
  Description of Artificial Sequence: Synthetic oligonucleotide
  Antisense strand to SEQ ID NO: 101326
ucguuuacacagggaaucc

SEQ ID NO: 101328 - RNA, 19 nt, Artificial Sequence
  Description of Artificial Sequence: Synthetic oligonucleotide
  Sense strand starting at position 3611 of SEQ ID NO: 1279
uuggauucccuguguaaac

SEQ ID NO: 101329 - RNA, 19 nt, Artificial Sequence
  Description of Artificial Sequence: Synthetic oligonucleotide
  Antisense strand to SEQ ID NO: 101328
guuuacacagggaauccaa

SEQ ID NO: 101330 - RNA, 19 nt, Artificial Sequence
  Description of Artificial Sequence: Synthetic oligonucleotide
  Sense strand starting at position 3572 of SEQ ID NO: 1279
ugcucucauccuugagacu

SEQ ID NO: 101331 - RNA, 19 nt, Artificial Sequence
  Description of Artificial Sequence: Synthetic oligonucleotide
  Antisense strand to SEQ ID NO: 101330
agucucaaggaugagagca

SEQ ID NO: 101332 - RNA, 19 nt, Artificial Sequence
  Description of Artificial Sequence: Synthetic oligonucleotide
  Sense strand starting at position 3549 of SEQ ID NO: 1279
agcucuuaucucgagcuuu

SEQ ID NO: 101333 - RNA, 19 nt, Artificial Sequence
  Description of Artificial Sequence: Synthetic oligonucleotide
  Antisense strand to SEQ ID NO: 101332
aaagcucgagauaagagcu

SEQ ID NO: 101334 - RNA, 19 nt, Artificial Sequence
  Description of Artificial Sequence: Synthetic oligonucleotide
  Sense strand starting at position 3487 of SEQ ID NO: 1279
cguugugucuaacugauuc

SEQ ID NO: 101335 - RNA, 19 nt, Artificial Sequence
  Description of Artificial Sequence: Synthetic oligonucleotide
  Antisense strand to SEQ ID NO: 101334
gaaucaguuagacacaacg

SEQ ID NO: 101336 - RNA, 19 nt, Artificial Sequence
  Description of Artificial Sequence: Synthetic oligonucleotide
  Sense strand starting at position 3484 of SEQ ID NO: 1279
auccguugugucuaacuga

SEQ ID NO: 101337 - RNA, 19 nt, Artificial Sequence
  Description of Artificial Sequence: Synthetic oligonucleotide
  Antisense strand to SEQ ID NO: 101336
ucaguuagacacaacggau

SEQ ID NO: 101338 - RNA, 19 nt, Artificial Sequence
  Description of Artificial Sequence: Synthetic oligonucleotide
  Sense strand starting at position 3255 of SEQ ID NO: 1279
ucgugaugaaaucaggcuu

SEQ ID NO: 101339 - RNA, 19 nt, Artificial Sequence
  Description of Artificial Sequence: Synthetic oligonucleotide
  Antisense strand to SEQ ID NO: 101338
aagccugauuucaucacga

SEQ ID NO: 101340 - RNA, 19 nt, Artificial Sequence
  Description of Artificial Sequence: Synthetic oligonucleotide
  Sense strand starting at position 3250 of SEQ ID NO: 1279
agcugucgugaugaaauca

SEQ ID NO: 101341 - RNA, 19 nt, Artificial Sequence
  Description of Artificial Sequence: Synthetic oligonucleotide
  Antisense strand to SEQ ID NO: 101340
ugauuucaucacgacagcu

SEQ ID NO: 101342 - RNA, 19 nt, Artificial Sequence
  Description of Artificial Sequence: Synthetic oligonucleotide
  Sense strand starting at position 3247 of SEQ ID NO: 1279
cacagcugucgugaugaaa

SEQ ID NO: 101343 - RNA, 19 nt, Artificial Sequence
  Description of Artificial Sequence: Synthetic oligonucleotide
  Antisense strand to SEQ ID NO: 101342
uuucaucacgacagcugug

SEQ ID NO: 101344 - RNA, 19 nt, Artificial Sequence
  Description of Artificial Sequence: Synthetic oligonucleotide
  Sense strand starting at position 3205 of SEQ ID NO: 1279
agggauugguggaaguagu

SEQ ID NO: 101345 - RNA, 19 nt, Artificial Sequence
  Description of Artificial Sequence: Synthetic oligonucleotide
  Antisense strand to SEQ ID NO: 101344
acuacuuccaccaaucccu

SEQ ID NO: 101346 - RNA, 19 nt, Artificial Sequence
  Description of Artificial Sequence: Synthetic oligonucleotide
  Sense strand starting at position 3200 of SEQ ID NO: 1279
uguuuagggauugguggaa

SEQ ID NO: 101347 - RNA, 19 nt, Artificial Sequence
  Description of Artificial Sequence: Synthetic oligonucleotide
  Antisense strand to SEQ ID NO: 101346
uuccaccaaucccuaaaca

SEQ ID NO: 101348 - RNA, 19 nt, Artificial Sequence
  Description of Artificial Sequence: Synthetic oligonucleotide
  Sense strand starting at position 3153 of SEQ ID NO: 1279
gguauuccugcaugagagc

SEQ ID NO: 101349 - RNA, 19 nt, Artificial Sequence
  Description of Artificial Sequence: Synthetic oligonucleotide
  Antisense strand to SEQ ID NO: 101348
gcucucaugcaggaauacc

SEQ ID NO: 101350 - RNA, 19 nt, Artificial Sequence
  Description of Artificial Sequence: Synthetic oligonucleotide
  Sense strand starting at position 3151 of SEQ ID NO: 1279
cagguauuccugcaugaga

SEQ ID NO: 101351 - RNA, 19 nt, Artificial Sequence
  Description of Artificial Sequence: Synthetic oligonucleotide
  Antisense strand to SEQ ID NO: 101350
ucucaugcaggaauaccug

SEQ ID NO: 101352 - RNA, 19 nt, Artificial Sequence
  Description of Artificial Sequence: Synthetic oligonucleotide
  Sense strand starting at position 3061 of SEQ ID NO: 1279
uacugcaguccugaggaau

SEQ ID NO: 101353 - RNA, 19 nt, Artificial Sequence
  Description of Artificial Sequence: Synthetic oligonucleotide
  Antisense strand to SEQ ID NO: 101352
auuccucaggacugcagua

SEQ ID NO: 101354 - RNA, 19 nt, Artificial Sequence
  Description of Artificial Sequence: Synthetic oligonucleotide
  Sense strand starting at position 3046 of SEQ ID NO: 1279
gcugcuuaucuagaauacu

SEQ ID NO: 101355 - RNA, 19 nt, Artificial Sequence
  Description of Artificial Sequence: Synthetic oligonucleotide
  Antisense strand to SEQ ID NO: 101354
aguauucuagauaagcagc

SEQ ID NO: 101356 - RNA, 19 nt, Artificial Sequence
  Description of Artificial Sequence: Synthetic oligonucleotide
  Sense strand starting at position 3042 of SEQ ID NO: 1279
gcaagcugcuuaucuagaa

SEQ ID NO: 101357 - RNA, 19 nt, Artificial Sequence
  Description of Artificial Sequence: Synthetic oligonucleotide
  Antisense strand to SEQ ID NO: 101356
uucuagauaagcagcuugc

SEQ ID NO: 101358 - RNA, 19 nt, Artificial Sequence
  Description of Artificial Sequence: Synthetic oligonucleotide
  Sense strand starting at position 3039 of SEQ ID NO: 1279
ugugcaagcugcuuaucua

SEQ ID NO: 101359 - RNA, 19 nt, Artificial Sequence
  Description of Artificial Sequence: Synthetic oligonucleotide
  Antisense strand to SEQ ID NO: 101358
uagauaagcagcuugcaca

SEQ ID NO: 101360 - RNA, 19 nt, Artificial Sequence
  Description of Artificial Sequence: Synthetic oligonucleotide
  Sense strand starting at position 2999 of SEQ ID NO: 1279
uagcuuguuguuggagaga

SEQ ID NO: 101361 - RNA, 19 nt, Artificial Sequence
  Description of Artificial Sequence: Synthetic oligonucleotide
  Antisense strand to SEQ ID NO: 101360
ucucuccaacaacaagcua

SEQ ID NO: 101362 - RNA, 19 nt, Artificial Sequence
  Description of Artificial Sequence: Synthetic oligonucleotide
  Sense strand starting at position 2997 of SEQ ID NO: 1279
guuagcuuguuguuggaga

SEQ ID NO: 101363 - RNA, 19 nt, Artificial Sequence
  Description of Artificial Sequence: Synthetic oligonucleotide
  Antisense strand to SEQ ID NO: 101362
ucuccaacaacaagcuaac

SEQ ID NO: 101364 - RNA, 19 nt, Artificial Sequence
  Description of Artificial Sequence: Synthetic oligonucleotide
  Sense strand starting at position 2874 of SEQ ID NO: 1279
cgugccaugacagaucaua

SEQ ID NO: 101365 - RNA, 19 nt, Artificial Sequence
  Description of Artificial Sequence: Synthetic oligonucleotide
  Antisense strand to SEQ ID NO: 101364
uaugaucugucauggcacg

SEQ ID NO: 101366 - RNA, 19 nt, Artificial Sequence
  Description of Artificial Sequence: Synthetic oligonucleotide
  Sense strand starting at position 2869 of SEQ ID NO: 1279
cuguucgugccaugacaga

SEQ ID NO: 101367 - RNA, 19 nt, Artificial Sequence
  Description of Artificial Sequence: Synthetic oligonucleotide
  Antisense strand to SEQ ID NO: 101366
ucugucauggcacgaacag

SEQ ID NO: 101368 - RNA, 19 nt, Artificial Sequence
  Description of Artificial Sequence: Synthetic oligonucleotide
  Sense strand starting at position 2728 of SEQ ID NO: 1279
ugagaaccuggcugaucuu

SEQ ID NO: 101369 - RNA, 19 nt, Artificial Sequence
  Description of Artificial Sequence: Synthetic oligonucleotide
  Antisense strand to SEQ ID NO: 101368
aagaucagccagguucuca

SEQ ID NO: 101370 - RNA, 19 nt, Artificial Sequence
  Description of Artificial Sequence: Synthetic oligonucleotide
  Sense strand starting at position 2727 of SEQ ID NO: 1279
cugagaaccuggcugaucu

SEQ ID NO: 101371 - RNA, 19 nt, Artificial Sequence
  Description of Artificial Sequence: Synthetic oligonucleotide
  Antisense strand to SEQ ID NO: 101370
agaucagccagguucucag

SEQ ID NO: 101372 - RNA, 19 nt, Artificial Sequence
  Description of Artificial Sequence: Synthetic oligonucleotide
  Sense strand starting at position 2725 of SEQ ID NO: 1279
cccugagaaccuggcugau

SEQ ID NO: 101373 - RNA, 19 nt, Artificial Sequence
  Description of Artificial Sequence: Synthetic oligonucleotide
  Antisense strand to SEQ ID NO: 101372
aucagccagguucucaggg

SEQ ID NO: 101374 - RNA, 19 nt, Artificial Sequence
  Description of Artificial Sequence: Synthetic oligonucleotide
  Sense strand starting at position 2706 of SEQ ID NO: 1279
gcguacuuccggagaaggu

SEQ ID NO: 101375 - RNA, 19 nt, Artificial Sequence
  Description of Artificial Sequence: Synthetic oligonucleotide
  Antisense strand to SEQ ID NO: 101374
accuucuccggaaguacgc

SEQ ID NO: 101376 - RNA, 19 nt, Artificial Sequence
  Description of Artificial Sequence: Synthetic oligonucleotide
  Sense strand starting at position 2360 of SEQ ID NO: 1279
gcuaguuucucauuucuuu

SEQ ID NO: 101377 - RNA, 19 nt, Artificial Sequence
  Description of Artificial Sequence: Synthetic oligonucleotide
  Antisense strand to SEQ ID NO: 101376
aaagaaaugagaaacuagc

SEQ ID NO: 101378 - RNA, 19 nt, Artificial Sequence
  Description of Artificial Sequence: Synthetic oligonucleotide
  Sense strand starting at position 2339 of SEQ ID NO: 1279
cgcguuucugaacaaugca

SEQ ID NO: 101379 - RNA, 19 nt, Artificial Sequence
  Description of Artificial Sequence: Synthetic oligonucleotide
  Antisense strand to SEQ ID NO: 101378
ugcauuguucagaaacgcg

SEQ ID NO: 101380 - RNA, 19 nt, Artificial Sequence
  Description of Artificial Sequence: Synthetic oligonucleotide
  Sense strand starting at position 2332 of SEQ ID NO: 1279
aagucuccgcguuucugaa

SEQ ID NO: 101381 - RNA, 19 nt, Artificial Sequence
  Description of Artificial Sequence: Synthetic oligonucleotide
  Antisense strand to SEQ ID NO: 101380
uucagaaacgcggagacuu

SEQ ID NO: 101382 - RNA, 19 nt, Artificial Sequence
  Description of Artificial Sequence: Synthetic oligonucleotide
  Sense strand starting at position 2331 of SEQ ID NO: 1279
gaagucuccgcguuucuga

SEQ ID NO: 101383 - RNA, 19 nt, Artificial Sequence
  Description of Artificial Sequence: Synthetic oligonucleotide
  Antisense strand to SEQ ID NO: 101382
ucagaaacgcggagacuuc

SEQ ID NO: 101384 - RNA, 19 nt, Artificial Sequence
  Description of Artificial Sequence: Synthetic oligonucleotide
  Sense strand starting at position 2328 of SEQ ID NO: 1279
agagaagucuccgcguuuc

SEQ ID NO: 101385 - RNA, 19 nt, Artificial Sequence
  Description of Artificial Sequence: Synthetic oligonucleotide
  Antisense strand to SEQ ID NO: 101384
gaaacgcggagacuucucu

SEQ ID NO: 101386 - RNA, 19 nt, Artificial Sequence
  Description of Artificial Sequence: Synthetic oligonucleotide
  Sense strand starting at position 2327 of SEQ ID NO: 1279
gagagaagucuccgcguuu

SEQ ID NO: 101387 - RNA, 19 nt, Artificial Sequence
  Description of Artificial Sequence: Synthetic oligonucleotide
  Antisense strand to SEQ ID NO: 101386
aaacgcggagacuucucuc

SEQ ID NO: 101388 - RNA, 19 nt, Artificial Sequence
  Description of Artificial Sequence: Synthetic oligonucleotide
  Sense strand starting at position 2315 of SEQ ID NO: 1279
ucgcuuucuccugagagaa

SEQ ID NO: 101389 - RNA, 19 nt, Artificial Sequence
  Description of Artificial Sequence: Synthetic oligonucleotide
  Antisense strand to SEQ ID NO: 101388
uucucucaggagaaagcga

SEQ ID NO: 101390 - RNA, 19 nt, Artificial Sequence
  Description of Artificial Sequence: Synthetic oligonucleotide
  Sense strand starting at position 692 of SEQ ID NO: 1279
ucgcaugcaugcucagaca

SEQ ID NO: 101391 - RNA, 19 nt, Artificial Sequence
  Description of Artificial Sequence: Synthetic oligonucleotide
  Antisense strand to SEQ ID NO: 101390
ugucugagcaugcaugcga

SEQ ID NO: 101392 - RNA, 19 nt, Artificial Sequence
  Description of Artificial Sequence: Synthetic oligonucleotide
  Sense strand starting at position 482 of SEQ ID NO: 1279
acuuguugcaugugaggca

SEQ ID NO: 101393 - RNA, 19 nt, Artificial Sequence
  Description of Artificial Sequence: Synthetic oligonucleotide
  Antisense strand to SEQ ID NO: 101392
ugccucacaugcaacaagu

SEQ ID NO: 101394 - RNA, 19 nt, Artificial Sequence
  Description of Artificial Sequence: Synthetic oligonucleotide
  Sense strand starting at position 188 of SEQ ID NO: 1279
gccuaaugacaccgaaaug

SEQ ID NO: 101395 - RNA, 19 nt, Artificial Sequence
  Description of Artificial Sequence: Synthetic oligonucleotide
  Antisense strand to SEQ ID NO: 101394
cauuucggugucauuaggc

SEQ ID NO: 101396 - RNA, 19 nt, Artificial Sequence
  Description of Artificial Sequence: Synthetic oligonucleotide
  Sense strand starting at position 97 of SEQ ID NO: 1279
gcgagaaaguuagcaaauu

SEQ ID NO: 101397 - RNA, 19 nt, Artificial Sequence
  Description of Artificial Sequence: Synthetic oligonucleotide
  Antisense strand to SEQ ID NO: 101396
aauuugcuaacuuucucgc

SEQ ID NO: 101398 - RNA, 19 nt, Artificial Sequence
  Description of Artificial Sequence: Synthetic oligonucleotide
  Sense strand starting at position 30 of SEQ ID NO: 1279
agaguucccuuauugcaag

SEQ ID NO: 101399 - RNA, 19 nt, Artificial Sequence
  Description of Artificial Sequence: Synthetic oligonucleotide
  Antisense strand to SEQ ID NO: 101398
cuugcaauaagggaacucu

SEQ ID NO: 101400 - RNA, 19 nt, Artificial Sequence
  Description of Artificial Sequence: Synthetic oligonucleotide
  Sense strand starting at position 25 of SEQ ID NO: 1279
aggagagaguucccuuauu

SEQ ID NO: 101401 - RNA, 19 nt, Artificial Sequence
  Description of Artificial Sequence: Synthetic oligonucleotide
  Antisense strand to SEQ ID NO: 101400
aauaagggaacucucuccu

SEQ ID NO: 101402 - RNA, 19 nt, Artificial Sequence
  Description of Artificial Sequence: Synthetic oligonucleotide
  Sense strand starting at position 3937 of SEQ ID NO: 1280
cguugugucuaacugauuc

SEQ ID NO: 101403 - RNA, 19 nt, Artificial Sequence
  Description of Artificial Sequence: Synthetic oligonucleotide
  Antisense strand to SEQ ID NO: 101402
gaaucaguuagacacaacg

SEQ ID NO: 101404 - RNA, 19 nt, Artificial Sequence
  Description of Artificial Sequence: Synthetic oligonucleotide
  Sense strand starting at position 3934 of SEQ ID NO: 1280
auccguugugucuaacuga

SEQ ID NO: 101405 - RNA, 19 nt, Artificial Sequence
  Description of Artificial Sequence: Synthetic oligonucleotide
  Antisense strand to SEQ ID NO: 101404
ucaguuagacacaacggau

SEQ ID NO: 101406 - RNA, 19 nt, Artificial Sequence
  Description of Artificial Sequence: Synthetic oligonucleotide
  Sense strand starting at position 3705 of SEQ ID NO: 1280
ucgugaugaaaucaggcuu

SEQ ID NO: 101407 - RNA, 19 nt, Artificial Sequence
  Description of Artificial Sequence: Synthetic oligonucleotide
  Antisense strand to SEQ ID NO: 101406
aagccugauuucaucacga

SEQ ID NO: 101408 - RNA, 19 nt, Artificial Sequence
  Description of Artificial Sequence: Synthetic oligonucleotide
  Sense strand starting at position 3700 of SEQ ID NO: 1280
agcugucgugaugaaauca

SEQ ID NO: 101409 - RNA, 19 nt, Artificial Sequence
  Description of Artificial Sequence: Synthetic oligonucleotide
  Antisense strand to SEQ ID NO: 101408
ugauuucaucacgacagcu

SEQ ID NO: 101410 - RNA, 19 nt, Artificial Sequence
  Description of Artificial Sequence: Synthetic oligonucleotide
  Sense strand starting at position 3697 of SEQ ID NO: 1280
cacagcugucgugaugaaa

SEQ ID NO: 101411 - RNA, 19 nt, Artificial Sequence
  Description of Artificial Sequence: Synthetic oligonucleotide
  Antisense strand to SEQ ID NO: 101410
uuucaucacgacagcugug

SEQ ID NO: 101412 - RNA, 19 nt, Artificial Sequence
  Description of Artificial Sequence: Synthetic oligonucleotide
  Sense strand starting at position 3655 of SEQ ID NO: 1280
agggauugguggaaguagu

SEQ ID NO: 101413 - RNA, 19 nt, Artificial Sequence
  Description of Artificial Sequence: Synthetic oligonucleotide
  Antisense strand to SEQ ID NO: 101412
acuacuuccaccaaucccu

SEQ ID NO: 101414 - RNA, 19 nt, Artificial Sequence
  Description of Artificial Sequence: Synthetic oligonucleotide
  Sense strand starting at position 3650 of SEQ ID NO: 1280
uguuuagggauugguggaa

SEQ ID NO: 101415 - RNA, 19 nt, Artificial Sequence
  Description of Artificial Sequence: Synthetic oligonucleotide
  Antisense strand to SEQ ID NO: 101414
uuccaccaaucccuaaaca

SEQ ID NO: 101416 - RNA, 19 nt, Artificial Sequence
  Description of Artificial Sequence: Synthetic oligonucleotide
  Sense strand starting at position 3603 of SEQ ID NO: 1280
gguauuccugcaugagagc

SEQ ID NO: 101417 - RNA, 19 nt, Artificial Sequence
  Description of Artificial Sequence: Synthetic oligonucleotide
  Antisense strand to SEQ ID NO: 101416
gcucucaugcaggaauacc

SEQ ID NO: 101418 - RNA, 19 nt, Artificial Sequence
  Description of Artificial Sequence: Synthetic oligonucleotide
  Sense strand starting at position 3601 of SEQ ID NO: 1280
cagguauuccugcaugaga

SEQ ID NO: 101419 - RNA, 19 nt, Artificial Sequence
  Description of Artificial Sequence: Synthetic oligonucleotide
  Antisense strand to SEQ ID NO: 101418
ucucaugcaggaauaccug

SEQ ID NO: 101420 - RNA, 19 nt, Artificial Sequence
  Description of Artificial Sequence: Synthetic oligonucleotide
  Sense strand starting at position 3511 of SEQ ID NO: 1280
uacugcaguccugaggaau

SEQ ID NO: 101421 - RNA, 19 nt, Artificial Sequence
  Description of Artificial Sequence: Synthetic oligonucleotide
  Antisense strand to SEQ ID NO: 101420
auuccucaggacugcagua

SEQ ID NO: 101422 - RNA, 19 nt, Artificial Sequence
  Description of Artificial Sequence: Synthetic oligonucleotide
  Sense strand starting at position 3496 of SEQ ID NO: 1280
gcugcuuaucuagaauacu

SEQ ID NO: 101423 - RNA, 19 nt, Artificial Sequence
  Description of Artificial Sequence: Synthetic oligonucleotide
  Antisense strand to SEQ ID NO: 101422
aguauucuagauaagcagc

SEQ ID NO: 101424 - RNA, 19 nt, Artificial Sequence
  Description of Artificial Sequence: Synthetic oligonucleotide
  Sense strand starting at position 3492 of SEQ ID NO: 1280
gcaagcugcuuaucuagaa

SEQ ID NO: 101425 - RNA, 19 nt, Artificial Sequence
  Description of Artificial Sequence: Synthetic oligonucleotide
  Antisense strand to SEQ ID NO: 101424
uucuagauaagcagcuugc

SEQ ID NO: 101426 - RNA, 19 nt, Artificial Sequence
  Description of Artificial Sequence: Synthetic oligonucleotide
  Sense strand starting at position 3449 of SEQ ID NO: 1280
uagcuuguuguuggagaga

SEQ ID NO: 101427 - RNA, 19 nt, Artificial Sequence
  Description of Artificial Sequence: Synthetic oligonucleotide
  Antisense strand to SEQ ID NO: 101426
ucucuccaacaacaagcua

SEQ ID NO: 101428 - RNA, 19 nt, Artificial Sequence
  Description of Artificial Sequence: Synthetic oligonucleotide
  Sense strand starting at position 3447 of SEQ ID NO: 1280
guuagcuuguuguuggaga

SEQ ID NO: 101429 - RNA, 19 nt, Artificial Sequence
  Description of Artificial Sequence: Synthetic oligonucleotide
  Antisense strand to SEQ ID NO: 101428
ucuccaacaacaagcuaac

SEQ ID NO: 101430 - RNA, 19 nt, Artificial Sequence
  Description of Artificial Sequence: Synthetic oligonucleotide
  Sense strand starting at position 3324 of SEQ ID NO: 1280
cgugccaugacagaucaua

SEQ ID NO: 101431 - RNA, 19 nt, Artificial Sequence
  Description of Artificial Sequence: Synthetic oligonucleotide
  Antisense strand to SEQ ID NO: 101430
uaugaucugucauggcacg

SEQ ID NO: 101432 - RNA, 19 nt, Artificial Sequence
  Description of Artificial Sequence: Synthetic oligonucleotide
  Sense strand starting at position 3319 of SEQ ID NO: 1280
cuguucgugccaugacaga

SEQ ID NO: 101433 - RNA, 19 nt, Artificial Sequence
  Description of Artificial Sequence: Synthetic oligonucleotide
  Antisense strand to SEQ ID NO: 101432
ucugucauggcacgaacag

SEQ ID NO: 101434 - RNA, 19 nt, Artificial Sequence
  Description of Artificial Sequence: Synthetic oligonucleotide
  Sense strand starting at position 3178 of SEQ ID NO: 1280
ugagaaccuggcugaucuu

SEQ ID NO: 101435 - RNA, 19 nt, Artificial Sequence
  Description of Artificial Sequence: Synthetic oligonucleotide
  Antisense strand to SEQ ID NO: 101434
aagaucagccagguucuca

SEQ ID NO: 101436 - RNA, 19 nt, Artificial Sequence
  Description of Artificial Sequence: Synthetic oligonucleotide
  Sense strand starting at position 3177 of SEQ ID NO: 1280
cugagaaccuggcugaucu

SEQ ID NO: 101437 - RNA, 19 nt, Artificial Sequence
  Description of Artificial Sequence: Synthetic oligonucleotide
  Antisense strand to SEQ ID NO: 101436
agaucagccagguucucag

SEQ ID NO: 101438 - RNA, 19 nt, Artificial Sequence
  Description of Artificial Sequence: Synthetic oligonucleotide
  Sense strand starting at position 3175 of SEQ ID NO: 1280
cccugagaaccuggcugau

SEQ ID NO: 101439 - RNA, 19 nt, Artificial Sequence
  Description of Artificial Sequence: Synthetic oligonucleotide
  Antisense strand to SEQ ID NO: 101438
aucagccagguucucaggg

SEQ ID NO: 101440 - RNA, 19 nt, Artificial Sequence
  Description of Artificial Sequence: Synthetic oligonucleotide
  Sense strand starting at position 3156 of SEQ ID NO: 1280
gcguacuuccggagaaggu

SEQ ID NO: 101441 - RNA, 19 nt, Artificial Sequence
  Description of Artificial Sequence: Synthetic oligonucleotide
  Antisense strand to SEQ ID NO: 101440
accuucuccggaaguacgc

SEQ ID NO: 101442 - RNA, 19 nt, Artificial Sequence
  Description of Artificial Sequence: Synthetic oligonucleotide
  Sense strand starting at position 2810 of SEQ ID NO: 1280
gcuaguuucucauuucuuu

SEQ ID NO: 101443 - RNA, 19 nt, Artificial Sequence
  Description of Artificial Sequence: Synthetic oligonucleotide
  Antisense strand to SEQ ID NO: 101442
aaagaaaugagaaacuagc

SEQ ID NO: 101444 - RNA, 19 nt, Artificial Sequence
  Description of Artificial Sequence: Synthetic oligonucleotide
  Sense strand starting at position 2789 of SEQ ID NO: 1280
cgcguuucugaacaaugca

SEQ ID NO: 101445 - RNA, 19 nt, Artificial Sequence
  Description of Artificial Sequence: Synthetic oligonucleotide
  Antisense strand to SEQ ID NO: 101444
ugcauuguucagaaacgcg

SEQ ID NO: 101446 - RNA, 19 nt, Artificial Sequence
  Description of Artificial Sequence: Synthetic oligonucleotide
  Sense strand starting at position 2782 of SEQ ID NO: 1280
aagucuccgcguuucugaa

SEQ ID NO: 101447 - RNA, 19 nt, Artificial Sequence
  Description of Artificial Sequence: Synthetic oligonucleotide
  Antisense strand to SEQ ID NO: 101446
uucagaaacgcggagacuu

SEQ ID NO: 101448 - RNA, 19 nt, Artificial Sequence
  Description of Artificial Sequence: Synthetic oligonucleotide
  Sense strand starting at position 2781 of SEQ ID NO: 1280
gaagucuccgcguuucuga

SEQ ID NO: 101449 - RNA, 19 nt, Artificial Sequence
  Description of Artificial Sequence: Synthetic oligonucleotide
  Antisense strand to SEQ ID NO: 101448
ucagaaacgcggagacuuc

SEQ ID NO: 101450 - RNA, 19 nt, Artificial Sequence
  Description of Artificial Sequence: Synthetic oligonucleotide
  Sense strand starting at position 2778 of SEQ ID NO: 1280
agagaagucuccgcguuuc

SEQ ID NO: 101451 - RNA, 19 nt, Artificial Sequence
  Description of Artificial Sequence: Synthetic oligonucleotide
  Antisense strand to SEQ ID NO: 101450
gaaacgcggagacuucucu

SEQ ID NO: 101452 - RNA, 19 nt, Artificial Sequence
  Description of Artificial Sequence: Synthetic oligonucleotide
  Sense strand starting at position 2777 of SEQ ID NO: 1280
gagagaagucuccgcguuu

SEQ ID NO: 101453 - RNA, 19 nt, Artificial Sequence
  Description of Artificial Sequence: Synthetic oligonucleotide
  Antisense strand to SEQ ID NO: 101452
aaacgcggagacuucucuc

SEQ ID NO: 101454 - RNA, 19 nt, Artificial Sequence
  Description of Artificial Sequence: Synthetic oligonucleotide
  Sense strand starting at position 2765 of SEQ ID NO: 1280
ucgcuuucuccugagagaa

SEQ ID NO: 101455 - RNA, 19 nt, Artificial Sequence
  Description of Artificial Sequence: Synthetic oligonucleotide
  Antisense strand to SEQ ID NO: 101454
uucucucaggagaaagcga

SEQ ID NO: 101456 - RNA, 19 nt, Artificial Sequence
  Description of Artificial Sequence: Synthetic oligonucleotide
  Sense strand starting at position 1142 of SEQ ID NO: 1280
ucgcaugcaugcucagaca

SEQ ID NO: 101457 - RNA, 19 nt, Artificial Sequence
  Description of Artificial Sequence: Synthetic oligonucleotide
  Antisense strand to SEQ ID NO: 101456
ugucugagcaugcaugcga

SEQ ID NO: 101458 - RNA, 19 nt, Artificial Sequence
  Description of Artificial Sequence: Synthetic oligonucleotide
  Sense strand starting at position 932 of SEQ ID NO: 1280
acuuguugcaugugaggca

SEQ ID NO: 101459 - RNA, 19 nt, Artificial Sequence
  Description of Artificial Sequence: Synthetic oligonucleotide
  Antisense strand to SEQ ID NO: 101458
ugccucacaugcaacaagu

SEQ ID NO: 101460 - RNA, 19 nt, Artificial Sequence
  Description of Artificial Sequence: Synthetic oligonucleotide
  Sense strand starting at position 638 of SEQ ID NO: 1280
gccuaaugacaccgaaaug

SEQ ID NO: 101461 - RNA, 19 nt, Artificial Sequence
  Description of Artificial Sequence: Synthetic oligonucleotide
  Antisense strand to SEQ ID NO: 101460
cauuucggugucauuaggc

SEQ ID NO: 101462 - RNA, 19 nt, Artificial Sequence
  Description of Artificial Sequence: Synthetic oligonucleotide
  Sense strand starting at position 547 of SEQ ID NO: 1280
gcgagaaaguuagcaaauu

SEQ ID NO: 101463 - RNA, 19 nt, Artificial Sequence
  Description of Artificial Sequence: Synthetic oligonucleotide
  Antisense strand to SEQ ID NO: 101462
aauuugcuaacuuucucgc

SEQ ID NO: 101464 - RNA, 19 nt, Artificial Sequence
  Description of Artificial Sequence: Synthetic oligonucleotide
  Sense strand starting at position 480 of SEQ ID NO: 1280
agaguucccuuauugcaag

SEQ ID NO: 101465 - RNA, 19 nt, Artificial Sequence
  Description of Artificial Sequence: Synthetic oligonucleotide
  Antisense strand to SEQ ID NO: 101464
cuugcaauaagggaacucu

SEQ ID NO: 101466 - RNA, 19 nt, Artificial Sequence
  Description of Artificial Sequence: Synthetic oligonucleotide
  Sense strand starting at position 475 of SEQ ID NO: 1280
aggagagaguucccuuauu

SEQ ID NO: 101467 - RNA, 19 nt, Artificial Sequence
  Description of Artificial Sequence: Synthetic oligonucleotide
  Antisense strand to SEQ ID NO: 101466
aauaagggaacucucuccu

SEQ ID NO: 101468 - RNA, 19 nt, Artificial Sequence
  Description of Artificial Sequence: Synthetic oligonucleotide
  Sense strand starting at position 382 of SEQ ID NO: 1280
guucuauugcugcuuaguu

SEQ ID NO: 101469 - RNA, 19 nt, Artificial Sequence
  Description of Artificial Sequence: Synthetic oligonucleotide
  Antisense strand to SEQ ID NO: 101468
aacuaagcagcaauagaac

SEQ ID NO: 101470 - RNA, 19 nt, Artificial Sequence
  Description of Artificial Sequence: Synthetic oligonucleotide
  Sense strand starting at position 381 of SEQ ID NO: 1280
uguucuauugcugcuuagu

SEQ ID NO: 101471 - RNA, 19 nt, Artificial Sequence
  Description of Artificial Sequence: Synthetic oligonucleotide
  Antisense strand to SEQ ID NO: 101470
acuaagcagcaauagaaca

SEQ ID NO: 101472 - RNA, 19 nt, Artificial Sequence
  Description of Artificial Sequence: Synthetic oligonucleotide
  Sense strand starting at position 123 of SEQ ID NO: 1280
agaugugcuuuggcaaauc

SEQ ID NO: 101473 - RNA, 19 nt, Artificial Sequence
  Description of Artificial Sequence: Synthetic oligonucleotide
  Antisense strand to SEQ ID NO: 101472
gauuugccaaagcacaucu

SEQ ID NO: 101474 - RNA, 19 nt, Artificial Sequence
  Description of Artificial Sequence: Synthetic oligonucleotide
  Sense strand starting at position 121 of SEQ ID NO: 1280
acagaugugcuuuggcaaa

SEQ ID NO: 101475 - RNA, 19 nt, Artificial Sequence
  Description of Artificial Sequence: Synthetic oligonucleotide
  Antisense strand to SEQ ID NO: 101474
uuugccaaagcacaucugu

SEQ ID NO: 101476 - RNA, 19 nt, Artificial Sequence
  Description of Artificial Sequence: Synthetic oligonucleotide
  Sense strand starting at position 110 of SEQ ID NO: 1280
gcgacagaucgacagaugu

SEQ ID NO: 101477 - RNA, 19 nt, Artificial Sequence
  Description of Artificial Sequence: Synthetic oligonucleotide
  Antisense strand to SEQ ID NO: 101476
acaucugucgaucugucgc

SEQ ID NO: 101478 - RNA, 19 nt, Artificial Sequence
  Description of Artificial Sequence: Synthetic oligonucleotide
  Sense strand starting at position 58 of SEQ ID NO: 1280
aacugcucccgauguuuaa

SEQ ID NO: 101479 - RNA, 19 nt, Artificial Sequence
  Description of Artificial Sequence: Synthetic oligonucleotide
  Antisense strand to SEQ ID NO: 101478
uuaaacaucgggagcaguu

SEQ ID NO: 101480 - RNA, 19 nt, Artificial Sequence
  Description of Artificial Sequence: Synthetic oligonucleotide
  Sense strand starting at position 56 of SEQ ID NO: 1280
gcaacugcucccgauguuu

SEQ ID NO: 101481 - RNA, 19 nt, Artificial Sequence
  Description of Artificial Sequence: Synthetic oligonucleotide
  Antisense strand to SEQ ID NO: 101480
aaacaucgggagcaguugc

SEQ ID NO: 101482 - RNA, 19 nt, Artificial Sequence
  Description of Artificial Sequence: Synthetic oligonucleotide
  Sense strand starting at position 3925 of SEQ ID NO: 1282
uggguuaguccauaaaccu

SEQ ID NO: 101483 - RNA, 19 nt, Artificial Sequence
  Description of Artificial Sequence: Synthetic oligonucleotide
  Antisense strand to SEQ ID NO: 101482
agguuuauggacuaaccca

SEQ ID NO: 101484 - RNA, 19 nt, Artificial Sequence
  Description of Artificial Sequence: Synthetic oligonucleotide
  Sense strand starting at position 3895 of SEQ ID NO: 1282
guugaugauccaggacugu

SEQ ID NO: 101485 - RNA, 19 nt, Artificial Sequence
  Description of Artificial Sequence: Synthetic oligonucleotide
  Antisense strand to SEQ ID NO: 101484
acaguccuggaucaucaac

SEQ ID NO: 101486 - RNA, 19 nt, Artificial Sequence
  Description of Artificial Sequence: Synthetic oligonucleotide
  Sense strand starting at position 3891 of SEQ ID NO: 1282
cauuguugaugauccagga

SEQ ID NO: 101487 - RNA, 19 nt, Artificial Sequence
  Description of Artificial Sequence: Synthetic oligonucleotide
  Antisense strand to SEQ ID NO: 101486
uccuggaucaucaacaaug

SEQ ID NO: 101488 - RNA, 19 nt, Artificial Sequence
  Description of Artificial Sequence: Synthetic oligonucleotide
  Sense strand starting at position 3866 of SEQ ID NO: 1282
ccagaucaccauuguauau

SEQ ID NO: 101489 - RNA, 19 nt, Artificial Sequence
  Description of Artificial Sequence: Synthetic oligonucleotide
  Antisense strand to SEQ ID NO: 101488
auauacaauggugaucugg

SEQ ID NO: 101490 - RNA, 19 nt, Artificial Sequence
  Description of Artificial Sequence: Synthetic oligonucleotide
  Sense strand starting at position 3824 of SEQ ID NO: 1282
acuacaacguuguuagaca

SEQ ID NO: 101491 - RNA, 19 nt, Artificial Sequence
  Description of Artificial Sequence: Synthetic oligonucleotide
  Antisense strand to SEQ ID NO: 101490
ugucuaacaacguuguagu

SEQ ID NO: 101492 - RNA, 19 nt, Artificial Sequence
  Description of Artificial Sequence: Synthetic oligonucleotide
  Sense strand starting at position 3822 of SEQ ID NO: 1282
caacuacaacguuguuaga

SEQ ID NO: 101493 - RNA, 19 nt, Artificial Sequence
  Description of Artificial Sequence: Synthetic oligonucleotide
  Antisense strand to SEQ ID NO: 101492
ucuaacaacguuguaguug

SEQ ID NO: 101494 - RNA, 19 nt, Artificial Sequence
  Description of Artificial Sequence: Synthetic oligonucleotide
  Sense strand starting at position 3658 of SEQ ID NO: 1282
acuaaaugguguuugcaua

SEQ ID NO: 101495 - RNA, 19 nt, Artificial Sequence
  Description of Artificial Sequence: Synthetic oligonucleotide
  Antisense strand to SEQ ID NO: 101494
uaugcaaacaccauuuagu

SEQ ID NO: 101496 - RNA, 19 nt, Artificial Sequence
  Description of Artificial Sequence: Synthetic oligonucleotide
  Sense strand starting at position 3621 of SEQ ID NO: 1282
gcuauaguaggcuauacau

SEQ ID NO: 101497 - RNA, 19 nt, Artificial Sequence
  Description of Artificial Sequence: Synthetic oligonucleotide
  Antisense strand to SEQ ID NO: 101496
auguauagccuacuauagc

SEQ ID NO: 101498 - RNA, 19 nt, Artificial Sequence
  Description of Artificial Sequence: Synthetic oligonucleotide
  Sense strand starting at position 3590 of SEQ ID NO: 1282
gcuacaauuguauaguaga

SEQ ID NO: 101499 - RNA, 19 nt, Artificial Sequence
  Description of Artificial Sequence: Synthetic oligonucleotide
  Antisense strand to SEQ ID NO: 101498
ucuacuauacaauuguagc

SEQ ID NO: 101500 - RNA, 19 nt, Artificial Sequence
  Description of Artificial Sequence: Synthetic oligonucleotide
  Sense strand starting at position 3564 of SEQ ID NO: 1282
agauguaugggcuacuaua

SEQ ID NO: 101501 - RNA, 19 nt, Artificial Sequence
  Description of Artificial Sequence: Synthetic oligonucleotide
  Antisense strand to SEQ ID NO: 101500
uauaguagcccauacaucu

SEQ ID NO: 101502 - RNA, 19 nt, Artificial Sequence
  Description of Artificial Sequence: Synthetic oligonucleotide
  Sense strand starting at position 3562 of SEQ ID NO: 1282
guagauguaugggcuacua

SEQ ID NO: 101503 - RNA, 19 nt, Artificial Sequence
  Description of Artificial Sequence: Synthetic oligonucleotide
  Antisense strand to SEQ ID NO: 101502
uaguagcccauacaucuac

SEQ ID NO: 101504 - RNA, 19 nt, Artificial Sequence
  Description of Artificial Sequence: Synthetic oligonucleotide
  Sense strand starting at position 3540 of SEQ ID NO: 1282
cuucuaguguacuuacaca

SEQ ID NO: 101505 - RNA, 19 nt, Artificial Sequence
  Description of Artificial Sequence: Synthetic oligonucleotide
  Antisense strand to SEQ ID NO: 101504
uguguaaguacacuagaag

SEQ ID NO: 101506 - RNA, 19 nt, Artificial Sequence
  Description of Artificial Sequence: Synthetic oligonucleotide
  Sense strand starting at position 3500 of SEQ ID NO: 1282
agaaauaccuuguuagcca

SEQ ID NO: 101507 - RNA, 19 nt, Artificial Sequence
  Description of Artificial Sequence: Synthetic oligonucleotide
  Antisense strand to SEQ ID NO: 101506
uggcuaacaagguauuucu

SEQ ID NO: 101508 - RNA, 19 nt, Artificial Sequence
  Description of Artificial Sequence: Synthetic oligonucleotide
  Sense strand starting at position 3498 of SEQ ID NO: 1282
ugagaaauaccuuguuagc

SEQ ID NO: 101509 - RNA, 19 nt, Artificial Sequence
  Description of Artificial Sequence: Synthetic oligonucleotide
  Antisense strand to SEQ ID NO: 101508
gcuaacaagguauuucuca

SEQ ID NO: 101510 - RNA, 19 nt, Artificial Sequence
  Description of Artificial Sequence: Synthetic oligonucleotide
  Sense strand starting at position 3334 of SEQ ID NO: 1282
gguuuaucgcuucucgauc

SEQ ID NO: 101511 - RNA, 19 nt, Artificial Sequence
  Description of Artificial Sequence: Synthetic oligonucleotide
  Antisense strand to SEQ ID NO: 101510
gaucgagaagcgauaaacc

SEQ ID NO: 101512 - RNA, 19 nt, Artificial Sequence
  Description of Artificial Sequence: Synthetic oligonucleotide
  Sense strand starting at position 3332 of SEQ ID NO: 1282
cggguuuaucgcuucucga

SEQ ID NO: 101513 - RNA, 19 nt, Artificial Sequence
  Description of Artificial Sequence: Synthetic oligonucleotide
  Antisense strand to SEQ ID NO: 101512
ucgagaagcgauaaacccg

SEQ ID NO: 101514 - RNA, 19 nt, Artificial Sequence
  Description of Artificial Sequence: Synthetic oligonucleotide
  Sense strand starting at position 3190 of SEQ ID NO: 1282
uucucucuugaauauggua

SEQ ID NO: 101515 - RNA, 19 nt, Artificial Sequence
  Description of Artificial Sequence: Synthetic oligonucleotide
  Antisense strand to SEQ ID NO: 101514
uaccauauucaagagagaa

SEQ ID NO: 101516 - RNA, 19 nt, Artificial Sequence
  Description of Artificial Sequence: Synthetic oligonucleotide
  Sense strand starting at position 3187 of SEQ ID NO: 1282
gcauucucucuugaauaug

SEQ ID NO: 101517 - RNA, 19 nt, Artificial Sequence
  Description of Artificial Sequence: Synthetic oligonucleotide
  Antisense strand to SEQ ID NO: 101516
cauauucaagagagaaugc

SEQ ID NO: 101518 - RNA, 19 nt, Artificial Sequence
  Description of Artificial Sequence: Synthetic oligonucleotide
  Sense strand starting at position 3174 of SEQ ID NO: 1282
gggagagaaccuugcauuc

SEQ ID NO: 101519 - RNA, 19 nt, Artificial Sequence
  Description of Artificial Sequence: Synthetic oligonucleotide
  Antisense strand to SEQ ID NO: 101518
gaaugcaagguucucuccc

SEQ ID NO: 101520 - RNA, 19 nt, Artificial Sequence
  Description of Artificial Sequence: Synthetic oligonucleotide
  Sense strand starting at position 3162 of SEQ ID NO: 1282
uugagaguucuugggagag

SEQ ID NO: 101521 - RNA, 19 nt, Artificial Sequence
  Description of Artificial Sequence: Synthetic oligonucleotide
  Antisense strand to SEQ ID NO: 101520
cucucccaagaacucucaa

SEQ ID NO: 101522 - RNA, 19 nt, Artificial Sequence
  Description of Artificial Sequence: Synthetic oligonucleotide
  Sense strand starting at position 3160 of SEQ ID NO: 1282
uguugagaguucuugggag

SEQ ID NO: 101523 - RNA, 19 nt, Artificial Sequence
  Description of Artificial Sequence: Synthetic oligonucleotide
  Antisense strand to SEQ ID NO: 101522
cucccaagaacucucaaca

SEQ ID NO: 101524 - RNA, 19 nt, Artificial Sequence
  Description of Artificial Sequence: Synthetic oligonucleotide
  Sense strand starting at position 3152 of SEQ ID NO: 1282
gcggaacuuguugagaguu

SEQ ID NO: 101525 - RNA, 19 nt, Artificial Sequence
  Description of Artificial Sequence: Synthetic oligonucleotide
  Antisense strand to SEQ ID NO: 101524
aacucucaacaaguuccgc

SEQ ID NO: 101526 - RNA, 19 nt, Artificial Sequence
  Description of Artificial Sequence: Synthetic oligonucleotide
  Sense strand starting at position 3020 of SEQ ID NO: 1282
ggacuugucuuacuuuaaa

SEQ ID NO: 101527 - RNA, 19 nt, Artificial Sequence
  Description of Artificial Sequence: Synthetic oligonucleotide
  Antisense strand to SEQ ID NO: 101526
uuuaaaguaagacaagucc

SEQ ID NO: 101528 - RNA, 19 nt, Artificial Sequence
  Description of Artificial Sequence: Synthetic oligonucleotide
  Sense strand starting at position 2985 of SEQ ID NO: 1282
guugaacaagacuguagaa

SEQ ID NO: 101529 - RNA, 19 nt, Artificial Sequence
  Description of Artificial Sequence: Synthetic oligonucleotide
  Antisense strand to SEQ ID NO: 101528
uucuacagucuuguucaac

SEQ ID NO: 101530 - RNA, 19 nt, Artificial Sequence
  Description of Artificial Sequence: Synthetic oligonucleotide
  Sense strand starting at position 2913 of SEQ ID NO: 1282
uauugucgucucgucaaua

SEQ ID NO: 101531 - RNA, 19 nt, Artificial Sequence
  Description of Artificial Sequence: Synthetic oligonucleotide
  Antisense strand to SEQ ID NO: 101530
uauugacgagacgacaaua

SEQ ID NO: 101532 - RNA, 19 nt, Artificial Sequence
  Description of Artificial Sequence: Synthetic oligonucleotide
  Sense strand starting at position 2911 of SEQ ID NO: 1282
uuuauugucgucucgucaa

SEQ ID NO: 101533 - RNA, 19 nt, Artificial Sequence
  Description of Artificial Sequence: Synthetic oligonucleotide
  Antisense strand to SEQ ID NO: 101532
uugacgagacgacaauaaa

SEQ ID NO: 101534 - RNA, 19 nt, Artificial Sequence
  Description of Artificial Sequence: Synthetic oligonucleotide
  Sense strand starting at position 2892 of SEQ ID NO: 1282
ugcucuguaguagagguau

SEQ ID NO: 101535 - RNA, 19 nt, Artificial Sequence
  Description of Artificial Sequence: Synthetic oligonucleotide
  Antisense strand to SEQ ID NO: 101534
auaccucuacuacagagca

SEQ ID NO: 101536 - RNA, 19 nt, Artificial Sequence
  Description of Artificial Sequence: Synthetic oligonucleotide
  Sense strand starting at position 2761 of SEQ ID NO: 1282
cugguuuagaaccaucguu

SEQ ID NO: 101537 - RNA, 19 nt, Artificial Sequence
  Description of Artificial Sequence: Synthetic oligonucleotide
  Antisense strand to SEQ ID NO: 101536
aacgaugguucuaaaccag

SEQ ID NO: 101538 - RNA, 19 nt, Artificial Sequence
  Description of Artificial Sequence: Synthetic oligonucleotide
  Sense strand starting at position 2233 of SEQ ID NO: 1282
uuguaaguuccggcgcuaa

SEQ ID NO: 101539 - RNA, 19 nt, Artificial Sequence
  Description of Artificial Sequence: Synthetic oligonucleotide
  Antisense strand to SEQ ID NO: 101538
uuagcgccggaacuuacaa

SEQ ID NO: 101540 - RNA, 19 nt, Artificial Sequence
  Description of Artificial Sequence: Synthetic oligonucleotide
  Sense strand starting at position 1283 of SEQ ID NO: 1282
acaguaauacccuauucga

SEQ ID NO: 101541 - RNA, 19 nt, Artificial Sequence
  Description of Artificial Sequence: Synthetic oligonucleotide
  Antisense strand to SEQ ID NO: 101540
ucgaauaggguauuacugu

SEQ ID NO: 101542 - RNA, 19 nt, Artificial Sequence
  Description of Artificial Sequence: Synthetic oligonucleotide
  Sense strand starting at position 1126 of SEQ ID NO: 1282
gggauagugacucgcucaa

SEQ ID NO: 101543 - RNA, 19 nt, Artificial Sequence
  Description of Artificial Sequence: Synthetic oligonucleotide
  Antisense strand to SEQ ID NO: 101542
uugagcgagucacuauccc

SEQ ID NO: 101544 - RNA, 19 nt, Artificial Sequence
  Description of Artificial Sequence: Synthetic oligonucleotide
  Sense strand starting at position 1076 of SEQ ID NO: 1282
aauucuagcguuggaggaa

SEQ ID NO: 101545 - RNA, 19 nt, Artificial Sequence
  Description of Artificial Sequence: Synthetic oligonucleotide
  Antisense strand to SEQ ID NO: 101544
uuccuccaacgcuagaauu

SEQ ID NO: 101546 - RNA, 19 nt, Artificial Sequence
  Description of Artificial Sequence: Synthetic oligonucleotide
  Sense strand starting at position 1075 of SEQ ID NO: 1282
gaauucuagcguuggagga

SEQ ID NO: 101547 - RNA, 19 nt, Artificial Sequence
  Description of Artificial Sequence: Synthetic oligonucleotide
  Antisense strand to SEQ ID NO: 101546
uccuccaacgcuagaauuc

SEQ ID NO: 101548 - RNA, 19 nt, Artificial Sequence
  Description of Artificial Sequence: Synthetic oligonucleotide
  Sense strand starting at position 1063 of SEQ ID NO: 1282
ugcagaaaugcagaauucu

SEQ ID NO: 101549 - RNA, 19 nt, Artificial Sequence
  Description of Artificial Sequence: Synthetic oligonucleotide
  Antisense strand to SEQ ID NO: 101548
agaauucugcauuucugca

SEQ ID NO: 101550 - RNA, 19 nt, Artificial Sequence
  Description of Artificial Sequence: Synthetic oligonucleotide
  Sense strand starting at position 1052 of SEQ ID NO: 1282
auaaguucuucugcagaaa

SEQ ID NO: 101551 - RNA, 19 nt, Artificial Sequence
  Description of Artificial Sequence: Synthetic oligonucleotide
  Antisense strand to SEQ ID NO: 101550
uuucugcagaagaacuuau

SEQ ID NO: 101552 - RNA, 19 nt, Artificial Sequence
  Description of Artificial Sequence: Synthetic oligonucleotide
  Sense strand starting at position 891 of SEQ ID NO: 1282
uuuaaugagccuuaaguca

SEQ ID NO: 101553 - RNA, 19 nt, Artificial Sequence
  Description of Artificial Sequence: Synthetic oligonucleotide
  Antisense strand to SEQ ID NO: 101552
ugacuuaaggcucauuaaa

SEQ ID NO: 101554 - RNA, 19 nt, Artificial Sequence
  Description of Artificial Sequence: Synthetic oligonucleotide
  Sense strand starting at position 623 of SEQ ID NO: 1282
ucccuuaaucuccaagugu

SEQ ID NO: 101555 - RNA, 19 nt, Artificial Sequence
  Description of Artificial Sequence: Synthetic oligonucleotide
  Antisense strand to SEQ ID NO: 101554
acacuuggagauuaaggga

SEQ ID NO: 101556 - RNA, 19 nt, Artificial Sequence
  Description of Artificial Sequence: Synthetic oligonucleotide
  Sense strand starting at position 594 of SEQ ID NO: 1282
auauuacuugagggaguuu

SEQ ID NO: 101557 - RNA, 19 nt, Artificial Sequence
  Description of Artificial Sequence: Synthetic oligonucleotide
  Antisense strand to SEQ ID NO: 101556
aaacucccucaaguaauau

SEQ ID NO: 101558 - RNA, 19 nt, Artificial Sequence
  Description of Artificial Sequence: Synthetic oligonucleotide
  Sense strand starting at position 204 of SEQ ID NO: 1282
acaccaugucuuuaugaug

SEQ ID NO: 101559 - RNA, 19 nt, Artificial Sequence
  Description of Artificial Sequence: Synthetic oligonucleotide
  Antisense strand to SEQ ID NO: 101558
caucauaaagacauggugu

SEQ ID NO: 101560 - RNA, 19 nt, Artificial Sequence
  Description of Artificial Sequence: Synthetic oligonucleotide
  Sense strand starting at position 63 of SEQ ID NO: 1282
ggguuagcugacugaaaua

SEQ ID NO: 101561 - RNA, 19 nt, Artificial Sequence
  Description of Artificial Sequence: Synthetic oligonucleotide
  Antisense strand to SEQ ID NO: 101560
uauuucagucagcuaaccc

SEQ ID NO: 101562 - RNA, 19 nt, Artificial Sequence
  Description of Artificial Sequence: Synthetic oligonucleotide
  Sense strand starting at position 3948 of SEQ ID NO: 1281
auccuaaacuugucaggaa

SEQ ID NO: 101563 - RNA, 19 nt, Artificial Sequence
  Description of Artificial Sequence: Synthetic oligonucleotide
  Antisense strand to SEQ ID NO: 101562
uuccugacaaguuuaggau

SEQ ID NO: 101564 - RNA, 19 nt, Artificial Sequence
  Description of Artificial Sequence: Synthetic oligonucleotide
  Sense strand starting at position 3847 of SEQ ID NO: 1281
gcuuaaguacacugaaucu

SEQ ID NO: 101565 - RNA, 19 nt, Artificial Sequence
  Description of Artificial Sequence: Synthetic oligonucleotide
  Antisense strand to SEQ ID NO: 101564
agauucaguguacuuaagc

SEQ ID NO: 101566 - RNA, 19 nt, Artificial Sequence
  Description of Artificial Sequence: Synthetic oligonucleotide
  Sense strand starting at position 3836 of SEQ ID NO: 1281
agaaauaacuugcuuaagu

SEQ ID NO: 101567 - RNA, 19 nt, Artificial Sequence
  Description of Artificial Sequence: Synthetic oligonucleotide
  Antisense strand to SEQ ID NO: 101566
acuuaagcaaguuauuucu

SEQ ID NO: 101568 - RNA, 19 nt, Artificial Sequence
  Description of Artificial Sequence: Synthetic oligonucleotide
  Sense strand starting at position 3731 of SEQ ID NO: 1281
gcuuuauaccauggagaug

SEQ ID NO: 101569 - RNA, 19 nt, Artificial Sequence
  Description of Artificial Sequence: Synthetic oligonucleotide
  Antisense strand to SEQ ID NO: 101568
caucuccaugguauaaagc

SEQ ID NO: 101570 - RNA, 19 nt, Artificial Sequence
  Description of Artificial Sequence: Synthetic oligonucleotide
  Sense strand starting at position 3730 of SEQ ID NO: 1281
ggcuuuauaccauggagau

SEQ ID NO: 101571 - RNA, 19 nt, Artificial Sequence
  Description of Artificial Sequence: Synthetic oligonucleotide
  Antisense strand to SEQ ID NO: 101570
aucuccaugguauaaagcc

SEQ ID NO: 101572 - RNA, 19 nt, Artificial Sequence
  Description of Artificial Sequence: Synthetic oligonucleotide
  Sense strand starting at position 3561 of SEQ ID NO: 1281
gucaauccucuggacuuga

SEQ ID NO: 101573 - RNA, 19 nt, Artificial Sequence
  Description of Artificial Sequence: Synthetic oligonucleotide
  Antisense strand to SEQ ID NO: 101572
ucaaguccagaggauugac

SEQ ID NO: 101574 - RNA, 19 nt, Artificial Sequence
  Description of Artificial Sequence: Synthetic oligonucleotide
  Sense strand starting at position 3559 of SEQ ID NO: 1281
augucaauccucuggacuu

SEQ ID NO: 101575 - RNA, 19 nt, Artificial Sequence
  Description of Artificial Sequence: Synthetic oligonucleotide
  Antisense strand to SEQ ID NO: 101574
aaguccagaggauugacau

SEQ ID NO: 101576 - RNA, 19 nt, Artificial Sequence
  Description of Artificial Sequence: Synthetic oligonucleotide
  Sense strand starting at position 3542 of SEQ ID NO: 1281
aguuacccuguugaauuau

SEQ ID NO: 101577 - RNA, 19 nt, Artificial Sequence
  Description of Artificial Sequence: Synthetic oligonucleotide
  Antisense strand to SEQ ID NO: 101576
auaauucaacaggguaacu

SEQ ID NO: 101578 - RNA, 19 nt, Artificial Sequence
  Description of Artificial Sequence: Synthetic oligonucleotide
  Sense strand starting at position 3525 of SEQ ID NO: 1281
gguauauaguuucuaauag

SEQ ID NO: 101579 - RNA, 19 nt, Artificial Sequence
  Description of Artificial Sequence: Synthetic oligonucleotide
  Antisense strand to SEQ ID NO: 101578
cuauuagaaacuauauacc

SEQ ID NO: 101580 - RNA, 19 nt, Artificial Sequence
  Description of Artificial Sequence: Synthetic oligonucleotide
  Sense strand starting at position 3522 of SEQ ID NO: 1281
agagguauauaguuucuaa

SEQ ID NO: 101581 - RNA, 19 nt, Artificial Sequence
  Description of Artificial Sequence: Synthetic oligonucleotide
  Antisense strand to SEQ ID NO: 101580
uuagaaacuauauaccucu

SEQ ID NO: 101582 - RNA, 19 nt, Artificial Sequence
  Description of Artificial Sequence: Synthetic oligonucleotide
  Sense strand starting at position 3517 of SEQ ID NO: 1281
uuagcagagguauauaguu

SEQ ID NO: 101583 - RNA, 19 nt, Artificial Sequence
  Description of Artificial Sequence: Synthetic oligonucleotide
  Antisense strand to SEQ ID NO: 101582
aacuauauaccucugcuaa

SEQ ID NO: 101584 - RNA, 19 nt, Artificial Sequence
  Description of Artificial Sequence: Synthetic oligonucleotide
  Sense strand starting at position 3273 of SEQ ID NO: 1281
gacauuaccugguaauuug

SEQ ID NO: 101585 - RNA, 19 nt, Artificial Sequence
  Description of Artificial Sequence: Synthetic oligonucleotide
  Antisense strand to SEQ ID NO: 101584
caaauuaccagguaauguc

SEQ ID NO: 101586 - RNA, 19 nt, Artificial Sequence
  Description of Artificial Sequence: Synthetic oligonucleotide
  Sense strand starting at position 3271 of SEQ ID NO: 1281
aggacauuaccugguaauu

SEQ ID NO: 101587 - RNA, 19 nt, Artificial Sequence
  Description of Artificial Sequence: Synthetic oligonucleotide
  Antisense strand to SEQ ID NO: 101586
aauuaccagguaauguccu

SEQ ID NO: 101588 - RNA, 19 nt, Artificial Sequence
  Description of Artificial Sequence: Synthetic oligonucleotide
  Sense strand starting at position 3260 of SEQ ID NO: 1281
ugcuaagugaaaggacauu

SEQ ID NO: 101589 - RNA, 19 nt, Artificial Sequence
  Description of Artificial Sequence: Synthetic oligonucleotide
  Antisense strand to SEQ ID NO: 101588
aauguccuuucacuuagca

SEQ ID NO: 101590 - RNA, 19 nt, Artificial Sequence
  Description of Artificial Sequence: Synthetic oligonucleotide
  Sense strand starting at position 3214 of SEQ ID NO: 1281
auaaucugugcaugaauaa

SEQ ID NO: 101591 - RNA, 19 nt, Artificial Sequence
  Description of Artificial Sequence: Synthetic oligonucleotide
  Antisense strand to SEQ ID NO: 101590
uuauucaugcacagauuau

SEQ ID NO: 101592 - RNA, 19 nt, Artificial Sequence
  Description of Artificial Sequence: Synthetic oligonucleotide
  Sense strand starting at position 3211 of SEQ ID NO: 1281
auaauaaucugugcaugaa

SEQ ID NO: 101593 - RNA, 19 nt, Artificial Sequence
  Description of Artificial Sequence: Synthetic oligonucleotide
  Antisense strand to SEQ ID NO: 101592
uucaugcacagauuauuau

SEQ ID NO: 101594 - RNA, 19 nt, Artificial Sequence
  Description of Artificial Sequence: Synthetic oligonucleotide
  Sense strand starting at position 3194 of SEQ ID NO: 1281
ugaaacuguuauguccaau

SEQ ID NO: 101595 - RNA, 19 nt, Artificial Sequence
  Description of Artificial Sequence: Synthetic oligonucleotide
  Antisense strand to SEQ ID NO: 101594
auuggacauaacaguuuca

SEQ ID NO: 101596 - RNA, 19 nt, Artificial Sequence
  Description of Artificial Sequence: Synthetic oligonucleotide
  Sense strand starting at position 3046 of SEQ ID NO: 1281
uugcauaaauguguacaua

SEQ ID NO: 101597 - RNA, 19 nt, Artificial Sequence
  Description of Artificial Sequence: Synthetic oligonucleotide
  Antisense strand to SEQ ID NO: 101596
uauguacacauuuaugcaa

SEQ ID NO: 101598 - RNA, 19 nt, Artificial Sequence
  Description of Artificial Sequence: Synthetic oligonucleotide
  Sense strand starting at position 2991 of SEQ ID NO: 1281
ccauuuaaauacgagaauu

SEQ ID NO: 101599 - RNA, 19 nt, Artificial Sequence
  Description of Artificial Sequence: Synthetic oligonucleotide
  Antisense strand to SEQ ID NO: 101598
aauucucguauuuaaaugg

SEQ ID NO: 101600 - RNA, 19 nt, Artificial Sequence
  Description of Artificial Sequence: Synthetic oligonucleotide
  Sense strand starting at position 2889 of SEQ ID NO: 1281
acuaaaccaguuugaaagu

SEQ ID NO: 101601 - RNA, 19 nt, Artificial Sequence
  Description of Artificial Sequence: Synthetic oligonucleotide
  Antisense strand to SEQ ID NO: 101600
acuuucaaacugguuuagu

SEQ ID NO: 101602 - RNA, 19 nt, Artificial Sequence
  Description of Artificial Sequence: Synthetic oligonucleotide
  Sense strand starting at position 2851 of SEQ ID NO: 1281
acacaaaggugacauuaaa

SEQ ID NO: 101603 - RNA, 19 nt, Artificial Sequence
  Description of Artificial Sequence: Synthetic oligonucleotide
  Antisense strand to SEQ ID NO: 101602
uuuaaugucaccuuugugu

SEQ ID NO: 101604 - RNA, 19 nt, Artificial Sequence
  Description of Artificial Sequence: Synthetic oligonucleotide
  Sense strand starting at position 2701 of SEQ ID NO: 1281
cugaaaugccuguaacuug

SEQ ID NO: 101605 - RNA, 19 nt, Artificial Sequence
  Description of Artificial Sequence: Synthetic oligonucleotide
  Antisense strand to SEQ ID NO: 101604
caaguuacaggcauuucag

SEQ ID NO: 101606 - RNA, 19 nt, Artificial Sequence
  Description of Artificial Sequence: Synthetic oligonucleotide
  Sense strand starting at position 2686 of SEQ ID NO: 1281
acuuauuugcaaugccuga

SEQ ID NO: 101607 - RNA, 19 nt, Artificial Sequence
  Description of Artificial Sequence: Synthetic oligonucleotide
  Antisense strand to SEQ ID NO: 101606
ucaggcauugcaaauaagu

SEQ ID NO: 101608 - RNA, 19 nt, Artificial Sequence
  Description of Artificial Sequence: Synthetic oligonucleotide
  Sense strand starting at position 2565 of SEQ ID NO: 1281
ucugucaugccgguagcaa

SEQ ID NO: 101609 - RNA, 19 nt, Artificial Sequence
  Description of Artificial Sequence: Synthetic oligonucleotide
  Antisense strand to SEQ ID NO: 101608
uugcuaccggcaugacaga

SEQ ID NO: 101610 - RNA, 19 nt, Artificial Sequence
  Description of Artificial Sequence: Synthetic oligonucleotide
  Sense strand starting at position 2405 of SEQ ID NO: 1281
cgguuaugccuugacaaau

SEQ ID NO: 101611 - RNA, 19 nt, Artificial Sequence
  Description of Artificial Sequence: Synthetic oligonucleotide
  Antisense strand to SEQ ID NO: 101610
auuugucaaggcauaaccg

SEQ ID NO: 101612 - RNA, 19 nt, Artificial Sequence
  Description of Artificial Sequence: Synthetic oligonucleotide
  Sense strand starting at position 2387 of SEQ ID NO: 1281
agaacugugcuuugaaagc

SEQ ID NO: 101613 - RNA, 19 nt, Artificial Sequence
  Description of Artificial Sequence: Synthetic oligonucleotide
  Antisense strand to SEQ ID NO: 101612
gcuuucaaagcacaguucu

SEQ ID NO: 101614 - RNA, 19 nt, Artificial Sequence
  Description of Artificial Sequence: Synthetic oligonucleotide
  Sense strand starting at position 2381 of SEQ ID NO: 1281
gcggcaagaacugugcuuu

SEQ ID NO: 101615 - RNA, 19 nt, Artificial Sequence
  Description of Artificial Sequence: Synthetic oligonucleotide
  Antisense strand to SEQ ID NO: 101614
aaagcacaguucuugccgc

SEQ ID NO: 101616 - RNA, 19 nt, Artificial Sequence
  Description of Artificial Sequence: Synthetic oligonucleotide
  Sense strand starting at position 1707 of SEQ ID NO: 1281
uggccuguuccggacaaca

SEQ ID NO: 101617 - RNA, 19 nt, Artificial Sequence
  Description of Artificial Sequence: Synthetic oligonucleotide
  Antisense strand to SEQ ID NO: 101616
uguuguccggaacaggcca

SEQ ID NO: 101618 - RNA, 19 nt, Artificial Sequence
  Description of Artificial Sequence: Synthetic oligonucleotide
  Sense strand starting at position 1148 of SEQ ID NO: 1281
aagaauagguagccuugau

SEQ ID NO: 101619 - RNA, 19 nt, Artificial Sequence
  Description of Artificial Sequence: Synthetic oligonucleotide
  Antisense strand to SEQ ID NO: 101618
aucaaggcuaccuauucuu

SEQ ID NO: 101620 - RNA, 19 nt, Artificial Sequence
  Description of Artificial Sequence: Synthetic oligonucleotide
  Sense strand starting at position 1066 of SEQ ID NO: 1281
ggaacuuguuuacuauaaa

SEQ ID NO: 101621 - RNA, 19 nt, Artificial Sequence
  Description of Artificial Sequence: Synthetic oligonucleotide
  Antisense strand to SEQ ID NO: 101620
uuuauaguaaacaaguucc

SEQ ID NO: 101622 - RNA, 19 nt, Artificial Sequence
  Description of Artificial Sequence: Synthetic oligonucleotide
  Sense strand starting at position 1063 of SEQ ID NO: 1281
uuaggaacuuguuuacuau

SEQ ID NO: 101623 - RNA, 19 nt, Artificial Sequence
  Description of Artificial Sequence: Synthetic oligonucleotide
  Antisense strand to SEQ ID NO: 101622
auaguaaacaaguuccuaa

SEQ ID NO: 101624 - RNA, 19 nt, Artificial Sequence
  Description of Artificial Sequence: Synthetic oligonucleotide
  Sense strand starting at position 1010 of SEQ ID NO: 1281
aguuguaugcccgccaacu

SEQ ID NO: 101625 - RNA, 19 nt, Artificial Sequence
  Description of Artificial Sequence: Synthetic oligonucleotide
  Antisense strand to SEQ ID NO: 101624
aguuggcgggcauacaacu

SEQ ID NO: 101626 - RNA, 19 nt, Artificial Sequence
  Description of Artificial Sequence: Synthetic oligonucleotide
  Sense strand starting at position 983 of SEQ ID NO: 1281
cuuaguuccgauuaauaaa

SEQ ID NO: 101627 - RNA, 19 nt, Artificial Sequence
  Description of Artificial Sequence: Synthetic oligonucleotide
  Antisense strand to SEQ ID NO: 101626
uuuauuaaucggaacuaag

SEQ ID NO: 101628 - RNA, 19 nt, Artificial Sequence
  Description of Artificial Sequence: Synthetic oligonucleotide
  Sense strand starting at position 873 of SEQ ID NO: 1281
gaaauucuuccacggguaa

SEQ ID NO: 101629 - RNA, 19 nt, Artificial Sequence
  Description of Artificial Sequence: Synthetic oligonucleotide
  Antisense strand to SEQ ID NO: 101628
uuacccguggaagaauuuc

SEQ ID NO: 101630 - RNA, 19 nt, Artificial Sequence
  Description of Artificial Sequence: Synthetic oligonucleotide
  Sense strand starting at position 686 of SEQ ID NO: 1281
uccugucugcuacagcaaa

SEQ ID NO: 101631 - RNA, 19 nt, Artificial Sequence
  Description of Artificial Sequence: Synthetic oligonucleotide
  Antisense strand to SEQ ID NO: 101630
uuugcuguagcagacagga

SEQ ID NO: 101632 - RNA, 19 nt, Artificial Sequence
  Description of Artificial Sequence: Synthetic oligonucleotide
  Sense strand starting at position 542 of SEQ ID NO: 1281
aguacuacguucuccaauu

SEQ ID NO: 101633 - RNA, 19 nt, Artificial Sequence
  Description of Artificial Sequence: Synthetic oligonucleotide
  Antisense strand to SEQ ID NO: 101632
aauuggagaacguaguacu

SEQ ID NO: 101634 - RNA, 19 nt, Artificial Sequence
  Description of Artificial Sequence: Synthetic oligonucleotide
  Sense strand starting at position 325 of SEQ ID NO: 1281
ccacauuaccuauguagca

SEQ ID NO: 101635 - RNA, 19 nt, Artificial Sequence
  Description of Artificial Sequence: Synthetic oligonucleotide
  Antisense strand to SEQ ID NO: 101634
ugcuacauagguaaugugg

SEQ ID NO: 101636 - RNA, 19 nt, Artificial Sequence
  Description of Artificial Sequence: Synthetic oligonucleotide
  Sense strand starting at position 262 of SEQ ID NO: 1281
cuuaguauaugacuacaca

SEQ ID NO: 101637 - RNA, 19 nt, Artificial Sequence
  Description of Artificial Sequence: Synthetic oligonucleotide
  Antisense strand to SEQ ID NO: 101636
uguguagucauauacuaag

SEQ ID NO: 101638 - RNA, 19 nt, Artificial Sequence
  Description of Artificial Sequence: Synthetic oligonucleotide
  Sense strand starting at position 249 of SEQ ID NO: 1281
aguaauaucuugccuuagu

SEQ ID NO: 101639 - RNA, 19 nt, Artificial Sequence
  Description of Artificial Sequence: Synthetic oligonucleotide
  Antisense strand to SEQ ID NO: 101638
acuaaggcaagauauuacu

SEQ ID NO: 101640 - RNA, 19 nt, Artificial Sequence
  Description of Artificial Sequence: Synthetic oligonucleotide
  Sense strand starting at position 153 of SEQ ID NO: 1281
uaguucccucggcaauaaa

SEQ ID NO: 101641 - RNA, 19 nt, Artificial Sequence
  Description of Artificial Sequence: Synthetic oligonucleotide
  Antisense strand to SEQ ID NO: 101640
uuuauugccgagggaacua

SEQ ID NO: 101642 - RNA, 19 nt, Artificial Sequence
  Description of Artificial Sequence: Synthetic oligonucleotide
  Sense strand starting at position 3969 of SEQ ID NO: 1283
caguaacucuagcaagaug

SEQ ID NO: 101643 - RNA, 19 nt, Artificial Sequence
  Description of Artificial Sequence: Synthetic oligonucleotide
  Antisense strand to SEQ ID NO: 101642
caucuugcuagaguuacug

SEQ ID NO: 101644 - RNA, 19 nt, Artificial Sequence
  Description of Artificial Sequence: Synthetic oligonucleotide
  Sense strand starting at position 3355 of SEQ ID NO: 1283
agaucuaguugugaaaccu

SEQ ID NO: 101645 - RNA, 19 nt, Artificial Sequence
  Description of Artificial Sequence: Synthetic oligonucleotide
  Antisense strand to SEQ ID NO: 101644
agguuucacaacuagaucu

SEQ ID NO: 101646 - RNA, 19 nt, Artificial Sequence
  Description of Artificial Sequence: Synthetic oligonucleotide
  Sense strand starting at position 3348 of SEQ ID NO: 1283
ggaucauagaucuaguugu

SEQ ID NO: 101647 - RNA, 19 nt, Artificial Sequence
  Description of Artificial Sequence: Synthetic oligonucleotide
  Antisense strand to SEQ ID NO: 101646
acaacuagaucuaugaucc

SEQ ID NO: 101648 - RNA, 19 nt, Artificial Sequence
  Description of Artificial Sequence: Synthetic oligonucleotide
  Sense strand starting at position 3271 of SEQ ID NO: 1283
guagguauaauuggauauc

SEQ ID NO: 101649 - RNA, 19 nt, Artificial Sequence
  Description of Artificial Sequence: Synthetic oligonucleotide
  Antisense strand to SEQ ID NO: 101648
gauauccaauuauaccuac

SEQ ID NO: 101650 - RNA, 19 nt, Artificial Sequence
  Description of Artificial Sequence: Synthetic oligonucleotide
  Sense strand starting at position 3262 of SEQ ID NO: 1283
acaaauguuguagguauaa

SEQ ID NO: 101651 - RNA, 19 nt, Artificial Sequence
  Description of Artificial Sequence: Synthetic oligonucleotide
  Antisense strand to SEQ ID NO: 101650
uuauaccuacaacauuugu

SEQ ID NO: 101652 - RNA, 19 nt, Artificial Sequence
  Description of Artificial Sequence: Synthetic oligonucleotide
  Sense strand starting at position 3260 of SEQ ID NO: 1283
caacaaauguuguagguau

SEQ ID NO: 101653 - RNA, 19 nt, Artificial Sequence
  Description of Artificial Sequence: Synthetic oligonucleotide
  Antisense strand to SEQ ID NO: 101652
auaccuacaacauuuguug

SEQ ID NO: 101654 - RNA, 19 nt, Artificial Sequence
  Description of Artificial Sequence: Synthetic oligonucleotide
  Sense strand starting at position 3055 of SEQ ID NO: 1283
agugcaauucaguggagaa

SEQ ID NO: 101655 - RNA, 19 nt, Artificial Sequence
  Description of Artificial Sequence: Synthetic oligonucleotide
  Antisense strand to SEQ ID NO: 101654
uucuccacugaauugcacu

SEQ ID NO: 101656 - RNA, 19 nt, Artificial Sequence
  Description of Artificial Sequence: Synthetic oligonucleotide
  Sense strand starting at position 3019 of SEQ ID NO: 1283
ccgauaugugagcaauuaa

SEQ ID NO: 101657 - RNA, 19 nt, Artificial Sequence
  Description of Artificial Sequence: Synthetic oligonucleotide
  Antisense strand to SEQ ID NO: 101656
uuaauugcucacauaucgg

SEQ ID NO: 101658 - RNA, 19 nt, Artificial Sequence
  Description of Artificial Sequence: Synthetic oligonucleotide
  Sense strand starting at position 3018 of SEQ ID NO: 1283
uccgauaugugagcaauua

SEQ ID NO: 101659 - RNA, 19 nt, Artificial Sequence
  Description of Artificial Sequence: Synthetic oligonucleotide
  Antisense strand to SEQ ID NO: 101658
uaauugcucacauaucgga

SEQ ID NO: 101660 - RNA, 19 nt, Artificial Sequence
  Description of Artificial Sequence: Synthetic oligonucleotide
  Sense strand starting at position 3015 of SEQ ID NO: 1283
aguuccgauaugugagcaa

SEQ ID NO: 101661 - RNA, 19 nt, Artificial Sequence
  Description of Artificial Sequence: Synthetic oligonucleotide
  Antisense strand to SEQ ID NO: 101660
uugcucacauaucggaacu

SEQ ID NO: 101662 - RNA, 19 nt, Artificial Sequence
  Description of Artificial Sequence: Synthetic oligonucleotide
  Sense strand starting at position 3008 of SEQ ID NO: 1283
agaauagaguuccgauaug

SEQ ID NO: 101663 - RNA, 19 nt, Artificial Sequence
  Description of Artificial Sequence: Synthetic oligonucleotide
  Antisense strand to SEQ ID NO: 101662
cauaucggaacucuauucu

SEQ ID NO: 101664 - RNA, 19 nt, Artificial Sequence
  Description of Artificial Sequence: Synthetic oligonucleotide
  Sense strand starting at position 2968 of SEQ ID NO: 1283
gugguauuggcguccaggu

SEQ ID NO: 101665 - RNA, 19 nt, Artificial Sequence
  Description of Artificial Sequence: Synthetic oligonucleotide
  Antisense strand to SEQ ID NO: 101664
accuggacgccaauaccac

SEQ ID NO: 101666 - RNA, 19 nt, Artificial Sequence
  Description of Artificial Sequence: Synthetic oligonucleotide
  Sense strand starting at position 2958 of SEQ ID NO: 1283
gaaagaaagugugguauug

SEQ ID NO: 101667 - RNA, 19 nt, Artificial Sequence
  Description of Artificial Sequence: Synthetic oligonucleotide
  Antisense strand to SEQ ID NO: 101666
caauaccacacuuucuuuc

SEQ ID NO: 101668 - RNA, 19 nt, Artificial Sequence
  Description of Artificial Sequence: Synthetic oligonucleotide
  Sense strand starting at position 2535 of SEQ ID NO: 1283
gguugcucacgccaguaaa

SEQ ID NO: 101669 - RNA, 19 nt, Artificial Sequence
  Description of Artificial Sequence: Synthetic oligonucleotide
  Antisense strand to SEQ ID NO: 101668
uuuacuggcgugagcaacc

SEQ ID NO: 101670 - RNA, 19 nt, Artificial Sequence
  Description of Artificial Sequence: Synthetic oligonucleotide
  Sense strand starting at position 2471 of SEQ ID NO: 1283
cgcuuugcgccagaagaua

SEQ ID NO: 101671 - RNA, 19 nt, Artificial Sequence
  Description of Artificial Sequence: Synthetic oligonucleotide
  Antisense strand to SEQ ID NO: 101670
uaucuucuggcgcaaagcg

SEQ ID NO: 101672 - RNA, 19 nt, Artificial Sequence
  Description of Artificial Sequence: Synthetic oligonucleotide
  Sense strand starting at position 2469 of SEQ ID NO: 1283
cccgcuuugcgccagaaga

SEQ ID NO: 101673 - RNA, 19 nt, Artificial Sequence
  Description of Artificial Sequence: Synthetic oligonucleotide
  Antisense strand to SEQ ID NO: 101672
ucuucuggcgcaaagcggg

SEQ ID NO: 101674 - RNA, 19 nt, Artificial Sequence
  Description of Artificial Sequence: Synthetic oligonucleotide
  Sense strand starting at position 2067 of SEQ ID NO: 1283
gcuggcuacucauuguacu

SEQ ID NO: 101675 - RNA, 19 nt, Artificial Sequence
  Description of Artificial Sequence: Synthetic oligonucleotide
  Antisense strand to SEQ ID NO: 101674
aguacaaugaguagccagc

SEQ ID NO: 101676 - RNA, 19 nt, Artificial Sequence
  Description of Artificial Sequence: Synthetic oligonucleotide
  Sense strand starting at position 1315 of SEQ ID NO: 1283
guuugauccgcaggacaaa

SEQ ID NO: 101677 - RNA, 19 nt, Artificial Sequence
  Description of Artificial Sequence: Synthetic oligonucleotide
  Antisense strand to SEQ ID NO: 101676
uuuguccugcggaucaaac

SEQ ID NO: 101678 - RNA, 19 nt, Artificial Sequence
  Description of Artificial Sequence: Synthetic oligonucleotide
  Sense strand starting at position 1313 of SEQ ID NO: 1283
cuguuugauccgcaggaca

SEQ ID NO: 101679 - RNA, 19 nt, Artificial Sequence
  Description of Artificial Sequence: Synthetic oligonucleotide
  Antisense strand to SEQ ID NO: 101678
uguccugcggaucaaacag

SEQ ID NO: 101680 - RNA, 19 nt, Artificial Sequence
  Description of Artificial Sequence: Synthetic oligonucleotide
  Sense strand starting at position 1184 of SEQ ID NO: 1283
cuccaaggauccucaggau

SEQ ID NO: 101681 - RNA, 19 nt, Artificial Sequence
  Description of Artificial Sequence: Synthetic oligonucleotide
  Antisense strand to SEQ ID NO: 101680
auccugaggauccuuggag

SEQ ID NO: 101682 - RNA, 19 nt, Artificial Sequence
  Description of Artificial Sequence: Synthetic oligonucleotide
  Sense strand starting at position 1115 of SEQ ID NO: 1283
agccuuucccuggaagugu

SEQ ID NO: 101683 - RNA, 19 nt, Artificial Sequence
  Description of Artificial Sequence: Synthetic oligonucleotide
  Antisense strand to SEQ ID NO: 101682
acacuuccagggaaaggcu

SEQ ID NO: 101684 - RNA, 19 nt, Artificial Sequence
  Description of Artificial Sequence: Synthetic oligonucleotide
  Sense strand starting at position 1113 of SEQ ID NO: 1283
aaagccuuucccuggaagu

SEQ ID NO: 101685 - RNA, 19 nt, Artificial Sequence
  Description of Artificial Sequence: Synthetic oligonucleotide
  Antisense strand to SEQ ID NO: 101684
acuuccagggaaaggcuuu

SEQ ID NO: 101686 - RNA, 19 nt, Artificial Sequence
  Description of Artificial Sequence: Synthetic oligonucleotide
  Sense strand starting at position 1097 of SEQ ID NO: 1283
aguucaggguucuuggaaa

SEQ ID NO: 101687 - RNA, 19 nt, Artificial Sequence
  Description of Artificial Sequence: Synthetic oligonucleotide
  Antisense strand to SEQ ID NO: 101686
uuuccaagaacccugaacu

SEQ ID NO: 101688 - RNA, 19 nt, Artificial Sequence
  Description of Artificial Sequence: Synthetic oligonucleotide
  Sense strand starting at position 1089 of SEQ ID NO: 1283
gguccaugaguucaggguu

SEQ ID NO: 101689 - RNA, 19 nt, Artificial Sequence
  Description of Artificial Sequence: Synthetic oligonucleotide
  Antisense strand to SEQ ID NO: 101688
aacccugaacucauggacc

SEQ ID NO: 101690 - RNA, 19 nt, Artificial Sequence
  Description of Artificial Sequence: Synthetic oligonucleotide
  Sense strand starting at position 1057 of SEQ ID NO: 1283
gaggcuagaucugaaccaa

SEQ ID NO: 101691 - RNA, 19 nt, Artificial Sequence
  Description of Artificial Sequence: Synthetic oligonucleotide
  Antisense strand to SEQ ID NO: 101690
uugguucagaucuagccuc

SEQ ID NO: 101692 - RNA, 19 nt, Artificial Sequence
  Description of Artificial Sequence: Synthetic oligonucleotide
  Sense strand starting at position 1006 of SEQ ID NO: 1283
accaaagcucagggaaguu

SEQ ID NO: 101693 - RNA, 19 nt, Artificial Sequence
  Description of Artificial Sequence: Synthetic oligonucleotide
  Antisense strand to SEQ ID NO: 101692
aacuucccugagcuuuggu

SEQ ID NO: 101694 - RNA, 19 nt, Artificial Sequence
  Description of Artificial Sequence: Synthetic oligonucleotide
  Sense strand starting at position 903 of SEQ ID NO: 1283
ugcuuuauaacuggugagu

SEQ ID NO: 101695 - RNA, 19 nt, Artificial Sequence
  Description of Artificial Sequence: Synthetic oligonucleotide
  Antisense strand to SEQ ID NO: 101694
acucaccaguuauaaagca

SEQ ID NO: 101696 - RNA, 19 nt, Artificial Sequence
  Description of Artificial Sequence: Synthetic oligonucleotide
  Sense strand starting at position 881 of SEQ ID NO: 1283
ugggcagugguuuggacaa

SEQ ID NO: 101697 - RNA, 19 nt, Artificial Sequence
  Description of Artificial Sequence: Synthetic oligonucleotide
  Antisense strand to SEQ ID NO: 101696
uuguccaaaccacugccca

SEQ ID NO: 101698 - RNA, 19 nt, Artificial Sequence
  Description of Artificial Sequence: Synthetic oligonucleotide
  Sense strand starting at position 779 of SEQ ID NO: 1283
agugguauacaguaagcau

SEQ ID NO: 101699 - RNA, 19 nt, Artificial Sequence
  Description of Artificial Sequence: Synthetic oligonucleotide
  Antisense strand to SEQ ID NO: 101698
augcuuacuguauaccacu

SEQ ID NO: 101700 - RNA, 19 nt, Artificial Sequence
  Description of Artificial Sequence: Synthetic oligonucleotide
  Sense strand starting at position 774 of SEQ ID NO: 1283
cuuacagugguauacagua

SEQ ID NO: 101701 - RNA, 19 nt, Artificial Sequence
  Description of Artificial Sequence: Synthetic oligonucleotide
  Antisense strand to SEQ ID NO: 101700
uacuguauaccacuguaag

SEQ ID NO: 101702 - RNA, 19 nt, Artificial Sequence
  Description of Artificial Sequence: Synthetic oligonucleotide
  Sense strand starting at position 769 of SEQ ID NO: 1283
cagugcuuacagugguaua

SEQ ID NO: 101703 - RNA, 19 nt, Artificial Sequence
  Description of Artificial Sequence: Synthetic oligonucleotide
  Antisense strand to SEQ ID NO: 101702
uauaccacuguaagcacug

SEQ ID NO: 101704 - RNA, 19 nt, Artificial Sequence
  Description of Artificial Sequence: Synthetic oligonucleotide
  Sense strand starting at position 763 of SEQ ID NO: 1283
uuaauacagugcuuacagu

SEQ ID NO: 101705 - RNA, 19 nt, Artificial Sequence
  Description of Artificial Sequence: Synthetic oligonucleotide
  Antisense strand to SEQ ID NO: 101704
acuguaagcacuguauuaa

SEQ ID NO: 101706 - RNA, 19 nt, Artificial Sequence
  Description of Artificial Sequence: Synthetic oligonucleotide
  Sense strand starting at position 747 of SEQ ID NO: 1283
ucaguacagugcuuacuua

SEQ ID NO: 101707 - RNA, 19 nt, Artificial Sequence
  Description of Artificial Sequence: Synthetic oligonucleotide
  Antisense strand to SEQ ID NO: 101706
uaaguaagcacuguacuga

SEQ ID NO: 101708 - RNA, 19 nt, Artificial Sequence
  Description of Artificial Sequence: Synthetic oligonucleotide
  Sense strand starting at position 361 of SEQ ID NO: 1283
gagagaccucgucgcuacu

SEQ ID NO: 101709 - RNA, 19 nt, Artificial Sequence
  Description of Artificial Sequence: Synthetic oligonucleotide
  Antisense strand to SEQ ID NO: 101708
aguagcgacgaggucucuc

SEQ ID NO: 101710 - RNA, 19 nt, Artificial Sequence
  Description of Artificial Sequence: Synthetic oligonucleotide
  Sense strand starting at position 359 of SEQ ID NO: 1283
gcgagagaccucgucgcua

SEQ ID NO: 101711 - RNA, 19 nt, Artificial Sequence
  Description of Artificial Sequence: Synthetic oligonucleotide
  Antisense strand to SEQ ID NO: 101710
uagcgacgaggucucucgc

SEQ ID NO: 101712 - RNA, 19 nt, Artificial Sequence
  Description of Artificial Sequence: Synthetic oligonucleotide
  Sense strand starting at position 230 of SEQ ID NO: 1283
augguugcaucacuguaaa

SEQ ID NO: 101713 - RNA, 19 nt, Artificial Sequence
  Description of Artificial Sequence: Synthetic oligonucleotide
  Antisense strand to SEQ ID NO: 101712
uuuacagugaugcaaccau

SEQ ID NO: 101714 - RNA, 19 nt, Artificial Sequence
  Description of Artificial Sequence: Synthetic oligonucleotide
  Sense strand starting at position 3853 of SEQ ID NO: 1284
ugaaauauuuguugaacug

SEQ ID NO: 101715 - RNA, 19 nt, Artificial Sequence
  Description of Artificial Sequence: Synthetic oligonucleotide
  Antisense strand to SEQ ID NO: 101714
caguucaacaaauauuuca

SEQ ID NO: 101716 - RNA, 19 nt, Artificial Sequence
  Description of Artificial Sequence: Synthetic oligonucleotide
  Sense strand starting at position 3841 of SEQ ID NO: 1284
uagggucuucuaugaaaua

SEQ ID NO: 101717 - RNA, 19 nt, Artificial Sequence
  Description of Artificial Sequence: Synthetic oligonucleotide
  Antisense strand to SEQ ID NO: 101716
uauuucauagaagacccua

SEQ ID NO: 101718 - RNA, 19 nt, Artificial Sequence
  Description of Artificial Sequence: Synthetic oligonucleotide
  Sense strand starting at position 3837 of SEQ ID NO: 1284
auaguagggucuucuauga

SEQ ID NO: 101719 - RNA, 19 nt, Artificial Sequence
  Description of Artificial Sequence: Synthetic oligonucleotide
  Antisense strand to SEQ ID NO: 101718
ucauagaagacccuacuau

SEQ ID NO: 101720 - RNA, 19 nt, Artificial Sequence
  Description of Artificial Sequence: Synthetic oligonucleotide
  Sense strand starting at position 3823 of SEQ ID NO: 1284
gcacaaugccuuggauagu

SEQ ID NO: 101721 - RNA, 19 nt, Artificial Sequence
  Description of Artificial Sequence: Synthetic oligonucleotide
  Antisense strand to SEQ ID NO: 101720
acuauccaaggcauugugc

SEQ ID NO: 101722 - RNA, 19 nt, Artificial Sequence
  Description of Artificial Sequence: Synthetic oligonucleotide
  Sense strand starting at position 3761 of SEQ ID NO: 1284
uguagauauuaucugcuag

SEQ ID NO: 101723 - RNA, 19 nt, Artificial Sequence
  Description of Artificial Sequence: Synthetic oligonucleotide
  Antisense strand to SEQ ID NO: 101722
cuagcagauaauaucuaca

SEQ ID NO: 101724 - RNA, 19 nt, Artificial Sequence
  Description of Artificial Sequence: Synthetic oligonucleotide
  Sense strand starting at position 3749 of SEQ ID NO: 1284
gaaacaucugguuguagau

SEQ ID NO: 101725 - RNA, 19 nt, Artificial Sequence
  Description of Artificial Sequence: Synthetic oligonucleotide
  Antisense strand to SEQ ID NO: 101724
aucuacaaccagauguuuc

SEQ ID NO: 101726 - RNA, 19 nt, Artificial Sequence
  Description of Artificial Sequence: Synthetic oligonucleotide
  Sense strand starting at position 3748 of SEQ ID NO: 1284
ugaaacaucugguuguaga

SEQ ID NO: 101727 - RNA, 19 nt, Artificial Sequence
  Description of Artificial Sequence: Synthetic oligonucleotide
  Antisense strand to SEQ ID NO: 101726
ucuacaaccagauguuuca

SEQ ID NO: 101728 - RNA, 19 nt, Artificial Sequence
  Description of Artificial Sequence: Synthetic oligonucleotide
  Sense strand starting at position 3724 of SEQ ID NO: 1284
cgcauugauuucucuaucu

SEQ ID NO: 101729 - RNA, 19 nt, Artificial Sequence
  Description of Artificial Sequence: Synthetic oligonucleotide
  Antisense strand to SEQ ID NO: 101728
agauagagaaaucaaugcg

SEQ ID NO: 101730 - RNA, 19 nt, Artificial Sequence
  Description of Artificial Sequence: Synthetic oligonucleotide
  Sense strand starting at position 3656 of SEQ ID NO: 1284
uaggaagccuagucagaua

SEQ ID NO: 101731 - RNA, 19 nt, Artificial Sequence
  Description of Artificial Sequence: Synthetic oligonucleotide
  Antisense strand to SEQ ID NO: 101730
uaucugacuaggcuuccua

SEQ ID NO: 101732 - RNA, 19 nt, Artificial Sequence
  Description of Artificial Sequence: Synthetic oligonucleotide
  Sense strand starting at position 3263 of SEQ ID NO: 1284
uuaugccucugauuagaag

SEQ ID NO: 101733 - RNA, 19 nt, Artificial Sequence
  Description of Artificial Sequence: Synthetic oligonucleotide
  Antisense strand to SEQ ID NO: 101732
cuucuaaucagaggcauaa

SEQ ID NO: 101734 - RNA, 19 nt, Artificial Sequence
  Description of Artificial Sequence: Synthetic oligonucleotide
  Sense strand starting at position 3260 of SEQ ID NO: 1284
acguuaugccucugauuag

SEQ ID NO: 101735 - RNA, 19 nt, Artificial Sequence
  Description of Artificial Sequence: Synthetic oligonucleotide
  Antisense strand to SEQ ID NO: 101734
cuaaucagaggcauaacgu

SEQ ID NO: 101736 - RNA, 19 nt, Artificial Sequence
  Description of Artificial Sequence: Synthetic oligonucleotide
  Sense strand starting at position 3249 of SEQ ID NO: 1284
gaaaucugaccacguuaug

SEQ ID NO: 101737 - RNA, 19 nt, Artificial Sequence
  Description of Artificial Sequence: Synthetic oligonucleotide
  Antisense strand to SEQ ID NO: 101736
cauaacguggucagauuuc

SEQ ID NO: 101738 - RNA, 19 nt, Artificial Sequence
  Description of Artificial Sequence: Synthetic oligonucleotide
  Sense strand starting at position 3247 of SEQ ID NO: 1284
uagaaaucugaccacguua

SEQ ID NO: 101739 - RNA, 19 nt, Artificial Sequence
  Description of Artificial Sequence: Synthetic oligonucleotide
  Antisense strand to SEQ ID NO: 101738
uaacguggucagauuucua

SEQ ID NO: 101740 - RNA, 19 nt, Artificial Sequence
  Description of Artificial Sequence: Synthetic oligonucleotide
  Sense strand starting at position 3246 of SEQ ID NO: 1284
auagaaaucugaccacguu

SEQ ID NO: 101741 - RNA, 19 nt, Artificial Sequence
  Description of Artificial Sequence: Synthetic oligonucleotide
  Antisense strand to SEQ ID NO: 101740
aacguggucagauuucuau

SEQ ID NO: 101742 - RNA, 19 nt, Artificial Sequence
  Description of Artificial Sequence: Synthetic oligonucleotide
  Sense strand starting at position 3205 of SEQ ID NO: 1284
uggcuagugucauugauuu

SEQ ID NO: 101743 - RNA, 19 nt, Artificial Sequence
  Description of Artificial Sequence: Synthetic oligonucleotide
  Antisense strand to SEQ ID NO: 101742
aaaucaaugacacuagcca

SEQ ID NO: 101744 - RNA, 19 nt, Artificial Sequence
  Description of Artificial Sequence: Synthetic oligonucleotide
  Sense strand starting at position 3145 of SEQ ID NO: 1284
cugcgagauccugaaacca

SEQ ID NO: 101745 - RNA, 19 nt, Artificial Sequence
  Description of Artificial Sequence: Synthetic oligonucleotide
  Antisense strand to SEQ ID NO: 101744
ugguuucaggaucucgcag

SEQ ID NO: 101746 - RNA, 19 nt, Artificial Sequence
  Description of Artificial Sequence: Synthetic oligonucleotide
  Sense strand starting at position 2701 of SEQ ID NO: 1284
gccuccuauccauguauau

SEQ ID NO: 101747 - RNA, 19 nt, Artificial Sequence
  Description of Artificial Sequence: Synthetic oligonucleotide
  Antisense strand to SEQ ID NO: 101746
auauacauggauaggaggc

SEQ ID NO: 101748 - RNA, 19 nt, Artificial Sequence
  Description of Artificial Sequence: Synthetic oligonucleotide
  Sense strand starting at position 2642 of SEQ ID NO: 1284
cucccugaguaauugcaaa

SEQ ID NO: 101749 - RNA, 19 nt, Artificial Sequence
  Description of Artificial Sequence: Synthetic oligonucleotide
  Antisense strand to SEQ ID NO: 101748
uuugcaauuacucagggag

SEQ ID NO: 101750 - RNA, 19 nt, Artificial Sequence
  Description of Artificial Sequence: Synthetic oligonucleotide
  Sense strand starting at position 2638 of SEQ ID NO: 1284
gacucucccugaguaauug

SEQ ID NO: 101751 - RNA, 19 nt, Artificial Sequence
  Description of Artificial Sequence: Synthetic oligonucleotide
  Antisense strand to SEQ ID NO: 101750
caauuacucagggagaguc

SEQ ID NO: 101752 - RNA, 19 nt, Artificial Sequence
  Description of Artificial Sequence: Synthetic oligonucleotide
  Sense strand starting at position 2635 of SEQ ID NO: 1284
acagacucucccugaguaa

SEQ ID NO: 101753 - RNA, 19 nt, Artificial Sequence
  Description of Artificial Sequence: Synthetic oligonucleotide
  Antisense strand to SEQ ID NO: 101752
uuacucagggagagucugu

SEQ ID NO: 101754 - RNA, 19 nt, Artificial Sequence
  Description of Artificial Sequence: Synthetic oligonucleotide
  Sense strand starting at position 2380 of SEQ ID NO: 1284
ccgaaacugcucugggaaa

SEQ ID NO: 101755 - RNA, 19 nt, Artificial Sequence
  Description of Artificial Sequence: Synthetic oligonucleotide
  Antisense strand to SEQ ID NO: 101754
uuucccagagcaguuucgg

SEQ ID NO: 101756 - RNA, 19 nt, Artificial Sequence
  Description of Artificial Sequence: Synthetic oligonucleotide
  Sense strand starting at position 2355 of SEQ ID NO: 1284
ggaauucccgccugaacca

SEQ ID NO: 101757 - RNA, 19 nt, Artificial Sequence
  Description of Artificial Sequence: Synthetic oligonucleotide
  Antisense strand to SEQ ID NO: 101756
ugguucaggcgggaauucc

SEQ ID NO: 101758 - RNA, 19 nt, Artificial Sequence
  Description of Artificial Sequence: Synthetic oligonucleotide
  Sense strand starting at position 2342 of SEQ ID NO: 1284
gguuucuugcauuggaauu

SEQ ID NO: 101759 - RNA, 19 nt, Artificial Sequence
  Description of Artificial Sequence: Synthetic oligonucleotide
  Antisense strand to SEQ ID NO: 101758
aauuccaaugcaagaaacc

SEQ ID NO: 101760 - RNA, 19 nt, Artificial Sequence
  Description of Artificial Sequence: Synthetic oligonucleotide
  Sense strand starting at position 2234 of SEQ ID NO: 1284
gacauuggcccuggaaauc

SEQ ID NO: 101761 - RNA, 19 nt, Artificial Sequence
  Description of Artificial Sequence: Synthetic oligonucleotide
  Antisense strand to SEQ ID NO: 101760
gauuuccagggccaauguc

SEQ ID NO: 101762 - RNA, 19 nt, Artificial Sequence
  Description of Artificial Sequence: Synthetic oligonucleotide
  Sense strand starting at position 2233 of SEQ ID NO: 1284
cgacauuggcccuggaaau

SEQ ID NO: 101763 - RNA, 19 nt, Artificial Sequence
  Description of Artificial Sequence: Synthetic oligonucleotide
  Antisense strand to SEQ ID NO: 101762
auuuccagggccaaugucg

SEQ ID NO: 101764 - RNA, 19 nt, Artificial Sequence
  Description of Artificial Sequence: Synthetic oligonucleotide
  Sense strand starting at position 2047 of SEQ ID NO: 1284
cagauaucgcgagaugauc

SEQ ID NO: 101765 - RNA, 19 nt, Artificial Sequence
  Description of Artificial Sequence: Synthetic oligonucleotide
  Antisense strand to SEQ ID NO: 101764
gaucaucucgcgauaucug

SEQ ID NO: 101766 - RNA, 19 nt, Artificial Sequence
  Description of Artificial Sequence: Synthetic oligonucleotide
  Sense strand starting at position 2045 of SEQ ID NO: 1284
uccagauaucgcgagauga

SEQ ID NO: 101767 - RNA, 19 nt, Artificial Sequence
  Description of Artificial Sequence: Synthetic oligonucleotide
  Antisense strand to SEQ ID NO: 101766
ucaucucgcgauaucugga

SEQ ID NO: 101768 - RNA, 19 nt, Artificial Sequence
  Description of Artificial Sequence: Synthetic oligonucleotide
  Sense strand starting at position 1586 of SEQ ID NO: 1284
acucaagagcucugcgacu

SEQ ID NO: 101769 - RNA, 19 nt, Artificial Sequence
  Description of Artificial Sequence: Synthetic oligonucleotide
  Antisense strand to SEQ ID NO: 101768
agucgcagagcucuugagu

SEQ ID NO: 101770 - RNA, 19 nt, Artificial Sequence
  Description of Artificial Sequence: Synthetic oligonucleotide
  Sense strand starting at position 1441 of SEQ ID NO: 1284
ugaccuucuccagaaggca

SEQ ID NO: 101771 - RNA, 19 nt, Artificial Sequence
  Description of Artificial Sequence: Synthetic oligonucleotide
  Antisense strand to SEQ ID NO: 101770
ugccuucuggagaagguca

SEQ ID NO: 101772 - RNA, 19 nt, Artificial Sequence
  Description of Artificial Sequence: Synthetic oligonucleotide
  Sense strand starting at position 1425 of SEQ ID NO: 1284
uaugaaaugcuccagguga

SEQ ID NO: 101773 - RNA, 19 nt, Artificial Sequence
  Description of Artificial Sequence: Synthetic oligonucleotide
  Antisense strand to SEQ ID NO: 101772
ucaccuggagcauuucaua

SEQ ID NO: 101774 - RNA, 19 nt, Artificial Sequence
  Description of Artificial Sequence: Synthetic oligonucleotide
  Sense strand starting at position 1413 of SEQ ID NO: 1284
ccuggcggugucuaugaaa

SEQ ID NO: 101775 - RNA, 19 nt, Artificial Sequence
  Description of Artificial Sequence: Synthetic oligonucleotide
  Antisense strand to SEQ ID NO: 101774
uuucauagacaccgccagg

SEQ ID NO: 101776 - RNA, 19 nt, Artificial Sequence
  Description of Artificial Sequence: Synthetic oligonucleotide
  Sense strand starting at position 1306 of SEQ ID NO: 1284
gcgcaauucucauuccaga

SEQ ID NO: 101777 - RNA, 19 nt, Artificial Sequence
  Description of Artificial Sequence: Synthetic oligonucleotide
  Antisense strand to SEQ ID NO: 101776
ucuggaaugagaauugcgc

SEQ ID NO: 101778 - RNA, 19 nt, Artificial Sequence
  Description of Artificial Sequence: Synthetic oligonucleotide
  Sense strand starting at position 1002 of SEQ ID NO: 1284
auaucacauuuggguaaca

SEQ ID NO: 101779 - RNA, 19 nt, Artificial Sequence
  Description of Artificial Sequence: Synthetic oligonucleotide
  Antisense strand to SEQ ID NO: 101778
uguuacccaaaugugauau

SEQ ID NO: 101780 - RNA, 19 nt, Artificial Sequence
  Description of Artificial Sequence: Synthetic oligonucleotide
  Sense strand starting at position 796 of SEQ ID NO: 1284
gugaaaugguaacuuauaa

SEQ ID NO: 101781 - RNA, 19 nt, Artificial Sequence
  Description of Artificial Sequence: Synthetic oligonucleotide
  Antisense strand to SEQ ID NO: 101780
uuauaaguuaccauuucac

SEQ ID NO: 101782 - RNA, 19 nt, Artificial Sequence
  Description of Artificial Sequence: Synthetic oligonucleotide
  Sense strand starting at position 571 of SEQ ID NO: 1284
agcuguuaacaguaacaaa

SEQ ID NO: 101783 - RNA, 19 nt, Artificial Sequence
  Description of Artificial Sequence: Synthetic oligonucleotide
  Antisense strand to SEQ ID NO: 101782
uuuguuacuguuaacagcu

SEQ ID NO: 101784 - RNA, 19 nt, Artificial Sequence
  Description of Artificial Sequence: Synthetic oligonucleotide
  Sense strand starting at position 546 of SEQ ID NO: 1284
uguuaagucuucucucuga

SEQ ID NO: 101785 - RNA, 19 nt, Artificial Sequence
  Description of Artificial Sequence: Synthetic oligonucleotide
  Antisense strand to SEQ ID NO: 101784
ucagagagaagacuuaaca

SEQ ID NO: 101786 - RNA, 19 nt, Artificial Sequence
  Description of Artificial Sequence: Synthetic oligonucleotide
  Sense strand starting at position 156 of SEQ ID NO: 1284
ugcuaaguagcuuauguau

SEQ ID NO: 101787 - RNA, 19 nt, Artificial Sequence
  Description of Artificial Sequence: Synthetic oligonucleotide
  Antisense strand to SEQ ID NO: 101786
auacauaagcuacuuagca

SEQ ID NO: 101788 - RNA, 19 nt, Artificial Sequence
  Description of Artificial Sequence: Synthetic oligonucleotide
  Sense strand starting at position 118 of SEQ ID NO: 1284
ugacuaccauuacuguaua

SEQ ID NO: 101789 - RNA, 19 nt, Artificial Sequence
  Description of Artificial Sequence: Synthetic oligonucleotide
  Antisense strand to SEQ ID NO: 101788
uauacaguaaugguaguca

SEQ ID NO: 101790 - RNA, 19 nt, Artificial Sequence
  Description of Artificial Sequence: Synthetic oligonucleotide
  Sense strand starting at position 32 of SEQ ID NO: 1284
ggagacccugccuguauaa

SEQ ID NO: 101791 - RNA, 19 nt, Artificial Sequence
  Description of Artificial Sequence: Synthetic oligonucleotide
  Antisense strand to SEQ ID NO: 101790
uuauacaggcagggucucc

SEQ ID NO: 101792 - RNA, 19 nt, Artificial Sequence
  Description of Artificial Sequence: Synthetic oligonucleotide
  Sense strand starting at position 31 of SEQ ID NO: 1284
gggagacccugccuguaua

SEQ ID NO: 101793 - RNA, 19 nt, Artificial Sequence
  Description of Artificial Sequence: Synthetic oligonucleotide
  Antisense strand to SEQ ID NO: 101792
uauacaggcagggucuccc

SEQ ID NO: 101794 - RNA, 19 nt, Artificial Sequence
  Description of Artificial Sequence: Synthetic oligonucleotide
  Sense strand starting at position 3853 of SEQ ID NO: 1284
ugaaauauuuguugaacug

SEQ ID NO: 101795 - RNA, 19 nt, Artificial Sequence
  Description of Artificial Sequence: Synthetic oligonucleotide
  Antisense strand to SEQ ID NO: 101794
caguucaacaaauauuuca

SEQ ID NO: 101796 - RNA, 19 nt, Artificial Sequence
  Description of Artificial Sequence: Synthetic oligonucleotide
  Sense strand starting at position 3841 of SEQ ID NO: 1284
uagggucuucuaugaaaua

SEQ ID NO: 101797 - RNA, 19 nt, Artificial Sequence
  Description of Artificial Sequence: Synthetic oligonucleotide
  Antisense strand to SEQ ID NO: 101796
uauuucauagaagacccua

SEQ ID NO: 101798 - RNA, 19 nt, Artificial Sequence
  Description of Artificial Sequence: Synthetic oligonucleotide
  Sense strand starting at position 3837 of SEQ ID NO: 1284
auaguagggucuucuauga

SEQ ID NO: 101799 - RNA, 19 nt, Artificial Sequence
  Description of Artificial Sequence: Synthetic oligonucleotide
  Antisense strand to SEQ ID NO: 101798
ucauagaagacccuacuau

SEQ ID NO: 101800 - RNA, 19 nt, Artificial Sequence
  Description of Artificial Sequence: Synthetic oligonucleotide
  Sense strand starting at position 3823 of SEQ ID NO: 1284
gcacaaugccuuggauagu

SEQ ID NO: 101801 - RNA, 19 nt, Artificial Sequence
  Description of Artificial Sequence: Synthetic oligonucleotide
  Antisense strand to SEQ ID NO: 101800
acuauccaaggcauugugc

SEQ ID NO: 101802 - RNA, 19 nt, Artificial Sequence
  Description of Artificial Sequence: Synthetic oligonucleotide
  Sense strand starting at position 3761 of SEQ ID NO: 1284
uguagauauuaucugcuag

SEQ ID NO: 101803 - RNA, 19 nt, Artificial Sequence
  Description of Artificial Sequence: Synthetic oligonucleotide
  Antisense strand to SEQ ID NO: 101802
cuagcagauaauaucuaca

SEQ ID NO: 101804 - RNA, 19 nt, Artificial Sequence
  Description of Artificial Sequence: Synthetic oligonucleotide
  Sense strand starting at position 3749 of SEQ ID NO: 1284
gaaacaucugguuguagau

SEQ ID NO: 101805 - RNA, 19 nt, Artificial Sequence
  Description of Artificial Sequence: Synthetic oligonucleotide
  Antisense strand to SEQ ID NO: 101804
aucuacaaccagauguuuc

SEQ ID NO: 101806 - RNA, 19 nt, Artificial Sequence
  Description of Artificial Sequence: Synthetic oligonucleotide
  Sense strand starting at position 3748 of SEQ ID NO: 1284
ugaaacaucugguuguaga

SEQ ID NO: 101807 - RNA, 19 nt, Artificial Sequence
  Description of Artificial Sequence: Synthetic oligonucleotide
  Antisense strand to SEQ ID NO: 101806
ucuacaaccagauguuuca

SEQ ID NO: 101808 - RNA, 19 nt, Artificial Sequence
  Description of Artificial Sequence: Synthetic oligonucleotide
  Sense strand starting at position 3724 of SEQ ID NO: 1284
cgcauugauuucucuaucu

SEQ ID NO: 101809 - RNA, 19 nt, Artificial Sequence
  Description of Artificial Sequence: Synthetic oligonucleotide
  Antisense strand to SEQ ID NO: 101808
agauagagaaaucaaugcg

SEQ ID NO: 101810 - RNA, 19 nt, Artificial Sequence
  Description of Artificial Sequence: Synthetic oligonucleotide
  Sense strand starting at position 3656 of SEQ ID NO: 1284
uaggaagccuagucagaua

SEQ ID NO: 101811 - RNA, 19 nt, Artificial Sequence
  Description of Artificial Sequence: Synthetic oligonucleotide
  Antisense strand to SEQ ID NO: 101810
uaucugacuaggcuuccua

SEQ ID NO: 101812 - RNA, 19 nt, Artificial Sequence
  Description of Artificial Sequence: Synthetic oligonucleotide
  Sense strand starting at position 3263 of SEQ ID NO: 1284
uuaugccucugauuagaag

SEQ ID NO: 101813 - RNA, 19 nt, Artificial Sequence
  Description of Artificial Sequence: Synthetic oligonucleotide
  Antisense strand to SEQ ID NO: 101812
cuucuaaucagaggcauaa

SEQ ID NO: 101814 - RNA, 19 nt, Artificial Sequence
  Description of Artificial Sequence: Synthetic oligonucleotide
  Sense strand starting at position 3260 of SEQ ID NO: 1284
acguuaugccucugauuag

SEQ ID NO: 101815 - RNA, 19 nt, Artificial Sequence
  Description of Artificial Sequence: Synthetic oligonucleotide
  Antisense strand to SEQ ID NO: 101814
cuaaucagaggcauaacgu

SEQ ID NO: 101816 - RNA, 19 nt, Artificial Sequence
  Description of Artificial Sequence: Synthetic oligonucleotide
  Sense strand starting at position 3249 of SEQ ID NO: 1284
gaaaucugaccacguuaug

SEQ ID NO: 101817 - RNA, 19 nt, Artificial Sequence
  Description of Artificial Sequence: Synthetic oligonucleotide
  Antisense strand to SEQ ID NO: 101816
cauaacguggucagauuuc

SEQ ID NO: 101818 - RNA, 19 nt, Artificial Sequence
  Description of Artificial Sequence: Synthetic oligonucleotide
  Sense strand starting at position 3247 of SEQ ID NO: 1284
uagaaaucugaccacguua

SEQ ID NO: 101819 - RNA, 19 nt, Artificial Sequence
  Description of Artificial Sequence: Synthetic oligonucleotide
  Antisense strand to SEQ ID NO: 101818
uaacguggucagauuucua

SEQ ID NO: 101820 - RNA, 19 nt, Artificial Sequence
  Description of Artificial Sequence: Synthetic oligonucleotide
  Sense strand starting at position 3246 of SEQ ID NO: 1284
auagaaaucugaccacguu

SEQ ID NO: 101821 - RNA, 19 nt, Artificial Sequence
  Description of Artificial Sequence: Synthetic oligonucleotide
  Antisense strand to SEQ ID NO: 101820
aacguggucagauuucuau

SEQ ID NO: 101822 - RNA, 19 nt, Artificial Sequence
  Description of Artificial Sequence: Synthetic oligonucleotide
  Sense strand starting at position 3205 of SEQ ID NO: 1284
uggcuagugucauugauuu

SEQ ID NO: 101823 - RNA, 19 nt, Artificial Sequence
  Description of Artificial Sequence: Synthetic oligonucleotide
  Antisense strand to SEQ ID NO: 101822
aaaucaaugacacuagcca

SEQ ID NO: 101824 - RNA, 19 nt, Artificial Sequence
  Description of Artificial Sequence: Synthetic oligonucleotide
  Sense strand starting at position 3145 of SEQ ID NO: 1284
cugcgagauccugaaacca

SEQ ID NO: 101825 - RNA, 19 nt, Artificial Sequence
  Description of Artificial Sequence: Synthetic oligonucleotide
  Antisense strand to SEQ ID NO: 101824
ugguuucaggaucucgcag

SEQ ID NO: 101826 - RNA, 19 nt, Artificial Sequence
  Description of Artificial Sequence: Synthetic oligonucleotide
  Sense strand starting at position 2701 of SEQ ID NO: 1284
gccuccuauccauguauau

SEQ ID NO: 101827 - RNA, 19 nt, Artificial Sequence
  Description of Artificial Sequence: Synthetic oligonucleotide
  Antisense strand to SEQ ID NO: 101826
auauacauggauaggaggc

SEQ ID NO: 101828 - RNA, 19 nt, Artificial Sequence
  Description of Artificial Sequence: Synthetic oligonucleotide
  Sense strand starting at position 2642 of SEQ ID NO: 1284
cucccugaguaauugcaaa

SEQ ID NO: 101829 - RNA, 19 nt, Artificial Sequence
  Description of Artificial Sequence: Synthetic oligonucleotide
  Antisense strand to SEQ ID NO: 101828
uuugcaauuacucagggag

SEQ ID NO: 101830 - RNA, 19 nt, Artificial Sequence
  Description of Artificial Sequence: Synthetic oligonucleotide
  Sense strand starting at position 2638 of SEQ ID NO: 1284
gacucucccugaguaauug

SEQ ID NO: 101831 - RNA, 19 nt, Artificial Sequence
  Description of Artificial Sequence: Synthetic oligonucleotide
  Antisense strand to SEQ ID NO: 101830
caauuacucagggagaguc

SEQ ID NO: 101832 - RNA, 19 nt, Artificial Sequence
  Description of Artificial Sequence: Synthetic oligonucleotide
  Sense strand starting at position 2635 of SEQ ID NO: 1284
acagacucucccugaguaa

SEQ ID NO: 101833 - RNA, 19 nt, Artificial Sequence
  Description of Artificial Sequence: Synthetic oligonucleotide
  Antisense strand to SEQ ID NO: 101832
uuacucagggagagucugu

SEQ ID NO: 101834 - RNA, 19 nt, Artificial Sequence
  Description of Artificial Sequence: Synthetic oligonucleotide
  Sense strand starting at position 2380 of SEQ ID NO: 1284
ccgaaacugcucugggaaa

SEQ ID NO: 101835 - RNA, 19 nt, Artificial Sequence
  Description of Artificial Sequence: Synthetic oligonucleotide
  Antisense strand to SEQ ID NO: 101834
uuucccagagcaguuucgg

SEQ ID NO: 101836 - RNA, 19 nt, Artificial Sequence
  Description of Artificial Sequence: Synthetic oligonucleotide
  Sense strand starting at position 2355 of SEQ ID NO: 1284
ggaauucccgccugaacca

SEQ ID NO: 101837 - RNA, 19 nt, Artificial Sequence
  Description of Artificial Sequence: Synthetic oligonucleotide
  Antisense strand to SEQ ID NO: 101836
ugguucaggcgggaauucc

SEQ ID NO: 101838 - RNA, 19 nt, Artificial Sequence
  Description of Artificial Sequence: Synthetic oligonucleotide
  Sense strand starting at position 2342 of SEQ ID NO: 1284
gguuucuugcauuggaauu

SEQ ID NO: 101839 - RNA, 19 nt, Artificial Sequence
  Description of Artificial Sequence: Synthetic oligonucleotide
  Antisense strand to SEQ ID NO: 101838
aauuccaaugcaagaaacc

SEQ ID NO: 101840 - RNA, 19 nt, Artificial Sequence
  Description of Artificial Sequence: Synthetic oligonucleotide
  Sense strand starting at position 2234 of SEQ ID NO: 1284
gacauuggcccuggaaauc

SEQ ID NO: 101841 - RNA, 19 nt, Artificial Sequence
  Description of Artificial Sequence: Synthetic oligonucleotide
  Antisense strand to SEQ ID NO: 101840
gauuuccagggccaauguc

SEQ ID NO: 101842 - RNA, 19 nt, Artificial Sequence
  Description of Artificial Sequence: Synthetic oligonucleotide
  Sense strand starting at position 2233 of SEQ ID NO: 1284
cgacauuggcccuggaaau

SEQ ID NO: 101843 - RNA, 19 nt, Artificial Sequence
  Description of Artificial Sequence: Synthetic oligonucleotide
  Antisense strand to SEQ ID NO: 101842
auuuccagggccaaugucg

SEQ ID NO: 101844 - RNA, 19 nt, Artificial Sequence
  Description of Artificial Sequence: Synthetic oligonucleotide
  Sense strand starting at position 2047 of SEQ ID NO: 1284
cagauaucgcgagaugauc

SEQ ID NO: 101845 - RNA, 19 nt, Artificial Sequence
  Description of Artificial Sequence: Synthetic oligonucleotide
  Antisense strand to SEQ ID NO: 101844
gaucaucucgcgauaucug

SEQ ID NO: 101846 - RNA, 19 nt, Artificial Sequence
  Description of Artificial Sequence: Synthetic oligonucleotide
  Sense strand starting at position 2045 of SEQ ID NO: 1284
uccagauaucgcgagauga

SEQ ID NO: 101847 - RNA, 19 nt, Artificial Sequence
  Description of Artificial Sequence: Synthetic oligonucleotide
  Antisense strand to SEQ ID NO: 101846
ucaucucgcgauaucugga

SEQ ID NO: 101848 - RNA, 19 nt, Artificial Sequence
  Description of Artificial Sequence: Synthetic oligonucleotide
  Sense strand starting at position 1586 of SEQ ID NO: 1284
acucaagagcucugcgacu

SEQ ID NO: 101849 - RNA, 19 nt, Artificial Sequence
  Description of Artificial Sequence: Synthetic oligonucleotide
  Antisense strand to SEQ ID NO: 101848
agucgcagagcucuugagu

SEQ ID NO: 101850 - RNA, 19 nt, Artificial Sequence
  Description of Artificial Sequence: Synthetic oligonucleotide
  Sense strand starting at position 1441 of SEQ ID NO: 1284
ugaccuucuccagaaggca

SEQ ID NO: 101851 - RNA, 19 nt, Artificial Sequence
  Description of Artificial Sequence: Synthetic oligonucleotide
  Antisense strand to SEQ ID NO: 101850
ugccuucuggagaagguca

SEQ ID NO: 101852 - RNA, 19 nt, Artificial Sequence
  Description of Artificial Sequence: Synthetic oligonucleotide
  Sense strand starting at position 1425 of SEQ ID NO: 1284
uaugaaaugcuccagguga

SEQ ID NO: 101853 - RNA, 19 nt, Artificial Sequence
  Description of Artificial Sequence: Synthetic oligonucleotide
  Antisense strand to SEQ ID NO: 101852
ucaccuggagcauuucaua

SEQ ID NO: 101854 - RNA, 19 nt, Artificial Sequence
  Description of Artificial Sequence: Synthetic oligonucleotide
  Sense strand starting at position 1413 of SEQ ID NO: 1284
ccuggcggugucuaugaaa

SEQ ID NO: 101855 - RNA, 19 nt, Artificial Sequence
  Description of Artificial Sequence: Synthetic oligonucleotide
  Antisense strand to SEQ ID NO: 101854
uuucauagacaccgccagg

SEQ ID NO: 101856 - RNA, 19 nt, Artificial Sequence
  Description of Artificial Sequence: Synthetic oligonucleotide
  Sense strand starting at position 1306 of SEQ ID NO: 1284
gcgcaauucucauuccaga

SEQ ID NO: 101857 - RNA, 19 nt, Artificial Sequence
  Description of Artificial Sequence: Synthetic oligonucleotide
  Antisense strand to SEQ ID NO: 101856
ucuggaaugagaauugcgc

SEQ ID NO: 101858 - RNA, 19 nt, Artificial Sequence
  Description of Artificial Sequence: Synthetic oligonucleotide
  Sense strand starting at position 1002 of SEQ ID NO: 1284
auaucacauuuggguaaca

SEQ ID NO: 101859 - RNA, 19 nt, Artificial Sequence
  Description of Artificial Sequence: Synthetic oligonucleotide
  Antisense strand to SEQ ID NO: 101858
uguuacccaaaugugauau

SEQ ID NO: 101860 - RNA, 19 nt, Artificial Sequence
  Description of Artificial Sequence: Synthetic oligonucleotide
  Sense strand starting at position 796 of SEQ ID NO: 1284
gugaaaugguaacuuauaa

SEQ ID NO: 101861 - RNA, 19 nt, Artificial Sequence
  Description of Artificial Sequence: Synthetic oligonucleotide
  Antisense strand to SEQ ID NO: 101860
uuauaaguuaccauuucac

SEQ ID NO: 101862 - RNA, 19 nt, Artificial Sequence
  Description of Artificial Sequence: Synthetic oligonucleotide
  Sense strand starting at position 571 of SEQ ID NO: 1284
agcuguuaacaguaacaaa

SEQ ID NO: 101863 - RNA, 19 nt, Artificial Sequence
  Description of Artificial Sequence: Synthetic oligonucleotide
  Antisense strand to SEQ ID NO: 101862
uuuguuacuguuaacagcu

SEQ ID NO: 101864 - RNA, 19 nt, Artificial Sequence
  Description of Artificial Sequence: Synthetic oligonucleotide
  Sense strand starting at position 546 of SEQ ID NO: 1284
uguuaagucuucucucuga

SEQ ID NO: 101865 - RNA, 19 nt, Artificial Sequence
  Description of Artificial Sequence: Synthetic oligonucleotide
  Antisense strand to SEQ ID NO: 101864
ucagagagaagacuuaaca

SEQ ID NO: 101866 - RNA, 19 nt, Artificial Sequence
  Description of Artificial Sequence: Synthetic oligonucleotide
  Sense strand starting at position 156 of SEQ ID NO: 1284
ugcuaaguagcuuauguau

SEQ ID NO: 101867 - RNA, 19 nt, Artificial Sequence
  Description of Artificial Sequence: Synthetic oligonucleotide
  Antisense strand to SEQ ID NO: 101866
auacauaagcuacuuagca

SEQ ID NO: 101868 - RNA, 19 nt, Artificial Sequence
  Description of Artificial Sequence: Synthetic oligonucleotide
  Sense strand starting at position 118 of SEQ ID NO: 1284
ugacuaccauuacuguaua

SEQ ID NO: 101869 - RNA, 19 nt, Artificial Sequence
  Description of Artificial Sequence: Synthetic oligonucleotide
  Antisense strand to SEQ ID NO: 101868
uauacaguaaugguaguca

SEQ ID NO: 101870 - RNA, 19 nt, Artificial Sequence
  Description of Artificial Sequence: Synthetic oligonucleotide
  Sense strand starting at position 32 of SEQ ID NO: 1284
ggagacccugccuguauaa

SEQ ID NO: 101871 - RNA, 19 nt, Artificial Sequence
  Description of Artificial Sequence: Synthetic oligonucleotide
  Antisense strand to SEQ ID NO: 101870
uuauacaggcagggucucc

SEQ ID NO: 101872 - RNA, 19 nt, Artificial Sequence
  Description of Artificial Sequence: Synthetic oligonucleotide
  Sense strand starting at position 31 of SEQ ID NO: 1284
gggagacccugccuguaua

SEQ ID NO: 101873 - RNA, 19 nt, Artificial Sequence
  Description of Artificial Sequence: Synthetic oligonucleotide
  Antisense strand to SEQ ID NO: 101872
uauacaggcagggucuccc

SEQ ID NO: 101874 - RNA, 19 nt, Artificial Sequence
  Description of Artificial Sequence: Synthetic oligonucleotide
  Sense strand starting at position 3965 of SEQ ID NO: 1285
agcgcagccaucuugugau

SEQ ID NO: 101875 - RNA, 19 nt, Artificial Sequence
  Description of Artificial Sequence: Synthetic oligonucleotide
  Antisense strand to SEQ ID NO: 101874
aucacaagauggcugcgcu

SEQ ID NO: 101876 - RNA, 19 nt, Artificial Sequence
  Description of Artificial Sequence: Synthetic oligonucleotide
  Sense strand starting at position 3797 of SEQ ID NO: 1285
cgcauuugucugugagauu

SEQ ID NO: 101877 - RNA, 19 nt, Artificial Sequence
  Description of Artificial Sequence: Synthetic oligonucleotide
  Antisense strand to SEQ ID NO: 101876
aaucucacagacaaaugcg

SEQ ID NO: 101878 - RNA, 19 nt, Artificial Sequence
  Description of Artificial Sequence: Synthetic oligonucleotide
  Sense strand starting at position 3796 of SEQ ID NO: 1285
ccgcauuugucugugagau

SEQ ID NO: 101879 - RNA, 19 nt, Artificial Sequence
  Description of Artificial Sequence: Synthetic oligonucleotide
  Antisense strand to SEQ ID NO: 101878
aucucacagacaaaugcgg

SEQ ID NO: 101880 - RNA, 19 nt, Artificial Sequence
  Description of Artificial Sequence: Synthetic oligonucleotide
  Sense strand starting at position 3795 of SEQ ID NO: 1285
gccgcauuugucugugaga

SEQ ID NO: 101881 - RNA, 19 nt, Artificial Sequence
  Description of Artificial Sequence: Synthetic oligonucleotide
  Antisense strand to SEQ ID NO: 101880
ucucacagacaaaugcggc

SEQ ID NO: 101882 - RNA, 19 nt, Artificial Sequence
  Description of Artificial Sequence: Synthetic oligonucleotide
  Sense strand starting at position 3643 of SEQ ID NO: 1285
guaucauuccaugagcauc

SEQ ID NO: 101883 - RNA, 19 nt, Artificial Sequence
  Description of Artificial Sequence: Synthetic oligonucleotide
  Antisense strand to SEQ ID NO: 101882
gaugcucauggaaugauac

SEQ ID NO: 101884 - RNA, 19 nt, Artificial Sequence
  Description of Artificial Sequence: Synthetic oligonucleotide
  Sense strand starting at position 3354 of SEQ ID NO: 1285
ggagaucuuccacgugaua

SEQ ID NO: 101885 - RNA, 19 nt, Artificial Sequence
  Description of Artificial Sequence: Synthetic oligonucleotide
  Antisense strand to SEQ ID NO: 101884
uaucacguggaagaucucc

SEQ ID NO: 101886 - RNA, 19 nt, Artificial Sequence
  Description of Artificial Sequence: Synthetic oligonucleotide
  Sense strand starting at position 3255 of SEQ ID NO: 1285
ccugaagcuugucugaacu

SEQ ID NO: 101887 - RNA, 19 nt, Artificial Sequence
  Description of Artificial Sequence: Synthetic oligonucleotide
  Antisense strand to SEQ ID NO: 101886
aguucagacaagcuucagg

SEQ ID NO: 101888 - RNA, 19 nt, Artificial Sequence
  Description of Artificial Sequence: Synthetic oligonucleotide
  Sense strand starting at position 3254 of SEQ ID NO: 1285
accugaagcuugucugaac

SEQ ID NO: 101889 - RNA, 19 nt, Artificial Sequence
  Description of Artificial Sequence: Synthetic oligonucleotide
  Antisense strand to SEQ ID NO: 101888
guucagacaagcuucaggu

SEQ ID NO: 101890 - RNA, 19 nt, Artificial Sequence
  Description of Artificial Sequence: Synthetic oligonucleotide
  Sense strand starting at position 3252 of SEQ ID NO: 1285
ggaccugaagcuugucuga

SEQ ID NO: 101891 - RNA, 19 nt, Artificial Sequence
  Description of Artificial Sequence: Synthetic oligonucleotide
  Antisense strand to SEQ ID NO: 101890
ucagacaagcuucaggucc

SEQ ID NO: 101892 - RNA, 19 nt, Artificial Sequence
  Description of Artificial Sequence: Synthetic oligonucleotide
  Sense strand starting at position 3133 of SEQ ID NO: 1285
gugaauuucugucuugcac

SEQ ID NO: 101893 - RNA, 19 nt, Artificial Sequence
  Description of Artificial Sequence: Synthetic oligonucleotide
  Antisense strand to SEQ ID NO: 101892
gugcaagacagaaauucac

SEQ ID NO: 101894 - RNA, 19 nt, Artificial Sequence
  Description of Artificial Sequence: Synthetic oligonucleotide
  Sense strand starting at position 3047 of SEQ ID NO: 1285
cugaaucaugccugcccaa

SEQ ID NO: 101895 - RNA, 19 nt, Artificial Sequence
  Description of Artificial Sequence: Synthetic oligonucleotide
  Antisense strand to SEQ ID NO: 101894
uugggcaggcaugauucag

SEQ ID NO: 101896 - RNA, 19 nt, Artificial Sequence
  Description of Artificial Sequence: Synthetic oligonucleotide
  Sense strand starting at position 2951 of SEQ ID NO: 1285
ggcagauuccucuauucuc

SEQ ID NO: 101897 - RNA, 19 nt, Artificial Sequence
  Description of Artificial Sequence: Synthetic oligonucleotide
  Antisense strand to SEQ ID NO: 101896
gagaauagaggaaucugcc

SEQ ID NO: 101898 - RNA, 19 nt, Artificial Sequence
  Description of Artificial Sequence: Synthetic oligonucleotide
  Sense strand starting at position 2914 of SEQ ID NO: 1285
uccauuuguucuccaggua

SEQ ID NO: 101899 - RNA, 19 nt, Artificial Sequence
  Description of Artificial Sequence: Synthetic oligonucleotide
  Antisense strand to SEQ ID NO: 101898
uaccuggagaacaaaugga

SEQ ID NO: 101900 - RNA, 19 nt, Artificial Sequence
  Description of Artificial Sequence: Synthetic oligonucleotide
  Sense strand starting at position 2863 of SEQ ID NO: 1285
guugaagucuccucaaaug

SEQ ID NO: 101901 - RNA, 19 nt, Artificial Sequence
  Description of Artificial Sequence: Synthetic oligonucleotide
  Antisense strand to SEQ ID NO: 101900
cauuugaggagacuucaac

SEQ ID NO: 101902 - RNA, 19 nt, Artificial Sequence
  Description of Artificial Sequence: Synthetic oligonucleotide
  Sense strand starting at position 2708 of SEQ ID NO: 1285
gagggcggucuauaaacuu

SEQ ID NO: 101903 - RNA, 19 nt, Artificial Sequence
  Description of Artificial Sequence: Synthetic oligonucleotide
  Antisense strand to SEQ ID NO: 101902
aaguuuauagaccgcccuc

SEQ ID NO: 101904 - RNA, 19 nt, Artificial Sequence
  Description of Artificial Sequence: Synthetic oligonucleotide
  Sense strand starting at position 2683 of SEQ ID NO: 1285
aggcaagcucauuaguaac

SEQ ID NO: 101905 - RNA, 19 nt, Artificial Sequence
  Description of Artificial Sequence: Synthetic oligonucleotide
  Antisense strand to SEQ ID NO: 101904
guuacuaaugagcuugccu

SEQ ID NO: 101906 - RNA, 19 nt, Artificial Sequence
  Description of Artificial Sequence: Synthetic oligonucleotide
  Sense strand starting at position 2526 of SEQ ID NO: 1285
gaggcuuauccuggcauuu

SEQ ID NO: 101907 - RNA, 19 nt, Artificial Sequence
  Description of Artificial Sequence: Synthetic oligonucleotide
  Antisense strand to SEQ ID NO: 101906
aaaugccaggauaagccuc

SEQ ID NO: 101908 - RNA, 19 nt, Artificial Sequence
  Description of Artificial Sequence: Synthetic oligonucleotide
  Sense strand starting at position 2419 of SEQ ID NO: 1285
aguugcugucucuacacaa

SEQ ID NO: 101909 - RNA, 19 nt, Artificial Sequence
  Description of Artificial Sequence: Synthetic oligonucleotide
  Antisense strand to SEQ ID NO: 101908
uuguguagagacagcaacu

SEQ ID NO: 101910 - RNA, 19 nt, Artificial Sequence
  Description of Artificial Sequence: Synthetic oligonucleotide
  Sense strand starting at position 2203 of SEQ ID NO: 1285
aagugaggucuuugucauc

SEQ ID NO: 101911 - RNA, 19 nt, Artificial Sequence
  Description of Artificial Sequence: Synthetic oligonucleotide
  Antisense strand to SEQ ID NO: 101910
gaugacaaagaccucacuu

SEQ ID NO: 101912 - RNA, 19 nt, Artificial Sequence
  Description of Artificial Sequence: Synthetic oligonucleotide
  Sense strand starting at position 2145 of SEQ ID NO: 1285
gaggucuuucugcaggcua

SEQ ID NO: 101913 - RNA, 19 nt, Artificial Sequence
  Description of Artificial Sequence: Synthetic oligonucleotide
  Antisense strand to SEQ ID NO: 101912
uagccugcagaaagaccuc

SEQ ID NO: 101914 - RNA, 19 nt, Artificial Sequence
  Description of Artificial Sequence: Synthetic oligonucleotide
  Sense strand starting at position 1237 of SEQ ID NO: 1285
aggaccuagcuuugaguuu

SEQ ID NO: 101915 - RNA, 19 nt, Artificial Sequence
  Description of Artificial Sequence: Synthetic oligonucleotide
  Antisense strand to SEQ ID NO: 101914
aaacucaaagcuagguccu

SEQ ID NO: 101916 - RNA, 19 nt, Artificial Sequence
  Description of Artificial Sequence: Synthetic oligonucleotide
  Sense strand starting at position 1214 of SEQ ID NO: 1285
gaguaccugugccuugaga

SEQ ID NO: 101917 - RNA, 19 nt, Artificial Sequence
  Description of Artificial Sequence: Synthetic oligonucleotide
  Antisense strand to SEQ ID NO: 101916
ucucaaggcacagguacuc

SEQ ID NO: 101918 - RNA, 19 nt, Artificial Sequence
  Description of Artificial Sequence: Synthetic oligonucleotide
  Sense strand starting at position 1086 of SEQ ID NO: 1285
uugacuugcagugaauaug

SEQ ID NO: 101919 - RNA, 19 nt, Artificial Sequence
  Description of Artificial Sequence: Synthetic oligonucleotide
  Antisense strand to SEQ ID NO: 101918
cauauucacugcaagucaa

SEQ ID NO: 101920 - RNA, 19 nt, Artificial Sequence
  Description of Artificial Sequence: Synthetic oligonucleotide
  Sense strand starting at position 1085 of SEQ ID NO: 1285
auugacuugcagugaauau

SEQ ID NO: 101921 - RNA, 19 nt, Artificial Sequence
  Description of Artificial Sequence: Synthetic oligonucleotide
  Antisense strand to SEQ ID NO: 101920
auauucacugcaagucaau

SEQ ID NO: 101922 - RNA, 19 nt, Artificial Sequence
  Description of Artificial Sequence: Synthetic oligonucleotide
  Sense strand starting at position 1080 of SEQ ID NO: 1285
ugauaauugacuugcagug

SEQ ID NO: 101923 - RNA, 19 nt, Artificial Sequence
  Description of Artificial Sequence: Synthetic oligonucleotide
  Antisense strand to SEQ ID NO: 101922
cacugcaagucaauuauca

SEQ ID NO: 101924 - RNA, 19 nt, Artificial Sequence
  Description of Artificial Sequence: Synthetic oligonucleotide
  Sense strand starting at position 1074 of SEQ ID NO: 1285
ggaaguugauaauugacuu

SEQ ID NO: 101925 - RNA, 19 nt, Artificial Sequence
  Description of Artificial Sequence: Synthetic oligonucleotide
  Antisense strand to SEQ ID NO: 101924
aagucaauuaucaacuucc

SEQ ID NO: 101926 - RNA, 19 nt, Artificial Sequence
  Description of Artificial Sequence: Synthetic oligonucleotide
  Sense strand starting at position 1024 of SEQ ID NO: 1285
ggcugaggauugguuuaaa

SEQ ID NO: 101927 - RNA, 19 nt, Artificial Sequence
  Description of Artificial Sequence: Synthetic oligonucleotide
  Antisense strand to SEQ ID NO: 101926
uuuaaaccaauccucagcc

SEQ ID NO: 101928 - RNA, 19 nt, Artificial Sequence
  Description of Artificial Sequence: Synthetic oligonucleotide
  Sense strand starting at position 1022 of SEQ ID NO: 1285
guggcugaggauugguuua

SEQ ID NO: 101929 - RNA, 19 nt, Artificial Sequence
  Description of Artificial Sequence: Synthetic oligonucleotide
  Antisense strand to SEQ ID NO: 101928
uaaaccaauccucagccac

SEQ ID NO: 101930 - RNA, 19 nt, Artificial Sequence
  Description of Artificial Sequence: Synthetic oligonucleotide
  Sense strand starting at position 876 of SEQ ID NO: 1285
cuucuaguugaguaaaucu

SEQ ID NO: 101931 - RNA, 19 nt, Artificial Sequence
  Description of Artificial Sequence: Synthetic oligonucleotide
  Antisense strand to SEQ ID NO: 101930
agauuuacucaacuagaag

SEQ ID NO: 101932 - RNA, 19 nt, Artificial Sequence
  Description of Artificial Sequence: Synthetic oligonucleotide
  Sense strand starting at position 875 of SEQ ID NO: 1285
ucuucuaguugaguaaauc

SEQ ID NO: 101933 - RNA, 19 nt, Artificial Sequence
  Description of Artificial Sequence: Synthetic oligonucleotide
  Antisense strand to SEQ ID NO: 101932
gauuuacucaacuagaaga

SEQ ID NO: 101934 - RNA, 19 nt, Artificial Sequence
  Description of Artificial Sequence: Synthetic oligonucleotide
  Sense strand starting at position 873 of SEQ ID NO: 1285
guucuucuaguugaguaaa

SEQ ID NO: 101935 - RNA, 19 nt, Artificial Sequence
  Description of Artificial Sequence: Synthetic oligonucleotide
  Antisense strand to SEQ ID NO: 101934
uuuacucaacuagaagaac

SEQ ID NO: 101936 - RNA, 19 nt, Artificial Sequence
  Description of Artificial Sequence: Synthetic oligonucleotide
  Sense strand starting at position 451 of SEQ ID NO: 1285
ugaguucuuuccuuaucac

SEQ ID NO: 101937 - RNA, 19 nt, Artificial Sequence
  Description of Artificial Sequence: Synthetic oligonucleotide
  Antisense strand to SEQ ID NO: 101936
gugauaaggaaagaacuca

SEQ ID NO: 101938 - RNA, 19 nt, Artificial Sequence
  Description of Artificial Sequence: Synthetic oligonucleotide
  Sense strand starting at position 446 of SEQ ID NO: 1285
aaaggugaguucuuuccuu

SEQ ID NO: 101939 - RNA, 19 nt, Artificial Sequence
  Description of Artificial Sequence: Synthetic oligonucleotide
  Antisense strand to SEQ ID NO: 101938
aaggaaagaacucaccuuu

SEQ ID NO: 101940 - RNA, 19 nt, Artificial Sequence
  Description of Artificial Sequence: Synthetic oligonucleotide
  Sense strand starting at position 442 of SEQ ID NO: 1285
ccagaaaggugaguucuuu

SEQ ID NO: 101941 - RNA, 19 nt, Artificial Sequence
  Description of Artificial Sequence: Synthetic oligonucleotide
  Antisense strand to SEQ ID NO: 101940
aaagaacucaccuuucugg

SEQ ID NO: 101942 - RNA, 19 nt, Artificial Sequence
  Description of Artificial Sequence: Synthetic oligonucleotide
  Sense strand starting at position 388 of SEQ ID NO: 1285
agaugacagugucugcaaa

SEQ ID NO: 101943 - RNA, 19 nt, Artificial Sequence
  Description of Artificial Sequence: Synthetic oligonucleotide
  Antisense strand to SEQ ID NO: 101942
uuugcagacacugucaucu

SEQ ID NO: 101944 - RNA, 19 nt, Artificial Sequence
  Description of Artificial Sequence: Synthetic oligonucleotide
  Sense strand starting at position 292 of SEQ ID NO: 1285
uguacaguccacuagauua

SEQ ID NO: 101945 - RNA, 19 nt, Artificial Sequence
  Description of Artificial Sequence: Synthetic oligonucleotide
  Antisense strand to SEQ ID NO: 101944
uaaucuaguggacuguaca

SEQ ID NO: 101946 - RNA, 19 nt, Artificial Sequence
  Description of Artificial Sequence: Synthetic oligonucleotide
  Sense strand starting at position 181 of SEQ ID NO: 1285
aggcaagauucuuugccuu

SEQ ID NO: 101947 - RNA, 19 nt, Artificial Sequence
  Description of Artificial Sequence: Synthetic oligonucleotide
  Antisense strand to SEQ ID NO: 101946
aaggcaaagaaucuugccu

SEQ ID NO: 101948 - RNA, 19 nt, Artificial Sequence
  Description of Artificial Sequence: Synthetic oligonucleotide
  Sense strand starting at position 121 of SEQ ID NO: 1285
gucuguuggcuguaauaaa

SEQ ID NO: 101949 - RNA, 19 nt, Artificial Sequence
  Description of Artificial Sequence: Synthetic oligonucleotide
  Antisense strand to SEQ ID NO: 101948
uuuauuacagccaacagac

SEQ ID NO: 101950 - RNA, 19 nt, Artificial Sequence
  Description of Artificial Sequence: Synthetic oligonucleotide
  Sense strand starting at position 43 of SEQ ID NO: 1285
gcuugugaauuaucuggac

SEQ ID NO: 101951 - RNA, 19 nt, Artificial Sequence
  Description of Artificial Sequence: Synthetic oligonucleotide
  Antisense strand to SEQ ID NO: 101950
guccagauaauucacaagc

SEQ ID NO: 101952 - RNA, 19 nt, Artificial Sequence
  Description of Artificial Sequence: Synthetic oligonucleotide
  Sense strand starting at position 15 of SEQ ID NO: 1285
ucucaauaaugagaggaaa

SEQ ID NO: 101953 - RNA, 19 nt, Artificial Sequence
  Description of Artificial Sequence: Synthetic oligonucleotide
  Antisense strand to SEQ ID NO: 101952
uuuccucucauuauugaga

SEQ ID NO: 101954 - RNA, 19 nt, Artificial Sequence
  Description of Artificial Sequence: Synthetic oligonucleotide
  Sense strand starting at position 3502 of SEQ ID NO: 1286
gugaaacucugacucagaa

SEQ ID NO: 101955 - RNA, 19 nt, Artificial Sequence
  Description of Artificial Sequence: Synthetic oligonucleotide
  Antisense strand to SEQ ID NO: 101954
uucugagucagaguuucac

SEQ ID NO: 101956 - RNA, 19 nt, Artificial Sequence
  Description of Artificial Sequence: Synthetic oligonucleotide
  Sense strand starting at position 3276 of SEQ ID NO: 1286
agcugcugcagagaagaau

SEQ ID NO: 101957 - RNA, 19 nt, Artificial Sequence
  Description of Artificial Sequence: Synthetic oligonucleotide
  Antisense strand to SEQ ID NO: 101956
auucuucucugcagcagcu

SEQ ID NO: 101958 - RNA, 19 nt, Artificial Sequence
  Description of Artificial Sequence: Synthetic oligonucleotide
  Sense strand starting at position 3240 of SEQ ID NO: 1286
ggacauuccagguggcaaa

SEQ ID NO: 101959 - RNA, 19 nt, Artificial Sequence
  Description of Artificial Sequence: Synthetic oligonucleotide
  Antisense strand to SEQ ID NO: 101958
uuugccaccuggaaugucc

SEQ ID NO: 101960 - RNA, 19 nt, Artificial Sequence
  Description of Artificial Sequence: Synthetic oligonucleotide
  Sense strand starting at position 3209 of SEQ ID NO: 1286
ucagaagagcuuggaucuu

SEQ ID NO: 101961 - RNA, 19 nt, Artificial Sequence
  Description of Artificial Sequence: Synthetic oligonucleotide
  Antisense strand to SEQ ID NO: 101960
aagauccaagcucuucuga

SEQ ID NO: 101962 - RNA, 19 nt, Artificial Sequence
  Description of Artificial Sequence: Synthetic oligonucleotide
  Sense strand starting at position 3208 of SEQ ID NO: 1286
cucagaagagcuuggaucu

SEQ ID NO: 101963 - RNA, 19 nt, Artificial Sequence
  Description of Artificial Sequence: Synthetic oligonucleotide
  Antisense strand to SEQ ID NO: 101962
agauccaagcucuucugag

SEQ ID NO: 101964 - RNA, 19 nt, Artificial Sequence
  Description of Artificial Sequence: Synthetic oligonucleotide
  Sense strand starting at position 3182 of SEQ ID NO: 1286
ugcauucuagaaggucaaa

SEQ ID NO: 101965 - RNA, 19 nt, Artificial Sequence
  Description of Artificial Sequence: Synthetic oligonucleotide
  Antisense strand to SEQ ID NO: 101964
uuugaccuucuagaaugca

SEQ ID NO: 101966 - RNA, 19 nt, Artificial Sequence
  Description of Artificial Sequence: Synthetic oligonucleotide
  Sense strand starting at position 3137 of SEQ ID NO: 1286
ucuuuauugggaggaucuu

SEQ ID NO: 101967 - RNA, 19 nt, Artificial Sequence
  Description of Artificial Sequence: Synthetic oligonucleotide
  Antisense strand to SEQ ID NO: 101966
aagauccucccaauaaaga

SEQ ID NO: 101968 - RNA, 19 nt, Artificial Sequence
  Description of Artificial Sequence: Synthetic oligonucleotide
  Sense strand starting at position 3135 of SEQ ID NO: 1286
gaucuuuauugggaggauc

SEQ ID NO: 101969 - RNA, 19 nt, Artificial Sequence
  Description of Artificial Sequence: Synthetic oligonucleotide
  Antisense strand to SEQ ID NO: 101968
gauccucccaauaaagauc

SEQ ID NO: 101970 - RNA, 19 nt, Artificial Sequence
  Description of Artificial Sequence: Synthetic oligonucleotide
  Sense strand starting at position 3134 of SEQ ID NO: 1286
agaucuuuauugggaggau

SEQ ID NO: 101971 - RNA, 19 nt, Artificial Sequence
  Description of Artificial Sequence: Synthetic oligonucleotide
  Antisense strand to SEQ ID NO: 101970
auccucccaauaaagaucu

SEQ ID NO: 101972 - RNA, 19 nt, Artificial Sequence
  Description of Artificial Sequence: Synthetic oligonucleotide
  Sense strand starting at position 3119 of SEQ ID NO: 1286
ggucgacucaaagggagau

SEQ ID NO: 101973 - RNA, 19 nt, Artificial Sequence
  Description of Artificial Sequence: Synthetic oligonucleotide
  Antisense strand to SEQ ID NO: 101972
aucucccuuugagucgacc

SEQ ID NO: 101974 - RNA, 19 nt, Artificial Sequence
  Description of Artificial Sequence: Synthetic oligonucleotide
  Sense strand starting at position 3091 of SEQ ID NO: 1286
cgcugauuucaccgggauc

SEQ ID NO: 101975 - RNA, 19 nt, Artificial Sequence
  Description of Artificial Sequence: Synthetic oligonucleotide
  Antisense strand to SEQ ID NO: 101974
gaucccggugaaaucagcg

SEQ ID NO: 101976 - RNA, 19 nt, Artificial Sequence
  Description of Artificial Sequence: Synthetic oligonucleotide
  Sense strand starting at position 2956 of SEQ ID NO: 1286
ugucgaauuggaugucacu

SEQ ID NO: 101977 - RNA, 19 nt, Artificial Sequence
  Description of Artificial Sequence: Synthetic oligonucleotide
  Antisense strand to SEQ ID NO: 101976
agugacauccaauucgaca

SEQ ID NO: 101978 - RNA, 19 nt, Artificial Sequence
  Description of Artificial Sequence: Synthetic oligonucleotide
  Sense strand starting at position 2945 of SEQ ID NO: 1286
uagugaaugucugucgaau

SEQ ID NO: 101979 - RNA, 19 nt, Artificial Sequence
  Description of Artificial Sequence: Synthetic oligonucleotide
  Antisense strand to SEQ ID NO: 101978
auucgacagacauucacua

SEQ ID NO: 101980 - RNA, 19 nt, Artificial Sequence
  Description of Artificial Sequence: Synthetic oligonucleotide
  Sense strand starting at position 2894 of SEQ ID NO: 1286
gagugucugcuuuguacac

SEQ ID NO: 101981 - RNA, 19 nt, Artificial Sequence
  Description of Artificial Sequence: Synthetic oligonucleotide
  Antisense strand to SEQ ID NO: 101980
guguacaaagcagacacuc

SEQ ID NO: 101982 - RNA, 19 nt, Artificial Sequence
  Description of Artificial Sequence: Synthetic oligonucleotide
  Sense strand starting at position 2875 of SEQ ID NO: 1286
cucccuuucugaguuuauu

SEQ ID NO: 101983 - RNA, 19 nt, Artificial Sequence
  Description of Artificial Sequence: Synthetic oligonucleotide
  Antisense strand to SEQ ID NO: 101982
aauaaacucagaaagggag

SEQ ID NO: 101984 - RNA, 19 nt, Artificial Sequence
  Description of Artificial Sequence: Synthetic oligonucleotide
  Sense strand starting at position 2843 of SEQ ID NO: 1286
gauauaaagucuuagcaag

SEQ ID NO: 101985 - RNA, 19 nt, Artificial Sequence
  Description of Artificial Sequence: Synthetic oligonucleotide
  Antisense strand to SEQ ID NO: 101984
cuugcuaagacuuuauauc

SEQ ID NO: 101986 - RNA, 19 nt, Artificial Sequence
  Description of Artificial Sequence: Synthetic oligonucleotide
  Sense strand starting at position 2827 of SEQ ID NO: 1286
guuucucuaucugcuagau

SEQ ID NO: 101987 - RNA, 19 nt, Artificial Sequence
  Description of Artificial Sequence: Synthetic oligonucleotide
  Antisense strand to SEQ ID NO: 101986
aucuagcagauagagaaac

SEQ ID NO: 101988 - RNA, 19 nt, Artificial Sequence
  Description of Artificial Sequence: Synthetic oligonucleotide
  Sense strand starting at position 2820 of SEQ ID NO: 1286
gguuaugguuucucuaucu

SEQ ID NO: 101989 - RNA, 19 nt, Artificial Sequence
  Description of Artificial Sequence: Synthetic oligonucleotide
  Antisense strand to SEQ ID NO: 101988
agauagagaaaccauaacc

SEQ ID NO: 101990 - RNA, 19 nt, Artificial Sequence
  Description of Artificial Sequence: Synthetic oligonucleotide
  Sense strand starting at position 2807 of SEQ ID NO: 1286
uacuuugugcuaugguuau

SEQ ID NO: 101991 - RNA, 19 nt, Artificial Sequence
  Description of Artificial Sequence: Synthetic oligonucleotide
  Antisense strand to SEQ ID NO: 101990
auaaccauagcacaaagua

SEQ ID NO: 101992 - RNA, 19 nt, Artificial Sequence
  Description of Artificial Sequence: Synthetic oligonucleotide
  Sense strand starting at position 2692 of SEQ ID NO: 1286
uuaagacccgucuauugga

SEQ ID NO: 101993 - RNA, 19 nt, Artificial Sequence
  Description of Artificial Sequence: Synthetic oligonucleotide
  Antisense strand to SEQ ID NO: 101992
uccaauagacgggucuuaa

SEQ ID NO: 101994 - RNA, 19 nt, Artificial Sequence
  Description of Artificial Sequence: Synthetic oligonucleotide
  Sense strand starting at position 2527 of SEQ ID NO: 1286
gcagcacauuccuccugau

SEQ ID NO: 101995 - RNA, 19 nt, Artificial Sequence
  Description of Artificial Sequence: Synthetic oligonucleotide
  Antisense strand to SEQ ID NO: 101994
aucaggaggaaugugcugc

SEQ ID NO: 101996 - RNA, 19 nt, Artificial Sequence
  Description of Artificial Sequence: Synthetic oligonucleotide
  Sense strand starting at position 2370 of SEQ ID NO: 1286
cccgucuguccucaucaaa

SEQ ID NO: 101997 - RNA, 19 nt, Artificial Sequence
  Description of Artificial Sequence: Synthetic oligonucleotide
  Antisense strand to SEQ ID NO: 101996
uuugaugaggacagacggg

SEQ ID NO: 101998 - RNA, 19 nt, Artificial Sequence
  Description of Artificial Sequence: Synthetic oligonucleotide
  Sense strand starting at position 2369 of SEQ ID NO: 1286
ucccgucuguccucaucaa

SEQ ID NO: 101999 - RNA, 19 nt, Artificial Sequence
  Description of Artificial Sequence: Synthetic oligonucleotide
  Antisense strand to SEQ ID NO: 101998
uugaugaggacagacggga

SEQ ID NO: 102000 - RNA, 19 nt, Artificial Sequence
  Description of Artificial Sequence: Synthetic oligonucleotide
  Sense strand starting at position 2276 of SEQ ID NO: 1286
cucucuucuccgggucaaa

SEQ ID NO: 102001 - RNA, 19 nt, Artificial Sequence
  Description of Artificial Sequence: Synthetic oligonucleotide
  Antisense strand to SEQ ID NO: 102000
uuugacccggagaagagag

SEQ ID NO: 102002 - RNA, 19 nt, Artificial Sequence
  Description of Artificial Sequence: Synthetic oligonucleotide
  Sense strand starting at position 1321 of SEQ ID NO: 1286
agagaaaucguucagugca

SEQ ID NO: 102003 - RNA, 19 nt, Artificial Sequence
  Description of Artificial Sequence: Synthetic oligonucleotide
  Antisense strand to SEQ ID NO: 102002
ugcacugaacgauuucucu

SEQ ID NO: 102004 - RNA, 19 nt, Artificial Sequence
  Description of Artificial Sequence: Synthetic oligonucleotide
  Sense strand starting at position 1252 of SEQ ID NO: 1286
gggaauuacuuucuggcca

SEQ ID NO: 102005 - RNA, 19 nt, Artificial Sequence
  Description of Artificial Sequence: Synthetic oligonucleotide
  Antisense strand to SEQ ID NO: 102004
uggccagaaaguaauuccc

SEQ ID NO: 102006 - RNA, 19 nt, Artificial Sequence
  Description of Artificial Sequence: Synthetic oligonucleotide
  Sense strand starting at position 1241 of SEQ ID NO: 1286
aucuuccugcugggaauua

SEQ ID NO: 102007 - RNA, 19 nt, Artificial Sequence
  Description of Artificial Sequence: Synthetic oligonucleotide
  Antisense strand to SEQ ID NO: 102006
uaauucccagcaggaagau

SEQ ID NO: 102008 - RNA, 19 nt, Artificial Sequence
  Description of Artificial Sequence: Synthetic oligonucleotide
  Sense strand starting at position 1203 of SEQ ID NO: 1286
gucuucuucccggauaaag

SEQ ID NO: 102009 - RNA, 19 nt, Artificial Sequence
  Description of Artificial Sequence: Synthetic oligonucleotide
  Antisense strand to SEQ ID NO: 102008
cuuuauccgggaagaagac

SEQ ID NO: 102010 - RNA, 19 nt, Artificial Sequence
  Description of Artificial Sequence: Synthetic oligonucleotide
  Sense strand starting at position 1202 of SEQ ID NO: 1286
ugucuucuucccggauaaa

SEQ ID NO: 102011 - RNA, 19 nt, Artificial Sequence
  Description of Artificial Sequence: Synthetic oligonucleotide
  Antisense strand to SEQ ID NO: 102010
uuuauccgggaagaagaca

SEQ ID NO: 102012 - RNA, 19 nt, Artificial Sequence
  Description of Artificial Sequence: Synthetic oligonucleotide
  Sense strand starting at position 1087 of SEQ ID NO: 1286
cguaacacuugccaagaaa

SEQ ID NO: 102013 - RNA, 19 nt, Artificial Sequence
  Description of Artificial Sequence: Synthetic oligonucleotide
  Antisense strand to SEQ ID NO: 102012
uuucuuggcaaguguuacg

SEQ ID NO: 102014 - RNA, 19 nt, Artificial Sequence
  Description of Artificial Sequence: Synthetic oligonucleotide
  Sense strand starting at position 1086 of SEQ ID NO: 1286
acguaacacuugccaagaa

SEQ ID NO: 102015 - RNA, 19 nt, Artificial Sequence
  Description of Artificial Sequence: Synthetic oligonucleotide
  Antisense strand to SEQ ID NO: 102014
uucuuggcaaguguuacgu

SEQ ID NO: 102016 - RNA, 19 nt, Artificial Sequence
  Description of Artificial Sequence: Synthetic oligonucleotide
  Sense strand starting at position 1033 of SEQ ID NO: 1286
ggugcuucucgcuuuaucu

SEQ ID NO: 102017 - RNA, 19 nt, Artificial Sequence
  Description of Artificial Sequence: Synthetic oligonucleotide
  Antisense strand to SEQ ID NO: 102016
agauaaagcgagaagcacc

SEQ ID NO: 102018 - RNA, 19 nt, Artificial Sequence
  Description of Artificial Sequence: Synthetic oligonucleotide
  Sense strand starting at position 629 of SEQ ID NO: 1286
gcaggcuucuccuuaccaa

SEQ ID NO: 102019 - RNA, 19 nt, Artificial Sequence
  Description of Artificial Sequence: Synthetic oligonucleotide
  Antisense strand to SEQ ID NO: 102018
uugguaaggagaagccugc

SEQ ID NO: 102020 - RNA, 19 nt, Artificial Sequence
  Description of Artificial Sequence: Synthetic oligonucleotide
  Sense strand starting at position 551 of SEQ ID NO: 1286
ucucccaguguuuaaauga

SEQ ID NO: 102021 - RNA, 19 nt, Artificial Sequence
  Description of Artificial Sequence: Synthetic oligonucleotide
  Antisense strand to SEQ ID NO: 102020
ucauuuaaacacugggaga

SEQ ID NO: 102022 - RNA, 19 nt, Artificial Sequence
  Description of Artificial Sequence: Synthetic oligonucleotide
  Sense strand starting at position 547 of SEQ ID NO: 1286
ccacucucccaguguuuaa

SEQ ID NO: 102023 - RNA, 19 nt, Artificial Sequence
  Description of Artificial Sequence: Synthetic oligonucleotide
  Antisense strand to SEQ ID NO: 102022
uuaaacacugggagagugg

SEQ ID NO: 102024 - RNA, 19 nt, Artificial Sequence
  Description of Artificial Sequence: Synthetic oligonucleotide
  Sense strand starting at position 338 of SEQ ID NO: 1286
acucuuuaguuagagaaau

SEQ ID NO: 102025 - RNA, 19 nt, Artificial Sequence
  Description of Artificial Sequence: Synthetic oligonucleotide
  Antisense strand to SEQ ID NO: 102024
auuucucuaacuaaagagu

SEQ ID NO: 102026 - RNA, 19 nt, Artificial Sequence
  Description of Artificial Sequence: Synthetic oligonucleotide
  Sense strand starting at position 335 of SEQ ID NO: 1286
ucuacucuuuaguuagaga

SEQ ID NO: 102027 - RNA, 19 nt, Artificial Sequence
  Description of Artificial Sequence: Synthetic oligonucleotide
  Antisense strand to SEQ ID NO: 102026
ucucuaacuaaagaguaga

SEQ ID NO: 102028 - RNA, 19 nt, Artificial Sequence
  Description of Artificial Sequence: Synthetic oligonucleotide
  Sense strand starting at position 315 of SEQ ID NO: 1286
uggaauaaugccuaguucu

SEQ ID NO: 102029 - RNA, 19 nt, Artificial Sequence
  Description of Artificial Sequence: Synthetic oligonucleotide
  Antisense strand to SEQ ID NO: 102028
agaacuaggcauuauucca

SEQ ID NO: 102030 - RNA, 19 nt, Artificial Sequence
  Description of Artificial Sequence: Synthetic oligonucleotide
  Sense strand starting at position 305 of SEQ ID NO: 1286
auggaaacauuggaauaau

SEQ ID NO: 102031 - RNA, 19 nt, Artificial Sequence
  Description of Artificial Sequence: Synthetic oligonucleotide
  Antisense strand to SEQ ID NO: 102030
auuauuccaauguuuccau

SEQ ID NO: 102032 - RNA, 19 nt, Artificial Sequence
  Description of Artificial Sequence: Synthetic oligonucleotide
  Sense strand starting at position 249 of SEQ ID NO: 1286
uggguugacgauuagaagu

SEQ ID NO: 102033 - RNA, 19 nt, Artificial Sequence
  Description of Artificial Sequence: Synthetic oligonucleotide
  Antisense strand to SEQ ID NO: 102032
acuucuaaucgucaaccca

SEQ ID NO: 102034 - RNA, 19 nt, Artificial Sequence
  Description of Artificial Sequence: Synthetic oligonucleotide
  Sense strand starting at position 286 of SEQ ID NO: 1287
ccuggauggcucugaaugu

SEQ ID NO: 102035 - RNA, 19 nt, Artificial Sequence
  Description of Artificial Sequence: Synthetic oligonucleotide
  Antisense strand to SEQ ID NO: 102034
acauucagagccauccagg

SEQ ID NO: 102036 - RNA, 19 nt, Artificial Sequence
  Description of Artificial Sequence: Synthetic oligonucleotide
  Sense strand starting at position 295 of SEQ ID NO: 1287
cucugaaugugguccaaca

SEQ ID NO: 102037 - RNA, 19 nt, Artificial Sequence
  Description of Artificial Sequence: Synthetic oligonucleotide
  Antisense strand to SEQ ID NO: 102036
uguuggaccacauucagag

SEQ ID NO: 102038 - RNA, 19 nt, Artificial Sequence
  Description of Artificial Sequence: Synthetic oligonucleotide
  Sense strand starting at position 297 of SEQ ID NO: 1287
cugaaugugguccaacaca

SEQ ID NO: 102039 - RNA, 19 nt, Artificial Sequence
  Description of Artificial Sequence: Synthetic oligonucleotide
  Antisense strand to SEQ ID NO: 102038
uguguuggaccacauucag

SEQ ID NO: 102040 - RNA, 19 nt, Artificial Sequence
  Description of Artificial Sequence: Synthetic oligonucleotide
  Sense strand starting at position 408 of SEQ ID NO: 1287
ccaagaugguucuucuucu

SEQ ID NO: 102041 - RNA, 19 nt, Artificial Sequence
  Description of Artificial Sequence: Synthetic oligonucleotide
  Antisense strand to SEQ ID NO: 102040
agaagaagaaccaucuugg

SEQ ID NO: 102042 - RNA, 19 nt, Artificial Sequence
  Description of Artificial Sequence: Synthetic oligonucleotide
  Sense strand starting at position 457 of SEQ ID NO: 1287
ggacaccacugcucuauau

SEQ ID NO: 102043 - RNA, 19 nt, Artificial Sequence
  Description of Artificial Sequence: Synthetic oligonucleotide
  Antisense strand to SEQ ID NO: 102042
auauagagcaguggugucc

SEQ ID NO: 102044 - RNA, 19 nt, Artificial Sequence
  Description of Artificial Sequence: Synthetic oligonucleotide
  Sense strand starting at position 461 of SEQ ID NO: 1287
accacugcucuauauagua

SEQ ID NO: 102045 - RNA, 19 nt, Artificial Sequence
  Description of Artificial Sequence: Synthetic oligonucleotide
  Antisense strand to SEQ ID NO: 102044
uacuauauagagcaguggu

SEQ ID NO: 102046 - RNA, 19 nt, Artificial Sequence
  Description of Artificial Sequence: Synthetic oligonucleotide
  Sense strand starting at position 469 of SEQ ID NO: 1287
ucuauauaguaggcaauga

SEQ ID NO: 102047 - RNA, 19 nt, Artificial Sequence
  Description of Artificial Sequence: Synthetic oligonucleotide
  Antisense strand to SEQ ID NO: 102046
ucauugccuacuauauaga

SEQ ID NO: 102048 - RNA, 19 nt, Artificial Sequence
  Description of Artificial Sequence: Synthetic oligonucleotide
  Sense strand starting at position 491 of SEQ ID NO: 1287
ccaccaagguuuccgagua

SEQ ID NO: 102049 - RNA, 19 nt, Artificial Sequence
  Description of Artificial Sequence: Synthetic oligonucleotide
  Antisense strand to SEQ ID NO: 102048
uacucggaaaccuuggugg

SEQ ID NO: 102050 - RNA, 19 nt, Artificial Sequence
  Description of Artificial Sequence: Synthetic oligonucleotide
  Sense strand starting at position 873 of SEQ ID NO: 1287
agcccagcccucuaaugaa

SEQ ID NO: 102051 - RNA, 19 nt, Artificial Sequence
  Description of Artificial Sequence: Synthetic oligonucleotide
  Antisense strand to SEQ ID NO: 102050
uucauuagagggcugggcu

SEQ ID NO: 102052 - RNA, 19 nt, Artificial Sequence
  Description of Artificial Sequence: Synthetic oligonucleotide
  Sense strand starting at position 937 of SEQ ID NO: 1287
uggugauccagugagacau

SEQ ID NO: 102053 - RNA, 19 nt, Artificial Sequence
  Description of Artificial Sequence: Synthetic oligonucleotide
  Antisense strand to SEQ ID NO: 102052
augucucacuggaucacca

SEQ ID NO: 102054 - RNA, 19 nt, Artificial Sequence
  Description of Artificial Sequence: Synthetic oligonucleotide
  Sense strand starting at position 1018 of SEQ ID NO: 1287
ucaguuccaucuguaaauc

SEQ ID NO: 102055 - RNA, 19 nt, Artificial Sequence
  Description of Artificial Sequence: Synthetic oligonucleotide
  Antisense strand to SEQ ID NO: 102054
gauuuacagauggaacuga

SEQ ID NO: 102056 - RNA, 19 nt, Artificial Sequence
  Description of Artificial Sequence: Synthetic oligonucleotide
  Sense strand starting at position 1076 of SEQ ID NO: 1287
cucagagccuuucuaaagu

SEQ ID NO: 102057 - RNA, 19 nt, Artificial Sequence
  Description of Artificial Sequence: Synthetic oligonucleotide
  Antisense strand to SEQ ID NO: 102056
acuuuagaaaggcucugag

SEQ ID NO: 102058 - RNA, 19 nt, Artificial Sequence
  Description of Artificial Sequence: Synthetic oligonucleotide
  Sense strand starting at position 1221 of SEQ ID NO: 1287
auggccauuuccuagggaa

SEQ ID NO: 102059 - RNA, 19 nt, Artificial Sequence
  Description of Artificial Sequence: Synthetic oligonucleotide
  Antisense strand to SEQ ID NO: 102058
uucccuaggaaauggccau

SEQ ID NO: 102060 - RNA, 19 nt, Artificial Sequence
  Description of Artificial Sequence: Synthetic oligonucleotide
  Sense strand starting at position 1546 of SEQ ID NO: 1287
ucacaaauuccucacguga

SEQ ID NO: 102061 - RNA, 19 nt, Artificial Sequence
  Description of Artificial Sequence: Synthetic oligonucleotide
  Antisense strand to SEQ ID NO: 102060
ucacgugaggaauuuguga

SEQ ID NO: 102062 - RNA, 19 nt, Artificial Sequence
  Description of Artificial Sequence: Synthetic oligonucleotide
  Sense strand starting at position 1617 of SEQ ID NO: 1287
gguccugaucccugggaga

SEQ ID NO: 102063 - RNA, 19 nt, Artificial Sequence
  Description of Artificial Sequence: Synthetic oligonucleotide
  Antisense strand to SEQ ID NO: 102062
ucucccagggaucaggacc

SEQ ID NO: 102064 - RNA, 19 nt, Artificial Sequence
  Description of Artificial Sequence: Synthetic oligonucleotide
  Sense strand starting at position 1861 of SEQ ID NO: 1287
ggaggaauaccucgcaggu

SEQ ID NO: 102065 - RNA, 19 nt, Artificial Sequence
  Description of Artificial Sequence: Synthetic oligonucleotide
  Antisense strand to SEQ ID NO: 102064
accugcgagguauuccucc

SEQ ID NO: 102066 - RNA, 19 nt, Artificial Sequence
  Description of Artificial Sequence: Synthetic oligonucleotide
  Sense strand starting at position 2315 of SEQ ID NO: 1287
gggccaauucuguacaauu

SEQ ID NO: 102067 - RNA, 19 nt, Artificial Sequence
  Description of Artificial Sequence: Synthetic oligonucleotide
  Antisense strand to SEQ ID NO: 102066
aauuguacagaauuggccc

SEQ ID NO: 102068 - RNA, 19 nt, Artificial Sequence
  Description of Artificial Sequence: Synthetic oligonucleotide
  Sense strand starting at position 2341 of SEQ ID NO: 1287
aagucugagugccuagaau

SEQ ID NO: 102069 - RNA, 19 nt, Artificial Sequence
  Description of Artificial Sequence: Synthetic oligonucleotide
  Antisense strand to SEQ ID NO: 102068
auucuaggcacucagacuu

SEQ ID NO: 102070 - RNA, 19 nt, Artificial Sequence
  Description of Artificial Sequence: Synthetic oligonucleotide
  Sense strand starting at position 2366 of SEQ ID NO: 1287
auaagaguuucuccuugag

SEQ ID NO: 102071 - RNA, 19 nt, Artificial Sequence
  Description of Artificial Sequence: Synthetic oligonucleotide
  Antisense strand to SEQ ID NO: 102070
cucaaggagaaacucuuau

SEQ ID NO: 102072 - RNA, 19 nt, Artificial Sequence
  Description of Artificial Sequence: Synthetic oligonucleotide
  Sense strand starting at position 2368 of SEQ ID NO: 1287
aagaguuucuccuugagua

SEQ ID NO: 102073 - RNA, 19 nt, Artificial Sequence
  Description of Artificial Sequence: Synthetic oligonucleotide
  Antisense strand to SEQ ID NO: 102072
uacucaaggagaaacucuu

SEQ ID NO: 102074 - RNA, 19 nt, Artificial Sequence
  Description of Artificial Sequence: Synthetic oligonucleotide
  Sense strand starting at position 2369 of SEQ ID NO: 1287
agaguuucuccuugaguac

SEQ ID NO: 102075 - RNA, 19 nt, Artificial Sequence
  Description of Artificial Sequence: Synthetic oligonucleotide
  Antisense strand to SEQ ID NO: 102074
guacucaaggagaaacucu

SEQ ID NO: 102076 - RNA, 19 nt, Artificial Sequence
  Description of Artificial Sequence: Synthetic oligonucleotide
  Sense strand starting at position 2370 of SEQ ID NO: 1287
gaguuucuccuugaguaca

SEQ ID NO: 102077 - RNA, 19 nt, Artificial Sequence
  Description of Artificial Sequence: Synthetic oligonucleotide
  Antisense strand to SEQ ID NO: 102076
uguacucaaggagaaacuc

SEQ ID NO: 102078 - RNA, 19 nt, Artificial Sequence
  Description of Artificial Sequence: Synthetic oligonucleotide
  Sense strand starting at position 2461 of SEQ ID NO: 1287
agguuaaugccucaaccag

SEQ ID NO: 102079 - RNA, 19 nt, Artificial Sequence
  Description of Artificial Sequence: Synthetic oligonucleotide
  Antisense strand to SEQ ID NO: 102078
cugguugaggcauuaaccu

SEQ ID NO: 102080 - RNA, 19 nt, Artificial Sequence
  Description of Artificial Sequence: Synthetic oligonucleotide
  Sense strand starting at position 2527 of SEQ ID NO: 1287
gagaguguggacugggauu

SEQ ID NO: 102081 - RNA, 19 nt, Artificial Sequence
  Description of Artificial Sequence: Synthetic oligonucleotide
  Antisense strand to SEQ ID NO: 102080
aaucccaguccacacucuc

SEQ ID NO: 102082 - RNA, 19 nt, Artificial Sequence
  Description of Artificial Sequence: Synthetic oligonucleotide
  Sense strand starting at position 2556 of SEQ ID NO: 1287
gcugacuccgagugaugga

SEQ ID NO: 102083 - RNA, 19 nt, Artificial Sequence
  Description of Artificial Sequence: Synthetic oligonucleotide
  Antisense strand to SEQ ID NO: 102082
uccaucacucggagucagc

SEQ ID NO: 102084 - RNA, 19 nt, Artificial Sequence
  Description of Artificial Sequence: Synthetic oligonucleotide
  Sense strand starting at position 2565 of SEQ ID NO: 1287
gagugauggaggugaacau

SEQ ID NO: 102085 - RNA, 19 nt, Artificial Sequence
  Description of Artificial Sequence: Synthetic oligonucleotide
  Antisense strand to SEQ ID NO: 102084
auguucaccuccaucacuc

SEQ ID NO: 102086 - RNA, 19 nt, Artificial Sequence
  Description of Artificial Sequence: Synthetic oligonucleotide
  Sense strand starting at position 2601 of SEQ ID NO: 1287
caggauuaucgugaggauu

SEQ ID NO: 102087 - RNA, 19 nt, Artificial Sequence
  Description of Artificial Sequence: Synthetic oligonucleotide
  Antisense strand to SEQ ID NO: 102086
aauccucacgauaauccug

SEQ ID NO: 102088 - RNA, 19 nt, Artificial Sequence
  Description of Artificial Sequence: Synthetic oligonucleotide
  Sense strand starting at position 2649 of SEQ ID NO: 1287
gggacuugcuucccaucau

SEQ ID NO: 102089 - RNA, 19 nt, Artificial Sequence
  Description of Artificial Sequence: Synthetic oligonucleotide
  Antisense strand to SEQ ID NO: 102088
augaugggaagcaaguccc

SEQ ID NO: 102090 - RNA, 19 nt, Artificial Sequence
  Description of Artificial Sequence: Synthetic oligonucleotide
  Sense strand starting at position 2726 of SEQ ID NO: 1287
gaaggagauugggaauauu

SEQ ID NO: 102091 - RNA, 19 nt, Artificial Sequence
  Description of Artificial Sequence: Synthetic oligonucleotide
  Antisense strand to SEQ ID NO: 102090
aauauucccaaucuccuuc

SEQ ID NO: 102092 - RNA, 19 nt, Artificial Sequence
  Description of Artificial Sequence: Synthetic oligonucleotide
  Sense strand starting at position 2963 of SEQ ID NO: 1287
gcaauagcccaagagauuc

SEQ ID NO: 102093 - RNA, 19 nt, Artificial Sequence
  Description of Artificial Sequence: Synthetic oligonucleotide
  Antisense strand to SEQ ID NO: 102092
gaaucucuugggcuauugc

SEQ ID NO: 102094 - RNA, 19 nt, Artificial Sequence
  Description of Artificial Sequence: Synthetic oligonucleotide
  Sense strand starting at position 3099 of SEQ ID NO: 1287
uggagcucuagucaugacu

SEQ ID NO: 102095 - RNA, 19 nt, Artificial Sequence
  Description of Artificial Sequence: Synthetic oligonucleotide
  Antisense strand to SEQ ID NO: 102094
agucaugacuagagcucca

SEQ ID NO: 102096 - RNA, 19 nt, Artificial Sequence
  Description of Artificial Sequence: Synthetic oligonucleotide
  Sense strand starting at position 3110 of SEQ ID NO: 1287
ucaugacuguggcuuauuu

SEQ ID NO: 102097 - RNA, 19 nt, Artificial Sequence
  Description of Artificial Sequence: Synthetic oligonucleotide
  Antisense strand to SEQ ID NO: 102096
aaauaagccacagucauga

SEQ ID NO: 102098 - RNA, 19 nt, Artificial Sequence
  Description of Artificial Sequence: Synthetic oligonucleotide
  Sense strand starting at position 3220 of SEQ ID NO: 1287
cggcauccuuuacucaaua

SEQ ID NO: 102099 - RNA, 19 nt, Artificial Sequence
  Description of Artificial Sequence: Synthetic oligonucleotide
  Antisense strand to SEQ ID NO: 102098
uauugaguaaaggaugccg

SEQ ID NO: 102100 - RNA, 19 nt, Artificial Sequence
  Description of Artificial Sequence: Synthetic oligonucleotide
  Sense strand starting at position 3260 of SEQ ID NO: 1287
uggagaggauggcuuacua

SEQ ID NO: 102101 - RNA, 19 nt, Artificial Sequence
  Description of Artificial Sequence: Synthetic oligonucleotide
  Antisense strand to SEQ ID NO: 102100
uaguaagccauccucucca

SEQ ID NO: 102102 - RNA, 19 nt, Artificial Sequence
  Description of Artificial Sequence: Synthetic oligonucleotide
  Sense strand starting at position 3264 of SEQ ID NO: 1287
gaggauggcuuacuaccua

SEQ ID NO: 102103 - RNA, 19 nt, Artificial Sequence
  Description of Artificial Sequence: Synthetic oligonucleotide
  Antisense strand to SEQ ID NO: 102102
uagguaguaagccauccuc

SEQ ID NO: 102104 - RNA, 19 nt, Artificial Sequence
  Description of Artificial Sequence: Synthetic oligonucleotide
  Sense strand starting at position 3282 of SEQ ID NO: 1287
aggucccugcuccaaauau

SEQ ID NO: 102105 - RNA, 19 nt, Artificial Sequence
  Description of Artificial Sequence: Synthetic oligonucleotide
  Antisense strand to SEQ ID NO: 102104
auauuuggagcagggaccu

SEQ ID NO: 102106 - RNA, 19 nt, Artificial Sequence
  Description of Artificial Sequence: Synthetic oligonucleotide
  Sense strand starting at position 3682 of SEQ ID NO: 1287
ccaggacccuuuguuacua

SEQ ID NO: 102107 - RNA, 19 nt, Artificial Sequence
  Description of Artificial Sequence: Synthetic oligonucleotide
  Antisense strand to SEQ ID NO: 102106
uaguaacaaaggguccugg

SEQ ID NO: 102108 - RNA, 19 nt, Artificial Sequence
  Description of Artificial Sequence: Synthetic oligonucleotide
  Sense strand starting at position 3803 of SEQ ID NO: 1287
cucugugaaucucucaaag

SEQ ID NO: 102109 - RNA, 19 nt, Artificial Sequence
  Description of Artificial Sequence: Synthetic oligonucleotide
  Antisense strand to SEQ ID NO: 102108
cuuugagagauucacagag

SEQ ID NO: 102110 - RNA, 19 nt, Artificial Sequence
  Description of Artificial Sequence: Synthetic oligonucleotide
  Sense strand starting at position 3969 of SEQ ID NO: 1287
gucugagcuguccaaugac

SEQ ID NO: 102111 - RNA, 19 nt, Artificial Sequence
  Description of Artificial Sequence: Synthetic oligonucleotide
  Antisense strand to SEQ ID NO: 102110
gucauuggacagcucagac

SEQ ID NO: 102112 - RNA, 19 nt, Artificial Sequence
  Description of Artificial Sequence: Synthetic oligonucleotide
  Sense strand starting at position 3972 of SEQ ID NO: 1287
ugagcuguccaaugacaga

SEQ ID NO: 102113 - RNA, 19 nt, Artificial Sequence
  Description of Artificial Sequence: Synthetic oligonucleotide
  Antisense strand to SEQ ID NO: 102112
ucugucauuggacagcuca

SEQ ID NO: 102114 - RNA, 19 nt, Artificial Sequence
  Description of Artificial Sequence: Synthetic oligonucleotide
  Sense strand starting at position 3903 of SEQ ID NO: 1288
ucaucucaaggcuguuaaa

SEQ ID NO: 102115 - RNA, 19 nt, Artificial Sequence
  Description of Artificial Sequence: Synthetic oligonucleotide
  Antisense strand to SEQ ID NO: 102114
uuuaacagccuugagauga

SEQ ID NO: 102116 - RNA, 19 nt, Artificial Sequence
  Description of Artificial Sequence: Synthetic oligonucleotide
  Sense strand starting at position 3883 of SEQ ID NO: 1288
auuugaguguuugugugau

SEQ ID NO: 102117 - RNA, 19 nt, Artificial Sequence
  Description of Artificial Sequence: Synthetic oligonucleotide
  Antisense strand to SEQ ID NO: 102116
aucacacaaacacucaaau

SEQ ID NO: 102118 - RNA, 19 nt, Artificial Sequence
  Description of Artificial Sequence: Synthetic oligonucleotide
  Sense strand starting at position 3814 of SEQ ID NO: 1288
cucccuuccaguggugaga

SEQ ID NO: 102119 - RNA, 19 nt, Artificial Sequence
  Description of Artificial Sequence: Synthetic oligonucleotide
  Antisense strand to SEQ ID NO: 102118
ucucaccacuggaagggag

SEQ ID NO: 102120 - RNA, 19 nt, Artificial Sequence
  Description of Artificial Sequence: Synthetic oligonucleotide
  Sense strand starting at position 3498 of SEQ ID NO: 1288
cagaaauggccuuguucuc

SEQ ID NO: 102121 - RNA, 19 nt, Artificial Sequence
  Description of Artificial Sequence: Synthetic oligonucleotide
  Antisense strand to SEQ ID NO: 102120
gagaacaaggccauuucug

SEQ ID NO: 102122 - RNA, 19 nt, Artificial Sequence
  Description of Artificial Sequence: Synthetic oligonucleotide
  Sense strand starting at position 3474 of SEQ ID NO: 1288
cuggucaggucccuggaaa

SEQ ID NO: 102123 - RNA, 19 nt, Artificial Sequence
  Description of Artificial Sequence: Synthetic oligonucleotide
  Antisense strand to SEQ ID NO: 102122
uuuccagggaccugaccag

SEQ ID NO: 102124 - RNA, 19 nt, Artificial Sequence
  Description of Artificial Sequence: Synthetic oligonucleotide
  Sense strand starting at position 3415 of SEQ ID NO: 1288
ucgucaucauuggucauuu

SEQ ID NO: 102125 - RNA, 19 nt, Artificial Sequence
  Description of Artificial Sequence: Synthetic oligonucleotide
  Antisense strand to SEQ ID NO: 102124
aaaugaccaaugaugacga

SEQ ID NO: 102126 - RNA, 19 nt, Artificial Sequence
  Description of Artificial Sequence: Synthetic oligonucleotide
  Sense strand starting at position 3407 of SEQ ID NO: 1288
gucacuucucgucaucauu

SEQ ID NO: 102127 - RNA, 19 nt, Artificial Sequence
  Description of Artificial Sequence: Synthetic oligonucleotide
  Antisense strand to SEQ ID NO: 102126
aaugaugacgagaagugac

SEQ ID NO: 102128 - RNA, 19 nt, Artificial Sequence
  Description of Artificial Sequence: Synthetic oligonucleotide
  Sense strand starting at position 3393 of SEQ ID NO: 1288
aauggaauuuccuggucac

SEQ ID NO: 102129 - RNA, 19 nt, Artificial Sequence
  Description of Artificial Sequence: Synthetic oligonucleotide
  Antisense strand to SEQ ID NO: 102128
gugaccaggaaauuccauu

SEQ ID NO: 102130 - RNA, 19 nt, Artificial Sequence
  Description of Artificial Sequence: Synthetic oligonucleotide
  Sense strand starting at position 3378 of SEQ ID NO: 1288
ccuaauguccuagggaaug

SEQ ID NO: 102131 - RNA, 19 nt, Artificial Sequence
  Description of Artificial Sequence: Synthetic oligonucleotide
  Antisense strand to SEQ ID NO: 102130
cauucccuaggacauuagg

SEQ ID NO: 102132 - RNA, 19 nt, Artificial Sequence
  Description of Artificial Sequence: Synthetic oligonucleotide
  Sense strand starting at position 3235 of SEQ ID NO: 1288
ggcugcuuuaaagaagagu

SEQ ID NO: 102133 - RNA, 19 nt, Artificial Sequence
  Description of Artificial Sequence: Synthetic oligonucleotide
  Antisense strand to SEQ ID NO: 102132
acucuucuuuaaagcagcc

SEQ ID NO: 102134 - RNA, 19 nt, Artificial Sequence
  Description of Artificial Sequence: Synthetic oligonucleotide
  Sense strand starting at position 3098 of SEQ ID NO: 1288
ccuuaugaggucuaauccu

SEQ ID NO: 102135 - RNA, 19 nt, Artificial Sequence
  Description of Artificial Sequence: Synthetic oligonucleotide
  Antisense strand to SEQ ID NO: 102134
aggauuagaccucauaagg

SEQ ID NO: 102136 - RNA, 19 nt, Artificial Sequence
  Description of Artificial Sequence: Synthetic oligonucleotide
  Sense strand starting at position 3062 of SEQ ID NO: 1288
ucgaguucugagcaccacu

SEQ ID NO: 102137 - RNA, 19 nt, Artificial Sequence
  Description of Artificial Sequence: Synthetic oligonucleotide
  Antisense strand to SEQ ID NO: 102136
aguggugcucagaacucga

SEQ ID NO: 102138 - RNA, 19 nt, Artificial Sequence
  Description of Artificial Sequence: Synthetic oligonucleotide
  Sense strand starting at position 2897 of SEQ ID NO: 1288
agagaacuagccuguacau

SEQ ID NO: 102139 - RNA, 19 nt, Artificial Sequence
  Description of Artificial Sequence: Synthetic oligonucleotide
  Antisense strand to SEQ ID NO: 102138
auguacaggcuaguucucu

SEQ ID NO: 102140 - RNA, 19 nt, Artificial Sequence
  Description of Artificial Sequence: Synthetic oligonucleotide
  Sense strand starting at position 2770 of SEQ ID NO: 1288
ugccauucucucgauucuu

SEQ ID NO: 102141 - RNA, 19 nt, Artificial Sequence
  Description of Artificial Sequence: Synthetic oligonucleotide
  Antisense strand to SEQ ID NO: 102140
aagaaucgagagaauggca

SEQ ID NO: 102142 - RNA, 19 nt, Artificial Sequence
  Description of Artificial Sequence: Synthetic oligonucleotide
  Sense strand starting at position 2756 of SEQ ID NO: 1288
gccagaauugcccaugcca

SEQ ID NO: 102143 - RNA, 19 nt, Artificial Sequence
  Description of Artificial Sequence: Synthetic oligonucleotide
  Antisense strand to SEQ ID NO: 102142
uggcaugggcaauucuggc

SEQ ID NO: 102144 - RNA, 19 nt, Artificial Sequence
  Description of Artificial Sequence: Synthetic oligonucleotide
  Sense strand starting at position 2746 of SEQ ID NO: 1288
cgggcuucuagccagaauu

SEQ ID NO: 102145 - RNA, 19 nt, Artificial Sequence
  Description of Artificial Sequence: Synthetic oligonucleotide
  Antisense strand to SEQ ID NO: 102144
aauucuggcuagaagcccg

SEQ ID NO: 102146 - RNA, 19 nt, Artificial Sequence
  Description of Artificial Sequence: Synthetic oligonucleotide
  Sense strand starting at position 2648 of SEQ ID NO: 1288
ugucacuuggcugaaauau

SEQ ID NO: 102147 - RNA, 19 nt, Artificial Sequence
  Description of Artificial Sequence: Synthetic oligonucleotide
  Antisense strand to SEQ ID NO: 102146
auauuucagccaagugaca

SEQ ID NO: 102148 - RNA, 19 nt, Artificial Sequence
  Description of Artificial Sequence: Synthetic oligonucleotide
  Sense strand starting at position 2647 of SEQ ID NO: 1288
cugucacuuggcugaaaua

SEQ ID NO: 102149 - RNA, 19 nt, Artificial Sequence
  Description of Artificial Sequence: Synthetic oligonucleotide
  Antisense strand to SEQ ID NO: 102148
uauuucagccaagugacag

SEQ ID NO: 102150 - RNA, 19 nt, Artificial Sequence
  Description of Artificial Sequence: Synthetic oligonucleotide
  Sense strand starting at position 2538 of SEQ ID NO: 1288
gaaucugugugauugaaua

SEQ ID NO: 102151 - RNA, 19 nt, Artificial Sequence
  Description of Artificial Sequence: Synthetic oligonucleotide
  Antisense strand to SEQ ID NO: 102150
uauucaaucacacagauuc

SEQ ID NO: 102152 - RNA, 19 nt, Artificial Sequence
  Description of Artificial Sequence: Synthetic oligonucleotide
  Sense strand starting at position 2535 of SEQ ID NO: 1288
acggaaucugugugauuga

SEQ ID NO: 102153 - RNA, 19 nt, Artificial Sequence
  Description of Artificial Sequence: Synthetic oligonucleotide
  Antisense strand to SEQ ID NO: 102152
ucaaucacacagauuccgu

SEQ ID NO: 102154 - RNA, 19 nt, Artificial Sequence
  Description of Artificial Sequence: Synthetic oligonucleotide
  Sense strand starting at position 2534 of SEQ ID NO: 1288
uacggaaucugugugauug

SEQ ID NO: 102155 - RNA, 19 nt, Artificial Sequence
  Description of Artificial Sequence: Synthetic oligonucleotide
  Antisense strand to SEQ ID NO: 102154
caaucacacagauuccgua

SEQ ID NO: 102156 - RNA, 19 nt, Artificial Sequence
  Description of Artificial Sequence: Synthetic oligonucleotide
  Sense strand starting at position 2494 of SEQ ID NO: 1288
gagaacuucuagguagagu

SEQ ID NO: 102157 - RNA, 19 nt, Artificial Sequence
  Description of Artificial Sequence: Synthetic oligonucleotide
  Antisense strand to SEQ ID NO: 102156
acucuaccuagaaguucuc

SEQ ID NO: 102158 - RNA, 19 nt, Artificial Sequence
  Description of Artificial Sequence: Synthetic oligonucleotide
  Sense strand starting at position 2473 of SEQ ID NO: 1288
gguuaaggguugagaacag

SEQ ID NO: 102159 - RNA, 19 nt, Artificial Sequence
  Description of Artificial Sequence: Synthetic oligonucleotide
  Antisense strand to SEQ ID NO: 102158
cuguucucaacccuuaacc

SEQ ID NO: 102160 - RNA, 19 nt, Artificial Sequence
  Description of Artificial Sequence: Synthetic oligonucleotide
  Sense strand starting at position 2472 of SEQ ID NO: 1288
cgguuaaggguugagaaca

SEQ ID NO: 102161 - RNA, 19 nt, Artificial Sequence
  Description of Artificial Sequence: Synthetic oligonucleotide
  Antisense strand to SEQ ID NO: 102160
uguucucaacccuuaaccg

SEQ ID NO: 102162 - RNA, 19 nt, Artificial Sequence
  Description of Artificial Sequence: Synthetic oligonucleotide
  Sense strand starting at position 2471 of SEQ ID NO: 1288
ccgguuaaggguugagaac

SEQ ID NO: 102163 - RNA, 19 nt, Artificial Sequence
  Description of Artificial Sequence: Synthetic oligonucleotide
  Antisense strand to SEQ ID NO: 102162
guucucaacccuuaaccgg

SEQ ID NO: 102164 - RNA, 19 nt, Artificial Sequence
  Description of Artificial Sequence: Synthetic oligonucleotide
  Sense strand starting at position 2443 of SEQ ID NO: 1288
uccgaaagauucccagaga

SEQ ID NO: 102165 - RNA, 19 nt, Artificial Sequence
  Description of Artificial Sequence: Synthetic oligonucleotide
  Antisense strand to SEQ ID NO: 102164
ucucugggaaucuuucgga

SEQ ID NO: 102166 - RNA, 19 nt, Artificial Sequence
  Description of Artificial Sequence: Synthetic oligonucleotide
  Sense strand starting at position 2011 of SEQ ID NO: 1288
gccggacggguuucguaau

SEQ ID NO: 102167 - RNA, 19 nt, Artificial Sequence
  Description of Artificial Sequence: Synthetic oligonucleotide
  Antisense strand to SEQ ID NO: 102166
auuacgaaacccguccggc

SEQ ID NO: 102168 - RNA, 19 nt, Artificial Sequence
  Description of Artificial Sequence: Synthetic oligonucleotide
  Sense strand starting at position 1117 of SEQ ID NO: 1288
guuuaccuguuaucaauca

SEQ ID NO: 102169 - RNA, 19 nt, Artificial Sequence
  Description of Artificial Sequence: Synthetic oligonucleotide
  Antisense strand to SEQ ID NO: 102168
ugauugauaacagguaaac

SEQ ID NO: 102170 - RNA, 19 nt, Artificial Sequence
  Description of Artificial Sequence: Synthetic oligonucleotide
  Sense strand starting at position 939 of SEQ ID NO: 1288
gauuaauggucuguauaag

SEQ ID NO: 102171 - RNA, 19 nt, Artificial Sequence
  Description of Artificial Sequence: Synthetic oligonucleotide
  Antisense strand to SEQ ID NO: 102170
cuuauacagaccauuaauc

SEQ ID NO: 102172 - RNA, 19 nt, Artificial Sequence
  Description of Artificial Sequence: Synthetic oligonucleotide
  Sense strand starting at position 938 of SEQ ID NO: 1288
agauuaauggucuguauaa

SEQ ID NO: 102173 - RNA, 19 nt, Artificial Sequence
  Description of Artificial Sequence: Synthetic oligonucleotide
  Antisense strand to SEQ ID NO: 102172
uuauacagaccauuaaucu

SEQ ID NO: 102174 - RNA, 19 nt, Artificial Sequence
  Description of Artificial Sequence: Synthetic oligonucleotide
  Sense strand starting at position 936 of SEQ ID NO: 1288
agagauuaauggucuguau

SEQ ID NO: 102175 - RNA, 19 nt, Artificial Sequence
  Description of Artificial Sequence: Synthetic oligonucleotide
  Antisense strand to SEQ ID NO: 102174
auacagaccauuaaucucu

SEQ ID NO: 102176 - RNA, 19 nt, Artificial Sequence
  Description of Artificial Sequence: Synthetic oligonucleotide
  Sense strand starting at position 899 of SEQ ID NO: 1288
gagguaggugcugagaaau

SEQ ID NO: 102177 - RNA, 19 nt, Artificial Sequence
  Description of Artificial Sequence: Synthetic oligonucleotide
  Antisense strand to SEQ ID NO: 102176
auuucucagcaccuaccuc

SEQ ID NO: 102178 - RNA, 19 nt, Artificial Sequence
  Description of Artificial Sequence: Synthetic oligonucleotide
  Sense strand starting at position 776 of SEQ ID NO: 1288
gagauacaguaggacuaaa

SEQ ID NO: 102179 - RNA, 19 nt, Artificial Sequence
  Description of Artificial Sequence: Synthetic oligonucleotide
  Antisense strand to SEQ ID NO: 102178
uuuaguccuacuguaucuc

SEQ ID NO: 102180 - RNA, 19 nt, Artificial Sequence
  Description of Artificial Sequence: Synthetic oligonucleotide
  Sense strand starting at position 624 of SEQ ID NO: 1288
aaagauucgagguggaaug

SEQ ID NO: 102181 - RNA, 19 nt, Artificial Sequence
  Description of Artificial Sequence: Synthetic oligonucleotide
  Antisense strand to SEQ ID NO: 102180
cauuccaccucgaaucuuu

SEQ ID NO: 102182 - RNA, 19 nt, Artificial Sequence
  Description of Artificial Sequence: Synthetic oligonucleotide
  Sense strand starting at position 611 of SEQ ID NO: 1288
cuuucuuuggagcaaagau

SEQ ID NO: 102183 - RNA, 19 nt, Artificial Sequence
  Description of Artificial Sequence: Synthetic oligonucleotide
  Antisense strand to SEQ ID NO: 102182
aucuuugcuccaaagaaag

SEQ ID NO: 102184 - RNA, 19 nt, Artificial Sequence
  Description of Artificial Sequence: Synthetic oligonucleotide
  Sense strand starting at position 402 of SEQ ID NO: 1288
gcagaaccucucugacauc

SEQ ID NO: 102185 - RNA, 19 nt, Artificial Sequence
  Description of Artificial Sequence: Synthetic oligonucleotide
  Antisense strand to SEQ ID NO: 102184
gaugucagagagguucugc

SEQ ID NO: 102186 - RNA, 19 nt, Artificial Sequence
  Description of Artificial Sequence: Synthetic oligonucleotide
  Sense strand starting at position 401 of SEQ ID NO: 1288
agcagaaccucucugacau

SEQ ID NO: 102187 - RNA, 19 nt, Artificial Sequence
  Description of Artificial Sequence: Synthetic oligonucleotide
  Antisense strand to SEQ ID NO: 102186
augucagagagguucugcu

SEQ ID NO: 102188 - RNA, 19 nt, Artificial Sequence
  Description of Artificial Sequence: Synthetic oligonucleotide
  Sense strand starting at position 203 of SEQ ID NO: 1288
aucacucuguucuuagaga

SEQ ID NO: 102189 - RNA, 19 nt, Artificial Sequence
  Description of Artificial Sequence: Synthetic oligonucleotide
  Antisense strand to SEQ ID NO: 102188
ucucuaagaacagagugau

SEQ ID NO: 102190 - RNA, 19 nt, Artificial Sequence
  Description of Artificial Sequence: Synthetic oligonucleotide
  Sense strand starting at position 201 of SEQ ID NO: 1288
uuaucacucuguucuuaga

SEQ ID NO: 102191 - RNA, 19 nt, Artificial Sequence
  Description of Artificial Sequence: Synthetic oligonucleotide
  Antisense strand to SEQ ID NO: 102190
ucuaagaacagagugauaa

SEQ ID NO: 102192 - RNA, 19 nt, Artificial Sequence
  Description of Artificial Sequence: Synthetic oligonucleotide
  Sense strand starting at position 159 of SEQ ID NO: 1288
acuuuaaauuauccgggua

SEQ ID NO: 102193 - RNA, 19 nt, Artificial Sequence
  Description of Artificial Sequence: Synthetic oligonucleotide
  Antisense strand to SEQ ID NO: 102192
uacccggauaauuuaaagu

SEQ ID NO: 102194 - RNA, 19 nt, Artificial Sequence
  Description of Artificial Sequence: Synthetic oligonucleotide
  Sense strand starting at position 3379 of SEQ ID NO: 1289
aagguaucuggccaguuau

SEQ ID NO: 102195 - RNA, 19 nt, Artificial Sequence
  Description of Artificial Sequence: Synthetic oligonucleotide
  Antisense strand to SEQ ID NO: 102194
auaacuggccagauaccuu

SEQ ID NO: 102196 - RNA, 19 nt, Artificial Sequence
  Description of Artificial Sequence: Synthetic oligonucleotide
  Sense strand starting at position 3378 of SEQ ID NO: 1289
gaagguaucuggccaguua

SEQ ID NO: 102197 - RNA, 19 nt, Artificial Sequence
  Description of Artificial Sequence: Synthetic oligonucleotide
  Antisense strand to SEQ ID NO: 102196
uaacuggccagauaccuuc

SEQ ID NO: 102198 - RNA, 19 nt, Artificial Sequence
  Description of Artificial Sequence: Synthetic oligonucleotide
  Sense strand starting at position 3366 of SEQ ID NO: 1289
aucaguguccuggaaggua

SEQ ID NO: 102199 - RNA, 19 nt, Artificial Sequence
  Description of Artificial Sequence: Synthetic oligonucleotide
  Antisense strand to SEQ ID NO: 102198
uaccuuccaggacacugau

SEQ ID NO: 102200 - RNA, 19 nt, Artificial Sequence
  Description of Artificial Sequence: Synthetic oligonucleotide
  Sense strand starting at position 3362 of SEQ ID NO: 1289
ccagaucaguguccuggaa

SEQ ID NO: 102201 - RNA, 19 nt, Artificial Sequence
  Description of Artificial Sequence: Synthetic oligonucleotide
  Antisense strand to SEQ ID NO: 102200
uuccaggacacugaucugg

SEQ ID NO: 102202 - RNA, 19 nt, Artificial Sequence
  Description of Artificial Sequence: Synthetic oligonucleotide
  Sense strand starting at position 3353 of SEQ ID NO: 1289
gcagaaguaccagaucagu

SEQ ID NO: 102203 - RNA, 19 nt, Artificial Sequence
  Description of Artificial Sequence: Synthetic oligonucleotide
  Antisense strand to SEQ ID NO: 102202
acugaucugguacuucugc

SEQ ID NO: 102204 - RNA, 19 nt, Artificial Sequence
  Description of Artificial Sequence: Synthetic oligonucleotide
  Sense strand starting at position 3224 of SEQ ID NO: 1289
guuuguguaagaugaggau

SEQ ID NO: 102205 - RNA, 19 nt, Artificial Sequence
  Description of Artificial Sequence: Synthetic oligonucleotide
  Antisense strand to SEQ ID NO: 102204
auccucaucuuacacaaac

SEQ ID NO: 102206 - RNA, 19 nt, Artificial Sequence
  Description of Artificial Sequence: Synthetic oligonucleotide
  Sense strand starting at position 3147 of SEQ ID NO: 1289
ugagguugcuauucucuga

SEQ ID NO: 102207 - RNA, 19 nt, Artificial Sequence
  Description of Artificial Sequence: Synthetic oligonucleotide
  Antisense strand to SEQ ID NO: 102206
ucagagaauagcaaccuca

SEQ ID NO: 102208 - RNA, 19 nt, Artificial Sequence
  Description of Artificial Sequence: Synthetic oligonucleotide
  Sense strand starting at position 2901 of SEQ ID NO: 1289
cguaucauccauuauuccu

SEQ ID NO: 102209 - RNA, 19 nt, Artificial Sequence
  Description of Artificial Sequence: Synthetic oligonucleotide
  Antisense strand to SEQ ID NO: 102208
aggaauaauggaugauacg

SEQ ID NO: 102210 - RNA, 19 nt, Artificial Sequence
  Description of Artificial Sequence: Synthetic oligonucleotide
  Sense strand starting at position 2635 of SEQ ID NO: 1289
aaaugugguccggaauaag

SEQ ID NO: 102211 - RNA, 19 nt, Artificial Sequence
  Description of Artificial Sequence: Synthetic oligonucleotide
  Antisense strand to SEQ ID NO: 102210
cuuauuccggaccacauuu

SEQ ID NO: 102212 - RNA, 19 nt, Artificial Sequence
  Description of Artificial Sequence: Synthetic oligonucleotide
  Sense strand starting at position 2633 of SEQ ID NO: 1289
ggaaaugugguccggaaua

SEQ ID NO: 102213 - RNA, 19 nt, Artificial Sequence
  Description of Artificial Sequence: Synthetic oligonucleotide
  Antisense strand to SEQ ID NO: 102212
uauuccggaccacauuucc

SEQ ID NO: 102214 - RNA, 19 nt, Artificial Sequence
  Description of Artificial Sequence: Synthetic oligonucleotide
  Sense strand starting at position 2631 of SEQ ID NO: 1289
auggaaaugugguccggaa

SEQ ID NO: 102215 - RNA, 19 nt, Artificial Sequence
  Description of Artificial Sequence: Synthetic oligonucleotide
  Antisense strand to SEQ ID NO: 102214
uuccggaccacauuuccau

SEQ ID NO: 102216 - RNA, 19 nt, Artificial Sequence
  Description of Artificial Sequence: Synthetic oligonucleotide
  Sense strand starting at position 2327 of SEQ ID NO: 1289
cugauaucugcguaucauc

SEQ ID NO: 102217 - RNA, 19 nt, Artificial Sequence
  Description of Artificial Sequence: Synthetic oligonucleotide
  Antisense strand to SEQ ID NO: 102216
gaugauacgcagauaucag

SEQ ID NO: 102218 - RNA, 19 nt, Artificial Sequence
  Description of Artificial Sequence: Synthetic oligonucleotide
  Sense strand starting at position 2097 of SEQ ID NO: 1289
cuucuagagaaagguaguu

SEQ ID NO: 102219 - RNA, 19 nt, Artificial Sequence
  Description of Artificial Sequence: Synthetic oligonucleotide
  Antisense strand to SEQ ID NO: 102218
aacuaccuuucucuagaag

SEQ ID NO: 102220 - RNA, 19 nt, Artificial Sequence
  Description of Artificial Sequence: Synthetic oligonucleotide
  Sense strand starting at position 2093 of SEQ ID NO: 1289
gucucuucuagagaaaggu

SEQ ID NO: 102221 - RNA, 19 nt, Artificial Sequence
  Description of Artificial Sequence: Synthetic oligonucleotide
  Antisense strand to SEQ ID NO: 102220
accuuucucuagaagagac

SEQ ID NO: 102222 - RNA, 19 nt, Artificial Sequence
  Description of Artificial Sequence: Synthetic oligonucleotide
  Sense strand starting at position 2091 of SEQ ID NO: 1289
gugucucuucuagagaaag

SEQ ID NO: 102223 - RNA, 19 nt, Artificial Sequence
  Description of Artificial Sequence: Synthetic oligonucleotide
  Antisense strand to SEQ ID NO: 102222
cuuucucuagaagagacac

SEQ ID NO: 102224 - RNA, 19 nt, Artificial Sequence
  Description of Artificial Sequence: Synthetic oligonucleotide
  Sense strand starting at position 1282 of SEQ ID NO: 1289
uuaaacaugcgacaacuuu

SEQ ID NO: 102225 - RNA, 19 nt, Artificial Sequence
  Description of Artificial Sequence: Synthetic oligonucleotide
  Antisense strand to SEQ ID NO: 102224
aaaguugucgcauguuuaa

SEQ ID NO: 102226 - RNA, 19 nt, Artificial Sequence
  Description of Artificial Sequence: Synthetic oligonucleotide
  Sense strand starting at position 1279 of SEQ ID NO: 1289
agguuaaacaugcgacaac

SEQ ID NO: 102227 - RNA, 19 nt, Artificial Sequence
  Description of Artificial Sequence: Synthetic oligonucleotide
  Antisense strand to SEQ ID NO: 102226
guugucgcauguuuaaccu

SEQ ID NO: 102228 - RNA, 19 nt, Artificial Sequence
  Description of Artificial Sequence: Synthetic oligonucleotide
  Sense strand starting at position 1250 of SEQ ID NO: 1289
uaacgaauccggcauuaua

SEQ ID NO: 102229 - RNA, 19 nt, Artificial Sequence
  Description of Artificial Sequence: Synthetic oligonucleotide
  Antisense strand to SEQ ID NO: 102228
uauaaugccggauucguua

SEQ ID NO: 102230 - RNA, 19 nt, Artificial Sequence
  Description of Artificial Sequence: Synthetic oligonucleotide
  Sense strand starting at position 1159 of SEQ ID NO: 1289
gugacuuugccucacaggu

SEQ ID NO: 102231 - RNA, 19 nt, Artificial Sequence
  Description of Artificial Sequence: Synthetic oligonucleotide
  Antisense strand to SEQ ID NO: 102230
accugugaggcaaagucac

SEQ ID NO: 102232 - RNA, 19 nt, Artificial Sequence
  Description of Artificial Sequence: Synthetic oligonucleotide
  Sense strand starting at position 1093 of SEQ ID NO: 1289
ccuaaaugauagcuaugca

SEQ ID NO: 102233 - RNA, 19 nt, Artificial Sequence
  Description of Artificial Sequence: Synthetic oligonucleotide
  Antisense strand to SEQ ID NO: 102232
ugcauagcuaucauuuagg

SEQ ID NO: 102234 - RNA, 19 nt, Artificial Sequence
  Description of Artificial Sequence: Synthetic oligonucleotide
  Sense strand starting at position 984 of SEQ ID NO: 1289
agcacugaugacuggaaau

SEQ ID NO: 102235 - RNA, 19 nt, Artificial Sequence
  Description of Artificial Sequence: Synthetic oligonucleotide
  Antisense strand to SEQ ID NO: 102234
auuuccagucaucagugcu

SEQ ID NO: 102236 - RNA, 19 nt, Artificial Sequence
  Description of Artificial Sequence: Synthetic oligonucleotide
  Sense strand starting at position 897 of SEQ ID NO: 1289
gggaaauguaaccguguaa

SEQ ID NO: 102237 - RNA, 19 nt, Artificial Sequence
  Description of Artificial Sequence: Synthetic oligonucleotide
  Antisense strand to SEQ ID NO: 102236
uuacacgguuacauuuccc

SEQ ID NO: 102238 - RNA, 19 nt, Artificial Sequence
  Description of Artificial Sequence: Synthetic oligonucleotide
  Sense strand starting at position 849 of SEQ ID NO: 1289
ugauuuagcuuuguaacuu

SEQ ID NO: 102239 - RNA, 19 nt, Artificial Sequence
  Description of Artificial Sequence: Synthetic oligonucleotide
  Antisense strand to SEQ ID NO: 102238
aaguuacaaagcuaaauca

SEQ ID NO: 102240 - RNA, 19 nt, Artificial Sequence
  Description of Artificial Sequence: Synthetic oligonucleotide
  Sense strand starting at position 848 of SEQ ID NO: 1289
cugauuuagcuuuguaacu

SEQ ID NO: 102241 - RNA, 19 nt, Artificial Sequence
  Description of Artificial Sequence: Synthetic oligonucleotide
  Antisense strand to SEQ ID NO: 102240
aguuacaaagcuaaaucag

SEQ ID NO: 102242 - RNA, 19 nt, Artificial Sequence
  Description of Artificial Sequence: Synthetic oligonucleotide
  Sense strand starting at position 802 of SEQ ID NO: 1289
ggaaguggguagucucuua

SEQ ID NO: 102243 - RNA, 19 nt, Artificial Sequence
  Description of Artificial Sequence: Synthetic oligonucleotide
  Antisense strand to SEQ ID NO: 102242
uaagagacuacccacuucc

SEQ ID NO: 102244 - RNA, 19 nt, Artificial Sequence
  Description of Artificial Sequence: Synthetic oligonucleotide
  Sense strand starting at position 638 of SEQ ID NO: 1289
ucugauauuugggauguac

SEQ ID NO: 102245 - RNA, 19 nt, Artificial Sequence
  Description of Artificial Sequence: Synthetic oligonucleotide
  Antisense strand to SEQ ID NO: 102244
guacaucccaaauaucaga

SEQ ID NO: 102246 - RNA, 19 nt, Artificial Sequence
  Description of Artificial Sequence: Synthetic oligonucleotide
  Sense strand starting at position 502 of SEQ ID NO: 1289
aaggucgaucugcaacaaa

SEQ ID NO: 102247 - RNA, 19 nt, Artificial Sequence
  Description of Artificial Sequence: Synthetic oligonucleotide
  Antisense strand to SEQ ID NO: 102246
uuuguugcagaucgaccuu

SEQ ID NO: 102248 - RNA, 19 nt, Artificial Sequence
  Description of Artificial Sequence: Synthetic oligonucleotide
  Sense strand starting at position 501 of SEQ ID NO: 1289
aaaggucgaucugcaacaa

SEQ ID NO: 102249 - RNA, 19 nt, Artificial Sequence
  Description of Artificial Sequence: Synthetic oligonucleotide
  Antisense strand to SEQ ID NO: 102248
uuguugcagaucgaccuuu

SEQ ID NO: 102250 - RNA, 19 nt, Artificial Sequence
  Description of Artificial Sequence: Synthetic oligonucleotide
  Sense strand starting at position 488 of SEQ ID NO: 1289
gucucaaagaguuaaaggu

SEQ ID NO: 102251 - RNA, 19 nt, Artificial Sequence
  Description of Artificial Sequence: Synthetic oligonucleotide
  Antisense strand to SEQ ID NO: 102250
accuuuaacucuuugagac

SEQ ID NO: 102252 - RNA, 19 nt, Artificial Sequence
  Description of Artificial Sequence: Synthetic oligonucleotide
  Sense strand starting at position 484 of SEQ ID NO: 1289
cggugucucaaagaguuaa

SEQ ID NO: 102253 - RNA, 19 nt, Artificial Sequence
  Description of Artificial Sequence: Synthetic oligonucleotide
  Antisense strand to SEQ ID NO: 102252
uuaacucuuugagacaccg

SEQ ID NO: 102254 - RNA, 19 nt, Artificial Sequence
  Description of Artificial Sequence: Synthetic oligonucleotide
  Sense strand starting at position 277 of SEQ ID NO: 1289
gggaauggauuugggagau

SEQ ID NO: 102255 - RNA, 19 nt, Artificial Sequence
  Description of Artificial Sequence: Synthetic oligonucleotide
  Antisense strand to SEQ ID NO: 102254
aucucccaaauccauuccc

SEQ ID NO: 102256 - RNA, 19 nt, Artificial Sequence
  Description of Artificial Sequence: Synthetic oligonucleotide
  Sense strand starting at position 255 of SEQ ID NO: 1289
agcauagauggguggaaua

SEQ ID NO: 102257 - RNA, 19 nt, Artificial Sequence
  Description of Artificial Sequence: Synthetic oligonucleotide
  Antisense strand to SEQ ID NO: 102256
uauuccacccaucuaugcu

SEQ ID NO: 102258 - RNA, 19 nt, Artificial Sequence
  Description of Artificial Sequence: Synthetic oligonucleotide
  Sense strand starting at position 211 of SEQ ID NO: 1289
agguuauuacaguaaucca

SEQ ID NO: 102259 - RNA, 19 nt, Artificial Sequence
  Description of Artificial Sequence: Synthetic oligonucleotide
  Antisense strand to SEQ ID NO: 102258
uggauuacuguaauaaccu

SEQ ID NO: 102260 - RNA, 19 nt, Artificial Sequence
  Description of Artificial Sequence: Synthetic oligonucleotide
  Sense strand starting at position 135 of SEQ ID NO: 1289
guaaacuagcaugaucauu

SEQ ID NO: 102261 - RNA, 19 nt, Artificial Sequence
  Description of Artificial Sequence: Synthetic oligonucleotide
  Antisense strand to SEQ ID NO: 102260
aaugaucaugcuaguuuac

SEQ ID NO: 102262 - RNA, 19 nt, Artificial Sequence
  Description of Artificial Sequence: Synthetic oligonucleotide
  Sense strand starting at position 134 of SEQ ID NO: 1289
aguaaacuagcaugaucau

SEQ ID NO: 102263 - RNA, 19 nt, Artificial Sequence
  Description of Artificial Sequence: Synthetic oligonucleotide
  Antisense strand to SEQ ID NO: 102262
augaucaugcuaguuuacu

SEQ ID NO: 102264 - RNA, 19 nt, Artificial Sequence
  Description of Artificial Sequence: Synthetic oligonucleotide
  Sense strand starting at position 95 of SEQ ID NO: 1289
uuaauuuggugacagugaa

SEQ ID NO: 102265 - RNA, 19 nt, Artificial Sequence
  Description of Artificial Sequence: Synthetic oligonucleotide
  Antisense strand to SEQ ID NO: 102264
uucacugucaccaaauuaa

SEQ ID NO: 102266 - RNA, 19 nt, Artificial Sequence
  Description of Artificial Sequence: Synthetic oligonucleotide
  Sense strand starting at position 92 of SEQ ID NO: 1289
gauuuaauuuggugacagu

SEQ ID NO: 102267 - RNA, 19 nt, Artificial Sequence
  Description of Artificial Sequence: Synthetic oligonucleotide
  Antisense strand to SEQ ID NO: 102266
acugucaccaaauuaaauc

SEQ ID NO: 102268 - RNA, 19 nt, Artificial Sequence
  Description of Artificial Sequence: Synthetic oligonucleotide
  Sense strand starting at position 90 of SEQ ID NO: 1289
uggauuuaauuuggugaca

SEQ ID NO: 102269 - RNA, 19 nt, Artificial Sequence
  Description of Artificial Sequence: Synthetic oligonucleotide
  Antisense strand to SEQ ID NO: 102268
ugucaccaaauuaaaucca

SEQ ID NO: 102270 - RNA, 19 nt, Artificial Sequence
  Description of Artificial Sequence: Synthetic oligonucleotide
  Sense strand starting at position 61 of SEQ ID NO: 1289
auuggcuuugaauaccaau

SEQ ID NO: 102271 - RNA, 19 nt, Artificial Sequence
  Description of Artificial Sequence: Synthetic oligonucleotide
  Antisense strand to SEQ ID NO: 102270
auugguauucaaagccaau

SEQ ID NO: 102272 - RNA, 19 nt, Artificial Sequence
  Description of Artificial Sequence: Synthetic oligonucleotide
  Sense strand starting at position 57 of SEQ ID NO: 1289
uuugauuggcuuugaauac

SEQ ID NO: 102273 - RNA, 19 nt, Artificial Sequence
  Description of Artificial Sequence: Synthetic oligonucleotide
  Antisense strand to SEQ ID NO: 102272
guauucaaagccaaucaaa

SEQ ID NO: 102274 - RNA, 19 nt, Artificial Sequence
  Description of Artificial Sequence: Synthetic oligonucleotide
  Sense strand starting at position 147 of SEQ ID NO: 1290
gugcuuuggccuuccagca

SEQ ID NO: 102275 - RNA, 19 nt, Artificial Sequence
  Description of Artificial Sequence: Synthetic oligonucleotide
  Antisense strand to SEQ ID NO: 102274
ugcuggaaggccaaagcac

SEQ ID NO: 102276 - RNA, 19 nt, Artificial Sequence
  Description of Artificial Sequence: Synthetic oligonucleotide
  Sense strand starting at position 367 of SEQ ID NO: 1290
uguggacuuugccugaguu

SEQ ID NO: 102277 - RNA, 19 nt, Artificial Sequence
  Description of Artificial Sequence: Synthetic oligonucleotide
  Antisense strand to SEQ ID NO: 102276
aacucaggcaaaguccaca

SEQ ID NO: 102278 - RNA, 19 nt, Artificial Sequence
  Description of Artificial Sequence: Synthetic oligonucleotide
  Sense strand starting at position 369 of SEQ ID NO: 1290
uggacuuugccugaguucu

SEQ ID NO: 102279 - RNA, 19 nt, Artificial Sequence
  Description of Artificial Sequence: Synthetic oligonucleotide
  Antisense strand to SEQ ID NO: 102278
agaacucaggcaaagucca

SEQ ID NO: 102280 - RNA, 19 nt, Artificial Sequence
  Description of Artificial Sequence: Synthetic oligonucleotide
  Sense strand starting at position 371 of SEQ ID NO: 1290
gacuuugccugaguucugu

SEQ ID NO: 102281 - RNA, 19 nt, Artificial Sequence
  Description of Artificial Sequence: Synthetic oligonucleotide
  Antisense strand to SEQ ID NO: 102280
acagaacucaggcaaaguc

SEQ ID NO: 102282 - RNA, 19 nt, Artificial Sequence
  Description of Artificial Sequence: Synthetic oligonucleotide
  Sense strand starting at position 380 of SEQ ID NO: 1290
ugaguucugucccugacuc

SEQ ID NO: 102283 - RNA, 19 nt, Artificial Sequence
  Description of Artificial Sequence: Synthetic oligonucleotide
  Antisense strand to SEQ ID NO: 102282
gagucagggacagaacuca

SEQ ID NO: 102284 - RNA, 19 nt, Artificial Sequence
  Description of Artificial Sequence: Synthetic oligonucleotide
  Sense strand starting at position 470 of SEQ ID NO: 1290
cagcgacuccuccagagau

SEQ ID NO: 102285 - RNA, 19 nt, Artificial Sequence
  Description of Artificial Sequence: Synthetic oligonucleotide
  Antisense strand to SEQ ID NO: 102284
aucucuggaggagucgcug

SEQ ID NO: 102286 - RNA, 19 nt, Artificial Sequence
  Description of Artificial Sequence: Synthetic oligonucleotide
  Sense strand starting at position 955 of SEQ ID NO: 1290
gggccuugcccugauguca

SEQ ID NO: 102287 - RNA, 19 nt, Artificial Sequence
  Description of Artificial Sequence: Synthetic oligonucleotide
  Antisense strand to SEQ ID NO: 102286
ugacaucagggcaaggccc

SEQ ID NO: 102288 - RNA, 19 nt, Artificial Sequence
  Description of Artificial Sequence: Synthetic oligonucleotide
  Sense strand starting at position 1299 of SEQ ID NO: 1290
cccagagaccucggucauu

SEQ ID NO: 102289 - RNA, 19 nt, Artificial Sequence
  Description of Artificial Sequence: Synthetic oligonucleotide
  Antisense strand to SEQ ID NO: 102288
aaugaccgaggucucuggg

SEQ ID NO: 102290 - RNA, 19 nt, Artificial Sequence
  Description of Artificial Sequence: Synthetic oligonucleotide
  Sense strand starting at position 1310 of SEQ ID NO: 1290
cggucauuaucuguugggu

SEQ ID NO: 102291 - RNA, 19 nt, Artificial Sequence
  Description of Artificial Sequence: Synthetic oligonucleotide
  Antisense strand to SEQ ID NO: 102290
acccaacagauaaugaccg

SEQ ID NO: 102292 - RNA, 19 nt, Artificial Sequence
  Description of Artificial Sequence: Synthetic oligonucleotide
  Sense strand starting at position 1313 of SEQ ID NO: 1290
ucauuaucuguugggugaa

SEQ ID NO: 102293 - RNA, 19 nt, Artificial Sequence
  Description of Artificial Sequence: Synthetic oligonucleotide
  Antisense strand to SEQ ID NO: 102292
uucacccaacagauaauga

SEQ ID NO: 102294 - RNA, 19 nt, Artificial Sequence
  Description of Artificial Sequence: Synthetic oligonucleotide
  Sense strand starting at position 1314 of SEQ ID NO: 1290
cauuaucuguugggugaau

SEQ ID NO: 102295 - RNA, 19 nt, Artificial Sequence
  Description of Artificial Sequence: Synthetic oligonucleotide
  Antisense strand to SEQ ID NO: 102294
auucacccaacagauaaug

SEQ ID NO: 102296 - RNA, 19 nt, Artificial Sequence
  Description of Artificial Sequence: Synthetic oligonucleotide
  Sense strand starting at position 1316 of SEQ ID NO: 1290
uuaucuguugggugaauga

SEQ ID NO: 102297 - RNA, 19 nt, Artificial Sequence
  Description of Artificial Sequence: Synthetic oligonucleotide
  Antisense strand to SEQ ID NO: 102296
ucauucacccaacagauaa

SEQ ID NO: 102298 - RNA, 19 nt, Artificial Sequence
  Description of Artificial Sequence: Synthetic oligonucleotide
  Sense strand starting at position 1358 of SEQ ID NO: 1290
aucaaucauuuggacaagu

SEQ ID NO: 102299 - RNA, 19 nt, Artificial Sequence
  Description of Artificial Sequence: Synthetic oligonucleotide
  Antisense strand to SEQ ID NO: 102298
acuuguccaaaugauugau

SEQ ID NO: 102300 - RNA, 19 nt, Artificial Sequence
  Description of Artificial Sequence: Synthetic oligonucleotide
  Sense strand starting at position 1397 of SEQ ID NO: 1290
cuucuuucuuuggucagaa

SEQ ID NO: 102301 - RNA, 19 nt, Artificial Sequence
  Description of Artificial Sequence: Synthetic oligonucleotide
  Antisense strand to SEQ ID NO: 102300
uucugaccaaagaaagaag

SEQ ID NO: 102302 - RNA, 19 nt, Artificial Sequence
  Description of Artificial Sequence: Synthetic oligonucleotide
  Sense strand starting at position 1398 of SEQ ID NO: 1290
uucuuucuuuggucagaau

SEQ ID NO: 102303 - RNA, 19 nt, Artificial Sequence
  Description of Artificial Sequence: Synthetic oligonucleotide
  Antisense strand to SEQ ID NO: 102302
auucugaccaaagaaagaa

SEQ ID NO: 102304 - RNA, 19 nt, Artificial Sequence
  Description of Artificial Sequence: Synthetic oligonucleotide
  Sense strand starting at position 1399 of SEQ ID NO: 1290
ucuuucuuuggucagaauu

SEQ ID NO: 102305 - RNA, 19 nt, Artificial Sequence
  Description of Artificial Sequence: Synthetic oligonucleotide
  Antisense strand to SEQ ID NO: 102304
aauucugaccaaagaaaga

SEQ ID NO: 102306 - RNA, 19 nt, Artificial Sequence
  Description of Artificial Sequence: Synthetic oligonucleotide
  Sense strand starting at position 1401 of SEQ ID NO: 1290
uuucuuuggucagaauuaa

SEQ ID NO: 102307 - RNA, 19 nt, Artificial Sequence
  Description of Artificial Sequence: Synthetic oligonucleotide
  Antisense strand to SEQ ID NO: 102306
uuaauucugaccaaagaaa

SEQ ID NO: 102308 - RNA, 19 nt, Artificial Sequence
  Description of Artificial Sequence: Synthetic oligonucleotide
  Sense strand starting at position 1426 of SEQ ID NO: 1290
ugcuccugcguccugaauu

SEQ ID NO: 102309 - RNA, 19 nt, Artificial Sequence
  Description of Artificial Sequence: Synthetic oligonucleotide
  Antisense strand to SEQ ID NO: 102308
aauucaggacgcaggagca

SEQ ID NO: 102310 - RNA, 19 nt, Artificial Sequence
  Description of Artificial Sequence: Synthetic oligonucleotide
  Sense strand starting at position 1445 of SEQ ID NO: 1290
cauucuguccugcagguau

SEQ ID NO: 102311 - RNA, 19 nt, Artificial Sequence
  Description of Artificial Sequence: Synthetic oligonucleotide
  Antisense strand to SEQ ID NO: 102310
auaccugcaggacagaaug

SEQ ID NO: 102312 - RNA, 19 nt, Artificial Sequence
  Description of Artificial Sequence: Synthetic oligonucleotide
  Sense strand starting at position 1594 of SEQ ID NO: 1290
ucuccagguuacuacagau

SEQ ID NO: 102313 - RNA, 19 nt, Artificial Sequence
  Description of Artificial Sequence: Synthetic oligonucleotide
  Antisense strand to SEQ ID NO: 102312
aucuguaguaaccuggaga

SEQ ID NO: 102314 - RNA, 19 nt, Artificial Sequence
  Description of Artificial Sequence: Synthetic oligonucleotide
  Sense strand starting at position 1622 of SEQ ID NO: 1290
cggguccuuuggguaagau

SEQ ID NO: 102315 - RNA, 19 nt, Artificial Sequence
  Description of Artificial Sequence: Synthetic oligonucleotide
  Antisense strand to SEQ ID NO: 102314
aucuuacccaaaggacccg

SEQ ID NO: 102316 - RNA, 19 nt, Artificial Sequence
  Description of Artificial Sequence: Synthetic oligonucleotide
  Sense strand starting at position 1623 of SEQ ID NO: 1290
ggguccuuuggguaagaua

SEQ ID NO: 102317 - RNA, 19 nt, Artificial Sequence
  Description of Artificial Sequence: Synthetic oligonucleotide
  Antisense strand to SEQ ID NO: 102316
uaucuuacccaaaggaccc

SEQ ID NO: 102318 - RNA, 19 nt, Artificial Sequence
  Description of Artificial Sequence: Synthetic oligonucleotide
  Sense strand starting at position 1635 of SEQ ID NO: 1290
uaagauaaaccguaugcca

SEQ ID NO: 102319 - RNA, 19 nt, Artificial Sequence
  Description of Artificial Sequence: Synthetic oligonucleotide
  Antisense strand to SEQ ID NO: 102318
uggcauacgguuuaucuua

SEQ ID NO: 102320 - RNA, 19 nt, Artificial Sequence
  Description of Artificial Sequence: Synthetic oligonucleotide
  Sense strand starting at position 1637 of SEQ ID NO: 1290
agauaaaccguaugccaga

SEQ ID NO: 102321 - RNA, 19 nt, Artificial Sequence
  Description of Artificial Sequence: Synthetic oligonucleotide
  Antisense strand to SEQ ID NO: 102320
ucuggcauacgguuuaucu

SEQ ID NO: 102322 - RNA, 19 nt, Artificial Sequence
  Description of Artificial Sequence: Synthetic oligonucleotide
  Sense strand starting at position 2351 of SEQ ID NO: 1290
ggaucuugccaaggugcaa

SEQ ID NO: 102323 - RNA, 19 nt, Artificial Sequence
  Description of Artificial Sequence: Synthetic oligonucleotide
  Antisense strand to SEQ ID NO: 102322
uugcaccuuggcaagaucc

SEQ ID NO: 102324 - RNA, 19 nt, Artificial Sequence
  Description of Artificial Sequence: Synthetic oligonucleotide
  Sense strand starting at position 2426 of SEQ ID NO: 1290
gagauacuagccuggguuu

SEQ ID NO: 102325 - RNA, 19 nt, Artificial Sequence
  Description of Artificial Sequence: Synthetic oligonucleotide
  Antisense strand to SEQ ID NO: 102324
aaacccaggcuaguaucuc

SEQ ID NO: 102326 - RNA, 19 nt, Artificial Sequence
  Description of Artificial Sequence: Synthetic oligonucleotide
  Sense strand starting at position 2551 of SEQ ID NO: 1290
aggguucgcagugaucaga

SEQ ID NO: 102327 - RNA, 19 nt, Artificial Sequence
  Description of Artificial Sequence: Synthetic oligonucleotide
  Antisense strand to SEQ ID NO: 102326
ucugaucacugcgaacccu

SEQ ID NO: 102328 - RNA, 19 nt, Artificial Sequence
  Description of Artificial Sequence: Synthetic oligonucleotide
  Sense strand starting at position 2557 of SEQ ID NO: 1290
cgcagugaucagaguguga

SEQ ID NO: 102329 - RNA, 19 nt, Artificial Sequence
  Description of Artificial Sequence: Synthetic oligonucleotide
  Antisense strand to SEQ ID NO: 102328
ucacacucugaucacugcg

SEQ ID NO: 102330 - RNA, 19 nt, Artificial Sequence
  Description of Artificial Sequence: Synthetic oligonucleotide
  Sense strand starting at position 2615 of SEQ ID NO: 1290
cagagcagucucugucuga

SEQ ID NO: 102331 - RNA, 19 nt, Artificial Sequence
  Description of Artificial Sequence: Synthetic oligonucleotide
  Antisense strand to SEQ ID NO: 102330
ucagacagagacugcucug

SEQ ID NO: 102332 - RNA, 19 nt, Artificial Sequence
  Description of Artificial Sequence: Synthetic oligonucleotide
  Sense strand starting at position 2616 of SEQ ID NO: 1290
agagcagucucugucugau

SEQ ID NO: 102333 - RNA, 19 nt, Artificial Sequence
  Description of Artificial Sequence: Synthetic oligonucleotide
  Antisense strand to SEQ ID NO: 102332
aucagacagagacugcucu

SEQ ID NO: 102334 - RNA, 19 nt, Artificial Sequence
  Description of Artificial Sequence: Synthetic oligonucleotide
  Sense strand starting at position 2619 of SEQ ID NO: 1290
gcagucucugucugauucu

SEQ ID NO: 102335 - RNA, 19 nt, Artificial Sequence
  Description of Artificial Sequence: Synthetic oligonucleotide
  Antisense strand to SEQ ID NO: 102334
agaaucagacagagacugc

SEQ ID NO: 102336 - RNA, 19 nt, Artificial Sequence
  Description of Artificial Sequence: Synthetic oligonucleotide
  Sense strand starting at position 2648 of SEQ ID NO: 1290
ugagguuucuagcuucugu

SEQ ID NO: 102337 - RNA, 19 nt, Artificial Sequence
  Description of Artificial Sequence: Synthetic oligonucleotide
  Antisense strand to SEQ ID NO: 102336
acagaagcuagaaaccuca

SEQ ID NO: 102338 - RNA, 19 nt, Artificial Sequence
  Description of Artificial Sequence: Synthetic oligonucleotide
  Sense strand starting at position 2810 of SEQ ID NO: 1290
guuggaagcuuugucuaug

SEQ ID NO: 102339 - RNA, 19 nt, Artificial Sequence
  Description of Artificial Sequence: Synthetic oligonucleotide
  Antisense strand to SEQ ID NO: 102338
cauagacaaagcuuccaac

SEQ ID NO: 102340 - RNA, 19 nt, Artificial Sequence
  Description of Artificial Sequence: Synthetic oligonucleotide
  Sense strand starting at position 3012 of SEQ ID NO: 1290
cuggguugcuggcccaaau

SEQ ID NO: 102341 - RNA, 19 nt, Artificial Sequence
  Description of Artificial Sequence: Synthetic oligonucleotide
  Antisense strand to SEQ ID NO: 102340
auuugggccagcaacccag

SEQ ID NO: 102342 - RNA, 19 nt, Artificial Sequence
  Description of Artificial Sequence: Synthetic oligonucleotide
  Sense strand starting at position 3186 of SEQ ID NO: 1290
gcccuuucuggaugucaca

SEQ ID NO: 102343 - RNA, 19 nt, Artificial Sequence
  Description of Artificial Sequence: Synthetic oligonucleotide
  Antisense strand to SEQ ID NO: 102342
ugugacauccagaaagggc

SEQ ID NO: 102344 - RNA, 19 nt, Artificial Sequence
  Description of Artificial Sequence: Synthetic oligonucleotide
  Sense strand starting at position 3203 of SEQ ID NO: 1290
caguguucuugucucuaag

SEQ ID NO: 102345 - RNA, 19 nt, Artificial Sequence
  Description of Artificial Sequence: Synthetic oligonucleotide
  Antisense strand to SEQ ID NO: 102344
cuuagagacaagaacacug

SEQ ID NO: 102346 - RNA, 19 nt, Artificial Sequence
  Description of Artificial Sequence: Synthetic oligonucleotide
  Sense strand starting at position 3205 of SEQ ID NO: 1290
guguucuugucucuaaggu

SEQ ID NO: 102347 - RNA, 19 nt, Artificial Sequence
  Description of Artificial Sequence: Synthetic oligonucleotide
  Antisense strand to SEQ ID NO: 102346
accuuagagacaagaacac

SEQ ID NO: 102348 - RNA, 19 nt, Artificial Sequence
  Description of Artificial Sequence: Synthetic oligonucleotide
  Sense strand starting at position 3206 of SEQ ID NO: 1290
uguucuugucucuaaggua

SEQ ID NO: 102349 - RNA, 19 nt, Artificial Sequence
  Description of Artificial Sequence: Synthetic oligonucleotide
  Antisense strand to SEQ ID NO: 102348
uaccuuagagacaagaaca

SEQ ID NO: 102350 - RNA, 19 nt, Artificial Sequence
  Description of Artificial Sequence: Synthetic oligonucleotide
  Sense strand starting at position 3432 of SEQ ID NO: 1290
ucccuacuucuaggugaca

SEQ ID NO: 102351 - RNA, 19 nt, Artificial Sequence
  Description of Artificial Sequence: Synthetic oligonucleotide
  Antisense strand to SEQ ID NO: 102350
ugucaccuagaaguaggga

SEQ ID NO: 102352 - RNA, 19 nt, Artificial Sequence
  Description of Artificial Sequence: Synthetic oligonucleotide
  Sense strand starting at position 3552 of SEQ ID NO: 1290
acuggacacucacagauuu

SEQ ID NO: 102353 - RNA, 19 nt, Artificial Sequence
  Description of Artificial Sequence: Synthetic oligonucleotide
  Antisense strand to SEQ ID NO: 102352
aaaucugugaguguccagu

SEQ ID NO: 102354 - RNA, 19 nt, Artificial Sequence
  Description of Artificial Sequence: Synthetic oligonucleotide
  Sense strand starting at position 3570 of SEQ ID NO: 1291
ggcaacguccgagaaucuu

SEQ ID NO: 102355 - RNA, 19 nt, Artificial Sequence
  Description of Artificial Sequence: Synthetic oligonucleotide
  Antisense strand to SEQ ID NO: 102354
aagauucucggacguugcc

SEQ ID NO: 102356 - RNA, 19 nt, Artificial Sequence
  Description of Artificial Sequence: Synthetic oligonucleotide
  Sense strand starting at position 3567 of SEQ ID NO: 1291
agaggcaacguccgagaau

SEQ ID NO: 102357 - RNA, 19 nt, Artificial Sequence
  Description of Artificial Sequence: Synthetic oligonucleotide
  Antisense strand to SEQ ID NO: 102356
auucucggacguugccucu

SEQ ID NO: 102358 - RNA, 19 nt, Artificial Sequence
  Description of Artificial Sequence: Synthetic oligonucleotide
  Sense strand starting at position 3124 of SEQ ID NO: 1291
cgccguauuugcuccgaca

SEQ ID NO: 102359 - RNA, 19 nt, Artificial Sequence
  Description of Artificial Sequence: Synthetic oligonucleotide
  Antisense strand to SEQ ID NO: 102358
ugucggagcaaauacggcg

SEQ ID NO: 102360 - RNA, 19 nt, Artificial Sequence
  Description of Artificial Sequence: Synthetic oligonucleotide
  Sense strand starting at position 2527 of SEQ ID NO: 1291
gggacguggcagugaguau

SEQ ID NO: 102361 - RNA, 19 nt, Artificial Sequence
  Description of Artificial Sequence: Synthetic oligonucleotide
  Antisense strand to SEQ ID NO: 102360
auacucacugccacguccc

SEQ ID NO: 102362 - RNA, 19 nt, Artificial Sequence
  Description of Artificial Sequence: Synthetic oligonucleotide
  Sense strand starting at position 2307 of SEQ ID NO: 1291
agggcucccgcuuaggaaa

SEQ ID NO: 102363 - RNA, 19 nt, Artificial Sequence
  Description of Artificial Sequence: Synthetic oligonucleotide
  Antisense strand to SEQ ID NO: 102362
uuuccuaagcgggagcccu

SEQ ID NO: 102364 - RNA, 19 nt, Artificial Sequence
  Description of Artificial Sequence: Synthetic oligonucleotide
  Sense strand starting at position 3967 of SEQ ID NO: 1292
ugucuuagaguuugagaga

SEQ ID NO: 102365 - RNA, 19 nt, Artificial Sequence
  Description of Artificial Sequence: Synthetic oligonucleotide
  Antisense strand to SEQ ID NO: 102364
ucucucaaacucuaagaca

SEQ ID NO: 102366 - RNA, 19 nt, Artificial Sequence
  Description of Artificial Sequence: Synthetic oligonucleotide
  Sense strand starting at position 3958 of SEQ ID NO: 1292
agagaugugugucuuagag

SEQ ID NO: 102367 - RNA, 19 nt, Artificial Sequence
  Description of Artificial Sequence: Synthetic oligonucleotide
  Antisense strand to SEQ ID NO: 102366
cucuaagacacacaucucu

SEQ ID NO: 102368 - RNA, 19 nt, Artificial Sequence
  Description of Artificial Sequence: Synthetic oligonucleotide
  Sense strand starting at position 3455 of SEQ ID NO: 1292
gggaguugcccugagcaag

SEQ ID NO: 102369 - RNA, 19 nt, Artificial Sequence
  Description of Artificial Sequence: Synthetic oligonucleotide
  Antisense strand to SEQ ID NO: 102368
cuugcucagggcaacuccc

SEQ ID NO: 102370 - RNA, 19 nt, Artificial Sequence
  Description of Artificial Sequence: Synthetic oligonucleotide
  Sense strand starting at position 3226 of SEQ ID NO: 1292
gagcucacgacaggaguua

SEQ ID NO: 102371 - RNA, 19 nt, Artificial Sequence
  Description of Artificial Sequence: Synthetic oligonucleotide
  Antisense strand to SEQ ID NO: 102370
uaacuccugucgugagcuc

SEQ ID NO: 102372 - RNA, 19 nt, Artificial Sequence
  Description of Artificial Sequence: Synthetic oligonucleotide
  Sense strand starting at position 3040 of SEQ ID NO: 1292
ccacuaaagcaggguaaau

SEQ ID NO: 102373 - RNA, 19 nt, Artificial Sequence
  Description of Artificial Sequence: Synthetic oligonucleotide
  Antisense strand to SEQ ID NO: 102372
auuuacccugcuuuagugg

SEQ ID NO: 102374 - RNA, 19 nt, Artificial Sequence
  Description of Artificial Sequence: Synthetic oligonucleotide
  Sense strand starting at position 2964 of SEQ ID NO: 1292
gaauaaagcugauugucuu

SEQ ID NO: 102375 - RNA, 19 nt, Artificial Sequence
  Description of Artificial Sequence: Synthetic oligonucleotide
  Antisense strand to SEQ ID NO: 102374
aagacaaucagcuuuauuc

SEQ ID NO: 102376 - RNA, 19 nt, Artificial Sequence
  Description of Artificial Sequence: Synthetic oligonucleotide
  Sense strand starting at position 2872 of SEQ ID NO: 1292
cuagcugaucuguaagcaa

SEQ ID NO: 102377 - RNA, 19 nt, Artificial Sequence
  Description of Artificial Sequence: Synthetic oligonucleotide
  Antisense strand to SEQ ID NO: 102376
uugcuuacagaucagcuag

SEQ ID NO: 102378 - RNA, 19 nt, Artificial Sequence
  Description of Artificial Sequence: Synthetic oligonucleotide
  Sense strand starting at position 2868 of SEQ ID NO: 1292
ccaacuagcugaucuguaa

SEQ ID NO: 102379 - RNA, 19 nt, Artificial Sequence
  Description of Artificial Sequence: Synthetic oligonucleotide
  Antisense strand to SEQ ID NO: 102378
uuacagaucagcuaguugg

SEQ ID NO: 102380 - RNA, 19 nt, Artificial Sequence
  Description of Artificial Sequence: Synthetic oligonucleotide
  Sense strand starting at position 2809 of SEQ ID NO: 1292
guaucauaacucugaauug

SEQ ID NO: 102381 - RNA, 19 nt, Artificial Sequence
  Description of Artificial Sequence: Synthetic oligonucleotide
  Antisense strand to SEQ ID NO: 102380
caauucagaguuaugauac

SEQ ID NO: 102382 - RNA, 19 nt, Artificial Sequence
  Description of Artificial Sequence: Synthetic oligonucleotide
  Sense strand starting at position 2749 of SEQ ID NO: 1292
ugauaaacccuuuguacug

SEQ ID NO: 102383 - RNA, 19 nt, Artificial Sequence
  Description of Artificial Sequence: Synthetic oligonucleotide
  Antisense strand to SEQ ID NO: 102382
caguacaaaggguuuauca

SEQ ID NO: 102384 - RNA, 19 nt, Artificial Sequence
  Description of Artificial Sequence: Synthetic oligonucleotide
  Sense strand starting at position 2593 of SEQ ID NO: 1292
ugcucucuugaguauaaua

SEQ ID NO: 102385 - RNA, 19 nt, Artificial Sequence
  Description of Artificial Sequence: Synthetic oligonucleotide
  Antisense strand to SEQ ID NO: 102384
uauuauacucaagagagca

SEQ ID NO: 102386 - RNA, 19 nt, Artificial Sequence
  Description of Artificial Sequence: Synthetic oligonucleotide
  Sense strand starting at position 2529 of SEQ ID NO: 1292
ggcagaaagucauuaugaa

SEQ ID NO: 102387 - RNA, 19 nt, Artificial Sequence
  Description of Artificial Sequence: Synthetic oligonucleotide
  Antisense strand to SEQ ID NO: 102386
uucauaaugacuuucugcc

SEQ ID NO: 102388 - RNA, 19 nt, Artificial Sequence
  Description of Artificial Sequence: Synthetic oligonucleotide
  Sense strand starting at position 2391 of SEQ ID NO: 1292
gguagagaugucuauugcu

SEQ ID NO: 102389 - RNA, 19 nt, Artificial Sequence
  Description of Artificial Sequence: Synthetic oligonucleotide
  Antisense strand to SEQ ID NO: 102388
agcaauagacaucucuacc

SEQ ID NO: 102390 - RNA, 19 nt, Artificial Sequence
  Description of Artificial Sequence: Synthetic oligonucleotide
  Sense strand starting at position 2379 of SEQ ID NO: 1292
gcaggagaucuugguagag

SEQ ID NO: 102391 - RNA, 19 nt, Artificial Sequence
  Description of Artificial Sequence: Synthetic oligonucleotide
  Antisense strand to SEQ ID NO: 102390
cucuaccaagaucuccugc

SEQ ID NO: 102392 - RNA, 19 nt, Artificial Sequence
  Description of Artificial Sequence: Synthetic oligonucleotide
  Sense strand starting at position 2264 of SEQ ID NO: 1292
acuuacauauaggucauua

SEQ ID NO: 102393 - RNA, 19 nt, Artificial Sequence
  Description of Artificial Sequence: Synthetic oligonucleotide
  Antisense strand to SEQ ID NO: 102392
uaaugaccuauauguaagu

SEQ ID NO: 102394 - RNA, 19 nt, Artificial Sequence
  Description of Artificial Sequence: Synthetic oligonucleotide
  Sense strand starting at position 2120 of SEQ ID NO: 1292
cagagaaaguggucaguuc

SEQ ID NO: 102395 - RNA, 19 nt, Artificial Sequence
  Description of Artificial Sequence: Synthetic oligonucleotide
  Antisense strand to SEQ ID NO: 102394
gaacugaccacuuucucug

SEQ ID NO: 102396 - RNA, 19 nt, Artificial Sequence
  Description of Artificial Sequence: Synthetic oligonucleotide
  Sense strand starting at position 2050 of SEQ ID NO: 1292
gaaguuauguaaucaugaa

SEQ ID NO: 102397 - RNA, 19 nt, Artificial Sequence
  Description of Artificial Sequence: Synthetic oligonucleotide
  Antisense strand to SEQ ID NO: 102396
uucaugauuacauaacuuc

SEQ ID NO: 102398 - RNA, 19 nt, Artificial Sequence
  Description of Artificial Sequence: Synthetic oligonucleotide
  Sense strand starting at position 1996 of SEQ ID NO: 1292
cucaaucuugauuguagau

SEQ ID NO: 102399 - RNA, 19 nt, Artificial Sequence
  Description of Artificial Sequence: Synthetic oligonucleotide
  Antisense strand to SEQ ID NO: 102398
aucuacaaucaagauugag

SEQ ID NO: 102400 - RNA, 19 nt, Artificial Sequence
  Description of Artificial Sequence: Synthetic oligonucleotide
  Sense strand starting at position 1995 of SEQ ID NO: 1292
ucucaaucuugauuguaga

SEQ ID NO: 102401 - RNA, 19 nt, Artificial Sequence
  Description of Artificial Sequence: Synthetic oligonucleotide
  Antisense strand to SEQ ID NO: 102400
ucuacaaucaagauugaga

SEQ ID NO: 102402 - RNA, 19 nt, Artificial Sequence
  Description of Artificial Sequence: Synthetic oligonucleotide
  Sense strand starting at position 1742 of SEQ ID NO: 1292
gcaauuauucucuacugag

SEQ ID NO: 102403 - RNA, 19 nt, Artificial Sequence
  Description of Artificial Sequence: Synthetic oligonucleotide
  Antisense strand to SEQ ID NO: 102402
cucaguagagaauaauugc

SEQ ID NO: 102404 - RNA, 19 nt, Artificial Sequence
  Description of Artificial Sequence: Synthetic oligonucleotide
  Sense strand starting at position 1741 of SEQ ID NO: 1292
ggcaauuauucucuacuga

SEQ ID NO: 102405 - RNA, 19 nt, Artificial Sequence
  Description of Artificial Sequence: Synthetic oligonucleotide
  Antisense strand to SEQ ID NO: 102404
ucaguagagaauaauugcc

SEQ ID NO: 102406 - RNA, 19 nt, Artificial Sequence
  Description of Artificial Sequence: Synthetic oligonucleotide
  Sense strand starting at position 1363 of SEQ ID NO: 1292
aaauuaaugugugcacaug

SEQ ID NO: 102407 - RNA, 19 nt, Artificial Sequence
  Description of Artificial Sequence: Synthetic oligonucleotide
  Antisense strand to SEQ ID NO: 102406
caugugcacacauuaauuu

SEQ ID NO: 102408 - RNA, 19 nt, Artificial Sequence
  Description of Artificial Sequence: Synthetic oligonucleotide
  Sense strand starting at position 1361 of SEQ ID NO: 1292
agaaauuaaugugugcaca

SEQ ID NO: 102409 - RNA, 19 nt, Artificial Sequence
  Description of Artificial Sequence: Synthetic oligonucleotide
  Antisense strand to SEQ ID NO: 102408
ugugcacacauuaauuucu

SEQ ID NO: 102410 - RNA, 19 nt, Artificial Sequence
  Description of Artificial Sequence: Synthetic oligonucleotide
  Sense strand starting at position 1338 of SEQ ID NO: 1292
uugaguaaaugcuuguaaa

SEQ ID NO: 102411 - RNA, 19 nt, Artificial Sequence
  Description of Artificial Sequence: Synthetic oligonucleotide
  Antisense strand to SEQ ID NO: 102410
uuuacaagcauuuacucaa

SEQ ID NO: 102412 - RNA, 19 nt, Artificial Sequence
  Description of Artificial Sequence: Synthetic oligonucleotide
  Sense strand starting at position 1222 of SEQ ID NO: 1292
guuaucuaugacugaguaa

SEQ ID NO: 102413 - RNA, 19 nt, Artificial Sequence
  Description of Artificial Sequence: Synthetic oligonucleotide
  Antisense strand to SEQ ID NO: 102412
uuacucagucauagauaac

SEQ ID NO: 102414 - RNA, 19 nt, Artificial Sequence
  Description of Artificial Sequence: Synthetic oligonucleotide
  Sense strand starting at position 1221 of SEQ ID NO: 1292
uguuaucuaugacugagua

SEQ ID NO: 102415 - RNA, 19 nt, Artificial Sequence
  Description of Artificial Sequence: Synthetic oligonucleotide
  Antisense strand to SEQ ID NO: 102414
uacucagucauagauaaca

SEQ ID NO: 102416 - RNA, 19 nt, Artificial Sequence
  Description of Artificial Sequence: Synthetic oligonucleotide
  Sense strand starting at position 1093 of SEQ ID NO: 1292
ucaaguacucauggaguaa

SEQ ID NO: 102417 - RNA, 19 nt, Artificial Sequence
  Description of Artificial Sequence: Synthetic oligonucleotide
  Antisense strand to SEQ ID NO: 102416
uuacuccaugaguacuuga

SEQ ID NO: 102418 - RNA, 19 nt, Artificial Sequence
  Description of Artificial Sequence: Synthetic oligonucleotide
  Sense strand starting at position 1065 of SEQ ID NO: 1292
uuuggaauccaacguuuau

SEQ ID NO: 102419 - RNA, 19 nt, Artificial Sequence
  Description of Artificial Sequence: Synthetic oligonucleotide
  Antisense strand to SEQ ID NO: 102418
auaaacguuggauuccaaa

SEQ ID NO: 102420 - RNA, 19 nt, Artificial Sequence
  Description of Artificial Sequence: Synthetic oligonucleotide
  Sense strand starting at position 930 of SEQ ID NO: 1292
cuauuagaguuggagauuu

SEQ ID NO: 102421 - RNA, 19 nt, Artificial Sequence
  Description of Artificial Sequence: Synthetic oligonucleotide
  Antisense strand to SEQ ID NO: 102420
aaaucuccaacucuaauag

SEQ ID NO: 102422 - RNA, 19 nt, Artificial Sequence
  Description of Artificial Sequence: Synthetic oligonucleotide
  Sense strand starting at position 929 of SEQ ID NO: 1292
acuauuagaguuggagauu

SEQ ID NO: 102423 - RNA, 19 nt, Artificial Sequence
  Description of Artificial Sequence: Synthetic oligonucleotide
  Antisense strand to SEQ ID NO: 102422
aaucuccaacucuaauagu

SEQ ID NO: 102424 - RNA, 19 nt, Artificial Sequence
  Description of Artificial Sequence: Synthetic oligonucleotide
  Sense strand starting at position 686 of SEQ ID NO: 1292
ggcuuaagucaauaaguau

SEQ ID NO: 102425 - RNA, 19 nt, Artificial Sequence
  Description of Artificial Sequence: Synthetic oligonucleotide
  Antisense strand to SEQ ID NO: 102424
auacuuauugacuuaagcc

SEQ ID NO: 102426 - RNA, 19 nt, Artificial Sequence
  Description of Artificial Sequence: Synthetic oligonucleotide
  Sense strand starting at position 556 of SEQ ID NO: 1292
ucauauguuguugacaaag

SEQ ID NO: 102427 - RNA, 19 nt, Artificial Sequence
  Description of Artificial Sequence: Synthetic oligonucleotide
  Antisense strand to SEQ ID NO: 102426
cuuugucaacaacauauga

SEQ ID NO: 102428 - RNA, 19 nt, Artificial Sequence
  Description of Artificial Sequence: Synthetic oligonucleotide
  Sense strand starting at position 554 of SEQ ID NO: 1292
agucauauguuguugacaa

SEQ ID NO: 102429 - RNA, 19 nt, Artificial Sequence
  Description of Artificial Sequence: Synthetic oligonucleotide
  Antisense strand to SEQ ID NO: 102428
uugucaacaacauaugacu

SEQ ID NO: 102430 - RNA, 19 nt, Artificial Sequence
  Description of Artificial Sequence: Synthetic oligonucleotide
  Sense strand starting at position 490 of SEQ ID NO: 1292
gcauaucuggacuaaacuc

SEQ ID NO: 102431 - RNA, 19 nt, Artificial Sequence
  Description of Artificial Sequence: Synthetic oligonucleotide
  Antisense strand to SEQ ID NO: 102430
gaguuuaguccagauaugc

SEQ ID NO: 102432 - RNA, 19 nt, Artificial Sequence
  Description of Artificial Sequence: Synthetic oligonucleotide
  Sense strand starting at position 487 of SEQ ID NO: 1292
uuugcauaucuggacuaaa

SEQ ID NO: 102433 - RNA, 19 nt, Artificial Sequence
  Description of Artificial Sequence: Synthetic oligonucleotide
  Antisense strand to SEQ ID NO: 102432
uuuaguccagauaugcaaa

SEQ ID NO: 102434 - RNA, 19 nt, Artificial Sequence
  Description of Artificial Sequence: Synthetic oligonucleotide
  Sense strand starting at position 239 of SEQ ID NO: 1292
uaaguaaagccagagucaa

SEQ ID NO: 102435 - RNA, 19 nt, Artificial Sequence
  Description of Artificial Sequence: Synthetic oligonucleotide
  Antisense strand to SEQ ID NO: 102434
uugacucuggcuuuacuua

SEQ ID NO: 102436 - RNA, 19 nt, Artificial Sequence
  Description of Artificial Sequence: Synthetic oligonucleotide
  Sense strand starting at position 167 of SEQ ID NO: 1292
agaaauguuggaggccaaa

SEQ ID NO: 102437 - RNA, 19 nt, Artificial Sequence
  Description of Artificial Sequence: Synthetic oligonucleotide
  Antisense strand to SEQ ID NO: 102436
uuuggccuccaacauuucu

SEQ ID NO: 102438 - RNA, 19 nt, Artificial Sequence
  Description of Artificial Sequence: Synthetic oligonucleotide
  Sense strand starting at position 124 of SEQ ID NO: 1292
gcucuuugugaagaacuac

SEQ ID NO: 102439 - RNA, 19 nt, Artificial Sequence
  Description of Artificial Sequence: Synthetic oligonucleotide
  Antisense strand to SEQ ID NO: 102438
guaguucuucacaaagagc

SEQ ID NO: 102440 - RNA, 19 nt, Artificial Sequence
  Description of Artificial Sequence: Synthetic oligonucleotide
  Sense strand starting at position 14 of SEQ ID NO: 1292
ugauuaagaugacacauuu

SEQ ID NO: 102441 - RNA, 19 nt, Artificial Sequence
  Description of Artificial Sequence: Synthetic oligonucleotide
  Antisense strand to SEQ ID NO: 102440
aaaugugucaucuuaauca

SEQ ID NO: 102442 - RNA, 19 nt, Artificial Sequence
  Description of Artificial Sequence: Synthetic oligonucleotide
  Sense strand starting at position 5 of SEQ ID NO: 1292
acuugaagcugauuaagau

SEQ ID NO: 102443 - RNA, 19 nt, Artificial Sequence
  Description of Artificial Sequence: Synthetic oligonucleotide
  Antisense strand to SEQ ID NO: 102442
aucuuaaucagcuucaagu

SEQ ID NO: 102444 - RNA, 19 nt, Artificial Sequence
  Description of Artificial Sequence: Synthetic oligonucleotide
  Sense strand starting at position 80 of SEQ ID NO: 1294
aggccugugccuucuugua

SEQ ID NO: 102445 - RNA, 19 nt, Artificial Sequence
  Description of Artificial Sequence: Synthetic oligonucleotide
  Antisense strand to SEQ ID NO: 102444
uacaagaaggcacaggccu

SEQ ID NO: 102446 - RNA, 19 nt, Artificial Sequence
  Description of Artificial Sequence: Synthetic oligonucleotide
  Sense strand starting at position 269 of SEQ ID NO: 1294
cggucaaggccuuaucauc

SEQ ID NO: 102447 - RNA, 19 nt, Artificial Sequence
  Description of Artificial Sequence: Synthetic oligonucleotide
  Antisense strand to SEQ ID NO: 102446
gaugauaaggccuugaccg

SEQ ID NO: 102448 - RNA, 19 nt, Artificial Sequence
  Description of Artificial Sequence: Synthetic oligonucleotide
  Sense strand starting at position 358 of SEQ ID NO: 1294
ccuggaaucuaaguccuca

SEQ ID NO: 102449 - RNA, 19 nt, Artificial Sequence
  Description of Artificial Sequence: Synthetic oligonucleotide
  Antisense strand to SEQ ID NO: 102448
ugaggacuuagauuccagg

SEQ ID NO: 102450 - RNA, 19 nt, Artificial Sequence
  Description of Artificial Sequence: Synthetic oligonucleotide
  Sense strand starting at position 400 of SEQ ID NO: 1294
cucuuuccaggcuauguua

SEQ ID NO: 102451 - RNA, 19 nt, Artificial Sequence
  Description of Artificial Sequence: Synthetic oligonucleotide
  Antisense strand to SEQ ID NO: 102450
uaacauagccuggaaagag

SEQ ID NO: 102452 - RNA, 19 nt, Artificial Sequence
  Description of Artificial Sequence: Synthetic oligonucleotide
  Sense strand starting at position 685 of SEQ ID NO: 1294
uucggcuuccucugggaua

SEQ ID NO: 102453 - RNA, 19 nt, Artificial Sequence
  Description of Artificial Sequence: Synthetic oligonucleotide
  Antisense strand to SEQ ID NO: 102452
uaucccagaggaagccgaa

SEQ ID NO: 102454 - RNA, 19 nt, Artificial Sequence
  Description of Artificial Sequence: Synthetic oligonucleotide
  Sense strand starting at position 687 of SEQ ID NO: 1294
cggcuuccucugggauauc

SEQ ID NO: 102455 - RNA, 19 nt, Artificial Sequence
  Description of Artificial Sequence: Synthetic oligonucleotide
  Antisense strand to SEQ ID NO: 102454
gauaucccagaggaagccg

SEQ ID NO: 102456 - RNA, 19 nt, Artificial Sequence
  Description of Artificial Sequence: Synthetic oligonucleotide
  Sense strand starting at position 697 of SEQ ID NO: 1294
ugggauaucccguagucca

SEQ ID NO: 102457 - RNA, 19 nt, Artificial Sequence
  Description of Artificial Sequence: Synthetic oligonucleotide
  Antisense strand to SEQ ID NO: 102456
uggacuacgggauauccca

SEQ ID NO: 102458 - RNA, 19 nt, Artificial Sequence
  Description of Artificial Sequence: Synthetic oligonucleotide
  Sense strand starting at position 988 of SEQ ID NO: 1294
aguagacauuccucuagca

SEQ ID NO: 102459 - RNA, 19 nt, Artificial Sequence
  Description of Artificial Sequence: Synthetic oligonucleotide
  Antisense strand to SEQ ID NO: 102458
ugcuagaggaaugucuacu

SEQ ID NO: 102460 - RNA, 19 nt, Artificial Sequence
  Description of Artificial Sequence: Synthetic oligonucleotide
  Sense strand starting at position 1139 of SEQ ID NO: 1294
gacagugaucagggcccua

SEQ ID NO: 102461 - RNA, 19 nt, Artificial Sequence
  Description of Artificial Sequence: Synthetic oligonucleotide
  Antisense strand to SEQ ID NO: 102460
uagggcccugaucacuguc

SEQ ID NO: 102462 - RNA, 19 nt, Artificial Sequence
  Description of Artificial Sequence: Synthetic oligonucleotide
  Sense strand starting at position 1263 of SEQ ID NO: 1294
ugcuauagcuagguuucua

SEQ ID NO: 102463 - RNA, 19 nt, Artificial Sequence
  Description of Artificial Sequence: Synthetic oligonucleotide
  Antisense strand to SEQ ID NO: 102462
uagaaaccuagcuauagca

SEQ ID NO: 102464 - RNA, 19 nt, Artificial Sequence
  Description of Artificial Sequence: Synthetic oligonucleotide
  Sense strand starting at position 1276 of SEQ ID NO: 1294
uuucuaagaccugagucau

SEQ ID NO: 102465 - RNA, 19 nt, Artificial Sequence
  Description of Artificial Sequence: Synthetic oligonucleotide
  Antisense strand to SEQ ID NO: 102464
augacucaggucuuagaaa

SEQ ID NO: 102466 - RNA, 19 nt, Artificial Sequence
  Description of Artificial Sequence: Synthetic oligonucleotide
  Sense strand starting at position 1282 of SEQ ID NO: 1294
agaccugagucaucucauc

SEQ ID NO: 102467 - RNA, 19 nt, Artificial Sequence
  Description of Artificial Sequence: Synthetic oligonucleotide
  Antisense strand to SEQ ID NO: 102466
gaugagaugacucaggucu

SEQ ID NO: 102468 - RNA, 19 nt, Artificial Sequence
  Description of Artificial Sequence: Synthetic oligonucleotide
  Sense strand starting at position 1313 of SEQ ID NO: 1294
gugugagcuacugggaaau

SEQ ID NO: 102469 - RNA, 19 nt, Artificial Sequence
  Description of Artificial Sequence: Synthetic oligonucleotide
  Antisense strand to SEQ ID NO: 102468
auuucccaguagcucacac

SEQ ID NO: 102470 - RNA, 19 nt, Artificial Sequence
  Description of Artificial Sequence: Synthetic oligonucleotide
  Sense strand starting at position 1401 of SEQ ID NO: 1294
gagcacuaaggcugaguau

SEQ ID NO: 102471 - RNA, 19 nt, Artificial Sequence
  Description of Artificial Sequence: Synthetic oligonucleotide
  Antisense strand to SEQ ID NO: 102470
auacucagccuuagugcuc

SEQ ID NO: 102472 - RNA, 19 nt, Artificial Sequence
  Description of Artificial Sequence: Synthetic oligonucleotide
  Sense strand starting at position 1402 of SEQ ID NO: 1294
agcacuaaggcugaguaua

SEQ ID NO: 102473 - RNA, 19 nt, Artificial Sequence
  Description of Artificial Sequence: Synthetic oligonucleotide
  Antisense strand to SEQ ID NO: 102472
uauacucagccuuagugcu

SEQ ID NO: 102474 - RNA, 19 nt, Artificial Sequence
  Description of Artificial Sequence: Synthetic oligonucleotide
  Sense strand starting at position 1410 of SEQ ID NO: 1294
ggcugaguauaagcuaaga

SEQ ID NO: 102475 - RNA, 19 nt, Artificial Sequence
  Description of Artificial Sequence: Synthetic oligonucleotide
  Antisense strand to SEQ ID NO: 102474
ucuuagcuuauacucagcc

SEQ ID NO: 102476 - RNA, 19 nt, Artificial Sequence
  Description of Artificial Sequence: Synthetic oligonucleotide
  Sense strand starting at position 1503 of SEQ ID NO: 1294
uacccugaggcuugcuuau

SEQ ID NO: 102477 - RNA, 19 nt, Artificial Sequence
  Description of Artificial Sequence: Synthetic oligonucleotide
  Antisense strand to SEQ ID NO: 102476
auaagcaagccucagggua

SEQ ID NO: 102478 - RNA, 19 nt, Artificial Sequence
  Description of Artificial Sequence: Synthetic oligonucleotide
  Sense strand starting at position 1552 of SEQ ID NO: 1294
ggagcacuguccuuucuca

SEQ ID NO: 102479 - RNA, 19 nt, Artificial Sequence
  Description of Artificial Sequence: Synthetic oligonucleotide
  Antisense strand to SEQ ID NO: 102478
ugagaaaggacagugcucc

SEQ ID NO: 102480 - RNA, 19 nt, Artificial Sequence
  Description of Artificial Sequence: Synthetic oligonucleotide
  Sense strand starting at position 1703 of SEQ ID NO: 1294
agcuguuugagacaaaggu

SEQ ID NO: 102481 - RNA, 19 nt, Artificial Sequence
  Description of Artificial Sequence: Synthetic oligonucleotide
  Antisense strand to SEQ ID NO: 102480
accuuugucucaaacagcu

SEQ ID NO: 102482 - RNA, 19 nt, Artificial Sequence
  Description of Artificial Sequence: Synthetic oligonucleotide
  Sense strand starting at position 1707 of SEQ ID NO: 1294
guuugagacaaagguccuu

SEQ ID NO: 102483 - RNA, 19 nt, Artificial Sequence
  Description of Artificial Sequence: Synthetic oligonucleotide
  Antisense strand to SEQ ID NO: 102482
aaggaccuuugucucaaac

SEQ ID NO: 102484 - RNA, 19 nt, Artificial Sequence
  Description of Artificial Sequence: Synthetic oligonucleotide
  Sense strand starting at position 1809 of SEQ ID NO: 1294
aggaacuuguucucuugaa

SEQ ID NO: 102485 - RNA, 19 nt, Artificial Sequence
  Description of Artificial Sequence: Synthetic oligonucleotide
  Antisense strand to SEQ ID NO: 102484
uucaagagaacaaguuccu

SEQ ID NO: 102486 - RNA, 19 nt, Artificial Sequence
  Description of Artificial Sequence: Synthetic oligonucleotide
  Sense strand starting at position 1810 of SEQ ID NO: 1294
ggaacuuguucucuugaaa

SEQ ID NO: 102487 - RNA, 19 nt, Artificial Sequence
  Description of Artificial Sequence: Synthetic oligonucleotide
  Antisense strand to SEQ ID NO: 102486
uuucaagagaacaaguucc

SEQ ID NO: 102488 - RNA, 19 nt, Artificial Sequence
  Description of Artificial Sequence: Synthetic oligonucleotide
  Sense strand starting at position 1841 of SEQ ID NO: 1294
ugugaaaggucaucucauc

SEQ ID NO: 102489 - RNA, 19 nt, Artificial Sequence
  Description of Artificial Sequence: Synthetic oligonucleotide
  Antisense strand to SEQ ID NO: 102488
gaugagaugaccuuucaca

SEQ ID NO: 102490 - RNA, 19 nt, Artificial Sequence
  Description of Artificial Sequence: Synthetic oligonucleotide
  Sense strand starting at position 2046 of SEQ ID NO: 1294
uuaugacaguuagaaauag

SEQ ID NO: 102491 - RNA, 19 nt, Artificial Sequence
  Description of Artificial Sequence: Synthetic oligonucleotide
  Antisense strand to SEQ ID NO: 102490
cuauuucuaacugucauaa

SEQ ID NO: 102492 - RNA, 19 nt, Artificial Sequence
  Description of Artificial Sequence: Synthetic oligonucleotide
  Sense strand starting at position 2141 of SEQ ID NO: 1294
gcuucuuccugauuccuga

SEQ ID NO: 102493 - RNA, 19 nt, Artificial Sequence
  Description of Artificial Sequence: Synthetic oligonucleotide
  Antisense strand to SEQ ID NO: 102492
ucaggaaucaggaagaagc

SEQ ID NO: 102494 - RNA, 19 nt, Artificial Sequence
  Description of Artificial Sequence: Synthetic oligonucleotide
  Sense strand starting at position 2369 of SEQ ID NO: 1294
guguucaggcuuuaaggaa

SEQ ID NO: 102495 - RNA, 19 nt, Artificial Sequence
  Description of Artificial Sequence: Synthetic oligonucleotide
  Antisense strand to SEQ ID NO: 102494
uuccuuaaagccugaacac

SEQ ID NO: 102496 - RNA, 19 nt, Artificial Sequence
  Description of Artificial Sequence: Synthetic oligonucleotide
  Sense strand starting at position 2382 of SEQ ID NO: 1294
aaggaaagcuuagacuaga

SEQ ID NO: 102497 - RNA, 19 nt, Artificial Sequence
  Description of Artificial Sequence: Synthetic oligonucleotide
  Antisense strand to SEQ ID NO: 102496
ucuagucuaagcuuuccuu

SEQ ID NO: 102498 - RNA, 19 nt, Artificial Sequence
  Description of Artificial Sequence: Synthetic oligonucleotide
  Sense strand starting at position 2395 of SEQ ID NO: 1294
acuagaaucuuagaguuaa

SEQ ID NO: 102499 - RNA, 19 nt, Artificial Sequence
  Description of Artificial Sequence: Synthetic oligonucleotide
  Antisense strand to SEQ ID NO: 102498
uuaacucuaagauucuagu

SEQ ID NO: 102500 - RNA, 19 nt, Artificial Sequence
  Description of Artificial Sequence: Synthetic oligonucleotide
  Sense strand starting at position 2423 of SEQ ID NO: 1294
gauagaucagcuggcccaa

SEQ ID NO: 102501 - RNA, 19 nt, Artificial Sequence
  Description of Artificial Sequence: Synthetic oligonucleotide
  Antisense strand to SEQ ID NO: 102500
uugggccagcugaucuauc

SEQ ID NO: 102502 - RNA, 19 nt, Artificial Sequence
  Description of Artificial Sequence: Synthetic oligonucleotide
  Sense strand starting at position 2599 of SEQ ID NO: 1294
ccugcacuggcucaucaau

SEQ ID NO: 102503 - RNA, 19 nt, Artificial Sequence
  Description of Artificial Sequence: Synthetic oligonucleotide
  Antisense strand to SEQ ID NO: 102502
auugaugagccagugcagg

SEQ ID NO: 102504 - RNA, 19 nt, Artificial Sequence
  Description of Artificial Sequence: Synthetic oligonucleotide
  Sense strand starting at position 2610 of SEQ ID NO: 1294
ucaucaauggucuggugga

SEQ ID NO: 102505 - RNA, 19 nt, Artificial Sequence
  Description of Artificial Sequence: Synthetic oligonucleotide
  Antisense strand to SEQ ID NO: 102504
uccaccagaccauugauga

SEQ ID NO: 102506 - RNA, 19 nt, Artificial Sequence
  Description of Artificial Sequence: Synthetic oligonucleotide
  Sense strand starting at position 2735 of SEQ ID NO: 1294
uguccugaccagugagcua

SEQ ID NO: 102507 - RNA, 19 nt, Artificial Sequence
  Description of Artificial Sequence: Synthetic oligonucleotide
  Antisense strand to SEQ ID NO: 102506
uagcucacuggucaggaca

SEQ ID NO: 102508 - RNA, 19 nt, Artificial Sequence
  Description of Artificial Sequence: Synthetic oligonucleotide
  Sense strand starting at position 2740 of SEQ ID NO: 1294
ugaccagugagcuagaguu

SEQ ID NO: 102509 - RNA, 19 nt, Artificial Sequence
  Description of Artificial Sequence: Synthetic oligonucleotide
  Antisense strand to SEQ ID NO: 102508
aacucuagcucacugguca

SEQ ID NO: 102510 - RNA, 19 nt, Artificial Sequence
  Description of Artificial Sequence: Synthetic oligonucleotide
  Sense strand starting at position 2761 of SEQ ID NO: 1294
accuuacuccuguggaacu

SEQ ID NO: 102511 - RNA, 19 nt, Artificial Sequence
  Description of Artificial Sequence: Synthetic oligonucleotide
  Antisense strand to SEQ ID NO: 102510
aguuccacaggaguaaggu

SEQ ID NO: 102512 - RNA, 19 nt, Artificial Sequence
  Description of Artificial Sequence: Synthetic oligonucleotide
  Sense strand starting at position 2787 of SEQ ID NO: 1294
cugggucucuuuccaggaa

SEQ ID NO: 102513 - RNA, 19 nt, Artificial Sequence
  Description of Artificial Sequence: Synthetic oligonucleotide
  Antisense strand to SEQ ID NO: 102512
uuccuggaaagagacccag

SEQ ID NO: 102514 - RNA, 19 nt, Artificial Sequence
  Description of Artificial Sequence: Synthetic oligonucleotide
  Sense strand starting at position 2963 of SEQ ID NO: 1294
cccagugauggcuauccuu

SEQ ID NO: 102515 - RNA, 19 nt, Artificial Sequence
  Description of Artificial Sequence: Synthetic oligonucleotide
  Antisense strand to SEQ ID NO: 102514
aaggauagccaucacuggg

SEQ ID NO: 102516 - RNA, 19 nt, Artificial Sequence
  Description of Artificial Sequence: Synthetic oligonucleotide
  Sense strand starting at position 3058 of SEQ ID NO: 1294
cccuaccuguuucugauau

SEQ ID NO: 102517 - RNA, 19 nt, Artificial Sequence
  Description of Artificial Sequence: Synthetic oligonucleotide
  Antisense strand to SEQ ID NO: 102516
auaucagaaacagguaggg

SEQ ID NO: 102518 - RNA, 19 nt, Artificial Sequence
  Description of Artificial Sequence: Synthetic oligonucleotide
  Sense strand starting at position 3060 of SEQ ID NO: 1294
cuaccuguuucugauauuu

SEQ ID NO: 102519 - RNA, 19 nt, Artificial Sequence
  Description of Artificial Sequence: Synthetic oligonucleotide
  Antisense strand to SEQ ID NO: 102518
aaauaucagaaacagguag

SEQ ID NO: 102520 - RNA, 19 nt, Artificial Sequence
  Description of Artificial Sequence: Synthetic oligonucleotide
  Sense strand starting at position 3062 of SEQ ID NO: 1294
accuguuucugauauuuag

SEQ ID NO: 102521 - RNA, 19 nt, Artificial Sequence
  Description of Artificial Sequence: Synthetic oligonucleotide
  Antisense strand to SEQ ID NO: 102520
cuaaauaucagaaacaggu

SEQ ID NO: 102522 - RNA, 19 nt, Artificial Sequence
  Description of Artificial Sequence: Synthetic oligonucleotide
  Sense strand starting at position 3962 of SEQ ID NO: 1294
cggcuucuucuggagcaga

SEQ ID NO: 102523 - RNA, 19 nt, Artificial Sequence
  Description of Artificial Sequence: Synthetic oligonucleotide
  Antisense strand to SEQ ID NO: 102522
ucugcuccagaagaagccg

SEQ ID NO: 102524 - RNA, 19 nt, Artificial Sequence
  Description of Artificial Sequence: Synthetic oligonucleotide
  Sense strand starting at position 51 of SEQ ID NO: 1293
aggaacuuguucucuugaa

SEQ ID NO: 102525 - RNA, 19 nt, Artificial Sequence
  Description of Artificial Sequence: Synthetic oligonucleotide
  Antisense strand to SEQ ID NO: 102524
uucaagagaacaaguuccu

SEQ ID NO: 102526 - RNA, 19 nt, Artificial Sequence
  Description of Artificial Sequence: Synthetic oligonucleotide
  Sense strand starting at position 52 of SEQ ID NO: 1293
ggaacuuguucucuugaaa

SEQ ID NO: 102527 - RNA, 19 nt, Artificial Sequence
  Description of Artificial Sequence: Synthetic oligonucleotide
  Antisense strand to SEQ ID NO: 102526
uuucaagagaacaaguucc

SEQ ID NO: 102528 - RNA, 19 nt, Artificial Sequence
  Description of Artificial Sequence: Synthetic oligonucleotide
  Sense strand starting at position 83 of SEQ ID NO: 1293
ugugaaaggucaucucauc

SEQ ID NO: 102529 - RNA, 19 nt, Artificial Sequence
  Description of Artificial Sequence: Synthetic oligonucleotide
  Antisense strand to SEQ ID NO: 102528
gaugagaugaccuuucaca

SEQ ID NO: 102530 - RNA, 19 nt, Artificial Sequence
  Description of Artificial Sequence: Synthetic oligonucleotide
  Sense strand starting at position 288 of SEQ ID NO: 1293
uuaugacaguuagaaauag

SEQ ID NO: 102531 - RNA, 19 nt, Artificial Sequence
  Description of Artificial Sequence: Synthetic oligonucleotide
  Antisense strand to SEQ ID NO: 102530
cuauuucuaacugucauaa

SEQ ID NO: 102532 - RNA, 19 nt, Artificial Sequence
  Description of Artificial Sequence: Synthetic oligonucleotide
  Sense strand starting at position 383 of SEQ ID NO: 1293
gcuucuuccugauuccuga

SEQ ID NO: 102533 - RNA, 19 nt, Artificial Sequence
  Description of Artificial Sequence: Synthetic oligonucleotide
  Antisense strand to SEQ ID NO: 102532
ucaggaaucaggaagaagc

SEQ ID NO: 102534 - RNA, 19 nt, Artificial Sequence
  Description of Artificial Sequence: Synthetic oligonucleotide
  Sense strand starting at position 611 of SEQ ID NO: 1293
guguucaggcuuuaaggaa

SEQ ID NO: 102535 - RNA, 19 nt, Artificial Sequence
  Description of Artificial Sequence: Synthetic oligonucleotide
  Antisense strand to SEQ ID NO: 102534
uuccuuaaagccugaacac

SEQ ID NO: 102536 - RNA, 19 nt, Artificial Sequence
  Description of Artificial Sequence: Synthetic oligonucleotide
  Sense strand starting at position 624 of SEQ ID NO: 1293
aaggaaagcuuagacuaga

SEQ ID NO: 102537 - RNA, 19 nt, Artificial Sequence
  Description of Artificial Sequence: Synthetic oligonucleotide
  Antisense strand to SEQ ID NO: 102536
ucuagucuaagcuuuccuu

SEQ ID NO: 102538 - RNA, 19 nt, Artificial Sequence
  Description of Artificial Sequence: Synthetic oligonucleotide
  Sense strand starting at position 665 of SEQ ID NO: 1293
gauagaucagcuggcccaa

SEQ ID NO: 102539 - RNA, 19 nt, Artificial Sequence
  Description of Artificial Sequence: Synthetic oligonucleotide
  Antisense strand to SEQ ID NO: 102538
uugggccagcugaucuauc

SEQ ID NO: 102540 - RNA, 19 nt, Artificial Sequence
  Description of Artificial Sequence: Synthetic oligonucleotide
  Sense strand starting at position 841 of SEQ ID NO: 1293
ccugcacuggcucaucaau

SEQ ID NO: 102541 - RNA, 19 nt, Artificial Sequence
  Description of Artificial Sequence: Synthetic oligonucleotide
  Antisense strand to SEQ ID NO: 102540
auugaugagccagugcagg

SEQ ID NO: 102542 - RNA, 19 nt, Artificial Sequence
  Description of Artificial Sequence: Synthetic oligonucleotide
  Sense strand starting at position 852 of SEQ ID NO: 1293
ucaucaauggucuggugga

SEQ ID NO: 102543 - RNA, 19 nt, Artificial Sequence
  Description of Artificial Sequence: Synthetic oligonucleotide
  Antisense strand to SEQ ID NO: 102542
uccaccagaccauugauga

SEQ ID NO: 102544 - RNA, 19 nt, Artificial Sequence
  Description of Artificial Sequence: Synthetic oligonucleotide
  Sense strand starting at position 977 of SEQ ID NO: 1293
uguccugaccagugagcua

SEQ ID NO: 102545 - RNA, 19 nt, Artificial Sequence
  Description of Artificial Sequence: Synthetic oligonucleotide
  Antisense strand to SEQ ID NO: 102544
uagcucacuggucaggaca

SEQ ID NO: 102546 - RNA, 19 nt, Artificial Sequence
  Description of Artificial Sequence: Synthetic oligonucleotide
  Sense strand starting at position 982 of SEQ ID NO: 1293
ugaccagugagcuagaguu

SEQ ID NO: 102547 - RNA, 19 nt, Artificial Sequence
  Description of Artificial Sequence: Synthetic oligonucleotide
  Antisense strand to SEQ ID NO: 102546
aacucuagcucacugguca

SEQ ID NO: 102548 - RNA, 19 nt, Artificial Sequence
  Description of Artificial Sequence: Synthetic oligonucleotide
  Sense strand starting at position 1003 of SEQ ID NO: 1293
accuuacuccuguggaacu

SEQ ID NO: 102549 - RNA, 19 nt, Artificial Sequence
  Description of Artificial Sequence: Synthetic oligonucleotide
  Antisense strand to SEQ ID NO: 102548
aguuccacaggaguaaggu

SEQ ID NO: 102550 - RNA, 19 nt, Artificial Sequence
  Description of Artificial Sequence: Synthetic oligonucleotide
  Sense strand starting at position 1029 of SEQ ID NO: 1293
cugggucucuuuccaggaa

SEQ ID NO: 102551 - RNA, 19 nt, Artificial Sequence
  Description of Artificial Sequence: Synthetic oligonucleotide
  Antisense strand to SEQ ID NO: 102550
uuccuggaaagagacccag

SEQ ID NO: 102552 - RNA, 19 nt, Artificial Sequence
  Description of Artificial Sequence: Synthetic oligonucleotide
  Sense strand starting at position 1205 of SEQ ID NO: 1293
cccagugauggcuauccuu

SEQ ID NO: 102553 - RNA, 19 nt, Artificial Sequence
  Description of Artificial Sequence: Synthetic oligonucleotide
  Antisense strand to SEQ ID NO: 102552
aaggauagccaucacuggg

SEQ ID NO: 102554 - RNA, 19 nt, Artificial Sequence
  Description of Artificial Sequence: Synthetic oligonucleotide
  Sense strand starting at position 1300 of SEQ ID NO: 1293
cccuaccuguuucugauau

SEQ ID NO: 102555 - RNA, 19 nt, Artificial Sequence
  Description of Artificial Sequence: Synthetic oligonucleotide
  Antisense strand to SEQ ID NO: 102554
auaucagaaacagguaggg

SEQ ID NO: 102556 - RNA, 19 nt, Artificial Sequence
  Description of Artificial Sequence: Synthetic oligonucleotide
  Sense strand starting at position 1302 of SEQ ID NO: 1293
cuaccuguuucugauauuu

SEQ ID NO: 102557 - RNA, 19 nt, Artificial Sequence
  Description of Artificial Sequence: Synthetic oligonucleotide
  Antisense strand to SEQ ID NO: 102556
aaauaucagaaacagguag

SEQ ID NO: 102558 - RNA, 19 nt, Artificial Sequence
  Description of Artificial Sequence: Synthetic oligonucleotide
  Sense strand starting at position 1304 of SEQ ID NO: 1293
accuguuucugauauuuag

SEQ ID NO: 102559 - RNA, 19 nt, Artificial Sequence
  Description of Artificial Sequence: Synthetic oligonucleotide
  Antisense strand to SEQ ID NO: 102558
cuaaauaucagaaacaggu

SEQ ID NO: 102560 - RNA, 19 nt, Artificial Sequence
  Description of Artificial Sequence: Synthetic oligonucleotide
  Sense strand starting at position 2204 of SEQ ID NO: 1293
cggcuucuucuggagcaga

SEQ ID NO: 102561 - RNA, 19 nt, Artificial Sequence
  Description of Artificial Sequence: Synthetic oligonucleotide
  Antisense strand to SEQ ID NO: 102560
ucugcuccagaagaagccg

SEQ ID NO: 102562 - RNA, 19 nt, Artificial Sequence
  Description of Artificial Sequence: Synthetic oligonucleotide
  Sense strand starting at position 2236 of SEQ ID NO: 1293
agauaagggugguuucuuu

SEQ ID NO: 102563 - RNA, 19 nt, Artificial Sequence
  Description of Artificial Sequence: Synthetic oligonucleotide
  Antisense strand to SEQ ID NO: 102562
aaagaaaccacccuuaucu

SEQ ID NO: 102564 - RNA, 19 nt, Artificial Sequence
  Description of Artificial Sequence: Synthetic oligonucleotide
  Sense strand starting at position 2385 of SEQ ID NO: 1293
augggugagugaaggaaua

SEQ ID NO: 102565 - RNA, 19 nt, Artificial Sequence
  Description of Artificial Sequence: Synthetic oligonucleotide
  Antisense strand to SEQ ID NO: 102564
uauuccuucacucacccau

SEQ ID NO: 102566 - RNA, 19 nt, Artificial Sequence
  Description of Artificial Sequence: Synthetic oligonucleotide
  Sense strand starting at position 2403 of SEQ ID NO: 1293
aaaugaacgccuugggaau

SEQ ID NO: 102567 - RNA, 19 nt, Artificial Sequence
  Description of Artificial Sequence: Synthetic oligonucleotide
  Antisense strand to SEQ ID NO: 102566
auucccaaggcguucauuu

SEQ ID NO: 102568 - RNA, 19 nt, Artificial Sequence
  Description of Artificial Sequence: Synthetic oligonucleotide
  Sense strand starting at position 2415 of SEQ ID NO: 1293
ugggaaucaugagcugagu

SEQ ID NO: 102569 - RNA, 19 nt, Artificial Sequence
  Description of Artificial Sequence: Synthetic oligonucleotide
  Antisense strand to SEQ ID NO: 102568
acucagcucaugauuccca

SEQ ID NO: 102570 - RNA, 19 nt, Artificial Sequence
  Description of Artificial Sequence: Synthetic oligonucleotide
  Sense strand starting at position 2670 of SEQ ID NO: 1293
ggguuccuucgaggacaga

SEQ ID NO: 102571 - RNA, 19 nt, Artificial Sequence
  Description of Artificial Sequence: Synthetic oligonucleotide
  Antisense strand to SEQ ID NO: 102570
ucuguccucgaaggaaccc

SEQ ID NO: 102572 - RNA, 19 nt, Artificial Sequence
  Description of Artificial Sequence: Synthetic oligonucleotide
  Sense strand starting at position 2805 of SEQ ID NO: 1293
cagagagcuuagccauaga

SEQ ID NO: 102573 - RNA, 19 nt, Artificial Sequence
  Description of Artificial Sequence: Synthetic oligonucleotide
  Antisense strand to SEQ ID NO: 102572
ucuauggcuaagcucucug

SEQ ID NO: 102574 - RNA, 19 nt, Artificial Sequence
  Description of Artificial Sequence: Synthetic oligonucleotide
  Sense strand starting at position 2954 of SEQ ID NO: 1293
acgcuagauccuuaaccca

SEQ ID NO: 102575 - RNA, 19 nt, Artificial Sequence
  Description of Artificial Sequence: Synthetic oligonucleotide
  Antisense strand to SEQ ID NO: 102574
uggguuaaggaucuagcgu

SEQ ID NO: 102576 - RNA, 19 nt, Artificial Sequence
  Description of Artificial Sequence: Synthetic oligonucleotide
  Sense strand starting at position 3197 of SEQ ID NO: 1293
ugcuuaccucggugaugaa

SEQ ID NO: 102577 - RNA, 19 nt, Artificial Sequence
  Description of Artificial Sequence: Synthetic oligonucleotide
  Antisense strand to SEQ ID NO: 102576
uucaucaccgagguaagca

SEQ ID NO: 102578 - RNA, 19 nt, Artificial Sequence
  Description of Artificial Sequence: Synthetic oligonucleotide
  Sense strand starting at position 3198 of SEQ ID NO: 1293
gcuuaccucggugaugaaa

SEQ ID NO: 102579 - RNA, 19 nt, Artificial Sequence
  Description of Artificial Sequence: Synthetic oligonucleotide
  Antisense strand to SEQ ID NO: 102578
uuucaucaccgagguaagc

SEQ ID NO: 102580 - RNA, 19 nt, Artificial Sequence
  Description of Artificial Sequence: Synthetic oligonucleotide
  Sense strand starting at position 3316 of SEQ ID NO: 1293
cucauagaacuguggguau

SEQ ID NO: 102581 - RNA, 19 nt, Artificial Sequence
  Description of Artificial Sequence: Synthetic oligonucleotide
  Antisense strand to SEQ ID NO: 102580
auacccacaguucuaugag

SEQ ID NO: 102582 - RNA, 19 nt, Artificial Sequence
  Description of Artificial Sequence: Synthetic oligonucleotide
  Sense strand starting at position 3318 of SEQ ID NO: 1293
cauagaacuguggguaugu

SEQ ID NO: 102583 - RNA, 19 nt, Artificial Sequence
  Description of Artificial Sequence: Synthetic oligonucleotide
  Antisense strand to SEQ ID NO: 102582
acauacccacaguucuaug

SEQ ID NO: 102584 - RNA, 19 nt, Artificial Sequence
  Description of Artificial Sequence: Synthetic oligonucleotide
  Sense strand starting at position 3319 of SEQ ID NO: 1293
auagaacuguggguauguu

SEQ ID NO: 102585 - RNA, 19 nt, Artificial Sequence
  Description of Artificial Sequence: Synthetic oligonucleotide
  Antisense strand to SEQ ID NO: 102584
aacauacccacaguucuau

SEQ ID NO: 102586 - RNA, 19 nt, Artificial Sequence
  Description of Artificial Sequence: Synthetic oligonucleotide
  Sense strand starting at position 3365 of SEQ ID NO: 1293
agucuaaaguucucuguau

SEQ ID NO: 102587 - RNA, 19 nt, Artificial Sequence
  Description of Artificial Sequence: Synthetic oligonucleotide
  Antisense strand to SEQ ID NO: 102586
auacagagaacuuuagacu

SEQ ID NO: 102588 - RNA, 19 nt, Artificial Sequence
  Description of Artificial Sequence: Synthetic oligonucleotide
  Sense strand starting at position 3366 of SEQ ID NO: 1293
gucuaaaguucucuguauu

SEQ ID NO: 102589 - RNA, 19 nt, Artificial Sequence
  Description of Artificial Sequence: Synthetic oligonucleotide
  Antisense strand to SEQ ID NO: 102588
aauacagagaacuuuagac

SEQ ID NO: 102590 - RNA, 19 nt, Artificial Sequence
  Description of Artificial Sequence: Synthetic oligonucleotide
  Sense strand starting at position 3367 of SEQ ID NO: 1293
ucuaaaguucucuguauuu

SEQ ID NO: 102591 - RNA, 19 nt, Artificial Sequence
  Description of Artificial Sequence: Synthetic oligonucleotide
  Antisense strand to SEQ ID NO: 102590
aaauacagagaacuuuaga

SEQ ID NO: 102592 - RNA, 19 nt, Artificial Sequence
  Description of Artificial Sequence: Synthetic oligonucleotide
  Sense strand starting at position 3435 of SEQ ID NO: 1293
uugcuuauggagcaaauua

SEQ ID NO: 102593 - RNA, 19 nt, Artificial Sequence
  Description of Artificial Sequence: Synthetic oligonucleotide
  Antisense strand to SEQ ID NO: 102592
uaauuugcuccauaagcaa

SEQ ID NO: 102594 - RNA, 19 nt, Artificial Sequence
  Description of Artificial Sequence: Synthetic oligonucleotide
  Sense strand starting at position 3622 of SEQ ID NO: 1293
cucagucacccagaaguga

SEQ ID NO: 102595 - RNA, 19 nt, Artificial Sequence
  Description of Artificial Sequence: Synthetic oligonucleotide
  Antisense strand to SEQ ID NO: 102594
ucacuucugggugacugag

SEQ ID NO: 102596 - RNA, 19 nt, Artificial Sequence
  Description of Artificial Sequence: Synthetic oligonucleotide
  Sense strand starting at position 3637 of SEQ ID NO: 1293
gugagaaugugguugugga

SEQ ID NO: 102597 - RNA, 19 nt, Artificial Sequence
  Description of Artificial Sequence: Synthetic oligonucleotide
  Antisense strand to SEQ ID NO: 102596
uccacaaccacauucucac

SEQ ID NO: 102598 - RNA, 19 nt, Artificial Sequence
  Description of Artificial Sequence: Synthetic oligonucleotide
  Sense strand starting at position 3638 of SEQ ID NO: 1293
ugagaaugugguuguggac

SEQ ID NO: 102599 - RNA, 19 nt, Artificial Sequence
  Description of Artificial Sequence: Synthetic oligonucleotide
  Antisense strand to SEQ ID NO: 102598
guccacaaccacauucuca

SEQ ID NO: 102600 - RNA, 19 nt, Artificial Sequence
  Description of Artificial Sequence: Synthetic oligonucleotide
  Sense strand starting at position 3706 of SEQ ID NO: 1293
ccagaauggguauguuuaa

SEQ ID NO: 102601 - RNA, 19 nt, Artificial Sequence
  Description of Artificial Sequence: Synthetic oligonucleotide
  Antisense strand to SEQ ID NO: 102600
uuaaacauacccauucugg

SEQ ID NO: 102602 - RNA, 19 nt, Artificial Sequence
  Description of Artificial Sequence: Synthetic oligonucleotide
  Sense strand starting at position 3707 of SEQ ID NO: 1293
cagaauggguauguuuaau

SEQ ID NO: 102603 - RNA, 19 nt, Artificial Sequence
  Description of Artificial Sequence: Synthetic oligonucleotide
  Antisense strand to SEQ ID NO: 102602
auuaaacauacccauucug

SEQ ID NO: 102604 - RNA, 19 nt, Artificial Sequence
  Description of Artificial Sequence: Synthetic oligonucleotide
  Sense strand starting at position 65 of SEQ ID NO: 1295
gcucgaaagcuacaggaaa

SEQ ID NO: 102605 - RNA, 19 nt, Artificial Sequence
  Description of Artificial Sequence: Synthetic oligonucleotide
  Antisense strand to SEQ ID NO: 102604
uuuccuguagcuuucgagc

SEQ ID NO: 102606 - RNA, 19 nt, Artificial Sequence
  Description of Artificial Sequence: Synthetic oligonucleotide
  Sense strand starting at position 109 of SEQ ID NO: 1295
gggagaaacugguuucguc

SEQ ID NO: 102607 - RNA, 19 nt, Artificial Sequence
  Description of Artificial Sequence: Synthetic oligonucleotide
  Antisense strand to SEQ ID NO: 102606
gacgaaaccaguuucuccc

SEQ ID NO: 102608 - RNA, 19 nt, Artificial Sequence
  Description of Artificial Sequence: Synthetic oligonucleotide
  Sense strand starting at position 225 of SEQ ID NO: 1295
gguauacguagacaccaua

SEQ ID NO: 102609 - RNA, 19 nt, Artificial Sequence
  Description of Artificial Sequence: Synthetic oligonucleotide
  Antisense strand to SEQ ID NO: 102608
uauggugucuacguauacc

SEQ ID NO: 102610 - RNA, 19 nt, Artificial Sequence
  Description of Artificial Sequence: Synthetic oligonucleotide
  Sense strand starting at position 238 of SEQ ID NO: 1295
accauaaccugaguauuga

SEQ ID NO: 102611 - RNA, 19 nt, Artificial Sequence
  Description of Artificial Sequence: Synthetic oligonucleotide
  Antisense strand to SEQ ID NO: 102610
ucaauacucagguuauggu

SEQ ID NO: 102612 - RNA, 19 nt, Artificial Sequence
  Description of Artificial Sequence: Synthetic oligonucleotide
  Sense strand starting at position 242 of SEQ ID NO: 1295
uaaccugaguauugagaag

SEQ ID NO: 102613 - RNA, 19 nt, Artificial Sequence
  Description of Artificial Sequence: Synthetic oligonucleotide
  Antisense strand to SEQ ID NO: 102612
cuucucaauacucagguua

SEQ ID NO: 102614 - RNA, 19 nt, Artificial Sequence
  Description of Artificial Sequence: Synthetic oligonucleotide
  Sense strand starting at position 295 of SEQ ID NO: 1295
gaugcucuccagugcugaa

SEQ ID NO: 102615 - RNA, 19 nt, Artificial Sequence
  Description of Artificial Sequence: Synthetic oligonucleotide
  Antisense strand to SEQ ID NO: 102614
uucagcacuggagagcauc

SEQ ID NO: 102616 - RNA, 19 nt, Artificial Sequence
  Description of Artificial Sequence: Synthetic oligonucleotide
  Sense strand starting at position 432 of SEQ ID NO: 1295
cucauuuguuuaugugaca

SEQ ID NO: 102617 - RNA, 19 nt, Artificial Sequence
  Description of Artificial Sequence: Synthetic oligonucleotide
  Antisense strand to SEQ ID NO: 102616
ugucacauaaacaaaugag

SEQ ID NO: 102618 - RNA, 19 nt, Artificial Sequence
  Description of Artificial Sequence: Synthetic oligonucleotide
  Sense strand starting at position 496 of SEQ ID NO: 1295
gagggcuggcuugaaacaa

SEQ ID NO: 102619 - RNA, 19 nt, Artificial Sequence
  Description of Artificial Sequence: Synthetic oligonucleotide
  Antisense strand to SEQ ID NO: 102618
uuguuucaagccagcccuc

SEQ ID NO: 102620 - RNA, 19 nt, Artificial Sequence
  Description of Artificial Sequence: Synthetic oligonucleotide
  Sense strand starting at position 514 of SEQ ID NO: 1295
acugcagguccuugagaga

SEQ ID NO: 102621 - RNA, 19 nt, Artificial Sequence
  Description of Artificial Sequence: Synthetic oligonucleotide
  Antisense strand to SEQ ID NO: 102620
ucucucaaggaccugcagu

SEQ ID NO: 102622 - RNA, 19 nt, Artificial Sequence
  Description of Artificial Sequence: Synthetic oligonucleotide
  Sense strand starting at position 914 of SEQ ID NO: 1295
guucuaccugaagauagua

SEQ ID NO: 102623 - RNA, 19 nt, Artificial Sequence
  Description of Artificial Sequence: Synthetic oligonucleotide
  Antisense strand to SEQ ID NO: 102622
uacuaucuucagguagaac

SEQ ID NO: 102624 - RNA, 19 nt, Artificial Sequence
  Description of Artificial Sequence: Synthetic oligonucleotide
  Sense strand starting at position 927 of SEQ ID NO: 1295
auaguaguguuagcucuga

SEQ ID NO: 102625 - RNA, 19 nt, Artificial Sequence
  Description of Artificial Sequence: Synthetic oligonucleotide
  Antisense strand to SEQ ID NO: 102624
ucagagcuaacacuacuau

SEQ ID NO: 102626 - RNA, 19 nt, Artificial Sequence
  Description of Artificial Sequence: Synthetic oligonucleotide
  Sense strand starting at position 931 of SEQ ID NO: 1295
uaguguuagcucugaguuc

SEQ ID NO: 102627 - RNA, 19 nt, Artificial Sequence
  Description of Artificial Sequence: Synthetic oligonucleotide
  Antisense strand to SEQ ID NO: 102626
gaacucagagcuaacacua

SEQ ID NO: 102628 - RNA, 19 nt, Artificial Sequence
  Description of Artificial Sequence: Synthetic oligonucleotide
  Sense strand starting at position 957 of SEQ ID NO: 1295
acccguuuauuugauucua

SEQ ID NO: 102629 - RNA, 19 nt, Artificial Sequence
  Description of Artificial Sequence: Synthetic oligonucleotide
  Antisense strand to SEQ ID NO: 102628
uagaaucaaauaaacgggu

SEQ ID NO: 102630 - RNA, 19 nt, Artificial Sequence
  Description of Artificial Sequence: Synthetic oligonucleotide
  Sense strand starting at position 1879 of SEQ ID NO: 1295
gcgcaaucucuggagcgaa

SEQ ID NO: 102631 - RNA, 19 nt, Artificial Sequence
  Description of Artificial Sequence: Synthetic oligonucleotide
  Antisense strand to SEQ ID NO: 102630
uucgcuccagagauugcgc

SEQ ID NO: 102632 - RNA, 19 nt, Artificial Sequence
  Description of Artificial Sequence: Synthetic oligonucleotide
  Sense strand starting at position 2258 of SEQ ID NO: 1295
gcuucuuccgggcugucaa

SEQ ID NO: 102633 - RNA, 19 nt, Artificial Sequence
  Description of Artificial Sequence: Synthetic oligonucleotide
  Antisense strand to SEQ ID NO: 102632
uugacagcccggaagaagc

SEQ ID NO: 102634 - RNA, 19 nt, Artificial Sequence
  Description of Artificial Sequence: Synthetic oligonucleotide
  Sense strand starting at position 2570 of SEQ ID NO: 1295
cugcgaguugggcuguauu

SEQ ID NO: 102635 - RNA, 19 nt, Artificial Sequence
  Description of Artificial Sequence: Synthetic oligonucleotide
  Antisense strand to SEQ ID NO: 102634
aauacagcccaacucgcag

SEQ ID NO: 102636 - RNA, 19 nt, Artificial Sequence
  Description of Artificial Sequence: Synthetic oligonucleotide
  Sense strand starting at position 2573 of SEQ ID NO: 1295
cgaguugggcuguauucca

SEQ ID NO: 102637 - RNA, 19 nt, Artificial Sequence
  Description of Artificial Sequence: Synthetic oligonucleotide
  Antisense strand to SEQ ID NO: 102636
uggaauacagcccaacucg

SEQ ID NO: 102638 - RNA, 19 nt, Artificial Sequence
  Description of Artificial Sequence: Synthetic oligonucleotide
  Sense strand starting at position 2580 of SEQ ID NO: 1295
ggcuguauuccagaguaau

SEQ ID NO: 102639 - RNA, 19 nt, Artificial Sequence
  Description of Artificial Sequence: Synthetic oligonucleotide
  Antisense strand to SEQ ID NO: 102638
auuacucuggaauacagcc

SEQ ID NO: 102640 - RNA, 19 nt, Artificial Sequence
  Description of Artificial Sequence: Synthetic oligonucleotide
  Sense strand starting at position 2583 of SEQ ID NO: 1295
uguauuccagaguaaugug

SEQ ID NO: 102641 - RNA, 19 nt, Artificial Sequence
  Description of Artificial Sequence: Synthetic oligonucleotide
  Antisense strand to SEQ ID NO: 102640
cacauuacucuggaauaca

SEQ ID NO: 102642 - RNA, 19 nt, Artificial Sequence
  Description of Artificial Sequence: Synthetic oligonucleotide
  Sense strand starting at position 2627 of SEQ ID NO: 1295
cagcgcuuaucuguaggau

SEQ ID NO: 102643 - RNA, 19 nt, Artificial Sequence
  Description of Artificial Sequence: Synthetic oligonucleotide
  Antisense strand to SEQ ID NO: 102642
auccuacagauaagcgcug

SEQ ID NO: 102644 - RNA, 19 nt, Artificial Sequence
  Description of Artificial Sequence: Synthetic oligonucleotide
  Sense strand starting at position 2628 of SEQ ID NO: 1295
agcgcuuaucuguaggauu

SEQ ID NO: 102645 - RNA, 19 nt, Artificial Sequence
  Description of Artificial Sequence: Synthetic oligonucleotide
  Antisense strand to SEQ ID NO: 102644
aauccuacagauaagcgcu

SEQ ID NO: 102646 - RNA, 19 nt, Artificial Sequence
  Description of Artificial Sequence: Synthetic oligonucleotide
  Sense strand starting at position 2630 of SEQ ID NO: 1295
cgcuuaucuguaggauuua

SEQ ID NO: 102647 - RNA, 19 nt, Artificial Sequence
  Description of Artificial Sequence: Synthetic oligonucleotide
  Antisense strand to SEQ ID NO: 102646
uaaauccuacagauaagcg

SEQ ID NO: 102648 - RNA, 19 nt, Artificial Sequence
  Description of Artificial Sequence: Synthetic oligonucleotide
  Sense strand starting at position 2631 of SEQ ID NO: 1295
gcuuaucuguaggauuuag

SEQ ID NO: 102649 - RNA, 19 nt, Artificial Sequence
  Description of Artificial Sequence: Synthetic oligonucleotide
  Antisense strand to SEQ ID NO: 102648
cuaaauccuacagauaagc

SEQ ID NO: 102650 - RNA, 19 nt, Artificial Sequence
  Description of Artificial Sequence: Synthetic oligonucleotide
  Sense strand starting at position 2641 of SEQ ID NO: 1295
aggauuuaguguuaagcuc

SEQ ID NO: 102651 - RNA, 19 nt, Artificial Sequence
  Description of Artificial Sequence: Synthetic oligonucleotide
  Antisense strand to SEQ ID NO: 102650
gagcuuaacacuaaauccu

SEQ ID NO: 102652 - RNA, 19 nt, Artificial Sequence
  Description of Artificial Sequence: Synthetic oligonucleotide
  Sense strand starting at position 2932 of SEQ ID NO: 1295
guugacauuucccaggaag

SEQ ID NO: 102653 - RNA, 19 nt, Artificial Sequence
  Description of Artificial Sequence: Synthetic oligonucleotide
  Antisense strand to SEQ ID NO: 102652
cuuccugggaaaugucaac

SEQ ID NO: 102654 - RNA, 19 nt, Artificial Sequence
  Description of Artificial Sequence: Synthetic oligonucleotide
  Sense strand starting at position 2972 of SEQ ID NO: 1295
gauaaaggguucucaguaa

SEQ ID NO: 102655 - RNA, 19 nt, Artificial Sequence
  Description of Artificial Sequence: Synthetic oligonucleotide
  Antisense strand to SEQ ID NO: 102654
uuacugagaacccuuuauc

SEQ ID NO: 102656 - RNA, 19 nt, Artificial Sequence
  Description of Artificial Sequence: Synthetic oligonucleotide
  Sense strand starting at position 3012 of SEQ ID NO: 1295
ugccguaugccugagguga

SEQ ID NO: 102657 - RNA, 19 nt, Artificial Sequence
  Description of Artificial Sequence: Synthetic oligonucleotide
  Antisense strand to SEQ ID NO: 102656
ucaccucaggcauacggca

SEQ ID NO: 102658 - RNA, 19 nt, Artificial Sequence
  Description of Artificial Sequence: Synthetic oligonucleotide
  Sense strand starting at position 3013 of SEQ ID NO: 1295
gccguaugccugaggugac

SEQ ID NO: 102659 - RNA, 19 nt, Artificial Sequence
  Description of Artificial Sequence: Synthetic oligonucleotide
  Antisense strand to SEQ ID NO: 102658
gucaccucaggcauacggc

SEQ ID NO: 102660 - RNA, 19 nt, Artificial Sequence
  Description of Artificial Sequence: Synthetic oligonucleotide
  Sense strand starting at position 3039 of SEQ ID NO: 1295
gcgguaacagugugucaga

SEQ ID NO: 102661 - RNA, 19 nt, Artificial Sequence
  Description of Artificial Sequence: Synthetic oligonucleotide
  Antisense strand to SEQ ID NO: 102660
ucugacacacuguuaccgc

SEQ ID NO: 102662 - RNA, 19 nt, Artificial Sequence
  Description of Artificial Sequence: Synthetic oligonucleotide
  Sense strand starting at position 3209 of SEQ ID NO: 1295
gggcuuucuuagucccgga

SEQ ID NO: 102663 - RNA, 19 nt, Artificial Sequence
  Description of Artificial Sequence: Synthetic oligonucleotide
  Antisense strand to SEQ ID NO: 102662
uccgggacuaagaaagccc

SEQ ID NO: 102664 - RNA, 19 nt, Artificial Sequence
  Description of Artificial Sequence: Synthetic oligonucleotide
  Sense strand starting at position 3213 of SEQ ID NO: 1295
uuucuuagucccggaggaa

SEQ ID NO: 102665 - RNA, 19 nt, Artificial Sequence
  Description of Artificial Sequence: Synthetic oligonucleotide
  Antisense strand to SEQ ID NO: 102664
uuccuccgggacuaagaaa

SEQ ID NO: 102666 - RNA, 19 nt, Artificial Sequence
  Description of Artificial Sequence: Synthetic oligonucleotide
  Sense strand starting at position 3214 of SEQ ID NO: 1295
uucuuagucccggaggaau

SEQ ID NO: 102667 - RNA, 19 nt, Artificial Sequence
  Description of Artificial Sequence: Synthetic oligonucleotide
  Antisense strand to SEQ ID NO: 102666
auuccuccgggacuaagaa

SEQ ID NO: 102668 - RNA, 19 nt, Artificial Sequence
  Description of Artificial Sequence: Synthetic oligonucleotide
  Sense strand starting at position 3332 of SEQ ID NO: 1295
cacagauguggaugaaugu

SEQ ID NO: 102669 - RNA, 19 nt, Artificial Sequence
  Description of Artificial Sequence: Synthetic oligonucleotide
  Antisense strand to SEQ ID NO: 102668
acauucauccacaucugug

SEQ ID NO: 102670 - RNA, 19 nt, Artificial Sequence
  Description of Artificial Sequence: Synthetic oligonucleotide
  Sense strand starting at position 3442 of SEQ ID NO: 1295
uuuguuugugaccaggcau

SEQ ID NO: 102671 - RNA, 19 nt, Artificial Sequence
  Description of Artificial Sequence: Synthetic oligonucleotide
  Antisense strand to SEQ ID NO: 102670
augccuggucacaaacaaa

SEQ ID NO: 102672 - RNA, 19 nt, Artificial Sequence
  Description of Artificial Sequence: Synthetic oligonucleotide
  Sense strand starting at position 3491 of SEQ ID NO: 1295
ggcugucuacuauguaaug

SEQ ID NO: 102673 - RNA, 19 nt, Artificial Sequence
  Description of Artificial Sequence: Synthetic oligonucleotide
  Antisense strand to SEQ ID NO: 102672
cauuacauaguagacagcc

SEQ ID NO: 102674 - RNA, 19 nt, Artificial Sequence
  Description of Artificial Sequence: Synthetic oligonucleotide
  Sense strand starting at position 3597 of SEQ ID NO: 1295
ccagaaagguaucaggaaa

SEQ ID NO: 102675 - RNA, 19 nt, Artificial Sequence
  Description of Artificial Sequence: Synthetic oligonucleotide
  Antisense strand to SEQ ID NO: 102674
uuuccugauaccuuucugg

SEQ ID NO: 102676 - RNA, 19 nt, Artificial Sequence
  Description of Artificial Sequence: Synthetic oligonucleotide
  Sense strand starting at position 3610 of SEQ ID NO: 1295
aggaaacaguuguacacaa

SEQ ID NO: 102677 - RNA, 19 nt, Artificial Sequence
  Description of Artificial Sequence: Synthetic oligonucleotide
  Antisense strand to SEQ ID NO: 102676
uuguguacaacuguuuccu

SEQ ID NO: 102678 - RNA, 19 nt, Artificial Sequence
  Description of Artificial Sequence: Synthetic oligonucleotide
  Sense strand starting at position 3640 of SEQ ID NO: 1295
ggugaugugauguaaggga

SEQ ID NO: 102679 - RNA, 19 nt, Artificial Sequence
  Description of Artificial Sequence: Synthetic oligonucleotide
  Antisense strand to SEQ ID NO: 102678
ucccuuacaucacaucacc

SEQ ID NO: 102680 - RNA, 19 nt, Artificial Sequence
  Description of Artificial Sequence: Synthetic oligonucleotide
  Sense strand starting at position 3905 of SEQ ID NO: 1295
ccuggaauagccuguccua

SEQ ID NO: 102681 - RNA, 19 nt, Artificial Sequence
  Description of Artificial Sequence: Synthetic oligonucleotide
  Antisense strand to SEQ ID NO: 102680
uaggacaggcuauuccagg

SEQ ID NO: 102682 - RNA, 19 nt, Artificial Sequence
  Description of Artificial Sequence: Synthetic oligonucleotide
  Sense strand starting at position 3966 of SEQ ID NO: 1295
gcuguuggaguccaaaguu

SEQ ID NO: 102683 - RNA, 19 nt, Artificial Sequence
  Description of Artificial Sequence: Synthetic oligonucleotide
  Antisense strand to SEQ ID NO: 102682
aacuuuggacuccaacagc

SEQ ID NO: 102684 - RNA, 19 nt, Artificial Sequence
  Description of Artificial Sequence: Synthetic oligonucleotide
  Sense strand starting at position 3841 of SEQ ID NO: 1296
agaugaguccagcaccgaa

SEQ ID NO: 102685 - RNA, 19 nt, Artificial Sequence
  Description of Artificial Sequence: Synthetic oligonucleotide
  Antisense strand to SEQ ID NO: 102684
uucggugcuggacucaucu

SEQ ID NO: 102686 - RNA, 19 nt, Artificial Sequence
  Description of Artificial Sequence: Synthetic oligonucleotide
  Sense strand starting at position 3788 of SEQ ID NO: 1296
auucuuugaguuugaagag

SEQ ID NO: 102687 - RNA, 19 nt, Artificial Sequence
  Description of Artificial Sequence: Synthetic oligonucleotide
  Antisense strand to SEQ ID NO: 102686
cucuucaaacucaaagaau

SEQ ID NO: 102688 - RNA, 19 nt, Artificial Sequence
  Description of Artificial Sequence: Synthetic oligonucleotide
  Sense strand starting at position 3785 of SEQ ID NO: 1296
aucauucuuugaguuugaa

SEQ ID NO: 102689 - RNA, 19 nt, Artificial Sequence
  Description of Artificial Sequence: Synthetic oligonucleotide
  Antisense strand to SEQ ID NO: 102688
uucaaacucaaagaaugau

SEQ ID NO: 102690 - RNA, 19 nt, Artificial Sequence
  Description of Artificial Sequence: Synthetic oligonucleotide
  Sense strand starting at position 3721 of SEQ ID NO: 1296
gcauuugguuuacuuggua

SEQ ID NO: 102691 - RNA, 19 nt, Artificial Sequence
  Description of Artificial Sequence: Synthetic oligonucleotide
  Antisense strand to SEQ ID NO: 102690
uaccaaguaaaccaaaugc

SEQ ID NO: 102692 - RNA, 19 nt, Artificial Sequence
  Description of Artificial Sequence: Synthetic oligonucleotide
  Sense strand starting at position 3707 of SEQ ID NO: 1296
gacaauggucaccagcauu

SEQ ID NO: 102693 - RNA, 19 nt, Artificial Sequence
  Description of Artificial Sequence: Synthetic oligonucleotide
  Antisense strand to SEQ ID NO: 102692
aaugcuggugaccauuguc

SEQ ID NO: 102694 - RNA, 19 nt, Artificial Sequence
  Description of Artificial Sequence: Synthetic oligonucleotide
  Sense strand starting at position 3706 of SEQ ID NO: 1296
agacaauggucaccagcau

SEQ ID NO: 102695 - RNA, 19 nt, Artificial Sequence
  Description of Artificial Sequence: Synthetic oligonucleotide
  Antisense strand to SEQ ID NO: 102694
augcuggugaccauugucu

SEQ ID NO: 102696 - RNA, 19 nt, Artificial Sequence
  Description of Artificial Sequence: Synthetic oligonucleotide
  Sense strand starting at position 3535 of SEQ ID NO: 1296
agauuuguuucugugcuca

SEQ ID NO: 102697 - RNA, 19 nt, Artificial Sequence
  Description of Artificial Sequence: Synthetic oligonucleotide
  Antisense strand to SEQ ID NO: 102696
ugagcacagaaacaaaucu

SEQ ID NO: 102698 - RNA, 19 nt, Artificial Sequence
  Description of Artificial Sequence: Synthetic oligonucleotide
  Sense strand starting at position 3533 of SEQ ID NO: 1296
ugagauuuguuucugugcu

SEQ ID NO: 102699 - RNA, 19 nt, Artificial Sequence
  Description of Artificial Sequence: Synthetic oligonucleotide
  Antisense strand to SEQ ID NO: 102698
agcacagaaacaaaucuca

SEQ ID NO: 102700 - RNA, 19 nt, Artificial Sequence
  Description of Artificial Sequence: Synthetic oligonucleotide
  Sense strand starting at position 3530 of SEQ ID NO: 1296
augugagauuuguuucugu

SEQ ID NO: 102701 - RNA, 19 nt, Artificial Sequence
  Description of Artificial Sequence: Synthetic oligonucleotide
  Antisense strand to SEQ ID NO: 102700
acagaaacaaaucucacau

SEQ ID NO: 102702 - RNA, 19 nt, Artificial Sequence
  Description of Artificial Sequence: Synthetic oligonucleotide
  Sense strand starting at position 3294 of SEQ ID NO: 1296
gucagagcucuuugaauca

SEQ ID NO: 102703 - RNA, 19 nt, Artificial Sequence
  Description of Artificial Sequence: Synthetic oligonucleotide
  Antisense strand to SEQ ID NO: 102702
ugauucaaagagcucugac

SEQ ID NO: 102704 - RNA, 19 nt, Artificial Sequence
  Description of Artificial Sequence: Synthetic oligonucleotide
  Sense strand starting at position 3219 of SEQ ID NO: 1296
cuuuguuuacaauggaacu

SEQ ID NO: 102705 - RNA, 19 nt, Artificial Sequence
  Description of Artificial Sequence: Synthetic oligonucleotide
  Antisense strand to SEQ ID NO: 102704
aguuccauuguaaacaaag

SEQ ID NO: 102706 - RNA, 19 nt, Artificial Sequence
  Description of Artificial Sequence: Synthetic oligonucleotide
  Sense strand starting at position 3209 of SEQ ID NO: 1296
ugcuauguggcuuuguuua

SEQ ID NO: 102707 - RNA, 19 nt, Artificial Sequence
  Description of Artificial Sequence: Synthetic oligonucleotide
  Antisense strand to SEQ ID NO: 102706
uaaacaaagccacauagca

SEQ ID NO: 102708 - RNA, 19 nt, Artificial Sequence
  Description of Artificial Sequence: Synthetic oligonucleotide
  Sense strand starting at position 3170 of SEQ ID NO: 1296
aagucugcaguauaguaaa

SEQ ID NO: 102709 - RNA, 19 nt, Artificial Sequence
  Description of Artificial Sequence: Synthetic oligonucleotide
  Antisense strand to SEQ ID NO: 102708
uuuacuauacugcagacuu

SEQ ID NO: 102710 - RNA, 19 nt, Artificial Sequence
  Description of Artificial Sequence: Synthetic oligonucleotide
  Sense strand starting at position 3141 of SEQ ID NO: 1296
ugucuuggauguucucaaa

SEQ ID NO: 102711 - RNA, 19 nt, Artificial Sequence
  Description of Artificial Sequence: Synthetic oligonucleotide
  Antisense strand to SEQ ID NO: 102710
uuugagaacauccaagaca

SEQ ID NO: 102712 - RNA, 19 nt, Artificial Sequence
  Description of Artificial Sequence: Synthetic oligonucleotide
  Sense strand starting at position 3132 of SEQ ID NO: 1296
ucagguuuaugucuuggau

SEQ ID NO: 102713 - RNA, 19 nt, Artificial Sequence
  Description of Artificial Sequence: Synthetic oligonucleotide
  Antisense strand to SEQ ID NO: 102712
auccaagacauaaaccuga

SEQ ID NO: 102714 - RNA, 19 nt, Artificial Sequence
  Description of Artificial Sequence: Synthetic oligonucleotide
  Sense strand starting at position 3067 of SEQ ID NO: 1296
gcuccauucugaccagcaa

SEQ ID NO: 102715 - RNA, 19 nt, Artificial Sequence
  Description of Artificial Sequence: Synthetic oligonucleotide
  Antisense strand to SEQ ID NO: 102714
uugcuggucagaauggagc

SEQ ID NO: 102716 - RNA, 19 nt, Artificial Sequence
  Description of Artificial Sequence: Synthetic oligonucleotide
  Sense strand starting at position 2825 of SEQ ID NO: 1296
augcaaugucagugggaac

SEQ ID NO: 102717 - RNA, 19 nt, Artificial Sequence
  Description of Artificial Sequence: Synthetic oligonucleotide
  Antisense strand to SEQ ID NO: 102716
guucccacugacauugcau

SEQ ID NO: 102718 - RNA, 19 nt, Artificial Sequence
  Description of Artificial Sequence: Synthetic oligonucleotide
  Sense strand starting at position 2824 of SEQ ID NO: 1296
aaugcaaugucagugggaa

SEQ ID NO: 102719 - RNA, 19 nt, Artificial Sequence
  Description of Artificial Sequence: Synthetic oligonucleotide
  Antisense strand to SEQ ID NO: 102718
uucccacugacauugcauu

SEQ ID NO: 102720 - RNA, 19 nt, Artificial Sequence
  Description of Artificial Sequence: Synthetic oligonucleotide
  Sense strand starting at position 2819 of SEQ ID NO: 1296
caggaaaugcaaugucagu

SEQ ID NO: 102721 - RNA, 19 nt, Artificial Sequence
  Description of Artificial Sequence: Synthetic oligonucleotide
  Antisense strand to SEQ ID NO: 102720
acugacauugcauuuccug

SEQ ID NO: 102722 - RNA, 19 nt, Artificial Sequence
  Description of Artificial Sequence: Synthetic oligonucleotide
  Sense strand starting at position 2701 of SEQ ID NO: 1296
acacucaaucuacggaauu

SEQ ID NO: 102723 - RNA, 19 nt, Artificial Sequence
  Description of Artificial Sequence: Synthetic oligonucleotide
  Antisense strand to SEQ ID NO: 102722
aauuccguagauugagugu

SEQ ID NO: 102724 - RNA, 19 nt, Artificial Sequence
  Description of Artificial Sequence: Synthetic oligonucleotide
  Sense strand starting at position 2487 of SEQ ID NO: 1296
ggcagugugcuucagaaga

SEQ ID NO: 102725 - RNA, 19 nt, Artificial Sequence
  Description of Artificial Sequence: Synthetic oligonucleotide
  Antisense strand to SEQ ID NO: 102724
ucuucugaagcacacugcc

SEQ ID NO: 102726 - RNA, 19 nt, Artificial Sequence
  Description of Artificial Sequence: Synthetic oligonucleotide
  Sense strand starting at position 2443 of SEQ ID NO: 1296
gugguuaauagugacagca

SEQ ID NO: 102727 - RNA, 19 nt, Artificial Sequence
  Description of Artificial Sequence: Synthetic oligonucleotide
  Antisense strand to SEQ ID NO: 102726
ugcugucacuauuaaccac

SEQ ID NO: 102728 - RNA, 19 nt, Artificial Sequence
  Description of Artificial Sequence: Synthetic oligonucleotide
  Sense strand starting at position 2432 of SEQ ID NO: 1296
ggcaauaauaagugguuaa

SEQ ID NO: 102729 - RNA, 19 nt, Artificial Sequence
  Description of Artificial Sequence: Synthetic oligonucleotide
  Antisense strand to SEQ ID NO: 102728
uuaaccacuuauuauugcc

SEQ ID NO: 102730 - RNA, 19 nt, Artificial Sequence
  Description of Artificial Sequence: Synthetic oligonucleotide
  Sense strand starting at position 2431 of SEQ ID NO: 1296
aggcaauaauaagugguua

SEQ ID NO: 102731 - RNA, 19 nt, Artificial Sequence
  Description of Artificial Sequence: Synthetic oligonucleotide
  Antisense strand to SEQ ID NO: 102730
uaaccacuuauuauugccu

SEQ ID NO: 102732 - RNA, 19 nt, Artificial Sequence
  Description of Artificial Sequence: Synthetic oligonucleotide
  Sense strand starting at position 2425 of SEQ ID NO: 1296
uguguuaggcaauaauaag

SEQ ID NO: 102733 - RNA, 19 nt, Artificial Sequence
  Description of Artificial Sequence: Synthetic oligonucleotide
  Antisense strand to SEQ ID NO: 102732
cuuauuauugccuaacaca

SEQ ID NO: 102734 - RNA, 19 nt, Artificial Sequence
  Description of Artificial Sequence: Synthetic oligonucleotide
  Sense strand starting at position 2422 of SEQ ID NO: 1296
uguuguguuaggcaauaau

SEQ ID NO: 102735 - RNA, 19 nt, Artificial Sequence
  Description of Artificial Sequence: Synthetic oligonucleotide
  Antisense strand to SEQ ID NO: 102734
auuauugccuaacacaaca

SEQ ID NO: 102736 - RNA, 19 nt, Artificial Sequence
  Description of Artificial Sequence: Synthetic oligonucleotide
  Sense strand starting at position 2402 of SEQ ID NO: 1296
gcaucuugagcguaaggga

SEQ ID NO: 102737 - RNA, 19 nt, Artificial Sequence
  Description of Artificial Sequence: Synthetic oligonucleotide
  Antisense strand to SEQ ID NO: 102736
ucccuuacgcucaagaugc

SEQ ID NO: 102738 - RNA, 19 nt, Artificial Sequence
  Description of Artificial Sequence: Synthetic oligonucleotide
  Sense strand starting at position 2326 of SEQ ID NO: 1296
cguugcauuccagucugua

SEQ ID NO: 102739 - RNA, 19 nt, Artificial Sequence
  Description of Artificial Sequence: Synthetic oligonucleotide
  Antisense strand to SEQ ID NO: 102738
uacagacuggaaugcaacg

SEQ ID NO: 102740 - RNA, 19 nt, Artificial Sequence
  Description of Artificial Sequence: Synthetic oligonucleotide
  Sense strand starting at position 978 of SEQ ID NO: 1296
ggcagaggucccuguaaag

SEQ ID NO: 102741 - RNA, 19 nt, Artificial Sequence
  Description of Artificial Sequence: Synthetic oligonucleotide
  Antisense strand to SEQ ID NO: 102740
cuuuacagggaccucugcc

SEQ ID NO: 102742 - RNA, 19 nt, Artificial Sequence
  Description of Artificial Sequence: Synthetic oligonucleotide
  Sense strand starting at position 702 of SEQ ID NO: 1296
uguggugugacagaagacu

SEQ ID NO: 102743 - RNA, 19 nt, Artificial Sequence
  Description of Artificial Sequence: Synthetic oligonucleotide
  Antisense strand to SEQ ID NO: 102742
agucuucugucacaccaca

SEQ ID NO: 102744 - RNA, 19 nt, Artificial Sequence
  Description of Artificial Sequence: Synthetic oligonucleotide
  Sense strand starting at position 697 of SEQ ID NO: 1296
aauucuguggugugacaga

SEQ ID NO: 102745 - RNA, 19 nt, Artificial Sequence
  Description of Artificial Sequence: Synthetic oligonucleotide
  Antisense strand to SEQ ID NO: 102744
ucugucacaccacagaauu

SEQ ID NO: 102746 - RNA, 19 nt, Artificial Sequence
  Description of Artificial Sequence: Synthetic oligonucleotide
  Sense strand starting at position 569 of SEQ ID NO: 1296
uguuauuaagcccagauuc

SEQ ID NO: 102747 - RNA, 19 nt, Artificial Sequence
  Description of Artificial Sequence: Synthetic oligonucleotide
  Antisense strand to SEQ ID NO: 102746
gaaucugggcuuaauaaca

SEQ ID NO: 102748 - RNA, 19 nt, Artificial Sequence
  Description of Artificial Sequence: Synthetic oligonucleotide
  Sense strand starting at position 402 of SEQ ID NO: 1296
cgauauuccagacacgauu

SEQ ID NO: 102749 - RNA, 19 nt, Artificial Sequence
  Description of Artificial Sequence: Synthetic oligonucleotide
  Antisense strand to SEQ ID NO: 102748
aaucgugucuggaauaucg

SEQ ID NO: 102750 - RNA, 19 nt, Artificial Sequence
  Description of Artificial Sequence: Synthetic oligonucleotide
  Sense strand starting at position 206 of SEQ ID NO: 1296
cuauauuguguacauguau

SEQ ID NO: 102751 - RNA, 19 nt, Artificial Sequence
  Description of Artificial Sequence: Synthetic oligonucleotide
  Antisense strand to SEQ ID NO: 102750
auacauguacacaauauag

SEQ ID NO: 102752 - RNA, 19 nt, Artificial Sequence
  Description of Artificial Sequence: Synthetic oligonucleotide
  Sense strand starting at position 204 of SEQ ID NO: 1296
uccuauauuguguacaugu

SEQ ID NO: 102753 - RNA, 19 nt, Artificial Sequence
  Description of Artificial Sequence: Synthetic oligonucleotide
  Antisense strand to SEQ ID NO: 102752
acauguacacaauauagga

SEQ ID NO: 102754 - RNA, 19 nt, Artificial Sequence
  Description of Artificial Sequence: Synthetic oligonucleotide
  Sense strand starting at position 128 of SEQ ID NO: 1296
augcaaaugcucgcucuuu

SEQ ID NO: 102755 - RNA, 19 nt, Artificial Sequence
  Description of Artificial Sequence: Synthetic oligonucleotide
  Antisense strand to SEQ ID NO: 102754
aaagagcgagcauuugcau

SEQ ID NO: 102756 - RNA, 19 nt, Artificial Sequence
  Description of Artificial Sequence: Synthetic oligonucleotide
  Sense strand starting at position 114 of SEQ ID NO: 1296
guugauaccaugugaugca

SEQ ID NO: 102757 - RNA, 19 nt, Artificial Sequence
  Description of Artificial Sequence: Synthetic oligonucleotide
  Antisense strand to SEQ ID NO: 102756
ugcaucacaugguaucaac

SEQ ID NO: 102758 - RNA, 19 nt, Artificial Sequence
  Description of Artificial Sequence: Synthetic oligonucleotide
  Sense strand starting at position 105 of SEQ ID NO: 1296
accuuaaguguugauacca

SEQ ID NO: 102759 - RNA, 19 nt, Artificial Sequence
  Description of Artificial Sequence: Synthetic oligonucleotide
  Antisense strand to SEQ ID NO: 102758
ugguaucaacacuuaaggu

SEQ ID NO: 102760 - RNA, 19 nt, Artificial Sequence
  Description of Artificial Sequence: Synthetic oligonucleotide
  Sense strand starting at position 82 of SEQ ID NO: 1296
uguggauauaggugaauuc

SEQ ID NO: 102761 - RNA, 19 nt, Artificial Sequence
  Description of Artificial Sequence: Synthetic oligonucleotide
  Antisense strand to SEQ ID NO: 102760
gaauucaccuauauccaca

SEQ ID NO: 102762 - RNA, 19 nt, Artificial Sequence
  Description of Artificial Sequence: Synthetic oligonucleotide
  Sense strand starting at position 45 of SEQ ID NO: 1296
agaaguaggugacuuguuu

SEQ ID NO: 102763 - RNA, 19 nt, Artificial Sequence
  Description of Artificial Sequence: Synthetic oligonucleotide
  Antisense strand to SEQ ID NO: 102762
aaacaagucaccuacuucu

SEQ ID NO: 102764 - RNA, 19 nt, Artificial Sequence
  Description of Artificial Sequence: Synthetic oligonucleotide
  Sense strand starting at position 3849 of SEQ ID NO: 1297
gggaaaucuuugccauagc

SEQ ID NO: 102765 - RNA, 19 nt, Artificial Sequence
  Description of Artificial Sequence: Synthetic oligonucleotide
  Antisense strand to SEQ ID NO: 102764
gcuauggcaaagauuuccc

SEQ ID NO: 102766 - RNA, 19 nt, Artificial Sequence
  Description of Artificial Sequence: Synthetic oligonucleotide
  Sense strand starting at position 3848 of SEQ ID NO: 1297
ugggaaaucuuugccauag

SEQ ID NO: 102767 - RNA, 19 nt, Artificial Sequence
  Description of Artificial Sequence: Synthetic oligonucleotide
  Antisense strand to SEQ ID NO: 102766
cuauggcaaagauuuccca

SEQ ID NO: 102768 - RNA, 19 nt, Artificial Sequence
  Description of Artificial Sequence: Synthetic oligonucleotide
  Sense strand starting at position 3847 of SEQ ID NO: 1297
cugggaaaucuuugccaua

SEQ ID NO: 102769 - RNA, 19 nt, Artificial Sequence
  Description of Artificial Sequence: Synthetic oligonucleotide
  Antisense strand to SEQ ID NO: 102768
uauggcaaagauuucccag

SEQ ID NO: 102770 - RNA, 19 nt, Artificial Sequence
  Description of Artificial Sequence: Synthetic oligonucleotide
  Sense strand starting at position 3838 of SEQ ID NO: 1297
uccagauggcugggaaauc

SEQ ID NO: 102771 - RNA, 19 nt, Artificial Sequence
  Description of Artificial Sequence: Synthetic oligonucleotide
  Antisense strand to SEQ ID NO: 102770
gauuucccagccaucugga

SEQ ID NO: 102772 - RNA, 19 nt, Artificial Sequence
  Description of Artificial Sequence: Synthetic oligonucleotide
  Sense strand starting at position 3680 of SEQ ID NO: 1297
agaugaguccagcaccgaa

SEQ ID NO: 102773 - RNA, 19 nt, Artificial Sequence
  Description of Artificial Sequence: Synthetic oligonucleotide
  Antisense strand to SEQ ID NO: 102772
uucggugcuggacucaucu

SEQ ID NO: 102774 - RNA, 19 nt, Artificial Sequence
  Description of Artificial Sequence: Synthetic oligonucleotide
  Sense strand starting at position 3627 of SEQ ID NO: 1297
auucuuugaguuugaagag

SEQ ID NO: 102775 - RNA, 19 nt, Artificial Sequence
  Description of Artificial Sequence: Synthetic oligonucleotide
  Antisense strand to SEQ ID NO: 102774
cucuucaaacucaaagaau

SEQ ID NO: 102776 - RNA, 19 nt, Artificial Sequence
  Description of Artificial Sequence: Synthetic oligonucleotide
  Sense strand starting at position 3624 of SEQ ID NO: 1297
aucauucuuugaguuugaa

SEQ ID NO: 102777 - RNA, 19 nt, Artificial Sequence
  Description of Artificial Sequence: Synthetic oligonucleotide
  Antisense strand to SEQ ID NO: 102776
uucaaacucaaagaaugau

SEQ ID NO: 102778 - RNA, 19 nt, Artificial Sequence
  Description of Artificial Sequence: Synthetic oligonucleotide
  Sense strand starting at position 3560 of SEQ ID NO: 1297
gcauuugguuuacuuggua

SEQ ID NO: 102779 - RNA, 19 nt, Artificial Sequence
  Description of Artificial Sequence: Synthetic oligonucleotide
  Antisense strand to SEQ ID NO: 102778
uaccaaguaaaccaaaugc

SEQ ID NO: 102780 - RNA, 19 nt, Artificial Sequence
  Description of Artificial Sequence: Synthetic oligonucleotide
  Sense strand starting at position 3546 of SEQ ID NO: 1297
gacaauggucaccagcauu

SEQ ID NO: 102781 - RNA, 19 nt, Artificial Sequence
  Description of Artificial Sequence: Synthetic oligonucleotide
  Antisense strand to SEQ ID NO: 102780
aaugcuggugaccauuguc

SEQ ID NO: 102782 - RNA, 19 nt, Artificial Sequence
  Description of Artificial Sequence: Synthetic oligonucleotide
  Sense strand starting at position 3545 of SEQ ID NO: 1297
agacaauggucaccagcau

SEQ ID NO: 102783 - RNA, 19 nt, Artificial Sequence
  Description of Artificial Sequence: Synthetic oligonucleotide
  Antisense strand to SEQ ID NO: 102782
augcuggugaccauugucu

SEQ ID NO: 102784 - RNA, 19 nt, Artificial Sequence
  Description of Artificial Sequence: Synthetic oligonucleotide
  Sense strand starting at position 3374 of SEQ ID NO: 1297
agauuuguuucugugcuca

SEQ ID NO: 102785 - RNA, 19 nt, Artificial Sequence
  Description of Artificial Sequence: Synthetic oligonucleotide
  Antisense strand to SEQ ID NO: 102784
ugagcacagaaacaaaucu

SEQ ID NO: 102786 - RNA, 19 nt, Artificial Sequence
  Description of Artificial Sequence: Synthetic oligonucleotide
  Sense strand starting at position 3372 of SEQ ID NO: 1297
ugagauuuguuucugugcu

SEQ ID NO: 102787 - RNA, 19 nt, Artificial Sequence
  Description of Artificial Sequence: Synthetic oligonucleotide
  Antisense strand to SEQ ID NO: 102786
agcacagaaacaaaucuca

SEQ ID NO: 102788 - RNA, 19 nt, Artificial Sequence
  Description of Artificial Sequence: Synthetic oligonucleotide
  Sense strand starting at position 3369 of SEQ ID NO: 1297
augugagauuuguuucugu

SEQ ID NO: 102789 - RNA, 19 nt, Artificial Sequence
  Description of Artificial Sequence: Synthetic oligonucleotide
  Antisense strand to SEQ ID NO: 102788
acagaaacaaaucucacau

SEQ ID NO: 102790 - RNA, 19 nt, Artificial Sequence
  Description of Artificial Sequence: Synthetic oligonucleotide
  Sense strand starting at position 3133 of SEQ ID NO: 1297
gucagagcucuuugaauca

SEQ ID NO: 102791 - RNA, 19 nt, Artificial Sequence
  Description of Artificial Sequence: Synthetic oligonucleotide
  Antisense strand to SEQ ID NO: 102790
ugauucaaagagcucugac

SEQ ID NO: 102792 - RNA, 19 nt, Artificial Sequence
  Description of Artificial Sequence: Synthetic oligonucleotide
  Sense strand starting at position 3058 of SEQ ID NO: 1297
cuuuguuuacaauggaacu

SEQ ID NO: 102793 - RNA, 19 nt, Artificial Sequence
  Description of Artificial Sequence: Synthetic oligonucleotide
  Antisense strand to SEQ ID NO: 102792
aguuccauuguaaacaaag

SEQ ID NO: 102794 - RNA, 19 nt, Artificial Sequence
  Description of Artificial Sequence: Synthetic oligonucleotide
  Sense strand starting at position 3048 of SEQ ID NO: 1297
ugcuauguggcuuuguuua

SEQ ID NO: 102795 - RNA, 19 nt, Artificial Sequence
  Description of Artificial Sequence: Synthetic oligonucleotide
  Antisense strand to SEQ ID NO: 102794
uaaacaaagccacauagca

SEQ ID NO: 102796 - RNA, 19 nt, Artificial Sequence
  Description of Artificial Sequence: Synthetic oligonucleotide
  Sense strand starting at position 3009 of SEQ ID NO: 1297
aagucugcaguauaguaaa

SEQ ID NO: 102797 - RNA, 19 nt, Artificial Sequence
  Description of Artificial Sequence: Synthetic oligonucleotide
  Antisense strand to SEQ ID NO: 102796
uuuacuauacugcagacuu

SEQ ID NO: 102798 - RNA, 19 nt, Artificial Sequence
  Description of Artificial Sequence: Synthetic oligonucleotide
  Sense strand starting at position 2980 of SEQ ID NO: 1297
ugucuuggauguucucaaa

SEQ ID NO: 102799 - RNA, 19 nt, Artificial Sequence
  Description of Artificial Sequence: Synthetic oligonucleotide
  Antisense strand to SEQ ID NO: 102798
uuugagaacauccaagaca

SEQ ID NO: 102800 - RNA, 19 nt, Artificial Sequence
  Description of Artificial Sequence: Synthetic oligonucleotide
  Sense strand starting at position 2971 of SEQ ID NO: 1297
ucagguuuaugucuuggau

SEQ ID NO: 102801 - RNA, 19 nt, Artificial Sequence
  Description of Artificial Sequence: Synthetic oligonucleotide
  Antisense strand to SEQ ID NO: 102800
auccaagacauaaaccuga

SEQ ID NO: 102802 - RNA, 19 nt, Artificial Sequence
  Description of Artificial Sequence: Synthetic oligonucleotide
  Sense strand starting at position 2906 of SEQ ID NO: 1297
gcuccauucugaccagcaa

SEQ ID NO: 102803 - RNA, 19 nt, Artificial Sequence
  Description of Artificial Sequence: Synthetic oligonucleotide
  Antisense strand to SEQ ID NO: 102802
uugcuggucagaauggagc

SEQ ID NO: 102804 - RNA, 19 nt, Artificial Sequence
  Description of Artificial Sequence: Synthetic oligonucleotide
  Sense strand starting at position 2664 of SEQ ID NO: 1297
augcaaugucagugggaac

SEQ ID NO: 102805 - RNA, 19 nt, Artificial Sequence
  Description of Artificial Sequence: Synthetic oligonucleotide
  Antisense strand to SEQ ID NO: 102804
guucccacugacauugcau

SEQ ID NO: 102806 - RNA, 19 nt, Artificial Sequence
  Description of Artificial Sequence: Synthetic oligonucleotide
  Sense strand starting at position 2663 of SEQ ID NO: 1297
aaugcaaugucagugggaa

SEQ ID NO: 102807 - RNA, 19 nt, Artificial Sequence
  Description of Artificial Sequence: Synthetic oligonucleotide
  Antisense strand to SEQ ID NO: 102806
uucccacugacauugcauu

SEQ ID NO: 102808 - RNA, 19 nt, Artificial Sequence
  Description of Artificial Sequence: Synthetic oligonucleotide
  Sense strand starting at position 2658 of SEQ ID NO: 1297
caggaaaugcaaugucagu

SEQ ID NO: 102809 - RNA, 19 nt, Artificial Sequence
  Description of Artificial Sequence: Synthetic oligonucleotide
  Antisense strand to SEQ ID NO: 102808
acugacauugcauuuccug

SEQ ID NO: 102810 - RNA, 19 nt, Artificial Sequence
  Description of Artificial Sequence: Synthetic oligonucleotide
  Sense strand starting at position 2540 of SEQ ID NO: 1297
acacucaaucuacggaauu

SEQ ID NO: 102811 - RNA, 19 nt, Artificial Sequence
  Description of Artificial Sequence: Synthetic oligonucleotide
  Antisense strand to SEQ ID NO: 102810
aauuccguagauugagugu

SEQ ID NO: 102812 - RNA, 19 nt, Artificial Sequence
  Description of Artificial Sequence: Synthetic oligonucleotide
  Sense strand starting at position 2502 of SEQ ID NO: 1297
aguguuguucuccauagua

SEQ ID NO: 102813 - RNA, 19 nt, Artificial Sequence
  Description of Artificial Sequence: Synthetic oligonucleotide
  Antisense strand to SEQ ID NO: 102812
uacuauggagaacaacacu

SEQ ID NO: 102814 - RNA, 19 nt, Artificial Sequence
  Description of Artificial Sequence: Synthetic oligonucleotide
  Sense strand starting at position 2326 of SEQ ID NO: 1297
ggcagugugcuucagaaga

SEQ ID NO: 102815 - RNA, 19 nt, Artificial Sequence
  Description of Artificial Sequence: Synthetic oligonucleotide
  Antisense strand to SEQ ID NO: 102814
ucuucugaagcacacugcc

SEQ ID NO: 102816 - RNA, 19 nt, Artificial Sequence
  Description of Artificial Sequence: Synthetic oligonucleotide
  Sense strand starting at position 2282 of SEQ ID NO: 1297
gugguuaauagugacagca

SEQ ID NO: 102817 - RNA, 19 nt, Artificial Sequence
  Description of Artificial Sequence: Synthetic oligonucleotide
  Antisense strand to SEQ ID NO: 102816
ugcugucacuauuaaccac

SEQ ID NO: 102818 - RNA, 19 nt, Artificial Sequence
  Description of Artificial Sequence: Synthetic oligonucleotide
  Sense strand starting at position 2271 of SEQ ID NO: 1297
ggcaauaauaagugguuaa

SEQ ID NO: 102819 - RNA, 19 nt, Artificial Sequence
  Description of Artificial Sequence: Synthetic oligonucleotide
  Antisense strand to SEQ ID NO: 102818
uuaaccacuuauuauugcc

SEQ ID NO: 102820 - RNA, 19 nt, Artificial Sequence
  Description of Artificial Sequence: Synthetic oligonucleotide
  Sense strand starting at position 2270 of SEQ ID NO: 1297
aggcaauaauaagugguua

SEQ ID NO: 102821 - RNA, 19 nt, Artificial Sequence
  Description of Artificial Sequence: Synthetic oligonucleotide
  Antisense strand to SEQ ID NO: 102820
uaaccacuuauuauugccu

SEQ ID NO: 102822 - RNA, 19 nt, Artificial Sequence
  Description of Artificial Sequence: Synthetic oligonucleotide
  Sense strand starting at position 2264 of SEQ ID NO: 1297
uguguuaggcaauaauaag

SEQ ID NO: 102823 - RNA, 19 nt, Artificial Sequence
  Description of Artificial Sequence: Synthetic oligonucleotide
  Antisense strand to SEQ ID NO: 102822
cuuauuauugccuaacaca

SEQ ID NO: 102824 - RNA, 19 nt, Artificial Sequence
  Description of Artificial Sequence: Synthetic oligonucleotide
  Sense strand starting at position 2261 of SEQ ID NO: 1297
uguuguguuaggcaauaau

SEQ ID NO: 102825 - RNA, 19 nt, Artificial Sequence
  Description of Artificial Sequence: Synthetic oligonucleotide
  Antisense strand to SEQ ID NO: 102824
auuauugccuaacacaaca

SEQ ID NO: 102826 - RNA, 19 nt, Artificial Sequence
  Description of Artificial Sequence: Synthetic oligonucleotide
  Sense strand starting at position 2241 of SEQ ID NO: 1297
gcaucuugagcguaaggga

SEQ ID NO: 102827 - RNA, 19 nt, Artificial Sequence
  Description of Artificial Sequence: Synthetic oligonucleotide
  Antisense strand to SEQ ID NO: 102826
ucccuuacgcucaagaugc

SEQ ID NO: 102828 - RNA, 19 nt, Artificial Sequence
  Description of Artificial Sequence: Synthetic oligonucleotide
  Sense strand starting at position 2165 of SEQ ID NO: 1297
cguugcauuccagucugua

SEQ ID NO: 102829 - RNA, 19 nt, Artificial Sequence
  Description of Artificial Sequence: Synthetic oligonucleotide
  Antisense strand to SEQ ID NO: 102828
uacagacuggaaugcaacg

SEQ ID NO: 102830 - RNA, 19 nt, Artificial Sequence
  Description of Artificial Sequence: Synthetic oligonucleotide
  Sense strand starting at position 817 of SEQ ID NO: 1297
ggcagaggucccuguaaag

SEQ ID NO: 102831 - RNA, 19 nt, Artificial Sequence
  Description of Artificial Sequence: Synthetic oligonucleotide
  Antisense strand to SEQ ID NO: 102830
cuuuacagggaccucugcc

SEQ ID NO: 102832 - RNA, 19 nt, Artificial Sequence
  Description of Artificial Sequence: Synthetic oligonucleotide
  Sense strand starting at position 541 of SEQ ID NO: 1297
uguggugugacagaagacu

SEQ ID NO: 102833 - RNA, 19 nt, Artificial Sequence
  Description of Artificial Sequence: Synthetic oligonucleotide
  Antisense strand to SEQ ID NO: 102832
agucuucugucacaccaca

SEQ ID NO: 102834 - RNA, 19 nt, Artificial Sequence
  Description of Artificial Sequence: Synthetic oligonucleotide
  Sense strand starting at position 536 of SEQ ID NO: 1297
aauucuguggugugacaga

SEQ ID NO: 102835 - RNA, 19 nt, Artificial Sequence
  Description of Artificial Sequence: Synthetic oligonucleotide
  Antisense strand to SEQ ID NO: 102834
ucugucacaccacagaauu

SEQ ID NO: 102836 - RNA, 19 nt, Artificial Sequence
  Description of Artificial Sequence: Synthetic oligonucleotide
  Sense strand starting at position 408 of SEQ ID NO: 1297
uguuauuaagcccagauuc

SEQ ID NO: 102837 - RNA, 19 nt, Artificial Sequence
  Description of Artificial Sequence: Synthetic oligonucleotide
  Antisense strand to SEQ ID NO: 102836
gaaucugggcuuaauaaca

SEQ ID NO: 102838 - RNA, 19 nt, Artificial Sequence
  Description of Artificial Sequence: Synthetic oligonucleotide
  Sense strand starting at position 241 of SEQ ID NO: 1297
cgauauuccagacacgauu

SEQ ID NO: 102839 - RNA, 19 nt, Artificial Sequence
  Description of Artificial Sequence: Synthetic oligonucleotide
  Antisense strand to SEQ ID NO: 102838
aaucgugucuggaauaucg

SEQ ID NO: 102840 - RNA, 19 nt, Artificial Sequence
  Description of Artificial Sequence: Synthetic oligonucleotide
  Sense strand starting at position 45 of SEQ ID NO: 1297
cuauauuguguacauguau

SEQ ID NO: 102841 - RNA, 19 nt, Artificial Sequence
  Description of Artificial Sequence: Synthetic oligonucleotide
  Antisense strand to SEQ ID NO: 102840
auacauguacacaauauag

SEQ ID NO: 102842 - RNA, 19 nt, Artificial Sequence
  Description of Artificial Sequence: Synthetic oligonucleotide
  Sense strand starting at position 43 of SEQ ID NO: 1297
uccuauauuguguacaugu

SEQ ID NO: 102843 - RNA, 19 nt, Artificial Sequence
  Description of Artificial Sequence: Synthetic oligonucleotide
  Antisense strand to SEQ ID NO: 102842
acauguacacaauauagga

SEQ ID NO: 102844 - RNA, 19 nt, Artificial Sequence
  Description of Artificial Sequence: Synthetic oligonucleotide
  Sense strand starting at position 40 of SEQ ID NO: 1298
gaaugauauccaggucugu

SEQ ID NO: 102845 - RNA, 19 nt, Artificial Sequence
  Description of Artificial Sequence: Synthetic oligonucleotide
  Antisense strand to SEQ ID NO: 102844
acagaccuggauaucauuc

SEQ ID NO: 102846 - RNA, 19 nt, Artificial Sequence
  Description of Artificial Sequence: Synthetic oligonucleotide
  Sense strand starting at position 73 of SEQ ID NO: 1298
cuggguagagcuuguucaa

SEQ ID NO: 102847 - RNA, 19 nt, Artificial Sequence
  Description of Artificial Sequence: Synthetic oligonucleotide
  Antisense strand to SEQ ID NO: 102846
uugaacaagcucuacccag

SEQ ID NO: 102848 - RNA, 19 nt, Artificial Sequence
  Description of Artificial Sequence: Synthetic oligonucleotide
  Sense strand starting at position 155 of SEQ ID NO: 1298
ugacucaagccuggaugaa

SEQ ID NO: 102849 - RNA, 19 nt, Artificial Sequence
  Description of Artificial Sequence: Synthetic oligonucleotide
  Antisense strand to SEQ ID NO: 102848
uucauccaggcuugaguca

SEQ ID NO: 102850 - RNA, 19 nt, Artificial Sequence
  Description of Artificial Sequence: Synthetic oligonucleotide
  Sense strand starting at position 285 of SEQ ID NO: 1298
cugccuagaguggguuaau

SEQ ID NO: 102851 - RNA, 19 nt, Artificial Sequence
  Description of Artificial Sequence: Synthetic oligonucleotide
  Antisense strand to SEQ ID NO: 102850
auuaacccacucuaggcag

SEQ ID NO: 102852 - RNA, 19 nt, Artificial Sequence
  Description of Artificial Sequence: Synthetic oligonucleotide
  Sense strand starting at position 286 of SEQ ID NO: 1298
ugccuagaguggguuaaua

SEQ ID NO: 102853 - RNA, 19 nt, Artificial Sequence
  Description of Artificial Sequence: Synthetic oligonucleotide
  Antisense strand to SEQ ID NO: 102852
uauuaacccacucuaggca

SEQ ID NO: 102854 - RNA, 19 nt, Artificial Sequence
  Description of Artificial Sequence: Synthetic oligonucleotide
  Sense strand starting at position 288 of SEQ ID NO: 1298
ccuagaguggguuaauaug

SEQ ID NO: 102855 - RNA, 19 nt, Artificial Sequence
  Description of Artificial Sequence: Synthetic oligonucleotide
  Antisense strand to SEQ ID NO: 102854
cauauuaacccacucuagg

SEQ ID NO: 102856 - RNA, 19 nt, Artificial Sequence
  Description of Artificial Sequence: Synthetic oligonucleotide
  Sense strand starting at position 294 of SEQ ID NO: 1298
guggguuaauaugccacaa

SEQ ID NO: 102857 - RNA, 19 nt, Artificial Sequence
  Description of Artificial Sequence: Synthetic oligonucleotide
  Antisense strand to SEQ ID NO: 102856
uuguggcauauuaacccac

SEQ ID NO: 102858 - RNA, 19 nt, Artificial Sequence
  Description of Artificial Sequence: Synthetic oligonucleotide
  Sense strand starting at position 411 of SEQ ID NO: 1298
uggagucgugcguaaggga

SEQ ID NO: 102859 - RNA, 19 nt, Artificial Sequence
  Description of Artificial Sequence: Synthetic oligonucleotide
  Antisense strand to SEQ ID NO: 102858
ucccuuacgcacgacucca

SEQ ID NO: 102860 - RNA, 19 nt, Artificial Sequence
  Description of Artificial Sequence: Synthetic oligonucleotide
  Sense strand starting at position 465 of SEQ ID NO: 1298
gagauacguuggcuuagga

SEQ ID NO: 102861 - RNA, 19 nt, Artificial Sequence
  Description of Artificial Sequence: Synthetic oligonucleotide
  Antisense strand to SEQ ID NO: 102860
uccuaagccaacguaucuc

SEQ ID NO: 102862 - RNA, 19 nt, Artificial Sequence
  Description of Artificial Sequence: Synthetic oligonucleotide
  Sense strand starting at position 484 of SEQ ID NO: 1298
agagauguugcaggagaga

SEQ ID NO: 102863 - RNA, 19 nt, Artificial Sequence
  Description of Artificial Sequence: Synthetic oligonucleotide
  Antisense strand to SEQ ID NO: 102862
ucucuccugcaacaucucu

SEQ ID NO: 102864 - RNA, 19 nt, Artificial Sequence
  Description of Artificial Sequence: Synthetic oligonucleotide
  Sense strand starting at position 503 of SEQ ID NO: 1298
gggugaaaugcacaggcua

SEQ ID NO: 102865 - RNA, 19 nt, Artificial Sequence
  Description of Artificial Sequence: Synthetic oligonucleotide
  Antisense strand to SEQ ID NO: 102864
uagccugugcauuucaccc

SEQ ID NO: 102866 - RNA, 19 nt, Artificial Sequence
  Description of Artificial Sequence: Synthetic oligonucleotide
  Sense strand starting at position 572 of SEQ ID NO: 1298
ucuagaggcaguugucaga

SEQ ID NO: 102867 - RNA, 19 nt, Artificial Sequence
  Description of Artificial Sequence: Synthetic oligonucleotide
  Antisense strand to SEQ ID NO: 102866
ucugacaacugccucuaga

SEQ ID NO: 102868 - RNA, 19 nt, Artificial Sequence
  Description of Artificial Sequence: Synthetic oligonucleotide
  Sense strand starting at position 1247 of SEQ ID NO: 1298
uaagcaggcccguaguuaa

SEQ ID NO: 102869 - RNA, 19 nt, Artificial Sequence
  Description of Artificial Sequence: Synthetic oligonucleotide
  Antisense strand to SEQ ID NO: 102868
uuaacuacgggccugcuua

SEQ ID NO: 102870 - RNA, 19 nt, Artificial Sequence
  Description of Artificial Sequence: Synthetic oligonucleotide
  Sense strand starting at position 1331 of SEQ ID NO: 1298
gagacucgugagcgagaga

SEQ ID NO: 102871 - RNA, 19 nt, Artificial Sequence
  Description of Artificial Sequence: Synthetic oligonucleotide
  Antisense strand to SEQ ID NO: 102870
ucucucgcucacgagucuc

SEQ ID NO: 102872 - RNA, 19 nt, Artificial Sequence
  Description of Artificial Sequence: Synthetic oligonucleotide
  Sense strand starting at position 1334 of SEQ ID NO: 1298
acucgugagcgagagacua

SEQ ID NO: 102873 - RNA, 19 nt, Artificial Sequence
  Description of Artificial Sequence: Synthetic oligonucleotide
  Antisense strand to SEQ ID NO: 102872
uagucucucgcucacgagu

SEQ ID NO: 102874 - RNA, 19 nt, Artificial Sequence
  Description of Artificial Sequence: Synthetic oligonucleotide
  Sense strand starting at position 1389 of SEQ ID NO: 1298
ucccuagcgacuuaaggau

SEQ ID NO: 102875 - RNA, 19 nt, Artificial Sequence
  Description of Artificial Sequence: Synthetic oligonucleotide
  Antisense strand to SEQ ID NO: 102874
auccuuaagucgcuaggga

SEQ ID NO: 102876 - RNA, 19 nt, Artificial Sequence
  Description of Artificial Sequence: Synthetic oligonucleotide
  Sense strand starting at position 1409 of SEQ ID NO: 1298
ugguuagaguggcccgaau

SEQ ID NO: 102877 - RNA, 19 nt, Artificial Sequence
  Description of Artificial Sequence: Synthetic oligonucleotide
  Antisense strand to SEQ ID NO: 102876
auucgggccacucuaacca

SEQ ID NO: 102878 - RNA, 19 nt, Artificial Sequence
  Description of Artificial Sequence: Synthetic oligonucleotide
  Sense strand starting at position 1483 of SEQ ID NO: 1298
ggucgucaucucgcgagaa

SEQ ID NO: 102879 - RNA, 19 nt, Artificial Sequence
  Description of Artificial Sequence: Synthetic oligonucleotide
  Antisense strand to SEQ ID NO: 102878
uucucgcgagaugacgacc

SEQ ID NO: 102880 - RNA, 19 nt, Artificial Sequence
  Description of Artificial Sequence: Synthetic oligonucleotide
  Sense strand starting at position 1485 of SEQ ID NO: 1298
ucgucaucucgcgagaaag

SEQ ID NO: 102881 - RNA, 19 nt, Artificial Sequence
  Description of Artificial Sequence: Synthetic oligonucleotide
  Antisense strand to SEQ ID NO: 102880
cuuucucgcgagaugacga

SEQ ID NO: 102882 - RNA, 19 nt, Artificial Sequence
  Description of Artificial Sequence: Synthetic oligonucleotide
  Sense strand starting at position 1486 of SEQ ID NO: 1298
cgucaucucgcgagaaagg

SEQ ID NO: 102883 - RNA, 19 nt, Artificial Sequence
  Description of Artificial Sequence: Synthetic oligonucleotide
  Antisense strand to SEQ ID NO: 102882
ccuuucucgcgagaugacg

SEQ ID NO: 102884 - RNA, 19 nt, Artificial Sequence
  Description of Artificial Sequence: Synthetic oligonucleotide
  Sense strand starting at position 2181 of SEQ ID NO: 1298
aagguacuggcuuguaaag

SEQ ID NO: 102885 - RNA, 19 nt, Artificial Sequence
  Description of Artificial Sequence: Synthetic oligonucleotide
  Antisense strand to SEQ ID NO: 102884
cuuuacaagccaguaccuu

SEQ ID NO: 102886 - RNA, 19 nt, Artificial Sequence
  Description of Artificial Sequence: Synthetic oligonucleotide
  Sense strand starting at position 2249 of SEQ ID NO: 1298
aggagcugccgcguuuaga

SEQ ID NO: 102887 - RNA, 19 nt, Artificial Sequence
  Description of Artificial Sequence: Synthetic oligonucleotide
  Antisense strand to SEQ ID NO: 102886
ucuaaacgcggcagcuccu

SEQ ID NO: 102888 - RNA, 19 nt, Artificial Sequence
  Description of Artificial Sequence: Synthetic oligonucleotide
  Sense strand starting at position 2412 of SEQ ID NO: 1298
ccagacagaauccguguaa

SEQ ID NO: 102889 - RNA, 19 nt, Artificial Sequence
  Description of Artificial Sequence: Synthetic oligonucleotide
  Antisense strand to SEQ ID NO: 102888
uuacacggauucugucugg

SEQ ID NO: 102890 - RNA, 19 nt, Artificial Sequence
  Description of Artificial Sequence: Synthetic oligonucleotide
  Sense strand starting at position 2413 of SEQ ID NO: 1298
cagacagaauccguguaaa

SEQ ID NO: 102891 - RNA, 19 nt, Artificial Sequence
  Description of Artificial Sequence: Synthetic oligonucleotide
  Antisense strand to SEQ ID NO: 102890
uuuacacggauucugucug

SEQ ID NO: 102892 - RNA, 19 nt, Artificial Sequence
  Description of Artificial Sequence: Synthetic oligonucleotide
  Sense strand starting at position 2416 of SEQ ID NO: 1298
acagaauccguguaaacug

SEQ ID NO: 102893 - RNA, 19 nt, Artificial Sequence
  Description of Artificial Sequence: Synthetic oligonucleotide
  Antisense strand to SEQ ID NO: 102892
caguuuacacggauucugu

SEQ ID NO: 102894 - RNA, 19 nt, Artificial Sequence
  Description of Artificial Sequence: Synthetic oligonucleotide
  Sense strand starting at position 2593 of SEQ ID NO: 1298
auuuacaguuucguaguua

SEQ ID NO: 102895 - RNA, 19 nt, Artificial Sequence
  Description of Artificial Sequence: Synthetic oligonucleotide
  Antisense strand to SEQ ID NO: 102894
uaacuacgaaacuguaaau

SEQ ID NO: 102896 - RNA, 19 nt, Artificial Sequence
  Description of Artificial Sequence: Synthetic oligonucleotide
  Sense strand starting at position 2744 of SEQ ID NO: 1298
guacuuaguaaaggucuuu

SEQ ID NO: 102897 - RNA, 19 nt, Artificial Sequence
  Description of Artificial Sequence: Synthetic oligonucleotide
  Antisense strand to SEQ ID NO: 102896
aaagaccuuuacuaaguac

SEQ ID NO: 102898 - RNA, 19 nt, Artificial Sequence
  Description of Artificial Sequence: Synthetic oligonucleotide
  Sense strand starting at position 2795 of SEQ ID NO: 1298
uucuuucuauuuggagaua

SEQ ID NO: 102899 - RNA, 19 nt, Artificial Sequence
  Description of Artificial Sequence: Synthetic oligonucleotide
  Antisense strand to SEQ ID NO: 102898
uaucuccaaauagaaagaa

SEQ ID NO: 102900 - RNA, 19 nt, Artificial Sequence
  Description of Artificial Sequence: Synthetic oligonucleotide
  Sense strand starting at position 2939 of SEQ ID NO: 1298
acaguucugguuuguaaau

SEQ ID NO: 102901 - RNA, 19 nt, Artificial Sequence
  Description of Artificial Sequence: Synthetic oligonucleotide
  Antisense strand to SEQ ID NO: 102900
auuuacaaaccagaacugu

SEQ ID NO: 102902 - RNA, 19 nt, Artificial Sequence
  Description of Artificial Sequence: Synthetic oligonucleotide
  Sense strand starting at position 2940 of SEQ ID NO: 1298
caguucugguuuguaaauu

SEQ ID NO: 102903 - RNA, 19 nt, Artificial Sequence
  Description of Artificial Sequence: Synthetic oligonucleotide
  Antisense strand to SEQ ID NO: 102902
aauuuacaaaccagaacug

SEQ ID NO: 102904 - RNA, 19 nt, Artificial Sequence
  Description of Artificial Sequence: Synthetic oligonucleotide
  Sense strand starting at position 3089 of SEQ ID NO: 1298
cuccgccacccuuagaaau

SEQ ID NO: 102905 - RNA, 19 nt, Artificial Sequence
  Description of Artificial Sequence: Synthetic oligonucleotide
  Antisense strand to SEQ ID NO: 102904
auuucuaaggguggcggag

SEQ ID NO: 102906 - RNA, 19 nt, Artificial Sequence
  Description of Artificial Sequence: Synthetic oligonucleotide
  Sense strand starting at position 3145 of SEQ ID NO: 1298
uuguuugcauucuuacaag

SEQ ID NO: 102907 - RNA, 19 nt, Artificial Sequence
  Description of Artificial Sequence: Synthetic oligonucleotide
  Antisense strand to SEQ ID NO: 102906
cuuguaagaaugcaaacaa

SEQ ID NO: 102908 - RNA, 19 nt, Artificial Sequence
  Description of Artificial Sequence: Synthetic oligonucleotide
  Sense strand starting at position 3278 of SEQ ID NO: 1298
gagaucuuuccauggcagu

SEQ ID NO: 102909 - RNA, 19 nt, Artificial Sequence
  Description of Artificial Sequence: Synthetic oligonucleotide
  Antisense strand to SEQ ID NO: 102908
acugccauggaaagaucuc

SEQ ID NO: 102910 - RNA, 19 nt, Artificial Sequence
  Description of Artificial Sequence: Synthetic oligonucleotide
  Sense strand starting at position 3446 of SEQ ID NO: 1298
uaggauaaguaccuagagu

SEQ ID NO: 102911 - RNA, 19 nt, Artificial Sequence
  Description of Artificial Sequence: Synthetic oligonucleotide
  Antisense strand to SEQ ID NO: 102910
acucuagguacuuauccua

SEQ ID NO: 102912 - RNA, 19 nt, Artificial Sequence
  Description of Artificial Sequence: Synthetic oligonucleotide
  Sense strand starting at position 3453 of SEQ ID NO: 1298
aguaccuagaguggugauu

SEQ ID NO: 102913 - RNA, 19 nt, Artificial Sequence
  Description of Artificial Sequence: Synthetic oligonucleotide
  Antisense strand to SEQ ID NO: 102912
aaucaccacucuagguacu

SEQ ID NO: 102914 - RNA, 19 nt, Artificial Sequence
  Description of Artificial Sequence: Synthetic oligonucleotide
  Sense strand starting at position 3549 of SEQ ID NO: 1298
agaauuuauuugcggagaa

SEQ ID NO: 102915 - RNA, 19 nt, Artificial Sequence
  Description of Artificial Sequence: Synthetic oligonucleotide
  Antisense strand to SEQ ID NO: 102914
uucuccgcaaauaaauucu

SEQ ID NO: 102916 - RNA, 19 nt, Artificial Sequence
  Description of Artificial Sequence: Synthetic oligonucleotide
  Sense strand starting at position 3550 of SEQ ID NO: 1298
gaauuuauuugcggagaaa

SEQ ID NO: 102917 - RNA, 19 nt, Artificial Sequence
  Description of Artificial Sequence: Synthetic oligonucleotide
  Antisense strand to SEQ ID NO: 102916
uuucuccgcaaauaaauuc

SEQ ID NO: 102918 - RNA, 19 nt, Artificial Sequence
  Description of Artificial Sequence: Synthetic oligonucleotide
  Sense strand starting at position 3641 of SEQ ID NO: 1298
aucucaguuggacaguuua

SEQ ID NO: 102919 - RNA, 19 nt, Artificial Sequence
  Description of Artificial Sequence: Synthetic oligonucleotide
  Antisense strand to SEQ ID NO: 102918
uaaacuguccaacugagau

SEQ ID NO: 102920 - RNA, 19 nt, Artificial Sequence
  Description of Artificial Sequence: Synthetic oligonucleotide
  Sense strand starting at position 3892 of SEQ ID NO: 1298
cagggaguucuuuaucuua

SEQ ID NO: 102921 - RNA, 19 nt, Artificial Sequence
  Description of Artificial Sequence: Synthetic oligonucleotide
  Antisense strand to SEQ ID NO: 102920
uaagauaaagaacucccug

SEQ ID NO: 102922 - RNA, 19 nt, Artificial Sequence
  Description of Artificial Sequence: Synthetic oligonucleotide
  Sense strand starting at position 3895 of SEQ ID NO: 1298
ggaguucuuuaucuuaaau

SEQ ID NO: 102923 - RNA, 19 nt, Artificial Sequence
  Description of Artificial Sequence: Synthetic oligonucleotide
  Antisense strand to SEQ ID NO: 102922
auuuaagauaaagaacucc

SEQ ID NO: 102924 - RNA, 19 nt, Artificial Sequence
  Description of Artificial Sequence: Synthetic oligonucleotide
  Sense strand starting at position 3938 of SEQ ID NO: 1299
cccaaacuucugugagauc

SEQ ID NO: 102925 - RNA, 19 nt, Artificial Sequence
  Description of Artificial Sequence: Synthetic oligonucleotide
  Antisense strand to SEQ ID NO: 102924
gaucucacagaaguuuggg

SEQ ID NO: 102926 - RNA, 19 nt, Artificial Sequence
  Description of Artificial Sequence: Synthetic oligonucleotide
  Sense strand starting at position 3937 of SEQ ID NO: 1299
acccaaacuucugugagau

SEQ ID NO: 102927 - RNA, 19 nt, Artificial Sequence
  Description of Artificial Sequence: Synthetic oligonucleotide
  Antisense strand to SEQ ID NO: 102926
aucucacagaaguuugggu

SEQ ID NO: 102928 - RNA, 19 nt, Artificial Sequence
  Description of Artificial Sequence: Synthetic oligonucleotide
  Sense strand starting at position 3874 of SEQ ID NO: 1299
cucacauuacgaggacuga

SEQ ID NO: 102929 - RNA, 19 nt, Artificial Sequence
  Description of Artificial Sequence: Synthetic oligonucleotide
  Antisense strand to SEQ ID NO: 102928
ucaguccucguaaugugag

SEQ ID NO: 102930 - RNA, 19 nt, Artificial Sequence
  Description of Artificial Sequence: Synthetic oligonucleotide
  Sense strand starting at position 3833 of SEQ ID NO: 1299
agcagucccugacucagau

SEQ ID NO: 102931 - RNA, 19 nt, Artificial Sequence
  Description of Artificial Sequence: Synthetic oligonucleotide
  Antisense strand to SEQ ID NO: 102930
aucugagucagggacugcu

SEQ ID NO: 102932 - RNA, 19 nt, Artificial Sequence
  Description of Artificial Sequence: Synthetic oligonucleotide
  Sense strand starting at position 3737 of SEQ ID NO: 1299
ggcuguacagacuaaguau

SEQ ID NO: 102933 - RNA, 19 nt, Artificial Sequence
  Description of Artificial Sequence: Synthetic oligonucleotide
  Antisense strand to SEQ ID NO: 102932
auacuuagucuguacagcc

SEQ ID NO: 102934 - RNA, 19 nt, Artificial Sequence
  Description of Artificial Sequence: Synthetic oligonucleotide
  Sense strand starting at position 3122 of SEQ ID NO: 1299
aucccuagaugguuugaau

SEQ ID NO: 102935 - RNA, 19 nt, Artificial Sequence
  Description of Artificial Sequence: Synthetic oligonucleotide
  Antisense strand to SEQ ID NO: 102934
auucaaaccaucuagggau

SEQ ID NO: 102936 - RNA, 19 nt, Artificial Sequence
  Description of Artificial Sequence: Synthetic oligonucleotide
  Sense strand starting at position 2858 of SEQ ID NO: 1299
guuugcucagauuggagau

SEQ ID NO: 102937 - RNA, 19 nt, Artificial Sequence
  Description of Artificial Sequence: Synthetic oligonucleotide
  Antisense strand to SEQ ID NO: 102936
aucuccaaucugagcaaac

SEQ ID NO: 102938 - RNA, 19 nt, Artificial Sequence
  Description of Artificial Sequence: Synthetic oligonucleotide
  Sense strand starting at position 2813 of SEQ ID NO: 1299
guaacuuaaaguuggagaa

SEQ ID NO: 102939 - RNA, 19 nt, Artificial Sequence
  Description of Artificial Sequence: Synthetic oligonucleotide
  Antisense strand to SEQ ID NO: 102938
uucuccaacuuuaaguuac

SEQ ID NO: 102940 - RNA, 19 nt, Artificial Sequence
  Description of Artificial Sequence: Synthetic oligonucleotide
  Sense strand starting at position 2805 of SEQ ID NO: 1299
guuugaauguaacuuaaag

SEQ ID NO: 102941 - RNA, 19 nt, Artificial Sequence
  Description of Artificial Sequence: Synthetic oligonucleotide
  Antisense strand to SEQ ID NO: 102940
cuuuaaguuacauucaaac

SEQ ID NO: 102942 - RNA, 19 nt, Artificial Sequence
  Description of Artificial Sequence: Synthetic oligonucleotide
  Sense strand starting at position 2712 of SEQ ID NO: 1299
gcauuaggugggcacuuau

SEQ ID NO: 102943 - RNA, 19 nt, Artificial Sequence
  Description of Artificial Sequence: Synthetic oligonucleotide
  Antisense strand to SEQ ID NO: 102942
auaagugcccaccuaaugc

SEQ ID NO: 102944 - RNA, 19 nt, Artificial Sequence
  Description of Artificial Sequence: Synthetic oligonucleotide
  Sense strand starting at position 2588 of SEQ ID NO: 1299
gacuuugcgcaugaauaaa

SEQ ID NO: 102945 - RNA, 19 nt, Artificial Sequence
  Description of Artificial Sequence: Synthetic oligonucleotide
  Antisense strand to SEQ ID NO: 102944
uuuauucaugcgcaaaguc

SEQ ID NO: 102946 - RNA, 19 nt, Artificial Sequence
  Description of Artificial Sequence: Synthetic oligonucleotide
  Sense strand starting at position 2551 of SEQ ID NO: 1299
ugccaaaugguggguauuu

SEQ ID NO: 102947 - RNA, 19 nt, Artificial Sequence
  Description of Artificial Sequence: Synthetic oligonucleotide
  Antisense strand to SEQ ID NO: 102946
aaauacccaccauuuggca

SEQ ID NO: 102948 - RNA, 19 nt, Artificial Sequence
  Description of Artificial Sequence: Synthetic oligonucleotide
  Sense strand starting at position 2550 of SEQ ID NO: 1299
augccaaaugguggguauu

SEQ ID NO: 102949 - RNA, 19 nt, Artificial Sequence
  Description of Artificial Sequence: Synthetic oligonucleotide
  Antisense strand to SEQ ID NO: 102948
aauacccaccauuuggcau

SEQ ID NO: 102950 - RNA, 19 nt, Artificial Sequence
  Description of Artificial Sequence: Synthetic oligonucleotide
  Sense strand starting at position 2512 of SEQ ID NO: 1299
ggcuaaucugcugagaaau

SEQ ID NO: 102951 - RNA, 19 nt, Artificial Sequence
  Description of Artificial Sequence: Synthetic oligonucleotide
  Antisense strand to SEQ ID NO: 102950
auuucucagcagauuagcc

SEQ ID NO: 102952 - RNA, 19 nt, Artificial Sequence
  Description of Artificial Sequence: Synthetic oligonucleotide
  Sense strand starting at position 2509 of SEQ ID NO: 1299
ggaggcuaaucugcugaga

SEQ ID NO: 102953 - RNA, 19 nt, Artificial Sequence
  Description of Artificial Sequence: Synthetic oligonucleotide
  Antisense strand to SEQ ID NO: 102952
ucucagcagauuagccucc

SEQ ID NO: 102954 - RNA, 19 nt, Artificial Sequence
  Description of Artificial Sequence: Synthetic oligonucleotide
  Sense strand starting at position 2347 of SEQ ID NO: 1299
agacaauccgcacaauagu

SEQ ID NO: 102955 - RNA, 19 nt, Artificial Sequence
  Description of Artificial Sequence: Synthetic oligonucleotide
  Antisense strand to SEQ ID NO: 102954
acuauugugcggauugucu

SEQ ID NO: 102956 - RNA, 19 nt, Artificial Sequence
  Description of Artificial Sequence: Synthetic oligonucleotide
  Sense strand starting at position 2345 of SEQ ID NO: 1299
uuagacaauccgcacaaua

SEQ ID NO: 102957 - RNA, 19 nt, Artificial Sequence
  Description of Artificial Sequence: Synthetic oligonucleotide
  Antisense strand to SEQ ID NO: 102956
uauugugcggauugucuaa

SEQ ID NO: 102958 - RNA, 19 nt, Artificial Sequence
  Description of Artificial Sequence: Synthetic oligonucleotide
  Sense strand starting at position 2344 of SEQ ID NO: 1299
cuuagacaauccgcacaau

SEQ ID NO: 102959 - RNA, 19 nt, Artificial Sequence
  Description of Artificial Sequence: Synthetic oligonucleotide
  Antisense strand to SEQ ID NO: 102958
auugugcggauugucuaag

SEQ ID NO: 102960 - RNA, 19 nt, Artificial Sequence
  Description of Artificial Sequence: Synthetic oligonucleotide
  Sense strand starting at position 2307 of SEQ ID NO: 1299
cuaugcugccguguguuaa

SEQ ID NO: 102961 - RNA, 19 nt, Artificial Sequence
  Description of Artificial Sequence: Synthetic oligonucleotide
  Antisense strand to SEQ ID NO: 102960
uuaacacacggcagcauag

SEQ ID NO: 102962 - RNA, 19 nt, Artificial Sequence
  Description of Artificial Sequence: Synthetic oligonucleotide
  Sense strand starting at position 2254 of SEQ ID NO: 1299
cgauuauagaaugguauaa

SEQ ID NO: 102963 - RNA, 19 nt, Artificial Sequence
  Description of Artificial Sequence: Synthetic oligonucleotide
  Antisense strand to SEQ ID NO: 102962
uuauaccauucuauaaucg

SEQ ID NO: 102964 - RNA, 19 nt, Artificial Sequence
  Description of Artificial Sequence: Synthetic oligonucleotide
  Sense strand starting at position 2253 of SEQ ID NO: 1299
acgauuauagaaugguaua

SEQ ID NO: 102965 - RNA, 19 nt, Artificial Sequence
  Description of Artificial Sequence: Synthetic oligonucleotide
  Antisense strand to SEQ ID NO: 102964
uauaccauucuauaaucgu

SEQ ID NO: 102966 - RNA, 19 nt, Artificial Sequence
  Description of Artificial Sequence: Synthetic oligonucleotide
  Sense strand starting at position 2246 of SEQ ID NO: 1299
ugugcuaacgauuauagaa

SEQ ID NO: 102967 - RNA, 19 nt, Artificial Sequence
  Description of Artificial Sequence: Synthetic oligonucleotide
  Antisense strand to SEQ ID NO: 102966
uucuauaaucguuagcaca

SEQ ID NO: 102968 - RNA, 19 nt, Artificial Sequence
  Description of Artificial Sequence: Synthetic oligonucleotide
  Sense strand starting at position 2204 of SEQ ID NO: 1299
uauauuugaccguguacca

SEQ ID NO: 102969 - RNA, 19 nt, Artificial Sequence
  Description of Artificial Sequence: Synthetic oligonucleotide
  Antisense strand to SEQ ID NO: 102968
ugguacacggucaaauaua

SEQ ID NO: 102970 - RNA, 19 nt, Artificial Sequence
  Description of Artificial Sequence: Synthetic oligonucleotide
  Sense strand starting at position 2202 of SEQ ID NO: 1299
uguauauuugaccguguac

SEQ ID NO: 102971 - RNA, 19 nt, Artificial Sequence
  Description of Artificial Sequence: Synthetic oligonucleotide
  Antisense strand to SEQ ID NO: 102970
guacacggucaaauauaca

SEQ ID NO: 102972 - RNA, 19 nt, Artificial Sequence
  Description of Artificial Sequence: Synthetic oligonucleotide
  Sense strand starting at position 2201 of SEQ ID NO: 1299
uuguauauuugaccgugua

SEQ ID NO: 102973 - RNA, 19 nt, Artificial Sequence
  Description of Artificial Sequence: Synthetic oligonucleotide
  Antisense strand to SEQ ID NO: 102972
uacacggucaaauauacaa

SEQ ID NO: 102974 - RNA, 19 nt, Artificial Sequence
  Description of Artificial Sequence: Synthetic oligonucleotide
  Sense strand starting at position 1367 of SEQ ID NO: 1299
cuucucacugccugggaua

SEQ ID NO: 102975 - RNA, 19 nt, Artificial Sequence
  Description of Artificial Sequence: Synthetic oligonucleotide
  Antisense strand to SEQ ID NO: 102974
uaucccaggcagugagaag

SEQ ID NO: 102976 - RNA, 19 nt, Artificial Sequence
  Description of Artificial Sequence: Synthetic oligonucleotide
  Sense strand starting at position 891 of SEQ ID NO: 1299
gaaugaucuguugggcauu

SEQ ID NO: 102977 - RNA, 19 nt, Artificial Sequence
  Description of Artificial Sequence: Synthetic oligonucleotide
  Antisense strand to SEQ ID NO: 102976
aaugcccaacagaucauuc

SEQ ID NO: 102978 - RNA, 19 nt, Artificial Sequence
  Description of Artificial Sequence: Synthetic oligonucleotide
  Sense strand starting at position 885 of SEQ ID NO: 1299
gggugugaaugaucuguug

SEQ ID NO: 102979 - RNA, 19 nt, Artificial Sequence
  Description of Artificial Sequence: Synthetic oligonucleotide
  Antisense strand to SEQ ID NO: 102978
caacagaucauucacaccc

SEQ ID NO: 102980 - RNA, 19 nt, Artificial Sequence
  Description of Artificial Sequence: Synthetic oligonucleotide
  Sense strand starting at position 836 of SEQ ID NO: 1299
guaacucuugaauggauga

SEQ ID NO: 102981 - RNA, 19 nt, Artificial Sequence
  Description of Artificial Sequence: Synthetic oligonucleotide
  Antisense strand to SEQ ID NO: 102980
ucauccauucaagaguuac

SEQ ID NO: 102982 - RNA, 19 nt, Artificial Sequence
  Description of Artificial Sequence: Synthetic oligonucleotide
  Sense strand starting at position 828 of SEQ ID NO: 1299
gguauucuguaacucuuga

SEQ ID NO: 102983 - RNA, 19 nt, Artificial Sequence
  Description of Artificial Sequence: Synthetic oligonucleotide
  Antisense strand to SEQ ID NO: 102982
ucaagaguuacagaauacc

SEQ ID NO: 102984 - RNA, 19 nt, Artificial Sequence
  Description of Artificial Sequence: Synthetic oligonucleotide
  Sense strand starting at position 825 of SEQ ID NO: 1299
guagguauucuguaacucu

SEQ ID NO: 102985 - RNA, 19 nt, Artificial Sequence
  Description of Artificial Sequence: Synthetic oligonucleotide
  Antisense strand to SEQ ID NO: 102984
agaguuacagaauaccuac

SEQ ID NO: 102986 - RNA, 19 nt, Artificial Sequence
  Description of Artificial Sequence: Synthetic oligonucleotide
  Sense strand starting at position 821 of SEQ ID NO: 1299
cacaguagguauucuguaa

SEQ ID NO: 102987 - RNA, 19 nt, Artificial Sequence
  Description of Artificial Sequence: Synthetic oligonucleotide
  Antisense strand to SEQ ID NO: 102986
uuacagaauaccuacugug

SEQ ID NO: 102988 - RNA, 19 nt, Artificial Sequence
  Description of Artificial Sequence: Synthetic oligonucleotide
  Sense strand starting at position 757 of SEQ ID NO: 1299
gcuucuuguaagcagggau

SEQ ID NO: 102989 - RNA, 19 nt, Artificial Sequence
  Description of Artificial Sequence: Synthetic oligonucleotide
  Antisense strand to SEQ ID NO: 102988
aucccugcuuacaagaagc

SEQ ID NO: 102990 - RNA, 19 nt, Artificial Sequence
  Description of Artificial Sequence: Synthetic oligonucleotide
  Sense strand starting at position 722 of SEQ ID NO: 1299
acuucuuugcaguaugaug

SEQ ID NO: 102991 - RNA, 19 nt, Artificial Sequence
  Description of Artificial Sequence: Synthetic oligonucleotide
  Antisense strand to SEQ ID NO: 102990
caucauacugcaaagaagu

SEQ ID NO: 102992 - RNA, 19 nt, Artificial Sequence
  Description of Artificial Sequence: Synthetic oligonucleotide
  Sense strand starting at position 711 of SEQ ID NO: 1299
ugagaacagugacuucuuu

SEQ ID NO: 102993 - RNA, 19 nt, Artificial Sequence
  Description of Artificial Sequence: Synthetic oligonucleotide
  Antisense strand to SEQ ID NO: 102992
aaagaagucacuguucuca

SEQ ID NO: 102994 - RNA, 19 nt, Artificial Sequence
  Description of Artificial Sequence: Synthetic oligonucleotide
  Sense strand starting at position 562 of SEQ ID NO: 1299
cucugaguaccacagucua

SEQ ID NO: 102995 - RNA, 19 nt, Artificial Sequence
  Description of Artificial Sequence: Synthetic oligonucleotide
  Antisense strand to SEQ ID NO: 102994
uagacugugguacucagag

SEQ ID NO: 102996 - RNA, 19 nt, Artificial Sequence
  Description of Artificial Sequence: Synthetic oligonucleotide
  Sense strand starting at position 553 of SEQ ID NO: 1299
acaucagaacucugaguac

SEQ ID NO: 102997 - RNA, 19 nt, Artificial Sequence
  Description of Artificial Sequence: Synthetic oligonucleotide
  Antisense strand to SEQ ID NO: 102996
guacucagaguucugaugu

SEQ ID NO: 102998 - RNA, 19 nt, Artificial Sequence
  Description of Artificial Sequence: Synthetic oligonucleotide
  Sense strand starting at position 218 of SEQ ID NO: 1299
agaagaaggucagcauacu

SEQ ID NO: 102999 - RNA, 19 nt, Artificial Sequence
  Description of Artificial Sequence: Synthetic oligonucleotide
  Antisense strand to SEQ ID NO: 102998
aguaugcugaccuucuucu

SEQ ID NO: 103000 - RNA, 19 nt, Artificial Sequence
  Description of Artificial Sequence: Synthetic oligonucleotide
  Sense strand starting at position 216 of SEQ ID NO: 1299
gcagaagaaggucagcaua

SEQ ID NO: 103001 - RNA, 19 nt, Artificial Sequence
  Description of Artificial Sequence: Synthetic oligonucleotide
  Antisense strand to SEQ ID NO: 103000
uaugcugaccuucuucugc

SEQ ID NO: 103002 - RNA, 19 nt, Artificial Sequence
  Description of Artificial Sequence: Synthetic oligonucleotide
  Sense strand starting at position 15 of SEQ ID NO: 1299
uugcgaaaucuccauuaau

SEQ ID NO: 103003 - RNA, 19 nt, Artificial Sequence
  Description of Artificial Sequence: Synthetic oligonucleotide
  Antisense strand to SEQ ID NO: 103002
auuaauggagauuucgcaa

SEQ ID NO: 103004 - RNA, 19 nt, Artificial Sequence
  Description of Artificial Sequence: Synthetic oligonucleotide
  Sense strand starting at position 259 of SEQ ID NO: 1300
gcuugcucuugacuggaga

SEQ ID NO: 103005 - RNA, 19 nt, Artificial Sequence
  Description of Artificial Sequence: Synthetic oligonucleotide
  Antisense strand to SEQ ID NO: 103004
ucuccagucaagagcaagc

SEQ ID NO: 103006 - RNA, 19 nt, Artificial Sequence
  Description of Artificial Sequence: Synthetic oligonucleotide
  Sense strand starting at position 261 of SEQ ID NO: 1300
uugcucuugacuggagagu

SEQ ID NO: 103007 - RNA, 19 nt, Artificial Sequence
  Description of Artificial Sequence: Synthetic oligonucleotide
  Antisense strand to SEQ ID NO: 103006
acucuccagucaagagcaa

SEQ ID NO: 103008 - RNA, 19 nt, Artificial Sequence
  Description of Artificial Sequence: Synthetic oligonucleotide
  Sense strand starting at position 342 of SEQ ID NO: 1300
cucagaugacccuacaugu

SEQ ID NO: 103009 - RNA, 19 nt, Artificial Sequence
  Description of Artificial Sequence: Synthetic oligonucleotide
  Antisense strand to SEQ ID NO: 103008
acauguagggucaucugag

SEQ ID NO: 103010 - RNA, 19 nt, Artificial Sequence
  Description of Artificial Sequence: Synthetic oligonucleotide
  Sense strand starting at position 357 of SEQ ID NO: 1300
augugagcccucuaugguu

SEQ ID NO: 103011 - RNA, 19 nt, Artificial Sequence
  Description of Artificial Sequence: Synthetic oligonucleotide
  Antisense strand to SEQ ID NO: 103010
aaccauagagggcucacau

SEQ ID NO: 103012 - RNA, 19 nt, Artificial Sequence
  Description of Artificial Sequence: Synthetic oligonucleotide
  Sense strand starting at position 541 of SEQ ID NO: 1300
aguuccauugucugaccaa

SEQ ID NO: 103013 - RNA, 19 nt, Artificial Sequence
  Description of Artificial Sequence: Synthetic oligonucleotide
  Antisense strand to SEQ ID NO: 103012
uuggucagacaauggaacu

SEQ ID NO: 103014 - RNA, 19 nt, Artificial Sequence
  Description of Artificial Sequence: Synthetic oligonucleotide
  Sense strand starting at position 657 of SEQ ID NO: 1300
cuuagaaccuucuugggaa

SEQ ID NO: 103015 - RNA, 19 nt, Artificial Sequence
  Description of Artificial Sequence: Synthetic oligonucleotide
  Antisense strand to SEQ ID NO: 103014
uucccaagaagguucuaag

SEQ ID NO: 103016 - RNA, 19 nt, Artificial Sequence
  Description of Artificial Sequence: Synthetic oligonucleotide
  Sense strand starting at position 681 of SEQ ID NO: 1300
cuuguuuaacaagggagau

SEQ ID NO: 103017 - RNA, 19 nt, Artificial Sequence
  Description of Artificial Sequence: Synthetic oligonucleotide
  Antisense strand to SEQ ID NO: 103016
aucucccuuguuaaacaag

SEQ ID NO: 103018 - RNA, 19 nt, Artificial Sequence
  Description of Artificial Sequence: Synthetic oligonucleotide
  Sense strand starting at position 769 of SEQ ID NO: 1300
ugguucuaugaguggaaca

SEQ ID NO: 103019 - RNA, 19 nt, Artificial Sequence
  Description of Artificial Sequence: Synthetic oligonucleotide
  Antisense strand to SEQ ID NO: 103018
uguuccacucauagaacca

SEQ ID NO: 103020 - RNA, 19 nt, Artificial Sequence
  Description of Artificial Sequence: Synthetic oligonucleotide
  Sense strand starting at position 770 of SEQ ID NO: 1300
gguucuaugaguggaacaa

SEQ ID NO: 103021 - RNA, 19 nt, Artificial Sequence
  Description of Artificial Sequence: Synthetic oligonucleotide
  Antisense strand to SEQ ID NO: 103020
uuguuccacucauagaacc

SEQ ID NO: 103022 - RNA, 19 nt, Artificial Sequence
  Description of Artificial Sequence: Synthetic oligonucleotide
  Sense strand starting at position 1019 of SEQ ID NO: 1300
uggcucacucauugcacua

SEQ ID NO: 103023 - RNA, 19 nt, Artificial Sequence
  Description of Artificial Sequence: Synthetic oligonucleotide
  Antisense strand to SEQ ID NO: 103022
uagugcaaugagugagcca

SEQ ID NO: 103024 - RNA, 19 nt, Artificial Sequence
  Description of Artificial Sequence: Synthetic oligonucleotide
  Sense strand starting at position 1066 of SEQ ID NO: 1300
gggccauuccaauaauccu

SEQ ID NO: 103025 - RNA, 19 nt, Artificial Sequence
  Description of Artificial Sequence: Synthetic oligonucleotide
  Antisense strand to SEQ ID NO: 103024
aggauuauuggaauggccc

SEQ ID NO: 103026 - RNA, 19 nt, Artificial Sequence
  Description of Artificial Sequence: Synthetic oligonucleotide
  Sense strand starting at position 1165 of SEQ ID NO: 1300
gggauaagaucccagaauc

SEQ ID NO: 103027 - RNA, 19 nt, Artificial Sequence
  Description of Artificial Sequence: Synthetic oligonucleotide
  Antisense strand to SEQ ID NO: 103026
gauucugggaucuuauccc

SEQ ID NO: 103028 - RNA, 19 nt, Artificial Sequence
  Description of Artificial Sequence: Synthetic oligonucleotide
  Sense strand starting at position 1267 of SEQ ID NO: 1300
cugggcuccuuacuuagau

SEQ ID NO: 103029 - RNA, 19 nt, Artificial Sequence
  Description of Artificial Sequence: Synthetic oligonucleotide
  Antisense strand to SEQ ID NO: 103028
aucuaaguaaggagcccag

SEQ ID NO: 103030 - RNA, 19 nt, Artificial Sequence
  Description of Artificial Sequence: Synthetic oligonucleotide
  Sense strand starting at position 1353 of SEQ ID NO: 1300
gaaccaaacccagguguuu

SEQ ID NO: 103031 - RNA, 19 nt, Artificial Sequence
  Description of Artificial Sequence: Synthetic oligonucleotide
  Antisense strand to SEQ ID NO: 103030
aaacaccuggguuugguuc

SEQ ID NO: 103032 - RNA, 19 nt, Artificial Sequence
  Description of Artificial Sequence: Synthetic oligonucleotide
  Sense strand starting at position 1365 of SEQ ID NO: 1300
gguguuugagccuauuucu

SEQ ID NO: 103033 - RNA, 19 nt, Artificial Sequence
  Description of Artificial Sequence: Synthetic oligonucleotide
  Antisense strand to SEQ ID NO: 103032
agaaauaggcucaaacacc

SEQ ID NO: 103034 - RNA, 19 nt, Artificial Sequence
  Description of Artificial Sequence: Synthetic oligonucleotide
  Sense strand starting at position 1368 of SEQ ID NO: 1300
guuugagccuauuucuuua

SEQ ID NO: 103035 - RNA, 19 nt, Artificial Sequence
  Description of Artificial Sequence: Synthetic oligonucleotide
  Antisense strand to SEQ ID NO: 103034
uaaagaaauaggcucaaac

SEQ ID NO: 103036 - RNA, 19 nt, Artificial Sequence
  Description of Artificial Sequence: Synthetic oligonucleotide
  Sense strand starting at position 1477 of SEQ ID NO: 1300
cagggaagcuugcuacacu

SEQ ID NO: 103037 - RNA, 19 nt, Artificial Sequence
  Description of Artificial Sequence: Synthetic oligonucleotide
  Antisense strand to SEQ ID NO: 103036
aguguagcaagcuucccug

SEQ ID NO: 103038 - RNA, 19 nt, Artificial Sequence
  Description of Artificial Sequence: Synthetic oligonucleotide
  Sense strand starting at position 1602 of SEQ ID NO: 1300
acagauggagucugguuau

SEQ ID NO: 103039 - RNA, 19 nt, Artificial Sequence
  Description of Artificial Sequence: Synthetic oligonucleotide
  Antisense strand to SEQ ID NO: 103038
auaaccagacuccaucugu

SEQ ID NO: 103040 - RNA, 19 nt, Artificial Sequence
  Description of Artificial Sequence: Synthetic oligonucleotide
  Sense strand starting at position 2345 of SEQ ID NO: 1300
agccuccuugccugagaga

SEQ ID NO: 103041 - RNA, 19 nt, Artificial Sequence
  Description of Artificial Sequence: Synthetic oligonucleotide
  Antisense strand to SEQ ID NO: 103040
ucucucaggcaaggaggcu

SEQ ID NO: 103042 - RNA, 19 nt, Artificial Sequence
  Description of Artificial Sequence: Synthetic oligonucleotide
  Sense strand starting at position 2432 of SEQ ID NO: 1300
uguuaucuccucuaaugug

SEQ ID NO: 103043 - RNA, 19 nt, Artificial Sequence
  Description of Artificial Sequence: Synthetic oligonucleotide
  Antisense strand to SEQ ID NO: 103042
cacauuagaggagauaaca

SEQ ID NO: 103044 - RNA, 19 nt, Artificial Sequence
  Description of Artificial Sequence: Synthetic oligonucleotide
  Sense strand starting at position 2476 of SEQ ID NO: 1300
gaccaaguccuaugggagu

SEQ ID NO: 103045 - RNA, 19 nt, Artificial Sequence
  Description of Artificial Sequence: Synthetic oligonucleotide
  Antisense strand to SEQ ID NO: 103044
acucccauaggacuugguc

SEQ ID NO: 103046 - RNA, 19 nt, Artificial Sequence
  Description of Artificial Sequence: Synthetic oligonucleotide
  Sense strand starting at position 2478 of SEQ ID NO: 1300
ccaaguccuaugggaguuu

SEQ ID NO: 103047 - RNA, 19 nt, Artificial Sequence
  Description of Artificial Sequence: Synthetic oligonucleotide
  Antisense strand to SEQ ID NO: 103046
aaacucccauaggacuugg

SEQ ID NO: 103048 - RNA, 19 nt, Artificial Sequence
  Description of Artificial Sequence: Synthetic oligonucleotide
  Sense strand starting at position 2671 of SEQ ID NO: 1300
aagugccagcaauauguaa

SEQ ID NO: 103049 - RNA, 19 nt, Artificial Sequence
  Description of Artificial Sequence: Synthetic oligonucleotide
  Antisense strand to SEQ ID NO: 103048
uuacauauugcuggcacuu

SEQ ID NO: 103050 - RNA, 19 nt, Artificial Sequence
  Description of Artificial Sequence: Synthetic oligonucleotide
  Sense strand starting at position 2821 of SEQ ID NO: 1300
ccaugacacuuccuuuagu

SEQ ID NO: 103051 - RNA, 19 nt, Artificial Sequence
  Description of Artificial Sequence: Synthetic oligonucleotide
  Antisense strand to SEQ ID NO: 103050
acuaaaggaagugucaugg

SEQ ID NO: 103052 - RNA, 19 nt, Artificial Sequence
  Description of Artificial Sequence: Synthetic oligonucleotide
  Sense strand starting at position 2895 of SEQ ID NO: 1300
aagacuaaguuauaugaga

SEQ ID NO: 103053 - RNA, 19 nt, Artificial Sequence
  Description of Artificial Sequence: Synthetic oligonucleotide
  Antisense strand to SEQ ID NO: 103052
ucucauauaacuuagucuu

SEQ ID NO: 103054 - RNA, 19 nt, Artificial Sequence
  Description of Artificial Sequence: Synthetic oligonucleotide
  Sense strand starting at position 2944 of SEQ ID NO: 1300
aaguuuaugccaggcauag

SEQ ID NO: 103055 - RNA, 19 nt, Artificial Sequence
  Description of Artificial Sequence: Synthetic oligonucleotide
  Antisense strand to SEQ ID NO: 103054
cuaugccuggcauaaacuu

SEQ ID NO: 103056 - RNA, 19 nt, Artificial Sequence
  Description of Artificial Sequence: Synthetic oligonucleotide
  Sense strand starting at position 2993 of SEQ ID NO: 1300
uaggcuuaugcaggaggau

SEQ ID NO: 103057 - RNA, 19 nt, Artificial Sequence
  Description of Artificial Sequence: Synthetic oligonucleotide
  Antisense strand to SEQ ID NO: 103056
auccuccugcauaagccua

SEQ ID NO: 103058 - RNA, 19 nt, Artificial Sequence
  Description of Artificial Sequence: Synthetic oligonucleotide
  Sense strand starting at position 2994 of SEQ ID NO: 1300
aggcuuaugcaggaggauu

SEQ ID NO: 103059 - RNA, 19 nt, Artificial Sequence
  Description of Artificial Sequence: Synthetic oligonucleotide
  Antisense strand to SEQ ID NO: 103058
aauccuccugcauaagccu

SEQ ID NO: 103060 - RNA, 19 nt, Artificial Sequence
  Description of Artificial Sequence: Synthetic oligonucleotide
  Sense strand starting at position 3314 of SEQ ID NO: 1300
agauaugaaucagccuuga

SEQ ID NO: 103061 - RNA, 19 nt, Artificial Sequence
  Description of Artificial Sequence: Synthetic oligonucleotide
  Antisense strand to SEQ ID NO: 103060
ucaaggcugauucauaucu

SEQ ID NO: 103062 - RNA, 19 nt, Artificial Sequence
  Description of Artificial Sequence: Synthetic oligonucleotide
  Sense strand starting at position 3318 of SEQ ID NO: 1300
augaaucagccuugaagga

SEQ ID NO: 103063 - RNA, 19 nt, Artificial Sequence
  Description of Artificial Sequence: Synthetic oligonucleotide
  Antisense strand to SEQ ID NO: 103062
uccuucaaggcugauucau

SEQ ID NO: 103064 - RNA, 19 nt, Artificial Sequence
  Description of Artificial Sequence: Synthetic oligonucleotide
  Sense strand starting at position 3475 of SEQ ID NO: 1300
uguguauguauaugagaug

SEQ ID NO: 103065 - RNA, 19 nt, Artificial Sequence
  Description of Artificial Sequence: Synthetic oligonucleotide
  Antisense strand to SEQ ID NO: 103064
caucucauauacauacaca

SEQ ID NO: 103066 - RNA, 19 nt, Artificial Sequence
  Description of Artificial Sequence: Synthetic oligonucleotide
  Sense strand starting at position 3480 of SEQ ID NO: 1300
auguauaugagauguaggu

SEQ ID NO: 103067 - RNA, 19 nt, Artificial Sequence
  Description of Artificial Sequence: Synthetic oligonucleotide
  Antisense strand to SEQ ID NO: 103066
accuacaucucauauacau

SEQ ID NO: 103068 - RNA, 19 nt, Artificial Sequence
  Description of Artificial Sequence: Synthetic oligonucleotide
  Sense strand starting at position 3482 of SEQ ID NO: 1300
guauaugagauguagguuu

SEQ ID NO: 103069 - RNA, 19 nt, Artificial Sequence
  Description of Artificial Sequence: Synthetic oligonucleotide
  Antisense strand to SEQ ID NO: 103068
aaaccuacaucucauauac

SEQ ID NO: 103070 - RNA, 19 nt, Artificial Sequence
  Description of Artificial Sequence: Synthetic oligonucleotide
  Sense strand starting at position 3484 of SEQ ID NO: 1300
auaugagauguagguuucu

SEQ ID NO: 103071 - RNA, 19 nt, Artificial Sequence
  Description of Artificial Sequence: Synthetic oligonucleotide
  Antisense strand to SEQ ID NO: 103070
agaaaccuacaucucauau

SEQ ID NO: 103072 - RNA, 19 nt, Artificial Sequence
  Description of Artificial Sequence: Synthetic oligonucleotide
  Sense strand starting at position 3489 of SEQ ID NO: 1300
agauguagguuucugaagu

SEQ ID NO: 103073 - RNA, 19 nt, Artificial Sequence
  Description of Artificial Sequence: Synthetic oligonucleotide
  Antisense strand to SEQ ID NO: 103072
acuucagaaaccuacaucu

SEQ ID NO: 103074 - RNA, 19 nt, Artificial Sequence
  Description of Artificial Sequence: Synthetic oligonucleotide
  Sense strand starting at position 3495 of SEQ ID NO: 1300
agguuucugaaguguugga

SEQ ID NO: 103075 - RNA, 19 nt, Artificial Sequence
  Description of Artificial Sequence: Synthetic oligonucleotide
  Antisense strand to SEQ ID NO: 103074
uccaacacuucagaaaccu

SEQ ID NO: 103076 - RNA, 19 nt, Artificial Sequence
  Description of Artificial Sequence: Synthetic oligonucleotide
  Sense strand starting at position 3499 of SEQ ID NO: 1300
uucugaaguguuggauaua

SEQ ID NO: 103077 - RNA, 19 nt, Artificial Sequence
  Description of Artificial Sequence: Synthetic oligonucleotide
  Antisense strand to SEQ ID NO: 103076
uauauccaacacuucagaa

SEQ ID NO: 103078 - RNA, 19 nt, Artificial Sequence
  Description of Artificial Sequence: Synthetic oligonucleotide
  Sense strand starting at position 3511 of SEQ ID NO: 1300
ggauauauucagggccgau

SEQ ID NO: 103079 - RNA, 19 nt, Artificial Sequence
  Description of Artificial Sequence: Synthetic oligonucleotide
  Antisense strand to SEQ ID NO: 103078
aucggcccugaauauaucc

SEQ ID NO: 103080 - RNA, 19 nt, Artificial Sequence
  Description of Artificial Sequence: Synthetic oligonucleotide
  Sense strand starting at position 3559 of SEQ ID NO: 1300
ggaaacuugaaguggcaua

SEQ ID NO: 103081 - RNA, 19 nt, Artificial Sequence
  Description of Artificial Sequence: Synthetic oligonucleotide
  Antisense strand to SEQ ID NO: 103080
uaugccacuucaaguuucc

SEQ ID NO: 103082 - RNA, 19 nt, Artificial Sequence
  Description of Artificial Sequence: Synthetic oligonucleotide
  Sense strand starting at position 3604 of SEQ ID NO: 1300
ucgaaaccaguuugugaaa

SEQ ID NO: 103083 - RNA, 19 nt, Artificial Sequence
  Description of Artificial Sequence: Synthetic oligonucleotide
  Antisense strand to SEQ ID NO: 103082
uuucacaaacugguuucga

SEQ ID NO: 103084 - RNA, 19 nt, Artificial Sequence
  Description of Artificial Sequence: Synthetic oligonucleotide
  Sense strand starting at position 3944 of SEQ ID NO: 1301
auacuuccggccgaauaaa

SEQ ID NO: 103085 - RNA, 19 nt, Artificial Sequence
  Description of Artificial Sequence: Synthetic oligonucleotide
  Antisense strand to SEQ ID NO: 103084
uuuauucggccggaaguau

SEQ ID NO: 103086 - RNA, 19 nt, Artificial Sequence
  Description of Artificial Sequence: Synthetic oligonucleotide
  Sense strand starting at position 3943 of SEQ ID NO: 1301
gauacuuccggccgaauaa

SEQ ID NO: 103087 - RNA, 19 nt, Artificial Sequence
  Description of Artificial Sequence: Synthetic oligonucleotide
  Antisense strand to SEQ ID NO: 103086
uuauucggccggaaguauc

SEQ ID NO: 103088 - RNA, 19 nt, Artificial Sequence
  Description of Artificial Sequence: Synthetic oligonucleotide
  Sense strand starting at position 3714 of SEQ ID NO: 1301
gguuauguuaucuauggau

SEQ ID NO: 103089 - RNA, 19 nt, Artificial Sequence
  Description of Artificial Sequence: Synthetic oligonucleotide
  Antisense strand to SEQ ID NO: 103088
auccauagauaacauaacc

SEQ ID NO: 103090 - RNA, 19 nt, Artificial Sequence
  Description of Artificial Sequence: Synthetic oligonucleotide
  Sense strand starting at position 3713 of SEQ ID NO: 1301
cgguuauguuaucuaugga

SEQ ID NO: 103091 - RNA, 19 nt, Artificial Sequence
  Description of Artificial Sequence: Synthetic oligonucleotide
  Antisense strand to SEQ ID NO: 103090
uccauagauaacauaaccg

SEQ ID NO: 103092 - RNA, 19 nt, Artificial Sequence
  Description of Artificial Sequence: Synthetic oligonucleotide
  Sense strand starting at position 3674 of SEQ ID NO: 1301
accuaagcccgguaguuaa

SEQ ID NO: 103093 - RNA, 19 nt, Artificial Sequence
  Description of Artificial Sequence: Synthetic oligonucleotide
  Antisense strand to SEQ ID NO: 103092
uuaacuaccgggcuuaggu

SEQ ID NO: 103094 - RNA, 19 nt, Artificial Sequence
  Description of Artificial Sequence: Synthetic oligonucleotide
  Sense strand starting at position 3296 of SEQ ID NO: 1301
cgucuacuaguguacacaa

SEQ ID NO: 103095 - RNA, 19 nt, Artificial Sequence
  Description of Artificial Sequence: Synthetic oligonucleotide
  Antisense strand to SEQ ID NO: 103094
uuguguacacuaguagacg

SEQ ID NO: 103096 - RNA, 19 nt, Artificial Sequence
  Description of Artificial Sequence: Synthetic oligonucleotide
  Sense strand starting at position 3244 of SEQ ID NO: 1301
uuaauugaaccauggaugu

SEQ ID NO: 103097 - RNA, 19 nt, Artificial Sequence
  Description of Artificial Sequence: Synthetic oligonucleotide
  Antisense strand to SEQ ID NO: 103096
acauccaugguucaauuaa

SEQ ID NO: 103098 - RNA, 19 nt, Artificial Sequence
  Description of Artificial Sequence: Synthetic oligonucleotide
  Sense strand starting at position 3175 of SEQ ID NO: 1301
cuauuucugucagcagauc

SEQ ID NO: 103099 - RNA, 19 nt, Artificial Sequence
  Description of Artificial Sequence: Synthetic oligonucleotide
  Antisense strand to SEQ ID NO: 103098
gaucugcugacagaaauag

SEQ ID NO: 103100 - RNA, 19 nt, Artificial Sequence
  Description of Artificial Sequence: Synthetic oligonucleotide
  Sense strand starting at position 3171 of SEQ ID NO: 1301
ugcccuauuucugucagca

SEQ ID NO: 103101 - RNA, 19 nt, Artificial Sequence
  Description of Artificial Sequence: Synthetic oligonucleotide
  Antisense strand to SEQ ID NO: 103100
ugcugacagaaauagggca

SEQ ID NO: 103102 - RNA, 19 nt, Artificial Sequence
  Description of Artificial Sequence: Synthetic oligonucleotide
  Sense strand starting at position 3043 of SEQ ID NO: 1301
ugucuaaggucagucuuaa

SEQ ID NO: 103103 - RNA, 19 nt, Artificial Sequence
  Description of Artificial Sequence: Synthetic oligonucleotide
  Antisense strand to SEQ ID NO: 103102
uuaagacugaccuuagaca

SEQ ID NO: 103104 - RNA, 19 nt, Artificial Sequence
  Description of Artificial Sequence: Synthetic oligonucleotide
  Sense strand starting at position 2740 of SEQ ID NO: 1301
agaaguucccgacacugau

SEQ ID NO: 103105 - RNA, 19 nt, Artificial Sequence
  Description of Artificial Sequence: Synthetic oligonucleotide
  Antisense strand to SEQ ID NO: 103104
aucagugucgggaacuucu

SEQ ID NO: 103106 - RNA, 19 nt, Artificial Sequence
  Description of Artificial Sequence: Synthetic oligonucleotide
  Sense strand starting at position 2727 of SEQ ID NO: 1301
ugaagugcccugcagaagu

SEQ ID NO: 103107 - RNA, 19 nt, Artificial Sequence
  Description of Artificial Sequence: Synthetic oligonucleotide
  Antisense strand to SEQ ID NO: 103106
acuucugcagggcacuuca

SEQ ID NO: 103108 - RNA, 19 nt, Artificial Sequence
  Description of Artificial Sequence: Synthetic oligonucleotide
  Sense strand starting at position 2663 of SEQ ID NO: 1301
cgcauaucuguguuccugu

SEQ ID NO: 103109 - RNA, 19 nt, Artificial Sequence
  Description of Artificial Sequence: Synthetic oligonucleotide
  Antisense strand to SEQ ID NO: 103108
acaggaacacagauaugcg

SEQ ID NO: 103110 - RNA, 19 nt, Artificial Sequence
  Description of Artificial Sequence: Synthetic oligonucleotide
  Sense strand starting at position 2584 of SEQ ID NO: 1301
gcuucagaaggaugggaau

SEQ ID NO: 103111 - RNA, 19 nt, Artificial Sequence
  Description of Artificial Sequence: Synthetic oligonucleotide
  Antisense strand to SEQ ID NO: 103110
auucccauccuucugaagc

SEQ ID NO: 103112 - RNA, 19 nt, Artificial Sequence
  Description of Artificial Sequence: Synthetic oligonucleotide
  Sense strand starting at position 2503 of SEQ ID NO: 1301
uguguugcaauuugcgaaa

SEQ ID NO: 103113 - RNA, 19 nt, Artificial Sequence
  Description of Artificial Sequence: Synthetic oligonucleotide
  Antisense strand to SEQ ID NO: 103112
uuucgcaaauugcaacaca

SEQ ID NO: 103114 - RNA, 19 nt, Artificial Sequence
  Description of Artificial Sequence: Synthetic oligonucleotide
  Sense strand starting at position 2480 of SEQ ID NO: 1301
cuuugcguggacuagauaa

SEQ ID NO: 103115 - RNA, 19 nt, Artificial Sequence
  Description of Artificial Sequence: Synthetic oligonucleotide
  Antisense strand to SEQ ID NO: 103114
uuaucuaguccacgcaaag

SEQ ID NO: 103116 - RNA, 19 nt, Artificial Sequence
  Description of Artificial Sequence: Synthetic oligonucleotide
  Sense strand starting at position 1315 of SEQ ID NO: 1301
ccuaguuccugagucagaa

SEQ ID NO: 103117 - RNA, 19 nt, Artificial Sequence
  Description of Artificial Sequence: Synthetic oligonucleotide
  Antisense strand to SEQ ID NO: 103116
uucugacucaggaacuagg

SEQ ID NO: 103118 - RNA, 19 nt, Artificial Sequence
  Description of Artificial Sequence: Synthetic oligonucleotide
  Sense strand starting at position 1070 of SEQ ID NO: 1301
aggccaucucacugguauu

SEQ ID NO: 103119 - RNA, 19 nt, Artificial Sequence
  Description of Artificial Sequence: Synthetic oligonucleotide
  Antisense strand to SEQ ID NO: 103118
aauaccagugagauggccu

SEQ ID NO: 103120 - RNA, 19 nt, Artificial Sequence
  Description of Artificial Sequence: Synthetic oligonucleotide
  Sense strand starting at position 1023 of SEQ ID NO: 1301
uggcuacgucuggaauuau

SEQ ID NO: 103121 - RNA, 19 nt, Artificial Sequence
  Description of Artificial Sequence: Synthetic oligonucleotide
  Antisense strand to SEQ ID NO: 103120
auaauuccagacguagcca

SEQ ID NO: 103122 - RNA, 19 nt, Artificial Sequence
  Description of Artificial Sequence: Synthetic oligonucleotide
  Sense strand starting at position 1000 of SEQ ID NO: 1301
cucuaugucuugucaaauu

SEQ ID NO: 103123 - RNA, 19 nt, Artificial Sequence
  Description of Artificial Sequence: Synthetic oligonucleotide
  Antisense strand to SEQ ID NO: 103122
aauuugacaagacauagag

SEQ ID NO: 103124 - RNA, 19 nt, Artificial Sequence
  Description of Artificial Sequence: Synthetic oligonucleotide
  Sense strand starting at position 924 of SEQ ID NO: 1301
ccuuaagcuugagucacaa

SEQ ID NO: 103125 - RNA, 19 nt, Artificial Sequence
  Description of Artificial Sequence: Synthetic oligonucleotide
  Antisense strand to SEQ ID NO: 103124
uugugacucaagcuuaagg

SEQ ID NO: 103126 - RNA, 19 nt, Artificial Sequence
  Description of Artificial Sequence: Synthetic oligonucleotide
  Sense strand starting at position 921 of SEQ ID NO: 1301
uuaccuuaagcuugaguca

SEQ ID NO: 103127 - RNA, 19 nt, Artificial Sequence
  Description of Artificial Sequence: Synthetic oligonucleotide
  Antisense strand to SEQ ID NO: 103126
ugacucaagcuuaagguaa

SEQ ID NO: 103128 - RNA, 19 nt, Artificial Sequence
  Description of Artificial Sequence: Synthetic oligonucleotide
  Sense strand starting at position 915 of SEQ ID NO: 1301
cgagguuuaccuuaagcuu

SEQ ID NO: 103129 - RNA, 19 nt, Artificial Sequence
  Description of Artificial Sequence: Synthetic oligonucleotide
  Antisense strand to SEQ ID NO: 103128
aagcuuaagguaaaccucg

SEQ ID NO: 103130 - RNA, 19 nt, Artificial Sequence
  Description of Artificial Sequence: Synthetic oligonucleotide
  Sense strand starting at position 904 of SEQ ID NO: 1301
uaaauugagcccgagguuu

SEQ ID NO: 103131 - RNA, 19 nt, Artificial Sequence
  Description of Artificial Sequence: Synthetic oligonucleotide
  Antisense strand to SEQ ID NO: 103130
aaaccucgggcucaauuua

SEQ ID NO: 103132 - RNA, 19 nt, Artificial Sequence
  Description of Artificial Sequence: Synthetic oligonucleotide
  Sense strand starting at position 903 of SEQ ID NO: 1301
auaaauugagcccgagguu

SEQ ID NO: 103133 - RNA, 19 nt, Artificial Sequence
  Description of Artificial Sequence: Synthetic oligonucleotide
  Antisense strand to SEQ ID NO: 103132
aaccucgggcucaauuuau

SEQ ID NO: 103134 - RNA, 19 nt, Artificial Sequence
  Description of Artificial Sequence: Synthetic oligonucleotide
  Sense strand starting at position 816 of SEQ ID NO: 1301
acaaguacuuugcuuugaa

SEQ ID NO: 103135 - RNA, 19 nt, Artificial Sequence
  Description of Artificial Sequence: Synthetic oligonucleotide
  Antisense strand to SEQ ID NO: 103134
uucaaagcaaaguacuugu

SEQ ID NO: 103136 - RNA, 19 nt, Artificial Sequence
  Description of Artificial Sequence: Synthetic oligonucleotide
  Sense strand starting at position 674 of SEQ ID NO: 1301
cugaguaaacucugguauu

SEQ ID NO: 103137 - RNA, 19 nt, Artificial Sequence
  Description of Artificial Sequence: Synthetic oligonucleotide
  Antisense strand to SEQ ID NO: 103136
aauaccagaguuuacucag

SEQ ID NO: 103138 - RNA, 19 nt, Artificial Sequence
  Description of Artificial Sequence: Synthetic oligonucleotide
  Sense strand starting at position 590 of SEQ ID NO: 1301
aacaguuggugauccaaca

SEQ ID NO: 103139 - RNA, 19 nt, Artificial Sequence
  Description of Artificial Sequence: Synthetic oligonucleotide
  Antisense strand to SEQ ID NO: 103138
uguuggaucaccaacuguu

SEQ ID NO: 103140 - RNA, 19 nt, Artificial Sequence
  Description of Artificial Sequence: Synthetic oligonucleotide
  Sense strand starting at position 577 of SEQ ID NO: 1301
acuguuuaaguggaacagu

SEQ ID NO: 103141 - RNA, 19 nt, Artificial Sequence
  Description of Artificial Sequence: Synthetic oligonucleotide
  Antisense strand to SEQ ID NO: 103140
acuguuccacuuaaacagu

SEQ ID NO: 103142 - RNA, 19 nt, Artificial Sequence
  Description of Artificial Sequence: Synthetic oligonucleotide
  Sense strand starting at position 570 of SEQ ID NO: 1301
uggaaucacuguuuaagug

SEQ ID NO: 103143 - RNA, 19 nt, Artificial Sequence
  Description of Artificial Sequence: Synthetic oligonucleotide
  Antisense strand to SEQ ID NO: 103142
cacuuaaacagugauucca

SEQ ID NO: 103144 - RNA, 19 nt, Artificial Sequence
  Description of Artificial Sequence: Synthetic oligonucleotide
  Sense strand starting at position 502 of SEQ ID NO: 1301
caaagugugucaucaucug

SEQ ID NO: 103145 - RNA, 19 nt, Artificial Sequence
  Description of Artificial Sequence: Synthetic oligonucleotide
  Antisense strand to SEQ ID NO: 103144
cagaugaugacacacuuug

SEQ ID NO: 103146 - RNA, 19 nt, Artificial Sequence
  Description of Artificial Sequence: Synthetic oligonucleotide
  Sense strand starting at position 484 of SEQ ID NO: 1301
aauggauugugucuuacac

SEQ ID NO: 103147 - RNA, 19 nt, Artificial Sequence
  Description of Artificial Sequence: Synthetic oligonucleotide
  Antisense strand to SEQ ID NO: 103146
guguaagacacaauccauu

SEQ ID NO: 103148 - RNA, 19 nt, Artificial Sequence
  Description of Artificial Sequence: Synthetic oligonucleotide
  Sense strand starting at position 326 of SEQ ID NO: 1301
ccuccauagcaaugucuga

SEQ ID NO: 103149 - RNA, 19 nt, Artificial Sequence
  Description of Artificial Sequence: Synthetic oligonucleotide
  Antisense strand to SEQ ID NO: 103148
ucagacauugcuauggagg

SEQ ID NO: 103150 - RNA, 19 nt, Artificial Sequence
  Description of Artificial Sequence: Synthetic oligonucleotide
  Sense strand starting at position 228 of SEQ ID NO: 1301
gggcuauuacucuagugau

SEQ ID NO: 103151 - RNA, 19 nt, Artificial Sequence
  Description of Artificial Sequence: Synthetic oligonucleotide
  Antisense strand to SEQ ID NO: 103150
aucacuagaguaauagccc

SEQ ID NO: 103152 - RNA, 19 nt, Artificial Sequence
  Description of Artificial Sequence: Synthetic oligonucleotide
  Sense strand starting at position 205 of SEQ ID NO: 1301
aagaguuacguccaaguug

SEQ ID NO: 103153 - RNA, 19 nt, Artificial Sequence
  Description of Artificial Sequence: Synthetic oligonucleotide
  Antisense strand to SEQ ID NO: 103152
caacuuggacguaacucuu

SEQ ID NO: 103154 - RNA, 19 nt, Artificial Sequence
  Description of Artificial Sequence: Synthetic oligonucleotide
  Sense strand starting at position 84 of SEQ ID NO: 1301
ugcaguauccaugaccaga

SEQ ID NO: 103155 - RNA, 19 nt, Artificial Sequence
  Description of Artificial Sequence: Synthetic oligonucleotide
  Antisense strand to SEQ ID NO: 103154
ucuggucauggauacugca

SEQ ID NO: 103156 - RNA, 19 nt, Artificial Sequence
  Description of Artificial Sequence: Synthetic oligonucleotide
  Sense strand starting at position 77 of SEQ ID NO: 1301
ucuuaugugcaguauccau

SEQ ID NO: 103157 - RNA, 19 nt, Artificial Sequence
  Description of Artificial Sequence: Synthetic oligonucleotide
  Antisense strand to SEQ ID NO: 103156
auggauacugcacauaaga

SEQ ID NO: 103158 - RNA, 19 nt, Artificial Sequence
  Description of Artificial Sequence: Synthetic oligonucleotide
  Sense strand starting at position 49 of SEQ ID NO: 1301
uuuagaagcuauccuguaa

SEQ ID NO: 103159 - RNA, 19 nt, Artificial Sequence
  Description of Artificial Sequence: Synthetic oligonucleotide
  Antisense strand to SEQ ID NO: 103158
uuacaggauagcuucuaaa

SEQ ID NO: 103160 - RNA, 19 nt, Artificial Sequence
  Description of Artificial Sequence: Synthetic oligonucleotide
  Sense strand starting at position 19 of SEQ ID NO: 1301
auguuugcugaguaacugu

SEQ ID NO: 103161 - RNA, 19 nt, Artificial Sequence
  Description of Artificial Sequence: Synthetic oligonucleotide
  Antisense strand to SEQ ID NO: 103160
acaguuacucagcaaacau

SEQ ID NO: 103162 - RNA, 19 nt, Artificial Sequence
  Description of Artificial Sequence: Synthetic oligonucleotide
  Sense strand starting at position 4 of SEQ ID NO: 1301
aaaggugcucagugaaugu

SEQ ID NO: 103163 - RNA, 19 nt, Artificial Sequence
  Description of Artificial Sequence: Synthetic oligonucleotide
  Antisense strand to SEQ ID NO: 103162
acauucacugagcaccuuu

SEQ ID NO: 103164 - RNA, 19 nt, Artificial Sequence
  Description of Artificial Sequence: Synthetic oligonucleotide
  Sense strand starting at position 3512 of SEQ ID NO: 1302
guagguaugucaacgaugu

SEQ ID NO: 103165 - RNA, 19 nt, Artificial Sequence
  Description of Artificial Sequence: Synthetic oligonucleotide
  Antisense strand to SEQ ID NO: 103164
acaucguugacauaccuac

SEQ ID NO: 103166 - RNA, 19 nt, Artificial Sequence
  Description of Artificial Sequence: Synthetic oligonucleotide
  Sense strand starting at position 3148 of SEQ ID NO: 1302
guuaauaucuuguuccaaa

SEQ ID NO: 103167 - RNA, 19 nt, Artificial Sequence
  Description of Artificial Sequence: Synthetic oligonucleotide
  Antisense strand to SEQ ID NO: 103166
uuuggaacaagauauuaac

SEQ ID NO: 103168 - RNA, 19 nt, Artificial Sequence
  Description of Artificial Sequence: Synthetic oligonucleotide
  Sense strand starting at position 3113 of SEQ ID NO: 1302
auuccauggccauguauuu

SEQ ID NO: 103169 - RNA, 19 nt, Artificial Sequence
  Description of Artificial Sequence: Synthetic oligonucleotide
  Antisense strand to SEQ ID NO: 103168
aaauacauggccauggaau

SEQ ID NO: 103170 - RNA, 19 nt, Artificial Sequence
  Description of Artificial Sequence: Synthetic oligonucleotide
  Sense strand starting at position 3111 of SEQ ID NO: 1302
gaauuccauggccauguau

SEQ ID NO: 103171 - RNA, 19 nt, Artificial Sequence
  Description of Artificial Sequence: Synthetic oligonucleotide
  Antisense strand to SEQ ID NO: 103170
auacauggccauggaauuc

SEQ ID NO: 103172 - RNA, 19 nt, Artificial Sequence
  Description of Artificial Sequence: Synthetic oligonucleotide
  Sense strand starting at position 3110 of SEQ ID NO: 1302
ggaauuccauggccaugua

SEQ ID NO: 103173 - RNA, 19 nt, Artificial Sequence
  Description of Artificial Sequence: Synthetic oligonucleotide
  Antisense strand to SEQ ID NO: 103172
uacauggccauggaauucc

SEQ ID NO: 103174 - RNA, 19 nt, Artificial Sequence
  Description of Artificial Sequence: Synthetic oligonucleotide
  Sense strand starting at position 2966 of SEQ ID NO: 1302
cuucucagaucuuuguauu

SEQ ID NO: 103175 - RNA, 19 nt, Artificial Sequence
  Description of Artificial Sequence: Synthetic oligonucleotide
  Antisense strand to SEQ ID NO: 103174
aauacaaagaucugagaag

SEQ ID NO: 103176 - RNA, 19 nt, Artificial Sequence
  Description of Artificial Sequence: Synthetic oligonucleotide
  Sense strand starting at position 2882 of SEQ ID NO: 1302
ggucuaccuuuacccagaa

SEQ ID NO: 103177 - RNA, 19 nt, Artificial Sequence
  Description of Artificial Sequence: Synthetic oligonucleotide
  Antisense strand to SEQ ID NO: 103176
uucuggguaaagguagacc

SEQ ID NO: 103178 - RNA, 19 nt, Artificial Sequence
  Description of Artificial Sequence: Synthetic oligonucleotide
  Sense strand starting at position 2814 of SEQ ID NO: 1302
auaaauuugcauuguucga

SEQ ID NO: 103179 - RNA, 19 nt, Artificial Sequence
  Description of Artificial Sequence: Synthetic oligonucleotide
  Antisense strand to SEQ ID NO: 103178
ucgaacaaugcaaauuuau

SEQ ID NO: 103180 - RNA, 19 nt, Artificial Sequence
  Description of Artificial Sequence: Synthetic oligonucleotide
  Sense strand starting at position 2685 of SEQ ID NO: 1302
gcagauggccucuagaacu

SEQ ID NO: 103181 - RNA, 19 nt, Artificial Sequence
  Description of Artificial Sequence: Synthetic oligonucleotide
  Antisense strand to SEQ ID NO: 103180
aguucuagaggccaucugc

SEQ ID NO: 103182 - RNA, 19 nt, Artificial Sequence
  Description of Artificial Sequence: Synthetic oligonucleotide
  Sense strand starting at position 2648 of SEQ ID NO: 1302
gaugccauugcugaaagaa

SEQ ID NO: 103183 - RNA, 19 nt, Artificial Sequence
  Description of Artificial Sequence: Synthetic oligonucleotide
  Antisense strand to SEQ ID NO: 103182
uucuuucagcaauggcauc

SEQ ID NO: 103184 - RNA, 19 nt, Artificial Sequence
  Description of Artificial Sequence: Synthetic oligonucleotide
  Sense strand starting at position 2606 of SEQ ID NO: 1302
gagucaaggagaugugaca

SEQ ID NO: 103185 - RNA, 19 nt, Artificial Sequence
  Description of Artificial Sequence: Synthetic oligonucleotide
  Antisense strand to SEQ ID NO: 103184
ugucacaucuccuugacuc

SEQ ID NO: 103186 - RNA, 19 nt, Artificial Sequence
  Description of Artificial Sequence: Synthetic oligonucleotide
  Sense strand starting at position 2602 of SEQ ID NO: 1302
gucagagucaaggagaugu

SEQ ID NO: 103187 - RNA, 19 nt, Artificial Sequence
  Description of Artificial Sequence: Synthetic oligonucleotide
  Antisense strand to SEQ ID NO: 103186
acaucuccuugacucugac

SEQ ID NO: 103188 - RNA, 19 nt, Artificial Sequence
  Description of Artificial Sequence: Synthetic oligonucleotide
  Sense strand starting at position 2600 of SEQ ID NO: 1302
gggucagagucaaggagau

SEQ ID NO: 103189 - RNA, 19 nt, Artificial Sequence
  Description of Artificial Sequence: Synthetic oligonucleotide
  Antisense strand to SEQ ID NO: 103188
aucuccuugacucugaccc

SEQ ID NO: 103190 - RNA, 19 nt, Artificial Sequence
  Description of Artificial Sequence: Synthetic oligonucleotide
  Sense strand starting at position 2578 of SEQ ID NO: 1302
gccuuauuagagggaggca

SEQ ID NO: 103191 - RNA, 19 nt, Artificial Sequence
  Description of Artificial Sequence: Synthetic oligonucleotide
  Antisense strand to SEQ ID NO: 103190
ugccucccucuaauaaggc

SEQ ID NO: 103192 - RNA, 19 nt, Artificial Sequence
  Description of Artificial Sequence: Synthetic oligonucleotide
  Sense strand starting at position 2534 of SEQ ID NO: 1302
agagcuauccuggauuauc

SEQ ID NO: 103193 - RNA, 19 nt, Artificial Sequence
  Description of Artificial Sequence: Synthetic oligonucleotide
  Antisense strand to SEQ ID NO: 103192
gauaauccaggauagcucu

SEQ ID NO: 103194 - RNA, 19 nt, Artificial Sequence
  Description of Artificial Sequence: Synthetic oligonucleotide
  Sense strand starting at position 2533 of SEQ ID NO: 1302
gagagcuauccuggauuau

SEQ ID NO: 103195 - RNA, 19 nt, Artificial Sequence
  Description of Artificial Sequence: Synthetic oligonucleotide
  Antisense strand to SEQ ID NO: 103194
auaauccaggauagcucuc

SEQ ID NO: 103196 - RNA, 19 nt, Artificial Sequence
  Description of Artificial Sequence: Synthetic oligonucleotide
  Sense strand starting at position 2447 of SEQ ID NO: 1302
guggauauauuaccuuaaa

SEQ ID NO: 103197 - RNA, 19 nt, Artificial Sequence
  Description of Artificial Sequence: Synthetic oligonucleotide
  Antisense strand to SEQ ID NO: 103196
uuuaagguaauauauccac

SEQ ID NO: 103198 - RNA, 19 nt, Artificial Sequence
  Description of Artificial Sequence: Synthetic oligonucleotide
  Sense strand starting at position 2365 of SEQ ID NO: 1302
guaguagaaccuuauguac

SEQ ID NO: 103199 - RNA, 19 nt, Artificial Sequence
  Description of Artificial Sequence: Synthetic oligonucleotide
  Antisense strand to SEQ ID NO: 103198
guacauaagguucuacuac

SEQ ID NO: 103200 - RNA, 19 nt, Artificial Sequence
  Description of Artificial Sequence: Synthetic oligonucleotide
  Sense strand starting at position 2352 of SEQ ID NO: 1302
augcauuuaguagguagua

SEQ ID NO: 103201 - RNA, 19 nt, Artificial Sequence
  Description of Artificial Sequence: Synthetic oligonucleotide
  Antisense strand to SEQ ID NO: 103200
uacuaccuacuaaaugcau

SEQ ID NO: 103202 - RNA, 19 nt, Artificial Sequence
  Description of Artificial Sequence: Synthetic oligonucleotide
  Sense strand starting at position 2336 of SEQ ID NO: 1302
agaaguucuguuuaugaug

SEQ ID NO: 103203 - RNA, 19 nt, Artificial Sequence
  Description of Artificial Sequence: Synthetic oligonucleotide
  Antisense strand to SEQ ID NO: 103202
caucauaaacagaacuucu

SEQ ID NO: 103204 - RNA, 19 nt, Artificial Sequence
  Description of Artificial Sequence: Synthetic oligonucleotide
  Sense strand starting at position 2333 of SEQ ID NO: 1302
aucagaaguucuguuuaug

SEQ ID NO: 103205 - RNA, 19 nt, Artificial Sequence
  Description of Artificial Sequence: Synthetic oligonucleotide
  Antisense strand to SEQ ID NO: 103204
cauaaacagaacuucugau

SEQ ID NO: 103206 - RNA, 19 nt, Artificial Sequence
  Description of Artificial Sequence: Synthetic oligonucleotide
  Sense strand starting at position 1882 of SEQ ID NO: 1302
uagauugucccguaaucuu

SEQ ID NO: 103207 - RNA, 19 nt, Artificial Sequence
  Description of Artificial Sequence: Synthetic oligonucleotide
  Antisense strand to SEQ ID NO: 103206
aagauuacgggacaaucua

SEQ ID NO: 103208 - RNA, 19 nt, Artificial Sequence
  Description of Artificial Sequence: Synthetic oligonucleotide
  Sense strand starting at position 1870 of SEQ ID NO: 1302
gcaggugucacuuagauug

SEQ ID NO: 103209 - RNA, 19 nt, Artificial Sequence
  Description of Artificial Sequence: Synthetic oligonucleotide
  Antisense strand to SEQ ID NO: 103208
caaucuaagugacaccugc

SEQ ID NO: 103210 - RNA, 19 nt, Artificial Sequence
  Description of Artificial Sequence: Synthetic oligonucleotide
  Sense strand starting at position 1851 of SEQ ID NO: 1302
gaagucucugucugagaua

SEQ ID NO: 103211 - RNA, 19 nt, Artificial Sequence
  Description of Artificial Sequence: Synthetic oligonucleotide
  Antisense strand to SEQ ID NO: 103210
uaucucagacagagacuuc

SEQ ID NO: 103212 - RNA, 19 nt, Artificial Sequence
  Description of Artificial Sequence: Synthetic oligonucleotide
  Sense strand starting at position 1850 of SEQ ID NO: 1302
ugaagucucugucugagau

SEQ ID NO: 103213 - RNA, 19 nt, Artificial Sequence
  Description of Artificial Sequence: Synthetic oligonucleotide
  Antisense strand to SEQ ID NO: 103212
aucucagacagagacuuca

SEQ ID NO: 103214 - RNA, 19 nt, Artificial Sequence
  Description of Artificial Sequence: Synthetic oligonucleotide
  Sense strand starting at position 1779 of SEQ ID NO: 1302
gcuuaagggucaguaagaa

SEQ ID NO: 103215 - RNA, 19 nt, Artificial Sequence
  Description of Artificial Sequence: Synthetic oligonucleotide
  Antisense strand to SEQ ID NO: 103214
uucuuacugacccuuaagc

SEQ ID NO: 103216 - RNA, 19 nt, Artificial Sequence
  Description of Artificial Sequence: Synthetic oligonucleotide
  Sense strand starting at position 1758 of SEQ ID NO: 1302
uucccuggagcuuagaauu

SEQ ID NO: 103217 - RNA, 19 nt, Artificial Sequence
  Description of Artificial Sequence: Synthetic oligonucleotide
  Antisense strand to SEQ ID NO: 103216
aauucuaagcuccagggaa

SEQ ID NO: 103218 - RNA, 19 nt, Artificial Sequence
  Description of Artificial Sequence: Synthetic oligonucleotide
  Sense strand starting at position 1572 of SEQ ID NO: 1302
ugaacaccuucuucgguaa

SEQ ID NO: 103219 - RNA, 19 nt, Artificial Sequence
  Description of Artificial Sequence: Synthetic oligonucleotide
  Antisense strand to SEQ ID NO: 103218
uuaccgaagaagguguuca

SEQ ID NO: 103220 - RNA, 19 nt, Artificial Sequence
  Description of Artificial Sequence: Synthetic oligonucleotide
  Sense strand starting at position 1225 of SEQ ID NO: 1302
guguaauacauacacguuu

SEQ ID NO: 103221 - RNA, 19 nt, Artificial Sequence
  Description of Artificial Sequence: Synthetic oligonucleotide
  Antisense strand to SEQ ID NO: 103220
aaacguguauguauuacac

SEQ ID NO: 103222 - RNA, 19 nt, Artificial Sequence
  Description of Artificial Sequence: Synthetic oligonucleotide
  Sense strand starting at position 1216 of SEQ ID NO: 1302
ggagucugaguguaauaca

SEQ ID NO: 103223 - RNA, 19 nt, Artificial Sequence
  Description of Artificial Sequence: Synthetic oligonucleotide
  Antisense strand to SEQ ID NO: 103222
uguauuacacucagacucc

SEQ ID NO: 103224 - RNA, 19 nt, Artificial Sequence
  Description of Artificial Sequence: Synthetic oligonucleotide
  Sense strand starting at position 1213 of SEQ ID NO: 1302
ccuggagucugaguguaau

SEQ ID NO: 103225 - RNA, 19 nt, Artificial Sequence
  Description of Artificial Sequence: Synthetic oligonucleotide
  Antisense strand to SEQ ID NO: 103224
auuacacucagacuccagg

SEQ ID NO: 103226 - RNA, 19 nt, Artificial Sequence
  Description of Artificial Sequence: Synthetic oligonucleotide
  Sense strand starting at position 1184 of SEQ ID NO: 1302
cugggaaacuguucaggca

SEQ ID NO: 103227 - RNA, 19 nt, Artificial Sequence
  Description of Artificial Sequence: Synthetic oligonucleotide
  Antisense strand to SEQ ID NO: 103226
ugccugaacaguuucccag

SEQ ID NO: 103228 - RNA, 19 nt, Artificial Sequence
  Description of Artificial Sequence: Synthetic oligonucleotide
  Sense strand starting at position 1115 of SEQ ID NO: 1302
uccagagucuuucuagaac

SEQ ID NO: 103229 - RNA, 19 nt, Artificial Sequence
  Description of Artificial Sequence: Synthetic oligonucleotide
  Antisense strand to SEQ ID NO: 103228
guucuagaaagacucugga

SEQ ID NO: 103230 - RNA, 19 nt, Artificial Sequence
  Description of Artificial Sequence: Synthetic oligonucleotide
  Sense strand starting at position 1107 of SEQ ID NO: 1302
gaggaaguuccagagucuu

SEQ ID NO: 103231 - RNA, 19 nt, Artificial Sequence
  Description of Artificial Sequence: Synthetic oligonucleotide
  Antisense strand to SEQ ID NO: 103230
aagacucuggaacuuccuc

SEQ ID NO: 103232 - RNA, 19 nt, Artificial Sequence
  Description of Artificial Sequence: Synthetic oligonucleotide
  Sense strand starting at position 929 of SEQ ID NO: 1302
agggcuuguguugaggaaa

SEQ ID NO: 103233 - RNA, 19 nt, Artificial Sequence
  Description of Artificial Sequence: Synthetic oligonucleotide
  Antisense strand to SEQ ID NO: 103232
uuuccucaacacaagcccu

SEQ ID NO: 103234 - RNA, 19 nt, Artificial Sequence
  Description of Artificial Sequence: Synthetic oligonucleotide
  Sense strand starting at position 605 of SEQ ID NO: 1302
cuaugugcaugggugauuu

SEQ ID NO: 103235 - RNA, 19 nt, Artificial Sequence
  Description of Artificial Sequence: Synthetic oligonucleotide
  Antisense strand to SEQ ID NO: 103234
aaaucacccaugcacauag

SEQ ID NO: 103236 - RNA, 19 nt, Artificial Sequence
  Description of Artificial Sequence: Synthetic oligonucleotide
  Sense strand starting at position 575 of SEQ ID NO: 1302
ccaaaucuccauggucagu

SEQ ID NO: 103237 - RNA, 19 nt, Artificial Sequence
  Description of Artificial Sequence: Synthetic oligonucleotide
  Antisense strand to SEQ ID NO: 103236
acugaccauggagauuugg

SEQ ID NO: 103238 - RNA, 19 nt, Artificial Sequence
  Description of Artificial Sequence: Synthetic oligonucleotide
  Sense strand starting at position 460 of SEQ ID NO: 1302
uuuguuauagcauagauug

SEQ ID NO: 103239 - RNA, 19 nt, Artificial Sequence
  Description of Artificial Sequence: Synthetic oligonucleotide
  Antisense strand to SEQ ID NO: 103238
caaucuaugcuauaacaaa

SEQ ID NO: 103240 - RNA, 19 nt, Artificial Sequence
  Description of Artificial Sequence: Synthetic oligonucleotide
  Sense strand starting at position 257 of SEQ ID NO: 1302
augggugugccgagcuaau

SEQ ID NO: 103241 - RNA, 19 nt, Artificial Sequence
  Description of Artificial Sequence: Synthetic oligonucleotide
  Antisense strand to SEQ ID NO: 103240
auuagcucggcacacccau

SEQ ID NO: 103242 - RNA, 19 nt, Artificial Sequence
  Description of Artificial Sequence: Synthetic oligonucleotide
  Sense strand starting at position 36 of SEQ ID NO: 1302
auaguaggccaucaaucaa

SEQ ID NO: 103243 - RNA, 19 nt, Artificial Sequence
  Description of Artificial Sequence: Synthetic oligonucleotide
  Antisense strand to SEQ ID NO: 103242
uugauugauggccuacuau

SEQ ID NO: 103244 - RNA, 19 nt, Artificial Sequence
  Description of Artificial Sequence: Synthetic oligonucleotide
  Sense strand starting at position 3939 of SEQ ID NO: 1303
auuaucauguuugugagau

SEQ ID NO: 103245 - RNA, 19 nt, Artificial Sequence
  Description of Artificial Sequence: Synthetic oligonucleotide
  Antisense strand to SEQ ID NO: 103244
aucucacaaacaugauaau

SEQ ID NO: 103246 - RNA, 19 nt, Artificial Sequence
  Description of Artificial Sequence: Synthetic oligonucleotide
  Sense strand starting at position 3937 of SEQ ID NO: 1303
caauuaucauguuugugag

SEQ ID NO: 103247 - RNA, 19 nt, Artificial Sequence
  Description of Artificial Sequence: Synthetic oligonucleotide
  Antisense strand to SEQ ID NO: 103246
cucacaaacaugauaauug

SEQ ID NO: 103248 - RNA, 19 nt, Artificial Sequence
  Description of Artificial Sequence: Synthetic oligonucleotide
  Sense strand starting at position 3837 of SEQ ID NO: 1303
gggaacagcuauccugacu

SEQ ID NO: 103249 - RNA, 19 nt, Artificial Sequence
  Description of Artificial Sequence: Synthetic oligonucleotide
  Antisense strand to SEQ ID NO: 103248
agucaggauagcuguuccc

SEQ ID NO: 103250 - RNA, 19 nt, Artificial Sequence
  Description of Artificial Sequence: Synthetic oligonucleotide
  Sense strand starting at position 3518 of SEQ ID NO: 1303
ggcagcuucccugacaacu

SEQ ID NO: 103251 - RNA, 19 nt, Artificial Sequence
  Description of Artificial Sequence: Synthetic oligonucleotide
  Antisense strand to SEQ ID NO: 103250
aguugucagggaagcugcc

SEQ ID NO: 103252 - RNA, 19 nt, Artificial Sequence
  Description of Artificial Sequence: Synthetic oligonucleotide
  Sense strand starting at position 3516 of SEQ ID NO: 1303
gaggcagcuucccugacaa

SEQ ID NO: 103253 - RNA, 19 nt, Artificial Sequence
  Description of Artificial Sequence: Synthetic oligonucleotide
  Antisense strand to SEQ ID NO: 103252
uugucagggaagcugccuc

SEQ ID NO: 103254 - RNA, 19 nt, Artificial Sequence
  Description of Artificial Sequence: Synthetic oligonucleotide
  Sense strand starting at position 3447 of SEQ ID NO: 1303
uggccaguccuguaaauaa

SEQ ID NO: 103255 - RNA, 19 nt, Artificial Sequence
  Description of Artificial Sequence: Synthetic oligonucleotide
  Antisense strand to SEQ ID NO: 103254
uuauuuacaggacuggcca

SEQ ID NO: 103256 - RNA, 19 nt, Artificial Sequence
  Description of Artificial Sequence: Synthetic oligonucleotide
  Sense strand starting at position 3419 of SEQ ID NO: 1303
agaucuucgucauugaaag

SEQ ID NO: 103257 - RNA, 19 nt, Artificial Sequence
  Description of Artificial Sequence: Synthetic oligonucleotide
  Antisense strand to SEQ ID NO: 103256
cuuucaaugacgaagaucu

SEQ ID NO: 103258 - RNA, 19 nt, Artificial Sequence
  Description of Artificial Sequence: Synthetic oligonucleotide
  Sense strand starting at position 3417 of SEQ ID NO: 1303
ucagaucuucgucauugaa

SEQ ID NO: 103259 - RNA, 19 nt, Artificial Sequence
  Description of Artificial Sequence: Synthetic oligonucleotide
  Antisense strand to SEQ ID NO: 103258
uucaaugacgaagaucuga

SEQ ID NO: 103260 - RNA, 19 nt, Artificial Sequence
  Description of Artificial Sequence: Synthetic oligonucleotide
  Sense strand starting at position 3416 of SEQ ID NO: 1303
cucagaucuucgucauuga

SEQ ID NO: 103261 - RNA, 19 nt, Artificial Sequence
  Description of Artificial Sequence: Synthetic oligonucleotide
  Antisense strand to SEQ ID NO: 103260
ucaaugacgaagaucugag

SEQ ID NO: 103262 - RNA, 19 nt, Artificial Sequence
  Description of Artificial Sequence: Synthetic oligonucleotide
  Sense strand starting at position 2866 of SEQ ID NO: 1303
ugugucaucgaggauuccu

SEQ ID NO: 103263 - RNA, 19 nt, Artificial Sequence
  Description of Artificial Sequence: Synthetic oligonucleotide
  Antisense strand to SEQ ID NO: 103262
aggaauccucgaugacaca

SEQ ID NO: 103264 - RNA, 19 nt, Artificial Sequence
  Description of Artificial Sequence: Synthetic oligonucleotide
  Sense strand starting at position 2863 of SEQ ID NO: 1303
ccuugugucaucgaggauu

SEQ ID NO: 103265 - RNA, 19 nt, Artificial Sequence
  Description of Artificial Sequence: Synthetic oligonucleotide
  Antisense strand to SEQ ID NO: 103264
aauccucgaugacacaagg

SEQ ID NO: 103266 - RNA, 19 nt, Artificial Sequence
  Description of Artificial Sequence: Synthetic oligonucleotide
  Sense strand starting at position 2663 of SEQ ID NO: 1303
agacaagcugccuagaagu

SEQ ID NO: 103267 - RNA, 19 nt, Artificial Sequence
  Description of Artificial Sequence: Synthetic oligonucleotide
  Antisense strand to SEQ ID NO: 103266
acuucuaggcagcuugucu

SEQ ID NO: 103268 - RNA, 19 nt, Artificial Sequence
  Description of Artificial Sequence: Synthetic oligonucleotide
  Sense strand starting at position 2513 of SEQ ID NO: 1303
ugagcaauagcucagcuaa

SEQ ID NO: 103269 - RNA, 19 nt, Artificial Sequence
  Description of Artificial Sequence: Synthetic oligonucleotide
  Antisense strand to SEQ ID NO: 103268
uuagcugagcuauugcuca

SEQ ID NO: 103270 - RNA, 19 nt, Artificial Sequence
  Description of Artificial Sequence: Synthetic oligonucleotide
  Sense strand starting at position 2508 of SEQ ID NO: 1303
gaugaugagcaauagcuca

SEQ ID NO: 103271 - RNA, 19 nt, Artificial Sequence
  Description of Artificial Sequence: Synthetic oligonucleotide
  Antisense strand to SEQ ID NO: 103270
ugagcuauugcucaucauc

SEQ ID NO: 103272 - RNA, 19 nt, Artificial Sequence
  Description of Artificial Sequence: Synthetic oligonucleotide
  Sense strand starting at position 2479 of SEQ ID NO: 1303
acggcuaucuuucuaaaga

SEQ ID NO: 103273 - RNA, 19 nt, Artificial Sequence
  Description of Artificial Sequence: Synthetic oligonucleotide
  Antisense strand to SEQ ID NO: 103272
ucuuuagaaagauagccgu

SEQ ID NO: 103274 - RNA, 19 nt, Artificial Sequence
  Description of Artificial Sequence: Synthetic oligonucleotide
  Sense strand starting at position 2435 of SEQ ID NO: 1303
acagcagugucaucuagau

SEQ ID NO: 103275 - RNA, 19 nt, Artificial Sequence
  Description of Artificial Sequence: Synthetic oligonucleotide
  Antisense strand to SEQ ID NO: 103274
aucuagaugacacugcugu

SEQ ID NO: 103276 - RNA, 19 nt, Artificial Sequence
  Description of Artificial Sequence: Synthetic oligonucleotide
  Sense strand starting at position 2249 of SEQ ID NO: 1303
guggucugugaugaggcaa

SEQ ID NO: 103277 - RNA, 19 nt, Artificial Sequence
  Description of Artificial Sequence: Synthetic oligonucleotide
  Antisense strand to SEQ ID NO: 103276
uugccucaucacagaccac

SEQ ID NO: 103278 - RNA, 19 nt, Artificial Sequence
  Description of Artificial Sequence: Synthetic oligonucleotide
  Sense strand starting at position 2241 of SEQ ID NO: 1303
gaaaucagguggucuguga

SEQ ID NO: 103279 - RNA, 19 nt, Artificial Sequence
  Description of Artificial Sequence: Synthetic oligonucleotide
  Antisense strand to SEQ ID NO: 103278
ucacagaccaccugauuuc

SEQ ID NO: 103280 - RNA, 19 nt, Artificial Sequence
  Description of Artificial Sequence: Synthetic oligonucleotide
  Sense strand starting at position 2228 of SEQ ID NO: 1303
ugacaagggcuuugaaauc

SEQ ID NO: 103281 - RNA, 19 nt, Artificial Sequence
  Description of Artificial Sequence: Synthetic oligonucleotide
  Antisense strand to SEQ ID NO: 103280
gauuucaaagcccuuguca

SEQ ID NO: 103282 - RNA, 19 nt, Artificial Sequence
  Description of Artificial Sequence: Synthetic oligonucleotide
  Sense strand starting at position 2204 of SEQ ID NO: 1303
cuuggaccucuguguauuu

SEQ ID NO: 103283 - RNA, 19 nt, Artificial Sequence
  Description of Artificial Sequence: Synthetic oligonucleotide
  Antisense strand to SEQ ID NO: 103282
aaauacacagagguccaag

SEQ ID NO: 103284 - RNA, 19 nt, Artificial Sequence
  Description of Artificial Sequence: Synthetic oligonucleotide
  Sense strand starting at position 2149 of SEQ ID NO: 1303
cugaguuucucauccagaa

SEQ ID NO: 103285 - RNA, 19 nt, Artificial Sequence
  Description of Artificial Sequence: Synthetic oligonucleotide
  Antisense strand to SEQ ID NO: 103284
uucuggaugagaaacucag

SEQ ID NO: 103286 - RNA, 19 nt, Artificial Sequence
  Description of Artificial Sequence: Synthetic oligonucleotide
  Sense strand starting at position 2138 of SEQ ID NO: 1303
gcuaauaaacacugaguuu

SEQ ID NO: 103287 - RNA, 19 nt, Artificial Sequence
  Description of Artificial Sequence: Synthetic oligonucleotide
  Antisense strand to SEQ ID NO: 103286
aaacucaguguuuauuagc

SEQ ID NO: 103288 - RNA, 19 nt, Artificial Sequence
  Description of Artificial Sequence: Synthetic oligonucleotide
  Sense strand starting at position 2016 of SEQ ID NO: 1303
ccagaagucccucagccaa

SEQ ID NO: 103289 - RNA, 19 nt, Artificial Sequence
  Description of Artificial Sequence: Synthetic oligonucleotide
  Antisense strand to SEQ ID NO: 103288
uuggcugagggacuucugg

SEQ ID NO: 103290 - RNA, 19 nt, Artificial Sequence
  Description of Artificial Sequence: Synthetic oligonucleotide
  Sense strand starting at position 1995 of SEQ ID NO: 1303
gcuuuaugaggucaccaug

SEQ ID NO: 103291 - RNA, 19 nt, Artificial Sequence
  Description of Artificial Sequence: Synthetic oligonucleotide
  Antisense strand to SEQ ID NO: 103290
cauggugaccucauaaagc

SEQ ID NO: 103292 - RNA, 19 nt, Artificial Sequence
  Description of Artificial Sequence: Synthetic oligonucleotide
  Sense strand starting at position 1424 of SEQ ID NO: 1303
gacagaugcccucaugacu

SEQ ID NO: 103293 - RNA, 19 nt, Artificial Sequence
  Description of Artificial Sequence: Synthetic oligonucleotide
  Antisense strand to SEQ ID NO: 103292
agucaugagggcaucuguc

SEQ ID NO: 103294 - RNA, 19 nt, Artificial Sequence
  Description of Artificial Sequence: Synthetic oligonucleotide
  Sense strand starting at position 1224 of SEQ ID NO: 1303
augaauuacucaguggaac

SEQ ID NO: 103295 - RNA, 19 nt, Artificial Sequence
  Description of Artificial Sequence: Synthetic oligonucleotide
  Antisense strand to SEQ ID NO: 103294
guuccacugaguaauucau

SEQ ID NO: 103296 - RNA, 19 nt, Artificial Sequence
  Description of Artificial Sequence: Synthetic oligonucleotide
  Sense strand starting at position 817 of SEQ ID NO: 1303
aguuauuucuggccaggca

SEQ ID NO: 103297 - RNA, 19 nt, Artificial Sequence
  Description of Artificial Sequence: Synthetic oligonucleotide
  Antisense strand to SEQ ID NO: 103296
ugccuggccagaaauaacu

SEQ ID NO: 103298 - RNA, 19 nt, Artificial Sequence
  Description of Artificial Sequence: Synthetic oligonucleotide
  Sense strand starting at position 804 of SEQ ID NO: 1303
ugugcaggaaucuaguuau

SEQ ID NO: 103299 - RNA, 19 nt, Artificial Sequence
  Description of Artificial Sequence: Synthetic oligonucleotide
  Antisense strand to SEQ ID NO: 103298
auaacuagauuccugcaca

SEQ ID NO: 103300 - RNA, 19 nt, Artificial Sequence
  Description of Artificial Sequence: Synthetic oligonucleotide
  Sense strand starting at position 799 of SEQ ID NO: 1303
cagacugugcaggaaucua

SEQ ID NO: 103301 - RNA, 19 nt, Artificial Sequence
  Description of Artificial Sequence: Synthetic oligonucleotide
  Antisense strand to SEQ ID NO: 103300
uagauuccugcacagucug

SEQ ID NO: 103302 - RNA, 19 nt, Artificial Sequence
  Description of Artificial Sequence: Synthetic oligonucleotide
  Sense strand starting at position 627 of SEQ ID NO: 1303
augaguuuggugagugucu

SEQ ID NO: 103303 - RNA, 19 nt, Artificial Sequence
  Description of Artificial Sequence: Synthetic oligonucleotide
  Antisense strand to SEQ ID NO: 103302
agacacucaccaaacucau

SEQ ID NO: 103304 - RNA, 19 nt, Artificial Sequence
  Description of Artificial Sequence: Synthetic oligonucleotide
  Sense strand starting at position 590 of SEQ ID NO: 1303
ggaucagucuguuuacuua

SEQ ID NO: 103305 - RNA, 19 nt, Artificial Sequence
  Description of Artificial Sequence: Synthetic oligonucleotide
  Antisense strand to SEQ ID NO: 103304
uaaguaaacagacugaucc

SEQ ID NO: 103306 - RNA, 19 nt, Artificial Sequence
  Description of Artificial Sequence: Synthetic oligonucleotide
  Sense strand starting at position 588 of SEQ ID NO: 1303
gaggaucagucuguuuacu

SEQ ID NO: 103307 - RNA, 19 nt, Artificial Sequence
  Description of Artificial Sequence: Synthetic oligonucleotide
  Antisense strand to SEQ ID NO: 103306
aguaaacagacugauccuc

SEQ ID NO: 103308 - RNA, 19 nt, Artificial Sequence
  Description of Artificial Sequence: Synthetic oligonucleotide
  Sense strand starting at position 587 of SEQ ID NO: 1303
agaggaucagucuguuuac

SEQ ID NO: 103309 - RNA, 19 nt, Artificial Sequence
  Description of Artificial Sequence: Synthetic oligonucleotide
  Antisense strand to SEQ ID NO: 103308
guaaacagacugauccucu

SEQ ID NO: 103310 - RNA, 19 nt, Artificial Sequence
  Description of Artificial Sequence: Synthetic oligonucleotide
  Sense strand starting at position 579 of SEQ ID NO: 1303
ucuguaucagaggaucagu

SEQ ID NO: 103311 - RNA, 19 nt, Artificial Sequence
  Description of Artificial Sequence: Synthetic oligonucleotide
  Antisense strand to SEQ ID NO: 103310
acugauccucugauacaga

SEQ ID NO: 103312 - RNA, 19 nt, Artificial Sequence
  Description of Artificial Sequence: Synthetic oligonucleotide
  Sense strand starting at position 571 of SEQ ID NO: 1303
gugaucacucuguaucaga

SEQ ID NO: 103313 - RNA, 19 nt, Artificial Sequence
  Description of Artificial Sequence: Synthetic oligonucleotide
  Antisense strand to SEQ ID NO: 103312
ucugauacagagugaucac

SEQ ID NO: 103314 - RNA, 19 nt, Artificial Sequence
  Description of Artificial Sequence: Synthetic oligonucleotide
  Sense strand starting at position 569 of SEQ ID NO: 1303
augugaucacucuguauca

SEQ ID NO: 103315 - RNA, 19 nt, Artificial Sequence
  Description of Artificial Sequence: Synthetic oligonucleotide
  Antisense strand to SEQ ID NO: 103314
ugauacagagugaucacau

SEQ ID NO: 103316 - RNA, 19 nt, Artificial Sequence
  Description of Artificial Sequence: Synthetic oligonucleotide
  Sense strand starting at position 110 of SEQ ID NO: 1303
guaguucugaagggaucca

SEQ ID NO: 103317 - RNA, 19 nt, Artificial Sequence
  Description of Artificial Sequence: Synthetic oligonucleotide
  Antisense strand to SEQ ID NO: 103316
uggaucccuucagaacuac

SEQ ID NO: 103318 - RNA, 19 nt, Artificial Sequence
  Description of Artificial Sequence: Synthetic oligonucleotide
  Sense strand starting at position 95 of SEQ ID NO: 1303
cagagacucugcuuuguag

SEQ ID NO: 103319 - RNA, 19 nt, Artificial Sequence
  Description of Artificial Sequence: Synthetic oligonucleotide
  Antisense strand to SEQ ID NO: 103318
cuacaaagcagagucucug

SEQ ID NO: 103320 - RNA, 19 nt, Artificial Sequence
  Description of Artificial Sequence: Synthetic oligonucleotide
  Sense strand starting at position 46 of SEQ ID NO: 1303
guggguguagcuuauauuu

SEQ ID NO: 103321 - RNA, 19 nt, Artificial Sequence
  Description of Artificial Sequence: Synthetic oligonucleotide
  Antisense strand to SEQ ID NO: 103320
aaauauaagcuacacccac

SEQ ID NO: 103322 - RNA, 19 nt, Artificial Sequence
  Description of Artificial Sequence: Synthetic oligonucleotide
  Sense strand starting at position 21 of SEQ ID NO: 1303
cuuguagguguucaaaugu

SEQ ID NO: 103323 - RNA, 19 nt, Artificial Sequence
  Description of Artificial Sequence: Synthetic oligonucleotide
  Antisense strand to SEQ ID NO: 103322
acauuugaacaccuacaag

SEQ ID NO: 103324 - RNA, 19 nt, Artificial Sequence
  Description of Artificial Sequence: Synthetic oligonucleotide
  Sense strand starting at position 3979 of SEQ ID NO: 1304
aggauaguuuggucaaaua

SEQ ID NO: 103325 - RNA, 19 nt, Artificial Sequence
  Description of Artificial Sequence: Synthetic oligonucleotide
  Antisense strand to SEQ ID NO: 103324
uauuugaccaaacuauccu

SEQ ID NO: 103326 - RNA, 19 nt, Artificial Sequence
  Description of Artificial Sequence: Synthetic oligonucleotide
  Sense strand starting at position 3978 of SEQ ID NO: 1304
aaggauaguuuggucaaau

SEQ ID NO: 103327 - RNA, 19 nt, Artificial Sequence
  Description of Artificial Sequence: Synthetic oligonucleotide
  Antisense strand to SEQ ID NO: 103326
auuugaccaaacuauccuu

SEQ ID NO: 103328 - RNA, 19 nt, Artificial Sequence
  Description of Artificial Sequence: Synthetic oligonucleotide
  Sense strand starting at position 3842 of SEQ ID NO: 1304
uagggcagaucugcuagaa

SEQ ID NO: 103329 - RNA, 19 nt, Artificial Sequence
  Description of Artificial Sequence: Synthetic oligonucleotide
  Antisense strand to SEQ ID NO: 103328
uucuagcagaucugcccua

SEQ ID NO: 103330 - RNA, 19 nt, Artificial Sequence
  Description of Artificial Sequence: Synthetic oligonucleotide
  Sense strand starting at position 3778 of SEQ ID NO: 1304
agacuugagugacuagcua

SEQ ID NO: 103331 - RNA, 19 nt, Artificial Sequence
  Description of Artificial Sequence: Synthetic oligonucleotide
  Antisense strand to SEQ ID NO: 103330
uagcuagucacucaagucu

SEQ ID NO: 103332 - RNA, 19 nt, Artificial Sequence
  Description of Artificial Sequence: Synthetic oligonucleotide
  Sense strand starting at position 3759 of SEQ ID NO: 1304
augagugugcucucugugu

SEQ ID NO: 103333 - RNA, 19 nt, Artificial Sequence
  Description of Artificial Sequence: Synthetic oligonucleotide
  Antisense strand to SEQ ID NO: 103332
acacagagagcacacucau

SEQ ID NO: 103334 - RNA, 19 nt, Artificial Sequence
  Description of Artificial Sequence: Synthetic oligonucleotide
  Sense strand starting at position 3741 of SEQ ID NO: 1304
auucuaccucuguaguuua

SEQ ID NO: 103335 - RNA, 19 nt, Artificial Sequence
  Description of Artificial Sequence: Synthetic oligonucleotide
  Antisense strand to SEQ ID NO: 103334
uaaacuacagagguagaau

SEQ ID NO: 103336 - RNA, 19 nt, Artificial Sequence
  Description of Artificial Sequence: Synthetic oligonucleotide
  Sense strand starting at position 3414 of SEQ ID NO: 1304
ugauuucugugucuuugua

SEQ ID NO: 103337 - RNA, 19 nt, Artificial Sequence
  Description of Artificial Sequence: Synthetic oligonucleotide
  Antisense strand to SEQ ID NO: 103336
uacaaagacacagaaauca

SEQ ID NO: 103338 - RNA, 19 nt, Artificial Sequence
  Description of Artificial Sequence: Synthetic oligonucleotide
  Sense strand starting at position 3412 of SEQ ID NO: 1304
ggugauuucugugucuuug

SEQ ID NO: 103339 - RNA, 19 nt, Artificial Sequence
  Description of Artificial Sequence: Synthetic oligonucleotide
  Antisense strand to SEQ ID NO: 103338
caaagacacagaaaucacc

SEQ ID NO: 103340 - RNA, 19 nt, Artificial Sequence
  Description of Artificial Sequence: Synthetic oligonucleotide
  Sense strand starting at position 3301 of SEQ ID NO: 1304
ccugauugucuccacaucu

SEQ ID NO: 103341 - RNA, 19 nt, Artificial Sequence
  Description of Artificial Sequence: Synthetic oligonucleotide
  Antisense strand to SEQ ID NO: 103340
agauguggagacaaucagg

SEQ ID NO: 103342 - RNA, 19 nt, Artificial Sequence
  Description of Artificial Sequence: Synthetic oligonucleotide
  Sense strand starting at position 2853 of SEQ ID NO: 1304
ugauuagacuguuuggauu

SEQ ID NO: 103343 - RNA, 19 nt, Artificial Sequence
  Description of Artificial Sequence: Synthetic oligonucleotide
  Antisense strand to SEQ ID NO: 103342
aauccaaacagucuaauca

SEQ ID NO: 103344 - RNA, 19 nt, Artificial Sequence
  Description of Artificial Sequence: Synthetic oligonucleotide
  Sense strand starting at position 2510 of SEQ ID NO: 1304
guccauagaguguauaaac

SEQ ID NO: 103345 - RNA, 19 nt, Artificial Sequence
  Description of Artificial Sequence: Synthetic oligonucleotide
  Antisense strand to SEQ ID NO: 103344
guuuauacacucuauggac

SEQ ID NO: 103346 - RNA, 19 nt, Artificial Sequence
  Description of Artificial Sequence: Synthetic oligonucleotide
  Sense strand starting at position 2508 of SEQ ID NO: 1304
agguccauagaguguauaa

SEQ ID NO: 103347 - RNA, 19 nt, Artificial Sequence
  Description of Artificial Sequence: Synthetic oligonucleotide
  Antisense strand to SEQ ID NO: 103346
uuauacacucuauggaccu

SEQ ID NO: 103348 - RNA, 19 nt, Artificial Sequence
  Description of Artificial Sequence: Synthetic oligonucleotide
  Sense strand starting at position 2503 of SEQ ID NO: 1304
guucuagguccauagagug

SEQ ID NO: 103349 - RNA, 19 nt, Artificial Sequence
  Description of Artificial Sequence: Synthetic oligonucleotide
  Antisense strand to SEQ ID NO: 103348
cacucuauggaccuagaac

SEQ ID NO: 103350 - RNA, 19 nt, Artificial Sequence
  Description of Artificial Sequence: Synthetic oligonucleotide
  Sense strand starting at position 2448 of SEQ ID NO: 1304
uagagaaacuugucaaguu

SEQ ID NO: 103351 - RNA, 19 nt, Artificial Sequence
  Description of Artificial Sequence: Synthetic oligonucleotide
  Antisense strand to SEQ ID NO: 103350
aacuugacaaguuucucua

SEQ ID NO: 103352 - RNA, 19 nt, Artificial Sequence
  Description of Artificial Sequence: Synthetic oligonucleotide
  Sense strand starting at position 2446 of SEQ ID NO: 1304
uguagagaaacuugucaag

SEQ ID NO: 103353 - RNA, 19 nt, Artificial Sequence
  Description of Artificial Sequence: Synthetic oligonucleotide
  Antisense strand to SEQ ID NO: 103352
cuugacaaguuucucuaca

SEQ ID NO: 103354 - RNA, 19 nt, Artificial Sequence
  Description of Artificial Sequence: Synthetic oligonucleotide
  Sense strand starting at position 2435 of SEQ ID NO: 1304
uauaacuaguuuguagaga

SEQ ID NO: 103355 - RNA, 19 nt, Artificial Sequence
  Description of Artificial Sequence: Synthetic oligonucleotide
  Antisense strand to SEQ ID NO: 103354
ucucuacaaacuaguuaua

SEQ ID NO: 103356 - RNA, 19 nt, Artificial Sequence
  Description of Artificial Sequence: Synthetic oligonucleotide
  Sense strand starting at position 2432 of SEQ ID NO: 1304
ggauauaacuaguuuguag

SEQ ID NO: 103357 - RNA, 19 nt, Artificial Sequence
  Description of Artificial Sequence: Synthetic oligonucleotide
  Antisense strand to SEQ ID NO: 103356
cuacaaacuaguuauaucc

SEQ ID NO: 103358 - RNA, 19 nt, Artificial Sequence
  Description of Artificial Sequence: Synthetic oligonucleotide
  Sense strand starting at position 2409 of SEQ ID NO: 1304
acacgacuggugggauuau

SEQ ID NO: 103359 - RNA, 19 nt, Artificial Sequence
  Description of Artificial Sequence: Synthetic oligonucleotide
  Antisense strand to SEQ ID NO: 103358
auaaucccaccagucgugu

SEQ ID NO: 103360 - RNA, 19 nt, Artificial Sequence
  Description of Artificial Sequence: Synthetic oligonucleotide
  Sense strand starting at position 2143 of SEQ ID NO: 1304
uguuacaagcacugaaaga

SEQ ID NO: 103361 - RNA, 19 nt, Artificial Sequence
  Description of Artificial Sequence: Synthetic oligonucleotide
  Antisense strand to SEQ ID NO: 103360
ucuuucagugcuuguaaca

SEQ ID NO: 103362 - RNA, 19 nt, Artificial Sequence
  Description of Artificial Sequence: Synthetic oligonucleotide
  Sense strand starting at position 2050 of SEQ ID NO: 1304
cuggaaugaaugugguaga

SEQ ID NO: 103363 - RNA, 19 nt, Artificial Sequence
  Description of Artificial Sequence: Synthetic oligonucleotide
  Antisense strand to SEQ ID NO: 103362
ucuaccacauucauuccag

SEQ ID NO: 103364 - RNA, 19 nt, Artificial Sequence
  Description of Artificial Sequence: Synthetic oligonucleotide
  Sense strand starting at position 2044 of SEQ ID NO: 1304
uccauucuggaaugaaugu

SEQ ID NO: 103365 - RNA, 19 nt, Artificial Sequence
  Description of Artificial Sequence: Synthetic oligonucleotide
  Antisense strand to SEQ ID NO: 103364
acauucauuccagaaugga

SEQ ID NO: 103366 - RNA, 19 nt, Artificial Sequence
  Description of Artificial Sequence: Synthetic oligonucleotide
  Sense strand starting at position 1350 of SEQ ID NO: 1304
cuaguaaggcaugaaguua

SEQ ID NO: 103367 - RNA, 19 nt, Artificial Sequence
  Description of Artificial Sequence: Synthetic oligonucleotide
  Antisense strand to SEQ ID NO: 103366
uaacuucaugccuuacuag

SEQ ID NO: 103368 - RNA, 19 nt, Artificial Sequence
  Description of Artificial Sequence: Synthetic oligonucleotide
  Sense strand starting at position 1268 of SEQ ID NO: 1304
uguguaaaccaauaccuua

SEQ ID NO: 103369 - RNA, 19 nt, Artificial Sequence
  Description of Artificial Sequence: Synthetic oligonucleotide
  Antisense strand to SEQ ID NO: 103368
uaagguauugguuuacaca

SEQ ID NO: 103370 - RNA, 19 nt, Artificial Sequence
  Description of Artificial Sequence: Synthetic oligonucleotide
  Sense strand starting at position 1260 of SEQ ID NO: 1304
ucuauuauuguguaaacca

SEQ ID NO: 103371 - RNA, 19 nt, Artificial Sequence
  Description of Artificial Sequence: Synthetic oligonucleotide
  Antisense strand to SEQ ID NO: 103370
ugguuuacacaauaauaga

SEQ ID NO: 103372 - RNA, 19 nt, Artificial Sequence
  Description of Artificial Sequence: Synthetic oligonucleotide
  Sense strand starting at position 1012 of SEQ ID NO: 1304
gggucaacaucuuccaauc

SEQ ID NO: 103373 - RNA, 19 nt, Artificial Sequence
  Description of Artificial Sequence: Synthetic oligonucleotide
  Antisense strand to SEQ ID NO: 103372
gauuggaagauguugaccc

SEQ ID NO: 103374 - RNA, 19 nt, Artificial Sequence
  Description of Artificial Sequence: Synthetic oligonucleotide
  Sense strand starting at position 1002 of SEQ ID NO: 1304
ucccuaaugugggucaaca

SEQ ID NO: 103375 - RNA, 19 nt, Artificial Sequence
  Description of Artificial Sequence: Synthetic oligonucleotide
  Antisense strand to SEQ ID NO: 103374
uguugacccacauuaggga

SEQ ID NO: 103376 - RNA, 19 nt, Artificial Sequence
  Description of Artificial Sequence: Synthetic oligonucleotide
  Sense strand starting at position 993 of SEQ ID NO: 1304
agaugacacucccuaaugu

SEQ ID NO: 103377 - RNA, 19 nt, Artificial Sequence
  Description of Artificial Sequence: Synthetic oligonucleotide
  Antisense strand to SEQ ID NO: 103376
acauuagggagugucaucu

SEQ ID NO: 103378 - RNA, 19 nt, Artificial Sequence
  Description of Artificial Sequence: Synthetic oligonucleotide
  Sense strand starting at position 975 of SEQ ID NO: 1304
ugguguucugaugauagga

SEQ ID NO: 103379 - RNA, 19 nt, Artificial Sequence
  Description of Artificial Sequence: Synthetic oligonucleotide
  Antisense strand to SEQ ID NO: 103378
uccuaucaucagaacacca

SEQ ID NO: 103380 - RNA, 19 nt, Artificial Sequence
  Description of Artificial Sequence: Synthetic oligonucleotide
  Sense strand starting at position 969 of SEQ ID NO: 1304
uuaaauugguguucugaug

SEQ ID NO: 103381 - RNA, 19 nt, Artificial Sequence
  Description of Artificial Sequence: Synthetic oligonucleotide
  Antisense strand to SEQ ID NO: 103380
caucagaacaccaauuuaa

SEQ ID NO: 103382 - RNA, 19 nt, Artificial Sequence
  Description of Artificial Sequence: Synthetic oligonucleotide
  Sense strand starting at position 884 of SEQ ID NO: 1304
cugagugagccauaggaug

SEQ ID NO: 103383 - RNA, 19 nt, Artificial Sequence
  Description of Artificial Sequence: Synthetic oligonucleotide
  Antisense strand to SEQ ID NO: 103382
cauccuauggcucacucag

SEQ ID NO: 103384 - RNA, 19 nt, Artificial Sequence
  Description of Artificial Sequence: Synthetic oligonucleotide
  Sense strand starting at position 851 of SEQ ID NO: 1304
acucauuaugguuaguuaa

SEQ ID NO: 103385 - RNA, 19 nt, Artificial Sequence
  Description of Artificial Sequence: Synthetic oligonucleotide
  Antisense strand to SEQ ID NO: 103384
uuaacuaaccauaaugagu

SEQ ID NO: 103386 - RNA, 19 nt, Artificial Sequence
  Description of Artificial Sequence: Synthetic oligonucleotide
  Sense strand starting at position 845 of SEQ ID NO: 1304
gugggaacucauuaugguu

SEQ ID NO: 103387 - RNA, 19 nt, Artificial Sequence
  Description of Artificial Sequence: Synthetic oligonucleotide
  Antisense strand to SEQ ID NO: 103386
aaccauaaugaguucccac

SEQ ID NO: 103388 - RNA, 19 nt, Artificial Sequence
  Description of Artificial Sequence: Synthetic oligonucleotide
  Sense strand starting at position 809 of SEQ ID NO: 1304
gcuuaaggauauguauaug

SEQ ID NO: 103389 - RNA, 19 nt, Artificial Sequence
  Description of Artificial Sequence: Synthetic oligonucleotide
  Antisense strand to SEQ ID NO: 103388
cauauacauauccuuaagc

SEQ ID NO: 103390 - RNA, 19 nt, Artificial Sequence
  Description of Artificial Sequence: Synthetic oligonucleotide
  Sense strand starting at position 808 of SEQ ID NO: 1304
ggcuuaaggauauguauau

SEQ ID NO: 103391 - RNA, 19 nt, Artificial Sequence
  Description of Artificial Sequence: Synthetic oligonucleotide
  Antisense strand to SEQ ID NO: 103390
auauacauauccuuaagcc

SEQ ID NO: 103392 - RNA, 19 nt, Artificial Sequence
  Description of Artificial Sequence: Synthetic oligonucleotide
  Sense strand starting at position 806 of SEQ ID NO: 1304
auggcuuaaggauauguau

SEQ ID NO: 103393 - RNA, 19 nt, Artificial Sequence
  Description of Artificial Sequence: Synthetic oligonucleotide
  Antisense strand to SEQ ID NO: 103392
auacauauccuuaagccau

SEQ ID NO: 103394 - RNA, 19 nt, Artificial Sequence
  Description of Artificial Sequence: Synthetic oligonucleotide
  Sense strand starting at position 795 of SEQ ID NO: 1304
ggagauuaacuauggcuua

SEQ ID NO: 103395 - RNA, 19 nt, Artificial Sequence
  Description of Artificial Sequence: Synthetic oligonucleotide
  Antisense strand to SEQ ID NO: 103394
uaagccauaguuaaucucc

SEQ ID NO: 103396 - RNA, 19 nt, Artificial Sequence
  Description of Artificial Sequence: Synthetic oligonucleotide
  Sense strand starting at position 784 of SEQ ID NO: 1304
ugacuuuauuuggagauua

SEQ ID NO: 103397 - RNA, 19 nt, Artificial Sequence
  Description of Artificial Sequence: Synthetic oligonucleotide
  Antisense strand to SEQ ID NO: 103396
uaaucuccaaauaaaguca

SEQ ID NO: 103398 - RNA, 19 nt, Artificial Sequence
  Description of Artificial Sequence: Synthetic oligonucleotide
  Sense strand starting at position 763 of SEQ ID NO: 1304
auggaauuaugagcuucuu

SEQ ID NO: 103399 - RNA, 19 nt, Artificial Sequence
  Description of Artificial Sequence: Synthetic oligonucleotide
  Antisense strand to SEQ ID NO: 103398
aagaagcucauaauuccau

SEQ ID NO: 103400 - RNA, 19 nt, Artificial Sequence
  Description of Artificial Sequence: Synthetic oligonucleotide
  Sense strand starting at position 245 of SEQ ID NO: 1304
aguuguaugcaggacauau

SEQ ID NO: 103401 - RNA, 19 nt, Artificial Sequence
  Description of Artificial Sequence: Synthetic oligonucleotide
  Antisense strand to SEQ ID NO: 103400
auauguccugcauacaacu

SEQ ID NO: 103402 - RNA, 19 nt, Artificial Sequence
  Description of Artificial Sequence: Synthetic oligonucleotide
  Sense strand starting at position 221 of SEQ ID NO: 1304
cugagaaggguuuagugca

SEQ ID NO: 103403 - RNA, 19 nt, Artificial Sequence
  Description of Artificial Sequence: Synthetic oligonucleotide
  Antisense strand to SEQ ID NO: 103402
ugcacuaaacccuucucag

SEQ ID NO: 103404 - RNA, 19 nt, Artificial Sequence
  Description of Artificial Sequence: Synthetic oligonucleotide
  Sense strand starting at position 3866 of SEQ ID NO: 1305
uagggcagaucugcuagaa

SEQ ID NO: 103405 - RNA, 19 nt, Artificial Sequence
  Description of Artificial Sequence: Synthetic oligonucleotide
  Antisense strand to SEQ ID NO: 103404
uucuagcagaucugcccua

SEQ ID NO: 103406 - RNA, 19 nt, Artificial Sequence
  Description of Artificial Sequence: Synthetic oligonucleotide
  Sense strand starting at position 3802 of SEQ ID NO: 1305
agacuugagugacuagcua

SEQ ID NO: 103407 - RNA, 19 nt, Artificial Sequence
  Description of Artificial Sequence: Synthetic oligonucleotide
  Antisense strand to SEQ ID NO: 103406
uagcuagucacucaagucu

SEQ ID NO: 103408 - RNA, 19 nt, Artificial Sequence
  Description of Artificial Sequence: Synthetic oligonucleotide
  Sense strand starting at position 3783 of SEQ ID NO: 1305
augagugugcucucugugu

SEQ ID NO: 103409 - RNA, 19 nt, Artificial Sequence
  Description of Artificial Sequence: Synthetic oligonucleotide
  Antisense strand to SEQ ID NO: 103408
acacagagagcacacucau

SEQ ID NO: 103410 - RNA, 19 nt, Artificial Sequence
  Description of Artificial Sequence: Synthetic oligonucleotide
  Sense strand starting at position 3765 of SEQ ID NO: 1305
auucuaccucuguaguuua

SEQ ID NO: 103411 - RNA, 19 nt, Artificial Sequence
  Description of Artificial Sequence: Synthetic oligonucleotide
  Antisense strand to SEQ ID NO: 103410
uaaacuacagagguagaau

SEQ ID NO: 103412 - RNA, 19 nt, Artificial Sequence
  Description of Artificial Sequence: Synthetic oligonucleotide
  Sense strand starting at position 3438 of SEQ ID NO: 1305
ugauuucugugucuuugua

SEQ ID NO: 103413 - RNA, 19 nt, Artificial Sequence
  Description of Artificial Sequence: Synthetic oligonucleotide
  Antisense strand to SEQ ID NO: 103412
uacaaagacacagaaauca

SEQ ID NO: 103414 - RNA, 19 nt, Artificial Sequence
  Description of Artificial Sequence: Synthetic oligonucleotide
  Sense strand starting at position 3436 of SEQ ID NO: 1305
ggugauuucugugucuuug

SEQ ID NO: 103415 - RNA, 19 nt, Artificial Sequence
  Description of Artificial Sequence: Synthetic oligonucleotide
  Antisense strand to SEQ ID NO: 103414
caaagacacagaaaucacc

SEQ ID NO: 103416 - RNA, 19 nt, Artificial Sequence
  Description of Artificial Sequence: Synthetic oligonucleotide
  Sense strand starting at position 3325 of SEQ ID NO: 1305
ccugauugucuccacaucu

SEQ ID NO: 103417 - RNA, 19 nt, Artificial Sequence
  Description of Artificial Sequence: Synthetic oligonucleotide
  Antisense strand to SEQ ID NO: 103416
agauguggagacaaucagg

SEQ ID NO: 103418 - RNA, 19 nt, Artificial Sequence
  Description of Artificial Sequence: Synthetic oligonucleotide
  Sense strand starting at position 3002 of SEQ ID NO: 1305
uugacagugucucuugaag

SEQ ID NO: 103419 - RNA, 19 nt, Artificial Sequence
  Description of Artificial Sequence: Synthetic oligonucleotide
  Antisense strand to SEQ ID NO: 103418
cuucaagagacacugucaa

SEQ ID NO: 103420 - RNA, 19 nt, Artificial Sequence
  Description of Artificial Sequence: Synthetic oligonucleotide
  Sense strand starting at position 2877 of SEQ ID NO: 1305
ugauuagacuguuuggauu

SEQ ID NO: 103421 - RNA, 19 nt, Artificial Sequence
  Description of Artificial Sequence: Synthetic oligonucleotide
  Antisense strand to SEQ ID NO: 103420
aauccaaacagucuaauca

SEQ ID NO: 103422 - RNA, 19 nt, Artificial Sequence
  Description of Artificial Sequence: Synthetic oligonucleotide
  Sense strand starting at position 2534 of SEQ ID NO: 1305
guccauagaguguauaaac

SEQ ID NO: 103423 - RNA, 19 nt, Artificial Sequence
  Description of Artificial Sequence: Synthetic oligonucleotide
  Antisense strand to SEQ ID NO: 103422
guuuauacacucuauggac

SEQ ID NO: 103424 - RNA, 19 nt, Artificial Sequence
  Description of Artificial Sequence: Synthetic oligonucleotide
  Sense strand starting at position 2532 of SEQ ID NO: 1305
agguccauagaguguauaa

SEQ ID NO: 103425 - RNA, 19 nt, Artificial Sequence
  Description of Artificial Sequence: Synthetic oligonucleotide
  Antisense strand to SEQ ID NO: 103424
uuauacacucuauggaccu

SEQ ID NO: 103426 - RNA, 19 nt, Artificial Sequence
  Description of Artificial Sequence: Synthetic oligonucleotide
  Sense strand starting at position 2527 of SEQ ID NO: 1305
guucuagguccauagagug

SEQ ID NO: 103427 - RNA, 19 nt, Artificial Sequence
  Description of Artificial Sequence: Synthetic oligonucleotide
  Antisense strand to SEQ ID NO: 103426
cacucuauggaccuagaac

SEQ ID NO: 103428 - RNA, 19 nt, Artificial Sequence
  Description of Artificial Sequence: Synthetic oligonucleotide
  Sense strand starting at position 2472 of SEQ ID NO: 1305
uagagaaacuugucaaguu

SEQ ID NO: 103429 - RNA, 19 nt, Artificial Sequence
  Description of Artificial Sequence: Synthetic oligonucleotide
  Antisense strand to SEQ ID NO: 103428
aacuugacaaguuucucua

SEQ ID NO: 103430 - RNA, 19 nt, Artificial Sequence
  Description of Artificial Sequence: Synthetic oligonucleotide
  Sense strand starting at position 2470 of SEQ ID NO: 1305
uguagagaaacuugucaag

SEQ ID NO: 103431 - RNA, 19 nt, Artificial Sequence
  Description of Artificial Sequence: Synthetic oligonucleotide
  Antisense strand to SEQ ID NO: 103430
cuugacaaguuucucuaca

SEQ ID NO: 103432 - RNA, 19 nt, Artificial Sequence
  Description of Artificial Sequence: Synthetic oligonucleotide
  Sense strand starting at position 2459 of SEQ ID NO: 1305
uauaacuaguuuguagaga

SEQ ID NO: 103433 - RNA, 19 nt, Artificial Sequence
  Description of Artificial Sequence: Synthetic oligonucleotide
  Antisense strand to SEQ ID NO: 103432
ucucuacaaacuaguuaua

SEQ ID NO: 103434 - RNA, 19 nt, Artificial Sequence
  Description of Artificial Sequence: Synthetic oligonucleotide
  Sense strand starting at position 2456 of SEQ ID NO: 1305
ggauauaacuaguuuguag

SEQ ID NO: 103435 - RNA, 19 nt, Artificial Sequence
  Description of Artificial Sequence: Synthetic oligonucleotide
  Antisense strand to SEQ ID NO: 103434
cuacaaacuaguuauaucc

SEQ ID NO: 103436 - RNA, 19 nt, Artificial Sequence
  Description of Artificial Sequence: Synthetic oligonucleotide
  Sense strand starting at position 2433 of SEQ ID NO: 1305
acacgacuggugggauuau

SEQ ID NO: 103437 - RNA, 19 nt, Artificial Sequence
  Description of Artificial Sequence: Synthetic oligonucleotide
  Antisense strand to SEQ ID NO: 103436
auaaucccaccagucgugu

SEQ ID NO: 103438 - RNA, 19 nt, Artificial Sequence
  Description of Artificial Sequence: Synthetic oligonucleotide
  Sense strand starting at position 2167 of SEQ ID NO: 1305
uguuacaagcacugaaaga

SEQ ID NO: 103439 - RNA, 19 nt, Artificial Sequence
  Description of Artificial Sequence: Synthetic oligonucleotide
  Antisense strand to SEQ ID NO: 103438
ucuuucagugcuuguaaca

SEQ ID NO: 103440 - RNA, 19 nt, Artificial Sequence
  Description of Artificial Sequence: Synthetic oligonucleotide
  Sense strand starting at position 2074 of SEQ ID NO: 1305
cuggaaugaaugugguaga

SEQ ID NO: 103441 - RNA, 19 nt, Artificial Sequence
  Description of Artificial Sequence: Synthetic oligonucleotide
  Antisense strand to SEQ ID NO: 103440
ucuaccacauucauuccag

SEQ ID NO: 103442 - RNA, 19 nt, Artificial Sequence
  Description of Artificial Sequence: Synthetic oligonucleotide
  Sense strand starting at position 2068 of SEQ ID NO: 1305
uccauucuggaaugaaugu

SEQ ID NO: 103443 - RNA, 19 nt, Artificial Sequence
  Description of Artificial Sequence: Synthetic oligonucleotide
  Antisense strand to SEQ ID NO: 103442
acauucauuccagaaugga

SEQ ID NO: 103444 - RNA, 19 nt, Artificial Sequence
  Description of Artificial Sequence: Synthetic oligonucleotide
  Sense strand starting at position 1374 of SEQ ID NO: 1305
cuaguaaggcaugaaguua

SEQ ID NO: 103445 - RNA, 19 nt, Artificial Sequence
  Description of Artificial Sequence: Synthetic oligonucleotide
  Antisense strand to SEQ ID NO: 103444
uaacuucaugccuuacuag

SEQ ID NO: 103446 - RNA, 19 nt, Artificial Sequence
  Description of Artificial Sequence: Synthetic oligonucleotide
  Sense strand starting at position 1373 of SEQ ID NO: 1305
acuaguaaggcaugaaguu

SEQ ID NO: 103447 - RNA, 19 nt, Artificial Sequence
  Description of Artificial Sequence: Synthetic oligonucleotide
  Antisense strand to SEQ ID NO: 103446
aacuucaugccuuacuagu

SEQ ID NO: 103448 - RNA, 19 nt, Artificial Sequence
  Description of Artificial Sequence: Synthetic oligonucleotide
  Sense strand starting at position 1292 of SEQ ID NO: 1305
uguguaaaccaauaccuua

SEQ ID NO: 103449 - RNA, 19 nt, Artificial Sequence
  Description of Artificial Sequence: Synthetic oligonucleotide
  Antisense strand to SEQ ID NO: 103448
uaagguauugguuuacaca

SEQ ID NO: 103450 - RNA, 19 nt, Artificial Sequence
  Description of Artificial Sequence: Synthetic oligonucleotide
  Sense strand starting at position 1284 of SEQ ID NO: 1305
ucuauuauuguguaaacca

SEQ ID NO: 103451 - RNA, 19 nt, Artificial Sequence
  Description of Artificial Sequence: Synthetic oligonucleotide
  Antisense strand to SEQ ID NO: 103450
ugguuuacacaauaauaga

SEQ ID NO: 103452 - RNA, 19 nt, Artificial Sequence
  Description of Artificial Sequence: Synthetic oligonucleotide
  Sense strand starting at position 1036 of SEQ ID NO: 1305
gggucaacaucuuccaauc

SEQ ID NO: 103453 - RNA, 19 nt, Artificial Sequence
  Description of Artificial Sequence: Synthetic oligonucleotide
  Antisense strand to SEQ ID NO: 103452
gauuggaagauguugaccc

SEQ ID NO: 103454 - RNA, 19 nt, Artificial Sequence
  Description of Artificial Sequence: Synthetic oligonucleotide
  Sense strand starting at position 1026 of SEQ ID NO: 1305
ucccuaaugugggucaaca

SEQ ID NO: 103455 - RNA, 19 nt, Artificial Sequence
  Description of Artificial Sequence: Synthetic oligonucleotide
  Antisense strand to SEQ ID NO: 103454
uguugacccacauuaggga

SEQ ID NO: 103456 - RNA, 19 nt, Artificial Sequence
  Description of Artificial Sequence: Synthetic oligonucleotide
  Sense strand starting at position 1017 of SEQ ID NO: 1305
agaugacacucccuaaugu

SEQ ID NO: 103457 - RNA, 19 nt, Artificial Sequence
  Description of Artificial Sequence: Synthetic oligonucleotide
  Antisense strand to SEQ ID NO: 103456
acauuagggagugucaucu

SEQ ID NO: 103458 - RNA, 19 nt, Artificial Sequence
  Description of Artificial Sequence: Synthetic oligonucleotide
  Sense strand starting at position 999 of SEQ ID NO: 1305
ugguguucugaugauagga

SEQ ID NO: 103459 - RNA, 19 nt, Artificial Sequence
  Description of Artificial Sequence: Synthetic oligonucleotide
  Antisense strand to SEQ ID NO: 103458
uccuaucaucagaacacca

SEQ ID NO: 103460 - RNA, 19 nt, Artificial Sequence
  Description of Artificial Sequence: Synthetic oligonucleotide
  Sense strand starting at position 993 of SEQ ID NO: 1305
uuaaauugguguucugaug

SEQ ID NO: 103461 - RNA, 19 nt, Artificial Sequence
  Description of Artificial Sequence: Synthetic oligonucleotide
  Antisense strand to SEQ ID NO: 103460
caucagaacaccaauuuaa

SEQ ID NO: 103462 - RNA, 19 nt, Artificial Sequence
  Description of Artificial Sequence: Synthetic oligonucleotide
  Sense strand starting at position 908 of SEQ ID NO: 1305
cugagugagccauaggaug

SEQ ID NO: 103463 - RNA, 19 nt, Artificial Sequence
  Description of Artificial Sequence: Synthetic oligonucleotide
  Antisense strand to SEQ ID NO: 103462
cauccuauggcucacucag

SEQ ID NO: 103464 - RNA, 19 nt, Artificial Sequence
  Description of Artificial Sequence: Synthetic oligonucleotide
  Sense strand starting at position 875 of SEQ ID NO: 1305
acucauuaugguuaguuaa

SEQ ID NO: 103465 - RNA, 19 nt, Artificial Sequence
  Description of Artificial Sequence: Synthetic oligonucleotide
  Antisense strand to SEQ ID NO: 103464
uuaacuaaccauaaugagu

SEQ ID NO: 103466 - RNA, 19 nt, Artificial Sequence
  Description of Artificial Sequence: Synthetic oligonucleotide
  Sense strand starting at position 869 of SEQ ID NO: 1305
gugggaacucauuaugguu

SEQ ID NO: 103467 - RNA, 19 nt, Artificial Sequence
  Description of Artificial Sequence: Synthetic oligonucleotide
  Antisense strand to SEQ ID NO: 103466
aaccauaaugaguucccac

SEQ ID NO: 103468 - RNA, 19 nt, Artificial Sequence
  Description of Artificial Sequence: Synthetic oligonucleotide
  Sense strand starting at position 833 of SEQ ID NO: 1305
gcuuaaggauauguauaug

SEQ ID NO: 103469 - RNA, 19 nt, Artificial Sequence
  Description of Artificial Sequence: Synthetic oligonucleotide
  Antisense strand to SEQ ID NO: 103468
cauauacauauccuuaagc

SEQ ID NO: 103470 - RNA, 19 nt, Artificial Sequence
  Description of Artificial Sequence: Synthetic oligonucleotide
  Sense strand starting at position 832 of SEQ ID NO: 1305
ggcuuaaggauauguauau

SEQ ID NO: 103471 - RNA, 19 nt, Artificial Sequence
  Description of Artificial Sequence: Synthetic oligonucleotide
  Antisense strand to SEQ ID NO: 103470
auauacauauccuuaagcc

SEQ ID NO: 103472 - RNA, 19 nt, Artificial Sequence
  Description of Artificial Sequence: Synthetic oligonucleotide
  Sense strand starting at position 830 of SEQ ID NO: 1305
auggcuuaaggauauguau

SEQ ID NO: 103473 - RNA, 19 nt, Artificial Sequence
  Description of Artificial Sequence: Synthetic oligonucleotide
  Antisense strand to SEQ ID NO: 103472
auacauauccuuaagccau

SEQ ID NO: 103474 - RNA, 19 nt, Artificial Sequence
  Description of Artificial Sequence: Synthetic oligonucleotide
  Sense strand starting at position 819 of SEQ ID NO: 1305
ggagauuaacuauggcuua

SEQ ID NO: 103475 - RNA, 19 nt, Artificial Sequence
  Description of Artificial Sequence: Synthetic oligonucleotide
  Antisense strand to SEQ ID NO: 103474
uaagccauaguuaaucucc

SEQ ID NO: 103476 - RNA, 19 nt, Artificial Sequence
  Description of Artificial Sequence: Synthetic oligonucleotide
  Sense strand starting at position 808 of SEQ ID NO: 1305
ugacuuuauuuggagauua

SEQ ID NO: 103477 - RNA, 19 nt, Artificial Sequence
  Description of Artificial Sequence: Synthetic oligonucleotide
  Antisense strand to SEQ ID NO: 103476
uaaucuccaaauaaaguca

SEQ ID NO: 103478 - RNA, 19 nt, Artificial Sequence
  Description of Artificial Sequence: Synthetic oligonucleotide
  Sense strand starting at position 787 of SEQ ID NO: 1305
auggaauuaugagcuucuu

SEQ ID NO: 103479 - RNA, 19 nt, Artificial Sequence
  Description of Artificial Sequence: Synthetic oligonucleotide
  Antisense strand to SEQ ID NO: 103478
aagaagcucauaauuccau

SEQ ID NO: 103480 - RNA, 19 nt, Artificial Sequence
  Description of Artificial Sequence: Synthetic oligonucleotide
  Sense strand starting at position 269 of SEQ ID NO: 1305
aguuguaugcaggacauau

SEQ ID NO: 103481 - RNA, 19 nt, Artificial Sequence
  Description of Artificial Sequence: Synthetic oligonucleotide
  Antisense strand to SEQ ID NO: 103480
auauguccugcauacaacu

SEQ ID NO: 103482 - RNA, 19 nt, Artificial Sequence
  Description of Artificial Sequence: Synthetic oligonucleotide
  Sense strand starting at position 245 of SEQ ID NO: 1305
cugagaaggguuuagugca

SEQ ID NO: 103483 - RNA, 19 nt, Artificial Sequence
  Description of Artificial Sequence: Synthetic oligonucleotide
  Antisense strand to SEQ ID NO: 103482
ugcacuaaacccuucucag

SEQ ID NO: 103484 - RNA, 19 nt, Artificial Sequence
  Description of Artificial Sequence: Synthetic oligonucleotide
  Sense strand starting at position 100 of SEQ ID NO: 1306
auuacaugucucuguacca

SEQ ID NO: 103485 - RNA, 19 nt, Artificial Sequence
  Description of Artificial Sequence: Synthetic oligonucleotide
  Antisense strand to SEQ ID NO: 103484
ugguacagagacauguaau

SEQ ID NO: 103486 - RNA, 19 nt, Artificial Sequence
  Description of Artificial Sequence: Synthetic oligonucleotide
  Sense strand starting at position 184 of SEQ ID NO: 1306
gcacuauuccuaggcacaa

SEQ ID NO: 103487 - RNA, 19 nt, Artificial Sequence
  Description of Artificial Sequence: Synthetic oligonucleotide
  Antisense strand to SEQ ID NO: 103486
uugugccuaggaauagugc

SEQ ID NO: 103488 - RNA, 19 nt, Artificial Sequence
  Description of Artificial Sequence: Synthetic oligonucleotide
  Sense strand starting at position 438 of SEQ ID NO: 1306
gcaugaugguuucugcaga

SEQ ID NO: 103489 - RNA, 19 nt, Artificial Sequence
  Description of Artificial Sequence: Synthetic oligonucleotide
  Antisense strand to SEQ ID NO: 103488
ucugcagaaaccaucaugc

SEQ ID NO: 103490 - RNA, 19 nt, Artificial Sequence
  Description of Artificial Sequence: Synthetic oligonucleotide
  Sense strand starting at position 448 of SEQ ID NO: 1306
uucugcagauguccagaau

SEQ ID NO: 103491 - RNA, 19 nt, Artificial Sequence
  Description of Artificial Sequence: Synthetic oligonucleotide
  Antisense strand to SEQ ID NO: 103490
auucuggacaucugcagaa

SEQ ID NO: 103492 - RNA, 19 nt, Artificial Sequence
  Description of Artificial Sequence: Synthetic oligonucleotide
  Sense strand starting at position 449 of SEQ ID NO: 1306
ucugcagauguccagaauu

SEQ ID NO: 103493 - RNA, 19 nt, Artificial Sequence
  Description of Artificial Sequence: Synthetic oligonucleotide
  Antisense strand to SEQ ID NO: 103492
aauucuggacaucugcaga

SEQ ID NO: 103494 - RNA, 19 nt, Artificial Sequence
  Description of Artificial Sequence: Synthetic oligonucleotide
  Sense strand starting at position 510 of SEQ ID NO: 1306
caaugagcgcuggauacuu

SEQ ID NO: 103495 - RNA, 19 nt, Artificial Sequence
  Description of Artificial Sequence: Synthetic oligonucleotide
  Antisense strand to SEQ ID NO: 103494
aaguauccagcgcucauug

SEQ ID NO: 103496 - RNA, 19 nt, Artificial Sequence
  Description of Artificial Sequence: Synthetic oligonucleotide
  Sense strand starting at position 541 of SEQ ID NO: 1306
cuggcuagcagcuguaauu

SEQ ID NO: 103497 - RNA, 19 nt, Artificial Sequence
  Description of Artificial Sequence: Synthetic oligonucleotide
  Antisense strand to SEQ ID NO: 103496
aauuacagcugcuagccag

SEQ ID NO: 103498 - RNA, 19 nt, Artificial Sequence
  Description of Artificial Sequence: Synthetic oligonucleotide
  Sense strand starting at position 548 of SEQ ID NO: 1306
gcagcuguaauucgauuaa

SEQ ID NO: 103499 - RNA, 19 nt, Artificial Sequence
  Description of Artificial Sequence: Synthetic oligonucleotide
  Antisense strand to SEQ ID NO: 103498
uuaaucgaauuacagcugc

SEQ ID NO: 103500 - RNA, 19 nt, Artificial Sequence
  Description of Artificial Sequence: Synthetic oligonucleotide
  Sense strand starting at position 552 of SEQ ID NO: 1306
cuguaauucgauuaaucca

SEQ ID NO: 103501 - RNA, 19 nt, Artificial Sequence
  Description of Artificial Sequence: Synthetic oligonucleotide
  Antisense strand to SEQ ID NO: 103500
uggauuaaucgaauuacag

SEQ ID NO: 103502 - RNA, 19 nt, Artificial Sequence
  Description of Artificial Sequence: Synthetic oligonucleotide
  Sense strand starting at position 559 of SEQ ID NO: 1306
ucgauuaauccagagcuga

SEQ ID NO: 103503 - RNA, 19 nt, Artificial Sequence
  Description of Artificial Sequence: Synthetic oligonucleotide
  Antisense strand to SEQ ID NO: 103502
ucagcucuggauuaaucga

SEQ ID NO: 103504 - RNA, 19 nt, Artificial Sequence
  Description of Artificial Sequence: Synthetic oligonucleotide
  Sense strand starting at position 605 of SEQ ID NO: 1306
augacuucuggauguuaug

SEQ ID NO: 103505 - RNA, 19 nt, Artificial Sequence
  Description of Artificial Sequence: Synthetic oligonucleotide
  Antisense strand to SEQ ID NO: 103504
cauaacauccagaagucau

SEQ ID NO: 103506 - RNA, 19 nt, Artificial Sequence
  Description of Artificial Sequence: Synthetic oligonucleotide
  Sense strand starting at position 634 of SEQ ID NO: 1306
gccucuaauugaucuaaag

SEQ ID NO: 103507 - RNA, 19 nt, Artificial Sequence
  Description of Artificial Sequence: Synthetic oligonucleotide
  Antisense strand to SEQ ID NO: 103506
cuuuagaucaauuagaggc

SEQ ID NO: 103508 - RNA, 19 nt, Artificial Sequence
  Description of Artificial Sequence: Synthetic oligonucleotide
  Sense strand starting at position 918 of SEQ ID NO: 1306
gucacaguuacucgggaga

SEQ ID NO: 103509 - RNA, 19 nt, Artificial Sequence
  Description of Artificial Sequence: Synthetic oligonucleotide
  Antisense strand to SEQ ID NO: 103508
ucucccgaguaacugugac

SEQ ID NO: 103510 - RNA, 19 nt, Artificial Sequence
  Description of Artificial Sequence: Synthetic oligonucleotide
  Sense strand starting at position 963 of SEQ ID NO: 1306
gggagacgagguugcauua

SEQ ID NO: 103511 - RNA, 19 nt, Artificial Sequence
  Description of Artificial Sequence: Synthetic oligonucleotide
  Antisense strand to SEQ ID NO: 103510
uaaugcaaccucgucuccc

SEQ ID NO: 103512 - RNA, 19 nt, Artificial Sequence
  Description of Artificial Sequence: Synthetic oligonucleotide
  Sense strand starting at position 1063 of SEQ ID NO: 1306
guuagaugcuagguucaug

SEQ ID NO: 103513 - RNA, 19 nt, Artificial Sequence
  Description of Artificial Sequence: Synthetic oligonucleotide
  Antisense strand to SEQ ID NO: 103512
caugaaccuagcaucuaac

SEQ ID NO: 103514 - RNA, 19 nt, Artificial Sequence
  Description of Artificial Sequence: Synthetic oligonucleotide
  Sense strand starting at position 1095 of SEQ ID NO: 1306
aguggugaggcgcaguaau

SEQ ID NO: 103515 - RNA, 19 nt, Artificial Sequence
  Description of Artificial Sequence: Synthetic oligonucleotide
  Antisense strand to SEQ ID NO: 103514
auuacugcgccucaccacu

SEQ ID NO: 103516 - RNA, 19 nt, Artificial Sequence
  Description of Artificial Sequence: Synthetic oligonucleotide
  Sense strand starting at position 1192 of SEQ ID NO: 1306
ggcguggucucuucgagga

SEQ ID NO: 103517 - RNA, 19 nt, Artificial Sequence
  Description of Artificial Sequence: Synthetic oligonucleotide
  Antisense strand to SEQ ID NO: 103516
uccucgaagagaccacgcc

SEQ ID NO: 103518 - RNA, 19 nt, Artificial Sequence
  Description of Artificial Sequence: Synthetic oligonucleotide
  Sense strand starting at position 1195 of SEQ ID NO: 1306
guggucucuucgaggagca

SEQ ID NO: 103519 - RNA, 19 nt, Artificial Sequence
  Description of Artificial Sequence: Synthetic oligonucleotide
  Antisense strand to SEQ ID NO: 103518
ugcuccucgaagagaccac

SEQ ID NO: 103520 - RNA, 19 nt, Artificial Sequence
  Description of Artificial Sequence: Synthetic oligonucleotide
  Sense strand starting at position 1451 of SEQ ID NO: 1306
cgacauaauuugucggagu

SEQ ID NO: 103521 - RNA, 19 nt, Artificial Sequence
  Description of Artificial Sequence: Synthetic oligonucleotide
  Antisense strand to SEQ ID NO: 103520
acuccgacaaauuaugucg

SEQ ID NO: 103522 - RNA, 19 nt, Artificial Sequence
  Description of Artificial Sequence: Synthetic oligonucleotide
  Sense strand starting at position 1452 of SEQ ID NO: 1306
gacauaauuugucggaguu

SEQ ID NO: 103523 - RNA, 19 nt, Artificial Sequence
  Description of Artificial Sequence: Synthetic oligonucleotide
  Antisense strand to SEQ ID NO: 103522
aacuccgacaaauuauguc

SEQ ID NO: 103524 - RNA, 19 nt, Artificial Sequence
  Description of Artificial Sequence: Synthetic oligonucleotide
  Sense strand starting at position 1454 of SEQ ID NO: 1306
cauaauuugucggaguuuc

SEQ ID NO: 103525 - RNA, 19 nt, Artificial Sequence
  Description of Artificial Sequence: Synthetic oligonucleotide
  Antisense strand to SEQ ID NO: 103524
gaaacuccgacaaauuaug

SEQ ID NO: 103526 - RNA, 19 nt, Artificial Sequence
  Description of Artificial Sequence: Synthetic oligonucleotide
  Sense strand starting at position 1462 of SEQ ID NO: 1306
gucggaguuucgaagcaag

SEQ ID NO: 103527 - RNA, 19 nt, Artificial Sequence
  Description of Artificial Sequence: Synthetic oligonucleotide
  Antisense strand to SEQ ID NO: 103526
cuugcuucgaaacuccgac

SEQ ID NO: 103528 - RNA, 19 nt, Artificial Sequence
  Description of Artificial Sequence: Synthetic oligonucleotide
  Sense strand starting at position 1465 of SEQ ID NO: 1306
ggaguuucgaagcaaggua

SEQ ID NO: 103529 - RNA, 19 nt, Artificial Sequence
  Description of Artificial Sequence: Synthetic oligonucleotide
  Antisense strand to SEQ ID NO: 103528
uaccuugcuucgaaacucc

SEQ ID NO: 103530 - RNA, 19 nt, Artificial Sequence
  Description of Artificial Sequence: Synthetic oligonucleotide
  Sense strand starting at position 1470 of SEQ ID NO: 1306
uucgaagcaagguaugaaa

SEQ ID NO: 103531 - RNA, 19 nt, Artificial Sequence
  Description of Artificial Sequence: Synthetic oligonucleotide
  Antisense strand to SEQ ID NO: 103530
uuucauaccuugcuucgaa

SEQ ID NO: 103532 - RNA, 19 nt, Artificial Sequence
  Description of Artificial Sequence: Synthetic oligonucleotide
  Sense strand starting at position 2154 of SEQ ID NO: 1306
uggcuauucgcggacgaug

SEQ ID NO: 103533 - RNA, 19 nt, Artificial Sequence
  Description of Artificial Sequence: Synthetic oligonucleotide
  Antisense strand to SEQ ID NO: 103532
caucguccgcgaauagcca

SEQ ID NO: 103534 - RNA, 19 nt, Artificial Sequence
  Description of Artificial Sequence: Synthetic oligonucleotide
  Sense strand starting at position 2360 of SEQ ID NO: 1306
uggucgcaucggugugaaa

SEQ ID NO: 103535 - RNA, 19 nt, Artificial Sequence
  Description of Artificial Sequence: Synthetic oligonucleotide
  Antisense strand to SEQ ID NO: 103534
uuucacaccgaugcgacca

SEQ ID NO: 103536 - RNA, 19 nt, Artificial Sequence
  Description of Artificial Sequence: Synthetic oligonucleotide
  Sense strand starting at position 2602 of SEQ ID NO: 1306
cuggcuucugcugggauua

SEQ ID NO: 103537 - RNA, 19 nt, Artificial Sequence
  Description of Artificial Sequence: Synthetic oligonucleotide
  Antisense strand to SEQ ID NO: 103536
uaaucccagcagaagccag

SEQ ID NO: 103538 - RNA, 19 nt, Artificial Sequence
  Description of Artificial Sequence: Synthetic oligonucleotide
  Sense strand starting at position 2636 of SEQ ID NO: 1306
gcgccaugccuggaaauuc

SEQ ID NO: 103539 - RNA, 19 nt, Artificial Sequence
  Description of Artificial Sequence: Synthetic oligonucleotide
  Antisense strand to SEQ ID NO: 103538
gaauuuccaggcauggcgc

SEQ ID NO: 103540 - RNA, 19 nt, Artificial Sequence
  Description of Artificial Sequence: Synthetic oligonucleotide
  Sense strand starting at position 2646 of SEQ ID NO: 1306
uggaaauucucagcuucga

SEQ ID NO: 103541 - RNA, 19 nt, Artificial Sequence
  Description of Artificial Sequence: Synthetic oligonucleotide
  Antisense strand to SEQ ID NO: 103540
ucgaagcugagaauuucca

SEQ ID NO: 103542 - RNA, 19 nt, Artificial Sequence
  Description of Artificial Sequence: Synthetic oligonucleotide
  Sense strand starting at position 2655 of SEQ ID NO: 1306
ucagcuucgaaaugguaaa

SEQ ID NO: 103543 - RNA, 19 nt, Artificial Sequence
  Description of Artificial Sequence: Synthetic oligonucleotide
  Antisense strand to SEQ ID NO: 103542
uuuaccauuucgaagcuga

SEQ ID NO: 103544 - RNA, 19 nt, Artificial Sequence
  Description of Artificial Sequence: Synthetic oligonucleotide
  Sense strand starting at position 2662 of SEQ ID NO: 1306
cgaaaugguaaaugugauc

SEQ ID NO: 103545 - RNA, 19 nt, Artificial Sequence
  Description of Artificial Sequence: Synthetic oligonucleotide
  Antisense strand to SEQ ID NO: 103544
gaucacauuuaccauuucg

SEQ ID NO: 103546 - RNA, 19 nt, Artificial Sequence
  Description of Artificial Sequence: Synthetic oligonucleotide
  Sense strand starting at position 2667 of SEQ ID NO: 1306
ugguaaaugugaucgcugu

SEQ ID NO: 103547 - RNA, 19 nt, Artificial Sequence
  Description of Artificial Sequence: Synthetic oligonucleotide
  Antisense strand to SEQ ID NO: 103546
acagcgaucacauuuacca

SEQ ID NO: 103548 - RNA, 19 nt, Artificial Sequence
  Description of Artificial Sequence: Synthetic oligonucleotide
  Sense strand starting at position 2668 of SEQ ID NO: 1306
gguaaaugugaucgcugug

SEQ ID NO: 103549 - RNA, 19 nt, Artificial Sequence
  Description of Artificial Sequence: Synthetic oligonucleotide
  Antisense strand to SEQ ID NO: 103548
cacagcgaucacauuuacc

SEQ ID NO: 103550 - RNA, 19 nt, Artificial Sequence
  Description of Artificial Sequence: Synthetic oligonucleotide
  Sense strand starting at position 2671 of SEQ ID NO: 1306
aaaugugaucgcuguggug

SEQ ID NO: 103551 - RNA, 19 nt, Artificial Sequence
  Description of Artificial Sequence: Synthetic oligonucleotide
  Antisense strand to SEQ ID NO: 103550
caccacagcgaucacauuu

SEQ ID NO: 103552 - RNA, 19 nt, Artificial Sequence
  Description of Artificial Sequence: Synthetic oligonucleotide
  Sense strand starting at position 3029 of SEQ ID NO: 1306
gugugcaguuucuuuauaa

SEQ ID NO: 103553 - RNA, 19 nt, Artificial Sequence
  Description of Artificial Sequence: Synthetic oligonucleotide
  Antisense strand to SEQ ID NO: 103552
uuauaaagaaacugcacac

SEQ ID NO: 103554 - RNA, 19 nt, Artificial Sequence
  Description of Artificial Sequence: Synthetic oligonucleotide
  Sense strand starting at position 3030 of SEQ ID NO: 1306
ugugcaguuucuuuauaac

SEQ ID NO: 103555 - RNA, 19 nt, Artificial Sequence
  Description of Artificial Sequence: Synthetic oligonucleotide
  Antisense strand to SEQ ID NO: 103554
guuauaaagaaacugcaca

SEQ ID NO: 103556 - RNA, 19 nt, Artificial Sequence
  Description of Artificial Sequence: Synthetic oligonucleotide
  Sense strand starting at position 3079 of SEQ ID NO: 1306
auagaagaguuggaauaca

SEQ ID NO: 103557 - RNA, 19 nt, Artificial Sequence
  Description of Artificial Sequence: Synthetic oligonucleotide
  Antisense strand to SEQ ID NO: 103556
uguauuccaacucuucuau

SEQ ID NO: 103558 - RNA, 19 nt, Artificial Sequence
  Description of Artificial Sequence: Synthetic oligonucleotide
  Sense strand starting at position 3160 of SEQ ID NO: 1306
uuuguuuaauacucucgaa

SEQ ID NO: 103559 - RNA, 19 nt, Artificial Sequence
  Description of Artificial Sequence: Synthetic oligonucleotide
  Antisense strand to SEQ ID NO: 103558
uucgagaguauuaaacaaa

SEQ ID NO: 103560 - RNA, 19 nt, Artificial Sequence
  Description of Artificial Sequence: Synthetic oligonucleotide
  Sense strand starting at position 3289 of SEQ ID NO: 1306
acacuuugcuguguauuua

SEQ ID NO: 103561 - RNA, 19 nt, Artificial Sequence
  Description of Artificial Sequence: Synthetic oligonucleotide
  Antisense strand to SEQ ID NO: 103560
uaaauacacagcaaagugu

SEQ ID NO: 103562 - RNA, 19 nt, Artificial Sequence
  Description of Artificial Sequence: Synthetic oligonucleotide
  Sense strand starting at position 3300 of SEQ ID NO: 1306
uguauuuacucuuaggaac

SEQ ID NO: 103563 - RNA, 19 nt, Artificial Sequence
  Description of Artificial Sequence: Synthetic oligonucleotide
  Antisense strand to SEQ ID NO: 103562
guuccuaagaguaaauaca

SEQ ID NO: 103564 - RNA, 19 nt, Artificial Sequence
  Description of Artificial Sequence: Synthetic oligonucleotide
  Sense strand starting at position 8 of SEQ ID NO: 1307
aagguaggcaguuguaaau

SEQ ID NO: 103565 - RNA, 19 nt, Artificial Sequence
  Description of Artificial Sequence: Synthetic oligonucleotide
  Antisense strand to SEQ ID NO: 103564
auuuacaacugccuaccuu

SEQ ID NO: 103566 - RNA, 19 nt, Artificial Sequence
  Description of Artificial Sequence: Synthetic oligonucleotide
  Sense strand starting at position 17 of SEQ ID NO: 1307
aguuguaaaucagugaaau

SEQ ID NO: 103567 - RNA, 19 nt, Artificial Sequence
  Description of Artificial Sequence: Synthetic oligonucleotide
  Antisense strand to SEQ ID NO: 103566
auuucacugauuuacaacu

SEQ ID NO: 103568 - RNA, 19 nt, Artificial Sequence
  Description of Artificial Sequence: Synthetic oligonucleotide
  Sense strand starting at position 18 of SEQ ID NO: 1307
guuguaaaucagugaaaug

SEQ ID NO: 103569 - RNA, 19 nt, Artificial Sequence
  Description of Artificial Sequence: Synthetic oligonucleotide
  Antisense strand to SEQ ID NO: 103568
cauuucacugauuuacaac

SEQ ID NO: 103570 - RNA, 19 nt, Artificial Sequence
  Description of Artificial Sequence: Synthetic oligonucleotide
  Sense strand starting at position 99 of SEQ ID NO: 1307
auccucagauaggaaauaa

SEQ ID NO: 103571 - RNA, 19 nt, Artificial Sequence
  Description of Artificial Sequence: Synthetic oligonucleotide
  Antisense strand to SEQ ID NO: 103570
uuauuuccuaucugaggau

SEQ ID NO: 103572 - RNA, 19 nt, Artificial Sequence
  Description of Artificial Sequence: Synthetic oligonucleotide
  Sense strand starting at position 233 of SEQ ID NO: 1307
aauuaaugagguggugaau

SEQ ID NO: 103573 - RNA, 19 nt, Artificial Sequence
  Description of Artificial Sequence: Synthetic oligonucleotide
  Antisense strand to SEQ ID NO: 103572
auucaccaccucauuaauu

SEQ ID NO: 103574 - RNA, 19 nt, Artificial Sequence
  Description of Artificial Sequence: Synthetic oligonucleotide
  Sense strand starting at position 315 of SEQ ID NO: 1307
ugcuaagugcuuuccugua

SEQ ID NO: 103575 - RNA, 19 nt, Artificial Sequence
  Description of Artificial Sequence: Synthetic oligonucleotide
  Antisense strand to SEQ ID NO: 103574
uacaggaaagcacuuagca

SEQ ID NO: 103576 - RNA, 19 nt, Artificial Sequence
  Description of Artificial Sequence: Synthetic oligonucleotide
  Sense strand starting at position 990 of SEQ ID NO: 1307
caguuauauuuauggaaag

SEQ ID NO: 103577 - RNA, 19 nt, Artificial Sequence
  Description of Artificial Sequence: Synthetic oligonucleotide
  Antisense strand to SEQ ID NO: 103576
cuuuccauaaauauaacug

SEQ ID NO: 103578 - RNA, 19 nt, Artificial Sequence
  Description of Artificial Sequence: Synthetic oligonucleotide
  Sense strand starting at position 1056 of SEQ ID NO: 1307
gaggucuguuaauuccauu

SEQ ID NO: 103579 - RNA, 19 nt, Artificial Sequence
  Description of Artificial Sequence: Synthetic oligonucleotide
  Antisense strand to SEQ ID NO: 103578
aauggaauuaacagaccuc

SEQ ID NO: 103580 - RNA, 19 nt, Artificial Sequence
  Description of Artificial Sequence: Synthetic oligonucleotide
  Sense strand starting at position 1127 of SEQ ID NO: 1307
guauuaacgguuuaucuga

SEQ ID NO: 103581 - RNA, 19 nt, Artificial Sequence
  Description of Artificial Sequence: Synthetic oligonucleotide
  Antisense strand to SEQ ID NO: 103580
ucagauaaaccguuaauac

SEQ ID NO: 103582 - RNA, 19 nt, Artificial Sequence
  Description of Artificial Sequence: Synthetic oligonucleotide
  Sense strand starting at position 1135 of SEQ ID NO: 1307
gguuuaucugaacagugag

SEQ ID NO: 103583 - RNA, 19 nt, Artificial Sequence
  Description of Artificial Sequence: Synthetic oligonucleotide
  Antisense strand to SEQ ID NO: 103582
cucacuguucagauaaacc

SEQ ID NO: 103584 - RNA, 19 nt, Artificial Sequence
  Description of Artificial Sequence: Synthetic oligonucleotide
  Sense strand starting at position 1314 of SEQ ID NO: 1307
ggacuacuauaugacaaac

SEQ ID NO: 103585 - RNA, 19 nt, Artificial Sequence
  Description of Artificial Sequence: Synthetic oligonucleotide
  Antisense strand to SEQ ID NO: 103584
guuugucauauaguagucc

SEQ ID NO: 103586 - RNA, 19 nt, Artificial Sequence
  Description of Artificial Sequence: Synthetic oligonucleotide
  Sense strand starting at position 1369 of SEQ ID NO: 1307
cacauugcccagugaggaa

SEQ ID NO: 103587 - RNA, 19 nt, Artificial Sequence
  Description of Artificial Sequence: Synthetic oligonucleotide
  Antisense strand to SEQ ID NO: 103586
uuccucacugggcaaugug

SEQ ID NO: 103588 - RNA, 19 nt, Artificial Sequence
  Description of Artificial Sequence: Synthetic oligonucleotide
  Sense strand starting at position 1548 of SEQ ID NO: 1307
ucagucaauccaggucuga

SEQ ID NO: 103589 - RNA, 19 nt, Artificial Sequence
  Description of Artificial Sequence: Synthetic oligonucleotide
  Antisense strand to SEQ ID NO: 103588
ucagaccuggauugacuga

SEQ ID NO: 103590 - RNA, 19 nt, Artificial Sequence
  Description of Artificial Sequence: Synthetic oligonucleotide
  Sense strand starting at position 1598 of SEQ ID NO: 1307
ccgagauccuucccuucuu

SEQ ID NO: 103591 - RNA, 19 nt, Artificial Sequence
  Description of Artificial Sequence: Synthetic oligonucleotide
  Antisense strand to SEQ ID NO: 103590
aagaagggaaggaucucgg

SEQ ID NO: 103592 - RNA, 19 nt, Artificial Sequence
  Description of Artificial Sequence: Synthetic oligonucleotide
  Sense strand starting at position 1805 of SEQ ID NO: 1307
ccaaacuuccggugcaaau

SEQ ID NO: 103593 - RNA, 19 nt, Artificial Sequence
  Description of Artificial Sequence: Synthetic oligonucleotide
  Antisense strand to SEQ ID NO: 103592
auuugcaccggaaguuugg

SEQ ID NO: 103594 - RNA, 19 nt, Artificial Sequence
  Description of Artificial Sequence: Synthetic oligonucleotide
  Sense strand starting at position 2002 of SEQ ID NO: 1307
ggaguuguaguccaagugu

SEQ ID NO: 103595 - RNA, 19 nt, Artificial Sequence
  Description of Artificial Sequence: Synthetic oligonucleotide
  Antisense strand to SEQ ID NO: 103594
acacuuggacuacaacucc

SEQ ID NO: 103596 - RNA, 19 nt, Artificial Sequence
  Description of Artificial Sequence: Synthetic oligonucleotide
  Sense strand starting at position 2068 of SEQ ID NO: 1307
uguaguccgccgcuagaaa

SEQ ID NO: 103597 - RNA, 19 nt, Artificial Sequence
  Description of Artificial Sequence: Synthetic oligonucleotide
  Antisense strand to SEQ ID NO: 103596
uuucuagcggcggacuaca

SEQ ID NO: 103598 - RNA, 19 nt, Artificial Sequence
  Description of Artificial Sequence: Synthetic oligonucleotide
  Sense strand starting at position 2143 of SEQ ID NO: 1307
gaagcaugucgggaaucga

SEQ ID NO: 103599 - RNA, 19 nt, Artificial Sequence
  Description of Artificial Sequence: Synthetic oligonucleotide
  Antisense strand to SEQ ID NO: 103598
ucgauucccgacaugcuuc

SEQ ID NO: 103600 - RNA, 19 nt, Artificial Sequence
  Description of Artificial Sequence: Synthetic oligonucleotide
  Sense strand starting at position 2425 of SEQ ID NO: 1307
gcuaguagccgaucuaguu

SEQ ID NO: 103601 - RNA, 19 nt, Artificial Sequence
  Description of Artificial Sequence: Synthetic oligonucleotide
  Antisense strand to SEQ ID NO: 103600
aacuagaucggcuacuagc

SEQ ID NO: 103602 - RNA, 19 nt, Artificial Sequence
  Description of Artificial Sequence: Synthetic oligonucleotide
  Sense strand starting at position 2583 of SEQ ID NO: 1307
uagcauuagcaaggagaaa

SEQ ID NO: 103603 - RNA, 19 nt, Artificial Sequence
  Description of Artificial Sequence: Synthetic oligonucleotide
  Antisense strand to SEQ ID NO: 103602
uuucuccuugcuaaugcua

SEQ ID NO: 103604 - RNA, 19 nt, Artificial Sequence
  Description of Artificial Sequence: Synthetic oligonucleotide
  Sense strand starting at position 2596 of SEQ ID NO: 1307
gagaaaggguuauccuauu

SEQ ID NO: 103605 - RNA, 19 nt, Artificial Sequence
  Description of Artificial Sequence: Synthetic oligonucleotide
  Antisense strand to SEQ ID NO: 103604
aauaggauaacccuuucuc

SEQ ID NO: 103606 - RNA, 19 nt, Artificial Sequence
  Description of Artificial Sequence: Synthetic oligonucleotide
  Sense strand starting at position 2602 of SEQ ID NO: 1307
ggguuauccuauuauuuga

SEQ ID NO: 103607 - RNA, 19 nt, Artificial Sequence
  Description of Artificial Sequence: Synthetic oligonucleotide
  Antisense strand to SEQ ID NO: 103606
ucaaauaauaggauaaccc

SEQ ID NO: 103608 - RNA, 19 nt, Artificial Sequence
  Description of Artificial Sequence: Synthetic oligonucleotide
  Sense strand starting at position 2632 of SEQ ID NO: 1307
gggucaaauuguuuauaca

SEQ ID NO: 103609 - RNA, 19 nt, Artificial Sequence
  Description of Artificial Sequence: Synthetic oligonucleotide
  Antisense strand to SEQ ID NO: 103608
uguauaaacaauuugaccc

SEQ ID NO: 103610 - RNA, 19 nt, Artificial Sequence
  Description of Artificial Sequence: Synthetic oligonucleotide
  Sense strand starting at position 2633 of SEQ ID NO: 1307
ggucaaauuguuuauacaa

SEQ ID NO: 103611 - RNA, 19 nt, Artificial Sequence
  Description of Artificial Sequence: Synthetic oligonucleotide
  Antisense strand to SEQ ID NO: 103610
uuguauaaacaauuugacc

SEQ ID NO: 103612 - RNA, 19 nt, Artificial Sequence
  Description of Artificial Sequence: Synthetic oligonucleotide
  Sense strand starting at position 2789 of SEQ ID NO: 1307
gaaugaauggugugguuua

SEQ ID NO: 103613 - RNA, 19 nt, Artificial Sequence
  Description of Artificial Sequence: Synthetic oligonucleotide
  Antisense strand to SEQ ID NO: 103612
uaaaccacaccauucauuc

SEQ ID NO: 103614 - RNA, 19 nt, Artificial Sequence
  Description of Artificial Sequence: Synthetic oligonucleotide
  Sense strand starting at position 2794 of SEQ ID NO: 1307
aauggugugguuuauucua

SEQ ID NO: 103615 - RNA, 19 nt, Artificial Sequence
  Description of Artificial Sequence: Synthetic oligonucleotide
  Antisense strand to SEQ ID NO: 103614
uagaauaaaccacaccauu

SEQ ID NO: 103616 - RNA, 19 nt, Artificial Sequence
  Description of Artificial Sequence: Synthetic oligonucleotide
  Sense strand starting at position 2801 of SEQ ID NO: 1307
ugguuuauucuacgacucu

SEQ ID NO: 103617 - RNA, 19 nt, Artificial Sequence
  Description of Artificial Sequence: Synthetic oligonucleotide
  Antisense strand to SEQ ID NO: 103616
agagucguagaauaaacca

SEQ ID NO: 103618 - RNA, 19 nt, Artificial Sequence
  Description of Artificial Sequence: Synthetic oligonucleotide
  Sense strand starting at position 2897 of SEQ ID NO: 1307
ggaaaucauuugcauucca

SEQ ID NO: 103619 - RNA, 19 nt, Artificial Sequence
  Description of Artificial Sequence: Synthetic oligonucleotide
  Antisense strand to SEQ ID NO: 103618
uggaaugcaaaugauuucc

SEQ ID NO: 103620 - RNA, 19 nt, Artificial Sequence
  Description of Artificial Sequence: Synthetic oligonucleotide
  Sense strand starting at position 2976 of SEQ ID NO: 1307
uauaguaaucaacggguuu

SEQ ID NO: 103621 - RNA, 19 nt, Artificial Sequence
  Description of Artificial Sequence: Synthetic oligonucleotide
  Antisense strand to SEQ ID NO: 103620
aaacccguugauuacuaua

SEQ ID NO: 103622 - RNA, 19 nt, Artificial Sequence
  Description of Artificial Sequence: Synthetic oligonucleotide
  Sense strand starting at position 3172 of SEQ ID NO: 1307
cucucaguggguuacaaau

SEQ ID NO: 103623 - RNA, 19 nt, Artificial Sequence
  Description of Artificial Sequence: Synthetic oligonucleotide
  Antisense strand to SEQ ID NO: 103622
auuuguaacccacugagag

SEQ ID NO: 103624 - RNA, 19 nt, Artificial Sequence
  Description of Artificial Sequence: Synthetic oligonucleotide
  Sense strand starting at position 3315 of SEQ ID NO: 1307
cccagugcaccucagaaau

SEQ ID NO: 103625 - RNA, 19 nt, Artificial Sequence
  Description of Artificial Sequence: Synthetic oligonucleotide
  Antisense strand to SEQ ID NO: 103624
auuucugaggugcacuggg

SEQ ID NO: 103626 - RNA, 19 nt, Artificial Sequence
  Description of Artificial Sequence: Synthetic oligonucleotide
  Sense strand starting at position 3447 of SEQ ID NO: 1307
uuccuuuaugucuggguga

SEQ ID NO: 103627 - RNA, 19 nt, Artificial Sequence
  Description of Artificial Sequence: Synthetic oligonucleotide
  Antisense strand to SEQ ID NO: 103626
ucacccagacauaaaggaa

SEQ ID NO: 103628 - RNA, 19 nt, Artificial Sequence
  Description of Artificial Sequence: Synthetic oligonucleotide
  Sense strand starting at position 3449 of SEQ ID NO: 1307
ccuuuaugucugggugaua

SEQ ID NO: 103629 - RNA, 19 nt, Artificial Sequence
  Description of Artificial Sequence: Synthetic oligonucleotide
  Antisense strand to SEQ ID NO: 103628
uaucacccagacauaaagg

SEQ ID NO: 103630 - RNA, 19 nt, Artificial Sequence
  Description of Artificial Sequence: Synthetic oligonucleotide
  Sense strand starting at position 3450 of SEQ ID NO: 1307
cuuuaugucugggugauau

SEQ ID NO: 103631 - RNA, 19 nt, Artificial Sequence
  Description of Artificial Sequence: Synthetic oligonucleotide
  Antisense strand to SEQ ID NO: 103630
auaucacccagacauaaag

SEQ ID NO: 103632 - RNA, 19 nt, Artificial Sequence
  Description of Artificial Sequence: Synthetic oligonucleotide
  Sense strand starting at position 3452 of SEQ ID NO: 1307
uuaugucugggugauauau

SEQ ID NO: 103633 - RNA, 19 nt, Artificial Sequence
  Description of Artificial Sequence: Synthetic oligonucleotide
  Antisense strand to SEQ ID NO: 103632
auauaucacccagacauaa

SEQ ID NO: 103634 - RNA, 19 nt, Artificial Sequence
  Description of Artificial Sequence: Synthetic oligonucleotide
  Sense strand starting at position 3519 of SEQ ID NO: 1307
cuaggagucuucccaagca

SEQ ID NO: 103635 - RNA, 19 nt, Artificial Sequence
  Description of Artificial Sequence: Synthetic oligonucleotide
  Antisense strand to SEQ ID NO: 103634
ugcuugggaagacuccuag

SEQ ID NO: 103636 - RNA, 19 nt, Artificial Sequence
  Description of Artificial Sequence: Synthetic oligonucleotide
  Sense strand starting at position 3714 of SEQ ID NO: 1307
gguguugucaaucaucaag

SEQ ID NO: 103637 - RNA, 19 nt, Artificial Sequence
  Description of Artificial Sequence: Synthetic oligonucleotide
  Antisense strand to SEQ ID NO: 103636
cuugaugauugacaacacc

SEQ ID NO: 103638 - RNA, 19 nt, Artificial Sequence
  Description of Artificial Sequence: Synthetic oligonucleotide
  Sense strand starting at position 3717 of SEQ ID NO: 1307
guugucaaucaucaaggau

SEQ ID NO: 103639 - RNA, 19 nt, Artificial Sequence
  Description of Artificial Sequence: Synthetic oligonucleotide
  Antisense strand to SEQ ID NO: 103638
auccuugaugauugacaac

SEQ ID NO: 103640 - RNA, 19 nt, Artificial Sequence
  Description of Artificial Sequence: Synthetic oligonucleotide
  Sense strand starting at position 3793 of SEQ ID NO: 1307
ugggauaauagguguagca

SEQ ID NO: 103641 - RNA, 19 nt, Artificial Sequence
  Description of Artificial Sequence: Synthetic oligonucleotide
  Antisense strand to SEQ ID NO: 103640
ugcuacaccuauuauccca

SEQ ID NO: 103642 - RNA, 19 nt, Artificial Sequence
  Description of Artificial Sequence: Synthetic oligonucleotide
  Sense strand starting at position 3955 of SEQ ID NO: 1307
ccagaaugccuaggagagu

SEQ ID NO: 103643 - RNA, 19 nt, Artificial Sequence
  Description of Artificial Sequence: Synthetic oligonucleotide
  Antisense strand to SEQ ID NO: 103642
acucuccuaggcauucugg

SEQ ID NO: 103644 - RNA, 19 nt, Artificial Sequence
  Description of Artificial Sequence: Synthetic oligonucleotide
  Sense strand starting at position 3939 of SEQ ID NO: 1308
ccuuguagucuaugaggcu

SEQ ID NO: 103645 - RNA, 19 nt, Artificial Sequence
  Description of Artificial Sequence: Synthetic oligonucleotide
  Antisense strand to SEQ ID NO: 103644
agccucauagacuacaagg

SEQ ID NO: 103646 - RNA, 19 nt, Artificial Sequence
  Description of Artificial Sequence: Synthetic oligonucleotide
  Sense strand starting at position 3917 of SEQ ID NO: 1308
aaugaauuggguugaucua

SEQ ID NO: 103647 - RNA, 19 nt, Artificial Sequence
  Description of Artificial Sequence: Synthetic oligonucleotide
  Antisense strand to SEQ ID NO: 103646
uagaucaacccaauucauu

SEQ ID NO: 103648 - RNA, 19 nt, Artificial Sequence
  Description of Artificial Sequence: Synthetic oligonucleotide
  Sense strand starting at position 3896 of SEQ ID NO: 1308
ugguccauagcaugcaaua

SEQ ID NO: 103649 - RNA, 19 nt, Artificial Sequence
  Description of Artificial Sequence: Synthetic oligonucleotide
  Antisense strand to SEQ ID NO: 103648
uauugcaugcuauggacca

SEQ ID NO: 103650 - RNA, 19 nt, Artificial Sequence
  Description of Artificial Sequence: Synthetic oligonucleotide
  Sense strand starting at position 3432 of SEQ ID NO: 1308
ucacuugggccucggagau

SEQ ID NO: 103651 - RNA, 19 nt, Artificial Sequence
  Description of Artificial Sequence: Synthetic oligonucleotide
  Antisense strand to SEQ ID NO: 103650
aucuccgaggcccaaguga

SEQ ID NO: 103652 - RNA, 19 nt, Artificial Sequence
  Description of Artificial Sequence: Synthetic oligonucleotide
  Sense strand starting at position 3383 of SEQ ID NO: 1308
auggcacgcaccuauagau

SEQ ID NO: 103653 - RNA, 19 nt, Artificial Sequence
  Description of Artificial Sequence: Synthetic oligonucleotide
  Antisense strand to SEQ ID NO: 103652
aucuauaggugcgugccau

SEQ ID NO: 103654 - RNA, 19 nt, Artificial Sequence
  Description of Artificial Sequence: Synthetic oligonucleotide
  Sense strand starting at position 3077 of SEQ ID NO: 1308
ugucaaggccuggauuaaa

SEQ ID NO: 103655 - RNA, 19 nt, Artificial Sequence
  Description of Artificial Sequence: Synthetic oligonucleotide
  Antisense strand to SEQ ID NO: 103654
uuuaauccaggccuugaca

SEQ ID NO: 103656 - RNA, 19 nt, Artificial Sequence
  Description of Artificial Sequence: Synthetic oligonucleotide
  Sense strand starting at position 3076 of SEQ ID NO: 1308
gugucaaggccuggauuaa

SEQ ID NO: 103657 - RNA, 19 nt, Artificial Sequence
  Description of Artificial Sequence: Synthetic oligonucleotide
  Antisense strand to SEQ ID NO: 103656
uuaauccaggccuugacac

SEQ ID NO: 103658 - RNA, 19 nt, Artificial Sequence
  Description of Artificial Sequence: Synthetic oligonucleotide
  Sense strand starting at position 3075 of SEQ ID NO: 1308
ugugucaaggccuggauua

SEQ ID NO: 103659 - RNA, 19 nt, Artificial Sequence
  Description of Artificial Sequence: Synthetic oligonucleotide
  Antisense strand to SEQ ID NO: 103658
uaauccaggccuugacaca

SEQ ID NO: 103660 - RNA, 19 nt, Artificial Sequence
  Description of Artificial Sequence: Synthetic oligonucleotide
  Sense strand starting at position 2957 of SEQ ID NO: 1308
caaauagagugccuuauag

SEQ ID NO: 103661 - RNA, 19 nt, Artificial Sequence
  Description of Artificial Sequence: Synthetic oligonucleotide
  Antisense strand to SEQ ID NO: 103660
cuauaaggcacucuauuug

SEQ ID NO: 103662 - RNA, 19 nt, Artificial Sequence
  Description of Artificial Sequence: Synthetic oligonucleotide
  Sense strand starting at position 2941 of SEQ ID NO: 1308
gcguguauaacagaaacaa

SEQ ID NO: 103663 - RNA, 19 nt, Artificial Sequence
  Description of Artificial Sequence: Synthetic oligonucleotide
  Antisense strand to SEQ ID NO: 103662
uuguuucuguuauacacgc

SEQ ID NO: 103664 - RNA, 19 nt, Artificial Sequence
  Description of Artificial Sequence: Synthetic oligonucleotide
  Sense strand starting at position 2934 of SEQ ID NO: 1308
agugaaugcguguauaaca

SEQ ID NO: 103665 - RNA, 19 nt, Artificial Sequence
  Description of Artificial Sequence: Synthetic oligonucleotide
  Antisense strand to SEQ ID NO: 103664
uguuauacacgcauucacu

SEQ ID NO: 103666 - RNA, 19 nt, Artificial Sequence
  Description of Artificial Sequence: Synthetic oligonucleotide
  Sense strand starting at position 2929 of SEQ ID NO: 1308
uguuuagugaaugcgugua

SEQ ID NO: 103667 - RNA, 19 nt, Artificial Sequence
  Description of Artificial Sequence: Synthetic oligonucleotide
  Antisense strand to SEQ ID NO: 103666
uacacgcauucacuaaaca

SEQ ID NO: 103668 - RNA, 19 nt, Artificial Sequence
  Description of Artificial Sequence: Synthetic oligonucleotide
  Sense strand starting at position 2717 of SEQ ID NO: 1308
auaagucaacugcgauaca

SEQ ID NO: 103669 - RNA, 19 nt, Artificial Sequence
  Description of Artificial Sequence: Synthetic oligonucleotide
  Antisense strand to SEQ ID NO: 103668
uguaucgcaguugacuuau

SEQ ID NO: 103670 - RNA, 19 nt, Artificial Sequence
  Description of Artificial Sequence: Synthetic oligonucleotide
  Sense strand starting at position 2624 of SEQ ID NO: 1308
ccgguuggcauugguaaau

SEQ ID NO: 103671 - RNA, 19 nt, Artificial Sequence
  Description of Artificial Sequence: Synthetic oligonucleotide
  Antisense strand to SEQ ID NO: 103670
auuuaccaaugccaaccgg

SEQ ID NO: 103672 - RNA, 19 nt, Artificial Sequence
  Description of Artificial Sequence: Synthetic oligonucleotide
  Sense strand starting at position 2623 of SEQ ID NO: 1308
cccgguuggcauugguaaa

SEQ ID NO: 103673 - RNA, 19 nt, Artificial Sequence
  Description of Artificial Sequence: Synthetic oligonucleotide
  Antisense strand to SEQ ID NO: 103672
uuuaccaaugccaaccggg

SEQ ID NO: 103674 - RNA, 19 nt, Artificial Sequence
  Description of Artificial Sequence: Synthetic oligonucleotide
  Sense strand starting at position 2331 of SEQ ID NO: 1308
gauagaaaugccuaagcug

SEQ ID NO: 103675 - RNA, 19 nt, Artificial Sequence
  Description of Artificial Sequence: Synthetic oligonucleotide
  Antisense strand to SEQ ID NO: 103674
cagcuuaggcauuucuauc

SEQ ID NO: 103676 - RNA, 19 nt, Artificial Sequence
  Description of Artificial Sequence: Synthetic oligonucleotide
  Sense strand starting at position 2212 of SEQ ID NO: 1308
ggagaaucgcuccaggacu

SEQ ID NO: 103677 - RNA, 19 nt, Artificial Sequence
  Description of Artificial Sequence: Synthetic oligonucleotide
  Antisense strand to SEQ ID NO: 103676
aguccuggagcgauucucc

SEQ ID NO: 103678 - RNA, 19 nt, Artificial Sequence
  Description of Artificial Sequence: Synthetic oligonucleotide
  Sense strand starting at position 2103 of SEQ ID NO: 1308
auaggugauaccugcuaag

SEQ ID NO: 103679 - RNA, 19 nt, Artificial Sequence
  Description of Artificial Sequence: Synthetic oligonucleotide
  Antisense strand to SEQ ID NO: 103678
cuuagcagguaucaccuau

SEQ ID NO: 103680 - RNA, 19 nt, Artificial Sequence
  Description of Artificial Sequence: Synthetic oligonucleotide
  Sense strand starting at position 2056 of SEQ ID NO: 1308
aggauauucuugucuugca

SEQ ID NO: 103681 - RNA, 19 nt, Artificial Sequence
  Description of Artificial Sequence: Synthetic oligonucleotide
  Antisense strand to SEQ ID NO: 103680
ugcaagacaagaauauccu

SEQ ID NO: 103682 - RNA, 19 nt, Artificial Sequence
  Description of Artificial Sequence: Synthetic oligonucleotide
  Sense strand starting at position 1206 of SEQ ID NO: 1308
aguuaaucuccagaauguc

SEQ ID NO: 103683 - RNA, 19 nt, Artificial Sequence
  Description of Artificial Sequence: Synthetic oligonucleotide
  Antisense strand to SEQ ID NO: 103682
gacauucuggagauuaacu

SEQ ID NO: 103684 - RNA, 19 nt, Artificial Sequence
  Description of Artificial Sequence: Synthetic oligonucleotide
  Sense strand starting at position 1158 of SEQ ID NO: 1308
uccugcugucuccacuaua

SEQ ID NO: 103685 - RNA, 19 nt, Artificial Sequence
  Description of Artificial Sequence: Synthetic oligonucleotide
  Antisense strand to SEQ ID NO: 103684
uauaguggagacagcagga

SEQ ID NO: 103686 - RNA, 19 nt, Artificial Sequence
  Description of Artificial Sequence: Synthetic oligonucleotide
  Sense strand starting at position 1135 of SEQ ID NO: 1308
gugacaggccuggagauua

SEQ ID NO: 103687 - RNA, 19 nt, Artificial Sequence
  Description of Artificial Sequence: Synthetic oligonucleotide
  Antisense strand to SEQ ID NO: 103686
uaaucuccaggccugucac

SEQ ID NO: 103688 - RNA, 19 nt, Artificial Sequence
  Description of Artificial Sequence: Synthetic oligonucleotide
  Sense strand starting at position 1134 of SEQ ID NO: 1308
ggugacaggccuggagauu

SEQ ID NO: 103689 - RNA, 19 nt, Artificial Sequence
  Description of Artificial Sequence: Synthetic oligonucleotide
  Antisense strand to SEQ ID NO: 103688
aaucuccaggccugucacc

SEQ ID NO: 103690 - RNA, 19 nt, Artificial Sequence
  Description of Artificial Sequence: Synthetic oligonucleotide
  Sense strand starting at position 1113 of SEQ ID NO: 1308
ggaguagucaugggcuuaa

SEQ ID NO: 103691 - RNA, 19 nt, Artificial Sequence
  Description of Artificial Sequence: Synthetic oligonucleotide
  Antisense strand to SEQ ID NO: 103690
uuaagcccaugacuacucc

SEQ ID NO: 103692 - RNA, 19 nt, Artificial Sequence
  Description of Artificial Sequence: Synthetic oligonucleotide
  Sense strand starting at position 1112 of SEQ ID NO: 1308
aggaguagucaugggcuua

SEQ ID NO: 103693 - RNA, 19 nt, Artificial Sequence
  Description of Artificial Sequence: Synthetic oligonucleotide
  Antisense strand to SEQ ID NO: 103692
uaagcccaugacuacuccu

SEQ ID NO: 103694 - RNA, 19 nt, Artificial Sequence
  Description of Artificial Sequence: Synthetic oligonucleotide
  Sense strand starting at position 1043 of SEQ ID NO: 1308
gguacuguucuagauagac

SEQ ID NO: 103695 - RNA, 19 nt, Artificial Sequence
  Description of Artificial Sequence: Synthetic oligonucleotide
  Antisense strand to SEQ ID NO: 103694
gucuaucuagaacaguacc

SEQ ID NO: 103696 - RNA, 19 nt, Artificial Sequence
  Description of Artificial Sequence: Synthetic oligonucleotide
  Sense strand starting at position 741 of SEQ ID NO: 1308
ggacacuggaaguguuuaa

SEQ ID NO: 103697 - RNA, 19 nt, Artificial Sequence
  Description of Artificial Sequence: Synthetic oligonucleotide
  Antisense strand to SEQ ID NO: 103696
uuaaacacuuccagugucc

SEQ ID NO: 103698 - RNA, 19 nt, Artificial Sequence
  Description of Artificial Sequence: Synthetic oligonucleotide
  Sense strand starting at position 715 of SEQ ID NO: 1308
gugagauccuucccacuac

SEQ ID NO: 103699 - RNA, 19 nt, Artificial Sequence
  Description of Artificial Sequence: Synthetic oligonucleotide
  Antisense strand to SEQ ID NO: 103698
guagugggaaggaucucac

SEQ ID NO: 103700 - RNA, 19 nt, Artificial Sequence
  Description of Artificial Sequence: Synthetic oligonucleotide
  Sense strand starting at position 679 of SEQ ID NO: 1308
uauuguuaccagggucacu

SEQ ID NO: 103701 - RNA, 19 nt, Artificial Sequence
  Description of Artificial Sequence: Synthetic oligonucleotide
  Antisense strand to SEQ ID NO: 103700
agugacccugguaacaaua

SEQ ID NO: 103702 - RNA, 19 nt, Artificial Sequence
  Description of Artificial Sequence: Synthetic oligonucleotide
  Sense strand starting at position 623 of SEQ ID NO: 1308
ggcaaacgaauguaaucuu

SEQ ID NO: 103703 - RNA, 19 nt, Artificial Sequence
  Description of Artificial Sequence: Synthetic oligonucleotide
  Antisense strand to SEQ ID NO: 103702
aagauuacauucguuugcc

SEQ ID NO: 103704 - RNA, 19 nt, Artificial Sequence
  Description of Artificial Sequence: Synthetic oligonucleotide
  Sense strand starting at position 536 of SEQ ID NO: 1308
cccuguauccugcagaguu

SEQ ID NO: 103705 - RNA, 19 nt, Artificial Sequence
  Description of Artificial Sequence: Synthetic oligonucleotide
  Antisense strand to SEQ ID NO: 103704
aacucugcaggauacaggg

SEQ ID NO: 103706 - RNA, 19 nt, Artificial Sequence
  Description of Artificial Sequence: Synthetic oligonucleotide
  Sense strand starting at position 480 of SEQ ID NO: 1308
guaugucuacccuaaagaa

SEQ ID NO: 103707 - RNA, 19 nt, Artificial Sequence
  Description of Artificial Sequence: Synthetic oligonucleotide
  Antisense strand to SEQ ID NO: 103706
uucuuuaggguagacauac

SEQ ID NO: 103708 - RNA, 19 nt, Artificial Sequence
  Description of Artificial Sequence: Synthetic oligonucleotide
  Sense strand starting at position 478 of SEQ ID NO: 1308
gaguaugucuacccuaaag

SEQ ID NO: 103709 - RNA, 19 nt, Artificial Sequence
  Description of Artificial Sequence: Synthetic oligonucleotide
  Antisense strand to SEQ ID NO: 103708
cuuuaggguagacauacuc

SEQ ID NO: 103710 - RNA, 19 nt, Artificial Sequence
  Description of Artificial Sequence: Synthetic oligonucleotide
  Sense strand starting at position 469 of SEQ ID NO: 1308
ggagaaucugaguaugucu

SEQ ID NO: 103711 - RNA, 19 nt, Artificial Sequence
  Description of Artificial Sequence: Synthetic oligonucleotide
  Antisense strand to SEQ ID NO: 103710
agacauacucagauucucc

SEQ ID NO: 103712 - RNA, 19 nt, Artificial Sequence
  Description of Artificial Sequence: Synthetic oligonucleotide
  Sense strand starting at position 468 of SEQ ID NO: 1308
aggagaaucugaguauguc

SEQ ID NO: 103713 - RNA, 19 nt, Artificial Sequence
  Description of Artificial Sequence: Synthetic oligonucleotide
  Antisense strand to SEQ ID NO: 103712
gacauacucagauucuccu

SEQ ID NO: 103714 - RNA, 19 nt, Artificial Sequence
  Description of Artificial Sequence: Synthetic oligonucleotide
  Sense strand starting at position 466 of SEQ ID NO: 1308
ggaggagaaucugaguaug

SEQ ID NO: 103715 - RNA, 19 nt, Artificial Sequence
  Description of Artificial Sequence: Synthetic oligonucleotide
  Antisense strand to SEQ ID NO: 103714
cauacucagauucuccucc

SEQ ID NO: 103716 - RNA, 19 nt, Artificial Sequence
  Description of Artificial Sequence: Synthetic oligonucleotide
  Sense strand starting at position 437 of SEQ ID NO: 1308
acucacauacuuuguaagu

SEQ ID NO: 103717 - RNA, 19 nt, Artificial Sequence
  Description of Artificial Sequence: Synthetic oligonucleotide
  Antisense strand to SEQ ID NO: 103716
acuuacaaaguaugugagu

SEQ ID NO: 103718 - RNA, 19 nt, Artificial Sequence
  Description of Artificial Sequence: Synthetic oligonucleotide
  Sense strand starting at position 373 of SEQ ID NO: 1308
cugcaaguuagaugggauu

SEQ ID NO: 103719 - RNA, 19 nt, Artificial Sequence
  Description of Artificial Sequence: Synthetic oligonucleotide
  Antisense strand to SEQ ID NO: 103718
aaucccaucuaacuugcag

SEQ ID NO: 103720 - RNA, 19 nt, Artificial Sequence
  Description of Artificial Sequence: Synthetic oligonucleotide
  Sense strand starting at position 364 of SEQ ID NO: 1308
gagcuuuaccugcaaguua

SEQ ID NO: 103721 - RNA, 19 nt, Artificial Sequence
  Description of Artificial Sequence: Synthetic oligonucleotide
  Antisense strand to SEQ ID NO: 103720
uaacuugcagguaaagcuc

SEQ ID NO: 103722 - RNA, 19 nt, Artificial Sequence
  Description of Artificial Sequence: Synthetic oligonucleotide
  Sense strand starting at position 362 of SEQ ID NO: 1308
aggagcuuuaccugcaagu

SEQ ID NO: 103723 - RNA, 19 nt, Artificial Sequence
  Description of Artificial Sequence: Synthetic oligonucleotide
  Antisense strand to SEQ ID NO: 103722
acuugcagguaaagcuccu

SEQ ID NO: 103724 - RNA, 19 nt, Artificial Sequence
  Description of Artificial Sequence: Synthetic oligonucleotide
  Sense strand starting at position 232 of SEQ ID NO: 1309
acuccugucaugugguaca

SEQ ID NO: 103725 - RNA, 19 nt, Artificial Sequence
  Description of Artificial Sequence: Synthetic oligonucleotide
  Antisense strand to SEQ ID NO: 103724
uguaccacaugacaggagu

SEQ ID NO: 103726 - RNA, 19 nt, Artificial Sequence
  Description of Artificial Sequence: Synthetic oligonucleotide
  Sense strand starting at position 427 of SEQ ID NO: 1309
gguagagucgugcauaagc

SEQ ID NO: 103727 - RNA, 19 nt, Artificial Sequence
  Description of Artificial Sequence: Synthetic oligonucleotide
  Antisense strand to SEQ ID NO: 103726
gcuuaugcacgacucuacc

SEQ ID NO: 103728 - RNA, 19 nt, Artificial Sequence
  Description of Artificial Sequence: Synthetic oligonucleotide
  Sense strand starting at position 845 of SEQ ID NO: 1309
cgguuuccugcugaagaga

SEQ ID NO: 103729 - RNA, 19 nt, Artificial Sequence
  Description of Artificial Sequence: Synthetic oligonucleotide
  Antisense strand to SEQ ID NO: 103728
ucucuucagcaggaaaccg

SEQ ID NO: 103730 - RNA, 19 nt, Artificial Sequence
  Description of Artificial Sequence: Synthetic oligonucleotide
  Sense strand starting at position 1183 of SEQ ID NO: 1309
gcagaaguuggucacuacu

SEQ ID NO: 103731 - RNA, 19 nt, Artificial Sequence
  Description of Artificial Sequence: Synthetic oligonucleotide
  Antisense strand to SEQ ID NO: 103730
aguagugaccaacuucugc

SEQ ID NO: 103732 - RNA, 19 nt, Artificial Sequence
  Description of Artificial Sequence: Synthetic oligonucleotide
  Sense strand starting at position 1189 of SEQ ID NO: 1309
guuggucacuacucccaaa

SEQ ID NO: 103733 - RNA, 19 nt, Artificial Sequence
  Description of Artificial Sequence: Synthetic oligonucleotide
  Antisense strand to SEQ ID NO: 103732
uuugggaguagugaccaac

SEQ ID NO: 103734 - RNA, 19 nt, Artificial Sequence
  Description of Artificial Sequence: Synthetic oligonucleotide
  Sense strand starting at position 1265 of SEQ ID NO: 1309
ugcgaaaccucucugaaug

SEQ ID NO: 103735 - RNA, 19 nt, Artificial Sequence
  Description of Artificial Sequence: Synthetic oligonucleotide
  Antisense strand to SEQ ID NO: 103734
cauucagagagguuucgca

SEQ ID NO: 103736 - RNA, 19 nt, Artificial Sequence
  Description of Artificial Sequence: Synthetic oligonucleotide
  Sense strand starting at position 1267 of SEQ ID NO: 1309
cgaaaccucucugaaugga

SEQ ID NO: 103737 - RNA, 19 nt, Artificial Sequence
  Description of Artificial Sequence: Synthetic oligonucleotide
  Antisense strand to SEQ ID NO: 103736
uccauucagagagguuucg

SEQ ID NO: 103738 - RNA, 19 nt, Artificial Sequence
  Description of Artificial Sequence: Synthetic oligonucleotide
  Sense strand starting at position 1324 of SEQ ID NO: 1309
uucuaaggucauugcuagu

SEQ ID NO: 103739 - RNA, 19 nt, Artificial Sequence
  Description of Artificial Sequence: Synthetic oligonucleotide
  Antisense strand to SEQ ID NO: 103738
acuagcaaugaccuuagaa

SEQ ID NO: 103740 - RNA, 19 nt, Artificial Sequence
  Description of Artificial Sequence: Synthetic oligonucleotide
  Sense strand starting at position 1359 of SEQ ID NO: 1309
ugaagugaggauugucaug

SEQ ID NO: 103741 - RNA, 19 nt, Artificial Sequence
  Description of Artificial Sequence: Synthetic oligonucleotide
  Antisense strand to SEQ ID NO: 103740
caugacaauccucacuuca

SEQ ID NO: 103742 - RNA, 19 nt, Artificial Sequence
  Description of Artificial Sequence: Synthetic oligonucleotide
  Sense strand starting at position 1361 of SEQ ID NO: 1309
aagugaggauugucaugcu

SEQ ID NO: 103743 - RNA, 19 nt, Artificial Sequence
  Description of Artificial Sequence: Synthetic oligonucleotide
  Antisense strand to SEQ ID NO: 103742
agcaugacaauccucacuu

SEQ ID NO: 103744 - RNA, 19 nt, Artificial Sequence
  Description of Artificial Sequence: Synthetic oligonucleotide
  Sense strand starting at position 1368 of SEQ ID NO: 1309
gauugucaugcuugcuuaa

SEQ ID NO: 103745 - RNA, 19 nt, Artificial Sequence
  Description of Artificial Sequence: Synthetic oligonucleotide
  Antisense strand to SEQ ID NO: 103744
uuaagcaagcaugacaauc

SEQ ID NO: 103746 - RNA, 19 nt, Artificial Sequence
  Description of Artificial Sequence: Synthetic oligonucleotide
  Sense strand starting at position 1370 of SEQ ID NO: 1309
uugucaugcuugcuuaaag

SEQ ID NO: 103747 - RNA, 19 nt, Artificial Sequence
  Description of Artificial Sequence: Synthetic oligonucleotide
  Antisense strand to SEQ ID NO: 103746
cuuuaagcaagcaugacaa

SEQ ID NO: 103748 - RNA, 19 nt, Artificial Sequence
  Description of Artificial Sequence: Synthetic oligonucleotide
  Sense strand starting at position 1421 of SEQ ID NO: 1309
ccuggauucccaugggagu

SEQ ID NO: 103749 - RNA, 19 nt, Artificial Sequence
  Description of Artificial Sequence: Synthetic oligonucleotide
  Antisense strand to SEQ ID NO: 103748
acucccaugggaauccagg

SEQ ID NO: 103750 - RNA, 19 nt, Artificial Sequence
  Description of Artificial Sequence: Synthetic oligonucleotide
  Sense strand starting at position 2005 of SEQ ID NO: 1309
gcgguaugacguguuccau

SEQ ID NO: 103751 - RNA, 19 nt, Artificial Sequence
  Description of Artificial Sequence: Synthetic oligonucleotide
  Antisense strand to SEQ ID NO: 103750
auggaacacgucauaccgc

SEQ ID NO: 103752 - RNA, 19 nt, Artificial Sequence
  Description of Artificial Sequence: Synthetic oligonucleotide
  Sense strand starting at position 2868 of SEQ ID NO: 1309
gagaaaugacccuguaguu

SEQ ID NO: 103753 - RNA, 19 nt, Artificial Sequence
  Description of Artificial Sequence: Synthetic oligonucleotide
  Antisense strand to SEQ ID NO: 103752
aacuacagggucauuucuc

SEQ ID NO: 103754 - RNA, 19 nt, Artificial Sequence
  Description of Artificial Sequence: Synthetic oligonucleotide
  Sense strand starting at position 2897 of SEQ ID NO: 1309
uggaguaauuuaugucaca

SEQ ID NO: 103755 - RNA, 19 nt, Artificial Sequence
  Description of Artificial Sequence: Synthetic oligonucleotide
  Antisense strand to SEQ ID NO: 103754
ugugacauaaauuacucca

SEQ ID NO: 103756 - RNA, 19 nt, Artificial Sequence
  Description of Artificial Sequence: Synthetic oligonucleotide
  Sense strand starting at position 2957 of SEQ ID NO: 1309
ugucacgcauuucugaaau

SEQ ID NO: 103757 - RNA, 19 nt, Artificial Sequence
  Description of Artificial Sequence: Synthetic oligonucleotide
  Antisense strand to SEQ ID NO: 103756
auuucagaaaugcgugaca

SEQ ID NO: 103758 - RNA, 19 nt, Artificial Sequence
  Description of Artificial Sequence: Synthetic oligonucleotide
  Sense strand starting at position 2976 of SEQ ID NO: 1309
gccagagaggcucgcuauu

SEQ ID NO: 103759 - RNA, 19 nt, Artificial Sequence
  Description of Artificial Sequence: Synthetic oligonucleotide
  Antisense strand to SEQ ID NO: 103758
aauagcgagccucucuggc

SEQ ID NO: 103760 - RNA, 19 nt, Artificial Sequence
  Description of Artificial Sequence: Synthetic oligonucleotide
  Sense strand starting at position 2987 of SEQ ID NO: 1309
ucgcuauuaccuuguaaac

SEQ ID NO: 103761 - RNA, 19 nt, Artificial Sequence
  Description of Artificial Sequence: Synthetic oligonucleotide
  Antisense strand to SEQ ID NO: 103760
guuuacaagguaauagcga

SEQ ID NO: 103762 - RNA, 19 nt, Artificial Sequence
  Description of Artificial Sequence: Synthetic oligonucleotide
  Sense strand starting at position 3007 of SEQ ID NO: 1309
gagcuuauuccgggcauuu

SEQ ID NO: 103763 - RNA, 19 nt, Artificial Sequence
  Description of Artificial Sequence: Synthetic oligonucleotide
  Antisense strand to SEQ ID NO: 103762
aaaugcccggaauaagcuc

SEQ ID NO: 103764 - RNA, 19 nt, Artificial Sequence
  Description of Artificial Sequence: Synthetic oligonucleotide
  Sense strand starting at position 3070 of SEQ ID NO: 1309
ggcagauagcaucgccuau

SEQ ID NO: 103765 - RNA, 19 nt, Artificial Sequence
  Description of Artificial Sequence: Synthetic oligonucleotide
  Antisense strand to SEQ ID NO: 103764
auaggcgaugcuaucugcc

SEQ ID NO: 103766 - RNA, 19 nt, Artificial Sequence
  Description of Artificial Sequence: Synthetic oligonucleotide
  Sense strand starting at position 3083 of SEQ ID NO: 1309
gccuaucugccucagcgaa

SEQ ID NO: 103767 - RNA, 19 nt, Artificial Sequence
  Description of Artificial Sequence: Synthetic oligonucleotide
  Antisense strand to SEQ ID NO: 103766
uucgcugaggcagauaggc

SEQ ID NO: 103768 - RNA, 19 nt, Artificial Sequence
  Description of Artificial Sequence: Synthetic oligonucleotide
  Sense strand starting at position 3103 of SEQ ID NO: 1309
cagggucacuuugugcaau

SEQ ID NO: 103769 - RNA, 19 nt, Artificial Sequence
  Description of Artificial Sequence: Synthetic oligonucleotide
  Antisense strand to SEQ ID NO: 103768
auugcacaaagugacccug

SEQ ID NO: 103770 - RNA, 19 nt, Artificial Sequence
  Description of Artificial Sequence: Synthetic oligonucleotide
  Sense strand starting at position 3105 of SEQ ID NO: 1309
gggucacuuugugcaauga

SEQ ID NO: 103771 - RNA, 19 nt, Artificial Sequence
  Description of Artificial Sequence: Synthetic oligonucleotide
  Antisense strand to SEQ ID NO: 103770
ucauugcacaaagugaccc

SEQ ID NO: 103772 - RNA, 19 nt, Artificial Sequence
  Description of Artificial Sequence: Synthetic oligonucleotide
  Sense strand starting at position 3109 of SEQ ID NO: 1309
cacuuugugcaaugaguuc

SEQ ID NO: 103773 - RNA, 19 nt, Artificial Sequence
  Description of Artificial Sequence: Synthetic oligonucleotide
  Antisense strand to SEQ ID NO: 103772
gaacucauugcacaaagug

SEQ ID NO: 103774 - RNA, 19 nt, Artificial Sequence
  Description of Artificial Sequence: Synthetic oligonucleotide
  Sense strand starting at position 3115 of SEQ ID NO: 1309
gugcaaugaguucaugaga

SEQ ID NO: 103775 - RNA, 19 nt, Artificial Sequence
  Description of Artificial Sequence: Synthetic oligonucleotide
  Antisense strand to SEQ ID NO: 103774
ucucaugaacucauugcac

SEQ ID NO: 103776 - RNA, 19 nt, Artificial Sequence
  Description of Artificial Sequence: Synthetic oligonucleotide
  Sense strand starting at position 3170 of SEQ ID NO: 1309
gugaaaucacuuugucagg

SEQ ID NO: 103777 - RNA, 19 nt, Artificial Sequence
  Description of Artificial Sequence: Synthetic oligonucleotide
  Antisense strand to SEQ ID NO: 103776
ccugacaaagugauuucac

SEQ ID NO: 103778 - RNA, 19 nt, Artificial Sequence
  Description of Artificial Sequence: Synthetic oligonucleotide
  Sense strand starting at position 3223 of SEQ ID NO: 1309
caggcuuagugucugagau

SEQ ID NO: 103779 - RNA, 19 nt, Artificial Sequence
  Description of Artificial Sequence: Synthetic oligonucleotide
  Antisense strand to SEQ ID NO: 103778
aucucagacacuaagccug

SEQ ID NO: 103780 - RNA, 19 nt, Artificial Sequence
  Description of Artificial Sequence: Synthetic oligonucleotide
  Sense strand starting at position 3224 of SEQ ID NO: 1309
aggcuuagugucugagaua

SEQ ID NO: 103781 - RNA, 19 nt, Artificial Sequence
  Description of Artificial Sequence: Synthetic oligonucleotide
  Antisense strand to SEQ ID NO: 103780
uaucucagacacuaagccu

SEQ ID NO: 103782 - RNA, 19 nt, Artificial Sequence
  Description of Artificial Sequence: Synthetic oligonucleotide
  Sense strand starting at position 3238 of SEQ ID NO: 1309
agauaagaauuauucgcaa

SEQ ID NO: 103783 - RNA, 19 nt, Artificial Sequence
  Description of Artificial Sequence: Synthetic oligonucleotide
  Antisense strand to SEQ ID NO: 103782
uugcgaauaauucuuaucu

SEQ ID NO: 103784 - RNA, 19 nt, Artificial Sequence
  Description of Artificial Sequence: Synthetic oligonucleotide
  Sense strand starting at position 3241 of SEQ ID NO: 1309
uaagaauuauucgcaagga

SEQ ID NO: 103785 - RNA, 19 nt, Artificial Sequence
  Description of Artificial Sequence: Synthetic oligonucleotide
  Antisense strand to SEQ ID NO: 103784
uccuugcgaauaauucuua

SEQ ID NO: 103786 - RNA, 19 nt, Artificial Sequence
  Description of Artificial Sequence: Synthetic oligonucleotide
  Sense strand starting at position 3300 of SEQ ID NO: 1309
cgggucuccuacuuugaca

SEQ ID NO: 103787 - RNA, 19 nt, Artificial Sequence
  Description of Artificial Sequence: Synthetic oligonucleotide
  Antisense strand to SEQ ID NO: 103786
ugucaaaguaggagacccg

SEQ ID NO: 103788 - RNA, 19 nt, Artificial Sequence
  Description of Artificial Sequence: Synthetic oligonucleotide
  Sense strand starting at position 3302 of SEQ ID NO: 1309
ggucuccuacuuugacaaa

SEQ ID NO: 103789 - RNA, 19 nt, Artificial Sequence
  Description of Artificial Sequence: Synthetic oligonucleotide
  Antisense strand to SEQ ID NO: 103788
uuugucaaaguaggagacc

SEQ ID NO: 103790 - RNA, 19 nt, Artificial Sequence
  Description of Artificial Sequence: Synthetic oligonucleotide
  Sense strand starting at position 3329 of SEQ ID NO: 1309
caucuuuaggacugcagua

SEQ ID NO: 103791 - RNA, 19 nt, Artificial Sequence
  Description of Artificial Sequence: Synthetic oligonucleotide
  Antisense strand to SEQ ID NO: 103790
uacugcaguccuaaagaug

SEQ ID NO: 103792 - RNA, 19 nt, Artificial Sequence
  Description of Artificial Sequence: Synthetic oligonucleotide
  Sense strand starting at position 3351 of SEQ ID NO: 1309
caguuaagaugcucggaau

SEQ ID NO: 103793 - RNA, 19 nt, Artificial Sequence
  Description of Artificial Sequence: Synthetic oligonucleotide
  Antisense strand to SEQ ID NO: 103792
auuccgagcaucuuaacug

SEQ ID NO: 103794 - RNA, 19 nt, Artificial Sequence
  Description of Artificial Sequence: Synthetic oligonucleotide
  Sense strand starting at position 3352 of SEQ ID NO: 1309
aguuaagaugcucggaaua

SEQ ID NO: 103795 - RNA, 19 nt, Artificial Sequence
  Description of Artificial Sequence: Synthetic oligonucleotide
  Antisense strand to SEQ ID NO: 103794
uauuccgagcaucuuaacu

SEQ ID NO: 103796 - RNA, 19 nt, Artificial Sequence
  Description of Artificial Sequence: Synthetic oligonucleotide
  Sense strand starting at position 3407 of SEQ ID NO: 1309
ugaggacaacuuugagcuu

SEQ ID NO: 103797 - RNA, 19 nt, Artificial Sequence
  Description of Artificial Sequence: Synthetic oligonucleotide
  Antisense strand to SEQ ID NO: 103796
aagcucaaaguuguccuca

SEQ ID NO: 103798 - RNA, 19 nt, Artificial Sequence
  Description of Artificial Sequence: Synthetic oligonucleotide
  Sense strand starting at position 3559 of SEQ ID NO: 1309
cuugcugcuguugaugaaa

SEQ ID NO: 103799 - RNA, 19 nt, Artificial Sequence
  Description of Artificial Sequence: Synthetic oligonucleotide
  Antisense strand to SEQ ID NO: 103798
uuucaucaacagcagcaag

SEQ ID NO: 103800 - RNA, 19 nt, Artificial Sequence
  Description of Artificial Sequence: Synthetic oligonucleotide
  Sense strand starting at position 3849 of SEQ ID NO: 1309
guuugacaauugguugaau

SEQ ID NO: 103801 - RNA, 19 nt, Artificial Sequence
  Description of Artificial Sequence: Synthetic oligonucleotide
  Antisense strand to SEQ ID NO: 103800
auucaaccaauugucaaac

SEQ ID NO: 103802 - RNA, 19 nt, Artificial Sequence
  Description of Artificial Sequence: Synthetic oligonucleotide
  Sense strand starting at position 3850 of SEQ ID NO: 1309
uuugacaauugguugaauu

SEQ ID NO: 103803 - RNA, 19 nt, Artificial Sequence
  Description of Artificial Sequence: Synthetic oligonucleotide
  Antisense strand to SEQ ID NO: 103802
aauucaaccaauugucaaa

SEQ ID NO: 103804 - RNA, 19 nt, Artificial Sequence
  Description of Artificial Sequence: Synthetic oligonucleotide
  Sense strand starting at position 29 of SEQ ID NO: 1310
ccaagaggucuccauaccu

SEQ ID NO: 103805 - RNA, 19 nt, Artificial Sequence
  Description of Artificial Sequence: Synthetic oligonucleotide
  Antisense strand to SEQ ID NO: 103804
agguauggagaccucuugg

SEQ ID NO: 103806 - RNA, 19 nt, Artificial Sequence
  Description of Artificial Sequence: Synthetic oligonucleotide
  Sense strand starting at position 203 of SEQ ID NO: 1310
uggucuggaucuucucuaa

SEQ ID NO: 103807 - RNA, 19 nt, Artificial Sequence
  Description of Artificial Sequence: Synthetic oligonucleotide
  Antisense strand to SEQ ID NO: 103806
uuagagaagauccagacca

SEQ ID NO: 103808 - RNA, 19 nt, Artificial Sequence
  Description of Artificial Sequence: Synthetic oligonucleotide
  Sense strand starting at position 227 of SEQ ID NO: 1310
cuucuugucucagcuagaa

SEQ ID NO: 103809 - RNA, 19 nt, Artificial Sequence
  Description of Artificial Sequence: Synthetic oligonucleotide
  Antisense strand to SEQ ID NO: 103808
uucuagcugagacaagaag

SEQ ID NO: 103810 - RNA, 19 nt, Artificial Sequence
  Description of Artificial Sequence: Synthetic oligonucleotide
  Sense strand starting at position 529 of SEQ ID NO: 1310
ucgauuccggccuaaagau

SEQ ID NO: 103811 - RNA, 19 nt, Artificial Sequence
  Description of Artificial Sequence: Synthetic oligonucleotide
  Antisense strand to SEQ ID NO: 103810
aucuuuaggccggaaucga

SEQ ID NO: 103812 - RNA, 19 nt, Artificial Sequence
  Description of Artificial Sequence: Synthetic oligonucleotide
  Sense strand starting at position 733 of SEQ ID NO: 1310
agagacugcuaauuaguuu

SEQ ID NO: 103813 - RNA, 19 nt, Artificial Sequence
  Description of Artificial Sequence: Synthetic oligonucleotide
  Antisense strand to SEQ ID NO: 103812
aaacuaauuagcagucucu

SEQ ID NO: 103814 - RNA, 19 nt, Artificial Sequence
  Description of Artificial Sequence: Synthetic oligonucleotide
  Sense strand starting at position 740 of SEQ ID NO: 1310
gcuaauuaguuucuuuaga

SEQ ID NO: 103815 - RNA, 19 nt, Artificial Sequence
  Description of Artificial Sequence: Synthetic oligonucleotide
  Antisense strand to SEQ ID NO: 103814
ucuaaagaaacuaauuagc

SEQ ID NO: 103816 - RNA, 19 nt, Artificial Sequence
  Description of Artificial Sequence: Synthetic oligonucleotide
  Sense strand starting at position 751 of SEQ ID NO: 1310
ucuuuagaacuugauguau

SEQ ID NO: 103817 - RNA, 19 nt, Artificial Sequence
  Description of Artificial Sequence: Synthetic oligonucleotide
  Antisense strand to SEQ ID NO: 103816
auacaucaaguucuaaaga

SEQ ID NO: 103818 - RNA, 19 nt, Artificial Sequence
  Description of Artificial Sequence: Synthetic oligonucleotide
  Sense strand starting at position 799 of SEQ ID NO: 1310
ugucgucccauggaggauu

SEQ ID NO: 103819 - RNA, 19 nt, Artificial Sequence
  Description of Artificial Sequence: Synthetic oligonucleotide
  Antisense strand to SEQ ID NO: 103818
aauccuccaugggacgaca

SEQ ID NO: 103820 - RNA, 19 nt, Artificial Sequence
  Description of Artificial Sequence: Synthetic oligonucleotide
  Sense strand starting at position 960 of SEQ ID NO: 1310
guuggauuguuuccacaaa

SEQ ID NO: 103821 - RNA, 19 nt, Artificial Sequence
  Description of Artificial Sequence: Synthetic oligonucleotide
  Antisense strand to SEQ ID NO: 103820
uuuguggaaacaauccaac

SEQ ID NO: 103822 - RNA, 19 nt, Artificial Sequence
  Description of Artificial Sequence: Synthetic oligonucleotide
  Sense strand starting at position 1362 of SEQ ID NO: 1310
gaaacaauacucgagcgua

SEQ ID NO: 103823 - RNA, 19 nt, Artificial Sequence
  Description of Artificial Sequence: Synthetic oligonucleotide
  Antisense strand to SEQ ID NO: 103822
uacgcucgaguauuguuuc

SEQ ID NO: 103824 - RNA, 19 nt, Artificial Sequence
  Description of Artificial Sequence: Synthetic oligonucleotide
  Sense strand starting at position 1746 of SEQ ID NO: 1310
auuacugacugauaaugga

SEQ ID NO: 103825 - RNA, 19 nt, Artificial Sequence
  Description of Artificial Sequence: Synthetic oligonucleotide
  Antisense strand to SEQ ID NO: 103824
uccauuaucagucaguaau

SEQ ID NO: 103826 - RNA, 19 nt, Artificial Sequence
  Description of Artificial Sequence: Synthetic oligonucleotide
  Sense strand starting at position 1754 of SEQ ID NO: 1310
cugauaauggaaugagugu

SEQ ID NO: 103827 - RNA, 19 nt, Artificial Sequence
  Description of Artificial Sequence: Synthetic oligonucleotide
  Antisense strand to SEQ ID NO: 103826
acacucauuccauuaucag

SEQ ID NO: 103828 - RNA, 19 nt, Artificial Sequence
  Description of Artificial Sequence: Synthetic oligonucleotide
  Sense strand starting at position 1794 of SEQ ID NO: 1310
agacgcucuuccucuugaa

SEQ ID NO: 103829 - RNA, 19 nt, Artificial Sequence
  Description of Artificial Sequence: Synthetic oligonucleotide
  Antisense strand to SEQ ID NO: 103828
uucaagaggaagagcgucu

SEQ ID NO: 103830 - RNA, 19 nt, Artificial Sequence
  Description of Artificial Sequence: Synthetic oligonucleotide
  Sense strand starting at position 1857 of SEQ ID NO: 1310
uucuaacguucugugauga

SEQ ID NO: 103831 - RNA, 19 nt, Artificial Sequence
  Description of Artificial Sequence: Synthetic oligonucleotide
  Antisense strand to SEQ ID NO: 103830
ucaucacagaacguuagaa

SEQ ID NO: 103832 - RNA, 19 nt, Artificial Sequence
  Description of Artificial Sequence: Synthetic oligonucleotide
  Sense strand starting at position 1998 of SEQ ID NO: 1310
aucauuauacugcaguauu

SEQ ID NO: 103833 - RNA, 19 nt, Artificial Sequence
  Description of Artificial Sequence: Synthetic oligonucleotide
  Antisense strand to SEQ ID NO: 103832
aauacugcaguauaaugau

SEQ ID NO: 103834 - RNA, 19 nt, Artificial Sequence
  Description of Artificial Sequence: Synthetic oligonucleotide
  Sense strand starting at position 2047 of SEQ ID NO: 1310
agcuauguaaaccguagaa

SEQ ID NO: 103835 - RNA, 19 nt, Artificial Sequence
  Description of Artificial Sequence: Synthetic oligonucleotide
  Antisense strand to SEQ ID NO: 103834
uucuacgguuuacauagcu

SEQ ID NO: 103836 - RNA, 19 nt, Artificial Sequence
  Description of Artificial Sequence: Synthetic oligonucleotide
  Sense strand starting at position 2110 of SEQ ID NO: 1310
ggucucaguacuggacaga

SEQ ID NO: 103837 - RNA, 19 nt, Artificial Sequence
  Description of Artificial Sequence: Synthetic oligonucleotide
  Antisense strand to SEQ ID NO: 103836
ucuguccaguacugagacc

SEQ ID NO: 103838 - RNA, 19 nt, Artificial Sequence
  Description of Artificial Sequence: Synthetic oligonucleotide
  Sense strand starting at position 2153 of SEQ ID NO: 1310
agguccauuuggcagagau

SEQ ID NO: 103839 - RNA, 19 nt, Artificial Sequence
  Description of Artificial Sequence: Synthetic oligonucleotide
  Antisense strand to SEQ ID NO: 103838
aucucugccaaauggaccu

SEQ ID NO: 103840 - RNA, 19 nt, Artificial Sequence
  Description of Artificial Sequence: Synthetic oligonucleotide
  Sense strand starting at position 2295 of SEQ ID NO: 1310
uuagaaugcccucgggacu

SEQ ID NO: 103841 - RNA, 19 nt, Artificial Sequence
  Description of Artificial Sequence: Synthetic oligonucleotide
  Antisense strand to SEQ ID NO: 103840
agucccgagggcauucuaa

SEQ ID NO: 103842 - RNA, 19 nt, Artificial Sequence
  Description of Artificial Sequence: Synthetic oligonucleotide
  Sense strand starting at position 2340 of SEQ ID NO: 1310
guauacacucacuguugau

SEQ ID NO: 103843 - RNA, 19 nt, Artificial Sequence
  Description of Artificial Sequence: Synthetic oligonucleotide
  Antisense strand to SEQ ID NO: 103842
aucaacagugaguguauac

SEQ ID NO: 103844 - RNA, 19 nt, Artificial Sequence
  Description of Artificial Sequence: Synthetic oligonucleotide
  Sense strand starting at position 2366 of SEQ ID NO: 1310
agucucguggcuuacaaua

SEQ ID NO: 103845 - RNA, 19 nt, Artificial Sequence
  Description of Artificial Sequence: Synthetic oligonucleotide
  Antisense strand to SEQ ID NO: 103844
uauuguaagccacgagacu

SEQ ID NO: 103846 - RNA, 19 nt, Artificial Sequence
  Description of Artificial Sequence: Synthetic oligonucleotide
  Sense strand starting at position 2416 of SEQ ID NO: 1310
aguuccauccuagacaucu

SEQ ID NO: 103847 - RNA, 19 nt, Artificial Sequence
  Description of Artificial Sequence: Synthetic oligonucleotide
  Antisense strand to SEQ ID NO: 103846
agaugucuaggauggaacu

SEQ ID NO: 103848 - RNA, 19 nt, Artificial Sequence
  Description of Artificial Sequence: Synthetic oligonucleotide
  Sense strand starting at position 2634 of SEQ ID NO: 1310
caggaaauccuguggguuc

SEQ ID NO: 103849 - RNA, 19 nt, Artificial Sequence
  Description of Artificial Sequence: Synthetic oligonucleotide
  Antisense strand to SEQ ID NO: 103848
gaacccacaggauuuccug

SEQ ID NO: 103850 - RNA, 19 nt, Artificial Sequence
  Description of Artificial Sequence: Synthetic oligonucleotide
  Sense strand starting at position 2636 of SEQ ID NO: 1310
ggaaauccuguggguucua

SEQ ID NO: 103851 - RNA, 19 nt, Artificial Sequence
  Description of Artificial Sequence: Synthetic oligonucleotide
  Antisense strand to SEQ ID NO: 103850
uagaacccacaggauuucc

SEQ ID NO: 103852 - RNA, 19 nt, Artificial Sequence
  Description of Artificial Sequence: Synthetic oligonucleotide
  Sense strand starting at position 2647 of SEQ ID NO: 1310
ggguucuaccuuuaaauua

SEQ ID NO: 103853 - RNA, 19 nt, Artificial Sequence
  Description of Artificial Sequence: Synthetic oligonucleotide
  Antisense strand to SEQ ID NO: 103852
uaauuuaaagguagaaccc

SEQ ID NO: 103854 - RNA, 19 nt, Artificial Sequence
  Description of Artificial Sequence: Synthetic oligonucleotide
  Sense strand starting at position 2668 of SEQ ID NO: 1310
gauagucccugacuuggau

SEQ ID NO: 103855 - RNA, 19 nt, Artificial Sequence
  Description of Artificial Sequence: Synthetic oligonucleotide
  Antisense strand to SEQ ID NO: 103854
auccaagucagggacuauc

SEQ ID NO: 103856 - RNA, 19 nt, Artificial Sequence
  Description of Artificial Sequence: Synthetic oligonucleotide
  Sense strand starting at position 2805 of SEQ ID NO: 1310
ccaacugucggauaaguug

SEQ ID NO: 103857 - RNA, 19 nt, Artificial Sequence
  Description of Artificial Sequence: Synthetic oligonucleotide
  Antisense strand to SEQ ID NO: 103856
caacuuauccgacaguugg

SEQ ID NO: 103858 - RNA, 19 nt, Artificial Sequence
  Description of Artificial Sequence: Synthetic oligonucleotide
  Sense strand starting at position 2814 of SEQ ID NO: 1310
ggauaaguugucugagcau

SEQ ID NO: 103859 - RNA, 19 nt, Artificial Sequence
  Description of Artificial Sequence: Synthetic oligonucleotide
  Antisense strand to SEQ ID NO: 103858
augcucagacaacuuaucc

SEQ ID NO: 103860 - RNA, 19 nt, Artificial Sequence
  Description of Artificial Sequence: Synthetic oligonucleotide
  Sense strand starting at position 2904 of SEQ ID NO: 1310
ucaacauacgauggguuua

SEQ ID NO: 103861 - RNA, 19 nt, Artificial Sequence
  Description of Artificial Sequence: Synthetic oligonucleotide
  Antisense strand to SEQ ID NO: 103860
uaaacccaucguauguuga

SEQ ID NO: 103862 - RNA, 19 nt, Artificial Sequence
  Description of Artificial Sequence: Synthetic oligonucleotide
  Sense strand starting at position 2995 of SEQ ID NO: 1310
augcucuaccuuggaauaa

SEQ ID NO: 103863 - RNA, 19 nt, Artificial Sequence
  Description of Artificial Sequence: Synthetic oligonucleotide
  Antisense strand to SEQ ID NO: 103862
uuauuccaagguagagcau

SEQ ID NO: 103864 - RNA, 19 nt, Artificial Sequence
  Description of Artificial Sequence: Synthetic oligonucleotide
  Sense strand starting at position 3204 of SEQ ID NO: 1310
gccaucagauggucuacaa

SEQ ID NO: 103865 - RNA, 19 nt, Artificial Sequence
  Description of Artificial Sequence: Synthetic oligonucleotide
  Antisense strand to SEQ ID NO: 103864
uuguagaccaucugauggc

SEQ ID NO: 103866 - RNA, 19 nt, Artificial Sequence
  Description of Artificial Sequence: Synthetic oligonucleotide
  Sense strand starting at position 3353 of SEQ ID NO: 1310
ggaugcucuuauccucaga

SEQ ID NO: 103867 - RNA, 19 nt, Artificial Sequence
  Description of Artificial Sequence: Synthetic oligonucleotide
  Antisense strand to SEQ ID NO: 103866
ucugaggauaagagcaucc

SEQ ID NO: 103868 - RNA, 19 nt, Artificial Sequence
  Description of Artificial Sequence: Synthetic oligonucleotide
  Sense strand starting at position 3355 of SEQ ID NO: 1310
augcucuuauccucagaug

SEQ ID NO: 103869 - RNA, 19 nt, Artificial Sequence
  Description of Artificial Sequence: Synthetic oligonucleotide
  Antisense strand to SEQ ID NO: 103868
caucugaggauaagagcau

SEQ ID NO: 103870 - RNA, 19 nt, Artificial Sequence
  Description of Artificial Sequence: Synthetic oligonucleotide
  Sense strand starting at position 3370 of SEQ ID NO: 1310
gaugcuggcuugguuaaca

SEQ ID NO: 103871 - RNA, 19 nt, Artificial Sequence
  Description of Artificial Sequence: Synthetic oligonucleotide
  Antisense strand to SEQ ID NO: 103870
uguuaaccaagccagcauc

SEQ ID NO: 103872 - RNA, 19 nt, Artificial Sequence
  Description of Artificial Sequence: Synthetic oligonucleotide
  Sense strand starting at position 3397 of SEQ ID NO: 1310
uccuccaaguguuuaauua

SEQ ID NO: 103873 - RNA, 19 nt, Artificial Sequence
  Description of Artificial Sequence: Synthetic oligonucleotide
  Antisense strand to SEQ ID NO: 103872
uaauuaaacacuuggagga

SEQ ID NO: 103874 - RNA, 19 nt, Artificial Sequence
  Description of Artificial Sequence: Synthetic oligonucleotide
  Sense strand starting at position 3589 of SEQ ID NO: 1310
uuuagaagauacguuccau

SEQ ID NO: 103875 - RNA, 19 nt, Artificial Sequence
  Description of Artificial Sequence: Synthetic oligonucleotide
  Antisense strand to SEQ ID NO: 103874
auggaacguaucuucuaaa

SEQ ID NO: 103876 - RNA, 19 nt, Artificial Sequence
  Description of Artificial Sequence: Synthetic oligonucleotide
  Sense strand starting at position 3630 of SEQ ID NO: 1310
acugauguaucaucucaag

SEQ ID NO: 103877 - RNA, 19 nt, Artificial Sequence
  Description of Artificial Sequence: Synthetic oligonucleotide
  Antisense strand to SEQ ID NO: 103876
cuugagaugauacaucagu

SEQ ID NO: 103878 - RNA, 19 nt, Artificial Sequence
  Description of Artificial Sequence: Synthetic oligonucleotide
  Sense strand starting at position 3652 of SEQ ID NO: 1310
cuagaauagugccuggcua

SEQ ID NO: 103879 - RNA, 19 nt, Artificial Sequence
  Description of Artificial Sequence: Synthetic oligonucleotide
  Antisense strand to SEQ ID NO: 103878
uagccaggcacuauucuag

SEQ ID NO: 103880 - RNA, 19 nt, Artificial Sequence
  Description of Artificial Sequence: Synthetic oligonucleotide
  Sense strand starting at position 3653 of SEQ ID NO: 1310
uagaauagugccuggcuaa

SEQ ID NO: 103881 - RNA, 19 nt, Artificial Sequence
  Description of Artificial Sequence: Synthetic oligonucleotide
  Antisense strand to SEQ ID NO: 103880
uuagccaggcacuauucua

SEQ ID NO: 103882 - RNA, 19 nt, Artificial Sequence
  Description of Artificial Sequence: Synthetic oligonucleotide
  Sense strand starting at position 3654 of SEQ ID NO: 1310
agaauagugccuggcuaau

SEQ ID NO: 103883 - RNA, 19 nt, Artificial Sequence
  Description of Artificial Sequence: Synthetic oligonucleotide
  Antisense strand to SEQ ID NO: 103882
auuagccaggcacuauucu

SEQ ID NO: 103884 - RNA, 19 nt, Artificial Sequence
  Description of Artificial Sequence: Synthetic oligonucleotide
  Sense strand starting at position 85 of SEQ ID NO: 1311
acaauccuucugggacuuu

SEQ ID NO: 103885 - RNA, 19 nt, Artificial Sequence
  Description of Artificial Sequence: Synthetic oligonucleotide
  Antisense strand to SEQ ID NO: 103884
aaagucccagaaggauugu

SEQ ID NO: 103886 - RNA, 19 nt, Artificial Sequence
  Description of Artificial Sequence: Synthetic oligonucleotide
  Sense strand starting at position 198 of SEQ ID NO: 1311
auacaacguucucuugaau

SEQ ID NO: 103887 - RNA, 19 nt, Artificial Sequence
  Description of Artificial Sequence: Synthetic oligonucleotide
  Antisense strand to SEQ ID NO: 103886
auucaagagaacguuguau

SEQ ID NO: 103888 - RNA, 19 nt, Artificial Sequence
  Description of Artificial Sequence: Synthetic oligonucleotide
  Sense strand starting at position 458 of SEQ ID NO: 1311
uguaucauauguucuacau

SEQ ID NO: 103889 - RNA, 19 nt, Artificial Sequence
  Description of Artificial Sequence: Synthetic oligonucleotide
  Antisense strand to SEQ ID NO: 103888
auguagaacauaugauaca

SEQ ID NO: 103890 - RNA, 19 nt, Artificial Sequence
  Description of Artificial Sequence: Synthetic oligonucleotide
  Sense strand starting at position 477 of SEQ ID NO: 1311
ucccuccuguuaucagaga

SEQ ID NO: 103891 - RNA, 19 nt, Artificial Sequence
  Description of Artificial Sequence: Synthetic oligonucleotide
  Antisense strand to SEQ ID NO: 103890
ucucugauaacaggaggga

SEQ ID NO: 103892 - RNA, 19 nt, Artificial Sequence
  Description of Artificial Sequence: Synthetic oligonucleotide
  Sense strand starting at position 491 of SEQ ID NO: 1311
agagauccacucuguccaa

SEQ ID NO: 103893 - RNA, 19 nt, Artificial Sequence
  Description of Artificial Sequence: Synthetic oligonucleotide
  Antisense strand to SEQ ID NO: 103892
uuggacagaguggaucucu

SEQ ID NO: 103894 - RNA, 19 nt, Artificial Sequence
  Description of Artificial Sequence: Synthetic oligonucleotide
  Sense strand starting at position 670 of SEQ ID NO: 1311
ugggaaauuuagcacccaa

SEQ ID NO: 103895 - RNA, 19 nt, Artificial Sequence
  Description of Artificial Sequence: Synthetic oligonucleotide
  Antisense strand to SEQ ID NO: 103894
uugggugcuaaauuuccca

SEQ ID NO: 103896 - RNA, 19 nt, Artificial Sequence
  Description of Artificial Sequence: Synthetic oligonucleotide
  Sense strand starting at position 792 of SEQ ID NO: 1311
uuggauauaccugguuaaa

SEQ ID NO: 103897 - RNA, 19 nt, Artificial Sequence
  Description of Artificial Sequence: Synthetic oligonucleotide
  Antisense strand to SEQ ID NO: 103896
uuuaaccagguauauccaa

SEQ ID NO: 103898 - RNA, 19 nt, Artificial Sequence
  Description of Artificial Sequence: Synthetic oligonucleotide
  Sense strand starting at position 794 of SEQ ID NO: 1311
ggauauaccugguuaaaua

SEQ ID NO: 103899 - RNA, 19 nt, Artificial Sequence
  Description of Artificial Sequence: Synthetic oligonucleotide
  Antisense strand to SEQ ID NO: 103898
uauuuaaccagguauaucc

SEQ ID NO: 103900 - RNA, 19 nt, Artificial Sequence
  Description of Artificial Sequence: Synthetic oligonucleotide
  Sense strand starting at position 926 of SEQ ID NO: 1311
cagauuaacuguccagguu

SEQ ID NO: 103901 - RNA, 19 nt, Artificial Sequence
  Description of Artificial Sequence: Synthetic oligonucleotide
  Antisense strand to SEQ ID NO: 103900
aaccuggacaguuaaucug

SEQ ID NO: 103902 - RNA, 19 nt, Artificial Sequence
  Description of Artificial Sequence: Synthetic oligonucleotide
  Sense strand starting at position 1148 of SEQ ID NO: 1311
aagguacagcucuagcaau

SEQ ID NO: 103903 - RNA, 19 nt, Artificial Sequence
  Description of Artificial Sequence: Synthetic oligonucleotide
  Antisense strand to SEQ ID NO: 103902
auugcuagagcuguaccuu

SEQ ID NO: 103904 - RNA, 19 nt, Artificial Sequence
  Description of Artificial Sequence: Synthetic oligonucleotide
  Sense strand starting at position 1390 of SEQ ID NO: 1311
ucagaacagcugugauuaa

SEQ ID NO: 103905 - RNA, 19 nt, Artificial Sequence
  Description of Artificial Sequence: Synthetic oligonucleotide
  Antisense strand to SEQ ID NO: 103904
uuaaucacagcuguucuga

SEQ ID NO: 103906 - RNA, 19 nt, Artificial Sequence
  Description of Artificial Sequence: Synthetic oligonucleotide
  Sense strand starting at position 1470 of SEQ ID NO: 1311
uaucaacuuugagcagagu

SEQ ID NO: 103907 - RNA, 19 nt, Artificial Sequence
  Description of Artificial Sequence: Synthetic oligonucleotide
  Antisense strand to SEQ ID NO: 103906
acucugcucaaaguugaua

SEQ ID NO: 103908 - RNA, 19 nt, Artificial Sequence
  Description of Artificial Sequence: Synthetic oligonucleotide
  Sense strand starting at position 1604 of SEQ ID NO: 1311
aucucuuaacguuacaagu

SEQ ID NO: 103909 - RNA, 19 nt, Artificial Sequence
  Description of Artificial Sequence: Synthetic oligonucleotide
  Antisense strand to SEQ ID NO: 103908
acuuguaacguuaagagau

SEQ ID NO: 103910 - RNA, 19 nt, Artificial Sequence
  Description of Artificial Sequence: Synthetic oligonucleotide
  Sense strand starting at position 1629 of SEQ ID NO: 1311
gagcucaauccucggaacu

SEQ ID NO: 103911 - RNA, 19 nt, Artificial Sequence
  Description of Artificial Sequence: Synthetic oligonucleotide
  Antisense strand to SEQ ID NO: 103910
aguuccgaggauugagcuc

SEQ ID NO: 103912 - RNA, 19 nt, Artificial Sequence
  Description of Artificial Sequence: Synthetic oligonucleotide
  Sense strand starting at position 1709 of SEQ ID NO: 1311
uagucauaugcuuacgaaa

SEQ ID NO: 103913 - RNA, 19 nt, Artificial Sequence
  Description of Artificial Sequence: Synthetic oligonucleotide
  Antisense strand to SEQ ID NO: 103912
uuucguaagcauaugacua

SEQ ID NO: 103914 - RNA, 19 nt, Artificial Sequence
  Description of Artificial Sequence: Synthetic oligonucleotide
  Sense strand starting at position 1845 of SEQ ID NO: 1311
ggacccguggguuaugaga

SEQ ID NO: 103915 - RNA, 19 nt, Artificial Sequence
  Description of Artificial Sequence: Synthetic oligonucleotide
  Antisense strand to SEQ ID NO: 103914
ucucauaacccacgggucc

SEQ ID NO: 103916 - RNA, 19 nt, Artificial Sequence
  Description of Artificial Sequence: Synthetic oligonucleotide
  Sense strand starting at position 1978 of SEQ ID NO: 1311
gcugaaacuuuauugacac

SEQ ID NO: 103917 - RNA, 19 nt, Artificial Sequence
  Description of Artificial Sequence: Synthetic oligonucleotide
  Antisense strand to SEQ ID NO: 103916
gugucaauaaaguuucagc

SEQ ID NO: 103918 - RNA, 19 nt, Artificial Sequence
  Description of Artificial Sequence: Synthetic oligonucleotide
  Sense strand starting at position 2100 of SEQ ID NO: 1311
aucggagcucucgcgauau

SEQ ID NO: 103919 - RNA, 19 nt, Artificial Sequence
  Description of Artificial Sequence: Synthetic oligonucleotide
  Antisense strand to SEQ ID NO: 103918
auaucgcgagagcuccgau

SEQ ID NO: 103920 - RNA, 19 nt, Artificial Sequence
  Description of Artificial Sequence: Synthetic oligonucleotide
  Sense strand starting at position 2102 of SEQ ID NO: 1311
cggagcucucgcgauauuu

SEQ ID NO: 103921 - RNA, 19 nt, Artificial Sequence
  Description of Artificial Sequence: Synthetic oligonucleotide
  Antisense strand to SEQ ID NO: 103920
aaauaucgcgagagcuccg

SEQ ID NO: 103922 - RNA, 19 nt, Artificial Sequence
  Description of Artificial Sequence: Synthetic oligonucleotide
  Sense strand starting at position 2247 of SEQ ID NO: 1311
cuauaagcgggucaugaaa

SEQ ID NO: 103923 - RNA, 19 nt, Artificial Sequence
  Description of Artificial Sequence: Synthetic oligonucleotide
  Antisense strand to SEQ ID NO: 103922
uuucaugacccgcuuauag

SEQ ID NO: 103924 - RNA, 19 nt, Artificial Sequence
  Description of Artificial Sequence: Synthetic oligonucleotide
  Sense strand starting at position 2258 of SEQ ID NO: 1311
ucaugaaauaggcgagcua

SEQ ID NO: 103925 - RNA, 19 nt, Artificial Sequence
  Description of Artificial Sequence: Synthetic oligonucleotide
  Antisense strand to SEQ ID NO: 103924
uagcucgccuauuucauga

SEQ ID NO: 103926 - RNA, 19 nt, Artificial Sequence
  Description of Artificial Sequence: Synthetic oligonucleotide
  Sense strand starting at position 2362 of SEQ ID NO: 1311
accuuauuggugugaccag

SEQ ID NO: 103927 - RNA, 19 nt, Artificial Sequence
  Description of Artificial Sequence: Synthetic oligonucleotide
  Antisense strand to SEQ ID NO: 103926
cuggucacaccaauaaggu

SEQ ID NO: 103928 - RNA, 19 nt, Artificial Sequence
  Description of Artificial Sequence: Synthetic oligonucleotide
  Sense strand starting at position 2476 of SEQ ID NO: 1311
ccuggaaaguggucagaaa

SEQ ID NO: 103929 - RNA, 19 nt, Artificial Sequence
  Description of Artificial Sequence: Synthetic oligonucleotide
  Antisense strand to SEQ ID NO: 103928
uuucugaccacuuuccagg

SEQ ID NO: 103930 - RNA, 19 nt, Artificial Sequence
  Description of Artificial Sequence: Synthetic oligonucleotide
  Sense strand starting at position 2500 of SEQ ID NO: 1311
agacuuaagccacgggagu

SEQ ID NO: 103931 - RNA, 19 nt, Artificial Sequence
  Description of Artificial Sequence: Synthetic oligonucleotide
  Antisense strand to SEQ ID NO: 103930
acucccguggcuuaagucu

SEQ ID NO: 103932 - RNA, 19 nt, Artificial Sequence
  Description of Artificial Sequence: Synthetic oligonucleotide
  Sense strand starting at position 2502 of SEQ ID NO: 1311
acuuaagccacgggaguua

SEQ ID NO: 103933 - RNA, 19 nt, Artificial Sequence
  Description of Artificial Sequence: Synthetic oligonucleotide
  Antisense strand to SEQ ID NO: 103932
uaacucccguggcuuaagu

SEQ ID NO: 103934 - RNA, 19 nt, Artificial Sequence
  Description of Artificial Sequence: Synthetic oligonucleotide
  Sense strand starting at position 2989 of SEQ ID NO: 1311
gaugaacagucgguuggaa

SEQ ID NO: 103935 - RNA, 19 nt, Artificial Sequence
  Description of Artificial Sequence: Synthetic oligonucleotide
  Antisense strand to SEQ ID NO: 103934
uuccaaccgacuguucauc

SEQ ID NO: 103936 - RNA, 19 nt, Artificial Sequence
  Description of Artificial Sequence: Synthetic oligonucleotide
  Sense strand starting at position 2991 of SEQ ID NO: 1311
ugaacagucgguuggaaga

SEQ ID NO: 103937 - RNA, 19 nt, Artificial Sequence
  Description of Artificial Sequence: Synthetic oligonucleotide
  Antisense strand to SEQ ID NO: 103936
ucuuccaaccgacuguuca

SEQ ID NO: 103938 - RNA, 19 nt, Artificial Sequence
  Description of Artificial Sequence: Synthetic oligonucleotide
  Sense strand starting at position 2994 of SEQ ID NO: 1311
acagucgguuggaagagau

SEQ ID NO: 103939 - RNA, 19 nt, Artificial Sequence
  Description of Artificial Sequence: Synthetic oligonucleotide
  Antisense strand to SEQ ID NO: 103938
aucucuuccaaccgacugu

SEQ ID NO: 103940 - RNA, 19 nt, Artificial Sequence
  Description of Artificial Sequence: Synthetic oligonucleotide
  Sense strand starting at position 3069 of SEQ ID NO: 1311
ggccaucuuccagaaaccu

SEQ ID NO: 103941 - RNA, 19 nt, Artificial Sequence
  Description of Artificial Sequence: Synthetic oligonucleotide
  Antisense strand to SEQ ID NO: 103940
agguuucuggaagauggcc

SEQ ID NO: 103942 - RNA, 19 nt, Artificial Sequence
  Description of Artificial Sequence: Synthetic oligonucleotide
  Sense strand starting at position 3114 of SEQ ID NO: 1311
gugaaagcaucuuuaaaca

SEQ ID NO: 103943 - RNA, 19 nt, Artificial Sequence
  Description of Artificial Sequence: Synthetic oligonucleotide
  Antisense strand to SEQ ID NO: 103942
uguuuaaagaugcuuucac

SEQ ID NO: 103944 - RNA, 19 nt, Artificial Sequence
  Description of Artificial Sequence: Synthetic oligonucleotide
  Sense strand starting at position 3220 of SEQ ID NO: 1311
ggcauuaaguaccuuuaca

SEQ ID NO: 103945 - RNA, 19 nt, Artificial Sequence
  Description of Artificial Sequence: Synthetic oligonucleotide
  Antisense strand to SEQ ID NO: 103944
uguaaagguacuuaaugcc

SEQ ID NO: 103946 - RNA, 19 nt, Artificial Sequence
  Description of Artificial Sequence: Synthetic oligonucleotide
  Sense strand starting at position 3271 of SEQ ID NO: 1311
agaacuuugugucuuccaa

SEQ ID NO: 103947 - RNA, 19 nt, Artificial Sequence
  Description of Artificial Sequence: Synthetic oligonucleotide
  Antisense strand to SEQ ID NO: 103946
uuggaagacacaaaguucu

SEQ ID NO: 103948 - RNA, 19 nt, Artificial Sequence
  Description of Artificial Sequence: Synthetic oligonucleotide
  Sense strand starting at position 3396 of SEQ ID NO: 1311
uagcucaucuaaguggaau

SEQ ID NO: 103949 - RNA, 19 nt, Artificial Sequence
  Description of Artificial Sequence: Synthetic oligonucleotide
  Antisense strand to SEQ ID NO: 103948
auuccacuuagaugagcua

SEQ ID NO: 103950 - RNA, 19 nt, Artificial Sequence
  Description of Artificial Sequence: Synthetic oligonucleotide
  Sense strand starting at position 3452 of SEQ ID NO: 1311
uuauaacauccucaggguu

SEQ ID NO: 103951 - RNA, 19 nt, Artificial Sequence
  Description of Artificial Sequence: Synthetic oligonucleotide
  Antisense strand to SEQ ID NO: 103950
aacccugaggauguuauaa

SEQ ID NO: 103952 - RNA, 19 nt, Artificial Sequence
  Description of Artificial Sequence: Synthetic oligonucleotide
  Sense strand starting at position 3697 of SEQ ID NO: 1311
aaccuaauggugugaguga

SEQ ID NO: 103953 - RNA, 19 nt, Artificial Sequence
  Description of Artificial Sequence: Synthetic oligonucleotide
  Antisense strand to SEQ ID NO: 103952
ucacucacaccauuagguu

SEQ ID NO: 103954 - RNA, 19 nt, Artificial Sequence
  Description of Artificial Sequence: Synthetic oligonucleotide
  Sense strand starting at position 3745 of SEQ ID NO: 1311
acuccagggucuucuuuaa

SEQ ID NO: 103955 - RNA, 19 nt, Artificial Sequence
  Description of Artificial Sequence: Synthetic oligonucleotide
  Antisense strand to SEQ ID NO: 103954
uuaaagaagacccuggagu

SEQ ID NO: 103956 - RNA, 19 nt, Artificial Sequence
  Description of Artificial Sequence: Synthetic oligonucleotide
  Sense strand starting at position 3752 of SEQ ID NO: 1311
ggucuucuuuaauuaauug

SEQ ID NO: 103957 - RNA, 19 nt, Artificial Sequence
  Description of Artificial Sequence: Synthetic oligonucleotide
  Antisense strand to SEQ ID NO: 103956
caauuaauuaaagaagacc

SEQ ID NO: 103958 - RNA, 19 nt, Artificial Sequence
  Description of Artificial Sequence: Synthetic oligonucleotide
  Sense strand starting at position 3857 of SEQ ID NO: 1311
uaaagaagucucgguuuac

SEQ ID NO: 103959 - RNA, 19 nt, Artificial Sequence
  Description of Artificial Sequence: Synthetic oligonucleotide
  Antisense strand to SEQ ID NO: 103958
guaaaccgagacuucuuua

SEQ ID NO: 103960 - RNA, 19 nt, Artificial Sequence
  Description of Artificial Sequence: Synthetic oligonucleotide
  Sense strand starting at position 3941 of SEQ ID NO: 1311
cuuuacuguccuggaauau

SEQ ID NO: 103961 - RNA, 19 nt, Artificial Sequence
  Description of Artificial Sequence: Synthetic oligonucleotide
  Antisense strand to SEQ ID NO: 103960
auauuccaggacaguaaag

SEQ ID NO: 103962 - RNA, 19 nt, Artificial Sequence
  Description of Artificial Sequence: Synthetic oligonucleotide
  Sense strand starting at position 3942 of SEQ ID NO: 1311
uuuacuguccuggaauauu

SEQ ID NO: 103963 - RNA, 19 nt, Artificial Sequence
  Description of Artificial Sequence: Synthetic oligonucleotide
  Antisense strand to SEQ ID NO: 103962
aauauuccaggacaguaaa

SEQ ID NO: 103964 - RNA, 19 nt, Artificial Sequence
  Description of Artificial Sequence: Synthetic oligonucleotide
  Sense strand starting at position 26 of SEQ ID NO: 1312
gacagaguuugacucccuu

SEQ ID NO: 103965 - RNA, 19 nt, Artificial Sequence
  Description of Artificial Sequence: Synthetic oligonucleotide
  Antisense strand to SEQ ID NO: 103964
aagggagucaaacucuguc

SEQ ID NO: 103966 - RNA, 19 nt, Artificial Sequence
  Description of Artificial Sequence: Synthetic oligonucleotide
  Sense strand starting at position 30 of SEQ ID NO: 1312
gaguuugacucccuuggaa

SEQ ID NO: 103967 - RNA, 19 nt, Artificial Sequence
  Description of Artificial Sequence: Synthetic oligonucleotide
  Antisense strand to SEQ ID NO: 103966
uuccaagggagucaaacuc

SEQ ID NO: 103968 - RNA, 19 nt, Artificial Sequence
  Description of Artificial Sequence: Synthetic oligonucleotide
  Sense strand starting at position 32 of SEQ ID NO: 1312
guuugacucccuuggaauc

SEQ ID NO: 103969 - RNA, 19 nt, Artificial Sequence
  Description of Artificial Sequence: Synthetic oligonucleotide
  Antisense strand to SEQ ID NO: 103968
gauuccaagggagucaaac

SEQ ID NO: 103970 - RNA, 19 nt, Artificial Sequence
  Description of Artificial Sequence: Synthetic oligonucleotide
  Sense strand starting at position 107 of SEQ ID NO: 1312
gcugacugcauguaugaau

SEQ ID NO: 103971 - RNA, 19 nt, Artificial Sequence
  Description of Artificial Sequence: Synthetic oligonucleotide
  Antisense strand to SEQ ID NO: 103970
auucauacaugcagucagc

SEQ ID NO: 103972 - RNA, 19 nt, Artificial Sequence
  Description of Artificial Sequence: Synthetic oligonucleotide
  Sense strand starting at position 221 of SEQ ID NO: 1312
ccugcuaucccuuggagau

SEQ ID NO: 103973 - RNA, 19 nt, Artificial Sequence
  Description of Artificial Sequence: Synthetic oligonucleotide
  Antisense strand to SEQ ID NO: 103972
aucuccaagggauagcagg

SEQ ID NO: 103974 - RNA, 19 nt, Artificial Sequence
  Description of Artificial Sequence: Synthetic oligonucleotide
  Sense strand starting at position 222 of SEQ ID NO: 1312
cugcuaucccuuggagaug

SEQ ID NO: 103975 - RNA, 19 nt, Artificial Sequence
  Description of Artificial Sequence: Synthetic oligonucleotide
  Antisense strand to SEQ ID NO: 103974
caucuccaagggauagcag

SEQ ID NO: 103976 - RNA, 19 nt, Artificial Sequence
  Description of Artificial Sequence: Synthetic oligonucleotide
  Sense strand starting at position 328 of SEQ ID NO: 1312
agcucaaguugauucugau

SEQ ID NO: 103977 - RNA, 19 nt, Artificial Sequence
  Description of Artificial Sequence: Synthetic oligonucleotide
  Antisense strand to SEQ ID NO: 103976
aucagaaucaacuugagcu

SEQ ID NO: 103978 - RNA, 19 nt, Artificial Sequence
  Description of Artificial Sequence: Synthetic oligonucleotide
  Sense strand starting at position 893 of SEQ ID NO: 1312
ucguguauuaucgcugaau

SEQ ID NO: 103979 - RNA, 19 nt, Artificial Sequence
  Description of Artificial Sequence: Synthetic oligonucleotide
  Antisense strand to SEQ ID NO: 103978
auucagcgauaauacacga

SEQ ID NO: 103980 - RNA, 19 nt, Artificial Sequence
  Description of Artificial Sequence: Synthetic oligonucleotide
  Sense strand starting at position 1030 of SEQ ID NO: 1312
cugaguugcaaugggaaau

SEQ ID NO: 103981 - RNA, 19 nt, Artificial Sequence
  Description of Artificial Sequence: Synthetic oligonucleotide
  Antisense strand to SEQ ID NO: 103980
auuucccauugcaacucag

SEQ ID NO: 103982 - RNA, 19 nt, Artificial Sequence
  Description of Artificial Sequence: Synthetic oligonucleotide
  Sense strand starting at position 1031 of SEQ ID NO: 1312
ugaguugcaaugggaaauu

SEQ ID NO: 103983 - RNA, 19 nt, Artificial Sequence
  Description of Artificial Sequence: Synthetic oligonucleotide
  Antisense strand to SEQ ID NO: 103982
aauuucccauugcaacuca

SEQ ID NO: 103984 - RNA, 19 nt, Artificial Sequence
  Description of Artificial Sequence: Synthetic oligonucleotide
  Sense strand starting at position 1368 of SEQ ID NO: 1312
ugguuuccggacgacauau

SEQ ID NO: 103985 - RNA, 19 nt, Artificial Sequence
  Description of Artificial Sequence: Synthetic oligonucleotide
  Antisense strand to SEQ ID NO: 103984
auaugucguccggaaacca

SEQ ID NO: 103986 - RNA, 19 nt, Artificial Sequence
  Description of Artificial Sequence: Synthetic oligonucleotide
  Sense strand starting at position 1501 of SEQ ID NO: 1312
cggucuaugcgcuucugaa

SEQ ID NO: 103987 - RNA, 19 nt, Artificial Sequence
  Description of Artificial Sequence: Synthetic oligonucleotide
  Antisense strand to SEQ ID NO: 103986
uucagaagcgcauagaccg

SEQ ID NO: 103988 - RNA, 19 nt, Artificial Sequence
  Description of Artificial Sequence: Synthetic oligonucleotide
  Sense strand starting at position 1769 of SEQ ID NO: 1312
gguacuaggaccuggguaa

SEQ ID NO: 103989 - RNA, 19 nt, Artificial Sequence
  Description of Artificial Sequence: Synthetic oligonucleotide
  Antisense strand to SEQ ID NO: 103988
uuacccagguccuaguacc

SEQ ID NO: 103990 - RNA, 19 nt, Artificial Sequence
  Description of Artificial Sequence: Synthetic oligonucleotide
  Sense strand starting at position 1830 of SEQ ID NO: 1312
ucagcauggugaccucuaa

SEQ ID NO: 103991 - RNA, 19 nt, Artificial Sequence
  Description of Artificial Sequence: Synthetic oligonucleotide
  Antisense strand to SEQ ID NO: 103990
uuagaggucaccaugcuga

SEQ ID NO: 103992 - RNA, 19 nt, Artificial Sequence
  Description of Artificial Sequence: Synthetic oligonucleotide
  Sense strand starting at position 2135 of SEQ ID NO: 1312
gcaugcguuccguccuuaa

SEQ ID NO: 103993 - RNA, 19 nt, Artificial Sequence
  Description of Artificial Sequence: Synthetic oligonucleotide
  Antisense strand to SEQ ID NO: 103992
uuaaggacggaacgcaugc

SEQ ID NO: 103994 - RNA, 19 nt, Artificial Sequence
  Description of Artificial Sequence: Synthetic oligonucleotide
  Sense strand starting at position 2137 of SEQ ID NO: 1312
augcguuccguccuuaauc

SEQ ID NO: 103995 - RNA, 19 nt, Artificial Sequence
  Description of Artificial Sequence: Synthetic oligonucleotide
  Antisense strand to SEQ ID NO: 103994
gauuaaggacggaacgcau

SEQ ID NO: 103996 - RNA, 19 nt, Artificial Sequence
  Description of Artificial Sequence: Synthetic oligonucleotide
  Sense strand starting at position 2265 of SEQ ID NO: 1312
caaggaugggaccguguaa

SEQ ID NO: 103997 - RNA, 19 nt, Artificial Sequence
  Description of Artificial Sequence: Synthetic oligonucleotide
  Antisense strand to SEQ ID NO: 103996
uuacacggucccauccuug

SEQ ID NO: 103998 - RNA, 19 nt, Artificial Sequence
  Description of Artificial Sequence: Synthetic oligonucleotide
  Sense strand starting at position 2267 of SEQ ID NO: 1312
aggaugggaccguguaaga

SEQ ID NO: 103999 - RNA, 19 nt, Artificial Sequence
  Description of Artificial Sequence: Synthetic oligonucleotide
  Antisense strand to SEQ ID NO: 103998
ucuuacacggucccauccu

SEQ ID NO: 104000 - RNA, 19 nt, Artificial Sequence
  Description of Artificial Sequence: Synthetic oligonucleotide
  Sense strand starting at position 2319 of SEQ ID NO: 1312
ccucguagccuggagacua

SEQ ID NO: 104001 - RNA, 19 nt, Artificial Sequence
  Description of Artificial Sequence: Synthetic oligonucleotide
  Antisense strand to SEQ ID NO: 104000
uagucuccaggcuacgagg

SEQ ID NO: 104002 - RNA, 19 nt, Artificial Sequence
  Description of Artificial Sequence: Synthetic oligonucleotide
  Sense strand starting at position 2404 of SEQ ID NO: 1312
ugaucuugugggcaaguca

SEQ ID NO: 104003 - RNA, 19 nt, Artificial Sequence
  Description of Artificial Sequence: Synthetic oligonucleotide
  Antisense strand to SEQ ID NO: 104002
ugacuugcccacaagauca

SEQ ID NO: 104004 - RNA, 19 nt, Artificial Sequence
  Description of Artificial Sequence: Synthetic oligonucleotide
  Sense strand starting at position 2484 of SEQ ID NO: 1312
aggauuaacugaguuguau

SEQ ID NO: 104005 - RNA, 19 nt, Artificial Sequence
  Description of Artificial Sequence: Synthetic oligonucleotide
  Antisense strand to SEQ ID NO: 104004
auacaacucaguuaauccu

SEQ ID NO: 104006 - RNA, 19 nt, Artificial Sequence
  Description of Artificial Sequence: Synthetic oligonucleotide
  Sense strand starting at position 2492 of SEQ ID NO: 1312
cugaguuguaugcagacca

SEQ ID NO: 104007 - RNA, 19 nt, Artificial Sequence
  Description of Artificial Sequence: Synthetic oligonucleotide
  Antisense strand to SEQ ID NO: 104006
uggucugcauacaacucag

SEQ ID NO: 104008 - RNA, 19 nt, Artificial Sequence
  Description of Artificial Sequence: Synthetic oligonucleotide
  Sense strand starting at position 2502 of SEQ ID NO: 1312
ugcagaccaccugguauau

SEQ ID NO: 104009 - RNA, 19 nt, Artificial Sequence
  Description of Artificial Sequence: Synthetic oligonucleotide
  Antisense strand to SEQ ID NO: 104008
auauaccagguggucugca

SEQ ID NO: 104010 - RNA, 19 nt, Artificial Sequence
  Description of Artificial Sequence: Synthetic oligonucleotide
  Sense strand starting at position 2512 of SEQ ID NO: 1312
cugguauauagugagcauu

SEQ ID NO: 104011 - RNA, 19 nt, Artificial Sequence
  Description of Artificial Sequence: Synthetic oligonucleotide
  Antisense strand to SEQ ID NO: 104010
aaugcucacuauauaccag

SEQ ID NO: 104012 - RNA, 19 nt, Artificial Sequence
  Description of Artificial Sequence: Synthetic oligonucleotide
  Sense strand starting at position 2544 of SEQ ID NO: 1312
cggugacguuauuugugaa

SEQ ID NO: 104013 - RNA, 19 nt, Artificial Sequence
  Description of Artificial Sequence: Synthetic oligonucleotide
  Antisense strand to SEQ ID NO: 104012
uucacaaauaacgucaccg

SEQ ID NO: 104014 - RNA, 19 nt, Artificial Sequence
  Description of Artificial Sequence: Synthetic oligonucleotide
  Sense strand starting at position 2545 of SEQ ID NO: 1312
ggugacguuauuugugaaa

SEQ ID NO: 104015 - RNA, 19 nt, Artificial Sequence
  Description of Artificial Sequence: Synthetic oligonucleotide
  Antisense strand to SEQ ID NO: 104014
uuucacaaauaacgucacc

SEQ ID NO: 104016 - RNA, 19 nt, Artificial Sequence
  Description of Artificial Sequence: Synthetic oligonucleotide
  Sense strand starting at position 2557 of SEQ ID NO: 1312
ugugaaaugagugguguaa

SEQ ID NO: 104017 - RNA, 19 nt, Artificial Sequence
  Description of Artificial Sequence: Synthetic oligonucleotide
  Antisense strand to SEQ ID NO: 104016
uuacaccacucauuucaca

SEQ ID NO: 104018 - RNA, 19 nt, Artificial Sequence
  Description of Artificial Sequence: Synthetic oligonucleotide
  Sense strand starting at position 2561 of SEQ ID NO: 1312
aaaugagugguguaagggu

SEQ ID NO: 104019 - RNA, 19 nt, Artificial Sequence
  Description of Artificial Sequence: Synthetic oligonucleotide
  Antisense strand to SEQ ID NO: 104018
acccuuacaccacucauuu

SEQ ID NO: 104020 - RNA, 19 nt, Artificial Sequence
  Description of Artificial Sequence: Synthetic oligonucleotide
  Sense strand starting at position 2568 of SEQ ID NO: 1312
ugguguaaggguggauaca

SEQ ID NO: 104021 - RNA, 19 nt, Artificial Sequence
  Description of Artificial Sequence: Synthetic oligonucleotide
  Antisense strand to SEQ ID NO: 104020
uguauccacccuuacacca

SEQ ID NO: 104022 - RNA, 19 nt, Artificial Sequence
  Description of Artificial Sequence: Synthetic oligonucleotide
  Sense strand starting at position 2580 of SEQ ID NO: 1312
ggauacaaauuagaagaaa

SEQ ID NO: 104023 - RNA, 19 nt, Artificial Sequence
  Description of Artificial Sequence: Synthetic oligonucleotide
  Antisense strand to SEQ ID NO: 104022
uuucuucuaauuuguaucc

SEQ ID NO: 104024 - RNA, 19 nt, Artificial Sequence
  Description of Artificial Sequence: Synthetic oligonucleotide
  Sense strand starting at position 2688 of SEQ ID NO: 1312
gugaauacuuucucuacug

SEQ ID NO: 104025 - RNA, 19 nt, Artificial Sequence
  Description of Artificial Sequence: Synthetic oligonucleotide
  Antisense strand to SEQ ID NO: 104024
caguagagaaaguauucac

SEQ ID NO: 104026 - RNA, 19 nt, Artificial Sequence
  Description of Artificial Sequence: Synthetic oligonucleotide
  Sense strand starting at position 2709 of SEQ ID NO: 1312
uugcgaugaauguaaaucu

SEQ ID NO: 104027 - RNA, 19 nt, Artificial Sequence
  Description of Artificial Sequence: Synthetic oligonucleotide
  Antisense strand to SEQ ID NO: 104026
agauuuacauucaucgcaa

SEQ ID NO: 104028 - RNA, 19 nt, Artificial Sequence
  Description of Artificial Sequence: Synthetic oligonucleotide
  Sense strand starting at position 2793 of SEQ ID NO: 1312
gggccaacccuuugaaaug

SEQ ID NO: 104029 - RNA, 19 nt, Artificial Sequence
  Description of Artificial Sequence: Synthetic oligonucleotide
  Antisense strand to SEQ ID NO: 104028
cauuucaaaggguuggccc

SEQ ID NO: 104030 - RNA, 19 nt, Artificial Sequence
  Description of Artificial Sequence: Synthetic oligonucleotide
  Sense strand starting at position 3018 of SEQ ID NO: 1312
uugcuugaggaccaguuau

SEQ ID NO: 104031 - RNA, 19 nt, Artificial Sequence
  Description of Artificial Sequence: Synthetic oligonucleotide
  Antisense strand to SEQ ID NO: 104030
auaacugguccucaagcaa

SEQ ID NO: 104032 - RNA, 19 nt, Artificial Sequence
  Description of Artificial Sequence: Synthetic oligonucleotide
  Sense strand starting at position 3024 of SEQ ID NO: 1312
gaggaccaguuauuguuua

SEQ ID NO: 104033 - RNA, 19 nt, Artificial Sequence
  Description of Artificial Sequence: Synthetic oligonucleotide
  Antisense strand to SEQ ID NO: 104032
uaaacaauaacugguccuc

SEQ ID NO: 104034 - RNA, 19 nt, Artificial Sequence
  Description of Artificial Sequence: Synthetic oligonucleotide
  Sense strand starting at position 3126 of SEQ ID NO: 1312
ggaucaccaguguaucaca

SEQ ID NO: 104035 - RNA, 19 nt, Artificial Sequence
  Description of Artificial Sequence: Synthetic oligonucleotide
  Antisense strand to SEQ ID NO: 104034
ugugauacacuggugaucc

SEQ ID NO: 104036 - RNA, 19 nt, Artificial Sequence
  Description of Artificial Sequence: Synthetic oligonucleotide
  Sense strand starting at position 3323 of SEQ ID NO: 1312
gccacugugcccuaaggau

SEQ ID NO: 104037 - RNA, 19 nt, Artificial Sequence
  Description of Artificial Sequence: Synthetic oligonucleotide
  Antisense strand to SEQ ID NO: 104036
auccuuagggcacaguggc

SEQ ID NO: 104038 - RNA, 19 nt, Artificial Sequence
  Description of Artificial Sequence: Synthetic oligonucleotide
  Sense strand starting at position 3607 of SEQ ID NO: 1312
acccaagagugucuauaaa

SEQ ID NO: 104039 - RNA, 19 nt, Artificial Sequence
  Description of Artificial Sequence: Synthetic oligonucleotide
  Antisense strand to SEQ ID NO: 104038
uuuauagacacucuugggu

SEQ ID NO: 104040 - RNA, 19 nt, Artificial Sequence
  Description of Artificial Sequence: Synthetic oligonucleotide
  Sense strand starting at position 3718 of SEQ ID NO: 1312
augaucugguccuuaaagu

SEQ ID NO: 104041 - RNA, 19 nt, Artificial Sequence
  Description of Artificial Sequence: Synthetic oligonucleotide
  Antisense strand to SEQ ID NO: 104040
acuuuaaggaccagaucau

SEQ ID NO: 104042 - RNA, 19 nt, Artificial Sequence
  Description of Artificial Sequence: Synthetic oligonucleotide
  Sense strand starting at position 3719 of SEQ ID NO: 1312
ugaucugguccuuaaagua

SEQ ID NO: 104043 - RNA, 19 nt, Artificial Sequence
  Description of Artificial Sequence: Synthetic oligonucleotide
  Antisense strand to SEQ ID NO: 104042
uacuuuaaggaccagauca

SEQ ID NO: 104044 - RNA, 19 nt, Artificial Sequence
  Description of Artificial Sequence: Synthetic oligonucleotide
  Sense strand starting at position 3878 of SEQ ID NO: 1313
cgaauuggguaguugcaau

SEQ ID NO: 104045 - RNA, 19 nt, Artificial Sequence
  Description of Artificial Sequence: Synthetic oligonucleotide
  Antisense strand to SEQ ID NO: 104044
auugcaacuacccaauucg

SEQ ID NO: 104046 - RNA, 19 nt, Artificial Sequence
  Description of Artificial Sequence: Synthetic oligonucleotide
  Sense strand starting at position 3835 of SEQ ID NO: 1313
auuugacuguguguuaugu

SEQ ID NO: 104047 - RNA, 19 nt, Artificial Sequence
  Description of Artificial Sequence: Synthetic oligonucleotide
  Antisense strand to SEQ ID NO: 104046
acauaacacacagucaaau

SEQ ID NO: 104048 - RNA, 19 nt, Artificial Sequence
  Description of Artificial Sequence: Synthetic oligonucleotide
  Sense strand starting at position 3833 of SEQ ID NO: 1313
uuauuugacuguguguuau

SEQ ID NO: 104049 - RNA, 19 nt, Artificial Sequence
  Description of Artificial Sequence: Synthetic oligonucleotide
  Antisense strand to SEQ ID NO: 104048
auaacacacagucaaauaa

SEQ ID NO: 104050 - RNA, 19 nt, Artificial Sequence
  Description of Artificial Sequence: Synthetic oligonucleotide
  Sense strand starting at position 3830 of SEQ ID NO: 1313
ugcuuauuugacugugugu

SEQ ID NO: 104051 - RNA, 19 nt, Artificial Sequence
  Description of Artificial Sequence: Synthetic oligonucleotide
  Antisense strand to SEQ ID NO: 104050
acacacagucaaauaagca

SEQ ID NO: 104052 - RNA, 19 nt, Artificial Sequence
  Description of Artificial Sequence: Synthetic oligonucleotide
  Sense strand starting at position 3812 of SEQ ID NO: 1313
gcuguugaccuacagucau

SEQ ID NO: 104053 - RNA, 19 nt, Artificial Sequence
  Description of Artificial Sequence: Synthetic oligonucleotide
  Antisense strand to SEQ ID NO: 104052
augacuguaggucaacagc

SEQ ID NO: 104054 - RNA, 19 nt, Artificial Sequence
  Description of Artificial Sequence: Synthetic oligonucleotide
  Sense strand starting at position 3720 of SEQ ID NO: 1313
ggccuaugaccuugaagaa

SEQ ID NO: 104055 - RNA, 19 nt, Artificial Sequence
  Description of Artificial Sequence: Synthetic oligonucleotide
  Antisense strand to SEQ ID NO: 104054
uucuucaaggucauaggcc

SEQ ID NO: 104056 - RNA, 19 nt, Artificial Sequence
  Description of Artificial Sequence: Synthetic oligonucleotide
  Sense strand starting at position 3163 of SEQ ID NO: 1313
uggccuguuguccuagcua

SEQ ID NO: 104057 - RNA, 19 nt, Artificial Sequence
  Description of Artificial Sequence: Synthetic oligonucleotide
  Antisense strand to SEQ ID NO: 104056
uagcuaggacaacaggcca

SEQ ID NO: 104058 - RNA, 19 nt, Artificial Sequence
  Description of Artificial Sequence: Synthetic oligonucleotide
  Sense strand starting at position 3138 of SEQ ID NO: 1313
uagaaauuagccgggugua

SEQ ID NO: 104059 - RNA, 19 nt, Artificial Sequence
  Description of Artificial Sequence: Synthetic oligonucleotide
  Antisense strand to SEQ ID NO: 104058
uacacccggcuaauuucua

SEQ ID NO: 104060 - RNA, 19 nt, Artificial Sequence
  Description of Artificial Sequence: Synthetic oligonucleotide
  Sense strand starting at position 2902 of SEQ ID NO: 1313
cucugugucagauacuguu

SEQ ID NO: 104061 - RNA, 19 nt, Artificial Sequence
  Description of Artificial Sequence: Synthetic oligonucleotide
  Antisense strand to SEQ ID NO: 104060
aacaguaucugacacagag

SEQ ID NO: 104062 - RNA, 19 nt, Artificial Sequence
  Description of Artificial Sequence: Synthetic oligonucleotide
  Sense strand starting at position 2896 of SEQ ID NO: 1313
ugacuacucugugucagau

SEQ ID NO: 104063 - RNA, 19 nt, Artificial Sequence
  Description of Artificial Sequence: Synthetic oligonucleotide
  Antisense strand to SEQ ID NO: 104062
aucugacacagaguaguca

SEQ ID NO: 104064 - RNA, 19 nt, Artificial Sequence
  Description of Artificial Sequence: Synthetic oligonucleotide
  Sense strand starting at position 2895 of SEQ ID NO: 1313
augacuacucugugucaga

SEQ ID NO: 104065 - RNA, 19 nt, Artificial Sequence
  Description of Artificial Sequence: Synthetic oligonucleotide
  Antisense strand to SEQ ID NO: 104064
ucugacacagaguagucau

SEQ ID NO: 104066 - RNA, 19 nt, Artificial Sequence
  Description of Artificial Sequence: Synthetic oligonucleotide
  Sense strand starting at position 2893 of SEQ ID NO: 1313
gaaugacuacucuguguca

SEQ ID NO: 104067 - RNA, 19 nt, Artificial Sequence
  Description of Artificial Sequence: Synthetic oligonucleotide
  Antisense strand to SEQ ID NO: 104066
ugacacagaguagucauuc

SEQ ID NO: 104068 - RNA, 19 nt, Artificial Sequence
  Description of Artificial Sequence: Synthetic oligonucleotide
  Sense strand starting at position 2849 of SEQ ID NO: 1313
gaacuagauugggacauua

SEQ ID NO: 104069 - RNA, 19 nt, Artificial Sequence
  Description of Artificial Sequence: Synthetic oligonucleotide
  Antisense strand to SEQ ID NO: 104068
uaaugucccaaucuaguuc

SEQ ID NO: 104070 - RNA, 19 nt, Artificial Sequence
  Description of Artificial Sequence: Synthetic oligonucleotide
  Sense strand starting at position 2818 of SEQ ID NO: 1313
cagaguaagccagguccaa

SEQ ID NO: 104071 - RNA, 19 nt, Artificial Sequence
  Description of Artificial Sequence: Synthetic oligonucleotide
  Antisense strand to SEQ ID NO: 104070
uuggaccuggcuuacucug

SEQ ID NO: 104072 - RNA, 19 nt, Artificial Sequence
  Description of Artificial Sequence: Synthetic oligonucleotide
  Sense strand starting at position 2770 of SEQ ID NO: 1313
gcaucaucaguugaugcua

SEQ ID NO: 104073 - RNA, 19 nt, Artificial Sequence
  Description of Artificial Sequence: Synthetic oligonucleotide
  Antisense strand to SEQ ID NO: 104072
uagcaucaacugaugaugc

SEQ ID NO: 104074 - RNA, 19 nt, Artificial Sequence
  Description of Artificial Sequence: Synthetic oligonucleotide
  Sense strand starting at position 2671 of SEQ ID NO: 1313
acaucuaauggcuguagga

SEQ ID NO: 104075 - RNA, 19 nt, Artificial Sequence
  Description of Artificial Sequence: Synthetic oligonucleotide
  Antisense strand to SEQ ID NO: 104074
uccuacagccauuagaugu

SEQ ID NO: 104076 - RNA, 19 nt, Artificial Sequence
  Description of Artificial Sequence: Synthetic oligonucleotide
  Sense strand starting at position 2626 of SEQ ID NO: 1313
guaugcuaccuguacauau

SEQ ID NO: 104077 - RNA, 19 nt, Artificial Sequence
  Description of Artificial Sequence: Synthetic oligonucleotide
  Antisense strand to SEQ ID NO: 104076
auauguacagguagcauac

SEQ ID NO: 104078 - RNA, 19 nt, Artificial Sequence
  Description of Artificial Sequence: Synthetic oligonucleotide
  Sense strand starting at position 2434 of SEQ ID NO: 1313
gugaguuuccuauaucauc

SEQ ID NO: 104079 - RNA, 19 nt, Artificial Sequence
  Description of Artificial Sequence: Synthetic oligonucleotide
  Antisense strand to SEQ ID NO: 104078
gaugauauaggaaacucac

SEQ ID NO: 104080 - RNA, 19 nt, Artificial Sequence
  Description of Artificial Sequence: Synthetic oligonucleotide
  Sense strand starting at position 2423 of SEQ ID NO: 1313
auaaacauacugugaguuu

SEQ ID NO: 104081 - RNA, 19 nt, Artificial Sequence
  Description of Artificial Sequence: Synthetic oligonucleotide
  Antisense strand to SEQ ID NO: 104080
aaacucacaguauguuuau

SEQ ID NO: 104082 - RNA, 19 nt, Artificial Sequence
  Description of Artificial Sequence: Synthetic oligonucleotide
  Sense strand starting at position 2356 of SEQ ID NO: 1313
aucugcucuccggacgaaa

SEQ ID NO: 104083 - RNA, 19 nt, Artificial Sequence
  Description of Artificial Sequence: Synthetic oligonucleotide
  Antisense strand to SEQ ID NO: 104082
uuucguccggagagcagau

SEQ ID NO: 104084 - RNA, 19 nt, Artificial Sequence
  Description of Artificial Sequence: Synthetic oligonucleotide
  Sense strand starting at position 2269 of SEQ ID NO: 1313
uuucucuuucucgauggaa

SEQ ID NO: 104085 - RNA, 19 nt, Artificial Sequence
  Description of Artificial Sequence: Synthetic oligonucleotide
  Antisense strand to SEQ ID NO: 104084
uuccaucgagaaagagaaa

SEQ ID NO: 104086 - RNA, 19 nt, Artificial Sequence
  Description of Artificial Sequence: Synthetic oligonucleotide
  Sense strand starting at position 2264 of SEQ ID NO: 1313
agccauuucucuuucucga

SEQ ID NO: 104087 - RNA, 19 nt, Artificial Sequence
  Description of Artificial Sequence: Synthetic oligonucleotide
  Antisense strand to SEQ ID NO: 104086
ucgagaaagagaaauggcu

SEQ ID NO: 104088 - RNA, 19 nt, Artificial Sequence
  Description of Artificial Sequence: Synthetic oligonucleotide
  Sense strand starting at position 2251 of SEQ ID NO: 1313
ugauaaauauuugagccau

SEQ ID NO: 104089 - RNA, 19 nt, Artificial Sequence
  Description of Artificial Sequence: Synthetic oligonucleotide
  Antisense strand to SEQ ID NO: 104088
auggcucaaauauuuauca

SEQ ID NO: 104090 - RNA, 19 nt, Artificial Sequence
  Description of Artificial Sequence: Synthetic oligonucleotide
  Sense strand starting at position 2239 of SEQ ID NO: 1313
cugugaaauccuugauaaa

SEQ ID NO: 104091 - RNA, 19 nt, Artificial Sequence
  Description of Artificial Sequence: Synthetic oligonucleotide
  Antisense strand to SEQ ID NO: 104090
uuuaucaaggauuucacag

SEQ ID NO: 104092 - RNA, 19 nt, Artificial Sequence
  Description of Artificial Sequence: Synthetic oligonucleotide
  Sense strand starting at position 2204 of SEQ ID NO: 1313
cugagaaggucagcccaau

SEQ ID NO: 104093 - RNA, 19 nt, Artificial Sequence
  Description of Artificial Sequence: Synthetic oligonucleotide
  Antisense strand to SEQ ID NO: 104092
auugggcugaccuucucag

SEQ ID NO: 104094 - RNA, 19 nt, Artificial Sequence
  Description of Artificial Sequence: Synthetic oligonucleotide
  Sense strand starting at position 1370 of SEQ ID NO: 1313
ugauucuggucccuuaaca

SEQ ID NO: 104095 - RNA, 19 nt, Artificial Sequence
  Description of Artificial Sequence: Synthetic oligonucleotide
  Antisense strand to SEQ ID NO: 104094
uguuaagggaccagaauca

SEQ ID NO: 104096 - RNA, 19 nt, Artificial Sequence
  Description of Artificial Sequence: Synthetic oligonucleotide
  Sense strand starting at position 1367 of SEQ ID NO: 1313
gcaugauucuggucccuua

SEQ ID NO: 104097 - RNA, 19 nt, Artificial Sequence
  Description of Artificial Sequence: Synthetic oligonucleotide
  Antisense strand to SEQ ID NO: 104096
uaagggaccagaaucaugc

SEQ ID NO: 104098 - RNA, 19 nt, Artificial Sequence
  Description of Artificial Sequence: Synthetic oligonucleotide
  Sense strand starting at position 1358 of SEQ ID NO: 1313
agagucuaggcaugauucu

SEQ ID NO: 104099 - RNA, 19 nt, Artificial Sequence
  Description of Artificial Sequence: Synthetic oligonucleotide
  Antisense strand to SEQ ID NO: 104098
agaaucaugccuagacucu

SEQ ID NO: 104100 - RNA, 19 nt, Artificial Sequence
  Description of Artificial Sequence: Synthetic oligonucleotide
  Sense strand starting at position 1355 of SEQ ID NO: 1313
cagagagucuaggcaugau

SEQ ID NO: 104101 - RNA, 19 nt, Artificial Sequence
  Description of Artificial Sequence: Synthetic oligonucleotide
  Antisense strand to SEQ ID NO: 104100
aucaugccuagacucucug

SEQ ID NO: 104102 - RNA, 19 nt, Artificial Sequence
  Description of Artificial Sequence: Synthetic oligonucleotide
  Sense strand starting at position 907 of SEQ ID NO: 1313
uacaguuagguuugaggaa

SEQ ID NO: 104103 - RNA, 19 nt, Artificial Sequence
  Description of Artificial Sequence: Synthetic oligonucleotide
  Antisense strand to SEQ ID NO: 104102
uuccucaaaccuaacugua

SEQ ID NO: 104104 - RNA, 19 nt, Artificial Sequence
  Description of Artificial Sequence: Synthetic oligonucleotide
  Sense strand starting at position 881 of SEQ ID NO: 1313
ggugauuacuuguugaaua

SEQ ID NO: 104105 - RNA, 19 nt, Artificial Sequence
  Description of Artificial Sequence: Synthetic oligonucleotide
  Antisense strand to SEQ ID NO: 104104
uauucaacaaguaaucacc

SEQ ID NO: 104106 - RNA, 19 nt, Artificial Sequence
  Description of Artificial Sequence: Synthetic oligonucleotide
  Sense strand starting at position 498 of SEQ ID NO: 1313
aggauuguugagugacaca

SEQ ID NO: 104107 - RNA, 19 nt, Artificial Sequence
  Description of Artificial Sequence: Synthetic oligonucleotide
  Antisense strand to SEQ ID NO: 104106
ugugucacucaacaauccu

SEQ ID NO: 104108 - RNA, 19 nt, Artificial Sequence
  Description of Artificial Sequence: Synthetic oligonucleotide
  Sense strand starting at position 497 of SEQ ID NO: 1313
gaggauuguugagugacac

SEQ ID NO: 104109 - RNA, 19 nt, Artificial Sequence
  Description of Artificial Sequence: Synthetic oligonucleotide
  Antisense strand to SEQ ID NO: 104108
gugucacucaacaauccuc

SEQ ID NO: 104110 - RNA, 19 nt, Artificial Sequence
  Description of Artificial Sequence: Synthetic oligonucleotide
  Sense strand starting at position 496 of SEQ ID NO: 1313
ggaggauuguugagugaca

SEQ ID NO: 104111 - RNA, 19 nt, Artificial Sequence
  Description of Artificial Sequence: Synthetic oligonucleotide
  Antisense strand to SEQ ID NO: 104110
ugucacucaacaauccucc

SEQ ID NO: 104112 - RNA, 19 nt, Artificial Sequence
  Description of Artificial Sequence: Synthetic oligonucleotide
  Sense strand starting at position 411 of SEQ ID NO: 1313
gagacucccucuguacaga

SEQ ID NO: 104113 - RNA, 19 nt, Artificial Sequence
  Description of Artificial Sequence: Synthetic oligonucleotide
  Antisense strand to SEQ ID NO: 104112
ucuguacagagggagucuc

SEQ ID NO: 104114 - RNA, 19 nt, Artificial Sequence
  Description of Artificial Sequence: Synthetic oligonucleotide
  Sense strand starting at position 93 of SEQ ID NO: 1313
uuaccagauuggucuugaa

SEQ ID NO: 104115 - RNA, 19 nt, Artificial Sequence
  Description of Artificial Sequence: Synthetic oligonucleotide
  Antisense strand to SEQ ID NO: 104114
uucaagaccaaucugguaa

SEQ ID NO: 104116 - RNA, 19 nt, Artificial Sequence
  Description of Artificial Sequence: Synthetic oligonucleotide
  Sense strand starting at position 90 of SEQ ID NO: 1313
uguuuaccagauuggucuu

SEQ ID NO: 104117 - RNA, 19 nt, Artificial Sequence
  Description of Artificial Sequence: Synthetic oligonucleotide
  Antisense strand to SEQ ID NO: 104116
aagaccaaucugguaaaca

SEQ ID NO: 104118 - RNA, 19 nt, Artificial Sequence
  Description of Artificial Sequence: Synthetic oligonucleotide
  Sense strand starting at position 87 of SEQ ID NO: 1313
cuauguuuaccagauuggu

SEQ ID NO: 104119 - RNA, 19 nt, Artificial Sequence
  Description of Artificial Sequence: Synthetic oligonucleotide
  Antisense strand to SEQ ID NO: 104118
accaaucugguaaacauag

SEQ ID NO: 104120 - RNA, 19 nt, Artificial Sequence
  Description of Artificial Sequence: Synthetic oligonucleotide
  Sense strand starting at position 82 of SEQ ID NO: 1313
ucuugcuauguuuaccaga

SEQ ID NO: 104121 - RNA, 19 nt, Artificial Sequence
  Description of Artificial Sequence: Synthetic oligonucleotide
  Antisense strand to SEQ ID NO: 104120
ucugguaaacauagcaaga

SEQ ID NO: 104122 - RNA, 19 nt, Artificial Sequence
  Description of Artificial Sequence: Synthetic oligonucleotide
  Sense strand starting at position 2 of SEQ ID NO: 1313
ugcuguaucuuuccugaaa

SEQ ID NO: 104123 - RNA, 19 nt, Artificial Sequence
  Description of Artificial Sequence: Synthetic oligonucleotide
  Antisense strand to SEQ ID NO: 104122
uuucaggaaagauacagca

SEQ ID NO: 104124 - RNA, 19 nt, Artificial Sequence
  Description of Artificial Sequence: Synthetic oligonucleotide
  Sense strand starting at position 3976 of SEQ ID NO: 1314
agguaugcaucacuuaaug

SEQ ID NO: 104125 - RNA, 19 nt, Artificial Sequence
  Description of Artificial Sequence: Synthetic oligonucleotide
  Antisense strand to SEQ ID NO: 104124
cauuaagugaugcauaccu

SEQ ID NO: 104126 - RNA, 19 nt, Artificial Sequence
  Description of Artificial Sequence: Synthetic oligonucleotide
  Sense strand starting at position 3674 of SEQ ID NO: 1314
ggacucauucuguagccca

SEQ ID NO: 104127 - RNA, 19 nt, Artificial Sequence
  Description of Artificial Sequence: Synthetic oligonucleotide
  Antisense strand to SEQ ID NO: 104126
ugggcuacagaaugagucc

SEQ ID NO: 104128 - RNA, 19 nt, Artificial Sequence
  Description of Artificial Sequence: Synthetic oligonucleotide
  Sense strand starting at position 3316 of SEQ ID NO: 1314
aaaggacucuguuuaagac

SEQ ID NO: 104129 - RNA, 19 nt, Artificial Sequence
  Description of Artificial Sequence: Synthetic oligonucleotide
  Antisense strand to SEQ ID NO: 104128
gucuuaaacagaguccuuu

SEQ ID NO: 104130 - RNA, 19 nt, Artificial Sequence
  Description of Artificial Sequence: Synthetic oligonucleotide
  Sense strand starting at position 3241 of SEQ ID NO: 1314
ggcauuuccuaacugcuua

SEQ ID NO: 104131 - RNA, 19 nt, Artificial Sequence
  Description of Artificial Sequence: Synthetic oligonucleotide
  Antisense strand to SEQ ID NO: 104130
uaagcaguuaggaaaugcc

SEQ ID NO: 104132 - RNA, 19 nt, Artificial Sequence
  Description of Artificial Sequence: Synthetic oligonucleotide
  Sense strand starting at position 3175 of SEQ ID NO: 1314
uuugcagaauacuugauau

SEQ ID NO: 104133 - RNA, 19 nt, Artificial Sequence
  Description of Artificial Sequence: Synthetic oligonucleotide
  Antisense strand to SEQ ID NO: 104132
auaucaaguauucugcaaa

SEQ ID NO: 104134 - RNA, 19 nt, Artificial Sequence
  Description of Artificial Sequence: Synthetic oligonucleotide
  Sense strand starting at position 3155 of SEQ ID NO: 1314
gggugauauguguaucuaa

SEQ ID NO: 104135 - RNA, 19 nt, Artificial Sequence
  Description of Artificial Sequence: Synthetic oligonucleotide
  Antisense strand to SEQ ID NO: 104134
uuagauacacauaucaccc

SEQ ID NO: 104136 - RNA, 19 nt, Artificial Sequence
  Description of Artificial Sequence: Synthetic oligonucleotide
  Sense strand starting at position 3147 of SEQ ID NO: 1314
uauauaucgggugauaugu

SEQ ID NO: 104137 - RNA, 19 nt, Artificial Sequence
  Description of Artificial Sequence: Synthetic oligonucleotide
  Antisense strand to SEQ ID NO: 104136
acauaucacccgauauaua

SEQ ID NO: 104138 - RNA, 19 nt, Artificial Sequence
  Description of Artificial Sequence: Synthetic oligonucleotide
  Sense strand starting at position 3124 of SEQ ID NO: 1314
augucauauguguauguua

SEQ ID NO: 104139 - RNA, 19 nt, Artificial Sequence
  Description of Artificial Sequence: Synthetic oligonucleotide
  Antisense strand to SEQ ID NO: 104138
uaacauacacauaugacau

SEQ ID NO: 104140 - RNA, 19 nt, Artificial Sequence
  Description of Artificial Sequence: Synthetic oligonucleotide
  Sense strand starting at position 3100 of SEQ ID NO: 1314
uaaugaugugcacaacugu

SEQ ID NO: 104141 - RNA, 19 nt, Artificial Sequence
  Description of Artificial Sequence: Synthetic oligonucleotide
  Antisense strand to SEQ ID NO: 104140
acaguugugcacaucauua

SEQ ID NO: 104142 - RNA, 19 nt, Artificial Sequence
  Description of Artificial Sequence: Synthetic oligonucleotide
  Sense strand starting at position 3056 of SEQ ID NO: 1314
ccuguuaugccagacagug

SEQ ID NO: 104143 - RNA, 19 nt, Artificial Sequence
  Description of Artificial Sequence: Synthetic oligonucleotide
  Antisense strand to SEQ ID NO: 104142
cacugucuggcauaacagg

SEQ ID NO: 104144 - RNA, 19 nt, Artificial Sequence
  Description of Artificial Sequence: Synthetic oligonucleotide
  Sense strand starting at position 3045 of SEQ ID NO: 1314
uauguugaguaccuguuau

SEQ ID NO: 104145 - RNA, 19 nt, Artificial Sequence
  Description of Artificial Sequence: Synthetic oligonucleotide
  Antisense strand to SEQ ID NO: 104144
auaacagguacucaacaua

SEQ ID NO: 104146 - RNA, 19 nt, Artificial Sequence
  Description of Artificial Sequence: Synthetic oligonucleotide
  Sense strand starting at position 3031 of SEQ ID NO: 1314
aguugauucgcauauaugu

SEQ ID NO: 104147 - RNA, 19 nt, Artificial Sequence
  Description of Artificial Sequence: Synthetic oligonucleotide
  Antisense strand to SEQ ID NO: 104146
acauauaugcgaaucaacu

SEQ ID NO: 104148 - RNA, 19 nt, Artificial Sequence
  Description of Artificial Sequence: Synthetic oligonucleotide
  Sense strand starting at position 2927 of SEQ ID NO: 1314
gaaugcagucauuaagcgu

SEQ ID NO: 104149 - RNA, 19 nt, Artificial Sequence
  Description of Artificial Sequence: Synthetic oligonucleotide
  Antisense strand to SEQ ID NO: 104148
acgcuuaaugacugcauuc

SEQ ID NO: 104150 - RNA, 19 nt, Artificial Sequence
  Description of Artificial Sequence: Synthetic oligonucleotide
  Sense strand starting at position 2843 of SEQ ID NO: 1314
cuaacaguccguuaucucu

SEQ ID NO: 104151 - RNA, 19 nt, Artificial Sequence
  Description of Artificial Sequence: Synthetic oligonucleotide
  Antisense strand to SEQ ID NO: 104150
agagauaacggacuguuag

SEQ ID NO: 104152 - RNA, 19 nt, Artificial Sequence
  Description of Artificial Sequence: Synthetic oligonucleotide
  Sense strand starting at position 2817 of SEQ ID NO: 1314
guuucuuugucuguagaau

SEQ ID NO: 104153 - RNA, 19 nt, Artificial Sequence
  Description of Artificial Sequence: Synthetic oligonucleotide
  Antisense strand to SEQ ID NO: 104152
auucuacagacaaagaaac

SEQ ID NO: 104154 - RNA, 19 nt, Artificial Sequence
  Description of Artificial Sequence: Synthetic oligonucleotide
  Sense strand starting at position 2816 of SEQ ID NO: 1314
gguuucuuugucuguagaa

SEQ ID NO: 104155 - RNA, 19 nt, Artificial Sequence
  Description of Artificial Sequence: Synthetic oligonucleotide
  Antisense strand to SEQ ID NO: 104154
uucuacagacaaagaaacc

SEQ ID NO: 104156 - RNA, 19 nt, Artificial Sequence
  Description of Artificial Sequence: Synthetic oligonucleotide
  Sense strand starting at position 2767 of SEQ ID NO: 1314
uuaagacuugugugaucuu

SEQ ID NO: 104157 - RNA, 19 nt, Artificial Sequence
  Description of Artificial Sequence: Synthetic oligonucleotide
  Antisense strand to SEQ ID NO: 104156
aagaucacacaagucuuaa

SEQ ID NO: 104158 - RNA, 19 nt, Artificial Sequence
  Description of Artificial Sequence: Synthetic oligonucleotide
  Sense strand starting at position 2763 of SEQ ID NO: 1314
cuaguuaagacuuguguga

SEQ ID NO: 104159 - RNA, 19 nt, Artificial Sequence
  Description of Artificial Sequence: Synthetic oligonucleotide
  Antisense strand to SEQ ID NO: 104158
ucacacaagucuuaacuag

SEQ ID NO: 104160 - RNA, 19 nt, Artificial Sequence
  Description of Artificial Sequence: Synthetic oligonucleotide
  Sense strand starting at position 2594 of SEQ ID NO: 1314
guccuaaacugaguccuuu

SEQ ID NO: 104161 - RNA, 19 nt, Artificial Sequence
  Description of Artificial Sequence: Synthetic oligonucleotide
  Antisense strand to SEQ ID NO: 104160
aaaggacucaguuuaggac

SEQ ID NO: 104162 - RNA, 19 nt, Artificial Sequence
  Description of Artificial Sequence: Synthetic oligonucleotide
  Sense strand starting at position 2573 of SEQ ID NO: 1314
acaggagcuuucgucuuaa

SEQ ID NO: 104163 - RNA, 19 nt, Artificial Sequence
  Description of Artificial Sequence: Synthetic oligonucleotide
  Antisense strand to SEQ ID NO: 104162
uuaagacgaaagcuccugu

SEQ ID NO: 104164 - RNA, 19 nt, Artificial Sequence
  Description of Artificial Sequence: Synthetic oligonucleotide
  Sense strand starting at position 2554 of SEQ ID NO: 1314
gugucuuguaggcaaguga

SEQ ID NO: 104165 - RNA, 19 nt, Artificial Sequence
  Description of Artificial Sequence: Synthetic oligonucleotide
  Antisense strand to SEQ ID NO: 104164
ucacuugccuacaagacac

SEQ ID NO: 104166 - RNA, 19 nt, Artificial Sequence
  Description of Artificial Sequence: Synthetic oligonucleotide
  Sense strand starting at position 2517 of SEQ ID NO: 1314
ccaagcugucagugaacuu

SEQ ID NO: 104167 - RNA, 19 nt, Artificial Sequence
  Description of Artificial Sequence: Synthetic oligonucleotide
  Antisense strand to SEQ ID NO: 104166
aaguucacugacagcuugg

SEQ ID NO: 104168 - RNA, 19 nt, Artificial Sequence
  Description of Artificial Sequence: Synthetic oligonucleotide
  Sense strand starting at position 2367 of SEQ ID NO: 1314
gggucauucuaagcugauc

SEQ ID NO: 104169 - RNA, 19 nt, Artificial Sequence
  Description of Artificial Sequence: Synthetic oligonucleotide
  Antisense strand to SEQ ID NO: 104168
gaucagcuuagaaugaccc

SEQ ID NO: 104170 - RNA, 19 nt, Artificial Sequence
  Description of Artificial Sequence: Synthetic oligonucleotide
  Sense strand starting at position 2327 of SEQ ID NO: 1314
uuuaaagucguuggaagca

SEQ ID NO: 104171 - RNA, 19 nt, Artificial Sequence
  Description of Artificial Sequence: Synthetic oligonucleotide
  Antisense strand to SEQ ID NO: 104170
ugcuuccaacgacuuuaaa

SEQ ID NO: 104172 - RNA, 19 nt, Artificial Sequence
  Description of Artificial Sequence: Synthetic oligonucleotide
  Sense strand starting at position 2251 of SEQ ID NO: 1314
caggauuggccgcauaauu

SEQ ID NO: 104173 - RNA, 19 nt, Artificial Sequence
  Description of Artificial Sequence: Synthetic oligonucleotide
  Antisense strand to SEQ ID NO: 104172
aauuaugcggccaauccug

SEQ ID NO: 104174 - RNA, 19 nt, Artificial Sequence
  Description of Artificial Sequence: Synthetic oligonucleotide
  Sense strand starting at position 2231 of SEQ ID NO: 1314
ugcuaaagguugucacuua

SEQ ID NO: 104175 - RNA, 19 nt, Artificial Sequence
  Description of Artificial Sequence: Synthetic oligonucleotide
  Antisense strand to SEQ ID NO: 104174
uaagugacaaccuuuagca

SEQ ID NO: 104176 - RNA, 19 nt, Artificial Sequence
  Description of Artificial Sequence: Synthetic oligonucleotide
  Sense strand starting at position 2178 of SEQ ID NO: 1314
guggaacauauucgagaga

SEQ ID NO: 104177 - RNA, 19 nt, Artificial Sequence
  Description of Artificial Sequence: Synthetic oligonucleotide
  Antisense strand to SEQ ID NO: 104176
ucucucgaauauguuccac

SEQ ID NO: 104178 - RNA, 19 nt, Artificial Sequence
  Description of Artificial Sequence: Synthetic oligonucleotide
  Sense strand starting at position 1594 of SEQ ID NO: 1314
agcggaacaccucgaggau

SEQ ID NO: 104179 - RNA, 19 nt, Artificial Sequence
  Description of Artificial Sequence: Synthetic oligonucleotide
  Antisense strand to SEQ ID NO: 104178
auccucgagguguuccgcu

SEQ ID NO: 104180 - RNA, 19 nt, Artificial Sequence
  Description of Artificial Sequence: Synthetic oligonucleotide
  Sense strand starting at position 1479 of SEQ ID NO: 1314
gcaagagcaccugaaacua

SEQ ID NO: 104181 - RNA, 19 nt, Artificial Sequence
  Description of Artificial Sequence: Synthetic oligonucleotide
  Antisense strand to SEQ ID NO: 104180
uaguuucaggugcucuugc

SEQ ID NO: 104182 - RNA, 19 nt, Artificial Sequence
  Description of Artificial Sequence: Synthetic oligonucleotide
  Sense strand starting at position 1325 of SEQ ID NO: 1314
ggaacaaaccugugcugaa

SEQ ID NO: 104183 - RNA, 19 nt, Artificial Sequence
  Description of Artificial Sequence: Synthetic oligonucleotide
  Antisense strand to SEQ ID NO: 104182
uucagcacagguuuguucc

SEQ ID NO: 104184 - RNA, 19 nt, Artificial Sequence
  Description of Artificial Sequence: Synthetic oligonucleotide
  Sense strand starting at position 1258 of SEQ ID NO: 1314
gcgcaaaccauacgaagau

SEQ ID NO: 104185 - RNA, 19 nt, Artificial Sequence
  Description of Artificial Sequence: Synthetic oligonucleotide
  Antisense strand to SEQ ID NO: 104184
aucuucguaugguuugcgc

SEQ ID NO: 104186 - RNA, 19 nt, Artificial Sequence
  Description of Artificial Sequence: Synthetic oligonucleotide
  Sense strand starting at position 1228 of SEQ ID NO: 1314
gagggauccuauuaacuga

SEQ ID NO: 104187 - RNA, 19 nt, Artificial Sequence
  Description of Artificial Sequence: Synthetic oligonucleotide
  Antisense strand to SEQ ID NO: 104186
ucaguuaauaggaucccuc

SEQ ID NO: 104188 - RNA, 19 nt, Artificial Sequence
  Description of Artificial Sequence: Synthetic oligonucleotide
  Sense strand starting at position 499 of SEQ ID NO: 1314
auaggcuuuccuugugacu

SEQ ID NO: 104189 - RNA, 19 nt, Artificial Sequence
  Description of Artificial Sequence: Synthetic oligonucleotide
  Antisense strand to SEQ ID NO: 104188
agucacaaggaaagccuau

SEQ ID NO: 104190 - RNA, 19 nt, Artificial Sequence
  Description of Artificial Sequence: Synthetic oligonucleotide
  Sense strand starting at position 479 of SEQ ID NO: 1314
aacguuaggcucgauaaga

SEQ ID NO: 104191 - RNA, 19 nt, Artificial Sequence
  Description of Artificial Sequence: Synthetic oligonucleotide
  Antisense strand to SEQ ID NO: 104190
ucuuaucgagccuaacguu

SEQ ID NO: 104192 - RNA, 19 nt, Artificial Sequence
  Description of Artificial Sequence: Synthetic oligonucleotide
  Sense strand starting at position 478 of SEQ ID NO: 1314
aaacguuaggcucgauaag

SEQ ID NO: 104193 - RNA, 19 nt, Artificial Sequence
  Description of Artificial Sequence: Synthetic oligonucleotide
  Antisense strand to SEQ ID NO: 104192
cuuaucgagccuaacguuu

SEQ ID NO: 104194 - RNA, 19 nt, Artificial Sequence
  Description of Artificial Sequence: Synthetic oligonucleotide
  Sense strand starting at position 461 of SEQ ID NO: 1314
ggaauauguuucuccuaaa

SEQ ID NO: 104195 - RNA, 19 nt, Artificial Sequence
  Description of Artificial Sequence: Synthetic oligonucleotide
  Antisense strand to SEQ ID NO: 104194
uuuaggagaaacauauucc

SEQ ID NO: 104196 - RNA, 19 nt, Artificial Sequence
  Description of Artificial Sequence: Synthetic oligonucleotide
  Sense strand starting at position 460 of SEQ ID NO: 1314
cggaauauguuucuccuaa

SEQ ID NO: 104197 - RNA, 19 nt, Artificial Sequence
  Description of Artificial Sequence: Synthetic oligonucleotide
  Antisense strand to SEQ ID NO: 104196
uuaggagaaacauauuccg

SEQ ID NO: 104198 - RNA, 19 nt, Artificial Sequence
  Description of Artificial Sequence: Synthetic oligonucleotide
  Sense strand starting at position 384 of SEQ ID NO: 1314
gagaccuuucccgaccaca

SEQ ID NO: 104199 - RNA, 19 nt, Artificial Sequence
  Description of Artificial Sequence: Synthetic oligonucleotide
  Antisense strand to SEQ ID NO: 104198
uguggucgggaaaggucuc

SEQ ID NO: 104200 - RNA, 19 nt, Artificial Sequence
  Description of Artificial Sequence: Synthetic oligonucleotide
  Sense strand starting at position 338 of SEQ ID NO: 1314
gcucgcuuccuuucuuuau

SEQ ID NO: 104201 - RNA, 19 nt, Artificial Sequence
  Description of Artificial Sequence: Synthetic oligonucleotide
  Antisense strand to SEQ ID NO: 104200
auaaagaaaggaagcgagc

SEQ ID NO: 104202 - RNA, 19 nt, Artificial Sequence
  Description of Artificial Sequence: Synthetic oligonucleotide
  Sense strand starting at position 87 of SEQ ID NO: 1314
ucacauggguccucugcua

SEQ ID NO: 104203 - RNA, 19 nt, Artificial Sequence
  Description of Artificial Sequence: Synthetic oligonucleotide
  Antisense strand to SEQ ID NO: 104202
uagcagaggacccauguga

SEQ ID NO: 104204 - RNA, 19 nt, Artificial Sequence
  Description of Artificial Sequence: Synthetic oligonucleotide
  Sense strand starting at position 3741 of SEQ ID NO: 1315
cuaagucugugaccaauuc

SEQ ID NO: 104205 - RNA, 19 nt, Artificial Sequence
  Description of Artificial Sequence: Synthetic oligonucleotide
  Antisense strand to SEQ ID NO: 104204
gaauuggucacagacuuag

SEQ ID NO: 104206 - RNA, 19 nt, Artificial Sequence
  Description of Artificial Sequence: Synthetic oligonucleotide
  Sense strand starting at position 3631 of SEQ ID NO: 1315
uucuuuggguaauucugau

SEQ ID NO: 104207 - RNA, 19 nt, Artificial Sequence
  Description of Artificial Sequence: Synthetic oligonucleotide
  Antisense strand to SEQ ID NO: 104206
aucagaauuacccaaagaa

SEQ ID NO: 104208 - RNA, 19 nt, Artificial Sequence
  Description of Artificial Sequence: Synthetic oligonucleotide
  Sense strand starting at position 3628 of SEQ ID NO: 1315
uccuucuuuggguaauucu

SEQ ID NO: 104209 - RNA, 19 nt, Artificial Sequence
  Description of Artificial Sequence: Synthetic oligonucleotide
  Antisense strand to SEQ ID NO: 104208
agaauuacccaaagaagga

SEQ ID NO: 104210 - RNA, 19 nt, Artificial Sequence
  Description of Artificial Sequence: Synthetic oligonucleotide
  Sense strand starting at position 3607 of SEQ ID NO: 1315
guuuccuuauuugaagaca

SEQ ID NO: 104211 - RNA, 19 nt, Artificial Sequence
  Description of Artificial Sequence: Synthetic oligonucleotide
  Antisense strand to SEQ ID NO: 104210
ugucuucaaauaaggaaac

SEQ ID NO: 104212 - RNA, 19 nt, Artificial Sequence
  Description of Artificial Sequence: Synthetic oligonucleotide
  Sense strand starting at position 3601 of SEQ ID NO: 1315
guuaguguuuccuuauuug

SEQ ID NO: 104213 - RNA, 19 nt, Artificial Sequence
  Description of Artificial Sequence: Synthetic oligonucleotide
  Antisense strand to SEQ ID NO: 104212
caaauaaggaaacacuaac

SEQ ID NO: 104214 - RNA, 19 nt, Artificial Sequence
  Description of Artificial Sequence: Synthetic oligonucleotide
  Sense strand starting at position 3598 of SEQ ID NO: 1315
cccguuaguguuuccuuau

SEQ ID NO: 104215 - RNA, 19 nt, Artificial Sequence
  Description of Artificial Sequence: Synthetic oligonucleotide
  Antisense strand to SEQ ID NO: 104214
auaaggaaacacuaacggg

SEQ ID NO: 104216 - RNA, 19 nt, Artificial Sequence
  Description of Artificial Sequence: Synthetic oligonucleotide
  Sense strand starting at position 3579 of SEQ ID NO: 1315
uguggugaccaucaacuua

SEQ ID NO: 104217 - RNA, 19 nt, Artificial Sequence
  Description of Artificial Sequence: Synthetic oligonucleotide
  Antisense strand to SEQ ID NO: 104216
uaaguugauggucaccaca

SEQ ID NO: 104218 - RNA, 19 nt, Artificial Sequence
  Description of Artificial Sequence: Synthetic oligonucleotide
  Sense strand starting at position 3106 of SEQ ID NO: 1315
cugugauugcacuacuaug

SEQ ID NO: 104219 - RNA, 19 nt, Artificial Sequence
  Description of Artificial Sequence: Synthetic oligonucleotide
  Antisense strand to SEQ ID NO: 104218
cauaguagugcaaucacag

SEQ ID NO: 104220 - RNA, 19 nt, Artificial Sequence
  Description of Artificial Sequence: Synthetic oligonucleotide
  Sense strand starting at position 2995 of SEQ ID NO: 1315
aagaaaucagcugggcaua

SEQ ID NO: 104221 - RNA, 19 nt, Artificial Sequence
  Description of Artificial Sequence: Synthetic oligonucleotide
  Antisense strand to SEQ ID NO: 104220
uaugcccagcugauuucuu

SEQ ID NO: 104222 - RNA, 19 nt, Artificial Sequence
  Description of Artificial Sequence: Synthetic oligonucleotide
  Sense strand starting at position 2805 of SEQ ID NO: 1315
uuggaaugauuauugcaca

SEQ ID NO: 104223 - RNA, 19 nt, Artificial Sequence
  Description of Artificial Sequence: Synthetic oligonucleotide
  Antisense strand to SEQ ID NO: 104222
ugugcaauaaucauuccaa

SEQ ID NO: 104224 - RNA, 19 nt, Artificial Sequence
  Description of Artificial Sequence: Synthetic oligonucleotide
  Sense strand starting at position 2799 of SEQ ID NO: 1315
cuguucuuggaaugauuau

SEQ ID NO: 104225 - RNA, 19 nt, Artificial Sequence
  Description of Artificial Sequence: Synthetic oligonucleotide
  Antisense strand to SEQ ID NO: 104224
auaaucauuccaagaacag

SEQ ID NO: 104226 - RNA, 19 nt, Artificial Sequence
  Description of Artificial Sequence: Synthetic oligonucleotide
  Sense strand starting at position 2795 of SEQ ID NO: 1315
aucucuguucuuggaauga

SEQ ID NO: 104227 - RNA, 19 nt, Artificial Sequence
  Description of Artificial Sequence: Synthetic oligonucleotide
  Antisense strand to SEQ ID NO: 104226
ucauuccaagaacagagau

SEQ ID NO: 104228 - RNA, 19 nt, Artificial Sequence
  Description of Artificial Sequence: Synthetic oligonucleotide
  Sense strand starting at position 2793 of SEQ ID NO: 1315
acaucucuguucuuggaau

SEQ ID NO: 104229 - RNA, 19 nt, Artificial Sequence
  Description of Artificial Sequence: Synthetic oligonucleotide
  Antisense strand to SEQ ID NO: 104228
auuccaagaacagagaugu

SEQ ID NO: 104230 - RNA, 19 nt, Artificial Sequence
  Description of Artificial Sequence: Synthetic oligonucleotide
  Sense strand starting at position 2791 of SEQ ID NO: 1315
gaacaucucuguucuugga

SEQ ID NO: 104231 - RNA, 19 nt, Artificial Sequence
  Description of Artificial Sequence: Synthetic oligonucleotide
  Antisense strand to SEQ ID NO: 104230
uccaagaacagagauguuc

SEQ ID NO: 104232 - RNA, 19 nt, Artificial Sequence
  Description of Artificial Sequence: Synthetic oligonucleotide
  Sense strand starting at position 2722 of SEQ ID NO: 1315
acuguugaguaucucaaua

SEQ ID NO: 104233 - RNA, 19 nt, Artificial Sequence
  Description of Artificial Sequence: Synthetic oligonucleotide
  Antisense strand to SEQ ID NO: 104232
uauugagauacucaacagu

SEQ ID NO: 104234 - RNA, 19 nt, Artificial Sequence
  Description of Artificial Sequence: Synthetic oligonucleotide
  Sense strand starting at position 2719 of SEQ ID NO: 1315
gccacuguugaguaucuca

SEQ ID NO: 104235 - RNA, 19 nt, Artificial Sequence
  Description of Artificial Sequence: Synthetic oligonucleotide
  Antisense strand to SEQ ID NO: 104234
ugagauacucaacaguggc

SEQ ID NO: 104236 - RNA, 19 nt, Artificial Sequence
  Description of Artificial Sequence: Synthetic oligonucleotide
  Sense strand starting at position 2647 of SEQ ID NO: 1315
ugacgaaauuaucuggaua

SEQ ID NO: 104237 - RNA, 19 nt, Artificial Sequence
  Description of Artificial Sequence: Synthetic oligonucleotide
  Antisense strand to SEQ ID NO: 104236
uauccagauaauuucguca

SEQ ID NO: 104238 - RNA, 19 nt, Artificial Sequence
  Description of Artificial Sequence: Synthetic oligonucleotide
  Sense strand starting at position 2536 of SEQ ID NO: 1315
caguuaauggcacacuaga

SEQ ID NO: 104239 - RNA, 19 nt, Artificial Sequence
  Description of Artificial Sequence: Synthetic oligonucleotide
  Antisense strand to SEQ ID NO: 104238
ucuagugugccauuaacug

SEQ ID NO: 104240 - RNA, 19 nt, Artificial Sequence
  Description of Artificial Sequence: Synthetic oligonucleotide
  Sense strand starting at position 2466 of SEQ ID NO: 1315
uggguaagaucucucaguu

SEQ ID NO: 104241 - RNA, 19 nt, Artificial Sequence
  Description of Artificial Sequence: Synthetic oligonucleotide
  Antisense strand to SEQ ID NO: 104240
aacugagagaucuuaccca

SEQ ID NO: 104242 - RNA, 19 nt, Artificial Sequence
  Description of Artificial Sequence: Synthetic oligonucleotide
  Sense strand starting at position 2366 of SEQ ID NO: 1315
uugaucuugugaccaaaua

SEQ ID NO: 104243 - RNA, 19 nt, Artificial Sequence
  Description of Artificial Sequence: Synthetic oligonucleotide
  Antisense strand to SEQ ID NO: 104242
uauuuggucacaagaucaa

SEQ ID NO: 104244 - RNA, 19 nt, Artificial Sequence
  Description of Artificial Sequence: Synthetic oligonucleotide
  Sense strand starting at position 2320 of SEQ ID NO: 1315
acacaaugagaacguguaa

SEQ ID NO: 104245 - RNA, 19 nt, Artificial Sequence
  Description of Artificial Sequence: Synthetic oligonucleotide
  Antisense strand to SEQ ID NO: 104244
uuacacguucucauugugu

SEQ ID NO: 104246 - RNA, 19 nt, Artificial Sequence
  Description of Artificial Sequence: Synthetic oligonucleotide
  Sense strand starting at position 2029 of SEQ ID NO: 1315
cucagcuuuccacauggau

SEQ ID NO: 104247 - RNA, 19 nt, Artificial Sequence
  Description of Artificial Sequence: Synthetic oligonucleotide
  Antisense strand to SEQ ID NO: 104246
auccauguggaaagcugag

SEQ ID NO: 104248 - RNA, 19 nt, Artificial Sequence
  Description of Artificial Sequence: Synthetic oligonucleotide
  Sense strand starting at position 1394 of SEQ ID NO: 1315
ggacguuauaugggauacu

SEQ ID NO: 104249 - RNA, 19 nt, Artificial Sequence
  Description of Artificial Sequence: Synthetic oligonucleotide
  Antisense strand to SEQ ID NO: 104248
aguaucccauauaacgucc

SEQ ID NO: 104250 - RNA, 19 nt, Artificial Sequence
  Description of Artificial Sequence: Synthetic oligonucleotide
  Sense strand starting at position 1392 of SEQ ID NO: 1315
agggacguuauaugggaua

SEQ ID NO: 104251 - RNA, 19 nt, Artificial Sequence
  Description of Artificial Sequence: Synthetic oligonucleotide
  Antisense strand to SEQ ID NO: 104250
uaucccauauaacgucccu

SEQ ID NO: 104252 - RNA, 19 nt, Artificial Sequence
  Description of Artificial Sequence: Synthetic oligonucleotide
  Sense strand starting at position 1385 of SEQ ID NO: 1315
cacugugagggacguuaua

SEQ ID NO: 104253 - RNA, 19 nt, Artificial Sequence
  Description of Artificial Sequence: Synthetic oligonucleotide
  Antisense strand to SEQ ID NO: 104252
uauaacgucccucacagug

SEQ ID NO: 104254 - RNA, 19 nt, Artificial Sequence
  Description of Artificial Sequence: Synthetic oligonucleotide
  Sense strand starting at position 1295 of SEQ ID NO: 1315
uuagcaggauuuggagaau

SEQ ID NO: 104255 - RNA, 19 nt, Artificial Sequence
  Description of Artificial Sequence: Synthetic oligonucleotide
  Antisense strand to SEQ ID NO: 104254
auucuccaaauccugcuaa

SEQ ID NO: 104256 - RNA, 19 nt, Artificial Sequence
  Description of Artificial Sequence: Synthetic oligonucleotide
  Sense strand starting at position 1109 of SEQ ID NO: 1315
gugggagguucaccauguu

SEQ ID NO: 104257 - RNA, 19 nt, Artificial Sequence
  Description of Artificial Sequence: Synthetic oligonucleotide
  Antisense strand to SEQ ID NO: 104256
aacauggugaaccucccac

SEQ ID NO: 104258 - RNA, 19 nt, Artificial Sequence
  Description of Artificial Sequence: Synthetic oligonucleotide
  Sense strand starting at position 853 of SEQ ID NO: 1315
augcuuugucaugaauaga

SEQ ID NO: 104259 - RNA, 19 nt, Artificial Sequence
  Description of Artificial Sequence: Synthetic oligonucleotide
  Antisense strand to SEQ ID NO: 104258
ucuauucaugacaaagcau

SEQ ID NO: 104260 - RNA, 19 nt, Artificial Sequence
  Description of Artificial Sequence: Synthetic oligonucleotide
  Sense strand starting at position 826 of SEQ ID NO: 1315
uguugcaaucgugugugaa

SEQ ID NO: 104261 - RNA, 19 nt, Artificial Sequence
  Description of Artificial Sequence: Synthetic oligonucleotide
  Antisense strand to SEQ ID NO: 104260
uucacacacgauugcaaca

SEQ ID NO: 104262 - RNA, 19 nt, Artificial Sequence
  Description of Artificial Sequence: Synthetic oligonucleotide
  Sense strand starting at position 513 of SEQ ID NO: 1315
agcaauucucugggaggua

SEQ ID NO: 104263 - RNA, 19 nt, Artificial Sequence
  Description of Artificial Sequence: Synthetic oligonucleotide
  Antisense strand to SEQ ID NO: 104262
uaccucccagagaauugcu

SEQ ID NO: 104264 - RNA, 19 nt, Artificial Sequence
  Description of Artificial Sequence: Synthetic oligonucleotide
  Sense strand starting at position 485 of SEQ ID NO: 1315
cccauaauuugggaacaaa

SEQ ID NO: 104265 - RNA, 19 nt, Artificial Sequence
  Description of Artificial Sequence: Synthetic oligonucleotide
  Antisense strand to SEQ ID NO: 104264
uuuguucccaaauuauggg

SEQ ID NO: 104266 - RNA, 19 nt, Artificial Sequence
  Description of Artificial Sequence: Synthetic oligonucleotide
  Sense strand starting at position 484 of SEQ ID NO: 1315
gcccauaauuugggaacaa

SEQ ID NO: 104267 - RNA, 19 nt, Artificial Sequence
  Description of Artificial Sequence: Synthetic oligonucleotide
  Antisense strand to SEQ ID NO: 104266
uuguucccaaauuaugggc

SEQ ID NO: 104268 - RNA, 19 nt, Artificial Sequence
  Description of Artificial Sequence: Synthetic oligonucleotide
  Sense strand starting at position 448 of SEQ ID NO: 1315
guagaaguggccuaggaaa

SEQ ID NO: 104269 - RNA, 19 nt, Artificial Sequence
  Description of Artificial Sequence: Synthetic oligonucleotide
  Antisense strand to SEQ ID NO: 104268
uuuccuaggccacuucuac

SEQ ID NO: 104270 - RNA, 19 nt, Artificial Sequence
  Description of Artificial Sequence: Synthetic oligonucleotide
  Sense strand starting at position 437 of SEQ ID NO: 1315
gucacaucuagguagaagu

SEQ ID NO: 104271 - RNA, 19 nt, Artificial Sequence
  Description of Artificial Sequence: Synthetic oligonucleotide
  Antisense strand to SEQ ID NO: 104270
acuucuaccuagaugugac

SEQ ID NO: 104272 - RNA, 19 nt, Artificial Sequence
  Description of Artificial Sequence: Synthetic oligonucleotide
  Sense strand starting at position 435 of SEQ ID NO: 1315
uagucacaucuagguagaa

SEQ ID NO: 104273 - RNA, 19 nt, Artificial Sequence
  Description of Artificial Sequence: Synthetic oligonucleotide
  Antisense strand to SEQ ID NO: 104272
uucuaccuagaugugacua

SEQ ID NO: 104274 - RNA, 19 nt, Artificial Sequence
  Description of Artificial Sequence: Synthetic oligonucleotide
  Sense strand starting at position 417 of SEQ ID NO: 1315
agaucugagcuguggagau

SEQ ID NO: 104275 - RNA, 19 nt, Artificial Sequence
  Description of Artificial Sequence: Synthetic oligonucleotide
  Antisense strand to SEQ ID NO: 104274
aucuccacagcucagaucu

SEQ ID NO: 104276 - RNA, 19 nt, Artificial Sequence
  Description of Artificial Sequence: Synthetic oligonucleotide
  Sense strand starting at position 394 of SEQ ID NO: 1315
gaaguaagucuggagugua

SEQ ID NO: 104277 - RNA, 19 nt, Artificial Sequence
  Description of Artificial Sequence: Synthetic oligonucleotide
  Antisense strand to SEQ ID NO: 104276
uacacuccagacuuacuuc

SEQ ID NO: 104278 - RNA, 19 nt, Artificial Sequence
  Description of Artificial Sequence: Synthetic oligonucleotide
  Sense strand starting at position 349 of SEQ ID NO: 1315
ugagguauccauuagucca

SEQ ID NO: 104279 - RNA, 19 nt, Artificial Sequence
  Description of Artificial Sequence: Synthetic oligonucleotide
  Antisense strand to SEQ ID NO: 104278
uggacuaauggauaccuca

SEQ ID NO: 104280 - RNA, 19 nt, Artificial Sequence
  Description of Artificial Sequence: Synthetic oligonucleotide
  Sense strand starting at position 346 of SEQ ID NO: 1315
gccugagguauccauuagu

SEQ ID NO: 104281 - RNA, 19 nt, Artificial Sequence
  Description of Artificial Sequence: Synthetic oligonucleotide
  Antisense strand to SEQ ID NO: 104280
acuaauggauaccucaggc

SEQ ID NO: 104282 - RNA, 19 nt, Artificial Sequence
  Description of Artificial Sequence: Synthetic oligonucleotide
  Sense strand starting at position 338 of SEQ ID NO: 1315
uauagucagccugagguau

SEQ ID NO: 104283 - RNA, 19 nt, Artificial Sequence
  Description of Artificial Sequence: Synthetic oligonucleotide
  Antisense strand to SEQ ID NO: 104282
auaccucaggcugacuaua

SEQ ID NO: 104284 - RNA, 19 nt, Artificial Sequence
  Description of Artificial Sequence: Synthetic oligonucleotide
  Sense strand starting at position 34 of SEQ ID NO: 1316
uguggcucucaggauagaa

SEQ ID NO: 104285 - RNA, 19 nt, Artificial Sequence
  Description of Artificial Sequence: Synthetic oligonucleotide
  Antisense strand to SEQ ID NO: 104284
uucuauccugagagccaca

SEQ ID NO: 104286 - RNA, 19 nt, Artificial Sequence
  Description of Artificial Sequence: Synthetic oligonucleotide
  Sense strand starting at position 154 of SEQ ID NO: 1316
uggaucucuugucugggaa

SEQ ID NO: 104287 - RNA, 19 nt, Artificial Sequence
  Description of Artificial Sequence: Synthetic oligonucleotide
  Antisense strand to SEQ ID NO: 104286
uucccagacaagagaucca

SEQ ID NO: 104288 - RNA, 19 nt, Artificial Sequence
  Description of Artificial Sequence: Synthetic oligonucleotide
  Sense strand starting at position 155 of SEQ ID NO: 1316
ggaucucuugucugggaac

SEQ ID NO: 104289 - RNA, 19 nt, Artificial Sequence
  Description of Artificial Sequence: Synthetic oligonucleotide
  Antisense strand to SEQ ID NO: 104288
guucccagacaagagaucc

SEQ ID NO: 104290 - RNA, 19 nt, Artificial Sequence
  Description of Artificial Sequence: Synthetic oligonucleotide
  Sense strand starting at position 157 of SEQ ID NO: 1316
aucucuugucugggaacuu

SEQ ID NO: 104291 - RNA, 19 nt, Artificial Sequence
  Description of Artificial Sequence: Synthetic oligonucleotide
  Antisense strand to SEQ ID NO: 104290
aaguucccagacaagagau

SEQ ID NO: 104292 - RNA, 19 nt, Artificial Sequence
  Description of Artificial Sequence: Synthetic oligonucleotide
  Sense strand starting at position 423 of SEQ ID NO: 1316
aggacuuuauaagaaagau

SEQ ID NO: 104293 - RNA, 19 nt, Artificial Sequence
  Description of Artificial Sequence: Synthetic oligonucleotide
  Antisense strand to SEQ ID NO: 104292
aucuuucuuauaaaguccu

SEQ ID NO: 104294 - RNA, 19 nt, Artificial Sequence
  Description of Artificial Sequence: Synthetic oligonucleotide
  Sense strand starting at position 445 of SEQ ID NO: 1316
auuuaauccuacgaaguag

SEQ ID NO: 104295 - RNA, 19 nt, Artificial Sequence
  Description of Artificial Sequence: Synthetic oligonucleotide
  Antisense strand to SEQ ID NO: 104294
cuacuucguaggauuaaau

SEQ ID NO: 104296 - RNA, 19 nt, Artificial Sequence
  Description of Artificial Sequence: Synthetic oligonucleotide
  Sense strand starting at position 524 of SEQ ID NO: 1316
uagagucaguaagugguaa

SEQ ID NO: 104297 - RNA, 19 nt, Artificial Sequence
  Description of Artificial Sequence: Synthetic oligonucleotide
  Antisense strand to SEQ ID NO: 104296
uuaccacuuacugacucua

SEQ ID NO: 104298 - RNA, 19 nt, Artificial Sequence
  Description of Artificial Sequence: Synthetic oligonucleotide
  Sense strand starting at position 525 of SEQ ID NO: 1316
agagucaguaagugguaaa

SEQ ID NO: 104299 - RNA, 19 nt, Artificial Sequence
  Description of Artificial Sequence: Synthetic oligonucleotide
  Antisense strand to SEQ ID NO: 104298
uuuaccacuuacugacucu

SEQ ID NO: 104300 - RNA, 19 nt, Artificial Sequence
  Description of Artificial Sequence: Synthetic oligonucleotide
  Sense strand starting at position 526 of SEQ ID NO: 1316
gagucaguaagugguaaag

SEQ ID NO: 104301 - RNA, 19 nt, Artificial Sequence
  Description of Artificial Sequence: Synthetic oligonucleotide
  Antisense strand to SEQ ID NO: 104300
cuuuaccacuuacugacuc

SEQ ID NO: 104302 - RNA, 19 nt, Artificial Sequence
  Description of Artificial Sequence: Synthetic oligonucleotide
  Sense strand starting at position 567 of SEQ ID NO: 1316
cugacucauggauguuaca

SEQ ID NO: 104303 - RNA, 19 nt, Artificial Sequence
  Description of Artificial Sequence: Synthetic oligonucleotide
  Antisense strand to SEQ ID NO: 104302
uguaacauccaugagucag

SEQ ID NO: 104304 - RNA, 19 nt, Artificial Sequence
  Description of Artificial Sequence: Synthetic oligonucleotide
  Sense strand starting at position 588 of SEQ ID NO: 1316
guguguuagaacuagccuu

SEQ ID NO: 104305 - RNA, 19 nt, Artificial Sequence
  Description of Artificial Sequence: Synthetic oligonucleotide
  Antisense strand to SEQ ID NO: 104304
aaggcuaguucuaacacac

SEQ ID NO: 104306 - RNA, 19 nt, Artificial Sequence
  Description of Artificial Sequence: Synthetic oligonucleotide
  Sense strand starting at position 690 of SEQ ID NO: 1316
uuggcagaagucuguauuu

SEQ ID NO: 104307 - RNA, 19 nt, Artificial Sequence
  Description of Artificial Sequence: Synthetic oligonucleotide
  Antisense strand to SEQ ID NO: 104306
aaauacagacuucugccaa

SEQ ID NO: 104308 - RNA, 19 nt, Artificial Sequence
  Description of Artificial Sequence: Synthetic oligonucleotide
  Sense strand starting at position 791 of SEQ ID NO: 1316
gcaacaagcuuggugaaga

SEQ ID NO: 104309 - RNA, 19 nt, Artificial Sequence
  Description of Artificial Sequence: Synthetic oligonucleotide
  Antisense strand to SEQ ID NO: 104308
ucuucaccaagcuuguugc

SEQ ID NO: 104310 - RNA, 19 nt, Artificial Sequence
  Description of Artificial Sequence: Synthetic oligonucleotide
  Sense strand starting at position 858 of SEQ ID NO: 1316
agcacuagcccauagucaa

SEQ ID NO: 104311 - RNA, 19 nt, Artificial Sequence
  Description of Artificial Sequence: Synthetic oligonucleotide
  Antisense strand to SEQ ID NO: 104310
uugacuaugggcuagugcu

SEQ ID NO: 104312 - RNA, 19 nt, Artificial Sequence
  Description of Artificial Sequence: Synthetic oligonucleotide
  Sense strand starting at position 1117 of SEQ ID NO: 1316
caggauucccuguaguaag

SEQ ID NO: 104313 - RNA, 19 nt, Artificial Sequence
  Description of Artificial Sequence: Synthetic oligonucleotide
  Antisense strand to SEQ ID NO: 104312
cuuacuacagggaauccug

SEQ ID NO: 104314 - RNA, 19 nt, Artificial Sequence
  Description of Artificial Sequence: Synthetic oligonucleotide
  Sense strand starting at position 1490 of SEQ ID NO: 1316
aggucucuuccuuacacau

SEQ ID NO: 104315 - RNA, 19 nt, Artificial Sequence
  Description of Artificial Sequence: Synthetic oligonucleotide
  Antisense strand to SEQ ID NO: 104314
auguguaaggaagagaccu

SEQ ID NO: 104316 - RNA, 19 nt, Artificial Sequence
  Description of Artificial Sequence: Synthetic oligonucleotide
  Sense strand starting at position 1589 of SEQ ID NO: 1316
ggacucagcuuuccuagga

SEQ ID NO: 104317 - RNA, 19 nt, Artificial Sequence
  Description of Artificial Sequence: Synthetic oligonucleotide
  Antisense strand to SEQ ID NO: 104316
uccuaggaaagcugagucc

SEQ ID NO: 104318 - RNA, 19 nt, Artificial Sequence
  Description of Artificial Sequence: Synthetic oligonucleotide
  Sense strand starting at position 1703 of SEQ ID NO: 1316
ucccuaauggccuguaaac

SEQ ID NO: 104319 - RNA, 19 nt, Artificial Sequence
  Description of Artificial Sequence: Synthetic oligonucleotide
  Antisense strand to SEQ ID NO: 104318
guuuacaggccauuaggga

SEQ ID NO: 104320 - RNA, 19 nt, Artificial Sequence
  Description of Artificial Sequence: Synthetic oligonucleotide
  Sense strand starting at position 1772 of SEQ ID NO: 1316
gagaaugcuccacacaugu

SEQ ID NO: 104321 - RNA, 19 nt, Artificial Sequence
  Description of Artificial Sequence: Synthetic oligonucleotide
  Antisense strand to SEQ ID NO: 104320
acauguguggagcauucuc

SEQ ID NO: 104322 - RNA, 19 nt, Artificial Sequence
  Description of Artificial Sequence: Synthetic oligonucleotide
  Sense strand starting at position 2097 of SEQ ID NO: 1316
cucgacuuucuccaagcau

SEQ ID NO: 104323 - RNA, 19 nt, Artificial Sequence
  Description of Artificial Sequence: Synthetic oligonucleotide
  Antisense strand to SEQ ID NO: 104322
augcuuggagaaagucgag

SEQ ID NO: 104324 - RNA, 19 nt, Artificial Sequence
  Description of Artificial Sequence: Synthetic oligonucleotide
  Sense strand starting at position 2244 of SEQ ID NO: 1316
guucccauguuugugauuu

SEQ ID NO: 104325 - RNA, 19 nt, Artificial Sequence
  Description of Artificial Sequence: Synthetic oligonucleotide
  Antisense strand to SEQ ID NO: 104324
aaaucacaaacaugggaac

SEQ ID NO: 104326 - RNA, 19 nt, Artificial Sequence
  Description of Artificial Sequence: Synthetic oligonucleotide
  Sense strand starting at position 2263 of SEQ ID NO: 1316
uguuauuucuacucuguuu

SEQ ID NO: 104327 - RNA, 19 nt, Artificial Sequence
  Description of Artificial Sequence: Synthetic oligonucleotide
  Antisense strand to SEQ ID NO: 104326
aaacagaguagaaauaaca

SEQ ID NO: 104328 - RNA, 19 nt, Artificial Sequence
  Description of Artificial Sequence: Synthetic oligonucleotide
  Sense strand starting at position 2278 of SEQ ID NO: 1316
guuuccucagagcaaugaa

SEQ ID NO: 104329 - RNA, 19 nt, Artificial Sequence
  Description of Artificial Sequence: Synthetic oligonucleotide
  Antisense strand to SEQ ID NO: 104328
uucauugcucugaggaaac

SEQ ID NO: 104330 - RNA, 19 nt, Artificial Sequence
  Description of Artificial Sequence: Synthetic oligonucleotide
  Sense strand starting at position 2281 of SEQ ID NO: 1316
uccucagagcaaugaaaca

SEQ ID NO: 104331 - RNA, 19 nt, Artificial Sequence
  Description of Artificial Sequence: Synthetic oligonucleotide
  Antisense strand to SEQ ID NO: 104330
uguuucauugcucugagga

SEQ ID NO: 104332 - RNA, 19 nt, Artificial Sequence
  Description of Artificial Sequence: Synthetic oligonucleotide
  Sense strand starting at position 2331 of SEQ ID NO: 1316
cucuaaguauacgugaacu

SEQ ID NO: 104333 - RNA, 19 nt, Artificial Sequence
  Description of Artificial Sequence: Synthetic oligonucleotide
  Antisense strand to SEQ ID NO: 104332
aguucacguauacuuagag

SEQ ID NO: 104334 - RNA, 19 nt, Artificial Sequence
  Description of Artificial Sequence: Synthetic oligonucleotide
  Sense strand starting at position 2333 of SEQ ID NO: 1316
cuaaguauacgugaacugu

SEQ ID NO: 104335 - RNA, 19 nt, Artificial Sequence
  Description of Artificial Sequence: Synthetic oligonucleotide
  Antisense strand to SEQ ID NO: 104334
acaguucacguauacuuag

SEQ ID NO: 104336 - RNA, 19 nt, Artificial Sequence
  Description of Artificial Sequence: Synthetic oligonucleotide
  Sense strand starting at position 2462 of SEQ ID NO: 1316
uguggcauuucccuggauu

SEQ ID NO: 104337 - RNA, 19 nt, Artificial Sequence
  Description of Artificial Sequence: Synthetic oligonucleotide
  Antisense strand to SEQ ID NO: 104336
aauccagggaaaugccaca

SEQ ID NO: 104338 - RNA, 19 nt, Artificial Sequence
  Description of Artificial Sequence: Synthetic oligonucleotide
  Sense strand starting at position 2475 of SEQ ID NO: 1316
uggauuaaugguuaacgca

SEQ ID NO: 104339 - RNA, 19 nt, Artificial Sequence
  Description of Artificial Sequence: Synthetic oligonucleotide
  Antisense strand to SEQ ID NO: 104338
ugcguuaaccauuaaucca

SEQ ID NO: 104340 - RNA, 19 nt, Artificial Sequence
  Description of Artificial Sequence: Synthetic oligonucleotide
  Sense strand starting at position 2521 of SEQ ID NO: 1316
aucaaagagugcuuugaau

SEQ ID NO: 104341 - RNA, 19 nt, Artificial Sequence
  Description of Artificial Sequence: Synthetic oligonucleotide
  Antisense strand to SEQ ID NO: 104340
auucaaagcacucuuugau

SEQ ID NO: 104342 - RNA, 19 nt, Artificial Sequence
  Description of Artificial Sequence: Synthetic oligonucleotide
  Sense strand starting at position 2527 of SEQ ID NO: 1316
gagugcuuugaauaaccau

SEQ ID NO: 104343 - RNA, 19 nt, Artificial Sequence
  Description of Artificial Sequence: Synthetic oligonucleotide
  Antisense strand to SEQ ID NO: 104342
augguuauucaaagcacuc

SEQ ID NO: 104344 - RNA, 19 nt, Artificial Sequence
  Description of Artificial Sequence: Synthetic oligonucleotide
  Sense strand starting at position 2546 of SEQ ID NO: 1316
uaacucucugguuaagcga

SEQ ID NO: 104345 - RNA, 19 nt, Artificial Sequence
  Description of Artificial Sequence: Synthetic oligonucleotide
  Antisense strand to SEQ ID NO: 104344
ucgcuuaaccagagaguua

SEQ ID NO: 104346 - RNA, 19 nt, Artificial Sequence
  Description of Artificial Sequence: Synthetic oligonucleotide
  Sense strand starting at position 2561 of SEQ ID NO: 1316
gcgaaagaaacacguuaau

SEQ ID NO: 104347 - RNA, 19 nt, Artificial Sequence
  Description of Artificial Sequence: Synthetic oligonucleotide
  Antisense strand to SEQ ID NO: 104346
auuaacguguuucuuucgc

SEQ ID NO: 104348 - RNA, 19 nt, Artificial Sequence
  Description of Artificial Sequence: Synthetic oligonucleotide
  Sense strand starting at position 2702 of SEQ ID NO: 1316
ccgguaaccuuguuacaag

SEQ ID NO: 104349 - RNA, 19 nt, Artificial Sequence
  Description of Artificial Sequence: Synthetic oligonucleotide
  Antisense strand to SEQ ID NO: 104348
cuuguaacaagguuaccgg

SEQ ID NO: 104350 - RNA, 19 nt, Artificial Sequence
  Description of Artificial Sequence: Synthetic oligonucleotide
  Sense strand starting at position 2713 of SEQ ID NO: 1316
guuacaaggacuugguaaa

SEQ ID NO: 104351 - RNA, 19 nt, Artificial Sequence
  Description of Artificial Sequence: Synthetic oligonucleotide
  Antisense strand to SEQ ID NO: 104350
uuuaccaaguccuuguaac

SEQ ID NO: 104352 - RNA, 19 nt, Artificial Sequence
  Description of Artificial Sequence: Synthetic oligonucleotide
  Sense strand starting at position 2862 of SEQ ID NO: 1316
aguaaagucucaucuauug

SEQ ID NO: 104353 - RNA, 19 nt, Artificial Sequence
  Description of Artificial Sequence: Synthetic oligonucleotide
  Antisense strand to SEQ ID NO: 104352
caauagaugagacuuuacu

SEQ ID NO: 104354 - RNA, 19 nt, Artificial Sequence
  Description of Artificial Sequence: Synthetic oligonucleotide
  Sense strand starting at position 3037 of SEQ ID NO: 1316
aacugaguguggcuagauu

SEQ ID NO: 104355 - RNA, 19 nt, Artificial Sequence
  Description of Artificial Sequence: Synthetic oligonucleotide
  Antisense strand to SEQ ID NO: 104354
aaucuagccacacucaguu

SEQ ID NO: 104356 - RNA, 19 nt, Artificial Sequence
  Description of Artificial Sequence: Synthetic oligonucleotide
  Sense strand starting at position 3480 of SEQ ID NO: 1316
cugcuagacuuaguaggaa

SEQ ID NO: 104357 - RNA, 19 nt, Artificial Sequence
  Description of Artificial Sequence: Synthetic oligonucleotide
  Antisense strand to SEQ ID NO: 104356
uuccuacuaagucuagcag

SEQ ID NO: 104358 - RNA, 19 nt, Artificial Sequence
  Description of Artificial Sequence: Synthetic oligonucleotide
  Sense strand starting at position 3599 of SEQ ID NO: 1316
gagccucucuguuccagau

SEQ ID NO: 104359 - RNA, 19 nt, Artificial Sequence
  Description of Artificial Sequence: Synthetic oligonucleotide
  Antisense strand to SEQ ID NO: 104358
aucuggaacagagaggcuc

SEQ ID NO: 104360 - RNA, 19 nt, Artificial Sequence
  Description of Artificial Sequence: Synthetic oligonucleotide
  Sense strand starting at position 3647 of SEQ ID NO: 1316
ugugcauuucccuggcagu

SEQ ID NO: 104361 - RNA, 19 nt, Artificial Sequence
  Description of Artificial Sequence: Synthetic oligonucleotide
  Antisense strand to SEQ ID NO: 104360
acugccagggaaaugcaca

SEQ ID NO: 104362 - RNA, 19 nt, Artificial Sequence
  Description of Artificial Sequence: Synthetic oligonucleotide
  Sense strand starting at position 3922 of SEQ ID NO: 1316
agaaguggugggcgacauu

SEQ ID NO: 104363 - RNA, 19 nt, Artificial Sequence
  Description of Artificial Sequence: Synthetic oligonucleotide
  Antisense strand to SEQ ID NO: 104362
aaugucgcccaccacuucu

SEQ ID NO: 104364 - RNA, 19 nt, Artificial Sequence
  Description of Artificial Sequence: Synthetic oligonucleotide
  Sense strand starting at position 3904 of SEQ ID NO: 1317
cgcuucagcgcaggaauua

SEQ ID NO: 104365 - RNA, 19 nt, Artificial Sequence
  Description of Artificial Sequence: Synthetic oligonucleotide
  Antisense strand to SEQ ID NO: 104364
uaauuccugcgcugaagcg

SEQ ID NO: 104366 - RNA, 19 nt, Artificial Sequence
  Description of Artificial Sequence: Synthetic oligonucleotide
  Sense strand starting at position 3770 of SEQ ID NO: 1317
ucgagaaugugaggguaga

SEQ ID NO: 104367 - RNA, 19 nt, Artificial Sequence
  Description of Artificial Sequence: Synthetic oligonucleotide
  Antisense strand to SEQ ID NO: 104366
ucuacccucacauucucga

SEQ ID NO: 104368 - RNA, 19 nt, Artificial Sequence
  Description of Artificial Sequence: Synthetic oligonucleotide
  Sense strand starting at position 3759 of SEQ ID NO: 1317
aguccagaaauucgagaau

SEQ ID NO: 104369 - RNA, 19 nt, Artificial Sequence
  Description of Artificial Sequence: Synthetic oligonucleotide
  Antisense strand to SEQ ID NO: 104368
auucucgaauuucuggacu

SEQ ID NO: 104370 - RNA, 19 nt, Artificial Sequence
  Description of Artificial Sequence: Synthetic oligonucleotide
  Sense strand starting at position 3227 of SEQ ID NO: 1317
ggcugagucagggaaucau

SEQ ID NO: 104371 - RNA, 19 nt, Artificial Sequence
  Description of Artificial Sequence: Synthetic oligonucleotide
  Antisense strand to SEQ ID NO: 104370
augauucccugacucagcc

SEQ ID NO: 104372 - RNA, 19 nt, Artificial Sequence
  Description of Artificial Sequence: Synthetic oligonucleotide
  Sense strand starting at position 3013 of SEQ ID NO: 1317
acauucuuguguguauuua

SEQ ID NO: 104373 - RNA, 19 nt, Artificial Sequence
  Description of Artificial Sequence: Synthetic oligonucleotide
  Antisense strand to SEQ ID NO: 104372
uaaauacacacaagaaugu

SEQ ID NO: 104374 - RNA, 19 nt, Artificial Sequence
  Description of Artificial Sequence: Synthetic oligonucleotide
  Sense strand starting at position 3010 of SEQ ID NO: 1317
uuaacauucuuguguguau

SEQ ID NO: 104375 - RNA, 19 nt, Artificial Sequence
  Description of Artificial Sequence: Synthetic oligonucleotide
  Antisense strand to SEQ ID NO: 104374
auacacacaagaauguuaa

SEQ ID NO: 104376 - RNA, 19 nt, Artificial Sequence
  Description of Artificial Sequence: Synthetic oligonucleotide
  Sense strand starting at position 3008 of SEQ ID NO: 1317
gauuaacauucuugugugu

SEQ ID NO: 104377 - RNA, 19 nt, Artificial Sequence
  Description of Artificial Sequence: Synthetic oligonucleotide
  Antisense strand to SEQ ID NO: 104376
acacacaagaauguuaauc

SEQ ID NO: 104378 - RNA, 19 nt, Artificial Sequence
  Description of Artificial Sequence: Synthetic oligonucleotide
  Sense strand starting at position 2993 of SEQ ID NO: 1317
gcuauuaggugcuaugauu

SEQ ID NO: 104379 - RNA, 19 nt, Artificial Sequence
  Description of Artificial Sequence: Synthetic oligonucleotide
  Antisense strand to SEQ ID NO: 104378
aaucauagcaccuaauagc

SEQ ID NO: 104380 - RNA, 19 nt, Artificial Sequence
  Description of Artificial Sequence: Synthetic oligonucleotide
  Sense strand starting at position 2583 of SEQ ID NO: 1317
guaugaauacgccaccacu

SEQ ID NO: 104381 - RNA, 19 nt, Artificial Sequence
  Description of Artificial Sequence: Synthetic oligonucleotide
  Antisense strand to SEQ ID NO: 104380
agugguggcguauucauac

SEQ ID NO: 104382 - RNA, 19 nt, Artificial Sequence
  Description of Artificial Sequence: Synthetic oligonucleotide
  Sense strand starting at position 2567 of SEQ ID NO: 1317
ugcggaauaguccauugua

SEQ ID NO: 104383 - RNA, 19 nt, Artificial Sequence
  Description of Artificial Sequence: Synthetic oligonucleotide
  Antisense strand to SEQ ID NO: 104382
uacaauggacuauuccgca

SEQ ID NO: 104384 - RNA, 19 nt, Artificial Sequence
  Description of Artificial Sequence: Synthetic oligonucleotide
  Sense strand starting at position 2509 of SEQ ID NO: 1317
cucaauaugguuuauguaa

SEQ ID NO: 104385 - RNA, 19 nt, Artificial Sequence
  Description of Artificial Sequence: Synthetic oligonucleotide
  Antisense strand to SEQ ID NO: 104384
uuacauaaaccauauugag

SEQ ID NO: 104386 - RNA, 19 nt, Artificial Sequence
  Description of Artificial Sequence: Synthetic oligonucleotide
  Sense strand starting at position 2507 of SEQ ID NO: 1317
ugcucaauaugguuuaugu

SEQ ID NO: 104387 - RNA, 19 nt, Artificial Sequence
  Description of Artificial Sequence: Synthetic oligonucleotide
  Antisense strand to SEQ ID NO: 104386
acauaaaccauauugagca

SEQ ID NO: 104388 - RNA, 19 nt, Artificial Sequence
  Description of Artificial Sequence: Synthetic oligonucleotide
  Sense strand starting at position 2456 of SEQ ID NO: 1317
cuguguaucuaacaccuua

SEQ ID NO: 104389 - RNA, 19 nt, Artificial Sequence
  Description of Artificial Sequence: Synthetic oligonucleotide
  Antisense strand to SEQ ID NO: 104388
uaagguguuagauacacag

SEQ ID NO: 104390 - RNA, 19 nt, Artificial Sequence
  Description of Artificial Sequence: Synthetic oligonucleotide
  Sense strand starting at position 2449 of SEQ ID NO: 1317
ucuaucucuguguaucuaa

SEQ ID NO: 104391 - RNA, 19 nt, Artificial Sequence
  Description of Artificial Sequence: Synthetic oligonucleotide
  Antisense strand to SEQ ID NO: 104390
uuagauacacagagauaga

SEQ ID NO: 104392 - RNA, 19 nt, Artificial Sequence
  Description of Artificial Sequence: Synthetic oligonucleotide
  Sense strand starting at position 2445 of SEQ ID NO: 1317
uuuaucuaucucuguguau

SEQ ID NO: 104393 - RNA, 19 nt, Artificial Sequence
  Description of Artificial Sequence: Synthetic oligonucleotide
  Antisense strand to SEQ ID NO: 104392
auacacagagauagauaaa

SEQ ID NO: 104394 - RNA, 19 nt, Artificial Sequence
  Description of Artificial Sequence: Synthetic oligonucleotide
  Sense strand starting at position 2427 of SEQ ID NO: 1317
cucuaucauuuacacguau

SEQ ID NO: 104395 - RNA, 19 nt, Artificial Sequence
  Description of Artificial Sequence: Synthetic oligonucleotide
  Antisense strand to SEQ ID NO: 104394
auacguguaaaugauagag

SEQ ID NO: 104396 - RNA, 19 nt, Artificial Sequence
  Description of Artificial Sequence: Synthetic oligonucleotide
  Sense strand starting at position 2410 of SEQ ID NO: 1317
uggcuuagcuaucauaucu

SEQ ID NO: 104397 - RNA, 19 nt, Artificial Sequence
  Description of Artificial Sequence: Synthetic oligonucleotide
  Antisense strand to SEQ ID NO: 104396
agauaugauagcuaagcca

SEQ ID NO: 104398 - RNA, 19 nt, Artificial Sequence
  Description of Artificial Sequence: Synthetic oligonucleotide
  Sense strand starting at position 2403 of SEQ ID NO: 1317
uguggacuggcuuagcuau

SEQ ID NO: 104399 - RNA, 19 nt, Artificial Sequence
  Description of Artificial Sequence: Synthetic oligonucleotide
  Antisense strand to SEQ ID NO: 104398
auagcuaagccaguccaca

SEQ ID NO: 104400 - RNA, 19 nt, Artificial Sequence
  Description of Artificial Sequence: Synthetic oligonucleotide
  Sense strand starting at position 2391 of SEQ ID NO: 1317
cgacuaauaaccuguggac

SEQ ID NO: 104401 - RNA, 19 nt, Artificial Sequence
  Description of Artificial Sequence: Synthetic oligonucleotide
  Antisense strand to SEQ ID NO: 104400
guccacagguuauuagucg

SEQ ID NO: 104402 - RNA, 19 nt, Artificial Sequence
  Description of Artificial Sequence: Synthetic oligonucleotide
  Sense strand starting at position 2018 of SEQ ID NO: 1317
gcuacuuauuggcccgcaa

SEQ ID NO: 104403 - RNA, 19 nt, Artificial Sequence
  Description of Artificial Sequence: Synthetic oligonucleotide
  Antisense strand to SEQ ID NO: 104402
uugcgggccaauaaguagc

SEQ ID NO: 104404 - RNA, 19 nt, Artificial Sequence
  Description of Artificial Sequence: Synthetic oligonucleotide
  Sense strand starting at position 2008 of SEQ ID NO: 1317
guuauucucggcuacuuau

SEQ ID NO: 104405 - RNA, 19 nt, Artificial Sequence
  Description of Artificial Sequence: Synthetic oligonucleotide
  Antisense strand to SEQ ID NO: 104404
auaaguagccgagaauaac

SEQ ID NO: 104406 - RNA, 19 nt, Artificial Sequence
  Description of Artificial Sequence: Synthetic oligonucleotide
  Sense strand starting at position 2006 of SEQ ID NO: 1317
guguuauucucggcuacuu

SEQ ID NO: 104407 - RNA, 19 nt, Artificial Sequence
  Description of Artificial Sequence: Synthetic oligonucleotide
  Antisense strand to SEQ ID NO: 104406
aaguagccgagaauaacac

SEQ ID NO: 104408 - RNA, 19 nt, Artificial Sequence
  Description of Artificial Sequence: Synthetic oligonucleotide
  Sense strand starting at position 2005 of SEQ ID NO: 1317
gguguuauucucggcuacu

SEQ ID NO: 104409 - RNA, 19 nt, Artificial Sequence
  Description of Artificial Sequence: Synthetic oligonucleotide
  Antisense strand to SEQ ID NO: 104408
aguagccgagaauaacacc

SEQ ID NO: 104410 - RNA, 19 nt, Artificial Sequence
  Description of Artificial Sequence: Synthetic oligonucleotide
  Sense strand starting at position 2004 of SEQ ID NO: 1317
ggguguuauucucggcuac

SEQ ID NO: 104411 - RNA, 19 nt, Artificial Sequence
  Description of Artificial Sequence: Synthetic oligonucleotide
  Antisense strand to SEQ ID NO: 104410
guagccgagaauaacaccc

SEQ ID NO: 104412 - RNA, 19 nt, Artificial Sequence
  Description of Artificial Sequence: Synthetic oligonucleotide
  Sense strand starting at position 154 of SEQ ID NO: 1318
accucacuccagugagaac

SEQ ID NO: 104413 - RNA, 19 nt, Artificial Sequence
  Description of Artificial Sequence: Synthetic oligonucleotide
  Antisense strand to SEQ ID NO: 104412
guucucacuggagugaggu

SEQ ID NO: 104414 - RNA, 19 nt, Artificial Sequence
  Description of Artificial Sequence: Synthetic oligonucleotide
  Sense strand starting at position 285 of SEQ ID NO: 1318
uuaaucccucaguaguuua

SEQ ID NO: 104415 - RNA, 19 nt, Artificial Sequence
  Description of Artificial Sequence: Synthetic oligonucleotide
  Antisense strand to SEQ ID NO: 104414
uaaacuacugagggauuaa

SEQ ID NO: 104416 - RNA, 19 nt, Artificial Sequence
  Description of Artificial Sequence: Synthetic oligonucleotide
  Sense strand starting at position 288 of SEQ ID NO: 1318
aucccucaguaguuuauaa

SEQ ID NO: 104417 - RNA, 19 nt, Artificial Sequence
  Description of Artificial Sequence: Synthetic oligonucleotide
  Antisense strand to SEQ ID NO: 104416
uuauaaacuacugagggau

SEQ ID NO: 104418 - RNA, 19 nt, Artificial Sequence
  Description of Artificial Sequence: Synthetic oligonucleotide
  Sense strand starting at position 290 of SEQ ID NO: 1318
cccucaguaguuuauaaau

SEQ ID NO: 104419 - RNA, 19 nt, Artificial Sequence
  Description of Artificial Sequence: Synthetic oligonucleotide
  Antisense strand to SEQ ID NO: 104418
auuuauaaacuacugaggg

SEQ ID NO: 104420 - RNA, 19 nt, Artificial Sequence
  Description of Artificial Sequence: Synthetic oligonucleotide
  Sense strand starting at position 434 of SEQ ID NO: 1318
acgcuuuccgacuagauau

SEQ ID NO: 104421 - RNA, 19 nt, Artificial Sequence
  Description of Artificial Sequence: Synthetic oligonucleotide
  Antisense strand to SEQ ID NO: 104420
auaucuagucggaaagcgu

SEQ ID NO: 104422 - RNA, 19 nt, Artificial Sequence
  Description of Artificial Sequence: Synthetic oligonucleotide
  Sense strand starting at position 436 of SEQ ID NO: 1318
gcuuuccgacuagauauua

SEQ ID NO: 104423 - RNA, 19 nt, Artificial Sequence
  Description of Artificial Sequence: Synthetic oligonucleotide
  Antisense strand to SEQ ID NO: 104422
uaauaucuagucggaaagc

SEQ ID NO: 104424 - RNA, 19 nt, Artificial Sequence
  Description of Artificial Sequence: Synthetic oligonucleotide
  Sense strand starting at position 489 of SEQ ID NO: 1318
aguuauugccauugagaug

SEQ ID NO: 104425 - RNA, 19 nt, Artificial Sequence
  Description of Artificial Sequence: Synthetic oligonucleotide
  Antisense strand to SEQ ID NO: 104424
caucucaauggcaauaacu

SEQ ID NO: 104426 - RNA, 19 nt, Artificial Sequence
  Description of Artificial Sequence: Synthetic oligonucleotide
  Sense strand starting at position 490 of SEQ ID NO: 1318
guuauugccauugagaugu

SEQ ID NO: 104427 - RNA, 19 nt, Artificial Sequence
  Description of Artificial Sequence: Synthetic oligonucleotide
  Antisense strand to SEQ ID NO: 104426
acaucucaauggcaauaac

SEQ ID NO: 104428 - RNA, 19 nt, Artificial Sequence
  Description of Artificial Sequence: Synthetic oligonucleotide
  Sense strand starting at position 659 of SEQ ID NO: 1318
cuagucuuugaaggcaaau

SEQ ID NO: 104429 - RNA, 19 nt, Artificial Sequence
  Description of Artificial Sequence: Synthetic oligonucleotide
  Antisense strand to SEQ ID NO: 104428
auuugccuucaaagacuag

SEQ ID NO: 104430 - RNA, 19 nt, Artificial Sequence
  Description of Artificial Sequence: Synthetic oligonucleotide
  Sense strand starting at position 672 of SEQ ID NO: 1318
gcaaauucucuaugaauag

SEQ ID NO: 104431 - RNA, 19 nt, Artificial Sequence
  Description of Artificial Sequence: Synthetic oligonucleotide
  Antisense strand to SEQ ID NO: 104430
cuauucauagagaauuugc

SEQ ID NO: 104432 - RNA, 19 nt, Artificial Sequence
  Description of Artificial Sequence: Synthetic oligonucleotide
  Sense strand starting at position 697 of SEQ ID NO: 1318
uagagauucuaauuggucu

SEQ ID NO: 104433 - RNA, 19 nt, Artificial Sequence
  Description of Artificial Sequence: Synthetic oligonucleotide
  Antisense strand to SEQ ID NO: 104432
agaccaauuagaaucucua

SEQ ID NO: 104434 - RNA, 19 nt, Artificial Sequence
  Description of Artificial Sequence: Synthetic oligonucleotide
  Sense strand starting at position 717 of SEQ ID NO: 1318
acaauugaguuuccgguaa

SEQ ID NO: 104435 - RNA, 19 nt, Artificial Sequence
  Description of Artificial Sequence: Synthetic oligonucleotide
  Antisense strand to SEQ ID NO: 104434
uuaccggaaacucaauugu

SEQ ID NO: 104436 - RNA, 19 nt, Artificial Sequence
  Description of Artificial Sequence: Synthetic oligonucleotide
  Sense strand starting at position 721 of SEQ ID NO: 1318
uugaguuuccgguaauuga

SEQ ID NO: 104437 - RNA, 19 nt, Artificial Sequence
  Description of Artificial Sequence: Synthetic oligonucleotide
  Antisense strand to SEQ ID NO: 104436
ucaauuaccggaaacucaa

SEQ ID NO: 104438 - RNA, 19 nt, Artificial Sequence
  Description of Artificial Sequence: Synthetic oligonucleotide
  Sense strand starting at position 1200 of SEQ ID NO: 1318
ucaucucagccagaugguu

SEQ ID NO: 104439 - RNA, 19 nt, Artificial Sequence
  Description of Artificial Sequence: Synthetic oligonucleotide
  Antisense strand to SEQ ID NO: 104438
aaccaucuggcugagauga

SEQ ID NO: 104440 - RNA, 19 nt, Artificial Sequence
  Description of Artificial Sequence: Synthetic oligonucleotide
  Sense strand starting at position 1205 of SEQ ID NO: 1318
ucagccagaugguucuuaa

SEQ ID NO: 104441 - RNA, 19 nt, Artificial Sequence
  Description of Artificial Sequence: Synthetic oligonucleotide
  Antisense strand to SEQ ID NO: 104440
uuaagaaccaucuggcuga

SEQ ID NO: 104442 - RNA, 19 nt, Artificial Sequence
  Description of Artificial Sequence: Synthetic oligonucleotide
  Sense strand starting at position 1208 of SEQ ID NO: 1318
gccagaugguucuuaaaug

SEQ ID NO: 104443 - RNA, 19 nt, Artificial Sequence
  Description of Artificial Sequence: Synthetic oligonucleotide
  Antisense strand to SEQ ID NO: 104442
cauuuaagaaccaucuggc

SEQ ID NO: 104444 - RNA, 19 nt, Artificial Sequence
  Description of Artificial Sequence: Synthetic oligonucleotide
  Sense strand starting at position 1317 of SEQ ID NO: 1318
acaaaugagucugcccaca

SEQ ID NO: 104445 - RNA, 19 nt, Artificial Sequence
  Description of Artificial Sequence: Synthetic oligonucleotide
  Antisense strand to SEQ ID NO: 104444
ugugggcagacucauuugu

SEQ ID NO: 104446 - RNA, 19 nt, Artificial Sequence
  Description of Artificial Sequence: Synthetic oligonucleotide
  Sense strand starting at position 1319 of SEQ ID NO: 1318
aaaugagucugcccacaag

SEQ ID NO: 104447 - RNA, 19 nt, Artificial Sequence
  Description of Artificial Sequence: Synthetic oligonucleotide
  Antisense strand to SEQ ID NO: 104446
cuugugggcagacucauuu

SEQ ID NO: 104448 - RNA, 19 nt, Artificial Sequence
  Description of Artificial Sequence: Synthetic oligonucleotide
  Sense strand starting at position 1506 of SEQ ID NO: 1318
guucguugugugcucuuca

SEQ ID NO: 104449 - RNA, 19 nt, Artificial Sequence
  Description of Artificial Sequence: Synthetic oligonucleotide
  Antisense strand to SEQ ID NO: 104448
ugaagagcacacaacgaac

SEQ ID NO: 104450 - RNA, 19 nt, Artificial Sequence
  Description of Artificial Sequence: Synthetic oligonucleotide
  Sense strand starting at position 1973 of SEQ ID NO: 1318
cggcguucccaagcgagaa

SEQ ID NO: 104451 - RNA, 19 nt, Artificial Sequence
  Description of Artificial Sequence: Synthetic oligonucleotide
  Antisense strand to SEQ ID NO: 104450
uucucgcuugggaacgccg

SEQ ID NO: 104452 - RNA, 19 nt, Artificial Sequence
  Description of Artificial Sequence: Synthetic oligonucleotide
  Sense strand starting at position 2451 of SEQ ID NO: 1318
uacaauuccgcuuauguga

SEQ ID NO: 104453 - RNA, 19 nt, Artificial Sequence
  Description of Artificial Sequence: Synthetic oligonucleotide
  Antisense strand to SEQ ID NO: 104452
ucacauaagcggaauugua

SEQ ID NO: 104454 - RNA, 19 nt, Artificial Sequence
  Description of Artificial Sequence: Synthetic oligonucleotide
  Sense strand starting at position 2583 of SEQ ID NO: 1318
uccugaagacauuguuaau

SEQ ID NO: 104455 - RNA, 19 nt, Artificial Sequence
  Description of Artificial Sequence: Synthetic oligonucleotide
  Antisense strand to SEQ ID NO: 104454
auuaacaaugucuucagga

SEQ ID NO: 104456 - RNA, 19 nt, Artificial Sequence
  Description of Artificial Sequence: Synthetic oligonucleotide
  Sense strand starting at position 2634 of SEQ ID NO: 1318
augaaacuguacucugguu

SEQ ID NO: 104457 - RNA, 19 nt, Artificial Sequence
  Description of Artificial Sequence: Synthetic oligonucleotide
  Antisense strand to SEQ ID NO: 104456
aaccagaguacaguuucau

SEQ ID NO: 104458 - RNA, 19 nt, Artificial Sequence
  Description of Artificial Sequence: Synthetic oligonucleotide
  Sense strand starting at position 2636 of SEQ ID NO: 1318
gaaacuguacucugguuaa

SEQ ID NO: 104459 - RNA, 19 nt, Artificial Sequence
  Description of Artificial Sequence: Synthetic oligonucleotide
  Antisense strand to SEQ ID NO: 104458
uuaaccagaguacaguuuc

SEQ ID NO: 104460 - RNA, 19 nt, Artificial Sequence
  Description of Artificial Sequence: Synthetic oligonucleotide
  Sense strand starting at position 2860 of SEQ ID NO: 1318
gcaccuucucguguuccau

SEQ ID NO: 104461 - RNA, 19 nt, Artificial Sequence
  Description of Artificial Sequence: Synthetic oligonucleotide
  Antisense strand to SEQ ID NO: 104460
auggaacacgagaaggugc

SEQ ID NO: 104462 - RNA, 19 nt, Artificial Sequence
  Description of Artificial Sequence: Synthetic oligonucleotide
  Sense strand starting at position 2951 of SEQ ID NO: 1318
acgagaggguucuuuauua

SEQ ID NO: 104463 - RNA, 19 nt, Artificial Sequence
  Description of Artificial Sequence: Synthetic oligonucleotide
  Antisense strand to SEQ ID NO: 104462
uaauaaagaacccucucgu

SEQ ID NO: 104464 - RNA, 19 nt, Artificial Sequence
  Description of Artificial Sequence: Synthetic oligonucleotide
  Sense strand starting at position 3038 of SEQ ID NO: 1318
ccgaaauggcugggaacua

SEQ ID NO: 104465 - RNA, 19 nt, Artificial Sequence
  Description of Artificial Sequence: Synthetic oligonucleotide
  Antisense strand to SEQ ID NO: 104464
uaguucccagccauuucgg

SEQ ID NO: 104466 - RNA, 19 nt, Artificial Sequence
  Description of Artificial Sequence: Synthetic oligonucleotide
  Sense strand starting at position 3050 of SEQ ID NO: 1318
ggaacuauagauugugauu

SEQ ID NO: 104467 - RNA, 19 nt, Artificial Sequence
  Description of Artificial Sequence: Synthetic oligonucleotide
  Antisense strand to SEQ ID NO: 104466
aaucacaaucuauaguucc

SEQ ID NO: 104468 - RNA, 19 nt, Artificial Sequence
  Description of Artificial Sequence: Synthetic oligonucleotide
  Sense strand starting at position 3180 of SEQ ID NO: 1318
uugggcacuugcuuauuua

SEQ ID NO: 104469 - RNA, 19 nt, Artificial Sequence
  Description of Artificial Sequence: Synthetic oligonucleotide
  Antisense strand to SEQ ID NO: 104468
uaaauaagcaagugcccaa

SEQ ID NO: 104470 - RNA, 19 nt, Artificial Sequence
  Description of Artificial Sequence: Synthetic oligonucleotide
  Sense strand starting at position 3183 of SEQ ID NO: 1318
ggcacuugcuuauuuaugu

SEQ ID NO: 104471 - RNA, 19 nt, Artificial Sequence
  Description of Artificial Sequence: Synthetic oligonucleotide
  Antisense strand to SEQ ID NO: 104470
acauaaauaagcaagugcc

SEQ ID NO: 104472 - RNA, 19 nt, Artificial Sequence
  Description of Artificial Sequence: Synthetic oligonucleotide
  Sense strand starting at position 3184 of SEQ ID NO: 1318
gcacuugcuuauuuaugua

SEQ ID NO: 104473 - RNA, 19 nt, Artificial Sequence
  Description of Artificial Sequence: Synthetic oligonucleotide
  Antisense strand to SEQ ID NO: 104472
uacauaaauaagcaagugc

SEQ ID NO: 104474 - RNA, 19 nt, Artificial Sequence
  Description of Artificial Sequence: Synthetic oligonucleotide
  Sense strand starting at position 3199 of SEQ ID NO: 1318
uguauuauccuagagcaua

SEQ ID NO: 104475 - RNA, 19 nt, Artificial Sequence
  Description of Artificial Sequence: Synthetic oligonucleotide
  Antisense strand to SEQ ID NO: 104474
uaugcucuaggauaauaca

SEQ ID NO: 104476 - RNA, 19 nt, Artificial Sequence
  Description of Artificial Sequence: Synthetic oligonucleotide
  Sense strand starting at position 3276 of SEQ ID NO: 1318
uuaugaauuagguggccaa

SEQ ID NO: 104477 - RNA, 19 nt, Artificial Sequence
  Description of Artificial Sequence: Synthetic oligonucleotide
  Antisense strand to SEQ ID NO: 104476
uuggccaccuaauucauaa

SEQ ID NO: 104478 - RNA, 19 nt, Artificial Sequence
  Description of Artificial Sequence: Synthetic oligonucleotide
  Sense strand starting at position 3277 of SEQ ID NO: 1318
uaugaauuagguggccaau

SEQ ID NO: 104479 - RNA, 19 nt, Artificial Sequence
  Description of Artificial Sequence: Synthetic oligonucleotide
  Antisense strand to SEQ ID NO: 104478
auuggccaccuaauucaua

SEQ ID NO: 104480 - RNA, 19 nt, Artificial Sequence
  Description of Artificial Sequence: Synthetic oligonucleotide
  Sense strand starting at position 3279 of SEQ ID NO: 1318
ugaauuagguggccaauca

SEQ ID NO: 104481 - RNA, 19 nt, Artificial Sequence
  Description of Artificial Sequence: Synthetic oligonucleotide
  Antisense strand to SEQ ID NO: 104480
ugauuggccaccuaauuca

SEQ ID NO: 104482 - RNA, 19 nt, Artificial Sequence
  Description of Artificial Sequence: Synthetic oligonucleotide
  Sense strand starting at position 3298 of SEQ ID NO: 1318
acauuaguuaaguggauga

SEQ ID NO: 104483 - RNA, 19 nt, Artificial Sequence
  Description of Artificial Sequence: Synthetic oligonucleotide
  Antisense strand to SEQ ID NO: 104482
ucauccacuuaacuaaugu

SEQ ID NO: 104484 - RNA, 19 nt, Artificial Sequence
  Description of Artificial Sequence: Synthetic oligonucleotide
  Sense strand starting at position 3302 of SEQ ID NO: 1318
uaguuaaguggaugaauga

SEQ ID NO: 104485 - RNA, 19 nt, Artificial Sequence
  Description of Artificial Sequence: Synthetic oligonucleotide
  Antisense strand to SEQ ID NO: 104484
ucauucauccacuuaacua

SEQ ID NO: 104486 - RNA, 19 nt, Artificial Sequence
  Description of Artificial Sequence: Synthetic oligonucleotide
  Sense strand starting at position 3309 of SEQ ID NO: 1318
guggaugaaugaguacauu

SEQ ID NO: 104487 - RNA, 19 nt, Artificial Sequence
  Description of Artificial Sequence: Synthetic oligonucleotide
  Antisense strand to SEQ ID NO: 104486
aauguacucauucauccac

SEQ ID NO: 104488 - RNA, 19 nt, Artificial Sequence
  Description of Artificial Sequence: Synthetic oligonucleotide
  Sense strand starting at position 3544 of SEQ ID NO: 1318
uuucgaaacugguuuauug

SEQ ID NO: 104489 - RNA, 19 nt, Artificial Sequence
  Description of Artificial Sequence: Synthetic oligonucleotide
  Antisense strand to SEQ ID NO: 104488
caauaaaccaguuucgaaa

SEQ ID NO: 104490 - RNA, 19 nt, Artificial Sequence
  Description of Artificial Sequence: Synthetic oligonucleotide
  Sense strand starting at position 3553 of SEQ ID NO: 1318
ugguuuauuguccaaguua

SEQ ID NO: 104491 - RNA, 19 nt, Artificial Sequence
  Description of Artificial Sequence: Synthetic oligonucleotide
  Antisense strand to SEQ ID NO: 104490
uaacuuggacaauaaacca

SEQ ID NO: 104492 - RNA, 19 nt, Artificial Sequence
  Description of Artificial Sequence: Synthetic oligonucleotide
  Sense strand starting at position 84 of SEQ ID NO: 1319
acuugucugcaacagaaca

SEQ ID NO: 104493 - RNA, 19 nt, Artificial Sequence
  Description of Artificial Sequence: Synthetic oligonucleotide
  Antisense strand to SEQ ID NO: 104492
uguucuguugcagacaagu

SEQ ID NO: 104494 - RNA, 19 nt, Artificial Sequence
  Description of Artificial Sequence: Synthetic oligonucleotide
  Sense strand starting at position 548 of SEQ ID NO: 1319
aaggcugaguugcuacaaa

SEQ ID NO: 104495 - RNA, 19 nt, Artificial Sequence
  Description of Artificial Sequence: Synthetic oligonucleotide
  Antisense strand to SEQ ID NO: 104494
uuuguagcaacucagccuu

SEQ ID NO: 104496 - RNA, 19 nt, Artificial Sequence
  Description of Artificial Sequence: Synthetic oligonucleotide
  Sense strand starting at position 616 of SEQ ID NO: 1319
ggcaguaaaugguuucaug

SEQ ID NO: 104497 - RNA, 19 nt, Artificial Sequence
  Description of Artificial Sequence: Synthetic oligonucleotide
  Antisense strand to SEQ ID NO: 104496
caugaaaccauuuacugcc

SEQ ID NO: 104498 - RNA, 19 nt, Artificial Sequence
  Description of Artificial Sequence: Synthetic oligonucleotide
  Sense strand starting at position 664 of SEQ ID NO: 1319
gaggcagagucaucuaccu

SEQ ID NO: 104499 - RNA, 19 nt, Artificial Sequence
  Description of Artificial Sequence: Synthetic oligonucleotide
  Antisense strand to SEQ ID NO: 104498
agguagaugacucugccuc

SEQ ID NO: 104500 - RNA, 19 nt, Artificial Sequence
  Description of Artificial Sequence: Synthetic oligonucleotide
  Sense strand starting at position 813 of SEQ ID NO: 1319
aagcacaauguuugguaaa

SEQ ID NO: 104501 - RNA, 19 nt, Artificial Sequence
  Description of Artificial Sequence: Synthetic oligonucleotide
  Antisense strand to SEQ ID NO: 104500
uuuaccaaacauugugcuu

SEQ ID NO: 104502 - RNA, 19 nt, Artificial Sequence
  Description of Artificial Sequence: Synthetic oligonucleotide
  Sense strand starting at position 815 of SEQ ID NO: 1319
gcacaauguuugguaaaua

SEQ ID NO: 104503 - RNA, 19 nt, Artificial Sequence
  Description of Artificial Sequence: Synthetic oligonucleotide
  Antisense strand to SEQ ID NO: 104502
uauuuaccaaacauugugc

SEQ ID NO: 104504 - RNA, 19 nt, Artificial Sequence
  Description of Artificial Sequence: Synthetic oligonucleotide
  Sense strand starting at position 820 of SEQ ID NO: 1319
auguuugguaaauaguaga

SEQ ID NO: 104505 - RNA, 19 nt, Artificial Sequence
  Description of Artificial Sequence: Synthetic oligonucleotide
  Antisense strand to SEQ ID NO: 104504
ucuacuauuuaccaaacau

SEQ ID NO: 104506 - RNA, 19 nt, Artificial Sequence
  Description of Artificial Sequence: Synthetic oligonucleotide
  Sense strand starting at position 899 of SEQ ID NO: 1319
agggcuauuccucaaucag

SEQ ID NO: 104507 - RNA, 19 nt, Artificial Sequence
  Description of Artificial Sequence: Synthetic oligonucleotide
  Antisense strand to SEQ ID NO: 104506
cugauugaggaauagcccu

SEQ ID NO: 104508 - RNA, 19 nt, Artificial Sequence
  Description of Artificial Sequence: Synthetic oligonucleotide
  Sense strand starting at position 926 of SEQ ID NO: 1319
aacgaagaucacuguaucu

SEQ ID NO: 104509 - RNA, 19 nt, Artificial Sequence
  Description of Artificial Sequence: Synthetic oligonucleotide
  Antisense strand to SEQ ID NO: 104508
agauacagugaucuucguu

SEQ ID NO: 104510 - RNA, 19 nt, Artificial Sequence
  Description of Artificial Sequence: Synthetic oligonucleotide
  Sense strand starting at position 928 of SEQ ID NO: 1319
cgaagaucacuguaucuau

SEQ ID NO: 104511 - RNA, 19 nt, Artificial Sequence
  Description of Artificial Sequence: Synthetic oligonucleotide
  Antisense strand to SEQ ID NO: 104510
auagauacagugaucuucg

SEQ ID NO: 104512 - RNA, 19 nt, Artificial Sequence
  Description of Artificial Sequence: Synthetic oligonucleotide
  Sense strand starting at position 965 of SEQ ID NO: 1319
uggugucaacaagaaguua

SEQ ID NO: 104513 - RNA, 19 nt, Artificial Sequence
  Description of Artificial Sequence: Synthetic oligonucleotide
  Antisense strand to SEQ ID NO: 104512
uaacuucuuguugacacca

SEQ ID NO: 104514 - RNA, 19 nt, Artificial Sequence
  Description of Artificial Sequence: Synthetic oligonucleotide
  Sense strand starting at position 1009 of SEQ ID NO: 1319
ugaaucaauugagucuuau

SEQ ID NO: 104515 - RNA, 19 nt, Artificial Sequence
  Description of Artificial Sequence: Synthetic oligonucleotide
  Antisense strand to SEQ ID NO: 104514
auaagacucaauugauuca

SEQ ID NO: 104516 - RNA, 19 nt, Artificial Sequence
  Description of Artificial Sequence: Synthetic oligonucleotide
  Sense strand starting at position 1050 of SEQ ID NO: 1319
agcauaguacacugauacu

SEQ ID NO: 104517 - RNA, 19 nt, Artificial Sequence
  Description of Artificial Sequence: Synthetic oligonucleotide
  Antisense strand to SEQ ID NO: 104516
aguaucaguguacuaugcu

SEQ ID NO: 104518 - RNA, 19 nt, Artificial Sequence
  Description of Artificial Sequence: Synthetic oligonucleotide
  Sense strand starting at position 1081 of SEQ ID NO: 1319
caggaaaugucagcuaaau

SEQ ID NO: 104519 - RNA, 19 nt, Artificial Sequence
  Description of Artificial Sequence: Synthetic oligonucleotide
  Antisense strand to SEQ ID NO: 104518
auuuagcugacauuuccug

SEQ ID NO: 104520 - RNA, 19 nt, Artificial Sequence
  Description of Artificial Sequence: Synthetic oligonucleotide
  Sense strand starting at position 1119 of SEQ ID NO: 1319
cuacucucucgugaagaua

SEQ ID NO: 104521 - RNA, 19 nt, Artificial Sequence
  Description of Artificial Sequence: Synthetic oligonucleotide
  Antisense strand to SEQ ID NO: 104520
uaucuucacgagagaguag

SEQ ID NO: 104522 - RNA, 19 nt, Artificial Sequence
  Description of Artificial Sequence: Synthetic oligonucleotide
  Sense strand starting at position 1191 of SEQ ID NO: 1319
cauguucuggaauagugau

SEQ ID NO: 104523 - RNA, 19 nt, Artificial Sequence
  Description of Artificial Sequence: Synthetic oligonucleotide
  Antisense strand to SEQ ID NO: 104522
aucacuauuccagaacaug

SEQ ID NO: 104524 - RNA, 19 nt, Artificial Sequence
  Description of Artificial Sequence: Synthetic oligonucleotide
  Sense strand starting at position 1308 of SEQ ID NO: 1319
uggcuuugcgcuuuaucuu

SEQ ID NO: 104525 - RNA, 19 nt, Artificial Sequence
  Description of Artificial Sequence: Synthetic oligonucleotide
  Antisense strand to SEQ ID NO: 104524
aagauaaagcgcaaagcca

SEQ ID NO: 104526 - RNA, 19 nt, Artificial Sequence
  Description of Artificial Sequence: Synthetic oligonucleotide
  Sense strand starting at position 1342 of SEQ ID NO: 1319
guuagaaagugagccuuua

SEQ ID NO: 104527 - RNA, 19 nt, Artificial Sequence
  Description of Artificial Sequence: Synthetic oligonucleotide
  Antisense strand to SEQ ID NO: 104526
uaaaggcucacuuucuaac

SEQ ID NO: 104528 - RNA, 19 nt, Artificial Sequence
  Description of Artificial Sequence: Synthetic oligonucleotide
  Sense strand starting at position 1353 of SEQ ID NO: 1319
agccuuuacuuagugggau

SEQ ID NO: 104529 - RNA, 19 nt, Artificial Sequence
  Description of Artificial Sequence: Synthetic oligonucleotide
  Antisense strand to SEQ ID NO: 104528
aucccacuaaguaaaggcu

SEQ ID NO: 104530 - RNA, 19 nt, Artificial Sequence
  Description of Artificial Sequence: Synthetic oligonucleotide
  Sense strand starting at position 1365 of SEQ ID NO: 1319
gugggauggcuagacaguu

SEQ ID NO: 104531 - RNA, 19 nt, Artificial Sequence
  Description of Artificial Sequence: Synthetic oligonucleotide
  Antisense strand to SEQ ID NO: 104530
aacugucuagccaucccac

SEQ ID NO: 104532 - RNA, 19 nt, Artificial Sequence
  Description of Artificial Sequence: Synthetic oligonucleotide
  Sense strand starting at position 1401 of SEQ ID NO: 1319
ggauuggauccgggaggua

SEQ ID NO: 104533 - RNA, 19 nt, Artificial Sequence
  Description of Artificial Sequence: Synthetic oligonucleotide
  Antisense strand to SEQ ID NO: 104532
uaccucccggauccaaucc

SEQ ID NO: 104534 - RNA, 19 nt, Artificial Sequence
  Description of Artificial Sequence: Synthetic oligonucleotide
  Sense strand starting at position 1544 of SEQ ID NO: 1319
agaccaacuguccgaaaca

SEQ ID NO: 104535 - RNA, 19 nt, Artificial Sequence
  Description of Artificial Sequence: Synthetic oligonucleotide
  Antisense strand to SEQ ID NO: 104534
uguuucggacaguuggucu

SEQ ID NO: 104536 - RNA, 19 nt, Artificial Sequence
  Description of Artificial Sequence: Synthetic oligonucleotide
  Sense strand starting at position 1574 of SEQ ID NO: 1319
gagguuugaggguagccaa

SEQ ID NO: 104537 - RNA, 19 nt, Artificial Sequence
  Description of Artificial Sequence: Synthetic oligonucleotide
  Antisense strand to SEQ ID NO: 104536
uuggcuacccucaaaccuc

SEQ ID NO: 104538 - RNA, 19 nt, Artificial Sequence
  Description of Artificial Sequence: Synthetic oligonucleotide
  Sense strand starting at position 1729 of SEQ ID NO: 1319
ccgggucuccauggaaaca

SEQ ID NO: 104539 - RNA, 19 nt, Artificial Sequence
  Description of Artificial Sequence: Synthetic oligonucleotide
  Antisense strand to SEQ ID NO: 104538
uguuuccauggagacccgg

SEQ ID NO: 104540 - RNA, 19 nt, Artificial Sequence
  Description of Artificial Sequence: Synthetic oligonucleotide
  Sense strand starting at position 2246 of SEQ ID NO: 1319
ccgaaauguccucagccag

SEQ ID NO: 104541 - RNA, 19 nt, Artificial Sequence
  Description of Artificial Sequence: Synthetic oligonucleotide
  Antisense strand to SEQ ID NO: 104540
cuggcugaggacauuucgg

SEQ ID NO: 104542 - RNA, 19 nt, Artificial Sequence
  Description of Artificial Sequence: Synthetic oligonucleotide
  Sense strand starting at position 2759 of SEQ ID NO: 1319
agcgauucugccuucguua

SEQ ID NO: 104543 - RNA, 19 nt, Artificial Sequence
  Description of Artificial Sequence: Synthetic oligonucleotide
  Antisense strand to SEQ ID NO: 104542
uaacgaaggcagaaucgcu

SEQ ID NO: 104544 - RNA, 19 nt, Artificial Sequence
  Description of Artificial Sequence: Synthetic oligonucleotide
  Sense strand starting at position 2760 of SEQ ID NO: 1319
gcgauucugccuucguuau

SEQ ID NO: 104545 - RNA, 19 nt, Artificial Sequence
  Description of Artificial Sequence: Synthetic oligonucleotide
  Antisense strand to SEQ ID NO: 104544
auaacgaaggcagaaucgc

SEQ ID NO: 104546 - RNA, 19 nt, Artificial Sequence
  Description of Artificial Sequence: Synthetic oligonucleotide
  Sense strand starting at position 2790 of SEQ ID NO: 1319
uuccaaaugccuggaggau

SEQ ID NO: 104547 - RNA, 19 nt, Artificial Sequence
  Description of Artificial Sequence: Synthetic oligonucleotide
  Antisense strand to SEQ ID NO: 104546
auccuccaggcauuuggaa

SEQ ID NO: 104548 - RNA, 19 nt, Artificial Sequence
  Description of Artificial Sequence: Synthetic oligonucleotide
  Sense strand starting at position 2802 of SEQ ID NO: 1319
ggaggaucuagcuguuaga

SEQ ID NO: 104549 - RNA, 19 nt, Artificial Sequence
  Description of Artificial Sequence: Synthetic oligonucleotide
  Antisense strand to SEQ ID NO: 104548
ucuaacagcuagauccucc

SEQ ID NO: 104550 - RNA, 19 nt, Artificial Sequence
  Description of Artificial Sequence: Synthetic oligonucleotide
  Sense strand starting at position 2919 of SEQ ID NO: 1319
aggucagugccauaaccau

SEQ ID NO: 104551 - RNA, 19 nt, Artificial Sequence
  Description of Artificial Sequence: Synthetic oligonucleotide
  Antisense strand to SEQ ID NO: 104550
augguuauggcacugaccu

SEQ ID NO: 104552 - RNA, 19 nt, Artificial Sequence
  Description of Artificial Sequence: Synthetic oligonucleotide
  Sense strand starting at position 2943 of SEQ ID NO: 1319
gcuggaaguaugugaauag

SEQ ID NO: 104553 - RNA, 19 nt, Artificial Sequence
  Description of Artificial Sequence: Synthetic oligonucleotide
  Antisense strand to SEQ ID NO: 104552
cuauucacauacuuccagc

SEQ ID NO: 104554 - RNA, 19 nt, Artificial Sequence
  Description of Artificial Sequence: Synthetic oligonucleotide
  Sense strand starting at position 2947 of SEQ ID NO: 1319
gaaguaugugaauagugac

SEQ ID NO: 104555 - RNA, 19 nt, Artificial Sequence
  Description of Artificial Sequence: Synthetic oligonucleotide
  Antisense strand to SEQ ID NO: 104554
gucacuauucacauacuuc

SEQ ID NO: 104556 - RNA, 19 nt, Artificial Sequence
  Description of Artificial Sequence: Synthetic oligonucleotide
  Sense strand starting at position 2974 of SEQ ID NO: 1319
accagacugccaggaauau

SEQ ID NO: 104557 - RNA, 19 nt, Artificial Sequence
  Description of Artificial Sequence: Synthetic oligonucleotide
  Antisense strand to SEQ ID NO: 104556
auauuccuggcagucuggu

SEQ ID NO: 104558 - RNA, 19 nt, Artificial Sequence
  Description of Artificial Sequence: Synthetic oligonucleotide
  Sense strand starting at position 3132 of SEQ ID NO: 1319
ucauauacaguuuggaaga

SEQ ID NO: 104559 - RNA, 19 nt, Artificial Sequence
  Description of Artificial Sequence: Synthetic oligonucleotide
  Antisense strand to SEQ ID NO: 104558
ucuuccaaacuguauauga

SEQ ID NO: 104560 - RNA, 19 nt, Artificial Sequence
  Description of Artificial Sequence: Synthetic oligonucleotide
  Sense strand starting at position 3147 of SEQ ID NO: 1319
aagacuugcuggcccagaa

SEQ ID NO: 104561 - RNA, 19 nt, Artificial Sequence
  Description of Artificial Sequence: Synthetic oligonucleotide
  Antisense strand to SEQ ID NO: 104560
uucugggccagcaagucuu

SEQ ID NO: 104562 - RNA, 19 nt, Artificial Sequence
  Description of Artificial Sequence: Synthetic oligonucleotide
  Sense strand starting at position 3259 of SEQ ID NO: 1319
cagugauguggucauaggu

SEQ ID NO: 104563 - RNA, 19 nt, Artificial Sequence
  Description of Artificial Sequence: Synthetic oligonucleotide
  Antisense strand to SEQ ID NO: 104562
accuaugaccacaucacug

SEQ ID NO: 104564 - RNA, 19 nt, Artificial Sequence
  Description of Artificial Sequence: Synthetic oligonucleotide
  Sense strand starting at position 3561 of SEQ ID NO: 1319
cagaguuauugagccauua

SEQ ID NO: 104565 - RNA, 19 nt, Artificial Sequence
  Description of Artificial Sequence: Synthetic oligonucleotide
  Antisense strand to SEQ ID NO: 104564
uaauggcucaauaacucug

SEQ ID NO: 104566 - RNA, 19 nt, Artificial Sequence
  Description of Artificial Sequence: Synthetic oligonucleotide
  Sense strand starting at position 3572 of SEQ ID NO: 1319
agccauuaucugggcagga

SEQ ID NO: 104567 - RNA, 19 nt, Artificial Sequence
  Description of Artificial Sequence: Synthetic oligonucleotide
  Antisense strand to SEQ ID NO: 104566
uccugcccagauaauggcu

SEQ ID NO: 104568 - RNA, 19 nt, Artificial Sequence
  Description of Artificial Sequence: Synthetic oligonucleotide
  Sense strand starting at position 3573 of SEQ ID NO: 1319
gccauuaucugggcaggaa

SEQ ID NO: 104569 - RNA, 19 nt, Artificial Sequence
  Description of Artificial Sequence: Synthetic oligonucleotide
  Antisense strand to SEQ ID NO: 104568
uuccugcccagauaauggc

SEQ ID NO: 104570 - RNA, 19 nt, Artificial Sequence
  Description of Artificial Sequence: Synthetic oligonucleotide
  Sense strand starting at position 3765 of SEQ ID NO: 1319
ugacuaugcccuggaggua

SEQ ID NO: 104571 - RNA, 19 nt, Artificial Sequence
  Description of Artificial Sequence: Synthetic oligonucleotide
  Antisense strand to SEQ ID NO: 104570
uaccuccagggcauaguca

SEQ ID NO: 104572 - RNA, 19 nt, Artificial Sequence
  Description of Artificial Sequence: Synthetic oligonucleotide
  Sense strand starting at position 3865 of SEQ ID NO: 1320
gggagucacagucaaguau

SEQ ID NO: 104573 - RNA, 19 nt, Artificial Sequence
  Description of Artificial Sequence: Synthetic oligonucleotide
  Antisense strand to SEQ ID NO: 104572
auacuugacugugacuccc

SEQ ID NO: 104574 - RNA, 19 nt, Artificial Sequence
  Description of Artificial Sequence: Synthetic oligonucleotide
  Sense strand starting at position 3805 of SEQ ID NO: 1320
gcaaacgugugaguacaaa

SEQ ID NO: 104575 - RNA, 19 nt, Artificial Sequence
  Description of Artificial Sequence: Synthetic oligonucleotide
  Antisense strand to SEQ ID NO: 104574
uuuguacucacacguuugc

SEQ ID NO: 104576 - RNA, 19 nt, Artificial Sequence
  Description of Artificial Sequence: Synthetic oligonucleotide
  Sense strand starting at position 3622 of SEQ ID NO: 1320
ucuguaaaguggucaccaa

SEQ ID NO: 104577 - RNA, 19 nt, Artificial Sequence
  Description of Artificial Sequence: Synthetic oligonucleotide
  Antisense strand to SEQ ID NO: 104576
uuggugaccacuuuacaga

SEQ ID NO: 104578 - RNA, 19 nt, Artificial Sequence
  Description of Artificial Sequence: Synthetic oligonucleotide
  Sense strand starting at position 3592 of SEQ ID NO: 1320
gaacguuuggucuaaguuu

SEQ ID NO: 104579 - RNA, 19 nt, Artificial Sequence
  Description of Artificial Sequence: Synthetic oligonucleotide
  Antisense strand to SEQ ID NO: 104578
aaacuuagaccaaacguuc

SEQ ID NO: 104580 - RNA, 19 nt, Artificial Sequence
  Description of Artificial Sequence: Synthetic oligonucleotide
  Sense strand starting at position 3590 of SEQ ID NO: 1320
gagaacguuuggucuaagu

SEQ ID NO: 104581 - RNA, 19 nt, Artificial Sequence
  Description of Artificial Sequence: Synthetic oligonucleotide
  Antisense strand to SEQ ID NO: 104580
acuuagaccaaacguucuc

SEQ ID NO: 104582 - RNA, 19 nt, Artificial Sequence
  Description of Artificial Sequence: Synthetic oligonucleotide
  Sense strand starting at position 3589 of SEQ ID NO: 1320
ggagaacguuuggucuaag

SEQ ID NO: 104583 - RNA, 19 nt, Artificial Sequence
  Description of Artificial Sequence: Synthetic oligonucleotide
  Antisense strand to SEQ ID NO: 104582
cuuagaccaaacguucucc

SEQ ID NO: 104584 - RNA, 19 nt, Artificial Sequence
  Description of Artificial Sequence: Synthetic oligonucleotide
  Sense strand starting at position 3559 of SEQ ID NO: 1320
agcuaagccuaaucagaga

SEQ ID NO: 104585 - RNA, 19 nt, Artificial Sequence
  Description of Artificial Sequence: Synthetic oligonucleotide
  Antisense strand to SEQ ID NO: 104584
ucucugauuaggcuuagcu

SEQ ID NO: 104586 - RNA, 19 nt, Artificial Sequence
  Description of Artificial Sequence: Synthetic oligonucleotide
  Sense strand starting at position 3545 of SEQ ID NO: 1320
uauauuugcugugcagcua

SEQ ID NO: 104587 - RNA, 19 nt, Artificial Sequence
  Description of Artificial Sequence: Synthetic oligonucleotide
  Antisense strand to SEQ ID NO: 104586
uagcugcacagcaaauaua

SEQ ID NO: 104588 - RNA, 19 nt, Artificial Sequence
  Description of Artificial Sequence: Synthetic oligonucleotide
  Sense strand starting at position 3541 of SEQ ID NO: 1320
cagauauauuugcugugca

SEQ ID NO: 104589 - RNA, 19 nt, Artificial Sequence
  Description of Artificial Sequence: Synthetic oligonucleotide
  Antisense strand to SEQ ID NO: 104588
ugcacagcaaauauaucug

SEQ ID NO: 104590 - RNA, 19 nt, Artificial Sequence
  Description of Artificial Sequence: Synthetic oligonucleotide
  Sense strand starting at position 3464 of SEQ ID NO: 1320
guggcauuaagguaaauaa

SEQ ID NO: 104591 - RNA, 19 nt, Artificial Sequence
  Description of Artificial Sequence: Synthetic oligonucleotide
  Antisense strand to SEQ ID NO: 104590
uuauuuaccuuaaugccac

SEQ ID NO: 104592 - RNA, 19 nt, Artificial Sequence
  Description of Artificial Sequence: Synthetic oligonucleotide
  Sense strand starting at position 3093 of SEQ ID NO: 1320
ucauacguuggcugaggaa

SEQ ID NO: 104593 - RNA, 19 nt, Artificial Sequence
  Description of Artificial Sequence: Synthetic oligonucleotide
  Antisense strand to SEQ ID NO: 104592
uuccucagccaacguauga

SEQ ID NO: 104594 - RNA, 19 nt, Artificial Sequence
  Description of Artificial Sequence: Synthetic oligonucleotide
  Sense strand starting at position 3068 of SEQ ID NO: 1320
cucauaaauucgucuuaag

SEQ ID NO: 104595 - RNA, 19 nt, Artificial Sequence
  Description of Artificial Sequence: Synthetic oligonucleotide
  Antisense strand to SEQ ID NO: 104594
cuuaagacgaauuuaugag

SEQ ID NO: 104596 - RNA, 19 nt, Artificial Sequence
  Description of Artificial Sequence: Synthetic oligonucleotide
  Sense strand starting at position 2952 of SEQ ID NO: 1320
gcuucuccugaauaauagu

SEQ ID NO: 104597 - RNA, 19 nt, Artificial Sequence
  Description of Artificial Sequence: Synthetic oligonucleotide
  Antisense strand to SEQ ID NO: 104596
acuauuauucaggagaagc

SEQ ID NO: 104598 - RNA, 19 nt, Artificial Sequence
  Description of Artificial Sequence: Synthetic oligonucleotide
  Sense strand starting at position 2877 of SEQ ID NO: 1320
ggcaaauaagcauauucgu

SEQ ID NO: 104599 - RNA, 19 nt, Artificial Sequence
  Description of Artificial Sequence: Synthetic oligonucleotide
  Antisense strand to SEQ ID NO: 104598
acgaauaugcuuauuugcc

SEQ ID NO: 104600 - RNA, 19 nt, Artificial Sequence
  Description of Artificial Sequence: Synthetic oligonucleotide
  Sense strand starting at position 2867 of SEQ ID NO: 1320
cucagaauuuggcaaauaa

SEQ ID NO: 104601 - RNA, 19 nt, Artificial Sequence
  Description of Artificial Sequence: Synthetic oligonucleotide
  Antisense strand to SEQ ID NO: 104600
uuauuugccaaauucugag

SEQ ID NO: 104602 - RNA, 19 nt, Artificial Sequence
  Description of Artificial Sequence: Synthetic oligonucleotide
  Sense strand starting at position 2865 of SEQ ID NO: 1320
aucucagaauuuggcaaau

SEQ ID NO: 104603 - RNA, 19 nt, Artificial Sequence
  Description of Artificial Sequence: Synthetic oligonucleotide
  Antisense strand to SEQ ID NO: 104602
auuugccaaauucugagau

SEQ ID NO: 104604 - RNA, 19 nt, Artificial Sequence
  Description of Artificial Sequence: Synthetic oligonucleotide
  Sense strand starting at position 2815 of SEQ ID NO: 1320
ggucuaagcucauuuggcu

SEQ ID NO: 104605 - RNA, 19 nt, Artificial Sequence
  Description of Artificial Sequence: Synthetic oligonucleotide
  Antisense strand to SEQ ID NO: 104604
agccaaaugagcuuagacc

SEQ ID NO: 104606 - RNA, 19 nt, Artificial Sequence
  Description of Artificial Sequence: Synthetic oligonucleotide
  Sense strand starting at position 2614 of SEQ ID NO: 1320
acugacaagcugugagauu

SEQ ID NO: 104607 - RNA, 19 nt, Artificial Sequence
  Description of Artificial Sequence: Synthetic oligonucleotide
  Antisense strand to SEQ ID NO: 104606
aaucucacagcuugucagu

SEQ ID NO: 104608 - RNA, 19 nt, Artificial Sequence
  Description of Artificial Sequence: Synthetic oligonucleotide
  Sense strand starting at position 2555 of SEQ ID NO: 1320
aauuguuuauuagugcaga

SEQ ID NO: 104609 - RNA, 19 nt, Artificial Sequence
  Description of Artificial Sequence: Synthetic oligonucleotide
  Antisense strand to SEQ ID NO: 104608
ucugcacuaauaaacaauu

SEQ ID NO: 104610 - RNA, 19 nt, Artificial Sequence
  Description of Artificial Sequence: Synthetic oligonucleotide
  Sense strand starting at position 2494 of SEQ ID NO: 1320
guccuuccuaguuguaaug

SEQ ID NO: 104611 - RNA, 19 nt, Artificial Sequence
  Description of Artificial Sequence: Synthetic oligonucleotide
  Antisense strand to SEQ ID NO: 104610
cauuacaacuaggaaggac

SEQ ID NO: 104612 - RNA, 19 nt, Artificial Sequence
  Description of Artificial Sequence: Synthetic oligonucleotide
  Sense strand starting at position 2493 of SEQ ID NO: 1320
aguccuuccuaguuguaau

SEQ ID NO: 104613 - RNA, 19 nt, Artificial Sequence
  Description of Artificial Sequence: Synthetic oligonucleotide
  Antisense strand to SEQ ID NO: 104612
auuacaacuaggaaggacu

SEQ ID NO: 104614 - RNA, 19 nt, Artificial Sequence
  Description of Artificial Sequence: Synthetic oligonucleotide
  Sense strand starting at position 1661 of SEQ ID NO: 1320
ccaucuccuccggaagagu

SEQ ID NO: 104615 - RNA, 19 nt, Artificial Sequence
  Description of Artificial Sequence: Synthetic oligonucleotide
  Antisense strand to SEQ ID NO: 104614
acucuuccggaggagaugg

SEQ ID NO: 104616 - RNA, 19 nt, Artificial Sequence
  Description of Artificial Sequence: Synthetic oligonucleotide
  Sense strand starting at position 1062 of SEQ ID NO: 1320
uuuggugagcuccaaauau

SEQ ID NO: 104617 - RNA, 19 nt, Artificial Sequence
  Description of Artificial Sequence: Synthetic oligonucleotide
  Antisense strand to SEQ ID NO: 104616
auauuuggagcucaccaaa

SEQ ID NO: 104618 - RNA, 19 nt, Artificial Sequence
  Description of Artificial Sequence: Synthetic oligonucleotide
  Sense strand starting at position 1014 of SEQ ID NO: 1320
uagauuauaugaguuaggu

SEQ ID NO: 104619 - RNA, 19 nt, Artificial Sequence
  Description of Artificial Sequence: Synthetic oligonucleotide
  Antisense strand to SEQ ID NO: 104618
accuaacucauauaaucua

SEQ ID NO: 104620 - RNA, 19 nt, Artificial Sequence
  Description of Artificial Sequence: Synthetic oligonucleotide
  Sense strand starting at position 1004 of SEQ ID NO: 1320
auccuagacguagauuaua

SEQ ID NO: 104621 - RNA, 19 nt, Artificial Sequence
  Description of Artificial Sequence: Synthetic oligonucleotide
  Antisense strand to SEQ ID NO: 104620
uauaaucuacgucuaggau

SEQ ID NO: 104622 - RNA, 19 nt, Artificial Sequence
  Description of Artificial Sequence: Synthetic oligonucleotide
  Sense strand starting at position 962 of SEQ ID NO: 1320
guaauuaccucaguuguaa

SEQ ID NO: 104623 - RNA, 19 nt, Artificial Sequence
  Description of Artificial Sequence: Synthetic oligonucleotide
  Antisense strand to SEQ ID NO: 104622
uuacaacugagguaauuac

SEQ ID NO: 104624 - RNA, 19 nt, Artificial Sequence
  Description of Artificial Sequence: Synthetic oligonucleotide
  Sense strand starting at position 960 of SEQ ID NO: 1320
ccguaauuaccucaguugu

SEQ ID NO: 104625 - RNA, 19 nt, Artificial Sequence
  Description of Artificial Sequence: Synthetic oligonucleotide
  Antisense strand to SEQ ID NO: 104624
acaacugagguaauuacgg

SEQ ID NO: 104626 - RNA, 19 nt, Artificial Sequence
  Description of Artificial Sequence: Synthetic oligonucleotide
  Sense strand starting at position 951 of SEQ ID NO: 1320
uuccuugagccguaauuac

SEQ ID NO: 104627 - RNA, 19 nt, Artificial Sequence
  Description of Artificial Sequence: Synthetic oligonucleotide
  Antisense strand to SEQ ID NO: 104626
guaauuacggcucaaggaa

SEQ ID NO: 104628 - RNA, 19 nt, Artificial Sequence
  Description of Artificial Sequence: Synthetic oligonucleotide
  Sense strand starting at position 923 of SEQ ID NO: 1320
uuaagaaaucuuggcaaau

SEQ ID NO: 104629 - RNA, 19 nt, Artificial Sequence
  Description of Artificial Sequence: Synthetic oligonucleotide
  Antisense strand to SEQ ID NO: 104628
auuugccaagauuucuuaa

SEQ ID NO: 104630 - RNA, 19 nt, Artificial Sequence
  Description of Artificial Sequence: Synthetic oligonucleotide
  Sense strand starting at position 912 of SEQ ID NO: 1320
accgaaauauguuaagaaa

SEQ ID NO: 104631 - RNA, 19 nt, Artificial Sequence
  Description of Artificial Sequence: Synthetic oligonucleotide
  Antisense strand to SEQ ID NO: 104630
uuucuuaacauauuucggu

SEQ ID NO: 104632 - RNA, 19 nt, Artificial Sequence
  Description of Artificial Sequence: Synthetic oligonucleotide
  Sense strand starting at position 899 of SEQ ID NO: 1320
gaguucuggcacuaccgaa

SEQ ID NO: 104633 - RNA, 19 nt, Artificial Sequence
  Description of Artificial Sequence: Synthetic oligonucleotide
  Antisense strand to SEQ ID NO: 104632
uucgguagugccagaacuc

SEQ ID NO: 104634 - RNA, 19 nt, Artificial Sequence
  Description of Artificial Sequence: Synthetic oligonucleotide
  Sense strand starting at position 793 of SEQ ID NO: 1320
ccuugcuguuagucagauu

SEQ ID NO: 104635 - RNA, 19 nt, Artificial Sequence
  Description of Artificial Sequence: Synthetic oligonucleotide
  Antisense strand to SEQ ID NO: 104634
aaucugacuaacagcaagg

SEQ ID NO: 104636 - RNA, 19 nt, Artificial Sequence
  Description of Artificial Sequence: Synthetic oligonucleotide
  Sense strand starting at position 707 of SEQ ID NO: 1320
guuacaugguuucuaucuu

SEQ ID NO: 104637 - RNA, 19 nt, Artificial Sequence
  Description of Artificial Sequence: Synthetic oligonucleotide
  Antisense strand to SEQ ID NO: 104636
aagauagaaaccauguaac

SEQ ID NO: 104638 - RNA, 19 nt, Artificial Sequence
  Description of Artificial Sequence: Synthetic oligonucleotide
  Sense strand starting at position 704 of SEQ ID NO: 1320
aguguuacaugguuucuau

SEQ ID NO: 104639 - RNA, 19 nt, Artificial Sequence
  Description of Artificial Sequence: Synthetic oligonucleotide
  Antisense strand to SEQ ID NO: 104638
auagaaaccauguaacacu

SEQ ID NO: 104640 - RNA, 19 nt, Artificial Sequence
  Description of Artificial Sequence: Synthetic oligonucleotide
  Sense strand starting at position 624 of SEQ ID NO: 1320
auuucuagcucuguacuga

SEQ ID NO: 104641 - RNA, 19 nt, Artificial Sequence
  Description of Artificial Sequence: Synthetic oligonucleotide
  Antisense strand to SEQ ID NO: 104640
ucaguacagagcuagaaau

SEQ ID NO: 104642 - RNA, 19 nt, Artificial Sequence
  Description of Artificial Sequence: Synthetic oligonucleotide
  Sense strand starting at position 572 of SEQ ID NO: 1320
acuauuacuaccggagguu

SEQ ID NO: 104643 - RNA, 19 nt, Artificial Sequence
  Description of Artificial Sequence: Synthetic oligonucleotide
  Antisense strand to SEQ ID NO: 104642
aaccuccgguaguaauagu

SEQ ID NO: 104644 - RNA, 19 nt, Artificial Sequence
  Description of Artificial Sequence: Synthetic oligonucleotide
  Sense strand starting at position 160 of SEQ ID NO: 1320
ggaagcagguguguucuua

SEQ ID NO: 104645 - RNA, 19 nt, Artificial Sequence
  Description of Artificial Sequence: Synthetic oligonucleotide
  Antisense strand to SEQ ID NO: 104644
uaagaacacaccugcuucc

SEQ ID NO: 104646 - RNA, 19 nt, Artificial Sequence
  Description of Artificial Sequence: Synthetic oligonucleotide
  Sense strand starting at position 102 of SEQ ID NO: 1320
ucauccugauaguuacaca

SEQ ID NO: 104647 - RNA, 19 nt, Artificial Sequence
  Description of Artificial Sequence: Synthetic oligonucleotide
  Antisense strand to SEQ ID NO: 104646
uguguaacuaucaggauga

SEQ ID NO: 104648 - RNA, 19 nt, Artificial Sequence
  Description of Artificial Sequence: Synthetic oligonucleotide
  Sense strand starting at position 69 of SEQ ID NO: 1320
cuguacaacuaguucuaaa

SEQ ID NO: 104649 - RNA, 19 nt, Artificial Sequence
  Description of Artificial Sequence: Synthetic oligonucleotide
  Antisense strand to SEQ ID NO: 104648
uuuagaacuaguuguacag

SEQ ID NO: 104650 - RNA, 19 nt, Artificial Sequence
  Description of Artificial Sequence: Synthetic oligonucleotide
  Sense strand starting at position 28 of SEQ ID NO: 1320
auaauugugucaucuagaa

SEQ ID NO: 104651 - RNA, 19 nt, Artificial Sequence
  Description of Artificial Sequence: Synthetic oligonucleotide
  Antisense strand to SEQ ID NO: 104650
uucuagaugacacaauuau

SEQ ID NO: 104652 - RNA, 19 nt, Artificial Sequence
  Description of Artificial Sequence: Synthetic oligonucleotide
  Sense strand starting at position 3569 of SEQ ID NO: 1321
guaagauaguaccugaaag

SEQ ID NO: 104653 - RNA, 19 nt, Artificial Sequence
  Description of Artificial Sequence: Synthetic oligonucleotide
  Antisense strand to SEQ ID NO: 104652
cuuucagguacuaucuuac

SEQ ID NO: 104654 - RNA, 19 nt, Artificial Sequence
  Description of Artificial Sequence: Synthetic oligonucleotide
  Sense strand starting at position 3561 of SEQ ID NO: 1321
uucgauagguaagauagua

SEQ ID NO: 104655 - RNA, 19 nt, Artificial Sequence
  Description of Artificial Sequence: Synthetic oligonucleotide
  Antisense strand to SEQ ID NO: 104654
uacuaucuuaccuaucgaa

SEQ ID NO: 104656 - RNA, 19 nt, Artificial Sequence
  Description of Artificial Sequence: Synthetic oligonucleotide
  Sense strand starting at position 3558 of SEQ ID NO: 1321
gccuucgauagguaagaua

SEQ ID NO: 104657 - RNA, 19 nt, Artificial Sequence
  Description of Artificial Sequence: Synthetic oligonucleotide
  Antisense strand to SEQ ID NO: 104656
uaucuuaccuaucgaaggc

SEQ ID NO: 104658 - RNA, 19 nt, Artificial Sequence
  Description of Artificial Sequence: Synthetic oligonucleotide
  Sense strand starting at position 3557 of SEQ ID NO: 1321
agccuucgauagguaagau

SEQ ID NO: 104659 - RNA, 19 nt, Artificial Sequence
  Description of Artificial Sequence: Synthetic oligonucleotide
  Antisense strand to SEQ ID NO: 104658
aucuuaccuaucgaaggcu

SEQ ID NO: 104660 - RNA, 19 nt, Artificial Sequence
  Description of Artificial Sequence: Synthetic oligonucleotide
  Sense strand starting at position 3554 of SEQ ID NO: 1321
ucaagccuucgauagguaa

SEQ ID NO: 104661 - RNA, 19 nt, Artificial Sequence
  Description of Artificial Sequence: Synthetic oligonucleotide
  Antisense strand to SEQ ID NO: 104660
uuaccuaucgaaggcuuga

SEQ ID NO: 104662 - RNA, 19 nt, Artificial Sequence
  Description of Artificial Sequence: Synthetic oligonucleotide
  Sense strand starting at position 3295 of SEQ ID NO: 1321
gacuguuccugcucagcau

SEQ ID NO: 104663 - RNA, 19 nt, Artificial Sequence
  Description of Artificial Sequence: Synthetic oligonucleotide
  Antisense strand to SEQ ID NO: 104662
augcugagcaggaacaguc

SEQ ID NO: 104664 - RNA, 19 nt, Artificial Sequence
  Description of Artificial Sequence: Synthetic oligonucleotide
  Sense strand starting at position 3100 of SEQ ID NO: 1321
gucuguccuggguguagau

SEQ ID NO: 104665 - RNA, 19 nt, Artificial Sequence
  Description of Artificial Sequence: Synthetic oligonucleotide
  Antisense strand to SEQ ID NO: 104664
aucuacacccaggacagac

SEQ ID NO: 104666 - RNA, 19 nt, Artificial Sequence
  Description of Artificial Sequence: Synthetic oligonucleotide
  Sense strand starting at position 3097 of SEQ ID NO: 1321
gcugucuguccugggugua

SEQ ID NO: 104667 - RNA, 19 nt, Artificial Sequence
  Description of Artificial Sequence: Synthetic oligonucleotide
  Antisense strand to SEQ ID NO: 104666
uacacccaggacagacagc

SEQ ID NO: 104668 - RNA, 19 nt, Artificial Sequence
  Description of Artificial Sequence: Synthetic oligonucleotide
  Sense strand starting at position 2982 of SEQ ID NO: 1321
aucucaaacgcugaagauu

SEQ ID NO: 104669 - RNA, 19 nt, Artificial Sequence
  Description of Artificial Sequence: Synthetic oligonucleotide
  Antisense strand to SEQ ID NO: 104668
aaucuucagcguuugagau

SEQ ID NO: 104670 - RNA, 19 nt, Artificial Sequence
  Description of Artificial Sequence: Synthetic oligonucleotide
  Sense strand starting at position 2929 of SEQ ID NO: 1321
gugacugguccuggcuaga

SEQ ID NO: 104671 - RNA, 19 nt, Artificial Sequence
  Description of Artificial Sequence: Synthetic oligonucleotide
  Antisense strand to SEQ ID NO: 104670
ucuagccaggaccagucac

SEQ ID NO: 104672 - RNA, 19 nt, Artificial Sequence
  Description of Artificial Sequence: Synthetic oligonucleotide
  Sense strand starting at position 2914 of SEQ ID NO: 1321
ggcugugcaaauuauguga

SEQ ID NO: 104673 - RNA, 19 nt, Artificial Sequence
  Description of Artificial Sequence: Synthetic oligonucleotide
  Antisense strand to SEQ ID NO: 104672
ucacauaauuugcacagcc

SEQ ID NO: 104674 - RNA, 19 nt, Artificial Sequence
  Description of Artificial Sequence: Synthetic oligonucleotide
  Sense strand starting at position 2857 of SEQ ID NO: 1321
uguugccgucuugaaauga

SEQ ID NO: 104675 - RNA, 19 nt, Artificial Sequence
  Description of Artificial Sequence: Synthetic oligonucleotide
  Antisense strand to SEQ ID NO: 104674
ucauuucaagacggcaaca

SEQ ID NO: 104676 - RNA, 19 nt, Artificial Sequence
  Description of Artificial Sequence: Synthetic oligonucleotide
  Sense strand starting at position 2842 of SEQ ID NO: 1321
gguuuaguacuuugcuguu

SEQ ID NO: 104677 - RNA, 19 nt, Artificial Sequence
  Description of Artificial Sequence: Synthetic oligonucleotide
  Antisense strand to SEQ ID NO: 104676
aacagcaaaguacuaaacc

SEQ ID NO: 104678 - RNA, 19 nt, Artificial Sequence
  Description of Artificial Sequence: Synthetic oligonucleotide
  Sense strand starting at position 2832 of SEQ ID NO: 1321
uccuguacuugguuuagua

SEQ ID NO: 104679 - RNA, 19 nt, Artificial Sequence
  Description of Artificial Sequence: Synthetic oligonucleotide
  Antisense strand to SEQ ID NO: 104678
uacuaaaccaaguacagga

SEQ ID NO: 104680 - RNA, 19 nt, Artificial Sequence
  Description of Artificial Sequence: Synthetic oligonucleotide
  Sense strand starting at position 2780 of SEQ ID NO: 1321
ugguuucaugggugaacag

SEQ ID NO: 104681 - RNA, 19 nt, Artificial Sequence
  Description of Artificial Sequence: Synthetic oligonucleotide
  Antisense strand to SEQ ID NO: 104680
cuguucacccaugaaacca

SEQ ID NO: 104682 - RNA, 19 nt, Artificial Sequence
  Description of Artificial Sequence: Synthetic oligonucleotide
  Sense strand starting at position 2779 of SEQ ID NO: 1321
cugguuucaugggugaaca

SEQ ID NO: 104683 - RNA, 19 nt, Artificial Sequence
  Description of Artificial Sequence: Synthetic oligonucleotide
  Antisense strand to SEQ ID NO: 104682
uguucacccaugaaaccag

SEQ ID NO: 104684 - RNA, 19 nt, Artificial Sequence
  Description of Artificial Sequence: Synthetic oligonucleotide
  Sense strand starting at position 2731 of SEQ ID NO: 1321
ggaguuccuugguuccaaa

SEQ ID NO: 104685 - RNA, 19 nt, Artificial Sequence
  Description of Artificial Sequence: Synthetic oligonucleotide
  Antisense strand to SEQ ID NO: 104684
uuuggaaccaaggaacucc

SEQ ID NO: 104686 - RNA, 19 nt, Artificial Sequence
  Description of Artificial Sequence: Synthetic oligonucleotide
  Sense strand starting at position 2730 of SEQ ID NO: 1321
uggaguuccuugguuccaa

SEQ ID NO: 104687 - RNA, 19 nt, Artificial Sequence
  Description of Artificial Sequence: Synthetic oligonucleotide
  Antisense strand to SEQ ID NO: 104686
uuggaaccaaggaacucca

SEQ ID NO: 104688 - RNA, 19 nt, Artificial Sequence
  Description of Artificial Sequence: Synthetic oligonucleotide
  Sense strand starting at position 2551 of SEQ ID NO: 1321
guacuugauguacaagacu

SEQ ID NO: 104689 - RNA, 19 nt, Artificial Sequence
  Description of Artificial Sequence: Synthetic oligonucleotide
  Antisense strand to SEQ ID NO: 104688
agucuuguacaucaaguac

SEQ ID NO: 104690 - RNA, 19 nt, Artificial Sequence
  Description of Artificial Sequence: Synthetic oligonucleotide
  Sense strand starting at position 2538 of SEQ ID NO: 1321
gcuuauuagauggguacuu

SEQ ID NO: 104691 - RNA, 19 nt, Artificial Sequence
  Description of Artificial Sequence: Synthetic oligonucleotide
  Antisense strand to SEQ ID NO: 104690
aaguacccaucuaauaagc

SEQ ID NO: 104692 - RNA, 19 nt, Artificial Sequence
  Description of Artificial Sequence: Synthetic oligonucleotide
  Sense strand starting at position 2537 of SEQ ID NO: 1321
ugcuuauuagauggguacu

SEQ ID NO: 104693 - RNA, 19 nt, Artificial Sequence
  Description of Artificial Sequence: Synthetic oligonucleotide
  Antisense strand to SEQ ID NO: 104692
aguacccaucuaauaagca

SEQ ID NO: 104694 - RNA, 19 nt, Artificial Sequence
  Description of Artificial Sequence: Synthetic oligonucleotide
  Sense strand starting at position 2531 of SEQ ID NO: 1321
ugaguuugcuuauuagaug

SEQ ID NO: 104695 - RNA, 19 nt, Artificial Sequence
  Description of Artificial Sequence: Synthetic oligonucleotide
  Antisense strand to SEQ ID NO: 104694
caucuaauaagcaaacuca

SEQ ID NO: 104696 - RNA, 19 nt, Artificial Sequence
  Description of Artificial Sequence: Synthetic oligonucleotide
  Sense strand starting at position 2528 of SEQ ID NO: 1321
caaugaguuugcuuauuag

SEQ ID NO: 104697 - RNA, 19 nt, Artificial Sequence
  Description of Artificial Sequence: Synthetic oligonucleotide
  Antisense strand to SEQ ID NO: 104696
cuaauaagcaaacucauug

SEQ ID NO: 104698 - RNA, 19 nt, Artificial Sequence
  Description of Artificial Sequence: Synthetic oligonucleotide
  Sense strand starting at position 2381 of SEQ ID NO: 1321
cagcaagaaugcgcagaau

SEQ ID NO: 104699 - RNA, 19 nt, Artificial Sequence
  Description of Artificial Sequence: Synthetic oligonucleotide
  Antisense strand to SEQ ID NO: 104698
auucugcgcauucuugcug

SEQ ID NO: 104700 - RNA, 19 nt, Artificial Sequence
  Description of Artificial Sequence: Synthetic oligonucleotide
  Sense strand starting at position 2160 of SEQ ID NO: 1321
ggaggaguuggcugcguuu

SEQ ID NO: 104701 - RNA, 19 nt, Artificial Sequence
  Description of Artificial Sequence: Synthetic oligonucleotide
  Antisense strand to SEQ ID NO: 104700
aaacgcagccaacuccucc

SEQ ID NO: 104702 - RNA, 19 nt, Artificial Sequence
  Description of Artificial Sequence: Synthetic oligonucleotide
  Sense strand starting at position 1756 of SEQ ID NO: 1321
gcgagaacucgcgcgggaa

SEQ ID NO: 104703 - RNA, 19 nt, Artificial Sequence
  Description of Artificial Sequence: Synthetic oligonucleotide
  Antisense strand to SEQ ID NO: 104702
uucccgcgcgaguucucgc

SEQ ID NO: 104704 - RNA, 19 nt, Artificial Sequence
  Description of Artificial Sequence: Synthetic oligonucleotide
  Sense strand starting at position 1188 of SEQ ID NO: 1321
agugucacuggcuagaaga

SEQ ID NO: 104705 - RNA, 19 nt, Artificial Sequence
  Description of Artificial Sequence: Synthetic oligonucleotide
  Antisense strand to SEQ ID NO: 104704
ucuucuagccagugacacu

SEQ ID NO: 104706 - RNA, 19 nt, Artificial Sequence
  Description of Artificial Sequence: Synthetic oligonucleotide
  Sense strand starting at position 1185 of SEQ ID NO: 1321
ccaagugucacuggcuaga

SEQ ID NO: 104707 - RNA, 19 nt, Artificial Sequence
  Description of Artificial Sequence: Synthetic oligonucleotide
  Antisense strand to SEQ ID NO: 104706
ucuagccagugacacuugg

SEQ ID NO: 104708 - RNA, 19 nt, Artificial Sequence
  Description of Artificial Sequence: Synthetic oligonucleotide
  Sense strand starting at position 706 of SEQ ID NO: 1321
caucgcucauccguuuaaa

SEQ ID NO: 104709 - RNA, 19 nt, Artificial Sequence
  Description of Artificial Sequence: Synthetic oligonucleotide
  Antisense strand to SEQ ID NO: 104708
uuuaaacggaugagcgaug

SEQ ID NO: 104710 - RNA, 19 nt, Artificial Sequence
  Description of Artificial Sequence: Synthetic oligonucleotide
  Sense strand starting at position 697 of SEQ ID NO: 1321
aguuaaucacaucgcucau

SEQ ID NO: 104711 - RNA, 19 nt, Artificial Sequence
  Description of Artificial Sequence: Synthetic oligonucleotide
  Antisense strand to SEQ ID NO: 104710
augagcgaugugauuaacu

SEQ ID NO: 104712 - RNA, 19 nt, Artificial Sequence
  Description of Artificial Sequence: Synthetic oligonucleotide
  Sense strand starting at position 577 of SEQ ID NO: 1321
guccgugucggccacaaau

SEQ ID NO: 104713 - RNA, 19 nt, Artificial Sequence
  Description of Artificial Sequence: Synthetic oligonucleotide
  Antisense strand to SEQ ID NO: 104712
auuuguggccgacacggac

SEQ ID NO: 104714 - RNA, 19 nt, Artificial Sequence
  Description of Artificial Sequence: Synthetic oligonucleotide
  Sense strand starting at position 447 of SEQ ID NO: 1321
uggucaugccagugcaaag

SEQ ID NO: 104715 - RNA, 19 nt, Artificial Sequence
  Description of Artificial Sequence: Synthetic oligonucleotide
  Antisense strand to SEQ ID NO: 104714
cuuugcacuggcaugacca

SEQ ID NO: 104716 - RNA, 19 nt, Artificial Sequence
  Description of Artificial Sequence: Synthetic oligonucleotide
  Sense strand starting at position 351 of SEQ ID NO: 1321
cucuucuacccuugggaga

SEQ ID NO: 104717 - RNA, 19 nt, Artificial Sequence
  Description of Artificial Sequence: Synthetic oligonucleotide
  Antisense strand to SEQ ID NO: 104716
ucucccaaggguagaagag

SEQ ID NO: 104718 - RNA, 19 nt, Artificial Sequence
  Description of Artificial Sequence: Synthetic oligonucleotide
  Sense strand starting at position 282 of SEQ ID NO: 1321
aggcucugaaugggagaua

SEQ ID NO: 104719 - RNA, 19 nt, Artificial Sequence
  Description of Artificial Sequence: Synthetic oligonucleotide
  Antisense strand to SEQ ID NO: 104718
uaucucccauucagagccu

SEQ ID NO: 104720 - RNA, 19 nt, Artificial Sequence
  Description of Artificial Sequence: Synthetic oligonucleotide
  Sense strand starting at position 209 of SEQ ID NO: 1321
aggagcagagcaugauaaa

SEQ ID NO: 104721 - RNA, 19 nt, Artificial Sequence
  Description of Artificial Sequence: Synthetic oligonucleotide
  Antisense strand to SEQ ID NO: 104720
uuuaucaugcucugcuccu

SEQ ID NO: 104722 - RNA, 19 nt, Artificial Sequence
  Description of Artificial Sequence: Synthetic oligonucleotide
  Sense strand starting at position 128 of SEQ ID NO: 1321
aguaaguugcgagggagua

SEQ ID NO: 104723 - RNA, 19 nt, Artificial Sequence
  Description of Artificial Sequence: Synthetic oligonucleotide
  Antisense strand to SEQ ID NO: 104722
uacucccucgcaacuuacu

SEQ ID NO: 104724 - RNA, 19 nt, Artificial Sequence
  Description of Artificial Sequence: Synthetic oligonucleotide
  Sense strand starting at position 127 of SEQ ID NO: 1321
uaguaaguugcgagggagu

SEQ ID NO: 104725 - RNA, 19 nt, Artificial Sequence
  Description of Artificial Sequence: Synthetic oligonucleotide
  Antisense strand to SEQ ID NO: 104724
acucccucgcaacuuacua

SEQ ID NO: 104726 - RNA, 19 nt, Artificial Sequence
  Description of Artificial Sequence: Synthetic oligonucleotide
  Sense strand starting at position 113 of SEQ ID NO: 1321
gcccuagugcccuguagua

SEQ ID NO: 104727 - RNA, 19 nt, Artificial Sequence
  Description of Artificial Sequence: Synthetic oligonucleotide
  Antisense strand to SEQ ID NO: 104726
uacuacagggcacuagggc

SEQ ID NO: 104728 - RNA, 19 nt, Artificial Sequence
  Description of Artificial Sequence: Synthetic oligonucleotide
  Sense strand starting at position 28 of SEQ ID NO: 1321
ccagcagagugauaggaca

SEQ ID NO: 104729 - RNA, 19 nt, Artificial Sequence
  Description of Artificial Sequence: Synthetic oligonucleotide
  Antisense strand to SEQ ID NO: 104728
uguccuaucacucugcugg

SEQ ID NO: 104730 - RNA, 19 nt, Artificial Sequence
  Description of Artificial Sequence: Synthetic oligonucleotide
  Sense strand starting at position 1 of SEQ ID NO: 1321
cagucaugcucucaaggaa

SEQ ID NO: 104731 - RNA, 19 nt, Artificial Sequence
  Description of Artificial Sequence: Synthetic oligonucleotide
  Antisense strand to SEQ ID NO: 104730
uuccuugagagcaugacug

SEQ ID NO: 104732 - RNA, 19 nt, Artificial Sequence
  Description of Artificial Sequence: Synthetic oligonucleotide
  Sense strand starting at position 3904 of SEQ ID NO: 1323
aucucaaacgcugaagauu

SEQ ID NO: 104733 - RNA, 19 nt, Artificial Sequence
  Description of Artificial Sequence: Synthetic oligonucleotide
  Antisense strand to SEQ ID NO: 104732
aaucuucagcguuugagau

SEQ ID NO: 104734 - RNA, 19 nt, Artificial Sequence
  Description of Artificial Sequence: Synthetic oligonucleotide
  Sense strand starting at position 3851 of SEQ ID NO: 1323
gugacugguccuggcuaga

SEQ ID NO: 104735 - RNA, 19 nt, Artificial Sequence
  Description of Artificial Sequence: Synthetic oligonucleotide
  Antisense strand to SEQ ID NO: 104734
ucuagccaggaccagucac

SEQ ID NO: 104736 - RNA, 19 nt, Artificial Sequence
  Description of Artificial Sequence: Synthetic oligonucleotide
  Sense strand starting at position 3836 of SEQ ID NO: 1323
ggcugugcaaauuauguga

SEQ ID NO: 104737 - RNA, 19 nt, Artificial Sequence
  Description of Artificial Sequence: Synthetic oligonucleotide
  Antisense strand to SEQ ID NO: 104736
ucacauaauuugcacagcc

SEQ ID NO: 104738 - RNA, 19 nt, Artificial Sequence
  Description of Artificial Sequence: Synthetic oligonucleotide
  Sense strand starting at position 3779 of SEQ ID NO: 1323
uguugccgucuugaaauga

SEQ ID NO: 104739 - RNA, 19 nt, Artificial Sequence
  Description of Artificial Sequence: Synthetic oligonucleotide
  Antisense strand to SEQ ID NO: 104738
ucauuucaagacggcaaca

SEQ ID NO: 104740 - RNA, 19 nt, Artificial Sequence
  Description of Artificial Sequence: Synthetic oligonucleotide
  Sense strand starting at position 3764 of SEQ ID NO: 1323
gguuuaguacuuugcuguu

SEQ ID NO: 104741 - RNA, 19 nt, Artificial Sequence
  Description of Artificial Sequence: Synthetic oligonucleotide
  Antisense strand to SEQ ID NO: 104740
aacagcaaaguacuaaacc

SEQ ID NO: 104742 - RNA, 19 nt, Artificial Sequence
  Description of Artificial Sequence: Synthetic oligonucleotide
  Sense strand starting at position 3754 of SEQ ID NO: 1323
uccuguacuugguuuagua

SEQ ID NO: 104743 - RNA, 19 nt, Artificial Sequence
  Description of Artificial Sequence: Synthetic oligonucleotide
  Antisense strand to SEQ ID NO: 104742
uacuaaaccaaguacagga

SEQ ID NO: 104744 - RNA, 19 nt, Artificial Sequence
  Description of Artificial Sequence: Synthetic oligonucleotide
  Sense strand starting at position 3702 of SEQ ID NO: 1323
ugguuucaugggugaacag

SEQ ID NO: 104745 - RNA, 19 nt, Artificial Sequence
  Description of Artificial Sequence: Synthetic oligonucleotide
  Antisense strand to SEQ ID NO: 104744
cuguucacccaugaaacca

SEQ ID NO: 104746 - RNA, 19 nt, Artificial Sequence
  Description of Artificial Sequence: Synthetic oligonucleotide
  Sense strand starting at position 3701 of SEQ ID NO: 1323
cugguuucaugggugaaca

SEQ ID NO: 104747 - RNA, 19 nt, Artificial Sequence
  Description of Artificial Sequence: Synthetic oligonucleotide
  Antisense strand to SEQ ID NO: 104746
uguucacccaugaaaccag

SEQ ID NO: 104748 - RNA, 19 nt, Artificial Sequence
  Description of Artificial Sequence: Synthetic oligonucleotide
  Sense strand starting at position 3653 of SEQ ID NO: 1323
ggaguuccuugguuccaaa

SEQ ID NO: 104749 - RNA, 19 nt, Artificial Sequence
  Description of Artificial Sequence: Synthetic oligonucleotide
  Antisense strand to SEQ ID NO: 104748
uuuggaaccaaggaacucc

SEQ ID NO: 104750 - RNA, 19 nt, Artificial Sequence
  Description of Artificial Sequence: Synthetic oligonucleotide
  Sense strand starting at position 3652 of SEQ ID NO: 1323
uggaguuccuugguuccaa

SEQ ID NO: 104751 - RNA, 19 nt, Artificial Sequence
  Description of Artificial Sequence: Synthetic oligonucleotide
  Antisense strand to SEQ ID NO: 104750
uuggaaccaaggaacucca

SEQ ID NO: 104752 - RNA, 19 nt, Artificial Sequence
  Description of Artificial Sequence: Synthetic oligonucleotide
  Sense strand starting at position 3473 of SEQ ID NO: 1323
guacuugauguacaagacu

SEQ ID NO: 104753 - RNA, 19 nt, Artificial Sequence
  Description of Artificial Sequence: Synthetic oligonucleotide
  Antisense strand to SEQ ID NO: 104752
agucuuguacaucaaguac

SEQ ID NO: 104754 - RNA, 19 nt, Artificial Sequence
  Description of Artificial Sequence: Synthetic oligonucleotide
  Sense strand starting at position 3469 of SEQ ID NO: 1323
auggguacuugauguacaa

SEQ ID NO: 104755 - RNA, 19 nt, Artificial Sequence
  Description of Artificial Sequence: Synthetic oligonucleotide
  Antisense strand to SEQ ID NO: 104754
uuguacaucaaguacccau

SEQ ID NO: 104756 - RNA, 19 nt, Artificial Sequence
  Description of Artificial Sequence: Synthetic oligonucleotide
  Sense strand starting at position 3460 of SEQ ID NO: 1323
gcuuauuagauggguacuu

SEQ ID NO: 104757 - RNA, 19 nt, Artificial Sequence
  Description of Artificial Sequence: Synthetic oligonucleotide
  Antisense strand to SEQ ID NO: 104756
aaguacccaucuaauaagc

SEQ ID NO: 104758 - RNA, 19 nt, Artificial Sequence
  Description of Artificial Sequence: Synthetic oligonucleotide
  Sense strand starting at position 3459 of SEQ ID NO: 1323
ugcuuauuagauggguacu

SEQ ID NO: 104759 - RNA, 19 nt, Artificial Sequence
  Description of Artificial Sequence: Synthetic oligonucleotide
  Antisense strand to SEQ ID NO: 104758
aguacccaucuaauaagca

SEQ ID NO: 104760 - RNA, 19 nt, Artificial Sequence
  Description of Artificial Sequence: Synthetic oligonucleotide
  Sense strand starting at position 3453 of SEQ ID NO: 1323
ugaguuugcuuauuagaug

SEQ ID NO: 104761 - RNA, 19 nt, Artificial Sequence
  Description of Artificial Sequence: Synthetic oligonucleotide
  Antisense strand to SEQ ID NO: 104760
caucuaauaagcaaacuca

SEQ ID NO: 104762 - RNA, 19 nt, Artificial Sequence
  Description of Artificial Sequence: Synthetic oligonucleotide
  Sense strand starting at position 3450 of SEQ ID NO: 1323
caaugaguuugcuuauuag

SEQ ID NO: 104763 - RNA, 19 nt, Artificial Sequence
  Description of Artificial Sequence: Synthetic oligonucleotide
  Antisense strand to SEQ ID NO: 104762
cuaauaagcaaacucauug

SEQ ID NO: 104764 - RNA, 19 nt, Artificial Sequence
  Description of Artificial Sequence: Synthetic oligonucleotide
  Sense strand starting at position 3303 of SEQ ID NO: 1323
cagcaagaaugcgcagaau

SEQ ID NO: 104765 - RNA, 19 nt, Artificial Sequence
  Description of Artificial Sequence: Synthetic oligonucleotide
  Antisense strand to SEQ ID NO: 104764
auucugcgcauucuugcug

SEQ ID NO: 104766 - RNA, 19 nt, Artificial Sequence
  Description of Artificial Sequence: Synthetic oligonucleotide
  Sense strand starting at position 3082 of SEQ ID NO: 1323
ggaggaguuggcugcguuu

SEQ ID NO: 104767 - RNA, 19 nt, Artificial Sequence
  Description of Artificial Sequence: Synthetic oligonucleotide
  Antisense strand to SEQ ID NO: 104766
aaacgcagccaacuccucc

SEQ ID NO: 104768 - RNA, 19 nt, Artificial Sequence
  Description of Artificial Sequence: Synthetic oligonucleotide
  Sense strand starting at position 2678 of SEQ ID NO: 1323
gcgagaacucgcgcgggaa

SEQ ID NO: 104769 - RNA, 19 nt, Artificial Sequence
  Description of Artificial Sequence: Synthetic oligonucleotide
  Antisense strand to SEQ ID NO: 104768
uucccgcgcgaguucucgc

SEQ ID NO: 104770 - RNA, 19 nt, Artificial Sequence
  Description of Artificial Sequence: Synthetic oligonucleotide
  Sense strand starting at position 2110 of SEQ ID NO: 1323
agugucacuggcuagaaga

SEQ ID NO: 104771 - RNA, 19 nt, Artificial Sequence
  Description of Artificial Sequence: Synthetic oligonucleotide
  Antisense strand to SEQ ID NO: 104770
ucuucuagccagugacacu

SEQ ID NO: 104772 - RNA, 19 nt, Artificial Sequence
  Description of Artificial Sequence: Synthetic oligonucleotide
  Sense strand starting at position 2107 of SEQ ID NO: 1323
ccaagugucacuggcuaga

SEQ ID NO: 104773 - RNA, 19 nt, Artificial Sequence
  Description of Artificial Sequence: Synthetic oligonucleotide
  Antisense strand to SEQ ID NO: 104772
ucuagccagugacacuugg

SEQ ID NO: 104774 - RNA, 19 nt, Artificial Sequence
  Description of Artificial Sequence: Synthetic oligonucleotide
  Sense strand starting at position 1628 of SEQ ID NO: 1323
caucgcucauccguuuaaa

SEQ ID NO: 104775 - RNA, 19 nt, Artificial Sequence
  Description of Artificial Sequence: Synthetic oligonucleotide
  Antisense strand to SEQ ID NO: 104774
uuuaaacggaugagcgaug

SEQ ID NO: 104776 - RNA, 19 nt, Artificial Sequence
  Description of Artificial Sequence: Synthetic oligonucleotide
  Sense strand starting at position 1619 of SEQ ID NO: 1323
aguuaaucacaucgcucau

SEQ ID NO: 104777 - RNA, 19 nt, Artificial Sequence
  Description of Artificial Sequence: Synthetic oligonucleotide
  Antisense strand to SEQ ID NO: 104776
augagcgaugugauuaacu

SEQ ID NO: 104778 - RNA, 19 nt, Artificial Sequence
  Description of Artificial Sequence: Synthetic oligonucleotide
  Sense strand starting at position 1499 of SEQ ID NO: 1323
guccgugucggccacaaau

SEQ ID NO: 104779 - RNA, 19 nt, Artificial Sequence
  Description of Artificial Sequence: Synthetic oligonucleotide
  Antisense strand to SEQ ID NO: 104778
auuuguggccgacacggac

SEQ ID NO: 104780 - RNA, 19 nt, Artificial Sequence
  Description of Artificial Sequence: Synthetic oligonucleotide
  Sense strand starting at position 1369 of SEQ ID NO: 1323
uggucaugccagugcaaag

SEQ ID NO: 104781 - RNA, 19 nt, Artificial Sequence
  Description of Artificial Sequence: Synthetic oligonucleotide
  Antisense strand to SEQ ID NO: 104780
cuuugcacuggcaugacca

SEQ ID NO: 104782 - RNA, 19 nt, Artificial Sequence
  Description of Artificial Sequence: Synthetic oligonucleotide
  Sense strand starting at position 1273 of SEQ ID NO: 1323
cucuucuacccuugggaga

SEQ ID NO: 104783 - RNA, 19 nt, Artificial Sequence
  Description of Artificial Sequence: Synthetic oligonucleotide
  Antisense strand to SEQ ID NO: 104782
ucucccaaggguagaagag

SEQ ID NO: 104784 - RNA, 19 nt, Artificial Sequence
  Description of Artificial Sequence: Synthetic oligonucleotide
  Sense strand starting at position 1204 of SEQ ID NO: 1323
aggcucugaaugggagaua

SEQ ID NO: 104785 - RNA, 19 nt, Artificial Sequence
  Description of Artificial Sequence: Synthetic oligonucleotide
  Antisense strand to SEQ ID NO: 104784
uaucucccauucagagccu

SEQ ID NO: 104786 - RNA, 19 nt, Artificial Sequence
  Description of Artificial Sequence: Synthetic oligonucleotide
  Sense strand starting at position 1131 of SEQ ID NO: 1323
aggagcagagcaugauaaa

SEQ ID NO: 104787 - RNA, 19 nt, Artificial Sequence
  Description of Artificial Sequence: Synthetic oligonucleotide
  Antisense strand to SEQ ID NO: 104786
uuuaucaugcucugcuccu

SEQ ID NO: 104788 - RNA, 19 nt, Artificial Sequence
  Description of Artificial Sequence: Synthetic oligonucleotide
  Sense strand starting at position 1050 of SEQ ID NO: 1323
aguaaguugcgagggagua

SEQ ID NO: 104789 - RNA, 19 nt, Artificial Sequence
  Description of Artificial Sequence: Synthetic oligonucleotide
  Antisense strand to SEQ ID NO: 104788
uacucccucgcaacuuacu

SEQ ID NO: 104790 - RNA, 19 nt, Artificial Sequence
  Description of Artificial Sequence: Synthetic oligonucleotide
  Sense strand starting at position 1049 of SEQ ID NO: 1323
uaguaaguugcgagggagu

SEQ ID NO: 104791 - RNA, 19 nt, Artificial Sequence
  Description of Artificial Sequence: Synthetic oligonucleotide
  Antisense strand to SEQ ID NO: 104790
acucccucgcaacuuacua

SEQ ID NO: 104792 - RNA, 19 nt, Artificial Sequence
  Description of Artificial Sequence: Synthetic oligonucleotide
  Sense strand starting at position 1035 of SEQ ID NO: 1323
gcccuagugcccuguagua

SEQ ID NO: 104793 - RNA, 19 nt, Artificial Sequence
  Description of Artificial Sequence: Synthetic oligonucleotide
  Antisense strand to SEQ ID NO: 104792
uacuacagggcacuagggc

SEQ ID NO: 104794 - RNA, 19 nt, Artificial Sequence
  Description of Artificial Sequence: Synthetic oligonucleotide
  Sense strand starting at position 950 of SEQ ID NO: 1323
ccagcagagugauaggaca

SEQ ID NO: 104795 - RNA, 19 nt, Artificial Sequence
  Description of Artificial Sequence: Synthetic oligonucleotide
  Antisense strand to SEQ ID NO: 104794
uguccuaucacucugcugg

SEQ ID NO: 104796 - RNA, 19 nt, Artificial Sequence
  Description of Artificial Sequence: Synthetic oligonucleotide
  Sense strand starting at position 923 of SEQ ID NO: 1323
cagucaugcucucaaggaa

SEQ ID NO: 104797 - RNA, 19 nt, Artificial Sequence
  Description of Artificial Sequence: Synthetic oligonucleotide
  Antisense strand to SEQ ID NO: 104796
uuccuugagagcaugacug

SEQ ID NO: 104798 - RNA, 19 nt, Artificial Sequence
  Description of Artificial Sequence: Synthetic oligonucleotide
  Sense strand starting at position 821 of SEQ ID NO: 1323
aucagugugcucguucauu

SEQ ID NO: 104799 - RNA, 19 nt, Artificial Sequence
  Description of Artificial Sequence: Synthetic oligonucleotide
  Antisense strand to SEQ ID NO: 104798
aaugaacgagcacacugau

SEQ ID NO: 104800 - RNA, 19 nt, Artificial Sequence
  Description of Artificial Sequence: Synthetic oligonucleotide
  Sense strand starting at position 542 of SEQ ID NO: 1323
aucucagucucaugagcua

SEQ ID NO: 104801 - RNA, 19 nt, Artificial Sequence
  Description of Artificial Sequence: Synthetic oligonucleotide
  Antisense strand to SEQ ID NO: 104800
uagcucaugagacugagau

SEQ ID NO: 104802 - RNA, 19 nt, Artificial Sequence
  Description of Artificial Sequence: Synthetic oligonucleotide
  Sense strand starting at position 455 of SEQ ID NO: 1323
ucuugaagaugagauguaa

SEQ ID NO: 104803 - RNA, 19 nt, Artificial Sequence
  Description of Artificial Sequence: Synthetic oligonucleotide
  Antisense strand to SEQ ID NO: 104802
uuacaucucaucuucaaga

SEQ ID NO: 104804 - RNA, 19 nt, Artificial Sequence
  Description of Artificial Sequence: Synthetic oligonucleotide
  Sense strand starting at position 387 of SEQ ID NO: 1323
auagaauccuugguagcua

SEQ ID NO: 104805 - RNA, 19 nt, Artificial Sequence
  Description of Artificial Sequence: Synthetic oligonucleotide
  Antisense strand to SEQ ID NO: 104804
uagcuaccaaggauucuau

SEQ ID NO: 104806 - RNA, 19 nt, Artificial Sequence
  Description of Artificial Sequence: Synthetic oligonucleotide
  Sense strand starting at position 386 of SEQ ID NO: 1323
aauagaauccuugguagcu

SEQ ID NO: 104807 - RNA, 19 nt, Artificial Sequence
  Description of Artificial Sequence: Synthetic oligonucleotide
  Antisense strand to SEQ ID NO: 104806
agcuaccaaggauucuauu

SEQ ID NO: 104808 - RNA, 19 nt, Artificial Sequence
  Description of Artificial Sequence: Synthetic oligonucleotide
  Sense strand starting at position 384 of SEQ ID NO: 1323
caaauagaauccuugguag

SEQ ID NO: 104809 - RNA, 19 nt, Artificial Sequence
  Description of Artificial Sequence: Synthetic oligonucleotide
  Antisense strand to SEQ ID NO: 104808
cuaccaaggauucuauuug

SEQ ID NO: 104810 - RNA, 19 nt, Artificial Sequence
  Description of Artificial Sequence: Synthetic oligonucleotide
  Sense strand starting at position 306 of SEQ ID NO: 1323
agauuugccuagugagcuu

SEQ ID NO: 104811 - RNA, 19 nt, Artificial Sequence
  Description of Artificial Sequence: Synthetic oligonucleotide
  Antisense strand to SEQ ID NO: 104810
aagcucacuaggcaaaucu

SEQ ID NO: 104812 - RNA, 19 nt, Artificial Sequence
  Description of Artificial Sequence: Synthetic oligonucleotide
  Sense strand starting at position 3856 of SEQ ID NO: 1322
guaagauaguaccugaaag

SEQ ID NO: 104813 - RNA, 19 nt, Artificial Sequence
  Description of Artificial Sequence: Synthetic oligonucleotide
  Antisense strand to SEQ ID NO: 104812
cuuucagguacuaucuuac

SEQ ID NO: 104814 - RNA, 19 nt, Artificial Sequence
  Description of Artificial Sequence: Synthetic oligonucleotide
  Sense strand starting at position 3848 of SEQ ID NO: 1322
uucgauagguaagauagua

SEQ ID NO: 104815 - RNA, 19 nt, Artificial Sequence
  Description of Artificial Sequence: Synthetic oligonucleotide
  Antisense strand to SEQ ID NO: 104814
uacuaucuuaccuaucgaa

SEQ ID NO: 104816 - RNA, 19 nt, Artificial Sequence
  Description of Artificial Sequence: Synthetic oligonucleotide
  Sense strand starting at position 3845 of SEQ ID NO: 1322
gccuucgauagguaagaua

SEQ ID NO: 104817 - RNA, 19 nt, Artificial Sequence
  Description of Artificial Sequence: Synthetic oligonucleotide
  Antisense strand to SEQ ID NO: 104816
uaucuuaccuaucgaaggc

SEQ ID NO: 104818 - RNA, 19 nt, Artificial Sequence
  Description of Artificial Sequence: Synthetic oligonucleotide
  Sense strand starting at position 3844 of SEQ ID NO: 1322
agccuucgauagguaagau

SEQ ID NO: 104819 - RNA, 19 nt, Artificial Sequence
  Description of Artificial Sequence: Synthetic oligonucleotide
  Antisense strand to SEQ ID NO: 104818
aucuuaccuaucgaaggcu

SEQ ID NO: 104820 - RNA, 19 nt, Artificial Sequence
  Description of Artificial Sequence: Synthetic oligonucleotide
  Sense strand starting at position 3841 of SEQ ID NO: 1322
ucaagccuucgauagguaa

SEQ ID NO: 104821 - RNA, 19 nt, Artificial Sequence
  Description of Artificial Sequence: Synthetic oligonucleotide
  Antisense strand to SEQ ID NO: 104820
uuaccuaucgaaggcuuga

SEQ ID NO: 104822 - RNA, 19 nt, Artificial Sequence
  Description of Artificial Sequence: Synthetic oligonucleotide
  Sense strand starting at position 3582 of SEQ ID NO: 1322
gacuguuccugcucagcau

SEQ ID NO: 104823 - RNA, 19 nt, Artificial Sequence
  Description of Artificial Sequence: Synthetic oligonucleotide
  Antisense strand to SEQ ID NO: 104822
augcugagcaggaacaguc

SEQ ID NO: 104824 - RNA, 19 nt, Artificial Sequence
  Description of Artificial Sequence: Synthetic oligonucleotide
  Sense strand starting at position 3387 of SEQ ID NO: 1322
gucuguccuggguguagau

SEQ ID NO: 104825 - RNA, 19 nt, Artificial Sequence
  Description of Artificial Sequence: Synthetic oligonucleotide
  Antisense strand to SEQ ID NO: 104824
aucuacacccaggacagac

SEQ ID NO: 104826 - RNA, 19 nt, Artificial Sequence
  Description of Artificial Sequence: Synthetic oligonucleotide
  Sense strand starting at position 3384 of SEQ ID NO: 1322
gcugucuguccugggugua

SEQ ID NO: 104827 - RNA, 19 nt, Artificial Sequence
  Description of Artificial Sequence: Synthetic oligonucleotide
  Antisense strand to SEQ ID NO: 104826
uacacccaggacagacagc

SEQ ID NO: 104828 - RNA, 19 nt, Artificial Sequence
  Description of Artificial Sequence: Synthetic oligonucleotide
  Sense strand starting at position 3269 of SEQ ID NO: 1322
aucucaaacgcugaagauu

SEQ ID NO: 104829 - RNA, 19 nt, Artificial Sequence
  Description of Artificial Sequence: Synthetic oligonucleotide
  Antisense strand to SEQ ID NO: 104828
aaucuucagcguuugagau

SEQ ID NO: 104830 - RNA, 19 nt, Artificial Sequence
  Description of Artificial Sequence: Synthetic oligonucleotide
  Sense strand starting at position 3216 of SEQ ID NO: 1322
gugacugguccuggcuaga

SEQ ID NO: 104831 - RNA, 19 nt, Artificial Sequence
  Description of Artificial Sequence: Synthetic oligonucleotide
  Antisense strand to SEQ ID NO: 104830
ucuagccaggaccagucac

SEQ ID NO: 104832 - RNA, 19 nt, Artificial Sequence
  Description of Artificial Sequence: Synthetic oligonucleotide
  Sense strand starting at position 3201 of SEQ ID NO: 1322
ggcugugcaaauuauguga

SEQ ID NO: 104833 - RNA, 19 nt, Artificial Sequence
  Description of Artificial Sequence: Synthetic oligonucleotide
  Antisense strand to SEQ ID NO: 104832
ucacauaauuugcacagcc

SEQ ID NO: 104834 - RNA, 19 nt, Artificial Sequence
  Description of Artificial Sequence: Synthetic oligonucleotide
  Sense strand starting at position 3144 of SEQ ID NO: 1322
uguugccgucuugaaauga

SEQ ID NO: 104835 - RNA, 19 nt, Artificial Sequence
  Description of Artificial Sequence: Synthetic oligonucleotide
  Antisense strand to SEQ ID NO: 104834
ucauuucaagacggcaaca

SEQ ID NO: 104836 - RNA, 19 nt, Artificial Sequence
  Description of Artificial Sequence: Synthetic oligonucleotide
  Sense strand starting at position 3129 of SEQ ID NO: 1322
gguuuaguacuuugcuguu

SEQ ID NO: 104837 - RNA, 19 nt, Artificial Sequence
  Description of Artificial Sequence: Synthetic oligonucleotide
  Antisense strand to SEQ ID NO: 104836
aacagcaaaguacuaaacc

SEQ ID NO: 104838 - RNA, 19 nt, Artificial Sequence
  Description of Artificial Sequence: Synthetic oligonucleotide
  Sense strand starting at position 3119 of SEQ ID NO: 1322
uccuguacuugguuuagua

SEQ ID NO: 104839 - RNA, 19 nt, Artificial Sequence
  Description of Artificial Sequence: Synthetic oligonucleotide
  Antisense strand to SEQ ID NO: 104838
uacuaaaccaaguacagga

SEQ ID NO: 104840 - RNA, 19 nt, Artificial Sequence
  Description of Artificial Sequence: Synthetic oligonucleotide
  Sense strand starting at position 3067 of SEQ ID NO: 1322
ugguuucaugggugaacag

SEQ ID NO: 104841 - RNA, 19 nt, Artificial Sequence
  Description of Artificial Sequence: Synthetic oligonucleotide
  Antisense strand to SEQ ID NO: 104840
cuguucacccaugaaacca

SEQ ID NO: 104842 - RNA, 19 nt, Artificial Sequence
  Description of Artificial Sequence: Synthetic oligonucleotide
  Sense strand starting at position 3066 of SEQ ID NO: 1322
cugguuucaugggugaaca

SEQ ID NO: 104843 - RNA, 19 nt, Artificial Sequence
  Description of Artificial Sequence: Synthetic oligonucleotide
  Antisense strand to SEQ ID NO: 104842
uguucacccaugaaaccag

SEQ ID NO: 104844 - RNA, 19 nt, Artificial Sequence
  Description of Artificial Sequence: Synthetic oligonucleotide
  Sense strand starting at position 3018 of SEQ ID NO: 1322
ggaguuccuugguuccaaa

SEQ ID NO: 104845 - RNA, 19 nt, Artificial Sequence
  Description of Artificial Sequence: Synthetic oligonucleotide
  Antisense strand to SEQ ID NO: 104844
uuuggaaccaaggaacucc

SEQ ID NO: 104846 - RNA, 19 nt, Artificial Sequence
  Description of Artificial Sequence: Synthetic oligonucleotide
  Sense strand starting at position 3017 of SEQ ID NO: 1322
uggaguuccuugguuccaa

SEQ ID NO: 104847 - RNA, 19 nt, Artificial Sequence
  Description of Artificial Sequence: Synthetic oligonucleotide
  Antisense strand to SEQ ID NO: 104846
uuggaaccaaggaacucca

SEQ ID NO: 104848 - RNA, 19 nt, Artificial Sequence
  Description of Artificial Sequence: Synthetic oligonucleotide
  Sense strand starting at position 2838 of SEQ ID NO: 1322
guacuugauguacaagacu

SEQ ID NO: 104849 - RNA, 19 nt, Artificial Sequence
  Description of Artificial Sequence: Synthetic oligonucleotide
  Antisense strand to SEQ ID NO: 104848
agucuuguacaucaaguac

SEQ ID NO: 104850 - RNA, 19 nt, Artificial Sequence
  Description of Artificial Sequence: Synthetic oligonucleotide
  Sense strand starting at position 2825 of SEQ ID NO: 1322
gcuuauuagauggguacuu

SEQ ID NO: 104851 - RNA, 19 nt, Artificial Sequence
  Description of Artificial Sequence: Synthetic oligonucleotide
  Antisense strand to SEQ ID NO: 104850
aaguacccaucuaauaagc

SEQ ID NO: 104852 - RNA, 19 nt, Artificial Sequence
  Description of Artificial Sequence: Synthetic oligonucleotide
  Sense strand starting at position 2824 of SEQ ID NO: 1322
ugcuuauuagauggguacu

SEQ ID NO: 104853 - RNA, 19 nt, Artificial Sequence
  Description of Artificial Sequence: Synthetic oligonucleotide
  Antisense strand to SEQ ID NO: 104852
aguacccaucuaauaagca

SEQ ID NO: 104854 - RNA, 19 nt, Artificial Sequence
  Description of Artificial Sequence: Synthetic oligonucleotide
  Sense strand starting at position 2818 of SEQ ID NO: 1322
ugaguuugcuuauuagaug

SEQ ID NO: 104855 - RNA, 19 nt, Artificial Sequence
  Description of Artificial Sequence: Synthetic oligonucleotide
  Antisense strand to SEQ ID NO: 104854
caucuaauaagcaaacuca

SEQ ID NO: 104856 - RNA, 19 nt, Artificial Sequence
  Description of Artificial Sequence: Synthetic oligonucleotide
  Sense strand starting at position 2815 of SEQ ID NO: 1322
caaugaguuugcuuauuag

SEQ ID NO: 104857 - RNA, 19 nt, Artificial Sequence
  Description of Artificial Sequence: Synthetic oligonucleotide
  Antisense strand to SEQ ID NO: 104856
cuaauaagcaaacucauug

SEQ ID NO: 104858 - RNA, 19 nt, Artificial Sequence
  Description of Artificial Sequence: Synthetic oligonucleotide
  Sense strand starting at position 2668 of SEQ ID NO: 1322
cagcaagaaugcgcagaau

SEQ ID NO: 104859 - RNA, 19 nt, Artificial Sequence
  Description of Artificial Sequence: Synthetic oligonucleotide
  Antisense strand to SEQ ID NO: 104858
auucugcgcauucuugcug

SEQ ID NO: 104860 - RNA, 19 nt, Artificial Sequence
  Description of Artificial Sequence: Synthetic oligonucleotide
  Sense strand starting at position 2447 of SEQ ID NO: 1322
ggaggaguuggcugcguuu

SEQ ID NO: 104861 - RNA, 19 nt, Artificial Sequence
  Description of Artificial Sequence: Synthetic oligonucleotide
  Antisense strand to SEQ ID NO: 104860
aaacgcagccaacuccucc

SEQ ID NO: 104862 - RNA, 19 nt, Artificial Sequence
  Description of Artificial Sequence: Synthetic oligonucleotide
  Sense strand starting at position 2043 of SEQ ID NO: 1322
gcgagaacucgcgcgggaa

SEQ ID NO: 104863 - RNA, 19 nt, Artificial Sequence
  Description of Artificial Sequence: Synthetic oligonucleotide
  Antisense strand to SEQ ID NO: 104862
uucccgcgcgaguucucgc

SEQ ID NO: 104864 - RNA, 19 nt, Artificial Sequence
  Description of Artificial Sequence: Synthetic oligonucleotide
  Sense strand starting at position 1475 of SEQ ID NO: 1322
agugucacuggcuagaaga

SEQ ID NO: 104865 - RNA, 19 nt, Artificial Sequence
  Description of Artificial Sequence: Synthetic oligonucleotide
  Antisense strand to SEQ ID NO: 104864
ucuucuagccagugacacu

SEQ ID NO: 104866 - RNA, 19 nt, Artificial Sequence
  Description of Artificial Sequence: Synthetic oligonucleotide
  Sense strand starting at position 1472 of SEQ ID NO: 1322
ccaagugucacuggcuaga

SEQ ID NO: 104867 - RNA, 19 nt, Artificial Sequence
  Description of Artificial Sequence: Synthetic oligonucleotide
  Antisense strand to SEQ ID NO: 104866
ucuagccagugacacuugg

SEQ ID NO: 104868 - RNA, 19 nt, Artificial Sequence
  Description of Artificial Sequence: Synthetic oligonucleotide
  Sense strand starting at position 993 of SEQ ID NO: 1322
caucgcucauccguuuaaa

SEQ ID NO: 104869 - RNA, 19 nt, Artificial Sequence
  Description of Artificial Sequence: Synthetic oligonucleotide
  Antisense strand to SEQ ID NO: 104868
uuuaaacggaugagcgaug

SEQ ID NO: 104870 - RNA, 19 nt, Artificial Sequence
  Description of Artificial Sequence: Synthetic oligonucleotide
  Sense strand starting at position 984 of SEQ ID NO: 1322
aguuaaucacaucgcucau

SEQ ID NO: 104871 - RNA, 19 nt, Artificial Sequence
  Description of Artificial Sequence: Synthetic oligonucleotide
  Antisense strand to SEQ ID NO: 104870
augagcgaugugauuaacu

SEQ ID NO: 104872 - RNA, 19 nt, Artificial Sequence
  Description of Artificial Sequence: Synthetic oligonucleotide
  Sense strand starting at position 864 of SEQ ID NO: 1322
guccgugucggccacaaau

SEQ ID NO: 104873 - RNA, 19 nt, Artificial Sequence
  Description of Artificial Sequence: Synthetic oligonucleotide
  Antisense strand to SEQ ID NO: 104872
auuuguggccgacacggac

SEQ ID NO: 104874 - RNA, 19 nt, Artificial Sequence
  Description of Artificial Sequence: Synthetic oligonucleotide
  Sense strand starting at position 734 of SEQ ID NO: 1322
uggucaugccagugcaaag

SEQ ID NO: 104875 - RNA, 19 nt, Artificial Sequence
  Description of Artificial Sequence: Synthetic oligonucleotide
  Antisense strand to SEQ ID NO: 104874
cuuugcacuggcaugacca

SEQ ID NO: 104876 - RNA, 19 nt, Artificial Sequence
  Description of Artificial Sequence: Synthetic oligonucleotide
  Sense strand starting at position 638 of SEQ ID NO: 1322
cucuucuacccuugggaga

SEQ ID NO: 104877 - RNA, 19 nt, Artificial Sequence
  Description of Artificial Sequence: Synthetic oligonucleotide
  Antisense strand to SEQ ID NO: 104876
ucucccaaggguagaagag

SEQ ID NO: 104878 - RNA, 19 nt, Artificial Sequence
  Description of Artificial Sequence: Synthetic oligonucleotide
  Sense strand starting at position 569 of SEQ ID NO: 1322
aggcucugaaugggagaua

SEQ ID NO: 104879 - RNA, 19 nt, Artificial Sequence
  Description of Artificial Sequence: Synthetic oligonucleotide
  Antisense strand to SEQ ID NO: 104878
uaucucccauucagagccu

SEQ ID NO: 104880 - RNA, 19 nt, Artificial Sequence
  Description of Artificial Sequence: Synthetic oligonucleotide
  Sense strand starting at position 496 of SEQ ID NO: 1322
aggagcagagcaugauaaa

SEQ ID NO: 104881 - RNA, 19 nt, Artificial Sequence
  Description of Artificial Sequence: Synthetic oligonucleotide
  Antisense strand to SEQ ID NO: 104880
uuuaucaugcucugcuccu

SEQ ID NO: 104882 - RNA, 19 nt, Artificial Sequence
  Description of Artificial Sequence: Synthetic oligonucleotide
  Sense strand starting at position 415 of SEQ ID NO: 1322
aguaaguugcgagggagua

SEQ ID NO: 104883 - RNA, 19 nt, Artificial Sequence
  Description of Artificial Sequence: Synthetic oligonucleotide
  Antisense strand to SEQ ID NO: 104882
uacucccucgcaacuuacu

SEQ ID NO: 104884 - RNA, 19 nt, Artificial Sequence
  Description of Artificial Sequence: Synthetic oligonucleotide
  Sense strand starting at position 414 of SEQ ID NO: 1322
uaguaaguugcgagggagu

SEQ ID NO: 104885 - RNA, 19 nt, Artificial Sequence
  Description of Artificial Sequence: Synthetic oligonucleotide
  Antisense strand to SEQ ID NO: 104884
acucccucgcaacuuacua

SEQ ID NO: 104886 - RNA, 19 nt, Artificial Sequence
  Description of Artificial Sequence: Synthetic oligonucleotide
  Sense strand starting at position 315 of SEQ ID NO: 1322
ccagcagagugauaggaca

SEQ ID NO: 104887 - RNA, 19 nt, Artificial Sequence
  Description of Artificial Sequence: Synthetic oligonucleotide
  Antisense strand to SEQ ID NO: 104886
uguccuaucacucugcugg

SEQ ID NO: 104888 - RNA, 19 nt, Artificial Sequence
  Description of Artificial Sequence: Synthetic oligonucleotide
  Sense strand starting at position 288 of SEQ ID NO: 1322
cagucaugcucucaaggaa

SEQ ID NO: 104889 - RNA, 19 nt, Artificial Sequence
  Description of Artificial Sequence: Synthetic oligonucleotide
  Antisense strand to SEQ ID NO: 104888
uuccuugagagcaugacug

SEQ ID NO: 104890 - RNA, 19 nt, Artificial Sequence
  Description of Artificial Sequence: Synthetic oligonucleotide
  Sense strand starting at position 186 of SEQ ID NO: 1322
aucagugugcucguucauu

SEQ ID NO: 104891 - RNA, 19 nt, Artificial Sequence
  Description of Artificial Sequence: Synthetic oligonucleotide
  Antisense strand to SEQ ID NO: 104890
aaugaacgagcacacugau

SEQ ID NO: 104892 - RNA, 19 nt, Artificial Sequence
  Description of Artificial Sequence: Synthetic oligonucleotide
  Sense strand starting at position 430 of SEQ ID NO: 1324
cuggcagucugguuaagaa

SEQ ID NO: 104893 - RNA, 19 nt, Artificial Sequence
  Description of Artificial Sequence: Synthetic oligonucleotide
  Antisense strand to SEQ ID NO: 104892
uucuuaaccagacugccag

SEQ ID NO: 104894 - RNA, 19 nt, Artificial Sequence
  Description of Artificial Sequence: Synthetic oligonucleotide
  Sense strand starting at position 868 of SEQ ID NO: 1324
ggcuuuccuccagcguuua

SEQ ID NO: 104895 - RNA, 19 nt, Artificial Sequence
  Description of Artificial Sequence: Synthetic oligonucleotide
  Antisense strand to SEQ ID NO: 104894
uaaacgcuggaggaaagcc

SEQ ID NO: 104896 - RNA, 19 nt, Artificial Sequence
  Description of Artificial Sequence: Synthetic oligonucleotide
  Sense strand starting at position 902 of SEQ ID NO: 1324
aauugcuugcuggaacaga

SEQ ID NO: 104897 - RNA, 19 nt, Artificial Sequence
  Description of Artificial Sequence: Synthetic oligonucleotide
  Antisense strand to SEQ ID NO: 104896
ucuguuccagcaagcaauu

SEQ ID NO: 104898 - RNA, 19 nt, Artificial Sequence
  Description of Artificial Sequence: Synthetic oligonucleotide
  Sense strand starting at position 973 of SEQ ID NO: 1324
cuuauugcauuccuaguau

SEQ ID NO: 104899 - RNA, 19 nt, Artificial Sequence
  Description of Artificial Sequence: Synthetic oligonucleotide
  Antisense strand to SEQ ID NO: 104898
auacuaggaaugcaauaag

SEQ ID NO: 104900 - RNA, 19 nt, Artificial Sequence
  Description of Artificial Sequence: Synthetic oligonucleotide
  Sense strand starting at position 997 of SEQ ID NO: 1324
acgcaugugccauauuugu

SEQ ID NO: 104901 - RNA, 19 nt, Artificial Sequence
  Description of Artificial Sequence: Synthetic oligonucleotide
  Antisense strand to SEQ ID NO: 104900
acaaauauggcacaugcgu

SEQ ID NO: 104902 - RNA, 19 nt, Artificial Sequence
  Description of Artificial Sequence: Synthetic oligonucleotide
  Sense strand starting at position 1024 of SEQ ID NO: 1324
ucccacgauuuauccguua

SEQ ID NO: 104903 - RNA, 19 nt, Artificial Sequence
  Description of Artificial Sequence: Synthetic oligonucleotide
  Antisense strand to SEQ ID NO: 104902
uaacggauaaaucguggga

SEQ ID NO: 104904 - RNA, 19 nt, Artificial Sequence
  Description of Artificial Sequence: Synthetic oligonucleotide
  Sense strand starting at position 1027 of SEQ ID NO: 1324
cacgauuuauccguuauca

SEQ ID NO: 104905 - RNA, 19 nt, Artificial Sequence
  Description of Artificial Sequence: Synthetic oligonucleotide
  Antisense strand to SEQ ID NO: 104904
ugauaacggauaaaucgug

SEQ ID NO: 104906 - RNA, 19 nt, Artificial Sequence
  Description of Artificial Sequence: Synthetic oligonucleotide
  Sense strand starting at position 1029 of SEQ ID NO: 1324
cgauuuauccguuaucagc

SEQ ID NO: 104907 - RNA, 19 nt, Artificial Sequence
  Description of Artificial Sequence: Synthetic oligonucleotide
  Antisense strand to SEQ ID NO: 104906
gcugauaacggauaaaucg

SEQ ID NO: 104908 - RNA, 19 nt, Artificial Sequence
  Description of Artificial Sequence: Synthetic oligonucleotide
  Sense strand starting at position 1067 of SEQ ID NO: 1324
ggguuguaacuguggguga

SEQ ID NO: 104909 - RNA, 19 nt, Artificial Sequence
  Description of Artificial Sequence: Synthetic oligonucleotide
  Antisense strand to SEQ ID NO: 104908
ucacccacaguuacaaccc

SEQ ID NO: 104910 - RNA, 19 nt, Artificial Sequence
  Description of Artificial Sequence: Synthetic oligonucleotide
  Sense strand starting at position 1069 of SEQ ID NO: 1324
guuguaacugugggugaaa

SEQ ID NO: 104911 - RNA, 19 nt, Artificial Sequence
  Description of Artificial Sequence: Synthetic oligonucleotide
  Antisense strand to SEQ ID NO: 104910
uuucacccacaguuacaac

SEQ ID NO: 104912 - RNA, 19 nt, Artificial Sequence
  Description of Artificial Sequence: Synthetic oligonucleotide
  Sense strand starting at position 1282 of SEQ ID NO: 1324
cuacgacucccagaaaggu

SEQ ID NO: 104913 - RNA, 19 nt, Artificial Sequence
  Description of Artificial Sequence: Synthetic oligonucleotide
  Antisense strand to SEQ ID NO: 104912
accuuucugggagucguag

SEQ ID NO: 104914 - RNA, 19 nt, Artificial Sequence
  Description of Artificial Sequence: Synthetic oligonucleotide
  Sense strand starting at position 1599 of SEQ ID NO: 1324
agugguagccauugggagu

SEQ ID NO: 104915 - RNA, 19 nt, Artificial Sequence
  Description of Artificial Sequence: Synthetic oligonucleotide
  Antisense strand to SEQ ID NO: 104914
acucccaauggcuaccacu

SEQ ID NO: 104916 - RNA, 19 nt, Artificial Sequence
  Description of Artificial Sequence: Synthetic oligonucleotide
  Sense strand starting at position 1606 of SEQ ID NO: 1324
gccauugggaguuacacua

SEQ ID NO: 104917 - RNA, 19 nt, Artificial Sequence
  Description of Artificial Sequence: Synthetic oligonucleotide
  Antisense strand to SEQ ID NO: 104916
uaguguaacucccaauggc

SEQ ID NO: 104918 - RNA, 19 nt, Artificial Sequence
  Description of Artificial Sequence: Synthetic oligonucleotide
  Sense strand starting at position 1620 of SEQ ID NO: 1324
cacuaaucccgcgaagggu

SEQ ID NO: 104919 - RNA, 19 nt, Artificial Sequence
  Description of Artificial Sequence: Synthetic oligonucleotide
  Antisense strand to SEQ ID NO: 104918
acccuucgcgggauuagug

SEQ ID NO: 104920 - RNA, 19 nt, Artificial Sequence
  Description of Artificial Sequence: Synthetic oligonucleotide
  Sense strand starting at position 2557 of SEQ ID NO: 1324
aggacuuugugcuuaucau

SEQ ID NO: 104921 - RNA, 19 nt, Artificial Sequence
  Description of Artificial Sequence: Synthetic oligonucleotide
  Antisense strand to SEQ ID NO: 104920
augauaagcacaaaguccu

SEQ ID NO: 104922 - RNA, 19 nt, Artificial Sequence
  Description of Artificial Sequence: Synthetic oligonucleotide
  Sense strand starting at position 2558 of SEQ ID NO: 1324
ggacuuugugcuuaucaug

SEQ ID NO: 104923 - RNA, 19 nt, Artificial Sequence
  Description of Artificial Sequence: Synthetic oligonucleotide
  Antisense strand to SEQ ID NO: 104922
caugauaagcacaaagucc

SEQ ID NO: 104924 - RNA, 19 nt, Artificial Sequence
  Description of Artificial Sequence: Synthetic oligonucleotide
  Sense strand starting at position 2693 of SEQ ID NO: 1324
guugacaaguccuuucuga

SEQ ID NO: 104925 - RNA, 19 nt, Artificial Sequence
  Description of Artificial Sequence: Synthetic oligonucleotide
  Antisense strand to SEQ ID NO: 104924
ucagaaaggacuugucaac

SEQ ID NO: 104926 - RNA, 19 nt, Artificial Sequence
  Description of Artificial Sequence: Synthetic oligonucleotide
  Sense strand starting at position 2803 of SEQ ID NO: 1324
ggugguuauuuggagacua

SEQ ID NO: 104927 - RNA, 19 nt, Artificial Sequence
  Description of Artificial Sequence: Synthetic oligonucleotide
  Antisense strand to SEQ ID NO: 104926
uagucuccaaauaaccacc

SEQ ID NO: 104928 - RNA, 19 nt, Artificial Sequence
  Description of Artificial Sequence: Synthetic oligonucleotide
  Sense strand starting at position 2852 of SEQ ID NO: 1324
uguagauccucacccacau

SEQ ID NO: 104929 - RNA, 19 nt, Artificial Sequence
  Description of Artificial Sequence: Synthetic oligonucleotide
  Antisense strand to SEQ ID NO: 104928
augugggugaggaucuaca

SEQ ID NO: 104930 - RNA, 19 nt, Artificial Sequence
  Description of Artificial Sequence: Synthetic oligonucleotide
  Sense strand starting at position 2927 of SEQ ID NO: 1324
ccagaugauuuagaagcua

SEQ ID NO: 104931 - RNA, 19 nt, Artificial Sequence
  Description of Artificial Sequence: Synthetic oligonucleotide
  Antisense strand to SEQ ID NO: 104930
uagcuucuaaaucaucugg

SEQ ID NO: 104932 - RNA, 19 nt, Artificial Sequence
  Description of Artificial Sequence: Synthetic oligonucleotide
  Sense strand starting at position 3023 of SEQ ID NO: 1324
ucuagaccauccuuggaga

SEQ ID NO: 104933 - RNA, 19 nt, Artificial Sequence
  Description of Artificial Sequence: Synthetic oligonucleotide
  Antisense strand to SEQ ID NO: 104932
ucuccaaggauggucuaga

SEQ ID NO: 104934 - RNA, 19 nt, Artificial Sequence
  Description of Artificial Sequence: Synthetic oligonucleotide
  Sense strand starting at position 3096 of SEQ ID NO: 1324
cuuugauacugcuugggca

SEQ ID NO: 104935 - RNA, 19 nt, Artificial Sequence
  Description of Artificial Sequence: Synthetic oligonucleotide
  Antisense strand to SEQ ID NO: 104934
ugcccaagcaguaucaaag

SEQ ID NO: 104936 - RNA, 19 nt, Artificial Sequence
  Description of Artificial Sequence: Synthetic oligonucleotide
  Sense strand starting at position 3097 of SEQ ID NO: 1324
uuugauacugcuugggcaa

SEQ ID NO: 104937 - RNA, 19 nt, Artificial Sequence
  Description of Artificial Sequence: Synthetic oligonucleotide
  Antisense strand to SEQ ID NO: 104936
uugcccaagcaguaucaaa

SEQ ID NO: 104938 - RNA, 19 nt, Artificial Sequence
  Description of Artificial Sequence: Synthetic oligonucleotide
  Sense strand starting at position 3100 of SEQ ID NO: 1324
gauacugcuugggcaacua

SEQ ID NO: 104939 - RNA, 19 nt, Artificial Sequence
  Description of Artificial Sequence: Synthetic oligonucleotide
  Antisense strand to SEQ ID NO: 104938
uaguugcccaagcaguauc

SEQ ID NO: 104940 - RNA, 19 nt, Artificial Sequence
  Description of Artificial Sequence: Synthetic oligonucleotide
  Sense strand starting at position 3168 of SEQ ID NO: 1324
cagagaugcucuuugaccu

SEQ ID NO: 104941 - RNA, 19 nt, Artificial Sequence
  Description of Artificial Sequence: Synthetic oligonucleotide
  Antisense strand to SEQ ID NO: 104940
aggucaaagagcaucucug

SEQ ID NO: 104942 - RNA, 19 nt, Artificial Sequence
  Description of Artificial Sequence: Synthetic oligonucleotide
  Sense strand starting at position 3169 of SEQ ID NO: 1324
agagaugcucuuugaccuu

SEQ ID NO: 104943 - RNA, 19 nt, Artificial Sequence
  Description of Artificial Sequence: Synthetic oligonucleotide
  Antisense strand to SEQ ID NO: 104942
aaggucaaagagcaucucu

SEQ ID NO: 104944 - RNA, 19 nt, Artificial Sequence
  Description of Artificial Sequence: Synthetic oligonucleotide
  Sense strand starting at position 3228 of SEQ ID NO: 1324
gaaagagacuguuuagcaa

SEQ ID NO: 104945 - RNA, 19 nt, Artificial Sequence
  Description of Artificial Sequence: Synthetic oligonucleotide
  Antisense strand to SEQ ID NO: 104944
uugcuaaacagucucuuuc

SEQ ID NO: 104946 - RNA, 19 nt, Artificial Sequence
  Description of Artificial Sequence: Synthetic oligonucleotide
  Sense strand starting at position 3309 of SEQ ID NO: 1324
gcaccuuaaccuggauaga

SEQ ID NO: 104947 - RNA, 19 nt, Artificial Sequence
  Description of Artificial Sequence: Synthetic oligonucleotide
  Antisense strand to SEQ ID NO: 104946
ucuauccagguuaaggugc

SEQ ID NO: 104948 - RNA, 19 nt, Artificial Sequence
  Description of Artificial Sequence: Synthetic oligonucleotide
  Sense strand starting at position 3324 of SEQ ID NO: 1324
uagaguauguauuugccau

SEQ ID NO: 104949 - RNA, 19 nt, Artificial Sequence
  Description of Artificial Sequence: Synthetic oligonucleotide
  Antisense strand to SEQ ID NO: 104948
auggcaaauacauacucua

SEQ ID NO: 104950 - RNA, 19 nt, Artificial Sequence
  Description of Artificial Sequence: Synthetic oligonucleotide
  Sense strand starting at position 3326 of SEQ ID NO: 1324
gaguauguauuugccauua

SEQ ID NO: 104951 - RNA, 19 nt, Artificial Sequence
  Description of Artificial Sequence: Synthetic oligonucleotide
  Antisense strand to SEQ ID NO: 104950
uaauggcaaauacauacuc

SEQ ID NO: 104952 - RNA, 19 nt, Artificial Sequence
  Description of Artificial Sequence: Synthetic oligonucleotide
  Sense strand starting at position 3367 of SEQ ID NO: 1324
cagagagacuuagagugaa

SEQ ID NO: 104953 - RNA, 19 nt, Artificial Sequence
  Description of Artificial Sequence: Synthetic oligonucleotide
  Antisense strand to SEQ ID NO: 104952
uucacucuaagucucucug

SEQ ID NO: 104954 - RNA, 19 nt, Artificial Sequence
  Description of Artificial Sequence: Synthetic oligonucleotide
  Sense strand starting at position 3414 of SEQ ID NO: 1324
acaggugugugcuuauaaa

SEQ ID NO: 104955 - RNA, 19 nt, Artificial Sequence
  Description of Artificial Sequence: Synthetic oligonucleotide
  Antisense strand to SEQ ID NO: 104954
uuuauaagcacacaccugu

SEQ ID NO: 104956 - RNA, 19 nt, Artificial Sequence
  Description of Artificial Sequence: Synthetic oligonucleotide
  Sense strand starting at position 3505 of SEQ ID NO: 1324
ucugacauguucuugauua

SEQ ID NO: 104957 - RNA, 19 nt, Artificial Sequence
  Description of Artificial Sequence: Synthetic oligonucleotide
  Antisense strand to SEQ ID NO: 104956
uaaucaagaacaugucaga

SEQ ID NO: 104958 - RNA, 19 nt, Artificial Sequence
  Description of Artificial Sequence: Synthetic oligonucleotide
  Sense strand starting at position 3509 of SEQ ID NO: 1324
acauguucuugauuaaguu

SEQ ID NO: 104959 - RNA, 19 nt, Artificial Sequence
  Description of Artificial Sequence: Synthetic oligonucleotide
  Antisense strand to SEQ ID NO: 104958
aacuuaaucaagaacaugu

SEQ ID NO: 104960 - RNA, 19 nt, Artificial Sequence
  Description of Artificial Sequence: Synthetic oligonucleotide
  Sense strand starting at position 3544 of SEQ ID NO: 1324
ggauucuuagaguaugugu

SEQ ID NO: 104961 - RNA, 19 nt, Artificial Sequence
  Description of Artificial Sequence: Synthetic oligonucleotide
  Antisense strand to SEQ ID NO: 104960
acacauacucuaagaaucc

SEQ ID NO: 104962 - RNA, 19 nt, Artificial Sequence
  Description of Artificial Sequence: Synthetic oligonucleotide
  Sense strand starting at position 3546 of SEQ ID NO: 1324
auucuuagaguauguguuu

SEQ ID NO: 104963 - RNA, 19 nt, Artificial Sequence
  Description of Artificial Sequence: Synthetic oligonucleotide
  Antisense strand to SEQ ID NO: 104962
aaacacauacucuaagaau

SEQ ID NO: 104964 - RNA, 19 nt, Artificial Sequence
  Description of Artificial Sequence: Synthetic oligonucleotide
  Sense strand starting at position 3591 of SEQ ID NO: 1324
aaacaacaugcgugacuuu

SEQ ID NO: 104965 - RNA, 19 nt, Artificial Sequence
  Description of Artificial Sequence: Synthetic oligonucleotide
  Antisense strand to SEQ ID NO: 104964
aaagucacgcauguuguuu

SEQ ID NO: 104966 - RNA, 19 nt, Artificial Sequence
  Description of Artificial Sequence: Synthetic oligonucleotide
  Sense strand starting at position 3682 of SEQ ID NO: 1324
guuaacaccuuacuaagua

SEQ ID NO: 104967 - RNA, 19 nt, Artificial Sequence
  Description of Artificial Sequence: Synthetic oligonucleotide
  Antisense strand to SEQ ID NO: 104966
uacuuaguaagguguuaac

SEQ ID NO: 104968 - RNA, 19 nt, Artificial Sequence
  Description of Artificial Sequence: Synthetic oligonucleotide
  Sense strand starting at position 3903 of SEQ ID NO: 1324
aauuuagugucagcguuag

SEQ ID NO: 104969 - RNA, 19 nt, Artificial Sequence
  Description of Artificial Sequence: Synthetic oligonucleotide
  Antisense strand to SEQ ID NO: 104968
cuaacgcugacacuaaauu

SEQ ID NO: 104970 - RNA, 19 nt, Artificial Sequence
  Description of Artificial Sequence: Synthetic oligonucleotide
  Sense strand starting at position 3914 of SEQ ID NO: 1324
agcguuaggauuuguagca

SEQ ID NO: 104971 - RNA, 19 nt, Artificial Sequence
  Description of Artificial Sequence: Synthetic oligonucleotide
  Antisense strand to SEQ ID NO: 104970
ugcuacaaauccuaacgcu

SEQ ID NO: 104972 - RNA, 19 nt, Artificial Sequence
  Description of Artificial Sequence: Synthetic oligonucleotide
  Sense strand starting at position 141 of SEQ ID NO: 1325
ggaagucucggccaugaau

SEQ ID NO: 104973 - RNA, 19 nt, Artificial Sequence
  Description of Artificial Sequence: Synthetic oligonucleotide
  Antisense strand to SEQ ID NO: 104972
auucauggccgagacuucc

SEQ ID NO: 104974 - RNA, 19 nt, Artificial Sequence
  Description of Artificial Sequence: Synthetic oligonucleotide
  Sense strand starting at position 404 of SEQ ID NO: 1325
ccucuaaucguccaauguu

SEQ ID NO: 104975 - RNA, 19 nt, Artificial Sequence
  Description of Artificial Sequence: Synthetic oligonucleotide
  Antisense strand to SEQ ID NO: 104974
aacauuggacgauuagagg

SEQ ID NO: 104976 - RNA, 19 nt, Artificial Sequence
  Description of Artificial Sequence: Synthetic oligonucleotide
  Sense strand starting at position 416 of SEQ ID NO: 1325
caauguugaccagggcaaa

SEQ ID NO: 104977 - RNA, 19 nt, Artificial Sequence
  Description of Artificial Sequence: Synthetic oligonucleotide
  Antisense strand to SEQ ID NO: 104976
uuugcccuggucaacauug

SEQ ID NO: 104978 - RNA, 19 nt, Artificial Sequence
  Description of Artificial Sequence: Synthetic oligonucleotide
  Sense strand starting at position 453 of SEQ ID NO: 1325
gggaguguccuagacgaaa

SEQ ID NO: 104979 - RNA, 19 nt, Artificial Sequence
  Description of Artificial Sequence: Synthetic oligonucleotide
  Antisense strand to SEQ ID NO: 104978
uuucgucuaggacacuccc

SEQ ID NO: 104980 - RNA, 19 nt, Artificial Sequence
  Description of Artificial Sequence: Synthetic oligonucleotide
  Sense strand starting at position 455 of SEQ ID NO: 1325
gaguguccuagacgaaaca

SEQ ID NO: 104981 - RNA, 19 nt, Artificial Sequence
  Description of Artificial Sequence: Synthetic oligonucleotide
  Antisense strand to SEQ ID NO: 104980
uguuucgucuaggacacuc

SEQ ID NO: 104982 - RNA, 19 nt, Artificial Sequence
  Description of Artificial Sequence: Synthetic oligonucleotide
  Sense strand starting at position 480 of SEQ ID NO: 1325
uggguagacaucugaaauc

SEQ ID NO: 104983 - RNA, 19 nt, Artificial Sequence
  Description of Artificial Sequence: Synthetic oligonucleotide
  Antisense strand to SEQ ID NO: 104982
gauuucagaugucuaccca

SEQ ID NO: 104984 - RNA, 19 nt, Artificial Sequence
  Description of Artificial Sequence: Synthetic oligonucleotide
  Sense strand starting at position 556 of SEQ ID NO: 1325
gagaguucccacugauuau

SEQ ID NO: 104985 - RNA, 19 nt, Artificial Sequence
  Description of Artificial Sequence: Synthetic oligonucleotide
  Antisense strand to SEQ ID NO: 104984
auaaucagugggaacucuc

SEQ ID NO: 104986 - RNA, 19 nt, Artificial Sequence
  Description of Artificial Sequence: Synthetic oligonucleotide
  Sense strand starting at position 603 of SEQ ID NO: 1325
acccauaauguuugucuaa

SEQ ID NO: 104987 - RNA, 19 nt, Artificial Sequence
  Description of Artificial Sequence: Synthetic oligonucleotide
  Antisense strand to SEQ ID NO: 104986
uuagacaaacauuaugggu

SEQ ID NO: 104988 - RNA, 19 nt, Artificial Sequence
  Description of Artificial Sequence: Synthetic oligonucleotide
  Sense strand starting at position 604 of SEQ ID NO: 1325
cccauaauguuugucuaaa

SEQ ID NO: 104989 - RNA, 19 nt, Artificial Sequence
  Description of Artificial Sequence: Synthetic oligonucleotide
  Antisense strand to SEQ ID NO: 104988
uuuagacaaacauuauggg

SEQ ID NO: 104990 - RNA, 19 nt, Artificial Sequence
  Description of Artificial Sequence: Synthetic oligonucleotide
  Sense strand starting at position 605 of SEQ ID NO: 1325
ccauaauguuugucuaaau

SEQ ID NO: 104991 - RNA, 19 nt, Artificial Sequence
  Description of Artificial Sequence: Synthetic oligonucleotide
  Antisense strand to SEQ ID NO: 104990
auuuagacaaacauuaugg

SEQ ID NO: 104992 - RNA, 19 nt, Artificial Sequence
  Description of Artificial Sequence: Synthetic oligonucleotide
  Sense strand starting at position 1016 of SEQ ID NO: 1325
ggcacuaacuauguaucga

SEQ ID NO: 104993 - RNA, 19 nt, Artificial Sequence
  Description of Artificial Sequence: Synthetic oligonucleotide
  Antisense strand to SEQ ID NO: 104992
ucgauacauaguuagugcc

SEQ ID NO: 104994 - RNA, 19 nt, Artificial Sequence
  Description of Artificial Sequence: Synthetic oligonucleotide
  Sense strand starting at position 1024 of SEQ ID NO: 1325
cuauguaucgaauaaguaa

SEQ ID NO: 104995 - RNA, 19 nt, Artificial Sequence
  Description of Artificial Sequence: Synthetic oligonucleotide
  Antisense strand to SEQ ID NO: 104994
uuacuuauucgauacauag

SEQ ID NO: 104996 - RNA, 19 nt, Artificial Sequence
  Description of Artificial Sequence: Synthetic oligonucleotide
  Sense strand starting at position 1198 of SEQ ID NO: 1325
acaagauuggcguaggaug

SEQ ID NO: 104997 - RNA, 19 nt, Artificial Sequence
  Description of Artificial Sequence: Synthetic oligonucleotide
  Antisense strand to SEQ ID NO: 104996
cauccuacgccaaucuugu

SEQ ID NO: 104998 - RNA, 19 nt, Artificial Sequence
  Description of Artificial Sequence: Synthetic oligonucleotide
  Sense strand starting at position 1200 of SEQ ID NO: 1325
aagauuggcguaggaugaa

SEQ ID NO: 104999 - RNA, 19 nt, Artificial Sequence
  Description of Artificial Sequence: Synthetic oligonucleotide
  Antisense strand to SEQ ID NO: 104998
uucauccuacgccaaucuu

SEQ ID NO: 105000 - RNA, 19 nt, Artificial Sequence
  Description of Artificial Sequence: Synthetic oligonucleotide
  Sense strand starting at position 1203 of SEQ ID NO: 1325
auuggcguaggaugaaauu

SEQ ID NO: 105001 - RNA, 19 nt, Artificial Sequence
  Description of Artificial Sequence: Synthetic oligonucleotide
  Antisense strand to SEQ ID NO: 105000
aauuucauccuacgccaau

SEQ ID NO: 105002 - RNA, 19 nt, Artificial Sequence
  Description of Artificial Sequence: Synthetic oligonucleotide
  Sense strand starting at position 1212 of SEQ ID NO: 1325
ggaugaaauuuggaagucu

SEQ ID NO: 105003 - RNA, 19 nt, Artificial Sequence
  Description of Artificial Sequence: Synthetic oligonucleotide
  Antisense strand to SEQ ID NO: 105002
agacuuccaaauuucaucc

SEQ ID NO: 105004 - RNA, 19 nt, Artificial Sequence
  Description of Artificial Sequence: Synthetic oligonucleotide
  Sense strand starting at position 1223 of SEQ ID NO: 1325
ggaagucuuuggagaguga

SEQ ID NO: 105005 - RNA, 19 nt, Artificial Sequence
  Description of Artificial Sequence: Synthetic oligonucleotide
  Antisense strand to SEQ ID NO: 105004
ucacucuccaaagacuucc

SEQ ID NO: 105006 - RNA, 19 nt, Artificial Sequence
  Description of Artificial Sequence: Synthetic oligonucleotide
  Sense strand starting at position 1232 of SEQ ID NO: 1325
uggagagugauagggcauu

SEQ ID NO: 105007 - RNA, 19 nt, Artificial Sequence
  Description of Artificial Sequence: Synthetic oligonucleotide
  Antisense strand to SEQ ID NO: 105006
aaugcccuaucacucucca

SEQ ID NO: 105008 - RNA, 19 nt, Artificial Sequence
  Description of Artificial Sequence: Synthetic oligonucleotide
  Sense strand starting at position 1247 of SEQ ID NO: 1325
cauuauuaccugggaggca

SEQ ID NO: 105009 - RNA, 19 nt, Artificial Sequence
  Description of Artificial Sequence: Synthetic oligonucleotide
  Antisense strand to SEQ ID NO: 105008
ugccucccagguaauaaug

SEQ ID NO: 105010 - RNA, 19 nt, Artificial Sequence
  Description of Artificial Sequence: Synthetic oligonucleotide
  Sense strand starting at position 1326 of SEQ ID NO: 1325
gacagacuuugguccagag

SEQ ID NO: 105011 - RNA, 19 nt, Artificial Sequence
  Description of Artificial Sequence: Synthetic oligonucleotide
  Antisense strand to SEQ ID NO: 105010
cucuggaccaaagucuguc

SEQ ID NO: 105012 - RNA, 19 nt, Artificial Sequence
  Description of Artificial Sequence: Synthetic oligonucleotide
  Sense strand starting at position 1330 of SEQ ID NO: 1325
gacuuugguccagaggguu

SEQ ID NO: 105013 - RNA, 19 nt, Artificial Sequence
  Description of Artificial Sequence: Synthetic oligonucleotide
  Antisense strand to SEQ ID NO: 105012
aacccucuggaccaaaguc

SEQ ID NO: 105014 - RNA, 19 nt, Artificial Sequence
  Description of Artificial Sequence: Synthetic oligonucleotide
  Sense strand starting at position 1434 of SEQ ID NO: 1325
aacugagaucagugucugu

SEQ ID NO: 105015 - RNA, 19 nt, Artificial Sequence
  Description of Artificial Sequence: Synthetic oligonucleotide
  Antisense strand to SEQ ID NO: 105014
acagacacugaucucaguu

SEQ ID NO: 105016 - RNA, 19 nt, Artificial Sequence
  Description of Artificial Sequence: Synthetic oligonucleotide
  Sense strand starting at position 1774 of SEQ ID NO: 1325
agcaguuaagggugggaaa

SEQ ID NO: 105017 - RNA, 19 nt, Artificial Sequence
  Description of Artificial Sequence: Synthetic oligonucleotide
  Antisense strand to SEQ ID NO: 105016
uuucccacccuuaacugcu

SEQ ID NO: 105018 - RNA, 19 nt, Artificial Sequence
  Description of Artificial Sequence: Synthetic oligonucleotide
  Sense strand starting at position 1823 of SEQ ID NO: 1325
ggcugagucuuguugagaa

SEQ ID NO: 105019 - RNA, 19 nt, Artificial Sequence
  Description of Artificial Sequence: Synthetic oligonucleotide
  Antisense strand to SEQ ID NO: 105018
uucucaacaagacucagcc

SEQ ID NO: 105020 - RNA, 19 nt, Artificial Sequence
  Description of Artificial Sequence: Synthetic oligonucleotide
  Sense strand starting at position 1825 of SEQ ID NO: 1325
cugagucuuguugagaaga

SEQ ID NO: 105021 - RNA, 19 nt, Artificial Sequence
  Description of Artificial Sequence: Synthetic oligonucleotide
  Antisense strand to SEQ ID NO: 105020
ucuucucaacaagacucag

SEQ ID NO: 105022 - RNA, 19 nt, Artificial Sequence
  Description of Artificial Sequence: Synthetic oligonucleotide
  Sense strand starting at position 1951 of SEQ ID NO: 1325
agaagucuccucggaaacu

SEQ ID NO: 105023 - RNA, 19 nt, Artificial Sequence
  Description of Artificial Sequence: Synthetic oligonucleotide
  Antisense strand to SEQ ID NO: 105022
aguuuccgaggagacuucu

SEQ ID NO: 105024 - RNA, 19 nt, Artificial Sequence
  Description of Artificial Sequence: Synthetic oligonucleotide
  Sense strand starting at position 2189 of SEQ ID NO: 1325
gauuaugaagcuggaauca

SEQ ID NO: 105025 - RNA, 19 nt, Artificial Sequence
  Description of Artificial Sequence: Synthetic oligonucleotide
  Antisense strand to SEQ ID NO: 105024
ugauuccagcuucauaauc

SEQ ID NO: 105026 - RNA, 19 nt, Artificial Sequence
  Description of Artificial Sequence: Synthetic oligonucleotide
  Sense strand starting at position 2198 of SEQ ID NO: 1325
gcuggaaucaucugggcua

SEQ ID NO: 105027 - RNA, 19 nt, Artificial Sequence
  Description of Artificial Sequence: Synthetic oligonucleotide
  Antisense strand to SEQ ID NO: 105026
uagcccagaugauuccagc

SEQ ID NO: 105028 - RNA, 19 nt, Artificial Sequence
  Description of Artificial Sequence: Synthetic oligonucleotide
  Sense strand starting at position 2201 of SEQ ID NO: 1325
ggaaucaucugggcuaccu

SEQ ID NO: 105029 - RNA, 19 nt, Artificial Sequence
  Description of Artificial Sequence: Synthetic oligonucleotide
  Antisense strand to SEQ ID NO: 105028
agguagcccagaugauucc

SEQ ID NO: 105030 - RNA, 19 nt, Artificial Sequence
  Description of Artificial Sequence: Synthetic oligonucleotide
  Sense strand starting at position 2223 of SEQ ID NO: 1325
uggagugucucagugauga

SEQ ID NO: 105031 - RNA, 19 nt, Artificial Sequence
  Description of Artificial Sequence: Synthetic oligonucleotide
  Antisense strand to SEQ ID NO: 105030
ucaucacugagacacucca

SEQ ID NO: 105032 - RNA, 19 nt, Artificial Sequence
  Description of Artificial Sequence: Synthetic oligonucleotide
  Sense strand starting at position 2234 of SEQ ID NO: 1325
agugaugacuucccuuaaa

SEQ ID NO: 105033 - RNA, 19 nt, Artificial Sequence
  Description of Artificial Sequence: Synthetic oligonucleotide
  Antisense strand to SEQ ID NO: 105032
uuuaagggaagucaucacu

SEQ ID NO: 105034 - RNA, 19 nt, Artificial Sequence
  Description of Artificial Sequence: Synthetic oligonucleotide
  Sense strand starting at position 2300 of SEQ ID NO: 1325
guaggaaugugaaaguggu

SEQ ID NO: 105035 - RNA, 19 nt, Artificial Sequence
  Description of Artificial Sequence: Synthetic oligonucleotide
  Antisense strand to SEQ ID NO: 105034
accacuuucacauuccuac

SEQ ID NO: 105036 - RNA, 19 nt, Artificial Sequence
  Description of Artificial Sequence: Synthetic oligonucleotide
  Sense strand starting at position 2332 of SEQ ID NO: 1325
ccgccucuuccagaagaaa

SEQ ID NO: 105037 - RNA, 19 nt, Artificial Sequence
  Description of Artificial Sequence: Synthetic oligonucleotide
  Antisense strand to SEQ ID NO: 105036
uuucuucuggaagaggcgg

SEQ ID NO: 105038 - RNA, 19 nt, Artificial Sequence
  Description of Artificial Sequence: Synthetic oligonucleotide
  Sense strand starting at position 2379 of SEQ ID NO: 1325
ucagcagaggcccaagaau

SEQ ID NO: 105039 - RNA, 19 nt, Artificial Sequence
  Description of Artificial Sequence: Synthetic oligonucleotide
  Antisense strand to SEQ ID NO: 105038
auucuugggccucugcuga

SEQ ID NO: 105040 - RNA, 19 nt, Artificial Sequence
  Description of Artificial Sequence: Synthetic oligonucleotide
  Sense strand starting at position 2410 of SEQ ID NO: 1325
cagggaaacugguuaaagu

SEQ ID NO: 105041 - RNA, 19 nt, Artificial Sequence
  Description of Artificial Sequence: Synthetic oligonucleotide
  Antisense strand to SEQ ID NO: 105040
acuuuaaccaguuucccug

SEQ ID NO: 105042 - RNA, 19 nt, Artificial Sequence
  Description of Artificial Sequence: Synthetic oligonucleotide
  Sense strand starting at position 2434 of SEQ ID NO: 1325
ugcauaucuuucucuagag

SEQ ID NO: 105043 - RNA, 19 nt, Artificial Sequence
  Description of Artificial Sequence: Synthetic oligonucleotide
  Antisense strand to SEQ ID NO: 105042
cucuagagaaagauaugca

SEQ ID NO: 105044 - RNA, 19 nt, Artificial Sequence
  Description of Artificial Sequence: Synthetic oligonucleotide
  Sense strand starting at position 2438 of SEQ ID NO: 1325
uaucuuucucuagagggca

SEQ ID NO: 105045 - RNA, 19 nt, Artificial Sequence
  Description of Artificial Sequence: Synthetic oligonucleotide
  Antisense strand to SEQ ID NO: 105044
ugcccucuagagaaagaua

SEQ ID NO: 105046 - RNA, 19 nt, Artificial Sequence
  Description of Artificial Sequence: Synthetic oligonucleotide
  Sense strand starting at position 3148 of SEQ ID NO: 1325
ccagaagccugauucuaga

SEQ ID NO: 105047 - RNA, 19 nt, Artificial Sequence
  Description of Artificial Sequence: Synthetic oligonucleotide
  Antisense strand to SEQ ID NO: 105046
ucuagaaucaggcuucugg

SEQ ID NO: 105048 - RNA, 19 nt, Artificial Sequence
  Description of Artificial Sequence: Synthetic oligonucleotide
  Sense strand starting at position 3590 of SEQ ID NO: 1325
ggaagagguguguaccaua

SEQ ID NO: 105049 - RNA, 19 nt, Artificial Sequence
  Description of Artificial Sequence: Synthetic oligonucleotide
  Antisense strand to SEQ ID NO: 105048
uaugguacacaccucuucc

SEQ ID NO: 105050 - RNA, 19 nt, Artificial Sequence
  Description of Artificial Sequence: Synthetic oligonucleotide
  Sense strand starting at position 3595 of SEQ ID NO: 1325
agguguguaccauaacuuu

SEQ ID NO: 105051 - RNA, 19 nt, Artificial Sequence
  Description of Artificial Sequence: Synthetic oligonucleotide
  Antisense strand to SEQ ID NO: 105050
aaaguuaugguacacaccu

SEQ ID NO: 105052 - RNA, 19 nt, Artificial Sequence
  Description of Artificial Sequence: Synthetic oligonucleotide
  Sense strand starting at position 98 of SEQ ID NO: 1326
gaauacuguugggcuugau

SEQ ID NO: 105053 - RNA, 19 nt, Artificial Sequence
  Description of Artificial Sequence: Synthetic oligonucleotide
  Antisense strand to SEQ ID NO: 105052
aucaagcccaacaguauuc

SEQ ID NO: 105054 - RNA, 19 nt, Artificial Sequence
  Description of Artificial Sequence: Synthetic oligonucleotide
  Sense strand starting at position 123 of SEQ ID NO: 1326
gagcucuggcuuggacaau

SEQ ID NO: 105055 - RNA, 19 nt, Artificial Sequence
  Description of Artificial Sequence: Synthetic oligonucleotide
  Antisense strand to SEQ ID NO: 105054
auuguccaagccagagcuc

SEQ ID NO: 105056 - RNA, 19 nt, Artificial Sequence
  Description of Artificial Sequence: Synthetic oligonucleotide
  Sense strand starting at position 236 of SEQ ID NO: 1326
ucucuuugccaagaaugaa

SEQ ID NO: 105057 - RNA, 19 nt, Artificial Sequence
  Description of Artificial Sequence: Synthetic oligonucleotide
  Antisense strand to SEQ ID NO: 105056
uucauucuuggcaaagaga

SEQ ID NO: 105058 - RNA, 19 nt, Artificial Sequence
  Description of Artificial Sequence: Synthetic oligonucleotide
  Sense strand starting at position 384 of SEQ ID NO: 1326
gaggaaacuugcccacagu

SEQ ID NO: 105059 - RNA, 19 nt, Artificial Sequence
  Description of Artificial Sequence: Synthetic oligonucleotide
  Antisense strand to SEQ ID NO: 105058
acugugggcaaguuuccuc

SEQ ID NO: 105060 - RNA, 19 nt, Artificial Sequence
  Description of Artificial Sequence: Synthetic oligonucleotide
  Sense strand starting at position 481 of SEQ ID NO: 1326
uuagccuuuccuugagaga

SEQ ID NO: 105061 - RNA, 19 nt, Artificial Sequence
  Description of Artificial Sequence: Synthetic oligonucleotide
  Antisense strand to SEQ ID NO: 105060
ucucucaaggaaaggcuaa

SEQ ID NO: 105062 - RNA, 19 nt, Artificial Sequence
  Description of Artificial Sequence: Synthetic oligonucleotide
  Sense strand starting at position 666 of SEQ ID NO: 1326
ggaagucucggccaugaau

SEQ ID NO: 105063 - RNA, 19 nt, Artificial Sequence
  Description of Artificial Sequence: Synthetic oligonucleotide
  Antisense strand to SEQ ID NO: 105062
auucauggccgagacuucc

SEQ ID NO: 105064 - RNA, 19 nt, Artificial Sequence
  Description of Artificial Sequence: Synthetic oligonucleotide
  Sense strand starting at position 941 of SEQ ID NO: 1326
caauguugaccagggcaaa

SEQ ID NO: 105065 - RNA, 19 nt, Artificial Sequence
  Description of Artificial Sequence: Synthetic oligonucleotide
  Antisense strand to SEQ ID NO: 105064
uuugcccuggucaacauug

SEQ ID NO: 105066 - RNA, 19 nt, Artificial Sequence
  Description of Artificial Sequence: Synthetic oligonucleotide
  Sense strand starting at position 978 of SEQ ID NO: 1326
gggaguguccuagacgaaa

SEQ ID NO: 105067 - RNA, 19 nt, Artificial Sequence
  Description of Artificial Sequence: Synthetic oligonucleotide
  Antisense strand to SEQ ID NO: 105066
uuucgucuaggacacuccc

SEQ ID NO: 105068 - RNA, 19 nt, Artificial Sequence
  Description of Artificial Sequence: Synthetic oligonucleotide
  Sense strand starting at position 980 of SEQ ID NO: 1326
gaguguccuagacgaaaca

SEQ ID NO: 105069 - RNA, 19 nt, Artificial Sequence
  Description of Artificial Sequence: Synthetic oligonucleotide
  Antisense strand to SEQ ID NO: 105068
uguuucgucuaggacacuc

SEQ ID NO: 105070 - RNA, 19 nt, Artificial Sequence
  Description of Artificial Sequence: Synthetic oligonucleotide
  Sense strand starting at position 1005 of SEQ ID NO: 1326
uggguagacaucugaaauc

SEQ ID NO: 105071 - RNA, 19 nt, Artificial Sequence
  Description of Artificial Sequence: Synthetic oligonucleotide
  Antisense strand to SEQ ID NO: 105070
gauuucagaugucuaccca

SEQ ID NO: 105072 - RNA, 19 nt, Artificial Sequence
  Description of Artificial Sequence: Synthetic oligonucleotide
  Sense strand starting at position 1081 of SEQ ID NO: 1326
gagaguucccacugauuau

SEQ ID NO: 105073 - RNA, 19 nt, Artificial Sequence
  Description of Artificial Sequence: Synthetic oligonucleotide
  Antisense strand to SEQ ID NO: 105072
auaaucagugggaacucuc

SEQ ID NO: 105074 - RNA, 19 nt, Artificial Sequence
  Description of Artificial Sequence: Synthetic oligonucleotide
  Sense strand starting at position 1128 of SEQ ID NO: 1326
acccauaauguuugucuaa

SEQ ID NO: 105075 - RNA, 19 nt, Artificial Sequence
  Description of Artificial Sequence: Synthetic oligonucleotide
  Antisense strand to SEQ ID NO: 105074
uuagacaaacauuaugggu

SEQ ID NO: 105076 - RNA, 19 nt, Artificial Sequence
  Description of Artificial Sequence: Synthetic oligonucleotide
  Sense strand starting at position 1129 of SEQ ID NO: 1326
cccauaauguuugucuaaa

SEQ ID NO: 105077 - RNA, 19 nt, Artificial Sequence
  Description of Artificial Sequence: Synthetic oligonucleotide
  Antisense strand to SEQ ID NO: 105076
uuuagacaaacauuauggg

SEQ ID NO: 105078 - RNA, 19 nt, Artificial Sequence
  Description of Artificial Sequence: Synthetic oligonucleotide
  Sense strand starting at position 1130 of SEQ ID NO: 1326
ccauaauguuugucuaaau

SEQ ID NO: 105079 - RNA, 19 nt, Artificial Sequence
  Description of Artificial Sequence: Synthetic oligonucleotide
  Antisense strand to SEQ ID NO: 105078
auuuagacaaacauuaugg

SEQ ID NO: 105080 - RNA, 19 nt, Artificial Sequence
  Description of Artificial Sequence: Synthetic oligonucleotide
  Sense strand starting at position 1549 of SEQ ID NO: 1326
cuauguaucgaauaaguaa

SEQ ID NO: 105081 - RNA, 19 nt, Artificial Sequence
  Description of Artificial Sequence: Synthetic oligonucleotide
  Antisense strand to SEQ ID NO: 105080
uuacuuauucgauacauag

SEQ ID NO: 105082 - RNA, 19 nt, Artificial Sequence
  Description of Artificial Sequence: Synthetic oligonucleotide
  Sense strand starting at position 1723 of SEQ ID NO: 1326
acaagauuggcguaggaug

SEQ ID NO: 105083 - RNA, 19 nt, Artificial Sequence
  Description of Artificial Sequence: Synthetic oligonucleotide
  Antisense strand to SEQ ID NO: 105082
cauccuacgccaaucuugu

SEQ ID NO: 105084 - RNA, 19 nt, Artificial Sequence
  Description of Artificial Sequence: Synthetic oligonucleotide
  Sense strand starting at position 1725 of SEQ ID NO: 1326
aagauuggcguaggaugaa

SEQ ID NO: 105085 - RNA, 19 nt, Artificial Sequence
  Description of Artificial Sequence: Synthetic oligonucleotide
  Antisense strand to SEQ ID NO: 105084
uucauccuacgccaaucuu

SEQ ID NO: 105086 - RNA, 19 nt, Artificial Sequence
  Description of Artificial Sequence: Synthetic oligonucleotide
  Sense strand starting at position 1728 of SEQ ID NO: 1326
auuggcguaggaugaaauu

SEQ ID NO: 105087 - RNA, 19 nt, Artificial Sequence
  Description of Artificial Sequence: Synthetic oligonucleotide
  Antisense strand to SEQ ID NO: 105086
aauuucauccuacgccaau

SEQ ID NO: 105088 - RNA, 19 nt, Artificial Sequence
  Description of Artificial Sequence: Synthetic oligonucleotide
  Sense strand starting at position 1737 of SEQ ID NO: 1326
ggaugaaauuuggaagucu

SEQ ID NO: 105089 - RNA, 19 nt, Artificial Sequence
  Description of Artificial Sequence: Synthetic oligonucleotide
  Antisense strand to SEQ ID NO: 105088
agacuuccaaauuucaucc

SEQ ID NO: 105090 - RNA, 19 nt, Artificial Sequence
  Description of Artificial Sequence: Synthetic oligonucleotide
  Sense strand starting at position 1748 of SEQ ID NO: 1326
ggaagucuuuggagaguga

SEQ ID NO: 105091 - RNA, 19 nt, Artificial Sequence
  Description of Artificial Sequence: Synthetic oligonucleotide
  Antisense strand to SEQ ID NO: 105090
ucacucuccaaagacuucc

SEQ ID NO: 105092 - RNA, 19 nt, Artificial Sequence
  Description of Artificial Sequence: Synthetic oligonucleotide
  Sense strand starting at position 1757 of SEQ ID NO: 1326
uggagagugauagggcauu

SEQ ID NO: 105093 - RNA, 19 nt, Artificial Sequence
  Description of Artificial Sequence: Synthetic oligonucleotide
  Antisense strand to SEQ ID NO: 105092
aaugcccuaucacucucca

SEQ ID NO: 105094 - RNA, 19 nt, Artificial Sequence
  Description of Artificial Sequence: Synthetic oligonucleotide
  Sense strand starting at position 1772 of SEQ ID NO: 1326
cauuauuaccugggaggca

SEQ ID NO: 105095 - RNA, 19 nt, Artificial Sequence
  Description of Artificial Sequence: Synthetic oligonucleotide
  Antisense strand to SEQ ID NO: 105094
ugccucccagguaauaaug

SEQ ID NO: 105096 - RNA, 19 nt, Artificial Sequence
  Description of Artificial Sequence: Synthetic oligonucleotide
  Sense strand starting at position 1851 of SEQ ID NO: 1326
gacagacuuugguccagag

SEQ ID NO: 105097 - RNA, 19 nt, Artificial Sequence
  Description of Artificial Sequence: Synthetic oligonucleotide
  Antisense strand to SEQ ID NO: 105096
cucuggaccaaagucuguc

SEQ ID NO: 105098 - RNA, 19 nt, Artificial Sequence
  Description of Artificial Sequence: Synthetic oligonucleotide
  Sense strand starting at position 1855 of SEQ ID NO: 1326
gacuuugguccagaggguu

SEQ ID NO: 105099 - RNA, 19 nt, Artificial Sequence
  Description of Artificial Sequence: Synthetic oligonucleotide
  Antisense strand to SEQ ID NO: 105098
aacccucuggaccaaaguc

SEQ ID NO: 105100 - RNA, 19 nt, Artificial Sequence
  Description of Artificial Sequence: Synthetic oligonucleotide
  Sense strand starting at position 1959 of SEQ ID NO: 1326
aacugagaucagugucugu

SEQ ID NO: 105101 - RNA, 19 nt, Artificial Sequence
  Description of Artificial Sequence: Synthetic oligonucleotide
  Antisense strand to SEQ ID NO: 105100
acagacacugaucucaguu

SEQ ID NO: 105102 - RNA, 19 nt, Artificial Sequence
  Description of Artificial Sequence: Synthetic oligonucleotide
  Sense strand starting at position 2299 of SEQ ID NO: 1326
agcaguuaagggugggaaa

SEQ ID NO: 105103 - RNA, 19 nt, Artificial Sequence
  Description of Artificial Sequence: Synthetic oligonucleotide
  Antisense strand to SEQ ID NO: 105102
uuucccacccuuaacugcu

SEQ ID NO: 105104 - RNA, 19 nt, Artificial Sequence
  Description of Artificial Sequence: Synthetic oligonucleotide
  Sense strand starting at position 2350 of SEQ ID NO: 1326
cugagucuuguugagaaga

SEQ ID NO: 105105 - RNA, 19 nt, Artificial Sequence
  Description of Artificial Sequence: Synthetic oligonucleotide
  Antisense strand to SEQ ID NO: 105104
ucuucucaacaagacucag

SEQ ID NO: 105106 - RNA, 19 nt, Artificial Sequence
  Description of Artificial Sequence: Synthetic oligonucleotide
  Sense strand starting at position 2476 of SEQ ID NO: 1326
agaagucuccucggaaacu

SEQ ID NO: 105107 - RNA, 19 nt, Artificial Sequence
  Description of Artificial Sequence: Synthetic oligonucleotide
  Antisense strand to SEQ ID NO: 105106
aguuuccgaggagacuucu

SEQ ID NO: 105108 - RNA, 19 nt, Artificial Sequence
  Description of Artificial Sequence: Synthetic oligonucleotide
  Sense strand starting at position 2714 of SEQ ID NO: 1326
gauuaugaagcuggaauca

SEQ ID NO: 105109 - RNA, 19 nt, Artificial Sequence
  Description of Artificial Sequence: Synthetic oligonucleotide
  Antisense strand to SEQ ID NO: 105108
ugauuccagcuucauaauc

SEQ ID NO: 105110 - RNA, 19 nt, Artificial Sequence
  Description of Artificial Sequence: Synthetic oligonucleotide
  Sense strand starting at position 2723 of SEQ ID NO: 1326
gcuggaaucaucugggcua

SEQ ID NO: 105111 - RNA, 19 nt, Artificial Sequence
  Description of Artificial Sequence: Synthetic oligonucleotide
  Antisense strand to SEQ ID NO: 105110
uagcccagaugauuccagc

SEQ ID NO: 105112 - RNA, 19 nt, Artificial Sequence
  Description of Artificial Sequence: Synthetic oligonucleotide
  Sense strand starting at position 2726 of SEQ ID NO: 1326
ggaaucaucugggcuaccu

SEQ ID NO: 105113 - RNA, 19 nt, Artificial Sequence
  Description of Artificial Sequence: Synthetic oligonucleotide
  Antisense strand to SEQ ID NO: 105112
agguagcccagaugauucc

SEQ ID NO: 105114 - RNA, 19 nt, Artificial Sequence
  Description of Artificial Sequence: Synthetic oligonucleotide
  Sense strand starting at position 2748 of SEQ ID NO: 1326
uggagugucucagugauga

SEQ ID NO: 105115 - RNA, 19 nt, Artificial Sequence
  Description of Artificial Sequence: Synthetic oligonucleotide
  Antisense strand to SEQ ID NO: 105114
ucaucacugagacacucca

SEQ ID NO: 105116 - RNA, 19 nt, Artificial Sequence
  Description of Artificial Sequence: Synthetic oligonucleotide
  Sense strand starting at position 2759 of SEQ ID NO: 1326
agugaugacuucccuuaaa

SEQ ID NO: 105117 - RNA, 19 nt, Artificial Sequence
  Description of Artificial Sequence: Synthetic oligonucleotide
  Antisense strand to SEQ ID NO: 105116
uuuaagggaagucaucacu

SEQ ID NO: 105118 - RNA, 19 nt, Artificial Sequence
  Description of Artificial Sequence: Synthetic oligonucleotide
  Sense strand starting at position 2825 of SEQ ID NO: 1326
guaggaaugugaaaguggu

SEQ ID NO: 105119 - RNA, 19 nt, Artificial Sequence
  Description of Artificial Sequence: Synthetic oligonucleotide
  Antisense strand to SEQ ID NO: 105118
accacuuucacauuccuac

SEQ ID NO: 105120 - RNA, 19 nt, Artificial Sequence
  Description of Artificial Sequence: Synthetic oligonucleotide
  Sense strand starting at position 2857 of SEQ ID NO: 1326
ccgccucuuccagaagaaa

SEQ ID NO: 105121 - RNA, 19 nt, Artificial Sequence
  Description of Artificial Sequence: Synthetic oligonucleotide
  Antisense strand to SEQ ID NO: 105120
uuucuucuggaagaggcgg

SEQ ID NO: 105122 - RNA, 19 nt, Artificial Sequence
  Description of Artificial Sequence: Synthetic oligonucleotide
  Sense strand starting at position 2904 of SEQ ID NO: 1326
ucagcagaggcccaagaau

SEQ ID NO: 105123 - RNA, 19 nt, Artificial Sequence
  Description of Artificial Sequence: Synthetic oligonucleotide
  Antisense strand to SEQ ID NO: 105122
auucuugggccucugcuga

SEQ ID NO: 105124 - RNA, 19 nt, Artificial Sequence
  Description of Artificial Sequence: Synthetic oligonucleotide
  Sense strand starting at position 2935 of SEQ ID NO: 1326
cagggaaacugguuaaagu

SEQ ID NO: 105125 - RNA, 19 nt, Artificial Sequence
  Description of Artificial Sequence: Synthetic oligonucleotide
  Antisense strand to SEQ ID NO: 105124
acuuuaaccaguuucccug

SEQ ID NO: 105126 - RNA, 19 nt, Artificial Sequence
  Description of Artificial Sequence: Synthetic oligonucleotide
  Sense strand starting at position 2959 of SEQ ID NO: 1326
ugcauaucuuucucuagag

SEQ ID NO: 105127 - RNA, 19 nt, Artificial Sequence
  Description of Artificial Sequence: Synthetic oligonucleotide
  Antisense strand to SEQ ID NO: 105126
cucuagagaaagauaugca

SEQ ID NO: 105128 - RNA, 19 nt, Artificial Sequence
  Description of Artificial Sequence: Synthetic oligonucleotide
  Sense strand starting at position 2963 of SEQ ID NO: 1326
uaucuuucucuagagggca

SEQ ID NO: 105129 - RNA, 19 nt, Artificial Sequence
  Description of Artificial Sequence: Synthetic oligonucleotide
  Antisense strand to SEQ ID NO: 105128
ugcccucuagagaaagaua

SEQ ID NO: 105130 - RNA, 19 nt, Artificial Sequence
  Description of Artificial Sequence: Synthetic oligonucleotide
  Sense strand starting at position 3673 of SEQ ID NO: 1326
ccagaagccugauucuaga

SEQ ID NO: 105131 - RNA, 19 nt, Artificial Sequence
  Description of Artificial Sequence: Synthetic oligonucleotide
  Antisense strand to SEQ ID NO: 105130
ucuagaaucaggcuucugg

SEQ ID NO: 105132 - RNA, 19 nt, Artificial Sequence
  Description of Artificial Sequence: Synthetic oligonucleotide
  Sense strand starting at position 44 of SEQ ID NO: 1327
ggcugcuuguagccauauu

SEQ ID NO: 105133 - RNA, 19 nt, Artificial Sequence
  Description of Artificial Sequence: Synthetic oligonucleotide
  Antisense strand to SEQ ID NO: 105132
aauauggcuacaagcagcc

SEQ ID NO: 105134 - RNA, 19 nt, Artificial Sequence
  Description of Artificial Sequence: Synthetic oligonucleotide
  Sense strand starting at position 151 of SEQ ID NO: 1327
uugauauaguguccauucu

SEQ ID NO: 105135 - RNA, 19 nt, Artificial Sequence
  Description of Artificial Sequence: Synthetic oligonucleotide
  Antisense strand to SEQ ID NO: 105134
agaauggacacuauaucaa

SEQ ID NO: 105136 - RNA, 19 nt, Artificial Sequence
  Description of Artificial Sequence: Synthetic oligonucleotide
  Sense strand starting at position 152 of SEQ ID NO: 1327
ugauauaguguccauucuu

SEQ ID NO: 105137 - RNA, 19 nt, Artificial Sequence
  Description of Artificial Sequence: Synthetic oligonucleotide
  Antisense strand to SEQ ID NO: 105136
aagaauggacacuauauca

SEQ ID NO: 105138 - RNA, 19 nt, Artificial Sequence
  Description of Artificial Sequence: Synthetic oligonucleotide
  Sense strand starting at position 585 of SEQ ID NO: 1327
ugguucuuguacugaacaa

SEQ ID NO: 105139 - RNA, 19 nt, Artificial Sequence
  Description of Artificial Sequence: Synthetic oligonucleotide
  Antisense strand to SEQ ID NO: 105138
uuguucaguacaagaacca

SEQ ID NO: 105140 - RNA, 19 nt, Artificial Sequence
  Description of Artificial Sequence: Synthetic oligonucleotide
  Sense strand starting at position 939 of SEQ ID NO: 1327
ccaauuaguuccugagcuc

SEQ ID NO: 105141 - RNA, 19 nt, Artificial Sequence
  Description of Artificial Sequence: Synthetic oligonucleotide
  Antisense strand to SEQ ID NO: 105140
gagcucaggaacuaauugg

SEQ ID NO: 105142 - RNA, 19 nt, Artificial Sequence
  Description of Artificial Sequence: Synthetic oligonucleotide
  Sense strand starting at position 942 of SEQ ID NO: 1327
auuaguuccugagcucauu

SEQ ID NO: 105143 - RNA, 19 nt, Artificial Sequence
  Description of Artificial Sequence: Synthetic oligonucleotide
  Antisense strand to SEQ ID NO: 105142
aaugagcucaggaacuaau

SEQ ID NO: 105144 - RNA, 19 nt, Artificial Sequence
  Description of Artificial Sequence: Synthetic oligonucleotide
  Sense strand starting at position 986 of SEQ ID NO: 1327
cugccauggguguaacaua

SEQ ID NO: 105145 - RNA, 19 nt, Artificial Sequence
  Description of Artificial Sequence: Synthetic oligonucleotide
  Antisense strand to SEQ ID NO: 105144
uauguuacacccauggcag

SEQ ID NO: 105146 - RNA, 19 nt, Artificial Sequence
  Description of Artificial Sequence: Synthetic oligonucleotide
  Sense strand starting at position 1270 of SEQ ID NO: 1327
uuucuauucucaggaaaga

SEQ ID NO: 105147 - RNA, 19 nt, Artificial Sequence
  Description of Artificial Sequence: Synthetic oligonucleotide
  Antisense strand to SEQ ID NO: 105146
ucuuuccugagaauagaaa

SEQ ID NO: 105148 - RNA, 19 nt, Artificial Sequence
  Description of Artificial Sequence: Synthetic oligonucleotide
  Sense strand starting at position 1289 of SEQ ID NO: 1327
accaguguaucuuuauaug

SEQ ID NO: 105149 - RNA, 19 nt, Artificial Sequence
  Description of Artificial Sequence: Synthetic oligonucleotide
  Antisense strand to SEQ ID NO: 105148
cauauaaagauacacuggu

SEQ ID NO: 105150 - RNA, 19 nt, Artificial Sequence
  Description of Artificial Sequence: Synthetic oligonucleotide
  Sense strand starting at position 1292 of SEQ ID NO: 1327
aguguaucuuuauaugauc

SEQ ID NO: 105151 - RNA, 19 nt, Artificial Sequence
  Description of Artificial Sequence: Synthetic oligonucleotide
  Antisense strand to SEQ ID NO: 105150
gaucauauaaagauacacu

SEQ ID NO: 105152 - RNA, 19 nt, Artificial Sequence
  Description of Artificial Sequence: Synthetic oligonucleotide
  Sense strand starting at position 1295 of SEQ ID NO: 1327
guaucuuuauaugaucuga

SEQ ID NO: 105153 - RNA, 19 nt, Artificial Sequence
  Description of Artificial Sequence: Synthetic oligonucleotide
  Antisense strand to SEQ ID NO: 105152
ucagaucauauaaagauac

SEQ ID NO: 105154 - RNA, 19 nt, Artificial Sequence
  Description of Artificial Sequence: Synthetic oligonucleotide
  Sense strand starting at position 1324 of SEQ ID NO: 1327
ccaucugcuccagacugaa

SEQ ID NO: 105155 - RNA, 19 nt, Artificial Sequence
  Description of Artificial Sequence: Synthetic oligonucleotide
  Antisense strand to SEQ ID NO: 105154
uucagucuggagcagaugg

SEQ ID NO: 105156 - RNA, 19 nt, Artificial Sequence
  Description of Artificial Sequence: Synthetic oligonucleotide
  Sense strand starting at position 1367 of SEQ ID NO: 1327
agucaaauauccuaauggu

SEQ ID NO: 105157 - RNA, 19 nt, Artificial Sequence
  Description of Artificial Sequence: Synthetic oligonucleotide
  Antisense strand to SEQ ID NO: 105156
accauuaggauauuugacu

SEQ ID NO: 105158 - RNA, 19 nt, Artificial Sequence
  Description of Artificial Sequence: Synthetic oligonucleotide
  Sense strand starting at position 1373 of SEQ ID NO: 1327
auauccuaaugguguugau

SEQ ID NO: 105159 - RNA, 19 nt, Artificial Sequence
  Description of Artificial Sequence: Synthetic oligonucleotide
  Antisense strand to SEQ ID NO: 105158
aucaacaccauuaggauau

SEQ ID NO: 105160 - RNA, 19 nt, Artificial Sequence
  Description of Artificial Sequence: Synthetic oligonucleotide
  Sense strand starting at position 1382 of SEQ ID NO: 1327
ugguguugauagggcuuaa

SEQ ID NO: 105161 - RNA, 19 nt, Artificial Sequence
  Description of Artificial Sequence: Synthetic oligonucleotide
  Antisense strand to SEQ ID NO: 105160
uuaagcccuaucaacacca

SEQ ID NO: 105162 - RNA, 19 nt, Artificial Sequence
  Description of Artificial Sequence: Synthetic oligonucleotide
  Sense strand starting at position 1836 of SEQ ID NO: 1327
ggccgugggucuggacauu

SEQ ID NO: 105163 - RNA, 19 nt, Artificial Sequence
  Description of Artificial Sequence: Synthetic oligonucleotide
  Antisense strand to SEQ ID NO: 105162
aauguccagacccacggcc

SEQ ID NO: 105164 - RNA, 19 nt, Artificial Sequence
  Description of Artificial Sequence: Synthetic oligonucleotide
  Sense strand starting at position 2069 of SEQ ID NO: 1327
ggccaauaguaaugaagaa

SEQ ID NO: 105165 - RNA, 19 nt, Artificial Sequence
  Description of Artificial Sequence: Synthetic oligonucleotide
  Antisense strand to SEQ ID NO: 105164
uucuucauuacuauuggcc

SEQ ID NO: 105166 - RNA, 19 nt, Artificial Sequence
  Description of Artificial Sequence: Synthetic oligonucleotide
  Sense strand starting at position 2189 of SEQ ID NO: 1327
gaaccaaucggucgugagu

SEQ ID NO: 105167 - RNA, 19 nt, Artificial Sequence
  Description of Artificial Sequence: Synthetic oligonucleotide
  Antisense strand to SEQ ID NO: 105166
acucacgaccgauugguuc

SEQ ID NO: 105168 - RNA, 19 nt, Artificial Sequence
  Description of Artificial Sequence: Synthetic oligonucleotide
  Sense strand starting at position 2298 of SEQ ID NO: 1327
uggguaucuccggaucgca

SEQ ID NO: 105169 - RNA, 19 nt, Artificial Sequence
  Description of Artificial Sequence: Synthetic oligonucleotide
  Antisense strand to SEQ ID NO: 105168
ugcgauccggagauaccca

SEQ ID NO: 105170 - RNA, 19 nt, Artificial Sequence
  Description of Artificial Sequence: Synthetic oligonucleotide
  Sense strand starting at position 2351 of SEQ ID NO: 1327
cgguguaauucugagagga

SEQ ID NO: 105171 - RNA, 19 nt, Artificial Sequence
  Description of Artificial Sequence: Synthetic oligonucleotide
  Antisense strand to SEQ ID NO: 105170
uccucucagaauuacaccg

SEQ ID NO: 105172 - RNA, 19 nt, Artificial Sequence
  Description of Artificial Sequence: Synthetic oligonucleotide
  Sense strand starting at position 2418 of SEQ ID NO: 1327
ucgggcuagcgcucuuuau

SEQ ID NO: 105173 - RNA, 19 nt, Artificial Sequence
  Description of Artificial Sequence: Synthetic oligonucleotide
  Antisense strand to SEQ ID NO: 105172
auaaagagcgcuagcccga

SEQ ID NO: 105174 - RNA, 19 nt, Artificial Sequence
  Description of Artificial Sequence: Synthetic oligonucleotide
  Sense strand starting at position 2422 of SEQ ID NO: 1327
gcuagcgcucuuuauggau

SEQ ID NO: 105175 - RNA, 19 nt, Artificial Sequence
  Description of Artificial Sequence: Synthetic oligonucleotide
  Antisense strand to SEQ ID NO: 105174
auccauaaagagcgcuagc

SEQ ID NO: 105176 - RNA, 19 nt, Artificial Sequence
  Description of Artificial Sequence: Synthetic oligonucleotide
  Sense strand starting at position 2431 of SEQ ID NO: 1327
cuuuauggauccugugaua

SEQ ID NO: 105177 - RNA, 19 nt, Artificial Sequence
  Description of Artificial Sequence: Synthetic oligonucleotide
  Antisense strand to SEQ ID NO: 105176
uaucacaggauccauaaag

SEQ ID NO: 105178 - RNA, 19 nt, Artificial Sequence
  Description of Artificial Sequence: Synthetic oligonucleotide
  Sense strand starting at position 2434 of SEQ ID NO: 1327
uauggauccugugauaucu

SEQ ID NO: 105179 - RNA, 19 nt, Artificial Sequence
  Description of Artificial Sequence: Synthetic oligonucleotide
  Antisense strand to SEQ ID NO: 105178
agauaucacaggauccaua

SEQ ID NO: 105180 - RNA, 19 nt, Artificial Sequence
  Description of Artificial Sequence: Synthetic oligonucleotide
  Sense strand starting at position 2839 of SEQ ID NO: 1327
gcacgaguaucgccugaac

SEQ ID NO: 105181 - RNA, 19 nt, Artificial Sequence
  Description of Artificial Sequence: Synthetic oligonucleotide
  Antisense strand to SEQ ID NO: 105180
guucaggcgauacucgugc

SEQ ID NO: 105182 - RNA, 19 nt, Artificial Sequence
  Description of Artificial Sequence: Synthetic oligonucleotide
  Sense strand starting at position 3092 of SEQ ID NO: 1327
gcgagacgaugucucuaca

SEQ ID NO: 105183 - RNA, 19 nt, Artificial Sequence
  Description of Artificial Sequence: Synthetic oligonucleotide
  Antisense strand to SEQ ID NO: 105182
uguagagacaucgucucgc

SEQ ID NO: 105184 - RNA, 19 nt, Artificial Sequence
  Description of Artificial Sequence: Synthetic oligonucleotide
  Sense strand starting at position 3095 of SEQ ID NO: 1327
agacgaugucucuacagau

SEQ ID NO: 105185 - RNA, 19 nt, Artificial Sequence
  Description of Artificial Sequence: Synthetic oligonucleotide
  Antisense strand to SEQ ID NO: 105184
aucuguagagacaucgucu

SEQ ID NO: 105186 - RNA, 19 nt, Artificial Sequence
  Description of Artificial Sequence: Synthetic oligonucleotide
  Sense strand starting at position 3170 of SEQ ID NO: 1327
agugcuauuugucauagua

SEQ ID NO: 105187 - RNA, 19 nt, Artificial Sequence
  Description of Artificial Sequence: Synthetic oligonucleotide
  Antisense strand to SEQ ID NO: 105186
uacuaugacaaauagcacu

SEQ ID NO: 105188 - RNA, 19 nt, Artificial Sequence
  Description of Artificial Sequence: Synthetic oligonucleotide
  Sense strand starting at position 3172 of SEQ ID NO: 1327
ugcuauuugucauaguaaa

SEQ ID NO: 105189 - RNA, 19 nt, Artificial Sequence
  Description of Artificial Sequence: Synthetic oligonucleotide
  Antisense strand to SEQ ID NO: 105188
uuuacuaugacaaauagca

SEQ ID NO: 105190 - RNA, 19 nt, Artificial Sequence
  Description of Artificial Sequence: Synthetic oligonucleotide
  Sense strand starting at position 3799 of SEQ ID NO: 1327
cgagaaucacuugagucua

SEQ ID NO: 105191 - RNA, 19 nt, Artificial Sequence
  Description of Artificial Sequence: Synthetic oligonucleotide
  Antisense strand to SEQ ID NO: 105190
uagacucaagugauucucg

SEQ ID NO: 105192 - RNA, 19 nt, Artificial Sequence
  Description of Artificial Sequence: Synthetic oligonucleotide
  Sense strand starting at position 3804 of SEQ ID NO: 1327
aucacuugagucuaugacu

SEQ ID NO: 105193 - RNA, 19 nt, Artificial Sequence
  Description of Artificial Sequence: Synthetic oligonucleotide
  Antisense strand to SEQ ID NO: 105192
agucauagacucaagugau

SEQ ID NO: 105194 - RNA, 19 nt, Artificial Sequence
  Description of Artificial Sequence: Synthetic oligonucleotide
  Sense strand starting at position 3828 of SEQ ID NO: 1327
guugcagucaucugugauc

SEQ ID NO: 105195 - RNA, 19 nt, Artificial Sequence
  Description of Artificial Sequence: Synthetic oligonucleotide
  Antisense strand to SEQ ID NO: 105194
gaucacagaugacugcaac

SEQ ID NO: 105196 - RNA, 19 nt, Artificial Sequence
  Description of Artificial Sequence: Synthetic oligonucleotide
  Sense strand starting at position 3830 of SEQ ID NO: 1327
ugcagucaucugugaucuc

SEQ ID NO: 105197 - RNA, 19 nt, Artificial Sequence
  Description of Artificial Sequence: Synthetic oligonucleotide
  Antisense strand to SEQ ID NO: 105196
gagaucacagaugacugca

SEQ ID NO: 105198 - RNA, 19 nt, Artificial Sequence
  Description of Artificial Sequence: Synthetic oligonucleotide
  Sense strand starting at position 3837 of SEQ ID NO: 1327
aucugugaucuccacugca

SEQ ID NO: 105199 - RNA, 19 nt, Artificial Sequence
  Description of Artificial Sequence: Synthetic oligonucleotide
  Antisense strand to SEQ ID NO: 105198
ugcaguggagaucacagau

SEQ ID NO: 105200 - RNA, 19 nt, Artificial Sequence
  Description of Artificial Sequence: Synthetic oligonucleotide
  Sense strand starting at position 3914 of SEQ ID NO: 1327
gugguaauuagaugaauau

SEQ ID NO: 105201 - RNA, 19 nt, Artificial Sequence
  Description of Artificial Sequence: Synthetic oligonucleotide
  Antisense strand to SEQ ID NO: 105200
auauucaucuaauuaccac

SEQ ID NO: 105202 - RNA, 19 nt, Artificial Sequence
  Description of Artificial Sequence: Synthetic oligonucleotide
  Sense strand starting at position 3925 of SEQ ID NO: 1327
augaauauuugcuaagaag

SEQ ID NO: 105203 - RNA, 19 nt, Artificial Sequence
  Description of Artificial Sequence: Synthetic oligonucleotide
  Antisense strand to SEQ ID NO: 105202
cuucuuagcaaauauucau

SEQ ID NO: 105204 - RNA, 19 nt, Artificial Sequence
  Description of Artificial Sequence: Synthetic oligonucleotide
  Sense strand starting at position 3969 of SEQ ID NO: 1327
auuacaaguugugcaacaa

SEQ ID NO: 105205 - RNA, 19 nt, Artificial Sequence
  Description of Artificial Sequence: Synthetic oligonucleotide
  Antisense strand to SEQ ID NO: 105204
uuguugcacaacuuguaau

SEQ ID NO: 105206 - RNA, 19 nt, Artificial Sequence
  Description of Artificial Sequence: Synthetic oligonucleotide
  Sense strand starting at position 3970 of SEQ ID NO: 1327
uuacaaguugugcaacaau

SEQ ID NO: 105207 - RNA, 19 nt, Artificial Sequence
  Description of Artificial Sequence: Synthetic oligonucleotide
  Antisense strand to SEQ ID NO: 105206
auuguugcacaacuuguaa

SEQ ID NO: 105208 - RNA, 19 nt, Artificial Sequence
  Description of Artificial Sequence: Synthetic oligonucleotide
  Sense strand starting at position 3973 of SEQ ID NO: 1327
caaguugugcaacaaugua

SEQ ID NO: 105209 - RNA, 19 nt, Artificial Sequence
  Description of Artificial Sequence: Synthetic oligonucleotide
  Antisense strand to SEQ ID NO: 105208
uacauuguugcacaacuug

SEQ ID NO: 105210 - RNA, 19 nt, Artificial Sequence
  Description of Artificial Sequence: Synthetic oligonucleotide
  Sense strand starting at position 3981 of SEQ ID NO: 1327
gcaacaauguaaguauaau

SEQ ID NO: 105211 - RNA, 19 nt, Artificial Sequence
  Description of Artificial Sequence: Synthetic oligonucleotide
  Antisense strand to SEQ ID NO: 105210
auuauacuuacauuguugc

SEQ ID NO: 105212 - RNA, 19 nt, Artificial Sequence
  Description of Artificial Sequence: Synthetic oligonucleotide
  Sense strand starting at position 3981 of SEQ ID NO: 1328
ccucaaagauauguugaag

SEQ ID NO: 105213 - RNA, 19 nt, Artificial Sequence
  Description of Artificial Sequence: Synthetic oligonucleotide
  Antisense strand to SEQ ID NO: 105212
cuucaacauaucuuugagg

SEQ ID NO: 105214 - RNA, 19 nt, Artificial Sequence
  Description of Artificial Sequence: Synthetic oligonucleotide
  Sense strand starting at position 3800 of SEQ ID NO: 1328
gaugcaagucaucaaaguu

SEQ ID NO: 105215 - RNA, 19 nt, Artificial Sequence
  Description of Artificial Sequence: Synthetic oligonucleotide
  Antisense strand to SEQ ID NO: 105214
aacuuugaugacuugcauc

SEQ ID NO: 105216 - RNA, 19 nt, Artificial Sequence
  Description of Artificial Sequence: Synthetic oligonucleotide
  Sense strand starting at position 3799 of SEQ ID NO: 1328
ugaugcaagucaucaaagu

SEQ ID NO: 105217 - RNA, 19 nt, Artificial Sequence
  Description of Artificial Sequence: Synthetic oligonucleotide
  Antisense strand to SEQ ID NO: 105216
acuuugaugacuugcauca

SEQ ID NO: 105218 - RNA, 19 nt, Artificial Sequence
  Description of Artificial Sequence: Synthetic oligonucleotide
  Sense strand starting at position 3765 of SEQ ID NO: 1328
uggaaauuccaggaguugu

SEQ ID NO: 105219 - RNA, 19 nt, Artificial Sequence
  Description of Artificial Sequence: Synthetic oligonucleotide
  Antisense strand to SEQ ID NO: 105218
acaacuccuggaauuucca

SEQ ID NO: 105220 - RNA, 19 nt, Artificial Sequence
  Description of Artificial Sequence: Synthetic oligonucleotide
  Sense strand starting at position 3764 of SEQ ID NO: 1328
cuggaaauuccaggaguug

SEQ ID NO: 105221 - RNA, 19 nt, Artificial Sequence
  Description of Artificial Sequence: Synthetic oligonucleotide
  Antisense strand to SEQ ID NO: 105220
caacuccuggaauuuccag

SEQ ID NO: 105222 - RNA, 19 nt, Artificial Sequence
  Description of Artificial Sequence: Synthetic oligonucleotide
  Sense strand starting at position 3689 of SEQ ID NO: 1328
guuuguugacguguuucuu

SEQ ID NO: 105223 - RNA, 19 nt, Artificial Sequence
  Description of Artificial Sequence: Synthetic oligonucleotide
  Antisense strand to SEQ ID NO: 105222
aagaaacacgucaacaaac

SEQ ID NO: 105224 - RNA, 19 nt, Artificial Sequence
  Description of Artificial Sequence: Synthetic oligonucleotide
  Sense strand starting at position 3540 of SEQ ID NO: 1328
gauuauaagggcuaguugu

SEQ ID NO: 105225 - RNA, 19 nt, Artificial Sequence
  Description of Artificial Sequence: Synthetic oligonucleotide
  Antisense strand to SEQ ID NO: 105224
acaacuagcccuuauaauc

SEQ ID NO: 105226 - RNA, 19 nt, Artificial Sequence
  Description of Artificial Sequence: Synthetic oligonucleotide
  Sense strand starting at position 3394 of SEQ ID NO: 1328
uuauccaggcuugauaaau

SEQ ID NO: 105227 - RNA, 19 nt, Artificial Sequence
  Description of Artificial Sequence: Synthetic oligonucleotide
  Antisense strand to SEQ ID NO: 105226
auuuaucaagccuggauaa

SEQ ID NO: 105228 - RNA, 19 nt, Artificial Sequence
  Description of Artificial Sequence: Synthetic oligonucleotide
  Sense strand starting at position 3393 of SEQ ID NO: 1328
uuuauccaggcuugauaaa

SEQ ID NO: 105229 - RNA, 19 nt, Artificial Sequence
  Description of Artificial Sequence: Synthetic oligonucleotide
  Antisense strand to SEQ ID NO: 105228
uuuaucaagccuggauaaa

SEQ ID NO: 105230 - RNA, 19 nt, Artificial Sequence
  Description of Artificial Sequence: Synthetic oligonucleotide
  Sense strand starting at position 3366 of SEQ ID NO: 1328
gucuucuaugcugaacuua

SEQ ID NO: 105231 - RNA, 19 nt, Artificial Sequence
  Description of Artificial Sequence: Synthetic oligonucleotide
  Antisense strand to SEQ ID NO: 105230
uaaguucagcauagaagac

SEQ ID NO: 105232 - RNA, 19 nt, Artificial Sequence
  Description of Artificial Sequence: Synthetic oligonucleotide
  Sense strand starting at position 3362 of SEQ ID NO: 1328
caaggucuucuaugcugaa

SEQ ID NO: 105233 - RNA, 19 nt, Artificial Sequence
  Description of Artificial Sequence: Synthetic oligonucleotide
  Antisense strand to SEQ ID NO: 105232
uucagcauagaagaccuug

SEQ ID NO: 105234 - RNA, 19 nt, Artificial Sequence
  Description of Artificial Sequence: Synthetic oligonucleotide
  Sense strand starting at position 2851 of SEQ ID NO: 1328
cugagcaugguagauguaa

SEQ ID NO: 105235 - RNA, 19 nt, Artificial Sequence
  Description of Artificial Sequence: Synthetic oligonucleotide
  Antisense strand to SEQ ID NO: 105234
uuacaucuaccaugcucag

SEQ ID NO: 105236 - RNA, 19 nt, Artificial Sequence
  Description of Artificial Sequence: Synthetic oligonucleotide
  Sense strand starting at position 2729 of SEQ ID NO: 1328
aggagaagcucccugugua

SEQ ID NO: 105237 - RNA, 19 nt, Artificial Sequence
  Description of Artificial Sequence: Synthetic oligonucleotide
  Antisense strand to SEQ ID NO: 105236
uacacagggagcuucuccu

SEQ ID NO: 105238 - RNA, 19 nt, Artificial Sequence
  Description of Artificial Sequence: Synthetic oligonucleotide
  Sense strand starting at position 2716 of SEQ ID NO: 1328
gguuguuccagucaggaga

SEQ ID NO: 105239 - RNA, 19 nt, Artificial Sequence
  Description of Artificial Sequence: Synthetic oligonucleotide
  Antisense strand to SEQ ID NO: 105238
ucuccugacuggaacaacc

SEQ ID NO: 105240 - RNA, 19 nt, Artificial Sequence
  Description of Artificial Sequence: Synthetic oligonucleotide
  Sense strand starting at position 2701 of SEQ ID NO: 1328
agugguaccagguaagguu

SEQ ID NO: 105241 - RNA, 19 nt, Artificial Sequence
  Description of Artificial Sequence: Synthetic oligonucleotide
  Antisense strand to SEQ ID NO: 105240
aaccuuaccugguaccacu

SEQ ID NO: 105242 - RNA, 19 nt, Artificial Sequence
  Description of Artificial Sequence: Synthetic oligonucleotide
  Sense strand starting at position 2409 of SEQ ID NO: 1328
ucguuugaccgcgcuauga

SEQ ID NO: 105243 - RNA, 19 nt, Artificial Sequence
  Description of Artificial Sequence: Synthetic oligonucleotide
  Antisense strand to SEQ ID NO: 105242
ucauagcgcggucaaacga

SEQ ID NO: 105244 - RNA, 19 nt, Artificial Sequence
  Description of Artificial Sequence: Synthetic oligonucleotide
  Sense strand starting at position 2407 of SEQ ID NO: 1328
gaucguuugaccgcgcuau

SEQ ID NO: 105245 - RNA, 19 nt, Artificial Sequence
  Description of Artificial Sequence: Synthetic oligonucleotide
  Antisense strand to SEQ ID NO: 105244
auagcgcggucaaacgauc

SEQ ID NO: 105246 - RNA, 19 nt, Artificial Sequence
  Description of Artificial Sequence: Synthetic oligonucleotide
  Sense strand starting at position 2398 of SEQ ID NO: 1328
guuaaaugagaucguuuga

SEQ ID NO: 105247 - RNA, 19 nt, Artificial Sequence
  Description of Artificial Sequence: Synthetic oligonucleotide
  Antisense strand to SEQ ID NO: 105246
ucaaacgaucucauuuaac

SEQ ID NO: 105248 - RNA, 19 nt, Artificial Sequence
  Description of Artificial Sequence: Synthetic oligonucleotide
  Sense strand starting at position 2388 of SEQ ID NO: 1328
uguaguaggcguuaaauga

SEQ ID NO: 105249 - RNA, 19 nt, Artificial Sequence
  Description of Artificial Sequence: Synthetic oligonucleotide
  Antisense strand to SEQ ID NO: 105248
ucauuuaacgccuacuaca

SEQ ID NO: 105250 - RNA, 19 nt, Artificial Sequence
  Description of Artificial Sequence: Synthetic oligonucleotide
  Sense strand starting at position 2351 of SEQ ID NO: 1328
gaaugauaggaugguagua

SEQ ID NO: 105251 - RNA, 19 nt, Artificial Sequence
  Description of Artificial Sequence: Synthetic oligonucleotide
  Antisense strand to SEQ ID NO: 105250
uacuaccauccuaucauuc

SEQ ID NO: 105252 - RNA, 19 nt, Artificial Sequence
  Description of Artificial Sequence: Synthetic oligonucleotide
  Sense strand starting at position 2257 of SEQ ID NO: 1328
guguggugucgagccugaa

SEQ ID NO: 105253 - RNA, 19 nt, Artificial Sequence
  Description of Artificial Sequence: Synthetic oligonucleotide
  Antisense strand to SEQ ID NO: 105252
uucaggcucgacaccacac

SEQ ID NO: 105254 - RNA, 19 nt, Artificial Sequence
  Description of Artificial Sequence: Synthetic oligonucleotide
  Sense strand starting at position 2064 of SEQ ID NO: 1328
gccgcauuggcugucaaua

SEQ ID NO: 105255 - RNA, 19 nt, Artificial Sequence
  Description of Artificial Sequence: Synthetic oligonucleotide
  Antisense strand to SEQ ID NO: 105254
uauugacagccaaugcggc

SEQ ID NO: 105256 - RNA, 19 nt, Artificial Sequence
  Description of Artificial Sequence: Synthetic oligonucleotide
  Sense strand starting at position 1254 of SEQ ID NO: 1328
uggaaaguuuaguuacugu

SEQ ID NO: 105257 - RNA, 19 nt, Artificial Sequence
  Description of Artificial Sequence: Synthetic oligonucleotide
  Antisense strand to SEQ ID NO: 105256
acaguaacuaaacuuucca

SEQ ID NO: 105258 - RNA, 19 nt, Artificial Sequence
  Description of Artificial Sequence: Synthetic oligonucleotide
  Sense strand starting at position 1105 of SEQ ID NO: 1328
uuuaaauaguucucugagu

SEQ ID NO: 105259 - RNA, 19 nt, Artificial Sequence
  Description of Artificial Sequence: Synthetic oligonucleotide
  Antisense strand to SEQ ID NO: 105258
acucagagaacuauuuaaa

SEQ ID NO: 105260 - RNA, 19 nt, Artificial Sequence
  Description of Artificial Sequence: Synthetic oligonucleotide
  Sense strand starting at position 1034 of SEQ ID NO: 1328
ugagucuaugcauauugca

SEQ ID NO: 105261 - RNA, 19 nt, Artificial Sequence
  Description of Artificial Sequence: Synthetic oligonucleotide
  Antisense strand to SEQ ID NO: 105260
ugcaauaugcauagacuca

SEQ ID NO: 105262 - RNA, 19 nt, Artificial Sequence
  Description of Artificial Sequence: Synthetic oligonucleotide
  Sense strand starting at position 961 of SEQ ID NO: 1328
ucagaaucgcuugaaauua

SEQ ID NO: 105263 - RNA, 19 nt, Artificial Sequence
  Description of Artificial Sequence: Synthetic oligonucleotide
  Antisense strand to SEQ ID NO: 105262
uaauuucaagcgauucuga

SEQ ID NO: 105264 - RNA, 19 nt, Artificial Sequence
  Description of Artificial Sequence: Synthetic oligonucleotide
  Sense strand starting at position 960 of SEQ ID NO: 1328
aucagaaucgcuugaaauu

SEQ ID NO: 105265 - RNA, 19 nt, Artificial Sequence
  Description of Artificial Sequence: Synthetic oligonucleotide
  Antisense strand to SEQ ID NO: 105264
aauuucaagcgauucugau

SEQ ID NO: 105266 - RNA, 19 nt, Artificial Sequence
  Description of Artificial Sequence: Synthetic oligonucleotide
  Sense strand starting at position 958 of SEQ ID NO: 1328
acaucagaaucgcuugaaa

SEQ ID NO: 105267 - RNA, 19 nt, Artificial Sequence
  Description of Artificial Sequence: Synthetic oligonucleotide
  Antisense strand to SEQ ID NO: 105266
uuucaagcgauucugaugu

SEQ ID NO: 105268 - RNA, 19 nt, Artificial Sequence
  Description of Artificial Sequence: Synthetic oligonucleotide
  Sense strand starting at position 903 of SEQ ID NO: 1328
cguucaguucucgugcuaa

SEQ ID NO: 105269 - RNA, 19 nt, Artificial Sequence
  Description of Artificial Sequence: Synthetic oligonucleotide
  Antisense strand to SEQ ID NO: 105268
uuagcacgagaacugaacg

SEQ ID NO: 105270 - RNA, 19 nt, Artificial Sequence
  Description of Artificial Sequence: Synthetic oligonucleotide
  Sense strand starting at position 875 of SEQ ID NO: 1328
ucuagagcucguuauaaag

SEQ ID NO: 105271 - RNA, 19 nt, Artificial Sequence
  Description of Artificial Sequence: Synthetic oligonucleotide
  Antisense strand to SEQ ID NO: 105270
cuuuauaacgagcucuaga

SEQ ID NO: 105272 - RNA, 19 nt, Artificial Sequence
  Description of Artificial Sequence: Synthetic oligonucleotide
  Sense strand starting at position 833 of SEQ ID NO: 1328
guguauuuguccucaaauu

SEQ ID NO: 105273 - RNA, 19 nt, Artificial Sequence
  Description of Artificial Sequence: Synthetic oligonucleotide
  Antisense strand to SEQ ID NO: 105272
aauuugaggacaaauacac

SEQ ID NO: 105274 - RNA, 19 nt, Artificial Sequence
  Description of Artificial Sequence: Synthetic oligonucleotide
  Sense strand starting at position 710 of SEQ ID NO: 1328
gcguuacgaauuuaguauu

SEQ ID NO: 105275 - RNA, 19 nt, Artificial Sequence
  Description of Artificial Sequence: Synthetic oligonucleotide
  Antisense strand to SEQ ID NO: 105274
aauacuaaauucguaacgc

SEQ ID NO: 105276 - RNA, 19 nt, Artificial Sequence
  Description of Artificial Sequence: Synthetic oligonucleotide
  Sense strand starting at position 701 of SEQ ID NO: 1328
uuuccuugugcguuacgaa

SEQ ID NO: 105277 - RNA, 19 nt, Artificial Sequence
  Description of Artificial Sequence: Synthetic oligonucleotide
  Antisense strand to SEQ ID NO: 105276
uucguaacgcacaaggaaa

SEQ ID NO: 105278 - RNA, 19 nt, Artificial Sequence
  Description of Artificial Sequence: Synthetic oligonucleotide
  Sense strand starting at position 695 of SEQ ID NO: 1328
gauaaauuuccuugugcgu

SEQ ID NO: 105279 - RNA, 19 nt, Artificial Sequence
  Description of Artificial Sequence: Synthetic oligonucleotide
  Antisense strand to SEQ ID NO: 105278
acgcacaaggaaauuuauc

SEQ ID NO: 105280 - RNA, 19 nt, Artificial Sequence
  Description of Artificial Sequence: Synthetic oligonucleotide
  Sense strand starting at position 682 of SEQ ID NO: 1328
ccgguuaaccucugauaaa

SEQ ID NO: 105281 - RNA, 19 nt, Artificial Sequence
  Description of Artificial Sequence: Synthetic oligonucleotide
  Antisense strand to SEQ ID NO: 105280
uuuaucagagguuaaccgg

SEQ ID NO: 105282 - RNA, 19 nt, Artificial Sequence
  Description of Artificial Sequence: Synthetic oligonucleotide
  Sense strand starting at position 670 of SEQ ID NO: 1328
ucaagagagucaccgguua

SEQ ID NO: 105283 - RNA, 19 nt, Artificial Sequence
  Description of Artificial Sequence: Synthetic oligonucleotide
  Antisense strand to SEQ ID NO: 105282
uaaccggugacucucuuga

SEQ ID NO: 105284 - RNA, 19 nt, Artificial Sequence
  Description of Artificial Sequence: Synthetic oligonucleotide
  Sense strand starting at position 558 of SEQ ID NO: 1328
cucucauagggagguuuau

SEQ ID NO: 105285 - RNA, 19 nt, Artificial Sequence
  Description of Artificial Sequence: Synthetic oligonucleotide
  Antisense strand to SEQ ID NO: 105284
auaaaccucccuaugagag

SEQ ID NO: 105286 - RNA, 19 nt, Artificial Sequence
  Description of Artificial Sequence: Synthetic oligonucleotide
  Sense strand starting at position 467 of SEQ ID NO: 1328
uagggagguuuacauuuau

SEQ ID NO: 105287 - RNA, 19 nt, Artificial Sequence
  Description of Artificial Sequence: Synthetic oligonucleotide
  Antisense strand to SEQ ID NO: 105286
auaaauguaaaccucccua

SEQ ID NO: 105288 - RNA, 19 nt, Artificial Sequence
  Description of Artificial Sequence: Synthetic oligonucleotide
  Sense strand starting at position 4 of SEQ ID NO: 1328
auuguacgccaguaaauua

SEQ ID NO: 105289 - RNA, 19 nt, Artificial Sequence
  Description of Artificial Sequence: Synthetic oligonucleotide
  Antisense strand to SEQ ID NO: 105288
uaauuuacuggcguacaau

SEQ ID NO: 105290 - RNA, 19 nt, Artificial Sequence
  Description of Artificial Sequence: Synthetic oligonucleotide
  Sense strand starting at position 1 of SEQ ID NO: 1328
aagauuguacgccaguaaa

SEQ ID NO: 105291 - RNA, 19 nt, Artificial Sequence
  Description of Artificial Sequence: Synthetic oligonucleotide
  Antisense strand to SEQ ID NO: 105290
uuuacuggcguacaaucuu

SEQ ID NO: 105292 - RNA, 19 nt, Artificial Sequence
  Description of Artificial Sequence: Synthetic oligonucleotide
  Sense strand starting at position 3759 of SEQ ID NO: 1329
gguaguaauaggcaauaau

SEQ ID NO: 105293 - RNA, 19 nt, Artificial Sequence
  Description of Artificial Sequence: Synthetic oligonucleotide
  Antisense strand to SEQ ID NO: 105292
auuauugccuauuacuacc

SEQ ID NO: 105294 - RNA, 19 nt, Artificial Sequence
  Description of Artificial Sequence: Synthetic oligonucleotide
  Sense strand starting at position 3749 of SEQ ID NO: 1329
guuccuggaagguaguaau

SEQ ID NO: 105295 - RNA, 19 nt, Artificial Sequence
  Description of Artificial Sequence: Synthetic oligonucleotide
  Antisense strand to SEQ ID NO: 105294
auuacuaccuuccaggaac

SEQ ID NO: 105296 - RNA, 19 nt, Artificial Sequence
  Description of Artificial Sequence: Synthetic oligonucleotide
  Sense strand starting at position 3711 of SEQ ID NO: 1329
gcuguuucuguguuuccaa

SEQ ID NO: 105297 - RNA, 19 nt, Artificial Sequence
  Description of Artificial Sequence: Synthetic oligonucleotide
  Antisense strand to SEQ ID NO: 105296
uuggaaacacagaaacagc

SEQ ID NO: 105298 - RNA, 19 nt, Artificial Sequence
  Description of Artificial Sequence: Synthetic oligonucleotide
  Sense strand starting at position 3455 of SEQ ID NO: 1329
uacauucccgugggagaua

SEQ ID NO: 105299 - RNA, 19 nt, Artificial Sequence
  Description of Artificial Sequence: Synthetic oligonucleotide
  Antisense strand to SEQ ID NO: 105298
uaucucccacgggaaugua

SEQ ID NO: 105300 - RNA, 19 nt, Artificial Sequence
  Description of Artificial Sequence: Synthetic oligonucleotide
  Sense strand starting at position 3454 of SEQ ID NO: 1329
cuacauucccgugggagau

SEQ ID NO: 105301 - RNA, 19 nt, Artificial Sequence
  Description of Artificial Sequence: Synthetic oligonucleotide
  Antisense strand to SEQ ID NO: 105300
aucucccacgggaauguag

SEQ ID NO: 105302 - RNA, 19 nt, Artificial Sequence
  Description of Artificial Sequence: Synthetic oligonucleotide
  Sense strand starting at position 3453 of SEQ ID NO: 1329
ccuacauucccgugggaga

SEQ ID NO: 105303 - RNA, 19 nt, Artificial Sequence
  Description of Artificial Sequence: Synthetic oligonucleotide
  Antisense strand to SEQ ID NO: 105302
ucucccacgggaauguagg

SEQ ID NO: 105304 - RNA, 19 nt, Artificial Sequence
  Description of Artificial Sequence: Synthetic oligonucleotide
  Sense strand starting at position 3415 of SEQ ID NO: 1329
acagauuggccaggacaca

SEQ ID NO: 105305 - RNA, 19 nt, Artificial Sequence
  Description of Artificial Sequence: Synthetic oligonucleotide
  Antisense strand to SEQ ID NO: 105304
uguguccuggccaaucugu

SEQ ID NO: 105306 - RNA, 19 nt, Artificial Sequence
  Description of Artificial Sequence: Synthetic oligonucleotide
  Sense strand starting at position 3333 of SEQ ID NO: 1329
gugggaugggccgauggau

SEQ ID NO: 105307 - RNA, 19 nt, Artificial Sequence
  Description of Artificial Sequence: Synthetic oligonucleotide
  Antisense strand to SEQ ID NO: 105306
auccaucggcccaucccac

SEQ ID NO: 105308 - RNA, 19 nt, Artificial Sequence
  Description of Artificial Sequence: Synthetic oligonucleotide
  Sense strand starting at position 3049 of SEQ ID NO: 1329
gaaauuauggccuggugga

SEQ ID NO: 105309 - RNA, 19 nt, Artificial Sequence
  Description of Artificial Sequence: Synthetic oligonucleotide
  Antisense strand to SEQ ID NO: 105308
uccaccaggccauaauuuc

SEQ ID NO: 105310 - RNA, 19 nt, Artificial Sequence
  Description of Artificial Sequence: Synthetic oligonucleotide
  Sense strand starting at position 3035 of SEQ ID NO: 1329
ugccuagaguuggugaaau

SEQ ID NO: 105311 - RNA, 19 nt, Artificial Sequence
  Description of Artificial Sequence: Synthetic oligonucleotide
  Antisense strand to SEQ ID NO: 105310
auuucaccaacucuaggca

SEQ ID NO: 105312 - RNA, 19 nt, Artificial Sequence
  Description of Artificial Sequence: Synthetic oligonucleotide
  Sense strand starting at position 3034 of SEQ ID NO: 1329
cugccuagaguuggugaaa

SEQ ID NO: 105313 - RNA, 19 nt, Artificial Sequence
  Description of Artificial Sequence: Synthetic oligonucleotide
  Antisense strand to SEQ ID NO: 105312
uuucaccaacucuaggcag

SEQ ID NO: 105314 - RNA, 19 nt, Artificial Sequence
  Description of Artificial Sequence: Synthetic oligonucleotide
  Sense strand starting at position 3026 of SEQ ID NO: 1329
acuuaagacugccuagagu

SEQ ID NO: 105315 - RNA, 19 nt, Artificial Sequence
  Description of Artificial Sequence: Synthetic oligonucleotide
  Antisense strand to SEQ ID NO: 105314
acucuaggcagucuuaagu

SEQ ID NO: 105316 - RNA, 19 nt, Artificial Sequence
  Description of Artificial Sequence: Synthetic oligonucleotide
  Sense strand starting at position 2909 of SEQ ID NO: 1329
cugucuccauccucuuaga

SEQ ID NO: 105317 - RNA, 19 nt, Artificial Sequence
  Description of Artificial Sequence: Synthetic oligonucleotide
  Antisense strand to SEQ ID NO: 105316
ucuaagaggauggagacag

SEQ ID NO: 105318 - RNA, 19 nt, Artificial Sequence
  Description of Artificial Sequence: Synthetic oligonucleotide
  Sense strand starting at position 2658 of SEQ ID NO: 1329
ugaugccuccagggugauu

SEQ ID NO: 105319 - RNA, 19 nt, Artificial Sequence
  Description of Artificial Sequence: Synthetic oligonucleotide
  Antisense strand to SEQ ID NO: 105318
aaucacccuggaggcauca

SEQ ID NO: 105320 - RNA, 19 nt, Artificial Sequence
  Description of Artificial Sequence: Synthetic oligonucleotide
  Sense strand starting at position 2428 of SEQ ID NO: 1329
cugccagcuguggaauaau

SEQ ID NO: 105321 - RNA, 19 nt, Artificial Sequence
  Description of Artificial Sequence: Synthetic oligonucleotide
  Antisense strand to SEQ ID NO: 105320
auuauuccacagcuggcag

SEQ ID NO: 105322 - RNA, 19 nt, Artificial Sequence
  Description of Artificial Sequence: Synthetic oligonucleotide
  Sense strand starting at position 2208 of SEQ ID NO: 1329
acugaccacugcuuuagau

SEQ ID NO: 105323 - RNA, 19 nt, Artificial Sequence
  Description of Artificial Sequence: Synthetic oligonucleotide
  Antisense strand to SEQ ID NO: 105322
aucuaaagcaguggucagu

SEQ ID NO: 105324 - RNA, 19 nt, Artificial Sequence
  Description of Artificial Sequence: Synthetic oligonucleotide
  Sense strand starting at position 1086 of SEQ ID NO: 1329
gagaaaggaucuccgcaag

SEQ ID NO: 105325 - RNA, 19 nt, Artificial Sequence
  Description of Artificial Sequence: Synthetic oligonucleotide
  Antisense strand to SEQ ID NO: 105324
cuugcggagauccuuucuc

SEQ ID NO: 105326 - RNA, 19 nt, Artificial Sequence
  Description of Artificial Sequence: Synthetic oligonucleotide
  Sense strand starting at position 1038 of SEQ ID NO: 1329
gacaguccagccuaguaaa

SEQ ID NO: 105327 - RNA, 19 nt, Artificial Sequence
  Description of Artificial Sequence: Synthetic oligonucleotide
  Antisense strand to SEQ ID NO: 105326
uuuacuaggcuggacuguc

SEQ ID NO: 105328 - RNA, 19 nt, Artificial Sequence
  Description of Artificial Sequence: Synthetic oligonucleotide
  Sense strand starting at position 1023 of SEQ ID NO: 1329
agaguaggucccugagaca

SEQ ID NO: 105329 - RNA, 19 nt, Artificial Sequence
  Description of Artificial Sequence: Synthetic oligonucleotide
  Antisense strand to SEQ ID NO: 105328
ugucucagggaccuacucu

SEQ ID NO: 105330 - RNA, 19 nt, Artificial Sequence
  Description of Artificial Sequence: Synthetic oligonucleotide
  Sense strand starting at position 946 of SEQ ID NO: 1329
acaauagccucaguaaaug

SEQ ID NO: 105331 - RNA, 19 nt, Artificial Sequence
  Description of Artificial Sequence: Synthetic oligonucleotide
  Antisense strand to SEQ ID NO: 105330
cauuuacugaggcuauugu

SEQ ID NO: 105332 - RNA, 19 nt, Artificial Sequence
  Description of Artificial Sequence: Synthetic oligonucleotide
  Sense strand starting at position 928 of SEQ ID NO: 1329
agucguuuggucuaacaaa

SEQ ID NO: 105333 - RNA, 19 nt, Artificial Sequence
  Description of Artificial Sequence: Synthetic oligonucleotide
  Antisense strand to SEQ ID NO: 105332
uuuguuagaccaaacgacu

SEQ ID NO: 105334 - RNA, 19 nt, Artificial Sequence
  Description of Artificial Sequence: Synthetic oligonucleotide
  Sense strand starting at position 884 of SEQ ID NO: 1329
aaggaagucugauugcuaa

SEQ ID NO: 105335 - RNA, 19 nt, Artificial Sequence
  Description of Artificial Sequence: Synthetic oligonucleotide
  Antisense strand to SEQ ID NO: 105334
uuagcaaucagacuuccuu

SEQ ID NO: 105336 - RNA, 19 nt, Artificial Sequence
  Description of Artificial Sequence: Synthetic oligonucleotide
  Sense strand starting at position 809 of SEQ ID NO: 1329
ccuggcaauguuuaauauu

SEQ ID NO: 105337 - RNA, 19 nt, Artificial Sequence
  Description of Artificial Sequence: Synthetic oligonucleotide
  Antisense strand to SEQ ID NO: 105336
aauauuaaacauugccagg

SEQ ID NO: 105338 - RNA, 19 nt, Artificial Sequence
  Description of Artificial Sequence: Synthetic oligonucleotide
  Sense strand starting at position 702 of SEQ ID NO: 1329
gucuguuccuacuuuaacu

SEQ ID NO: 105339 - RNA, 19 nt, Artificial Sequence
  Description of Artificial Sequence: Synthetic oligonucleotide
  Antisense strand to SEQ ID NO: 105338
aguuaaaguaggaacagac

SEQ ID NO: 105340 - RNA, 19 nt, Artificial Sequence
  Description of Artificial Sequence: Synthetic oligonucleotide
  Sense strand starting at position 690 of SEQ ID NO: 1329
gcaguaucuguggucuguu

SEQ ID NO: 105341 - RNA, 19 nt, Artificial Sequence
  Description of Artificial Sequence: Synthetic oligonucleotide
  Antisense strand to SEQ ID NO: 105340
aacagaccacagauacugc

SEQ ID NO: 105342 - RNA, 19 nt, Artificial Sequence
  Description of Artificial Sequence: Synthetic oligonucleotide
  Sense strand starting at position 614 of SEQ ID NO: 1329
gugaacaucuauccucaga

SEQ ID NO: 105343 - RNA, 19 nt, Artificial Sequence
  Description of Artificial Sequence: Synthetic oligonucleotide
  Antisense strand to SEQ ID NO: 105342
ucugaggauagauguucac

SEQ ID NO: 105344 - RNA, 19 nt, Artificial Sequence
  Description of Artificial Sequence: Synthetic oligonucleotide
  Sense strand starting at position 548 of SEQ ID NO: 1329
caugucugugauuacagga

SEQ ID NO: 105345 - RNA, 19 nt, Artificial Sequence
  Description of Artificial Sequence: Synthetic oligonucleotide
  Antisense strand to SEQ ID NO: 105344
uccuguaaucacagacaug

SEQ ID NO: 105346 - RNA, 19 nt, Artificial Sequence
  Description of Artificial Sequence: Synthetic oligonucleotide
  Sense strand starting at position 544 of SEQ ID NO: 1329
cggacaugucugugauuac

SEQ ID NO: 105347 - RNA, 19 nt, Artificial Sequence
  Description of Artificial Sequence: Synthetic oligonucleotide
  Antisense strand to SEQ ID NO: 105346
guaaucacagacauguccg

SEQ ID NO: 105348 - RNA, 19 nt, Artificial Sequence
  Description of Artificial Sequence: Synthetic oligonucleotide
  Sense strand starting at position 543 of SEQ ID NO: 1329
ccggacaugucugugauua

SEQ ID NO: 105349 - RNA, 19 nt, Artificial Sequence
  Description of Artificial Sequence: Synthetic oligonucleotide
  Antisense strand to SEQ ID NO: 105348
uaaucacagacauguccgg

SEQ ID NO: 105350 - RNA, 19 nt, Artificial Sequence
  Description of Artificial Sequence: Synthetic oligonucleotide
  Sense strand starting at position 542 of SEQ ID NO: 1329
uccggacaugucugugauu

SEQ ID NO: 105351 - RNA, 19 nt, Artificial Sequence
  Description of Artificial Sequence: Synthetic oligonucleotide
  Antisense strand to SEQ ID NO: 105350
aaucacagacauguccgga

SEQ ID NO: 105352 - RNA, 19 nt, Artificial Sequence
  Description of Artificial Sequence: Synthetic oligonucleotide
  Sense strand starting at position 536 of SEQ ID NO: 1329
agagauuccggacaugucu

SEQ ID NO: 105353 - RNA, 19 nt, Artificial Sequence
  Description of Artificial Sequence: Synthetic oligonucleotide
  Antisense strand to SEQ ID NO: 105352
agacauguccggaaucucu

SEQ ID NO: 105354 - RNA, 19 nt, Artificial Sequence
  Description of Artificial Sequence: Synthetic oligonucleotide
  Sense strand starting at position 488 of SEQ ID NO: 1329
gggagucacuaccauuucu

SEQ ID NO: 105355 - RNA, 19 nt, Artificial Sequence
  Description of Artificial Sequence: Synthetic oligonucleotide
  Antisense strand to SEQ ID NO: 105354
agaaaugguagugacuccc

SEQ ID NO: 105356 - RNA, 19 nt, Artificial Sequence
  Description of Artificial Sequence: Synthetic oligonucleotide
  Sense strand starting at position 461 of SEQ ID NO: 1329
uuaguaucuuagucucgaa

SEQ ID NO: 105357 - RNA, 19 nt, Artificial Sequence
  Description of Artificial Sequence: Synthetic oligonucleotide
  Antisense strand to SEQ ID NO: 105356
uucgagacuaagauacuaa

SEQ ID NO: 105358 - RNA, 19 nt, Artificial Sequence
  Description of Artificial Sequence: Synthetic oligonucleotide
  Sense strand starting at position 460 of SEQ ID NO: 1329
cuuaguaucuuagucucga

SEQ ID NO: 105359 - RNA, 19 nt, Artificial Sequence
  Description of Artificial Sequence: Synthetic oligonucleotide
  Antisense strand to SEQ ID NO: 105358
ucgagacuaagauacuaag

SEQ ID NO: 105360 - RNA, 19 nt, Artificial Sequence
  Description of Artificial Sequence: Synthetic oligonucleotide
  Sense strand starting at position 444 of SEQ ID NO: 1329
ugugccauucccuauacuu

SEQ ID NO: 105361 - RNA, 19 nt, Artificial Sequence
  Description of Artificial Sequence: Synthetic oligonucleotide
  Antisense strand to SEQ ID NO: 105360
aaguauagggaauggcaca

SEQ ID NO: 105362 - RNA, 19 nt, Artificial Sequence
  Description of Artificial Sequence: Synthetic oligonucleotide
  Sense strand starting at position 346 of SEQ ID NO: 1329
ggcauaggucugcagggaa

SEQ ID NO: 105363 - RNA, 19 nt, Artificial Sequence
  Description of Artificial Sequence: Synthetic oligonucleotide
  Antisense strand to SEQ ID NO: 105362
uucccugcagaccuaugcc

SEQ ID NO: 105364 - RNA, 19 nt, Artificial Sequence
  Description of Artificial Sequence: Synthetic oligonucleotide
  Sense strand starting at position 184 of SEQ ID NO: 1329
cccuuagcugccuagucau

SEQ ID NO: 105365 - RNA, 19 nt, Artificial Sequence
  Description of Artificial Sequence: Synthetic oligonucleotide
  Antisense strand to SEQ ID NO: 105364
augacuaggcagcuaaggg

SEQ ID NO: 105366 - RNA, 19 nt, Artificial Sequence
  Description of Artificial Sequence: Synthetic oligonucleotide
  Sense strand starting at position 151 of SEQ ID NO: 1329
uccugauauugagagggaa

SEQ ID NO: 105367 - RNA, 19 nt, Artificial Sequence
  Description of Artificial Sequence: Synthetic oligonucleotide
  Antisense strand to SEQ ID NO: 105366
uucccucucaauaucagga

SEQ ID NO: 105368 - RNA, 19 nt, Artificial Sequence
  Description of Artificial Sequence: Synthetic oligonucleotide
  Sense strand starting at position 141 of SEQ ID NO: 1329
caggcagaguuccugauau

SEQ ID NO: 105369 - RNA, 19 nt, Artificial Sequence
  Description of Artificial Sequence: Synthetic oligonucleotide
  Antisense strand to SEQ ID NO: 105368
auaucaggaacucugccug

SEQ ID NO: 105370 - RNA, 19 nt, Artificial Sequence
  Description of Artificial Sequence: Synthetic oligonucleotide
  Sense strand starting at position 10 of SEQ ID NO: 1329
guguauuguauagaauuga

SEQ ID NO: 105371 - RNA, 19 nt, Artificial Sequence
  Description of Artificial Sequence: Synthetic oligonucleotide
  Antisense strand to SEQ ID NO: 105370
ucaauucuauacaauacac

SEQ ID NO: 105372 - RNA, 19 nt, Artificial Sequence
  Description of Artificial Sequence: Synthetic oligonucleotide
  Sense strand starting at position 1244 of SEQ ID NO: 1330
gaguacgcugcuggucaua

SEQ ID NO: 105373 - RNA, 19 nt, Artificial Sequence
  Description of Artificial Sequence: Synthetic oligonucleotide
  Antisense strand to SEQ ID NO: 105372
uaugaccagcagcguacuc

SEQ ID NO: 105374 - RNA, 19 nt, Artificial Sequence
  Description of Artificial Sequence: Synthetic oligonucleotide
  Sense strand starting at position 1255 of SEQ ID NO: 1330
uggucauacucacagcauu

SEQ ID NO: 105375 - RNA, 19 nt, Artificial Sequence
  Description of Artificial Sequence: Synthetic oligonucleotide
  Antisense strand to SEQ ID NO: 105374
aaugcugugaguaugacca

SEQ ID NO: 105376 - RNA, 19 nt, Artificial Sequence
  Description of Artificial Sequence: Synthetic oligonucleotide
  Sense strand starting at position 1266 of SEQ ID NO: 1330
acagcauucuucucaguag

SEQ ID NO: 105377 - RNA, 19 nt, Artificial Sequence
  Description of Artificial Sequence: Synthetic oligonucleotide
  Antisense strand to SEQ ID NO: 105376
cuacugagaagaaugcugu

SEQ ID NO: 105378 - RNA, 19 nt, Artificial Sequence
  Description of Artificial Sequence: Synthetic oligonucleotide
  Sense strand starting at position 1269 of SEQ ID NO: 1330
gcauucuucucaguagagc

SEQ ID NO: 105379 - RNA, 19 nt, Artificial Sequence
  Description of Artificial Sequence: Synthetic oligonucleotide
  Antisense strand to SEQ ID NO: 105378
gcucuacugagaagaaugc

SEQ ID NO: 105380 - RNA, 19 nt, Artificial Sequence
  Description of Artificial Sequence: Synthetic oligonucleotide
  Sense strand starting at position 1385 of SEQ ID NO: 1330
ggcugugguagcuguaaga

SEQ ID NO: 105381 - RNA, 19 nt, Artificial Sequence
  Description of Artificial Sequence: Synthetic oligonucleotide
  Antisense strand to SEQ ID NO: 105380
ucuuacagcuaccacagcc

SEQ ID NO: 105382 - RNA, 19 nt, Artificial Sequence
  Description of Artificial Sequence: Synthetic oligonucleotide
  Sense strand starting at position 1395 of SEQ ID NO: 1330
gcuguaagaaguuaaaguc

SEQ ID NO: 105383 - RNA, 19 nt, Artificial Sequence
  Description of Artificial Sequence: Synthetic oligonucleotide
  Antisense strand to SEQ ID NO: 105382
gacuuuaacuucuuacagc

SEQ ID NO: 105384 - RNA, 19 nt, Artificial Sequence
  Description of Artificial Sequence: Synthetic oligonucleotide
  Sense strand starting at position 1403 of SEQ ID NO: 1330
aaguuaaagucauaggguu

SEQ ID NO: 105385 - RNA, 19 nt, Artificial Sequence
  Description of Artificial Sequence: Synthetic oligonucleotide
  Antisense strand to SEQ ID NO: 105384
aacccuaugacuuuaacuu

SEQ ID NO: 105386 - RNA, 19 nt, Artificial Sequence
  Description of Artificial Sequence: Synthetic oligonucleotide
  Sense strand starting at position 1416 of SEQ ID NO: 1330
aggguugggucuuuaugaa

SEQ ID NO: 105387 - RNA, 19 nt, Artificial Sequence
  Description of Artificial Sequence: Synthetic oligonucleotide
  Antisense strand to SEQ ID NO: 105386
uucauaaagacccaacccu

SEQ ID NO: 105388 - RNA, 19 nt, Artificial Sequence
  Description of Artificial Sequence: Synthetic oligonucleotide
  Sense strand starting at position 1420 of SEQ ID NO: 1330
uugggucuuuaugaaggaa

SEQ ID NO: 105389 - RNA, 19 nt, Artificial Sequence
  Description of Artificial Sequence: Synthetic oligonucleotide
  Antisense strand to SEQ ID NO: 105388
uuccuucauaaagacccaa

SEQ ID NO: 105390 - RNA, 19 nt, Artificial Sequence
  Description of Artificial Sequence: Synthetic oligonucleotide
  Sense strand starting at position 1748 of SEQ ID NO: 1330
gcagccucugucugcaauu

SEQ ID NO: 105391 - RNA, 19 nt, Artificial Sequence
  Description of Artificial Sequence: Synthetic oligonucleotide
  Antisense strand to SEQ ID NO: 105390
aauugcagacagaggcugc

SEQ ID NO: 105392 - RNA, 19 nt, Artificial Sequence
  Description of Artificial Sequence: Synthetic oligonucleotide
  Sense strand starting at position 1922 of SEQ ID NO: 1330
gugucauggugguggugaa

SEQ ID NO: 105393 - RNA, 19 nt, Artificial Sequence
  Description of Artificial Sequence: Synthetic oligonucleotide
  Antisense strand to SEQ ID NO: 105392
uucaccaccaccaugacac

SEQ ID NO: 105394 - RNA, 19 nt, Artificial Sequence
  Description of Artificial Sequence: Synthetic oligonucleotide
  Sense strand starting at position 1923 of SEQ ID NO: 1330
ugucauggugguggugaaa

SEQ ID NO: 105395 - RNA, 19 nt, Artificial Sequence
  Description of Artificial Sequence: Synthetic oligonucleotide
  Antisense strand to SEQ ID NO: 105394
uuucaccaccaccaugaca

SEQ ID NO: 105396 - RNA, 19 nt, Artificial Sequence
  Description of Artificial Sequence: Synthetic oligonucleotide
  Sense strand starting at position 2069 of SEQ ID NO: 1330
gcaggugacaggugacaaa

SEQ ID NO: 105397 - RNA, 19 nt, Artificial Sequence
  Description of Artificial Sequence: Synthetic oligonucleotide
  Antisense strand to SEQ ID NO: 105396
uuugucaccugucaccugc

SEQ ID NO: 105398 - RNA, 19 nt, Artificial Sequence
  Description of Artificial Sequence: Synthetic oligonucleotide
  Sense strand starting at position 2443 of SEQ ID NO: 1330
gcuggauaaugaguggacu

SEQ ID NO: 105399 - RNA, 19 nt, Artificial Sequence
  Description of Artificial Sequence: Synthetic oligonucleotide
  Antisense strand to SEQ ID NO: 105398
aguccacucauuauccagc

SEQ ID NO: 105400 - RNA, 19 nt, Artificial Sequence
  Description of Artificial Sequence: Synthetic oligonucleotide
  Sense strand starting at position 2544 of SEQ ID NO: 1330
gcaguucuacccugaaacc

SEQ ID NO: 105401 - RNA, 19 nt, Artificial Sequence
  Description of Artificial Sequence: Synthetic oligonucleotide
  Antisense strand to SEQ ID NO: 105400
gguuucaggguagaacugc

SEQ ID NO: 105402 - RNA, 19 nt, Artificial Sequence
  Description of Artificial Sequence: Synthetic oligonucleotide
  Sense strand starting at position 2599 of SEQ ID NO: 1330
ggguucccuccuuggagaa

SEQ ID NO: 105403 - RNA, 19 nt, Artificial Sequence
  Description of Artificial Sequence: Synthetic oligonucleotide
  Antisense strand to SEQ ID NO: 105402
uucuccaaggagggaaccc

SEQ ID NO: 105404 - RNA, 19 nt, Artificial Sequence
  Description of Artificial Sequence: Synthetic oligonucleotide
  Sense strand starting at position 2600 of SEQ ID NO: 1330
gguucccuccuuggagaaa

SEQ ID NO: 105405 - RNA, 19 nt, Artificial Sequence
  Description of Artificial Sequence: Synthetic oligonucleotide
  Antisense strand to SEQ ID NO: 105404
uuucuccaaggagggaacc

SEQ ID NO: 105406 - RNA, 19 nt, Artificial Sequence
  Description of Artificial Sequence: Synthetic oligonucleotide
  Sense strand starting at position 2636 of SEQ ID NO: 1330
ggaagaaauuuccacuuaa

SEQ ID NO: 105407 - RNA, 19 nt, Artificial Sequence
  Description of Artificial Sequence: Synthetic oligonucleotide
  Antisense strand to SEQ ID NO: 105406
uuaaguggaaauuucuucc

SEQ ID NO: 105408 - RNA, 19 nt, Artificial Sequence
  Description of Artificial Sequence: Synthetic oligonucleotide
  Sense strand starting at position 2961 of SEQ ID NO: 1330
gguggcgucuggaggaaau

SEQ ID NO: 105409 - RNA, 19 nt, Artificial Sequence
  Description of Artificial Sequence: Synthetic oligonucleotide
  Antisense strand to SEQ ID NO: 105408
auuuccuccagacgccacc

SEQ ID NO: 105410 - RNA, 19 nt, Artificial Sequence
  Description of Artificial Sequence: Synthetic oligonucleotide
  Sense strand starting at position 2996 of SEQ ID NO: 1330
gguccugagguauguggaa

SEQ ID NO: 105411 - RNA, 19 nt, Artificial Sequence
  Description of Artificial Sequence: Synthetic oligonucleotide
  Antisense strand to SEQ ID NO: 105410
uuccacauaccucaggacc

SEQ ID NO: 105412 - RNA, 19 nt, Artificial Sequence
  Description of Artificial Sequence: Synthetic oligonucleotide
  Sense strand starting at position 3074 of SEQ ID NO: 1330
cugugugggccguuaugua

SEQ ID NO: 105413 - RNA, 19 nt, Artificial Sequence
  Description of Artificial Sequence: Synthetic oligonucleotide
  Antisense strand to SEQ ID NO: 105412
uacauaacggcccacacag

SEQ ID NO: 105414 - RNA, 19 nt, Artificial Sequence
  Description of Artificial Sequence: Synthetic oligonucleotide
  Sense strand starting at position 3082 of SEQ ID NO: 1330
gccguuauguacuuaagag

SEQ ID NO: 105415 - RNA, 19 nt, Artificial Sequence
  Description of Artificial Sequence: Synthetic oligonucleotide
  Antisense strand to SEQ ID NO: 105414
cucuuaaguacauaacggc

SEQ ID NO: 105416 - RNA, 19 nt, Artificial Sequence
  Description of Artificial Sequence: Synthetic oligonucleotide
  Sense strand starting at position 3083 of SEQ ID NO: 1330
ccguuauguacuuaagagg

SEQ ID NO: 105417 - RNA, 19 nt, Artificial Sequence
  Description of Artificial Sequence: Synthetic oligonucleotide
  Antisense strand to SEQ ID NO: 105416
ccucuuaaguacauaacgg

SEQ ID NO: 105418 - RNA, 19 nt, Artificial Sequence
  Description of Artificial Sequence: Synthetic oligonucleotide
  Sense strand starting at position 3647 of SEQ ID NO: 1330
gaagcaguuccgccuguau

SEQ ID NO: 105419 - RNA, 19 nt, Artificial Sequence
  Description of Artificial Sequence: Synthetic oligonucleotide
  Antisense strand to SEQ ID NO: 105418
auacaggcggaacugcuuc

SEQ ID NO: 105420 - RNA, 19 nt, Artificial Sequence
  Description of Artificial Sequence: Synthetic oligonucleotide
  Sense strand starting at position 3736 of SEQ ID NO: 1330
gggauuggagcgcaucaga

SEQ ID NO: 105421 - RNA, 19 nt, Artificial Sequence
  Description of Artificial Sequence: Synthetic oligonucleotide
  Antisense strand to SEQ ID NO: 105420
ucugaugcgcuccaauccc

SEQ ID NO: 105422 - RNA, 19 nt, Artificial Sequence
  Description of Artificial Sequence: Synthetic oligonucleotide
  Sense strand starting at position 3 of SEQ ID NO: 1331
guuagucagguuuaggaau

SEQ ID NO: 105423 - RNA, 19 nt, Artificial Sequence
  Description of Artificial Sequence: Synthetic oligonucleotide
  Antisense strand to SEQ ID NO: 105422
auuccuaaaccugacuaac

SEQ ID NO: 105424 - RNA, 19 nt, Artificial Sequence
  Description of Artificial Sequence: Synthetic oligonucleotide
  Sense strand starting at position 209 of SEQ ID NO: 1331
ccagucagauagucacaau

SEQ ID NO: 105425 - RNA, 19 nt, Artificial Sequence
  Description of Artificial Sequence: Synthetic oligonucleotide
  Antisense strand to SEQ ID NO: 105424
auugugacuaucugacugg

SEQ ID NO: 105426 - RNA, 19 nt, Artificial Sequence
  Description of Artificial Sequence: Synthetic oligonucleotide
  Sense strand starting at position 775 of SEQ ID NO: 1331
guggcucacgccuuuacau

SEQ ID NO: 105427 - RNA, 19 nt, Artificial Sequence
  Description of Artificial Sequence: Synthetic oligonucleotide
  Antisense strand to SEQ ID NO: 105426
auguaaaggcgugagccac

SEQ ID NO: 105428 - RNA, 19 nt, Artificial Sequence
  Description of Artificial Sequence: Synthetic oligonucleotide
  Sense strand starting at position 819 of SEQ ID NO: 1331
gggagaucacccgacguca

SEQ ID NO: 105429 - RNA, 19 nt, Artificial Sequence
  Description of Artificial Sequence: Synthetic oligonucleotide
  Antisense strand to SEQ ID NO: 105428
ugacgucgggugaucuccc

SEQ ID NO: 105430 - RNA, 19 nt, Artificial Sequence
  Description of Artificial Sequence: Synthetic oligonucleotide
  Sense strand starting at position 1069 of SEQ ID NO: 1331
uuguguaaaccguaaagca

SEQ ID NO: 105431 - RNA, 19 nt, Artificial Sequence
  Description of Artificial Sequence: Synthetic oligonucleotide
  Antisense strand to SEQ ID NO: 105430
ugcuuuacgguuuacacaa

SEQ ID NO: 105432 - RNA, 19 nt, Artificial Sequence
  Description of Artificial Sequence: Synthetic oligonucleotide
  Sense strand starting at position 1132 of SEQ ID NO: 1331
aaaggaagcgucuguaaag

SEQ ID NO: 105433 - RNA, 19 nt, Artificial Sequence
  Description of Artificial Sequence: Synthetic oligonucleotide
  Antisense strand to SEQ ID NO: 105432
cuuuacagacgcuuccuuu

SEQ ID NO: 105434 - RNA, 19 nt, Artificial Sequence
  Description of Artificial Sequence: Synthetic oligonucleotide
  Sense strand starting at position 1156 of SEQ ID NO: 1331
aguggagugguucaguaaa

SEQ ID NO: 105435 - RNA, 19 nt, Artificial Sequence
  Description of Artificial Sequence: Synthetic oligonucleotide
  Antisense strand to SEQ ID NO: 105434
uuuacugaaccacuccacu

SEQ ID NO: 105436 - RNA, 19 nt, Artificial Sequence
  Description of Artificial Sequence: Synthetic oligonucleotide
  Sense strand starting at position 1158 of SEQ ID NO: 1331
uggagugguucaguaaaug

SEQ ID NO: 105437 - RNA, 19 nt, Artificial Sequence
  Description of Artificial Sequence: Synthetic oligonucleotide
  Antisense strand to SEQ ID NO: 105436
cauuuacugaaccacucca

SEQ ID NO: 105438 - RNA, 19 nt, Artificial Sequence
  Description of Artificial Sequence: Synthetic oligonucleotide
  Sense strand starting at position 1199 of SEQ ID NO: 1331
uccaucucccgcuagauau

SEQ ID NO: 105439 - RNA, 19 nt, Artificial Sequence
  Description of Artificial Sequence: Synthetic oligonucleotide
  Antisense strand to SEQ ID NO: 105438
auaucuagcgggagaugga

SEQ ID NO: 105440 - RNA, 19 nt, Artificial Sequence
  Description of Artificial Sequence: Synthetic oligonucleotide
  Sense strand starting at position 1209 of SEQ ID NO: 1331
gcuagauaucugcaugacu

SEQ ID NO: 105441 - RNA, 19 nt, Artificial Sequence
  Description of Artificial Sequence: Synthetic oligonucleotide
  Antisense strand to SEQ ID NO: 105440
agucaugcagauaucuagc

SEQ ID NO: 105442 - RNA, 19 nt, Artificial Sequence
  Description of Artificial Sequence: Synthetic oligonucleotide
  Sense strand starting at position 1242 of SEQ ID NO: 1331
cuaggcucugcucaaaugu

SEQ ID NO: 105443 - RNA, 19 nt, Artificial Sequence
  Description of Artificial Sequence: Synthetic oligonucleotide
  Antisense strand to SEQ ID NO: 105442
acauuugagcagagccuag

SEQ ID NO: 105444 - RNA, 19 nt, Artificial Sequence
  Description of Artificial Sequence: Synthetic oligonucleotide
  Sense strand starting at position 1347 of SEQ ID NO: 1331
uguuacaccgccugauuua

SEQ ID NO: 105445 - RNA, 19 nt, Artificial Sequence
  Description of Artificial Sequence: Synthetic oligonucleotide
  Antisense strand to SEQ ID NO: 105444
uaaaucaggcgguguaaca

SEQ ID NO: 105446 - RNA, 19 nt, Artificial Sequence
  Description of Artificial Sequence: Synthetic oligonucleotide
  Sense strand starting at position 1372 of SEQ ID NO: 1331
ugcugucuagucguacuaa

SEQ ID NO: 105447 - RNA, 19 nt, Artificial Sequence
  Description of Artificial Sequence: Synthetic oligonucleotide
  Antisense strand to SEQ ID NO: 105446
uuaguacgacuagacagca

SEQ ID NO: 105448 - RNA, 19 nt, Artificial Sequence
  Description of Artificial Sequence: Synthetic oligonucleotide
  Sense strand starting at position 1469 of SEQ ID NO: 1331
uuucgaguaaaguaaugaa

SEQ ID NO: 105449 - RNA, 19 nt, Artificial Sequence
  Description of Artificial Sequence: Synthetic oligonucleotide
  Antisense strand to SEQ ID NO: 105448
uucauuacuuuacucgaaa

SEQ ID NO: 105450 - RNA, 19 nt, Artificial Sequence
  Description of Artificial Sequence: Synthetic oligonucleotide
  Sense strand starting at position 1541 of SEQ ID NO: 1331
gccguuaucccgagcccga

SEQ ID NO: 105451 - RNA, 19 nt, Artificial Sequence
  Description of Artificial Sequence: Synthetic oligonucleotide
  Antisense strand to SEQ ID NO: 105450
ucgggcucgggauaacggc

SEQ ID NO: 105452 - RNA, 19 nt, Artificial Sequence
  Description of Artificial Sequence: Synthetic oligonucleotide
  Sense strand starting at position 1542 of SEQ ID NO: 1331
ccguuaucccgagcccgaa

SEQ ID NO: 105453 - RNA, 19 nt, Artificial Sequence
  Description of Artificial Sequence: Synthetic oligonucleotide
  Antisense strand to SEQ ID NO: 105452
uucgggcucgggauaacgg

SEQ ID NO: 105454 - RNA, 19 nt, Artificial Sequence
  Description of Artificial Sequence: Synthetic oligonucleotide
  Sense strand starting at position 2245 of SEQ ID NO: 1331
uggguuauuccaugucuuc

SEQ ID NO: 105455 - RNA, 19 nt, Artificial Sequence
  Description of Artificial Sequence: Synthetic oligonucleotide
  Antisense strand to SEQ ID NO: 105454
gaagacauggaauaaccca

SEQ ID NO: 105456 - RNA, 19 nt, Artificial Sequence
  Description of Artificial Sequence: Synthetic oligonucleotide
  Sense strand starting at position 2254 of SEQ ID NO: 1331
ccaugucuucgccauuaga

SEQ ID NO: 105457 - RNA, 19 nt, Artificial Sequence
  Description of Artificial Sequence: Synthetic oligonucleotide
  Antisense strand to SEQ ID NO: 105456
ucuaauggcgaagacaugg

SEQ ID NO: 105458 - RNA, 19 nt, Artificial Sequence
  Description of Artificial Sequence: Synthetic oligonucleotide
  Sense strand starting at position 2257 of SEQ ID NO: 1331
ugucuucgccauuagauug

SEQ ID NO: 105459 - RNA, 19 nt, Artificial Sequence
  Description of Artificial Sequence: Synthetic oligonucleotide
  Antisense strand to SEQ ID NO: 105458
caaucuaauggcgaagaca

SEQ ID NO: 105460 - RNA, 19 nt, Artificial Sequence
  Description of Artificial Sequence: Synthetic oligonucleotide
  Sense strand starting at position 2264 of SEQ ID NO: 1331
gccauuagauuggcaggaa

SEQ ID NO: 105461 - RNA, 19 nt, Artificial Sequence
  Description of Artificial Sequence: Synthetic oligonucleotide
  Antisense strand to SEQ ID NO: 105460
uuccugccaaucuaauggc

SEQ ID NO: 105462 - RNA, 19 nt, Artificial Sequence
  Description of Artificial Sequence: Synthetic oligonucleotide
  Sense strand starting at position 2310 of SEQ ID NO: 1331
ugaguaauauacguuuaag

SEQ ID NO: 105463 - RNA, 19 nt, Artificial Sequence
  Description of Artificial Sequence: Synthetic oligonucleotide
  Antisense strand to SEQ ID NO: 105462
cuuaaacguauauuacuca

SEQ ID NO: 105464 - RNA, 19 nt, Artificial Sequence
  Description of Artificial Sequence: Synthetic oligonucleotide
  Sense strand starting at position 2342 of SEQ ID NO: 1331
ucucaagacuuggaauuua

SEQ ID NO: 105465 - RNA, 19 nt, Artificial Sequence
  Description of Artificial Sequence: Synthetic oligonucleotide
  Antisense strand to SEQ ID NO: 105464
uaaauuccaagucuugaga

SEQ ID NO: 105466 - RNA, 19 nt, Artificial Sequence
  Description of Artificial Sequence: Synthetic oligonucleotide
  Sense strand starting at position 2403 of SEQ ID NO: 1331
uagggaaugaugugcucga

SEQ ID NO: 105467 - RNA, 19 nt, Artificial Sequence
  Description of Artificial Sequence: Synthetic oligonucleotide
  Antisense strand to SEQ ID NO: 105466
ucgagcacaucauucccua

SEQ ID NO: 105468 - RNA, 19 nt, Artificial Sequence
  Description of Artificial Sequence: Synthetic oligonucleotide
  Sense strand starting at position 2404 of SEQ ID NO: 1331
agggaaugaugugcucgaa

SEQ ID NO: 105469 - RNA, 19 nt, Artificial Sequence
  Description of Artificial Sequence: Synthetic oligonucleotide
  Antisense strand to SEQ ID NO: 105468
uucgagcacaucauucccu

SEQ ID NO: 105470 - RNA, 19 nt, Artificial Sequence
  Description of Artificial Sequence: Synthetic oligonucleotide
  Sense strand starting at position 2421 of SEQ ID NO: 1331
aagucuagugagugcuaga

SEQ ID NO: 105471 - RNA, 19 nt, Artificial Sequence
  Description of Artificial Sequence: Synthetic oligonucleotide
  Antisense strand to SEQ ID NO: 105470
ucuagcacucacuagacuu

SEQ ID NO: 105472 - RNA, 19 nt, Artificial Sequence
  Description of Artificial Sequence: Synthetic oligonucleotide
  Sense strand starting at position 2428 of SEQ ID NO: 1331
gugagugcuagagaggaau

SEQ ID NO: 105473 - RNA, 19 nt, Artificial Sequence
  Description of Artificial Sequence: Synthetic oligonucleotide
  Antisense strand to SEQ ID NO: 105472
auuccucucuagcacucac

SEQ ID NO: 105474 - RNA, 19 nt, Artificial Sequence
  Description of Artificial Sequence: Synthetic oligonucleotide
  Sense strand starting at position 2751 of SEQ ID NO: 1331
cucagagacuguucccuga

SEQ ID NO: 105475 - RNA, 19 nt, Artificial Sequence
  Description of Artificial Sequence: Synthetic oligonucleotide
  Antisense strand to SEQ ID NO: 105474
ucagggaacagucucugag

SEQ ID NO: 105476 - RNA, 19 nt, Artificial Sequence
  Description of Artificial Sequence: Synthetic oligonucleotide
  Sense strand starting at position 2753 of SEQ ID NO: 1331
cagagacuguucccugauc

SEQ ID NO: 105477 - RNA, 19 nt, Artificial Sequence
  Description of Artificial Sequence: Synthetic oligonucleotide
  Antisense strand to SEQ ID NO: 105476
gaucagggaacagucucug

SEQ ID NO: 105478 - RNA, 19 nt, Artificial Sequence
  Description of Artificial Sequence: Synthetic oligonucleotide
  Sense strand starting at position 2754 of SEQ ID NO: 1331
agagacuguucccugaucu

SEQ ID NO: 105479 - RNA, 19 nt, Artificial Sequence
  Description of Artificial Sequence: Synthetic oligonucleotide
  Antisense strand to SEQ ID NO: 105478
agaucagggaacagucucu

SEQ ID NO: 105480 - RNA, 19 nt, Artificial Sequence
  Description of Artificial Sequence: Synthetic oligonucleotide
  Sense strand starting at position 2755 of SEQ ID NO: 1331
gagacuguucccugaucuc

SEQ ID NO: 105481 - RNA, 19 nt, Artificial Sequence
  Description of Artificial Sequence: Synthetic oligonucleotide
  Antisense strand to SEQ ID NO: 105480
gagaucagggaacagucuc

SEQ ID NO: 105482 - RNA, 19 nt, Artificial Sequence
  Description of Artificial Sequence: Synthetic oligonucleotide
  Sense strand starting at position 2761 of SEQ ID NO: 1331
guucccugaucucuguaau

SEQ ID NO: 105483 - RNA, 19 nt, Artificial Sequence
  Description of Artificial Sequence: Synthetic oligonucleotide
  Antisense strand to SEQ ID NO: 105482
auuacagagaucagggaac

SEQ ID NO: 105484 - RNA, 19 nt, Artificial Sequence
  Description of Artificial Sequence: Synthetic oligonucleotide
  Sense strand starting at position 2762 of SEQ ID NO: 1331
uucccugaucucuguaaug

SEQ ID NO: 105485 - RNA, 19 nt, Artificial Sequence
  Description of Artificial Sequence: Synthetic oligonucleotide
  Antisense strand to SEQ ID NO: 105484
cauuacagagaucagggaa

SEQ ID NO: 105486 - RNA, 19 nt, Artificial Sequence
  Description of Artificial Sequence: Synthetic oligonucleotide
  Sense strand starting at position 2764 of SEQ ID NO: 1331
cccugaucucuguaaugca

SEQ ID NO: 105487 - RNA, 19 nt, Artificial Sequence
  Description of Artificial Sequence: Synthetic oligonucleotide
  Antisense strand to SEQ ID NO: 105486
ugcauuacagagaucaggg

SEQ ID NO: 105488 - RNA, 19 nt, Artificial Sequence
  Description of Artificial Sequence: Synthetic oligonucleotide
  Sense strand starting at position 2844 of SEQ ID NO: 1331
agcuaucuccuacagguua

SEQ ID NO: 105489 - RNA, 19 nt, Artificial Sequence
  Description of Artificial Sequence: Synthetic oligonucleotide
  Antisense strand to SEQ ID NO: 105488
uaaccuguaggagauagcu

SEQ ID NO: 105490 - RNA, 19 nt, Artificial Sequence
  Description of Artificial Sequence: Synthetic oligonucleotide
  Sense strand starting at position 3106 of SEQ ID NO: 1331
ugacuugccuucccaaagu

SEQ ID NO: 105491 - RNA, 19 nt, Artificial Sequence
  Description of Artificial Sequence: Synthetic oligonucleotide
  Antisense strand to SEQ ID NO: 105490
acuuugggaaggcaaguca

SEQ ID NO: 105492 - RNA, 19 nt, Artificial Sequence
  Description of Artificial Sequence: Synthetic oligonucleotide
  Sense strand starting at position 3193 of SEQ ID NO: 1331
guauuuauguagggagaau

SEQ ID NO: 105493 - RNA, 19 nt, Artificial Sequence
  Description of Artificial Sequence: Synthetic oligonucleotide
  Antisense strand to SEQ ID NO: 105492
auucucccuacauaaauac

SEQ ID NO: 105494 - RNA, 19 nt, Artificial Sequence
  Description of Artificial Sequence: Synthetic oligonucleotide
  Sense strand starting at position 3239 of SEQ ID NO: 1331
ggguguuggcaccauuaau

SEQ ID NO: 105495 - RNA, 19 nt, Artificial Sequence
  Description of Artificial Sequence: Synthetic oligonucleotide
  Antisense strand to SEQ ID NO: 105494
auuaauggugccaacaccc

SEQ ID NO: 105496 - RNA, 19 nt, Artificial Sequence
  Description of Artificial Sequence: Synthetic oligonucleotide
  Sense strand starting at position 3307 of SEQ ID NO: 1331
augagcaauaugugggaau

SEQ ID NO: 105497 - RNA, 19 nt, Artificial Sequence
  Description of Artificial Sequence: Synthetic oligonucleotide
  Antisense strand to SEQ ID NO: 105496
auucccacauauugcucau

SEQ ID NO: 105498 - RNA, 19 nt, Artificial Sequence
  Description of Artificial Sequence: Synthetic oligonucleotide
  Sense strand starting at position 3737 of SEQ ID NO: 1331
ugaucaucccuuggguuga

SEQ ID NO: 105499 - RNA, 19 nt, Artificial Sequence
  Description of Artificial Sequence: Synthetic oligonucleotide
  Antisense strand to SEQ ID NO: 105498
ucaacccaagggaugauca

SEQ ID NO: 105500 - RNA, 19 nt, Artificial Sequence
  Description of Artificial Sequence: Synthetic oligonucleotide
  Sense strand starting at position 3929 of SEQ ID NO: 1331
uuagauacaucaucuguag

SEQ ID NO: 105501 - RNA, 19 nt, Artificial Sequence
  Description of Artificial Sequence: Synthetic oligonucleotide
  Antisense strand to SEQ ID NO: 105500
cuacagaugauguaucuaa

SEQ ID NO: 105502 - RNA, 19 nt, Artificial Sequence
  Description of Artificial Sequence: Synthetic oligonucleotide
  Sense strand starting at position 62 of SEQ ID NO: 1335
uucuuuccaucagugugua

SEQ ID NO: 105503 - RNA, 19 nt, Artificial Sequence
  Description of Artificial Sequence: Synthetic oligonucleotide
  Antisense strand to SEQ ID NO: 105502
uacacacugauggaaagaa

SEQ ID NO: 105504 - RNA, 19 nt, Artificial Sequence
  Description of Artificial Sequence: Synthetic oligonucleotide
  Sense strand starting at position 65 of SEQ ID NO: 1335
uuuccaucaguguguacuu

SEQ ID NO: 105505 - RNA, 19 nt, Artificial Sequence
  Description of Artificial Sequence: Synthetic oligonucleotide
  Antisense strand to SEQ ID NO: 105504
aaguacacacugauggaaa

SEQ ID NO: 105506 - RNA, 19 nt, Artificial Sequence
  Description of Artificial Sequence: Synthetic oligonucleotide
  Sense strand starting at position 179 of SEQ ID NO: 1335
auagauaccuguuaaauga

SEQ ID NO: 105507 - RNA, 19 nt, Artificial Sequence
  Description of Artificial Sequence: Synthetic oligonucleotide
  Antisense strand to SEQ ID NO: 105506
ucauuuaacagguaucuau

SEQ ID NO: 105508 - RNA, 19 nt, Artificial Sequence
  Description of Artificial Sequence: Synthetic oligonucleotide
  Sense strand starting at position 307 of SEQ ID NO: 1335
gacagugugucccucacuu

SEQ ID NO: 105509 - RNA, 19 nt, Artificial Sequence
  Description of Artificial Sequence: Synthetic oligonucleotide
  Antisense strand to SEQ ID NO: 105508
aagugagggacacacuguc

SEQ ID NO: 105510 - RNA, 19 nt, Artificial Sequence
  Description of Artificial Sequence: Synthetic oligonucleotide
  Sense strand starting at position 344 of SEQ ID NO: 1335
gcuggagugcaauaagaac

SEQ ID NO: 105511 - RNA, 19 nt, Artificial Sequence
  Description of Artificial Sequence: Synthetic oligonucleotide
  Antisense strand to SEQ ID NO: 105510
guucuuauugcacuccagc

SEQ ID NO: 105512 - RNA, 19 nt, Artificial Sequence
  Description of Artificial Sequence: Synthetic oligonucleotide
  Sense strand starting at position 550 of SEQ ID NO: 1335
gccuccuaagaugauuaca

SEQ ID NO: 105513 - RNA, 19 nt, Artificial Sequence
  Description of Artificial Sequence: Synthetic oligonucleotide
  Antisense strand to SEQ ID NO: 105512
uguaaucaucuuaggaggc

SEQ ID NO: 105514 - RNA, 19 nt, Artificial Sequence
  Description of Artificial Sequence: Synthetic oligonucleotide
  Sense strand starting at position 595 of SEQ ID NO: 1335
agcaguucugaauaaugau

SEQ ID NO: 105515 - RNA, 19 nt, Artificial Sequence
  Description of Artificial Sequence: Synthetic oligonucleotide
  Antisense strand to SEQ ID NO: 105514
aucauuauucagaacugcu

SEQ ID NO: 105516 - RNA, 19 nt, Artificial Sequence
  Description of Artificial Sequence: Synthetic oligonucleotide
  Sense strand starting at position 601 of SEQ ID NO: 1335
ucugaauaaugaugaaaug

SEQ ID NO: 105517 - RNA, 19 nt, Artificial Sequence
  Description of Artificial Sequence: Synthetic oligonucleotide
  Antisense strand to SEQ ID NO: 105516
cauuucaucauuauucaga

SEQ ID NO: 105518 - RNA, 19 nt, Artificial Sequence
  Description of Artificial Sequence: Synthetic oligonucleotide
  Sense strand starting at position 703 of SEQ ID NO: 1335
aguguuuacggagggacua

SEQ ID NO: 105519 - RNA, 19 nt, Artificial Sequence
  Description of Artificial Sequence: Synthetic oligonucleotide
  Antisense strand to SEQ ID NO: 105518
uagucccuccguaaacacu

SEQ ID NO: 105520 - RNA, 19 nt, Artificial Sequence
  Description of Artificial Sequence: Synthetic oligonucleotide
  Sense strand starting at position 1154 of SEQ ID NO: 1335
auuaucacuugauuggauu

SEQ ID NO: 105521 - RNA, 19 nt, Artificial Sequence
  Description of Artificial Sequence: Synthetic oligonucleotide
  Antisense strand to SEQ ID NO: 105520
aauccaaucaagugauaau

SEQ ID NO: 105522 - RNA, 19 nt, Artificial Sequence
  Description of Artificial Sequence: Synthetic oligonucleotide
  Sense strand starting at position 1155 of SEQ ID NO: 1335
uuaucacuugauuggauua

SEQ ID NO: 105523 - RNA, 19 nt, Artificial Sequence
  Description of Artificial Sequence: Synthetic oligonucleotide
  Antisense strand to SEQ ID NO: 105522
uaauccaaucaagugauaa

SEQ ID NO: 105524 - RNA, 19 nt, Artificial Sequence
  Description of Artificial Sequence: Synthetic oligonucleotide
  Sense strand starting at position 1894 of SEQ ID NO: 1335
ucgggcucauaguucuaga

SEQ ID NO: 105525 - RNA, 19 nt, Artificial Sequence
  Description of Artificial Sequence: Synthetic oligonucleotide
  Antisense strand to SEQ ID NO: 105524
ucuagaacuaugagcccga

SEQ ID NO: 105526 - RNA, 19 nt, Artificial Sequence
  Description of Artificial Sequence: Synthetic oligonucleotide
  Sense strand starting at position 2047 of SEQ ID NO: 1335
ggagauguagucuggagcu

SEQ ID NO: 105527 - RNA, 19 nt, Artificial Sequence
  Description of Artificial Sequence: Synthetic oligonucleotide
  Antisense strand to SEQ ID NO: 105526
agcuccagacuacaucucc

SEQ ID NO: 105528 - RNA, 19 nt, Artificial Sequence
  Description of Artificial Sequence: Synthetic oligonucleotide
  Sense strand starting at position 2049 of SEQ ID NO: 1335
agauguagucuggagcuca

SEQ ID NO: 105529 - RNA, 19 nt, Artificial Sequence
  Description of Artificial Sequence: Synthetic oligonucleotide
  Antisense strand to SEQ ID NO: 105528
ugagcuccagacuacaucu

SEQ ID NO: 105530 - RNA, 19 nt, Artificial Sequence
  Description of Artificial Sequence: Synthetic oligonucleotide
  Sense strand starting at position 2063 of SEQ ID NO: 1335
gcucauaacgguuaguagu

SEQ ID NO: 105531 - RNA, 19 nt, Artificial Sequence
  Description of Artificial Sequence: Synthetic oligonucleotide
  Antisense strand to SEQ ID NO: 105530
acuacuaaccguuaugagc

SEQ ID NO: 105532 - RNA, 19 nt, Artificial Sequence
  Description of Artificial Sequence: Synthetic oligonucleotide
  Sense strand starting at position 2065 of SEQ ID NO: 1335
ucauaacgguuaguaguaa

SEQ ID NO: 105533 - RNA, 19 nt, Artificial Sequence
  Description of Artificial Sequence: Synthetic oligonucleotide
  Antisense strand to SEQ ID NO: 105532
uuacuacuaaccguuauga

SEQ ID NO: 105534 - RNA, 19 nt, Artificial Sequence
  Description of Artificial Sequence: Synthetic oligonucleotide
  Sense strand starting at position 2076 of SEQ ID NO: 1335
aguaguaauaguugugauu

SEQ ID NO: 105535 - RNA, 19 nt, Artificial Sequence
  Description of Artificial Sequence: Synthetic oligonucleotide
  Antisense strand to SEQ ID NO: 105534
aaucacaacuauuacuacu

SEQ ID NO: 105536 - RNA, 19 nt, Artificial Sequence
  Description of Artificial Sequence: Synthetic oligonucleotide
  Sense strand starting at position 2108 of SEQ ID NO: 1335
uggauugagcguugugauc

SEQ ID NO: 105537 - RNA, 19 nt, Artificial Sequence
  Description of Artificial Sequence: Synthetic oligonucleotide
  Antisense strand to SEQ ID NO: 105536
gaucacaacgcucaaucca

SEQ ID NO: 105538 - RNA, 19 nt, Artificial Sequence
  Description of Artificial Sequence: Synthetic oligonucleotide
  Sense strand starting at position 2115 of SEQ ID NO: 1335
agcguugugauccaaagga

SEQ ID NO: 105539 - RNA, 19 nt, Artificial Sequence
  Description of Artificial Sequence: Synthetic oligonucleotide
  Antisense strand to SEQ ID NO: 105538
uccuuuggaucacaacgcu

SEQ ID NO: 105540 - RNA, 19 nt, Artificial Sequence
  Description of Artificial Sequence: Synthetic oligonucleotide
  Sense strand starting at position 2119 of SEQ ID NO: 1335
uugugauccaaaggaaggu

SEQ ID NO: 105541 - RNA, 19 nt, Artificial Sequence
  Description of Artificial Sequence: Synthetic oligonucleotide
  Antisense strand to SEQ ID NO: 105540
accuuccuuuggaucacaa

SEQ ID NO: 105542 - RNA, 19 nt, Artificial Sequence
  Description of Artificial Sequence: Synthetic oligonucleotide
  Sense strand starting at position 2181 of SEQ ID NO: 1335
gggcuuacugggagcuguu

SEQ ID NO: 105543 - RNA, 19 nt, Artificial Sequence
  Description of Artificial Sequence: Synthetic oligonucleotide
  Antisense strand to SEQ ID NO: 105542
aacagcucccaguaagccc

SEQ ID NO: 105544 - RNA, 19 nt, Artificial Sequence
  Description of Artificial Sequence: Synthetic oligonucleotide
  Sense strand starting at position 2221 of SEQ ID NO: 1335
ugagaacaguaguauggau

SEQ ID NO: 105545 - RNA, 19 nt, Artificial Sequence
  Description of Artificial Sequence: Synthetic oligonucleotide
  Antisense strand to SEQ ID NO: 105544
auccauacuacuguucuca

SEQ ID NO: 105546 - RNA, 19 nt, Artificial Sequence
  Description of Artificial Sequence: Synthetic oligonucleotide
  Sense strand starting at position 2233 of SEQ ID NO: 1335
uauggaucccugugggaua

SEQ ID NO: 105547 - RNA, 19 nt, Artificial Sequence
  Description of Artificial Sequence: Synthetic oligonucleotide
  Antisense strand to SEQ ID NO: 105546
uaucccacagggauccaua

SEQ ID NO: 105548 - RNA, 19 nt, Artificial Sequence
  Description of Artificial Sequence: Synthetic oligonucleotide
  Sense strand starting at position 2235 of SEQ ID NO: 1335
uggaucccugugggauauu

SEQ ID NO: 105549 - RNA, 19 nt, Artificial Sequence
  Description of Artificial Sequence: Synthetic oligonucleotide
  Antisense strand to SEQ ID NO: 105548
aauaucccacagggaucca

SEQ ID NO: 105550 - RNA, 19 nt, Artificial Sequence
  Description of Artificial Sequence: Synthetic oligonucleotide
  Sense strand starting at position 2282 of SEQ ID NO: 1335
aaauguuuccugcaggaca

SEQ ID NO: 105551 - RNA, 19 nt, Artificial Sequence
  Description of Artificial Sequence: Synthetic oligonucleotide
  Antisense strand to SEQ ID NO: 105550
uguccugcaggaaacauuu

SEQ ID NO: 105552 - RNA, 19 nt, Artificial Sequence
  Description of Artificial Sequence: Synthetic oligonucleotide
  Sense strand starting at position 2319 of SEQ ID NO: 1335
ggucgucuaguccaacuuu

SEQ ID NO: 105553 - RNA, 19 nt, Artificial Sequence
  Description of Artificial Sequence: Synthetic oligonucleotide
  Antisense strand to SEQ ID NO: 105552
aaaguuggacuagacgacc

SEQ ID NO: 105554 - RNA, 19 nt, Artificial Sequence
  Description of Artificial Sequence: Synthetic oligonucleotide
  Sense strand starting at position 2339 of SEQ ID NO: 1335
uccucuacagauugugaaa

SEQ ID NO: 105555 - RNA, 19 nt, Artificial Sequence
  Description of Artificial Sequence: Synthetic oligonucleotide
  Antisense strand to SEQ ID NO: 105554
uuucacaaucuguagagga

SEQ ID NO: 105556 - RNA, 19 nt, Artificial Sequence
  Description of Artificial Sequence: Synthetic oligonucleotide
  Sense strand starting at position 2470 of SEQ ID NO: 1335
guuacaaaggcuuguggga

SEQ ID NO: 105557 - RNA, 19 nt, Artificial Sequence
  Description of Artificial Sequence: Synthetic oligonucleotide
  Antisense strand to SEQ ID NO: 105556
ucccacaagccuuuguaac

SEQ ID NO: 105558 - RNA, 19 nt, Artificial Sequence
  Description of Artificial Sequence: Synthetic oligonucleotide
  Sense strand starting at position 2556 of SEQ ID NO: 1335
gggcucuuuccuuaagcau

SEQ ID NO: 105559 - RNA, 19 nt, Artificial Sequence
  Description of Artificial Sequence: Synthetic oligonucleotide
  Antisense strand to SEQ ID NO: 105558
augcuuaaggaaagagccc

SEQ ID NO: 105560 - RNA, 19 nt, Artificial Sequence
  Description of Artificial Sequence: Synthetic oligonucleotide
  Sense strand starting at position 2742 of SEQ ID NO: 1335
cacggugagaguugggaaa

SEQ ID NO: 105561 - RNA, 19 nt, Artificial Sequence
  Description of Artificial Sequence: Synthetic oligonucleotide
  Antisense strand to SEQ ID NO: 105560
uuucccaacucucaccgug

SEQ ID NO: 105562 - RNA, 19 nt, Artificial Sequence
  Description of Artificial Sequence: Synthetic oligonucleotide
  Sense strand starting at position 2791 of SEQ ID NO: 1335
gugcuagaggccugucaca

SEQ ID NO: 105563 - RNA, 19 nt, Artificial Sequence
  Description of Artificial Sequence: Synthetic oligonucleotide
  Antisense strand to SEQ ID NO: 105562
ugugacaggccucuagcac

SEQ ID NO: 105564 - RNA, 19 nt, Artificial Sequence
  Description of Artificial Sequence: Synthetic oligonucleotide
  Sense strand starting at position 3097 of SEQ ID NO: 1335
aagguaugagcugaucuca

SEQ ID NO: 105565 - RNA, 19 nt, Artificial Sequence
  Description of Artificial Sequence: Synthetic oligonucleotide
  Antisense strand to SEQ ID NO: 105564
ugagaucagcucauaccuu

SEQ ID NO: 105566 - RNA, 19 nt, Artificial Sequence
  Description of Artificial Sequence: Synthetic oligonucleotide
  Sense strand starting at position 3140 of SEQ ID NO: 1335
gguggaggguagagagauu

SEQ ID NO: 105567 - RNA, 19 nt, Artificial Sequence
  Description of Artificial Sequence: Synthetic oligonucleotide
  Antisense strand to SEQ ID NO: 105566
aaucucucuacccuccacc

SEQ ID NO: 105568 - RNA, 19 nt, Artificial Sequence
  Description of Artificial Sequence: Synthetic oligonucleotide
  Sense strand starting at position 3466 of SEQ ID NO: 1335
cucuuucucccagggugaa

SEQ ID NO: 105569 - RNA, 19 nt, Artificial Sequence
  Description of Artificial Sequence: Synthetic oligonucleotide
  Antisense strand to SEQ ID NO: 105568
uucacccugggagaaagag

SEQ ID NO: 105570 - RNA, 19 nt, Artificial Sequence
  Description of Artificial Sequence: Synthetic oligonucleotide
  Sense strand starting at position 3670 of SEQ ID NO: 1335
cccuuucugugacuuuauu

SEQ ID NO: 105571 - RNA, 19 nt, Artificial Sequence
  Description of Artificial Sequence: Synthetic oligonucleotide
  Antisense strand to SEQ ID NO: 105570
aauaaagucacagaaaggg

SEQ ID NO: 105572 - RNA, 19 nt, Artificial Sequence
  Description of Artificial Sequence: Synthetic oligonucleotide
  Sense strand starting at position 3715 of SEQ ID NO: 1335
gggagaaucugcuucuuag

SEQ ID NO: 105573 - RNA, 19 nt, Artificial Sequence
  Description of Artificial Sequence: Synthetic oligonucleotide
  Antisense strand to SEQ ID NO: 105572
cuaagaagcagauucuccc

SEQ ID NO: 105574 - RNA, 19 nt, Artificial Sequence
  Description of Artificial Sequence: Synthetic oligonucleotide
  Sense strand starting at position 3718 of SEQ ID NO: 1335
agaaucugcuucuuaggga

SEQ ID NO: 105575 - RNA, 19 nt, Artificial Sequence
  Description of Artificial Sequence: Synthetic oligonucleotide
  Antisense strand to SEQ ID NO: 105574
ucccuaagaagcagauucu

SEQ ID NO: 105576 - RNA, 19 nt, Artificial Sequence
  Description of Artificial Sequence: Synthetic oligonucleotide
  Sense strand starting at position 3752 of SEQ ID NO: 1335
agugacagggcuugggaaa

SEQ ID NO: 105577 - RNA, 19 nt, Artificial Sequence
  Description of Artificial Sequence: Synthetic oligonucleotide
  Antisense strand to SEQ ID NO: 105576
uuucccaagcccugucacu

SEQ ID NO: 105578 - RNA, 19 nt, Artificial Sequence
  Description of Artificial Sequence: Synthetic oligonucleotide
  Sense strand starting at position 3793 of SEQ ID NO: 1335
ggcagcauuggguaaggua

SEQ ID NO: 105579 - RNA, 19 nt, Artificial Sequence
  Description of Artificial Sequence: Synthetic oligonucleotide
  Antisense strand to SEQ ID NO: 105578
uaccuuacccaaugcugcc

SEQ ID NO: 105580 - RNA, 19 nt, Artificial Sequence
  Description of Artificial Sequence: Synthetic oligonucleotide
  Sense strand starting at position 3841 of SEQ ID NO: 1335
gggauaagugcccagcaga

SEQ ID NO: 105581 - RNA, 19 nt, Artificial Sequence
  Description of Artificial Sequence: Synthetic oligonucleotide
  Antisense strand to SEQ ID NO: 105580
ucugcugggcacuuauccc

SEQ ID NO: 105582 - RNA, 19 nt, Artificial Sequence
  Description of Artificial Sequence: Synthetic oligonucleotide
  Sense strand starting at position 2 of SEQ ID NO: 1334
gggacugagugguagaaga

SEQ ID NO: 105583 - RNA, 19 nt, Artificial Sequence
  Description of Artificial Sequence: Synthetic oligonucleotide
  Antisense strand to SEQ ID NO: 105582
ucuucuaccacucaguccc

SEQ ID NO: 105584 - RNA, 19 nt, Artificial Sequence
  Description of Artificial Sequence: Synthetic oligonucleotide
  Sense strand starting at position 51 of SEQ ID NO: 1334
agaggagggucacaaagua

SEQ ID NO: 105585 - RNA, 19 nt, Artificial Sequence
  Description of Artificial Sequence: Synthetic oligonucleotide
  Antisense strand to SEQ ID NO: 105584
uacuuugugacccuccucu

SEQ ID NO: 105586 - RNA, 19 nt, Artificial Sequence
  Description of Artificial Sequence: Synthetic oligonucleotide
  Sense strand starting at position 192 of SEQ ID NO: 1334
agccaagguugacugaauu

SEQ ID NO: 105587 - RNA, 19 nt, Artificial Sequence
  Description of Artificial Sequence: Synthetic oligonucleotide
  Antisense strand to SEQ ID NO: 105586
aauucagucaaccuuggcu

SEQ ID NO: 105588 - RNA, 19 nt, Artificial Sequence
  Description of Artificial Sequence: Synthetic oligonucleotide
  Sense strand starting at position 216 of SEQ ID NO: 1334
gcuuaaacaccucaagugu

SEQ ID NO: 105589 - RNA, 19 nt, Artificial Sequence
  Description of Artificial Sequence: Synthetic oligonucleotide
  Antisense strand to SEQ ID NO: 105588
acacuugagguguuuaagc

SEQ ID NO: 105590 - RNA, 19 nt, Artificial Sequence
  Description of Artificial Sequence: Synthetic oligonucleotide
  Sense strand starting at position 316 of SEQ ID NO: 1334
ucaagucuugacugaaaug

SEQ ID NO: 105591 - RNA, 19 nt, Artificial Sequence
  Description of Artificial Sequence: Synthetic oligonucleotide
  Antisense strand to SEQ ID NO: 105590
cauuucagucaagacuuga

SEQ ID NO: 105592 - RNA, 19 nt, Artificial Sequence
  Description of Artificial Sequence: Synthetic oligonucleotide
  Sense strand starting at position 417 of SEQ ID NO: 1334
uucuuuccaucagugugua

SEQ ID NO: 105593 - RNA, 19 nt, Artificial Sequence
  Description of Artificial Sequence: Synthetic oligonucleotide
  Antisense strand to SEQ ID NO: 105592
uacacacugauggaaagaa

SEQ ID NO: 105594 - RNA, 19 nt, Artificial Sequence
  Description of Artificial Sequence: Synthetic oligonucleotide
  Sense strand starting at position 420 of SEQ ID NO: 1334
uuuccaucaguguguacuu

SEQ ID NO: 105595 - RNA, 19 nt, Artificial Sequence
  Description of Artificial Sequence: Synthetic oligonucleotide
  Antisense strand to SEQ ID NO: 105594
aaguacacacugauggaaa

SEQ ID NO: 105596 - RNA, 19 nt, Artificial Sequence
  Description of Artificial Sequence: Synthetic oligonucleotide
  Sense strand starting at position 534 of SEQ ID NO: 1334
auagauaccuguuaaauga

SEQ ID NO: 105597 - RNA, 19 nt, Artificial Sequence
  Description of Artificial Sequence: Synthetic oligonucleotide
  Antisense strand to SEQ ID NO: 105596
ucauuuaacagguaucuau

SEQ ID NO: 105598 - RNA, 19 nt, Artificial Sequence
  Description of Artificial Sequence: Synthetic oligonucleotide
  Sense strand starting at position 662 of SEQ ID NO: 1334
gacagugugucccucacuu

SEQ ID NO: 105599 - RNA, 19 nt, Artificial Sequence
  Description of Artificial Sequence: Synthetic oligonucleotide
  Antisense strand to SEQ ID NO: 105598
aagugagggacacacuguc

SEQ ID NO: 105600 - RNA, 19 nt, Artificial Sequence
  Description of Artificial Sequence: Synthetic oligonucleotide
  Sense strand starting at position 699 of SEQ ID NO: 1334
gcuggagugcaauaagaac

SEQ ID NO: 105601 - RNA, 19 nt, Artificial Sequence
  Description of Artificial Sequence: Synthetic oligonucleotide
  Antisense strand to SEQ ID NO: 105600
guucuuauugcacuccagc

SEQ ID NO: 105602 - RNA, 19 nt, Artificial Sequence
  Description of Artificial Sequence: Synthetic oligonucleotide
  Sense strand starting at position 905 of SEQ ID NO: 1334
gccuccuaagaugauuaca

SEQ ID NO: 105603 - RNA, 19 nt, Artificial Sequence
  Description of Artificial Sequence: Synthetic oligonucleotide
  Antisense strand to SEQ ID NO: 105602
uguaaucaucuuaggaggc

SEQ ID NO: 105604 - RNA, 19 nt, Artificial Sequence
  Description of Artificial Sequence: Synthetic oligonucleotide
  Sense strand starting at position 950 of SEQ ID NO: 1334
agcaguucugaauaaugau

SEQ ID NO: 105605 - RNA, 19 nt, Artificial Sequence
  Description of Artificial Sequence: Synthetic oligonucleotide
  Antisense strand to SEQ ID NO: 105604
aucauuauucagaacugcu

SEQ ID NO: 105606 - RNA, 19 nt, Artificial Sequence
  Description of Artificial Sequence: Synthetic oligonucleotide
  Sense strand starting at position 956 of SEQ ID NO: 1334
ucugaauaaugaugaaaug

SEQ ID NO: 105607 - RNA, 19 nt, Artificial Sequence
  Description of Artificial Sequence: Synthetic oligonucleotide
  Antisense strand to SEQ ID NO: 105606
cauuucaucauuauucaga

SEQ ID NO: 105608 - RNA, 19 nt, Artificial Sequence
  Description of Artificial Sequence: Synthetic oligonucleotide
  Sense strand starting at position 1058 of SEQ ID NO: 1334
aguguuuacggagggacua

SEQ ID NO: 105609 - RNA, 19 nt, Artificial Sequence
  Description of Artificial Sequence: Synthetic oligonucleotide
  Antisense strand to SEQ ID NO: 105608
uagucccuccguaaacacu

SEQ ID NO: 105610 - RNA, 19 nt, Artificial Sequence
  Description of Artificial Sequence: Synthetic oligonucleotide
  Sense strand starting at position 1509 of SEQ ID NO: 1334
auuaucacuugauuggauu

SEQ ID NO: 105611 - RNA, 19 nt, Artificial Sequence
  Description of Artificial Sequence: Synthetic oligonucleotide
  Antisense strand to SEQ ID NO: 105610
aauccaaucaagugauaau

SEQ ID NO: 105612 - RNA, 19 nt, Artificial Sequence
  Description of Artificial Sequence: Synthetic oligonucleotide
  Sense strand starting at position 1510 of SEQ ID NO: 1334
uuaucacuugauuggauua

SEQ ID NO: 105613 - RNA, 19 nt, Artificial Sequence
  Description of Artificial Sequence: Synthetic oligonucleotide
  Antisense strand to SEQ ID NO: 105612
uaauccaaucaagugauaa

SEQ ID NO: 105614 - RNA, 19 nt, Artificial Sequence
  Description of Artificial Sequence: Synthetic oligonucleotide
  Sense strand starting at position 1512 of SEQ ID NO: 1334
aucacuugauuggauuauu

SEQ ID NO: 105615 - RNA, 19 nt, Artificial Sequence
  Description of Artificial Sequence: Synthetic oligonucleotide
  Antisense strand to SEQ ID NO: 105614
aauaauccaaucaagugau

SEQ ID NO: 105616 - RNA, 19 nt, Artificial Sequence
  Description of Artificial Sequence: Synthetic oligonucleotide
  Sense strand starting at position 2249 of SEQ ID NO: 1334
ucgggcucauaguucuaga

SEQ ID NO: 105617 - RNA, 19 nt, Artificial Sequence
  Description of Artificial Sequence: Synthetic oligonucleotide
  Antisense strand to SEQ ID NO: 105616
ucuagaacuaugagcccga

SEQ ID NO: 105618 - RNA, 19 nt, Artificial Sequence
  Description of Artificial Sequence: Synthetic oligonucleotide
  Sense strand starting at position 2402 of SEQ ID NO: 1334
ggagauguagucuggagcu

SEQ ID NO: 105619 - RNA, 19 nt, Artificial Sequence
  Description of Artificial Sequence: Synthetic oligonucleotide
  Antisense strand to SEQ ID NO: 105618
agcuccagacuacaucucc

SEQ ID NO: 105620 - RNA, 19 nt, Artificial Sequence
  Description of Artificial Sequence: Synthetic oligonucleotide
  Sense strand starting at position 2404 of SEQ ID NO: 1334
agauguagucuggagcuca

SEQ ID NO: 105621 - RNA, 19 nt, Artificial Sequence
  Description of Artificial Sequence: Synthetic oligonucleotide
  Antisense strand to SEQ ID NO: 105620
ugagcuccagacuacaucu

SEQ ID NO: 105622 - RNA, 19 nt, Artificial Sequence
  Description of Artificial Sequence: Synthetic oligonucleotide
  Sense strand starting at position 2418 of SEQ ID NO: 1334
gcucauaacgguuaguagu

SEQ ID NO: 105623 - RNA, 19 nt, Artificial Sequence
  Description of Artificial Sequence: Synthetic oligonucleotide
  Antisense strand to SEQ ID NO: 105622
acuacuaaccguuaugagc

SEQ ID NO: 105624 - RNA, 19 nt, Artificial Sequence
  Description of Artificial Sequence: Synthetic oligonucleotide
  Sense strand starting at position 2420 of SEQ ID NO: 1334
ucauaacgguuaguaguaa

SEQ ID NO: 105625 - RNA, 19 nt, Artificial Sequence
  Description of Artificial Sequence: Synthetic oligonucleotide
  Antisense strand to SEQ ID NO: 105624
uuacuacuaaccguuauga

SEQ ID NO: 105626 - RNA, 19 nt, Artificial Sequence
  Description of Artificial Sequence: Synthetic oligonucleotide
  Sense strand starting at position 2431 of SEQ ID NO: 1334
aguaguaauaguugugauu

SEQ ID NO: 105627 - RNA, 19 nt, Artificial Sequence
  Description of Artificial Sequence: Synthetic oligonucleotide
  Antisense strand to SEQ ID NO: 105626
aaucacaacuauuacuacu

SEQ ID NO: 105628 - RNA, 19 nt, Artificial Sequence
  Description of Artificial Sequence: Synthetic oligonucleotide
  Sense strand starting at position 2463 of SEQ ID NO: 1334
uggauugagcguugugauc

SEQ ID NO: 105629 - RNA, 19 nt, Artificial Sequence
  Description of Artificial Sequence: Synthetic oligonucleotide
  Antisense strand to SEQ ID NO: 105628
gaucacaacgcucaaucca

SEQ ID NO: 105630 - RNA, 19 nt, Artificial Sequence
  Description of Artificial Sequence: Synthetic oligonucleotide
  Sense strand starting at position 2470 of SEQ ID NO: 1334
agcguugugauccaaagga

SEQ ID NO: 105631 - RNA, 19 nt, Artificial Sequence
  Description of Artificial Sequence: Synthetic oligonucleotide
  Antisense strand to SEQ ID NO: 105630
uccuuuggaucacaacgcu

SEQ ID NO: 105632 - RNA, 19 nt, Artificial Sequence
  Description of Artificial Sequence: Synthetic oligonucleotide
  Sense strand starting at position 2474 of SEQ ID NO: 1334
uugugauccaaaggaaggu

SEQ ID NO: 105633 - RNA, 19 nt, Artificial Sequence
  Description of Artificial Sequence: Synthetic oligonucleotide
  Antisense strand to SEQ ID NO: 105632
accuuccuuuggaucacaa

SEQ ID NO: 105634 - RNA, 19 nt, Artificial Sequence
  Description of Artificial Sequence: Synthetic oligonucleotide
  Sense strand starting at position 2536 of SEQ ID NO: 1334
gggcuuacugggagcuguu

SEQ ID NO: 105635 - RNA, 19 nt, Artificial Sequence
  Description of Artificial Sequence: Synthetic oligonucleotide
  Antisense strand to SEQ ID NO: 105634
aacagcucccaguaagccc

SEQ ID NO: 105636 - RNA, 19 nt, Artificial Sequence
  Description of Artificial Sequence: Synthetic oligonucleotide
  Sense strand starting at position 2576 of SEQ ID NO: 1334
ugagaacaguaguauggau

SEQ ID NO: 105637 - RNA, 19 nt, Artificial Sequence
  Description of Artificial Sequence: Synthetic oligonucleotide
  Antisense strand to SEQ ID NO: 105636
auccauacuacuguucuca

SEQ ID NO: 105638 - RNA, 19 nt, Artificial Sequence
  Description of Artificial Sequence: Synthetic oligonucleotide
  Sense strand starting at position 2588 of SEQ ID NO: 1334
uauggaucccugugggaua

SEQ ID NO: 105639 - RNA, 19 nt, Artificial Sequence
  Description of Artificial Sequence: Synthetic oligonucleotide
  Antisense strand to SEQ ID NO: 105638
uaucccacagggauccaua

SEQ ID NO: 105640 - RNA, 19 nt, Artificial Sequence
  Description of Artificial Sequence: Synthetic oligonucleotide
  Sense strand starting at position 2590 of SEQ ID NO: 1334
uggaucccugugggauauu

SEQ ID NO: 105641 - RNA, 19 nt, Artificial Sequence
  Description of Artificial Sequence: Synthetic oligonucleotide
  Antisense strand to SEQ ID NO: 105640
aauaucccacagggaucca

SEQ ID NO: 105642 - RNA, 19 nt, Artificial Sequence
  Description of Artificial Sequence: Synthetic oligonucleotide
  Sense strand starting at position 2637 of SEQ ID NO: 1334
aaauguuuccugcaggaca

SEQ ID NO: 105643 - RNA, 19 nt, Artificial Sequence
  Description of Artificial Sequence: Synthetic oligonucleotide
  Antisense strand to SEQ ID NO: 105642
uguccugcaggaaacauuu

SEQ ID NO: 105644 - RNA, 19 nt, Artificial Sequence
  Description of Artificial Sequence: Synthetic oligonucleotide
  Sense strand starting at position 2674 of SEQ ID NO: 1334
ggucgucuaguccaacuuu

SEQ ID NO: 105645 - RNA, 19 nt, Artificial Sequence
  Description of Artificial Sequence: Synthetic oligonucleotide
  Antisense strand to SEQ ID NO: 105644
aaaguuggacuagacgacc

SEQ ID NO: 105646 - RNA, 19 nt, Artificial Sequence
  Description of Artificial Sequence: Synthetic oligonucleotide
  Sense strand starting at position 2694 of SEQ ID NO: 1334
uccucuacagauugugaaa

SEQ ID NO: 105647 - RNA, 19 nt, Artificial Sequence
  Description of Artificial Sequence: Synthetic oligonucleotide
  Antisense strand to SEQ ID NO: 105646
uuucacaaucuguagagga

SEQ ID NO: 105648 - RNA, 19 nt, Artificial Sequence
  Description of Artificial Sequence: Synthetic oligonucleotide
  Sense strand starting at position 2825 of SEQ ID NO: 1334
guuacaaaggcuuguggga

SEQ ID NO: 105649 - RNA, 19 nt, Artificial Sequence
  Description of Artificial Sequence: Synthetic oligonucleotide
  Antisense strand to SEQ ID NO: 105648
ucccacaagccuuuguaac

SEQ ID NO: 105650 - RNA, 19 nt, Artificial Sequence
  Description of Artificial Sequence: Synthetic oligonucleotide
  Sense strand starting at position 2911 of SEQ ID NO: 1334
gggcucuuuccuuaagcau

SEQ ID NO: 105651 - RNA, 19 nt, Artificial Sequence
  Description of Artificial Sequence: Synthetic oligonucleotide
  Antisense strand to SEQ ID NO: 105650
augcuuaaggaaagagccc

SEQ ID NO: 105652 - RNA, 19 nt, Artificial Sequence
  Description of Artificial Sequence: Synthetic oligonucleotide
  Sense strand starting at position 3097 of SEQ ID NO: 1334
cacggugagaguugggaaa

SEQ ID NO: 105653 - RNA, 19 nt, Artificial Sequence
  Description of Artificial Sequence: Synthetic oligonucleotide
  Antisense strand to SEQ ID NO: 105652
uuucccaacucucaccgug

SEQ ID NO: 105654 - RNA, 19 nt, Artificial Sequence
  Description of Artificial Sequence: Synthetic oligonucleotide
  Sense strand starting at position 3146 of SEQ ID NO: 1334
gugcuagaggccugucaca

SEQ ID NO: 105655 - RNA, 19 nt, Artificial Sequence
  Description of Artificial Sequence: Synthetic oligonucleotide
  Antisense strand to SEQ ID NO: 105654
ugugacaggccucuagcac

SEQ ID NO: 105656 - RNA, 19 nt, Artificial Sequence
  Description of Artificial Sequence: Synthetic oligonucleotide
  Sense strand starting at position 3452 of SEQ ID NO: 1334
aagguaugagcugaucuca

SEQ ID NO: 105657 - RNA, 19 nt, Artificial Sequence
  Description of Artificial Sequence: Synthetic oligonucleotide
  Antisense strand to SEQ ID NO: 105656
ugagaucagcucauaccuu

SEQ ID NO: 105658 - RNA, 19 nt, Artificial Sequence
  Description of Artificial Sequence: Synthetic oligonucleotide
  Sense strand starting at position 3495 of SEQ ID NO: 1334
gguggaggguagagagauu

SEQ ID NO: 105659 - RNA, 19 nt, Artificial Sequence
  Description of Artificial Sequence: Synthetic oligonucleotide
  Antisense strand to SEQ ID NO: 105658
aaucucucuacccuccacc

SEQ ID NO: 105660 - RNA, 19 nt, Artificial Sequence
  Description of Artificial Sequence: Synthetic oligonucleotide
  Sense strand starting at position 3821 of SEQ ID NO: 1334
cucuuucucccagggugaa

SEQ ID NO: 105661 - RNA, 19 nt, Artificial Sequence
  Description of Artificial Sequence: Synthetic oligonucleotide
  Antisense strand to SEQ ID NO: 105660
uucacccugggagaaagag

SEQ ID NO: 105662 - RNA, 19 nt, Artificial Sequence
  Description of Artificial Sequence: Synthetic oligonucleotide
  Sense strand starting at position 41 of SEQ ID NO: 1332
uaaagacuguggucaaggu

SEQ ID NO: 105663 - RNA, 19 nt, Artificial Sequence
  Description of Artificial Sequence: Synthetic oligonucleotide
  Antisense strand to SEQ ID NO: 105662
accuugaccacagucuuua

SEQ ID NO: 105664 - RNA, 19 nt, Artificial Sequence
  Description of Artificial Sequence: Synthetic oligonucleotide
  Sense strand starting at position 42 of SEQ ID NO: 1332
aaagacuguggucaaggua

SEQ ID NO: 105665 - RNA, 19 nt, Artificial Sequence
  Description of Artificial Sequence: Synthetic oligonucleotide
  Antisense strand to SEQ ID NO: 105664
uaccuugaccacagucuuu

SEQ ID NO: 105666 - RNA, 19 nt, Artificial Sequence
  Description of Artificial Sequence: Synthetic oligonucleotide
  Sense strand starting at position 66 of SEQ ID NO: 1332
aaagcauucuaagugagug

SEQ ID NO: 105667 - RNA, 19 nt, Artificial Sequence
  Description of Artificial Sequence: Synthetic oligonucleotide
  Antisense strand to SEQ ID NO: 105666
cacucacuuagaaugcuuu

SEQ ID NO: 105668 - RNA, 19 nt, Artificial Sequence
  Description of Artificial Sequence: Synthetic oligonucleotide
  Sense strand starting at position 70 of SEQ ID NO: 1332
cauucuaagugagugcaaa

SEQ ID NO: 105669 - RNA, 19 nt, Artificial Sequence
  Description of Artificial Sequence: Synthetic oligonucleotide
  Antisense strand to SEQ ID NO: 105668
uuugcacucacuuagaaug

SEQ ID NO: 105670 - RNA, 19 nt, Artificial Sequence
  Description of Artificial Sequence: Synthetic oligonucleotide
  Sense strand starting at position 126 of SEQ ID NO: 1332
uaaguaggucaaugugguu

SEQ ID NO: 105671 - RNA, 19 nt, Artificial Sequence
  Description of Artificial Sequence: Synthetic oligonucleotide
  Antisense strand to SEQ ID NO: 105670
aaccacauugaccuacuua

SEQ ID NO: 105672 - RNA, 19 nt, Artificial Sequence
  Description of Artificial Sequence: Synthetic oligonucleotide
  Sense strand starting at position 131 of SEQ ID NO: 1332
aggucaaugugguuagaau

SEQ ID NO: 105673 - RNA, 19 nt, Artificial Sequence
  Description of Artificial Sequence: Synthetic oligonucleotide
  Antisense strand to SEQ ID NO: 105672
auucuaaccacauugaccu

SEQ ID NO: 105674 - RNA, 19 nt, Artificial Sequence
  Description of Artificial Sequence: Synthetic oligonucleotide
  Sense strand starting at position 132 of SEQ ID NO: 1332
ggucaaugugguuagaaug

SEQ ID NO: 105675 - RNA, 19 nt, Artificial Sequence
  Description of Artificial Sequence: Synthetic oligonucleotide
  Antisense strand to SEQ ID NO: 105674
cauucuaaccacauugacc

SEQ ID NO: 105676 - RNA, 19 nt, Artificial Sequence
  Description of Artificial Sequence: Synthetic oligonucleotide
  Sense strand starting at position 138 of SEQ ID NO: 1332
ugugguuagaauggaauga

SEQ ID NO: 105677 - RNA, 19 nt, Artificial Sequence
  Description of Artificial Sequence: Synthetic oligonucleotide
  Antisense strand to SEQ ID NO: 105676
ucauuccauucuaaccaca

SEQ ID NO: 105678 - RNA, 19 nt, Artificial Sequence
  Description of Artificial Sequence: Synthetic oligonucleotide
  Sense strand starting at position 158 of SEQ ID NO: 1332
augggacugagugguagaa

SEQ ID NO: 105679 - RNA, 19 nt, Artificial Sequence
  Description of Artificial Sequence: Synthetic oligonucleotide
  Antisense strand to SEQ ID NO: 105678
uucuaccacucagucccau

SEQ ID NO: 105680 - RNA, 19 nt, Artificial Sequence
  Description of Artificial Sequence: Synthetic oligonucleotide
  Sense strand starting at position 209 of SEQ ID NO: 1332
agaggagggucacaaagua

SEQ ID NO: 105681 - RNA, 19 nt, Artificial Sequence
  Description of Artificial Sequence: Synthetic oligonucleotide
  Antisense strand to SEQ ID NO: 105680
uacuuugugacccuccucu

SEQ ID NO: 105682 - RNA, 19 nt, Artificial Sequence
  Description of Artificial Sequence: Synthetic oligonucleotide
  Sense strand starting at position 350 of SEQ ID NO: 1332
agccaagguugacugaauu

SEQ ID NO: 105683 - RNA, 19 nt, Artificial Sequence
  Description of Artificial Sequence: Synthetic oligonucleotide
  Antisense strand to SEQ ID NO: 105682
aauucagucaaccuuggcu

SEQ ID NO: 105684 - RNA, 19 nt, Artificial Sequence
  Description of Artificial Sequence: Synthetic oligonucleotide
  Sense strand starting at position 374 of SEQ ID NO: 1332
gcuuaaacaccucaagugu

SEQ ID NO: 105685 - RNA, 19 nt, Artificial Sequence
  Description of Artificial Sequence: Synthetic oligonucleotide
  Antisense strand to SEQ ID NO: 105684
acacuugagguguuuaagc

SEQ ID NO: 105686 - RNA, 19 nt, Artificial Sequence
  Description of Artificial Sequence: Synthetic oligonucleotide
  Sense strand starting at position 474 of SEQ ID NO: 1332
ucaagucuugacugaaaug

SEQ ID NO: 105687 - RNA, 19 nt, Artificial Sequence
  Description of Artificial Sequence: Synthetic oligonucleotide
  Antisense strand to SEQ ID NO: 105686
cauuucagucaagacuuga

SEQ ID NO: 105688 - RNA, 19 nt, Artificial Sequence
  Description of Artificial Sequence: Synthetic oligonucleotide
  Sense strand starting at position 820 of SEQ ID NO: 1332
gacagugugucccucacuu

SEQ ID NO: 105689 - RNA, 19 nt, Artificial Sequence
  Description of Artificial Sequence: Synthetic oligonucleotide
  Antisense strand to SEQ ID NO: 105688
aagugagggacacacuguc

SEQ ID NO: 105690 - RNA, 19 nt, Artificial Sequence
  Description of Artificial Sequence: Synthetic oligonucleotide
  Sense strand starting at position 857 of SEQ ID NO: 1332
gcuggagugcaauaagaac

SEQ ID NO: 105691 - RNA, 19 nt, Artificial Sequence
  Description of Artificial Sequence: Synthetic oligonucleotide
  Antisense strand to SEQ ID NO: 105690
guucuuauugcacuccagc

SEQ ID NO: 105692 - RNA, 19 nt, Artificial Sequence
  Description of Artificial Sequence: Synthetic oligonucleotide
  Sense strand starting at position 1063 of SEQ ID NO: 1332
gccuccuaagaugauuaca

SEQ ID NO: 105693 - RNA, 19 nt, Artificial Sequence
  Description of Artificial Sequence: Synthetic oligonucleotide
  Antisense strand to SEQ ID NO: 105692
uguaaucaucuuaggaggc

SEQ ID NO: 105694 - RNA, 19 nt, Artificial Sequence
  Description of Artificial Sequence: Synthetic oligonucleotide
  Sense strand starting at position 1108 of SEQ ID NO: 1332
agcaguucugaauaaugau

SEQ ID NO: 105695 - RNA, 19 nt, Artificial Sequence
  Description of Artificial Sequence: Synthetic oligonucleotide
  Antisense strand to SEQ ID NO: 105694
aucauuauucagaacugcu

SEQ ID NO: 105696 - RNA, 19 nt, Artificial Sequence
  Description of Artificial Sequence: Synthetic oligonucleotide
  Sense strand starting at position 1216 of SEQ ID NO: 1332
aguguuuacggagggacua

SEQ ID NO: 105697 - RNA, 19 nt, Artificial Sequence
  Description of Artificial Sequence: Synthetic oligonucleotide
  Antisense strand to SEQ ID NO: 105696
uagucccuccguaaacacu

SEQ ID NO: 105698 - RNA, 19 nt, Artificial Sequence
  Description of Artificial Sequence: Synthetic oligonucleotide
  Sense strand starting at position 1667 of SEQ ID NO: 1332
auuaucacuugauuggauu

SEQ ID NO: 105699 - RNA, 19 nt, Artificial Sequence
  Description of Artificial Sequence: Synthetic oligonucleotide
  Antisense strand to SEQ ID NO: 105698
aauccaaucaagugauaau

SEQ ID NO: 105700 - RNA, 19 nt, Artificial Sequence
  Description of Artificial Sequence: Synthetic oligonucleotide
  Sense strand starting at position 1668 of SEQ ID NO: 1332
uuaucacuugauuggauua

SEQ ID NO: 105701 - RNA, 19 nt, Artificial Sequence
  Description of Artificial Sequence: Synthetic oligonucleotide
  Antisense strand to SEQ ID NO: 105700
uaauccaaucaagugauaa

SEQ ID NO: 105702 - RNA, 19 nt, Artificial Sequence
  Description of Artificial Sequence: Synthetic oligonucleotide
  Sense strand starting at position 2407 of SEQ ID NO: 1332
ucgggcucauaguucuaga

SEQ ID NO: 105703 - RNA, 19 nt, Artificial Sequence
  Description of Artificial Sequence: Synthetic oligonucleotide
  Antisense strand to SEQ ID NO: 105702
ucuagaacuaugagcccga

SEQ ID NO: 105704 - RNA, 19 nt, Artificial Sequence
  Description of Artificial Sequence: Synthetic oligonucleotide
  Sense strand starting at position 2560 of SEQ ID NO: 1332
ggagauguagucuggagcu

SEQ ID NO: 105705 - RNA, 19 nt, Artificial Sequence
  Description of Artificial Sequence: Synthetic oligonucleotide
  Antisense strand to SEQ ID NO: 105704
agcuccagacuacaucucc

SEQ ID NO: 105706 - RNA, 19 nt, Artificial Sequence
  Description of Artificial Sequence: Synthetic oligonucleotide
  Sense strand starting at position 2562 of SEQ ID NO: 1332
agauguagucuggagcuca

SEQ ID NO: 105707 - RNA, 19 nt, Artificial Sequence
  Description of Artificial Sequence: Synthetic oligonucleotide
  Antisense strand to SEQ ID NO: 105706
ugagcuccagacuacaucu

SEQ ID NO: 105708 - RNA, 19 nt, Artificial Sequence
  Description of Artificial Sequence: Synthetic oligonucleotide
  Sense strand starting at position 2576 of SEQ ID NO: 1332
gcucauaacgguuaguagu

SEQ ID NO: 105709 - RNA, 19 nt, Artificial Sequence
  Description of Artificial Sequence: Synthetic oligonucleotide
  Antisense strand to SEQ ID NO: 105708
acuacuaaccguuaugagc

SEQ ID NO: 105710 - RNA, 19 nt, Artificial Sequence
  Description of Artificial Sequence: Synthetic oligonucleotide
  Sense strand starting at position 2578 of SEQ ID NO: 1332
ucauaacgguuaguaguaa

SEQ ID NO: 105711 - RNA, 19 nt, Artificial Sequence
  Description of Artificial Sequence: Synthetic oligonucleotide
  Antisense strand to SEQ ID NO: 105710
uuacuacuaaccguuauga

SEQ ID NO: 105712 - RNA, 19 nt, Artificial Sequence
  Description of Artificial Sequence: Synthetic oligonucleotide
  Sense strand starting at position 2589 of SEQ ID NO: 1332
aguaguaauaguugugauu

SEQ ID NO: 105713 - RNA, 19 nt, Artificial Sequence
  Description of Artificial Sequence: Synthetic oligonucleotide
  Antisense strand to SEQ ID NO: 105712
aaucacaacuauuacuacu

SEQ ID NO: 105714 - RNA, 19 nt, Artificial Sequence
  Description of Artificial Sequence: Synthetic oligonucleotide
  Sense strand starting at position 2628 of SEQ ID NO: 1332
agcguugugauccaaagga

SEQ ID NO: 105715 - RNA, 19 nt, Artificial Sequence
  Description of Artificial Sequence: Synthetic oligonucleotide
  Antisense strand to SEQ ID NO: 105714
uccuuuggaucacaacgcu

SEQ ID NO: 105716 - RNA, 19 nt, Artificial Sequence
  Description of Artificial Sequence: Synthetic oligonucleotide
  Sense strand starting at position 2632 of SEQ ID NO: 1332
uugugauccaaaggaaggu

SEQ ID NO: 105717 - RNA, 19 nt, Artificial Sequence
  Description of Artificial Sequence: Synthetic oligonucleotide
  Antisense strand to SEQ ID NO: 105716
accuuccuuuggaucacaa

SEQ ID NO: 105718 - RNA, 19 nt, Artificial Sequence
  Description of Artificial Sequence: Synthetic oligonucleotide
  Sense strand starting at position 2694 of SEQ ID NO: 1332
gggcuuacugggagcuguu

SEQ ID NO: 105719 - RNA, 19 nt, Artificial Sequence
  Description of Artificial Sequence: Synthetic oligonucleotide
  Antisense strand to SEQ ID NO: 105718
aacagcucccaguaagccc

SEQ ID NO: 105720 - RNA, 19 nt, Artificial Sequence
  Description of Artificial Sequence: Synthetic oligonucleotide
  Sense strand starting at position 2746 of SEQ ID NO: 1332
uauggaucccugugggaua

SEQ ID NO: 105721 - RNA, 19 nt, Artificial Sequence
  Description of Artificial Sequence: Synthetic oligonucleotide
  Antisense strand to SEQ ID NO: 105720
uaucccacagggauccaua

SEQ ID NO: 105722 - RNA, 19 nt, Artificial Sequence
  Description of Artificial Sequence: Synthetic oligonucleotide
  Sense strand starting at position 2748 of SEQ ID NO: 1332
uggaucccugugggauauu

SEQ ID NO: 105723 - RNA, 19 nt, Artificial Sequence
  Description of Artificial Sequence: Synthetic oligonucleotide
  Antisense strand to SEQ ID NO: 105722
aauaucccacagggaucca

SEQ ID NO: 105724 - RNA, 19 nt, Artificial Sequence
  Description of Artificial Sequence: Synthetic oligonucleotide
  Sense strand starting at position 2795 of SEQ ID NO: 1332
aaauguuuccugcaggaca

SEQ ID NO: 105725 - RNA, 19 nt, Artificial Sequence
  Description of Artificial Sequence: Synthetic oligonucleotide
  Antisense strand to SEQ ID NO: 105724
uguccugcaggaaacauuu

SEQ ID NO: 105726 - RNA, 19 nt, Artificial Sequence
  Description of Artificial Sequence: Synthetic oligonucleotide
  Sense strand starting at position 2832 of SEQ ID NO: 1332
ggucgucuaguccaacuuu

SEQ ID NO: 105727 - RNA, 19 nt, Artificial Sequence
  Description of Artificial Sequence: Synthetic oligonucleotide
  Antisense strand to SEQ ID NO: 105726
aaaguuggacuagacgacc

SEQ ID NO: 105728 - RNA, 19 nt, Artificial Sequence
  Description of Artificial Sequence: Synthetic oligonucleotide
  Sense strand starting at position 2852 of SEQ ID NO: 1332
uccucuacagauugugaaa

SEQ ID NO: 105729 - RNA, 19 nt, Artificial Sequence
  Description of Artificial Sequence: Synthetic oligonucleotide
  Antisense strand to SEQ ID NO: 105728
uuucacaaucuguagagga

SEQ ID NO: 105730 - RNA, 19 nt, Artificial Sequence
  Description of Artificial Sequence: Synthetic oligonucleotide
  Sense strand starting at position 2983 of SEQ ID NO: 1332
guuacaaaggcuuguggga

SEQ ID NO: 105731 - RNA, 19 nt, Artificial Sequence
  Description of Artificial Sequence: Synthetic oligonucleotide
  Antisense strand to SEQ ID NO: 105730
ucccacaagccuuuguaac

SEQ ID NO: 105732 - RNA, 19 nt, Artificial Sequence
  Description of Artificial Sequence: Synthetic oligonucleotide
  Sense strand starting at position 3069 of SEQ ID NO: 1332
gggcucuuuccuuaagcau

SEQ ID NO: 105733 - RNA, 19 nt, Artificial Sequence
  Description of Artificial Sequence: Synthetic oligonucleotide
  Antisense strand to SEQ ID NO: 105732
augcuuaaggaaagagccc

SEQ ID NO: 105734 - RNA, 19 nt, Artificial Sequence
  Description of Artificial Sequence: Synthetic oligonucleotide
  Sense strand starting at position 3255 of SEQ ID NO: 1332
cacggugagaguugggaaa

SEQ ID NO: 105735 - RNA, 19 nt, Artificial Sequence
  Description of Artificial Sequence: Synthetic oligonucleotide
  Antisense strand to SEQ ID NO: 105734
uuucccaacucucaccgug

SEQ ID NO: 105736 - RNA, 19 nt, Artificial Sequence
  Description of Artificial Sequence: Synthetic oligonucleotide
  Sense strand starting at position 3610 of SEQ ID NO: 1332
aagguaugagcugaucuca

SEQ ID NO: 105737 - RNA, 19 nt, Artificial Sequence
  Description of Artificial Sequence: Synthetic oligonucleotide
  Antisense strand to SEQ ID NO: 105736
ugagaucagcucauaccuu

SEQ ID NO: 105738 - RNA, 19 nt, Artificial Sequence
  Description of Artificial Sequence: Synthetic oligonucleotide
  Sense strand starting at position 3653 of SEQ ID NO: 1332
gguggaggguagagagauu

SEQ ID NO: 105739 - RNA, 19 nt, Artificial Sequence
  Description of Artificial Sequence: Synthetic oligonucleotide
  Antisense strand to SEQ ID NO: 105738
aaucucucuacccuccacc

SEQ ID NO: 105740 - RNA, 19 nt, Artificial Sequence
  Description of Artificial Sequence: Synthetic oligonucleotide
  Sense strand starting at position 3979 of SEQ ID NO: 1332
cucuuucucccagggugaa

SEQ ID NO: 105741 - RNA, 19 nt, Artificial Sequence
  Description of Artificial Sequence: Synthetic oligonucleotide
  Antisense strand to SEQ ID NO: 105740
uucacccugggagaaagag

SEQ ID NO: 105742 - RNA, 19 nt, Artificial Sequence
  Description of Artificial Sequence: Synthetic oligonucleotide
  Sense strand starting at position 1 of SEQ ID NO: 1333
gggacugagugguagaaga

SEQ ID NO: 105743 - RNA, 19 nt, Artificial Sequence
  Description of Artificial Sequence: Synthetic oligonucleotide
  Antisense strand to SEQ ID NO: 105742
ucuucuaccacucaguccc

SEQ ID NO: 105744 - RNA, 19 nt, Artificial Sequence
  Description of Artificial Sequence: Synthetic oligonucleotide
  Sense strand starting at position 50 of SEQ ID NO: 1333
agaggagggucacaaagua

SEQ ID NO: 105745 - RNA, 19 nt, Artificial Sequence
  Description of Artificial Sequence: Synthetic oligonucleotide
  Antisense strand to SEQ ID NO: 105744
uacuuugugacccuccucu

SEQ ID NO: 105746 - RNA, 19 nt, Artificial Sequence
  Description of Artificial Sequence: Synthetic oligonucleotide
  Sense strand starting at position 191 of SEQ ID NO: 1333
agccaagguugacugaauu

SEQ ID NO: 105747 - RNA, 19 nt, Artificial Sequence
  Description of Artificial Sequence: Synthetic oligonucleotide
  Antisense strand to SEQ ID NO: 105746
aauucagucaaccuuggcu

SEQ ID NO: 105748 - RNA, 19 nt, Artificial Sequence
  Description of Artificial Sequence: Synthetic oligonucleotide
  Sense strand starting at position 215 of SEQ ID NO: 1333
gcuuaaacaccucaagugu

SEQ ID NO: 105749 - RNA, 19 nt, Artificial Sequence
  Description of Artificial Sequence: Synthetic oligonucleotide
  Antisense strand to SEQ ID NO: 105748
acacuugagguguuuaagc

SEQ ID NO: 105750 - RNA, 19 nt, Artificial Sequence
  Description of Artificial Sequence: Synthetic oligonucleotide
  Sense strand starting at position 315 of SEQ ID NO: 1333
ucaagucuugacugaaaug

SEQ ID NO: 105751 - RNA, 19 nt, Artificial Sequence
  Description of Artificial Sequence: Synthetic oligonucleotide
  Antisense strand to SEQ ID NO: 105750
cauuucagucaagacuuga

SEQ ID NO: 105752 - RNA, 19 nt, Artificial Sequence
  Description of Artificial Sequence: Synthetic oligonucleotide
  Sense strand starting at position 416 of SEQ ID NO: 1333
uucuuuccaucagugugua

SEQ ID NO: 105753 - RNA, 19 nt, Artificial Sequence
  Description of Artificial Sequence: Synthetic oligonucleotide
  Antisense strand to SEQ ID NO: 105752
uacacacugauggaaagaa

SEQ ID NO: 105754 - RNA, 19 nt, Artificial Sequence
  Description of Artificial Sequence: Synthetic oligonucleotide
  Sense strand starting at position 419 of SEQ ID NO: 1333
uuuccaucaguguguacuu

SEQ ID NO: 105755 - RNA, 19 nt, Artificial Sequence
  Description of Artificial Sequence: Synthetic oligonucleotide
  Antisense strand to SEQ ID NO: 105754
aaguacacacugauggaaa

SEQ ID NO: 105756 - RNA, 19 nt, Artificial Sequence
  Description of Artificial Sequence: Synthetic oligonucleotide
  Sense strand starting at position 533 of SEQ ID NO: 1333
auagauaccuguuaaauga

SEQ ID NO: 105757 - RNA, 19 nt, Artificial Sequence
  Description of Artificial Sequence: Synthetic oligonucleotide
  Antisense strand to SEQ ID NO: 105756
ucauuuaacagguaucuau

SEQ ID NO: 105758 - RNA, 19 nt, Artificial Sequence
  Description of Artificial Sequence: Synthetic oligonucleotide
  Sense strand starting at position 661 of SEQ ID NO: 1333
gacagugugucccucacuu

SEQ ID NO: 105759 - RNA, 19 nt, Artificial Sequence
  Description of Artificial Sequence: Synthetic oligonucleotide
  Antisense strand to SEQ ID NO: 105758
aagugagggacacacuguc

SEQ ID NO: 105760 - RNA, 19 nt, Artificial Sequence
  Description of Artificial Sequence: Synthetic oligonucleotide
  Sense strand starting at position 698 of SEQ ID NO: 1333
gcuggagugcaauaagaac

SEQ ID NO: 105761 - RNA, 19 nt, Artificial Sequence
  Description of Artificial Sequence: Synthetic oligonucleotide
  Antisense strand to SEQ ID NO: 105760
guucuuauugcacuccagc

SEQ ID NO: 105762 - RNA, 19 nt, Artificial Sequence
  Description of Artificial Sequence: Synthetic oligonucleotide
  Sense strand starting at position 904 of SEQ ID NO: 1333
gccuccuaagaugauuaca

SEQ ID NO: 105763 - RNA, 19 nt, Artificial Sequence
  Description of Artificial Sequence: Synthetic oligonucleotide
  Antisense strand to SEQ ID NO: 105762
uguaaucaucuuaggaggc

SEQ ID NO: 105764 - RNA, 19 nt, Artificial Sequence
  Description of Artificial Sequence: Synthetic oligonucleotide
  Sense strand starting at position 949 of SEQ ID NO: 1333
agcaguucugaauaaugau

SEQ ID NO: 105765 - RNA, 19 nt, Artificial Sequence
  Description of Artificial Sequence: Synthetic oligonucleotide
  Antisense strand to SEQ ID NO: 105764
aucauuauucagaacugcu

SEQ ID NO: 105766 - RNA, 19 nt, Artificial Sequence
  Description of Artificial Sequence: Synthetic oligonucleotide
  Sense strand starting at position 955 of SEQ ID NO: 1333
ucugaauaaugaugaaaug

SEQ ID NO: 105767 - RNA, 19 nt, Artificial Sequence
  Description of Artificial Sequence: Synthetic oligonucleotide
  Antisense strand to SEQ ID NO: 105766
cauuucaucauuauucaga

SEQ ID NO: 105768 - RNA, 19 nt, Artificial Sequence
  Description of Artificial Sequence: Synthetic oligonucleotide
  Sense strand starting at position 1057 of SEQ ID NO: 1333
aguguuuacggagggacua

SEQ ID NO: 105769 - RNA, 19 nt, Artificial Sequence
  Description of Artificial Sequence: Synthetic oligonucleotide
  Antisense strand to SEQ ID NO: 105768
uagucccuccguaaacacu

SEQ ID NO: 105770 - RNA, 19 nt, Artificial Sequence
  Description of Artificial Sequence: Synthetic oligonucleotide
  Sense strand starting at position 1508 of SEQ ID NO: 1333
auuaucacuugauuggauu

SEQ ID NO: 105771 - RNA, 19 nt, Artificial Sequence
  Description of Artificial Sequence: Synthetic oligonucleotide
  Antisense strand to SEQ ID NO: 105770
aauccaaucaagugauaau

SEQ ID NO: 105772 - RNA, 19 nt, Artificial Sequence
  Description of Artificial Sequence: Synthetic oligonucleotide
  Sense strand starting at position 1509 of SEQ ID NO: 1333
uuaucacuugauuggauua

SEQ ID NO: 105773 - RNA, 19 nt, Artificial Sequence
  Description of Artificial Sequence: Synthetic oligonucleotide
  Antisense strand to SEQ ID NO: 105772
uaauccaaucaagugauaa

SEQ ID NO: 105774 - RNA, 19 nt, Artificial Sequence
  Description of Artificial Sequence: Synthetic oligonucleotide
  Sense strand starting at position 1511 of SEQ ID NO: 1333
aucacuugauuggauuauu

SEQ ID NO: 105775 - RNA, 19 nt, Artificial Sequence
  Description of Artificial Sequence: Synthetic oligonucleotide
  Antisense strand to SEQ ID NO: 105774
aauaauccaaucaagugau

SEQ ID NO: 105776 - RNA, 19 nt, Artificial Sequence
  Description of Artificial Sequence: Synthetic oligonucleotide
  Sense strand starting at position 2248 of SEQ ID NO: 1333
ucgggcucauaguucuaga

SEQ ID NO: 105777 - RNA, 19 nt, Artificial Sequence
  Description of Artificial Sequence: Synthetic oligonucleotide
  Antisense strand to SEQ ID NO: 105776
ucuagaacuaugagcccga

SEQ ID NO: 105778 - RNA, 19 nt, Artificial Sequence
  Description of Artificial Sequence: Synthetic oligonucleotide
  Sense strand starting at position 2401 of SEQ ID NO: 1333
ggagauguagucuggagcu

SEQ ID NO: 105779 - RNA, 19 nt, Artificial Sequence
  Description of Artificial Sequence: Synthetic oligonucleotide
  Antisense strand to SEQ ID NO: 105778
agcuccagacuacaucucc

SEQ ID NO: 105780 - RNA, 19 nt, Artificial Sequence
  Description of Artificial Sequence: Synthetic oligonucleotide
  Sense strand starting at position 2403 of SEQ ID NO: 1333
agauguagucuggagcuca

SEQ ID NO: 105781 - RNA, 19 nt, Artificial Sequence
  Description of Artificial Sequence: Synthetic oligonucleotide
  Antisense strand to SEQ ID NO: 105780
ugagcuccagacuacaucu

SEQ ID NO: 105782 - RNA, 19 nt, Artificial Sequence
  Description of Artificial Sequence: Synthetic oligonucleotide
  Sense strand starting at position 2417 of SEQ ID NO: 1333
gcucauaacgguuaguagu

SEQ ID NO: 105783 - RNA, 19 nt, Artificial Sequence
  Description of Artificial Sequence: Synthetic oligonucleotide
  Antisense strand to SEQ ID NO: 105782
acuacuaaccguuaugagc

SEQ ID NO: 105784 - RNA, 19 nt, Artificial Sequence
  Description of Artificial Sequence: Synthetic oligonucleotide
  Sense strand starting at position 2419 of SEQ ID NO: 1333
ucauaacgguuaguaguaa

SEQ ID NO: 105785 - RNA, 19 nt, Artificial Sequence
  Description of Artificial Sequence: Synthetic oligonucleotide
  Antisense strand to SEQ ID NO: 105784
uuacuacuaaccguuauga

SEQ ID NO: 105786 - RNA, 19 nt, Artificial Sequence
  Description of Artificial Sequence: Synthetic oligonucleotide
  Sense strand starting at position 2430 of SEQ ID NO: 1333
aguaguaauaguugugauu

SEQ ID NO: 105787 - RNA, 19 nt, Artificial Sequence
  Description of Artificial Sequence: Synthetic oligonucleotide
  Antisense strand to SEQ ID NO: 105786
aaucacaacuauuacuacu

SEQ ID NO: 105788 - RNA, 19 nt, Artificial Sequence
  Description of Artificial Sequence: Synthetic oligonucleotide
  Sense strand starting at position 2462 of SEQ ID NO: 1333
uggauugagcguugugauc

SEQ ID NO: 105789 - RNA, 19 nt, Artificial Sequence
  Description of Artificial Sequence: Synthetic oligonucleotide
  Antisense strand to SEQ ID NO: 105788
gaucacaacgcucaaucca

SEQ ID NO: 105790 - RNA, 19 nt, Artificial Sequence
  Description of Artificial Sequence: Synthetic oligonucleotide
  Sense strand starting at position 2469 of SEQ ID NO: 1333
agcguugugauccaaagga

SEQ ID NO: 105791 - RNA, 19 nt, Artificial Sequence
  Description of Artificial Sequence: Synthetic oligonucleotide
  Antisense strand to SEQ ID NO: 105790
uccuuuggaucacaacgcu

SEQ ID NO: 105792 - RNA, 19 nt, Artificial Sequence
  Description of Artificial Sequence: Synthetic oligonucleotide
  Sense strand starting at position 2473 of SEQ ID NO: 1333
uugugauccaaaggaaggu

SEQ ID NO: 105793 - RNA, 19 nt, Artificial Sequence
  Description of Artificial Sequence: Synthetic oligonucleotide
  Antisense strand to SEQ ID NO: 105792
accuuccuuuggaucacaa

SEQ ID NO: 105794 - RNA, 19 nt, Artificial Sequence
  Description of Artificial Sequence: Synthetic oligonucleotide
  Sense strand starting at position 2535 of SEQ ID NO: 1333
gggcuuacugggagcuguu

SEQ ID NO: 105795 - RNA, 19 nt, Artificial Sequence
  Description of Artificial Sequence: Synthetic oligonucleotide
  Antisense strand to SEQ ID NO: 105794
aacagcucccaguaagccc

SEQ ID NO: 105796 - RNA, 19 nt, Artificial Sequence
  Description of Artificial Sequence: Synthetic oligonucleotide
  Sense strand starting at position 2575 of SEQ ID NO: 1333
ugagaacaguaguauggau

SEQ ID NO: 105797 - RNA, 19 nt, Artificial Sequence
  Description of Artificial Sequence: Synthetic oligonucleotide
  Antisense strand to SEQ ID NO: 105796
auccauacuacuguucuca

SEQ ID NO: 105798 - RNA, 19 nt, Artificial Sequence
  Description of Artificial Sequence: Synthetic oligonucleotide
  Sense strand starting at position 2587 of SEQ ID NO: 1333
uauggaucccugugggaua

SEQ ID NO: 105799 - RNA, 19 nt, Artificial Sequence
  Description of Artificial Sequence: Synthetic oligonucleotide
  Antisense strand to SEQ ID NO: 105798
uaucccacagggauccaua

SEQ ID NO: 105800 - RNA, 19 nt, Artificial Sequence
  Description of Artificial Sequence: Synthetic oligonucleotide
  Sense strand starting at position 2589 of SEQ ID NO: 1333
uggaucccugugggauauu

SEQ ID NO: 105801 - RNA, 19 nt, Artificial Sequence
  Description of Artificial Sequence: Synthetic oligonucleotide
  Antisense strand to SEQ ID NO: 105800
aauaucccacagggaucca

SEQ ID NO: 105802 - RNA, 19 nt, Artificial Sequence
  Description of Artificial Sequence: Synthetic oligonucleotide
  Sense strand starting at position 2636 of SEQ ID NO: 1333
aaauguuuccugcaggaca

SEQ ID NO: 105803 - RNA, 19 nt, Artificial Sequence
  Description of Artificial Sequence: Synthetic oligonucleotide
  Antisense strand to SEQ ID NO: 105802
uguccugcaggaaacauuu

SEQ ID NO: 105804 - RNA, 19 nt, Artificial Sequence
  Description of Artificial Sequence: Synthetic oligonucleotide
  Sense strand starting at position 2673 of SEQ ID NO: 1333
ggucgucuaguccaacuuu

SEQ ID NO: 105805 - RNA, 19 nt, Artificial Sequence
  Description of Artificial Sequence: Synthetic oligonucleotide
  Antisense strand to SEQ ID NO: 105804
aaaguuggacuagacgacc

SEQ ID NO: 105806 - RNA, 19 nt, Artificial Sequence
  Description of Artificial Sequence: Synthetic oligonucleotide
  Sense strand starting at position 2693 of SEQ ID NO: 1333
uccucuacagauugugaaa

SEQ ID NO: 105807 - RNA, 19 nt, Artificial Sequence
  Description of Artificial Sequence: Synthetic oligonucleotide
  Antisense strand to SEQ ID NO: 105806
uuucacaaucuguagagga

SEQ ID NO: 105808 - RNA, 19 nt, Artificial Sequence
  Description of Artificial Sequence: Synthetic oligonucleotide
  Sense strand starting at position 2824 of SEQ ID NO: 1333
guuacaaaggcuuguggga

SEQ ID NO: 105809 - RNA, 19 nt, Artificial Sequence
  Description of Artificial Sequence: Synthetic oligonucleotide
  Antisense strand to SEQ ID NO: 105808
ucccacaagccuuuguaac

SEQ ID NO: 105810 - RNA, 19 nt, Artificial Sequence
  Description of Artificial Sequence: Synthetic oligonucleotide
  Sense strand starting at position 2910 of SEQ ID NO: 1333
gggcucuuuccuuaagcau

SEQ ID NO: 105811 - RNA, 19 nt, Artificial Sequence
  Description of Artificial Sequence: Synthetic oligonucleotide
  Antisense strand to SEQ ID NO: 105810
augcuuaaggaaagagccc

SEQ ID NO: 105812 - RNA, 19 nt, Artificial Sequence
  Description of Artificial Sequence: Synthetic oligonucleotide
  Sense strand starting at position 3096 of SEQ ID NO: 1333
cacggugagaguugggaaa

SEQ ID NO: 105813 - RNA, 19 nt, Artificial Sequence
  Description of Artificial Sequence: Synthetic oligonucleotide
  Antisense strand to SEQ ID NO: 105812
uuucccaacucucaccgug

SEQ ID NO: 105814 - RNA, 19 nt, Artificial Sequence
  Description of Artificial Sequence: Synthetic oligonucleotide
  Sense strand starting at position 3145 of SEQ ID NO: 1333
gugcuagaggccugucaca

SEQ ID NO: 105815 - RNA, 19 nt, Artificial Sequence
  Description of Artificial Sequence: Synthetic oligonucleotide
  Antisense strand to SEQ ID NO: 105814
ugugacaggccucuagcac

SEQ ID NO: 105816 - RNA, 19 nt, Artificial Sequence
  Description of Artificial Sequence: Synthetic oligonucleotide
  Sense strand starting at position 3451 of SEQ ID NO: 1333
aagguaugagcugaucuca

SEQ ID NO: 105817 - RNA, 19 nt, Artificial Sequence
  Description of Artificial Sequence: Synthetic oligonucleotide
  Antisense strand to SEQ ID NO: 105816
ugagaucagcucauaccuu

SEQ ID NO: 105818 - RNA, 19 nt, Artificial Sequence
  Description of Artificial Sequence: Synthetic oligonucleotide
  Sense strand starting at position 3494 of SEQ ID NO: 1333
gguggaggguagagagauu

SEQ ID NO: 105819 - RNA, 19 nt, Artificial Sequence
  Description of Artificial Sequence: Synthetic oligonucleotide
  Antisense strand to SEQ ID NO: 105818
aaucucucuacccuccacc

SEQ ID NO: 105820 - RNA, 19 nt, Artificial Sequence
  Description of Artificial Sequence: Synthetic oligonucleotide
  Sense strand starting at position 3820 of SEQ ID NO: 1333
cucuuucucccagggugaa

SEQ ID NO: 105821 - RNA, 19 nt, Artificial Sequence
  Description of Artificial Sequence: Synthetic oligonucleotide
  Antisense strand to SEQ ID NO: 105820
uucacccugggagaaagag

SEQ ID NO: 105822 - RNA, 19 nt, Artificial Sequence
  Description of Artificial Sequence: Synthetic oligonucleotide
  Sense strand starting at position 90 of SEQ ID NO: 1339
ggguuaggcucgaggacaa

SEQ ID NO: 105823 - RNA, 19 nt, Artificial Sequence
  Description of Artificial Sequence: Synthetic oligonucleotide
  Antisense strand to SEQ ID NO: 105822
uuguccucgagccuaaccc

SEQ ID NO: 105824 - RNA, 19 nt, Artificial Sequence
  Description of Artificial Sequence: Synthetic oligonucleotide
  Sense strand starting at position 339 of SEQ ID NO: 1339
cagucacucuccugggaaa

SEQ ID NO: 105825 - RNA, 19 nt, Artificial Sequence
  Description of Artificial Sequence: Synthetic oligonucleotide
  Antisense strand to SEQ ID NO: 105824
uuucccaggagagugacug

SEQ ID NO: 105826 - RNA, 19 nt, Artificial Sequence
  Description of Artificial Sequence: Synthetic oligonucleotide
  Sense strand starting at position 341 of SEQ ID NO: 1339
gucacucuccugggaaagu

SEQ ID NO: 105827 - RNA, 19 nt, Artificial Sequence
  Description of Artificial Sequence: Synthetic oligonucleotide
  Antisense strand to SEQ ID NO: 105826
acuuucccaggagagugac

SEQ ID NO: 105828 - RNA, 19 nt, Artificial Sequence
  Description of Artificial Sequence: Synthetic oligonucleotide
  Sense strand starting at position 414 of SEQ ID NO: 1339
uuaguuauguaugcugacu

SEQ ID NO: 105829 - RNA, 19 nt, Artificial Sequence
  Description of Artificial Sequence: Synthetic oligonucleotide
  Antisense strand to SEQ ID NO: 105828
agucagcauacauaacuaa

SEQ ID NO: 105830 - RNA, 19 nt, Artificial Sequence
  Description of Artificial Sequence: Synthetic oligonucleotide
  Sense strand starting at position 416 of SEQ ID NO: 1339
aguuauguaugcugacuaa

SEQ ID NO: 105831 - RNA, 19 nt, Artificial Sequence
  Description of Artificial Sequence: Synthetic oligonucleotide
  Antisense strand to SEQ ID NO: 105830
uuagucagcauacauaacu

SEQ ID NO: 105832 - RNA, 19 nt, Artificial Sequence
  Description of Artificial Sequence: Synthetic oligonucleotide
  Sense strand starting at position 472 of SEQ ID NO: 1339
auguguuaauccguuauag

SEQ ID NO: 105833 - RNA, 19 nt, Artificial Sequence
  Description of Artificial Sequence: Synthetic oligonucleotide
  Antisense strand to SEQ ID NO: 105832
cuauaacggauuaacacau

SEQ ID NO: 105834 - RNA, 19 nt, Artificial Sequence
  Description of Artificial Sequence: Synthetic oligonucleotide
  Sense strand starting at position 473 of SEQ ID NO: 1339
uguguuaauccguuauagc

SEQ ID NO: 105835 - RNA, 19 nt, Artificial Sequence
  Description of Artificial Sequence: Synthetic oligonucleotide
  Antisense strand to SEQ ID NO: 105834
gcuauaacggauuaacaca

SEQ ID NO: 105836 - RNA, 19 nt, Artificial Sequence
  Description of Artificial Sequence: Synthetic oligonucleotide
  Sense strand starting at position 474 of SEQ ID NO: 1339
guguuaauccguuauagcc

SEQ ID NO: 105837 - RNA, 19 nt, Artificial Sequence
  Description of Artificial Sequence: Synthetic oligonucleotide
  Antisense strand to SEQ ID NO: 105836
ggcuauaacggauuaacac

SEQ ID NO: 105838 - RNA, 19 nt, Artificial Sequence
  Description of Artificial Sequence: Synthetic oligonucleotide
  Sense strand starting at position 812 of SEQ ID NO: 1339
ccuccucucgaguaguauc

SEQ ID NO: 105839 - RNA, 19 nt, Artificial Sequence
  Description of Artificial Sequence: Synthetic oligonucleotide
  Antisense strand to SEQ ID NO: 105838
gauacuacucgagaggagg

SEQ ID NO: 105840 - RNA, 19 nt, Artificial Sequence
  Description of Artificial Sequence: Synthetic oligonucleotide
  Sense strand starting at position 820 of SEQ ID NO: 1339
cgaguaguaucuggcuugu

SEQ ID NO: 105841 - RNA, 19 nt, Artificial Sequence
  Description of Artificial Sequence: Synthetic oligonucleotide
  Antisense strand to SEQ ID NO: 105840
acaagccagauacuacucg

SEQ ID NO: 105842 - RNA, 19 nt, Artificial Sequence
  Description of Artificial Sequence: Synthetic oligonucleotide
  Sense strand starting at position 824 of SEQ ID NO: 1339
uaguaucuggcuuguucua

SEQ ID NO: 105843 - RNA, 19 nt, Artificial Sequence
  Description of Artificial Sequence: Synthetic oligonucleotide
  Antisense strand to SEQ ID NO: 105842
uagaacaagccagauacua

SEQ ID NO: 105844 - RNA, 19 nt, Artificial Sequence
  Description of Artificial Sequence: Synthetic oligonucleotide
  Sense strand starting at position 826 of SEQ ID NO: 1339
guaucuggcuuguucuaaa

SEQ ID NO: 105845 - RNA, 19 nt, Artificial Sequence
  Description of Artificial Sequence: Synthetic oligonucleotide
  Antisense strand to SEQ ID NO: 105844
uuuagaacaagccagauac

SEQ ID NO: 105846 - RNA, 19 nt, Artificial Sequence
  Description of Artificial Sequence: Synthetic oligonucleotide
  Sense strand starting at position 829 of SEQ ID NO: 1339
ucuggcuuguucuaaacau

SEQ ID NO: 105847 - RNA, 19 nt, Artificial Sequence
  Description of Artificial Sequence: Synthetic oligonucleotide
  Antisense strand to SEQ ID NO: 105846
auguuuagaacaagccaga

SEQ ID NO: 105848 - RNA, 19 nt, Artificial Sequence
  Description of Artificial Sequence: Synthetic oligonucleotide
  Sense strand starting at position 913 of SEQ ID NO: 1339
agggccaccuucuguaauu

SEQ ID NO: 105849 - RNA, 19 nt, Artificial Sequence
  Description of Artificial Sequence: Synthetic oligonucleotide
  Antisense strand to SEQ ID NO: 105848
aauuacagaagguggcccu

SEQ ID NO: 105850 - RNA, 19 nt, Artificial Sequence
  Description of Artificial Sequence: Synthetic oligonucleotide
  Sense strand starting at position 914 of SEQ ID NO: 1339
gggccaccuucuguaauuu

SEQ ID NO: 105851 - RNA, 19 nt, Artificial Sequence
  Description of Artificial Sequence: Synthetic oligonucleotide
  Antisense strand to SEQ ID NO: 105850
aaauuacagaagguggccc

SEQ ID NO: 105852 - RNA, 19 nt, Artificial Sequence
  Description of Artificial Sequence: Synthetic oligonucleotide
  Sense strand starting at position 1951 of SEQ ID NO: 1339
ggugcaaucucagaaucac

SEQ ID NO: 105853 - RNA, 19 nt, Artificial Sequence
  Description of Artificial Sequence: Synthetic oligonucleotide
  Antisense strand to SEQ ID NO: 105852
gugauucugagauugcacc

SEQ ID NO: 105854 - RNA, 19 nt, Artificial Sequence
  Description of Artificial Sequence: Synthetic oligonucleotide
  Sense strand starting at position 2689 of SEQ ID NO: 1339
caauguguuggccaggcua

SEQ ID NO: 105855 - RNA, 19 nt, Artificial Sequence
  Description of Artificial Sequence: Synthetic oligonucleotide
  Antisense strand to SEQ ID NO: 105854
uagccuggccaacacauug

SEQ ID NO: 105856 - RNA, 19 nt, Artificial Sequence
  Description of Artificial Sequence: Synthetic oligonucleotide
  Sense strand starting at position 2774 of SEQ ID NO: 1339
agacaccaugccugaucaa

SEQ ID NO: 105857 - RNA, 19 nt, Artificial Sequence
  Description of Artificial Sequence: Synthetic oligonucleotide
  Antisense strand to SEQ ID NO: 105856
uugaucaggcauggugucu

SEQ ID NO: 105858 - RNA, 19 nt, Artificial Sequence
  Description of Artificial Sequence: Synthetic oligonucleotide
  Sense strand starting at position 3020 of SEQ ID NO: 1339
ucggcuguuacauguaaca

SEQ ID NO: 105859 - RNA, 19 nt, Artificial Sequence
  Description of Artificial Sequence: Synthetic oligonucleotide
  Antisense strand to SEQ ID NO: 105858
uguuacauguaacagccga

SEQ ID NO: 105860 - RNA, 19 nt, Artificial Sequence
  Description of Artificial Sequence: Synthetic oligonucleotide
  Sense strand starting at position 3070 of SEQ ID NO: 1339
guacgcaauuaugauagaa

SEQ ID NO: 105861 - RNA, 19 nt, Artificial Sequence
  Description of Artificial Sequence: Synthetic oligonucleotide
  Antisense strand to SEQ ID NO: 105860
uucuaucauaauugcguac

SEQ ID NO: 105862 - RNA, 19 nt, Artificial Sequence
  Description of Artificial Sequence: Synthetic oligonucleotide
  Sense strand starting at position 3149 of SEQ ID NO: 1339
gagguuuaagcccaggauu

SEQ ID NO: 105863 - RNA, 19 nt, Artificial Sequence
  Description of Artificial Sequence: Synthetic oligonucleotide
  Antisense strand to SEQ ID NO: 105862
aauccugggcuuaaaccuc

SEQ ID NO: 105864 - RNA, 19 nt, Artificial Sequence
  Description of Artificial Sequence: Synthetic oligonucleotide
  Sense strand starting at position 3151 of SEQ ID NO: 1339
gguuuaagcccaggauuau

SEQ ID NO: 105865 - RNA, 19 nt, Artificial Sequence
  Description of Artificial Sequence: Synthetic oligonucleotide
  Antisense strand to SEQ ID NO: 105864
auaauccugggcuuaaacc

SEQ ID NO: 105866 - RNA, 19 nt, Artificial Sequence
  Description of Artificial Sequence: Synthetic oligonucleotide
  Sense strand starting at position 3152 of SEQ ID NO: 1339
guuuaagcccaggauuaug

SEQ ID NO: 105867 - RNA, 19 nt, Artificial Sequence
  Description of Artificial Sequence: Synthetic oligonucleotide
  Antisense strand to SEQ ID NO: 105866
cauaauccugggcuuaaac

SEQ ID NO: 105868 - RNA, 19 nt, Artificial Sequence
  Description of Artificial Sequence: Synthetic oligonucleotide
  Sense strand starting at position 127 of SEQ ID NO: 1338
uuccaacugguuuguauua

SEQ ID NO: 105869 - RNA, 19 nt, Artificial Sequence
  Description of Artificial Sequence: Synthetic oligonucleotide
  Antisense strand to SEQ ID NO: 105868
uaauacaaaccaguuggaa

SEQ ID NO: 105870 - RNA, 19 nt, Artificial Sequence
  Description of Artificial Sequence: Synthetic oligonucleotide
  Sense strand starting at position 129 of SEQ ID NO: 1338
ccaacugguuuguauuagu

SEQ ID NO: 105871 - RNA, 19 nt, Artificial Sequence
  Description of Artificial Sequence: Synthetic oligonucleotide
  Antisense strand to SEQ ID NO: 105870
acuaauacaaaccaguugg

SEQ ID NO: 105872 - RNA, 19 nt, Artificial Sequence
  Description of Artificial Sequence: Synthetic oligonucleotide
  Sense strand starting at position 136 of SEQ ID NO: 1338
guuuguauuagugcuggca

SEQ ID NO: 105873 - RNA, 19 nt, Artificial Sequence
  Description of Artificial Sequence: Synthetic oligonucleotide
  Antisense strand to SEQ ID NO: 105872
ugccagcacuaauacaaac

SEQ ID NO: 105874 - RNA, 19 nt, Artificial Sequence
  Description of Artificial Sequence: Synthetic oligonucleotide
  Sense strand starting at position 744 of SEQ ID NO: 1338
gugggugugugacuuaauu

SEQ ID NO: 105875 - RNA, 19 nt, Artificial Sequence
  Description of Artificial Sequence: Synthetic oligonucleotide
  Antisense strand to SEQ ID NO: 105874
aauuaagucacacacccac

SEQ ID NO: 105876 - RNA, 19 nt, Artificial Sequence
  Description of Artificial Sequence: Synthetic oligonucleotide
  Sense strand starting at position 826 of SEQ ID NO: 1338
aucacugugcucuggcuaa

SEQ ID NO: 105877 - RNA, 19 nt, Artificial Sequence
  Description of Artificial Sequence: Synthetic oligonucleotide
  Antisense strand to SEQ ID NO: 105876
uuagccagagcacagugau

SEQ ID NO: 105878 - RNA, 19 nt, Artificial Sequence
  Description of Artificial Sequence: Synthetic oligonucleotide
  Sense strand starting at position 991 of SEQ ID NO: 1338
gcccgucucauugggaaga

SEQ ID NO: 105879 - RNA, 19 nt, Artificial Sequence
  Description of Artificial Sequence: Synthetic oligonucleotide
  Antisense strand to SEQ ID NO: 105878
ucuucccaaugagacgggc

SEQ ID NO: 105880 - RNA, 19 nt, Artificial Sequence
  Description of Artificial Sequence: Synthetic oligonucleotide
  Sense strand starting at position 992 of SEQ ID NO: 1338
cccgucucauugggaagaa

SEQ ID NO: 105881 - RNA, 19 nt, Artificial Sequence
  Description of Artificial Sequence: Synthetic oligonucleotide
  Antisense strand to SEQ ID NO: 105880
uucuucccaaugagacggg

SEQ ID NO: 105882 - RNA, 19 nt, Artificial Sequence
  Description of Artificial Sequence: Synthetic oligonucleotide
  Sense strand starting at position 993 of SEQ ID NO: 1338
ccgucucauugggaagaaa

SEQ ID NO: 105883 - RNA, 19 nt, Artificial Sequence
  Description of Artificial Sequence: Synthetic oligonucleotide
  Antisense strand to SEQ ID NO: 105882
uuucuucccaaugagacgg

SEQ ID NO: 105884 - RNA, 19 nt, Artificial Sequence
  Description of Artificial Sequence: Synthetic oligonucleotide
  Sense strand starting at position 1478 of SEQ ID NO: 1338
gcggaucaucgauggcuga

SEQ ID NO: 105885 - RNA, 19 nt, Artificial Sequence
  Description of Artificial Sequence: Synthetic oligonucleotide
  Antisense strand to SEQ ID NO: 105884
ucagccaucgaugauccgc

SEQ ID NO: 105886 - RNA, 19 nt, Artificial Sequence
  Description of Artificial Sequence: Synthetic oligonucleotide
  Sense strand starting at position 1479 of SEQ ID NO: 1338
cggaucaucgauggcugaa

SEQ ID NO: 105887 - RNA, 19 nt, Artificial Sequence
  Description of Artificial Sequence: Synthetic oligonucleotide
  Antisense strand to SEQ ID NO: 105886
uucagccaucgaugauccg

SEQ ID NO: 105888 - RNA, 19 nt, Artificial Sequence
  Description of Artificial Sequence: Synthetic oligonucleotide
  Sense strand starting at position 1481 of SEQ ID NO: 1338
gaucaucgauggcugaaga

SEQ ID NO: 105889 - RNA, 19 nt, Artificial Sequence
  Description of Artificial Sequence: Synthetic oligonucleotide
  Antisense strand to SEQ ID NO: 105888
ucuucagccaucgaugauc

SEQ ID NO: 105890 - RNA, 19 nt, Artificial Sequence
  Description of Artificial Sequence: Synthetic oligonucleotide
  Sense strand starting at position 1704 of SEQ ID NO: 1338
ggaagcaaccucugugaca

SEQ ID NO: 105891 - RNA, 19 nt, Artificial Sequence
  Description of Artificial Sequence: Synthetic oligonucleotide
  Antisense strand to SEQ ID NO: 105890
ugucacagagguugcuucc

SEQ ID NO: 105892 - RNA, 19 nt, Artificial Sequence
  Description of Artificial Sequence: Synthetic oligonucleotide
  Sense strand starting at position 1854 of SEQ ID NO: 1338
ggguuaggcucgaggacaa

SEQ ID NO: 105893 - RNA, 19 nt, Artificial Sequence
  Description of Artificial Sequence: Synthetic oligonucleotide
  Antisense strand to SEQ ID NO: 105892
uuguccucgagccuaaccc

SEQ ID NO: 105894 - RNA, 19 nt, Artificial Sequence
  Description of Artificial Sequence: Synthetic oligonucleotide
  Sense strand starting at position 2103 of SEQ ID NO: 1338
cagucacucuccugggaaa

SEQ ID NO: 105895 - RNA, 19 nt, Artificial Sequence
  Description of Artificial Sequence: Synthetic oligonucleotide
  Antisense strand to SEQ ID NO: 105894
uuucccaggagagugacug

SEQ ID NO: 105896 - RNA, 19 nt, Artificial Sequence
  Description of Artificial Sequence: Synthetic oligonucleotide
  Sense strand starting at position 2105 of SEQ ID NO: 1338
gucacucuccugggaaagu

SEQ ID NO: 105897 - RNA, 19 nt, Artificial Sequence
  Description of Artificial Sequence: Synthetic oligonucleotide
  Antisense strand to SEQ ID NO: 105896
acuuucccaggagagugac

SEQ ID NO: 105898 - RNA, 19 nt, Artificial Sequence
  Description of Artificial Sequence: Synthetic oligonucleotide
  Sense strand starting at position 2178 of SEQ ID NO: 1338
uuaguuauguaugcugacu

SEQ ID NO: 105899 - RNA, 19 nt, Artificial Sequence
  Description of Artificial Sequence: Synthetic oligonucleotide
  Antisense strand to SEQ ID NO: 105898
agucagcauacauaacuaa

SEQ ID NO: 105900 - RNA, 19 nt, Artificial Sequence
  Description of Artificial Sequence: Synthetic oligonucleotide
  Sense strand starting at position 2180 of SEQ ID NO: 1338
aguuauguaugcugacuaa

SEQ ID NO: 105901 - RNA, 19 nt, Artificial Sequence
  Description of Artificial Sequence: Synthetic oligonucleotide
  Antisense strand to SEQ ID NO: 105900
uuagucagcauacauaacu

SEQ ID NO: 105902 - RNA, 19 nt, Artificial Sequence
  Description of Artificial Sequence: Synthetic oligonucleotide
  Sense strand starting at position 2236 of SEQ ID NO: 1338
auguguuaauccguuauag

SEQ ID NO: 105903 - RNA, 19 nt, Artificial Sequence
  Description of Artificial Sequence: Synthetic oligonucleotide
  Antisense strand to SEQ ID NO: 105902
cuauaacggauuaacacau

SEQ ID NO: 105904 - RNA, 19 nt, Artificial Sequence
  Description of Artificial Sequence: Synthetic oligonucleotide
  Sense strand starting at position 2237 of SEQ ID NO: 1338
uguguuaauccguuauagc

SEQ ID NO: 105905 - RNA, 19 nt, Artificial Sequence
  Description of Artificial Sequence: Synthetic oligonucleotide
  Antisense strand to SEQ ID NO: 105904
gcuauaacggauuaacaca

SEQ ID NO: 105906 - RNA, 19 nt, Artificial Sequence
  Description of Artificial Sequence: Synthetic oligonucleotide
  Sense strand starting at position 2238 of SEQ ID NO: 1338
guguuaauccguuauagcc

SEQ ID NO: 105907 - RNA, 19 nt, Artificial Sequence
  Description of Artificial Sequence: Synthetic oligonucleotide
  Antisense strand to SEQ ID NO: 105906
ggcuauaacggauuaacac

SEQ ID NO: 105908 - RNA, 19 nt, Artificial Sequence
  Description of Artificial Sequence: Synthetic oligonucleotide
  Sense strand starting at position 2576 of SEQ ID NO: 1338
ccuccucucgaguaguauc

SEQ ID NO: 105909 - RNA, 19 nt, Artificial Sequence
  Description of Artificial Sequence: Synthetic oligonucleotide
  Antisense strand to SEQ ID NO: 105908
gauacuacucgagaggagg

SEQ ID NO: 105910 - RNA, 19 nt, Artificial Sequence
  Description of Artificial Sequence: Synthetic oligonucleotide
  Sense strand starting at position 2584 of SEQ ID NO: 1338
cgaguaguaucuggcuugu

SEQ ID NO: 105911 - RNA, 19 nt, Artificial Sequence
  Description of Artificial Sequence: Synthetic oligonucleotide
  Antisense strand to SEQ ID NO: 105910
acaagccagauacuacucg

SEQ ID NO: 105912 - RNA, 19 nt, Artificial Sequence
  Description of Artificial Sequence: Synthetic oligonucleotide
  Sense strand starting at position 2588 of SEQ ID NO: 1338
uaguaucuggcuuguucua

SEQ ID NO: 105913 - RNA, 19 nt, Artificial Sequence
  Description of Artificial Sequence: Synthetic oligonucleotide
  Antisense strand to SEQ ID NO: 105912
uagaacaagccagauacua

SEQ ID NO: 105914 - RNA, 19 nt, Artificial Sequence
  Description of Artificial Sequence: Synthetic oligonucleotide
  Sense strand starting at position 2590 of SEQ ID NO: 1338
guaucuggcuuguucuaaa

SEQ ID NO: 105915 - RNA, 19 nt, Artificial Sequence
  Description of Artificial Sequence: Synthetic oligonucleotide
  Antisense strand to SEQ ID NO: 105914
uuuagaacaagccagauac

SEQ ID NO: 105916 - RNA, 19 nt, Artificial Sequence
  Description of Artificial Sequence: Synthetic oligonucleotide
  Sense strand starting at position 2593 of SEQ ID NO: 1338
ucuggcuuguucuaaacau

SEQ ID NO: 105917 - RNA, 19 nt, Artificial Sequence
  Description of Artificial Sequence: Synthetic oligonucleotide
  Antisense strand to SEQ ID NO: 105916
auguuuagaacaagccaga

SEQ ID NO: 105918 - RNA, 19 nt, Artificial Sequence
  Description of Artificial Sequence: Synthetic oligonucleotide
  Sense strand starting at position 2677 of SEQ ID NO: 1338
agggccaccuucuguaauu

SEQ ID NO: 105919 - RNA, 19 nt, Artificial Sequence
  Description of Artificial Sequence: Synthetic oligonucleotide
  Antisense strand to SEQ ID NO: 105918
aauuacagaagguggcccu

SEQ ID NO: 105920 - RNA, 19 nt, Artificial Sequence
  Description of Artificial Sequence: Synthetic oligonucleotide
  Sense strand starting at position 2678 of SEQ ID NO: 1338
gggccaccuucuguaauuu

SEQ ID NO: 105921 - RNA, 19 nt, Artificial Sequence
  Description of Artificial Sequence: Synthetic oligonucleotide
  Antisense strand to SEQ ID NO: 105920
aaauuacagaagguggccc

SEQ ID NO: 105922 - RNA, 19 nt, Artificial Sequence
  Description of Artificial Sequence: Synthetic oligonucleotide
  Sense strand starting at position 3715 of SEQ ID NO: 1338
ggugcaaucucagaaucac

SEQ ID NO: 105923 - RNA, 19 nt, Artificial Sequence
  Description of Artificial Sequence: Synthetic oligonucleotide
  Antisense strand to SEQ ID NO: 105922
gugauucugagauugcacc

SEQ ID NO: 105924 - RNA, 19 nt, Artificial Sequence
  Description of Artificial Sequence: Synthetic oligonucleotide
  Sense strand starting at position 437 of SEQ ID NO: 1337
agggacucucauugucgua

SEQ ID NO: 105925 - RNA, 19 nt, Artificial Sequence
  Description of Artificial Sequence: Synthetic oligonucleotide
  Antisense strand to SEQ ID NO: 105924
uacgacaaugagagucccu

SEQ ID NO: 105926 - RNA, 19 nt, Artificial Sequence
  Description of Artificial Sequence: Synthetic oligonucleotide
  Sense strand starting at position 487 of SEQ ID NO: 1337
uggacuuucucugaccgga

SEQ ID NO: 105927 - RNA, 19 nt, Artificial Sequence
  Description of Artificial Sequence: Synthetic oligonucleotide
  Antisense strand to SEQ ID NO: 105926
uccggucagagaaagucca

SEQ ID NO: 105928 - RNA, 19 nt, Artificial Sequence
  Description of Artificial Sequence: Synthetic oligonucleotide
  Sense strand starting at position 1031 of SEQ ID NO: 1337
gggaaaccuguaugcagaa

SEQ ID NO: 105929 - RNA, 19 nt, Artificial Sequence
  Description of Artificial Sequence: Synthetic oligonucleotide
  Antisense strand to SEQ ID NO: 105928
uucugcauacagguuuccc

SEQ ID NO: 105930 - RNA, 19 nt, Artificial Sequence
  Description of Artificial Sequence: Synthetic oligonucleotide
  Sense strand starting at position 1049 of SEQ ID NO: 1337
acgcccugaucccaauaaa

SEQ ID NO: 105931 - RNA, 19 nt, Artificial Sequence
  Description of Artificial Sequence: Synthetic oligonucleotide
  Antisense strand to SEQ ID NO: 105930
uuuauugggaucagggcgu

SEQ ID NO: 105932 - RNA, 19 nt, Artificial Sequence
  Description of Artificial Sequence: Synthetic oligonucleotide
  Sense strand starting at position 1197 of SEQ ID NO: 1337
ucacauagauccuauguga

SEQ ID NO: 105933 - RNA, 19 nt, Artificial Sequence
  Description of Artificial Sequence: Synthetic oligonucleotide
  Antisense strand to SEQ ID NO: 105932
ucacauaggaucuauguga

SEQ ID NO: 105934 - RNA, 19 nt, Artificial Sequence
  Description of Artificial Sequence: Synthetic oligonucleotide
  Sense strand starting at position 1257 of SEQ ID NO: 1337
agaggaaugugcccgguca

SEQ ID NO: 105935 - RNA, 19 nt, Artificial Sequence
  Description of Artificial Sequence: Synthetic oligonucleotide
  Antisense strand to SEQ ID NO: 105934
ugaccgggcacauuccucu

SEQ ID NO: 105936 - RNA, 19 nt, Artificial Sequence
  Description of Artificial Sequence: Synthetic oligonucleotide
  Sense strand starting at position 1472 of SEQ ID NO: 1337
gccaaagucuaacugaaga

SEQ ID NO: 105937 - RNA, 19 nt, Artificial Sequence
  Description of Artificial Sequence: Synthetic oligonucleotide
  Antisense strand to SEQ ID NO: 105936
ucuucaguuagacuuuggc

SEQ ID NO: 105938 - RNA, 19 nt, Artificial Sequence
  Description of Artificial Sequence: Synthetic oligonucleotide
  Sense strand starting at position 2006 of SEQ ID NO: 1337
ccugauaccacgugaucgu

SEQ ID NO: 105939 - RNA, 19 nt, Artificial Sequence
  Description of Artificial Sequence: Synthetic oligonucleotide
  Antisense strand to SEQ ID NO: 105938
acgaucacgugguaucagg

SEQ ID NO: 105940 - RNA, 19 nt, Artificial Sequence
  Description of Artificial Sequence: Synthetic oligonucleotide
  Sense strand starting at position 2344 of SEQ ID NO: 1337
ccuuuacaaccuggagagu

SEQ ID NO: 105941 - RNA, 19 nt, Artificial Sequence
  Description of Artificial Sequence: Synthetic oligonucleotide
  Antisense strand to SEQ ID NO: 105940
acucuccagguuguaaagg

SEQ ID NO: 105942 - RNA, 19 nt, Artificial Sequence
  Description of Artificial Sequence: Synthetic oligonucleotide
  Sense strand starting at position 2471 of SEQ ID NO: 1337
ccuggugucccugaaacca

SEQ ID NO: 105943 - RNA, 19 nt, Artificial Sequence
  Description of Artificial Sequence: Synthetic oligonucleotide
  Antisense strand to SEQ ID NO: 105942
ugguuucagggacaccagg

SEQ ID NO: 105944 - RNA, 19 nt, Artificial Sequence
  Description of Artificial Sequence: Synthetic oligonucleotide
  Sense strand starting at position 2499 of SEQ ID NO: 1337
uuacaagccuccuggagaa

SEQ ID NO: 105945 - RNA, 19 nt, Artificial Sequence
  Description of Artificial Sequence: Synthetic oligonucleotide
  Antisense strand to SEQ ID NO: 105944
uucuccaggaggcuuguaa

SEQ ID NO: 105946 - RNA, 19 nt, Artificial Sequence
  Description of Artificial Sequence: Synthetic oligonucleotide
  Sense strand starting at position 2790 of SEQ ID NO: 1337
gugcccaaguccucagaca

SEQ ID NO: 105947 - RNA, 19 nt, Artificial Sequence
  Description of Artificial Sequence: Synthetic oligonucleotide
  Antisense strand to SEQ ID NO: 105946
ugucugaggacuugggcac

SEQ ID NO: 105948 - RNA, 19 nt, Artificial Sequence
  Description of Artificial Sequence: Synthetic oligonucleotide
  Sense strand starting at position 2864 of SEQ ID NO: 1337
ugcggcugcuccagugaga

SEQ ID NO: 105949 - RNA, 19 nt, Artificial Sequence
  Description of Artificial Sequence: Synthetic oligonucleotide
  Antisense strand to SEQ ID NO: 105948
ucucacuggagcagccgca

SEQ ID NO: 105950 - RNA, 19 nt, Artificial Sequence
  Description of Artificial Sequence: Synthetic oligonucleotide
  Sense strand starting at position 3110 of SEQ ID NO: 1337
uuccaacugguuuguauua

SEQ ID NO: 105951 - RNA, 19 nt, Artificial Sequence
  Description of Artificial Sequence: Synthetic oligonucleotide
  Antisense strand to SEQ ID NO: 105950
uaauacaaaccaguuggaa

SEQ ID NO: 105952 - RNA, 19 nt, Artificial Sequence
  Description of Artificial Sequence: Synthetic oligonucleotide
  Sense strand starting at position 3112 of SEQ ID NO: 1337
ccaacugguuuguauuagu

SEQ ID NO: 105953 - RNA, 19 nt, Artificial Sequence
  Description of Artificial Sequence: Synthetic oligonucleotide
  Antisense strand to SEQ ID NO: 105952
acuaauacaaaccaguugg

SEQ ID NO: 105954 - RNA, 19 nt, Artificial Sequence
  Description of Artificial Sequence: Synthetic oligonucleotide
  Sense strand starting at position 3119 of SEQ ID NO: 1337
guuuguauuagugcuggca

SEQ ID NO: 105955 - RNA, 19 nt, Artificial Sequence
  Description of Artificial Sequence: Synthetic oligonucleotide
  Antisense strand to SEQ ID NO: 105954
ugccagcacuaauacaaac

SEQ ID NO: 105956 - RNA, 19 nt, Artificial Sequence
  Description of Artificial Sequence: Synthetic oligonucleotide
  Sense strand starting at position 3727 of SEQ ID NO: 1337
gugggugugugacuuaauu

SEQ ID NO: 105957 - RNA, 19 nt, Artificial Sequence
  Description of Artificial Sequence: Synthetic oligonucleotide
  Antisense strand to SEQ ID NO: 105956
aauuaagucacacacccac

SEQ ID NO: 105958 - RNA, 19 nt, Artificial Sequence
  Description of Artificial Sequence: Synthetic oligonucleotide
  Sense strand starting at position 3809 of SEQ ID NO: 1337
aucacugugcucuggcuaa

SEQ ID NO: 105959 - RNA, 19 nt, Artificial Sequence
  Description of Artificial Sequence: Synthetic oligonucleotide
  Antisense strand to SEQ ID NO: 105958
uuagccagagcacagugau

SEQ ID NO: 105960 - RNA, 19 nt, Artificial Sequence
  Description of Artificial Sequence: Synthetic oligonucleotide
  Sense strand starting at position 3974 of SEQ ID NO: 1337
gcccgucucauugggaaga

SEQ ID NO: 105961 - RNA, 19 nt, Artificial Sequence
  Description of Artificial Sequence: Synthetic oligonucleotide
  Antisense strand to SEQ ID NO: 105960
ucuucccaaugagacgggc

SEQ ID NO: 105962 - RNA, 19 nt, Artificial Sequence
  Description of Artificial Sequence: Synthetic oligonucleotide
  Sense strand starting at position 3975 of SEQ ID NO: 1337
cccgucucauugggaagaa

SEQ ID NO: 105963 - RNA, 19 nt, Artificial Sequence
  Description of Artificial Sequence: Synthetic oligonucleotide
  Antisense strand to SEQ ID NO: 105962
uucuucccaaugagacggg

SEQ ID NO: 105964 - RNA, 19 nt, Artificial Sequence
  Description of Artificial Sequence: Synthetic oligonucleotide
  Sense strand starting at position 3976 of SEQ ID NO: 1337
ccgucucauugggaagaaa

SEQ ID NO: 105965 - RNA, 19 nt, Artificial Sequence
  Description of Artificial Sequence: Synthetic oligonucleotide
  Antisense strand to SEQ ID NO: 105964
uuucuucccaaugagacgg

SEQ ID NO: 105966 - RNA, 19 nt, Artificial Sequence
  Description of Artificial Sequence: Synthetic oligonucleotide
  Sense strand starting at position 684 of SEQ ID NO: 1336
agggacucucauugucgua

SEQ ID NO: 105967 - RNA, 19 nt, Artificial Sequence
  Description of Artificial Sequence: Synthetic oligonucleotide
  Antisense strand to SEQ ID NO: 105966
uacgacaaugagagucccu

SEQ ID NO: 105968 - RNA, 19 nt, Artificial Sequence
  Description of Artificial Sequence: Synthetic oligonucleotide
  Sense strand starting at position 734 of SEQ ID NO: 1336
uggacuuucucugaccgga

SEQ ID NO: 105969 - RNA, 19 nt, Artificial Sequence
  Description of Artificial Sequence: Synthetic oligonucleotide
  Antisense strand to SEQ ID NO: 105968
uccggucagagaaagucca

SEQ ID NO: 105970 - RNA, 19 nt, Artificial Sequence
  Description of Artificial Sequence: Synthetic oligonucleotide
  Sense strand starting at position 1278 of SEQ ID NO: 1336
gggaaaccuguaugcagaa

SEQ ID NO: 105971 - RNA, 19 nt, Artificial Sequence
  Description of Artificial Sequence: Synthetic oligonucleotide
  Antisense strand to SEQ ID NO: 105970
uucugcauacagguuuccc

SEQ ID NO: 105972 - RNA, 19 nt, Artificial Sequence
  Description of Artificial Sequence: Synthetic oligonucleotide
  Sense strand starting at position 1296 of SEQ ID NO: 1336
acgcccugaucccaauaaa

SEQ ID NO: 105973 - RNA, 19 nt, Artificial Sequence
  Description of Artificial Sequence: Synthetic oligonucleotide
  Antisense strand to SEQ ID NO: 105972
uuuauugggaucagggcgu

SEQ ID NO: 105974 - RNA, 19 nt, Artificial Sequence
  Description of Artificial Sequence: Synthetic oligonucleotide
  Sense strand starting at position 1444 of SEQ ID NO: 1336
ucacauagauccuauguga

SEQ ID NO: 105975 - RNA, 19 nt, Artificial Sequence
  Description of Artificial Sequence: Synthetic oligonucleotide
  Antisense strand to SEQ ID NO: 105974
ucacauaggaucuauguga

SEQ ID NO: 105976 - RNA, 19 nt, Artificial Sequence
  Description of Artificial Sequence: Synthetic oligonucleotide
  Sense strand starting at position 1504 of SEQ ID NO: 1336
agaggaaugugcccgguca

SEQ ID NO: 105977 - RNA, 19 nt, Artificial Sequence
  Description of Artificial Sequence: Synthetic oligonucleotide
  Antisense strand to SEQ ID NO: 105976
ugaccgggcacauuccucu

SEQ ID NO: 105978 - RNA, 19 nt, Artificial Sequence
  Description of Artificial Sequence: Synthetic oligonucleotide
  Sense strand starting at position 1719 of SEQ ID NO: 1336
gccaaagucuaacugaaga

SEQ ID NO: 105979 - RNA, 19 nt, Artificial Sequence
  Description of Artificial Sequence: Synthetic oligonucleotide
  Antisense strand to SEQ ID NO: 105978
ucuucaguuagacuuuggc

SEQ ID NO: 105980 - RNA, 19 nt, Artificial Sequence
  Description of Artificial Sequence: Synthetic oligonucleotide
  Sense strand starting at position 2253 of SEQ ID NO: 1336
ccugauaccacgugaucgu

SEQ ID NO: 105981 - RNA, 19 nt, Artificial Sequence
  Description of Artificial Sequence: Synthetic oligonucleotide
  Antisense strand to SEQ ID NO: 105980
acgaucacgugguaucagg

SEQ ID NO: 105982 - RNA, 19 nt, Artificial Sequence
  Description of Artificial Sequence: Synthetic oligonucleotide
  Sense strand starting at position 2591 of SEQ ID NO: 1336
ccuuuacaaccuggagagu

SEQ ID NO: 105983 - RNA, 19 nt, Artificial Sequence
  Description of Artificial Sequence: Synthetic oligonucleotide
  Antisense strand to SEQ ID NO: 105982
acucuccagguuguaaagg

SEQ ID NO: 105984 - RNA, 19 nt, Artificial Sequence
  Description of Artificial Sequence: Synthetic oligonucleotide
  Sense strand starting at position 2718 of SEQ ID NO: 1336
ccuggugucccugaaacca

SEQ ID NO: 105985 - RNA, 19 nt, Artificial Sequence
  Description of Artificial Sequence: Synthetic oligonucleotide
  Antisense strand to SEQ ID NO: 105984
ugguuucagggacaccagg

SEQ ID NO: 105986 - RNA, 19 nt, Artificial Sequence
  Description of Artificial Sequence: Synthetic oligonucleotide
  Sense strand starting at position 2746 of SEQ ID NO: 1336
uuacaagccuccuggagaa

SEQ ID NO: 105987 - RNA, 19 nt, Artificial Sequence
  Description of Artificial Sequence: Synthetic oligonucleotide
  Antisense strand to SEQ ID NO: 105986
uucuccaggaggcuuguaa

SEQ ID NO: 105988 - RNA, 19 nt, Artificial Sequence
  Description of Artificial Sequence: Synthetic oligonucleotide
  Sense strand starting at position 3037 of SEQ ID NO: 1336
gugcccaaguccucagaca

SEQ ID NO: 105989 - RNA, 19 nt, Artificial Sequence
  Description of Artificial Sequence: Synthetic oligonucleotide
  Antisense strand to SEQ ID NO: 105988
ugucugaggacuugggcac

SEQ ID NO: 105990 - RNA, 19 nt, Artificial Sequence
  Description of Artificial Sequence: Synthetic oligonucleotide
  Sense strand starting at position 3111 of SEQ ID NO: 1336
ugcggcugcuccagugaga

SEQ ID NO: 105991 - RNA, 19 nt, Artificial Sequence
  Description of Artificial Sequence: Synthetic oligonucleotide
  Antisense strand to SEQ ID NO: 105990
ucucacuggagcagccgca

SEQ ID NO: 105992 - RNA, 19 nt, Artificial Sequence
  Description of Artificial Sequence: Synthetic oligonucleotide
  Sense strand starting at position 3357 of SEQ ID NO: 1336
uuccaacugguuuguauua

SEQ ID NO: 105993 - RNA, 19 nt, Artificial Sequence
  Description of Artificial Sequence: Synthetic oligonucleotide
  Antisense strand to SEQ ID NO: 105992
uaauacaaaccaguuggaa

SEQ ID NO: 105994 - RNA, 19 nt, Artificial Sequence
  Description of Artificial Sequence: Synthetic oligonucleotide
  Sense strand starting at position 3359 of SEQ ID NO: 1336
ccaacugguuuguauuagu

SEQ ID NO: 105995 - RNA, 19 nt, Artificial Sequence
  Description of Artificial Sequence: Synthetic oligonucleotide
  Antisense strand to SEQ ID NO: 105994
acuaauacaaaccaguugg

SEQ ID NO: 105996 - RNA, 19 nt, Artificial Sequence
  Description of Artificial Sequence: Synthetic oligonucleotide
  Sense strand starting at position 3366 of SEQ ID NO: 1336
guuuguauuagugcuggca

SEQ ID NO: 105997 - RNA, 19 nt, Artificial Sequence
  Description of Artificial Sequence: Synthetic oligonucleotide
  Antisense strand to SEQ ID NO: 105996
ugccagcacuaauacaaac

SEQ ID NO: 105998 - RNA, 19 nt, Artificial Sequence
  Description of Artificial Sequence: Synthetic oligonucleotide
  Sense strand starting at position 3974 of SEQ ID NO: 1336
gugggugugugacuuaauu

SEQ ID NO: 105999 - RNA, 19 nt, Artificial Sequence
  Description of Artificial Sequence: Synthetic oligonucleotide
  Antisense strand to SEQ ID NO: 105998
aauuaagucacacacccac

SEQ ID NO: 106000 - RNA, 19 nt, Artificial Sequence
  Description of Artificial Sequence: Synthetic oligonucleotide
  Sense strand starting at position 28 of SEQ ID NO: 1340
gaggauugaggcuaaugca

SEQ ID NO: 106001 - RNA, 19 nt, Artificial Sequence
  Description of Artificial Sequence: Synthetic oligonucleotide
  Antisense strand to SEQ ID NO: 106000
ugcauuagccucaauccuc

SEQ ID NO: 106002 - RNA, 19 nt, Artificial Sequence
  Description of Artificial Sequence: Synthetic oligonucleotide
  Sense strand starting at position 38 of SEQ ID NO: 1340
gcuaaugcaccuugcaaau

SEQ ID NO: 106003 - RNA, 19 nt, Artificial Sequence
  Description of Artificial Sequence: Synthetic oligonucleotide
  Antisense strand to SEQ ID NO: 106002
auuugcaaggugcauuagc

SEQ ID NO: 106004 - RNA, 19 nt, Artificial Sequence
  Description of Artificial Sequence: Synthetic oligonucleotide
  Sense strand starting at position 104 of SEQ ID NO: 1340
agguaugcccucugcaaug

SEQ ID NO: 106005 - RNA, 19 nt, Artificial Sequence
  Description of Artificial Sequence: Synthetic oligonucleotide
  Antisense strand to SEQ ID NO: 106004
cauugcagagggcauaccu

SEQ ID NO: 106006 - RNA, 19 nt, Artificial Sequence
  Description of Artificial Sequence: Synthetic oligonucleotide
  Sense strand starting at position 282 of SEQ ID NO: 1340
uggagagauugagauuaga

SEQ ID NO: 106007 - RNA, 19 nt, Artificial Sequence
  Description of Artificial Sequence: Synthetic oligonucleotide
  Antisense strand to SEQ ID NO: 106006
ucuaaucucaaucucucca

SEQ ID NO: 106008 - RNA, 19 nt, Artificial Sequence
  Description of Artificial Sequence: Synthetic oligonucleotide
  Sense strand starting at position 315 of SEQ ID NO: 1340
gauggacucuuagcauuga

SEQ ID NO: 106009 - RNA, 19 nt, Artificial Sequence
  Description of Artificial Sequence: Synthetic oligonucleotide
  Antisense strand to SEQ ID NO: 106008
ucaaugcuaagaguccauc

SEQ ID NO: 106010 - RNA, 19 nt, Artificial Sequence
  Description of Artificial Sequence: Synthetic oligonucleotide
  Sense strand starting at position 563 of SEQ ID NO: 1340
uagauaagguguuugggaa

SEQ ID NO: 106011 - RNA, 19 nt, Artificial Sequence
  Description of Artificial Sequence: Synthetic oligonucleotide
  Antisense strand to SEQ ID NO: 106010
uucccaaacaccuuaucua

SEQ ID NO: 106012 - RNA, 19 nt, Artificial Sequence
  Description of Artificial Sequence: Synthetic oligonucleotide
  Sense strand starting at position 564 of SEQ ID NO: 1340
agauaagguguuugggaag

SEQ ID NO: 106013 - RNA, 19 nt, Artificial Sequence
  Description of Artificial Sequence: Synthetic oligonucleotide
  Antisense strand to SEQ ID NO: 106012
cuucccaaacaccuuaucu

SEQ ID NO: 106014 - RNA, 19 nt, Artificial Sequence
  Description of Artificial Sequence: Synthetic oligonucleotide
  Sense strand starting at position 612 of SEQ ID NO: 1340
uuaccaauguucucucgga

SEQ ID NO: 106015 - RNA, 19 nt, Artificial Sequence
  Description of Artificial Sequence: Synthetic oligonucleotide
  Antisense strand to SEQ ID NO: 106014
uccgagagaacauugguaa

SEQ ID NO: 106016 - RNA, 19 nt, Artificial Sequence
  Description of Artificial Sequence: Synthetic oligonucleotide
  Sense strand starting at position 613 of SEQ ID NO: 1340
uaccaauguucucucggau

SEQ ID NO: 106017 - RNA, 19 nt, Artificial Sequence
  Description of Artificial Sequence: Synthetic oligonucleotide
  Antisense strand to SEQ ID NO: 106016
auccgagagaacauuggua

SEQ ID NO: 106018 - RNA, 19 nt, Artificial Sequence
  Description of Artificial Sequence: Synthetic oligonucleotide
  Sense strand starting at position 616 of SEQ ID NO: 1340
caauguucucucggaugug

SEQ ID NO: 106019 - RNA, 19 nt, Artificial Sequence
  Description of Artificial Sequence: Synthetic oligonucleotide
  Antisense strand to SEQ ID NO: 106018
cacauccgagagaacauug

SEQ ID NO: 106020 - RNA, 19 nt, Artificial Sequence
  Description of Artificial Sequence: Synthetic oligonucleotide
  Sense strand starting at position 619 of SEQ ID NO: 1340
uguucucucggauguggau

SEQ ID NO: 106021 - RNA, 19 nt, Artificial Sequence
  Description of Artificial Sequence: Synthetic oligonucleotide
  Antisense strand to SEQ ID NO: 106020
auccacauccgagagaaca

SEQ ID NO: 106022 - RNA, 19 nt, Artificial Sequence
  Description of Artificial Sequence: Synthetic oligonucleotide
  Sense strand starting at position 801 of SEQ ID NO: 1340
gugugaggucuuugcaaug

SEQ ID NO: 106023 - RNA, 19 nt, Artificial Sequence
  Description of Artificial Sequence: Synthetic oligonucleotide
  Antisense strand to SEQ ID NO: 106022
cauugcaaagaccucacac

SEQ ID NO: 106024 - RNA, 19 nt, Artificial Sequence
  Description of Artificial Sequence: Synthetic oligonucleotide
  Sense strand starting at position 919 of SEQ ID NO: 1340
ccugacuucuugucaaaug

SEQ ID NO: 106025 - RNA, 19 nt, Artificial Sequence
  Description of Artificial Sequence: Synthetic oligonucleotide
  Antisense strand to SEQ ID NO: 106024
cauuugacaagaagucagg

SEQ ID NO: 106026 - RNA, 19 nt, Artificial Sequence
  Description of Artificial Sequence: Synthetic oligonucleotide
  Sense strand starting at position 954 of SEQ ID NO: 1340
auguuagagcccugaaauu

SEQ ID NO: 106027 - RNA, 19 nt, Artificial Sequence
  Description of Artificial Sequence: Synthetic oligonucleotide
  Antisense strand to SEQ ID NO: 106026
aauuucagggcucuaacau

SEQ ID NO: 106028 - RNA, 19 nt, Artificial Sequence
  Description of Artificial Sequence: Synthetic oligonucleotide
  Sense strand starting at position 965 of SEQ ID NO: 1340
cugaaauuguggcuagaga

SEQ ID NO: 106029 - RNA, 19 nt, Artificial Sequence
  Description of Artificial Sequence: Synthetic oligonucleotide
  Antisense strand to SEQ ID NO: 106028
ucucuagccacaauuucag

SEQ ID NO: 106030 - RNA, 19 nt, Artificial Sequence
  Description of Artificial Sequence: Synthetic oligonucleotide
  Sense strand starting at position 1144 of SEQ ID NO: 1340
ugucucuuacgcuaacauu

SEQ ID NO: 106031 - RNA, 19 nt, Artificial Sequence
  Description of Artificial Sequence: Synthetic oligonucleotide
  Antisense strand to SEQ ID NO: 106030
aauguuagcguaagagaca

SEQ ID NO: 106032 - RNA, 19 nt, Artificial Sequence
  Description of Artificial Sequence: Synthetic oligonucleotide
  Sense strand starting at position 1482 of SEQ ID NO: 1340
ggguguaugcaagacuuag

SEQ ID NO: 106033 - RNA, 19 nt, Artificial Sequence
  Description of Artificial Sequence: Synthetic oligonucleotide
  Antisense strand to SEQ ID NO: 106032
cuaagucuugcauacaccc

SEQ ID NO: 106034 - RNA, 19 nt, Artificial Sequence
  Description of Artificial Sequence: Synthetic oligonucleotide
  Sense strand starting at position 1822 of SEQ ID NO: 1340
ucugguggacucugauacu

SEQ ID NO: 106035 - RNA, 19 nt, Artificial Sequence
  Description of Artificial Sequence: Synthetic oligonucleotide
  Antisense strand to SEQ ID NO: 106034
aguaucagaguccaccaga

SEQ ID NO: 106036 - RNA, 19 nt, Artificial Sequence
  Description of Artificial Sequence: Synthetic oligonucleotide
  Sense strand starting at position 2171 of SEQ ID NO: 1340
ggagucacuuccucaucca

SEQ ID NO: 106037 - RNA, 19 nt, Artificial Sequence
  Description of Artificial Sequence: Synthetic oligonucleotide
  Antisense strand to SEQ ID NO: 106036
uggaugaggaagugacucc

SEQ ID NO: 106038 - RNA, 19 nt, Artificial Sequence
  Description of Artificial Sequence: Synthetic oligonucleotide
  Sense strand starting at position 2406 of SEQ ID NO: 1340
gacaguuugggacaaucgu

SEQ ID NO: 106039 - RNA, 19 nt, Artificial Sequence
  Description of Artificial Sequence: Synthetic oligonucleotide
  Antisense strand to SEQ ID NO: 106038
acgauugucccaaacuguc

SEQ ID NO: 106040 - RNA, 19 nt, Artificial Sequence
  Description of Artificial Sequence: Synthetic oligonucleotide
  Sense strand starting at position 2415 of SEQ ID NO: 1340
ggacaaucguccuugugag

SEQ ID NO: 106041 - RNA, 19 nt, Artificial Sequence
  Description of Artificial Sequence: Synthetic oligonucleotide
  Antisense strand to SEQ ID NO: 106040
cucacaaggacgauugucc

SEQ ID NO: 106042 - RNA, 19 nt, Artificial Sequence
  Description of Artificial Sequence: Synthetic oligonucleotide
  Sense strand starting at position 2722 of SEQ ID NO: 1340
guugcaguuguaggcagau

SEQ ID NO: 106043 - RNA, 19 nt, Artificial Sequence
  Description of Artificial Sequence: Synthetic oligonucleotide
  Antisense strand to SEQ ID NO: 106042
aucugccuacaacugcaac

SEQ ID NO: 106044 - RNA, 19 nt, Artificial Sequence
  Description of Artificial Sequence: Synthetic oligonucleotide
  Sense strand starting at position 2841 of SEQ ID NO: 1340
uggccagauuucuagucau

SEQ ID NO: 106045 - RNA, 19 nt, Artificial Sequence
  Description of Artificial Sequence: Synthetic oligonucleotide
  Antisense strand to SEQ ID NO: 106044
augacuagaaaucuggcca

SEQ ID NO: 106046 - RNA, 19 nt, Artificial Sequence
  Description of Artificial Sequence: Synthetic oligonucleotide
  Sense strand starting at position 2935 of SEQ ID NO: 1340
ggagaacauuaagaacuuu

SEQ ID NO: 106047 - RNA, 19 nt, Artificial Sequence
  Description of Artificial Sequence: Synthetic oligonucleotide
  Antisense strand to SEQ ID NO: 106046
aaaguucuuaauguucucc

SEQ ID NO: 106048 - RNA, 19 nt, Artificial Sequence
  Description of Artificial Sequence: Synthetic oligonucleotide
  Sense strand starting at position 2996 of SEQ ID NO: 1340
uuuacuagugccuaguaaa

SEQ ID NO: 106049 - RNA, 19 nt, Artificial Sequence
  Description of Artificial Sequence: Synthetic oligonucleotide
  Antisense strand to SEQ ID NO: 106048
uuuacuaggcacuaguaaa

SEQ ID NO: 106050 - RNA, 19 nt, Artificial Sequence
  Description of Artificial Sequence: Synthetic oligonucleotide
  Sense strand starting at position 3101 of SEQ ID NO: 1340
uggcaauguuauuuguaau

SEQ ID NO: 106051 - RNA, 19 nt, Artificial Sequence
  Description of Artificial Sequence: Synthetic oligonucleotide
  Antisense strand to SEQ ID NO: 106050
auuacaaauaacauugcca

SEQ ID NO: 106052 - RNA, 19 nt, Artificial Sequence
  Description of Artificial Sequence: Synthetic oligonucleotide
  Sense strand starting at position 3139 of SEQ ID NO: 1340
acagcugucccucaacagu

SEQ ID NO: 106053 - RNA, 19 nt, Artificial Sequence
  Description of Artificial Sequence: Synthetic oligonucleotide
  Antisense strand to SEQ ID NO: 106052
acuguugagggacagcugu

SEQ ID NO: 106054 - RNA, 19 nt, Artificial Sequence
  Description of Artificial Sequence: Synthetic oligonucleotide
  Sense strand starting at position 3164 of SEQ ID NO: 1340
gauaaauaacuguggagug

SEQ ID NO: 106055 - RNA, 19 nt, Artificial Sequence
  Description of Artificial Sequence: Synthetic oligonucleotide
  Antisense strand to SEQ ID NO: 106054
cacuccacaguuauuuauc

SEQ ID NO: 106056 - RNA, 19 nt, Artificial Sequence
  Description of Artificial Sequence: Synthetic oligonucleotide
  Sense strand starting at position 3166 of SEQ ID NO: 1340
uaaauaacuguggaguguu

SEQ ID NO: 106057 - RNA, 19 nt, Artificial Sequence
  Description of Artificial Sequence: Synthetic oligonucleotide
  Antisense strand to SEQ ID NO: 106056
aacacuccacaguuauuua

SEQ ID NO: 106058 - RNA, 19 nt, Artificial Sequence
  Description of Artificial Sequence: Synthetic oligonucleotide
  Sense strand starting at position 3169 of SEQ ID NO: 1340
auaacuguggaguguuuau

SEQ ID NO: 106059 - RNA, 19 nt, Artificial Sequence
  Description of Artificial Sequence: Synthetic oligonucleotide
  Antisense strand to SEQ ID NO: 106058
auaaacacuccacaguuau

SEQ ID NO: 106060 - RNA, 19 nt, Artificial Sequence
  Description of Artificial Sequence: Synthetic oligonucleotide
  Sense strand starting at position 3270 of SEQ ID NO: 1340
cagaaauguugcgucucau

SEQ ID NO: 106061 - RNA, 19 nt, Artificial Sequence
  Description of Artificial Sequence: Synthetic oligonucleotide
  Antisense strand to SEQ ID NO: 106060
augagacgcaacauuucug

SEQ ID NO: 106062 - RNA, 19 nt, Artificial Sequence
  Description of Artificial Sequence: Synthetic oligonucleotide
  Sense strand starting at position 3426 of SEQ ID NO: 1340
cagggauaucugugaucgu

SEQ ID NO: 106063 - RNA, 19 nt, Artificial Sequence
  Description of Artificial Sequence: Synthetic oligonucleotide
  Antisense strand to SEQ ID NO: 106062
acgaucacagauaucccug

SEQ ID NO: 106064 - RNA, 19 nt, Artificial Sequence
  Description of Artificial Sequence: Synthetic oligonucleotide
  Sense strand starting at position 3429 of SEQ ID NO: 1340
ggauaucugugaucgugag

SEQ ID NO: 106065 - RNA, 19 nt, Artificial Sequence
  Description of Artificial Sequence: Synthetic oligonucleotide
  Antisense strand to SEQ ID NO: 106064
cucacgaucacagauaucc

SEQ ID NO: 106066 - RNA, 19 nt, Artificial Sequence
  Description of Artificial Sequence: Synthetic oligonucleotide
  Sense strand starting at position 3549 of SEQ ID NO: 1340
cacucuuuagcacguaaga

SEQ ID NO: 106067 - RNA, 19 nt, Artificial Sequence
  Description of Artificial Sequence: Synthetic oligonucleotide
  Antisense strand to SEQ ID NO: 106066
ucuuacgugcuaaagagug

SEQ ID NO: 106068 - RNA, 19 nt, Artificial Sequence
  Description of Artificial Sequence: Synthetic oligonucleotide
  Sense strand starting at position 3551 of SEQ ID NO: 1340
cucuuuagcacguaagaug

SEQ ID NO: 106069 - RNA, 19 nt, Artificial Sequence
  Description of Artificial Sequence: Synthetic oligonucleotide
  Antisense strand to SEQ ID NO: 106068
caucuuacgugcuaaagag

SEQ ID NO: 106070 - RNA, 19 nt, Artificial Sequence
  Description of Artificial Sequence: Synthetic oligonucleotide
  Sense strand starting at position 3559 of SEQ ID NO: 1340
cacguaagaugugcucaca

SEQ ID NO: 106071 - RNA, 19 nt, Artificial Sequence
  Description of Artificial Sequence: Synthetic oligonucleotide
  Antisense strand to SEQ ID NO: 106070
ugugagcacaucuuacgug

SEQ ID NO: 106072 - RNA, 19 nt, Artificial Sequence
  Description of Artificial Sequence: Synthetic oligonucleotide
  Sense strand starting at position 3562 of SEQ ID NO: 1340
guaagaugugcucacaauu

SEQ ID NO: 106073 - RNA, 19 nt, Artificial Sequence
  Description of Artificial Sequence: Synthetic oligonucleotide
  Antisense strand to SEQ ID NO: 106072
aauugugagcacaucuuac

SEQ ID NO: 106074 - RNA, 19 nt, Artificial Sequence
  Description of Artificial Sequence: Synthetic oligonucleotide
  Sense strand starting at position 3834 of SEQ ID NO: 1340
ugcagcuauaagugaaugu

SEQ ID NO: 106075 - RNA, 19 nt, Artificial Sequence
  Description of Artificial Sequence: Synthetic oligonucleotide
  Antisense strand to SEQ ID NO: 106074
acauucacuuauagcugca

SEQ ID NO: 106076 - RNA, 19 nt, Artificial Sequence
  Description of Artificial Sequence: Synthetic oligonucleotide
  Sense strand starting at position 3838 of SEQ ID NO: 1340
gcuauaagugaaugugacu

SEQ ID NO: 106077 - RNA, 19 nt, Artificial Sequence
  Description of Artificial Sequence: Synthetic oligonucleotide
  Antisense strand to SEQ ID NO: 106076
agucacauucacuuauagc

SEQ ID NO: 106078 - RNA, 19 nt, Artificial Sequence
  Description of Artificial Sequence: Synthetic oligonucleotide
  Sense strand starting at position 3967 of SEQ ID NO: 1340
caaagaugccuguguggug

SEQ ID NO: 106079 - RNA, 19 nt, Artificial Sequence
  Description of Artificial Sequence: Synthetic oligonucleotide
  Antisense strand to SEQ ID NO: 106078
caccacacaggcaucuuug

SEQ ID NO: 106080 - RNA, 19 nt, Artificial Sequence
  Description of Artificial Sequence: Synthetic oligonucleotide
  Sense strand starting at position 230 of SEQ ID NO: 1341
ucaugacuucuuuguucca

SEQ ID NO: 106081 - RNA, 19 nt, Artificial Sequence
  Description of Artificial Sequence: Synthetic oligonucleotide
  Antisense strand to SEQ ID NO: 106080
uggaacaaagaagucauga

SEQ ID NO: 106082 - RNA, 19 nt, Artificial Sequence
  Description of Artificial Sequence: Synthetic oligonucleotide
  Sense strand starting at position 712 of SEQ ID NO: 1341
ggccucucccaugaggaua

SEQ ID NO: 106083 - RNA, 19 nt, Artificial Sequence
  Description of Artificial Sequence: Synthetic oligonucleotide
  Antisense strand to SEQ ID NO: 106082
uauccucaugggagaggcc

SEQ ID NO: 106084 - RNA, 19 nt, Artificial Sequence
  Description of Artificial Sequence: Synthetic oligonucleotide
  Sense strand starting at position 848 of SEQ ID NO: 1341
ggaucaucucagcaauccu

SEQ ID NO: 106085 - RNA, 19 nt, Artificial Sequence
  Description of Artificial Sequence: Synthetic oligonucleotide
  Antisense strand to SEQ ID NO: 106084
aggauugcugagaugaucc

SEQ ID NO: 106086 - RNA, 19 nt, Artificial Sequence
  Description of Artificial Sequence: Synthetic oligonucleotide
  Sense strand starting at position 875 of SEQ ID NO: 1341
cccugauagguagauguua

SEQ ID NO: 106087 - RNA, 19 nt, Artificial Sequence
  Description of Artificial Sequence: Synthetic oligonucleotide
  Antisense strand to SEQ ID NO: 106086
uaacaucuaccuaucaggg

SEQ ID NO: 106088 - RNA, 19 nt, Artificial Sequence
  Description of Artificial Sequence: Synthetic oligonucleotide
  Sense strand starting at position 877 of SEQ ID NO: 1341
cugauagguagauguuauu

SEQ ID NO: 106089 - RNA, 19 nt, Artificial Sequence
  Description of Artificial Sequence: Synthetic oligonucleotide
  Antisense strand to SEQ ID NO: 106088
aauaacaucuaccuaucag

SEQ ID NO: 106090 - RNA, 19 nt, Artificial Sequence
  Description of Artificial Sequence: Synthetic oligonucleotide
  Sense strand starting at position 927 of SEQ ID NO: 1341
ugagcaguccagugacuug

SEQ ID NO: 106091 - RNA, 19 nt, Artificial Sequence
  Description of Artificial Sequence: Synthetic oligonucleotide
  Antisense strand to SEQ ID NO: 106090
caagucacuggacugcuca

SEQ ID NO: 106092 - RNA, 19 nt, Artificial Sequence
  Description of Artificial Sequence: Synthetic oligonucleotide
  Sense strand starting at position 932 of SEQ ID NO: 1341
aguccagugacuuguccaa

SEQ ID NO: 106093 - RNA, 19 nt, Artificial Sequence
  Description of Artificial Sequence: Synthetic oligonucleotide
  Antisense strand to SEQ ID NO: 106092
uuggacaagucacuggacu

SEQ ID NO: 106094 - RNA, 19 nt, Artificial Sequence
  Description of Artificial Sequence: Synthetic oligonucleotide
  Sense strand starting at position 978 of SEQ ID NO: 1341
aggaauugagccuagagcu

SEQ ID NO: 106095 - RNA, 19 nt, Artificial Sequence
  Description of Artificial Sequence: Synthetic oligonucleotide
  Antisense strand to SEQ ID NO: 106094
agcucuaggcucaauuccu

SEQ ID NO: 106096 - RNA, 19 nt, Artificial Sequence
  Description of Artificial Sequence: Synthetic oligonucleotide
  Sense strand starting at position 1106 of SEQ ID NO: 1341
cgaagugguuagcuacaga

SEQ ID NO: 106097 - RNA, 19 nt, Artificial Sequence
  Description of Artificial Sequence: Synthetic oligonucleotide
  Antisense strand to SEQ ID NO: 106096
ucuguagcuaaccacuucg

SEQ ID NO: 106098 - RNA, 19 nt, Artificial Sequence
  Description of Artificial Sequence: Synthetic oligonucleotide
  Sense strand starting at position 1171 of SEQ ID NO: 1341
uggaauuccucacuuggga

SEQ ID NO: 106099 - RNA, 19 nt, Artificial Sequence
  Description of Artificial Sequence: Synthetic oligonucleotide
  Antisense strand to SEQ ID NO: 106098
ucccaagugaggaauucca

SEQ ID NO: 106100 - RNA, 19 nt, Artificial Sequence
  Description of Artificial Sequence: Synthetic oligonucleotide
  Sense strand starting at position 1236 of SEQ ID NO: 1341
uugaaugcuucucccagga

SEQ ID NO: 106101 - RNA, 19 nt, Artificial Sequence
  Description of Artificial Sequence: Synthetic oligonucleotide
  Antisense strand to SEQ ID NO: 106100
uccugggagaagcauucaa

SEQ ID NO: 106102 - RNA, 19 nt, Artificial Sequence
  Description of Artificial Sequence: Synthetic oligonucleotide
  Sense strand starting at position 1466 of SEQ ID NO: 1341
cugacuggccauuaguaua

SEQ ID NO: 106103 - RNA, 19 nt, Artificial Sequence
  Description of Artificial Sequence: Synthetic oligonucleotide
  Antisense strand to SEQ ID NO: 106102
uauacuaauggccagucag

SEQ ID NO: 106104 - RNA, 19 nt, Artificial Sequence
  Description of Artificial Sequence: Synthetic oligonucleotide
  Sense strand starting at position 1664 of SEQ ID NO: 1341
acgaaugaucuccagccua

SEQ ID NO: 106105 - RNA, 19 nt, Artificial Sequence
  Description of Artificial Sequence: Synthetic oligonucleotide
  Antisense strand to SEQ ID NO: 106104
uaggcuggagaucauucgu

SEQ ID NO: 106106 - RNA, 19 nt, Artificial Sequence
  Description of Artificial Sequence: Synthetic oligonucleotide
  Sense strand starting at position 1692 of SEQ ID NO: 1341
ccuauagagucuuuagcuc

SEQ ID NO: 106107 - RNA, 19 nt, Artificial Sequence
  Description of Artificial Sequence: Synthetic oligonucleotide
  Antisense strand to SEQ ID NO: 106106
gagcuaaagacucuauagg

SEQ ID NO: 106108 - RNA, 19 nt, Artificial Sequence
  Description of Artificial Sequence: Synthetic oligonucleotide
  Sense strand starting at position 2180 of SEQ ID NO: 1341
cccuguuaucucgggagag

SEQ ID NO: 106109 - RNA, 19 nt, Artificial Sequence
  Description of Artificial Sequence: Synthetic oligonucleotide
  Antisense strand to SEQ ID NO: 106108
cucucccgagauaacaggg

SEQ ID NO: 106110 - RNA, 19 nt, Artificial Sequence
  Description of Artificial Sequence: Synthetic oligonucleotide
  Sense strand starting at position 2182 of SEQ ID NO: 1341
cuguuaucucgggagagag

SEQ ID NO: 106111 - RNA, 19 nt, Artificial Sequence
  Description of Artificial Sequence: Synthetic oligonucleotide
  Antisense strand to SEQ ID NO: 106110
cucucucccgagauaacag

SEQ ID NO: 106112 - RNA, 19 nt, Artificial Sequence
  Description of Artificial Sequence: Synthetic oligonucleotide
  Sense strand starting at position 2414 of SEQ ID NO: 1341
uguaaagucuuaucaacuc

SEQ ID NO: 106113 - RNA, 19 nt, Artificial Sequence
  Description of Artificial Sequence: Synthetic oligonucleotide
  Antisense strand to SEQ ID NO: 106112
gaguugauaagacuuuaca

SEQ ID NO: 106114 - RNA, 19 nt, Artificial Sequence
  Description of Artificial Sequence: Synthetic oligonucleotide
  Sense strand starting at position 2639 of SEQ ID NO: 1341
cguugugaggauuaaagag

SEQ ID NO: 106115 - RNA, 19 nt, Artificial Sequence
  Description of Artificial Sequence: Synthetic oligonucleotide
  Antisense strand to SEQ ID NO: 106114
cucuuuaauccucacaacg

SEQ ID NO: 106116 - RNA, 19 nt, Artificial Sequence
  Description of Artificial Sequence: Synthetic oligonucleotide
  Sense strand starting at position 2654 of SEQ ID NO: 1341
agagguaaucucuguaaag

SEQ ID NO: 106117 - RNA, 19 nt, Artificial Sequence
  Description of Artificial Sequence: Synthetic oligonucleotide
  Antisense strand to SEQ ID NO: 106116
cuuuacagagauuaccucu

SEQ ID NO: 106118 - RNA, 19 nt, Artificial Sequence
  Description of Artificial Sequence: Synthetic oligonucleotide
  Sense strand starting at position 2655 of SEQ ID NO: 1341
gagguaaucucuguaaagu

SEQ ID NO: 106119 - RNA, 19 nt, Artificial Sequence
  Description of Artificial Sequence: Synthetic oligonucleotide
  Antisense strand to SEQ ID NO: 106118
acuuuacagagauuaccuc

SEQ ID NO: 106120 - RNA, 19 nt, Artificial Sequence
  Description of Artificial Sequence: Synthetic oligonucleotide
  Sense strand starting at position 2656 of SEQ ID NO: 1341
agguaaucucuguaaagug

SEQ ID NO: 106121 - RNA, 19 nt, Artificial Sequence
  Description of Artificial Sequence: Synthetic oligonucleotide
  Antisense strand to SEQ ID NO: 106120
cacuuuacagagauuaccu

SEQ ID NO: 106122 - RNA, 19 nt, Artificial Sequence
  Description of Artificial Sequence: Synthetic oligonucleotide
  Sense strand starting at position 2665 of SEQ ID NO: 1341
cuguaaagugcuuagcaga

SEQ ID NO: 106123 - RNA, 19 nt, Artificial Sequence
  Description of Artificial Sequence: Synthetic oligonucleotide
  Antisense strand to SEQ ID NO: 106122
ucugcuaagcacuuuacag

SEQ ID NO: 106124 - RNA, 19 nt, Artificial Sequence
  Description of Artificial Sequence: Synthetic oligonucleotide
  Sense strand starting at position 2690 of SEQ ID NO: 1341
ccgacuaagugcuugauaa

SEQ ID NO: 106125 - RNA, 19 nt, Artificial Sequence
  Description of Artificial Sequence: Synthetic oligonucleotide
  Antisense strand to SEQ ID NO: 106124
uuaucaagcacuuagucgg

SEQ ID NO: 106126 - RNA, 19 nt, Artificial Sequence
  Description of Artificial Sequence: Synthetic oligonucleotide
  Sense strand starting at position 2691 of SEQ ID NO: 1341
cgacuaagugcuugauaaa

SEQ ID NO: 106127 - RNA, 19 nt, Artificial Sequence
  Description of Artificial Sequence: Synthetic oligonucleotide
  Antisense strand to SEQ ID NO: 106126
uuuaucaagcacuuagucg

SEQ ID NO: 106128 - RNA, 19 nt, Artificial Sequence
  Description of Artificial Sequence: Synthetic oligonucleotide
  Sense strand starting at position 2692 of SEQ ID NO: 1341
gacuaagugcuugauaaau

SEQ ID NO: 106129 - RNA, 19 nt, Artificial Sequence
  Description of Artificial Sequence: Synthetic oligonucleotide
  Antisense strand to SEQ ID NO: 106128
auuuaucaagcacuuaguc

SEQ ID NO: 106130 - RNA, 19 nt, Artificial Sequence
  Description of Artificial Sequence: Synthetic oligonucleotide
  Sense strand starting at position 2909 of SEQ ID NO: 1341
agucccagucuaugaaaca

SEQ ID NO: 106131 - RNA, 19 nt, Artificial Sequence
  Description of Artificial Sequence: Synthetic oligonucleotide
  Antisense strand to SEQ ID NO: 106130
uguuucauagacugggacu

SEQ ID NO: 106132 - RNA, 19 nt, Artificial Sequence
  Description of Artificial Sequence: Synthetic oligonucleotide
  Sense strand starting at position 2939 of SEQ ID NO: 1341
caugauuguguugaggaua

SEQ ID NO: 106133 - RNA, 19 nt, Artificial Sequence
  Description of Artificial Sequence: Synthetic oligonucleotide
  Antisense strand to SEQ ID NO: 106132
uauccucaacacaaucaug

SEQ ID NO: 106134 - RNA, 19 nt, Artificial Sequence
  Description of Artificial Sequence: Synthetic oligonucleotide
  Sense strand starting at position 3153 of SEQ ID NO: 1341
uuuagagcaguuugagagu

SEQ ID NO: 106135 - RNA, 19 nt, Artificial Sequence
  Description of Artificial Sequence: Synthetic oligonucleotide
  Antisense strand to SEQ ID NO: 106134
acucucaaacugcucuaaa

SEQ ID NO: 106136 - RNA, 19 nt, Artificial Sequence
  Description of Artificial Sequence: Synthetic oligonucleotide
  Sense strand starting at position 3174 of SEQ ID NO: 1341
cggcaaagcugaguggaaa

SEQ ID NO: 106137 - RNA, 19 nt, Artificial Sequence
  Description of Artificial Sequence: Synthetic oligonucleotide
  Antisense strand to SEQ ID NO: 106136
uuuccacucagcuuugccg

SEQ ID NO: 106138 - RNA, 19 nt, Artificial Sequence
  Description of Artificial Sequence: Synthetic oligonucleotide
  Sense strand starting at position 3267 of SEQ ID NO: 1341
uggacugacuucuuacuca

SEQ ID NO: 106139 - RNA, 19 nt, Artificial Sequence
  Description of Artificial Sequence: Synthetic oligonucleotide
  Antisense strand to SEQ ID NO: 106138
ugaguaagaagucagucca

SEQ ID NO: 106140 - RNA, 19 nt, Artificial Sequence
  Description of Artificial Sequence: Synthetic oligonucleotide
  Sense strand starting at position 3389 of SEQ ID NO: 1341
ccaggacaaucuguuuauu

SEQ ID NO: 106141 - RNA, 19 nt, Artificial Sequence
  Description of Artificial Sequence: Synthetic oligonucleotide
  Antisense strand to SEQ ID NO: 106140
aauaaacagauuguccugg

SEQ ID NO: 106142 - RNA, 19 nt, Artificial Sequence
  Description of Artificial Sequence: Synthetic oligonucleotide
  Sense strand starting at position 3432 of SEQ ID NO: 1341
ugauuugguuggcagaaga

SEQ ID NO: 106143 - RNA, 19 nt, Artificial Sequence
  Description of Artificial Sequence: Synthetic oligonucleotide
  Antisense strand to SEQ ID NO: 106142
ucuucugccaaccaaauca

SEQ ID NO: 106144 - RNA, 19 nt, Artificial Sequence
  Description of Artificial Sequence: Synthetic oligonucleotide
  Sense strand starting at position 3476 of SEQ ID NO: 1341
gcuugaaggucuuucugaa

SEQ ID NO: 106145 - RNA, 19 nt, Artificial Sequence
  Description of Artificial Sequence: Synthetic oligonucleotide
  Antisense strand to SEQ ID NO: 106144
uucagaaagaccuucaagc

SEQ ID NO: 106146 - RNA, 19 nt, Artificial Sequence
  Description of Artificial Sequence: Synthetic oligonucleotide
  Sense strand starting at position 3683 of SEQ ID NO: 1341
agguuugcccaucagaaag

SEQ ID NO: 106147 - RNA, 19 nt, Artificial Sequence
  Description of Artificial Sequence: Synthetic oligonucleotide
  Antisense strand to SEQ ID NO: 106146
cuuucugaugggcaaaccu

SEQ ID NO: 106148 - RNA, 19 nt, Artificial Sequence
  Description of Artificial Sequence: Synthetic oligonucleotide
  Sense strand starting at position 3720 of SEQ ID NO: 1341
gggugcuauccagaaaucu

SEQ ID NO: 106149 - RNA, 19 nt, Artificial Sequence
  Description of Artificial Sequence: Synthetic oligonucleotide
  Antisense strand to SEQ ID NO: 106148
agauuucuggauagcaccc

SEQ ID NO: 106150 - RNA, 19 nt, Artificial Sequence
  Description of Artificial Sequence: Synthetic oligonucleotide
  Sense strand starting at position 3760 of SEQ ID NO: 1341
gugacucuggcgcaggaaa

SEQ ID NO: 106151 - RNA, 19 nt, Artificial Sequence
  Description of Artificial Sequence: Synthetic oligonucleotide
  Antisense strand to SEQ ID NO: 106150
uuuccugcgccagagucac

SEQ ID NO: 106152 - RNA, 19 nt, Artificial Sequence
  Description of Artificial Sequence: Synthetic oligonucleotide
  Sense strand starting at position 3771 of SEQ ID NO: 1341
gcaggaaaucuuggaauac

SEQ ID NO: 106153 - RNA, 19 nt, Artificial Sequence
  Description of Artificial Sequence: Synthetic oligonucleotide
  Antisense strand to SEQ ID NO: 106152
guauuccaagauuuccugc

SEQ ID NO: 106154 - RNA, 19 nt, Artificial Sequence
  Description of Artificial Sequence: Synthetic oligonucleotide
  Sense strand starting at position 3780 of SEQ ID NO: 1341
cuuggaauaccauguuaga

SEQ ID NO: 106155 - RNA, 19 nt, Artificial Sequence
  Description of Artificial Sequence: Synthetic oligonucleotide
  Antisense strand to SEQ ID NO: 106154
ucuaacaugguauuccaag

SEQ ID NO: 106156 - RNA, 19 nt, Artificial Sequence
  Description of Artificial Sequence: Synthetic oligonucleotide
  Sense strand starting at position 3881 of SEQ ID NO: 1341
ggcuuugcccugucaucuu

SEQ ID NO: 106157 - RNA, 19 nt, Artificial Sequence
  Description of Artificial Sequence: Synthetic oligonucleotide
  Antisense strand to SEQ ID NO: 106156
aagaugacagggcaaagcc

SEQ ID NO: 106158 - RNA, 19 nt, Artificial Sequence
  Description of Artificial Sequence: Synthetic oligonucleotide
  Sense strand starting at position 3980 of SEQ ID NO: 1341
gcaggaaccucucuuaaau

SEQ ID NO: 106159 - RNA, 19 nt, Artificial Sequence
  Description of Artificial Sequence: Synthetic oligonucleotide
  Antisense strand to SEQ ID NO: 106158
auuuaagagagguuccugc

SEQ ID NO: 106160 - RNA, 19 nt, Artificial Sequence
  Description of Artificial Sequence: Synthetic oligonucleotide
  Sense strand starting at position 475 of SEQ ID NO: 1342
ugcuuaucuccagugugca

SEQ ID NO: 106161 - RNA, 19 nt, Artificial Sequence
  Description of Artificial Sequence: Synthetic oligonucleotide
  Antisense strand to SEQ ID NO: 106160
ugcacacuggagauaagca

SEQ ID NO: 106162 - RNA, 19 nt, Artificial Sequence
  Description of Artificial Sequence: Synthetic oligonucleotide
  Sense strand starting at position 612 of SEQ ID NO: 1342
agaguagucccuuaagacu

SEQ ID NO: 106163 - RNA, 19 nt, Artificial Sequence
  Description of Artificial Sequence: Synthetic oligonucleotide
  Antisense strand to SEQ ID NO: 106162
agucuuaagggacuacucu

SEQ ID NO: 106164 - RNA, 19 nt, Artificial Sequence
  Description of Artificial Sequence: Synthetic oligonucleotide
  Sense strand starting at position 623 of SEQ ID NO: 1342
uuaagacuugcugaaguuu

SEQ ID NO: 106165 - RNA, 19 nt, Artificial Sequence
  Description of Artificial Sequence: Synthetic oligonucleotide
  Antisense strand to SEQ ID NO: 106164
aaacuucagcaagucuuaa

SEQ ID NO: 106166 - RNA, 19 nt, Artificial Sequence
  Description of Artificial Sequence: Synthetic oligonucleotide
  Sense strand starting at position 632 of SEQ ID NO: 1342
gcugaaguuuauuugcaaa

SEQ ID NO: 106167 - RNA, 19 nt, Artificial Sequence
  Description of Artificial Sequence: Synthetic oligonucleotide
  Antisense strand to SEQ ID NO: 106166
uuugcaaauaaacuucagc

SEQ ID NO: 106168 - RNA, 19 nt, Artificial Sequence
  Description of Artificial Sequence: Synthetic oligonucleotide
  Sense strand starting at position 653 of SEQ ID NO: 1342
gguaaacuauuaucugaac

SEQ ID NO: 106169 - RNA, 19 nt, Artificial Sequence
  Description of Artificial Sequence: Synthetic oligonucleotide
  Antisense strand to SEQ ID NO: 106168
guucagauaauaguuuacc

SEQ ID NO: 106170 - RNA, 19 nt, Artificial Sequence
  Description of Artificial Sequence: Synthetic oligonucleotide
  Sense strand starting at position 711 of SEQ ID NO: 1342
uucuaagacccaggaguua

SEQ ID NO: 106171 - RNA, 19 nt, Artificial Sequence
  Description of Artificial Sequence: Synthetic oligonucleotide
  Antisense strand to SEQ ID NO: 106170
uaacuccugggucuuagaa

SEQ ID NO: 106172 - RNA, 19 nt, Artificial Sequence
  Description of Artificial Sequence: Synthetic oligonucleotide
  Sense strand starting at position 862 of SEQ ID NO: 1342
ugaauaucccagugaguug

SEQ ID NO: 106173 - RNA, 19 nt, Artificial Sequence
  Description of Artificial Sequence: Synthetic oligonucleotide
  Antisense strand to SEQ ID NO: 106172
caacucacugggauauuca

SEQ ID NO: 106174 - RNA, 19 nt, Artificial Sequence
  Description of Artificial Sequence: Synthetic oligonucleotide
  Sense strand starting at position 871 of SEQ ID NO: 1342
cagugaguugagugacaca

SEQ ID NO: 106175 - RNA, 19 nt, Artificial Sequence
  Description of Artificial Sequence: Synthetic oligonucleotide
  Antisense strand to SEQ ID NO: 106174
ugugucacucaacucacug

SEQ ID NO: 106176 - RNA, 19 nt, Artificial Sequence
  Description of Artificial Sequence: Synthetic oligonucleotide
  Sense strand starting at position 908 of SEQ ID NO: 1342
gugcuaagccaauaaagua

SEQ ID NO: 106177 - RNA, 19 nt, Artificial Sequence
  Description of Artificial Sequence: Synthetic oligonucleotide
  Antisense strand to SEQ ID NO: 106176
uacuuuauuggcuuagcac

SEQ ID NO: 106178 - RNA, 19 nt, Artificial Sequence
  Description of Artificial Sequence: Synthetic oligonucleotide
  Sense strand starting at position 990 of SEQ ID NO: 1342
ucuugaagccacgaaugaa

SEQ ID NO: 106179 - RNA, 19 nt, Artificial Sequence
  Description of Artificial Sequence: Synthetic oligonucleotide
  Antisense strand to SEQ ID NO: 106178
uucauucguggcuucaaga

SEQ ID NO: 106180 - RNA, 19 nt, Artificial Sequence
  Description of Artificial Sequence: Synthetic oligonucleotide
  Sense strand starting at position 1009 of SEQ ID NO: 1342
gagauacagcguuaacagu

SEQ ID NO: 106181 - RNA, 19 nt, Artificial Sequence
  Description of Artificial Sequence: Synthetic oligonucleotide
  Antisense strand to SEQ ID NO: 106180
acuguuaacgcuguaucuc

SEQ ID NO: 106182 - RNA, 19 nt, Artificial Sequence
  Description of Artificial Sequence: Synthetic oligonucleotide
  Sense strand starting at position 1055 of SEQ ID NO: 1342
auguaaccaccuugauaug

SEQ ID NO: 106183 - RNA, 19 nt, Artificial Sequence
  Description of Artificial Sequence: Synthetic oligonucleotide
  Antisense strand to SEQ ID NO: 106182
cauaucaaggugguuacau

SEQ ID NO: 106184 - RNA, 19 nt, Artificial Sequence
  Description of Artificial Sequence: Synthetic oligonucleotide
  Sense strand starting at position 1169 of SEQ ID NO: 1342
agccaaauucgcuaugaau

SEQ ID NO: 106185 - RNA, 19 nt, Artificial Sequence
  Description of Artificial Sequence: Synthetic oligonucleotide
  Antisense strand to SEQ ID NO: 106184
auucauagcgaauuuggcu

SEQ ID NO: 106186 - RNA, 19 nt, Artificial Sequence
  Description of Artificial Sequence: Synthetic oligonucleotide
  Sense strand starting at position 1334 of SEQ ID NO: 1342
aucugaagguccuuggcaa

SEQ ID NO: 106187 - RNA, 19 nt, Artificial Sequence
  Description of Artificial Sequence: Synthetic oligonucleotide
  Antisense strand to SEQ ID NO: 106186
uugccaaggaccuucagau

SEQ ID NO: 106188 - RNA, 19 nt, Artificial Sequence
  Description of Artificial Sequence: Synthetic oligonucleotide
  Sense strand starting at position 2357 of SEQ ID NO: 1342
ggcucucguccugagaaag

SEQ ID NO: 106189 - RNA, 19 nt, Artificial Sequence
  Description of Artificial Sequence: Synthetic oligonucleotide
  Antisense strand to SEQ ID NO: 106188
cuuucucaggacgagagcc

SEQ ID NO: 106190 - RNA, 19 nt, Artificial Sequence
  Description of Artificial Sequence: Synthetic oligonucleotide
  Sense strand starting at position 2399 of SEQ ID NO: 1342
cgaggaggguguuuagaau

SEQ ID NO: 106191 - RNA, 19 nt, Artificial Sequence
  Description of Artificial Sequence: Synthetic oligonucleotide
  Antisense strand to SEQ ID NO: 106190
auucuaaacacccuccucg

SEQ ID NO: 106192 - RNA, 19 nt, Artificial Sequence
  Description of Artificial Sequence: Synthetic oligonucleotide
  Sense strand starting at position 2496 of SEQ ID NO: 1342
gcaguaacgagcuugcagu

SEQ ID NO: 106193 - RNA, 19 nt, Artificial Sequence
  Description of Artificial Sequence: Synthetic oligonucleotide
  Antisense strand to SEQ ID NO: 106192
acugcaagcucguuacugc

SEQ ID NO: 106194 - RNA, 19 nt, Artificial Sequence
  Description of Artificial Sequence: Synthetic oligonucleotide
  Sense strand starting at position 2608 of SEQ ID NO: 1342
ugguuagauguccagugag

SEQ ID NO: 106195 - RNA, 19 nt, Artificial Sequence
  Description of Artificial Sequence: Synthetic oligonucleotide
  Antisense strand to SEQ ID NO: 106194
cucacuggacaucuaacca

SEQ ID NO: 106196 - RNA, 19 nt, Artificial Sequence
  Description of Artificial Sequence: Synthetic oligonucleotide
  Sense strand starting at position 2636 of SEQ ID NO: 1342
guccaauccgggcaaugaa

SEQ ID NO: 106197 - RNA, 19 nt, Artificial Sequence
  Description of Artificial Sequence: Synthetic oligonucleotide
  Antisense strand to SEQ ID NO: 106196
uucauugcccggauuggac

SEQ ID NO: 106198 - RNA, 19 nt, Artificial Sequence
  Description of Artificial Sequence: Synthetic oligonucleotide
  Sense strand starting at position 2649 of SEQ ID NO: 1342
aaugaaucacgaugcuaug

SEQ ID NO: 106199 - RNA, 19 nt, Artificial Sequence
  Description of Artificial Sequence: Synthetic oligonucleotide
  Antisense strand to SEQ ID NO: 106198
cauagcaucgugauucauu

SEQ ID NO: 106200 - RNA, 19 nt, Artificial Sequence
  Description of Artificial Sequence: Synthetic oligonucleotide
  Sense strand starting at position 2717 of SEQ ID NO: 1342
agcaacaugugauuauacu

SEQ ID NO: 106201 - RNA, 19 nt, Artificial Sequence
  Description of Artificial Sequence: Synthetic oligonucleotide
  Antisense strand to SEQ ID NO: 106200
aguauaaucacauguugcu

SEQ ID NO: 106202 - RNA, 19 nt, Artificial Sequence
  Description of Artificial Sequence: Synthetic oligonucleotide
  Sense strand starting at position 2718 of SEQ ID NO: 1342
gcaacaugugauuauacuc

SEQ ID NO: 106203 - RNA, 19 nt, Artificial Sequence
  Description of Artificial Sequence: Synthetic oligonucleotide
  Antisense strand to SEQ ID NO: 106202
gaguauaaucacauguugc

SEQ ID NO: 106204 - RNA, 19 nt, Artificial Sequence
  Description of Artificial Sequence: Synthetic oligonucleotide
  Sense strand starting at position 2723 of SEQ ID NO: 1342
augugauuauacucaagac

SEQ ID NO: 106205 - RNA, 19 nt, Artificial Sequence
  Description of Artificial Sequence: Synthetic oligonucleotide
  Antisense strand to SEQ ID NO: 106204
gucuugaguauaaucacau

SEQ ID NO: 106206 - RNA, 19 nt, Artificial Sequence
  Description of Artificial Sequence: Synthetic oligonucleotide
  Sense strand starting at position 2935 of SEQ ID NO: 1342
ucgaaaggauaucauuuaa

SEQ ID NO: 106207 - RNA, 19 nt, Artificial Sequence
  Description of Artificial Sequence: Synthetic oligonucleotide
  Antisense strand to SEQ ID NO: 106206
uuaaaugauauccuuucga

SEQ ID NO: 106208 - RNA, 19 nt, Artificial Sequence
  Description of Artificial Sequence: Synthetic oligonucleotide
  Sense strand starting at position 3125 of SEQ ID NO: 1342
aggcuacuucucugauaau

SEQ ID NO: 106209 - RNA, 19 nt, Artificial Sequence
  Description of Artificial Sequence: Synthetic oligonucleotide
  Antisense strand to SEQ ID NO: 106208
auuaucagagaaguagccu

SEQ ID NO: 106210 - RNA, 19 nt, Artificial Sequence
  Description of Artificial Sequence: Synthetic oligonucleotide
  Sense strand starting at position 3209 of SEQ ID NO: 1342
gagauuguucguuagggac

SEQ ID NO: 106211 - RNA, 19 nt, Artificial Sequence
  Description of Artificial Sequence: Synthetic oligonucleotide
  Antisense strand to SEQ ID NO: 106210
gucccuaacgaacaaucuc

SEQ ID NO: 106212 - RNA, 19 nt, Artificial Sequence
  Description of Artificial Sequence: Synthetic oligonucleotide
  Sense strand starting at position 3317 of SEQ ID NO: 1342
uggaaugucaagugauuga

SEQ ID NO: 106213 - RNA, 19 nt, Artificial Sequence
  Description of Artificial Sequence: Synthetic oligonucleotide
  Antisense strand to SEQ ID NO: 106212
ucaaucacuugacauucca

SEQ ID NO: 106214 - RNA, 19 nt, Artificial Sequence
  Description of Artificial Sequence: Synthetic oligonucleotide
  Sense strand starting at position 3321 of SEQ ID NO: 1342
augucaagugauugagaau

SEQ ID NO: 106215 - RNA, 19 nt, Artificial Sequence
  Description of Artificial Sequence: Synthetic oligonucleotide
  Antisense strand to SEQ ID NO: 106214
auucucaaucacuugacau

SEQ ID NO: 106216 - RNA, 19 nt, Artificial Sequence
  Description of Artificial Sequence: Synthetic oligonucleotide
  Sense strand starting at position 3330 of SEQ ID NO: 1342
gauugagaaucuccuugug

SEQ ID NO: 106217 - RNA, 19 nt, Artificial Sequence
  Description of Artificial Sequence: Synthetic oligonucleotide
  Antisense strand to SEQ ID NO: 106216
cacaaggagauucucaauc

SEQ ID NO: 106218 - RNA, 19 nt, Artificial Sequence
  Description of Artificial Sequence: Synthetic oligonucleotide
  Sense strand starting at position 3332 of SEQ ID NO: 1342
uugagaaucuccuugugaa

SEQ ID NO: 106219 - RNA, 19 nt, Artificial Sequence
  Description of Artificial Sequence: Synthetic oligonucleotide
  Antisense strand to SEQ ID NO: 106218
uucacaaggagauucucaa

SEQ ID NO: 106220 - RNA, 19 nt, Artificial Sequence
  Description of Artificial Sequence: Synthetic oligonucleotide
  Sense strand starting at position 3333 of SEQ ID NO: 1342
ugagaaucuccuugugaag

SEQ ID NO: 106221 - RNA, 19 nt, Artificial Sequence
  Description of Artificial Sequence: Synthetic oligonucleotide
  Antisense strand to SEQ ID NO: 106220
cuucacaaggagauucuca

SEQ ID NO: 106222 - RNA, 19 nt, Artificial Sequence
  Description of Artificial Sequence: Synthetic oligonucleotide
  Sense strand starting at position 3423 of SEQ ID NO: 1342
ucauguucuguagaggaac

SEQ ID NO: 106223 - RNA, 19 nt, Artificial Sequence
  Description of Artificial Sequence: Synthetic oligonucleotide
  Antisense strand to SEQ ID NO: 106222
guuccucuacagaacauga

SEQ ID NO: 106224 - RNA, 19 nt, Artificial Sequence
  Description of Artificial Sequence: Synthetic oligonucleotide
  Sense strand starting at position 3556 of SEQ ID NO: 1342
aacggugaccucuagagua

SEQ ID NO: 106225 - RNA, 19 nt, Artificial Sequence
  Description of Artificial Sequence: Synthetic oligonucleotide
  Antisense strand to SEQ ID NO: 106224
uacucuagaggucaccguu

SEQ ID NO: 106226 - RNA, 19 nt, Artificial Sequence
  Description of Artificial Sequence: Synthetic oligonucleotide
  Sense strand starting at position 3561 of SEQ ID NO: 1342
ugaccucuagaguaguagu

SEQ ID NO: 106227 - RNA, 19 nt, Artificial Sequence
  Description of Artificial Sequence: Synthetic oligonucleotide
  Antisense strand to SEQ ID NO: 106226
acuacuacucuagagguca

SEQ ID NO: 106228 - RNA, 19 nt, Artificial Sequence
  Description of Artificial Sequence: Synthetic oligonucleotide
  Sense strand starting at position 3676 of SEQ ID NO: 1342
uugaacugauguguugaaa

SEQ ID NO: 106229 - RNA, 19 nt, Artificial Sequence
  Description of Artificial Sequence: Synthetic oligonucleotide
  Antisense strand to SEQ ID NO: 106228
uuucaacacaucaguucaa

SEQ ID NO: 106230 - RNA, 19 nt, Artificial Sequence
  Description of Artificial Sequence: Synthetic oligonucleotide
  Sense strand starting at position 3704 of SEQ ID NO: 1342
acuaguacuaaguguggaa

SEQ ID NO: 106231 - RNA, 19 nt, Artificial Sequence
  Description of Artificial Sequence: Synthetic oligonucleotide
  Antisense strand to SEQ ID NO: 106230
uuccacacuuaguacuagu

SEQ ID NO: 106232 - RNA, 19 nt, Artificial Sequence
  Description of Artificial Sequence: Synthetic oligonucleotide
  Sense strand starting at position 3706 of SEQ ID NO: 1342
uaguacuaaguguggaaau

SEQ ID NO: 106233 - RNA, 19 nt, Artificial Sequence
  Description of Artificial Sequence: Synthetic oligonucleotide
  Antisense strand to SEQ ID NO: 106232
auuuccacacuuaguacua

SEQ ID NO: 106234 - RNA, 19 nt, Artificial Sequence
  Description of Artificial Sequence: Synthetic oligonucleotide
  Sense strand starting at position 3708 of SEQ ID NO: 1342
guacuaaguguggaaaucu

SEQ ID NO: 106235 - RNA, 19 nt, Artificial Sequence
  Description of Artificial Sequence: Synthetic oligonucleotide
  Antisense strand to SEQ ID NO: 106234
agauuuccacacuuaguac

SEQ ID NO: 106236 - RNA, 19 nt, Artificial Sequence
  Description of Artificial Sequence: Synthetic oligonucleotide
  Sense strand starting at position 3777 of SEQ ID NO: 1342
acacuaugauugucaggau

SEQ ID NO: 106237 - RNA, 19 nt, Artificial Sequence
  Description of Artificial Sequence: Synthetic oligonucleotide
  Antisense strand to SEQ ID NO: 106236
auccugacaaucauagugu

SEQ ID NO: 106238 - RNA, 19 nt, Artificial Sequence
  Description of Artificial Sequence: Synthetic oligonucleotide
  Sense strand starting at position 3916 of SEQ ID NO: 1342
ucugguauuuggcuacauu

SEQ ID NO: 106239 - RNA, 19 nt, Artificial Sequence
  Description of Artificial Sequence: Synthetic oligonucleotide
  Antisense strand to SEQ ID NO: 106238
aauguagccaaauaccaga

SEQ ID NO: 106240 - RNA, 19 nt, Artificial Sequence
  Description of Artificial Sequence: Synthetic oligonucleotide
  Sense strand starting at position 308 of SEQ ID NO: 1343
acuuguagugauugucuau

SEQ ID NO: 106241 - RNA, 19 nt, Artificial Sequence
  Description of Artificial Sequence: Synthetic oligonucleotide
  Antisense strand to SEQ ID NO: 106240
auagacaaucacuacaagu

SEQ ID NO: 106242 - RNA, 19 nt, Artificial Sequence
  Description of Artificial Sequence: Synthetic oligonucleotide
  Sense strand starting at position 315 of SEQ ID NO: 1343
gugauugucuaucucuaag

SEQ ID NO: 106243 - RNA, 19 nt, Artificial Sequence
  Description of Artificial Sequence: Synthetic oligonucleotide
  Antisense strand to SEQ ID NO: 106242
cuuagagauagacaaucac

SEQ ID NO: 106244 - RNA, 19 nt, Artificial Sequence
  Description of Artificial Sequence: Synthetic oligonucleotide
  Sense strand starting at position 389 of SEQ ID NO: 1343
ggaugcacgagugguaagu

SEQ ID NO: 106245 - RNA, 19 nt, Artificial Sequence
  Description of Artificial Sequence: Synthetic oligonucleotide
  Antisense strand to SEQ ID NO: 106244
acuuaccacucgugcaucc

SEQ ID NO: 106246 - RNA, 19 nt, Artificial Sequence
  Description of Artificial Sequence: Synthetic oligonucleotide
  Sense strand starting at position 546 of SEQ ID NO: 1343
gugaguuuccuagggaaag

SEQ ID NO: 106247 - RNA, 19 nt, Artificial Sequence
  Description of Artificial Sequence: Synthetic oligonucleotide
  Antisense strand to SEQ ID NO: 106246
cuuucccuaggaaacucac

SEQ ID NO: 106248 - RNA, 19 nt, Artificial Sequence
  Description of Artificial Sequence: Synthetic oligonucleotide
  Sense strand starting at position 637 of SEQ ID NO: 1343
ccaguauuguccucucuaa

SEQ ID NO: 106249 - RNA, 19 nt, Artificial Sequence
  Description of Artificial Sequence: Synthetic oligonucleotide
  Antisense strand to SEQ ID NO: 106248
uuagagaggacaauacugg

SEQ ID NO: 106250 - RNA, 19 nt, Artificial Sequence
  Description of Artificial Sequence: Synthetic oligonucleotide
  Sense strand starting at position 821 of SEQ ID NO: 1343
ggcccaagagcuugagaag

SEQ ID NO: 106251 - RNA, 19 nt, Artificial Sequence
  Description of Artificial Sequence: Synthetic oligonucleotide
  Antisense strand to SEQ ID NO: 106250
cuucucaagcucuugggcc

SEQ ID NO: 106252 - RNA, 19 nt, Artificial Sequence
  Description of Artificial Sequence: Synthetic oligonucleotide
  Sense strand starting at position 1317 of SEQ ID NO: 1343
gcucgaauuucuuccagau

SEQ ID NO: 106253 - RNA, 19 nt, Artificial Sequence
  Description of Artificial Sequence: Synthetic oligonucleotide
  Antisense strand to SEQ ID NO: 106252
aucuggaagaaauucgagc

SEQ ID NO: 106254 - RNA, 19 nt, Artificial Sequence
  Description of Artificial Sequence: Synthetic oligonucleotide
  Sense strand starting at position 1348 of SEQ ID NO: 1343
cgccguggagcgguagaaa

SEQ ID NO: 106255 - RNA, 19 nt, Artificial Sequence
  Description of Artificial Sequence: Synthetic oligonucleotide
  Antisense strand to SEQ ID NO: 106254
uuucuaccgcuccacggcg

SEQ ID NO: 106256 - RNA, 19 nt, Artificial Sequence
  Description of Artificial Sequence: Synthetic oligonucleotide
  Sense strand starting at position 1378 of SEQ ID NO: 1343
gucauagucguagaaauag

SEQ ID NO: 106257 - RNA, 19 nt, Artificial Sequence
  Description of Artificial Sequence: Synthetic oligonucleotide
  Antisense strand to SEQ ID NO: 106256
cuauuucuacgacuaugac

SEQ ID NO: 106258 - RNA, 19 nt, Artificial Sequence
  Description of Artificial Sequence: Synthetic oligonucleotide
  Sense strand starting at position 1389 of SEQ ID NO: 1343
agaaauagugcugguacga

SEQ ID NO: 106259 - RNA, 19 nt, Artificial Sequence
  Description of Artificial Sequence: Synthetic oligonucleotide
  Antisense strand to SEQ ID NO: 106258
ucguaccagcacuauuucu

SEQ ID NO: 106260 - RNA, 19 nt, Artificial Sequence
  Description of Artificial Sequence: Synthetic oligonucleotide
  Sense strand starting at position 2491 of SEQ ID NO: 1343
uggcaucgaagcgaagauu

SEQ ID NO: 106261 - RNA, 19 nt, Artificial Sequence
  Description of Artificial Sequence: Synthetic oligonucleotide
  Antisense strand to SEQ ID NO: 106260
aaucuucgcuucgaugcca

SEQ ID NO: 106262 - RNA, 19 nt, Artificial Sequence
  Description of Artificial Sequence: Synthetic oligonucleotide
  Sense strand starting at position 2571 of SEQ ID NO: 1343
gaugguaaugcuuaccuca

SEQ ID NO: 106263 - RNA, 19 nt, Artificial Sequence
  Description of Artificial Sequence: Synthetic oligonucleotide
  Antisense strand to SEQ ID NO: 106262
ugagguaagcauuaccauc

SEQ ID NO: 106264 - RNA, 19 nt, Artificial Sequence
  Description of Artificial Sequence: Synthetic oligonucleotide
  Sense strand starting at position 2573 of SEQ ID NO: 1343
ugguaaugcuuaccucaca

SEQ ID NO: 106265 - RNA, 19 nt, Artificial Sequence
  Description of Artificial Sequence: Synthetic oligonucleotide
  Antisense strand to SEQ ID NO: 106264
ugugagguaagcauuacca

SEQ ID NO: 106266 - RNA, 19 nt, Artificial Sequence
  Description of Artificial Sequence: Synthetic oligonucleotide
  Sense strand starting at position 2775 of SEQ ID NO: 1343
ggagcuguacaguagagaa

SEQ ID NO: 106267 - RNA, 19 nt, Artificial Sequence
  Description of Artificial Sequence: Synthetic oligonucleotide
  Antisense strand to SEQ ID NO: 106266
uucucuacuguacagcucc

SEQ ID NO: 106268 - RNA, 19 nt, Artificial Sequence
  Description of Artificial Sequence: Synthetic oligonucleotide
  Sense strand starting at position 2852 of SEQ ID NO: 1343
auugcuggccaagaugaua

SEQ ID NO: 106269 - RNA, 19 nt, Artificial Sequence
  Description of Artificial Sequence: Synthetic oligonucleotide
  Antisense strand to SEQ ID NO: 106268
uaucaucuuggccagcaau

SEQ ID NO: 106270 - RNA, 19 nt, Artificial Sequence
  Description of Artificial Sequence: Synthetic oligonucleotide
  Sense strand starting at position 2857 of SEQ ID NO: 1343
uggccaagaugauagauaa

SEQ ID NO: 106271 - RNA, 19 nt, Artificial Sequence
  Description of Artificial Sequence: Synthetic oligonucleotide
  Antisense strand to SEQ ID NO: 106270
uuaucuaucaucuuggcca

SEQ ID NO: 106272 - RNA, 19 nt, Artificial Sequence
  Description of Artificial Sequence: Synthetic oligonucleotide
  Sense strand starting at position 3076 of SEQ ID NO: 1343
ugucaucuucuacacagau

SEQ ID NO: 106273 - RNA, 19 nt, Artificial Sequence
  Description of Artificial Sequence: Synthetic oligonucleotide
  Antisense strand to SEQ ID NO: 106272
aucuguguagaagaugaca

SEQ ID NO: 106274 - RNA, 19 nt, Artificial Sequence
  Description of Artificial Sequence: Synthetic oligonucleotide
  Sense strand starting at position 3089 of SEQ ID NO: 1343
acagaugaccuuuggugga

SEQ ID NO: 106275 - RNA, 19 nt, Artificial Sequence
  Description of Artificial Sequence: Synthetic oligonucleotide
  Antisense strand to SEQ ID NO: 106274
uccaccaaaggucaucugu

SEQ ID NO: 106276 - RNA, 19 nt, Artificial Sequence
  Description of Artificial Sequence: Synthetic oligonucleotide
  Sense strand starting at position 3355 of SEQ ID NO: 1343
ggauguguguuguuauaug

SEQ ID NO: 106277 - RNA, 19 nt, Artificial Sequence
  Description of Artificial Sequence: Synthetic oligonucleotide
  Antisense strand to SEQ ID NO: 106276
cauauaacaacacacaucc

SEQ ID NO: 106278 - RNA, 19 nt, Artificial Sequence
  Description of Artificial Sequence: Synthetic oligonucleotide
  Sense strand starting at position 3359 of SEQ ID NO: 1343
guguguuguuauauggguu

SEQ ID NO: 106279 - RNA, 19 nt, Artificial Sequence
  Description of Artificial Sequence: Synthetic oligonucleotide
  Antisense strand to SEQ ID NO: 106278
aacccauauaacaacacac

SEQ ID NO: 106280 - RNA, 19 nt, Artificial Sequence
  Description of Artificial Sequence: Synthetic oligonucleotide
  Sense strand starting at position 3363 of SEQ ID NO: 1343
guuguuauauggguuggga

SEQ ID NO: 106281 - RNA, 19 nt, Artificial Sequence
  Description of Artificial Sequence: Synthetic oligonucleotide
  Antisense strand to SEQ ID NO: 106280
ucccaacccauauaacaac

SEQ ID NO: 106282 - RNA, 19 nt, Artificial Sequence
  Description of Artificial Sequence: Synthetic oligonucleotide
  Sense strand starting at position 3365 of SEQ ID NO: 1343
uguuauauggguugggaag

SEQ ID NO: 106283 - RNA, 19 nt, Artificial Sequence
  Description of Artificial Sequence: Synthetic oligonucleotide
  Antisense strand to SEQ ID NO: 106282
cuucccaacccauauaaca

SEQ ID NO: 106284 - RNA, 19 nt, Artificial Sequence
  Description of Artificial Sequence: Synthetic oligonucleotide
  Sense strand starting at position 3435 of SEQ ID NO: 1343
gugggacaucuugaaggca

SEQ ID NO: 106285 - RNA, 19 nt, Artificial Sequence
  Description of Artificial Sequence: Synthetic oligonucleotide
  Antisense strand to SEQ ID NO: 106284
ugccuucaagaugucccac

SEQ ID NO: 106286 - RNA, 19 nt, Artificial Sequence
  Description of Artificial Sequence: Synthetic oligonucleotide
  Sense strand starting at position 3451 of SEQ ID NO: 1343
gcagaaaccugcuccuacu

SEQ ID NO: 106287 - RNA, 19 nt, Artificial Sequence
  Description of Artificial Sequence: Synthetic oligonucleotide
  Antisense strand to SEQ ID NO: 106286
aguaggagcagguuucugc

SEQ ID NO: 106288 - RNA, 19 nt, Artificial Sequence
  Description of Artificial Sequence: Synthetic oligonucleotide
  Sense strand starting at position 3464 of SEQ ID NO: 1343
ccuacuugcuuugugauuu

SEQ ID NO: 106289 - RNA, 19 nt, Artificial Sequence
  Description of Artificial Sequence: Synthetic oligonucleotide
  Antisense strand to SEQ ID NO: 106288
aaaucacaaagcaaguagg

SEQ ID NO: 106290 - RNA, 19 nt, Artificial Sequence
  Description of Artificial Sequence: Synthetic oligonucleotide
  Sense strand starting at position 3504 of SEQ ID NO: 1343
gcagacauuugugaacuaa

SEQ ID NO: 106291 - RNA, 19 nt, Artificial Sequence
  Description of Artificial Sequence: Synthetic oligonucleotide
  Antisense strand to SEQ ID NO: 106290
uuaguucacaaaugucugc

SEQ ID NO: 106292 - RNA, 19 nt, Artificial Sequence
  Description of Artificial Sequence: Synthetic oligonucleotide
  Sense strand starting at position 3536 of SEQ ID NO: 1343
ggacucagcuaaccagauu

SEQ ID NO: 106293 - RNA, 19 nt, Artificial Sequence
  Description of Artificial Sequence: Synthetic oligonucleotide
  Antisense strand to SEQ ID NO: 106292
aaucugguuagcugagucc

SEQ ID NO: 106294 - RNA, 19 nt, Artificial Sequence
  Description of Artificial Sequence: Synthetic oligonucleotide
  Sense strand starting at position 3580 of SEQ ID NO: 1343
cuuugugcuaaacggaaga

SEQ ID NO: 106295 - RNA, 19 nt, Artificial Sequence
  Description of Artificial Sequence: Synthetic oligonucleotide
  Antisense strand to SEQ ID NO: 106294
ucuuccguuuagcacaaag

SEQ ID NO: 106296 - RNA, 19 nt, Artificial Sequence
  Description of Artificial Sequence: Synthetic oligonucleotide
  Sense strand starting at position 3644 of SEQ ID NO: 1343
ggcauuggauuguccuuua

SEQ ID NO: 106297 - RNA, 19 nt, Artificial Sequence
  Description of Artificial Sequence: Synthetic oligonucleotide
  Antisense strand to SEQ ID NO: 106296
uaaaggacaauccaaugcc

SEQ ID NO: 106298 - RNA, 19 nt, Artificial Sequence
  Description of Artificial Sequence: Synthetic oligonucleotide
  Sense strand starting at position 3647 of SEQ ID NO: 1343
auuggauuguccuuuagug

SEQ ID NO: 106299 - RNA, 19 nt, Artificial Sequence
  Description of Artificial Sequence: Synthetic oligonucleotide
  Antisense strand to SEQ ID NO: 106298
cacuaaaggacaauccaau

SEQ ID NO: 106300 - RNA, 19 nt, Artificial Sequence
  Description of Artificial Sequence: Synthetic oligonucleotide
  Sense strand starting at position 3649 of SEQ ID NO: 1343
uggauuguccuuuagugac

SEQ ID NO: 106301 - RNA, 19 nt, Artificial Sequence
  Description of Artificial Sequence: Synthetic oligonucleotide
  Antisense strand to SEQ ID NO: 106300
gucacuaaaggacaaucca

SEQ ID NO: 106302 - RNA, 19 nt, Artificial Sequence
  Description of Artificial Sequence: Synthetic oligonucleotide
  Sense strand starting at position 3651 of SEQ ID NO: 1343
gauuguccuuuagugacuu

SEQ ID NO: 106303 - RNA, 19 nt, Artificial Sequence
  Description of Artificial Sequence: Synthetic oligonucleotide
  Antisense strand to SEQ ID NO: 106302
aagucacuaaaggacaauc

SEQ ID NO: 106304 - RNA, 19 nt, Artificial Sequence
  Description of Artificial Sequence: Synthetic oligonucleotide
  Sense strand starting at position 3677 of SEQ ID NO: 1343
guccacagaugucugagau

SEQ ID NO: 106305 - RNA, 19 nt, Artificial Sequence
  Description of Artificial Sequence: Synthetic oligonucleotide
  Antisense strand to SEQ ID NO: 106304
aucucagacaucuguggac

SEQ ID NO: 106306 - RNA, 19 nt, Artificial Sequence
  Description of Artificial Sequence: Synthetic oligonucleotide
  Sense strand starting at position 3678 of SEQ ID NO: 1343
uccacagaugucugagaug

SEQ ID NO: 106307 - RNA, 19 nt, Artificial Sequence
  Description of Artificial Sequence: Synthetic oligonucleotide
  Antisense strand to SEQ ID NO: 106306
caucucagacaucugugga

SEQ ID NO: 106308 - RNA, 19 nt, Artificial Sequence
  Description of Artificial Sequence: Synthetic oligonucleotide
  Sense strand starting at position 3689 of SEQ ID NO: 1343
cugagaugguugcuguacu

SEQ ID NO: 106309 - RNA, 19 nt, Artificial Sequence
  Description of Artificial Sequence: Synthetic oligonucleotide
  Antisense strand to SEQ ID NO: 106308
aguacagcaaccaucucag

SEQ ID NO: 106310 - RNA, 19 nt, Artificial Sequence
  Description of Artificial Sequence: Synthetic oligonucleotide
  Sense strand starting at position 3702 of SEQ ID NO: 1343
uguacuagucuggguuauu

SEQ ID NO: 106311 - RNA, 19 nt, Artificial Sequence
  Description of Artificial Sequence: Synthetic oligonucleotide
  Antisense strand to SEQ ID NO: 106310
aauaacccagacuaguaca

SEQ ID NO: 106312 - RNA, 19 nt, Artificial Sequence
  Description of Artificial Sequence: Synthetic oligonucleotide
  Sense strand starting at position 3703 of SEQ ID NO: 1343
guacuagucuggguuauug

SEQ ID NO: 106313 - RNA, 19 nt, Artificial Sequence
  Description of Artificial Sequence: Synthetic oligonucleotide
  Antisense strand to SEQ ID NO: 106312
caauaacccagacuaguac

SEQ ID NO: 106314 - RNA, 19 nt, Artificial Sequence
  Description of Artificial Sequence: Synthetic oligonucleotide
  Sense strand starting at position 3707 of SEQ ID NO: 1343
uagucuggguuauugguua

SEQ ID NO: 106315 - RNA, 19 nt, Artificial Sequence
  Description of Artificial Sequence: Synthetic oligonucleotide
  Antisense strand to SEQ ID NO: 106314
uaaccaauaacccagacua

SEQ ID NO: 106316 - RNA, 19 nt, Artificial Sequence
  Description of Artificial Sequence: Synthetic oligonucleotide
  Sense strand starting at position 3711 of SEQ ID NO: 1343
cuggguuauugguuacaaa

SEQ ID NO: 106317 - RNA, 19 nt, Artificial Sequence
  Description of Artificial Sequence: Synthetic oligonucleotide
  Antisense strand to SEQ ID NO: 106316
uuuguaaccaauaacccag

SEQ ID NO: 106318 - RNA, 19 nt, Artificial Sequence
  Description of Artificial Sequence: Synthetic oligonucleotide
  Sense strand starting at position 3712 of SEQ ID NO: 1343
uggguuauugguuacaaau

SEQ ID NO: 106319 - RNA, 19 nt, Artificial Sequence
  Description of Artificial Sequence: Synthetic oligonucleotide
  Antisense strand to SEQ ID NO: 106318
auuuguaaccaauaaccca

SEQ ID NO: 106320 - RNA, 19 nt, Artificial Sequence
  Description of Artificial Sequence: Synthetic oligonucleotide
  Sense strand starting at position 216 of SEQ ID NO: 1344
ucaaccauuugagagcaaa

SEQ ID NO: 106321 - RNA, 19 nt, Artificial Sequence
  Description of Artificial Sequence: Synthetic oligonucleotide
  Antisense strand to SEQ ID NO: 106320
uuugcucucaaaugguuga

SEQ ID NO: 106322 - RNA, 19 nt, Artificial Sequence
  Description of Artificial Sequence: Synthetic oligonucleotide
  Sense strand starting at position 260 of SEQ ID NO: 1344
uggguacuuaagcauguau

SEQ ID NO: 106323 - RNA, 19 nt, Artificial Sequence
  Description of Artificial Sequence: Synthetic oligonucleotide
  Antisense strand to SEQ ID NO: 106322
auacaugcuuaaguaccca

SEQ ID NO: 106324 - RNA, 19 nt, Artificial Sequence
  Description of Artificial Sequence: Synthetic oligonucleotide
  Sense strand starting at position 571 of SEQ ID NO: 1344
acuggauuugcuugcuuau

SEQ ID NO: 106325 - RNA, 19 nt, Artificial Sequence
  Description of Artificial Sequence: Synthetic oligonucleotide
  Antisense strand to SEQ ID NO: 106324
auaagcaagcaaauccagu

SEQ ID NO: 106326 - RNA, 19 nt, Artificial Sequence
  Description of Artificial Sequence: Synthetic oligonucleotide
  Sense strand starting at position 619 of SEQ ID NO: 1344
gggaauauuugggagccca

SEQ ID NO: 106327 - RNA, 19 nt, Artificial Sequence
  Description of Artificial Sequence: Synthetic oligonucleotide
  Antisense strand to SEQ ID NO: 106326
ugggcucccaaauauuccc

SEQ ID NO: 106328 - RNA, 19 nt, Artificial Sequence
  Description of Artificial Sequence: Synthetic oligonucleotide
  Sense strand starting at position 793 of SEQ ID NO: 1344
aagaauuugucugaugacu

SEQ ID NO: 106329 - RNA, 19 nt, Artificial Sequence
  Description of Artificial Sequence: Synthetic oligonucleotide
  Antisense strand to SEQ ID NO: 106328
agucaucagacaaauucuu

SEQ ID NO: 106330 - RNA, 19 nt, Artificial Sequence
  Description of Artificial Sequence: Synthetic oligonucleotide
  Sense strand starting at position 826 of SEQ ID NO: 1344
cucagauuggacugaguaa

SEQ ID NO: 106331 - RNA, 19 nt, Artificial Sequence
  Description of Artificial Sequence: Synthetic oligonucleotide
  Antisense strand to SEQ ID NO: 106330
uuacucaguccaaucugag

SEQ ID NO: 106332 - RNA, 19 nt, Artificial Sequence
  Description of Artificial Sequence: Synthetic oligonucleotide
  Sense strand starting at position 1077 of SEQ ID NO: 1344
ugcucauaugcagacacau

SEQ ID NO: 106333 - RNA, 19 nt, Artificial Sequence
  Description of Artificial Sequence: Synthetic oligonucleotide
  Antisense strand to SEQ ID NO: 106332
augugucugcauaugagca

SEQ ID NO: 106334 - RNA, 19 nt, Artificial Sequence
  Description of Artificial Sequence: Synthetic oligonucleotide
  Sense strand starting at position 1154 of SEQ ID NO: 1344
gcacaagaacucugaacca

SEQ ID NO: 106335 - RNA, 19 nt, Artificial Sequence
  Description of Artificial Sequence: Synthetic oligonucleotide
  Antisense strand to SEQ ID NO: 106334
ugguucagaguucuugugc

SEQ ID NO: 106336 - RNA, 19 nt, Artificial Sequence
  Description of Artificial Sequence: Synthetic oligonucleotide
  Sense strand starting at position 1194 of SEQ ID NO: 1344
ggagcuaaauuacuaguaa

SEQ ID NO: 106337 - RNA, 19 nt, Artificial Sequence
  Description of Artificial Sequence: Synthetic oligonucleotide
  Antisense strand to SEQ ID NO: 106336
uuacuaguaauuuagcucc

SEQ ID NO: 106338 - RNA, 19 nt, Artificial Sequence
  Description of Artificial Sequence: Synthetic oligonucleotide
  Sense strand starting at position 1209 of SEQ ID NO: 1344
guaauacuugaaggugauc

SEQ ID NO: 106339 - RNA, 19 nt, Artificial Sequence
  Description of Artificial Sequence: Synthetic oligonucleotide
  Antisense strand to SEQ ID NO: 106338
gaucaccuucaaguauuac

SEQ ID NO: 106340 - RNA, 19 nt, Artificial Sequence
  Description of Artificial Sequence: Synthetic oligonucleotide
  Sense strand starting at position 1224 of SEQ ID NO: 1344
gaucgcugugcuuuccuua

SEQ ID NO: 106341 - RNA, 19 nt, Artificial Sequence
  Description of Artificial Sequence: Synthetic oligonucleotide
  Antisense strand to SEQ ID NO: 106340
uaaggaaagcacagcgauc

SEQ ID NO: 106342 - RNA, 19 nt, Artificial Sequence
  Description of Artificial Sequence: Synthetic oligonucleotide
  Sense strand starting at position 1225 of SEQ ID NO: 1344
aucgcugugcuuuccuuaa

SEQ ID NO: 106343 - RNA, 19 nt, Artificial Sequence
  Description of Artificial Sequence: Synthetic oligonucleotide
  Antisense strand to SEQ ID NO: 106342
uuaaggaaagcacagcgau

SEQ ID NO: 106344 - RNA, 19 nt, Artificial Sequence
  Description of Artificial Sequence: Synthetic oligonucleotide
  Sense strand starting at position 1263 of SEQ ID NO: 1344
cugugcagucucuaggaga

SEQ ID NO: 106345 - RNA, 19 nt, Artificial Sequence
  Description of Artificial Sequence: Synthetic oligonucleotide
  Antisense strand to SEQ ID NO: 106344
ucuccuagagacugcacag

SEQ ID NO: 106346 - RNA, 19 nt, Artificial Sequence
  Description of Artificial Sequence: Synthetic oligonucleotide
  Sense strand starting at position 1524 of SEQ ID NO: 1344
agaacugacuugucucgga

SEQ ID NO: 106347 - RNA, 19 nt, Artificial Sequence
  Description of Artificial Sequence: Synthetic oligonucleotide
  Antisense strand to SEQ ID NO: 106346
uccgagacaagucaguucu

SEQ ID NO: 106348 - RNA, 19 nt, Artificial Sequence
  Description of Artificial Sequence: Synthetic oligonucleotide
  Sense strand starting at position 1741 of SEQ ID NO: 1344
ugcugcugucucucuguaa

SEQ ID NO: 106349 - RNA, 19 nt, Artificial Sequence
  Description of Artificial Sequence: Synthetic oligonucleotide
  Antisense strand to SEQ ID NO: 106348
uuacagagagacagcagca

SEQ ID NO: 106350 - RNA, 19 nt, Artificial Sequence
  Description of Artificial Sequence: Synthetic oligonucleotide
  Sense strand starting at position 1754 of SEQ ID NO: 1344
cuguaaguuauggaugacu

SEQ ID NO: 106351 - RNA, 19 nt, Artificial Sequence
  Description of Artificial Sequence: Synthetic oligonucleotide
  Antisense strand to SEQ ID NO: 106350
agucauccauaacuuacag

SEQ ID NO: 106352 - RNA, 19 nt, Artificial Sequence
  Description of Artificial Sequence: Synthetic oligonucleotide
  Sense strand starting at position 1756 of SEQ ID NO: 1344
guaaguuauggaugacuga

SEQ ID NO: 106353 - RNA, 19 nt, Artificial Sequence
  Description of Artificial Sequence: Synthetic oligonucleotide
  Antisense strand to SEQ ID NO: 106352
ucagucauccauaacuuac

SEQ ID NO: 106354 - RNA, 19 nt, Artificial Sequence
  Description of Artificial Sequence: Synthetic oligonucleotide
  Sense strand starting at position 1759 of SEQ ID NO: 1344
aguuauggaugacugacau

SEQ ID NO: 106355 - RNA, 19 nt, Artificial Sequence
  Description of Artificial Sequence: Synthetic oligonucleotide
  Antisense strand to SEQ ID NO: 106354
augucagucauccauaacu

SEQ ID NO: 106356 - RNA, 19 nt, Artificial Sequence
  Description of Artificial Sequence: Synthetic oligonucleotide
  Sense strand starting at position 1992 of SEQ ID NO: 1344
ugaggcuuccucuggaaag

SEQ ID NO: 106357 - RNA, 19 nt, Artificial Sequence
  Description of Artificial Sequence: Synthetic oligonucleotide
  Antisense strand to SEQ ID NO: 106356
cuuuccagaggaagccuca

SEQ ID NO: 106358 - RNA, 19 nt, Artificial Sequence
  Description of Artificial Sequence: Synthetic oligonucleotide
  Sense strand starting at position 1994 of SEQ ID NO: 1344
aggcuuccucuggaaagcu

SEQ ID NO: 106359 - RNA, 19 nt, Artificial Sequence
  Description of Artificial Sequence: Synthetic oligonucleotide
  Antisense strand to SEQ ID NO: 106358
agcuuuccagaggaagccu

SEQ ID NO: 106360 - RNA, 19 nt, Artificial Sequence
  Description of Artificial Sequence: Synthetic oligonucleotide
  Sense strand starting at position 2173 of SEQ ID NO: 1344
ccagcaagauucuuagaaa

SEQ ID NO: 106361 - RNA, 19 nt, Artificial Sequence
  Description of Artificial Sequence: Synthetic oligonucleotide
  Antisense strand to SEQ ID NO: 106360
uuucuaagaaucuugcugg

SEQ ID NO: 106362 - RNA, 19 nt, Artificial Sequence
  Description of Artificial Sequence: Synthetic oligonucleotide
  Sense strand starting at position 2394 of SEQ ID NO: 1344
ucugcaaacucauugagaa

SEQ ID NO: 106363 - RNA, 19 nt, Artificial Sequence
  Description of Artificial Sequence: Synthetic oligonucleotide
  Antisense strand to SEQ ID NO: 106362
uucucaaugaguuugcaga

SEQ ID NO: 106364 - RNA, 19 nt, Artificial Sequence
  Description of Artificial Sequence: Synthetic oligonucleotide
  Sense strand starting at position 2395 of SEQ ID NO: 1344
cugcaaacucauugagaac

SEQ ID NO: 106365 - RNA, 19 nt, Artificial Sequence
  Description of Artificial Sequence: Synthetic oligonucleotide
  Antisense strand to SEQ ID NO: 106364
guucucaaugaguuugcag

SEQ ID NO: 106366 - RNA, 19 nt, Artificial Sequence
  Description of Artificial Sequence: Synthetic oligonucleotide
  Sense strand starting at position 2535 of SEQ ID NO: 1344
gggagagcauuccuauaga

SEQ ID NO: 106367 - RNA, 19 nt, Artificial Sequence
  Description of Artificial Sequence: Synthetic oligonucleotide
  Antisense strand to SEQ ID NO: 106366
ucuauaggaaugcucuccc

SEQ ID NO: 106368 - RNA, 19 nt, Artificial Sequence
  Description of Artificial Sequence: Synthetic oligonucleotide
  Sense strand starting at position 2538 of SEQ ID NO: 1344
agagcauuccuauagaagc

SEQ ID NO: 106369 - RNA, 19 nt, Artificial Sequence
  Description of Artificial Sequence: Synthetic oligonucleotide
  Antisense strand to SEQ ID NO: 106368
gcuucuauaggaaugcucu

SEQ ID NO: 106370 - RNA, 19 nt, Artificial Sequence
  Description of Artificial Sequence: Synthetic oligonucleotide
  Sense strand starting at position 2605 of SEQ ID NO: 1344
gggagaacuuucuaauuuc

SEQ ID NO: 106371 - RNA, 19 nt, Artificial Sequence
  Description of Artificial Sequence: Synthetic oligonucleotide
  Antisense strand to SEQ ID NO: 106370
gaaauuagaaaguucuccc

SEQ ID NO: 106372 - RNA, 19 nt, Artificial Sequence
  Description of Artificial Sequence: Synthetic oligonucleotide
  Sense strand starting at position 2693 of SEQ ID NO: 1344
ccaagaaccucauugguga

SEQ ID NO: 106373 - RNA, 19 nt, Artificial Sequence
  Description of Artificial Sequence: Synthetic oligonucleotide
  Antisense strand to SEQ ID NO: 106372
ucaccaaugagguucuugg

SEQ ID NO: 106374 - RNA, 19 nt, Artificial Sequence
  Description of Artificial Sequence: Synthetic oligonucleotide
  Sense strand starting at position 2696 of SEQ ID NO: 1344
agaaccucauuggugaaau

SEQ ID NO: 106375 - RNA, 19 nt, Artificial Sequence
  Description of Artificial Sequence: Synthetic oligonucleotide
  Antisense strand to SEQ ID NO: 106374
auuucaccaaugagguucu

SEQ ID NO: 106376 - RNA, 19 nt, Artificial Sequence
  Description of Artificial Sequence: Synthetic oligonucleotide
  Sense strand starting at position 3030 of SEQ ID NO: 1344
uuaguuagaaggugguaaa

SEQ ID NO: 106377 - RNA, 19 nt, Artificial Sequence
  Description of Artificial Sequence: Synthetic oligonucleotide
  Antisense strand to SEQ ID NO: 106376
uuuaccaccuucuaacuaa

SEQ ID NO: 106378 - RNA, 19 nt, Artificial Sequence
  Description of Artificial Sequence: Synthetic oligonucleotide
  Sense strand starting at position 3082 of SEQ ID NO: 1344
acaggcuuucuggacugua

SEQ ID NO: 106379 - RNA, 19 nt, Artificial Sequence
  Description of Artificial Sequence: Synthetic oligonucleotide
  Antisense strand to SEQ ID NO: 106378
uacaguccagaaagccugu

SEQ ID NO: 106380 - RNA, 19 nt, Artificial Sequence
  Description of Artificial Sequence: Synthetic oligonucleotide
  Sense strand starting at position 3090 of SEQ ID NO: 1344
ucuggacuguagguuaaua

SEQ ID NO: 106381 - RNA, 19 nt, Artificial Sequence
  Description of Artificial Sequence: Synthetic oligonucleotide
  Antisense strand to SEQ ID NO: 106380
uauuaaccuacaguccaga

SEQ ID NO: 106382 - RNA, 19 nt, Artificial Sequence
  Description of Artificial Sequence: Synthetic oligonucleotide
  Sense strand starting at position 3209 of SEQ ID NO: 1344
ugaaauaaugauugccuuu

SEQ ID NO: 106383 - RNA, 19 nt, Artificial Sequence
  Description of Artificial Sequence: Synthetic oligonucleotide
  Antisense strand to SEQ ID NO: 106382
aaaggcaaucauuauuuca

SEQ ID NO: 106384 - RNA, 19 nt, Artificial Sequence
  Description of Artificial Sequence: Synthetic oligonucleotide
  Sense strand starting at position 3351 of SEQ ID NO: 1344
uuauuugauugguucugca

SEQ ID NO: 106385 - RNA, 19 nt, Artificial Sequence
  Description of Artificial Sequence: Synthetic oligonucleotide
  Antisense strand to SEQ ID NO: 106384
ugcagaaccaaucaaauaa

SEQ ID NO: 106386 - RNA, 19 nt, Artificial Sequence
  Description of Artificial Sequence: Synthetic oligonucleotide
  Sense strand starting at position 3406 of SEQ ID NO: 1344
uuguuuacagcugaccaaa

SEQ ID NO: 106387 - RNA, 19 nt, Artificial Sequence
  Description of Artificial Sequence: Synthetic oligonucleotide
  Antisense strand to SEQ ID NO: 106386
uuuggucagcuguaaacaa

SEQ ID NO: 106388 - RNA, 19 nt, Artificial Sequence
  Description of Artificial Sequence: Synthetic oligonucleotide
  Sense strand starting at position 3454 of SEQ ID NO: 1344
aguaaacaucgcugaaaug

SEQ ID NO: 106389 - RNA, 19 nt, Artificial Sequence
  Description of Artificial Sequence: Synthetic oligonucleotide
  Antisense strand to SEQ ID NO: 106388
cauuucagcgauguuuacu

SEQ ID NO: 106390 - RNA, 19 nt, Artificial Sequence
  Description of Artificial Sequence: Synthetic oligonucleotide
  Sense strand starting at position 3455 of SEQ ID NO: 1344
guaaacaucgcugaaauga

SEQ ID NO: 106391 - RNA, 19 nt, Artificial Sequence
  Description of Artificial Sequence: Synthetic oligonucleotide
  Antisense strand to SEQ ID NO: 106390
ucauuucagcgauguuuac

SEQ ID NO: 106392 - RNA, 19 nt, Artificial Sequence
  Description of Artificial Sequence: Synthetic oligonucleotide
  Sense strand starting at position 3489 of SEQ ID NO: 1344
aucauauagucagcaagac

SEQ ID NO: 106393 - RNA, 19 nt, Artificial Sequence
  Description of Artificial Sequence: Synthetic oligonucleotide
  Antisense strand to SEQ ID NO: 106392
gucuugcugacuauaugau

SEQ ID NO: 106394 - RNA, 19 nt, Artificial Sequence
  Description of Artificial Sequence: Synthetic oligonucleotide
  Sense strand starting at position 3654 of SEQ ID NO: 1344
uugugacuugcucagaauu

SEQ ID NO: 106395 - RNA, 19 nt, Artificial Sequence
  Description of Artificial Sequence: Synthetic oligonucleotide
  Antisense strand to SEQ ID NO: 106394
aauucugagcaagucacaa

SEQ ID NO: 106396 - RNA, 19 nt, Artificial Sequence
  Description of Artificial Sequence: Synthetic oligonucleotide
  Sense strand starting at position 3717 of SEQ ID NO: 1344
ccgacuucccuugaacuga

SEQ ID NO: 106397 - RNA, 19 nt, Artificial Sequence
  Description of Artificial Sequence: Synthetic oligonucleotide
  Antisense strand to SEQ ID NO: 106396
ucaguucaagggaagucgg

SEQ ID NO: 106398 - RNA, 19 nt, Artificial Sequence
  Description of Artificial Sequence: Synthetic oligonucleotide
  Sense strand starting at position 3773 of SEQ ID NO: 1344
ccaggaucacguggacuau

SEQ ID NO: 106399 - RNA, 19 nt, Artificial Sequence
  Description of Artificial Sequence: Synthetic oligonucleotide
  Antisense strand to SEQ ID NO: 106398
auaguccacgugauccugg

SEQ ID NO: 106400 - RNA, 19 nt, Artificial Sequence
  Description of Artificial Sequence: Synthetic oligonucleotide
  Sense strand starting at position 38 of SEQ ID NO: 1345
guucuugaggcccagaaua

SEQ ID NO: 106401 - RNA, 19 nt, Artificial Sequence
  Description of Artificial Sequence: Synthetic oligonucleotide
  Antisense strand to SEQ ID NO: 106400
uauucugggccucaagaac

SEQ ID NO: 106402 - RNA, 19 nt, Artificial Sequence
  Description of Artificial Sequence: Synthetic oligonucleotide
  Sense strand starting at position 102 of SEQ ID NO: 1345
augacaaagcuccggaguu

SEQ ID NO: 106403 - RNA, 19 nt, Artificial Sequence
  Description of Artificial Sequence: Synthetic oligonucleotide
  Antisense strand to SEQ ID NO: 106402
aacuccggagcuuugucau

SEQ ID NO: 106404 - RNA, 19 nt, Artificial Sequence
  Description of Artificial Sequence: Synthetic oligonucleotide
  Sense strand starting at position 348 of SEQ ID NO: 1345
gggacauuguccucucugu

SEQ ID NO: 106405 - RNA, 19 nt, Artificial Sequence
  Description of Artificial Sequence: Synthetic oligonucleotide
  Antisense strand to SEQ ID NO: 106404
acagagaggacaauguccc

SEQ ID NO: 106406 - RNA, 19 nt, Artificial Sequence
  Description of Artificial Sequence: Synthetic oligonucleotide
  Sense strand starting at position 354 of SEQ ID NO: 1345
uuguccucucuguggagaa

SEQ ID NO: 106407 - RNA, 19 nt, Artificial Sequence
  Description of Artificial Sequence: Synthetic oligonucleotide
  Antisense strand to SEQ ID NO: 106406
uucuccacagagaggacaa

SEQ ID NO: 106408 - RNA, 19 nt, Artificial Sequence
  Description of Artificial Sequence: Synthetic oligonucleotide
  Sense strand starting at position 837 of SEQ ID NO: 1345
ccagaaucuuuguaacuag

SEQ ID NO: 106409 - RNA, 19 nt, Artificial Sequence
  Description of Artificial Sequence: Synthetic oligonucleotide
  Antisense strand to SEQ ID NO: 106408
cuaguuacaaagauucugg

SEQ ID NO: 106410 - RNA, 19 nt, Artificial Sequence
  Description of Artificial Sequence: Synthetic oligonucleotide
  Sense strand starting at position 959 of SEQ ID NO: 1345
uccugacucuggcgauaag

SEQ ID NO: 106411 - RNA, 19 nt, Artificial Sequence
  Description of Artificial Sequence: Synthetic oligonucleotide
  Antisense strand to SEQ ID NO: 106410
cuuaucgccagagucagga

SEQ ID NO: 106412 - RNA, 19 nt, Artificial Sequence
  Description of Artificial Sequence: Synthetic oligonucleotide
  Sense strand starting at position 1093 of SEQ ID NO: 1345
agcagucuucucuggugaa

SEQ ID NO: 106413 - RNA, 19 nt, Artificial Sequence
  Description of Artificial Sequence: Synthetic oligonucleotide
  Antisense strand to SEQ ID NO: 106412
uucaccagagaagacugcu

SEQ ID NO: 106414 - RNA, 19 nt, Artificial Sequence
  Description of Artificial Sequence: Synthetic oligonucleotide
  Sense strand starting at position 1146 of SEQ ID NO: 1345
ugggauuaauccucacccu

SEQ ID NO: 106415 - RNA, 19 nt, Artificial Sequence
  Description of Artificial Sequence: Synthetic oligonucleotide
  Antisense strand to SEQ ID NO: 106414
agggugaggauuaauccca

SEQ ID NO: 106416 - RNA, 19 nt, Artificial Sequence
  Description of Artificial Sequence: Synthetic oligonucleotide
  Sense strand starting at position 1181 of SEQ ID NO: 1345
ggccuugcuccugaucuuu

SEQ ID NO: 106417 - RNA, 19 nt, Artificial Sequence
  Description of Artificial Sequence: Synthetic oligonucleotide
  Antisense strand to SEQ ID NO: 106416
aaagaucaggagcaaggcc

SEQ ID NO: 106418 - RNA, 19 nt, Artificial Sequence
  Description of Artificial Sequence: Synthetic oligonucleotide
  Sense strand starting at position 1250 of SEQ ID NO: 1345
gccuuuaucuugucuggaa

SEQ ID NO: 106419 - RNA, 19 nt, Artificial Sequence
  Description of Artificial Sequence: Synthetic oligonucleotide
  Antisense strand to SEQ ID NO: 106418
uuccagacaagauaaaggc

SEQ ID NO: 106420 - RNA, 19 nt, Artificial Sequence
  Description of Artificial Sequence: Synthetic oligonucleotide
  Sense strand starting at position 1252 of SEQ ID NO: 1345
cuuuaucuugucuggaaag

SEQ ID NO: 106421 - RNA, 19 nt, Artificial Sequence
  Description of Artificial Sequence: Synthetic oligonucleotide
  Antisense strand to SEQ ID NO: 106420
cuuuccagacaagauaaag

SEQ ID NO: 106422 - RNA, 19 nt, Artificial Sequence
  Description of Artificial Sequence: Synthetic oligonucleotide
  Sense strand starting at position 1253 of SEQ ID NO: 1345
uuuaucuugucuggaaaga

SEQ ID NO: 106423 - RNA, 19 nt, Artificial Sequence
  Description of Artificial Sequence: Synthetic oligonucleotide
  Antisense strand to SEQ ID NO: 106422
ucuuuccagacaagauaaa

SEQ ID NO: 106424 - RNA, 19 nt, Artificial Sequence
  Description of Artificial Sequence: Synthetic oligonucleotide
  Sense strand starting at position 2088 of SEQ ID NO: 1345
aggcguuuacaguggauua

SEQ ID NO: 106425 - RNA, 19 nt, Artificial Sequence
  Description of Artificial Sequence: Synthetic oligonucleotide
  Antisense strand to SEQ ID NO: 106424
uaauccacuguaaacgccu

SEQ ID NO: 106426 - RNA, 19 nt, Artificial Sequence
  Description of Artificial Sequence: Synthetic oligonucleotide
  Sense strand starting at position 2090 of SEQ ID NO: 1345
gcguuuacaguggauuaga

SEQ ID NO: 106427 - RNA, 19 nt, Artificial Sequence
  Description of Artificial Sequence: Synthetic oligonucleotide
  Antisense strand to SEQ ID NO: 106426
ucuaauccacuguaaacgc

SEQ ID NO: 106428 - RNA, 19 nt, Artificial Sequence
  Description of Artificial Sequence: Synthetic oligonucleotide
  Sense strand starting at position 2196 of SEQ ID NO: 1345
gaggccgucggguguaauu

SEQ ID NO: 106429 - RNA, 19 nt, Artificial Sequence
  Description of Artificial Sequence: Synthetic oligonucleotide
  Antisense strand to SEQ ID NO: 106428
aauuacacccgacggccuc

SEQ ID NO: 106430 - RNA, 19 nt, Artificial Sequence
  Description of Artificial Sequence: Synthetic oligonucleotide
  Sense strand starting at position 2459 of SEQ ID NO: 1345
uacaucagucgaugagacu

SEQ ID NO: 106431 - RNA, 19 nt, Artificial Sequence
  Description of Artificial Sequence: Synthetic oligonucleotide
  Antisense strand to SEQ ID NO: 106430
agucucaucgacugaugua

SEQ ID NO: 106432 - RNA, 19 nt, Artificial Sequence
  Description of Artificial Sequence: Synthetic oligonucleotide
  Sense strand starting at position 2484 of SEQ ID NO: 1345
aagacuucccuccggaaag

SEQ ID NO: 106433 - RNA, 19 nt, Artificial Sequence
  Description of Artificial Sequence: Synthetic oligonucleotide
  Antisense strand to SEQ ID NO: 106432
cuuuccggagggaagucuu

SEQ ID NO: 106434 - RNA, 19 nt, Artificial Sequence
  Description of Artificial Sequence: Synthetic oligonucleotide
  Sense strand starting at position 2485 of SEQ ID NO: 1345
agacuucccuccggaaaga

SEQ ID NO: 106435 - RNA, 19 nt, Artificial Sequence
  Description of Artificial Sequence: Synthetic oligonucleotide
  Antisense strand to SEQ ID NO: 106434
ucuuuccggagggaagucu

SEQ ID NO: 106436 - RNA, 19 nt, Artificial Sequence
  Description of Artificial Sequence: Synthetic oligonucleotide
  Sense strand starting at position 2536 of SEQ ID NO: 1345
gcacucaguauccagggau

SEQ ID NO: 106437 - RNA, 19 nt, Artificial Sequence
  Description of Artificial Sequence: Synthetic oligonucleotide
  Antisense strand to SEQ ID NO: 106436
aucccuggauacugagugc

SEQ ID NO: 106438 - RNA, 19 nt, Artificial Sequence
  Description of Artificial Sequence: Synthetic oligonucleotide
  Sense strand starting at position 2539 of SEQ ID NO: 1345
cucaguauccagggauaag

SEQ ID NO: 106439 - RNA, 19 nt, Artificial Sequence
  Description of Artificial Sequence: Synthetic oligonucleotide
  Antisense strand to SEQ ID NO: 106438
cuuaucccuggauacugag

SEQ ID NO: 106440 - RNA, 19 nt, Artificial Sequence
  Description of Artificial Sequence: Synthetic oligonucleotide
  Sense strand starting at position 2608 of SEQ ID NO: 1345
gcagcuuugagcuguaugu

SEQ ID NO: 106441 - RNA, 19 nt, Artificial Sequence
  Description of Artificial Sequence: Synthetic oligonucleotide
  Antisense strand to SEQ ID NO: 106440
acauacagcucaaagcugc

SEQ ID NO: 106442 - RNA, 19 nt, Artificial Sequence
  Description of Artificial Sequence: Synthetic oligonucleotide
  Sense strand starting at position 2615 of SEQ ID NO: 1345
ugagcuguauguucucuua

SEQ ID NO: 106443 - RNA, 19 nt, Artificial Sequence
  Description of Artificial Sequence: Synthetic oligonucleotide
  Antisense strand to SEQ ID NO: 106442
uaagagaacauacagcuca

SEQ ID NO: 106444 - RNA, 19 nt, Artificial Sequence
  Description of Artificial Sequence: Synthetic oligonucleotide
  Sense strand starting at position 2618 of SEQ ID NO: 1345
gcuguauguucucuuaggu

SEQ ID NO: 106445 - RNA, 19 nt, Artificial Sequence
  Description of Artificial Sequence: Synthetic oligonucleotide
  Antisense strand to SEQ ID NO: 106444
accuaagagaacauacagc

SEQ ID NO: 106446 - RNA, 19 nt, Artificial Sequence
  Description of Artificial Sequence: Synthetic oligonucleotide
  Sense strand starting at position 2732 of SEQ ID NO: 1345
guggucagagcagagauua

SEQ ID NO: 106447 - RNA, 19 nt, Artificial Sequence
  Description of Artificial Sequence: Synthetic oligonucleotide
  Antisense strand to SEQ ID NO: 106446
uaaucucugcucugaccac

SEQ ID NO: 106448 - RNA, 19 nt, Artificial Sequence
  Description of Artificial Sequence: Synthetic oligonucleotide
  Sense strand starting at position 2842 of SEQ ID NO: 1345
auugaucuguccuucuaug

SEQ ID NO: 106449 - RNA, 19 nt, Artificial Sequence
  Description of Artificial Sequence: Synthetic oligonucleotide
  Antisense strand to SEQ ID NO: 106448
cauagaaggacagaucaau

SEQ ID NO: 106450 - RNA, 19 nt, Artificial Sequence
  Description of Artificial Sequence: Synthetic oligonucleotide
  Sense strand starting at position 2894 of SEQ ID NO: 1345
uuuccuggcucauuaaugu

SEQ ID NO: 106451 - RNA, 19 nt, Artificial Sequence
  Description of Artificial Sequence: Synthetic oligonucleotide
  Antisense strand to SEQ ID NO: 106450
acauuaaugagccaggaaa

SEQ ID NO: 106452 - RNA, 19 nt, Artificial Sequence
  Description of Artificial Sequence: Synthetic oligonucleotide
  Sense strand starting at position 3002 of SEQ ID NO: 1345
cucuuacugucugagccau

SEQ ID NO: 106453 - RNA, 19 nt, Artificial Sequence
  Description of Artificial Sequence: Synthetic oligonucleotide
  Antisense strand to SEQ ID NO: 106452
auggcucagacaguaagag

SEQ ID NO: 106454 - RNA, 19 nt, Artificial Sequence
  Description of Artificial Sequence: Synthetic oligonucleotide
  Sense strand starting at position 3035 of SEQ ID NO: 1345
ucaugcaggucucaaaugu

SEQ ID NO: 106455 - RNA, 19 nt, Artificial Sequence
  Description of Artificial Sequence: Synthetic oligonucleotide
  Antisense strand to SEQ ID NO: 106454
acauuugagaccugcauga

SEQ ID NO: 106456 - RNA, 19 nt, Artificial Sequence
  Description of Artificial Sequence: Synthetic oligonucleotide
  Sense strand starting at position 3044 of SEQ ID NO: 1345
ucucaaaugucagguagag

SEQ ID NO: 106457 - RNA, 19 nt, Artificial Sequence
  Description of Artificial Sequence: Synthetic oligonucleotide
  Antisense strand to SEQ ID NO: 106456
cucuaccugacauuugaga

SEQ ID NO: 106458 - RNA, 19 nt, Artificial Sequence
  Description of Artificial Sequence: Synthetic oligonucleotide
  Sense strand starting at position 3046 of SEQ ID NO: 1345
ucaaaugucagguagagca

SEQ ID NO: 106459 - RNA, 19 nt, Artificial Sequence
  Description of Artificial Sequence: Synthetic oligonucleotide
  Antisense strand to SEQ ID NO: 106458
ugcucuaccugacauuuga

SEQ ID NO: 106460 - RNA, 19 nt, Artificial Sequence
  Description of Artificial Sequence: Synthetic oligonucleotide
  Sense strand starting at position 3354 of SEQ ID NO: 1345
guuccauugacguguagcu

SEQ ID NO: 106461 - RNA, 19 nt, Artificial Sequence
  Description of Artificial Sequence: Synthetic oligonucleotide
  Antisense strand to SEQ ID NO: 106460
agcuacacgucaauggaac

SEQ ID NO: 106462 - RNA, 19 nt, Artificial Sequence
  Description of Artificial Sequence: Synthetic oligonucleotide
  Sense strand starting at position 3447 of SEQ ID NO: 1345
cuccuuauccuacgacaga

SEQ ID NO: 106463 - RNA, 19 nt, Artificial Sequence
  Description of Artificial Sequence: Synthetic oligonucleotide
  Antisense strand to SEQ ID NO: 106462
ucugucguaggauaaggag

SEQ ID NO: 106464 - RNA, 19 nt, Artificial Sequence
  Description of Artificial Sequence: Synthetic oligonucleotide
  Sense strand starting at position 3448 of SEQ ID NO: 1345
uccuuauccuacgacagau

SEQ ID NO: 106465 - RNA, 19 nt, Artificial Sequence
  Description of Artificial Sequence: Synthetic oligonucleotide
  Antisense strand to SEQ ID NO: 106464
aucugucguaggauaagga

SEQ ID NO: 106466 - RNA, 19 nt, Artificial Sequence
  Description of Artificial Sequence: Synthetic oligonucleotide
  Sense strand starting at position 3550 of SEQ ID NO: 1345
acaugagaucugcgaggca

SEQ ID NO: 106467 - RNA, 19 nt, Artificial Sequence
  Description of Artificial Sequence: Synthetic oligonucleotide
  Antisense strand to SEQ ID NO: 106466
ugccucgcagaucucaugu

SEQ ID NO: 106468 - RNA, 19 nt, Artificial Sequence
  Description of Artificial Sequence: Synthetic oligonucleotide
  Sense strand starting at position 3559 of SEQ ID NO: 1345
cugcgaggcaugugaagaa

SEQ ID NO: 106469 - RNA, 19 nt, Artificial Sequence
  Description of Artificial Sequence: Synthetic oligonucleotide
  Antisense strand to SEQ ID NO: 106468
uucuucacaugccucgcag

SEQ ID NO: 106470 - RNA, 19 nt, Artificial Sequence
  Description of Artificial Sequence: Synthetic oligonucleotide
  Sense strand starting at position 3580 of SEQ ID NO: 1345
aguguuccuuccucucauu

SEQ ID NO: 106471 - RNA, 19 nt, Artificial Sequence
  Description of Artificial Sequence: Synthetic oligonucleotide
  Antisense strand to SEQ ID NO: 106470
aaugagaggaaggaacacu

SEQ ID NO: 106472 - RNA, 19 nt, Artificial Sequence
  Description of Artificial Sequence: Synthetic oligonucleotide
  Sense strand starting at position 3614 of SEQ ID NO: 1345
ccaggagaauucugauguc

SEQ ID NO: 106473 - RNA, 19 nt, Artificial Sequence
  Description of Artificial Sequence: Synthetic oligonucleotide
  Antisense strand to SEQ ID NO: 106472
gacaucagaauucuccugg

SEQ ID NO: 106474 - RNA, 19 nt, Artificial Sequence
  Description of Artificial Sequence: Synthetic oligonucleotide
  Sense strand starting at position 3617 of SEQ ID NO: 1345
ggagaauucugauguccuu

SEQ ID NO: 106475 - RNA, 19 nt, Artificial Sequence
  Description of Artificial Sequence: Synthetic oligonucleotide
  Antisense strand to SEQ ID NO: 106474
aaggacaucagaauucucc

SEQ ID NO: 106476 - RNA, 19 nt, Artificial Sequence
  Description of Artificial Sequence: Synthetic oligonucleotide
  Sense strand starting at position 3732 of SEQ ID NO: 1345
uggccuuaccagcaugaua

SEQ ID NO: 106477 - RNA, 19 nt, Artificial Sequence
  Description of Artificial Sequence: Synthetic oligonucleotide
  Antisense strand to SEQ ID NO: 106476
uaucaugcugguaaggcca

SEQ ID NO: 106478 - RNA, 19 nt, Artificial Sequence
  Description of Artificial Sequence: Synthetic oligonucleotide
  Sense strand starting at position 3734 of SEQ ID NO: 1345
gccuuaccagcaugauaga

SEQ ID NO: 106479 - RNA, 19 nt, Artificial Sequence
  Description of Artificial Sequence: Synthetic oligonucleotide
  Antisense strand to SEQ ID NO: 106478
ucuaucaugcugguaaggc

SEQ ID NO: 106480 - RNA, 19 nt, Artificial Sequence
  Description of Artificial Sequence: Synthetic oligonucleotide
  Sense strand starting at position 224 of SEQ ID NO: 1346
gucuucugccuggauguga

SEQ ID NO: 106481 - RNA, 19 nt, Artificial Sequence
  Description of Artificial Sequence: Synthetic oligonucleotide
  Antisense strand to SEQ ID NO: 106480
ucacauccaggcagaagac

SEQ ID NO: 106482 - RNA, 19 nt, Artificial Sequence
  Description of Artificial Sequence: Synthetic oligonucleotide
  Sense strand starting at position 402 of SEQ ID NO: 1346
ccuagaaguuugcuccuuu

SEQ ID NO: 106483 - RNA, 19 nt, Artificial Sequence
  Description of Artificial Sequence: Synthetic oligonucleotide
  Antisense strand to SEQ ID NO: 106482
aaaggagcaaacuucuagg

SEQ ID NO: 106484 - RNA, 19 nt, Artificial Sequence
  Description of Artificial Sequence: Synthetic oligonucleotide
  Sense strand starting at position 432 of SEQ ID NO: 1346
aguugugggcaucaggaaa

SEQ ID NO: 106485 - RNA, 19 nt, Artificial Sequence
  Description of Artificial Sequence: Synthetic oligonucleotide
  Antisense strand to SEQ ID NO: 106484
uuuccugaugcccacaacu

SEQ ID NO: 106486 - RNA, 19 nt, Artificial Sequence
  Description of Artificial Sequence: Synthetic oligonucleotide
  Sense strand starting at position 583 of SEQ ID NO: 1346
ggaagaaguucucuuugca

SEQ ID NO: 106487 - RNA, 19 nt, Artificial Sequence
  Description of Artificial Sequence: Synthetic oligonucleotide
  Antisense strand to SEQ ID NO: 106486
ugcaaagagaacuucuucc

SEQ ID NO: 106488 - RNA, 19 nt, Artificial Sequence
  Description of Artificial Sequence: Synthetic oligonucleotide
  Sense strand starting at position 736 of SEQ ID NO: 1346
gcuccaguggcugagaguu

SEQ ID NO: 106489 - RNA, 19 nt, Artificial Sequence
  Description of Artificial Sequence: Synthetic oligonucleotide
  Antisense strand to SEQ ID NO: 106488
aacucucagccacuggagc

SEQ ID NO: 106490 - RNA, 19 nt, Artificial Sequence
  Description of Artificial Sequence: Synthetic oligonucleotide
  Sense strand starting at position 742 of SEQ ID NO: 1346
guggcugagaguuaacauu

SEQ ID NO: 106491 - RNA, 19 nt, Artificial Sequence
  Description of Artificial Sequence: Synthetic oligonucleotide
  Antisense strand to SEQ ID NO: 106490
aauguuaacucucagccac

SEQ ID NO: 106492 - RNA, 19 nt, Artificial Sequence
  Description of Artificial Sequence: Synthetic oligonucleotide
  Sense strand starting at position 750 of SEQ ID NO: 1346
gaguuaacauucccuggca

SEQ ID NO: 106493 - RNA, 19 nt, Artificial Sequence
  Description of Artificial Sequence: Synthetic oligonucleotide
  Antisense strand to SEQ ID NO: 106492
ugccagggaauguuaacuc

SEQ ID NO: 106494 - RNA, 19 nt, Artificial Sequence
  Description of Artificial Sequence: Synthetic oligonucleotide
  Sense strand starting at position 793 of SEQ ID NO: 1346
gaugcucuguucccgauua

SEQ ID NO: 106495 - RNA, 19 nt, Artificial Sequence
  Description of Artificial Sequence: Synthetic oligonucleotide
  Antisense strand to SEQ ID NO: 106494
uaaucgggaacagagcauc

SEQ ID NO: 106496 - RNA, 19 nt, Artificial Sequence
  Description of Artificial Sequence: Synthetic oligonucleotide
  Sense strand starting at position 874 of SEQ ID NO: 1346
ggcuuuagcggaugagcua

SEQ ID NO: 106497 - RNA, 19 nt, Artificial Sequence
  Description of Artificial Sequence: Synthetic oligonucleotide
  Antisense strand to SEQ ID NO: 106496
uagcucauccgcuaaagcc

SEQ ID NO: 106498 - RNA, 19 nt, Artificial Sequence
  Description of Artificial Sequence: Synthetic oligonucleotide
  Sense strand starting at position 911 of SEQ ID NO: 1346
cugacugaugcgugguauu

SEQ ID NO: 106499 - RNA, 19 nt, Artificial Sequence
  Description of Artificial Sequence: Synthetic oligonucleotide
  Antisense strand to SEQ ID NO: 106498
aauaccacgcaucagucag

SEQ ID NO: 106500 - RNA, 19 nt, Artificial Sequence
  Description of Artificial Sequence: Synthetic oligonucleotide
  Sense strand starting at position 923 of SEQ ID NO: 1346
ugguauuaagcagggacaa

SEQ ID NO: 106501 - RNA, 19 nt, Artificial Sequence
  Description of Artificial Sequence: Synthetic oligonucleotide
  Antisense strand to SEQ ID NO: 106500
uugucccugcuuaauacca

SEQ ID NO: 106502 - RNA, 19 nt, Artificial Sequence
  Description of Artificial Sequence: Synthetic oligonucleotide
  Sense strand starting at position 925 of SEQ ID NO: 1346
guauuaagcagggacaagu

SEQ ID NO: 106503 - RNA, 19 nt, Artificial Sequence
  Description of Artificial Sequence: Synthetic oligonucleotide
  Antisense strand to SEQ ID NO: 106502
acuugucccugcuuaauac

SEQ ID NO: 106504 - RNA, 19 nt, Artificial Sequence
  Description of Artificial Sequence: Synthetic oligonucleotide
  Sense strand starting at position 979 of SEQ ID NO: 1346
ugccucuucccggaacacu

SEQ ID NO: 106505 - RNA, 19 nt, Artificial Sequence
  Description of Artificial Sequence: Synthetic oligonucleotide
  Antisense strand to SEQ ID NO: 106504
aguguuccgggaagaggca

SEQ ID NO: 106506 - RNA, 19 nt, Artificial Sequence
  Description of Artificial Sequence: Synthetic oligonucleotide
  Sense strand starting at position 1321 of SEQ ID NO: 1346
cagucaugagcugaggcaa

SEQ ID NO: 106507 - RNA, 19 nt, Artificial Sequence
  Description of Artificial Sequence: Synthetic oligonucleotide
  Antisense strand to SEQ ID NO: 106506
uugccucagcucaugacug

SEQ ID NO: 106508 - RNA, 19 nt, Artificial Sequence
  Description of Artificial Sequence: Synthetic oligonucleotide
  Sense strand starting at position 1474 of SEQ ID NO: 1346
cucuaaguucguggaacuu

SEQ ID NO: 106509 - RNA, 19 nt, Artificial Sequence
  Description of Artificial Sequence: Synthetic oligonucleotide
  Antisense strand to SEQ ID NO: 106508
aaguuccacgaacuuagag

SEQ ID NO: 106510 - RNA, 19 nt, Artificial Sequence
  Description of Artificial Sequence: Synthetic oligonucleotide
  Sense strand starting at position 1857 of SEQ ID NO: 1346
gaagcagugugcccacuua

SEQ ID NO: 106511 - RNA, 19 nt, Artificial Sequence
  Description of Artificial Sequence: Synthetic oligonucleotide
  Antisense strand to SEQ ID NO: 106510
uaagugggcacacugcuuc

SEQ ID NO: 106512 - RNA, 19 nt, Artificial Sequence
  Description of Artificial Sequence: Synthetic oligonucleotide
  Sense strand starting at position 1957 of SEQ ID NO: 1346
gaaugcgaucccggagacu

SEQ ID NO: 106513 - RNA, 19 nt, Artificial Sequence
  Description of Artificial Sequence: Synthetic oligonucleotide
  Antisense strand to SEQ ID NO: 106512
agucuccgggaucgcauuc

SEQ ID NO: 106514 - RNA, 19 nt, Artificial Sequence
  Description of Artificial Sequence: Synthetic oligonucleotide
  Sense strand starting at position 1968 of SEQ ID NO: 1346
cggagacugcaccgucuua

SEQ ID NO: 106515 - RNA, 19 nt, Artificial Sequence
  Description of Artificial Sequence: Synthetic oligonucleotide
  Antisense strand to SEQ ID NO: 106514
uaagacggugcagucuccg

SEQ ID NO: 106516 - RNA, 19 nt, Artificial Sequence
  Description of Artificial Sequence: Synthetic oligonucleotide
  Sense strand starting at position 2014 of SEQ ID NO: 1346
gacaauggaugagaacuau

SEQ ID NO: 106517 - RNA, 19 nt, Artificial Sequence
  Description of Artificial Sequence: Synthetic oligonucleotide
  Antisense strand to SEQ ID NO: 106516
auaguucucauccauuguc

SEQ ID NO: 106518 - RNA, 19 nt, Artificial Sequence
  Description of Artificial Sequence: Synthetic oligonucleotide
  Sense strand starting at position 2020 of SEQ ID NO: 1346
ggaugagaacuauggcauc

SEQ ID NO: 106519 - RNA, 19 nt, Artificial Sequence
  Description of Artificial Sequence: Synthetic oligonucleotide
  Antisense strand to SEQ ID NO: 106518
gaugccauaguucucaucc

SEQ ID NO: 106520 - RNA, 19 nt, Artificial Sequence
  Description of Artificial Sequence: Synthetic oligonucleotide
  Sense strand starting at position 2252 of SEQ ID NO: 1346
ggaguucugaucugaauuc

SEQ ID NO: 106521 - RNA, 19 nt, Artificial Sequence
  Description of Artificial Sequence: Synthetic oligonucleotide
  Antisense strand to SEQ ID NO: 106520
gaauucagaucagaacucc

SEQ ID NO: 106522 - RNA, 19 nt, Artificial Sequence
  Description of Artificial Sequence: Synthetic oligonucleotide
  Sense strand starting at position 2411 of SEQ ID NO: 1346
gugcucagaaguugucacu

SEQ ID NO: 106523 - RNA, 19 nt, Artificial Sequence
  Description of Artificial Sequence: Synthetic oligonucleotide
  Antisense strand to SEQ ID NO: 106522
agugacaacuucugagcac

SEQ ID NO: 106524 - RNA, 19 nt, Artificial Sequence
  Description of Artificial Sequence: Synthetic oligonucleotide
  Sense strand starting at position 2417 of SEQ ID NO: 1346
agaaguugucacuggcuaa

SEQ ID NO: 106525 - RNA, 19 nt, Artificial Sequence
  Description of Artificial Sequence: Synthetic oligonucleotide
  Antisense strand to SEQ ID NO: 106524
uuagccagugacaacuucu

SEQ ID NO: 106526 - RNA, 19 nt, Artificial Sequence
  Description of Artificial Sequence: Synthetic oligonucleotide
  Sense strand starting at position 2603 of SEQ ID NO: 1346
ggccuucuuauaggguaaa

SEQ ID NO: 106527 - RNA, 19 nt, Artificial Sequence
  Description of Artificial Sequence: Synthetic oligonucleotide
  Antisense strand to SEQ ID NO: 106526
uuuacccuauaagaaggcc

SEQ ID NO: 106528 - RNA, 19 nt, Artificial Sequence
  Description of Artificial Sequence: Synthetic oligonucleotide
  Sense strand starting at position 2641 of SEQ ID NO: 1346
ugaagcacgcuccaagaau

SEQ ID NO: 106529 - RNA, 19 nt, Artificial Sequence
  Description of Artificial Sequence: Synthetic oligonucleotide
  Antisense strand to SEQ ID NO: 106528
auucuuggagcgugcuuca

SEQ ID NO: 106530 - RNA, 19 nt, Artificial Sequence
  Description of Artificial Sequence: Synthetic oligonucleotide
  Sense strand starting at position 2675 of SEQ ID NO: 1346
accugaauauguguuccga

SEQ ID NO: 106531 - RNA, 19 nt, Artificial Sequence
  Description of Artificial Sequence: Synthetic oligonucleotide
  Antisense strand to SEQ ID NO: 106530
ucggaacacauauucaggu

SEQ ID NO: 106532 - RNA, 19 nt, Artificial Sequence
  Description of Artificial Sequence: Synthetic oligonucleotide
  Sense strand starting at position 2684 of SEQ ID NO: 1346
uguguuccgagcuaaggaa

SEQ ID NO: 106533 - RNA, 19 nt, Artificial Sequence
  Description of Artificial Sequence: Synthetic oligonucleotide
  Antisense strand to SEQ ID NO: 106532
uuccuuagcucggaacaca

SEQ ID NO: 106534 - RNA, 19 nt, Artificial Sequence
  Description of Artificial Sequence: Synthetic oligonucleotide
  Sense strand starting at position 2719 of SEQ ID NO: 1346
cccguuucuuaccuacgau

SEQ ID NO: 106535 - RNA, 19 nt, Artificial Sequence
  Description of Artificial Sequence: Synthetic oligonucleotide
  Antisense strand to SEQ ID NO: 106534
aucguagguaagaaacggg

SEQ ID NO: 106536 - RNA, 19 nt, Artificial Sequence
  Description of Artificial Sequence: Synthetic oligonucleotide
  Sense strand starting at position 2722 of SEQ ID NO: 1346
guuucuuaccuacgaugaa

SEQ ID NO: 106537 - RNA, 19 nt, Artificial Sequence
  Description of Artificial Sequence: Synthetic oligonucleotide
  Antisense strand to SEQ ID NO: 106536
uucaucguagguaagaaac

SEQ ID NO: 106538 - RNA, 19 nt, Artificial Sequence
  Description of Artificial Sequence: Synthetic oligonucleotide
  Sense strand starting at position 2725 of SEQ ID NO: 1346
ucuuaccuacgaugaauau

SEQ ID NO: 106539 - RNA, 19 nt, Artificial Sequence
  Description of Artificial Sequence: Synthetic oligonucleotide
  Antisense strand to SEQ ID NO: 106538
auauucaucguagguaaga

SEQ ID NO: 106540 - RNA, 19 nt, Artificial Sequence
  Description of Artificial Sequence: Synthetic oligonucleotide
  Sense strand starting at position 2974 of SEQ ID NO: 1346
gcgguucuccuguccaguu

SEQ ID NO: 106541 - RNA, 19 nt, Artificial Sequence
  Description of Artificial Sequence: Synthetic oligonucleotide
  Antisense strand to SEQ ID NO: 106540
aacuggacaggagaaccgc

SEQ ID NO: 106542 - RNA, 19 nt, Artificial Sequence
  Description of Artificial Sequence: Synthetic oligonucleotide
  Sense strand starting at position 3378 of SEQ ID NO: 1346
ccguuugcuggcuauggau

SEQ ID NO: 106543 - RNA, 19 nt, Artificial Sequence
  Description of Artificial Sequence: Synthetic oligonucleotide
  Antisense strand to SEQ ID NO: 106542
auccauagccagcaaacgg

SEQ ID NO: 106544 - RNA, 19 nt, Artificial Sequence
  Description of Artificial Sequence: Synthetic oligonucleotide
  Sense strand starting at position 3442 of SEQ ID NO: 1346
auagguguucggcaccaca

SEQ ID NO: 106545 - RNA, 19 nt, Artificial Sequence
  Description of Artificial Sequence: Synthetic oligonucleotide
  Antisense strand to SEQ ID NO: 106544
uguggugccgaacaccuau

SEQ ID NO: 106546 - RNA, 19 nt, Artificial Sequence
  Description of Artificial Sequence: Synthetic oligonucleotide
  Sense strand starting at position 3746 of SEQ ID NO: 1346
agggacuccucacucgaga

SEQ ID NO: 106547 - RNA, 19 nt, Artificial Sequence
  Description of Artificial Sequence: Synthetic oligonucleotide
  Antisense strand to SEQ ID NO: 106546
ucucgagugaggagucccu

SEQ ID NO: 106548 - RNA, 19 nt, Artificial Sequence
  Description of Artificial Sequence: Synthetic oligonucleotide
  Sense strand starting at position 3748 of SEQ ID NO: 1346
ggacuccucacucgagaga

SEQ ID NO: 106549 - RNA, 19 nt, Artificial Sequence
  Description of Artificial Sequence: Synthetic oligonucleotide
  Antisense strand to SEQ ID NO: 106548
ucucucgagugaggagucc

SEQ ID NO: 106550 - RNA, 19 nt, Artificial Sequence
  Description of Artificial Sequence: Synthetic oligonucleotide
  Sense strand starting at position 3919 of SEQ ID NO: 1346
agggcuuuccaagacucau

SEQ ID NO: 106551 - RNA, 19 nt, Artificial Sequence
  Description of Artificial Sequence: Synthetic oligonucleotide
  Antisense strand to SEQ ID NO: 106550
augagucuuggaaagcccu

SEQ ID NO: 106552 - RNA, 19 nt, Artificial Sequence
  Description of Artificial Sequence: Synthetic oligonucleotide
  Sense strand starting at position 3943 of SEQ ID NO: 1346
uacauuugcugugagggau

SEQ ID NO: 106553 - RNA, 19 nt, Artificial Sequence
  Description of Artificial Sequence: Synthetic oligonucleotide
  Antisense strand to SEQ ID NO: 106552
aucccucacagcaaaugua

SEQ ID NO: 106554 - RNA, 19 nt, Artificial Sequence
  Description of Artificial Sequence: Synthetic oligonucleotide
  Sense strand starting at position 3955 of SEQ ID NO: 1346
gagggaugagugugaguga

SEQ ID NO: 106555 - RNA, 19 nt, Artificial Sequence
  Description of Artificial Sequence: Synthetic oligonucleotide
  Antisense strand to SEQ ID NO: 106554
ucacucacacucaucccuc

SEQ ID NO: 106556 - RNA, 19 nt, Artificial Sequence
  Description of Artificial Sequence: Synthetic oligonucleotide
  Sense strand starting at position 3958 of SEQ ID NO: 1346
ggaugagugugagugaauc

SEQ ID NO: 106557 - RNA, 19 nt, Artificial Sequence
  Description of Artificial Sequence: Synthetic oligonucleotide
  Antisense strand to SEQ ID NO: 106556
gauucacucacacucaucc

SEQ ID NO: 106558 - RNA, 19 nt, Artificial Sequence
  Description of Artificial Sequence: Synthetic oligonucleotide
  Sense strand starting at position 3966 of SEQ ID NO: 1346
gugagugaauccguacgaa

SEQ ID NO: 106559 - RNA, 19 nt, Artificial Sequence
  Description of Artificial Sequence: Synthetic oligonucleotide
  Antisense strand to SEQ ID NO: 106558
uucguacggauucacucac

SEQ ID NO: 106560 - RNA, 19 nt, Artificial Sequence
  Description of Artificial Sequence: Synthetic oligonucleotide
  Sense strand starting at position 372 of SEQ ID NO: 1347
uuguaaccaucaucaggaa

SEQ ID NO: 106561 - RNA, 19 nt, Artificial Sequence
  Description of Artificial Sequence: Synthetic oligonucleotide
  Antisense strand to SEQ ID NO: 106560
uuccugaugaugguuacaa

SEQ ID NO: 106562 - RNA, 19 nt, Artificial Sequence
  Description of Artificial Sequence: Synthetic oligonucleotide
  Sense strand starting at position 589 of SEQ ID NO: 1347
agauaaguaucccugccaa

SEQ ID NO: 106563 - RNA, 19 nt, Artificial Sequence
  Description of Artificial Sequence: Synthetic oligonucleotide
  Antisense strand to SEQ ID NO: 106562
uuggcagggauacuuaucu

SEQ ID NO: 106564 - RNA, 19 nt, Artificial Sequence
  Description of Artificial Sequence: Synthetic oligonucleotide
  Sense strand starting at position 655 of SEQ ID NO: 1347
aaagcacuuggucaagauu

SEQ ID NO: 106565 - RNA, 19 nt, Artificial Sequence
  Description of Artificial Sequence: Synthetic oligonucleotide
  Antisense strand to SEQ ID NO: 106564
aaucuugaccaagugcuuu

SEQ ID NO: 106566 - RNA, 19 nt, Artificial Sequence
  Description of Artificial Sequence: Synthetic oligonucleotide
  Sense strand starting at position 729 of SEQ ID NO: 1347
caaagcuuugagggacaau

SEQ ID NO: 106567 - RNA, 19 nt, Artificial Sequence
  Description of Artificial Sequence: Synthetic oligonucleotide
  Antisense strand to SEQ ID NO: 106566
auugucccucaaagcuuug

SEQ ID NO: 106568 - RNA, 19 nt, Artificial Sequence
  Description of Artificial Sequence: Synthetic oligonucleotide
  Sense strand starting at position 746 of SEQ ID NO: 1347
augaccauaugaguuuaau

SEQ ID NO: 106569 - RNA, 19 nt, Artificial Sequence
  Description of Artificial Sequence: Synthetic oligonucleotide
  Antisense strand to SEQ ID NO: 106568
auuaaacucauauggucau

SEQ ID NO: 106570 - RNA, 19 nt, Artificial Sequence
  Description of Artificial Sequence: Synthetic oligonucleotide
  Sense strand starting at position 778 of SEQ ID NO: 1347
uuuauagggcuuuagaguu

SEQ ID NO: 106571 - RNA, 19 nt, Artificial Sequence
  Description of Artificial Sequence: Synthetic oligonucleotide
  Antisense strand to SEQ ID NO: 106570
aacucuaaagcccuauaaa

SEQ ID NO: 106572 - RNA, 19 nt, Artificial Sequence
  Description of Artificial Sequence: Synthetic oligonucleotide
  Sense strand starting at position 872 of SEQ ID NO: 1347
cuaauauuaggcugaacua

SEQ ID NO: 106573 - RNA, 19 nt, Artificial Sequence
  Description of Artificial Sequence: Synthetic oligonucleotide
  Antisense strand to SEQ ID NO: 106572
uaguucagccuaauauuag

SEQ ID NO: 106574 - RNA, 19 nt, Artificial Sequence
  Description of Artificial Sequence: Synthetic oligonucleotide
  Sense strand starting at position 881 of SEQ ID NO: 1347
ggcugaacuacaugaaguu

SEQ ID NO: 106575 - RNA, 19 nt, Artificial Sequence
  Description of Artificial Sequence: Synthetic oligonucleotide
  Antisense strand to SEQ ID NO: 106574
aacuucauguaguucagcc

SEQ ID NO: 106576 - RNA, 19 nt, Artificial Sequence
  Description of Artificial Sequence: Synthetic oligonucleotide
  Sense strand starting at position 998 of SEQ ID NO: 1347
gcuggcugacuuuagaacu

SEQ ID NO: 106577 - RNA, 19 nt, Artificial Sequence
  Description of Artificial Sequence: Synthetic oligonucleotide
  Antisense strand to SEQ ID NO: 106576
aguucuaaagucagccagc

SEQ ID NO: 106578 - RNA, 19 nt, Artificial Sequence
  Description of Artificial Sequence: Synthetic oligonucleotide
  Sense strand starting at position 1025 of SEQ ID NO: 1347
cugauuccuggcuagucua

SEQ ID NO: 106579 - RNA, 19 nt, Artificial Sequence
  Description of Artificial Sequence: Synthetic oligonucleotide
  Antisense strand to SEQ ID NO: 106578
uagacuagccaggaaucag

SEQ ID NO: 106580 - RNA, 19 nt, Artificial Sequence
  Description of Artificial Sequence: Synthetic oligonucleotide
  Sense strand starting at position 1088 of SEQ ID NO: 1347
caaggagucaaaggagguu

SEQ ID NO: 106581 - RNA, 19 nt, Artificial Sequence
  Description of Artificial Sequence: Synthetic oligonucleotide
  Antisense strand to SEQ ID NO: 106580
aaccuccuuugacuccuug

SEQ ID NO: 106582 - RNA, 19 nt, Artificial Sequence
  Description of Artificial Sequence: Synthetic oligonucleotide
  Sense strand starting at position 1097 of SEQ ID NO: 1347
aaaggagguucugugucaa

SEQ ID NO: 106583 - RNA, 19 nt, Artificial Sequence
  Description of Artificial Sequence: Synthetic oligonucleotide
  Antisense strand to SEQ ID NO: 106582
uugacacagaaccuccuuu

SEQ ID NO: 106584 - RNA, 19 nt, Artificial Sequence
  Description of Artificial Sequence: Synthetic oligonucleotide
  Sense strand starting at position 1161 of SEQ ID NO: 1347
ugugaucccuuacuggauu

SEQ ID NO: 106585 - RNA, 19 nt, Artificial Sequence
  Description of Artificial Sequence: Synthetic oligonucleotide
  Antisense strand to SEQ ID NO: 106584
aauccaguaagggaucaca

SEQ ID NO: 106586 - RNA, 19 nt, Artificial Sequence
  Description of Artificial Sequence: Synthetic oligonucleotide
  Sense strand starting at position 1305 of SEQ ID NO: 1347
guuuaaauaugagcagucu

SEQ ID NO: 106587 - RNA, 19 nt, Artificial Sequence
  Description of Artificial Sequence: Synthetic oligonucleotide
  Antisense strand to SEQ ID NO: 106586
agacugcucauauuuaaac

SEQ ID NO: 106588 - RNA, 19 nt, Artificial Sequence
  Description of Artificial Sequence: Synthetic oligonucleotide
  Sense strand starting at position 1517 of SEQ ID NO: 1347
gcuagcaagccauagaaca

SEQ ID NO: 106589 - RNA, 19 nt, Artificial Sequence
  Description of Artificial Sequence: Synthetic oligonucleotide
  Antisense strand to SEQ ID NO: 106588
uguucuauggcuugcuagc

SEQ ID NO: 106590 - RNA, 19 nt, Artificial Sequence
  Description of Artificial Sequence: Synthetic oligonucleotide
  Sense strand starting at position 1565 of SEQ ID NO: 1347
gccgcucuuguucuaguua

SEQ ID NO: 106591 - RNA, 19 nt, Artificial Sequence
  Description of Artificial Sequence: Synthetic oligonucleotide
  Antisense strand to SEQ ID NO: 106590
uaacuagaacaagagcggc

SEQ ID NO: 106592 - RNA, 19 nt, Artificial Sequence
  Description of Artificial Sequence: Synthetic oligonucleotide
  Sense strand starting at position 1577 of SEQ ID NO: 1347
cuaguuacugucgaugaga

SEQ ID NO: 106593 - RNA, 19 nt, Artificial Sequence
  Description of Artificial Sequence: Synthetic oligonucleotide
  Antisense strand to SEQ ID NO: 106592
ucucaucgacaguaacuag

SEQ ID NO: 106594 - RNA, 19 nt, Artificial Sequence
  Description of Artificial Sequence: Synthetic oligonucleotide
  Sense strand starting at position 1579 of SEQ ID NO: 1347
aguuacugucgaugagauc

SEQ ID NO: 106595 - RNA, 19 nt, Artificial Sequence
  Description of Artificial Sequence: Synthetic oligonucleotide
  Antisense strand to SEQ ID NO: 106594
gaucucaucgacaguaacu

SEQ ID NO: 106596 - RNA, 19 nt, Artificial Sequence
  Description of Artificial Sequence: Synthetic oligonucleotide
  Sense strand starting at position 1706 of SEQ ID NO: 1347
guaccugagcuccagguaa

SEQ ID NO: 106597 - RNA, 19 nt, Artificial Sequence
  Description of Artificial Sequence: Synthetic oligonucleotide
  Antisense strand to SEQ ID NO: 106596
uuaccuggagcucagguac

SEQ ID NO: 106598 - RNA, 19 nt, Artificial Sequence
  Description of Artificial Sequence: Synthetic oligonucleotide
  Sense strand starting at position 2006 of SEQ ID NO: 1347
gagagaucccgcgagacga

SEQ ID NO: 106599 - RNA, 19 nt, Artificial Sequence
  Description of Artificial Sequence: Synthetic oligonucleotide
  Antisense strand to SEQ ID NO: 106598
ucgucucgcgggaucucuc

SEQ ID NO: 106600 - RNA, 19 nt, Artificial Sequence
  Description of Artificial Sequence: Synthetic oligonucleotide
  Sense strand starting at position 2165 of SEQ ID NO: 1347
uguagagaccuugggaagu

SEQ ID NO: 106601 - RNA, 19 nt, Artificial Sequence
  Description of Artificial Sequence: Synthetic oligonucleotide
  Antisense strand to SEQ ID NO: 106600
acuucccaaggucucuaca

SEQ ID NO: 106602 - RNA, 19 nt, Artificial Sequence
  Description of Artificial Sequence: Synthetic oligonucleotide
  Sense strand starting at position 2574 of SEQ ID NO: 1347
ggauaacagcaguaucuuu

SEQ ID NO: 106603 - RNA, 19 nt, Artificial Sequence
  Description of Artificial Sequence: Synthetic oligonucleotide
  Antisense strand to SEQ ID NO: 106602
aaagauacugcuguuaucc

SEQ ID NO: 106604 - RNA, 19 nt, Artificial Sequence
  Description of Artificial Sequence: Synthetic oligonucleotide
  Sense strand starting at position 2584 of SEQ ID NO: 1347
aguaucuuucuggacugau

SEQ ID NO: 106605 - RNA, 19 nt, Artificial Sequence
  Description of Artificial Sequence: Synthetic oligonucleotide
  Antisense strand to SEQ ID NO: 106604
aucaguccagaaagauacu

SEQ ID NO: 106606 - RNA, 19 nt, Artificial Sequence
  Description of Artificial Sequence: Synthetic oligonucleotide
  Sense strand starting at position 2587 of SEQ ID NO: 1347
aucuuucuggacugaugaa

SEQ ID NO: 106607 - RNA, 19 nt, Artificial Sequence
  Description of Artificial Sequence: Synthetic oligonucleotide
  Antisense strand to SEQ ID NO: 106606
uucaucaguccagaaagau

SEQ ID NO: 106608 - RNA, 19 nt, Artificial Sequence
  Description of Artificial Sequence: Synthetic oligonucleotide
  Sense strand starting at position 2806 of SEQ ID NO: 1347
guagacgucuuugcaauuu

SEQ ID NO: 106609 - RNA, 19 nt, Artificial Sequence
  Description of Artificial Sequence: Synthetic oligonucleotide
  Antisense strand to SEQ ID NO: 106608
aaauugcaaagacgucuac

SEQ ID NO: 106610 - RNA, 19 nt, Artificial Sequence
  Description of Artificial Sequence: Synthetic oligonucleotide
  Sense strand starting at position 2889 of SEQ ID NO: 1347
ccaguuauacuuuacaggu

SEQ ID NO: 106611 - RNA, 19 nt, Artificial Sequence
  Description of Artificial Sequence: Synthetic oligonucleotide
  Antisense strand to SEQ ID NO: 106610
accuguaaaguauaacugg

SEQ ID NO: 106612 - RNA, 19 nt, Artificial Sequence
  Description of Artificial Sequence: Synthetic oligonucleotide
  Sense strand starting at position 2895 of SEQ ID NO: 1347
auacuuuacaggugaggua

SEQ ID NO: 106613 - RNA, 19 nt, Artificial Sequence
  Description of Artificial Sequence: Synthetic oligonucleotide
  Antisense strand to SEQ ID NO: 106612
uaccucaccuguaaaguau

SEQ ID NO: 106614 - RNA, 19 nt, Artificial Sequence
  Description of Artificial Sequence: Synthetic oligonucleotide
  Sense strand starting at position 2928 of SEQ ID NO: 1347
agcugaaaugacuguccaa

SEQ ID NO: 106615 - RNA, 19 nt, Artificial Sequence
  Description of Artificial Sequence: Synthetic oligonucleotide
  Antisense strand to SEQ ID NO: 106614
uuggacagucauuucagcu

SEQ ID NO: 106616 - RNA, 19 nt, Artificial Sequence
  Description of Artificial Sequence: Synthetic oligonucleotide
  Sense strand starting at position 3005 of SEQ ID NO: 1347
cugagugcucaccauguaa

SEQ ID NO: 106617 - RNA, 19 nt, Artificial Sequence
  Description of Artificial Sequence: Synthetic oligonucleotide
  Antisense strand to SEQ ID NO: 106616
uuacauggugagcacucag

SEQ ID NO: 106618 - RNA, 19 nt, Artificial Sequence
  Description of Artificial Sequence: Synthetic oligonucleotide
  Sense strand starting at position 3023 of SEQ ID NO: 1347
acaaucauguuguuagaaa

SEQ ID NO: 106619 - RNA, 19 nt, Artificial Sequence
  Description of Artificial Sequence: Synthetic oligonucleotide
  Antisense strand to SEQ ID NO: 106618
uuucuaacaacaugauugu

SEQ ID NO: 106620 - RNA, 19 nt, Artificial Sequence
  Description of Artificial Sequence: Synthetic oligonucleotide
  Sense strand starting at position 3031 of SEQ ID NO: 1347
guuguuagaaauuggagga

SEQ ID NO: 106621 - RNA, 19 nt, Artificial Sequence
  Description of Artificial Sequence: Synthetic oligonucleotide
  Antisense strand to SEQ ID NO: 106620
uccuccaauuucuaacaac

SEQ ID NO: 106622 - RNA, 19 nt, Artificial Sequence
  Description of Artificial Sequence: Synthetic oligonucleotide
  Sense strand starting at position 3055 of SEQ ID NO: 1347
accacuucugucuaguuua

SEQ ID NO: 106623 - RNA, 19 nt, Artificial Sequence
  Description of Artificial Sequence: Synthetic oligonucleotide
  Antisense strand to SEQ ID NO: 106622
uaaacuagacagaaguggu

SEQ ID NO: 106624 - RNA, 19 nt, Artificial Sequence
  Description of Artificial Sequence: Synthetic oligonucleotide
  Sense strand starting at position 3058 of SEQ ID NO: 1347
acuucugucuaguuuauag

SEQ ID NO: 106625 - RNA, 19 nt, Artificial Sequence
  Description of Artificial Sequence: Synthetic oligonucleotide
  Antisense strand to SEQ ID NO: 106624
cuauaaacuagacagaagu

SEQ ID NO: 106626 - RNA, 19 nt, Artificial Sequence
  Description of Artificial Sequence: Synthetic oligonucleotide
  Sense strand starting at position 3068 of SEQ ID NO: 1347
aguuuauaguuucucaaga

SEQ ID NO: 106627 - RNA, 19 nt, Artificial Sequence
  Description of Artificial Sequence: Synthetic oligonucleotide
  Antisense strand to SEQ ID NO: 106626
ucuugagaaacuauaaacu

SEQ ID NO: 106628 - RNA, 19 nt, Artificial Sequence
  Description of Artificial Sequence: Synthetic oligonucleotide
  Sense strand starting at position 3069 of SEQ ID NO: 1347
guuuauaguuucucaagaa

SEQ ID NO: 106629 - RNA, 19 nt, Artificial Sequence
  Description of Artificial Sequence: Synthetic oligonucleotide
  Antisense strand to SEQ ID NO: 106628
uucuugagaaacuauaaac

SEQ ID NO: 106630 - RNA, 19 nt, Artificial Sequence
  Description of Artificial Sequence: Synthetic oligonucleotide
  Sense strand starting at position 3470 of SEQ ID NO: 1347
ucugcacuggacugugaau

SEQ ID NO: 106631 - RNA, 19 nt, Artificial Sequence
  Description of Artificial Sequence: Synthetic oligonucleotide
  Antisense strand to SEQ ID NO: 106630
auucacaguccagugcaga

SEQ ID NO: 106632 - RNA, 19 nt, Artificial Sequence
  Description of Artificial Sequence: Synthetic oligonucleotide
  Sense strand starting at position 3510 of SEQ ID NO: 1347
ucugcuaguccuuacacua

SEQ ID NO: 106633 - RNA, 19 nt, Artificial Sequence
  Description of Artificial Sequence: Synthetic oligonucleotide
  Antisense strand to SEQ ID NO: 106632
uaguguaaggacuagcaga

SEQ ID NO: 106634 - RNA, 19 nt, Artificial Sequence
  Description of Artificial Sequence: Synthetic oligonucleotide
  Sense strand starting at position 3793 of SEQ ID NO: 1347
gggcuuauccaguaaccag

SEQ ID NO: 106635 - RNA, 19 nt, Artificial Sequence
  Description of Artificial Sequence: Synthetic oligonucleotide
  Antisense strand to SEQ ID NO: 106634
cugguuacuggauaagccc

SEQ ID NO: 106636 - RNA, 19 nt, Artificial Sequence
  Description of Artificial Sequence: Synthetic oligonucleotide
  Sense strand starting at position 3848 of SEQ ID NO: 1347
acuuaaagaugucuguuga

SEQ ID NO: 106637 - RNA, 19 nt, Artificial Sequence
  Description of Artificial Sequence: Synthetic oligonucleotide
  Antisense strand to SEQ ID NO: 106636
ucaacagacaucuuuaagu

SEQ ID NO: 106638 - RNA, 19 nt, Artificial Sequence
  Description of Artificial Sequence: Synthetic oligonucleotide
  Sense strand starting at position 3849 of SEQ ID NO: 1347
cuuaaagaugucuguugaa

SEQ ID NO: 106639 - RNA, 19 nt, Artificial Sequence
  Description of Artificial Sequence: Synthetic oligonucleotide
  Antisense strand to SEQ ID NO: 106638
uucaacagacaucuuuaag

SEQ ID NO: 106640 - RNA, 19 nt, Artificial Sequence
  Description of Artificial Sequence: Synthetic oligonucleotide
  Sense strand starting at position 208 of SEQ ID NO: 1351
aggcccuguuucuaacaua

SEQ ID NO: 106641 - RNA, 19 nt, Artificial Sequence
  Description of Artificial Sequence: Synthetic oligonucleotide
  Antisense strand to SEQ ID NO: 106640
uauguuagaaacagggccu

SEQ ID NO: 106642 - RNA, 19 nt, Artificial Sequence
  Description of Artificial Sequence: Synthetic oligonucleotide
  Sense strand starting at position 296 of SEQ ID NO: 1351
ugcgguggcaccugugauu

SEQ ID NO: 106643 - RNA, 19 nt, Artificial Sequence
  Description of Artificial Sequence: Synthetic oligonucleotide
  Antisense strand to SEQ ID NO: 106642
aaucacaggugccaccgca

SEQ ID NO: 106644 - RNA, 19 nt, Artificial Sequence
  Description of Artificial Sequence: Synthetic oligonucleotide
  Sense strand starting at position 305 of SEQ ID NO: 1351
accugugauuccucaagua

SEQ ID NO: 106645 - RNA, 19 nt, Artificial Sequence
  Description of Artificial Sequence: Synthetic oligonucleotide
  Antisense strand to SEQ ID NO: 106644
uacuugaggaaucacaggu

SEQ ID NO: 106646 - RNA, 19 nt, Artificial Sequence
  Description of Artificial Sequence: Synthetic oligonucleotide
  Sense strand starting at position 326 of SEQ ID NO: 1351
uuggaaucagcgugcuaac

SEQ ID NO: 106647 - RNA, 19 nt, Artificial Sequence
  Description of Artificial Sequence: Synthetic oligonucleotide
  Antisense strand to SEQ ID NO: 106646
guuagcacgcugauuccaa

SEQ ID NO: 106648 - RNA, 19 nt, Artificial Sequence
  Description of Artificial Sequence: Synthetic oligonucleotide
  Sense strand starting at position 477 of SEQ ID NO: 1351
ggaauuaucuaacaaggug

SEQ ID NO: 106649 - RNA, 19 nt, Artificial Sequence
  Description of Artificial Sequence: Synthetic oligonucleotide
  Antisense strand to SEQ ID NO: 106648
caccuuguuagauaauucc

SEQ ID NO: 106650 - RNA, 19 nt, Artificial Sequence
  Description of Artificial Sequence: Synthetic oligonucleotide
  Sense strand starting at position 480 of SEQ ID NO: 1351
auuaucuaacaagguguua

SEQ ID NO: 106651 - RNA, 19 nt, Artificial Sequence
  Description of Artificial Sequence: Synthetic oligonucleotide
  Antisense strand to SEQ ID NO: 106650
uaacaccuuguuagauaau

SEQ ID NO: 106652 - RNA, 19 nt, Artificial Sequence
  Description of Artificial Sequence: Synthetic oligonucleotide
  Sense strand starting at position 485 of SEQ ID NO: 1351
cuaacaagguguuaaagua

SEQ ID NO: 106653 - RNA, 19 nt, Artificial Sequence
  Description of Artificial Sequence: Synthetic oligonucleotide
  Antisense strand to SEQ ID NO: 106652
uacuuuaacaccuuguuag

SEQ ID NO: 106654 - RNA, 19 nt, Artificial Sequence
  Description of Artificial Sequence: Synthetic oligonucleotide
  Sense strand starting at position 493 of SEQ ID NO: 1351
guguuaaaguaacuagcuu

SEQ ID NO: 106655 - RNA, 19 nt, Artificial Sequence
  Description of Artificial Sequence: Synthetic oligonucleotide
  Antisense strand to SEQ ID NO: 106654
aagcuaguuacuuuaacac

SEQ ID NO: 106656 - RNA, 19 nt, Artificial Sequence
  Description of Artificial Sequence: Synthetic oligonucleotide
  Sense strand starting at position 501 of SEQ ID NO: 1351
guaacuagcuucuuagaca

SEQ ID NO: 106657 - RNA, 19 nt, Artificial Sequence
  Description of Artificial Sequence: Synthetic oligonucleotide
  Antisense strand to SEQ ID NO: 106656
ugucuaagaagcuaguuac

SEQ ID NO: 106658 - RNA, 19 nt, Artificial Sequence
  Description of Artificial Sequence: Synthetic oligonucleotide
  Sense strand starting at position 504 of SEQ ID NO: 1351
acuagcuucuuagacaaga

SEQ ID NO: 106659 - RNA, 19 nt, Artificial Sequence
  Description of Artificial Sequence: Synthetic oligonucleotide
  Antisense strand to SEQ ID NO: 106658
ucuugucuaagaagcuagu

SEQ ID NO: 106660 - RNA, 19 nt, Artificial Sequence
  Description of Artificial Sequence: Synthetic oligonucleotide
  Sense strand starting at position 573 of SEQ ID NO: 1351
gccaacuaaggcugucaga

SEQ ID NO: 106661 - RNA, 19 nt, Artificial Sequence
  Description of Artificial Sequence: Synthetic oligonucleotide
  Antisense strand to SEQ ID NO: 106660
ucugacagccuuaguuggc

SEQ ID NO: 106662 - RNA, 19 nt, Artificial Sequence
  Description of Artificial Sequence: Synthetic oligonucleotide
  Sense strand starting at position 642 of SEQ ID NO: 1351
agccaagaauaaugaacuu

SEQ ID NO: 106663 - RNA, 19 nt, Artificial Sequence
  Description of Artificial Sequence: Synthetic oligonucleotide
  Antisense strand to SEQ ID NO: 106662
aaguucauuauucuuggcu

SEQ ID NO: 106664 - RNA, 19 nt, Artificial Sequence
  Description of Artificial Sequence: Synthetic oligonucleotide
  Sense strand starting at position 703 of SEQ ID NO: 1351
auaacuuguuacucggaau

SEQ ID NO: 106665 - RNA, 19 nt, Artificial Sequence
  Description of Artificial Sequence: Synthetic oligonucleotide
  Antisense strand to SEQ ID NO: 106664
auuccgaguaacaaguuau

SEQ ID NO: 106666 - RNA, 19 nt, Artificial Sequence
  Description of Artificial Sequence: Synthetic oligonucleotide
  Sense strand starting at position 706 of SEQ ID NO: 1351
acuuguuacucggaaucga

SEQ ID NO: 106667 - RNA, 19 nt, Artificial Sequence
  Description of Artificial Sequence: Synthetic oligonucleotide
  Antisense strand to SEQ ID NO: 106666
ucgauuccgaguaacaagu

SEQ ID NO: 106668 - RNA, 19 nt, Artificial Sequence
  Description of Artificial Sequence: Synthetic oligonucleotide
  Sense strand starting at position 875 of SEQ ID NO: 1351
ggugcugacaucugaccua

SEQ ID NO: 106669 - RNA, 19 nt, Artificial Sequence
  Description of Artificial Sequence: Synthetic oligonucleotide
  Antisense strand to SEQ ID NO: 106668
uaggucagaugucagcacc

SEQ ID NO: 106670 - RNA, 19 nt, Artificial Sequence
  Description of Artificial Sequence: Synthetic oligonucleotide
  Sense strand starting at position 922 of SEQ ID NO: 1351
accauagacuauuggaauu

SEQ ID NO: 106671 - RNA, 19 nt, Artificial Sequence
  Description of Artificial Sequence: Synthetic oligonucleotide
  Antisense strand to SEQ ID NO: 106670
aauuccaauagucuauggu

SEQ ID NO: 106672 - RNA, 19 nt, Artificial Sequence
  Description of Artificial Sequence: Synthetic oligonucleotide
  Sense strand starting at position 946 of SEQ ID NO: 1351
gcaaguacugggcacuaaa

SEQ ID NO: 106673 - RNA, 19 nt, Artificial Sequence
  Description of Artificial Sequence: Synthetic oligonucleotide
  Antisense strand to SEQ ID NO: 106672
uuuagugcccaguacuugc

SEQ ID NO: 106674 - RNA, 19 nt, Artificial Sequence
  Description of Artificial Sequence: Synthetic oligonucleotide
  Sense strand starting at position 956 of SEQ ID NO: 1351
ggcacuaaaucagagaugu

SEQ ID NO: 106675 - RNA, 19 nt, Artificial Sequence
  Description of Artificial Sequence: Synthetic oligonucleotide
  Antisense strand to SEQ ID NO: 106674
acaucucugauuuagugcc

SEQ ID NO: 106676 - RNA, 19 nt, Artificial Sequence
  Description of Artificial Sequence: Synthetic oligonucleotide
  Sense strand starting at position 978 of SEQ ID NO: 1351
uuuagagaauuccaugcca

SEQ ID NO: 106677 - RNA, 19 nt, Artificial Sequence
  Description of Artificial Sequence: Synthetic oligonucleotide
  Antisense strand to SEQ ID NO: 106676
uggcauggaauucucuaaa

SEQ ID NO: 106678 - RNA, 19 nt, Artificial Sequence
  Description of Artificial Sequence: Synthetic oligonucleotide
  Sense strand starting at position 1023 of SEQ ID NO: 1351
auacuuucccacuagguuu

SEQ ID NO: 106679 - RNA, 19 nt, Artificial Sequence
  Description of Artificial Sequence: Synthetic oligonucleotide
  Antisense strand to SEQ ID NO: 106678
aaaccuagugggaaaguau

SEQ ID NO: 106680 - RNA, 19 nt, Artificial Sequence
  Description of Artificial Sequence: Synthetic oligonucleotide
  Sense strand starting at position 2428 of SEQ ID NO: 1351
cuuuguaguguuuguugga

SEQ ID NO: 106681 - RNA, 19 nt, Artificial Sequence
  Description of Artificial Sequence: Synthetic oligonucleotide
  Antisense strand to SEQ ID NO: 106680
uccaacaaacacuacaaag

SEQ ID NO: 106682 - RNA, 19 nt, Artificial Sequence
  Description of Artificial Sequence: Synthetic oligonucleotide
  Sense strand starting at position 2429 of SEQ ID NO: 1351
uuuguaguguuuguuggaa

SEQ ID NO: 106683 - RNA, 19 nt, Artificial Sequence
  Description of Artificial Sequence: Synthetic oligonucleotide
  Antisense strand to SEQ ID NO: 106682
uuccaacaaacacuacaaa

SEQ ID NO: 106684 - RNA, 19 nt, Artificial Sequence
  Description of Artificial Sequence: Synthetic oligonucleotide
  Sense strand starting at position 2554 of SEQ ID NO: 1351
gagucacugucagguaaac

SEQ ID NO: 106685 - RNA, 19 nt, Artificial Sequence
  Description of Artificial Sequence: Synthetic oligonucleotide
  Antisense strand to SEQ ID NO: 106684
guuuaccugacagugacuc

SEQ ID NO: 106686 - RNA, 19 nt, Artificial Sequence
  Description of Artificial Sequence: Synthetic oligonucleotide
  Sense strand starting at position 2967 of SEQ ID NO: 1351
ucuauacuuucugugugau

SEQ ID NO: 106687 - RNA, 19 nt, Artificial Sequence
  Description of Artificial Sequence: Synthetic oligonucleotide
  Antisense strand to SEQ ID NO: 106686
aucacacagaaaguauaga

SEQ ID NO: 106688 - RNA, 19 nt, Artificial Sequence
  Description of Artificial Sequence: Synthetic oligonucleotide
  Sense strand starting at position 2968 of SEQ ID NO: 1351
cuauacuuucugugugauc

SEQ ID NO: 106689 - RNA, 19 nt, Artificial Sequence
  Description of Artificial Sequence: Synthetic oligonucleotide
  Antisense strand to SEQ ID NO: 106688
gaucacacagaaaguauag

SEQ ID NO: 106690 - RNA, 19 nt, Artificial Sequence
  Description of Artificial Sequence: Synthetic oligonucleotide
  Sense strand starting at position 2970 of SEQ ID NO: 1351
auacuuucugugugaucac

SEQ ID NO: 106691 - RNA, 19 nt, Artificial Sequence
  Description of Artificial Sequence: Synthetic oligonucleotide
  Antisense strand to SEQ ID NO: 106690
gugaucacacagaaaguau

SEQ ID NO: 106692 - RNA, 19 nt, Artificial Sequence
  Description of Artificial Sequence: Synthetic oligonucleotide
  Sense strand starting at position 3182 of SEQ ID NO: 1351
aagcaaggaucaugagaac

SEQ ID NO: 106693 - RNA, 19 nt, Artificial Sequence
  Description of Artificial Sequence: Synthetic oligonucleotide
  Antisense strand to SEQ ID NO: 106692
guucucaugauccuugcuu

SEQ ID NO: 106694 - RNA, 19 nt, Artificial Sequence
  Description of Artificial Sequence: Synthetic oligonucleotide
  Sense strand starting at position 3185 of SEQ ID NO: 1351
caaggaucaugagaacuug

SEQ ID NO: 106695 - RNA, 19 nt, Artificial Sequence
  Description of Artificial Sequence: Synthetic oligonucleotide
  Antisense strand to SEQ ID NO: 106694
caaguucucaugauccuug

SEQ ID NO: 106696 - RNA, 19 nt, Artificial Sequence
  Description of Artificial Sequence: Synthetic oligonucleotide
  Sense strand starting at position 3355 of SEQ ID NO: 1351
auaauaaugcgugagcuga

SEQ ID NO: 106697 - RNA, 19 nt, Artificial Sequence
  Description of Artificial Sequence: Synthetic oligonucleotide
  Antisense strand to SEQ ID NO: 106696
ucagcucacgcauuauuau

SEQ ID NO: 106698 - RNA, 19 nt, Artificial Sequence
  Description of Artificial Sequence: Synthetic oligonucleotide
  Sense strand starting at position 3359 of SEQ ID NO: 1351
uaaugcgugagcugaguuu

SEQ ID NO: 106699 - RNA, 19 nt, Artificial Sequence
  Description of Artificial Sequence: Synthetic oligonucleotide
  Antisense strand to SEQ ID NO: 106698
aaacucagcucacgcauua

SEQ ID NO: 106700 - RNA, 19 nt, Artificial Sequence
  Description of Artificial Sequence: Synthetic oligonucleotide
  Sense strand starting at position 3379 of SEQ ID NO: 1351
ugcauaugaucauuagcau

SEQ ID NO: 106701 - RNA, 19 nt, Artificial Sequence
  Description of Artificial Sequence: Synthetic oligonucleotide
  Antisense strand to SEQ ID NO: 106700
augcuaaugaucauaugca

SEQ ID NO: 106702 - RNA, 19 nt, Artificial Sequence
  Description of Artificial Sequence: Synthetic oligonucleotide
  Sense strand starting at position 3380 of SEQ ID NO: 1351
gcauaugaucauuagcaua

SEQ ID NO: 106703 - RNA, 19 nt, Artificial Sequence
  Description of Artificial Sequence: Synthetic oligonucleotide
  Antisense strand to SEQ ID NO: 106702
uaugcuaaugaucauaugc

SEQ ID NO: 106704 - RNA, 19 nt, Artificial Sequence
  Description of Artificial Sequence: Synthetic oligonucleotide
  Sense strand starting at position 3394 of SEQ ID NO: 1351
gcauaauaaugcuugaucu

SEQ ID NO: 106705 - RNA, 19 nt, Artificial Sequence
  Description of Artificial Sequence: Synthetic oligonucleotide
  Antisense strand to SEQ ID NO: 106704
agaucaagcauuauuaugc

SEQ ID NO: 106706 - RNA, 19 nt, Artificial Sequence
  Description of Artificial Sequence: Synthetic oligonucleotide
  Sense strand starting at position 3404 of SEQ ID NO: 1351
gcuugaucuagauggcgca

SEQ ID NO: 106707 - RNA, 19 nt, Artificial Sequence
  Description of Artificial Sequence: Synthetic oligonucleotide
  Antisense strand to SEQ ID NO: 106706
ugcgccaucuagaucaagc

SEQ ID NO: 106708 - RNA, 19 nt, Artificial Sequence
  Description of Artificial Sequence: Synthetic oligonucleotide
  Sense strand starting at position 3450 of SEQ ID NO: 1351
ucaguagaaucuucuagag

SEQ ID NO: 106709 - RNA, 19 nt, Artificial Sequence
  Description of Artificial Sequence: Synthetic oligonucleotide
  Antisense strand to SEQ ID NO: 106708
cucuagaagauucuacuga

SEQ ID NO: 106710 - RNA, 19 nt, Artificial Sequence
  Description of Artificial Sequence: Synthetic oligonucleotide
  Sense strand starting at position 3452 of SEQ ID NO: 1351
aguagaaucuucuagagug

SEQ ID NO: 106711 - RNA, 19 nt, Artificial Sequence
  Description of Artificial Sequence: Synthetic oligonucleotide
  Antisense strand to SEQ ID NO: 106710
cacucuagaagauucuacu

SEQ ID NO: 106712 - RNA, 19 nt, Artificial Sequence
  Description of Artificial Sequence: Synthetic oligonucleotide
  Sense strand starting at position 3691 of SEQ ID NO: 1351
cugacagguugugcaauuu

SEQ ID NO: 106713 - RNA, 19 nt, Artificial Sequence
  Description of Artificial Sequence: Synthetic oligonucleotide
  Antisense strand to SEQ ID NO: 106712
aaauugcacaaccugucag

SEQ ID NO: 106714 - RNA, 19 nt, Artificial Sequence
  Description of Artificial Sequence: Synthetic oligonucleotide
  Sense strand starting at position 3700 of SEQ ID NO: 1351
ugugcaauuucucagggca

SEQ ID NO: 106715 - RNA, 19 nt, Artificial Sequence
  Description of Artificial Sequence: Synthetic oligonucleotide
  Antisense strand to SEQ ID NO: 106714
ugcccugagaaauugcaca

SEQ ID NO: 106716 - RNA, 19 nt, Artificial Sequence
  Description of Artificial Sequence: Synthetic oligonucleotide
  Sense strand starting at position 3724 of SEQ ID NO: 1351
cggauaugaccuugaagau

SEQ ID NO: 106717 - RNA, 19 nt, Artificial Sequence
  Description of Artificial Sequence: Synthetic oligonucleotide
  Antisense strand to SEQ ID NO: 106716
aucuucaaggucauauccg

SEQ ID NO: 106718 - RNA, 19 nt, Artificial Sequence
  Description of Artificial Sequence: Synthetic oligonucleotide
  Sense strand starting at position 3849 of SEQ ID NO: 1351
agcuuugcuugggcugaga

SEQ ID NO: 106719 - RNA, 19 nt, Artificial Sequence
  Description of Artificial Sequence: Synthetic oligonucleotide
  Antisense strand to SEQ ID NO: 106718
ucucagcccaagcaaagcu

SEQ ID NO: 106720 - RNA, 19 nt, Artificial Sequence
  Description of Artificial Sequence: Synthetic oligonucleotide
  Sense strand starting at position 1213 of SEQ ID NO: 1349
cggacuuuguaguguuugu

SEQ ID NO: 106721 - RNA, 19 nt, Artificial Sequence
  Description of Artificial Sequence: Synthetic oligonucleotide
  Antisense strand to SEQ ID NO: 106720
acaaacacuacaaaguccg

SEQ ID NO: 106722 - RNA, 19 nt, Artificial Sequence
  Description of Artificial Sequence: Synthetic oligonucleotide
  Sense strand starting at position 1217 of SEQ ID NO: 1349
cuuuguaguguuuguugga

SEQ ID NO: 106723 - RNA, 19 nt, Artificial Sequence
  Description of Artificial Sequence: Synthetic oligonucleotide
  Antisense strand to SEQ ID NO: 106722
uccaacaaacacuacaaag

SEQ ID NO: 106724 - RNA, 19 nt, Artificial Sequence
  Description of Artificial Sequence: Synthetic oligonucleotide
  Sense strand starting at position 1218 of SEQ ID NO: 1349
uuuguaguguuuguuggaa

SEQ ID NO: 106725 - RNA, 19 nt, Artificial Sequence
  Description of Artificial Sequence: Synthetic oligonucleotide
  Antisense strand to SEQ ID NO: 106724
uuccaacaaacacuacaaa

SEQ ID NO: 106726 - RNA, 19 nt, Artificial Sequence
  Description of Artificial Sequence: Synthetic oligonucleotide
  Sense strand starting at position 1220 of SEQ ID NO: 1349
uguaguguuuguuggaacu

SEQ ID NO: 106727 - RNA, 19 nt, Artificial Sequence
  Description of Artificial Sequence: Synthetic oligonucleotide
  Antisense strand to SEQ ID NO: 106726
aguuccaacaaacacuaca

SEQ ID NO: 106728 - RNA, 19 nt, Artificial Sequence
  Description of Artificial Sequence: Synthetic oligonucleotide
  Sense strand starting at position 1330 of SEQ ID NO: 1349
guucucagcucucgaguca

SEQ ID NO: 106729 - RNA, 19 nt, Artificial Sequence
  Description of Artificial Sequence: Synthetic oligonucleotide
  Antisense strand to SEQ ID NO: 106728
ugacucgagagcugagaac

SEQ ID NO: 106730 - RNA, 19 nt, Artificial Sequence
  Description of Artificial Sequence: Synthetic oligonucleotide
  Sense strand starting at position 1341 of SEQ ID NO: 1349
ucgagucacugucagguaa

SEQ ID NO: 106731 - RNA, 19 nt, Artificial Sequence
  Description of Artificial Sequence: Synthetic oligonucleotide
  Antisense strand to SEQ ID NO: 106730
uuaccugacagugacucga

SEQ ID NO: 106732 - RNA, 19 nt, Artificial Sequence
  Description of Artificial Sequence: Synthetic oligonucleotide
  Sense strand starting at position 1343 of SEQ ID NO: 1349
gagucacugucagguaaac

SEQ ID NO: 106733 - RNA, 19 nt, Artificial Sequence
  Description of Artificial Sequence: Synthetic oligonucleotide
  Antisense strand to SEQ ID NO: 106732
guuuaccugacagugacuc

SEQ ID NO: 106734 - RNA, 19 nt, Artificial Sequence
  Description of Artificial Sequence: Synthetic oligonucleotide
  Sense strand starting at position 1429 of SEQ ID NO: 1349
gagauagugucucauucgu

SEQ ID NO: 106735 - RNA, 19 nt, Artificial Sequence
  Description of Artificial Sequence: Synthetic oligonucleotide
  Antisense strand to SEQ ID NO: 106734
acgaaugagacacuaucuc

SEQ ID NO: 106736 - RNA, 19 nt, Artificial Sequence
  Description of Artificial Sequence: Synthetic oligonucleotide
  Sense strand starting at position 1755 of SEQ ID NO: 1349
gucuauacuuucuguguga

SEQ ID NO: 106737 - RNA, 19 nt, Artificial Sequence
  Description of Artificial Sequence: Synthetic oligonucleotide
  Antisense strand to SEQ ID NO: 106736
ucacacagaaaguauagac

SEQ ID NO: 106738 - RNA, 19 nt, Artificial Sequence
  Description of Artificial Sequence: Synthetic oligonucleotide
  Sense strand starting at position 1756 of SEQ ID NO: 1349
ucuauacuuucugugugau

SEQ ID NO: 106739 - RNA, 19 nt, Artificial Sequence
  Description of Artificial Sequence: Synthetic oligonucleotide
  Antisense strand to SEQ ID NO: 106738
aucacacagaaaguauaga

SEQ ID NO: 106740 - RNA, 19 nt, Artificial Sequence
  Description of Artificial Sequence: Synthetic oligonucleotide
  Sense strand starting at position 1757 of SEQ ID NO: 1349
cuauacuuucugugugauc

SEQ ID NO: 106741 - RNA, 19 nt, Artificial Sequence
  Description of Artificial Sequence: Synthetic oligonucleotide
  Antisense strand to SEQ ID NO: 106740
gaucacacagaaaguauag

SEQ ID NO: 106742 - RNA, 19 nt, Artificial Sequence
  Description of Artificial Sequence: Synthetic oligonucleotide
  Sense strand starting at position 1759 of SEQ ID NO: 1349
auacuuucugugugaucac

SEQ ID NO: 106743 - RNA, 19 nt, Artificial Sequence
  Description of Artificial Sequence: Synthetic oligonucleotide
  Antisense strand to SEQ ID NO: 106742
gugaucacacagaaaguau

SEQ ID NO: 106744 - RNA, 19 nt, Artificial Sequence
  Description of Artificial Sequence: Synthetic oligonucleotide
  Sense strand starting at position 1971 of SEQ ID NO: 1349
aagcaaggaucaugagaac

SEQ ID NO: 106745 - RNA, 19 nt, Artificial Sequence
  Description of Artificial Sequence: Synthetic oligonucleotide
  Antisense strand to SEQ ID NO: 106744
guucucaugauccuugcuu

SEQ ID NO: 106746 - RNA, 19 nt, Artificial Sequence
  Description of Artificial Sequence: Synthetic oligonucleotide
  Sense strand starting at position 1974 of SEQ ID NO: 1349
caaggaucaugagaacuug

SEQ ID NO: 106747 - RNA, 19 nt, Artificial Sequence
  Description of Artificial Sequence: Synthetic oligonucleotide
  Antisense strand to SEQ ID NO: 106746
caaguucucaugauccuug

SEQ ID NO: 106748 - RNA, 19 nt, Artificial Sequence
  Description of Artificial Sequence: Synthetic oligonucleotide
  Sense strand starting at position 2144 of SEQ ID NO: 1349
auaauaaugcgugagcuga

SEQ ID NO: 106749 - RNA, 19 nt, Artificial Sequence
  Description of Artificial Sequence: Synthetic oligonucleotide
  Antisense strand to SEQ ID NO: 106748
ucagcucacgcauuauuau

SEQ ID NO: 106750 - RNA, 19 nt, Artificial Sequence
  Description of Artificial Sequence: Synthetic oligonucleotide
  Sense strand starting at position 2148 of SEQ ID NO: 1349
uaaugcgugagcugaguuu

SEQ ID NO: 106751 - RNA, 19 nt, Artificial Sequence
  Description of Artificial Sequence: Synthetic oligonucleotide
  Antisense strand to SEQ ID NO: 106750
aaacucagcucacgcauua

SEQ ID NO: 106752 - RNA, 19 nt, Artificial Sequence
  Description of Artificial Sequence: Synthetic oligonucleotide
  Sense strand starting at position 2168 of SEQ ID NO: 1349
ugcauaugaucauuagcau

SEQ ID NO: 106753 - RNA, 19 nt, Artificial Sequence
  Description of Artificial Sequence: Synthetic oligonucleotide
  Antisense strand to SEQ ID NO: 106752
augcuaaugaucauaugca

SEQ ID NO: 106754 - RNA, 19 nt, Artificial Sequence
  Description of Artificial Sequence: Synthetic oligonucleotide
  Sense strand starting at position 2169 of SEQ ID NO: 1349
gcauaugaucauuagcaua

SEQ ID NO: 106755 - RNA, 19 nt, Artificial Sequence
  Description of Artificial Sequence: Synthetic oligonucleotide
  Antisense strand to SEQ ID NO: 106754
uaugcuaaugaucauaugc

SEQ ID NO: 106756 - RNA, 19 nt, Artificial Sequence
  Description of Artificial Sequence: Synthetic oligonucleotide
  Sense strand starting at position 2183 of SEQ ID NO: 1349
gcauaauaaugcuugaucu

SEQ ID NO: 106757 - RNA, 19 nt, Artificial Sequence
  Description of Artificial Sequence: Synthetic oligonucleotide
  Antisense strand to SEQ ID NO: 106756
agaucaagcauuauuaugc

SEQ ID NO: 106758 - RNA, 19 nt, Artificial Sequence
  Description of Artificial Sequence: Synthetic oligonucleotide
  Sense strand starting at position 2193 of SEQ ID NO: 1349
gcuugaucuagauggcgca

SEQ ID NO: 106759 - RNA, 19 nt, Artificial Sequence
  Description of Artificial Sequence: Synthetic oligonucleotide
  Antisense strand to SEQ ID NO: 106758
ugcgccaucuagaucaagc

SEQ ID NO: 106760 - RNA, 19 nt, Artificial Sequence
  Description of Artificial Sequence: Synthetic oligonucleotide
  Sense strand starting at position 2239 of SEQ ID NO: 1349
ucaguagaaucuucuagag

SEQ ID NO: 106761 - RNA, 19 nt, Artificial Sequence
  Description of Artificial Sequence: Synthetic oligonucleotide
  Antisense strand to SEQ ID NO: 106760
cucuagaagauucuacuga

SEQ ID NO: 106762 - RNA, 19 nt, Artificial Sequence
  Description of Artificial Sequence: Synthetic oligonucleotide
  Sense strand starting at position 2241 of SEQ ID NO: 1349
aguagaaucuucuagagug

SEQ ID NO: 106763 - RNA, 19 nt, Artificial Sequence
  Description of Artificial Sequence: Synthetic oligonucleotide
  Antisense strand to SEQ ID NO: 106762
cacucuagaagauucuacu

SEQ ID NO: 106764 - RNA, 19 nt, Artificial Sequence
  Description of Artificial Sequence: Synthetic oligonucleotide
  Sense strand starting at position 2479 of SEQ ID NO: 1349
gcugacagguugugcaauu

SEQ ID NO: 106765 - RNA, 19 nt, Artificial Sequence
  Description of Artificial Sequence: Synthetic oligonucleotide
  Antisense strand to SEQ ID NO: 106764
aauugcacaaccugucagc

SEQ ID NO: 106766 - RNA, 19 nt, Artificial Sequence
  Description of Artificial Sequence: Synthetic oligonucleotide
  Sense strand starting at position 2480 of SEQ ID NO: 1349
cugacagguugugcaauuu

SEQ ID NO: 106767 - RNA, 19 nt, Artificial Sequence
  Description of Artificial Sequence: Synthetic oligonucleotide
  Antisense strand to SEQ ID NO: 106766
aaauugcacaaccugucag

SEQ ID NO: 106768 - RNA, 19 nt, Artificial Sequence
  Description of Artificial Sequence: Synthetic oligonucleotide
  Sense strand starting at position 2489 of SEQ ID NO: 1349
ugugcaauuucucagggca

SEQ ID NO: 106769 - RNA, 19 nt, Artificial Sequence
  Description of Artificial Sequence: Synthetic oligonucleotide
  Antisense strand to SEQ ID NO: 106768
ugcccugagaaauugcaca

SEQ ID NO: 106770 - RNA, 19 nt, Artificial Sequence
  Description of Artificial Sequence: Synthetic oligonucleotide
  Sense strand starting at position 2513 of SEQ ID NO: 1349
cggauaugaccuugaagau

SEQ ID NO: 106771 - RNA, 19 nt, Artificial Sequence
  Description of Artificial Sequence: Synthetic oligonucleotide
  Antisense strand to SEQ ID NO: 106770
aucuucaaggucauauccg

SEQ ID NO: 106772 - RNA, 19 nt, Artificial Sequence
  Description of Artificial Sequence: Synthetic oligonucleotide
  Sense strand starting at position 2638 of SEQ ID NO: 1349
agcuuugcuugggcugaga

SEQ ID NO: 106773 - RNA, 19 nt, Artificial Sequence
  Description of Artificial Sequence: Synthetic oligonucleotide
  Antisense strand to SEQ ID NO: 106772
ucucagcccaagcaaagcu

SEQ ID NO: 106774 - RNA, 19 nt, Artificial Sequence
  Description of Artificial Sequence: Synthetic oligonucleotide
  Sense strand starting at position 2665 of SEQ ID NO: 1349
aagagauguucccgcagca

SEQ ID NO: 106775 - RNA, 19 nt, Artificial Sequence
  Description of Artificial Sequence: Synthetic oligonucleotide
  Antisense strand to SEQ ID NO: 106774
ugcugcgggaacaucucuu

SEQ ID NO: 106776 - RNA, 19 nt, Artificial Sequence
  Description of Artificial Sequence: Synthetic oligonucleotide
  Sense strand starting at position 3109 of SEQ ID NO: 1349
guggccuggcuccaguaaa

SEQ ID NO: 106777 - RNA, 19 nt, Artificial Sequence
  Description of Artificial Sequence: Synthetic oligonucleotide
  Antisense strand to SEQ ID NO: 106776
uuuacuggagccaggccac

SEQ ID NO: 106778 - RNA, 19 nt, Artificial Sequence
  Description of Artificial Sequence: Synthetic oligonucleotide
  Sense strand starting at position 3201 of SEQ ID NO: 1349
gacugaggcucccagugaa

SEQ ID NO: 106779 - RNA, 19 nt, Artificial Sequence
  Description of Artificial Sequence: Synthetic oligonucleotide
  Antisense strand to SEQ ID NO: 106778
uucacugggagccucaguc

SEQ ID NO: 106780 - RNA, 19 nt, Artificial Sequence
  Description of Artificial Sequence: Synthetic oligonucleotide
  Sense strand starting at position 3235 of SEQ ID NO: 1349
aggcuaucuggucaucuca

SEQ ID NO: 106781 - RNA, 19 nt, Artificial Sequence
  Description of Artificial Sequence: Synthetic oligonucleotide
  Antisense strand to SEQ ID NO: 106780
ugagaugaccagauagccu

SEQ ID NO: 106782 - RNA, 19 nt, Artificial Sequence
  Description of Artificial Sequence: Synthetic oligonucleotide
  Sense strand starting at position 3331 of SEQ ID NO: 1349
ucuggaucugcucacauga

SEQ ID NO: 106783 - RNA, 19 nt, Artificial Sequence
  Description of Artificial Sequence: Synthetic oligonucleotide
  Antisense strand to SEQ ID NO: 106782
ucaugugagcagauccaga

SEQ ID NO: 106784 - RNA, 19 nt, Artificial Sequence
  Description of Artificial Sequence: Synthetic oligonucleotide
  Sense strand starting at position 3333 of SEQ ID NO: 1349
uggaucugcucacaugaca

SEQ ID NO: 106785 - RNA, 19 nt, Artificial Sequence
  Description of Artificial Sequence: Synthetic oligonucleotide
  Antisense strand to SEQ ID NO: 106784
ugucaugugagcagaucca

SEQ ID NO: 106786 - RNA, 19 nt, Artificial Sequence
  Description of Artificial Sequence: Synthetic oligonucleotide
  Sense strand starting at position 3344 of SEQ ID NO: 1349
acaugacagucuucuguuu

SEQ ID NO: 106787 - RNA, 19 nt, Artificial Sequence
  Description of Artificial Sequence: Synthetic oligonucleotide
  Antisense strand to SEQ ID NO: 106786
aaacagaagacugucaugu

SEQ ID NO: 106788 - RNA, 19 nt, Artificial Sequence
  Description of Artificial Sequence: Synthetic oligonucleotide
  Sense strand starting at position 3687 of SEQ ID NO: 1349
caagcagccuaguauaaga

SEQ ID NO: 106789 - RNA, 19 nt, Artificial Sequence
  Description of Artificial Sequence: Synthetic oligonucleotide
  Antisense strand to SEQ ID NO: 106788
ucuuauacuaggcugcuug

SEQ ID NO: 106790 - RNA, 19 nt, Artificial Sequence
  Description of Artificial Sequence: Synthetic oligonucleotide
  Sense strand starting at position 163 of SEQ ID NO: 1350
gcucccucucaggaauuga

SEQ ID NO: 106791 - RNA, 19 nt, Artificial Sequence
  Description of Artificial Sequence: Synthetic oligonucleotide
  Antisense strand to SEQ ID NO: 106790
ucaauuccugagagggagc

SEQ ID NO: 106792 - RNA, 19 nt, Artificial Sequence
  Description of Artificial Sequence: Synthetic oligonucleotide
  Sense strand starting at position 177 of SEQ ID NO: 1350
auugacuaaggcuguuauu

SEQ ID NO: 106793 - RNA, 19 nt, Artificial Sequence
  Description of Artificial Sequence: Synthetic oligonucleotide
  Antisense strand to SEQ ID NO: 106792
aauaacagccuuagucaau

SEQ ID NO: 106794 - RNA, 19 nt, Artificial Sequence
  Description of Artificial Sequence: Synthetic oligonucleotide
  Sense strand starting at position 231 of SEQ ID NO: 1350
gccugcucuucugaagaga

SEQ ID NO: 106795 - RNA, 19 nt, Artificial Sequence
  Description of Artificial Sequence: Synthetic oligonucleotide
  Antisense strand to SEQ ID NO: 106794
ucucuucagaagagcaggc

SEQ ID NO: 106796 - RNA, 19 nt, Artificial Sequence
  Description of Artificial Sequence: Synthetic oligonucleotide
  Sense strand starting at position 328 of SEQ ID NO: 1350
gcucauuguuggucaccca

SEQ ID NO: 106797 - RNA, 19 nt, Artificial Sequence
  Description of Artificial Sequence: Synthetic oligonucleotide
  Antisense strand to SEQ ID NO: 106796
ugggugaccaacaaugagc

SEQ ID NO: 106798 - RNA, 19 nt, Artificial Sequence
  Description of Artificial Sequence: Synthetic oligonucleotide
  Sense strand starting at position 550 of SEQ ID NO: 1350
gcgugcagagcuccuugaa

SEQ ID NO: 106799 - RNA, 19 nt, Artificial Sequence
  Description of Artificial Sequence: Synthetic oligonucleotide
  Antisense strand to SEQ ID NO: 106798
uucaaggagcucugcacgc

SEQ ID NO: 106800 - RNA, 19 nt, Artificial Sequence
  Description of Artificial Sequence: Synthetic oligonucleotide
  Sense strand starting at position 592 of SEQ ID NO: 1350
ucaucuucuugaugacaag

SEQ ID NO: 106801 - RNA, 19 nt, Artificial Sequence
  Description of Artificial Sequence: Synthetic oligonucleotide
  Antisense strand to SEQ ID NO: 106800
cuugucaucaagaagauga

SEQ ID NO: 106802 - RNA, 19 nt, Artificial Sequence
  Description of Artificial Sequence: Synthetic oligonucleotide
  Sense strand starting at position 1100 of SEQ ID NO: 1350
gugacucugucccuaggau

SEQ ID NO: 106803 - RNA, 19 nt, Artificial Sequence
  Description of Artificial Sequence: Synthetic oligonucleotide
  Antisense strand to SEQ ID NO: 106802
auccuagggacagagucac

SEQ ID NO: 106804 - RNA, 19 nt, Artificial Sequence
  Description of Artificial Sequence: Synthetic oligonucleotide
  Sense strand starting at position 1507 of SEQ ID NO: 1350
aggacaaguucuuauacca

SEQ ID NO: 106805 - RNA, 19 nt, Artificial Sequence
  Description of Artificial Sequence: Synthetic oligonucleotide
  Antisense strand to SEQ ID NO: 106804
ugguauaagaacuuguccu

SEQ ID NO: 106806 - RNA, 19 nt, Artificial Sequence
  Description of Artificial Sequence: Synthetic oligonucleotide
  Sense strand starting at position 1796 of SEQ ID NO: 1350
acauguggcucgcgaggua

SEQ ID NO: 106807 - RNA, 19 nt, Artificial Sequence
  Description of Artificial Sequence: Synthetic oligonucleotide
  Antisense strand to SEQ ID NO: 106806
uaccucgcgagccacaugu

SEQ ID NO: 106808 - RNA, 19 nt, Artificial Sequence
  Description of Artificial Sequence: Synthetic oligonucleotide
  Sense strand starting at position 1889 of SEQ ID NO: 1350
ucgguaugguccugacugu

SEQ ID NO: 106809 - RNA, 19 nt, Artificial Sequence
  Description of Artificial Sequence: Synthetic oligonucleotide
  Antisense strand to SEQ ID NO: 106808
acagucaggaccauaccga

SEQ ID NO: 106810 - RNA, 19 nt, Artificial Sequence
  Description of Artificial Sequence: Synthetic oligonucleotide
  Sense strand starting at position 1955 of SEQ ID NO: 1350
aaacacaauugugaugaga

SEQ ID NO: 106811 - RNA, 19 nt, Artificial Sequence
  Description of Artificial Sequence: Synthetic oligonucleotide
  Antisense strand to SEQ ID NO: 106810
ucucaucacaauuguguuu

SEQ ID NO: 106812 - RNA, 19 nt, Artificial Sequence
  Description of Artificial Sequence: Synthetic oligonucleotide
  Sense strand starting at position 1957 of SEQ ID NO: 1350
acacaauugugaugagacu

SEQ ID NO: 106813 - RNA, 19 nt, Artificial Sequence
  Description of Artificial Sequence: Synthetic oligonucleotide
  Antisense strand to SEQ ID NO: 106812
agucucaucacaauugugu

SEQ ID NO: 106814 - RNA, 19 nt, Artificial Sequence
  Description of Artificial Sequence: Synthetic oligonucleotide
  Sense strand starting at position 1964 of SEQ ID NO: 1350
ugugaugagacuugguaaa

SEQ ID NO: 106815 - RNA, 19 nt, Artificial Sequence
  Description of Artificial Sequence: Synthetic oligonucleotide
  Antisense strand to SEQ ID NO: 106814
uuuaccaagucucaucaca

SEQ ID NO: 106816 - RNA, 19 nt, Artificial Sequence
  Description of Artificial Sequence: Synthetic oligonucleotide
  Sense strand starting at position 1966 of SEQ ID NO: 1350
ugaugagacuugguaaagu

SEQ ID NO: 106817 - RNA, 19 nt, Artificial Sequence
  Description of Artificial Sequence: Synthetic oligonucleotide
  Antisense strand to SEQ ID NO: 106816
acuuuaccaagucucauca

SEQ ID NO: 106818 - RNA, 19 nt, Artificial Sequence
  Description of Artificial Sequence: Synthetic oligonucleotide
  Sense strand starting at position 1975 of SEQ ID NO: 1350
uugguaaaguuguuguaaa

SEQ ID NO: 106819 - RNA, 19 nt, Artificial Sequence
  Description of Artificial Sequence: Synthetic oligonucleotide
  Antisense strand to SEQ ID NO: 106818
uuuacaacaacuuuaccaa

SEQ ID NO: 106820 - RNA, 19 nt, Artificial Sequence
  Description of Artificial Sequence: Synthetic oligonucleotide
  Sense strand starting at position 2046 of SEQ ID NO: 1350
acaguuuccucauugguca

SEQ ID NO: 106821 - RNA, 19 nt, Artificial Sequence
  Description of Artificial Sequence: Synthetic oligonucleotide
  Antisense strand to SEQ ID NO: 106820
ugaccaaugaggaaacugu

SEQ ID NO: 106822 - RNA, 19 nt, Artificial Sequence
  Description of Artificial Sequence: Synthetic oligonucleotide
  Sense strand starting at position 2765 of SEQ ID NO: 1350
gccagcuccuacugagacu

SEQ ID NO: 106823 - RNA, 19 nt, Artificial Sequence
  Description of Artificial Sequence: Synthetic oligonucleotide
  Antisense strand to SEQ ID NO: 106822
agucucaguaggagcuggc

SEQ ID NO: 106824 - RNA, 19 nt, Artificial Sequence
  Description of Artificial Sequence: Synthetic oligonucleotide
  Sense strand starting at position 2776 of SEQ ID NO: 1350
cugagacugucucacacau

SEQ ID NO: 106825 - RNA, 19 nt, Artificial Sequence
  Description of Artificial Sequence: Synthetic oligonucleotide
  Antisense strand to SEQ ID NO: 106824
augugugagacagucucag

SEQ ID NO: 106826 - RNA, 19 nt, Artificial Sequence
  Description of Artificial Sequence: Synthetic oligonucleotide
  Sense strand starting at position 2910 of SEQ ID NO: 1350
agggucuugcucuggacua

SEQ ID NO: 106827 - RNA, 19 nt, Artificial Sequence
  Description of Artificial Sequence: Synthetic oligonucleotide
  Antisense strand to SEQ ID NO: 106826
uaguccagagcaagacccu

SEQ ID NO: 106828 - RNA, 19 nt, Artificial Sequence
  Description of Artificial Sequence: Synthetic oligonucleotide
  Sense strand starting at position 2911 of SEQ ID NO: 1350
gggucuugcucuggacuau

SEQ ID NO: 106829 - RNA, 19 nt, Artificial Sequence
  Description of Artificial Sequence: Synthetic oligonucleotide
  Antisense strand to SEQ ID NO: 106828
auaguccagagcaagaccc

SEQ ID NO: 106830 - RNA, 19 nt, Artificial Sequence
  Description of Artificial Sequence: Synthetic oligonucleotide
  Sense strand starting at position 2995 of SEQ ID NO: 1350
agguuaugaucccagagac

SEQ ID NO: 106831 - RNA, 19 nt, Artificial Sequence
  Description of Artificial Sequence: Synthetic oligonucleotide
  Antisense strand to SEQ ID NO: 106830
gucucugggaucauaaccu

SEQ ID NO: 106832 - RNA, 19 nt, Artificial Sequence
  Description of Artificial Sequence: Synthetic oligonucleotide
  Sense strand starting at position 3233 of SEQ ID NO: 1350
cugagaugcgagugacaaa

SEQ ID NO: 106833 - RNA, 19 nt, Artificial Sequence
  Description of Artificial Sequence: Synthetic oligonucleotide
  Antisense strand to SEQ ID NO: 106832
uuugucacucgcaucucag

SEQ ID NO: 106834 - RNA, 19 nt, Artificial Sequence
  Description of Artificial Sequence: Synthetic oligonucleotide
  Sense strand starting at position 3489 of SEQ ID NO: 1350
gggagcugcuuggauauuu

SEQ ID NO: 106835 - RNA, 19 nt, Artificial Sequence
  Description of Artificial Sequence: Synthetic oligonucleotide
  Antisense strand to SEQ ID NO: 106834
aaauauccaagcagcuccc

SEQ ID NO: 106836 - RNA, 19 nt, Artificial Sequence
  Description of Artificial Sequence: Synthetic oligonucleotide
  Sense strand starting at position 3660 of SEQ ID NO: 1350
gcgagucacuuccauccua

SEQ ID NO: 106837 - RNA, 19 nt, Artificial Sequence
  Description of Artificial Sequence: Synthetic oligonucleotide
  Antisense strand to SEQ ID NO: 106836
uaggauggaagugacucgc

SEQ ID NO: 106838 - RNA, 19 nt, Artificial Sequence
  Description of Artificial Sequence: Synthetic oligonucleotide
  Sense strand starting at position 3924 of SEQ ID NO: 1350
uugcgcuuucuggucaaca

SEQ ID NO: 106839 - RNA, 19 nt, Artificial Sequence
  Description of Artificial Sequence: Synthetic oligonucleotide
  Antisense strand to SEQ ID NO: 106838
uguugaccagaaagcgcaa

SEQ ID NO: 106840 - RNA, 19 nt, Artificial Sequence
  Description of Artificial Sequence: Synthetic oligonucleotide
  Sense strand starting at position 3926 of SEQ ID NO: 1350
gcgcuuucuggucaacagu

SEQ ID NO: 106841 - RNA, 19 nt, Artificial Sequence
  Description of Artificial Sequence: Synthetic oligonucleotide
  Antisense strand to SEQ ID NO: 106840
acuguugaccagaaagcgc

SEQ ID NO: 106842 - RNA, 19 nt, Artificial Sequence
  Description of Artificial Sequence: Synthetic oligonucleotide
  Sense strand starting at position 336 of SEQ ID NO: 1348
guggcuuacgucuguaaga

SEQ ID NO: 106843 - RNA, 19 nt, Artificial Sequence
  Description of Artificial Sequence: Synthetic oligonucleotide
  Antisense strand to SEQ ID NO: 106842
ucuuacagacguaagccac

SEQ ID NO: 106844 - RNA, 19 nt, Artificial Sequence
  Description of Artificial Sequence: Synthetic oligonucleotide
  Sense strand starting at position 337 of SEQ ID NO: 1348
uggcuuacgucuguaagau

SEQ ID NO: 106845 - RNA, 19 nt, Artificial Sequence
  Description of Artificial Sequence: Synthetic oligonucleotide
  Antisense strand to SEQ ID NO: 106844
aucuuacagacguaagcca

SEQ ID NO: 106846 - RNA, 19 nt, Artificial Sequence
  Description of Artificial Sequence: Synthetic oligonucleotide
  Sense strand starting at position 338 of SEQ ID NO: 1348
ggcuuacgucuguaagauc

SEQ ID NO: 106847 - RNA, 19 nt, Artificial Sequence
  Description of Artificial Sequence: Synthetic oligonucleotide
  Antisense strand to SEQ ID NO: 106846
gaucuuacagacguaagcc

SEQ ID NO: 106848 - RNA, 19 nt, Artificial Sequence
  Description of Artificial Sequence: Synthetic oligonucleotide
  Sense strand starting at position 346 of SEQ ID NO: 1348
ucuguaagaucagcacuuu

SEQ ID NO: 106849 - RNA, 19 nt, Artificial Sequence
  Description of Artificial Sequence: Synthetic oligonucleotide
  Antisense strand to SEQ ID NO: 106848
aaagugcugaucuuacaga

SEQ ID NO: 106850 - RNA, 19 nt, Artificial Sequence
  Description of Artificial Sequence: Synthetic oligonucleotide
  Sense strand starting at position 596 of SEQ ID NO: 1348
aggcccuguuucuaacaua

SEQ ID NO: 106851 - RNA, 19 nt, Artificial Sequence
  Description of Artificial Sequence: Synthetic oligonucleotide
  Antisense strand to SEQ ID NO: 106850
uauguuagaaacagggccu

SEQ ID NO: 106852 - RNA, 19 nt, Artificial Sequence
  Description of Artificial Sequence: Synthetic oligonucleotide
  Sense strand starting at position 684 of SEQ ID NO: 1348
ugcgguggcaccugugauu

SEQ ID NO: 106853 - RNA, 19 nt, Artificial Sequence
  Description of Artificial Sequence: Synthetic oligonucleotide
  Antisense strand to SEQ ID NO: 106852
aaucacaggugccaccgca

SEQ ID NO: 106854 - RNA, 19 nt, Artificial Sequence
  Description of Artificial Sequence: Synthetic oligonucleotide
  Sense strand starting at position 693 of SEQ ID NO: 1348
accugugauuccucaagua

SEQ ID NO: 106855 - RNA, 19 nt, Artificial Sequence
  Description of Artificial Sequence: Synthetic oligonucleotide
  Antisense strand to SEQ ID NO: 106854
uacuugaggaaucacaggu

SEQ ID NO: 106856 - RNA, 19 nt, Artificial Sequence
  Description of Artificial Sequence: Synthetic oligonucleotide
  Sense strand starting at position 714 of SEQ ID NO: 1348
uuggaaucagcgugcuaac

SEQ ID NO: 106857 - RNA, 19 nt, Artificial Sequence
  Description of Artificial Sequence: Synthetic oligonucleotide
  Antisense strand to SEQ ID NO: 106856
guuagcacgcugauuccaa

SEQ ID NO: 106858 - RNA, 19 nt, Artificial Sequence
  Description of Artificial Sequence: Synthetic oligonucleotide
  Sense strand starting at position 865 of SEQ ID NO: 1348
ggaauuaucuaacaaggug

SEQ ID NO: 106859 - RNA, 19 nt, Artificial Sequence
  Description of Artificial Sequence: Synthetic oligonucleotide
  Antisense strand to SEQ ID NO: 106858
caccuuguuagauaauucc

SEQ ID NO: 106860 - RNA, 19 nt, Artificial Sequence
  Description of Artificial Sequence: Synthetic oligonucleotide
  Sense strand starting at position 868 of SEQ ID NO: 1348
auuaucuaacaagguguua

SEQ ID NO: 106861 - RNA, 19 nt, Artificial Sequence
  Description of Artificial Sequence: Synthetic oligonucleotide
  Antisense strand to SEQ ID NO: 106860
uaacaccuuguuagauaau

SEQ ID NO: 106862 - RNA, 19 nt, Artificial Sequence
  Description of Artificial Sequence: Synthetic oligonucleotide
  Sense strand starting at position 873 of SEQ ID NO: 1348
cuaacaagguguuaaagua

SEQ ID NO: 106863 - RNA, 19 nt, Artificial Sequence
  Description of Artificial Sequence: Synthetic oligonucleotide
  Antisense strand to SEQ ID NO: 106862
uacuuuaacaccuuguuag

SEQ ID NO: 106864 - RNA, 19 nt, Artificial Sequence
  Description of Artificial Sequence: Synthetic oligonucleotide
  Sense strand starting at position 881 of SEQ ID NO: 1348
guguuaaaguaacuagcuu

SEQ ID NO: 106865 - RNA, 19 nt, Artificial Sequence
  Description of Artificial Sequence: Synthetic oligonucleotide
  Antisense strand to SEQ ID NO: 106864
aagcuaguuacuuuaacac

SEQ ID NO: 106866 - RNA, 19 nt, Artificial Sequence
  Description of Artificial Sequence: Synthetic oligonucleotide
  Sense strand starting at position 889 of SEQ ID NO: 1348
guaacuagcuucuuagaca

SEQ ID NO: 106867 - RNA, 19 nt, Artificial Sequence
  Description of Artificial Sequence: Synthetic oligonucleotide
  Antisense strand to SEQ ID NO: 106866
ugucuaagaagcuaguuac

SEQ ID NO: 106868 - RNA, 19 nt, Artificial Sequence
  Description of Artificial Sequence: Synthetic oligonucleotide
  Sense strand starting at position 892 of SEQ ID NO: 1348
acuagcuucuuagacaaga

SEQ ID NO: 106869 - RNA, 19 nt, Artificial Sequence
  Description of Artificial Sequence: Synthetic oligonucleotide
  Antisense strand to SEQ ID NO: 106868
ucuugucuaagaagcuagu

SEQ ID NO: 106870 - RNA, 19 nt, Artificial Sequence
  Description of Artificial Sequence: Synthetic oligonucleotide
  Sense strand starting at position 961 of SEQ ID NO: 1348
gccaacuaaggcugucaga

SEQ ID NO: 106871 - RNA, 19 nt, Artificial Sequence
  Description of Artificial Sequence: Synthetic oligonucleotide
  Antisense strand to SEQ ID NO: 106870
ucugacagccuuaguuggc

SEQ ID NO: 106872 - RNA, 19 nt, Artificial Sequence
  Description of Artificial Sequence: Synthetic oligonucleotide
  Sense strand starting at position 1030 of SEQ ID NO: 1348
agccaagaauaaugaacuu

SEQ ID NO: 106873 - RNA, 19 nt, Artificial Sequence
  Description of Artificial Sequence: Synthetic oligonucleotide
  Antisense strand to SEQ ID NO: 106872
aaguucauuauucuuggcu

SEQ ID NO: 106874 - RNA, 19 nt, Artificial Sequence
  Description of Artificial Sequence: Synthetic oligonucleotide
  Sense strand starting at position 1091 of SEQ ID NO: 1348
auaacuuguuacucggaau

SEQ ID NO: 106875 - RNA, 19 nt, Artificial Sequence
  Description of Artificial Sequence: Synthetic oligonucleotide
  Antisense strand to SEQ ID NO: 106874
auuccgaguaacaaguuau

SEQ ID NO: 106876 - RNA, 19 nt, Artificial Sequence
  Description of Artificial Sequence: Synthetic oligonucleotide
  Sense strand starting at position 1094 of SEQ ID NO: 1348
acuuguuacucggaaucga

SEQ ID NO: 106877 - RNA, 19 nt, Artificial Sequence
  Description of Artificial Sequence: Synthetic oligonucleotide
  Antisense strand to SEQ ID NO: 106876
ucgauuccgaguaacaagu

SEQ ID NO: 106878 - RNA, 19 nt, Artificial Sequence
  Description of Artificial Sequence: Synthetic oligonucleotide
  Sense strand starting at position 1263 of SEQ ID NO: 1348
ggugcugacaucugaccua

SEQ ID NO: 106879 - RNA, 19 nt, Artificial Sequence
  Description of Artificial Sequence: Synthetic oligonucleotide
  Antisense strand to SEQ ID NO: 106878
uaggucagaugucagcacc

SEQ ID NO: 106880 - RNA, 19 nt, Artificial Sequence
  Description of Artificial Sequence: Synthetic oligonucleotide
  Sense strand starting at position 1310 of SEQ ID NO: 1348
accauagacuauuggaauu

SEQ ID NO: 106881 - RNA, 19 nt, Artificial Sequence
  Description of Artificial Sequence: Synthetic oligonucleotide
  Antisense strand to SEQ ID NO: 106880
aauuccaauagucuauggu

SEQ ID NO: 106882 - RNA, 19 nt, Artificial Sequence
  Description of Artificial Sequence: Synthetic oligonucleotide
  Sense strand starting at position 1334 of SEQ ID NO: 1348
gcaaguacugggcacuaaa

SEQ ID NO: 106883 - RNA, 19 nt, Artificial Sequence
  Description of Artificial Sequence: Synthetic oligonucleotide
  Antisense strand to SEQ ID NO: 106882
uuuagugcccaguacuugc

SEQ ID NO: 106884 - RNA, 19 nt, Artificial Sequence
  Description of Artificial Sequence: Synthetic oligonucleotide
  Sense strand starting at position 1344 of SEQ ID NO: 1348
ggcacuaaaucagagaugu

SEQ ID NO: 106885 - RNA, 19 nt, Artificial Sequence
  Description of Artificial Sequence: Synthetic oligonucleotide
  Antisense strand to SEQ ID NO: 106884
acaucucugauuuagugcc

SEQ ID NO: 106886 - RNA, 19 nt, Artificial Sequence
  Description of Artificial Sequence: Synthetic oligonucleotide
  Sense strand starting at position 1366 of SEQ ID NO: 1348
uuuagagaauuccaugcca

SEQ ID NO: 106887 - RNA, 19 nt, Artificial Sequence
  Description of Artificial Sequence: Synthetic oligonucleotide
  Antisense strand to SEQ ID NO: 106886
uggcauggaauucucuaaa

SEQ ID NO: 106888 - RNA, 19 nt, Artificial Sequence
  Description of Artificial Sequence: Synthetic oligonucleotide
  Sense strand starting at position 1411 of SEQ ID NO: 1348
auacuuucccacuagguuu

SEQ ID NO: 106889 - RNA, 19 nt, Artificial Sequence
  Description of Artificial Sequence: Synthetic oligonucleotide
  Antisense strand to SEQ ID NO: 106888
aaaccuagugggaaaguau

SEQ ID NO: 106890 - RNA, 19 nt, Artificial Sequence
  Description of Artificial Sequence: Synthetic oligonucleotide
  Sense strand starting at position 2816 of SEQ ID NO: 1348
cuuuguaguguuuguugga

SEQ ID NO: 106891 - RNA, 19 nt, Artificial Sequence
  Description of Artificial Sequence: Synthetic oligonucleotide
  Antisense strand to SEQ ID NO: 106890
uccaacaaacacuacaaag

SEQ ID NO: 106892 - RNA, 19 nt, Artificial Sequence
  Description of Artificial Sequence: Synthetic oligonucleotide
  Sense strand starting at position 2817 of SEQ ID NO: 1348
uuuguaguguuuguuggaa

SEQ ID NO: 106893 - RNA, 19 nt, Artificial Sequence
  Description of Artificial Sequence: Synthetic oligonucleotide
  Antisense strand to SEQ ID NO: 106892
uuccaacaaacacuacaaa

SEQ ID NO: 106894 - RNA, 19 nt, Artificial Sequence
  Description of Artificial Sequence: Synthetic oligonucleotide
  Sense strand starting at position 2942 of SEQ ID NO: 1348
gagucacugucagguaaac

SEQ ID NO: 106895 - RNA, 19 nt, Artificial Sequence
  Description of Artificial Sequence: Synthetic oligonucleotide
  Antisense strand to SEQ ID NO: 106894
guuuaccugacagugacuc

SEQ ID NO: 106896 - RNA, 19 nt, Artificial Sequence
  Description of Artificial Sequence: Synthetic oligonucleotide
  Sense strand starting at position 3355 of SEQ ID NO: 1348
ucuauacuuucugugugau

SEQ ID NO: 106897 - RNA, 19 nt, Artificial Sequence
  Description of Artificial Sequence: Synthetic oligonucleotide
  Antisense strand to SEQ ID NO: 106896
aucacacagaaaguauaga

SEQ ID NO: 106898 - RNA, 19 nt, Artificial Sequence
  Description of Artificial Sequence: Synthetic oligonucleotide
  Sense strand starting at position 3356 of SEQ ID NO: 1348
cuauacuuucugugugauc

SEQ ID NO: 106899 - RNA, 19 nt, Artificial Sequence
  Description of Artificial Sequence: Synthetic oligonucleotide
  Antisense strand to SEQ ID NO: 106898
gaucacacagaaaguauag

SEQ ID NO: 106900 - RNA, 19 nt, Artificial Sequence
  Description of Artificial Sequence: Synthetic oligonucleotide
  Sense strand starting at position 3358 of SEQ ID NO: 1348
auacuuucugugugaucac

SEQ ID NO: 106901 - RNA, 19 nt, Artificial Sequence
  Description of Artificial Sequence: Synthetic oligonucleotide
  Antisense strand to SEQ ID NO: 106900
gugaucacacagaaaguau

SEQ ID NO: 106902 - RNA, 19 nt, Artificial Sequence
  Description of Artificial Sequence: Synthetic oligonucleotide
  Sense strand starting at position 3570 of SEQ ID NO: 1348
aagcaaggaucaugagaac

SEQ ID NO: 106903 - RNA, 19 nt, Artificial Sequence
  Description of Artificial Sequence: Synthetic oligonucleotide
  Antisense strand to SEQ ID NO: 106902
guucucaugauccuugcuu

SEQ ID NO: 106904 - RNA, 19 nt, Artificial Sequence
  Description of Artificial Sequence: Synthetic oligonucleotide
  Sense strand starting at position 3573 of SEQ ID NO: 1348
caaggaucaugagaacuug

SEQ ID NO: 106905 - RNA, 19 nt, Artificial Sequence
  Description of Artificial Sequence: Synthetic oligonucleotide
  Antisense strand to SEQ ID NO: 106904
caaguucucaugauccuug

SEQ ID NO: 106906 - RNA, 19 nt, Artificial Sequence
  Description of Artificial Sequence: Synthetic oligonucleotide
  Sense strand starting at position 3743 of SEQ ID NO: 1348
auaauaaugcgugagcuga

SEQ ID NO: 106907 - RNA, 19 nt, Artificial Sequence
  Description of Artificial Sequence: Synthetic oligonucleotide
  Antisense strand to SEQ ID NO: 106906
ucagcucacgcauuauuau

SEQ ID NO: 106908 - RNA, 19 nt, Artificial Sequence
  Description of Artificial Sequence: Synthetic oligonucleotide
  Sense strand starting at position 3747 of SEQ ID NO: 1348
uaaugcgugagcugaguuu

SEQ ID NO: 106909 - RNA, 19 nt, Artificial Sequence
  Description of Artificial Sequence: Synthetic oligonucleotide
  Antisense strand to SEQ ID NO: 106908
aaacucagcucacgcauua

SEQ ID NO: 106910 - RNA, 19 nt, Artificial Sequence
  Description of Artificial Sequence: Synthetic oligonucleotide
  Sense strand starting at position 3767 of SEQ ID NO: 1348
ugcauaugaucauuagcau

SEQ ID NO: 106911 - RNA, 19 nt, Artificial Sequence
  Description of Artificial Sequence: Synthetic oligonucleotide
  Antisense strand to SEQ ID NO: 106910
augcuaaugaucauaugca

SEQ ID NO: 106912 - RNA, 19 nt, Artificial Sequence
  Description of Artificial Sequence: Synthetic oligonucleotide
  Sense strand starting at position 3768 of SEQ ID NO: 1348
gcauaugaucauuagcaua

SEQ ID NO: 106913 - RNA, 19 nt, Artificial Sequence
  Description of Artificial Sequence: Synthetic oligonucleotide
  Antisense strand to SEQ ID NO: 106912
uaugcuaaugaucauaugc

SEQ ID NO: 106914 - RNA, 19 nt, Artificial Sequence
  Description of Artificial Sequence: Synthetic oligonucleotide
  Sense strand starting at position 3782 of SEQ ID NO: 1348
gcauaauaaugcuugaucu

SEQ ID NO: 106915 - RNA, 19 nt, Artificial Sequence
  Description of Artificial Sequence: Synthetic oligonucleotide
  Antisense strand to SEQ ID NO: 106914
agaucaagcauuauuaugc

SEQ ID NO: 106916 - RNA, 19 nt, Artificial Sequence
  Description of Artificial Sequence: Synthetic oligonucleotide
  Sense strand starting at position 3792 of SEQ ID NO: 1348
gcuugaucuagauggcgca

SEQ ID NO: 106917 - RNA, 19 nt, Artificial Sequence
  Description of Artificial Sequence: Synthetic oligonucleotide
  Antisense strand to SEQ ID NO: 106916
ugcgccaucuagaucaagc

SEQ ID NO: 106918 - RNA, 19 nt, Artificial Sequence
  Description of Artificial Sequence: Synthetic oligonucleotide
  Sense strand starting at position 3838 of SEQ ID NO: 1348
ucaguagaaucuucuagag

SEQ ID NO: 106919 - RNA, 19 nt, Artificial Sequence
  Description of Artificial Sequence: Synthetic oligonucleotide
  Antisense strand to SEQ ID NO: 106918
cucuagaagauucuacuga

SEQ ID NO: 106920 - RNA, 19 nt, Artificial Sequence
  Description of Artificial Sequence: Synthetic oligonucleotide
  Sense strand starting at position 3840 of SEQ ID NO: 1348
aguagaaucuucuagagug

SEQ ID NO: 106921 - RNA, 19 nt, Artificial Sequence
  Description of Artificial Sequence: Synthetic oligonucleotide
  Antisense strand to SEQ ID NO: 106920
cacucuagaagauucuacu

SEQ ID NO: 106922 - RNA, 19 nt, Artificial Sequence
  Description of Artificial Sequence: Synthetic oligonucleotide
  Sense strand starting at position 3978 of SEQ ID NO: 1352
guacaagacuuuguacuag

SEQ ID NO: 106923 - RNA, 19 nt, Artificial Sequence
  Description of Artificial Sequence: Synthetic oligonucleotide
  Antisense strand to SEQ ID NO: 106922
cuaguacaaagucuuguac

SEQ ID NO: 106924 - RNA, 19 nt, Artificial Sequence
  Description of Artificial Sequence: Synthetic oligonucleotide
  Sense strand starting at position 3977 of SEQ ID NO: 1352
gguacaagacuuuguacua

SEQ ID NO: 106925 - RNA, 19 nt, Artificial Sequence
  Description of Artificial Sequence: Synthetic oligonucleotide
  Antisense strand to SEQ ID NO: 106924
uaguacaaagucuuguacc

SEQ ID NO: 106926 - RNA, 19 nt, Artificial Sequence
  Description of Artificial Sequence: Synthetic oligonucleotide
  Sense strand starting at position 3895 of SEQ ID NO: 1352
agggcuagggccugagaaa

SEQ ID NO: 106927 - RNA, 19 nt, Artificial Sequence
  Description of Artificial Sequence: Synthetic oligonucleotide
  Antisense strand to SEQ ID NO: 106926
uuucucaggcccuagcccu

SEQ ID NO: 106928 - RNA, 19 nt, Artificial Sequence
  Description of Artificial Sequence: Synthetic oligonucleotide
  Sense strand starting at position 3783 of SEQ ID NO: 1352
auuagcacuguguagaauu

SEQ ID NO: 106929 - RNA, 19 nt, Artificial Sequence
  Description of Artificial Sequence: Synthetic oligonucleotide
  Antisense strand to SEQ ID NO: 106928
aauucuacacagugcuaau

SEQ ID NO: 106930 - RNA, 19 nt, Artificial Sequence
  Description of Artificial Sequence: Synthetic oligonucleotide
  Sense strand starting at position 3781 of SEQ ID NO: 1352
uaauuagcacuguguagaa

SEQ ID NO: 106931 - RNA, 19 nt, Artificial Sequence
  Description of Artificial Sequence: Synthetic oligonucleotide
  Antisense strand to SEQ ID NO: 106930
uucuacacagugcuaauua

SEQ ID NO: 106932 - RNA, 19 nt, Artificial Sequence
  Description of Artificial Sequence: Synthetic oligonucleotide
  Sense strand starting at position 3767 of SEQ ID NO: 1352
gugagaauuacagguaauu

SEQ ID NO: 106933 - RNA, 19 nt, Artificial Sequence
  Description of Artificial Sequence: Synthetic oligonucleotide
  Antisense strand to SEQ ID NO: 106932
aauuaccuguaauucucac

SEQ ID NO: 106934 - RNA, 19 nt, Artificial Sequence
  Description of Artificial Sequence: Synthetic oligonucleotide
  Sense strand starting at position 3754 of SEQ ID NO: 1352
gcuuaaggacauugugaga

SEQ ID NO: 106935 - RNA, 19 nt, Artificial Sequence
  Description of Artificial Sequence: Synthetic oligonucleotide
  Antisense strand to SEQ ID NO: 106934
ucucacaauguccuuaagc

SEQ ID NO: 106936 - RNA, 19 nt, Artificial Sequence
  Description of Artificial Sequence: Synthetic oligonucleotide
  Sense strand starting at position 3712 of SEQ ID NO: 1352
gauuaagguuaaguguaaa

SEQ ID NO: 106937 - RNA, 19 nt, Artificial Sequence
  Description of Artificial Sequence: Synthetic oligonucleotide
  Antisense strand to SEQ ID NO: 106936
uuuacacuuaaccuuaauc

SEQ ID NO: 106938 - RNA, 19 nt, Artificial Sequence
  Description of Artificial Sequence: Synthetic oligonucleotide
  Sense strand starting at position 3709 of SEQ ID NO: 1352
ugggauuaagguuaagugu

SEQ ID NO: 106939 - RNA, 19 nt, Artificial Sequence
  Description of Artificial Sequence: Synthetic oligonucleotide
  Antisense strand to SEQ ID NO: 106938
acacuuaaccuuaauccca

SEQ ID NO: 106940 - RNA, 19 nt, Artificial Sequence
  Description of Artificial Sequence: Synthetic oligonucleotide
  Sense strand starting at position 3597 of SEQ ID NO: 1352
uagagagcuggacgugaaa

SEQ ID NO: 106941 - RNA, 19 nt, Artificial Sequence
  Description of Artificial Sequence: Synthetic oligonucleotide
  Antisense strand to SEQ ID NO: 106940
uuucacguccagcucucua

SEQ ID NO: 106942 - RNA, 19 nt, Artificial Sequence
  Description of Artificial Sequence: Synthetic oligonucleotide
  Sense strand starting at position 3570 of SEQ ID NO: 1352
gcucgaagagguugaaauc

SEQ ID NO: 106943 - RNA, 19 nt, Artificial Sequence
  Description of Artificial Sequence: Synthetic oligonucleotide
  Antisense strand to SEQ ID NO: 106942
gauuucaaccucuucgagc

SEQ ID NO: 106944 - RNA, 19 nt, Artificial Sequence
  Description of Artificial Sequence: Synthetic oligonucleotide
  Sense strand starting at position 3439 of SEQ ID NO: 1352
ccuggaguaucauccauuc

SEQ ID NO: 106945 - RNA, 19 nt, Artificial Sequence
  Description of Artificial Sequence: Synthetic oligonucleotide
  Antisense strand to SEQ ID NO: 106944
gaauggaugauacuccagg

SEQ ID NO: 106946 - RNA, 19 nt, Artificial Sequence
  Description of Artificial Sequence: Synthetic oligonucleotide
  Sense strand starting at position 3383 of SEQ ID NO: 1352
cugcaaauggcugagugaa

SEQ ID NO: 106947 - RNA, 19 nt, Artificial Sequence
  Description of Artificial Sequence: Synthetic oligonucleotide
  Antisense strand to SEQ ID NO: 106946
uucacucagccauuugcag

SEQ ID NO: 106948 - RNA, 19 nt, Artificial Sequence
  Description of Artificial Sequence: Synthetic oligonucleotide
  Sense strand starting at position 3371 of SEQ ID NO: 1352
gugccucauuuccugcaaa

SEQ ID NO: 106949 - RNA, 19 nt, Artificial Sequence
  Description of Artificial Sequence: Synthetic oligonucleotide
  Antisense strand to SEQ ID NO: 106948
uuugcaggaaaugaggcac

SEQ ID NO: 106950 - RNA, 19 nt, Artificial Sequence
  Description of Artificial Sequence: Synthetic oligonucleotide
  Sense strand starting at position 2657 of SEQ ID NO: 1352
ugauuugcugugugacuac

SEQ ID NO: 106951 - RNA, 19 nt, Artificial Sequence
  Description of Artificial Sequence: Synthetic oligonucleotide
  Antisense strand to SEQ ID NO: 106950
guagucacacagcaaauca

SEQ ID NO: 106952 - RNA, 19 nt, Artificial Sequence
  Description of Artificial Sequence: Synthetic oligonucleotide
  Sense strand starting at position 2656 of SEQ ID NO: 1352
augauuugcugugugacua

SEQ ID NO: 106953 - RNA, 19 nt, Artificial Sequence
  Description of Artificial Sequence: Synthetic oligonucleotide
  Antisense strand to SEQ ID NO: 106952
uagucacacagcaaaucau

SEQ ID NO: 106954 - RNA, 19 nt, Artificial Sequence
  Description of Artificial Sequence: Synthetic oligonucleotide
  Sense strand starting at position 2655 of SEQ ID NO: 1352
uaugauuugcugugugacu

SEQ ID NO: 106955 - RNA, 19 nt, Artificial Sequence
  Description of Artificial Sequence: Synthetic oligonucleotide
  Antisense strand to SEQ ID NO: 106954
agucacacagcaaaucaua

SEQ ID NO: 106956 - RNA, 19 nt, Artificial Sequence
  Description of Artificial Sequence: Synthetic oligonucleotide
  Sense strand starting at position 2416 of SEQ ID NO: 1352
gggugagaucuaggccuca

SEQ ID NO: 106957 - RNA, 19 nt, Artificial Sequence
  Description of Artificial Sequence: Synthetic oligonucleotide
  Antisense strand to SEQ ID NO: 106956
ugaggccuagaucucaccc

SEQ ID NO: 106958 - RNA, 19 nt, Artificial Sequence
  Description of Artificial Sequence: Synthetic oligonucleotide
  Sense strand starting at position 2407 of SEQ ID NO: 1352
aacugaucugggugagauc

SEQ ID NO: 106959 - RNA, 19 nt, Artificial Sequence
  Description of Artificial Sequence: Synthetic oligonucleotide
  Antisense strand to SEQ ID NO: 106958
gaucucacccagaucaguu

SEQ ID NO: 106960 - RNA, 19 nt, Artificial Sequence
  Description of Artificial Sequence: Synthetic oligonucleotide
  Sense strand starting at position 2403 of SEQ ID NO: 1352
cuagaacugaucuggguga

SEQ ID NO: 106961 - RNA, 19 nt, Artificial Sequence
  Description of Artificial Sequence: Synthetic oligonucleotide
  Antisense strand to SEQ ID NO: 106960
ucacccagaucaguucuag

SEQ ID NO: 106962 - RNA, 19 nt, Artificial Sequence
  Description of Artificial Sequence: Synthetic oligonucleotide
  Sense strand starting at position 2174 of SEQ ID NO: 1352
cagcaagucgcauaagaag

SEQ ID NO: 106963 - RNA, 19 nt, Artificial Sequence
  Description of Artificial Sequence: Synthetic oligonucleotide
  Antisense strand to SEQ ID NO: 106962
cuucuuaugcgacuugcug

SEQ ID NO: 106964 - RNA, 19 nt, Artificial Sequence
  Description of Artificial Sequence: Synthetic oligonucleotide
  Sense strand starting at position 2136 of SEQ ID NO: 1352
gcccgacuucuccaauaaa

SEQ ID NO: 106965 - RNA, 19 nt, Artificial Sequence
  Description of Artificial Sequence: Synthetic oligonucleotide
  Antisense strand to SEQ ID NO: 106964
uuuauuggagaagucgggc

SEQ ID NO: 106966 - RNA, 19 nt, Artificial Sequence
  Description of Artificial Sequence: Synthetic oligonucleotide
  Sense strand starting at position 1779 of SEQ ID NO: 1352
cuuacuugucggcagaaac

SEQ ID NO: 106967 - RNA, 19 nt, Artificial Sequence
  Description of Artificial Sequence: Synthetic oligonucleotide
  Antisense strand to SEQ ID NO: 106966
guuucugccgacaaguaag

SEQ ID NO: 106968 - RNA, 19 nt, Artificial Sequence
  Description of Artificial Sequence: Synthetic oligonucleotide
  Sense strand starting at position 991 of SEQ ID NO: 1352
gcuuuacguccgguaaugu

SEQ ID NO: 106969 - RNA, 19 nt, Artificial Sequence
  Description of Artificial Sequence: Synthetic oligonucleotide
  Antisense strand to SEQ ID NO: 106968
acauuaccggacguaaagc

SEQ ID NO: 106970 - RNA, 19 nt, Artificial Sequence
  Description of Artificial Sequence: Synthetic oligonucleotide
  Sense strand starting at position 988 of SEQ ID NO: 1352
gacgcuuuacguccgguaa

SEQ ID NO: 106971 - RNA, 19 nt, Artificial Sequence
  Description of Artificial Sequence: Synthetic oligonucleotide
  Antisense strand to SEQ ID NO: 106970
uuaccggacguaaagcguc

SEQ ID NO: 106972 - RNA, 19 nt, Artificial Sequence
  Description of Artificial Sequence: Synthetic oligonucleotide
  Sense strand starting at position 947 of SEQ ID NO: 1352
ccaaacagugcuggugaga

SEQ ID NO: 106973 - RNA, 19 nt, Artificial Sequence
  Description of Artificial Sequence: Synthetic oligonucleotide
  Antisense strand to SEQ ID NO: 106972
ucucaccagcacuguuugg

SEQ ID NO: 106974 - RNA, 19 nt, Artificial Sequence
  Description of Artificial Sequence: Synthetic oligonucleotide
  Sense strand starting at position 859 of SEQ ID NO: 1352
ggcacugugccgcuuucaa

SEQ ID NO: 106975 - RNA, 19 nt, Artificial Sequence
  Description of Artificial Sequence: Synthetic oligonucleotide
  Antisense strand to SEQ ID NO: 106974
uugaaagcggcacagugcc

SEQ ID NO: 106976 - RNA, 19 nt, Artificial Sequence
  Description of Artificial Sequence: Synthetic oligonucleotide
  Sense strand starting at position 700 of SEQ ID NO: 1352
cucuaaagcgcacaagauu

SEQ ID NO: 106977 - RNA, 19 nt, Artificial Sequence
  Description of Artificial Sequence: Synthetic oligonucleotide
  Antisense strand to SEQ ID NO: 106976
aaucuugugcgcuuuagag

SEQ ID NO: 106978 - RNA, 19 nt, Artificial Sequence
  Description of Artificial Sequence: Synthetic oligonucleotide
  Sense strand starting at position 628 of SEQ ID NO: 1352
aguguaagccuauagaaua

SEQ ID NO: 106979 - RNA, 19 nt, Artificial Sequence
  Description of Artificial Sequence: Synthetic oligonucleotide
  Antisense strand to SEQ ID NO: 106978
uauucuauaggcuuacacu

SEQ ID NO: 106980 - RNA, 19 nt, Artificial Sequence
  Description of Artificial Sequence: Synthetic oligonucleotide
  Sense strand starting at position 623 of SEQ ID NO: 1352
gacagaguguaagccuaua

SEQ ID NO: 106981 - RNA, 19 nt, Artificial Sequence
  Description of Artificial Sequence: Synthetic oligonucleotide
  Antisense strand to SEQ ID NO: 106980
uauaggcuuacacucuguc

SEQ ID NO: 106982 - RNA, 19 nt, Artificial Sequence
  Description of Artificial Sequence: Synthetic oligonucleotide
  Sense strand starting at position 572 of SEQ ID NO: 1352
agcagagauauacguaaau

SEQ ID NO: 106983 - RNA, 19 nt, Artificial Sequence
  Description of Artificial Sequence: Synthetic oligonucleotide
  Antisense strand to SEQ ID NO: 106982
auuuacguauaucucugcu

SEQ ID NO: 106984 - RNA, 19 nt, Artificial Sequence
  Description of Artificial Sequence: Synthetic oligonucleotide
  Sense strand starting at position 566 of SEQ ID NO: 1352
gugguaagcagagauauac

SEQ ID NO: 106985 - RNA, 19 nt, Artificial Sequence
  Description of Artificial Sequence: Synthetic oligonucleotide
  Antisense strand to SEQ ID NO: 106984
guauaucucugcuuaccac

SEQ ID NO: 106986 - RNA, 19 nt, Artificial Sequence
  Description of Artificial Sequence: Synthetic oligonucleotide
  Sense strand starting at position 510 of SEQ ID NO: 1352
aaugauucucagggugacu

SEQ ID NO: 106987 - RNA, 19 nt, Artificial Sequence
  Description of Artificial Sequence: Synthetic oligonucleotide
  Antisense strand to SEQ ID NO: 106986
agucacccugagaaucauu

SEQ ID NO: 106988 - RNA, 19 nt, Artificial Sequence
  Description of Artificial Sequence: Synthetic oligonucleotide
  Sense strand starting at position 506 of SEQ ID NO: 1352
cccaaaugauucucagggu

SEQ ID NO: 106989 - RNA, 19 nt, Artificial Sequence
  Description of Artificial Sequence: Synthetic oligonucleotide
  Antisense strand to SEQ ID NO: 106988
acccugagaaucauuuggg

SEQ ID NO: 106990 - RNA, 19 nt, Artificial Sequence
  Description of Artificial Sequence: Synthetic oligonucleotide
  Sense strand starting at position 495 of SEQ ID NO: 1352
ucccaugaguucccaaaug

SEQ ID NO: 106991 - RNA, 19 nt, Artificial Sequence
  Description of Artificial Sequence: Synthetic oligonucleotide
  Antisense strand to SEQ ID NO: 106990
cauuugggaacucauggga

SEQ ID NO: 106992 - RNA, 19 nt, Artificial Sequence
  Description of Artificial Sequence: Synthetic oligonucleotide
  Sense strand starting at position 488 of SEQ ID NO: 1352
uuguauuucccaugaguuc

SEQ ID NO: 106993 - RNA, 19 nt, Artificial Sequence
  Description of Artificial Sequence: Synthetic oligonucleotide
  Antisense strand to SEQ ID NO: 106992
gaacucaugggaaauacaa

SEQ ID NO: 106994 - RNA, 19 nt, Artificial Sequence
  Description of Artificial Sequence: Synthetic oligonucleotide
  Sense strand starting at position 355 of SEQ ID NO: 1352
uagagcugucuaggaaaca

SEQ ID NO: 106995 - RNA, 19 nt, Artificial Sequence
  Description of Artificial Sequence: Synthetic oligonucleotide
  Antisense strand to SEQ ID NO: 106994
uguuuccuagacagcucua

SEQ ID NO: 106996 - RNA, 19 nt, Artificial Sequence
  Description of Artificial Sequence: Synthetic oligonucleotide
  Sense strand starting at position 353 of SEQ ID NO: 1352
gcuagagcugucuaggaaa

SEQ ID NO: 106997 - RNA, 19 nt, Artificial Sequence
  Description of Artificial Sequence: Synthetic oligonucleotide
  Antisense strand to SEQ ID NO: 106996
uuuccuagacagcucuagc

SEQ ID NO: 106998 - RNA, 19 nt, Artificial Sequence
  Description of Artificial Sequence: Synthetic oligonucleotide
  Sense strand starting at position 340 of SEQ ID NO: 1352
ugaaauacugacugcuaga

SEQ ID NO: 106999 - RNA, 19 nt, Artificial Sequence
  Description of Artificial Sequence: Synthetic oligonucleotide
  Antisense strand to SEQ ID NO: 106998
ucuagcagucaguauuuca

SEQ ID NO: 107000 - RNA, 19 nt, Artificial Sequence
  Description of Artificial Sequence: Synthetic oligonucleotide
  Sense strand starting at position 328 of SEQ ID NO: 1352
cacagcugucagugaaaua

SEQ ID NO: 107001 - RNA, 19 nt, Artificial Sequence
  Description of Artificial Sequence: Synthetic oligonucleotide
  Antisense strand to SEQ ID NO: 107000
uauuucacugacagcugug

SEQ ID NO: 107002 - RNA, 19 nt, Artificial Sequence
  Description of Artificial Sequence: Synthetic oligonucleotide
  Sense strand starting at position 3768 of SEQ ID NO: 1353
ggaugaugucccuggccaa

SEQ ID NO: 107003 - RNA, 19 nt, Artificial Sequence
  Description of Artificial Sequence: Synthetic oligonucleotide
  Antisense strand to SEQ ID NO: 107002
uuggccagggacaucaucc

SEQ ID NO: 107004 - RNA, 19 nt, Artificial Sequence
  Description of Artificial Sequence: Synthetic oligonucleotide
  Sense strand starting at position 3582 of SEQ ID NO: 1353
gcgccaaucccucagacuu

SEQ ID NO: 107005 - RNA, 19 nt, Artificial Sequence
  Description of Artificial Sequence: Synthetic oligonucleotide
  Antisense strand to SEQ ID NO: 107004
aagucugagggauuggcgc

SEQ ID NO: 107006 - RNA, 19 nt, Artificial Sequence
  Description of Artificial Sequence: Synthetic oligonucleotide
  Sense strand starting at position 3559 of SEQ ID NO: 1353
aguaaagagcugcagugau

SEQ ID NO: 107007 - RNA, 19 nt, Artificial Sequence
  Description of Artificial Sequence: Synthetic oligonucleotide
  Antisense strand to SEQ ID NO: 107006
aucacugcagcucuuuacu

SEQ ID NO: 107008 - RNA, 19 nt, Artificial Sequence
  Description of Artificial Sequence: Synthetic oligonucleotide
  Sense strand starting at position 3533 of SEQ ID NO: 1353
ccaaauaugcuuugagauc

SEQ ID NO: 107009 - RNA, 19 nt, Artificial Sequence
  Description of Artificial Sequence: Synthetic oligonucleotide
  Antisense strand to SEQ ID NO: 107008
gaucucaaagcauauuugg

SEQ ID NO: 107010 - RNA, 19 nt, Artificial Sequence
  Description of Artificial Sequence: Synthetic oligonucleotide
  Sense strand starting at position 3531 of SEQ ID NO: 1353
uuccaaauaugcuuugaga

SEQ ID NO: 107011 - RNA, 19 nt, Artificial Sequence
  Description of Artificial Sequence: Synthetic oligonucleotide
  Antisense strand to SEQ ID NO: 107010
ucucaaagcauauuuggaa

SEQ ID NO: 107012 - RNA, 19 nt, Artificial Sequence
  Description of Artificial Sequence: Synthetic oligonucleotide
  Sense strand starting at position 3513 of SEQ ID NO: 1353
gcacauuguggccaaguuu

SEQ ID NO: 107013 - RNA, 19 nt, Artificial Sequence
  Description of Artificial Sequence: Synthetic oligonucleotide
  Antisense strand to SEQ ID NO: 107012
aaacuuggccacaaugugc

SEQ ID NO: 107014 - RNA, 19 nt, Artificial Sequence
  Description of Artificial Sequence: Synthetic oligonucleotide
  Sense strand starting at position 3487 of SEQ ID NO: 1353
gaggaagggucuuuguuuc

SEQ ID NO: 107015 - RNA, 19 nt, Artificial Sequence
  Description of Artificial Sequence: Synthetic oligonucleotide
  Antisense strand to SEQ ID NO: 107014
gaaacaaagacccuuccuc

SEQ ID NO: 107016 - RNA, 19 nt, Artificial Sequence
  Description of Artificial Sequence: Synthetic oligonucleotide
  Sense strand starting at position 3474 of SEQ ID NO: 1353
acaguuuaaguuggaggaa

SEQ ID NO: 107017 - RNA, 19 nt, Artificial Sequence
  Description of Artificial Sequence: Synthetic oligonucleotide
  Antisense strand to SEQ ID NO: 107016
uuccuccaacuuaaacugu

SEQ ID NO: 107018 - RNA, 19 nt, Artificial Sequence
  Description of Artificial Sequence: Synthetic oligonucleotide
  Sense strand starting at position 3450 of SEQ ID NO: 1353
ggaccucuguuucuggaga

SEQ ID NO: 107019 - RNA, 19 nt, Artificial Sequence
  Description of Artificial Sequence: Synthetic oligonucleotide
  Antisense strand to SEQ ID NO: 107018
ucuccagaaacagaggucc

SEQ ID NO: 107020 - RNA, 19 nt, Artificial Sequence
  Description of Artificial Sequence: Synthetic oligonucleotide
  Sense strand starting at position 3396 of SEQ ID NO: 1353
gcagcucuagagugaugaa

SEQ ID NO: 107021 - RNA, 19 nt, Artificial Sequence
  Description of Artificial Sequence: Synthetic oligonucleotide
  Antisense strand to SEQ ID NO: 107020
uucaucacucuagagcugc

SEQ ID NO: 107022 - RNA, 19 nt, Artificial Sequence
  Description of Artificial Sequence: Synthetic oligonucleotide
  Sense strand starting at position 3320 of SEQ ID NO: 1353
gucaaugcacuuuggguaa

SEQ ID NO: 107023 - RNA, 19 nt, Artificial Sequence
  Description of Artificial Sequence: Synthetic oligonucleotide
  Antisense strand to SEQ ID NO: 107022
uuacccaaagugcauugac

SEQ ID NO: 107024 - RNA, 19 nt, Artificial Sequence
  Description of Artificial Sequence: Synthetic oligonucleotide
  Sense strand starting at position 3246 of SEQ ID NO: 1353
cuuugaguccuaggaacaa

SEQ ID NO: 107025 - RNA, 19 nt, Artificial Sequence
  Description of Artificial Sequence: Synthetic oligonucleotide
  Antisense strand to SEQ ID NO: 107024
uuguuccuaggacucaaag

SEQ ID NO: 107026 - RNA, 19 nt, Artificial Sequence
  Description of Artificial Sequence: Synthetic oligonucleotide
  Sense strand starting at position 3124 of SEQ ID NO: 1353
ucacauguguucucuuaag

SEQ ID NO: 107027 - RNA, 19 nt, Artificial Sequence
  Description of Artificial Sequence: Synthetic oligonucleotide
  Antisense strand to SEQ ID NO: 107026
cuuaagagaacacauguga

SEQ ID NO: 107028 - RNA, 19 nt, Artificial Sequence
  Description of Artificial Sequence: Synthetic oligonucleotide
  Sense strand starting at position 3089 of SEQ ID NO: 1353
guuugaugugacugagcca

SEQ ID NO: 107029 - RNA, 19 nt, Artificial Sequence
  Description of Artificial Sequence: Synthetic oligonucleotide
  Antisense strand to SEQ ID NO: 107028
uggcucagucacaucaaac

SEQ ID NO: 107030 - RNA, 19 nt, Artificial Sequence
  Description of Artificial Sequence: Synthetic oligonucleotide
  Sense strand starting at position 3085 of SEQ ID NO: 1353
ggcaguuugaugugacuga

SEQ ID NO: 107031 - RNA, 19 nt, Artificial Sequence
  Description of Artificial Sequence: Synthetic oligonucleotide
  Antisense strand to SEQ ID NO: 107030
ucagucacaucaaacugcc

SEQ ID NO: 107032 - RNA, 19 nt, Artificial Sequence
  Description of Artificial Sequence: Synthetic oligonucleotide
  Sense strand starting at position 3027 of SEQ ID NO: 1353
cccuaaagugcugaacuaa

SEQ ID NO: 107033 - RNA, 19 nt, Artificial Sequence
  Description of Artificial Sequence: Synthetic oligonucleotide
  Antisense strand to SEQ ID NO: 107032
uuaguucagcacuuuaggg

SEQ ID NO: 107034 - RNA, 19 nt, Artificial Sequence
  Description of Artificial Sequence: Synthetic oligonucleotide
  Sense strand starting at position 2982 of SEQ ID NO: 1353
caguuucuuuaagcgacaa

SEQ ID NO: 107035 - RNA, 19 nt, Artificial Sequence
  Description of Artificial Sequence: Synthetic oligonucleotide
  Antisense strand to SEQ ID NO: 107034
uugucgcuuaaagaaacug

SEQ ID NO: 107036 - RNA, 19 nt, Artificial Sequence
  Description of Artificial Sequence: Synthetic oligonucleotide
  Sense strand starting at position 2893 of SEQ ID NO: 1353
gggcuaagugucuaugguu

SEQ ID NO: 107037 - RNA, 19 nt, Artificial Sequence
  Description of Artificial Sequence: Synthetic oligonucleotide
  Antisense strand to SEQ ID NO: 107036
aaccauagacacuuagccc

SEQ ID NO: 107038 - RNA, 19 nt, Artificial Sequence
  Description of Artificial Sequence: Synthetic oligonucleotide
  Sense strand starting at position 2777 of SEQ ID NO: 1353
gaggguccuccugguaacu

SEQ ID NO: 107039 - RNA, 19 nt, Artificial Sequence
  Description of Artificial Sequence: Synthetic oligonucleotide
  Antisense strand to SEQ ID NO: 107038
aguuaccaggaggacccuc

SEQ ID NO: 107040 - RNA, 19 nt, Artificial Sequence
  Description of Artificial Sequence: Synthetic oligonucleotide
  Sense strand starting at position 2686 of SEQ ID NO: 1353
gucuuuauccaggaugcau

SEQ ID NO: 107041 - RNA, 19 nt, Artificial Sequence
  Description of Artificial Sequence: Synthetic oligonucleotide
  Antisense strand to SEQ ID NO: 107040
augcauccuggauaaagac

SEQ ID NO: 107042 - RNA, 19 nt, Artificial Sequence
  Description of Artificial Sequence: Synthetic oligonucleotide
  Sense strand starting at position 2685 of SEQ ID NO: 1353
ugucuuuauccaggaugca

SEQ ID NO: 107043 - RNA, 19 nt, Artificial Sequence
  Description of Artificial Sequence: Synthetic oligonucleotide
  Antisense strand to SEQ ID NO: 107042
ugcauccuggauaaagaca

SEQ ID NO: 107044 - RNA, 19 nt, Artificial Sequence
  Description of Artificial Sequence: Synthetic oligonucleotide
  Sense strand starting at position 2682 of SEQ ID NO: 1353
cugugucuuuauccaggau

SEQ ID NO: 107045 - RNA, 19 nt, Artificial Sequence
  Description of Artificial Sequence: Synthetic oligonucleotide
  Antisense strand to SEQ ID NO: 107044
auccuggauaaagacacag

SEQ ID NO: 107046 - RNA, 19 nt, Artificial Sequence
  Description of Artificial Sequence: Synthetic oligonucleotide
  Sense strand starting at position 2678 of SEQ ID NO: 1353
ggaucugugucuuuaucca

SEQ ID NO: 107047 - RNA, 19 nt, Artificial Sequence
  Description of Artificial Sequence: Synthetic oligonucleotide
  Antisense strand to SEQ ID NO: 107046
uggauaaagacacagaucc

SEQ ID NO: 107048 - RNA, 19 nt, Artificial Sequence
  Description of Artificial Sequence: Synthetic oligonucleotide
  Sense strand starting at position 2676 of SEQ ID NO: 1353
aaggaucugugucuuuauc

SEQ ID NO: 107049 - RNA, 19 nt, Artificial Sequence
  Description of Artificial Sequence: Synthetic oligonucleotide
  Antisense strand to SEQ ID NO: 107048
gauaaagacacagauccuu

SEQ ID NO: 107050 - RNA, 19 nt, Artificial Sequence
  Description of Artificial Sequence: Synthetic oligonucleotide
  Sense strand starting at position 2638 of SEQ ID NO: 1353
ggaagauugugggagagaa

SEQ ID NO: 107051 - RNA, 19 nt, Artificial Sequence
  Description of Artificial Sequence: Synthetic oligonucleotide
  Antisense strand to SEQ ID NO: 107050
uucucucccacaaucuucc

SEQ ID NO: 107052 - RNA, 19 nt, Artificial Sequence
  Description of Artificial Sequence: Synthetic oligonucleotide
  Sense strand starting at position 2406 of SEQ ID NO: 1353
ggagcaugggucagugcau

SEQ ID NO: 107053 - RNA, 19 nt, Artificial Sequence
  Description of Artificial Sequence: Synthetic oligonucleotide
  Antisense strand to SEQ ID NO: 107052
augcacugacccaugcucc

SEQ ID NO: 107054 - RNA, 19 nt, Artificial Sequence
  Description of Artificial Sequence: Synthetic oligonucleotide
  Sense strand starting at position 2328 of SEQ ID NO: 1353
gcagaaccuucuccauaga

SEQ ID NO: 107055 - RNA, 19 nt, Artificial Sequence
  Description of Artificial Sequence: Synthetic oligonucleotide
  Antisense strand to SEQ ID NO: 107054
ucuauggagaagguucugc

SEQ ID NO: 107056 - RNA, 19 nt, Artificial Sequence
  Description of Artificial Sequence: Synthetic oligonucleotide
  Sense strand starting at position 2327 of SEQ ID NO: 1353
ggcagaaccuucuccauag

SEQ ID NO: 107057 - RNA, 19 nt, Artificial Sequence
  Description of Artificial Sequence: Synthetic oligonucleotide
  Antisense strand to SEQ ID NO: 107056
cuauggagaagguucugcc

SEQ ID NO: 107058 - RNA, 19 nt, Artificial Sequence
  Description of Artificial Sequence: Synthetic oligonucleotide
  Sense strand starting at position 2070 of SEQ ID NO: 1353
gcgagcgggcucuuuaaca

SEQ ID NO: 107059 - RNA, 19 nt, Artificial Sequence
  Description of Artificial Sequence: Synthetic oligonucleotide
  Antisense strand to SEQ ID NO: 107058
uguuaaagagcccgcucgc

SEQ ID NO: 107060 - RNA, 19 nt, Artificial Sequence
  Description of Artificial Sequence: Synthetic oligonucleotide
  Sense strand starting at position 2068 of SEQ ID NO: 1353
cugcgagcgggcucuuuaa

SEQ ID NO: 107061 - RNA, 19 nt, Artificial Sequence
  Description of Artificial Sequence: Synthetic oligonucleotide
  Antisense strand to SEQ ID NO: 107060
uuaaagagcccgcucgcag

SEQ ID NO: 107062 - RNA, 19 nt, Artificial Sequence
  Description of Artificial Sequence: Synthetic oligonucleotide
  Sense strand starting at position 968 of SEQ ID NO: 1353
cuaauucucccuuggaagu

SEQ ID NO: 107063 - RNA, 19 nt, Artificial Sequence
  Description of Artificial Sequence: Synthetic oligonucleotide
  Antisense strand to SEQ ID NO: 107062
acuuccaagggagaauuag

SEQ ID NO: 107064 - RNA, 19 nt, Artificial Sequence
  Description of Artificial Sequence: Synthetic oligonucleotide
  Sense strand starting at position 957 of SEQ ID NO: 1353
gguggaauuuccuaauucu

SEQ ID NO: 107065 - RNA, 19 nt, Artificial Sequence
  Description of Artificial Sequence: Synthetic oligonucleotide
  Antisense strand to SEQ ID NO: 107064
agaauuaggaaauuccacc

SEQ ID NO: 107066 - RNA, 19 nt, Artificial Sequence
  Description of Artificial Sequence: Synthetic oligonucleotide
  Sense strand starting at position 879 of SEQ ID NO: 1353
ugagaauagugagauggga

SEQ ID NO: 107067 - RNA, 19 nt, Artificial Sequence
  Description of Artificial Sequence: Synthetic oligonucleotide
  Antisense strand to SEQ ID NO: 107066
ucccaucucacuauucuca

SEQ ID NO: 107068 - RNA, 19 nt, Artificial Sequence
  Description of Artificial Sequence: Synthetic oligonucleotide
  Sense strand starting at position 719 of SEQ ID NO: 1353
gcucccuucgagcaauaug

SEQ ID NO: 107069 - RNA, 19 nt, Artificial Sequence
  Description of Artificial Sequence: Synthetic oligonucleotide
  Antisense strand to SEQ ID NO: 107068
cauauugcucgaagggagc

SEQ ID NO: 107070 - RNA, 19 nt, Artificial Sequence
  Description of Artificial Sequence: Synthetic oligonucleotide
  Sense strand starting at position 349 of SEQ ID NO: 1353
gugagcuguccaggacuca

SEQ ID NO: 107071 - RNA, 19 nt, Artificial Sequence
  Description of Artificial Sequence: Synthetic oligonucleotide
  Antisense strand to SEQ ID NO: 107070
ugaguccuggacagcucac

SEQ ID NO: 107072 - RNA, 19 nt, Artificial Sequence
  Description of Artificial Sequence: Synthetic oligonucleotide
  Sense strand starting at position 347 of SEQ ID NO: 1353
cagugagcuguccaggacu

SEQ ID NO: 107073 - RNA, 19 nt, Artificial Sequence
  Description of Artificial Sequence: Synthetic oligonucleotide
  Antisense strand to SEQ ID NO: 107072
aguccuggacagcucacug

SEQ ID NO: 107074 - RNA, 19 nt, Artificial Sequence
  Description of Artificial Sequence: Synthetic oligonucleotide
  Sense strand starting at position 217 of SEQ ID NO: 1353
uuggguggcaauuauaauu

SEQ ID NO: 107075 - RNA, 19 nt, Artificial Sequence
  Description of Artificial Sequence: Synthetic oligonucleotide
  Antisense strand to SEQ ID NO: 107074
aauuauaauugccacccaa

SEQ ID NO: 107076 - RNA, 19 nt, Artificial Sequence
  Description of Artificial Sequence: Synthetic oligonucleotide
  Sense strand starting at position 209 of SEQ ID NO: 1353
aauauuguuuggguggcaa

SEQ ID NO: 107077 - RNA, 19 nt, Artificial Sequence
  Description of Artificial Sequence: Synthetic oligonucleotide
  Antisense strand to SEQ ID NO: 107076
uugccacccaaacaauauu

SEQ ID NO: 107078 - RNA, 19 nt, Artificial Sequence
  Description of Artificial Sequence: Synthetic oligonucleotide
  Sense strand starting at position 16 of SEQ ID NO: 1353
ugagauggaguuggguaaa

SEQ ID NO: 107079 - RNA, 19 nt, Artificial Sequence
  Description of Artificial Sequence: Synthetic oligonucleotide
  Antisense strand to SEQ ID NO: 107078
uuuacccaacuccaucuca

SEQ ID NO: 107080 - RNA, 19 nt, Artificial Sequence
  Description of Artificial Sequence: Synthetic oligonucleotide
  Sense strand starting at position 15 of SEQ ID NO: 1353
augagauggaguuggguaa

SEQ ID NO: 107081 - RNA, 19 nt, Artificial Sequence
  Description of Artificial Sequence: Synthetic oligonucleotide
  Antisense strand to SEQ ID NO: 107080
uuacccaacuccaucucau

SEQ ID NO: 107082 - RNA, 19 nt, Artificial Sequence
  Description of Artificial Sequence: Synthetic oligonucleotide
  Sense strand starting at position 3938 of SEQ ID NO: 1354
ggguguauauauuccaauu

SEQ ID NO: 107083 - RNA, 19 nt, Artificial Sequence
  Description of Artificial Sequence: Synthetic oligonucleotide
  Antisense strand to SEQ ID NO: 107082
aauuggaauauauacaccc

SEQ ID NO: 107084 - RNA, 19 nt, Artificial Sequence
  Description of Artificial Sequence: Synthetic oligonucleotide
  Sense strand starting at position 3931 of SEQ ID NO: 1354
cggacauggguguauauau

SEQ ID NO: 107085 - RNA, 19 nt, Artificial Sequence
  Description of Artificial Sequence: Synthetic oligonucleotide
  Antisense strand to SEQ ID NO: 107084
auauauacacccauguccg

SEQ ID NO: 107086 - RNA, 19 nt, Artificial Sequence
  Description of Artificial Sequence: Synthetic oligonucleotide
  Sense strand starting at position 3929 of SEQ ID NO: 1354
gacggacauggguguauau

SEQ ID NO: 107087 - RNA, 19 nt, Artificial Sequence
  Description of Artificial Sequence: Synthetic oligonucleotide
  Antisense strand to SEQ ID NO: 107086
auauacacccauguccguc

SEQ ID NO: 107088 - RNA, 19 nt, Artificial Sequence
  Description of Artificial Sequence: Synthetic oligonucleotide
  Sense strand starting at position 3870 of SEQ ID NO: 1354
auaauccugucccugugaa

SEQ ID NO: 107089 - RNA, 19 nt, Artificial Sequence
  Description of Artificial Sequence: Synthetic oligonucleotide
  Antisense strand to SEQ ID NO: 107088
uucacagggacaggauuau

SEQ ID NO: 107090 - RNA, 19 nt, Artificial Sequence
  Description of Artificial Sequence: Synthetic oligonucleotide
  Sense strand starting at position 3820 of SEQ ID NO: 1354
uccugucuggcagggaaua

SEQ ID NO: 107091 - RNA, 19 nt, Artificial Sequence
  Description of Artificial Sequence: Synthetic oligonucleotide
  Antisense strand to SEQ ID NO: 107090
uauucccugccagacagga

SEQ ID NO: 107092 - RNA, 19 nt, Artificial Sequence
  Description of Artificial Sequence: Synthetic oligonucleotide
  Sense strand starting at position 3784 of SEQ ID NO: 1354
cgauucuguccuugaggaa

SEQ ID NO: 107093 - RNA, 19 nt, Artificial Sequence
  Description of Artificial Sequence: Synthetic oligonucleotide
  Antisense strand to SEQ ID NO: 107092
uuccucaaggacagaaucg

SEQ ID NO: 107094 - RNA, 19 nt, Artificial Sequence
  Description of Artificial Sequence: Synthetic oligonucleotide
  Sense strand starting at position 3753 of SEQ ID NO: 1354
ggcugucuuggagacauag

SEQ ID NO: 107095 - RNA, 19 nt, Artificial Sequence
  Description of Artificial Sequence: Synthetic oligonucleotide
  Antisense strand to SEQ ID NO: 107094
cuaugucuccaagacagcc

SEQ ID NO: 107096 - RNA, 19 nt, Artificial Sequence
  Description of Artificial Sequence: Synthetic oligonucleotide
  Sense strand starting at position 3750 of SEQ ID NO: 1354
cuuggcugucuuggagaca

SEQ ID NO: 107097 - RNA, 19 nt, Artificial Sequence
  Description of Artificial Sequence: Synthetic oligonucleotide
  Antisense strand to SEQ ID NO: 107096
ugucuccaagacagccaag

SEQ ID NO: 107098 - RNA, 19 nt, Artificial Sequence
  Description of Artificial Sequence: Synthetic oligonucleotide
  Sense strand starting at position 3734 of SEQ ID NO: 1354
guaagaagcauggacucuu

SEQ ID NO: 107099 - RNA, 19 nt, Artificial Sequence
  Description of Artificial Sequence: Synthetic oligonucleotide
  Antisense strand to SEQ ID NO: 107098
aagaguccaugcuucuuac

SEQ ID NO: 107100 - RNA, 19 nt, Artificial Sequence
  Description of Artificial Sequence: Synthetic oligonucleotide
  Sense strand starting at position 3720 of SEQ ID NO: 1354
cagagaaguguuugguaag

SEQ ID NO: 107101 - RNA, 19 nt, Artificial Sequence
  Description of Artificial Sequence: Synthetic oligonucleotide
  Antisense strand to SEQ ID NO: 107100
cuuaccaaacacuucucug

SEQ ID NO: 107102 - RNA, 19 nt, Artificial Sequence
  Description of Artificial Sequence: Synthetic oligonucleotide
  Sense strand starting at position 3710 of SEQ ID NO: 1354
aguucucaagcagagaagu

SEQ ID NO: 107103 - RNA, 19 nt, Artificial Sequence
  Description of Artificial Sequence: Synthetic oligonucleotide
  Antisense strand to SEQ ID NO: 107102
acuucucugcuugagaacu

SEQ ID NO: 107104 - RNA, 19 nt, Artificial Sequence
  Description of Artificial Sequence: Synthetic oligonucleotide
  Sense strand starting at position 3687 of SEQ ID NO: 1354
ggauaaguggcacgagaau

SEQ ID NO: 107105 - RNA, 19 nt, Artificial Sequence
  Description of Artificial Sequence: Synthetic oligonucleotide
  Antisense strand to SEQ ID NO: 107104
auucucgugccacuuaucc

SEQ ID NO: 107106 - RNA, 19 nt, Artificial Sequence
  Description of Artificial Sequence: Synthetic oligonucleotide
  Sense strand starting at position 3661 of SEQ ID NO: 1354
ugccgugacagggaucaua

SEQ ID NO: 107107 - RNA, 19 nt, Artificial Sequence
  Description of Artificial Sequence: Synthetic oligonucleotide
  Antisense strand to SEQ ID NO: 107106
uaugaucccugucacggca

SEQ ID NO: 107108 - RNA, 19 nt, Artificial Sequence
  Description of Artificial Sequence: Synthetic oligonucleotide
  Sense strand starting at position 3613 of SEQ ID NO: 1354
guguuaucucaggacucuc

SEQ ID NO: 107109 - RNA, 19 nt, Artificial Sequence
  Description of Artificial Sequence: Synthetic oligonucleotide
  Antisense strand to SEQ ID NO: 107108
gagaguccugagauaacac

SEQ ID NO: 107110 - RNA, 19 nt, Artificial Sequence
  Description of Artificial Sequence: Synthetic oligonucleotide
  Sense strand starting at position 3535 of SEQ ID NO: 1354
caacucuguugguuaaaug

SEQ ID NO: 107111 - RNA, 19 nt, Artificial Sequence
  Description of Artificial Sequence: Synthetic oligonucleotide
  Antisense strand to SEQ ID NO: 107110
cauuuaaccaacagaguug

SEQ ID NO: 107112 - RNA, 19 nt, Artificial Sequence
  Description of Artificial Sequence: Synthetic oligonucleotide
  Sense strand starting at position 3495 of SEQ ID NO: 1354
agaacugugucacucagca

SEQ ID NO: 107113 - RNA, 19 nt, Artificial Sequence
  Description of Artificial Sequence: Synthetic oligonucleotide
  Antisense strand to SEQ ID NO: 107112
ugcugagugacacaguucu

SEQ ID NO: 107114 - RNA, 19 nt, Artificial Sequence
  Description of Artificial Sequence: Synthetic oligonucleotide
  Sense strand starting at position 3441 of SEQ ID NO: 1354
auguauuugugucucuauc

SEQ ID NO: 107115 - RNA, 19 nt, Artificial Sequence
  Description of Artificial Sequence: Synthetic oligonucleotide
  Antisense strand to SEQ ID NO: 107114
gauagagacacaaauacau

SEQ ID NO: 107116 - RNA, 19 nt, Artificial Sequence
  Description of Artificial Sequence: Synthetic oligonucleotide
  Sense strand starting at position 3436 of SEQ ID NO: 1354
gugaaauguauuugugucu

SEQ ID NO: 107117 - RNA, 19 nt, Artificial Sequence
  Description of Artificial Sequence: Synthetic oligonucleotide
  Antisense strand to SEQ ID NO: 107116
agacacaaauacauuucac

SEQ ID NO: 107118 - RNA, 19 nt, Artificial Sequence
  Description of Artificial Sequence: Synthetic oligonucleotide
  Sense strand starting at position 3435 of SEQ ID NO: 1354
ugugaaauguauuuguguc

SEQ ID NO: 107119 - RNA, 19 nt, Artificial Sequence
  Description of Artificial Sequence: Synthetic oligonucleotide
  Antisense strand to SEQ ID NO: 107118
gacacaaauacauuucaca

SEQ ID NO: 107120 - RNA, 19 nt, Artificial Sequence
  Description of Artificial Sequence: Synthetic oligonucleotide
  Sense strand starting at position 3430 of SEQ ID NO: 1354
ccuggugugaaauguauuu

SEQ ID NO: 107121 - RNA, 19 nt, Artificial Sequence
  Description of Artificial Sequence: Synthetic oligonucleotide
  Antisense strand to SEQ ID NO: 107120
aaauacauuucacaccagg

SEQ ID NO: 107122 - RNA, 19 nt, Artificial Sequence
  Description of Artificial Sequence: Synthetic oligonucleotide
  Sense strand starting at position 3240 of SEQ ID NO: 1354
agccacacucuagggauua

SEQ ID NO: 107123 - RNA, 19 nt, Artificial Sequence
  Description of Artificial Sequence: Synthetic oligonucleotide
  Antisense strand to SEQ ID NO: 107122
uaaucccuagaguguggcu

SEQ ID NO: 107124 - RNA, 19 nt, Artificial Sequence
  Description of Artificial Sequence: Synthetic oligonucleotide
  Sense strand starting at position 2902 of SEQ ID NO: 1354
gugucaaaccuagggaauc

SEQ ID NO: 107125 - RNA, 19 nt, Artificial Sequence
  Description of Artificial Sequence: Synthetic oligonucleotide
  Antisense strand to SEQ ID NO: 107124
gauucccuagguuugacac

SEQ ID NO: 107126 - RNA, 19 nt, Artificial Sequence
  Description of Artificial Sequence: Synthetic oligonucleotide
  Sense strand starting at position 2879 of SEQ ID NO: 1354
gggcuuuggaacuguaaag

SEQ ID NO: 107127 - RNA, 19 nt, Artificial Sequence
  Description of Artificial Sequence: Synthetic oligonucleotide
  Antisense strand to SEQ ID NO: 107126
cuuuacaguuccaaagccc

SEQ ID NO: 107128 - RNA, 19 nt, Artificial Sequence
  Description of Artificial Sequence: Synthetic oligonucleotide
  Sense strand starting at position 2873 of SEQ ID NO: 1354
guagaagggcuuuggaacu

SEQ ID NO: 107129 - RNA, 19 nt, Artificial Sequence
  Description of Artificial Sequence: Synthetic oligonucleotide
  Antisense strand to SEQ ID NO: 107128
aguuccaaagcccuucuac

SEQ ID NO: 107130 - RNA, 19 nt, Artificial Sequence
  Description of Artificial Sequence: Synthetic oligonucleotide
  Sense strand starting at position 2775 of SEQ ID NO: 1354
cuggguuucuauuccaauu

SEQ ID NO: 107131 - RNA, 19 nt, Artificial Sequence
  Description of Artificial Sequence: Synthetic oligonucleotide
  Antisense strand to SEQ ID NO: 107130
aauuggaauagaaacccag

SEQ ID NO: 107132 - RNA, 19 nt, Artificial Sequence
  Description of Artificial Sequence: Synthetic oligonucleotide
  Sense strand starting at position 2767 of SEQ ID NO: 1354
ucaggaaacuggguuucua

SEQ ID NO: 107133 - RNA, 19 nt, Artificial Sequence
  Description of Artificial Sequence: Synthetic oligonucleotide
  Antisense strand to SEQ ID NO: 107132
uagaaacccaguuuccuga

SEQ ID NO: 107134 - RNA, 19 nt, Artificial Sequence
  Description of Artificial Sequence: Synthetic oligonucleotide
  Sense strand starting at position 2535 of SEQ ID NO: 1354
gaggaaugguauccagggu

SEQ ID NO: 107135 - RNA, 19 nt, Artificial Sequence
  Description of Artificial Sequence: Synthetic oligonucleotide
  Antisense strand to SEQ ID NO: 107134
acccuggauaccauuccuc

SEQ ID NO: 107136 - RNA, 19 nt, Artificial Sequence
  Description of Artificial Sequence: Synthetic oligonucleotide
  Sense strand starting at position 2407 of SEQ ID NO: 1354
ccguguccaggauaaagau

SEQ ID NO: 107137 - RNA, 19 nt, Artificial Sequence
  Description of Artificial Sequence: Synthetic oligonucleotide
  Antisense strand to SEQ ID NO: 107136
aucuuuauccuggacacgg

SEQ ID NO: 107138 - RNA, 19 nt, Artificial Sequence
  Description of Artificial Sequence: Synthetic oligonucleotide
  Sense strand starting at position 2405 of SEQ ID NO: 1354
ugccguguccaggauaaag

SEQ ID NO: 107139 - RNA, 19 nt, Artificial Sequence
  Description of Artificial Sequence: Synthetic oligonucleotide
  Antisense strand to SEQ ID NO: 107138
cuuuauccuggacacggca

SEQ ID NO: 107140 - RNA, 19 nt, Artificial Sequence
  Description of Artificial Sequence: Synthetic oligonucleotide
  Sense strand starting at position 2345 of SEQ ID NO: 1354
ccagcuuuccgcguagaag

SEQ ID NO: 107141 - RNA, 19 nt, Artificial Sequence
  Description of Artificial Sequence: Synthetic oligonucleotide
  Antisense strand to SEQ ID NO: 107140
cuucuacgcggaaagcugg

SEQ ID NO: 107142 - RNA, 19 nt, Artificial Sequence
  Description of Artificial Sequence: Synthetic oligonucleotide
  Sense strand starting at position 2270 of SEQ ID NO: 1354
gagguaucugcgagcggag

SEQ ID NO: 107143 - RNA, 19 nt, Artificial Sequence
  Description of Artificial Sequence: Synthetic oligonucleotide
  Antisense strand to SEQ ID NO: 107142
cuccgcucgcagauaccuc

SEQ ID NO: 107144 - RNA, 19 nt, Artificial Sequence
  Description of Artificial Sequence: Synthetic oligonucleotide
  Sense strand starting at position 2247 of SEQ ID NO: 1354
gucuauuucuggcucggga

SEQ ID NO: 107145 - RNA, 19 nt, Artificial Sequence
  Description of Artificial Sequence: Synthetic oligonucleotide
  Antisense strand to SEQ ID NO: 107144
ucccgagccagaaauagac

SEQ ID NO: 107146 - RNA, 19 nt, Artificial Sequence
  Description of Artificial Sequence: Synthetic oligonucleotide
  Sense strand starting at position 2235 of SEQ ID NO: 1354
gagagauagugugucuauu

SEQ ID NO: 107147 - RNA, 19 nt, Artificial Sequence
  Description of Artificial Sequence: Synthetic oligonucleotide
  Antisense strand to SEQ ID NO: 107146
aauagacacacuaucucuc

SEQ ID NO: 107148 - RNA, 19 nt, Artificial Sequence
  Description of Artificial Sequence: Synthetic oligonucleotide
  Sense strand starting at position 684 of SEQ ID NO: 1354
cuguaaugucuuuaagaag

SEQ ID NO: 107149 - RNA, 19 nt, Artificial Sequence
  Description of Artificial Sequence: Synthetic oligonucleotide
  Antisense strand to SEQ ID NO: 107148
cuucuuaaagacauuacag

SEQ ID NO: 107150 - RNA, 19 nt, Artificial Sequence
  Description of Artificial Sequence: Synthetic oligonucleotide
  Sense strand starting at position 683 of SEQ ID NO: 1354
ccuguaaugucuuuaagaa

SEQ ID NO: 107151 - RNA, 19 nt, Artificial Sequence
  Description of Artificial Sequence: Synthetic oligonucleotide
  Antisense strand to SEQ ID NO: 107150
uucuuaaagacauuacagg

SEQ ID NO: 107152 - RNA, 19 nt, Artificial Sequence
  Description of Artificial Sequence: Synthetic oligonucleotide
  Sense strand starting at position 672 of SEQ ID NO: 1354
ccggguucccgccuguaau

SEQ ID NO: 107153 - RNA, 19 nt, Artificial Sequence
  Description of Artificial Sequence: Synthetic oligonucleotide
  Antisense strand to SEQ ID NO: 107152
auuacaggcgggaacccgg

SEQ ID NO: 107154 - RNA, 19 nt, Artificial Sequence
  Description of Artificial Sequence: Synthetic oligonucleotide
  Sense strand starting at position 582 of SEQ ID NO: 1354
uugggauucuggcucuauu

SEQ ID NO: 107155 - RNA, 19 nt, Artificial Sequence
  Description of Artificial Sequence: Synthetic oligonucleotide
  Antisense strand to SEQ ID NO: 107154
aauagagccagaaucccaa

SEQ ID NO: 107156 - RNA, 19 nt, Artificial Sequence
  Description of Artificial Sequence: Synthetic oligonucleotide
  Sense strand starting at position 463 of SEQ ID NO: 1354
ccacaucuguccucuagau

SEQ ID NO: 107157 - RNA, 19 nt, Artificial Sequence
  Description of Artificial Sequence: Synthetic oligonucleotide
  Antisense strand to SEQ ID NO: 107156
aucuagaggacagaugugg

SEQ ID NO: 107158 - RNA, 19 nt, Artificial Sequence
  Description of Artificial Sequence: Synthetic oligonucleotide
  Sense strand starting at position 275 of SEQ ID NO: 1354
ggcugagguaucggacaug

SEQ ID NO: 107159 - RNA, 19 nt, Artificial Sequence
  Description of Artificial Sequence: Synthetic oligonucleotide
  Antisense strand to SEQ ID NO: 107158
cauguccgauaccucagcc

SEQ ID NO: 107160 - RNA, 19 nt, Artificial Sequence
  Description of Artificial Sequence: Synthetic oligonucleotide
  Sense strand starting at position 148 of SEQ ID NO: 1354
gccugcucggcuuccauua

SEQ ID NO: 107161 - RNA, 19 nt, Artificial Sequence
  Description of Artificial Sequence: Synthetic oligonucleotide
  Antisense strand to SEQ ID NO: 107160
uaauggaagccgagcaggc

SEQ ID NO: 107162 - RNA, 19 nt, Artificial Sequence
  Description of Artificial Sequence: Synthetic oligonucleotide
  Sense strand starting at position 3969 of SEQ ID NO: 1360
cgccuaaagucacacagua

SEQ ID NO: 107163 - RNA, 19 nt, Artificial Sequence
  Description of Artificial Sequence: Synthetic oligonucleotide
  Antisense strand to SEQ ID NO: 107162
uacugugugacuuuaggcg

SEQ ID NO: 107164 - RNA, 19 nt, Artificial Sequence
  Description of Artificial Sequence: Synthetic oligonucleotide
  Sense strand starting at position 3961 of SEQ ID NO: 1360
aaguaacucgccuaaaguc

SEQ ID NO: 107165 - RNA, 19 nt, Artificial Sequence
  Description of Artificial Sequence: Synthetic oligonucleotide
  Antisense strand to SEQ ID NO: 107164
gacuuuaggcgaguuacuu

SEQ ID NO: 107166 - RNA, 19 nt, Artificial Sequence
  Description of Artificial Sequence: Synthetic oligonucleotide
  Sense strand starting at position 3959 of SEQ ID NO: 1360
uuaaguaacucgccuaaag

SEQ ID NO: 107167 - RNA, 19 nt, Artificial Sequence
  Description of Artificial Sequence: Synthetic oligonucleotide
  Antisense strand to SEQ ID NO: 107166
cuuuaggcgaguuacuuaa

SEQ ID NO: 107168 - RNA, 19 nt, Artificial Sequence
  Description of Artificial Sequence: Synthetic oligonucleotide
  Sense strand starting at position 3957 of SEQ ID NO: 1360
gguuaaguaacucgccuaa

SEQ ID NO: 107169 - RNA, 19 nt, Artificial Sequence
  Description of Artificial Sequence: Synthetic oligonucleotide
  Antisense strand to SEQ ID NO: 107168
uuaggcgaguuacuuaacc

SEQ ID NO: 107170 - RNA, 19 nt, Artificial Sequence
  Description of Artificial Sequence: Synthetic oligonucleotide
  Sense strand starting at position 3878 of SEQ ID NO: 1360
accuaaugagcuugucacu

SEQ ID NO: 107171 - RNA, 19 nt, Artificial Sequence
  Description of Artificial Sequence: Synthetic oligonucleotide
  Antisense strand to SEQ ID NO: 107170
agugacaagcucauuaggu

SEQ ID NO: 107172 - RNA, 19 nt, Artificial Sequence
  Description of Artificial Sequence: Synthetic oligonucleotide
  Sense strand starting at position 3864 of SEQ ID NO: 1360
aggcuaauuguggaaccua

SEQ ID NO: 107173 - RNA, 19 nt, Artificial Sequence
  Description of Artificial Sequence: Synthetic oligonucleotide
  Antisense strand to SEQ ID NO: 107172
uagguuccacaauuagccu

SEQ ID NO: 107174 - RNA, 19 nt, Artificial Sequence
  Description of Artificial Sequence: Synthetic oligonucleotide
  Sense strand starting at position 3408 of SEQ ID NO: 1360
agguaaguauugucucugu

SEQ ID NO: 107175 - RNA, 19 nt, Artificial Sequence
  Description of Artificial Sequence: Synthetic oligonucleotide
  Antisense strand to SEQ ID NO: 107174
acagagacaauacuuaccu

SEQ ID NO: 107176 - RNA, 19 nt, Artificial Sequence
  Description of Artificial Sequence: Synthetic oligonucleotide
  Sense strand starting at position 3406 of SEQ ID NO: 1360
ugagguaaguauugucucu

SEQ ID NO: 107177 - RNA, 19 nt, Artificial Sequence
  Description of Artificial Sequence: Synthetic oligonucleotide
  Antisense strand to SEQ ID NO: 107176
agagacaauacuuaccuca

SEQ ID NO: 107178 - RNA, 19 nt, Artificial Sequence
  Description of Artificial Sequence: Synthetic oligonucleotide
  Sense strand starting at position 3316 of SEQ ID NO: 1360
cuaugaccguuauaauagu

SEQ ID NO: 107179 - RNA, 19 nt, Artificial Sequence
  Description of Artificial Sequence: Synthetic oligonucleotide
  Antisense strand to SEQ ID NO: 107178
acuauuauaacggucauag

SEQ ID NO: 107180 - RNA, 19 nt, Artificial Sequence
  Description of Artificial Sequence: Synthetic oligonucleotide
  Sense strand starting at position 3311 of SEQ ID NO: 1360
gguaacuaugaccguuaua

SEQ ID NO: 107181 - RNA, 19 nt, Artificial Sequence
  Description of Artificial Sequence: Synthetic oligonucleotide
  Antisense strand to SEQ ID NO: 107180
uauaacggucauaguuacc

SEQ ID NO: 107182 - RNA, 19 nt, Artificial Sequence
  Description of Artificial Sequence: Synthetic oligonucleotide
  Sense strand starting at position 3310 of SEQ ID NO: 1360
ugguaacuaugaccguuau

SEQ ID NO: 107183 - RNA, 19 nt, Artificial Sequence
  Description of Artificial Sequence: Synthetic oligonucleotide
  Antisense strand to SEQ ID NO: 107182
auaacggucauaguuacca

SEQ ID NO: 107184 - RNA, 19 nt, Artificial Sequence
  Description of Artificial Sequence: Synthetic oligonucleotide
  Sense strand starting at position 3295 of SEQ ID NO: 1360
uaggucuucccuuaauggu

SEQ ID NO: 107185 - RNA, 19 nt, Artificial Sequence
  Description of Artificial Sequence: Synthetic oligonucleotide
  Antisense strand to SEQ ID NO: 107184
accauuaagggaagaccua

SEQ ID NO: 107186 - RNA, 19 nt, Artificial Sequence
  Description of Artificial Sequence: Synthetic oligonucleotide
  Sense strand starting at position 3290 of SEQ ID NO: 1360
acagauaggucuucccuua

SEQ ID NO: 107187 - RNA, 19 nt, Artificial Sequence
  Description of Artificial Sequence: Synthetic oligonucleotide
  Antisense strand to SEQ ID NO: 107186
uaagggaagaccuaucugu

SEQ ID NO: 107188 - RNA, 19 nt, Artificial Sequence
  Description of Artificial Sequence: Synthetic oligonucleotide
  Sense strand starting at position 3277 of SEQ ID NO: 1360
ccauuaauguagcacagau

SEQ ID NO: 107189 - RNA, 19 nt, Artificial Sequence
  Description of Artificial Sequence: Synthetic oligonucleotide
  Antisense strand to SEQ ID NO: 107188
aucugugcuacauuaaugg

SEQ ID NO: 107190 - RNA, 19 nt, Artificial Sequence
  Description of Artificial Sequence: Synthetic oligonucleotide
  Sense strand starting at position 2928 of SEQ ID NO: 1360
guugaaugaaguuguuguu

SEQ ID NO: 107191 - RNA, 19 nt, Artificial Sequence
  Description of Artificial Sequence: Synthetic oligonucleotide
  Antisense strand to SEQ ID NO: 107190
aacaacaacuucauucaac

SEQ ID NO: 107192 - RNA, 19 nt, Artificial Sequence
  Description of Artificial Sequence: Synthetic oligonucleotide
  Sense strand starting at position 2915 of SEQ ID NO: 1360
uacaauguauuugguugaa

SEQ ID NO: 107193 - RNA, 19 nt, Artificial Sequence
  Description of Artificial Sequence: Synthetic oligonucleotide
  Antisense strand to SEQ ID NO: 107192
uucaaccaaauacauugua

SEQ ID NO: 107194 - RNA, 19 nt, Artificial Sequence
  Description of Artificial Sequence: Synthetic oligonucleotide
  Sense strand starting at position 2905 of SEQ ID NO: 1360
aggugagauguacaaugua

SEQ ID NO: 107195 - RNA, 19 nt, Artificial Sequence
  Description of Artificial Sequence: Synthetic oligonucleotide
  Antisense strand to SEQ ID NO: 107194
uacauuguacaucucaccu

SEQ ID NO: 107196 - RNA, 19 nt, Artificial Sequence
  Description of Artificial Sequence: Synthetic oligonucleotide
  Sense strand starting at position 2859 of SEQ ID NO: 1360
caggaaucguguuuauuuc

SEQ ID NO: 107197 - RNA, 19 nt, Artificial Sequence
  Description of Artificial Sequence: Synthetic oligonucleotide
  Antisense strand to SEQ ID NO: 107196
gaaauaaacacgauuccug

SEQ ID NO: 107198 - RNA, 19 nt, Artificial Sequence
  Description of Artificial Sequence: Synthetic oligonucleotide
  Sense strand starting at position 2816 of SEQ ID NO: 1360
agaauagcuguguacaucu

SEQ ID NO: 107199 - RNA, 19 nt, Artificial Sequence
  Description of Artificial Sequence: Synthetic oligonucleotide
  Antisense strand to SEQ ID NO: 107198
agauguacacagcuauucu

SEQ ID NO: 107200 - RNA, 19 nt, Artificial Sequence
  Description of Artificial Sequence: Synthetic oligonucleotide
  Sense strand starting at position 2815 of SEQ ID NO: 1360
uagaauagcuguguacauc

SEQ ID NO: 107201 - RNA, 19 nt, Artificial Sequence
  Description of Artificial Sequence: Synthetic oligonucleotide
  Antisense strand to SEQ ID NO: 107200
gauguacacagcuauucua

SEQ ID NO: 107202 - RNA, 19 nt, Artificial Sequence
  Description of Artificial Sequence: Synthetic oligonucleotide
  Sense strand starting at position 2814 of SEQ ID NO: 1360
cuagaauagcuguguacau

SEQ ID NO: 107203 - RNA, 19 nt, Artificial Sequence
  Description of Artificial Sequence: Synthetic oligonucleotide
  Antisense strand to SEQ ID NO: 107202
auguacacagcuauucuag

SEQ ID NO: 107204 - RNA, 19 nt, Artificial Sequence
  Description of Artificial Sequence: Synthetic oligonucleotide
  Sense strand starting at position 2811 of SEQ ID NO: 1360
ccucuagaauagcugugua

SEQ ID NO: 107205 - RNA, 19 nt, Artificial Sequence
  Description of Artificial Sequence: Synthetic oligonucleotide
  Antisense strand to SEQ ID NO: 107204
uacacagcuauucuagagg

SEQ ID NO: 107206 - RNA, 19 nt, Artificial Sequence
  Description of Artificial Sequence: Synthetic oligonucleotide
  Sense strand starting at position 2685 of SEQ ID NO: 1360
acaucucuugggcaaacau

SEQ ID NO: 107207 - RNA, 19 nt, Artificial Sequence
  Description of Artificial Sequence: Synthetic oligonucleotide
  Antisense strand to SEQ ID NO: 107206
auguuugcccaagagaugu

SEQ ID NO: 107208 - RNA, 19 nt, Artificial Sequence
  Description of Artificial Sequence: Synthetic oligonucleotide
  Sense strand starting at position 2682 of SEQ ID NO: 1360
uguacaucucuugggcaaa

SEQ ID NO: 107209 - RNA, 19 nt, Artificial Sequence
  Description of Artificial Sequence: Synthetic oligonucleotide
  Antisense strand to SEQ ID NO: 107208
uuugcccaagagauguaca

SEQ ID NO: 107210 - RNA, 19 nt, Artificial Sequence
  Description of Artificial Sequence: Synthetic oligonucleotide
  Sense strand starting at position 2681 of SEQ ID NO: 1360
guguacaucucuugggcaa

SEQ ID NO: 107211 - RNA, 19 nt, Artificial Sequence
  Description of Artificial Sequence: Synthetic oligonucleotide
  Antisense strand to SEQ ID NO: 107210
uugcccaagagauguacac

SEQ ID NO: 107212 - RNA, 19 nt, Artificial Sequence
  Description of Artificial Sequence: Synthetic oligonucleotide
  Sense strand starting at position 2672 of SEQ ID NO: 1360
agaauaacuguguacaucu

SEQ ID NO: 107213 - RNA, 19 nt, Artificial Sequence
  Description of Artificial Sequence: Synthetic oligonucleotide
  Antisense strand to SEQ ID NO: 107212
agauguacacaguuauucu

SEQ ID NO: 107214 - RNA, 19 nt, Artificial Sequence
  Description of Artificial Sequence: Synthetic oligonucleotide
  Sense strand starting at position 2670 of SEQ ID NO: 1360
cuagaauaacuguguacau

SEQ ID NO: 107215 - RNA, 19 nt, Artificial Sequence
  Description of Artificial Sequence: Synthetic oligonucleotide
  Antisense strand to SEQ ID NO: 107214
auguacacaguuauucuag

SEQ ID NO: 107216 - RNA, 19 nt, Artificial Sequence
  Description of Artificial Sequence: Synthetic oligonucleotide
  Sense strand starting at position 2050 of SEQ ID NO: 1360
gggacuuauuaggaacuaa

SEQ ID NO: 107217 - RNA, 19 nt, Artificial Sequence
  Description of Artificial Sequence: Synthetic oligonucleotide
  Antisense strand to SEQ ID NO: 107216
uuaguuccuaauaaguccc

SEQ ID NO: 107218 - RNA, 19 nt, Artificial Sequence
  Description of Artificial Sequence: Synthetic oligonucleotide
  Sense strand starting at position 2049 of SEQ ID NO: 1360
agggacuuauuaggaacua

SEQ ID NO: 107219 - RNA, 19 nt, Artificial Sequence
  Description of Artificial Sequence: Synthetic oligonucleotide
  Antisense strand to SEQ ID NO: 107218
uaguuccuaauaagucccu

SEQ ID NO: 107220 - RNA, 19 nt, Artificial Sequence
  Description of Artificial Sequence: Synthetic oligonucleotide
  Sense strand starting at position 1989 of SEQ ID NO: 1360
guguuauccuagugucgcu

SEQ ID NO: 107221 - RNA, 19 nt, Artificial Sequence
  Description of Artificial Sequence: Synthetic oligonucleotide
  Antisense strand to SEQ ID NO: 107220
agcgacacuaggauaacac

SEQ ID NO: 107222 - RNA, 19 nt, Artificial Sequence
  Description of Artificial Sequence: Synthetic oligonucleotide
  Sense strand starting at position 553 of SEQ ID NO: 1360
cuaggaaacuauucgugaa

SEQ ID NO: 107223 - RNA, 19 nt, Artificial Sequence
  Description of Artificial Sequence: Synthetic oligonucleotide
  Antisense strand to SEQ ID NO: 107222
uucacgaauaguuuccuag

SEQ ID NO: 107224 - RNA, 19 nt, Artificial Sequence
  Description of Artificial Sequence: Synthetic oligonucleotide
  Sense strand starting at position 335 of SEQ ID NO: 1360
cuuguaaacgaucagaauc

SEQ ID NO: 107225 - RNA, 19 nt, Artificial Sequence
  Description of Artificial Sequence: Synthetic oligonucleotide
  Antisense strand to SEQ ID NO: 107224
gauucugaucguuuacaag

SEQ ID NO: 107226 - RNA, 19 nt, Artificial Sequence
  Description of Artificial Sequence: Synthetic oligonucleotide
  Sense strand starting at position 332 of SEQ ID NO: 1360
ccgcuuguaaacgaucaga

SEQ ID NO: 107227 - RNA, 19 nt, Artificial Sequence
  Description of Artificial Sequence: Synthetic oligonucleotide
  Antisense strand to SEQ ID NO: 107226
ucugaucguuuacaagcgg

SEQ ID NO: 107228 - RNA, 19 nt, Artificial Sequence
  Description of Artificial Sequence: Synthetic oligonucleotide
  Sense strand starting at position 126 of SEQ ID NO: 1360
gcuccuuguugacaaauug

SEQ ID NO: 107229 - RNA, 19 nt, Artificial Sequence
  Description of Artificial Sequence: Synthetic oligonucleotide
  Antisense strand to SEQ ID NO: 107228
caauuugucaacaaggagc

SEQ ID NO: 107230 - RNA, 19 nt, Artificial Sequence
  Description of Artificial Sequence: Synthetic oligonucleotide
  Sense strand starting at position 124 of SEQ ID NO: 1360
gggcuccuuguugacaaau

SEQ ID NO: 107231 - RNA, 19 nt, Artificial Sequence
  Description of Artificial Sequence: Synthetic oligonucleotide
  Antisense strand to SEQ ID NO: 107230
auuugucaacaaggagccc

SEQ ID NO: 107232 - RNA, 19 nt, Artificial Sequence
  Description of Artificial Sequence: Synthetic oligonucleotide
  Sense strand starting at position 98 of SEQ ID NO: 1360
cccauuccgcaguaacaaa

SEQ ID NO: 107233 - RNA, 19 nt, Artificial Sequence
  Description of Artificial Sequence: Synthetic oligonucleotide
  Antisense strand to SEQ ID NO: 107232
uuuguuacugcggaauggg

SEQ ID NO: 107234 - RNA, 19 nt, Artificial Sequence
  Description of Artificial Sequence: Synthetic oligonucleotide
  Sense strand starting at position 3708 of SEQ ID NO: 1359
gggacuuauuaggaacuaa

SEQ ID NO: 107235 - RNA, 19 nt, Artificial Sequence
  Description of Artificial Sequence: Synthetic oligonucleotide
  Antisense strand to SEQ ID NO: 107234
uuaguuccuaauaaguccc

SEQ ID NO: 107236 - RNA, 19 nt, Artificial Sequence
  Description of Artificial Sequence: Synthetic oligonucleotide
  Sense strand starting at position 3707 of SEQ ID NO: 1359
agggacuuauuaggaacua

SEQ ID NO: 107237 - RNA, 19 nt, Artificial Sequence
  Description of Artificial Sequence: Synthetic oligonucleotide
  Antisense strand to SEQ ID NO: 107236
uaguuccuaauaagucccu

SEQ ID NO: 107238 - RNA, 19 nt, Artificial Sequence
  Description of Artificial Sequence: Synthetic oligonucleotide
  Sense strand starting at position 3647 of SEQ ID NO: 1359
guguuauccuagugucgcu

SEQ ID NO: 107239 - RNA, 19 nt, Artificial Sequence
  Description of Artificial Sequence: Synthetic oligonucleotide
  Antisense strand to SEQ ID NO: 107238
agcgacacuaggauaacac

SEQ ID NO: 107240 - RNA, 19 nt, Artificial Sequence
  Description of Artificial Sequence: Synthetic oligonucleotide
  Sense strand starting at position 2211 of SEQ ID NO: 1359
cuaggaaacuauucgugaa

SEQ ID NO: 107241 - RNA, 19 nt, Artificial Sequence
  Description of Artificial Sequence: Synthetic oligonucleotide
  Antisense strand to SEQ ID NO: 107240
uucacgaauaguuuccuag

SEQ ID NO: 107242 - RNA, 19 nt, Artificial Sequence
  Description of Artificial Sequence: Synthetic oligonucleotide
  Sense strand starting at position 1993 of SEQ ID NO: 1359
cuuguaaacgaucagaauc

SEQ ID NO: 107243 - RNA, 19 nt, Artificial Sequence
  Description of Artificial Sequence: Synthetic oligonucleotide
  Antisense strand to SEQ ID NO: 107242
gauucugaucguuuacaag

SEQ ID NO: 107244 - RNA, 19 nt, Artificial Sequence
  Description of Artificial Sequence: Synthetic oligonucleotide
  Sense strand starting at position 1990 of SEQ ID NO: 1359
ccgcuuguaaacgaucaga

SEQ ID NO: 107245 - RNA, 19 nt, Artificial Sequence
  Description of Artificial Sequence: Synthetic oligonucleotide
  Antisense strand to SEQ ID NO: 107244
ucugaucguuuacaagcgg

SEQ ID NO: 107246 - RNA, 19 nt, Artificial Sequence
  Description of Artificial Sequence: Synthetic oligonucleotide
  Sense strand starting at position 1784 of SEQ ID NO: 1359
gcuccuuguugacaaauug

SEQ ID NO: 107247 - RNA, 19 nt, Artificial Sequence
  Description of Artificial Sequence: Synthetic oligonucleotide
  Antisense strand to SEQ ID NO: 107246
caauuugucaacaaggagc

SEQ ID NO: 107248 - RNA, 19 nt, Artificial Sequence
  Description of Artificial Sequence: Synthetic oligonucleotide
  Sense strand starting at position 1782 of SEQ ID NO: 1359
gggcuccuuguugacaaau

SEQ ID NO: 107249 - RNA, 19 nt, Artificial Sequence
  Description of Artificial Sequence: Synthetic oligonucleotide
  Antisense strand to SEQ ID NO: 107248
auuugucaacaaggagccc

SEQ ID NO: 107250 - RNA, 19 nt, Artificial Sequence
  Description of Artificial Sequence: Synthetic oligonucleotide
  Sense strand starting at position 1756 of SEQ ID NO: 1359
cccauuccgcaguaacaaa

SEQ ID NO: 107251 - RNA, 19 nt, Artificial Sequence
  Description of Artificial Sequence: Synthetic oligonucleotide
  Antisense strand to SEQ ID NO: 107250
uuuguuacugcggaauggg

SEQ ID NO: 107252 - RNA, 19 nt, Artificial Sequence
  Description of Artificial Sequence: Synthetic oligonucleotide
  Sense strand starting at position 1215 of SEQ ID NO: 1359
gcaugagucaacuguccag

SEQ ID NO: 107253 - RNA, 19 nt, Artificial Sequence
  Description of Artificial Sequence: Synthetic oligonucleotide
  Antisense strand to SEQ ID NO: 107252
cuggacaguugacucaugc

SEQ ID NO: 107254 - RNA, 19 nt, Artificial Sequence
  Description of Artificial Sequence: Synthetic oligonucleotide
  Sense strand starting at position 1137 of SEQ ID NO: 1359
gcuuaaggccgcugugauu

SEQ ID NO: 107255 - RNA, 19 nt, Artificial Sequence
  Description of Artificial Sequence: Synthetic oligonucleotide
  Antisense strand to SEQ ID NO: 107254
aaucacagcggccuuaagc

SEQ ID NO: 107256 - RNA, 19 nt, Artificial Sequence
  Description of Artificial Sequence: Synthetic oligonucleotide
  Sense strand starting at position 1136 of SEQ ID NO: 1359
ugcuuaaggccgcugugau

SEQ ID NO: 107257 - RNA, 19 nt, Artificial Sequence
  Description of Artificial Sequence: Synthetic oligonucleotide
  Antisense strand to SEQ ID NO: 107256
aucacagcggccuuaagca

SEQ ID NO: 107258 - RNA, 19 nt, Artificial Sequence
  Description of Artificial Sequence: Synthetic oligonucleotide
  Sense strand starting at position 1004 of SEQ ID NO: 1359
augguuauagcucgagcca

SEQ ID NO: 107259 - RNA, 19 nt, Artificial Sequence
  Description of Artificial Sequence: Synthetic oligonucleotide
  Antisense strand to SEQ ID NO: 107258
uggcucgagcuauaaccau

SEQ ID NO: 107260 - RNA, 19 nt, Artificial Sequence
  Description of Artificial Sequence: Synthetic oligonucleotide
  Sense strand starting at position 997 of SEQ ID NO: 1359
gagucuaaugguuauagcu

SEQ ID NO: 107261 - RNA, 19 nt, Artificial Sequence
  Description of Artificial Sequence: Synthetic oligonucleotide
  Antisense strand to SEQ ID NO: 107260
agcuauaaccauuagacuc

SEQ ID NO: 107262 - RNA, 19 nt, Artificial Sequence
  Description of Artificial Sequence: Synthetic oligonucleotide
  Sense strand starting at position 993 of SEQ ID NO: 1359
aggagagucuaaugguuau

SEQ ID NO: 107263 - RNA, 19 nt, Artificial Sequence
  Description of Artificial Sequence: Synthetic oligonucleotide
  Antisense strand to SEQ ID NO: 107262
auaaccauuagacucuccu

SEQ ID NO: 107264 - RNA, 19 nt, Artificial Sequence
  Description of Artificial Sequence: Synthetic oligonucleotide
  Sense strand starting at position 953 of SEQ ID NO: 1359
ggccaaagcucauacauug

SEQ ID NO: 107265 - RNA, 19 nt, Artificial Sequence
  Description of Artificial Sequence: Synthetic oligonucleotide
  Antisense strand to SEQ ID NO: 107264
caauguaugagcuuuggcc

SEQ ID NO: 107266 - RNA, 19 nt, Artificial Sequence
  Description of Artificial Sequence: Synthetic oligonucleotide
  Sense strand starting at position 940 of SEQ ID NO: 1359
gaggaugaguucuggccaa

SEQ ID NO: 107267 - RNA, 19 nt, Artificial Sequence
  Description of Artificial Sequence: Synthetic oligonucleotide
  Antisense strand to SEQ ID NO: 107266
uuggccagaacucauccuc

SEQ ID NO: 107268 - RNA, 19 nt, Artificial Sequence
  Description of Artificial Sequence: Synthetic oligonucleotide
  Sense strand starting at position 822 of SEQ ID NO: 1359
ugaaauuguugcucuguga

SEQ ID NO: 107269 - RNA, 19 nt, Artificial Sequence
  Description of Artificial Sequence: Synthetic oligonucleotide
  Antisense strand to SEQ ID NO: 107268
ucacagagcaacaauuuca

SEQ ID NO: 107270 - RNA, 19 nt, Artificial Sequence
  Description of Artificial Sequence: Synthetic oligonucleotide
  Sense strand starting at position 806 of SEQ ID NO: 1359
ccuugaauggugcaacuga

SEQ ID NO: 107271 - RNA, 19 nt, Artificial Sequence
  Description of Artificial Sequence: Synthetic oligonucleotide
  Antisense strand to SEQ ID NO: 107270
ucaguugcaccauucaagg

SEQ ID NO: 107272 - RNA, 19 nt, Artificial Sequence
  Description of Artificial Sequence: Synthetic oligonucleotide
  Sense strand starting at position 775 of SEQ ID NO: 1359
gcuccaggucuugaaauga

SEQ ID NO: 107273 - RNA, 19 nt, Artificial Sequence
  Description of Artificial Sequence: Synthetic oligonucleotide
  Antisense strand to SEQ ID NO: 107272
ucauuucaagaccuggagc

SEQ ID NO: 107274 - RNA, 19 nt, Artificial Sequence
  Description of Artificial Sequence: Synthetic oligonucleotide
  Sense strand starting at position 768 of SEQ ID NO: 1359
ggcgaucgcuccaggucuu

SEQ ID NO: 107275 - RNA, 19 nt, Artificial Sequence
  Description of Artificial Sequence: Synthetic oligonucleotide
  Antisense strand to SEQ ID NO: 107274
aagaccuggagcgaucgcc

SEQ ID NO: 107276 - RNA, 19 nt, Artificial Sequence
  Description of Artificial Sequence: Synthetic oligonucleotide
  Sense strand starting at position 516 of SEQ ID NO: 1359
ugggaugacagcugggaau

SEQ ID NO: 107277 - RNA, 19 nt, Artificial Sequence
  Description of Artificial Sequence: Synthetic oligonucleotide
  Antisense strand to SEQ ID NO: 107276
auucccagcugucauccca

SEQ ID NO: 107278 - RNA, 19 nt, Artificial Sequence
  Description of Artificial Sequence: Synthetic oligonucleotide
  Sense strand starting at position 327 of SEQ ID NO: 1359
guuaauuccucaguccaug

SEQ ID NO: 107279 - RNA, 19 nt, Artificial Sequence
  Description of Artificial Sequence: Synthetic oligonucleotide
  Antisense strand to SEQ ID NO: 107278
cauggacugaggaauuaac

SEQ ID NO: 107280 - RNA, 19 nt, Artificial Sequence
  Description of Artificial Sequence: Synthetic oligonucleotide
  Sense strand starting at position 313 of SEQ ID NO: 1359
gaucgcccaucauaguuaa

SEQ ID NO: 107281 - RNA, 19 nt, Artificial Sequence
  Description of Artificial Sequence: Synthetic oligonucleotide
  Antisense strand to SEQ ID NO: 107280
uuaacuaugaugggcgauc

SEQ ID NO: 107282 - RNA, 19 nt, Artificial Sequence
  Description of Artificial Sequence: Synthetic oligonucleotide
  Sense strand starting at position 311 of SEQ ID NO: 1359
gagaucgcccaucauaguu

SEQ ID NO: 107283 - RNA, 19 nt, Artificial Sequence
  Description of Artificial Sequence: Synthetic oligonucleotide
  Antisense strand to SEQ ID NO: 107282
aacuaugaugggcgaucuc

SEQ ID NO: 107284 - RNA, 19 nt, Artificial Sequence
  Description of Artificial Sequence: Synthetic oligonucleotide
  Sense strand starting at position 296 of SEQ ID NO: 1359
auggaaaucucuggagaga

SEQ ID NO: 107285 - RNA, 19 nt, Artificial Sequence
  Description of Artificial Sequence: Synthetic oligonucleotide
  Antisense strand to SEQ ID NO: 107284
ucucuccagagauuuccau

SEQ ID NO: 107286 - RNA, 19 nt, Artificial Sequence
  Description of Artificial Sequence: Synthetic oligonucleotide
  Sense strand starting at position 263 of SEQ ID NO: 1359
caggacagcugugacaauu

SEQ ID NO: 107287 - RNA, 19 nt, Artificial Sequence
  Description of Artificial Sequence: Synthetic oligonucleotide
  Antisense strand to SEQ ID NO: 107286
aauugucacagcuguccug

SEQ ID NO: 107288 - RNA, 19 nt, Artificial Sequence
  Description of Artificial Sequence: Synthetic oligonucleotide
  Sense strand starting at position 262 of SEQ ID NO: 1359
acaggacagcugugacaau

SEQ ID NO: 107289 - RNA, 19 nt, Artificial Sequence
  Description of Artificial Sequence: Synthetic oligonucleotide
  Antisense strand to SEQ ID NO: 107288
auugucacagcuguccugu

SEQ ID NO: 107290 - RNA, 19 nt, Artificial Sequence
  Description of Artificial Sequence: Synthetic oligonucleotide
  Sense strand starting at position 53 of SEQ ID NO: 1359
cagaauagcuggugguaca

SEQ ID NO: 107291 - RNA, 19 nt, Artificial Sequence
  Description of Artificial Sequence: Synthetic oligonucleotide
  Antisense strand to SEQ ID NO: 107290
uguaccaccagcuauucug

SEQ ID NO: 107292 - RNA, 19 nt, Artificial Sequence
  Description of Artificial Sequence: Synthetic oligonucleotide
  Sense strand starting at position 51 of SEQ ID NO: 1359
uccagaauagcugguggua

SEQ ID NO: 107293 - RNA, 19 nt, Artificial Sequence
  Description of Artificial Sequence: Synthetic oligonucleotide
  Antisense strand to SEQ ID NO: 107292
uaccaccagcuauucugga

SEQ ID NO: 107294 - RNA, 19 nt, Artificial Sequence
  Description of Artificial Sequence: Synthetic oligonucleotide
  Sense strand starting at position 2605 of SEQ ID NO: 1356
cuaggaaacuauucgugaa

SEQ ID NO: 107295 - RNA, 19 nt, Artificial Sequence
  Description of Artificial Sequence: Synthetic oligonucleotide
  Antisense strand to SEQ ID NO: 107294
uucacgaauaguuuccuag

SEQ ID NO: 107296 - RNA, 19 nt, Artificial Sequence
  Description of Artificial Sequence: Synthetic oligonucleotide
  Sense strand starting at position 2387 of SEQ ID NO: 1356
cuuguaaacgaucagaauc

SEQ ID NO: 107297 - RNA, 19 nt, Artificial Sequence
  Description of Artificial Sequence: Synthetic oligonucleotide
  Antisense strand to SEQ ID NO: 107296
gauucugaucguuuacaag

SEQ ID NO: 107298 - RNA, 19 nt, Artificial Sequence
  Description of Artificial Sequence: Synthetic oligonucleotide
  Sense strand starting at position 2384 of SEQ ID NO: 1356
ccgcuuguaaacgaucaga

SEQ ID NO: 107299 - RNA, 19 nt, Artificial Sequence
  Description of Artificial Sequence: Synthetic oligonucleotide
  Antisense strand to SEQ ID NO: 107298
ucugaucguuuacaagcgg

SEQ ID NO: 107300 - RNA, 19 nt, Artificial Sequence
  Description of Artificial Sequence: Synthetic oligonucleotide
  Sense strand starting at position 2178 of SEQ ID NO: 1356
gcuccuuguugacaaauug

SEQ ID NO: 107301 - RNA, 19 nt, Artificial Sequence
  Description of Artificial Sequence: Synthetic oligonucleotide
  Antisense strand to SEQ ID NO: 107300
caauuugucaacaaggagc

SEQ ID NO: 107302 - RNA, 19 nt, Artificial Sequence
  Description of Artificial Sequence: Synthetic oligonucleotide
  Sense strand starting at position 2176 of SEQ ID NO: 1356
gggcuccuuguugacaaau

SEQ ID NO: 107303 - RNA, 19 nt, Artificial Sequence
  Description of Artificial Sequence: Synthetic oligonucleotide
  Antisense strand to SEQ ID NO: 107302
auuugucaacaaggagccc

SEQ ID NO: 107304 - RNA, 19 nt, Artificial Sequence
  Description of Artificial Sequence: Synthetic oligonucleotide
  Sense strand starting at position 2150 of SEQ ID NO: 1356
cccauuccgcaguaacaaa

SEQ ID NO: 107305 - RNA, 19 nt, Artificial Sequence
  Description of Artificial Sequence: Synthetic oligonucleotide
  Antisense strand to SEQ ID NO: 107304
uuuguuacugcggaauggg

SEQ ID NO: 107306 - RNA, 19 nt, Artificial Sequence
  Description of Artificial Sequence: Synthetic oligonucleotide
  Sense strand starting at position 1609 of SEQ ID NO: 1356
gcaugagucaacuguccag

SEQ ID NO: 107307 - RNA, 19 nt, Artificial Sequence
  Description of Artificial Sequence: Synthetic oligonucleotide
  Antisense strand to SEQ ID NO: 107306
cuggacaguugacucaugc

SEQ ID NO: 107308 - RNA, 19 nt, Artificial Sequence
  Description of Artificial Sequence: Synthetic oligonucleotide
  Sense strand starting at position 1531 of SEQ ID NO: 1356
gcuuaaggccgcugugauu

SEQ ID NO: 107309 - RNA, 19 nt, Artificial Sequence
  Description of Artificial Sequence: Synthetic oligonucleotide
  Antisense strand to SEQ ID NO: 107308
aaucacagcggccuuaagc

SEQ ID NO: 107310 - RNA, 19 nt, Artificial Sequence
  Description of Artificial Sequence: Synthetic oligonucleotide
  Sense strand starting at position 1530 of SEQ ID NO: 1356
ugcuuaaggccgcugugau

SEQ ID NO: 107311 - RNA, 19 nt, Artificial Sequence
  Description of Artificial Sequence: Synthetic oligonucleotide
  Antisense strand to SEQ ID NO: 107310
aucacagcggccuuaagca

SEQ ID NO: 107312 - RNA, 19 nt, Artificial Sequence
  Description of Artificial Sequence: Synthetic oligonucleotide
  Sense strand starting at position 1398 of SEQ ID NO: 1356
augguuauagcucgagcca

SEQ ID NO: 107313 - RNA, 19 nt, Artificial Sequence
  Description of Artificial Sequence: Synthetic oligonucleotide
  Antisense strand to SEQ ID NO: 107312
uggcucgagcuauaaccau

SEQ ID NO: 107314 - RNA, 19 nt, Artificial Sequence
  Description of Artificial Sequence: Synthetic oligonucleotide
  Sense strand starting at position 1391 of SEQ ID NO: 1356
gagucuaaugguuauagcu

SEQ ID NO: 107315 - RNA, 19 nt, Artificial Sequence
  Description of Artificial Sequence: Synthetic oligonucleotide
  Antisense strand to SEQ ID NO: 107314
agcuauaaccauuagacuc

SEQ ID NO: 107316 - RNA, 19 nt, Artificial Sequence
  Description of Artificial Sequence: Synthetic oligonucleotide
  Sense strand starting at position 1387 of SEQ ID NO: 1356
aggagagucuaaugguuau

SEQ ID NO: 107317 - RNA, 19 nt, Artificial Sequence
  Description of Artificial Sequence: Synthetic oligonucleotide
  Antisense strand to SEQ ID NO: 107316
auaaccauuagacucuccu

SEQ ID NO: 107318 - RNA, 19 nt, Artificial Sequence
  Description of Artificial Sequence: Synthetic oligonucleotide
  Sense strand starting at position 1347 of SEQ ID NO: 1356
ggccaaagcucauacauug

SEQ ID NO: 107319 - RNA, 19 nt, Artificial Sequence
  Description of Artificial Sequence: Synthetic oligonucleotide
  Antisense strand to SEQ ID NO: 107318
caauguaugagcuuuggcc

SEQ ID NO: 107320 - RNA, 19 nt, Artificial Sequence
  Description of Artificial Sequence: Synthetic oligonucleotide
  Sense strand starting at position 1334 of SEQ ID NO: 1356
gaggaugaguucuggccaa

SEQ ID NO: 107321 - RNA, 19 nt, Artificial Sequence
  Description of Artificial Sequence: Synthetic oligonucleotide
  Antisense strand to SEQ ID NO: 107320
uuggccagaacucauccuc

SEQ ID NO: 107322 - RNA, 19 nt, Artificial Sequence
  Description of Artificial Sequence: Synthetic oligonucleotide
  Sense strand starting at position 1216 of SEQ ID NO: 1356
ugaaauuguugcucuguga

SEQ ID NO: 107323 - RNA, 19 nt, Artificial Sequence
  Description of Artificial Sequence: Synthetic oligonucleotide
  Antisense strand to SEQ ID NO: 107322
ucacagagcaacaauuuca

SEQ ID NO: 107324 - RNA, 19 nt, Artificial Sequence
  Description of Artificial Sequence: Synthetic oligonucleotide
  Sense strand starting at position 1200 of SEQ ID NO: 1356
ccuugaauggugcaacuga

SEQ ID NO: 107325 - RNA, 19 nt, Artificial Sequence
  Description of Artificial Sequence: Synthetic oligonucleotide
  Antisense strand to SEQ ID NO: 107324
ucaguugcaccauucaagg

SEQ ID NO: 107326 - RNA, 19 nt, Artificial Sequence
  Description of Artificial Sequence: Synthetic oligonucleotide
  Sense strand starting at position 1169 of SEQ ID NO: 1356
gcuccaggucuugaaauga

SEQ ID NO: 107327 - RNA, 19 nt, Artificial Sequence
  Description of Artificial Sequence: Synthetic oligonucleotide
  Antisense strand to SEQ ID NO: 107326
ucauuucaagaccuggagc

SEQ ID NO: 107328 - RNA, 19 nt, Artificial Sequence
  Description of Artificial Sequence: Synthetic oligonucleotide
  Sense strand starting at position 1162 of SEQ ID NO: 1356
ggcgaucgcuccaggucuu

SEQ ID NO: 107329 - RNA, 19 nt, Artificial Sequence
  Description of Artificial Sequence: Synthetic oligonucleotide
  Antisense strand to SEQ ID NO: 107328
aagaccuggagcgaucgcc

SEQ ID NO: 107330 - RNA, 19 nt, Artificial Sequence
  Description of Artificial Sequence: Synthetic oligonucleotide
  Sense strand starting at position 910 of SEQ ID NO: 1356
ugggaugacagcugggaau

SEQ ID NO: 107331 - RNA, 19 nt, Artificial Sequence
  Description of Artificial Sequence: Synthetic oligonucleotide
  Antisense strand to SEQ ID NO: 107330
auucccagcugucauccca

SEQ ID NO: 107332 - RNA, 19 nt, Artificial Sequence
  Description of Artificial Sequence: Synthetic oligonucleotide
  Sense strand starting at position 721 of SEQ ID NO: 1356
guuaauuccucaguccaug

SEQ ID NO: 107333 - RNA, 19 nt, Artificial Sequence
  Description of Artificial Sequence: Synthetic oligonucleotide
  Antisense strand to SEQ ID NO: 107332
cauggacugaggaauuaac

SEQ ID NO: 107334 - RNA, 19 nt, Artificial Sequence
  Description of Artificial Sequence: Synthetic oligonucleotide
  Sense strand starting at position 707 of SEQ ID NO: 1356
gaucgcccaucauaguuaa

SEQ ID NO: 107335 - RNA, 19 nt, Artificial Sequence
  Description of Artificial Sequence: Synthetic oligonucleotide
  Antisense strand to SEQ ID NO: 107334
uuaacuaugaugggcgauc

SEQ ID NO: 107336 - RNA, 19 nt, Artificial Sequence
  Description of Artificial Sequence: Synthetic oligonucleotide
  Sense strand starting at position 705 of SEQ ID NO: 1356
gagaucgcccaucauaguu

SEQ ID NO: 107337 - RNA, 19 nt, Artificial Sequence
  Description of Artificial Sequence: Synthetic oligonucleotide
  Antisense strand to SEQ ID NO: 107336
aacuaugaugggcgaucuc

SEQ ID NO: 107338 - RNA, 19 nt, Artificial Sequence
  Description of Artificial Sequence: Synthetic oligonucleotide
  Sense strand starting at position 690 of SEQ ID NO: 1356
auggaaaucucuggagaga

SEQ ID NO: 107339 - RNA, 19 nt, Artificial Sequence
  Description of Artificial Sequence: Synthetic oligonucleotide
  Antisense strand to SEQ ID NO: 107338
ucucuccagagauuuccau

SEQ ID NO: 107340 - RNA, 19 nt, Artificial Sequence
  Description of Artificial Sequence: Synthetic oligonucleotide
  Sense strand starting at position 657 of SEQ ID NO: 1356
caggacagcugugacaauu

SEQ ID NO: 107341 - RNA, 19 nt, Artificial Sequence
  Description of Artificial Sequence: Synthetic oligonucleotide
  Antisense strand to SEQ ID NO: 107340
aauugucacagcuguccug

SEQ ID NO: 107342 - RNA, 19 nt, Artificial Sequence
  Description of Artificial Sequence: Synthetic oligonucleotide
  Sense strand starting at position 656 of SEQ ID NO: 1356
acaggacagcugugacaau

SEQ ID NO: 107343 - RNA, 19 nt, Artificial Sequence
  Description of Artificial Sequence: Synthetic oligonucleotide
  Antisense strand to SEQ ID NO: 107342
auugucacagcuguccugu

SEQ ID NO: 107344 - RNA, 19 nt, Artificial Sequence
  Description of Artificial Sequence: Synthetic oligonucleotide
  Sense strand starting at position 447 of SEQ ID NO: 1356
cagaauagcuggugguaca

SEQ ID NO: 107345 - RNA, 19 nt, Artificial Sequence
  Description of Artificial Sequence: Synthetic oligonucleotide
  Antisense strand to SEQ ID NO: 107344
uguaccaccagcuauucug

SEQ ID NO: 107346 - RNA, 19 nt, Artificial Sequence
  Description of Artificial Sequence: Synthetic oligonucleotide
  Sense strand starting at position 445 of SEQ ID NO: 1356
uccagaauagcugguggua

SEQ ID NO: 107347 - RNA, 19 nt, Artificial Sequence
  Description of Artificial Sequence: Synthetic oligonucleotide
  Antisense strand to SEQ ID NO: 107346
uaccaccagcuauucugga

SEQ ID NO: 107348 - RNA, 19 nt, Artificial Sequence
  Description of Artificial Sequence: Synthetic oligonucleotide
  Sense strand starting at position 3965 of SEQ ID NO: 1357
gcauuaugcuggucacucu

SEQ ID NO: 107349 - RNA, 19 nt, Artificial Sequence
  Description of Artificial Sequence: Synthetic oligonucleotide
  Antisense strand to SEQ ID NO: 107348
agagugaccagcauaaugc

SEQ ID NO: 107350 - RNA, 19 nt, Artificial Sequence
  Description of Artificial Sequence: Synthetic oligonucleotide
  Sense strand starting at position 3963 of SEQ ID NO: 1357
aggcauuaugcuggucacu

SEQ ID NO: 107351 - RNA, 19 nt, Artificial Sequence
  Description of Artificial Sequence: Synthetic oligonucleotide
  Antisense strand to SEQ ID NO: 107350
agugaccagcauaaugccu

SEQ ID NO: 107352 - RNA, 19 nt, Artificial Sequence
  Description of Artificial Sequence: Synthetic oligonucleotide
  Sense strand starting at position 3926 of SEQ ID NO: 1357
gaaguaacuugguaguaau

SEQ ID NO: 107353 - RNA, 19 nt, Artificial Sequence
  Description of Artificial Sequence: Synthetic oligonucleotide
  Antisense strand to SEQ ID NO: 107352
auuacuaccaaguuacuuc

SEQ ID NO: 107354 - RNA, 19 nt, Artificial Sequence
  Description of Artificial Sequence: Synthetic oligonucleotide
  Sense strand starting at position 3925 of SEQ ID NO: 1357
ggaaguaacuugguaguaa

SEQ ID NO: 107355 - RNA, 19 nt, Artificial Sequence
  Description of Artificial Sequence: Synthetic oligonucleotide
  Antisense strand to SEQ ID NO: 107354
uuacuaccaaguuacuucc

SEQ ID NO: 107356 - RNA, 19 nt, Artificial Sequence
  Description of Artificial Sequence: Synthetic oligonucleotide
  Sense strand starting at position 3923 of SEQ ID NO: 1357
ugggaaguaacuugguagu

SEQ ID NO: 107357 - RNA, 19 nt, Artificial Sequence
  Description of Artificial Sequence: Synthetic oligonucleotide
  Antisense strand to SEQ ID NO: 107356
acuaccaaguuacuuccca

SEQ ID NO: 107358 - RNA, 19 nt, Artificial Sequence
  Description of Artificial Sequence: Synthetic oligonucleotide
  Sense strand starting at position 3860 of SEQ ID NO: 1357
aggguuuggaguugaguca

SEQ ID NO: 107359 - RNA, 19 nt, Artificial Sequence
  Description of Artificial Sequence: Synthetic oligonucleotide
  Antisense strand to SEQ ID NO: 107358
ugacucaacuccaaacccu

SEQ ID NO: 107360 - RNA, 19 nt, Artificial Sequence
  Description of Artificial Sequence: Synthetic oligonucleotide
  Sense strand starting at position 3854 of SEQ ID NO: 1357
ggacaaaggguuuggaguu

SEQ ID NO: 107361 - RNA, 19 nt, Artificial Sequence
  Description of Artificial Sequence: Synthetic oligonucleotide
  Antisense strand to SEQ ID NO: 107360
aacuccaaacccuuugucc

SEQ ID NO: 107362 - RNA, 19 nt, Artificial Sequence
  Description of Artificial Sequence: Synthetic oligonucleotide
  Sense strand starting at position 3726 of SEQ ID NO: 1357
augagcuggucagaucaca

SEQ ID NO: 107363 - RNA, 19 nt, Artificial Sequence
  Description of Artificial Sequence: Synthetic oligonucleotide
  Antisense strand to SEQ ID NO: 107362
ugugaucugaccagcucau

SEQ ID NO: 107364 - RNA, 19 nt, Artificial Sequence
  Description of Artificial Sequence: Synthetic oligonucleotide
  Sense strand starting at position 3724 of SEQ ID NO: 1357
ugaugagcuggucagauca

SEQ ID NO: 107365 - RNA, 19 nt, Artificial Sequence
  Description of Artificial Sequence: Synthetic oligonucleotide
  Antisense strand to SEQ ID NO: 107364
ugaucugaccagcucauca

SEQ ID NO: 107366 - RNA, 19 nt, Artificial Sequence
  Description of Artificial Sequence: Synthetic oligonucleotide
  Sense strand starting at position 3721 of SEQ ID NO: 1357
gccugaugagcuggucaga

SEQ ID NO: 107367 - RNA, 19 nt, Artificial Sequence
  Description of Artificial Sequence: Synthetic oligonucleotide
  Antisense strand to SEQ ID NO: 107366
ucugaccagcucaucaggc

SEQ ID NO: 107368 - RNA, 19 nt, Artificial Sequence
  Description of Artificial Sequence: Synthetic oligonucleotide
  Sense strand starting at position 3702 of SEQ ID NO: 1357
gcagaaagcuaauugugga

SEQ ID NO: 107369 - RNA, 19 nt, Artificial Sequence
  Description of Artificial Sequence: Synthetic oligonucleotide
  Antisense strand to SEQ ID NO: 107368
uccacaauuagcuuucugc

SEQ ID NO: 107370 - RNA, 19 nt, Artificial Sequence
  Description of Artificial Sequence: Synthetic oligonucleotide
  Sense strand starting at position 3523 of SEQ ID NO: 1357
ucuguuggauaacuauaua

SEQ ID NO: 107371 - RNA, 19 nt, Artificial Sequence
  Description of Artificial Sequence: Synthetic oligonucleotide
  Antisense strand to SEQ ID NO: 107370
uauauaguuauccaacaga

SEQ ID NO: 107372 - RNA, 19 nt, Artificial Sequence
  Description of Artificial Sequence: Synthetic oligonucleotide
  Sense strand starting at position 3520 of SEQ ID NO: 1357
gugucuguuggauaacuau

SEQ ID NO: 107373 - RNA, 19 nt, Artificial Sequence
  Description of Artificial Sequence: Synthetic oligonucleotide
  Antisense strand to SEQ ID NO: 107372
auaguuauccaacagacac

SEQ ID NO: 107374 - RNA, 19 nt, Artificial Sequence
  Description of Artificial Sequence: Synthetic oligonucleotide
  Sense strand starting at position 3514 of SEQ ID NO: 1357
cagcuagugucuguuggau

SEQ ID NO: 107375 - RNA, 19 nt, Artificial Sequence
  Description of Artificial Sequence: Synthetic oligonucleotide
  Antisense strand to SEQ ID NO: 107374
auccaacagacacuagcug

SEQ ID NO: 107376 - RNA, 19 nt, Artificial Sequence
  Description of Artificial Sequence: Synthetic oligonucleotide
  Sense strand starting at position 3476 of SEQ ID NO: 1357
aaguaacucgccuaaaguc

SEQ ID NO: 107377 - RNA, 19 nt, Artificial Sequence
  Description of Artificial Sequence: Synthetic oligonucleotide
  Antisense strand to SEQ ID NO: 107376
gacuuuaggcgaguuacuu

SEQ ID NO: 107378 - RNA, 19 nt, Artificial Sequence
  Description of Artificial Sequence: Synthetic oligonucleotide
  Sense strand starting at position 3474 of SEQ ID NO: 1357
uuaaguaacucgccuaaag

SEQ ID NO: 107379 - RNA, 19 nt, Artificial Sequence
  Description of Artificial Sequence: Synthetic oligonucleotide
  Antisense strand to SEQ ID NO: 107378
cuuuaggcgaguuacuuaa

SEQ ID NO: 107380 - RNA, 19 nt, Artificial Sequence
  Description of Artificial Sequence: Synthetic oligonucleotide
  Sense strand starting at position 3472 of SEQ ID NO: 1357
gguuaaguaacucgccuaa

SEQ ID NO: 107381 - RNA, 19 nt, Artificial Sequence
  Description of Artificial Sequence: Synthetic oligonucleotide
  Antisense strand to SEQ ID NO: 107380
uuaggcgaguuacuuaacc

SEQ ID NO: 107382 - RNA, 19 nt, Artificial Sequence
  Description of Artificial Sequence: Synthetic oligonucleotide
  Sense strand starting at position 3393 of SEQ ID NO: 1357
accuaaugagcuugucacu

SEQ ID NO: 107383 - RNA, 19 nt, Artificial Sequence
  Description of Artificial Sequence: Synthetic oligonucleotide
  Antisense strand to SEQ ID NO: 107382
agugacaagcucauuaggu

SEQ ID NO: 107384 - RNA, 19 nt, Artificial Sequence
  Description of Artificial Sequence: Synthetic oligonucleotide
  Sense strand starting at position 3379 of SEQ ID NO: 1357
aggcuaauuguggaaccua

SEQ ID NO: 107385 - RNA, 19 nt, Artificial Sequence
  Description of Artificial Sequence: Synthetic oligonucleotide
  Antisense strand to SEQ ID NO: 107384
uagguuccacaauuagccu

SEQ ID NO: 107386 - RNA, 19 nt, Artificial Sequence
  Description of Artificial Sequence: Synthetic oligonucleotide
  Sense strand starting at position 2923 of SEQ ID NO: 1357
agguaaguauugucucugu

SEQ ID NO: 107387 - RNA, 19 nt, Artificial Sequence
  Description of Artificial Sequence: Synthetic oligonucleotide
  Antisense strand to SEQ ID NO: 107386
acagagacaauacuuaccu

SEQ ID NO: 107388 - RNA, 19 nt, Artificial Sequence
  Description of Artificial Sequence: Synthetic oligonucleotide
  Sense strand starting at position 2826 of SEQ ID NO: 1357
gguaacuaugaccguuaua

SEQ ID NO: 107389 - RNA, 19 nt, Artificial Sequence
  Description of Artificial Sequence: Synthetic oligonucleotide
  Antisense strand to SEQ ID NO: 107388
uauaacggucauaguuacc

SEQ ID NO: 107390 - RNA, 19 nt, Artificial Sequence
  Description of Artificial Sequence: Synthetic oligonucleotide
  Sense strand starting at position 2825 of SEQ ID NO: 1357
ugguaacuaugaccguuau

SEQ ID NO: 107391 - RNA, 19 nt, Artificial Sequence
  Description of Artificial Sequence: Synthetic oligonucleotide
  Antisense strand to SEQ ID NO: 107390
auaacggucauaguuacca

SEQ ID NO: 107392 - RNA, 19 nt, Artificial Sequence
  Description of Artificial Sequence: Synthetic oligonucleotide
  Sense strand starting at position 2810 of SEQ ID NO: 1357
uaggucuucccuuaauggu

SEQ ID NO: 107393 - RNA, 19 nt, Artificial Sequence
  Description of Artificial Sequence: Synthetic oligonucleotide
  Antisense strand to SEQ ID NO: 107392
accauuaagggaagaccua

SEQ ID NO: 107394 - RNA, 19 nt, Artificial Sequence
  Description of Artificial Sequence: Synthetic oligonucleotide
  Sense strand starting at position 2805 of SEQ ID NO: 1357
acagauaggucuucccuua

SEQ ID NO: 107395 - RNA, 19 nt, Artificial Sequence
  Description of Artificial Sequence: Synthetic oligonucleotide
  Antisense strand to SEQ ID NO: 107394
uaagggaagaccuaucugu

SEQ ID NO: 107396 - RNA, 19 nt, Artificial Sequence
  Description of Artificial Sequence: Synthetic oligonucleotide
  Sense strand starting at position 2792 of SEQ ID NO: 1357
ccauuaauguagcacagau

SEQ ID NO: 107397 - RNA, 19 nt, Artificial Sequence
  Description of Artificial Sequence: Synthetic oligonucleotide
  Antisense strand to SEQ ID NO: 107396
aucugugcuacauuaaugg

SEQ ID NO: 107398 - RNA, 19 nt, Artificial Sequence
  Description of Artificial Sequence: Synthetic oligonucleotide
  Sense strand starting at position 2443 of SEQ ID NO: 1357
guugaaugaaguuguuguu

SEQ ID NO: 107399 - RNA, 19 nt, Artificial Sequence
  Description of Artificial Sequence: Synthetic oligonucleotide
  Antisense strand to SEQ ID NO: 107398
aacaacaacuucauucaac

SEQ ID NO: 107400 - RNA, 19 nt, Artificial Sequence
  Description of Artificial Sequence: Synthetic oligonucleotide
  Sense strand starting at position 2430 of SEQ ID NO: 1357
uacaauguauuugguugaa

SEQ ID NO: 107401 - RNA, 19 nt, Artificial Sequence
  Description of Artificial Sequence: Synthetic oligonucleotide
  Antisense strand to SEQ ID NO: 107400
uucaaccaaauacauugua

SEQ ID NO: 107402 - RNA, 19 nt, Artificial Sequence
  Description of Artificial Sequence: Synthetic oligonucleotide
  Sense strand starting at position 2420 of SEQ ID NO: 1357
aggugagauguacaaugua

SEQ ID NO: 107403 - RNA, 19 nt, Artificial Sequence
  Description of Artificial Sequence: Synthetic oligonucleotide
  Antisense strand to SEQ ID NO: 107402
uacauuguacaucucaccu

SEQ ID NO: 107404 - RNA, 19 nt, Artificial Sequence
  Description of Artificial Sequence: Synthetic oligonucleotide
  Sense strand starting at position 2374 of SEQ ID NO: 1357
caggaaucguguuuauuuc

SEQ ID NO: 107405 - RNA, 19 nt, Artificial Sequence
  Description of Artificial Sequence: Synthetic oligonucleotide
  Antisense strand to SEQ ID NO: 107404
gaaauaaacacgauuccug

SEQ ID NO: 107406 - RNA, 19 nt, Artificial Sequence
  Description of Artificial Sequence: Synthetic oligonucleotide
  Sense strand starting at position 2331 of SEQ ID NO: 1357
agaauagcuguguacaucu

SEQ ID NO: 107407 - RNA, 19 nt, Artificial Sequence
  Description of Artificial Sequence: Synthetic oligonucleotide
  Antisense strand to SEQ ID NO: 107406
agauguacacagcuauucu

SEQ ID NO: 107408 - RNA, 19 nt, Artificial Sequence
  Description of Artificial Sequence: Synthetic oligonucleotide
  Sense strand starting at position 2330 of SEQ ID NO: 1357
uagaauagcuguguacauc

SEQ ID NO: 107409 - RNA, 19 nt, Artificial Sequence
  Description of Artificial Sequence: Synthetic oligonucleotide
  Antisense strand to SEQ ID NO: 107408
gauguacacagcuauucua

SEQ ID NO: 107410 - RNA, 19 nt, Artificial Sequence
  Description of Artificial Sequence: Synthetic oligonucleotide
  Sense strand starting at position 2329 of SEQ ID NO: 1357
cuagaauagcuguguacau

SEQ ID NO: 107411 - RNA, 19 nt, Artificial Sequence
  Description of Artificial Sequence: Synthetic oligonucleotide
  Antisense strand to SEQ ID NO: 107410
auguacacagcuauucuag

SEQ ID NO: 107412 - RNA, 19 nt, Artificial Sequence
  Description of Artificial Sequence: Synthetic oligonucleotide
  Sense strand starting at position 2326 of SEQ ID NO: 1357
ccucuagaauagcugugua

SEQ ID NO: 107413 - RNA, 19 nt, Artificial Sequence
  Description of Artificial Sequence: Synthetic oligonucleotide
  Antisense strand to SEQ ID NO: 107412
uacacagcuauucuagagg

SEQ ID NO: 107414 - RNA, 19 nt, Artificial Sequence
  Description of Artificial Sequence: Synthetic oligonucleotide
  Sense strand starting at position 2200 of SEQ ID NO: 1357
acaucucuugggcaaacau

SEQ ID NO: 107415 - RNA, 19 nt, Artificial Sequence
  Description of Artificial Sequence: Synthetic oligonucleotide
  Antisense strand to SEQ ID NO: 107414
auguuugcccaagagaugu

SEQ ID NO: 107416 - RNA, 19 nt, Artificial Sequence
  Description of Artificial Sequence: Synthetic oligonucleotide
  Sense strand starting at position 2197 of SEQ ID NO: 1357
uguacaucucuugggcaaa

SEQ ID NO: 107417 - RNA, 19 nt, Artificial Sequence
  Description of Artificial Sequence: Synthetic oligonucleotide
  Antisense strand to SEQ ID NO: 107416
uuugcccaagagauguaca

SEQ ID NO: 107418 - RNA, 19 nt, Artificial Sequence
  Description of Artificial Sequence: Synthetic oligonucleotide
  Sense strand starting at position 2187 of SEQ ID NO: 1357
agaauaacuguguacaucu

SEQ ID NO: 107419 - RNA, 19 nt, Artificial Sequence
  Description of Artificial Sequence: Synthetic oligonucleotide
  Antisense strand to SEQ ID NO: 107418
agauguacacaguuauucu

SEQ ID NO: 107420 - RNA, 19 nt, Artificial Sequence
  Description of Artificial Sequence: Synthetic oligonucleotide
  Sense strand starting at position 2185 of SEQ ID NO: 1357
cuagaauaacuguguacau

SEQ ID NO: 107421 - RNA, 19 nt, Artificial Sequence
  Description of Artificial Sequence: Synthetic oligonucleotide
  Antisense strand to SEQ ID NO: 107420
auguacacaguuauucuag

SEQ ID NO: 107422 - RNA, 19 nt, Artificial Sequence
  Description of Artificial Sequence: Synthetic oligonucleotide
  Sense strand starting at position 1565 of SEQ ID NO: 1357
gggacuuauuaggaacuaa

SEQ ID NO: 107423 - RNA, 19 nt, Artificial Sequence
  Description of Artificial Sequence: Synthetic oligonucleotide
  Antisense strand to SEQ ID NO: 107422
uuaguuccuaauaaguccc

SEQ ID NO: 107424 - RNA, 19 nt, Artificial Sequence
  Description of Artificial Sequence: Synthetic oligonucleotide
  Sense strand starting at position 1564 of SEQ ID NO: 1357
agggacuuauuaggaacua

SEQ ID NO: 107425 - RNA, 19 nt, Artificial Sequence
  Description of Artificial Sequence: Synthetic oligonucleotide
  Antisense strand to SEQ ID NO: 107424
uaguuccuaauaagucccu

SEQ ID NO: 107426 - RNA, 19 nt, Artificial Sequence
  Description of Artificial Sequence: Synthetic oligonucleotide
  Sense strand starting at position 68 of SEQ ID NO: 1357
cuaggaaacuauucgugaa

SEQ ID NO: 107427 - RNA, 19 nt, Artificial Sequence
  Description of Artificial Sequence: Synthetic oligonucleotide
  Antisense strand to SEQ ID NO: 107426
uucacgaauaguuuccuag

SEQ ID NO: 107428 - RNA, 19 nt, Artificial Sequence
  Description of Artificial Sequence: Synthetic oligonucleotide
  Sense strand starting at position 3906 of SEQ ID NO: 1355
augagcuggucagaucaca

SEQ ID NO: 107429 - RNA, 19 nt, Artificial Sequence
  Description of Artificial Sequence: Synthetic oligonucleotide
  Antisense strand to SEQ ID NO: 107428
ugugaucugaccagcucau

SEQ ID NO: 107430 - RNA, 19 nt, Artificial Sequence
  Description of Artificial Sequence: Synthetic oligonucleotide
  Sense strand starting at position 3904 of SEQ ID NO: 1355
ugaugagcuggucagauca

SEQ ID NO: 107431 - RNA, 19 nt, Artificial Sequence
  Description of Artificial Sequence: Synthetic oligonucleotide
  Antisense strand to SEQ ID NO: 107430
ugaucugaccagcucauca

SEQ ID NO: 107432 - RNA, 19 nt, Artificial Sequence
  Description of Artificial Sequence: Synthetic oligonucleotide
  Sense strand starting at position 3901 of SEQ ID NO: 1355
gccugaugagcuggucaga

SEQ ID NO: 107433 - RNA, 19 nt, Artificial Sequence
  Description of Artificial Sequence: Synthetic oligonucleotide
  Antisense strand to SEQ ID NO: 107432
ucugaccagcucaucaggc

SEQ ID NO: 107434 - RNA, 19 nt, Artificial Sequence
  Description of Artificial Sequence: Synthetic oligonucleotide
  Sense strand starting at position 3882 of SEQ ID NO: 1355
gcagaaagcuaauugugga

SEQ ID NO: 107435 - RNA, 19 nt, Artificial Sequence
  Description of Artificial Sequence: Synthetic oligonucleotide
  Antisense strand to SEQ ID NO: 107434
uccacaauuagcuuucugc

SEQ ID NO: 107436 - RNA, 19 nt, Artificial Sequence
  Description of Artificial Sequence: Synthetic oligonucleotide
  Sense strand starting at position 3703 of SEQ ID NO: 1355
ucuguuggauaacuauaua

SEQ ID NO: 107437 - RNA, 19 nt, Artificial Sequence
  Description of Artificial Sequence: Synthetic oligonucleotide
  Antisense strand to SEQ ID NO: 107436
uauauaguuauccaacaga

SEQ ID NO: 107438 - RNA, 19 nt, Artificial Sequence
  Description of Artificial Sequence: Synthetic oligonucleotide
  Sense strand starting at position 3700 of SEQ ID NO: 1355
gugucuguuggauaacuau

SEQ ID NO: 107439 - RNA, 19 nt, Artificial Sequence
  Description of Artificial Sequence: Synthetic oligonucleotide
  Antisense strand to SEQ ID NO: 107438
auaguuauccaacagacac

SEQ ID NO: 107440 - RNA, 19 nt, Artificial Sequence
  Description of Artificial Sequence: Synthetic oligonucleotide
  Sense strand starting at position 3698 of SEQ ID NO: 1355
uagugucuguuggauaacu

SEQ ID NO: 107441 - RNA, 19 nt, Artificial Sequence
  Description of Artificial Sequence: Synthetic oligonucleotide
  Antisense strand to SEQ ID NO: 107440
aguuauccaacagacacua

SEQ ID NO: 107442 - RNA, 19 nt, Artificial Sequence
  Description of Artificial Sequence: Synthetic oligonucleotide
  Sense strand starting at position 3694 of SEQ ID NO: 1355
cagcuagugucuguuggau

SEQ ID NO: 107443 - RNA, 19 nt, Artificial Sequence
  Description of Artificial Sequence: Synthetic oligonucleotide
  Antisense strand to SEQ ID NO: 107442
auccaacagacacuagcug

SEQ ID NO: 107444 - RNA, 19 nt, Artificial Sequence
  Description of Artificial Sequence: Synthetic oligonucleotide
  Sense strand starting at position 3664 of SEQ ID NO: 1355
cgccuaaagucacacagua

SEQ ID NO: 107445 - RNA, 19 nt, Artificial Sequence
  Description of Artificial Sequence: Synthetic oligonucleotide
  Antisense strand to SEQ ID NO: 107444
uacugugugacuuuaggcg

SEQ ID NO: 107446 - RNA, 19 nt, Artificial Sequence
  Description of Artificial Sequence: Synthetic oligonucleotide
  Sense strand starting at position 3656 of SEQ ID NO: 1355
aaguaacucgccuaaaguc

SEQ ID NO: 107447 - RNA, 19 nt, Artificial Sequence
  Description of Artificial Sequence: Synthetic oligonucleotide
  Antisense strand to SEQ ID NO: 107446
gacuuuaggcgaguuacuu

SEQ ID NO: 107448 - RNA, 19 nt, Artificial Sequence
  Description of Artificial Sequence: Synthetic oligonucleotide
  Sense strand starting at position 3654 of SEQ ID NO: 1355
uuaaguaacucgccuaaag

SEQ ID NO: 107449 - RNA, 19 nt, Artificial Sequence
  Description of Artificial Sequence: Synthetic oligonucleotide
  Antisense strand to SEQ ID NO: 107448
cuuuaggcgaguuacuuaa

SEQ ID NO: 107450 - RNA, 19 nt, Artificial Sequence
  Description of Artificial Sequence: Synthetic oligonucleotide
  Sense strand starting at position 3652 of SEQ ID NO: 1355
gguuaaguaacucgccuaa

SEQ ID NO: 107451 - RNA, 19 nt, Artificial Sequence
  Description of Artificial Sequence: Synthetic oligonucleotide
  Antisense strand to SEQ ID NO: 107450
uuaggcgaguuacuuaacc

SEQ ID NO: 107452 - RNA, 19 nt, Artificial Sequence
  Description of Artificial Sequence: Synthetic oligonucleotide
  Sense strand starting at position 3573 of SEQ ID NO: 1355
accuaaugagcuugucacu

SEQ ID NO: 107453 - RNA, 19 nt, Artificial Sequence
  Description of Artificial Sequence: Synthetic oligonucleotide
  Antisense strand to SEQ ID NO: 107452
agugacaagcucauuaggu

SEQ ID NO: 107454 - RNA, 19 nt, Artificial Sequence
  Description of Artificial Sequence: Synthetic oligonucleotide
  Sense strand starting at position 3559 of SEQ ID NO: 1355
aggcuaauuguggaaccua

SEQ ID NO: 107455 - RNA, 19 nt, Artificial Sequence
  Description of Artificial Sequence: Synthetic oligonucleotide
  Antisense strand to SEQ ID NO: 107454
uagguuccacaauuagccu

SEQ ID NO: 107456 - RNA, 19 nt, Artificial Sequence
  Description of Artificial Sequence: Synthetic oligonucleotide
  Sense strand starting at position 3103 of SEQ ID NO: 1355
agguaaguauugucucugu

SEQ ID NO: 107457 - RNA, 19 nt, Artificial Sequence
  Description of Artificial Sequence: Synthetic oligonucleotide
  Antisense strand to SEQ ID NO: 107456
acagagacaauacuuaccu

SEQ ID NO: 107458 - RNA, 19 nt, Artificial Sequence
  Description of Artificial Sequence: Synthetic oligonucleotide
  Sense strand starting at position 3101 of SEQ ID NO: 1355
ugagguaaguauugucucu

SEQ ID NO: 107459 - RNA, 19 nt, Artificial Sequence
  Description of Artificial Sequence: Synthetic oligonucleotide
  Antisense strand to SEQ ID NO: 107458
agagacaauacuuaccuca

SEQ ID NO: 107460 - RNA, 19 nt, Artificial Sequence
  Description of Artificial Sequence: Synthetic oligonucleotide
  Sense strand starting at position 3011 of SEQ ID NO: 1355
cuaugaccguuauaauagu

SEQ ID NO: 107461 - RNA, 19 nt, Artificial Sequence
  Description of Artificial Sequence: Synthetic oligonucleotide
  Antisense strand to SEQ ID NO: 107460
acuauuauaacggucauag

SEQ ID NO: 107462 - RNA, 19 nt, Artificial Sequence
  Description of Artificial Sequence: Synthetic oligonucleotide
  Sense strand starting at position 3006 of SEQ ID NO: 1355
gguaacuaugaccguuaua

SEQ ID NO: 107463 - RNA, 19 nt, Artificial Sequence
  Description of Artificial Sequence: Synthetic oligonucleotide
  Antisense strand to SEQ ID NO: 107462
uauaacggucauaguuacc

SEQ ID NO: 107464 - RNA, 19 nt, Artificial Sequence
  Description of Artificial Sequence: Synthetic oligonucleotide
  Sense strand starting at position 3005 of SEQ ID NO: 1355
ugguaacuaugaccguuau

SEQ ID NO: 107465 - RNA, 19 nt, Artificial Sequence
  Description of Artificial Sequence: Synthetic oligonucleotide
  Antisense strand to SEQ ID NO: 107464
auaacggucauaguuacca

SEQ ID NO: 107466 - RNA, 19 nt, Artificial Sequence
  Description of Artificial Sequence: Synthetic oligonucleotide
  Sense strand starting at position 2990 of SEQ ID NO: 1355
uaggucuucccuuaauggu

SEQ ID NO: 107467 - RNA, 19 nt, Artificial Sequence
  Description of Artificial Sequence: Synthetic oligonucleotide
  Antisense strand to SEQ ID NO: 107466
accauuaagggaagaccua

SEQ ID NO: 107468 - RNA, 19 nt, Artificial Sequence
  Description of Artificial Sequence: Synthetic oligonucleotide
  Sense strand starting at position 2985 of SEQ ID NO: 1355
acagauaggucuucccuua

SEQ ID NO: 107469 - RNA, 19 nt, Artificial Sequence
  Description of Artificial Sequence: Synthetic oligonucleotide
  Antisense strand to SEQ ID NO: 107468
uaagggaagaccuaucugu

SEQ ID NO: 107470 - RNA, 19 nt, Artificial Sequence
  Description of Artificial Sequence: Synthetic oligonucleotide
  Sense strand starting at position 2972 of SEQ ID NO: 1355
ccauuaauguagcacagau

SEQ ID NO: 107471 - RNA, 19 nt, Artificial Sequence
  Description of Artificial Sequence: Synthetic oligonucleotide
  Antisense strand to SEQ ID NO: 107470
aucugugcuacauuaaugg

SEQ ID NO: 107472 - RNA, 19 nt, Artificial Sequence
  Description of Artificial Sequence: Synthetic oligonucleotide
  Sense strand starting at position 2623 of SEQ ID NO: 1355
guugaaugaaguuguuguu

SEQ ID NO: 107473 - RNA, 19 nt, Artificial Sequence
  Description of Artificial Sequence: Synthetic oligonucleotide
  Antisense strand to SEQ ID NO: 107472
aacaacaacuucauucaac

SEQ ID NO: 107474 - RNA, 19 nt, Artificial Sequence
  Description of Artificial Sequence: Synthetic oligonucleotide
  Sense strand starting at position 2610 of SEQ ID NO: 1355
uacaauguauuugguugaa

SEQ ID NO: 107475 - RNA, 19 nt, Artificial Sequence
  Description of Artificial Sequence: Synthetic oligonucleotide
  Antisense strand to SEQ ID NO: 107474
uucaaccaaauacauugua

SEQ ID NO: 107476 - RNA, 19 nt, Artificial Sequence
  Description of Artificial Sequence: Synthetic oligonucleotide
  Sense strand starting at position 2600 of SEQ ID NO: 1355
aggugagauguacaaugua

SEQ ID NO: 107477 - RNA, 19 nt, Artificial Sequence
  Description of Artificial Sequence: Synthetic oligonucleotide
  Antisense strand to SEQ ID NO: 107476
uacauuguacaucucaccu

SEQ ID NO: 107478 - RNA, 19 nt, Artificial Sequence
  Description of Artificial Sequence: Synthetic oligonucleotide
  Sense strand starting at position 2554 of SEQ ID NO: 1355
caggaaucguguuuauuuc

SEQ ID NO: 107479 - RNA, 19 nt, Artificial Sequence
  Description of Artificial Sequence: Synthetic oligonucleotide
  Antisense strand to SEQ ID NO: 107478
gaaauaaacacgauuccug

SEQ ID NO: 107480 - RNA, 19 nt, Artificial Sequence
  Description of Artificial Sequence: Synthetic oligonucleotide
  Sense strand starting at position 2511 of SEQ ID NO: 1355
agaauagcuguguacaucu

SEQ ID NO: 107481 - RNA, 19 nt, Artificial Sequence
  Description of Artificial Sequence: Synthetic oligonucleotide
  Antisense strand to SEQ ID NO: 107480
agauguacacagcuauucu

SEQ ID NO: 107482 - RNA, 19 nt, Artificial Sequence
  Description of Artificial Sequence: Synthetic oligonucleotide
  Sense strand starting at position 2510 of SEQ ID NO: 1355
uagaauagcuguguacauc

SEQ ID NO: 107483 - RNA, 19 nt, Artificial Sequence
  Description of Artificial Sequence: Synthetic oligonucleotide
  Antisense strand to SEQ ID NO: 107482
gauguacacagcuauucua

SEQ ID NO: 107484 - RNA, 19 nt, Artificial Sequence
  Description of Artificial Sequence: Synthetic oligonucleotide
  Sense strand starting at position 2509 of SEQ ID NO: 1355
cuagaauagcuguguacau

SEQ ID NO: 107485 - RNA, 19 nt, Artificial Sequence
  Description of Artificial Sequence: Synthetic oligonucleotide
  Antisense strand to SEQ ID NO: 107484
auguacacagcuauucuag

SEQ ID NO: 107486 - RNA, 19 nt, Artificial Sequence
  Description of Artificial Sequence: Synthetic oligonucleotide
  Sense strand starting at position 2506 of SEQ ID NO: 1355
ccucuagaauagcugugua

SEQ ID NO: 107487 - RNA, 19 nt, Artificial Sequence
  Description of Artificial Sequence: Synthetic oligonucleotide
  Antisense strand to SEQ ID NO: 107486
uacacagcuauucuagagg

SEQ ID NO: 107488 - RNA, 19 nt, Artificial Sequence
  Description of Artificial Sequence: Synthetic oligonucleotide
  Sense strand starting at position 2380 of SEQ ID NO: 1355
acaucucuugggcaaacau

SEQ ID NO: 107489 - RNA, 19 nt, Artificial Sequence
  Description of Artificial Sequence: Synthetic oligonucleotide
  Antisense strand to SEQ ID NO: 107488
auguuugcccaagagaugu

SEQ ID NO: 107490 - RNA, 19 nt, Artificial Sequence
  Description of Artificial Sequence: Synthetic oligonucleotide
  Sense strand starting at position 2377 of SEQ ID NO: 1355
uguacaucucuugggcaaa

SEQ ID NO: 107491 - RNA, 19 nt, Artificial Sequence
  Description of Artificial Sequence: Synthetic oligonucleotide
  Antisense strand to SEQ ID NO: 107490
uuugcccaagagauguaca

SEQ ID NO: 107492 - RNA, 19 nt, Artificial Sequence
  Description of Artificial Sequence: Synthetic oligonucleotide
  Sense strand starting at position 2376 of SEQ ID NO: 1355
guguacaucucuugggcaa

SEQ ID NO: 107493 - RNA, 19 nt, Artificial Sequence
  Description of Artificial Sequence: Synthetic oligonucleotide
  Antisense strand to SEQ ID NO: 107492
uugcccaagagauguacac

SEQ ID NO: 107494 - RNA, 19 nt, Artificial Sequence
  Description of Artificial Sequence: Synthetic oligonucleotide
  Sense strand starting at position 2367 of SEQ ID NO: 1355
agaauaacuguguacaucu

SEQ ID NO: 107495 - RNA, 19 nt, Artificial Sequence
  Description of Artificial Sequence: Synthetic oligonucleotide
  Antisense strand to SEQ ID NO: 107494
agauguacacaguuauucu

SEQ ID NO: 107496 - RNA, 19 nt, Artificial Sequence
  Description of Artificial Sequence: Synthetic oligonucleotide
  Sense strand starting at position 2365 of SEQ ID NO: 1355
cuagaauaacuguguacau

SEQ ID NO: 107497 - RNA, 19 nt, Artificial Sequence
  Description of Artificial Sequence: Synthetic oligonucleotide
  Antisense strand to SEQ ID NO: 107496
auguacacaguuauucuag

SEQ ID NO: 107498 - RNA, 19 nt, Artificial Sequence
  Description of Artificial Sequence: Synthetic oligonucleotide
  Sense strand starting at position 1745 of SEQ ID NO: 1355
gggacuuauuaggaacuaa

SEQ ID NO: 107499 - RNA, 19 nt, Artificial Sequence
  Description of Artificial Sequence: Synthetic oligonucleotide
  Antisense strand to SEQ ID NO: 107498
uuaguuccuaauaaguccc

SEQ ID NO: 107500 - RNA, 19 nt, Artificial Sequence
  Description of Artificial Sequence: Synthetic oligonucleotide
  Sense strand starting at position 1744 of SEQ ID NO: 1355
agggacuuauuaggaacua

SEQ ID NO: 107501 - RNA, 19 nt, Artificial Sequence
  Description of Artificial Sequence: Synthetic oligonucleotide
  Antisense strand to SEQ ID NO: 107500
uaguuccuaauaagucccu

SEQ ID NO: 107502 - RNA, 19 nt, Artificial Sequence
  Description of Artificial Sequence: Synthetic oligonucleotide
  Sense strand starting at position 248 of SEQ ID NO: 1355
cuaggaaacuauucgugaa

SEQ ID NO: 107503 - RNA, 19 nt, Artificial Sequence
  Description of Artificial Sequence: Synthetic oligonucleotide
  Antisense strand to SEQ ID NO: 107502
uucacgaauaguuuccuag

SEQ ID NO: 107504 - RNA, 19 nt, Artificial Sequence
  Description of Artificial Sequence: Synthetic oligonucleotide
  Sense strand starting at position 30 of SEQ ID NO: 1355
cuuguaaacgaucagaauc

SEQ ID NO: 107505 - RNA, 19 nt, Artificial Sequence
  Description of Artificial Sequence: Synthetic oligonucleotide
  Antisense strand to SEQ ID NO: 107504
gauucugaucguuuacaag

SEQ ID NO: 107506 - RNA, 19 nt, Artificial Sequence
  Description of Artificial Sequence: Synthetic oligonucleotide
  Sense strand starting at position 27 of SEQ ID NO: 1355
ccgcuuguaaacgaucaga

SEQ ID NO: 107507 - RNA, 19 nt, Artificial Sequence
  Description of Artificial Sequence: Synthetic oligonucleotide
  Antisense strand to SEQ ID NO: 107506
ucugaucguuuacaagcgg

SEQ ID NO: 107508 - RNA, 19 nt, Artificial Sequence
  Description of Artificial Sequence: Synthetic oligonucleotide
  Sense strand starting at position 3453 of SEQ ID NO: 1358
gcaugagucaacuguccag

SEQ ID NO: 107509 - RNA, 19 nt, Artificial Sequence
  Description of Artificial Sequence: Synthetic oligonucleotide
  Antisense strand to SEQ ID NO: 107508
cuggacaguugacucaugc

SEQ ID NO: 107510 - RNA, 19 nt, Artificial Sequence
  Description of Artificial Sequence: Synthetic oligonucleotide
  Sense strand starting at position 3374 of SEQ ID NO: 1358
ugcuuaaggccgcugugau

SEQ ID NO: 107511 - RNA, 19 nt, Artificial Sequence
  Description of Artificial Sequence: Synthetic oligonucleotide
  Antisense strand to SEQ ID NO: 107510
aucacagcggccuuaagca

SEQ ID NO: 107512 - RNA, 19 nt, Artificial Sequence
  Description of Artificial Sequence: Synthetic oligonucleotide
  Sense strand starting at position 3235 of SEQ ID NO: 1358
gagucuaaugguuauagcu

SEQ ID NO: 107513 - RNA, 19 nt, Artificial Sequence
  Description of Artificial Sequence: Synthetic oligonucleotide
  Antisense strand to SEQ ID NO: 107512
agcuauaaccauuagacuc

SEQ ID NO: 107514 - RNA, 19 nt, Artificial Sequence
  Description of Artificial Sequence: Synthetic oligonucleotide
  Sense strand starting at position 3044 of SEQ ID NO: 1358
ccuugaauggugcaacuga

SEQ ID NO: 107515 - RNA, 19 nt, Artificial Sequence
  Description of Artificial Sequence: Synthetic oligonucleotide
  Antisense strand to SEQ ID NO: 107514
ucaguugcaccauucaagg

SEQ ID NO: 107516 - RNA, 19 nt, Artificial Sequence
  Description of Artificial Sequence: Synthetic oligonucleotide
  Sense strand starting at position 3013 of SEQ ID NO: 1358
gcuccaggucuugaaauga

SEQ ID NO: 107517 - RNA, 19 nt, Artificial Sequence
  Description of Artificial Sequence: Synthetic oligonucleotide
  Antisense strand to SEQ ID NO: 107516
ucauuucaagaccuggagc

SEQ ID NO: 107518 - RNA, 19 nt, Artificial Sequence
  Description of Artificial Sequence: Synthetic oligonucleotide
  Sense strand starting at position 2754 of SEQ ID NO: 1358
ugggaugacagcugggaau

SEQ ID NO: 107519 - RNA, 19 nt, Artificial Sequence
  Description of Artificial Sequence: Synthetic oligonucleotide
  Antisense strand to SEQ ID NO: 107518
auucccagcugucauccca

SEQ ID NO: 107520 - RNA, 19 nt, Artificial Sequence
  Description of Artificial Sequence: Synthetic oligonucleotide
  Sense strand starting at position 2565 of SEQ ID NO: 1358
guuaauuccucaguccaug

SEQ ID NO: 107521 - RNA, 19 nt, Artificial Sequence
  Description of Artificial Sequence: Synthetic oligonucleotide
  Antisense strand to SEQ ID NO: 107520
cauggacugaggaauuaac

SEQ ID NO: 107522 - RNA, 19 nt, Artificial Sequence
  Description of Artificial Sequence: Synthetic oligonucleotide
  Sense strand starting at position 2549 of SEQ ID NO: 1358
gagaucgcccaucauaguu

SEQ ID NO: 107523 - RNA, 19 nt, Artificial Sequence
  Description of Artificial Sequence: Synthetic oligonucleotide
  Antisense strand to SEQ ID NO: 107522
aacuaugaugggcgaucuc

SEQ ID NO: 107524 - RNA, 19 nt, Artificial Sequence
  Description of Artificial Sequence: Synthetic oligonucleotide
  Sense strand starting at position 2500 of SEQ ID NO: 1358
acaggacagcugugacaau

SEQ ID NO: 107525 - RNA, 19 nt, Artificial Sequence
  Description of Artificial Sequence: Synthetic oligonucleotide
  Antisense strand to SEQ ID NO: 107524
auugucacagcuguccugu

SEQ ID NO: 107526 - RNA, 19 nt, Artificial Sequence
  Description of Artificial Sequence: Synthetic oligonucleotide
  Sense strand starting at position 2289 of SEQ ID NO: 1358
uccagaauagcugguggua

SEQ ID NO: 107527 - RNA, 19 nt, Artificial Sequence
  Description of Artificial Sequence: Synthetic oligonucleotide
  Antisense strand to SEQ ID NO: 107526
uaccaccagcuauucugga

SEQ ID NO: 107528 - RNA, 19 nt, Artificial Sequence
  Description of Artificial Sequence: Synthetic oligonucleotide
  Sense strand starting at position 1821 of SEQ ID NO: 1358
ugacaaauccucgguggaa

SEQ ID NO: 107529 - RNA, 19 nt, Artificial Sequence
  Description of Artificial Sequence: Synthetic oligonucleotide
  Antisense strand to SEQ ID NO: 107528
uuccaccgaggauuuguca

SEQ ID NO: 107530 - RNA, 19 nt, Artificial Sequence
  Description of Artificial Sequence: Synthetic oligonucleotide
  Sense strand starting at position 1820 of SEQ ID NO: 1358
cugacaaauccucggugga

SEQ ID NO: 107531 - RNA, 19 nt, Artificial Sequence
  Description of Artificial Sequence: Synthetic oligonucleotide
  Antisense strand to SEQ ID NO: 107530
uccaccgaggauuugucag

SEQ ID NO: 107532 - RNA, 19 nt, Artificial Sequence
  Description of Artificial Sequence: Synthetic oligonucleotide
  Sense strand starting at position 1558 of SEQ ID NO: 1358
gguagaguguauccacuca

SEQ ID NO: 107533 - RNA, 19 nt, Artificial Sequence
  Description of Artificial Sequence: Synthetic oligonucleotide
  Antisense strand to SEQ ID NO: 107532
ugaguggauacacucuacc

SEQ ID NO: 107534 - RNA, 19 nt, Artificial Sequence
  Description of Artificial Sequence: Synthetic oligonucleotide
  Sense strand starting at position 1525 of SEQ ID NO: 1358
gucacucaaggccagauau

SEQ ID NO: 107535 - RNA, 19 nt, Artificial Sequence
  Description of Artificial Sequence: Synthetic oligonucleotide
  Antisense strand to SEQ ID NO: 107534
auaucuggccuugagugac

SEQ ID NO: 107536 - RNA, 19 nt, Artificial Sequence
  Description of Artificial Sequence: Synthetic oligonucleotide
  Sense strand starting at position 1501 of SEQ ID NO: 1358
cuggguuaagucugaauau

SEQ ID NO: 107537 - RNA, 19 nt, Artificial Sequence
  Description of Artificial Sequence: Synthetic oligonucleotide
  Antisense strand to SEQ ID NO: 107536
auauucagacuuaacccag

SEQ ID NO: 107538 - RNA, 19 nt, Artificial Sequence
  Description of Artificial Sequence: Synthetic oligonucleotide
  Sense strand starting at position 1457 of SEQ ID NO: 1358
uuagcuuugguauaacaag

SEQ ID NO: 107539 - RNA, 19 nt, Artificial Sequence
  Description of Artificial Sequence: Synthetic oligonucleotide
  Antisense strand to SEQ ID NO: 107538
cuuguuauaccaaagcuaa

SEQ ID NO: 107540 - RNA, 19 nt, Artificial Sequence
  Description of Artificial Sequence: Synthetic oligonucleotide
  Sense strand starting at position 1454 of SEQ ID NO: 1358
ggauuagcuuugguauaac

SEQ ID NO: 107541 - RNA, 19 nt, Artificial Sequence
  Description of Artificial Sequence: Synthetic oligonucleotide
  Antisense strand to SEQ ID NO: 107540
guuauaccaaagcuaaucc

SEQ ID NO: 107542 - RNA, 19 nt, Artificial Sequence
  Description of Artificial Sequence: Synthetic oligonucleotide
  Sense strand starting at position 1452 of SEQ ID NO: 1358
guggauuagcuuugguaua

SEQ ID NO: 107543 - RNA, 19 nt, Artificial Sequence
  Description of Artificial Sequence: Synthetic oligonucleotide
  Antisense strand to SEQ ID NO: 107542
uauaccaaagcuaauccac

SEQ ID NO: 107544 - RNA, 19 nt, Artificial Sequence
  Description of Artificial Sequence: Synthetic oligonucleotide
  Sense strand starting at position 1446 of SEQ ID NO: 1358
uguagaguggauuagcuuu

SEQ ID NO: 107545 - RNA, 19 nt, Artificial Sequence
  Description of Artificial Sequence: Synthetic oligonucleotide
  Antisense strand to SEQ ID NO: 107544
aaagcuaauccacucuaca

SEQ ID NO: 107546 - RNA, 19 nt, Artificial Sequence
  Description of Artificial Sequence: Synthetic oligonucleotide
  Sense strand starting at position 1441 of SEQ ID NO: 1358
cccuuuguagaguggauua

SEQ ID NO: 107547 - RNA, 19 nt, Artificial Sequence
  Description of Artificial Sequence: Synthetic oligonucleotide
  Antisense strand to SEQ ID NO: 107546
uaauccacucuacaaaggg

SEQ ID NO: 107548 - RNA, 19 nt, Artificial Sequence
  Description of Artificial Sequence: Synthetic oligonucleotide
  Sense strand starting at position 1435 of SEQ ID NO: 1358
gugaaacccuuuguagagu

SEQ ID NO: 107549 - RNA, 19 nt, Artificial Sequence
  Description of Artificial Sequence: Synthetic oligonucleotide
  Antisense strand to SEQ ID NO: 107548
acucuacaaaggguuucac

SEQ ID NO: 107550 - RNA, 19 nt, Artificial Sequence
  Description of Artificial Sequence: Synthetic oligonucleotide
  Sense strand starting at position 1434 of SEQ ID NO: 1358
cgugaaacccuuuguagag

SEQ ID NO: 107551 - RNA, 19 nt, Artificial Sequence
  Description of Artificial Sequence: Synthetic oligonucleotide
  Antisense strand to SEQ ID NO: 107550
cucuacaaaggguuucacg

SEQ ID NO: 107552 - RNA, 19 nt, Artificial Sequence
  Description of Artificial Sequence: Synthetic oligonucleotide
  Sense strand starting at position 1132 of SEQ ID NO: 1358
uccugagaugccugccaaa

SEQ ID NO: 107553 - RNA, 19 nt, Artificial Sequence
  Description of Artificial Sequence: Synthetic oligonucleotide
  Antisense strand to SEQ ID NO: 107552
uuuggcaggcaucucagga

SEQ ID NO: 107554 - RNA, 19 nt, Artificial Sequence
  Description of Artificial Sequence: Synthetic oligonucleotide
  Sense strand starting at position 1121 of SEQ ID NO: 1358
ugacaccucuuuccugaga

SEQ ID NO: 107555 - RNA, 19 nt, Artificial Sequence
  Description of Artificial Sequence: Synthetic oligonucleotide
  Antisense strand to SEQ ID NO: 107554
ucucaggaaagagguguca

SEQ ID NO: 107556 - RNA, 19 nt, Artificial Sequence
  Description of Artificial Sequence: Synthetic oligonucleotide
  Sense strand starting at position 1065 of SEQ ID NO: 1358
cugaaagucuugguccaga

SEQ ID NO: 107557 - RNA, 19 nt, Artificial Sequence
  Description of Artificial Sequence: Synthetic oligonucleotide
  Antisense strand to SEQ ID NO: 107556
ucuggaccaagacuuucag

SEQ ID NO: 107558 - RNA, 19 nt, Artificial Sequence
  Description of Artificial Sequence: Synthetic oligonucleotide
  Sense strand starting at position 1055 of SEQ ID NO: 1358
gguugcuuuccugaaaguc

SEQ ID NO: 107559 - RNA, 19 nt, Artificial Sequence
  Description of Artificial Sequence: Synthetic oligonucleotide
  Antisense strand to SEQ ID NO: 107558
gacuuucaggaaagcaacc

SEQ ID NO: 107560 - RNA, 19 nt, Artificial Sequence
  Description of Artificial Sequence: Synthetic oligonucleotide
  Sense strand starting at position 1053 of SEQ ID NO: 1358
cugguugcuuuccugaaag

SEQ ID NO: 107561 - RNA, 19 nt, Artificial Sequence
  Description of Artificial Sequence: Synthetic oligonucleotide
  Antisense strand to SEQ ID NO: 107560
cuuucaggaaagcaaccag

SEQ ID NO: 107562 - RNA, 19 nt, Artificial Sequence
  Description of Artificial Sequence: Synthetic oligonucleotide
  Sense strand starting at position 806 of SEQ ID NO: 1358
aggugagugucuucccaac

SEQ ID NO: 107563 - RNA, 19 nt, Artificial Sequence
  Description of Artificial Sequence: Synthetic oligonucleotide
  Antisense strand to SEQ ID NO: 107562
guugggaagacacucaccu

SEQ ID NO: 107564 - RNA, 19 nt, Artificial Sequence
  Description of Artificial Sequence: Synthetic oligonucleotide
  Sense strand starting at position 770 of SEQ ID NO: 1358
ggcgccgugaggcuuuaaa

SEQ ID NO: 107565 - RNA, 19 nt, Artificial Sequence
  Description of Artificial Sequence: Synthetic oligonucleotide
  Antisense strand to SEQ ID NO: 107564
uuuaaagccucacggcgcc

SEQ ID NO: 107566 - RNA, 19 nt, Artificial Sequence
  Description of Artificial Sequence: Synthetic oligonucleotide
  Sense strand starting at position 734 of SEQ ID NO: 1358
gguaaagguaugugugaca

SEQ ID NO: 107567 - RNA, 19 nt, Artificial Sequence
  Description of Artificial Sequence: Synthetic oligonucleotide
  Antisense strand to SEQ ID NO: 107566
ugucacacauaccuuuacc

SEQ ID NO: 107568 - RNA, 19 nt, Artificial Sequence
  Description of Artificial Sequence: Synthetic oligonucleotide
  Sense strand starting at position 732 of SEQ ID NO: 1358
cugguaaagguauguguga

SEQ ID NO: 107569 - RNA, 19 nt, Artificial Sequence
  Description of Artificial Sequence: Synthetic oligonucleotide
  Antisense strand to SEQ ID NO: 107568
ucacacauaccuuuaccag

SEQ ID NO: 107570 - RNA, 19 nt, Artificial Sequence
  Description of Artificial Sequence: Synthetic oligonucleotide
  Sense strand starting at position 522 of SEQ ID NO: 1358
gcaagaaacgauggaaucu

SEQ ID NO: 107571 - RNA, 19 nt, Artificial Sequence
  Description of Artificial Sequence: Synthetic oligonucleotide
  Antisense strand to SEQ ID NO: 107570
agauuccaucguuucuugc

SEQ ID NO: 107572 - RNA, 19 nt, Artificial Sequence
  Description of Artificial Sequence: Synthetic oligonucleotide
  Sense strand starting at position 419 of SEQ ID NO: 1358
cuuacacuguuaguaaaca

SEQ ID NO: 107573 - RNA, 19 nt, Artificial Sequence
  Description of Artificial Sequence: Synthetic oligonucleotide
  Antisense strand to SEQ ID NO: 107572
uguuuacuaacaguguaag

SEQ ID NO: 107574 - RNA, 19 nt, Artificial Sequence
  Description of Artificial Sequence: Synthetic oligonucleotide
  Sense strand starting at position 404 of SEQ ID NO: 1358
agaaaucugcuugggcuua

SEQ ID NO: 107575 - RNA, 19 nt, Artificial Sequence
  Description of Artificial Sequence: Synthetic oligonucleotide
  Antisense strand to SEQ ID NO: 107574
uaagcccaagcagauuucu

SEQ ID NO: 107576 - RNA, 19 nt, Artificial Sequence
  Description of Artificial Sequence: Synthetic oligonucleotide
  Sense strand starting at position 403 of SEQ ID NO: 1358
aagaaaucugcuugggcuu

SEQ ID NO: 107577 - RNA, 19 nt, Artificial Sequence
  Description of Artificial Sequence: Synthetic oligonucleotide
  Antisense strand to SEQ ID NO: 107576
aagcccaagcagauuucuu

SEQ ID NO: 107578 - RNA, 19 nt, Artificial Sequence
  Description of Artificial Sequence: Synthetic oligonucleotide
  Sense strand starting at position 402 of SEQ ID NO: 1358
caagaaaucugcuugggcu

SEQ ID NO: 107579 - RNA, 19 nt, Artificial Sequence
  Description of Artificial Sequence: Synthetic oligonucleotide
  Antisense strand to SEQ ID NO: 107578
agcccaagcagauuucuug

SEQ ID NO: 107580 - RNA, 19 nt, Artificial Sequence
  Description of Artificial Sequence: Synthetic oligonucleotide
  Sense strand starting at position 338 of SEQ ID NO: 1358
ugauaacugccugauccua

SEQ ID NO: 107581 - RNA, 19 nt, Artificial Sequence
  Description of Artificial Sequence: Synthetic oligonucleotide
  Antisense strand to SEQ ID NO: 107580
uaggaucaggcaguuauca

SEQ ID NO: 107582 - RNA, 19 nt, Artificial Sequence
  Description of Artificial Sequence: Synthetic oligonucleotide
  Sense strand starting at position 337 of SEQ ID NO: 1358
augauaacugccugauccu

SEQ ID NO: 107583 - RNA, 19 nt, Artificial Sequence
  Description of Artificial Sequence: Synthetic oligonucleotide
  Antisense strand to SEQ ID NO: 107582
aggaucaggcaguuaucau

SEQ ID NO: 107584 - RNA, 19 nt, Artificial Sequence
  Description of Artificial Sequence: Synthetic oligonucleotide
  Sense strand starting at position 309 of SEQ ID NO: 1358
gugacuggauauuaauuua

SEQ ID NO: 107585 - RNA, 19 nt, Artificial Sequence
  Description of Artificial Sequence: Synthetic oligonucleotide
  Antisense strand to SEQ ID NO: 107584
uaaauuaauauccagucac

SEQ ID NO: 107586 - RNA, 19 nt, Artificial Sequence
  Description of Artificial Sequence: Synthetic oligonucleotide
  Sense strand starting at position 303 of SEQ ID NO: 1358
uggugugugacuggauauu

SEQ ID NO: 107587 - RNA, 19 nt, Artificial Sequence
  Description of Artificial Sequence: Synthetic oligonucleotide
  Antisense strand to SEQ ID NO: 107586
aauauccagucacacacca

SEQ ID NO: 107588 - RNA, 19 nt, Artificial Sequence
  Description of Artificial Sequence: Synthetic oligonucleotide
  Sense strand starting at position 3867 of SEQ ID NO: 1361
agguaaguauugucucugu

SEQ ID NO: 107589 - RNA, 19 nt, Artificial Sequence
  Description of Artificial Sequence: Synthetic oligonucleotide
  Antisense strand to SEQ ID NO: 107588
acagagacaauacuuaccu

SEQ ID NO: 107590 - RNA, 19 nt, Artificial Sequence
  Description of Artificial Sequence: Synthetic oligonucleotide
  Sense strand starting at position 3865 of SEQ ID NO: 1361
ugagguaaguauugucucu

SEQ ID NO: 107591 - RNA, 19 nt, Artificial Sequence
  Description of Artificial Sequence: Synthetic oligonucleotide
  Antisense strand to SEQ ID NO: 107590
agagacaauacuuaccuca

SEQ ID NO: 107592 - RNA, 19 nt, Artificial Sequence
  Description of Artificial Sequence: Synthetic oligonucleotide
  Sense strand starting at position 3775 of SEQ ID NO: 1361
cuaugaccguuauaauagu

SEQ ID NO: 107593 - RNA, 19 nt, Artificial Sequence
  Description of Artificial Sequence: Synthetic oligonucleotide
  Antisense strand to SEQ ID NO: 107592
acuauuauaacggucauag

SEQ ID NO: 107594 - RNA, 19 nt, Artificial Sequence
  Description of Artificial Sequence: Synthetic oligonucleotide
  Sense strand starting at position 3770 of SEQ ID NO: 1361
gguaacuaugaccguuaua

SEQ ID NO: 107595 - RNA, 19 nt, Artificial Sequence
  Description of Artificial Sequence: Synthetic oligonucleotide
  Antisense strand to SEQ ID NO: 107594
uauaacggucauaguuacc

SEQ ID NO: 107596 - RNA, 19 nt, Artificial Sequence
  Description of Artificial Sequence: Synthetic oligonucleotide
  Sense strand starting at position 3769 of SEQ ID NO: 1361
ugguaacuaugaccguuau

SEQ ID NO: 107597 - RNA, 19 nt, Artificial Sequence
  Description of Artificial Sequence: Synthetic oligonucleotide
  Antisense strand to SEQ ID NO: 107596
auaacggucauaguuacca

SEQ ID NO: 107598 - RNA, 19 nt, Artificial Sequence
  Description of Artificial Sequence: Synthetic oligonucleotide
  Sense strand starting at position 3754 of SEQ ID NO: 1361
uaggucuucccuuaauggu

SEQ ID NO: 107599 - RNA, 19 nt, Artificial Sequence
  Description of Artificial Sequence: Synthetic oligonucleotide
  Antisense strand to SEQ ID NO: 107598
accauuaagggaagaccua

SEQ ID NO: 107600 - RNA, 19 nt, Artificial Sequence
  Description of Artificial Sequence: Synthetic oligonucleotide
  Sense strand starting at position 3749 of SEQ ID NO: 1361
acagauaggucuucccuua

SEQ ID NO: 107601 - RNA, 19 nt, Artificial Sequence
  Description of Artificial Sequence: Synthetic oligonucleotide
  Antisense strand to SEQ ID NO: 107600
uaagggaagaccuaucugu

SEQ ID NO: 107602 - RNA, 19 nt, Artificial Sequence
  Description of Artificial Sequence: Synthetic oligonucleotide
  Sense strand starting at position 3736 of SEQ ID NO: 1361
ccauuaauguagcacagau

SEQ ID NO: 107603 - RNA, 19 nt, Artificial Sequence
  Description of Artificial Sequence: Synthetic oligonucleotide
  Antisense strand to SEQ ID NO: 107602
aucugugcuacauuaaugg

SEQ ID NO: 107604 - RNA, 19 nt, Artificial Sequence
  Description of Artificial Sequence: Synthetic oligonucleotide
  Sense strand starting at position 3387 of SEQ ID NO: 1361
guugaaugaaguuguuguu

SEQ ID NO: 107605 - RNA, 19 nt, Artificial Sequence
  Description of Artificial Sequence: Synthetic oligonucleotide
  Antisense strand to SEQ ID NO: 107604
aacaacaacuucauucaac

SEQ ID NO: 107606 - RNA, 19 nt, Artificial Sequence
  Description of Artificial Sequence: Synthetic oligonucleotide
  Sense strand starting at position 3374 of SEQ ID NO: 1361
uacaauguauuugguugaa

SEQ ID NO: 107607 - RNA, 19 nt, Artificial Sequence
  Description of Artificial Sequence: Synthetic oligonucleotide
  Antisense strand to SEQ ID NO: 107606
uucaaccaaauacauugua

SEQ ID NO: 107608 - RNA, 19 nt, Artificial Sequence
  Description of Artificial Sequence: Synthetic oligonucleotide
  Sense strand starting at position 3364 of SEQ ID NO: 1361
aggugagauguacaaugua

SEQ ID NO: 107609 - RNA, 19 nt, Artificial Sequence
  Description of Artificial Sequence: Synthetic oligonucleotide
  Antisense strand to SEQ ID NO: 107608
uacauuguacaucucaccu

SEQ ID NO: 107610 - RNA, 19 nt, Artificial Sequence
  Description of Artificial Sequence: Synthetic oligonucleotide
  Sense strand starting at position 3318 of SEQ ID NO: 1361
caggaaucguguuuauuuc

SEQ ID NO: 107611 - RNA, 19 nt, Artificial Sequence
  Description of Artificial Sequence: Synthetic oligonucleotide
  Antisense strand to SEQ ID NO: 107610
gaaauaaacacgauuccug

SEQ ID NO: 107612 - RNA, 19 nt, Artificial Sequence
  Description of Artificial Sequence: Synthetic oligonucleotide
  Sense strand starting at position 3275 of SEQ ID NO: 1361
agaauagcuguguacaucu

SEQ ID NO: 107613 - RNA, 19 nt, Artificial Sequence
  Description of Artificial Sequence: Synthetic oligonucleotide
  Antisense strand to SEQ ID NO: 107612
agauguacacagcuauucu

SEQ ID NO: 107614 - RNA, 19 nt, Artificial Sequence
  Description of Artificial Sequence: Synthetic oligonucleotide
  Sense strand starting at position 3274 of SEQ ID NO: 1361
uagaauagcuguguacauc

SEQ ID NO: 107615 - RNA, 19 nt, Artificial Sequence
  Description of Artificial Sequence: Synthetic oligonucleotide
  Antisense strand to SEQ ID NO: 107614
gauguacacagcuauucua

SEQ ID NO: 107616 - RNA, 19 nt, Artificial Sequence
  Description of Artificial Sequence: Synthetic oligonucleotide
  Sense strand starting at position 3273 of SEQ ID NO: 1361
cuagaauagcuguguacau

SEQ ID NO: 107617 - RNA, 19 nt, Artificial Sequence
  Description of Artificial Sequence: Synthetic oligonucleotide
  Antisense strand to SEQ ID NO: 107616
auguacacagcuauucuag

SEQ ID NO: 107618 - RNA, 19 nt, Artificial Sequence
  Description of Artificial Sequence: Synthetic oligonucleotide
  Sense strand starting at position 3270 of SEQ ID NO: 1361
ccucuagaauagcugugua

SEQ ID NO: 107619 - RNA, 19 nt, Artificial Sequence
  Description of Artificial Sequence: Synthetic oligonucleotide
  Antisense strand to SEQ ID NO: 107618
uacacagcuauucuagagg

SEQ ID NO: 107620 - RNA, 19 nt, Artificial Sequence
  Description of Artificial Sequence: Synthetic oligonucleotide
  Sense strand starting at position 3144 of SEQ ID NO: 1361
acaucucuugggcaaacau

SEQ ID NO: 107621 - RNA, 19 nt, Artificial Sequence
  Description of Artificial Sequence: Synthetic oligonucleotide
  Antisense strand to SEQ ID NO: 107620
auguuugcccaagagaugu

SEQ ID NO: 107622 - RNA, 19 nt, Artificial Sequence
  Description of Artificial Sequence: Synthetic oligonucleotide
  Sense strand starting at position 3141 of SEQ ID NO: 1361
uguacaucucuugggcaaa

SEQ ID NO: 107623 - RNA, 19 nt, Artificial Sequence
  Description of Artificial Sequence: Synthetic oligonucleotide
  Antisense strand to SEQ ID NO: 107622
uuugcccaagagauguaca

SEQ ID NO: 107624 - RNA, 19 nt, Artificial Sequence
  Description of Artificial Sequence: Synthetic oligonucleotide
  Sense strand starting at position 3140 of SEQ ID NO: 1361
guguacaucucuugggcaa

SEQ ID NO: 107625 - RNA, 19 nt, Artificial Sequence
  Description of Artificial Sequence: Synthetic oligonucleotide
  Antisense strand to SEQ ID NO: 107624
uugcccaagagauguacac

SEQ ID NO: 107626 - RNA, 19 nt, Artificial Sequence
  Description of Artificial Sequence: Synthetic oligonucleotide
  Sense strand starting at position 3131 of SEQ ID NO: 1361
agaauaacuguguacaucu

SEQ ID NO: 107627 - RNA, 19 nt, Artificial Sequence
  Description of Artificial Sequence: Synthetic oligonucleotide
  Antisense strand to SEQ ID NO: 107626
agauguacacaguuauucu

SEQ ID NO: 107628 - RNA, 19 nt, Artificial Sequence
  Description of Artificial Sequence: Synthetic oligonucleotide
  Sense strand starting at position 3129 of SEQ ID NO: 1361
cuagaauaacuguguacau

SEQ ID NO: 107629 - RNA, 19 nt, Artificial Sequence
  Description of Artificial Sequence: Synthetic oligonucleotide
  Antisense strand to SEQ ID NO: 107628
auguacacaguuauucuag

SEQ ID NO: 107630 - RNA, 19 nt, Artificial Sequence
  Description of Artificial Sequence: Synthetic oligonucleotide
  Sense strand starting at position 2509 of SEQ ID NO: 1361
gggacuuauuaggaacuaa

SEQ ID NO: 107631 - RNA, 19 nt, Artificial Sequence
  Description of Artificial Sequence: Synthetic oligonucleotide
  Antisense strand to SEQ ID NO: 107630
uuaguuccuaauaaguccc

SEQ ID NO: 107632 - RNA, 19 nt, Artificial Sequence
  Description of Artificial Sequence: Synthetic oligonucleotide
  Sense strand starting at position 2508 of SEQ ID NO: 1361
agggacuuauuaggaacua

SEQ ID NO: 107633 - RNA, 19 nt, Artificial Sequence
  Description of Artificial Sequence: Synthetic oligonucleotide
  Antisense strand to SEQ ID NO: 107632
uaguuccuaauaagucccu

SEQ ID NO: 107634 - RNA, 19 nt, Artificial Sequence
  Description of Artificial Sequence: Synthetic oligonucleotide
  Sense strand starting at position 2448 of SEQ ID NO: 1361
guguuauccuagugucgcu

SEQ ID NO: 107635 - RNA, 19 nt, Artificial Sequence
  Description of Artificial Sequence: Synthetic oligonucleotide
  Antisense strand to SEQ ID NO: 107634
agcgacacuaggauaacac

SEQ ID NO: 107636 - RNA, 19 nt, Artificial Sequence
  Description of Artificial Sequence: Synthetic oligonucleotide
  Sense strand starting at position 1012 of SEQ ID NO: 1361
cuaggaaacuauucgugaa

SEQ ID NO: 107637 - RNA, 19 nt, Artificial Sequence
  Description of Artificial Sequence: Synthetic oligonucleotide
  Antisense strand to SEQ ID NO: 107636
uucacgaauaguuuccuag

SEQ ID NO: 107638 - RNA, 19 nt, Artificial Sequence
  Description of Artificial Sequence: Synthetic oligonucleotide
  Sense strand starting at position 794 of SEQ ID NO: 1361
cuuguaaacgaucagaauc

SEQ ID NO: 107639 - RNA, 19 nt, Artificial Sequence
  Description of Artificial Sequence: Synthetic oligonucleotide
  Antisense strand to SEQ ID NO: 107638
gauucugaucguuuacaag

SEQ ID NO: 107640 - RNA, 19 nt, Artificial Sequence
  Description of Artificial Sequence: Synthetic oligonucleotide
  Sense strand starting at position 791 of SEQ ID NO: 1361
ccgcuuguaaacgaucaga

SEQ ID NO: 107641 - RNA, 19 nt, Artificial Sequence
  Description of Artificial Sequence: Synthetic oligonucleotide
  Antisense strand to SEQ ID NO: 107640
ucugaucguuuacaagcgg

SEQ ID NO: 107642 - RNA, 19 nt, Artificial Sequence
  Description of Artificial Sequence: Synthetic oligonucleotide
  Sense strand starting at position 585 of SEQ ID NO: 1361
gcuccuuguugacaaauug

SEQ ID NO: 107643 - RNA, 19 nt, Artificial Sequence
  Description of Artificial Sequence: Synthetic oligonucleotide
  Antisense strand to SEQ ID NO: 107642
caauuugucaacaaggagc

SEQ ID NO: 107644 - RNA, 19 nt, Artificial Sequence
  Description of Artificial Sequence: Synthetic oligonucleotide
  Sense strand starting at position 583 of SEQ ID NO: 1361
gggcuccuuguugacaaau

SEQ ID NO: 107645 - RNA, 19 nt, Artificial Sequence
  Description of Artificial Sequence: Synthetic oligonucleotide
  Antisense strand to SEQ ID NO: 107644
auuugucaacaaggagccc

SEQ ID NO: 107646 - RNA, 19 nt, Artificial Sequence
  Description of Artificial Sequence: Synthetic oligonucleotide
  Sense strand starting at position 557 of SEQ ID NO: 1361
cccauuccgcaguaacaaa

SEQ ID NO: 107647 - RNA, 19 nt, Artificial Sequence
  Description of Artificial Sequence: Synthetic oligonucleotide
  Antisense strand to SEQ ID NO: 107646
uuuguuacugcggaauggg

SEQ ID NO: 107648 - RNA, 19 nt, Artificial Sequence
  Description of Artificial Sequence: Synthetic oligonucleotide
  Sense strand starting at position 16 of SEQ ID NO: 1361
gcaugagucaacuguccag

SEQ ID NO: 107649 - RNA, 19 nt, Artificial Sequence
  Description of Artificial Sequence: Synthetic oligonucleotide
  Antisense strand to SEQ ID NO: 107648
cuggacaguugacucaugc

SEQ ID NO: 107650 - RNA, 19 nt, Artificial Sequence
  Description of Artificial Sequence: Synthetic oligonucleotide
  Sense strand starting at position 180 of SEQ ID NO: 1362
acagguaucagcgaagaug

SEQ ID NO: 107651 - RNA, 19 nt, Artificial Sequence
  Description of Artificial Sequence: Synthetic oligonucleotide
  Antisense strand to SEQ ID NO: 107650
caucuucgcugauaccugu

SEQ ID NO: 107652 - RNA, 19 nt, Artificial Sequence
  Description of Artificial Sequence: Synthetic oligonucleotide
  Sense strand starting at position 485 of SEQ ID NO: 1362
uggugauccucccaacuca

SEQ ID NO: 107653 - RNA, 19 nt, Artificial Sequence
  Description of Artificial Sequence: Synthetic oligonucleotide
  Antisense strand to SEQ ID NO: 107652
ugaguugggaggaucacca

SEQ ID NO: 107654 - RNA, 19 nt, Artificial Sequence
  Description of Artificial Sequence: Synthetic oligonucleotide
  Sense strand starting at position 702 of SEQ ID NO: 1362
uugugaacuucuguauacu

SEQ ID NO: 107655 - RNA, 19 nt, Artificial Sequence
  Description of Artificial Sequence: Synthetic oligonucleotide
  Antisense strand to SEQ ID NO: 107654
aguauacagaaguucacaa

SEQ ID NO: 107656 - RNA, 19 nt, Artificial Sequence
  Description of Artificial Sequence: Synthetic oligonucleotide
  Sense strand starting at position 703 of SEQ ID NO: 1362
ugugaacuucuguauacuu

SEQ ID NO: 107657 - RNA, 19 nt, Artificial Sequence
  Description of Artificial Sequence: Synthetic oligonucleotide
  Antisense strand to SEQ ID NO: 107656
aaguauacagaaguucaca

SEQ ID NO: 107658 - RNA, 19 nt, Artificial Sequence
  Description of Artificial Sequence: Synthetic oligonucleotide
  Sense strand starting at position 746 of SEQ ID NO: 1362
gacgcaaaguucucagaaa

SEQ ID NO: 107659 - RNA, 19 nt, Artificial Sequence
  Description of Artificial Sequence: Synthetic oligonucleotide
  Antisense strand to SEQ ID NO: 107658
uuucugagaacuuugcguc

SEQ ID NO: 107660 - RNA, 19 nt, Artificial Sequence
  Description of Artificial Sequence: Synthetic oligonucleotide
  Sense strand starting at position 747 of SEQ ID NO: 1362
acgcaaaguucucagaaau

SEQ ID NO: 107661 - RNA, 19 nt, Artificial Sequence
  Description of Artificial Sequence: Synthetic oligonucleotide
  Antisense strand to SEQ ID NO: 107660
auuucugagaacuuugcgu

SEQ ID NO: 107662 - RNA, 19 nt, Artificial Sequence
  Description of Artificial Sequence: Synthetic oligonucleotide
  Sense strand starting at position 855 of SEQ ID NO: 1362
cgcauaucagcucagaaca

SEQ ID NO: 107663 - RNA, 19 nt, Artificial Sequence
  Description of Artificial Sequence: Synthetic oligonucleotide
  Antisense strand to SEQ ID NO: 107662
uguucugagcugauaugcg

SEQ ID NO: 107664 - RNA, 19 nt, Artificial Sequence
  Description of Artificial Sequence: Synthetic oligonucleotide
  Sense strand starting at position 1038 of SEQ ID NO: 1362
ggccaaacgucuugguuaa

SEQ ID NO: 107665 - RNA, 19 nt, Artificial Sequence
  Description of Artificial Sequence: Synthetic oligonucleotide
  Antisense strand to SEQ ID NO: 107664
uuaaccaagacguuuggcc

SEQ ID NO: 107666 - RNA, 19 nt, Artificial Sequence
  Description of Artificial Sequence: Synthetic oligonucleotide
  Sense strand starting at position 1049 of SEQ ID NO: 1362
uugguuaacucuccgcuga

SEQ ID NO: 107667 - RNA, 19 nt, Artificial Sequence
  Description of Artificial Sequence: Synthetic oligonucleotide
  Antisense strand to SEQ ID NO: 107666
ucagcggagaguuaaccaa

SEQ ID NO: 107668 - RNA, 19 nt, Artificial Sequence
  Description of Artificial Sequence: Synthetic oligonucleotide
  Sense strand starting at position 1050 of SEQ ID NO: 1362
ugguuaacucuccgcugaa

SEQ ID NO: 107669 - RNA, 19 nt, Artificial Sequence
  Description of Artificial Sequence: Synthetic oligonucleotide
  Antisense strand to SEQ ID NO: 107668
uucagcggagaguuaacca

SEQ ID NO: 107670 - RNA, 19 nt, Artificial Sequence
  Description of Artificial Sequence: Synthetic oligonucleotide
  Sense strand starting at position 1051 of SEQ ID NO: 1362
gguuaacucuccgcugaaa

SEQ ID NO: 107671 - RNA, 19 nt, Artificial Sequence
  Description of Artificial Sequence: Synthetic oligonucleotide
  Antisense strand to SEQ ID NO: 107670
uuucagcggagaguuaacc

SEQ ID NO: 107672 - RNA, 19 nt, Artificial Sequence
  Description of Artificial Sequence: Synthetic oligonucleotide
  Sense strand starting at position 1054 of SEQ ID NO: 1362
uaacucuccgcugaaagga

SEQ ID NO: 107673 - RNA, 19 nt, Artificial Sequence
  Description of Artificial Sequence: Synthetic oligonucleotide
  Antisense strand to SEQ ID NO: 107672
uccuuucagcggagaguua

SEQ ID NO: 107674 - RNA, 19 nt, Artificial Sequence
  Description of Artificial Sequence: Synthetic oligonucleotide
  Sense strand starting at position 1073 of SEQ ID NO: 1362
cgccacaugagaugaucua

SEQ ID NO: 107675 - RNA, 19 nt, Artificial Sequence
  Description of Artificial Sequence: Synthetic oligonucleotide
  Antisense strand to SEQ ID NO: 107674
uagaucaucucauguggcg

SEQ ID NO: 107676 - RNA, 19 nt, Artificial Sequence
  Description of Artificial Sequence: Synthetic oligonucleotide
  Sense strand starting at position 1172 of SEQ ID NO: 1362
cccgaaauccugcgguuca

SEQ ID NO: 107677 - RNA, 19 nt, Artificial Sequence
  Description of Artificial Sequence: Synthetic oligonucleotide
  Antisense strand to SEQ ID NO: 107676
ugaaccgcaggauuucggg

SEQ ID NO: 107678 - RNA, 19 nt, Artificial Sequence
  Description of Artificial Sequence: Synthetic oligonucleotide
  Sense strand starting at position 1173 of SEQ ID NO: 1362
ccgaaauccugcgguucau

SEQ ID NO: 107679 - RNA, 19 nt, Artificial Sequence
  Description of Artificial Sequence: Synthetic oligonucleotide
  Antisense strand to SEQ ID NO: 107678
augaaccgcaggauuucgg

SEQ ID NO: 107680 - RNA, 19 nt, Artificial Sequence
  Description of Artificial Sequence: Synthetic oligonucleotide
  Sense strand starting at position 1422 of SEQ ID NO: 1362
gggucaguguccucuacag

SEQ ID NO: 107681 - RNA, 19 nt, Artificial Sequence
  Description of Artificial Sequence: Synthetic oligonucleotide
  Antisense strand to SEQ ID NO: 107680
cuguagaggacacugaccc

SEQ ID NO: 107682 - RNA, 19 nt, Artificial Sequence
  Description of Artificial Sequence: Synthetic oligonucleotide
  Sense strand starting at position 1424 of SEQ ID NO: 1362
gucaguguccucuacagga

SEQ ID NO: 107683 - RNA, 19 nt, Artificial Sequence
  Description of Artificial Sequence: Synthetic oligonucleotide
  Antisense strand to SEQ ID NO: 107682
uccuguagaggacacugac

SEQ ID NO: 107684 - RNA, 19 nt, Artificial Sequence
  Description of Artificial Sequence: Synthetic oligonucleotide
  Sense strand starting at position 1426 of SEQ ID NO: 1362
caguguccucuacaggaua

SEQ ID NO: 107685 - RNA, 19 nt, Artificial Sequence
  Description of Artificial Sequence: Synthetic oligonucleotide
  Antisense strand to SEQ ID NO: 107684
uauccuguagaggacacug

SEQ ID NO: 107686 - RNA, 19 nt, Artificial Sequence
  Description of Artificial Sequence: Synthetic oligonucleotide
  Sense strand starting at position 1745 of SEQ ID NO: 1362
ggguggacuucgcguaacu

SEQ ID NO: 107687 - RNA, 19 nt, Artificial Sequence
  Description of Artificial Sequence: Synthetic oligonucleotide
  Antisense strand to SEQ ID NO: 107686
aguuacgcgaaguccaccc

SEQ ID NO: 107688 - RNA, 19 nt, Artificial Sequence
  Description of Artificial Sequence: Synthetic oligonucleotide
  Sense strand starting at position 2392 of SEQ ID NO: 1362
ggccuuaggucacucucaa

SEQ ID NO: 107689 - RNA, 19 nt, Artificial Sequence
  Description of Artificial Sequence: Synthetic oligonucleotide
  Antisense strand to SEQ ID NO: 107688
uugagagugaccuaaggcc

SEQ ID NO: 107690 - RNA, 19 nt, Artificial Sequence
  Description of Artificial Sequence: Synthetic oligonucleotide
  Sense strand starting at position 2963 of SEQ ID NO: 1362
auauaaugugaccguguca

SEQ ID NO: 107691 - RNA, 19 nt, Artificial Sequence
  Description of Artificial Sequence: Synthetic oligonucleotide
  Antisense strand to SEQ ID NO: 107690
ugacacggucacauuauau

SEQ ID NO: 107692 - RNA, 19 nt, Artificial Sequence
  Description of Artificial Sequence: Synthetic oligonucleotide
  Sense strand starting at position 3194 of SEQ ID NO: 1362
uuugcucugugccuggaaa

SEQ ID NO: 107693 - RNA, 19 nt, Artificial Sequence
  Description of Artificial Sequence: Synthetic oligonucleotide
  Antisense strand to SEQ ID NO: 107692
uuuccaggcacagagcaaa

SEQ ID NO: 107694 - RNA, 19 nt, Artificial Sequence
  Description of Artificial Sequence: Synthetic oligonucleotide
  Sense strand starting at position 3196 of SEQ ID NO: 1362
ugcucugugccuggaaagu

SEQ ID NO: 107695 - RNA, 19 nt, Artificial Sequence
  Description of Artificial Sequence: Synthetic oligonucleotide
  Antisense strand to SEQ ID NO: 107694
acuuuccaggcacagagca

SEQ ID NO: 107696 - RNA, 19 nt, Artificial Sequence
  Description of Artificial Sequence: Synthetic oligonucleotide
  Sense strand starting at position 3205 of SEQ ID NO: 1362
ccuggaaaguucuucuaac

SEQ ID NO: 107697 - RNA, 19 nt, Artificial Sequence
  Description of Artificial Sequence: Synthetic oligonucleotide
  Antisense strand to SEQ ID NO: 107696
guuagaagaacuuuccagg

SEQ ID NO: 107698 - RNA, 19 nt, Artificial Sequence
  Description of Artificial Sequence: Synthetic oligonucleotide
  Sense strand starting at position 3206 of SEQ ID NO: 1362
cuggaaaguucuucuaacc

SEQ ID NO: 107699 - RNA, 19 nt, Artificial Sequence
  Description of Artificial Sequence: Synthetic oligonucleotide
  Antisense strand to SEQ ID NO: 107698
gguuagaagaacuuuccag

SEQ ID NO: 107700 - RNA, 19 nt, Artificial Sequence
  Description of Artificial Sequence: Synthetic oligonucleotide
  Sense strand starting at position 3226 of SEQ ID NO: 1362
cuauucuucugagaacagc

SEQ ID NO: 107701 - RNA, 19 nt, Artificial Sequence
  Description of Artificial Sequence: Synthetic oligonucleotide
  Antisense strand to SEQ ID NO: 107700
gcuguucucagaagaauag

SEQ ID NO: 107702 - RNA, 19 nt, Artificial Sequence
  Description of Artificial Sequence: Synthetic oligonucleotide
  Sense strand starting at position 3318 of SEQ ID NO: 1362
acuguaaucgggugguuau

SEQ ID NO: 107703 - RNA, 19 nt, Artificial Sequence
  Description of Artificial Sequence: Synthetic oligonucleotide
  Antisense strand to SEQ ID NO: 107702
auaaccacccgauuacagu

SEQ ID NO: 107704 - RNA, 19 nt, Artificial Sequence
  Description of Artificial Sequence: Synthetic oligonucleotide
  Sense strand starting at position 3319 of SEQ ID NO: 1362
cuguaaucgggugguuauu

SEQ ID NO: 107705 - RNA, 19 nt, Artificial Sequence
  Description of Artificial Sequence: Synthetic oligonucleotide
  Antisense strand to SEQ ID NO: 107704
aauaaccacccgauuacag

SEQ ID NO: 107706 - RNA, 19 nt, Artificial Sequence
  Description of Artificial Sequence: Synthetic oligonucleotide
  Sense strand starting at position 3349 of SEQ ID NO: 1362
uuuacuaucggcuacguaa

SEQ ID NO: 107707 - RNA, 19 nt, Artificial Sequence
  Description of Artificial Sequence: Synthetic oligonucleotide
  Antisense strand to SEQ ID NO: 107706
uuacguagccgauaguaaa

SEQ ID NO: 107708 - RNA, 19 nt, Artificial Sequence
  Description of Artificial Sequence: Synthetic oligonucleotide
  Sense strand starting at position 3443 of SEQ ID NO: 1362
aaugauggaugcuagaagu

SEQ ID NO: 107709 - RNA, 19 nt, Artificial Sequence
  Description of Artificial Sequence: Synthetic oligonucleotide
  Antisense strand to SEQ ID NO: 107708
acuucuagcauccaucauu

SEQ ID NO: 107710 - RNA, 19 nt, Artificial Sequence
  Description of Artificial Sequence: Synthetic oligonucleotide
  Sense strand starting at position 3574 of SEQ ID NO: 1362
ugaguugucuuaggaugcu

SEQ ID NO: 107711 - RNA, 19 nt, Artificial Sequence
  Description of Artificial Sequence: Synthetic oligonucleotide
  Antisense strand to SEQ ID NO: 107710
agcauccuaagacaacuca

SEQ ID NO: 107712 - RNA, 19 nt, Artificial Sequence
  Description of Artificial Sequence: Synthetic oligonucleotide
  Sense strand starting at position 3583 of SEQ ID NO: 1362
uuaggaugcuuuggguaac

SEQ ID NO: 107713 - RNA, 19 nt, Artificial Sequence
  Description of Artificial Sequence: Synthetic oligonucleotide
  Antisense strand to SEQ ID NO: 107712
guuacccaaagcauccuaa

SEQ ID NO: 107714 - RNA, 19 nt, Artificial Sequence
  Description of Artificial Sequence: Synthetic oligonucleotide
  Sense strand starting at position 3586 of SEQ ID NO: 1362
ggaugcuuuggguaaccuu

SEQ ID NO: 107715 - RNA, 19 nt, Artificial Sequence
  Description of Artificial Sequence: Synthetic oligonucleotide
  Antisense strand to SEQ ID NO: 107714
aagguuacccaaagcaucc

SEQ ID NO: 107716 - RNA, 19 nt, Artificial Sequence
  Description of Artificial Sequence: Synthetic oligonucleotide
  Sense strand starting at position 3589 of SEQ ID NO: 1362
ugcuuuggguaaccuuuaa

SEQ ID NO: 107717 - RNA, 19 nt, Artificial Sequence
  Description of Artificial Sequence: Synthetic oligonucleotide
  Antisense strand to SEQ ID NO: 107716
uuaaagguuacccaaagca

SEQ ID NO: 107718 - RNA, 19 nt, Artificial Sequence
  Description of Artificial Sequence: Synthetic oligonucleotide
  Sense strand starting at position 3617 of SEQ ID NO: 1362
cucaaagagccuuguauaa

SEQ ID NO: 107719 - RNA, 19 nt, Artificial Sequence
  Description of Artificial Sequence: Synthetic oligonucleotide
  Antisense strand to SEQ ID NO: 107718
uuauacaaggcucuuugag

SEQ ID NO: 107720 - RNA, 19 nt, Artificial Sequence
  Description of Artificial Sequence: Synthetic oligonucleotide
  Sense strand starting at position 3686 of SEQ ID NO: 1362
aacauugguugcuuuaaga

SEQ ID NO: 107721 - RNA, 19 nt, Artificial Sequence
  Description of Artificial Sequence: Synthetic oligonucleotide
  Antisense strand to SEQ ID NO: 107720
ucuuaaagcaaccaauguu

SEQ ID NO: 107722 - RNA, 19 nt, Artificial Sequence
  Description of Artificial Sequence: Synthetic oligonucleotide
  Sense strand starting at position 1531 of SEQ ID NO: 1363
ucauucugugccuguguua

SEQ ID NO: 107723 - RNA, 19 nt, Artificial Sequence
  Description of Artificial Sequence: Synthetic oligonucleotide
  Antisense strand to SEQ ID NO: 107722
uaacacaggcacagaauga

SEQ ID NO: 107724 - RNA, 19 nt, Artificial Sequence
  Description of Artificial Sequence: Synthetic oligonucleotide
  Sense strand starting at position 2053 of SEQ ID NO: 1363
ucgguuuaaugaggacuga

SEQ ID NO: 107725 - RNA, 19 nt, Artificial Sequence
  Description of Artificial Sequence: Synthetic oligonucleotide
  Antisense strand to SEQ ID NO: 107724
ucaguccucauuaaaccga

SEQ ID NO: 107726 - RNA, 19 nt, Artificial Sequence
  Description of Artificial Sequence: Synthetic oligonucleotide
  Sense strand starting at position 474 of SEQ ID NO: 1365
agaugcagcuauugucaga

SEQ ID NO: 107727 - RNA, 19 nt, Artificial Sequence
  Description of Artificial Sequence: Synthetic oligonucleotide
  Antisense strand to SEQ ID NO: 107726
ucugacaauagcugcaucu

SEQ ID NO: 107728 - RNA, 19 nt, Artificial Sequence
  Description of Artificial Sequence: Synthetic oligonucleotide
  Sense strand starting at position 674 of SEQ ID NO: 1365
gaaaguggaucugugggaa

SEQ ID NO: 107729 - RNA, 19 nt, Artificial Sequence
  Description of Artificial Sequence: Synthetic oligonucleotide
  Antisense strand to SEQ ID NO: 107728
uucccacagauccacuuuc

SEQ ID NO: 107730 - RNA, 19 nt, Artificial Sequence
  Description of Artificial Sequence: Synthetic oligonucleotide
  Sense strand starting at position 926 of SEQ ID NO: 1365
gguacagccucacucaauu

SEQ ID NO: 107731 - RNA, 19 nt, Artificial Sequence
  Description of Artificial Sequence: Synthetic oligonucleotide
  Antisense strand to SEQ ID NO: 107730
aauugagugaggcuguacc

SEQ ID NO: 107732 - RNA, 19 nt, Artificial Sequence
  Description of Artificial Sequence: Synthetic oligonucleotide
  Sense strand starting at position 937 of SEQ ID NO: 1365
acucaauuauguguugaag

SEQ ID NO: 107733 - RNA, 19 nt, Artificial Sequence
  Description of Artificial Sequence: Synthetic oligonucleotide
  Antisense strand to SEQ ID NO: 107732
cuucaacacauaauugagu

SEQ ID NO: 107734 - RNA, 19 nt, Artificial Sequence
  Description of Artificial Sequence: Synthetic oligonucleotide
  Sense strand starting at position 2125 of SEQ ID NO: 1365
gucacaggauucuuuacau

SEQ ID NO: 107735 - RNA, 19 nt, Artificial Sequence
  Description of Artificial Sequence: Synthetic oligonucleotide
  Antisense strand to SEQ ID NO: 107734
auguaaagaauccugugac

SEQ ID NO: 107736 - RNA, 19 nt, Artificial Sequence
  Description of Artificial Sequence: Synthetic oligonucleotide
  Sense strand starting at position 2277 of SEQ ID NO: 1365
agcgaaagcuuucucaccu

SEQ ID NO: 107737 - RNA, 19 nt, Artificial Sequence
  Description of Artificial Sequence: Synthetic oligonucleotide
  Antisense strand to SEQ ID NO: 107736
aggugagaaagcuuucgcu

SEQ ID NO: 107738 - RNA, 19 nt, Artificial Sequence
  Description of Artificial Sequence: Synthetic oligonucleotide
  Sense strand starting at position 2278 of SEQ ID NO: 1365
gcgaaagcuuucucaccuu

SEQ ID NO: 107739 - RNA, 19 nt, Artificial Sequence
  Description of Artificial Sequence: Synthetic oligonucleotide
  Antisense strand to SEQ ID NO: 107738
aaggugagaaagcuuucgc

SEQ ID NO: 107740 - RNA, 19 nt, Artificial Sequence
  Description of Artificial Sequence: Synthetic oligonucleotide
  Sense strand starting at position 2455 of SEQ ID NO: 1365
caagaauguccauagcagu

SEQ ID NO: 107741 - RNA, 19 nt, Artificial Sequence
  Description of Artificial Sequence: Synthetic oligonucleotide
  Antisense strand to SEQ ID NO: 107740
acugcuauggacauucuug

SEQ ID NO: 107742 - RNA, 19 nt, Artificial Sequence
  Description of Artificial Sequence: Synthetic oligonucleotide
  Sense strand starting at position 2526 of SEQ ID NO: 1365
auggauacauucuuguauu

SEQ ID NO: 107743 - RNA, 19 nt, Artificial Sequence
  Description of Artificial Sequence: Synthetic oligonucleotide
  Antisense strand to SEQ ID NO: 107742
aauacaagaauguauccau

SEQ ID NO: 107744 - RNA, 19 nt, Artificial Sequence
  Description of Artificial Sequence: Synthetic oligonucleotide
  Sense strand starting at position 2527 of SEQ ID NO: 1365
uggauacauucuuguauuc

SEQ ID NO: 107745 - RNA, 19 nt, Artificial Sequence
  Description of Artificial Sequence: Synthetic oligonucleotide
  Antisense strand to SEQ ID NO: 107744
gaauacaagaauguaucca

SEQ ID NO: 107746 - RNA, 19 nt, Artificial Sequence
  Description of Artificial Sequence: Synthetic oligonucleotide
  Sense strand starting at position 2580 of SEQ ID NO: 1365
auacaagaaugugauacau

SEQ ID NO: 107747 - RNA, 19 nt, Artificial Sequence
  Description of Artificial Sequence: Synthetic oligonucleotide
  Antisense strand to SEQ ID NO: 107746
auguaucacauucuuguau

SEQ ID NO: 107748 - RNA, 19 nt, Artificial Sequence
  Description of Artificial Sequence: Synthetic oligonucleotide
  Sense strand starting at position 2582 of SEQ ID NO: 1365
acaagaaugugauacauuc

SEQ ID NO: 107749 - RNA, 19 nt, Artificial Sequence
  Description of Artificial Sequence: Synthetic oligonucleotide
  Antisense strand to SEQ ID NO: 107748
gaauguaucacauucuugu

SEQ ID NO: 107750 - RNA, 19 nt, Artificial Sequence
  Description of Artificial Sequence: Synthetic oligonucleotide
  Sense strand starting at position 2791 of SEQ ID NO: 1365
ggcuguggauccuuacuaa

SEQ ID NO: 107751 - RNA, 19 nt, Artificial Sequence
  Description of Artificial Sequence: Synthetic oligonucleotide
  Antisense strand to SEQ ID NO: 107750
uuaguaaggauccacagcc

SEQ ID NO: 107752 - RNA, 19 nt, Artificial Sequence
  Description of Artificial Sequence: Synthetic oligonucleotide
  Sense strand starting at position 2794 of SEQ ID NO: 1365
uguggauccuuacuaagaa

SEQ ID NO: 107753 - RNA, 19 nt, Artificial Sequence
  Description of Artificial Sequence: Synthetic oligonucleotide
  Antisense strand to SEQ ID NO: 107752
uucuuaguaaggauccaca

SEQ ID NO: 107754 - RNA, 19 nt, Artificial Sequence
  Description of Artificial Sequence: Synthetic oligonucleotide
  Sense strand starting at position 2795 of SEQ ID NO: 1365
guggauccuuacuaagaaa

SEQ ID NO: 107755 - RNA, 19 nt, Artificial Sequence
  Description of Artificial Sequence: Synthetic oligonucleotide
  Antisense strand to SEQ ID NO: 107754
uuucuuaguaaggauccac

SEQ ID NO: 107756 - RNA, 19 nt, Artificial Sequence
  Description of Artificial Sequence: Synthetic oligonucleotide
  Sense strand starting at position 2806 of SEQ ID NO: 1365
cuaagaaacuccugcggga

SEQ ID NO: 107757 - RNA, 19 nt, Artificial Sequence
  Description of Artificial Sequence: Synthetic oligonucleotide
  Antisense strand to SEQ ID NO: 107756
ucccgcaggaguuucuuag

SEQ ID NO: 107758 - RNA, 19 nt, Artificial Sequence
  Description of Artificial Sequence: Synthetic oligonucleotide
  Sense strand starting at position 2808 of SEQ ID NO: 1365
aagaaacuccugcgggauu

SEQ ID NO: 107759 - RNA, 19 nt, Artificial Sequence
  Description of Artificial Sequence: Synthetic oligonucleotide
  Antisense strand to SEQ ID NO: 107758
aaucccgcaggaguuucuu

SEQ ID NO: 107760 - RNA, 19 nt, Artificial Sequence
  Description of Artificial Sequence: Synthetic oligonucleotide
  Sense strand starting at position 2809 of SEQ ID NO: 1365
agaaacuccugcgggauuu

SEQ ID NO: 107761 - RNA, 19 nt, Artificial Sequence
  Description of Artificial Sequence: Synthetic oligonucleotide
  Antisense strand to SEQ ID NO: 107760
aaaucccgcaggaguuucu

SEQ ID NO: 107762 - RNA, 19 nt, Artificial Sequence
  Description of Artificial Sequence: Synthetic oligonucleotide
  Sense strand starting at position 3283 of SEQ ID NO: 1365
acaccauuccugugacuac

SEQ ID NO: 107763 - RNA, 19 nt, Artificial Sequence
  Description of Artificial Sequence: Synthetic oligonucleotide
  Antisense strand to SEQ ID NO: 107762
guagucacaggaauggugu

SEQ ID NO: 107764 - RNA, 19 nt, Artificial Sequence
  Description of Artificial Sequence: Synthetic oligonucleotide
  Sense strand starting at position 3286 of SEQ ID NO: 1365
ccauuccugugacuacauu

SEQ ID NO: 107765 - RNA, 19 nt, Artificial Sequence
  Description of Artificial Sequence: Synthetic oligonucleotide
  Antisense strand to SEQ ID NO: 107764
aauguagucacaggaaugg

SEQ ID NO: 107766 - RNA, 19 nt, Artificial Sequence
  Description of Artificial Sequence: Synthetic oligonucleotide
  Sense strand starting at position 3292 of SEQ ID NO: 1365
cugugacuacauuguuaua

SEQ ID NO: 107767 - RNA, 19 nt, Artificial Sequence
  Description of Artificial Sequence: Synthetic oligonucleotide
  Antisense strand to SEQ ID NO: 107766
uauaacaauguagucacag

SEQ ID NO: 107768 - RNA, 19 nt, Artificial Sequence
  Description of Artificial Sequence: Synthetic oligonucleotide
  Sense strand starting at position 3294 of SEQ ID NO: 1365
gugacuacauuguuauaug

SEQ ID NO: 107769 - RNA, 19 nt, Artificial Sequence
  Description of Artificial Sequence: Synthetic oligonucleotide
  Antisense strand to SEQ ID NO: 107768
cauauaacaauguagucac

SEQ ID NO: 107770 - RNA, 19 nt, Artificial Sequence
  Description of Artificial Sequence: Synthetic oligonucleotide
  Sense strand starting at position 3302 of SEQ ID NO: 1365
auuguuauaugccaguuau

SEQ ID NO: 107771 - RNA, 19 nt, Artificial Sequence
  Description of Artificial Sequence: Synthetic oligonucleotide
  Antisense strand to SEQ ID NO: 107770
auaacuggcauauaacaau

SEQ ID NO: 107772 - RNA, 19 nt, Artificial Sequence
  Description of Artificial Sequence: Synthetic oligonucleotide
  Sense strand starting at position 3448 of SEQ ID NO: 1365
auaaguuguuauugguuga

SEQ ID NO: 107773 - RNA, 19 nt, Artificial Sequence
  Description of Artificial Sequence: Synthetic oligonucleotide
  Antisense strand to SEQ ID NO: 107772
ucaaccaauaacaacuuau

SEQ ID NO: 107774 - RNA, 19 nt, Artificial Sequence
  Description of Artificial Sequence: Synthetic oligonucleotide
  Sense strand starting at position 3749 of SEQ ID NO: 1365
gauaauaggcagcgagaga

SEQ ID NO: 107775 - RNA, 19 nt, Artificial Sequence
  Description of Artificial Sequence: Synthetic oligonucleotide
  Antisense strand to SEQ ID NO: 107774
ucucucgcugccuauuauc

SEQ ID NO: 107776 - RNA, 19 nt, Artificial Sequence
  Description of Artificial Sequence: Synthetic oligonucleotide
  Sense strand starting at position 210 of SEQ ID NO: 1364
agaucaccugcacguuuaa

SEQ ID NO: 107777 - RNA, 19 nt, Artificial Sequence
  Description of Artificial Sequence: Synthetic oligonucleotide
  Antisense strand to SEQ ID NO: 107776
uuaaacgugcaggugaucu

SEQ ID NO: 107778 - RNA, 19 nt, Artificial Sequence
  Description of Artificial Sequence: Synthetic oligonucleotide
  Sense strand starting at position 233 of SEQ ID NO: 1364
gugaacuucuucuguauac

SEQ ID NO: 107779 - RNA, 19 nt, Artificial Sequence
  Description of Artificial Sequence: Synthetic oligonucleotide
  Antisense strand to SEQ ID NO: 107778
guauacagaagaaguucac

SEQ ID NO: 107780 - RNA, 19 nt, Artificial Sequence
  Description of Artificial Sequence: Synthetic oligonucleotide
  Sense strand starting at position 441 of SEQ ID NO: 1364
uuuccuuaacuucgugaag

SEQ ID NO: 107781 - RNA, 19 nt, Artificial Sequence
  Description of Artificial Sequence: Synthetic oligonucleotide
  Antisense strand to SEQ ID NO: 107780
cuucacgaaguuaaggaaa

SEQ ID NO: 107782 - RNA, 19 nt, Artificial Sequence
  Description of Artificial Sequence: Synthetic oligonucleotide
  Sense strand starting at position 443 of SEQ ID NO: 1364
uccuuaacuucgugaagca

SEQ ID NO: 107783 - RNA, 19 nt, Artificial Sequence
  Description of Artificial Sequence: Synthetic oligonucleotide
  Antisense strand to SEQ ID NO: 107782
ugcuucacgaaguuaagga

SEQ ID NO: 107784 - RNA, 19 nt, Artificial Sequence
  Description of Artificial Sequence: Synthetic oligonucleotide
  Sense strand starting at position 452 of SEQ ID NO: 1364
ucgugaagcacugguauuc

SEQ ID NO: 107785 - RNA, 19 nt, Artificial Sequence
  Description of Artificial Sequence: Synthetic oligonucleotide
  Antisense strand to SEQ ID NO: 107784
gaauaccagugcuucacga

SEQ ID NO: 107786 - RNA, 19 nt, Artificial Sequence
  Description of Artificial Sequence: Synthetic oligonucleotide
  Sense strand starting at position 595 of SEQ ID NO: 1364
acaagauaucuccgcucac

SEQ ID NO: 107787 - RNA, 19 nt, Artificial Sequence
  Description of Artificial Sequence: Synthetic oligonucleotide
  Antisense strand to SEQ ID NO: 107786
gugagcggagauaucuugu

SEQ ID NO: 107788 - RNA, 19 nt, Artificial Sequence
  Description of Artificial Sequence: Synthetic oligonucleotide
  Sense strand starting at position 855 of SEQ ID NO: 1364
ccauuccucgcuugguuaa

SEQ ID NO: 107789 - RNA, 19 nt, Artificial Sequence
  Description of Artificial Sequence: Synthetic oligonucleotide
  Antisense strand to SEQ ID NO: 107788
uuaaccaagcgaggaaugg

SEQ ID NO: 107790 - RNA, 19 nt, Artificial Sequence
  Description of Artificial Sequence: Synthetic oligonucleotide
  Sense strand starting at position 993 of SEQ ID NO: 1364
ccagaaauccugugguuaa

SEQ ID NO: 107791 - RNA, 19 nt, Artificial Sequence
  Description of Artificial Sequence: Synthetic oligonucleotide
  Antisense strand to SEQ ID NO: 107790
uuaaccacaggauuucugg

SEQ ID NO: 107792 - RNA, 19 nt, Artificial Sequence
  Description of Artificial Sequence: Synthetic oligonucleotide
  Sense strand starting at position 994 of SEQ ID NO: 1364
cagaaauccugugguuaau

SEQ ID NO: 107793 - RNA, 19 nt, Artificial Sequence
  Description of Artificial Sequence: Synthetic oligonucleotide
  Antisense strand to SEQ ID NO: 107792
auuaaccacaggauuucug

SEQ ID NO: 107794 - RNA, 19 nt, Artificial Sequence
  Description of Artificial Sequence: Synthetic oligonucleotide
  Sense strand starting at position 996 of SEQ ID NO: 1364
gaaauccugugguuaauug

SEQ ID NO: 107795 - RNA, 19 nt, Artificial Sequence
  Description of Artificial Sequence: Synthetic oligonucleotide
  Antisense strand to SEQ ID NO: 107794
caauuaaccacaggauuuc

SEQ ID NO: 107796 - RNA, 19 nt, Artificial Sequence
  Description of Artificial Sequence: Synthetic oligonucleotide
  Sense strand starting at position 1024 of SEQ ID NO: 1364
cccgcuagucaugagauga

SEQ ID NO: 107797 - RNA, 19 nt, Artificial Sequence
  Description of Artificial Sequence: Synthetic oligonucleotide
  Antisense strand to SEQ ID NO: 107796
ucaucucaugacuagcggg

SEQ ID NO: 107798 - RNA, 19 nt, Artificial Sequence
  Description of Artificial Sequence: Synthetic oligonucleotide
  Sense strand starting at position 1575 of SEQ ID NO: 1364
uggacuucgcaguaaacuu

SEQ ID NO: 107799 - RNA, 19 nt, Artificial Sequence
  Description of Artificial Sequence: Synthetic oligonucleotide
  Antisense strand to SEQ ID NO: 107798
aaguuuacugcgaagucca

SEQ ID NO: 107800 - RNA, 19 nt, Artificial Sequence
  Description of Artificial Sequence: Synthetic oligonucleotide
  Sense strand starting at position 2418 of SEQ ID NO: 1364
aggcaaauguuugcauaau

SEQ ID NO: 107801 - RNA, 19 nt, Artificial Sequence
  Description of Artificial Sequence: Synthetic oligonucleotide
  Antisense strand to SEQ ID NO: 107800
auuaugcaaacauuugccu

SEQ ID NO: 107802 - RNA, 19 nt, Artificial Sequence
  Description of Artificial Sequence: Synthetic oligonucleotide
  Sense strand starting at position 2419 of SEQ ID NO: 1364
ggcaaauguuugcauaauu

SEQ ID NO: 107803 - RNA, 19 nt, Artificial Sequence
  Description of Artificial Sequence: Synthetic oligonucleotide
  Antisense strand to SEQ ID NO: 107802
aauuaugcaaacauuugcc

SEQ ID NO: 107804 - RNA, 19 nt, Artificial Sequence
  Description of Artificial Sequence: Synthetic oligonucleotide
  Sense strand starting at position 2686 of SEQ ID NO: 1364
cuagucuccuugugguuua

SEQ ID NO: 107805 - RNA, 19 nt, Artificial Sequence
  Description of Artificial Sequence: Synthetic oligonucleotide
  Antisense strand to SEQ ID NO: 107804
uaaaccacaaggagacuag

SEQ ID NO: 107806 - RNA, 19 nt, Artificial Sequence
  Description of Artificial Sequence: Synthetic oligonucleotide
  Sense strand starting at position 2693 of SEQ ID NO: 1364
ccuugugguuuacccauau

SEQ ID NO: 107807 - RNA, 19 nt, Artificial Sequence
  Description of Artificial Sequence: Synthetic oligonucleotide
  Antisense strand to SEQ ID NO: 107806
auauggguaaaccacaagg

SEQ ID NO: 107808 - RNA, 19 nt, Artificial Sequence
  Description of Artificial Sequence: Synthetic oligonucleotide
  Sense strand starting at position 3121 of SEQ ID NO: 1364
cuguaaucaagugguuaug

SEQ ID NO: 107809 - RNA, 19 nt, Artificial Sequence
  Description of Artificial Sequence: Synthetic oligonucleotide
  Antisense strand to SEQ ID NO: 107808
cauaaccacuugauuacag

SEQ ID NO: 107810 - RNA, 19 nt, Artificial Sequence
  Description of Artificial Sequence: Synthetic oligonucleotide
  Sense strand starting at position 3123 of SEQ ID NO: 1364
guaaucaagugguuauguu

SEQ ID NO: 107811 - RNA, 19 nt, Artificial Sequence
  Description of Artificial Sequence: Synthetic oligonucleotide
  Antisense strand to SEQ ID NO: 107810
aacauaaccacuugauuac

SEQ ID NO: 107812 - RNA, 19 nt, Artificial Sequence
  Description of Artificial Sequence: Synthetic oligonucleotide
  Sense strand starting at position 3228 of SEQ ID NO: 1364
guuccuaaaugagaacgau

SEQ ID NO: 107813 - RNA, 19 nt, Artificial Sequence
  Description of Artificial Sequence: Synthetic oligonucleotide
  Antisense strand to SEQ ID NO: 107812
aucguucucauuuaggaac

SEQ ID NO: 107814 - RNA, 19 nt, Artificial Sequence
  Description of Artificial Sequence: Synthetic oligonucleotide
  Sense strand starting at position 3238 of SEQ ID NO: 1364
gagaacgauagaugcuaga

SEQ ID NO: 107815 - RNA, 19 nt, Artificial Sequence
  Description of Artificial Sequence: Synthetic oligonucleotide
  Antisense strand to SEQ ID NO: 107814
ucuagcaucuaucguucuc

SEQ ID NO: 107816 - RNA, 19 nt, Artificial Sequence
  Description of Artificial Sequence: Synthetic oligonucleotide
  Sense strand starting at position 3241 of SEQ ID NO: 1364
aacgauagaugcuagaagu

SEQ ID NO: 107817 - RNA, 19 nt, Artificial Sequence
  Description of Artificial Sequence: Synthetic oligonucleotide
  Antisense strand to SEQ ID NO: 107816
acuucuagcaucuaucguu

SEQ ID NO: 107818 - RNA, 19 nt, Artificial Sequence
  Description of Artificial Sequence: Synthetic oligonucleotide
  Sense strand starting at position 3382 of SEQ ID NO: 1364
cagggacucuuuggguaau

SEQ ID NO: 107819 - RNA, 19 nt, Artificial Sequence
  Description of Artificial Sequence: Synthetic oligonucleotide
  Antisense strand to SEQ ID NO: 107818
auuacccaaagagucccug

SEQ ID NO: 107820 - RNA, 19 nt, Artificial Sequence
  Description of Artificial Sequence: Synthetic oligonucleotide
  Sense strand starting at position 3384 of SEQ ID NO: 1364
gggacucuuuggguaaucu

SEQ ID NO: 107821 - RNA, 19 nt, Artificial Sequence
  Description of Artificial Sequence: Synthetic oligonucleotide
  Antisense strand to SEQ ID NO: 107820
agauuacccaaagaguccc

SEQ ID NO: 107822 - RNA, 19 nt, Artificial Sequence
  Description of Artificial Sequence: Synthetic oligonucleotide
  Sense strand starting at position 3385 of SEQ ID NO: 1364
ggacucuuuggguaaucuu

SEQ ID NO: 107823 - RNA, 19 nt, Artificial Sequence
  Description of Artificial Sequence: Synthetic oligonucleotide
  Antisense strand to SEQ ID NO: 107822
aagauuacccaaagagucc

SEQ ID NO: 107824 - RNA, 19 nt, Artificial Sequence
  Description of Artificial Sequence: Synthetic oligonucleotide
  Sense strand starting at position 3388 of SEQ ID NO: 1364
cucuuuggguaaucuuuaa

SEQ ID NO: 107825 - RNA, 19 nt, Artificial Sequence
  Description of Artificial Sequence: Synthetic oligonucleotide
  Antisense strand to SEQ ID NO: 107824
uuaaagauuacccaaagag

SEQ ID NO: 107826 - RNA, 19 nt, Artificial Sequence
  Description of Artificial Sequence: Synthetic oligonucleotide
  Sense strand starting at position 3410 of SEQ ID NO: 1364
ugaguucucagagagccuu

SEQ ID NO: 107827 - RNA, 19 nt, Artificial Sequence
  Description of Artificial Sequence: Synthetic oligonucleotide
  Antisense strand to SEQ ID NO: 107826
aaggcucucugagaacuca

SEQ ID NO: 107828 - RNA, 19 nt, Artificial Sequence
  Description of Artificial Sequence: Synthetic oligonucleotide
  Sense strand starting at position 3416 of SEQ ID NO: 1364
cucagagagccuuguauaa

SEQ ID NO: 107829 - RNA, 19 nt, Artificial Sequence
  Description of Artificial Sequence: Synthetic oligonucleotide
  Antisense strand to SEQ ID NO: 107828
uuauacaaggcucucugag

SEQ ID NO: 107830 - RNA, 19 nt, Artificial Sequence
  Description of Artificial Sequence: Synthetic oligonucleotide
  Sense strand starting at position 3418 of SEQ ID NO: 1364
cagagagccuuguauaaac

SEQ ID NO: 107831 - RNA, 19 nt, Artificial Sequence
  Description of Artificial Sequence: Synthetic oligonucleotide
  Antisense strand to SEQ ID NO: 107830
guuuauacaaggcucucug

SEQ ID NO: 107832 - RNA, 19 nt, Artificial Sequence
  Description of Artificial Sequence: Synthetic oligonucleotide
  Sense strand starting at position 3448 of SEQ ID NO: 1364
uaaugauagcccugggaug

SEQ ID NO: 107833 - RNA, 19 nt, Artificial Sequence
  Description of Artificial Sequence: Synthetic oligonucleotide
  Antisense strand to SEQ ID NO: 107832
caucccagggcuaucauua

SEQ ID NO: 107834 - RNA, 19 nt, Artificial Sequence
  Description of Artificial Sequence: Synthetic oligonucleotide
  Sense strand starting at position 3841 of SEQ ID NO: 1364
gguggcuacuggugggaaa

SEQ ID NO: 107835 - RNA, 19 nt, Artificial Sequence
  Description of Artificial Sequence: Synthetic oligonucleotide
  Antisense strand to SEQ ID NO: 107834
uuucccaccaguagccacc

SEQ ID NO: 107836 - RNA, 19 nt, Artificial Sequence
  Description of Artificial Sequence: Synthetic oligonucleotide
  Sense strand starting at position 3923 of SEQ ID NO: 1366
gguggcuacuggugggaaa

SEQ ID NO: 107837 - RNA, 19 nt, Artificial Sequence
  Description of Artificial Sequence: Synthetic oligonucleotide
  Antisense strand to SEQ ID NO: 107836
uuucccaccaguagccacc

SEQ ID NO: 107838 - RNA, 19 nt, Artificial Sequence
  Description of Artificial Sequence: Synthetic oligonucleotide
  Sense strand starting at position 3530 of SEQ ID NO: 1366
uaaugauagcccugggaug

SEQ ID NO: 107839 - RNA, 19 nt, Artificial Sequence
  Description of Artificial Sequence: Synthetic oligonucleotide
  Antisense strand to SEQ ID NO: 107838
caucccagggcuaucauua

SEQ ID NO: 107840 - RNA, 19 nt, Artificial Sequence
  Description of Artificial Sequence: Synthetic oligonucleotide
  Sense strand starting at position 3500 of SEQ ID NO: 1366
cagagagccuuguauaaac

SEQ ID NO: 107841 - RNA, 19 nt, Artificial Sequence
  Description of Artificial Sequence: Synthetic oligonucleotide
  Antisense strand to SEQ ID NO: 107840
guuuauacaaggcucucug

SEQ ID NO: 107842 - RNA, 19 nt, Artificial Sequence
  Description of Artificial Sequence: Synthetic oligonucleotide
  Sense strand starting at position 3498 of SEQ ID NO: 1366
cucagagagccuuguauaa

SEQ ID NO: 107843 - RNA, 19 nt, Artificial Sequence
  Description of Artificial Sequence: Synthetic oligonucleotide
  Antisense strand to SEQ ID NO: 107842
uuauacaaggcucucugag

SEQ ID NO: 107844 - RNA, 19 nt, Artificial Sequence
  Description of Artificial Sequence: Synthetic oligonucleotide
  Sense strand starting at position 3492 of SEQ ID NO: 1366
ugaguucucagagagccuu

SEQ ID NO: 107845 - RNA, 19 nt, Artificial Sequence
  Description of Artificial Sequence: Synthetic oligonucleotide
  Antisense strand to SEQ ID NO: 107844
aaggcucucugagaacuca

SEQ ID NO: 107846 - RNA, 19 nt, Artificial Sequence
  Description of Artificial Sequence: Synthetic oligonucleotide
  Sense strand starting at position 3470 of SEQ ID NO: 1366
cucuuuggguaaucuuuaa

SEQ ID NO: 107847 - RNA, 19 nt, Artificial Sequence
  Description of Artificial Sequence: Synthetic oligonucleotide
  Antisense strand to SEQ ID NO: 107846
uuaaagauuacccaaagag

SEQ ID NO: 107848 - RNA, 19 nt, Artificial Sequence
  Description of Artificial Sequence: Synthetic oligonucleotide
  Sense strand starting at position 3467 of SEQ ID NO: 1366
ggacucuuuggguaaucuu

SEQ ID NO: 107849 - RNA, 19 nt, Artificial Sequence
  Description of Artificial Sequence: Synthetic oligonucleotide
  Antisense strand to SEQ ID NO: 107848
aagauuacccaaagagucc

SEQ ID NO: 107850 - RNA, 19 nt, Artificial Sequence
  Description of Artificial Sequence: Synthetic oligonucleotide
  Sense strand starting at position 3466 of SEQ ID NO: 1366
gggacucuuuggguaaucu

SEQ ID NO: 107851 - RNA, 19 nt, Artificial Sequence
  Description of Artificial Sequence: Synthetic oligonucleotide
  Antisense strand to SEQ ID NO: 107850
agauuacccaaagaguccc

SEQ ID NO: 107852 - RNA, 19 nt, Artificial Sequence
  Description of Artificial Sequence: Synthetic oligonucleotide
  Sense strand starting at position 3464 of SEQ ID NO: 1366
cagggacucuuuggguaau

SEQ ID NO: 107853 - RNA, 19 nt, Artificial Sequence
  Description of Artificial Sequence: Synthetic oligonucleotide
  Antisense strand to SEQ ID NO: 107852
auuacccaaagagucccug

SEQ ID NO: 107854 - RNA, 19 nt, Artificial Sequence
  Description of Artificial Sequence: Synthetic oligonucleotide
  Sense strand starting at position 3354 of SEQ ID NO: 1366
ggcauaaagucagagaaag

SEQ ID NO: 107855 - RNA, 19 nt, Artificial Sequence
  Description of Artificial Sequence: Synthetic oligonucleotide
  Antisense strand to SEQ ID NO: 107854
cuuucucugacuuuaugcc

SEQ ID NO: 107856 - RNA, 19 nt, Artificial Sequence
  Description of Artificial Sequence: Synthetic oligonucleotide
  Sense strand starting at position 3342 of SEQ ID NO: 1366
ugaaguaaauuuggcauaa

SEQ ID NO: 107857 - RNA, 19 nt, Artificial Sequence
  Description of Artificial Sequence: Synthetic oligonucleotide
  Antisense strand to SEQ ID NO: 107856
uuaugccaaauuuacuuca

SEQ ID NO: 107858 - RNA, 19 nt, Artificial Sequence
  Description of Artificial Sequence: Synthetic oligonucleotide
  Sense strand starting at position 3331 of SEQ ID NO: 1366
augcuagaaguugaaguaa

SEQ ID NO: 107859 - RNA, 19 nt, Artificial Sequence
  Description of Artificial Sequence: Synthetic oligonucleotide
  Antisense strand to SEQ ID NO: 107858
uuacuucaacuucuagcau

SEQ ID NO: 107860 - RNA, 19 nt, Artificial Sequence
  Description of Artificial Sequence: Synthetic oligonucleotide
  Sense strand starting at position 3323 of SEQ ID NO: 1366
aacgauagaugcuagaagu

SEQ ID NO: 107861 - RNA, 19 nt, Artificial Sequence
  Description of Artificial Sequence: Synthetic oligonucleotide
  Antisense strand to SEQ ID NO: 107860
acuucuagcaucuaucguu

SEQ ID NO: 107862 - RNA, 19 nt, Artificial Sequence
  Description of Artificial Sequence: Synthetic oligonucleotide
  Sense strand starting at position 3320 of SEQ ID NO: 1366
gagaacgauagaugcuaga

SEQ ID NO: 107863 - RNA, 19 nt, Artificial Sequence
  Description of Artificial Sequence: Synthetic oligonucleotide
  Antisense strand to SEQ ID NO: 107862
ucuagcaucuaucguucuc

SEQ ID NO: 107864 - RNA, 19 nt, Artificial Sequence
  Description of Artificial Sequence: Synthetic oligonucleotide
  Sense strand starting at position 3310 of SEQ ID NO: 1366
guuccuaaaugagaacgau

SEQ ID NO: 107865 - RNA, 19 nt, Artificial Sequence
  Description of Artificial Sequence: Synthetic oligonucleotide
  Antisense strand to SEQ ID NO: 107864
aucguucucauuuaggaac

SEQ ID NO: 107866 - RNA, 19 nt, Artificial Sequence
  Description of Artificial Sequence: Synthetic oligonucleotide
  Sense strand starting at position 3205 of SEQ ID NO: 1366
guaaucaagugguuauguu

SEQ ID NO: 107867 - RNA, 19 nt, Artificial Sequence
  Description of Artificial Sequence: Synthetic oligonucleotide
  Antisense strand to SEQ ID NO: 107866
aacauaaccacuugauuac

SEQ ID NO: 107868 - RNA, 19 nt, Artificial Sequence
  Description of Artificial Sequence: Synthetic oligonucleotide
  Sense strand starting at position 3203 of SEQ ID NO: 1366
cuguaaucaagugguuaug

SEQ ID NO: 107869 - RNA, 19 nt, Artificial Sequence
  Description of Artificial Sequence: Synthetic oligonucleotide
  Antisense strand to SEQ ID NO: 107868
cauaaccacuugauuacag

SEQ ID NO: 107870 - RNA, 19 nt, Artificial Sequence
  Description of Artificial Sequence: Synthetic oligonucleotide
  Sense strand starting at position 3089 of SEQ ID NO: 1366
gccugaagauucuuccaac

SEQ ID NO: 107871 - RNA, 19 nt, Artificial Sequence
  Description of Artificial Sequence: Synthetic oligonucleotide
  Antisense strand to SEQ ID NO: 107870
guuggaagaaucuucaggc

SEQ ID NO: 107872 - RNA, 19 nt, Artificial Sequence
  Description of Artificial Sequence: Synthetic oligonucleotide
  Sense strand starting at position 3081 of SEQ ID NO: 1366
ugcucugugccugaagauu

SEQ ID NO: 107873 - RNA, 19 nt, Artificial Sequence
  Description of Artificial Sequence: Synthetic oligonucleotide
  Antisense strand to SEQ ID NO: 107872
aaucuucaggcacagagca

SEQ ID NO: 107874 - RNA, 19 nt, Artificial Sequence
  Description of Artificial Sequence: Synthetic oligonucleotide
  Sense strand starting at position 3080 of SEQ ID NO: 1366
uugcucugugccugaagau

SEQ ID NO: 107875 - RNA, 19 nt, Artificial Sequence
  Description of Artificial Sequence: Synthetic oligonucleotide
  Antisense strand to SEQ ID NO: 107874
aucuucaggcacagagcaa

SEQ ID NO: 107876 - RNA, 19 nt, Artificial Sequence
  Description of Artificial Sequence: Synthetic oligonucleotide
  Sense strand starting at position 2777 of SEQ ID NO: 1366
cuagucuccuugugguuua

SEQ ID NO: 107877 - RNA, 19 nt, Artificial Sequence
  Description of Artificial Sequence: Synthetic oligonucleotide
  Antisense strand to SEQ ID NO: 107876
uaaaccacaaggagacuag

SEQ ID NO: 107878 - RNA, 19 nt, Artificial Sequence
  Description of Artificial Sequence: Synthetic oligonucleotide
  Sense strand starting at position 2534 of SEQ ID NO: 1366
ucgugccauuauuuaaagu

SEQ ID NO: 107879 - RNA, 19 nt, Artificial Sequence
  Description of Artificial Sequence: Synthetic oligonucleotide
  Antisense strand to SEQ ID NO: 107878
acuuuaaauaauggcacga

SEQ ID NO: 107880 - RNA, 19 nt, Artificial Sequence
  Description of Artificial Sequence: Synthetic oligonucleotide
  Sense strand starting at position 2510 of SEQ ID NO: 1366
ggcaaauguuugcauaauu

SEQ ID NO: 107881 - RNA, 19 nt, Artificial Sequence
  Description of Artificial Sequence: Synthetic oligonucleotide
  Antisense strand to SEQ ID NO: 107880
aauuaugcaaacauuugcc

SEQ ID NO: 107882 - RNA, 19 nt, Artificial Sequence
  Description of Artificial Sequence: Synthetic oligonucleotide
  Sense strand starting at position 2509 of SEQ ID NO: 1366
aggcaaauguuugcauaau

SEQ ID NO: 107883 - RNA, 19 nt, Artificial Sequence
  Description of Artificial Sequence: Synthetic oligonucleotide
  Antisense strand to SEQ ID NO: 107882
auuaugcaaacauuugccu

SEQ ID NO: 107884 - RNA, 19 nt, Artificial Sequence
  Description of Artificial Sequence: Synthetic oligonucleotide
  Sense strand starting at position 2507 of SEQ ID NO: 1366
uaaggcaaauguuugcaua

SEQ ID NO: 107885 - RNA, 19 nt, Artificial Sequence
  Description of Artificial Sequence: Synthetic oligonucleotide
  Antisense strand to SEQ ID NO: 107884
uaugcaaacauuugccuua

SEQ ID NO: 107886 - RNA, 19 nt, Artificial Sequence
  Description of Artificial Sequence: Synthetic oligonucleotide
  Sense strand starting at position 1188 of SEQ ID NO: 1366
gagcgcucuugcccaaguu

SEQ ID NO: 107887 - RNA, 19 nt, Artificial Sequence
  Description of Artificial Sequence: Synthetic oligonucleotide
  Antisense strand to SEQ ID NO: 107886
aacuugggcaagagcgcuc

SEQ ID NO: 107888 - RNA, 19 nt, Artificial Sequence
  Description of Artificial Sequence: Synthetic oligonucleotide
  Sense strand starting at position 1046 of SEQ ID NO: 1366
gugauucagugaucgcuac

SEQ ID NO: 107889 - RNA, 19 nt, Artificial Sequence
  Description of Artificial Sequence: Synthetic oligonucleotide
  Antisense strand to SEQ ID NO: 107888
guagcgaucacugaaucac

SEQ ID NO: 107890 - RNA, 19 nt, Artificial Sequence
  Description of Artificial Sequence: Synthetic oligonucleotide
  Sense strand starting at position 1003 of SEQ ID NO: 1366
gaaauccugugguuaauug

SEQ ID NO: 107891 - RNA, 19 nt, Artificial Sequence
  Description of Artificial Sequence: Synthetic oligonucleotide
  Antisense strand to SEQ ID NO: 107890
caauuaaccacaggauuuc

SEQ ID NO: 107892 - RNA, 19 nt, Artificial Sequence
  Description of Artificial Sequence: Synthetic oligonucleotide
  Sense strand starting at position 1001 of SEQ ID NO: 1366
cagaaauccugugguuaau

SEQ ID NO: 107893 - RNA, 19 nt, Artificial Sequence
  Description of Artificial Sequence: Synthetic oligonucleotide
  Antisense strand to SEQ ID NO: 107892
auuaaccacaggauuucug

SEQ ID NO: 107894 - RNA, 19 nt, Artificial Sequence
  Description of Artificial Sequence: Synthetic oligonucleotide
  Sense strand starting at position 1000 of SEQ ID NO: 1366
ccagaaauccugugguuaa

SEQ ID NO: 107895 - RNA, 19 nt, Artificial Sequence
  Description of Artificial Sequence: Synthetic oligonucleotide
  Antisense strand to SEQ ID NO: 107894
uuaaccacaggauuucugg

SEQ ID NO: 107896 - RNA, 19 nt, Artificial Sequence
  Description of Artificial Sequence: Synthetic oligonucleotide
  Sense strand starting at position 876 of SEQ ID NO: 1366
guuaacucuugggugaaag

SEQ ID NO: 107897 - RNA, 19 nt, Artificial Sequence
  Description of Artificial Sequence: Synthetic oligonucleotide
  Antisense strand to SEQ ID NO: 107896
cuuucacccaagaguuaac

SEQ ID NO: 107898 - RNA, 19 nt, Artificial Sequence
  Description of Artificial Sequence: Synthetic oligonucleotide
  Sense strand starting at position 875 of SEQ ID NO: 1366
gguuaacucuugggugaaa

SEQ ID NO: 107899 - RNA, 19 nt, Artificial Sequence
  Description of Artificial Sequence: Synthetic oligonucleotide
  Antisense strand to SEQ ID NO: 107898
uuucacccaagaguuaacc

SEQ ID NO: 107900 - RNA, 19 nt, Artificial Sequence
  Description of Artificial Sequence: Synthetic oligonucleotide
  Sense strand starting at position 873 of SEQ ID NO: 1366
uugguuaacucuuggguga

SEQ ID NO: 107901 - RNA, 19 nt, Artificial Sequence
  Description of Artificial Sequence: Synthetic oligonucleotide
  Antisense strand to SEQ ID NO: 107900
ucacccaagaguuaaccaa

SEQ ID NO: 107902 - RNA, 19 nt, Artificial Sequence
  Description of Artificial Sequence: Synthetic oligonucleotide
  Sense strand starting at position 862 of SEQ ID NO: 1366
ccauuccucgcuugguuaa

SEQ ID NO: 107903 - RNA, 19 nt, Artificial Sequence
  Description of Artificial Sequence: Synthetic oligonucleotide
  Antisense strand to SEQ ID NO: 107902
uuaaccaagcgaggaaugg

SEQ ID NO: 107904 - RNA, 19 nt, Artificial Sequence
  Description of Artificial Sequence: Synthetic oligonucleotide
  Sense strand starting at position 807 of SEQ ID NO: 1366
agugcuucuuucgaaagca

SEQ ID NO: 107905 - RNA, 19 nt, Artificial Sequence
  Description of Artificial Sequence: Synthetic oligonucleotide
  Antisense strand to SEQ ID NO: 107904
ugcuuucgaaagaagcacu

SEQ ID NO: 107906 - RNA, 19 nt, Artificial Sequence
  Description of Artificial Sequence: Synthetic oligonucleotide
  Sense strand starting at position 804 of SEQ ID NO: 1366
uaaagugcuucuuucgaaa

SEQ ID NO: 107907 - RNA, 19 nt, Artificial Sequence
  Description of Artificial Sequence: Synthetic oligonucleotide
  Antisense strand to SEQ ID NO: 107906
uuucgaaagaagcacuuua

SEQ ID NO: 107908 - RNA, 19 nt, Artificial Sequence
  Description of Artificial Sequence: Synthetic oligonucleotide
  Sense strand starting at position 603 of SEQ ID NO: 1366
acaagauaucuccgcucac

SEQ ID NO: 107909 - RNA, 19 nt, Artificial Sequence
  Description of Artificial Sequence: Synthetic oligonucleotide
  Antisense strand to SEQ ID NO: 107908
gugagcggagauaucuugu

SEQ ID NO: 107910 - RNA, 19 nt, Artificial Sequence
  Description of Artificial Sequence: Synthetic oligonucleotide
  Sense strand starting at position 453 of SEQ ID NO: 1366
uccuuaacuucgugaagca

SEQ ID NO: 107911 - RNA, 19 nt, Artificial Sequence
  Description of Artificial Sequence: Synthetic oligonucleotide
  Antisense strand to SEQ ID NO: 107910
ugcuucacgaaguuaagga

SEQ ID NO: 107912 - RNA, 19 nt, Artificial Sequence
  Description of Artificial Sequence: Synthetic oligonucleotide
  Sense strand starting at position 451 of SEQ ID NO: 1366
uuuccuuaacuucgugaag

SEQ ID NO: 107913 - RNA, 19 nt, Artificial Sequence
  Description of Artificial Sequence: Synthetic oligonucleotide
  Antisense strand to SEQ ID NO: 107912
cuucacgaaguuaaggaaa

SEQ ID NO: 107914 - RNA, 19 nt, Artificial Sequence
  Description of Artificial Sequence: Synthetic oligonucleotide
  Sense strand starting at position 221 of SEQ ID NO: 1366
agaucaccugcacguuuaa

SEQ ID NO: 107915 - RNA, 19 nt, Artificial Sequence
  Description of Artificial Sequence: Synthetic oligonucleotide
  Antisense strand to SEQ ID NO: 107914
uuaaacgugcaggugaucu

SEQ ID NO: 107916 - RNA, 19 nt, Artificial Sequence
  Description of Artificial Sequence: Synthetic oligonucleotide
  Sense strand starting at position 261 of SEQ ID NO: 1367
gaggucugacucugaaugu

SEQ ID NO: 107917 - RNA, 19 nt, Artificial Sequence
  Description of Artificial Sequence: Synthetic oligonucleotide
  Antisense strand to SEQ ID NO: 107916
acauucagagucagaccuc

SEQ ID NO: 107918 - RNA, 19 nt, Artificial Sequence
  Description of Artificial Sequence: Synthetic oligonucleotide
  Sense strand starting at position 605 of SEQ ID NO: 1367
gaauaagauuaguuugugu

SEQ ID NO: 107919 - RNA, 19 nt, Artificial Sequence
  Description of Artificial Sequence: Synthetic oligonucleotide
  Antisense strand to SEQ ID NO: 107918
acacaaacuaaucuuauuc

SEQ ID NO: 107920 - RNA, 19 nt, Artificial Sequence
  Description of Artificial Sequence: Synthetic oligonucleotide
  Sense strand starting at position 1566 of SEQ ID NO: 1367
ucauucugugccugcguua

SEQ ID NO: 107921 - RNA, 19 nt, Artificial Sequence
  Description of Artificial Sequence: Synthetic oligonucleotide
  Antisense strand to SEQ ID NO: 107920
uaacgcaggcacagaauga

SEQ ID NO: 107922 - RNA, 19 nt, Artificial Sequence
  Description of Artificial Sequence: Synthetic oligonucleotide
  Sense strand starting at position 1569 of SEQ ID NO: 1367
uucugugccugcguuagaa

SEQ ID NO: 107923 - RNA, 19 nt, Artificial Sequence
  Description of Artificial Sequence: Synthetic oligonucleotide
  Antisense strand to SEQ ID NO: 107922
uucuaacgcaggcacagaa

SEQ ID NO: 107924 - RNA, 19 nt, Artificial Sequence
  Description of Artificial Sequence: Synthetic oligonucleotide
  Sense strand starting at position 1571 of SEQ ID NO: 1367
cugugccugcguuagaaau

SEQ ID NO: 107925 - RNA, 19 nt, Artificial Sequence
  Description of Artificial Sequence: Synthetic oligonucleotide
  Antisense strand to SEQ ID NO: 107924
auuucuaacgcaggcacag

SEQ ID NO: 107926 - RNA, 19 nt, Artificial Sequence
  Description of Artificial Sequence: Synthetic oligonucleotide
  Sense strand starting at position 1573 of SEQ ID NO: 1367
gugccugcguuagaaauca

SEQ ID NO: 107927 - RNA, 19 nt, Artificial Sequence
  Description of Artificial Sequence: Synthetic oligonucleotide
  Antisense strand to SEQ ID NO: 107926
ugauuucuaacgcaggcac

SEQ ID NO: 107928 - RNA, 19 nt, Artificial Sequence
  Description of Artificial Sequence: Synthetic oligonucleotide
  Sense strand starting at position 1796 of SEQ ID NO: 1369
gcagaugucucaccugaga

SEQ ID NO: 107929 - RNA, 19 nt, Artificial Sequence
  Description of Artificial Sequence: Synthetic oligonucleotide
  Antisense strand to SEQ ID NO: 107928
ucucaggugagacaucugc

SEQ ID NO: 107930 - RNA, 19 nt, Artificial Sequence
  Description of Artificial Sequence: Synthetic oligonucleotide
  Sense strand starting at position 2378 of SEQ ID NO: 1369
accagaguaucccugcuaa

SEQ ID NO: 107931 - RNA, 19 nt, Artificial Sequence
  Description of Artificial Sequence: Synthetic oligonucleotide
  Antisense strand to SEQ ID NO: 107930
uuagcagggauacucuggu

SEQ ID NO: 107932 - RNA, 19 nt, Artificial Sequence
  Description of Artificial Sequence: Synthetic oligonucleotide
  Sense strand starting at position 2497 of SEQ ID NO: 1369
ccagucuaguaauguucua

SEQ ID NO: 107933 - RNA, 19 nt, Artificial Sequence
  Description of Artificial Sequence: Synthetic oligonucleotide
  Antisense strand to SEQ ID NO: 107932
uagaacauuacuagacugg

SEQ ID NO: 107934 - RNA, 19 nt, Artificial Sequence
  Description of Artificial Sequence: Synthetic oligonucleotide
  Sense strand starting at position 3096 of SEQ ID NO: 1369
uuccuuuaaccuugugaag

SEQ ID NO: 107935 - RNA, 19 nt, Artificial Sequence
  Description of Artificial Sequence: Synthetic oligonucleotide
  Antisense strand to SEQ ID NO: 107934
cuucacaagguuaaaggaa

SEQ ID NO: 107936 - RNA, 19 nt, Artificial Sequence
  Description of Artificial Sequence: Synthetic oligonucleotide
  Sense strand starting at position 3098 of SEQ ID NO: 1369
ccuuuaaccuugugaagca

SEQ ID NO: 107937 - RNA, 19 nt, Artificial Sequence
  Description of Artificial Sequence: Synthetic oligonucleotide
  Antisense strand to SEQ ID NO: 107936
ugcuucacaagguuaaagg

SEQ ID NO: 107938 - RNA, 19 nt, Artificial Sequence
  Description of Artificial Sequence: Synthetic oligonucleotide
  Sense strand starting at position 1209 of SEQ ID NO: 1368
acauuauacuggcaacuga

SEQ ID NO: 107939 - RNA, 19 nt, Artificial Sequence
  Description of Artificial Sequence: Synthetic oligonucleotide
  Antisense strand to SEQ ID NO: 107938
ucaguugccaguauaaugu

SEQ ID NO: 107940 - RNA, 19 nt, Artificial Sequence
  Description of Artificial Sequence: Synthetic oligonucleotide
  Sense strand starting at position 1497 of SEQ ID NO: 1368
acucuccucuccugaggua

SEQ ID NO: 107941 - RNA, 19 nt, Artificial Sequence
  Description of Artificial Sequence: Synthetic oligonucleotide
  Antisense strand to SEQ ID NO: 107940
uaccucaggagaggagagu

SEQ ID NO: 107942 - RNA, 19 nt, Artificial Sequence
  Description of Artificial Sequence: Synthetic oligonucleotide
  Sense strand starting at position 1498 of SEQ ID NO: 1368
cucuccucuccugagguaa

SEQ ID NO: 107943 - RNA, 19 nt, Artificial Sequence
  Description of Artificial Sequence: Synthetic oligonucleotide
  Antisense strand to SEQ ID NO: 107942
uuaccucaggagaggagag

SEQ ID NO: 107944 - RNA, 19 nt, Artificial Sequence
  Description of Artificial Sequence: Synthetic oligonucleotide
  Sense strand starting at position 2452 of SEQ ID NO: 1368
cuguuagggaauuaugagu

SEQ ID NO: 107945 - RNA, 19 nt, Artificial Sequence
  Description of Artificial Sequence: Synthetic oligonucleotide
  Antisense strand to SEQ ID NO: 107944
acucauaauucccuaacag

SEQ ID NO: 107946 - RNA, 19 nt, Artificial Sequence
  Description of Artificial Sequence: Synthetic oligonucleotide
  Sense strand starting at position 2460 of SEQ ID NO: 1368
gaauuaugagugugugggu

SEQ ID NO: 107947 - RNA, 19 nt, Artificial Sequence
  Description of Artificial Sequence: Synthetic oligonucleotide
  Antisense strand to SEQ ID NO: 107946
acccacacacucauaauuc

SEQ ID NO: 107948 - RNA, 19 nt, Artificial Sequence
  Description of Artificial Sequence: Synthetic oligonucleotide
  Sense strand starting at position 2463 of SEQ ID NO: 1368
uuaugagugugugggugua

SEQ ID NO: 107949 - RNA, 19 nt, Artificial Sequence
  Description of Artificial Sequence: Synthetic oligonucleotide
  Antisense strand to SEQ ID NO: 107948
uacacccacacacucauaa

SEQ ID NO: 107950 - RNA, 19 nt, Artificial Sequence
  Description of Artificial Sequence: Synthetic oligonucleotide
  Sense strand starting at position 156 of SEQ ID NO: 1370
aguguucacugugugccaa

SEQ ID NO: 107951 - RNA, 19 nt, Artificial Sequence
  Description of Artificial Sequence: Synthetic oligonucleotide
  Antisense strand to SEQ ID NO: 107950
uuggcacacagugaacacu

SEQ ID NO: 107952 - RNA, 19 nt, Artificial Sequence
  Description of Artificial Sequence: Synthetic oligonucleotide
  Sense strand starting at position 157 of SEQ ID NO: 1370
guguucacugugugccaau

SEQ ID NO: 107953 - RNA, 19 nt, Artificial Sequence
  Description of Artificial Sequence: Synthetic oligonucleotide
  Antisense strand to SEQ ID NO: 107952
auuggcacacagugaacac

SEQ ID NO: 107954 - RNA, 19 nt, Artificial Sequence
  Description of Artificial Sequence: Synthetic oligonucleotide
  Sense strand starting at position 1254 of SEQ ID NO: 1370
cauuuagugucucagaaga

SEQ ID NO: 107955 - RNA, 19 nt, Artificial Sequence
  Description of Artificial Sequence: Synthetic oligonucleotide
  Antisense strand to SEQ ID NO: 107954
ucuucugagacacuaaaug

SEQ ID NO: 107956 - RNA, 19 nt, Artificial Sequence
  Description of Artificial Sequence: Synthetic oligonucleotide
  Sense strand starting at position 1256 of SEQ ID NO: 1370
uuuagugucucagaagaca

SEQ ID NO: 107957 - RNA, 19 nt, Artificial Sequence
  Description of Artificial Sequence: Synthetic oligonucleotide
  Antisense strand to SEQ ID NO: 107956
ugucuucugagacacuaaa

SEQ ID NO: 107958 - RNA, 19 nt, Artificial Sequence
  Description of Artificial Sequence: Synthetic oligonucleotide
  Sense strand starting at position 2752 of SEQ ID NO: 1370
guauuuguauugcuuuaca

SEQ ID NO: 107959 - RNA, 19 nt, Artificial Sequence
  Description of Artificial Sequence: Synthetic oligonucleotide
  Antisense strand to SEQ ID NO: 107958
uguaaagcaauacaaauac

SEQ ID NO: 107960 - RNA, 19 nt, Artificial Sequence
  Description of Artificial Sequence: Synthetic oligonucleotide
  Sense strand starting at position 3419 of SEQ ID NO: 1371
uaggacuggugugaggauu

SEQ ID NO: 107961 - RNA, 19 nt, Artificial Sequence
  Description of Artificial Sequence: Synthetic oligonucleotide
  Antisense strand to SEQ ID NO: 107960
aauccucacaccaguccua

SEQ ID NO: 107962 - RNA, 19 nt, Artificial Sequence
  Description of Artificial Sequence: Synthetic oligonucleotide
  Sense strand starting at position 3418 of SEQ ID NO: 1371
auaggacuggugugaggau

SEQ ID NO: 107963 - RNA, 19 nt, Artificial Sequence
  Description of Artificial Sequence: Synthetic oligonucleotide
  Antisense strand to SEQ ID NO: 107962
auccucacaccaguccuau

SEQ ID NO: 107964 - RNA, 19 nt, Artificial Sequence
  Description of Artificial Sequence: Synthetic oligonucleotide
  Sense strand starting at position 3352 of SEQ ID NO: 1371
cugugcaggucauuuaagu

SEQ ID NO: 107965 - RNA, 19 nt, Artificial Sequence
  Description of Artificial Sequence: Synthetic oligonucleotide
  Antisense strand to SEQ ID NO: 107964
acuuaaaugaccugcacag

SEQ ID NO: 107966 - RNA, 19 nt, Artificial Sequence
  Description of Artificial Sequence: Synthetic oligonucleotide
  Sense strand starting at position 3025 of SEQ ID NO: 1371
ggaagagcguuccaaagag

SEQ ID NO: 107967 - RNA, 19 nt, Artificial Sequence
  Description of Artificial Sequence: Synthetic oligonucleotide
  Antisense strand to SEQ ID NO: 107966
cucuuuggaacgcucuucc

SEQ ID NO: 107968 - RNA, 19 nt, Artificial Sequence
  Description of Artificial Sequence: Synthetic oligonucleotide
  Sense strand starting at position 2541 of SEQ ID NO: 1371
ugaauccuuccagggauau

SEQ ID NO: 107969 - RNA, 19 nt, Artificial Sequence
  Description of Artificial Sequence: Synthetic oligonucleotide
  Antisense strand to SEQ ID NO: 107968
auaucccuggaaggauuca

SEQ ID NO: 107970 - RNA, 19 nt, Artificial Sequence
  Description of Artificial Sequence: Synthetic oligonucleotide
  Sense strand starting at position 2530 of SEQ ID NO: 1371
ugcuguuccugugaauccu

SEQ ID NO: 107971 - RNA, 19 nt, Artificial Sequence
  Description of Artificial Sequence: Synthetic oligonucleotide
  Antisense strand to SEQ ID NO: 107970
aggauucacaggaacagca

SEQ ID NO: 107972 - RNA, 19 nt, Artificial Sequence
  Description of Artificial Sequence: Synthetic oligonucleotide
  Sense strand starting at position 2527 of SEQ ID NO: 1371
ggaugcuguuccugugaau

SEQ ID NO: 107973 - RNA, 19 nt, Artificial Sequence
  Description of Artificial Sequence: Synthetic oligonucleotide
  Antisense strand to SEQ ID NO: 107972
auucacaggaacagcaucc

SEQ ID NO: 107974 - RNA, 19 nt, Artificial Sequence
  Description of Artificial Sequence: Synthetic oligonucleotide
  Sense strand starting at position 2342 of SEQ ID NO: 1371
uuuacaugguucgaaauuc

SEQ ID NO: 107975 - RNA, 19 nt, Artificial Sequence
  Description of Artificial Sequence: Synthetic oligonucleotide
  Antisense strand to SEQ ID NO: 107974
gaauuucgaaccauguaaa

SEQ ID NO: 107976 - RNA, 19 nt, Artificial Sequence
  Description of Artificial Sequence: Synthetic oligonucleotide
  Sense strand starting at position 2206 of SEQ ID NO: 1371
ccuccaaaucgcugauuuc

SEQ ID NO: 107977 - RNA, 19 nt, Artificial Sequence
  Description of Artificial Sequence: Synthetic oligonucleotide
  Antisense strand to SEQ ID NO: 107976
gaaaucagcgauuuggagg

SEQ ID NO: 107978 - RNA, 19 nt, Artificial Sequence
  Description of Artificial Sequence: Synthetic oligonucleotide
  Sense strand starting at position 2117 of SEQ ID NO: 1371
aggaguaaccuaggugaug

SEQ ID NO: 107979 - RNA, 19 nt, Artificial Sequence
  Description of Artificial Sequence: Synthetic oligonucleotide
  Antisense strand to SEQ ID NO: 107978
caucaccuagguuacuccu

SEQ ID NO: 107980 - RNA, 19 nt, Artificial Sequence
  Description of Artificial Sequence: Synthetic oligonucleotide
  Sense strand starting at position 1732 of SEQ ID NO: 1371
ggcgcccucaccugagaaa

SEQ ID NO: 107981 - RNA, 19 nt, Artificial Sequence
  Description of Artificial Sequence: Synthetic oligonucleotide
  Antisense strand to SEQ ID NO: 107980
uuucucaggugagggcgcc

SEQ ID NO: 107982 - RNA, 19 nt, Artificial Sequence
  Description of Artificial Sequence: Synthetic oligonucleotide
  Sense strand starting at position 1429 of SEQ ID NO: 1371
caguguccucuacaggaua

SEQ ID NO: 107983 - RNA, 19 nt, Artificial Sequence
  Description of Artificial Sequence: Synthetic oligonucleotide
  Antisense strand to SEQ ID NO: 107982
uauccuguagaggacacug

SEQ ID NO: 107984 - RNA, 19 nt, Artificial Sequence
  Description of Artificial Sequence: Synthetic oligonucleotide
  Sense strand starting at position 1427 of SEQ ID NO: 1371
gucaguguccucuacagga

SEQ ID NO: 107985 - RNA, 19 nt, Artificial Sequence
  Description of Artificial Sequence: Synthetic oligonucleotide
  Antisense strand to SEQ ID NO: 107984
uccuguagaggacacugac

SEQ ID NO: 107986 - RNA, 19 nt, Artificial Sequence
  Description of Artificial Sequence: Synthetic oligonucleotide
  Sense strand starting at position 1425 of SEQ ID NO: 1371
gagucaguguccucuacag

SEQ ID NO: 107987 - RNA, 19 nt, Artificial Sequence
  Description of Artificial Sequence: Synthetic oligonucleotide
  Antisense strand to SEQ ID NO: 107986
cuguagaggacacugacuc

SEQ ID NO: 107988 - RNA, 19 nt, Artificial Sequence
  Description of Artificial Sequence: Synthetic oligonucleotide
  Sense strand starting at position 1176 of SEQ ID NO: 1371
ccgaaauccugcgguucau

SEQ ID NO: 107989 - RNA, 19 nt, Artificial Sequence
  Description of Artificial Sequence: Synthetic oligonucleotide
  Antisense strand to SEQ ID NO: 107988
augaaccgcaggauuucgg

SEQ ID NO: 107990 - RNA, 19 nt, Artificial Sequence
  Description of Artificial Sequence: Synthetic oligonucleotide
  Sense strand starting at position 1175 of SEQ ID NO: 1371
gccgaaauccugcgguuca

SEQ ID NO: 107991 - RNA, 19 nt, Artificial Sequence
  Description of Artificial Sequence: Synthetic oligonucleotide
  Antisense strand to SEQ ID NO: 107990
ugaaccgcaggauuucggc

SEQ ID NO: 107992 - RNA, 19 nt, Artificial Sequence
  Description of Artificial Sequence: Synthetic oligonucleotide
  Sense strand starting at position 1069 of SEQ ID NO: 1371
cgccacaugagaugaugau

SEQ ID NO: 107993 - RNA, 19 nt, Artificial Sequence
  Description of Artificial Sequence: Synthetic oligonucleotide
  Antisense strand to SEQ ID NO: 107992
aucaucaucucauguggcg

SEQ ID NO: 107994 - RNA, 19 nt, Artificial Sequence
  Description of Artificial Sequence: Synthetic oligonucleotide
  Sense strand starting at position 1049 of SEQ ID NO: 1371
uuaacucuucggugaaagg

SEQ ID NO: 107995 - RNA, 19 nt, Artificial Sequence
  Description of Artificial Sequence: Synthetic oligonucleotide
  Antisense strand to SEQ ID NO: 107994
ccuuucaccgaagaguuaa

SEQ ID NO: 107996 - RNA, 19 nt, Artificial Sequence
  Description of Artificial Sequence: Synthetic oligonucleotide
  Sense strand starting at position 1048 of SEQ ID NO: 1371
guuaacucuucggugaaag

SEQ ID NO: 107997 - RNA, 19 nt, Artificial Sequence
  Description of Artificial Sequence: Synthetic oligonucleotide
  Antisense strand to SEQ ID NO: 107996
cuuucaccgaagaguuaac

SEQ ID NO: 107998 - RNA, 19 nt, Artificial Sequence
  Description of Artificial Sequence: Synthetic oligonucleotide
  Sense strand starting at position 1047 of SEQ ID NO: 1371
gguuaacucuucggugaaa

SEQ ID NO: 107999 - RNA, 19 nt, Artificial Sequence
  Description of Artificial Sequence: Synthetic oligonucleotide
  Antisense strand to SEQ ID NO: 107998
uuucaccgaagaguuaacc

SEQ ID NO: 108000 - RNA, 19 nt, Artificial Sequence
  Description of Artificial Sequence: Synthetic oligonucleotide
  Sense strand starting at position 1046 of SEQ ID NO: 1371
ugguuaacucuucggugaa

SEQ ID NO: 108001 - RNA, 19 nt, Artificial Sequence
  Description of Artificial Sequence: Synthetic oligonucleotide
  Antisense strand to SEQ ID NO: 108000
uucaccgaagaguuaacca

SEQ ID NO: 108002 - RNA, 19 nt, Artificial Sequence
  Description of Artificial Sequence: Synthetic oligonucleotide
  Sense strand starting at position 1045 of SEQ ID NO: 1371
uugguuaacucuucgguga

SEQ ID NO: 108003 - RNA, 19 nt, Artificial Sequence
  Description of Artificial Sequence: Synthetic oligonucleotide
  Antisense strand to SEQ ID NO: 108002
ucaccgaagaguuaaccaa

SEQ ID NO: 108004 - RNA, 19 nt, Artificial Sequence
  Description of Artificial Sequence: Synthetic oligonucleotide
  Sense strand starting at position 1034 of SEQ ID NO: 1371
ggccaaacgucuugguuaa

SEQ ID NO: 108005 - RNA, 19 nt, Artificial Sequence
  Description of Artificial Sequence: Synthetic oligonucleotide
  Antisense strand to SEQ ID NO: 108004
uuaaccaagacguuuggcc

SEQ ID NO: 108006 - RNA, 19 nt, Artificial Sequence
  Description of Artificial Sequence: Synthetic oligonucleotide
  Sense strand starting at position 910 of SEQ ID NO: 1371
ucauuccuuuggcaaagaa

SEQ ID NO: 108007 - RNA, 19 nt, Artificial Sequence
  Description of Artificial Sequence: Synthetic oligonucleotide
  Antisense strand to SEQ ID NO: 108006
uucuuugccaaaggaauga

SEQ ID NO: 108008 - RNA, 19 nt, Artificial Sequence
  Description of Artificial Sequence: Synthetic oligonucleotide
  Sense strand starting at position 884 of SEQ ID NO: 1371
ucuuuaacuucgugaagca

SEQ ID NO: 108009 - RNA, 19 nt, Artificial Sequence
  Description of Artificial Sequence: Synthetic oligonucleotide
  Antisense strand to SEQ ID NO: 108008
ugcuucacgaaguuaaaga

SEQ ID NO: 108010 - RNA, 19 nt, Artificial Sequence
  Description of Artificial Sequence: Synthetic oligonucleotide
  Sense strand starting at position 882 of SEQ ID NO: 1371
gaucuuuaacuucgugaag

SEQ ID NO: 108011 - RNA, 19 nt, Artificial Sequence
  Description of Artificial Sequence: Synthetic oligonucleotide
  Antisense strand to SEQ ID NO: 108010
cuucacgaaguuaaagauc

SEQ ID NO: 108012 - RNA, 19 nt, Artificial Sequence
  Description of Artificial Sequence: Synthetic oligonucleotide
  Sense strand starting at position 732 of SEQ ID NO: 1371
acgcaaaguuaucagaaau

SEQ ID NO: 108013 - RNA, 19 nt, Artificial Sequence
  Description of Artificial Sequence: Synthetic oligonucleotide
  Antisense strand to SEQ ID NO: 108012
auuucugauaacuuugcgu

SEQ ID NO: 108014 - RNA, 19 nt, Artificial Sequence
  Description of Artificial Sequence: Synthetic oligonucleotide
  Sense strand starting at position 731 of SEQ ID NO: 1371
gacgcaaaguuaucagaaa

SEQ ID NO: 108015 - RNA, 19 nt, Artificial Sequence
  Description of Artificial Sequence: Synthetic oligonucleotide
  Antisense strand to SEQ ID NO: 108014
uuucugauaacuuugcguc

SEQ ID NO: 108016 - RNA, 19 nt, Artificial Sequence
  Description of Artificial Sequence: Synthetic oligonucleotide
  Sense strand starting at position 721 of SEQ ID NO: 1371
agauuucuuugacgcaaag

SEQ ID NO: 108017 - RNA, 19 nt, Artificial Sequence
  Description of Artificial Sequence: Synthetic oligonucleotide
  Antisense strand to SEQ ID NO: 108016
cuuugcgucaaagaaaucu

SEQ ID NO: 108018 - RNA, 19 nt, Artificial Sequence
  Description of Artificial Sequence: Synthetic oligonucleotide
  Sense strand starting at position 584 of SEQ ID NO: 1371
guggaaauccugggcucaa

SEQ ID NO: 108019 - RNA, 19 nt, Artificial Sequence
  Description of Artificial Sequence: Synthetic oligonucleotide
  Antisense strand to SEQ ID NO: 108018
uugagcccaggauuuccac

SEQ ID NO: 108020 - RNA, 19 nt, Artificial Sequence
  Description of Artificial Sequence: Synthetic oligonucleotide
  Sense strand starting at position 338 of SEQ ID NO: 1371
ggugguucacuuggucaaa

SEQ ID NO: 108021 - RNA, 19 nt, Artificial Sequence
  Description of Artificial Sequence: Synthetic oligonucleotide
  Antisense strand to SEQ ID NO: 108020
uuugaccaagugaaccacc

SEQ ID NO: 108022 - RNA, 19 nt, Artificial Sequence
  Description of Artificial Sequence: Synthetic oligonucleotide
  Sense strand starting at position 303 of SEQ ID NO: 1371
acuccagucuaguaauguu

SEQ ID NO: 108023 - RNA, 19 nt, Artificial Sequence
  Description of Artificial Sequence: Synthetic oligonucleotide
  Antisense strand to SEQ ID NO: 108022
aacauuacuagacuggagu

SEQ ID NO: 108024 - RNA, 19 nt, Artificial Sequence
  Description of Artificial Sequence: Synthetic oligonucleotide
  Sense strand starting at position 190 of SEQ ID NO: 1371
agaauauccuugcuaaaug

SEQ ID NO: 108025 - RNA, 19 nt, Artificial Sequence
  Description of Artificial Sequence: Synthetic oligonucleotide
  Antisense strand to SEQ ID NO: 108024
cauuuagcaaggauauucu

SEQ ID NO: 108026 - RNA, 19 nt, Artificial Sequence
  Description of Artificial Sequence: Synthetic oligonucleotide
  Sense strand starting at position 41 of SEQ ID NO: 1371
guuuaacaggcaugucaca

SEQ ID NO: 108027 - RNA, 19 nt, Artificial Sequence
  Description of Artificial Sequence: Synthetic oligonucleotide
  Antisense strand to SEQ ID NO: 108026
ugugacaugccuguuaaac

SEQ ID NO: 108028 - RNA, 19 nt, Artificial Sequence
  Description of Artificial Sequence: Synthetic oligonucleotide
  Sense strand starting at position 39 of SEQ ID NO: 1371
agguuuaacaggcauguca

SEQ ID NO: 108029 - RNA, 19 nt, Artificial Sequence
  Description of Artificial Sequence: Synthetic oligonucleotide
  Antisense strand to SEQ ID NO: 108028
ugacaugccuguuaaaccu

SEQ ID NO: 108030 - RNA, 19 nt, Artificial Sequence
  Description of Artificial Sequence: Synthetic oligonucleotide
  Sense strand starting at position 491 of SEQ ID NO: 1372
acccaaaguuucccuugua

SEQ ID NO: 108031 - RNA, 19 nt, Artificial Sequence
  Description of Artificial Sequence: Synthetic oligonucleotide
  Antisense strand to SEQ ID NO: 108030
uacaagggaaacuuugggu

SEQ ID NO: 108032 - RNA, 19 nt, Artificial Sequence
  Description of Artificial Sequence: Synthetic oligonucleotide
  Sense strand starting at position 603 of SEQ ID NO: 1372
guagaaauaugcccaaaua

SEQ ID NO: 108033 - RNA, 19 nt, Artificial Sequence
  Description of Artificial Sequence: Synthetic oligonucleotide
  Antisense strand to SEQ ID NO: 108032
uauuugggcauauuucuac

SEQ ID NO: 108034 - RNA, 19 nt, Artificial Sequence
  Description of Artificial Sequence: Synthetic oligonucleotide
  Sense strand starting at position 675 of SEQ ID NO: 1372
uguuuacucuguuccaaga

SEQ ID NO: 108035 - RNA, 19 nt, Artificial Sequence
  Description of Artificial Sequence: Synthetic oligonucleotide
  Antisense strand to SEQ ID NO: 108034
ucuuggaacagaguaaaca

SEQ ID NO: 108036 - RNA, 19 nt, Artificial Sequence
  Description of Artificial Sequence: Synthetic oligonucleotide
  Sense strand starting at position 691 of SEQ ID NO: 1372
agaacuguucuaggaaauu

SEQ ID NO: 108037 - RNA, 19 nt, Artificial Sequence
  Description of Artificial Sequence: Synthetic oligonucleotide
  Antisense strand to SEQ ID NO: 108036
aauuuccuagaacaguucu

SEQ ID NO: 108038 - RNA, 19 nt, Artificial Sequence
  Description of Artificial Sequence: Synthetic oligonucleotide
  Sense strand starting at position 967 of SEQ ID NO: 1372
ugcuuugaagggugucaca

SEQ ID NO: 108039 - RNA, 19 nt, Artificial Sequence
  Description of Artificial Sequence: Synthetic oligonucleotide
  Antisense strand to SEQ ID NO: 108038
ugugacacccuucaaagca

SEQ ID NO: 108040 - RNA, 19 nt, Artificial Sequence
  Description of Artificial Sequence: Synthetic oligonucleotide
  Sense strand starting at position 1034 of SEQ ID NO: 1372
guggguacucuguacaguu

SEQ ID NO: 108041 - RNA, 19 nt, Artificial Sequence
  Description of Artificial Sequence: Synthetic oligonucleotide
  Antisense strand to SEQ ID NO: 108040
aacuguacagaguacccac

SEQ ID NO: 108042 - RNA, 19 nt, Artificial Sequence
  Description of Artificial Sequence: Synthetic oligonucleotide
  Sense strand starting at position 1109 of SEQ ID NO: 1372
gcuugaacugaauggaagu

SEQ ID NO: 108043 - RNA, 19 nt, Artificial Sequence
  Description of Artificial Sequence: Synthetic oligonucleotide
  Antisense strand to SEQ ID NO: 108042
acuuccauucaguucaagc

SEQ ID NO: 108044 - RNA, 19 nt, Artificial Sequence
  Description of Artificial Sequence: Synthetic oligonucleotide
  Sense strand starting at position 1160 of SEQ ID NO: 1372
agauguuacuugucuguag

SEQ ID NO: 108045 - RNA, 19 nt, Artificial Sequence
  Description of Artificial Sequence: Synthetic oligonucleotide
  Antisense strand to SEQ ID NO: 108044
cuacagacaaguaacaucu

SEQ ID NO: 108046 - RNA, 19 nt, Artificial Sequence
  Description of Artificial Sequence: Synthetic oligonucleotide
  Sense strand starting at position 1161 of SEQ ID NO: 1372
gauguuacuugucuguaga

SEQ ID NO: 108047 - RNA, 19 nt, Artificial Sequence
  Description of Artificial Sequence: Synthetic oligonucleotide
  Antisense strand to SEQ ID NO: 108046
ucuacagacaaguaacauc

SEQ ID NO: 108048 - RNA, 19 nt, Artificial Sequence
  Description of Artificial Sequence: Synthetic oligonucleotide
  Sense strand starting at position 1162 of SEQ ID NO: 1372
auguuacuugucuguagaa

SEQ ID NO: 108049 - RNA, 19 nt, Artificial Sequence
  Description of Artificial Sequence: Synthetic oligonucleotide
  Antisense strand to SEQ ID NO: 108048
uucuacagacaaguaacau

SEQ ID NO: 108050 - RNA, 19 nt, Artificial Sequence
  Description of Artificial Sequence: Synthetic oligonucleotide
  Sense strand starting at position 1164 of SEQ ID NO: 1372
guuacuugucuguagaauc

SEQ ID NO: 108051 - RNA, 19 nt, Artificial Sequence
  Description of Artificial Sequence: Synthetic oligonucleotide
  Antisense strand to SEQ ID NO: 108050
gauucuacagacaaguaac

SEQ ID NO: 108052 - RNA, 19 nt, Artificial Sequence
  Description of Artificial Sequence: Synthetic oligonucleotide
  Sense strand starting at position 1196 of SEQ ID NO: 1372
agaggauucucauaaacau

SEQ ID NO: 108053 - RNA, 19 nt, Artificial Sequence
  Description of Artificial Sequence: Synthetic oligonucleotide
  Antisense strand to SEQ ID NO: 108052
auguuuaugagaauccucu

SEQ ID NO: 108054 - RNA, 19 nt, Artificial Sequence
  Description of Artificial Sequence: Synthetic oligonucleotide
  Sense strand starting at position 1215 of SEQ ID NO: 1372
gauuuagccucuuacugag

SEQ ID NO: 108055 - RNA, 19 nt, Artificial Sequence
  Description of Artificial Sequence: Synthetic oligonucleotide
  Antisense strand to SEQ ID NO: 108054
cucaguaagaggcuaaauc

SEQ ID NO: 108056 - RNA, 19 nt, Artificial Sequence
  Description of Artificial Sequence: Synthetic oligonucleotide
  Sense strand starting at position 1555 of SEQ ID NO: 1372
gaauuucucuuugaggucu

SEQ ID NO: 108057 - RNA, 19 nt, Artificial Sequence
  Description of Artificial Sequence: Synthetic oligonucleotide
  Antisense strand to SEQ ID NO: 108056
agaccucaaagagaaauuc

SEQ ID NO: 108058 - RNA, 19 nt, Artificial Sequence
  Description of Artificial Sequence: Synthetic oligonucleotide
  Sense strand starting at position 1607 of SEQ ID NO: 1372
cgcaauuccugguugauuu

SEQ ID NO: 108059 - RNA, 19 nt, Artificial Sequence
  Description of Artificial Sequence: Synthetic oligonucleotide
  Antisense strand to SEQ ID NO: 108058
aaaucaaccaggaauugcg

SEQ ID NO: 108060 - RNA, 19 nt, Artificial Sequence
  Description of Artificial Sequence: Synthetic oligonucleotide
  Sense strand starting at position 1655 of SEQ ID NO: 1372
gacaaagggucggcagaua

SEQ ID NO: 108061 - RNA, 19 nt, Artificial Sequence
  Description of Artificial Sequence: Synthetic oligonucleotide
  Antisense strand to SEQ ID NO: 108060
uaucugccgacccuuuguc

SEQ ID NO: 108062 - RNA, 19 nt, Artificial Sequence
  Description of Artificial Sequence: Synthetic oligonucleotide
  Sense strand starting at position 1854 of SEQ ID NO: 1372
uagaguccuuaaccgcaaa

SEQ ID NO: 108063 - RNA, 19 nt, Artificial Sequence
  Description of Artificial Sequence: Synthetic oligonucleotide
  Antisense strand to SEQ ID NO: 108062
uuugcgguuaaggacucua

SEQ ID NO: 108064 - RNA, 19 nt, Artificial Sequence
  Description of Artificial Sequence: Synthetic oligonucleotide
  Sense strand starting at position 2258 of SEQ ID NO: 1372
cuuagugguagucaucaag

SEQ ID NO: 108065 - RNA, 19 nt, Artificial Sequence
  Description of Artificial Sequence: Synthetic oligonucleotide
  Antisense strand to SEQ ID NO: 108064
cuugaugacuaccacuaag

SEQ ID NO: 108066 - RNA, 19 nt, Artificial Sequence
  Description of Artificial Sequence: Synthetic oligonucleotide
  Sense strand starting at position 2261 of SEQ ID NO: 1372
agugguagucaucaaguca

SEQ ID NO: 108067 - RNA, 19 nt, Artificial Sequence
  Description of Artificial Sequence: Synthetic oligonucleotide
  Antisense strand to SEQ ID NO: 108066
ugacuugaugacuaccacu

SEQ ID NO: 108068 - RNA, 19 nt, Artificial Sequence
  Description of Artificial Sequence: Synthetic oligonucleotide
  Sense strand starting at position 2608 of SEQ ID NO: 1372
ucauacuugucacuuacga

SEQ ID NO: 108069 - RNA, 19 nt, Artificial Sequence
  Description of Artificial Sequence: Synthetic oligonucleotide
  Antisense strand to SEQ ID NO: 108068
ucguaagugacaaguauga

SEQ ID NO: 108070 - RNA, 19 nt, Artificial Sequence
  Description of Artificial Sequence: Synthetic oligonucleotide
  Sense strand starting at position 2616 of SEQ ID NO: 1372
gucacuuacgaauaucauu

SEQ ID NO: 108071 - RNA, 19 nt, Artificial Sequence
  Description of Artificial Sequence: Synthetic oligonucleotide
  Antisense strand to SEQ ID NO: 108070
aaugauauucguaagugac

SEQ ID NO: 108072 - RNA, 19 nt, Artificial Sequence
  Description of Artificial Sequence: Synthetic oligonucleotide
  Sense strand starting at position 2728 of SEQ ID NO: 1372
ucuuguaaaccugauggua

SEQ ID NO: 108073 - RNA, 19 nt, Artificial Sequence
  Description of Artificial Sequence: Synthetic oligonucleotide
  Antisense strand to SEQ ID NO: 108072
uaccaucagguuuacaaga

SEQ ID NO: 108074 - RNA, 19 nt, Artificial Sequence
  Description of Artificial Sequence: Synthetic oligonucleotide
  Sense strand starting at position 2794 of SEQ ID NO: 1372
aacgcuucucagggaauau

SEQ ID NO: 108075 - RNA, 19 nt, Artificial Sequence
  Description of Artificial Sequence: Synthetic oligonucleotide
  Antisense strand to SEQ ID NO: 108074
auauucccugagaagcguu

SEQ ID NO: 108076 - RNA, 19 nt, Artificial Sequence
  Description of Artificial Sequence: Synthetic oligonucleotide
  Sense strand starting at position 2795 of SEQ ID NO: 1372
acgcuucucagggaauauu

SEQ ID NO: 108077 - RNA, 19 nt, Artificial Sequence
  Description of Artificial Sequence: Synthetic oligonucleotide
  Antisense strand to SEQ ID NO: 108076
aauauucccugagaagcgu

SEQ ID NO: 108078 - RNA, 19 nt, Artificial Sequence
  Description of Artificial Sequence: Synthetic oligonucleotide
  Sense strand starting at position 2895 of SEQ ID NO: 1372
uguugaugugugguugcau

SEQ ID NO: 108079 - RNA, 19 nt, Artificial Sequence
  Description of Artificial Sequence: Synthetic oligonucleotide
  Antisense strand to SEQ ID NO: 108078
augcaaccacacaucaaca

SEQ ID NO: 108080 - RNA, 19 nt, Artificial Sequence
  Description of Artificial Sequence: Synthetic oligonucleotide
  Sense strand starting at position 2907 of SEQ ID NO: 1372
guugcauuccacuaaccga

SEQ ID NO: 108081 - RNA, 19 nt, Artificial Sequence
  Description of Artificial Sequence: Synthetic oligonucleotide
  Antisense strand to SEQ ID NO: 108080
ucgguuaguggaaugcaac

SEQ ID NO: 108082 - RNA, 19 nt, Artificial Sequence
  Description of Artificial Sequence: Synthetic oligonucleotide
  Sense strand starting at position 2968 of SEQ ID NO: 1372
cucaguguuccugugcagu

SEQ ID NO: 108083 - RNA, 19 nt, Artificial Sequence
  Description of Artificial Sequence: Synthetic oligonucleotide
  Antisense strand to SEQ ID NO: 108082
acugcacaggaacacugag

SEQ ID NO: 108084 - RNA, 19 nt, Artificial Sequence
  Description of Artificial Sequence: Synthetic oligonucleotide
  Sense strand starting at position 3084 of SEQ ID NO: 1372
aggcuaggacuugggagau

SEQ ID NO: 108085 - RNA, 19 nt, Artificial Sequence
  Description of Artificial Sequence: Synthetic oligonucleotide
  Antisense strand to SEQ ID NO: 108084
aucucccaaguccuagccu

SEQ ID NO: 108086 - RNA, 19 nt, Artificial Sequence
  Description of Artificial Sequence: Synthetic oligonucleotide
  Sense strand starting at position 3098 of SEQ ID NO: 1372
gagauuguccuguagccca

SEQ ID NO: 108087 - RNA, 19 nt, Artificial Sequence
  Description of Artificial Sequence: Synthetic oligonucleotide
  Antisense strand to SEQ ID NO: 108086
ugggcuacaggacaaucuc

SEQ ID NO: 108088 - RNA, 19 nt, Artificial Sequence
  Description of Artificial Sequence: Synthetic oligonucleotide
  Sense strand starting at position 3278 of SEQ ID NO: 1372
uagugacagugcuuugaga

SEQ ID NO: 108089 - RNA, 19 nt, Artificial Sequence
  Description of Artificial Sequence: Synthetic oligonucleotide
  Antisense strand to SEQ ID NO: 108088
ucucaaagcacugucacua

SEQ ID NO: 108090 - RNA, 19 nt, Artificial Sequence
  Description of Artificial Sequence: Synthetic oligonucleotide
  Sense strand starting at position 3280 of SEQ ID NO: 1372
gugacagugcuuugagaug

SEQ ID NO: 108091 - RNA, 19 nt, Artificial Sequence
  Description of Artificial Sequence: Synthetic oligonucleotide
  Antisense strand to SEQ ID NO: 108090
caucucaaagcacugucac

SEQ ID NO: 108092 - RNA, 19 nt, Artificial Sequence
  Description of Artificial Sequence: Synthetic oligonucleotide
  Sense strand starting at position 3420 of SEQ ID NO: 1372
acugguuuacuugagguca

SEQ ID NO: 108093 - RNA, 19 nt, Artificial Sequence
  Description of Artificial Sequence: Synthetic oligonucleotide
  Antisense strand to SEQ ID NO: 108092
ugaccucaaguaaaccagu

SEQ ID NO: 108094 - RNA, 19 nt, Artificial Sequence
  Description of Artificial Sequence: Synthetic oligonucleotide
  Sense strand starting at position 3611 of SEQ ID NO: 1372
uccuuaaggcaauguuauu

SEQ ID NO: 108095 - RNA, 19 nt, Artificial Sequence
  Description of Artificial Sequence: Synthetic oligonucleotide
  Antisense strand to SEQ ID NO: 108094
aauaacauugccuuaagga

SEQ ID NO: 108096 - RNA, 19 nt, Artificial Sequence
  Description of Artificial Sequence: Synthetic oligonucleotide
  Sense strand starting at position 3675 of SEQ ID NO: 1372
ucauguauuuggcuauauu

SEQ ID NO: 108097 - RNA, 19 nt, Artificial Sequence
  Description of Artificial Sequence: Synthetic oligonucleotide
  Antisense strand to SEQ ID NO: 108096
aauauagccaaauacauga

SEQ ID NO: 108098 - RNA, 19 nt, Artificial Sequence
  Description of Artificial Sequence: Synthetic oligonucleotide
  Sense strand starting at position 3707 of SEQ ID NO: 1372
uucugugaugcuggaagaa

SEQ ID NO: 108099 - RNA, 19 nt, Artificial Sequence
  Description of Artificial Sequence: Synthetic oligonucleotide
  Antisense strand to SEQ ID NO: 108098
uucuuccagcaucacagaa

SEQ ID NO: 108100 - RNA, 19 nt, Artificial Sequence
  Description of Artificial Sequence: Synthetic oligonucleotide
  Sense strand starting at position 3796 of SEQ ID NO: 1372
cagcauugggaccgaaauu

SEQ ID NO: 108101 - RNA, 19 nt, Artificial Sequence
  Description of Artificial Sequence: Synthetic oligonucleotide
  Antisense strand to SEQ ID NO: 108100
aauuucggucccaaugcug

SEQ ID NO: 108102 - RNA, 19 nt, Artificial Sequence
  Description of Artificial Sequence: Synthetic oligonucleotide
  Sense strand starting at position 3814 of SEQ ID NO: 1372
ucagaagugucugcaaccu

SEQ ID NO: 108103 - RNA, 19 nt, Artificial Sequence
  Description of Artificial Sequence: Synthetic oligonucleotide
  Antisense strand to SEQ ID NO: 108102
agguugcagacacuucuga

SEQ ID NO: 108104 - RNA, 19 nt, Artificial Sequence
  Description of Artificial Sequence: Synthetic oligonucleotide
  Sense strand starting at position 3832 of SEQ ID NO: 1372
uugcuuuaacaguguggga

SEQ ID NO: 108105 - RNA, 19 nt, Artificial Sequence
  Description of Artificial Sequence: Synthetic oligonucleotide
  Antisense strand to SEQ ID NO: 108104
ucccacacuguuaaagcaa

SEQ ID NO: 108106 - RNA, 19 nt, Artificial Sequence
  Description of Artificial Sequence: Synthetic oligonucleotide
  Sense strand starting at position 3834 of SEQ ID NO: 1372
gcuuuaacagugugggaaa

SEQ ID NO: 108107 - RNA, 19 nt, Artificial Sequence
  Description of Artificial Sequence: Synthetic oligonucleotide
  Antisense strand to SEQ ID NO: 108106
uuucccacacuguuaaagc

SEQ ID NO: 108108 - RNA, 19 nt, Artificial Sequence
  Description of Artificial Sequence: Synthetic oligonucleotide
  Sense strand starting at position 3836 of SEQ ID NO: 1372
uuuaacagugugggaaaua

SEQ ID NO: 108109 - RNA, 19 nt, Artificial Sequence
  Description of Artificial Sequence: Synthetic oligonucleotide
  Antisense strand to SEQ ID NO: 108108
uauuucccacacuguuaaa

SEQ ID NO: 108110 - RNA, 19 nt, Artificial Sequence
  Description of Artificial Sequence: Synthetic oligonucleotide
  Sense strand starting at position 3715 of SEQ ID NO: 1373
cagaaugagucaugggaau

SEQ ID NO: 108111 - RNA, 19 nt, Artificial Sequence
  Description of Artificial Sequence: Synthetic oligonucleotide
  Antisense strand to SEQ ID NO: 108110
auucccaugacucauucug

SEQ ID NO: 108112 - RNA, 19 nt, Artificial Sequence
  Description of Artificial Sequence: Synthetic oligonucleotide
  Sense strand starting at position 3265 of SEQ ID NO: 1373
gcgacagugcuuugagaug

SEQ ID NO: 108113 - RNA, 19 nt, Artificial Sequence
  Description of Artificial Sequence: Synthetic oligonucleotide
  Antisense strand to SEQ ID NO: 108112
caucucaaagcacugucgc

SEQ ID NO: 108114 - RNA, 19 nt, Artificial Sequence
  Description of Artificial Sequence: Synthetic oligonucleotide
  Sense strand starting at position 3263 of SEQ ID NO: 1373
uagcgacagugcuuugaga

SEQ ID NO: 108115 - RNA, 19 nt, Artificial Sequence
  Description of Artificial Sequence: Synthetic oligonucleotide
  Antisense strand to SEQ ID NO: 108114
ucucaaagcacugucgcua

SEQ ID NO: 108116 - RNA, 19 nt, Artificial Sequence
  Description of Artificial Sequence: Synthetic oligonucleotide
  Sense strand starting at position 2868 of SEQ ID NO: 1373
uuguucuaacacuguugau

SEQ ID NO: 108117 - RNA, 19 nt, Artificial Sequence
  Description of Artificial Sequence: Synthetic oligonucleotide
  Antisense strand to SEQ ID NO: 108116
aucaacaguguuagaacaa

SEQ ID NO: 108118 - RNA, 19 nt, Artificial Sequence
  Description of Artificial Sequence: Synthetic oligonucleotide
  Sense strand starting at position 758 of SEQ ID NO: 1373
guauuauuauaguccucaa

SEQ ID NO: 108119 - RNA, 19 nt, Artificial Sequence
  Description of Artificial Sequence: Synthetic oligonucleotide
  Antisense strand to SEQ ID NO: 108118
uugaggacuauaauaauac

SEQ ID NO: 108120 - RNA, 19 nt, Artificial Sequence
  Description of Artificial Sequence: Synthetic oligonucleotide
  Sense strand starting at position 9 of SEQ ID NO: 1374
gguagugauuucccgcaca

SEQ ID NO: 108121 - RNA, 19 nt, Artificial Sequence
  Description of Artificial Sequence: Synthetic oligonucleotide
  Antisense strand to SEQ ID NO: 108120
ugugcgggaaaucacuacc

SEQ ID NO: 108122 - RNA, 19 nt, Artificial Sequence
  Description of Artificial Sequence: Synthetic oligonucleotide
  Sense strand starting at position 12 of SEQ ID NO: 1374
agugauuucccgcacaggu

SEQ ID NO: 108123 - RNA, 19 nt, Artificial Sequence
  Description of Artificial Sequence: Synthetic oligonucleotide
  Antisense strand to SEQ ID NO: 108122
accugugcgggaaaucacu

SEQ ID NO: 108124 - RNA, 19 nt, Artificial Sequence
  Description of Artificial Sequence: Synthetic oligonucleotide
  Sense strand starting at position 219 of SEQ ID NO: 1374
uccaauaaaguuuguguua

SEQ ID NO: 108125 - RNA, 19 nt, Artificial Sequence
  Description of Artificial Sequence: Synthetic oligonucleotide
  Antisense strand to SEQ ID NO: 108124
uaacacaaacuuuauugga

SEQ ID NO: 108126 - RNA, 19 nt, Artificial Sequence
  Description of Artificial Sequence: Synthetic oligonucleotide
  Sense strand starting at position 220 of SEQ ID NO: 1374
ccaauaaaguuuguguuaa

SEQ ID NO: 108127 - RNA, 19 nt, Artificial Sequence
  Description of Artificial Sequence: Synthetic oligonucleotide
  Antisense strand to SEQ ID NO: 108126
uuaacacaaacuuuauugg

SEQ ID NO: 108128 - RNA, 19 nt, Artificial Sequence
  Description of Artificial Sequence: Synthetic oligonucleotide
  Sense strand starting at position 285 of SEQ ID NO: 1374
gccaauaacuguucuagga

SEQ ID NO: 108129 - RNA, 19 nt, Artificial Sequence
  Description of Artificial Sequence: Synthetic oligonucleotide
  Antisense strand to SEQ ID NO: 108128
uccuagaacaguuauuggc

SEQ ID NO: 108130 - RNA, 19 nt, Artificial Sequence
  Description of Artificial Sequence: Synthetic oligonucleotide
  Sense strand starting at position 289 of SEQ ID NO: 1374
auaacuguucuaggagauu

SEQ ID NO: 108131 - RNA, 19 nt, Artificial Sequence
  Description of Artificial Sequence: Synthetic oligonucleotide
  Antisense strand to SEQ ID NO: 108130
aaucuccuagaacaguuau

SEQ ID NO: 108132 - RNA, 19 nt, Artificial Sequence
  Description of Artificial Sequence: Synthetic oligonucleotide
  Sense strand starting at position 298 of SEQ ID NO: 1374
cuaggagauugacaagaca

SEQ ID NO: 108133 - RNA, 19 nt, Artificial Sequence
  Description of Artificial Sequence: Synthetic oligonucleotide
  Antisense strand to SEQ ID NO: 108132
ugucuugucaaucuccuag

SEQ ID NO: 108134 - RNA, 19 nt, Artificial Sequence
  Description of Artificial Sequence: Synthetic oligonucleotide
  Sense strand starting at position 832 of SEQ ID NO: 1374
cucaaaguucuacgauuac

SEQ ID NO: 108135 - RNA, 19 nt, Artificial Sequence
  Description of Artificial Sequence: Synthetic oligonucleotide
  Antisense strand to SEQ ID NO: 108134
guaaucguagaacuuugag

SEQ ID NO: 108136 - RNA, 19 nt, Artificial Sequence
  Description of Artificial Sequence: Synthetic oligonucleotide
  Sense strand starting at position 926 of SEQ ID NO: 1374
ggagcagagucucuugaag

SEQ ID NO: 108137 - RNA, 19 nt, Artificial Sequence
  Description of Artificial Sequence: Synthetic oligonucleotide
  Antisense strand to SEQ ID NO: 108136
cuucaagagacucugcucc

SEQ ID NO: 108138 - RNA, 19 nt, Artificial Sequence
  Description of Artificial Sequence: Synthetic oligonucleotide
  Sense strand starting at position 1233 of SEQ ID NO: 1374
auggaaauuugcuaaauac

SEQ ID NO: 108139 - RNA, 19 nt, Artificial Sequence
  Description of Artificial Sequence: Synthetic oligonucleotide
  Antisense strand to SEQ ID NO: 108138
guauuuagcaaauuuccau

SEQ ID NO: 108140 - RNA, 19 nt, Artificial Sequence
  Description of Artificial Sequence: Synthetic oligonucleotide
  Sense strand starting at position 1450 of SEQ ID NO: 1374
ccggccauuugaguuacaa

SEQ ID NO: 108141 - RNA, 19 nt, Artificial Sequence
  Description of Artificial Sequence: Synthetic oligonucleotide
  Antisense strand to SEQ ID NO: 108140
uuguaacucaaauggccgg

SEQ ID NO: 108142 - RNA, 19 nt, Artificial Sequence
  Description of Artificial Sequence: Synthetic oligonucleotide
  Sense strand starting at position 1454 of SEQ ID NO: 1374
ccauuugaguuacaagaaa

SEQ ID NO: 108143 - RNA, 19 nt, Artificial Sequence
  Description of Artificial Sequence: Synthetic oligonucleotide
  Antisense strand to SEQ ID NO: 108142
uuucuuguaacucaaaugg

SEQ ID NO: 108144 - RNA, 19 nt, Artificial Sequence
  Description of Artificial Sequence: Synthetic oligonucleotide
  Sense strand starting at position 1556 of SEQ ID NO: 1374
cugcuuucucacuggacca

SEQ ID NO: 108145 - RNA, 19 nt, Artificial Sequence
  Description of Artificial Sequence: Synthetic oligonucleotide
  Antisense strand to SEQ ID NO: 108144
ugguccagugagaaagcag

SEQ ID NO: 108146 - RNA, 19 nt, Artificial Sequence
  Description of Artificial Sequence: Synthetic oligonucleotide
  Sense strand starting at position 1671 of SEQ ID NO: 1374
ggugaaaucgaauagguuu

SEQ ID NO: 108147 - RNA, 19 nt, Artificial Sequence
  Description of Artificial Sequence: Synthetic oligonucleotide
  Antisense strand to SEQ ID NO: 108146
aaaccuauucgauuucacc

SEQ ID NO: 108148 - RNA, 19 nt, Artificial Sequence
  Description of Artificial Sequence: Synthetic oligonucleotide
  Sense strand starting at position 1673 of SEQ ID NO: 1374
ugaaaucgaauagguuuaa

SEQ ID NO: 108149 - RNA, 19 nt, Artificial Sequence
  Description of Artificial Sequence: Synthetic oligonucleotide
  Antisense strand to SEQ ID NO: 108148
uuaaaccuauucgauuuca

SEQ ID NO: 108150 - RNA, 19 nt, Artificial Sequence
  Description of Artificial Sequence: Synthetic oligonucleotide
  Sense strand starting at position 1674 of SEQ ID NO: 1374
gaaaucgaauagguuuaau

SEQ ID NO: 108151 - RNA, 19 nt, Artificial Sequence
  Description of Artificial Sequence: Synthetic oligonucleotide
  Antisense strand to SEQ ID NO: 108150
auuaaaccuauucgauuuc

SEQ ID NO: 108152 - RNA, 19 nt, Artificial Sequence
  Description of Artificial Sequence: Synthetic oligonucleotide
  Sense strand starting at position 1703 of SEQ ID NO: 1374
gaaggucaguaacugaaau

SEQ ID NO: 108153 - RNA, 19 nt, Artificial Sequence
  Description of Artificial Sequence: Synthetic oligonucleotide
  Antisense strand to SEQ ID NO: 108152
auuucaguuacugaccuuc

SEQ ID NO: 108154 - RNA, 19 nt, Artificial Sequence
  Description of Artificial Sequence: Synthetic oligonucleotide
  Sense strand starting at position 1841 of SEQ ID NO: 1374
cucugacaagagugaggua

SEQ ID NO: 108155 - RNA, 19 nt, Artificial Sequence
  Description of Artificial Sequence: Synthetic oligonucleotide
  Antisense strand to SEQ ID NO: 108154
uaccucacucuugucagag

SEQ ID NO: 108156 - RNA, 19 nt, Artificial Sequence
  Description of Artificial Sequence: Synthetic oligonucleotide
  Sense strand starting at position 1856 of SEQ ID NO: 1374
gguagauuguggccagcau

SEQ ID NO: 108157 - RNA, 19 nt, Artificial Sequence
  Description of Artificial Sequence: Synthetic oligonucleotide
  Antisense strand to SEQ ID NO: 108156
augcuggccacaaucuacc

SEQ ID NO: 108158 - RNA, 19 nt, Artificial Sequence
  Description of Artificial Sequence: Synthetic oligonucleotide
  Sense strand starting at position 2523 of SEQ ID NO: 1374
uuauacuugucacuuauga

SEQ ID NO: 108159 - RNA, 19 nt, Artificial Sequence
  Description of Artificial Sequence: Synthetic oligonucleotide
  Antisense strand to SEQ ID NO: 108158
ucauaagugacaaguauaa

SEQ ID NO: 108160 - RNA, 19 nt, Artificial Sequence
  Description of Artificial Sequence: Synthetic oligonucleotide
  Sense strand starting at position 2531 of SEQ ID NO: 1374
gucacuuaugaaugucauu

SEQ ID NO: 108161 - RNA, 19 nt, Artificial Sequence
  Description of Artificial Sequence: Synthetic oligonucleotide
  Antisense strand to SEQ ID NO: 108160
aaugacauucauaagugac

SEQ ID NO: 108162 - RNA, 19 nt, Artificial Sequence
  Description of Artificial Sequence: Synthetic oligonucleotide
  Sense strand starting at position 2536 of SEQ ID NO: 1374
uuaugaaugucauucuagu

SEQ ID NO: 108163 - RNA, 19 nt, Artificial Sequence
  Description of Artificial Sequence: Synthetic oligonucleotide
  Antisense strand to SEQ ID NO: 108162
acuagaaugacauucauaa

SEQ ID NO: 108164 - RNA, 19 nt, Artificial Sequence
  Description of Artificial Sequence: Synthetic oligonucleotide
  Sense strand starting at position 2713 of SEQ ID NO: 1374
caugaacaguucuuaugga

SEQ ID NO: 108165 - RNA, 19 nt, Artificial Sequence
  Description of Artificial Sequence: Synthetic oligonucleotide
  Antisense strand to SEQ ID NO: 108164
uccauaagaacuguucaug

SEQ ID NO: 108166 - RNA, 19 nt, Artificial Sequence
  Description of Artificial Sequence: Synthetic oligonucleotide
  Sense strand starting at position 2807 of SEQ ID NO: 1374
gcaagauaaguuuaugguc

SEQ ID NO: 108167 - RNA, 19 nt, Artificial Sequence
  Description of Artificial Sequence: Synthetic oligonucleotide
  Antisense strand to SEQ ID NO: 108166
gaccauaaacuuaucuugc

SEQ ID NO: 108168 - RNA, 19 nt, Artificial Sequence
  Description of Artificial Sequence: Synthetic oligonucleotide
  Sense strand starting at position 2812 of SEQ ID NO: 1374
auaaguuuauggucagggu

SEQ ID NO: 108169 - RNA, 19 nt, Artificial Sequence
  Description of Artificial Sequence: Synthetic oligonucleotide
  Antisense strand to SEQ ID NO: 108168
acccugaccauaaacuuau

SEQ ID NO: 108170 - RNA, 19 nt, Artificial Sequence
  Description of Artificial Sequence: Synthetic oligonucleotide
  Sense strand starting at position 2813 of SEQ ID NO: 1374
uaaguuuauggucaggguu

SEQ ID NO: 108171 - RNA, 19 nt, Artificial Sequence
  Description of Artificial Sequence: Synthetic oligonucleotide
  Antisense strand to SEQ ID NO: 108170
aacccugaccauaaacuua

SEQ ID NO: 108172 - RNA, 19 nt, Artificial Sequence
  Description of Artificial Sequence: Synthetic oligonucleotide
  Sense strand starting at position 2973 of SEQ ID NO: 1374
gagacuguucgguagccca

SEQ ID NO: 108173 - RNA, 19 nt, Artificial Sequence
  Description of Artificial Sequence: Synthetic oligonucleotide
  Antisense strand to SEQ ID NO: 108172
ugggcuaccgaacagucuc

SEQ ID NO: 108174 - RNA, 19 nt, Artificial Sequence
  Description of Artificial Sequence: Synthetic oligonucleotide
  Sense strand starting at position 3130 of SEQ ID NO: 1374
aggauccugcuuugaaaug

SEQ ID NO: 108175 - RNA, 19 nt, Artificial Sequence
  Description of Artificial Sequence: Synthetic oligonucleotide
  Antisense strand to SEQ ID NO: 108174
cauuucaaagcaggauccu

SEQ ID NO: 108176 - RNA, 19 nt, Artificial Sequence
  Description of Artificial Sequence: Synthetic oligonucleotide
  Sense strand starting at position 3286 of SEQ ID NO: 1374
gucacacagggaugaguuu

SEQ ID NO: 108177 - RNA, 19 nt, Artificial Sequence
  Description of Artificial Sequence: Synthetic oligonucleotide
  Antisense strand to SEQ ID NO: 108176
aaacucaucccugugugac

SEQ ID NO: 108178 - RNA, 19 nt, Artificial Sequence
  Description of Artificial Sequence: Synthetic oligonucleotide
  Sense strand starting at position 3441 of SEQ ID NO: 1374
gugcuaauauuuccacagu

SEQ ID NO: 108179 - RNA, 19 nt, Artificial Sequence
  Description of Artificial Sequence: Synthetic oligonucleotide
  Antisense strand to SEQ ID NO: 108178
acuguggaaauauuagcac

SEQ ID NO: 108180 - RNA, 19 nt, Artificial Sequence
  Description of Artificial Sequence: Synthetic oligonucleotide
  Sense strand starting at position 3576 of SEQ ID NO: 1374
ugggaugcuggaugaauga

SEQ ID NO: 108181 - RNA, 19 nt, Artificial Sequence
  Description of Artificial Sequence: Synthetic oligonucleotide
  Antisense strand to SEQ ID NO: 108180
ucauucauccagcauccca

SEQ ID NO: 108182 - RNA, 19 nt, Artificial Sequence
  Description of Artificial Sequence: Synthetic oligonucleotide
  Sense strand starting at position 3679 of SEQ ID NO: 1374
uucggaagugucugcaaac

SEQ ID NO: 108183 - RNA, 19 nt, Artificial Sequence
  Description of Artificial Sequence: Synthetic oligonucleotide
  Antisense strand to SEQ ID NO: 108182
guuugcagacacuuccgaa

SEQ ID NO: 108184 - RNA, 19 nt, Artificial Sequence
  Description of Artificial Sequence: Synthetic oligonucleotide
  Sense strand starting at position 3680 of SEQ ID NO: 1374
ucggaagugucugcaaacu

SEQ ID NO: 108185 - RNA, 19 nt, Artificial Sequence
  Description of Artificial Sequence: Synthetic oligonucleotide
  Antisense strand to SEQ ID NO: 108184
aguuugcagacacuuccga

SEQ ID NO: 108186 - RNA, 19 nt, Artificial Sequence
  Description of Artificial Sequence: Synthetic oligonucleotide
  Sense strand starting at position 3692 of SEQ ID NO: 1374
gcaaacuugcuuuaaccgu

SEQ ID NO: 108187 - RNA, 19 nt, Artificial Sequence
  Description of Artificial Sequence: Synthetic oligonucleotide
  Antisense strand to SEQ ID NO: 108186
acgguuaaagcaaguuugc

SEQ ID NO: 108188 - RNA, 19 nt, Artificial Sequence
  Description of Artificial Sequence: Synthetic oligonucleotide
  Sense strand starting at position 3698 of SEQ ID NO: 1374
uugcuuuaaccguauggga

SEQ ID NO: 108189 - RNA, 19 nt, Artificial Sequence
  Description of Artificial Sequence: Synthetic oligonucleotide
  Antisense strand to SEQ ID NO: 108188
ucccauacgguuaaagcaa

SEQ ID NO: 108190 - RNA, 19 nt, Artificial Sequence
  Description of Artificial Sequence: Synthetic oligonucleotide
  Sense strand starting at position 3700 of SEQ ID NO: 1374
gcuuuaaccguaugggaaa

SEQ ID NO: 108191 - RNA, 19 nt, Artificial Sequence
  Description of Artificial Sequence: Synthetic oligonucleotide
  Antisense strand to SEQ ID NO: 108190
uuucccauacgguuaaagc

SEQ ID NO: 108192 - RNA, 19 nt, Artificial Sequence
  Description of Artificial Sequence: Synthetic oligonucleotide
  Sense strand starting at position 3702 of SEQ ID NO: 1374
uuuaaccguaugggaaaua

SEQ ID NO: 108193 - RNA, 19 nt, Artificial Sequence
  Description of Artificial Sequence: Synthetic oligonucleotide
  Antisense strand to SEQ ID NO: 108192
uauuucccauacgguuaaa

SEQ ID NO: 108194 - RNA, 19 nt, Artificial Sequence
  Description of Artificial Sequence: Synthetic oligonucleotide
  Sense strand starting at position 3734 of SEQ ID NO: 1374
ggaauuuccuugggacuuu

SEQ ID NO: 108195 - RNA, 19 nt, Artificial Sequence
  Description of Artificial Sequence: Synthetic oligonucleotide
  Antisense strand to SEQ ID NO: 108194
aaagucccaaggaaauucc

SEQ ID NO: 108196 - RNA, 19 nt, Artificial Sequence
  Description of Artificial Sequence: Synthetic oligonucleotide
  Sense strand starting at position 3862 of SEQ ID NO: 1374
caauguaugcuuuauggag

SEQ ID NO: 108197 - RNA, 19 nt, Artificial Sequence
  Description of Artificial Sequence: Synthetic oligonucleotide
  Antisense strand to SEQ ID NO: 108196
cuccauaaagcauacauug

SEQ ID NO: 108198 - RNA, 19 nt, Artificial Sequence
  Description of Artificial Sequence: Synthetic oligonucleotide
  Sense strand starting at position 3919 of SEQ ID NO: 1374
ugagcaaugcuuuagguuu

SEQ ID NO: 108199 - RNA, 19 nt, Artificial Sequence
  Description of Artificial Sequence: Synthetic oligonucleotide
  Antisense strand to SEQ ID NO: 108198
aaaccuaaagcauugcuca

SEQ ID NO: 108200 - RNA, 19 nt, Artificial Sequence
  Description of Artificial Sequence: Synthetic oligonucleotide
  Sense strand starting at position 3746 of SEQ ID NO: 1375
gcaagcauguucucacuca

SEQ ID NO: 108201 - RNA, 19 nt, Artificial Sequence
  Description of Artificial Sequence: Synthetic oligonucleotide
  Antisense strand to SEQ ID NO: 108200
ugagugagaacaugcuugc

SEQ ID NO: 108202 - RNA, 19 nt, Artificial Sequence
  Description of Artificial Sequence: Synthetic oligonucleotide
  Sense strand starting at position 3744 of SEQ ID NO: 1375
gugcaagcauguucucacu

SEQ ID NO: 108203 - RNA, 19 nt, Artificial Sequence
  Description of Artificial Sequence: Synthetic oligonucleotide
  Antisense strand to SEQ ID NO: 108202
agugagaacaugcuugcac

SEQ ID NO: 108204 - RNA, 19 nt, Artificial Sequence
  Description of Artificial Sequence: Synthetic oligonucleotide
  Sense strand starting at position 2810 of SEQ ID NO: 1375
guguauauaugccacuaau

SEQ ID NO: 108205 - RNA, 19 nt, Artificial Sequence
  Description of Artificial Sequence: Synthetic oligonucleotide
  Antisense strand to SEQ ID NO: 108204
auuaguggcauauauacac

SEQ ID NO: 108206 - RNA, 19 nt, Artificial Sequence
  Description of Artificial Sequence: Synthetic oligonucleotide
  Sense strand starting at position 2808 of SEQ ID NO: 1375
guguguauauaugccacua

SEQ ID NO: 108207 - RNA, 19 nt, Artificial Sequence
  Description of Artificial Sequence: Synthetic oligonucleotide
  Antisense strand to SEQ ID NO: 108206
uaguggcauauauacacac

SEQ ID NO: 108208 - RNA, 19 nt, Artificial Sequence
  Description of Artificial Sequence: Synthetic oligonucleotide
  Sense strand starting at position 2800 of SEQ ID NO: 1375
uuacucaaguguguauaua

SEQ ID NO: 108209 - RNA, 19 nt, Artificial Sequence
  Description of Artificial Sequence: Synthetic oligonucleotide
  Antisense strand to SEQ ID NO: 108208
uauauacacacuugaguaa

SEQ ID NO: 108210 - RNA, 19 nt, Artificial Sequence
  Description of Artificial Sequence: Synthetic oligonucleotide
  Sense strand starting at position 2799 of SEQ ID NO: 1375
uuuacucaaguguguauau

SEQ ID NO: 108211 - RNA, 19 nt, Artificial Sequence
  Description of Artificial Sequence: Synthetic oligonucleotide
  Antisense strand to SEQ ID NO: 108210
auauacacacuugaguaaa

SEQ ID NO: 108212 - RNA, 19 nt, Artificial Sequence
  Description of Artificial Sequence: Synthetic oligonucleotide
  Sense strand starting at position 1395 of SEQ ID NO: 1375
ucguucugugccuguguua

SEQ ID NO: 108213 - RNA, 19 nt, Artificial Sequence
  Description of Artificial Sequence: Synthetic oligonucleotide
  Antisense strand to SEQ ID NO: 108212
uaacacaggcacagaacga

SEQ ID NO: 108214 - RNA, 19 nt, Artificial Sequence
  Description of Artificial Sequence: Synthetic oligonucleotide
  Sense strand starting at position 1084 of SEQ ID NO: 1375
aggagugagccauguugca

SEQ ID NO: 108215 - RNA, 19 nt, Artificial Sequence
  Description of Artificial Sequence: Synthetic oligonucleotide
  Antisense strand to SEQ ID NO: 108214
ugcaacauggcucacuccu

SEQ ID NO: 108216 - RNA, 19 nt, Artificial Sequence
  Description of Artificial Sequence: Synthetic oligonucleotide
  Sense strand starting at position 525 of SEQ ID NO: 1375
ggaaaugccucauguaauu

SEQ ID NO: 108217 - RNA, 19 nt, Artificial Sequence
  Description of Artificial Sequence: Synthetic oligonucleotide
  Antisense strand to SEQ ID NO: 108216
aauuacaugaggcauuucc

SEQ ID NO: 108218 - RNA, 19 nt, Artificial Sequence
  Description of Artificial Sequence: Synthetic oligonucleotide
  Sense strand starting at position 523 of SEQ ID NO: 1375
caggaaaugccucauguaa

SEQ ID NO: 108219 - RNA, 19 nt, Artificial Sequence
  Description of Artificial Sequence: Synthetic oligonucleotide
  Antisense strand to SEQ ID NO: 108218
uuacaugaggcauuuccug

SEQ ID NO: 108220 - RNA, 19 nt, Artificial Sequence
  Description of Artificial Sequence: Synthetic oligonucleotide
  Sense strand starting at position 430 of SEQ ID NO: 1375
gcauaagauuaguuugugu

SEQ ID NO: 108221 - RNA, 19 nt, Artificial Sequence
  Description of Artificial Sequence: Synthetic oligonucleotide
  Antisense strand to SEQ ID NO: 108220
acacaaacuaaucuuaugc

SEQ ID NO: 108222 - RNA, 19 nt, Artificial Sequence
  Description of Artificial Sequence: Synthetic oligonucleotide
  Sense strand starting at position 403 of SEQ ID NO: 1375
uagauucguuguguuaauu

SEQ ID NO: 108223 - RNA, 19 nt, Artificial Sequence
  Description of Artificial Sequence: Synthetic oligonucleotide
  Antisense strand to SEQ ID NO: 108222
aauuaacacaacgaaucua

SEQ ID NO: 108224 - RNA, 19 nt, Artificial Sequence
  Description of Artificial Sequence: Synthetic oligonucleotide
  Sense strand starting at position 402 of SEQ ID NO: 1375
uuagauucguuguguuaau

SEQ ID NO: 108225 - RNA, 19 nt, Artificial Sequence
  Description of Artificial Sequence: Synthetic oligonucleotide
  Antisense strand to SEQ ID NO: 108224
auuaacacaacgaaucuaa

SEQ ID NO: 108226 - RNA, 19 nt, Artificial Sequence
  Description of Artificial Sequence: Synthetic oligonucleotide
  Sense strand starting at position 399 of SEQ ID NO: 1375
gauuuagauucguuguguu

SEQ ID NO: 108227 - RNA, 19 nt, Artificial Sequence
  Description of Artificial Sequence: Synthetic oligonucleotide
  Antisense strand to SEQ ID NO: 108226
aacacaacgaaucuaaauc

SEQ ID NO: 108228 - RNA, 19 nt, Artificial Sequence
  Description of Artificial Sequence: Synthetic oligonucleotide
  Sense strand starting at position 398 of SEQ ID NO: 1375
agauuuagauucguugugu

SEQ ID NO: 108229 - RNA, 19 nt, Artificial Sequence
  Description of Artificial Sequence: Synthetic oligonucleotide
  Antisense strand to SEQ ID NO: 108228
acacaacgaaucuaaaucu

SEQ ID NO: 108230 - RNA, 19 nt, Artificial Sequence
  Description of Artificial Sequence: Synthetic oligonucleotide
  Sense strand starting at position 183 of SEQ ID NO: 1375
cgggaaggucccuaggacu

SEQ ID NO: 108231 - RNA, 19 nt, Artificial Sequence
  Description of Artificial Sequence: Synthetic oligonucleotide
  Antisense strand to SEQ ID NO: 108230
aguccuagggaccuucccg

SEQ ID NO: 108232 - RNA, 19 nt, Artificial Sequence
  Description of Artificial Sequence: Synthetic oligonucleotide
  Sense strand starting at position 527 of SEQ ID NO: 1376
caggaaaugccucauguaa

SEQ ID NO: 108233 - RNA, 19 nt, Artificial Sequence
  Description of Artificial Sequence: Synthetic oligonucleotide
  Antisense strand to SEQ ID NO: 108232
uuacaugaggcauuuccug

SEQ ID NO: 108234 - RNA, 19 nt, Artificial Sequence
  Description of Artificial Sequence: Synthetic oligonucleotide
  Sense strand starting at position 529 of SEQ ID NO: 1376
ggaaaugccucauguaauu

SEQ ID NO: 108235 - RNA, 19 nt, Artificial Sequence
  Description of Artificial Sequence: Synthetic oligonucleotide
  Antisense strand to SEQ ID NO: 108234
aauuacaugaggcauuucc

SEQ ID NO: 108236 - RNA, 19 nt, Artificial Sequence
  Description of Artificial Sequence: Synthetic oligonucleotide
  Sense strand starting at position 3765 of SEQ ID NO: 1376
cucacucaugggugggaaa

SEQ ID NO: 108237 - RNA, 19 nt, Artificial Sequence
  Description of Artificial Sequence: Synthetic oligonucleotide
  Antisense strand to SEQ ID NO: 108236
uuucccacccaugagugag

SEQ ID NO: 108238 - RNA, 19 nt, Artificial Sequence
  Description of Artificial Sequence: Synthetic oligonucleotide
  Sense strand starting at position 3766 of SEQ ID NO: 1376
ucacucaugggugggaaau

SEQ ID NO: 108239 - RNA, 19 nt, Artificial Sequence
  Description of Artificial Sequence: Synthetic oligonucleotide
  Antisense strand to SEQ ID NO: 108238
auuucccacccaugaguga

SEQ ID NO: 108240 - RNA, 19 nt, Artificial Sequence
  Description of Artificial Sequence: Synthetic oligonucleotide
  Sense strand starting at position 3917 of SEQ ID NO: 1377
gguguuuauuacuccauuu

SEQ ID NO: 108241 - RNA, 19 nt, Artificial Sequence
  Description of Artificial Sequence: Synthetic oligonucleotide
  Antisense strand to SEQ ID NO: 108240
aaauggaguaauaaacacc

SEQ ID NO: 108242 - RNA, 19 nt, Artificial Sequence
  Description of Artificial Sequence: Synthetic oligonucleotide
  Sense strand starting at position 3916 of SEQ ID NO: 1377
ugguguuuauuacuccauu

SEQ ID NO: 108243 - RNA, 19 nt, Artificial Sequence
  Description of Artificial Sequence: Synthetic oligonucleotide
  Antisense strand to SEQ ID NO: 108242
aauggaguaauaaacacca

SEQ ID NO: 108244 - RNA, 19 nt, Artificial Sequence
  Description of Artificial Sequence: Synthetic oligonucleotide
  Sense strand starting at position 3911 of SEQ ID NO: 1377
uccagugguguuuauuacu

SEQ ID NO: 108245 - RNA, 19 nt, Artificial Sequence
  Description of Artificial Sequence: Synthetic oligonucleotide
  Antisense strand to SEQ ID NO: 108244
aguaauaaacaccacugga

SEQ ID NO: 108246 - RNA, 19 nt, Artificial Sequence
  Description of Artificial Sequence: Synthetic oligonucleotide
  Sense strand starting at position 3903 of SEQ ID NO: 1377
cuuguuaguccaguggugu

SEQ ID NO: 108247 - RNA, 19 nt, Artificial Sequence
  Description of Artificial Sequence: Synthetic oligonucleotide
  Antisense strand to SEQ ID NO: 108246
acaccacuggacuaacaag

SEQ ID NO: 108248 - RNA, 19 nt, Artificial Sequence
  Description of Artificial Sequence: Synthetic oligonucleotide
  Sense strand starting at position 3893 of SEQ ID NO: 1377
uucuaaucagcuuguuagu

SEQ ID NO: 108249 - RNA, 19 nt, Artificial Sequence
  Description of Artificial Sequence: Synthetic oligonucleotide
  Antisense strand to SEQ ID NO: 108248
acuaacaagcugauuagaa

SEQ ID NO: 108250 - RNA, 19 nt, Artificial Sequence
  Description of Artificial Sequence: Synthetic oligonucleotide
  Sense strand starting at position 3876 of SEQ ID NO: 1377
uuuauuagacauggcacuu

SEQ ID NO: 108251 - RNA, 19 nt, Artificial Sequence
  Description of Artificial Sequence: Synthetic oligonucleotide
  Antisense strand to SEQ ID NO: 108250
aagugccaugucuaauaaa

SEQ ID NO: 108252 - RNA, 19 nt, Artificial Sequence
  Description of Artificial Sequence: Synthetic oligonucleotide
  Sense strand starting at position 3706 of SEQ ID NO: 1377
guaacaaacuauucggauc

SEQ ID NO: 108253 - RNA, 19 nt, Artificial Sequence
  Description of Artificial Sequence: Synthetic oligonucleotide
  Antisense strand to SEQ ID NO: 108252
gauccgaauaguuuguuac

SEQ ID NO: 108254 - RNA, 19 nt, Artificial Sequence
  Description of Artificial Sequence: Synthetic oligonucleotide
  Sense strand starting at position 3626 of SEQ ID NO: 1377
uugugagcuucucuagauu

SEQ ID NO: 108255 - RNA, 19 nt, Artificial Sequence
  Description of Artificial Sequence: Synthetic oligonucleotide
  Antisense strand to SEQ ID NO: 108254
aaucuagagaagcucacaa

SEQ ID NO: 108256 - RNA, 19 nt, Artificial Sequence
  Description of Artificial Sequence: Synthetic oligonucleotide
  Sense strand starting at position 3620 of SEQ ID NO: 1377
gaacuauugugagcuucuc

SEQ ID NO: 108257 - RNA, 19 nt, Artificial Sequence
  Description of Artificial Sequence: Synthetic oligonucleotide
  Antisense strand to SEQ ID NO: 108256
gagaagcucacaauaguuc

SEQ ID NO: 108258 - RNA, 19 nt, Artificial Sequence
  Description of Artificial Sequence: Synthetic oligonucleotide
  Sense strand starting at position 3490 of SEQ ID NO: 1377
cagacugaacugugauaca

SEQ ID NO: 108259 - RNA, 19 nt, Artificial Sequence
  Description of Artificial Sequence: Synthetic oligonucleotide
  Antisense strand to SEQ ID NO: 108258
uguaucacaguucagucug

SEQ ID NO: 108260 - RNA, 19 nt, Artificial Sequence
  Description of Artificial Sequence: Synthetic oligonucleotide
  Sense strand starting at position 3475 of SEQ ID NO: 1377
cacguauguaguugacaga

SEQ ID NO: 108261 - RNA, 19 nt, Artificial Sequence
  Description of Artificial Sequence: Synthetic oligonucleotide
  Antisense strand to SEQ ID NO: 108260
ucugucaacuacauacgug

SEQ ID NO: 108262 - RNA, 19 nt, Artificial Sequence
  Description of Artificial Sequence: Synthetic oligonucleotide
  Sense strand starting at position 3469 of SEQ ID NO: 1377
gaguuccacguauguaguu

SEQ ID NO: 108263 - RNA, 19 nt, Artificial Sequence
  Description of Artificial Sequence: Synthetic oligonucleotide
  Antisense strand to SEQ ID NO: 108262
aacuacauacguggaacuc

SEQ ID NO: 108264 - RNA, 19 nt, Artificial Sequence
  Description of Artificial Sequence: Synthetic oligonucleotide
  Sense strand starting at position 3467 of SEQ ID NO: 1377
uggaguuccacguauguag

SEQ ID NO: 108265 - RNA, 19 nt, Artificial Sequence
  Description of Artificial Sequence: Synthetic oligonucleotide
  Antisense strand to SEQ ID NO: 108264
cuacauacguggaacucca

SEQ ID NO: 108266 - RNA, 19 nt, Artificial Sequence
  Description of Artificial Sequence: Synthetic oligonucleotide
  Sense strand starting at position 3465 of SEQ ID NO: 1377
aauggaguuccacguaugu

SEQ ID NO: 108267 - RNA, 19 nt, Artificial Sequence
  Description of Artificial Sequence: Synthetic oligonucleotide
  Antisense strand to SEQ ID NO: 108266
acauacguggaacuccauu

SEQ ID NO: 108268 - RNA, 19 nt, Artificial Sequence
  Description of Artificial Sequence: Synthetic oligonucleotide
  Sense strand starting at position 3449 of SEQ ID NO: 1377
uaucgcuguguacauaaau

SEQ ID NO: 108269 - RNA, 19 nt, Artificial Sequence
  Description of Artificial Sequence: Synthetic oligonucleotide
  Antisense strand to SEQ ID NO: 108268
auuuauguacacagcgaua

SEQ ID NO: 108270 - RNA, 19 nt, Artificial Sequence
  Description of Artificial Sequence: Synthetic oligonucleotide
  Sense strand starting at position 3447 of SEQ ID NO: 1377
cuuaucgcuguguacauaa

SEQ ID NO: 108271 - RNA, 19 nt, Artificial Sequence
  Description of Artificial Sequence: Synthetic oligonucleotide
  Antisense strand to SEQ ID NO: 108270
uuauguacacagcgauaag

SEQ ID NO: 108272 - RNA, 19 nt, Artificial Sequence
  Description of Artificial Sequence: Synthetic oligonucleotide
  Sense strand starting at position 3446 of SEQ ID NO: 1377
ucuuaucgcuguguacaua

SEQ ID NO: 108273 - RNA, 19 nt, Artificial Sequence
  Description of Artificial Sequence: Synthetic oligonucleotide
  Antisense strand to SEQ ID NO: 108272
uauguacacagcgauaaga

SEQ ID NO: 108274 - RNA, 19 nt, Artificial Sequence
  Description of Artificial Sequence: Synthetic oligonucleotide
  Sense strand starting at position 3442 of SEQ ID NO: 1377
cauaucuuaucgcugugua

SEQ ID NO: 108275 - RNA, 19 nt, Artificial Sequence
  Description of Artificial Sequence: Synthetic oligonucleotide
  Antisense strand to SEQ ID NO: 108274
uacacagcgauaagauaug

SEQ ID NO: 108276 - RNA, 19 nt, Artificial Sequence
  Description of Artificial Sequence: Synthetic oligonucleotide
  Sense strand starting at position 3375 of SEQ ID NO: 1377
agcuuuauucucgauuacu

SEQ ID NO: 108277 - RNA, 19 nt, Artificial Sequence
  Description of Artificial Sequence: Synthetic oligonucleotide
  Antisense strand to SEQ ID NO: 108276
aguaaucgagaauaaagcu

SEQ ID NO: 108278 - RNA, 19 nt, Artificial Sequence
  Description of Artificial Sequence: Synthetic oligonucleotide
  Sense strand starting at position 3373 of SEQ ID NO: 1377
agagcuuuauucucgauua

SEQ ID NO: 108279 - RNA, 19 nt, Artificial Sequence
  Description of Artificial Sequence: Synthetic oligonucleotide
  Antisense strand to SEQ ID NO: 108278
uaaucgagaauaaagcucu

SEQ ID NO: 108280 - RNA, 19 nt, Artificial Sequence
  Description of Artificial Sequence: Synthetic oligonucleotide
  Sense strand starting at position 3203 of SEQ ID NO: 1377
cucuccugugauuaacaga

SEQ ID NO: 108281 - RNA, 19 nt, Artificial Sequence
  Description of Artificial Sequence: Synthetic oligonucleotide
  Antisense strand to SEQ ID NO: 108280
ucuguuaaucacaggagag

SEQ ID NO: 108282 - RNA, 19 nt, Artificial Sequence
  Description of Artificial Sequence: Synthetic oligonucleotide
  Sense strand starting at position 3199 of SEQ ID NO: 1377
ugcucucuccugugauuaa

SEQ ID NO: 108283 - RNA, 19 nt, Artificial Sequence
  Description of Artificial Sequence: Synthetic oligonucleotide
  Antisense strand to SEQ ID NO: 108282
uuaaucacaggagagagca

SEQ ID NO: 108284 - RNA, 19 nt, Artificial Sequence
  Description of Artificial Sequence: Synthetic oligonucleotide
  Sense strand starting at position 3165 of SEQ ID NO: 1377
gcaguuagugaagagcauu

SEQ ID NO: 108285 - RNA, 19 nt, Artificial Sequence
  Description of Artificial Sequence: Synthetic oligonucleotide
  Antisense strand to SEQ ID NO: 108284
aaugcucuucacuaacugc

SEQ ID NO: 108286 - RNA, 19 nt, Artificial Sequence
  Description of Artificial Sequence: Synthetic oligonucleotide
  Sense strand starting at position 3158 of SEQ ID NO: 1377
aguaguugcaguuagugaa

SEQ ID NO: 108287 - RNA, 19 nt, Artificial Sequence
  Description of Artificial Sequence: Synthetic oligonucleotide
  Antisense strand to SEQ ID NO: 108286
uucacuaacugcaacuacu

SEQ ID NO: 108288 - RNA, 19 nt, Artificial Sequence
  Description of Artificial Sequence: Synthetic oligonucleotide
  Sense strand starting at position 3138 of SEQ ID NO: 1377
agugguuguguccaacuga

SEQ ID NO: 108289 - RNA, 19 nt, Artificial Sequence
  Description of Artificial Sequence: Synthetic oligonucleotide
  Antisense strand to SEQ ID NO: 108288
ucaguuggacacaaccacu

SEQ ID NO: 108290 - RNA, 19 nt, Artificial Sequence
  Description of Artificial Sequence: Synthetic oligonucleotide
  Sense strand starting at position 3120 of SEQ ID NO: 1377
uuuggcuucuggucucaua

SEQ ID NO: 108291 - RNA, 19 nt, Artificial Sequence
  Description of Artificial Sequence: Synthetic oligonucleotide
  Antisense strand to SEQ ID NO: 108290
uaugagaccagaagccaaa

SEQ ID NO: 108292 - RNA, 19 nt, Artificial Sequence
  Description of Artificial Sequence: Synthetic oligonucleotide
  Sense strand starting at position 3102 of SEQ ID NO: 1377
gcgggauuccaggaacucu

SEQ ID NO: 108293 - RNA, 19 nt, Artificial Sequence
  Description of Artificial Sequence: Synthetic oligonucleotide
  Antisense strand to SEQ ID NO: 108292
agaguuccuggaaucccgc

SEQ ID NO: 108294 - RNA, 19 nt, Artificial Sequence
  Description of Artificial Sequence: Synthetic oligonucleotide
  Sense strand starting at position 2974 of SEQ ID NO: 1377
cgauguguccauuauaaug

SEQ ID NO: 108295 - RNA, 19 nt, Artificial Sequence
  Description of Artificial Sequence: Synthetic oligonucleotide
  Antisense strand to SEQ ID NO: 108294
cauuauaauggacacaucg

SEQ ID NO: 108296 - RNA, 19 nt, Artificial Sequence
  Description of Artificial Sequence: Synthetic oligonucleotide
  Sense strand starting at position 2971 of SEQ ID NO: 1377
gcacgauguguccauuaua

SEQ ID NO: 108297 - RNA, 19 nt, Artificial Sequence
  Description of Artificial Sequence: Synthetic oligonucleotide
  Antisense strand to SEQ ID NO: 108296
uauaauggacacaucgugc

SEQ ID NO: 108298 - RNA, 19 nt, Artificial Sequence
  Description of Artificial Sequence: Synthetic oligonucleotide
  Sense strand starting at position 2931 of SEQ ID NO: 1377
gauagaaaguuggugcaga

SEQ ID NO: 108299 - RNA, 19 nt, Artificial Sequence
  Description of Artificial Sequence: Synthetic oligonucleotide
  Antisense strand to SEQ ID NO: 108298
ucugcaccaacuuucuauc

SEQ ID NO: 108300 - RNA, 19 nt, Artificial Sequence
  Description of Artificial Sequence: Synthetic oligonucleotide
  Sense strand starting at position 2916 of SEQ ID NO: 1377
uggucucuccaccgagaua

SEQ ID NO: 108301 - RNA, 19 nt, Artificial Sequence
  Description of Artificial Sequence: Synthetic oligonucleotide
  Antisense strand to SEQ ID NO: 108300
uaucucgguggagagacca

SEQ ID NO: 108302 - RNA, 19 nt, Artificial Sequence
  Description of Artificial Sequence: Synthetic oligonucleotide
  Sense strand starting at position 2894 of SEQ ID NO: 1377
uuuaguugcugucucugau

SEQ ID NO: 108303 - RNA, 19 nt, Artificial Sequence
  Description of Artificial Sequence: Synthetic oligonucleotide
  Antisense strand to SEQ ID NO: 108302
aucagagacagcaacuaaa

SEQ ID NO: 108304 - RNA, 19 nt, Artificial Sequence
  Description of Artificial Sequence: Synthetic oligonucleotide
  Sense strand starting at position 2331 of SEQ ID NO: 1377
cuugguuagcauggagagu

SEQ ID NO: 108305 - RNA, 19 nt, Artificial Sequence
  Description of Artificial Sequence: Synthetic oligonucleotide
  Antisense strand to SEQ ID NO: 108304
acucuccaugcuaaccaag

SEQ ID NO: 108306 - RNA, 19 nt, Artificial Sequence
  Description of Artificial Sequence: Synthetic oligonucleotide
  Sense strand starting at position 1194 of SEQ ID NO: 1377
agagauacgcuucagaagu

SEQ ID NO: 108307 - RNA, 19 nt, Artificial Sequence
  Description of Artificial Sequence: Synthetic oligonucleotide
  Antisense strand to SEQ ID NO: 108306
acuucugaagcguaucucu

SEQ ID NO: 108308 - RNA, 19 nt, Artificial Sequence
  Description of Artificial Sequence: Synthetic oligonucleotide
  Sense strand starting at position 1108 of SEQ ID NO: 1377
augggugaaguucgauuau

SEQ ID NO: 108309 - RNA, 19 nt, Artificial Sequence
  Description of Artificial Sequence: Synthetic oligonucleotide
  Antisense strand to SEQ ID NO: 108308
auaaucgaacuucacccau

SEQ ID NO: 108310 - RNA, 19 nt, Artificial Sequence
  Description of Artificial Sequence: Synthetic oligonucleotide
  Sense strand starting at position 1101 of SEQ ID NO: 1377
gacauacaugggugaaguu

SEQ ID NO: 108311 - RNA, 19 nt, Artificial Sequence
  Description of Artificial Sequence: Synthetic oligonucleotide
  Antisense strand to SEQ ID NO: 108310
aacuucacccauguauguc

SEQ ID NO: 108312 - RNA, 19 nt, Artificial Sequence
  Description of Artificial Sequence: Synthetic oligonucleotide
  Sense strand starting at position 864 of SEQ ID NO: 1377
ucugcaaauccuuagggau

SEQ ID NO: 108313 - RNA, 19 nt, Artificial Sequence
  Description of Artificial Sequence: Synthetic oligonucleotide
  Antisense strand to SEQ ID NO: 108312
aucccuaaggauuugcaga

SEQ ID NO: 108314 - RNA, 19 nt, Artificial Sequence
  Description of Artificial Sequence: Synthetic oligonucleotide
  Sense strand starting at position 267 of SEQ ID NO: 1377
gcuguuacccuaugaguca

SEQ ID NO: 108315 - RNA, 19 nt, Artificial Sequence
  Description of Artificial Sequence: Synthetic oligonucleotide
  Antisense strand to SEQ ID NO: 108314
ugacucauaggguaacagc

SEQ ID NO: 108316 - RNA, 19 nt, Artificial Sequence
  Description of Artificial Sequence: Synthetic oligonucleotide
  Sense strand starting at position 237 of SEQ ID NO: 1377
ucaaguacucugcacuagu

SEQ ID NO: 108317 - RNA, 19 nt, Artificial Sequence
  Description of Artificial Sequence: Synthetic oligonucleotide
  Antisense strand to SEQ ID NO: 108316
acuagugcagaguacuuga

SEQ ID NO: 108318 - RNA, 19 nt, Artificial Sequence
  Description of Artificial Sequence: Synthetic oligonucleotide
  Sense strand starting at position 88 of SEQ ID NO: 1377
cagcuuggguuccuccaaa

SEQ ID NO: 108319 - RNA, 19 nt, Artificial Sequence
  Description of Artificial Sequence: Synthetic oligonucleotide
  Antisense strand to SEQ ID NO: 108318
uuuggaggaacccaagcug

SEQ ID NO: 108320 - RNA, 19 nt, Artificial Sequence
  Description of Artificial Sequence: Synthetic oligonucleotide
  Sense strand starting at position 471 of SEQ ID NO: 1379
gccuuagagccugagauug

SEQ ID NO: 108321 - RNA, 19 nt, Artificial Sequence
  Description of Artificial Sequence: Synthetic oligonucleotide
  Antisense strand to SEQ ID NO: 108320
caaucucaggcucuaaggc

SEQ ID NO: 108322 - RNA, 19 nt, Artificial Sequence
  Description of Artificial Sequence: Synthetic oligonucleotide
  Sense strand starting at position 481 of SEQ ID NO: 1379
cugagauugacuugucaag

SEQ ID NO: 108323 - RNA, 19 nt, Artificial Sequence
  Description of Artificial Sequence: Synthetic oligonucleotide
  Antisense strand to SEQ ID NO: 108322
cuugacaagucaaucucag

SEQ ID NO: 108324 - RNA, 19 nt, Artificial Sequence
  Description of Artificial Sequence: Synthetic oligonucleotide
  Sense strand starting at position 483 of SEQ ID NO: 1379
gagauugacuugucaagcu

SEQ ID NO: 108325 - RNA, 19 nt, Artificial Sequence
  Description of Artificial Sequence: Synthetic oligonucleotide
  Antisense strand to SEQ ID NO: 108324
agcuugacaagucaaucuc

SEQ ID NO: 108326 - RNA, 19 nt, Artificial Sequence
  Description of Artificial Sequence: Synthetic oligonucleotide
  Sense strand starting at position 685 of SEQ ID NO: 1379
ugugaaguuccacgagaca

SEQ ID NO: 108327 - RNA, 19 nt, Artificial Sequence
  Description of Artificial Sequence: Synthetic oligonucleotide
  Antisense strand to SEQ ID NO: 108326
ugucucguggaacuucaca

SEQ ID NO: 108328 - RNA, 19 nt, Artificial Sequence
  Description of Artificial Sequence: Synthetic oligonucleotide
  Sense strand starting at position 699 of SEQ ID NO: 1379
agacauuaauaguuuggca

SEQ ID NO: 108329 - RNA, 19 nt, Artificial Sequence
  Description of Artificial Sequence: Synthetic oligonucleotide
  Antisense strand to SEQ ID NO: 108328
ugccaaacuauuaaugucu

SEQ ID NO: 108330 - RNA, 19 nt, Artificial Sequence
  Description of Artificial Sequence: Synthetic oligonucleotide
  Sense strand starting at position 754 of SEQ ID NO: 1379
agcugaaagccagaugucu

SEQ ID NO: 108331 - RNA, 19 nt, Artificial Sequence
  Description of Artificial Sequence: Synthetic oligonucleotide
  Antisense strand to SEQ ID NO: 108330
agacaucuggcuuucagcu

SEQ ID NO: 108332 - RNA, 19 nt, Artificial Sequence
  Description of Artificial Sequence: Synthetic oligonucleotide
  Sense strand starting at position 986 of SEQ ID NO: 1379
agcagacaucacuagucaa

SEQ ID NO: 108333 - RNA, 19 nt, Artificial Sequence
  Description of Artificial Sequence: Synthetic oligonucleotide
  Antisense strand to SEQ ID NO: 108332
uugacuagugaugucugcu

SEQ ID NO: 108334 - RNA, 19 nt, Artificial Sequence
  Description of Artificial Sequence: Synthetic oligonucleotide
  Sense strand starting at position 1066 of SEQ ID NO: 1379
ucagaauugucacuuggga

SEQ ID NO: 108335 - RNA, 19 nt, Artificial Sequence
  Description of Artificial Sequence: Synthetic oligonucleotide
  Antisense strand to SEQ ID NO: 108334
ucccaagugacaauucuga

SEQ ID NO: 108336 - RNA, 19 nt, Artificial Sequence
  Description of Artificial Sequence: Synthetic oligonucleotide
  Sense strand starting at position 1068 of SEQ ID NO: 1379
agaauugucacuugggaua

SEQ ID NO: 108337 - RNA, 19 nt, Artificial Sequence
  Description of Artificial Sequence: Synthetic oligonucleotide
  Antisense strand to SEQ ID NO: 108336
uaucccaagugacaauucu

SEQ ID NO: 108338 - RNA, 19 nt, Artificial Sequence
  Description of Artificial Sequence: Synthetic oligonucleotide
  Sense strand starting at position 1128 of SEQ ID NO: 1379
aggcaaagucgacacacau

SEQ ID NO: 108339 - RNA, 19 nt, Artificial Sequence
  Description of Artificial Sequence: Synthetic oligonucleotide
  Antisense strand to SEQ ID NO: 108338
augugugucgacuuugccu

SEQ ID NO: 108340 - RNA, 19 nt, Artificial Sequence
  Description of Artificial Sequence: Synthetic oligonucleotide
  Sense strand starting at position 1134 of SEQ ID NO: 1379
agucgacacacaugaaagu

SEQ ID NO: 108341 - RNA, 19 nt, Artificial Sequence
  Description of Artificial Sequence: Synthetic oligonucleotide
  Antisense strand to SEQ ID NO: 108340
acuuucaugugugucgacu

SEQ ID NO: 108342 - RNA, 19 nt, Artificial Sequence
  Description of Artificial Sequence: Synthetic oligonucleotide
  Sense strand starting at position 1211 of SEQ ID NO: 1379
gauagagauucugugccca

SEQ ID NO: 108343 - RNA, 19 nt, Artificial Sequence
  Description of Artificial Sequence: Synthetic oligonucleotide
  Antisense strand to SEQ ID NO: 108342
ugggcacagaaucucuauc

SEQ ID NO: 108344 - RNA, 19 nt, Artificial Sequence
  Description of Artificial Sequence: Synthetic oligonucleotide
  Sense strand starting at position 1213 of SEQ ID NO: 1379
uagagauucugugcccaga

SEQ ID NO: 108345 - RNA, 19 nt, Artificial Sequence
  Description of Artificial Sequence: Synthetic oligonucleotide
  Antisense strand to SEQ ID NO: 108344
ucugggcacagaaucucua

SEQ ID NO: 108346 - RNA, 19 nt, Artificial Sequence
  Description of Artificial Sequence: Synthetic oligonucleotide
  Sense strand starting at position 1215 of SEQ ID NO: 1379
gagauucugugcccagaag

SEQ ID NO: 108347 - RNA, 19 nt, Artificial Sequence
  Description of Artificial Sequence: Synthetic oligonucleotide
  Antisense strand to SEQ ID NO: 108346
cuucugggcacagaaucuc

SEQ ID NO: 108348 - RNA, 19 nt, Artificial Sequence
  Description of Artificial Sequence: Synthetic oligonucleotide
  Sense strand starting at position 1230 of SEQ ID NO: 1379
gaaggaguucuguguagaa

SEQ ID NO: 108349 - RNA, 19 nt, Artificial Sequence
  Description of Artificial Sequence: Synthetic oligonucleotide
  Antisense strand to SEQ ID NO: 108348
uucuacacagaacuccuuc

SEQ ID NO: 108350 - RNA, 19 nt, Artificial Sequence
  Description of Artificial Sequence: Synthetic oligonucleotide
  Sense strand starting at position 1232 of SEQ ID NO: 1379
aggaguucuguguagaaga

SEQ ID NO: 108351 - RNA, 19 nt, Artificial Sequence
  Description of Artificial Sequence: Synthetic oligonucleotide
  Antisense strand to SEQ ID NO: 108350
ucuucuacacagaacuccu

SEQ ID NO: 108352 - RNA, 19 nt, Artificial Sequence
  Description of Artificial Sequence: Synthetic oligonucleotide
  Sense strand starting at position 1234 of SEQ ID NO: 1379
gaguucuguguagaagaaa

SEQ ID NO: 108353 - RNA, 19 nt, Artificial Sequence
  Description of Artificial Sequence: Synthetic oligonucleotide
  Antisense strand to SEQ ID NO: 108352
uuucuucuacacagaacuc

SEQ ID NO: 108354 - RNA, 19 nt, Artificial Sequence
  Description of Artificial Sequence: Synthetic oligonucleotide
  Sense strand starting at position 1237 of SEQ ID NO: 1379
uucuguguagaagaaagua

SEQ ID NO: 108355 - RNA, 19 nt, Artificial Sequence
  Description of Artificial Sequence: Synthetic oligonucleotide
  Antisense strand to SEQ ID NO: 108354
uacuuucuucuacacagaa

SEQ ID NO: 108356 - RNA, 19 nt, Artificial Sequence
  Description of Artificial Sequence: Synthetic oligonucleotide
  Sense strand starting at position 1466 of SEQ ID NO: 1379
gagguuagguuuccgaaau

SEQ ID NO: 108357 - RNA, 19 nt, Artificial Sequence
  Description of Artificial Sequence: Synthetic oligonucleotide
  Antisense strand to SEQ ID NO: 108356
auuucggaaaccuaaccuc

SEQ ID NO: 108358 - RNA, 19 nt, Artificial Sequence
  Description of Artificial Sequence: Synthetic oligonucleotide
  Sense strand starting at position 1832 of SEQ ID NO: 1379
cuuucugggccagaugagu

SEQ ID NO: 108359 - RNA, 19 nt, Artificial Sequence
  Description of Artificial Sequence: Synthetic oligonucleotide
  Antisense strand to SEQ ID NO: 108358
acucaucuggcccagaaag

SEQ ID NO: 108360 - RNA, 19 nt, Artificial Sequence
  Description of Artificial Sequence: Synthetic oligonucleotide
  Sense strand starting at position 1890 of SEQ ID NO: 1379
uugcaaaugcaucaggaaa

SEQ ID NO: 108361 - RNA, 19 nt, Artificial Sequence
  Description of Artificial Sequence: Synthetic oligonucleotide
  Antisense strand to SEQ ID NO: 108360
uuuccugaugcauuugcaa

SEQ ID NO: 108362 - RNA, 19 nt, Artificial Sequence
  Description of Artificial Sequence: Synthetic oligonucleotide
  Sense strand starting at position 2285 of SEQ ID NO: 1379
aaaugaaacccgugaccua

SEQ ID NO: 108363 - RNA, 19 nt, Artificial Sequence
  Description of Artificial Sequence: Synthetic oligonucleotide
  Antisense strand to SEQ ID NO: 108362
uaggucacggguuucauuu

SEQ ID NO: 108364 - RNA, 19 nt, Artificial Sequence
  Description of Artificial Sequence: Synthetic oligonucleotide
  Sense strand starting at position 2624 of SEQ ID NO: 1379
agagguuccuggcuuacaa

SEQ ID NO: 108365 - RNA, 19 nt, Artificial Sequence
  Description of Artificial Sequence: Synthetic oligonucleotide
  Antisense strand to SEQ ID NO: 108364
uuguaagccaggaaccucu

SEQ ID NO: 108366 - RNA, 19 nt, Artificial Sequence
  Description of Artificial Sequence: Synthetic oligonucleotide
  Sense strand starting at position 2633 of SEQ ID NO: 1379
uggcuuacaaagugaugga

SEQ ID NO: 108367 - RNA, 19 nt, Artificial Sequence
  Description of Artificial Sequence: Synthetic oligonucleotide
  Antisense strand to SEQ ID NO: 108366
uccaucacuuuguaagcca

SEQ ID NO: 108368 - RNA, 19 nt, Artificial Sequence
  Description of Artificial Sequence: Synthetic oligonucleotide
  Sense strand starting at position 2693 of SEQ ID NO: 1379
guuaaaugggagugucaga

SEQ ID NO: 108369 - RNA, 19 nt, Artificial Sequence
  Description of Artificial Sequence: Synthetic oligonucleotide
  Antisense strand to SEQ ID NO: 108368
ucugacacucccauuuaac

SEQ ID NO: 108370 - RNA, 19 nt, Artificial Sequence
  Description of Artificial Sequence: Synthetic oligonucleotide
  Sense strand starting at position 2715 of SEQ ID NO: 1379
gaggauaauucuuuccagu

SEQ ID NO: 108371 - RNA, 19 nt, Artificial Sequence
  Description of Artificial Sequence: Synthetic oligonucleotide
  Antisense strand to SEQ ID NO: 108370
acuggaaagaauuauccuc

SEQ ID NO: 108372 - RNA, 19 nt, Artificial Sequence
  Description of Artificial Sequence: Synthetic oligonucleotide
  Sense strand starting at position 2717 of SEQ ID NO: 1379
ggauaauucuuuccagucu

SEQ ID NO: 108373 - RNA, 19 nt, Artificial Sequence
  Description of Artificial Sequence: Synthetic oligonucleotide
  Antisense strand to SEQ ID NO: 108372
agacuggaaagaauuaucc

SEQ ID NO: 108374 - RNA, 19 nt, Artificial Sequence
  Description of Artificial Sequence: Synthetic oligonucleotide
  Sense strand starting at position 2725 of SEQ ID NO: 1379
cuuuccagucuugaaugaa

SEQ ID NO: 108375 - RNA, 19 nt, Artificial Sequence
  Description of Artificial Sequence: Synthetic oligonucleotide
  Antisense strand to SEQ ID NO: 108374
uucauucaagacuggaaag

SEQ ID NO: 108376 - RNA, 19 nt, Artificial Sequence
  Description of Artificial Sequence: Synthetic oligonucleotide
  Sense strand starting at position 2728 of SEQ ID NO: 1379
uccagucuugaaugaauuc

SEQ ID NO: 108377 - RNA, 19 nt, Artificial Sequence
  Description of Artificial Sequence: Synthetic oligonucleotide
  Antisense strand to SEQ ID NO: 108376
gaauucauucaagacugga

SEQ ID NO: 108378 - RNA, 19 nt, Artificial Sequence
  Description of Artificial Sequence: Synthetic oligonucleotide
  Sense strand starting at position 2766 of SEQ ID NO: 1379
ucccauaggcuguauuaau

SEQ ID NO: 108379 - RNA, 19 nt, Artificial Sequence
  Description of Artificial Sequence: Synthetic oligonucleotide
  Antisense strand to SEQ ID NO: 108378
auuaauacagccuauggga

SEQ ID NO: 108380 - RNA, 19 nt, Artificial Sequence
  Description of Artificial Sequence: Synthetic oligonucleotide
  Sense strand starting at position 2795 of SEQ ID NO: 1379
uuaucuugagcugaaauua

SEQ ID NO: 108381 - RNA, 19 nt, Artificial Sequence
  Description of Artificial Sequence: Synthetic oligonucleotide
  Antisense strand to SEQ ID NO: 108380
uaauuucagcucaagauaa

SEQ ID NO: 108382 - RNA, 19 nt, Artificial Sequence
  Description of Artificial Sequence: Synthetic oligonucleotide
  Sense strand starting at position 2846 of SEQ ID NO: 1379
uggagauccaucugaucug

SEQ ID NO: 108383 - RNA, 19 nt, Artificial Sequence
  Description of Artificial Sequence: Synthetic oligonucleotide
  Antisense strand to SEQ ID NO: 108382
cagaucagauggaucucca

SEQ ID NO: 108384 - RNA, 19 nt, Artificial Sequence
  Description of Artificial Sequence: Synthetic oligonucleotide
  Sense strand starting at position 2857 of SEQ ID NO: 1379
cugaucugggccugaaaua

SEQ ID NO: 108385 - RNA, 19 nt, Artificial Sequence
  Description of Artificial Sequence: Synthetic oligonucleotide
  Antisense strand to SEQ ID NO: 108384
uauuucaggcccagaucag

SEQ ID NO: 108386 - RNA, 19 nt, Artificial Sequence
  Description of Artificial Sequence: Synthetic oligonucleotide
  Sense strand starting at position 3253 of SEQ ID NO: 1379
gccacaugacagugaauua

SEQ ID NO: 108387 - RNA, 19 nt, Artificial Sequence
  Description of Artificial Sequence: Synthetic oligonucleotide
  Antisense strand to SEQ ID NO: 108386
uaauucacugucauguggc

SEQ ID NO: 108388 - RNA, 19 nt, Artificial Sequence
  Description of Artificial Sequence: Synthetic oligonucleotide
  Sense strand starting at position 3307 of SEQ ID NO: 1379
augaaaguccugcacugau

SEQ ID NO: 108389 - RNA, 19 nt, Artificial Sequence
  Description of Artificial Sequence: Synthetic oligonucleotide
  Antisense strand to SEQ ID NO: 108388
aucagugcaggacuuucau

SEQ ID NO: 108390 - RNA, 19 nt, Artificial Sequence
  Description of Artificial Sequence: Synthetic oligonucleotide
  Sense strand starting at position 3320 of SEQ ID NO: 1379
acugaugacuaauggauuu

SEQ ID NO: 108391 - RNA, 19 nt, Artificial Sequence
  Description of Artificial Sequence: Synthetic oligonucleotide
  Antisense strand to SEQ ID NO: 108390
aaauccauuagucaucagu

SEQ ID NO: 108392 - RNA, 19 nt, Artificial Sequence
  Description of Artificial Sequence: Synthetic oligonucleotide
  Sense strand starting at position 3442 of SEQ ID NO: 1379
gccaauuuggcuugcuaaa

SEQ ID NO: 108393 - RNA, 19 nt, Artificial Sequence
  Description of Artificial Sequence: Synthetic oligonucleotide
  Antisense strand to SEQ ID NO: 108392
uuuagcaagccaaauuggc

SEQ ID NO: 108394 - RNA, 19 nt, Artificial Sequence
  Description of Artificial Sequence: Synthetic oligonucleotide
  Sense strand starting at position 3619 of SEQ ID NO: 1379
uaggauugaaggugugaga

SEQ ID NO: 108395 - RNA, 19 nt, Artificial Sequence
  Description of Artificial Sequence: Synthetic oligonucleotide
  Antisense strand to SEQ ID NO: 108394
ucucacaccuucaauccua

SEQ ID NO: 108396 - RNA, 19 nt, Artificial Sequence
  Description of Artificial Sequence: Synthetic oligonucleotide
  Sense strand starting at position 3744 of SEQ ID NO: 1379
guuuaaaugucaccaacug

SEQ ID NO: 108397 - RNA, 19 nt, Artificial Sequence
  Description of Artificial Sequence: Synthetic oligonucleotide
  Antisense strand to SEQ ID NO: 108396
caguuggugacauuuaaac

SEQ ID NO: 108398 - RNA, 19 nt, Artificial Sequence
  Description of Artificial Sequence: Synthetic oligonucleotide
  Sense strand starting at position 3775 of SEQ ID NO: 1379
cccugaacucuggguagua

SEQ ID NO: 108399 - RNA, 19 nt, Artificial Sequence
  Description of Artificial Sequence: Synthetic oligonucleotide
  Antisense strand to SEQ ID NO: 108398
uacuacccagaguucaggg

SEQ ID NO: 108400 - RNA, 19 nt, Artificial Sequence
  Description of Artificial Sequence: Synthetic oligonucleotide
  Sense strand starting at position 154 of SEQ ID NO: 1378
gccuuagagccugagauug

SEQ ID NO: 108401 - RNA, 19 nt, Artificial Sequence
  Description of Artificial Sequence: Synthetic oligonucleotide
  Antisense strand to SEQ ID NO: 108400
caaucucaggcucuaaggc

SEQ ID NO: 108402 - RNA, 19 nt, Artificial Sequence
  Description of Artificial Sequence: Synthetic oligonucleotide
  Sense strand starting at position 164 of SEQ ID NO: 1378
cugagauugacuugucaag

SEQ ID NO: 108403 - RNA, 19 nt, Artificial Sequence
  Description of Artificial Sequence: Synthetic oligonucleotide
  Antisense strand to SEQ ID NO: 108402
cuugacaagucaaucucag

SEQ ID NO: 108404 - RNA, 19 nt, Artificial Sequence
  Description of Artificial Sequence: Synthetic oligonucleotide
  Sense strand starting at position 166 of SEQ ID NO: 1378
gagauugacuugucaagcu

SEQ ID NO: 108405 - RNA, 19 nt, Artificial Sequence
  Description of Artificial Sequence: Synthetic oligonucleotide
  Antisense strand to SEQ ID NO: 108404
agcuugacaagucaaucuc

SEQ ID NO: 108406 - RNA, 19 nt, Artificial Sequence
  Description of Artificial Sequence: Synthetic oligonucleotide
  Sense strand starting at position 368 of SEQ ID NO: 1378
ugugaaguuccacgagaca

SEQ ID NO: 108407 - RNA, 19 nt, Artificial Sequence
  Description of Artificial Sequence: Synthetic oligonucleotide
  Antisense strand to SEQ ID NO: 108406
ugucucguggaacuucaca

SEQ ID NO: 108408 - RNA, 19 nt, Artificial Sequence
  Description of Artificial Sequence: Synthetic oligonucleotide
  Sense strand starting at position 382 of SEQ ID NO: 1378
agacauuaauaguuuggca

SEQ ID NO: 108409 - RNA, 19 nt, Artificial Sequence
  Description of Artificial Sequence: Synthetic oligonucleotide
  Antisense strand to SEQ ID NO: 108408
ugccaaacuauuaaugucu

SEQ ID NO: 108410 - RNA, 19 nt, Artificial Sequence
  Description of Artificial Sequence: Synthetic oligonucleotide
  Sense strand starting at position 437 of SEQ ID NO: 1378
agcugaaagccagaugucu

SEQ ID NO: 108411 - RNA, 19 nt, Artificial Sequence
  Description of Artificial Sequence: Synthetic oligonucleotide
  Antisense strand to SEQ ID NO: 108410
agacaucuggcuuucagcu

SEQ ID NO: 108412 - RNA, 19 nt, Artificial Sequence
  Description of Artificial Sequence: Synthetic oligonucleotide
  Sense strand starting at position 669 of SEQ ID NO: 1378
agcagacaucacuagucaa

SEQ ID NO: 108413 - RNA, 19 nt, Artificial Sequence
  Description of Artificial Sequence: Synthetic oligonucleotide
  Antisense strand to SEQ ID NO: 108412
uugacuagugaugucugcu

SEQ ID NO: 108414 - RNA, 19 nt, Artificial Sequence
  Description of Artificial Sequence: Synthetic oligonucleotide
  Sense strand starting at position 749 of SEQ ID NO: 1378
ucagaauugucacuuggga

SEQ ID NO: 108415 - RNA, 19 nt, Artificial Sequence
  Description of Artificial Sequence: Synthetic oligonucleotide
  Antisense strand to SEQ ID NO: 108414
ucccaagugacaauucuga

SEQ ID NO: 108416 - RNA, 19 nt, Artificial Sequence
  Description of Artificial Sequence: Synthetic oligonucleotide
  Sense strand starting at position 751 of SEQ ID NO: 1378
agaauugucacuugggaua

SEQ ID NO: 108417 - RNA, 19 nt, Artificial Sequence
  Description of Artificial Sequence: Synthetic oligonucleotide
  Antisense strand to SEQ ID NO: 108416
uaucccaagugacaauucu

SEQ ID NO: 108418 - RNA, 19 nt, Artificial Sequence
  Description of Artificial Sequence: Synthetic oligonucleotide
  Sense strand starting at position 811 of SEQ ID NO: 1378
aggcaaagucgacacacau

SEQ ID NO: 108419 - RNA, 19 nt, Artificial Sequence
  Description of Artificial Sequence: Synthetic oligonucleotide
  Antisense strand to SEQ ID NO: 108418
augugugucgacuuugccu

SEQ ID NO: 108420 - RNA, 19 nt, Artificial Sequence
  Description of Artificial Sequence: Synthetic oligonucleotide
  Sense strand starting at position 817 of SEQ ID NO: 1378
agucgacacacaugaaagu

SEQ ID NO: 108421 - RNA, 19 nt, Artificial Sequence
  Description of Artificial Sequence: Synthetic oligonucleotide
  Antisense strand to SEQ ID NO: 108420
acuuucaugugugucgacu

SEQ ID NO: 108422 - RNA, 19 nt, Artificial Sequence
  Description of Artificial Sequence: Synthetic oligonucleotide
  Sense strand starting at position 894 of SEQ ID NO: 1378
gauagagauucugugccca

SEQ ID NO: 108423 - RNA, 19 nt, Artificial Sequence
  Description of Artificial Sequence: Synthetic oligonucleotide
  Antisense strand to SEQ ID NO: 108422
ugggcacagaaucucuauc

SEQ ID NO: 108424 - RNA, 19 nt, Artificial Sequence
  Description of Artificial Sequence: Synthetic oligonucleotide
  Sense strand starting at position 896 of SEQ ID NO: 1378
uagagauucugugcccaga

SEQ ID NO: 108425 - RNA, 19 nt, Artificial Sequence
  Description of Artificial Sequence: Synthetic oligonucleotide
  Antisense strand to SEQ ID NO: 108424
ucugggcacagaaucucua

SEQ ID NO: 108426 - RNA, 19 nt, Artificial Sequence
  Description of Artificial Sequence: Synthetic oligonucleotide
  Sense strand starting at position 898 of SEQ ID NO: 1378
gagauucugugcccagaag

SEQ ID NO: 108427 - RNA, 19 nt, Artificial Sequence
  Description of Artificial Sequence: Synthetic oligonucleotide
  Antisense strand to SEQ ID NO: 108426
cuucugggcacagaaucuc

SEQ ID NO: 108428 - RNA, 19 nt, Artificial Sequence
  Description of Artificial Sequence: Synthetic oligonucleotide
  Sense strand starting at position 913 of SEQ ID NO: 1378
gaaggaguucuguguagaa

SEQ ID NO: 108429 - RNA, 19 nt, Artificial Sequence
  Description of Artificial Sequence: Synthetic oligonucleotide
  Antisense strand to SEQ ID NO: 108428
uucuacacagaacuccuuc

SEQ ID NO: 108430 - RNA, 19 nt, Artificial Sequence
  Description of Artificial Sequence: Synthetic oligonucleotide
  Sense strand starting at position 915 of SEQ ID NO: 1378
aggaguucuguguagaaga

SEQ ID NO: 108431 - RNA, 19 nt, Artificial Sequence
  Description of Artificial Sequence: Synthetic oligonucleotide
  Antisense strand to SEQ ID NO: 108430
ucuucuacacagaacuccu

SEQ ID NO: 108432 - RNA, 19 nt, Artificial Sequence
  Description of Artificial Sequence: Synthetic oligonucleotide
  Sense strand starting at position 917 of SEQ ID NO: 1378
gaguucuguguagaagaaa

SEQ ID NO: 108433 - RNA, 19 nt, Artificial Sequence
  Description of Artificial Sequence: Synthetic oligonucleotide
  Antisense strand to SEQ ID NO: 108432
uuucuucuacacagaacuc

SEQ ID NO: 108434 - RNA, 19 nt, Artificial Sequence
  Description of Artificial Sequence: Synthetic oligonucleotide
  Sense strand starting at position 920 of SEQ ID NO: 1378
uucuguguagaagaaagua

SEQ ID NO: 108435 - RNA, 19 nt, Artificial Sequence
  Description of Artificial Sequence: Synthetic oligonucleotide
  Antisense strand to SEQ ID NO: 108434
uacuuucuucuacacagaa

SEQ ID NO: 108436 - RNA, 19 nt, Artificial Sequence
  Description of Artificial Sequence: Synthetic oligonucleotide
  Sense strand starting at position 1149 of SEQ ID NO: 1378
gagguuagguuuccgaaau

SEQ ID NO: 108437 - RNA, 19 nt, Artificial Sequence
  Description of Artificial Sequence: Synthetic oligonucleotide
  Antisense strand to SEQ ID NO: 108436
auuucggaaaccuaaccuc

SEQ ID NO: 108438 - RNA, 19 nt, Artificial Sequence
  Description of Artificial Sequence: Synthetic oligonucleotide
  Sense strand starting at position 1515 of SEQ ID NO: 1378
cuuucugggccagaugagu

SEQ ID NO: 108439 - RNA, 19 nt, Artificial Sequence
  Description of Artificial Sequence: Synthetic oligonucleotide
  Antisense strand to SEQ ID NO: 108438
acucaucuggcccagaaag

SEQ ID NO: 108440 - RNA, 19 nt, Artificial Sequence
  Description of Artificial Sequence: Synthetic oligonucleotide
  Sense strand starting at position 1573 of SEQ ID NO: 1378
uugcaaaugcaucaggaaa

SEQ ID NO: 108441 - RNA, 19 nt, Artificial Sequence
  Description of Artificial Sequence: Synthetic oligonucleotide
  Antisense strand to SEQ ID NO: 108440
uuuccugaugcauuugcaa

SEQ ID NO: 108442 - RNA, 19 nt, Artificial Sequence
  Description of Artificial Sequence: Synthetic oligonucleotide
  Sense strand starting at position 1968 of SEQ ID NO: 1378
aaaugaaacccgugaccua

SEQ ID NO: 108443 - RNA, 19 nt, Artificial Sequence
  Description of Artificial Sequence: Synthetic oligonucleotide
  Antisense strand to SEQ ID NO: 108442
uaggucacggguuucauuu

SEQ ID NO: 108444 - RNA, 19 nt, Artificial Sequence
  Description of Artificial Sequence: Synthetic oligonucleotide
  Sense strand starting at position 2307 of SEQ ID NO: 1378
agagguuccuggcuuacaa

SEQ ID NO: 108445 - RNA, 19 nt, Artificial Sequence
  Description of Artificial Sequence: Synthetic oligonucleotide
  Antisense strand to SEQ ID NO: 108444
uuguaagccaggaaccucu

SEQ ID NO: 108446 - RNA, 19 nt, Artificial Sequence
  Description of Artificial Sequence: Synthetic oligonucleotide
  Sense strand starting at position 2316 of SEQ ID NO: 1378
uggcuuacaaagugaugga

SEQ ID NO: 108447 - RNA, 19 nt, Artificial Sequence
  Description of Artificial Sequence: Synthetic oligonucleotide
  Antisense strand to SEQ ID NO: 108446
uccaucacuuuguaagcca

SEQ ID NO: 108448 - RNA, 19 nt, Artificial Sequence
  Description of Artificial Sequence: Synthetic oligonucleotide
  Sense strand starting at position 2376 of SEQ ID NO: 1378
guuaaaugggagugucaga

SEQ ID NO: 108449 - RNA, 19 nt, Artificial Sequence
  Description of Artificial Sequence: Synthetic oligonucleotide
  Antisense strand to SEQ ID NO: 108448
ucugacacucccauuuaac

SEQ ID NO: 108450 - RNA, 19 nt, Artificial Sequence
  Description of Artificial Sequence: Synthetic oligonucleotide
  Sense strand starting at position 2398 of SEQ ID NO: 1378
gaggauaauucuuuccagu

SEQ ID NO: 108451 - RNA, 19 nt, Artificial Sequence
  Description of Artificial Sequence: Synthetic oligonucleotide
  Antisense strand to SEQ ID NO: 108450
acuggaaagaauuauccuc

SEQ ID NO: 108452 - RNA, 19 nt, Artificial Sequence
  Description of Artificial Sequence: Synthetic oligonucleotide
  Sense strand starting at position 2400 of SEQ ID NO: 1378
ggauaauucuuuccagucu

SEQ ID NO: 108453 - RNA, 19 nt, Artificial Sequence
  Description of Artificial Sequence: Synthetic oligonucleotide
  Antisense strand to SEQ ID NO: 108452
agacuggaaagaauuaucc

SEQ ID NO: 108454 - RNA, 19 nt, Artificial Sequence
  Description of Artificial Sequence: Synthetic oligonucleotide
  Sense strand starting at position 2408 of SEQ ID NO: 1378
cuuuccagucuugaaugaa

SEQ ID NO: 108455 - RNA, 19 nt, Artificial Sequence
  Description of Artificial Sequence: Synthetic oligonucleotide
  Antisense strand to SEQ ID NO: 108454
uucauucaagacuggaaag

SEQ ID NO: 108456 - RNA, 19 nt, Artificial Sequence
  Description of Artificial Sequence: Synthetic oligonucleotide
  Sense strand starting at position 2411 of SEQ ID NO: 1378
uccagucuugaaugaauuc

SEQ ID NO: 108457 - RNA, 19 nt, Artificial Sequence
  Description of Artificial Sequence: Synthetic oligonucleotide
  Antisense strand to SEQ ID NO: 108456
gaauucauucaagacugga

SEQ ID NO: 108458 - RNA, 19 nt, Artificial Sequence
  Description of Artificial Sequence: Synthetic oligonucleotide
  Sense strand starting at position 2449 of SEQ ID NO: 1378
ucccauaggcuguauuaau

SEQ ID NO: 108459 - RNA, 19 nt, Artificial Sequence
  Description of Artificial Sequence: Synthetic oligonucleotide
  Antisense strand to SEQ ID NO: 108458
auuaauacagccuauggga

SEQ ID NO: 108460 - RNA, 19 nt, Artificial Sequence
  Description of Artificial Sequence: Synthetic oligonucleotide
  Sense strand starting at position 2478 of SEQ ID NO: 1378
uuaucuugagcugaaauua

SEQ ID NO: 108461 - RNA, 19 nt, Artificial Sequence
  Description of Artificial Sequence: Synthetic oligonucleotide
  Antisense strand to SEQ ID NO: 108460
uaauuucagcucaagauaa

SEQ ID NO: 108462 - RNA, 19 nt, Artificial Sequence
  Description of Artificial Sequence: Synthetic oligonucleotide
  Sense strand starting at position 2529 of SEQ ID NO: 1378
uggagauccaucugaucug

SEQ ID NO: 108463 - RNA, 19 nt, Artificial Sequence
  Description of Artificial Sequence: Synthetic oligonucleotide
  Antisense strand to SEQ ID NO: 108462
cagaucagauggaucucca

SEQ ID NO: 108464 - RNA, 19 nt, Artificial Sequence
  Description of Artificial Sequence: Synthetic oligonucleotide
  Sense strand starting at position 2540 of SEQ ID NO: 1378
cugaucugggccugaaaua

SEQ ID NO: 108465 - RNA, 19 nt, Artificial Sequence
  Description of Artificial Sequence: Synthetic oligonucleotide
  Antisense strand to SEQ ID NO: 108464
uauuucaggcccagaucag

SEQ ID NO: 108466 - RNA, 19 nt, Artificial Sequence
  Description of Artificial Sequence: Synthetic oligonucleotide
  Sense strand starting at position 2936 of SEQ ID NO: 1378
gccacaugacagugaauua

SEQ ID NO: 108467 - RNA, 19 nt, Artificial Sequence
  Description of Artificial Sequence: Synthetic oligonucleotide
  Antisense strand to SEQ ID NO: 108466
uaauucacugucauguggc

SEQ ID NO: 108468 - RNA, 19 nt, Artificial Sequence
  Description of Artificial Sequence: Synthetic oligonucleotide
  Sense strand starting at position 2990 of SEQ ID NO: 1378
augaaaguccugcacugau

SEQ ID NO: 108469 - RNA, 19 nt, Artificial Sequence
  Description of Artificial Sequence: Synthetic oligonucleotide
  Antisense strand to SEQ ID NO: 108468
aucagugcaggacuuucau

SEQ ID NO: 108470 - RNA, 19 nt, Artificial Sequence
  Description of Artificial Sequence: Synthetic oligonucleotide
  Sense strand starting at position 3003 of SEQ ID NO: 1378
acugaugacuaauggauuu

SEQ ID NO: 108471 - RNA, 19 nt, Artificial Sequence
  Description of Artificial Sequence: Synthetic oligonucleotide
  Antisense strand to SEQ ID NO: 108470
aaauccauuagucaucagu

SEQ ID NO: 108472 - RNA, 19 nt, Artificial Sequence
  Description of Artificial Sequence: Synthetic oligonucleotide
  Sense strand starting at position 3125 of SEQ ID NO: 1378
gccaauuuggcuugcuaaa

SEQ ID NO: 108473 - RNA, 19 nt, Artificial Sequence
  Description of Artificial Sequence: Synthetic oligonucleotide
  Antisense strand to SEQ ID NO: 108472
uuuagcaagccaaauuggc

SEQ ID NO: 108474 - RNA, 19 nt, Artificial Sequence
  Description of Artificial Sequence: Synthetic oligonucleotide
  Sense strand starting at position 3302 of SEQ ID NO: 1378
uaggauugaaggugugaga

SEQ ID NO: 108475 - RNA, 19 nt, Artificial Sequence
  Description of Artificial Sequence: Synthetic oligonucleotide
  Antisense strand to SEQ ID NO: 108474
ucucacaccuucaauccua

SEQ ID NO: 108476 - RNA, 19 nt, Artificial Sequence
  Description of Artificial Sequence: Synthetic oligonucleotide
  Sense strand starting at position 3427 of SEQ ID NO: 1378
guuuaaaugucaccaacug

SEQ ID NO: 108477 - RNA, 19 nt, Artificial Sequence
  Description of Artificial Sequence: Synthetic oligonucleotide
  Antisense strand to SEQ ID NO: 108476
caguuggugacauuuaaac

SEQ ID NO: 108478 - RNA, 19 nt, Artificial Sequence
  Description of Artificial Sequence: Synthetic oligonucleotide
  Sense strand starting at position 3695 of SEQ ID NO: 1378
ggcagaaagagguauugcu

SEQ ID NO: 108479 - RNA, 19 nt, Artificial Sequence
  Description of Artificial Sequence: Synthetic oligonucleotide
  Antisense strand to SEQ ID NO: 108478
agcaauaccucuuucugcc

SEQ ID NO: 108480 - RNA, 19 nt, Artificial Sequence
  Description of Artificial Sequence: Synthetic oligonucleotide
  Sense strand starting at position 3963 of SEQ ID NO: 1380
ggagcucuuccuugcacca

SEQ ID NO: 108481 - RNA, 19 nt, Artificial Sequence
  Description of Artificial Sequence: Synthetic oligonucleotide
  Antisense strand to SEQ ID NO: 108480
uggugcaaggaagagcucc

SEQ ID NO: 108482 - RNA, 19 nt, Artificial Sequence
  Description of Artificial Sequence: Synthetic oligonucleotide
  Sense strand starting at position 3921 of SEQ ID NO: 1380
cagaaugaguuugugcaca

SEQ ID NO: 108483 - RNA, 19 nt, Artificial Sequence
  Description of Artificial Sequence: Synthetic oligonucleotide
  Antisense strand to SEQ ID NO: 108482
ugugcacaaacucauucug

SEQ ID NO: 108484 - RNA, 19 nt, Artificial Sequence
  Description of Artificial Sequence: Synthetic oligonucleotide
  Sense strand starting at position 3841 of SEQ ID NO: 1380
uucuguuaucuauggcuca

SEQ ID NO: 108485 - RNA, 19 nt, Artificial Sequence
  Description of Artificial Sequence: Synthetic oligonucleotide
  Antisense strand to SEQ ID NO: 108484
ugagccauagauaacagaa

SEQ ID NO: 108486 - RNA, 19 nt, Artificial Sequence
  Description of Artificial Sequence: Synthetic oligonucleotide
  Sense strand starting at position 3791 of SEQ ID NO: 1380
ggacuuugaugucuuaggu

SEQ ID NO: 108487 - RNA, 19 nt, Artificial Sequence
  Description of Artificial Sequence: Synthetic oligonucleotide
  Antisense strand to SEQ ID NO: 108486
accuaagacaucaaagucc

SEQ ID NO: 108488 - RNA, 19 nt, Artificial Sequence
  Description of Artificial Sequence: Synthetic oligonucleotide
  Sense strand starting at position 3754 of SEQ ID NO: 1380
gagaaugauuaugccaagu

SEQ ID NO: 108489 - RNA, 19 nt, Artificial Sequence
  Description of Artificial Sequence: Synthetic oligonucleotide
  Antisense strand to SEQ ID NO: 108488
acuuggcauaaucauucuc

SEQ ID NO: 108490 - RNA, 19 nt, Artificial Sequence
  Description of Artificial Sequence: Synthetic oligonucleotide
  Sense strand starting at position 3733 of SEQ ID NO: 1380
ugugaagugccagguaagu

SEQ ID NO: 108491 - RNA, 19 nt, Artificial Sequence
  Description of Artificial Sequence: Synthetic oligonucleotide
  Antisense strand to SEQ ID NO: 108490
acuuaccuggcacuucaca

SEQ ID NO: 108492 - RNA, 19 nt, Artificial Sequence
  Description of Artificial Sequence: Synthetic oligonucleotide
  Sense strand starting at position 3721 of SEQ ID NO: 1380
ugagaucacacuugugaag

SEQ ID NO: 108493 - RNA, 19 nt, Artificial Sequence
  Description of Artificial Sequence: Synthetic oligonucleotide
  Antisense strand to SEQ ID NO: 108492
cuucacaagugugaucuca

SEQ ID NO: 108494 - RNA, 19 nt, Artificial Sequence
  Description of Artificial Sequence: Synthetic oligonucleotide
  Sense strand starting at position 3705 of SEQ ID NO: 1380
cggugaggauuagaaauga

SEQ ID NO: 108495 - RNA, 19 nt, Artificial Sequence
  Description of Artificial Sequence: Synthetic oligonucleotide
  Antisense strand to SEQ ID NO: 108494
ucauuucuaauccucaccg

SEQ ID NO: 108496 - RNA, 19 nt, Artificial Sequence
  Description of Artificial Sequence: Synthetic oligonucleotide
  Sense strand starting at position 3703 of SEQ ID NO: 1380
ugcggugaggauuagaaau

SEQ ID NO: 108497 - RNA, 19 nt, Artificial Sequence
  Description of Artificial Sequence: Synthetic oligonucleotide
  Antisense strand to SEQ ID NO: 108496
auuucuaauccucaccgca

SEQ ID NO: 108498 - RNA, 19 nt, Artificial Sequence
  Description of Artificial Sequence: Synthetic oligonucleotide
  Sense strand starting at position 3697 of SEQ ID NO: 1380
uauaguugcggugaggauu

SEQ ID NO: 108499 - RNA, 19 nt, Artificial Sequence
  Description of Artificial Sequence: Synthetic oligonucleotide
  Antisense strand to SEQ ID NO: 108498
aauccucaccgcaacuaua

SEQ ID NO: 108500 - RNA, 19 nt, Artificial Sequence
  Description of Artificial Sequence: Synthetic oligonucleotide
  Sense strand starting at position 3696 of SEQ ID NO: 1380
guauaguugcggugaggau

SEQ ID NO: 108501 - RNA, 19 nt, Artificial Sequence
  Description of Artificial Sequence: Synthetic oligonucleotide
  Antisense strand to SEQ ID NO: 108500
auccucaccgcaacuauac

SEQ ID NO: 108502 - RNA, 19 nt, Artificial Sequence
  Description of Artificial Sequence: Synthetic oligonucleotide
  Sense strand starting at position 3656 of SEQ ID NO: 1380
gagacuguuucuuucugua

SEQ ID NO: 108503 - RNA, 19 nt, Artificial Sequence
  Description of Artificial Sequence: Synthetic oligonucleotide
  Antisense strand to SEQ ID NO: 108502
uacagaaagaaacagucuc

SEQ ID NO: 108504 - RNA, 19 nt, Artificial Sequence
  Description of Artificial Sequence: Synthetic oligonucleotide
  Sense strand starting at position 3628 of SEQ ID NO: 1380
uacuauucgcaagauggga

SEQ ID NO: 108505 - RNA, 19 nt, Artificial Sequence
  Description of Artificial Sequence: Synthetic oligonucleotide
  Antisense strand to SEQ ID NO: 108504
ucccaucuugcgaauagua

SEQ ID NO: 108506 - RNA, 19 nt, Artificial Sequence
  Description of Artificial Sequence: Synthetic oligonucleotide
  Sense strand starting at position 3624 of SEQ ID NO: 1380
ugcuuacuauucgcaagau

SEQ ID NO: 108507 - RNA, 19 nt, Artificial Sequence
  Description of Artificial Sequence: Synthetic oligonucleotide
  Antisense strand to SEQ ID NO: 108506
aucuugcgaauaguaagca

SEQ ID NO: 108508 - RNA, 19 nt, Artificial Sequence
  Description of Artificial Sequence: Synthetic oligonucleotide
  Sense strand starting at position 3498 of SEQ ID NO: 1380
gccugaguuccacaguaaa

SEQ ID NO: 108509 - RNA, 19 nt, Artificial Sequence
  Description of Artificial Sequence: Synthetic oligonucleotide
  Antisense strand to SEQ ID NO: 108508
uuuacuguggaacucaggc

SEQ ID NO: 108510 - RNA, 19 nt, Artificial Sequence
  Description of Artificial Sequence: Synthetic oligonucleotide
  Sense strand starting at position 3361 of SEQ ID NO: 1380
ugaguauggucuuuaagga

SEQ ID NO: 108511 - RNA, 19 nt, Artificial Sequence
  Description of Artificial Sequence: Synthetic oligonucleotide
  Antisense strand to SEQ ID NO: 108510
uccuuaaagaccauacuca

SEQ ID NO: 108512 - RNA, 19 nt, Artificial Sequence
  Description of Artificial Sequence: Synthetic oligonucleotide
  Sense strand starting at position 3358 of SEQ ID NO: 1380
acuugaguauggucuuuaa

SEQ ID NO: 108513 - RNA, 19 nt, Artificial Sequence
  Description of Artificial Sequence: Synthetic oligonucleotide
  Antisense strand to SEQ ID NO: 108512
uuaaagaccauacucaagu

SEQ ID NO: 108514 - RNA, 19 nt, Artificial Sequence
  Description of Artificial Sequence: Synthetic oligonucleotide
  Sense strand starting at position 3315 of SEQ ID NO: 1380
aguauaauccuguaauucu

SEQ ID NO: 108515 - RNA, 19 nt, Artificial Sequence
  Description of Artificial Sequence: Synthetic oligonucleotide
  Antisense strand to SEQ ID NO: 108514
agaauuacaggauuauacu

SEQ ID NO: 108516 - RNA, 19 nt, Artificial Sequence
  Description of Artificial Sequence: Synthetic oligonucleotide
  Sense strand starting at position 3310 of SEQ ID NO: 1380
uugagaguauaauccugua

SEQ ID NO: 108517 - RNA, 19 nt, Artificial Sequence
  Description of Artificial Sequence: Synthetic oligonucleotide
  Antisense strand to SEQ ID NO: 108516
uacaggauuauacucucaa

SEQ ID NO: 108518 - RNA, 19 nt, Artificial Sequence
  Description of Artificial Sequence: Synthetic oligonucleotide
  Sense strand starting at position 2794 of SEQ ID NO: 1380
aggaaacuccaagguagua

SEQ ID NO: 108519 - RNA, 19 nt, Artificial Sequence
  Description of Artificial Sequence: Synthetic oligonucleotide
  Antisense strand to SEQ ID NO: 108518
uacuaccuuggaguuuccu

SEQ ID NO: 108520 - RNA, 19 nt, Artificial Sequence
  Description of Artificial Sequence: Synthetic oligonucleotide
  Sense strand starting at position 2713 of SEQ ID NO: 1380
cgcucagugccugugagau

SEQ ID NO: 108521 - RNA, 19 nt, Artificial Sequence
  Description of Artificial Sequence: Synthetic oligonucleotide
  Antisense strand to SEQ ID NO: 108520
aucucacaggcacugagcg

SEQ ID NO: 108522 - RNA, 19 nt, Artificial Sequence
  Description of Artificial Sequence: Synthetic oligonucleotide
  Sense strand starting at position 2678 of SEQ ID NO: 1380
ccagaaagugauugcaucu

SEQ ID NO: 108523 - RNA, 19 nt, Artificial Sequence
  Description of Artificial Sequence: Synthetic oligonucleotide
  Antisense strand to SEQ ID NO: 108522
agaugcaaucacuuucugg

SEQ ID NO: 108524 - RNA, 19 nt, Artificial Sequence
  Description of Artificial Sequence: Synthetic oligonucleotide
  Sense strand starting at position 2677 of SEQ ID NO: 1380
uccagaaagugauugcauc

SEQ ID NO: 108525 - RNA, 19 nt, Artificial Sequence
  Description of Artificial Sequence: Synthetic oligonucleotide
  Antisense strand to SEQ ID NO: 108524
gaugcaaucacuuucugga

SEQ ID NO: 108526 - RNA, 19 nt, Artificial Sequence
  Description of Artificial Sequence: Synthetic oligonucleotide
  Sense strand starting at position 2646 of SEQ ID NO: 1380
gcugguuucccgguucuau

SEQ ID NO: 108527 - RNA, 19 nt, Artificial Sequence
  Description of Artificial Sequence: Synthetic oligonucleotide
  Antisense strand to SEQ ID NO: 108526
auagaaccgggaaaccagc

SEQ ID NO: 108528 - RNA, 19 nt, Artificial Sequence
  Description of Artificial Sequence: Synthetic oligonucleotide
  Sense strand starting at position 2608 of SEQ ID NO: 1380
agucuuauagcagguuagu

SEQ ID NO: 108529 - RNA, 19 nt, Artificial Sequence
  Description of Artificial Sequence: Synthetic oligonucleotide
  Antisense strand to SEQ ID NO: 108528
acuaaccugcuauaagacu

SEQ ID NO: 108530 - RNA, 19 nt, Artificial Sequence
  Description of Artificial Sequence: Synthetic oligonucleotide
  Sense strand starting at position 2550 of SEQ ID NO: 1380
gggaucucuucucucagaa

SEQ ID NO: 108531 - RNA, 19 nt, Artificial Sequence
  Description of Artificial Sequence: Synthetic oligonucleotide
  Antisense strand to SEQ ID NO: 108530
uucugagagaagagauccc

SEQ ID NO: 108532 - RNA, 19 nt, Artificial Sequence
  Description of Artificial Sequence: Synthetic oligonucleotide
  Sense strand starting at position 2358 of SEQ ID NO: 1380
aacguuagaccgggaggaa

SEQ ID NO: 108533 - RNA, 19 nt, Artificial Sequence
  Description of Artificial Sequence: Synthetic oligonucleotide
  Antisense strand to SEQ ID NO: 108532
uuccucccggucuaacguu

SEQ ID NO: 108534 - RNA, 19 nt, Artificial Sequence
  Description of Artificial Sequence: Synthetic oligonucleotide
  Sense strand starting at position 2306 of SEQ ID NO: 1380
gcuaaucugauugaagguu

SEQ ID NO: 108535 - RNA, 19 nt, Artificial Sequence
  Description of Artificial Sequence: Synthetic oligonucleotide
  Antisense strand to SEQ ID NO: 108534
aaccuucaaucagauuagc

SEQ ID NO: 108536 - RNA, 19 nt, Artificial Sequence
  Description of Artificial Sequence: Synthetic oligonucleotide
  Sense strand starting at position 2305 of SEQ ID NO: 1380
cgcuaaucugauugaaggu

SEQ ID NO: 108537 - RNA, 19 nt, Artificial Sequence
  Description of Artificial Sequence: Synthetic oligonucleotide
  Antisense strand to SEQ ID NO: 108536
accuucaaucagauuagcg

SEQ ID NO: 108538 - RNA, 19 nt, Artificial Sequence
  Description of Artificial Sequence: Synthetic oligonucleotide
  Sense strand starting at position 2304 of SEQ ID NO: 1380
gcgcuaaucugauugaagg

SEQ ID NO: 108539 - RNA, 19 nt, Artificial Sequence
  Description of Artificial Sequence: Synthetic oligonucleotide
  Antisense strand to SEQ ID NO: 108538
ccuucaaucagauuagcgc

SEQ ID NO: 108540 - RNA, 19 nt, Artificial Sequence
  Description of Artificial Sequence: Synthetic oligonucleotide
  Sense strand starting at position 2279 of SEQ ID NO: 1380
ugaguagggucuuuaaagg

SEQ ID NO: 108541 - RNA, 19 nt, Artificial Sequence
  Description of Artificial Sequence: Synthetic oligonucleotide
  Antisense strand to SEQ ID NO: 108540
ccuuuaaagacccuacuca

SEQ ID NO: 108542 - RNA, 19 nt, Artificial Sequence
  Description of Artificial Sequence: Synthetic oligonucleotide
  Sense strand starting at position 1459 of SEQ ID NO: 1380
cgcugaaucgcagaucuuc

SEQ ID NO: 108543 - RNA, 19 nt, Artificial Sequence
  Description of Artificial Sequence: Synthetic oligonucleotide
  Antisense strand to SEQ ID NO: 108542
gaagaucugcgauucagcg

SEQ ID NO: 108544 - RNA, 19 nt, Artificial Sequence
  Description of Artificial Sequence: Synthetic oligonucleotide
  Sense strand starting at position 1265 of SEQ ID NO: 1380
cugccuuggucucucuaau

SEQ ID NO: 108545 - RNA, 19 nt, Artificial Sequence
  Description of Artificial Sequence: Synthetic oligonucleotide
  Antisense strand to SEQ ID NO: 108544
auuagagagaccaaggcag

SEQ ID NO: 108546 - RNA, 19 nt, Artificial Sequence
  Description of Artificial Sequence: Synthetic oligonucleotide
  Sense strand starting at position 1115 of SEQ ID NO: 1380
ggacuugcccgagacuguu

SEQ ID NO: 108547 - RNA, 19 nt, Artificial Sequence
  Description of Artificial Sequence: Synthetic oligonucleotide
  Antisense strand to SEQ ID NO: 108546
aacagucucgggcaagucc

SEQ ID NO: 108548 - RNA, 19 nt, Artificial Sequence
  Description of Artificial Sequence: Synthetic oligonucleotide
  Sense strand starting at position 1112 of SEQ ID NO: 1380
uguggacuugcccgagacu

SEQ ID NO: 108549 - RNA, 19 nt, Artificial Sequence
  Description of Artificial Sequence: Synthetic oligonucleotide
  Antisense strand to SEQ ID NO: 108548
agucucgggcaaguccaca

SEQ ID NO: 108550 - RNA, 19 nt, Artificial Sequence
  Description of Artificial Sequence: Synthetic oligonucleotide
  Sense strand starting at position 1050 of SEQ ID NO: 1380
uuuaaucugucagagaaau

SEQ ID NO: 108551 - RNA, 19 nt, Artificial Sequence
  Description of Artificial Sequence: Synthetic oligonucleotide
  Antisense strand to SEQ ID NO: 108550
auuucucugacagauuaaa

SEQ ID NO: 108552 - RNA, 19 nt, Artificial Sequence
  Description of Artificial Sequence: Synthetic oligonucleotide
  Sense strand starting at position 1048 of SEQ ID NO: 1380
gauuuaaucugucagagaa

SEQ ID NO: 108553 - RNA, 19 nt, Artificial Sequence
  Description of Artificial Sequence: Synthetic oligonucleotide
  Antisense strand to SEQ ID NO: 108552
uucucugacagauuaaauc

SEQ ID NO: 108554 - RNA, 19 nt, Artificial Sequence
  Description of Artificial Sequence: Synthetic oligonucleotide
  Sense strand starting at position 1033 of SEQ ID NO: 1380
cuuuaugaguuaucugauu

SEQ ID NO: 108555 - RNA, 19 nt, Artificial Sequence
  Description of Artificial Sequence: Synthetic oligonucleotide
  Antisense strand to SEQ ID NO: 108554
aaucagauaacucauaaag

SEQ ID NO: 108556 - RNA, 19 nt, Artificial Sequence
  Description of Artificial Sequence: Synthetic oligonucleotide
  Sense strand starting at position 734 of SEQ ID NO: 1380
uuggcuucugcuuauaacu

SEQ ID NO: 108557 - RNA, 19 nt, Artificial Sequence
  Description of Artificial Sequence: Synthetic oligonucleotide
  Antisense strand to SEQ ID NO: 108556
aguuauaagcagaagccaa

SEQ ID NO: 108558 - RNA, 19 nt, Artificial Sequence
  Description of Artificial Sequence: Synthetic oligonucleotide
  Sense strand starting at position 525 of SEQ ID NO: 1380
ucaggauuccaggguauua

SEQ ID NO: 108559 - RNA, 19 nt, Artificial Sequence
  Description of Artificial Sequence: Synthetic oligonucleotide
  Antisense strand to SEQ ID NO: 108558
uaauacccuggaauccuga

SEQ ID NO: 108560 - RNA, 19 nt, Artificial Sequence
  Description of Artificial Sequence: Synthetic oligonucleotide
  Sense strand starting at position 3946 of SEQ ID NO: 1381
uuauauaguuaagugagga

SEQ ID NO: 108561 - RNA, 19 nt, Artificial Sequence
  Description of Artificial Sequence: Synthetic oligonucleotide
  Antisense strand to SEQ ID NO: 108560
uccucacuuaacuauauaa

SEQ ID NO: 108562 - RNA, 19 nt, Artificial Sequence
  Description of Artificial Sequence: Synthetic oligonucleotide
  Sense strand starting at position 3906 of SEQ ID NO: 1381
gaaugagguuauguuuaua

SEQ ID NO: 108563 - RNA, 19 nt, Artificial Sequence
  Description of Artificial Sequence: Synthetic oligonucleotide
  Antisense strand to SEQ ID NO: 108562
uauaaacauaaccucauuc

SEQ ID NO: 108564 - RNA, 19 nt, Artificial Sequence
  Description of Artificial Sequence: Synthetic oligonucleotide
  Sense strand starting at position 3882 of SEQ ID NO: 1381
acauuugucccuuguaguu

SEQ ID NO: 108565 - RNA, 19 nt, Artificial Sequence
  Description of Artificial Sequence: Synthetic oligonucleotide
  Antisense strand to SEQ ID NO: 108564
aacuacaagggacaaaugu

SEQ ID NO: 108566 - RNA, 19 nt, Artificial Sequence
  Description of Artificial Sequence: Synthetic oligonucleotide
  Sense strand starting at position 3880 of SEQ ID NO: 1381
guacauuugucccuuguag

SEQ ID NO: 108567 - RNA, 19 nt, Artificial Sequence
  Description of Artificial Sequence: Synthetic oligonucleotide
  Antisense strand to SEQ ID NO: 108566
cuacaagggacaaauguac

SEQ ID NO: 108568 - RNA, 19 nt, Artificial Sequence
  Description of Artificial Sequence: Synthetic oligonucleotide
  Sense strand starting at position 3794 of SEQ ID NO: 1381
agauuauguguagaaguau

SEQ ID NO: 108569 - RNA, 19 nt, Artificial Sequence
  Description of Artificial Sequence: Synthetic oligonucleotide
  Antisense strand to SEQ ID NO: 108568
auacuucuacacauaaucu

SEQ ID NO: 108570 - RNA, 19 nt, Artificial Sequence
  Description of Artificial Sequence: Synthetic oligonucleotide
  Sense strand starting at position 3792 of SEQ ID NO: 1381
cuagauuauguguagaagu

SEQ ID NO: 108571 - RNA, 19 nt, Artificial Sequence
  Description of Artificial Sequence: Synthetic oligonucleotide
  Antisense strand to SEQ ID NO: 108570
acuucuacacauaaucuag

SEQ ID NO: 108572 - RNA, 19 nt, Artificial Sequence
  Description of Artificial Sequence: Synthetic oligonucleotide
  Sense strand starting at position 3783 of SEQ ID NO: 1381
gcaaauaggcuagauuaug

SEQ ID NO: 108573 - RNA, 19 nt, Artificial Sequence
  Description of Artificial Sequence: Synthetic oligonucleotide
  Antisense strand to SEQ ID NO: 108572
cauaaucuagccuauuugc

SEQ ID NO: 108574 - RNA, 19 nt, Artificial Sequence
  Description of Artificial Sequence: Synthetic oligonucleotide
  Sense strand starting at position 3781 of SEQ ID NO: 1381
augcaaauaggcuagauua

SEQ ID NO: 108575 - RNA, 19 nt, Artificial Sequence
  Description of Artificial Sequence: Synthetic oligonucleotide
  Antisense strand to SEQ ID NO: 108574
uaaucuagccuauuugcau

SEQ ID NO: 108576 - RNA, 19 nt, Artificial Sequence
  Description of Artificial Sequence: Synthetic oligonucleotide
  Sense strand starting at position 3764 of SEQ ID NO: 1381
agccuagggcaguaauaau

SEQ ID NO: 108577 - RNA, 19 nt, Artificial Sequence
  Description of Artificial Sequence: Synthetic oligonucleotide
  Antisense strand to SEQ ID NO: 108576
auuauuacugcccuaggcu

SEQ ID NO: 108578 - RNA, 19 nt, Artificial Sequence
  Description of Artificial Sequence: Synthetic oligonucleotide
  Sense strand starting at position 3646 of SEQ ID NO: 1381
ugggcaccuccauaaacuu

SEQ ID NO: 108579 - RNA, 19 nt, Artificial Sequence
  Description of Artificial Sequence: Synthetic oligonucleotide
  Antisense strand to SEQ ID NO: 108578
aaguuuauggaggugccca

SEQ ID NO: 108580 - RNA, 19 nt, Artificial Sequence
  Description of Artificial Sequence: Synthetic oligonucleotide
  Sense strand starting at position 3297 of SEQ ID NO: 1381
accuguauaggugaaaugu

SEQ ID NO: 108581 - RNA, 19 nt, Artificial Sequence
  Description of Artificial Sequence: Synthetic oligonucleotide
  Antisense strand to SEQ ID NO: 108580
acauuucaccuauacaggu

SEQ ID NO: 108582 - RNA, 19 nt, Artificial Sequence
  Description of Artificial Sequence: Synthetic oligonucleotide
  Sense strand starting at position 3295 of SEQ ID NO: 1381
agaccuguauaggugaaau

SEQ ID NO: 108583 - RNA, 19 nt, Artificial Sequence
  Description of Artificial Sequence: Synthetic oligonucleotide
  Antisense strand to SEQ ID NO: 108582
auuucaccuauacaggucu

SEQ ID NO: 108584 - RNA, 19 nt, Artificial Sequence
  Description of Artificial Sequence: Synthetic oligonucleotide
  Sense strand starting at position 3294 of SEQ ID NO: 1381
gagaccuguauaggugaaa

SEQ ID NO: 108585 - RNA, 19 nt, Artificial Sequence
  Description of Artificial Sequence: Synthetic oligonucleotide
  Antisense strand to SEQ ID NO: 108584
uuucaccuauacaggucuc

SEQ ID NO: 108586 - RNA, 19 nt, Artificial Sequence
  Description of Artificial Sequence: Synthetic oligonucleotide
  Sense strand starting at position 3290 of SEQ ID NO: 1381
uucugagaccuguauaggu

SEQ ID NO: 108587 - RNA, 19 nt, Artificial Sequence
  Description of Artificial Sequence: Synthetic oligonucleotide
  Antisense strand to SEQ ID NO: 108586
accuauacaggucucagaa

SEQ ID NO: 108588 - RNA, 19 nt, Artificial Sequence
  Description of Artificial Sequence: Synthetic oligonucleotide
  Sense strand starting at position 3282 of SEQ ID NO: 1381
uuaagaauuucugagaccu

SEQ ID NO: 108589 - RNA, 19 nt, Artificial Sequence
  Description of Artificial Sequence: Synthetic oligonucleotide
  Antisense strand to SEQ ID NO: 108588
aggucucagaaauucuuaa

SEQ ID NO: 108590 - RNA, 19 nt, Artificial Sequence
  Description of Artificial Sequence: Synthetic oligonucleotide
  Sense strand starting at position 3264 of SEQ ID NO: 1381
cuugaaagauggguaccau

SEQ ID NO: 108591 - RNA, 19 nt, Artificial Sequence
  Description of Artificial Sequence: Synthetic oligonucleotide
  Antisense strand to SEQ ID NO: 108590
augguacccaucuuucaag

SEQ ID NO: 108592 - RNA, 19 nt, Artificial Sequence
  Description of Artificial Sequence: Synthetic oligonucleotide
  Sense strand starting at position 3263 of SEQ ID NO: 1381
ccuugaaagauggguacca

SEQ ID NO: 108593 - RNA, 19 nt, Artificial Sequence
  Description of Artificial Sequence: Synthetic oligonucleotide
  Antisense strand to SEQ ID NO: 108592
ugguacccaucuuucaagg

SEQ ID NO: 108594 - RNA, 19 nt, Artificial Sequence
  Description of Artificial Sequence: Synthetic oligonucleotide
  Sense strand starting at position 3081 of SEQ ID NO: 1381
ugucucuaagucuguauuu

SEQ ID NO: 108595 - RNA, 19 nt, Artificial Sequence
  Description of Artificial Sequence: Synthetic oligonucleotide
  Antisense strand to SEQ ID NO: 108594
aaauacagacuuagagaca

SEQ ID NO: 108596 - RNA, 19 nt, Artificial Sequence
  Description of Artificial Sequence: Synthetic oligonucleotide
  Sense strand starting at position 3075 of SEQ ID NO: 1381
acuuaaugucucuaagucu

SEQ ID NO: 108597 - RNA, 19 nt, Artificial Sequence
  Description of Artificial Sequence: Synthetic oligonucleotide
  Antisense strand to SEQ ID NO: 108596
agacuuagagacauuaagu

SEQ ID NO: 108598 - RNA, 19 nt, Artificial Sequence
  Description of Artificial Sequence: Synthetic oligonucleotide
  Sense strand starting at position 3064 of SEQ ID NO: 1381
uuggaugacuuacuuaaug

SEQ ID NO: 108599 - RNA, 19 nt, Artificial Sequence
  Description of Artificial Sequence: Synthetic oligonucleotide
  Antisense strand to SEQ ID NO: 108598
cauuaaguaagucauccaa

SEQ ID NO: 108600 - RNA, 19 nt, Artificial Sequence
  Description of Artificial Sequence: Synthetic oligonucleotide
  Sense strand starting at position 3057 of SEQ ID NO: 1381
cugugacuuggaugacuua

SEQ ID NO: 108601 - RNA, 19 nt, Artificial Sequence
  Description of Artificial Sequence: Synthetic oligonucleotide
  Antisense strand to SEQ ID NO: 108600
uaagucauccaagucacag

SEQ ID NO: 108602 - RNA, 19 nt, Artificial Sequence
  Description of Artificial Sequence: Synthetic oligonucleotide
  Sense strand starting at position 2993 of SEQ ID NO: 1381
uuaggaacuuggucuuuga

SEQ ID NO: 108603 - RNA, 19 nt, Artificial Sequence
  Description of Artificial Sequence: Synthetic oligonucleotide
  Antisense strand to SEQ ID NO: 108602
ucaaagaccaaguuccuaa

SEQ ID NO: 108604 - RNA, 19 nt, Artificial Sequence
  Description of Artificial Sequence: Synthetic oligonucleotide
  Sense strand starting at position 2981 of SEQ ID NO: 1381
guaacaaagugguuaggaa

SEQ ID NO: 108605 - RNA, 19 nt, Artificial Sequence
  Description of Artificial Sequence: Synthetic oligonucleotide
  Antisense strand to SEQ ID NO: 108604
uuccuaaccacuuuguuac

SEQ ID NO: 108606 - RNA, 19 nt, Artificial Sequence
  Description of Artificial Sequence: Synthetic oligonucleotide
  Sense strand starting at position 2970 of SEQ ID NO: 1381
ugagaugcagcguaacaaa

SEQ ID NO: 108607 - RNA, 19 nt, Artificial Sequence
  Description of Artificial Sequence: Synthetic oligonucleotide
  Antisense strand to SEQ ID NO: 108606
uuuguuacgcugcaucuca

SEQ ID NO: 108608 - RNA, 19 nt, Artificial Sequence
  Description of Artificial Sequence: Synthetic oligonucleotide
  Sense strand starting at position 2921 of SEQ ID NO: 1381
gaaguaaggucuccgaaga

SEQ ID NO: 108609 - RNA, 19 nt, Artificial Sequence
  Description of Artificial Sequence: Synthetic oligonucleotide
  Antisense strand to SEQ ID NO: 108608
ucuucggagaccuuacuuc

SEQ ID NO: 108610 - RNA, 19 nt, Artificial Sequence
  Description of Artificial Sequence: Synthetic oligonucleotide
  Sense strand starting at position 2891 of SEQ ID NO: 1381
gccucagaacguuagaaug

SEQ ID NO: 108611 - RNA, 19 nt, Artificial Sequence
  Description of Artificial Sequence: Synthetic oligonucleotide
  Antisense strand to SEQ ID NO: 108610
cauucuaacguucugaggc

SEQ ID NO: 108612 - RNA, 19 nt, Artificial Sequence
  Description of Artificial Sequence: Synthetic oligonucleotide
  Sense strand starting at position 2686 of SEQ ID NO: 1381
uugauagaguugccagaua

SEQ ID NO: 108613 - RNA, 19 nt, Artificial Sequence
  Description of Artificial Sequence: Synthetic oligonucleotide
  Antisense strand to SEQ ID NO: 108612
uaucuggcaacucuaucaa

SEQ ID NO: 108614 - RNA, 19 nt, Artificial Sequence
  Description of Artificial Sequence: Synthetic oligonucleotide
  Sense strand starting at position 2684 of SEQ ID NO: 1381
acuugauagaguugccaga

SEQ ID NO: 108615 - RNA, 19 nt, Artificial Sequence
  Description of Artificial Sequence: Synthetic oligonucleotide
  Antisense strand to SEQ ID NO: 108614
ucuggcaacucuaucaagu

SEQ ID NO: 108616 - RNA, 19 nt, Artificial Sequence
  Description of Artificial Sequence: Synthetic oligonucleotide
  Sense strand starting at position 2645 of SEQ ID NO: 1381
gaaauaguacuugaggcuu

SEQ ID NO: 108617 - RNA, 19 nt, Artificial Sequence
  Description of Artificial Sequence: Synthetic oligonucleotide
  Antisense strand to SEQ ID NO: 108616
aagccucaaguacuauuuc

SEQ ID NO: 108618 - RNA, 19 nt, Artificial Sequence
  Description of Artificial Sequence: Synthetic oligonucleotide
  Sense strand starting at position 2644 of SEQ ID NO: 1381
ggaaauaguacuugaggcu

SEQ ID NO: 108619 - RNA, 19 nt, Artificial Sequence
  Description of Artificial Sequence: Synthetic oligonucleotide
  Antisense strand to SEQ ID NO: 108618
agccucaaguacuauuucc

SEQ ID NO: 108620 - RNA, 19 nt, Artificial Sequence
  Description of Artificial Sequence: Synthetic oligonucleotide
  Sense strand starting at position 2327 of SEQ ID NO: 1381
guccuugggcuucgauuua

SEQ ID NO: 108621 - RNA, 19 nt, Artificial Sequence
  Description of Artificial Sequence: Synthetic oligonucleotide
  Antisense strand to SEQ ID NO: 108620
uaaaucgaagcccaaggac

SEQ ID NO: 108622 - RNA, 19 nt, Artificial Sequence
  Description of Artificial Sequence: Synthetic oligonucleotide
  Sense strand starting at position 2137 of SEQ ID NO: 1381
gucaaagguaguggagaau

SEQ ID NO: 108623 - RNA, 19 nt, Artificial Sequence
  Description of Artificial Sequence: Synthetic oligonucleotide
  Antisense strand to SEQ ID NO: 108622
auucuccacuaccuuugac

SEQ ID NO: 108624 - RNA, 19 nt, Artificial Sequence
  Description of Artificial Sequence: Synthetic oligonucleotide
  Sense strand starting at position 2072 of SEQ ID NO: 1381
ggauuaagacaucggaguc

SEQ ID NO: 108625 - RNA, 19 nt, Artificial Sequence
  Description of Artificial Sequence: Synthetic oligonucleotide
  Antisense strand to SEQ ID NO: 108624
gacuccgaugucuuaaucc

SEQ ID NO: 108626 - RNA, 19 nt, Artificial Sequence
  Description of Artificial Sequence: Synthetic oligonucleotide
  Sense strand starting at position 1341 of SEQ ID NO: 1381
acagacuuaggauguaauc

SEQ ID NO: 108627 - RNA, 19 nt, Artificial Sequence
  Description of Artificial Sequence: Synthetic oligonucleotide
  Antisense strand to SEQ ID NO: 108626
gauuacauccuaagucugu

SEQ ID NO: 108628 - RNA, 19 nt, Artificial Sequence
  Description of Artificial Sequence: Synthetic oligonucleotide
  Sense strand starting at position 1254 of SEQ ID NO: 1381
aguuaagaguacccauauc

SEQ ID NO: 108629 - RNA, 19 nt, Artificial Sequence
  Description of Artificial Sequence: Synthetic oligonucleotide
  Antisense strand to SEQ ID NO: 108628
gauauggguacucuuaacu

SEQ ID NO: 108630 - RNA, 19 nt, Artificial Sequence
  Description of Artificial Sequence: Synthetic oligonucleotide
  Sense strand starting at position 826 of SEQ ID NO: 1381
aaagguguuugaccuuaga

SEQ ID NO: 108631 - RNA, 19 nt, Artificial Sequence
  Description of Artificial Sequence: Synthetic oligonucleotide
  Antisense strand to SEQ ID NO: 108630
ucuaaggucaaacaccuuu

SEQ ID NO: 108632 - RNA, 19 nt, Artificial Sequence
  Description of Artificial Sequence: Synthetic oligonucleotide
  Sense strand starting at position 823 of SEQ ID NO: 1381
aggaaagguguuugaccuu

SEQ ID NO: 108633 - RNA, 19 nt, Artificial Sequence
  Description of Artificial Sequence: Synthetic oligonucleotide
  Antisense strand to SEQ ID NO: 108632
aaggucaaacaccuuuccu

SEQ ID NO: 108634 - RNA, 19 nt, Artificial Sequence
  Description of Artificial Sequence: Synthetic oligonucleotide
  Sense strand starting at position 613 of SEQ ID NO: 1381
ugucauuaaccugaaguau

SEQ ID NO: 108635 - RNA, 19 nt, Artificial Sequence
  Description of Artificial Sequence: Synthetic oligonucleotide
  Antisense strand to SEQ ID NO: 108634
auacuucagguuaaugaca

SEQ ID NO: 108636 - RNA, 19 nt, Artificial Sequence
  Description of Artificial Sequence: Synthetic oligonucleotide
  Sense strand starting at position 545 of SEQ ID NO: 1381
gcacaaaccugaucggaag

SEQ ID NO: 108637 - RNA, 19 nt, Artificial Sequence
  Description of Artificial Sequence: Synthetic oligonucleotide
  Antisense strand to SEQ ID NO: 108636
cuuccgaucagguuugugc

SEQ ID NO: 108638 - RNA, 19 nt, Artificial Sequence
  Description of Artificial Sequence: Synthetic oligonucleotide
  Sense strand starting at position 139 of SEQ ID NO: 1381
ugggaaaguuacucaacuu

SEQ ID NO: 108639 - RNA, 19 nt, Artificial Sequence
  Description of Artificial Sequence: Synthetic oligonucleotide
  Antisense strand to SEQ ID NO: 108638
aaguugaguaacuuuccca

SEQ ID NO: 108640 - RNA, 19 nt, Artificial Sequence
  Description of Artificial Sequence: Synthetic oligonucleotide
  Sense strand starting at position 522 of SEQ ID NO: 1382
aaauaugugguauguccau

SEQ ID NO: 108641 - RNA, 19 nt, Artificial Sequence
  Description of Artificial Sequence: Synthetic oligonucleotide
  Antisense strand to SEQ ID NO: 108640
auggacauaccacauauuu

SEQ ID NO: 108642 - RNA, 19 nt, Artificial Sequence
  Description of Artificial Sequence: Synthetic oligonucleotide
  Sense strand starting at position 535 of SEQ ID NO: 1382
guccauacaguggauuauu

SEQ ID NO: 108643 - RNA, 19 nt, Artificial Sequence
  Description of Artificial Sequence: Synthetic oligonucleotide
  Antisense strand to SEQ ID NO: 108642
aauaauccacuguauggac

SEQ ID NO: 108644 - RNA, 19 nt, Artificial Sequence
  Description of Artificial Sequence: Synthetic oligonucleotide
  Sense strand starting at position 573 of SEQ ID NO: 1382
aguacucaugcaugcuaaa

SEQ ID NO: 108645 - RNA, 19 nt, Artificial Sequence
  Description of Artificial Sequence: Synthetic oligonucleotide
  Antisense strand to SEQ ID NO: 108644
uuuagcaugcaugaguacu

SEQ ID NO: 108646 - RNA, 19 nt, Artificial Sequence
  Description of Artificial Sequence: Synthetic oligonucleotide
  Sense strand starting at position 792 of SEQ ID NO: 1382
ggaugacucacuugagguc

SEQ ID NO: 108647 - RNA, 19 nt, Artificial Sequence
  Description of Artificial Sequence: Synthetic oligonucleotide
  Antisense strand to SEQ ID NO: 108646
gaccucaagugagucaucc

SEQ ID NO: 108648 - RNA, 19 nt, Artificial Sequence
  Description of Artificial Sequence: Synthetic oligonucleotide
  Sense strand starting at position 884 of SEQ ID NO: 1382
aguggugcguaucuauaau

SEQ ID NO: 108649 - RNA, 19 nt, Artificial Sequence
  Description of Artificial Sequence: Synthetic oligonucleotide
  Antisense strand to SEQ ID NO: 108648
auuauagauacgcaccacu

SEQ ID NO: 108650 - RNA, 19 nt, Artificial Sequence
  Description of Artificial Sequence: Synthetic oligonucleotide
  Sense strand starting at position 1115 of SEQ ID NO: 1382
agggaucuuucuccucuuu

SEQ ID NO: 108651 - RNA, 19 nt, Artificial Sequence
  Description of Artificial Sequence: Synthetic oligonucleotide
  Antisense strand to SEQ ID NO: 108650
aaagaggagaaagaucccu

SEQ ID NO: 108652 - RNA, 19 nt, Artificial Sequence
  Description of Artificial Sequence: Synthetic oligonucleotide
  Sense strand starting at position 1134 of SEQ ID NO: 1382
cucuuugcacuccagagaa

SEQ ID NO: 108653 - RNA, 19 nt, Artificial Sequence
  Description of Artificial Sequence: Synthetic oligonucleotide
  Antisense strand to SEQ ID NO: 108652
uucucuggagugcaaagag

SEQ ID NO: 108654 - RNA, 19 nt, Artificial Sequence
  Description of Artificial Sequence: Synthetic oligonucleotide
  Sense strand starting at position 1147 of SEQ ID NO: 1382
agagaagcgauguaguacu

SEQ ID NO: 108655 - RNA, 19 nt, Artificial Sequence
  Description of Artificial Sequence: Synthetic oligonucleotide
  Antisense strand to SEQ ID NO: 108654
aguacuacaucgcuucucu

SEQ ID NO: 108656 - RNA, 19 nt, Artificial Sequence
  Description of Artificial Sequence: Synthetic oligonucleotide
  Sense strand starting at position 1163 of SEQ ID NO: 1382
acuguuaauuccguaacuu

SEQ ID NO: 108657 - RNA, 19 nt, Artificial Sequence
  Description of Artificial Sequence: Synthetic oligonucleotide
  Antisense strand to SEQ ID NO: 108656
aaguuacggaauuaacagu

SEQ ID NO: 108658 - RNA, 19 nt, Artificial Sequence
  Description of Artificial Sequence: Synthetic oligonucleotide
  Sense strand starting at position 1164 of SEQ ID NO: 1382
cuguuaauuccguaacuuu

SEQ ID NO: 108659 - RNA, 19 nt, Artificial Sequence
  Description of Artificial Sequence: Synthetic oligonucleotide
  Antisense strand to SEQ ID NO: 108658
aaaguuacggaauuaacag

SEQ ID NO: 108660 - RNA, 19 nt, Artificial Sequence
  Description of Artificial Sequence: Synthetic oligonucleotide
  Sense strand starting at position 1861 of SEQ ID NO: 1382
cgaggcuucgucuggacaa

SEQ ID NO: 108661 - RNA, 19 nt, Artificial Sequence
  Description of Artificial Sequence: Synthetic oligonucleotide
  Antisense strand to SEQ ID NO: 108660
uuguccagacgaagccucg

SEQ ID NO: 108662 - RNA, 19 nt, Artificial Sequence
  Description of Artificial Sequence: Synthetic oligonucleotide
  Sense strand starting at position 2094 of SEQ ID NO: 1382
acagaaugcugggagucaa

SEQ ID NO: 108663 - RNA, 19 nt, Artificial Sequence
  Description of Artificial Sequence: Synthetic oligonucleotide
  Antisense strand to SEQ ID NO: 108662
uugacucccagcauucugu

SEQ ID NO: 108664 - RNA, 19 nt, Artificial Sequence
  Description of Artificial Sequence: Synthetic oligonucleotide
  Sense strand starting at position 2167 of SEQ ID NO: 1382
cgauaacagccacaguauu

SEQ ID NO: 108665 - RNA, 19 nt, Artificial Sequence
  Description of Artificial Sequence: Synthetic oligonucleotide
  Antisense strand to SEQ ID NO: 108664
aauacuguggcuguuaucg

SEQ ID NO: 108666 - RNA, 19 nt, Artificial Sequence
  Description of Artificial Sequence: Synthetic oligonucleotide
  Sense strand starting at position 2180 of SEQ ID NO: 1382
aguauugauugacuggaau

SEQ ID NO: 108667 - RNA, 19 nt, Artificial Sequence
  Description of Artificial Sequence: Synthetic oligonucleotide
  Antisense strand to SEQ ID NO: 108666
auuccagucaaucaauacu

SEQ ID NO: 108668 - RNA, 19 nt, Artificial Sequence
  Description of Artificial Sequence: Synthetic oligonucleotide
  Sense strand starting at position 2283 of SEQ ID NO: 1382
gguggucuucuccacaaua

SEQ ID NO: 108669 - RNA, 19 nt, Artificial Sequence
  Description of Artificial Sequence: Synthetic oligonucleotide
  Antisense strand to SEQ ID NO: 108668
uauuguggagaagaccacc

SEQ ID NO: 108670 - RNA, 19 nt, Artificial Sequence
  Description of Artificial Sequence: Synthetic oligonucleotide
  Sense strand starting at position 2296 of SEQ ID NO: 1382
acaauagguacgcaguaau

SEQ ID NO: 108671 - RNA, 19 nt, Artificial Sequence
  Description of Artificial Sequence: Synthetic oligonucleotide
  Antisense strand to SEQ ID NO: 108670
auuacugcguaccuauugu

SEQ ID NO: 108672 - RNA, 19 nt, Artificial Sequence
  Description of Artificial Sequence: Synthetic oligonucleotide
  Sense strand starting at position 2341 of SEQ ID NO: 1382
uagagaugccuuugguuuc

SEQ ID NO: 108673 - RNA, 19 nt, Artificial Sequence
  Description of Artificial Sequence: Synthetic oligonucleotide
  Antisense strand to SEQ ID NO: 108672
gaaaccaaaggcaucucua

SEQ ID NO: 108674 - RNA, 19 nt, Artificial Sequence
  Description of Artificial Sequence: Synthetic oligonucleotide
  Sense strand starting at position 2439 of SEQ ID NO: 1382
acaguaagauaaggaugaa

SEQ ID NO: 108675 - RNA, 19 nt, Artificial Sequence
  Description of Artificial Sequence: Synthetic oligonucleotide
  Antisense strand to SEQ ID NO: 108674
uucauccuuaucuuacugu

SEQ ID NO: 108676 - RNA, 19 nt, Artificial Sequence
  Description of Artificial Sequence: Synthetic oligonucleotide
  Sense strand starting at position 2474 of SEQ ID NO: 1382
ugauguugugaggauguaa

SEQ ID NO: 108677 - RNA, 19 nt, Artificial Sequence
  Description of Artificial Sequence: Synthetic oligonucleotide
  Antisense strand to SEQ ID NO: 108676
uuacauccucacaacauca

SEQ ID NO: 108678 - RNA, 19 nt, Artificial Sequence
  Description of Artificial Sequence: Synthetic oligonucleotide
  Sense strand starting at position 2485 of SEQ ID NO: 1382
ggauguaaauaauaugcua

SEQ ID NO: 108679 - RNA, 19 nt, Artificial Sequence
  Description of Artificial Sequence: Synthetic oligonucleotide
  Antisense strand to SEQ ID NO: 108678
uagcauauuauuuacaucc

SEQ ID NO: 108680 - RNA, 19 nt, Artificial Sequence
  Description of Artificial Sequence: Synthetic oligonucleotide
  Sense strand starting at position 2573 of SEQ ID NO: 1382
gaagucuucucagugcuuu

SEQ ID NO: 108681 - RNA, 19 nt, Artificial Sequence
  Description of Artificial Sequence: Synthetic oligonucleotide
  Antisense strand to SEQ ID NO: 108680
aaagcacugagaagacuuc

SEQ ID NO: 108682 - RNA, 19 nt, Artificial Sequence
  Description of Artificial Sequence: Synthetic oligonucleotide
  Sense strand starting at position 2589 of SEQ ID NO: 1382
uuuagaccucagugagauc

SEQ ID NO: 108683 - RNA, 19 nt, Artificial Sequence
  Description of Artificial Sequence: Synthetic oligonucleotide
  Antisense strand to SEQ ID NO: 108682
gaucucacugaggucuaaa

SEQ ID NO: 108684 - RNA, 19 nt, Artificial Sequence
  Description of Artificial Sequence: Synthetic oligonucleotide
  Sense strand starting at position 2600 of SEQ ID NO: 1382
gugagaucucuggaugcau

SEQ ID NO: 108685 - RNA, 19 nt, Artificial Sequence
  Description of Artificial Sequence: Synthetic oligonucleotide
  Antisense strand to SEQ ID NO: 108684
augcauccagagaucucac

SEQ ID NO: 108686 - RNA, 19 nt, Artificial Sequence
  Description of Artificial Sequence: Synthetic oligonucleotide
  Sense strand starting at position 2602 of SEQ ID NO: 1382
gagaucucuggaugcauau

SEQ ID NO: 108687 - RNA, 19 nt, Artificial Sequence
  Description of Artificial Sequence: Synthetic oligonucleotide
  Antisense strand to SEQ ID NO: 108686
auaugcauccagagaucuc

SEQ ID NO: 108688 - RNA, 19 nt, Artificial Sequence
  Description of Artificial Sequence: Synthetic oligonucleotide
  Sense strand starting at position 2710 of SEQ ID NO: 1382
aaugcauaggcuggugaga

SEQ ID NO: 108689 - RNA, 19 nt, Artificial Sequence
  Description of Artificial Sequence: Synthetic oligonucleotide
  Antisense strand to SEQ ID NO: 108688
ucucaccagccuaugcauu

SEQ ID NO: 108690 - RNA, 19 nt, Artificial Sequence
  Description of Artificial Sequence: Synthetic oligonucleotide
  Sense strand starting at position 2753 of SEQ ID NO: 1382
cugcaacguuugcuaacaa

SEQ ID NO: 108691 - RNA, 19 nt, Artificial Sequence
  Description of Artificial Sequence: Synthetic oligonucleotide
  Antisense strand to SEQ ID NO: 108690
uuguuagcaaacguugcag

SEQ ID NO: 108692 - RNA, 19 nt, Artificial Sequence
  Description of Artificial Sequence: Synthetic oligonucleotide
  Sense strand starting at position 2772 of SEQ ID NO: 1382
uggcuuccugaaugcuuua

SEQ ID NO: 108693 - RNA, 19 nt, Artificial Sequence
  Description of Artificial Sequence: Synthetic oligonucleotide
  Antisense strand to SEQ ID NO: 108692
uaaagcauucaggaagcca

SEQ ID NO: 108694 - RNA, 19 nt, Artificial Sequence
  Description of Artificial Sequence: Synthetic oligonucleotide
  Sense strand starting at position 2775 of SEQ ID NO: 1382
cuuccugaaugcuuuaaga

SEQ ID NO: 108695 - RNA, 19 nt, Artificial Sequence
  Description of Artificial Sequence: Synthetic oligonucleotide
  Antisense strand to SEQ ID NO: 108694
ucuuaaagcauucaggaag

SEQ ID NO: 108696 - RNA, 19 nt, Artificial Sequence
  Description of Artificial Sequence: Synthetic oligonucleotide
  Sense strand starting at position 2777 of SEQ ID NO: 1382
uccugaaugcuuuaagauu

SEQ ID NO: 108697 - RNA, 19 nt, Artificial Sequence
  Description of Artificial Sequence: Synthetic oligonucleotide
  Antisense strand to SEQ ID NO: 108696
aaucuuaaagcauucagga

SEQ ID NO: 108698 - RNA, 19 nt, Artificial Sequence
  Description of Artificial Sequence: Synthetic oligonucleotide
  Sense strand starting at position 2880 of SEQ ID NO: 1382
aagucucugccgugaagag

SEQ ID NO: 108699 - RNA, 19 nt, Artificial Sequence
  Description of Artificial Sequence: Synthetic oligonucleotide
  Antisense strand to SEQ ID NO: 108698
cucuucacggcagagacuu

SEQ ID NO: 108700 - RNA, 19 nt, Artificial Sequence
  Description of Artificial Sequence: Synthetic oligonucleotide
  Sense strand starting at position 2881 of SEQ ID NO: 1382
agucucugccgugaagaga

SEQ ID NO: 108701 - RNA, 19 nt, Artificial Sequence
  Description of Artificial Sequence: Synthetic oligonucleotide
  Antisense strand to SEQ ID NO: 108700
ucucuucacggcagagacu

SEQ ID NO: 108702 - RNA, 19 nt, Artificial Sequence
  Description of Artificial Sequence: Synthetic oligonucleotide
  Sense strand starting at position 2894 of SEQ ID NO: 1382
aagagaucuauccgguggu

SEQ ID NO: 108703 - RNA, 19 nt, Artificial Sequence
  Description of Artificial Sequence: Synthetic oligonucleotide
  Antisense strand to SEQ ID NO: 108702
accaccggauagaucucuu

SEQ ID NO: 108704 - RNA, 19 nt, Artificial Sequence
  Description of Artificial Sequence: Synthetic oligonucleotide
  Sense strand starting at position 2897 of SEQ ID NO: 1382
agaucuauccgguggugga

SEQ ID NO: 108705 - RNA, 19 nt, Artificial Sequence
  Description of Artificial Sequence: Synthetic oligonucleotide
  Antisense strand to SEQ ID NO: 108704
uccaccaccggauagaucu

SEQ ID NO: 108706 - RNA, 19 nt, Artificial Sequence
  Description of Artificial Sequence: Synthetic oligonucleotide
  Sense strand starting at position 3191 of SEQ ID NO: 1382
cagugauggcgccaucaca

SEQ ID NO: 108707 - RNA, 19 nt, Artificial Sequence
  Description of Artificial Sequence: Synthetic oligonucleotide
  Antisense strand to SEQ ID NO: 108706
ugugauggcgccaucacug

SEQ ID NO: 108708 - RNA, 19 nt, Artificial Sequence
  Description of Artificial Sequence: Synthetic oligonucleotide
  Sense strand starting at position 3299 of SEQ ID NO: 1382
guucuugugguagagacua

SEQ ID NO: 108709 - RNA, 19 nt, Artificial Sequence
  Description of Artificial Sequence: Synthetic oligonucleotide
  Antisense strand to SEQ ID NO: 108708
uagucucuaccacaagaac

SEQ ID NO: 108710 - RNA, 19 nt, Artificial Sequence
  Description of Artificial Sequence: Synthetic oligonucleotide
  Sense strand starting at position 3307 of SEQ ID NO: 1382
gguagagacuacucguugu

SEQ ID NO: 108711 - RNA, 19 nt, Artificial Sequence
  Description of Artificial Sequence: Synthetic oligonucleotide
  Antisense strand to SEQ ID NO: 108710
acaacgaguagucucuacc

SEQ ID NO: 108712 - RNA, 19 nt, Artificial Sequence
  Description of Artificial Sequence: Synthetic oligonucleotide
  Sense strand starting at position 3320 of SEQ ID NO: 1382
cguugucugccucaauauc

SEQ ID NO: 108713 - RNA, 19 nt, Artificial Sequence
  Description of Artificial Sequence: Synthetic oligonucleotide
  Antisense strand to SEQ ID NO: 108712
gauauugaggcagacaacg

SEQ ID NO: 108714 - RNA, 19 nt, Artificial Sequence
  Description of Artificial Sequence: Synthetic oligonucleotide
  Sense strand starting at position 3383 of SEQ ID NO: 1382
cugggcauauaguuauauu

SEQ ID NO: 108715 - RNA, 19 nt, Artificial Sequence
  Description of Artificial Sequence: Synthetic oligonucleotide
  Antisense strand to SEQ ID NO: 108714
aauauaacuauaugcccag

SEQ ID NO: 108716 - RNA, 19 nt, Artificial Sequence
  Description of Artificial Sequence: Synthetic oligonucleotide
  Sense strand starting at position 3474 of SEQ ID NO: 1382
caugguagcuuccuagaaa

SEQ ID NO: 108717 - RNA, 19 nt, Artificial Sequence
  Description of Artificial Sequence: Synthetic oligonucleotide
  Antisense strand to SEQ ID NO: 108716
uuucuaggaagcuaccaug

SEQ ID NO: 108718 - RNA, 19 nt, Artificial Sequence
  Description of Artificial Sequence: Synthetic oligonucleotide
  Sense strand starting at position 3659 of SEQ ID NO: 1382
cuugauuauuuauggcaac

SEQ ID NO: 108719 - RNA, 19 nt, Artificial Sequence
  Description of Artificial Sequence: Synthetic oligonucleotide
  Antisense strand to SEQ ID NO: 108718
guugccauaaauaaucaag

SEQ ID NO: 108720 - RNA, 19 nt, Artificial Sequence
  Description of Artificial Sequence: Synthetic oligonucleotide
  Sense strand starting at position 3788 of SEQ ID NO: 1384
cuuccuugccuugagaguu

SEQ ID NO: 108721 - RNA, 19 nt, Artificial Sequence
  Description of Artificial Sequence: Synthetic oligonucleotide
  Antisense strand to SEQ ID NO: 108720
aacucucaaggcaaggaag

SEQ ID NO: 108722 - RNA, 19 nt, Artificial Sequence
  Description of Artificial Sequence: Synthetic oligonucleotide
  Sense strand starting at position 3787 of SEQ ID NO: 1384
ccuuccuugccuugagagu

SEQ ID NO: 108723 - RNA, 19 nt, Artificial Sequence
  Description of Artificial Sequence: Synthetic oligonucleotide
  Antisense strand to SEQ ID NO: 108722
acucucaaggcaaggaagg

SEQ ID NO: 108724 - RNA, 19 nt, Artificial Sequence
  Description of Artificial Sequence: Synthetic oligonucleotide
  Sense strand starting at position 3673 of SEQ ID NO: 1384
guccacuucugggaaagga

SEQ ID NO: 108725 - RNA, 19 nt, Artificial Sequence
  Description of Artificial Sequence: Synthetic oligonucleotide
  Antisense strand to SEQ ID NO: 108724
uccuuucccagaaguggac

SEQ ID NO: 108726 - RNA, 19 nt, Artificial Sequence
  Description of Artificial Sequence: Synthetic oligonucleotide
  Sense strand starting at position 3592 of SEQ ID NO: 1384
aaguauucugacggauaug

SEQ ID NO: 108727 - RNA, 19 nt, Artificial Sequence
  Description of Artificial Sequence: Synthetic oligonucleotide
  Antisense strand to SEQ ID NO: 108726
cauauccgucagaauacuu

SEQ ID NO: 108728 - RNA, 19 nt, Artificial Sequence
  Description of Artificial Sequence: Synthetic oligonucleotide
  Sense strand starting at position 3588 of SEQ ID NO: 1384
aaggaaguauucugacgga

SEQ ID NO: 108729 - RNA, 19 nt, Artificial Sequence
  Description of Artificial Sequence: Synthetic oligonucleotide
  Antisense strand to SEQ ID NO: 108728
uccgucagaauacuuccuu

SEQ ID NO: 108730 - RNA, 19 nt, Artificial Sequence
  Description of Artificial Sequence: Synthetic oligonucleotide
  Sense strand starting at position 3552 of SEQ ID NO: 1384
gcagguauuaccgaccuga

SEQ ID NO: 108731 - RNA, 19 nt, Artificial Sequence
  Description of Artificial Sequence: Synthetic oligonucleotide
  Antisense strand to SEQ ID NO: 108730
ucaggucgguaauaccugc

SEQ ID NO: 108732 - RNA, 19 nt, Artificial Sequence
  Description of Artificial Sequence: Synthetic oligonucleotide
  Sense strand starting at position 3521 of SEQ ID NO: 1384
gugggugauccaggaagug

SEQ ID NO: 108733 - RNA, 19 nt, Artificial Sequence
  Description of Artificial Sequence: Synthetic oligonucleotide
  Antisense strand to SEQ ID NO: 108732
cacuuccuggaucacccac

SEQ ID NO: 108734 - RNA, 19 nt, Artificial Sequence
  Description of Artificial Sequence: Synthetic oligonucleotide
  Sense strand starting at position 3377 of SEQ ID NO: 1384
gaguucucuggugauagcu

SEQ ID NO: 108735 - RNA, 19 nt, Artificial Sequence
  Description of Artificial Sequence: Synthetic oligonucleotide
  Antisense strand to SEQ ID NO: 108734
agcuaucaccagagaacuc

SEQ ID NO: 108736 - RNA, 19 nt, Artificial Sequence
  Description of Artificial Sequence: Synthetic oligonucleotide
  Sense strand starting at position 3373 of SEQ ID NO: 1384
aguagaguucucuggugau

SEQ ID NO: 108737 - RNA, 19 nt, Artificial Sequence
  Description of Artificial Sequence: Synthetic oligonucleotide
  Antisense strand to SEQ ID NO: 108736
aucaccagagaacucuacu

SEQ ID NO: 108738 - RNA, 19 nt, Artificial Sequence
  Description of Artificial Sequence: Synthetic oligonucleotide
  Sense strand starting at position 3371 of SEQ ID NO: 1384
gcaguagaguucucuggug

SEQ ID NO: 108739 - RNA, 19 nt, Artificial Sequence
  Description of Artificial Sequence: Synthetic oligonucleotide
  Antisense strand to SEQ ID NO: 108738
caccagagaacucuacugc

SEQ ID NO: 108740 - RNA, 19 nt, Artificial Sequence
  Description of Artificial Sequence: Synthetic oligonucleotide
  Sense strand starting at position 3016 of SEQ ID NO: 1384
gagguuuggucccucuguu

SEQ ID NO: 108741 - RNA, 19 nt, Artificial Sequence
  Description of Artificial Sequence: Synthetic oligonucleotide
  Antisense strand to SEQ ID NO: 108740
aacagagggaccaaaccuc

SEQ ID NO: 108742 - RNA, 19 nt, Artificial Sequence
  Description of Artificial Sequence: Synthetic oligonucleotide
  Sense strand starting at position 2950 of SEQ ID NO: 1384
gauccuuagcugugggaac

SEQ ID NO: 108743 - RNA, 19 nt, Artificial Sequence
  Description of Artificial Sequence: Synthetic oligonucleotide
  Antisense strand to SEQ ID NO: 108742
guucccacagcuaaggauc

SEQ ID NO: 108744 - RNA, 19 nt, Artificial Sequence
  Description of Artificial Sequence: Synthetic oligonucleotide
  Sense strand starting at position 2944 of SEQ ID NO: 1384
gggccagauccuuagcugu

SEQ ID NO: 108745 - RNA, 19 nt, Artificial Sequence
  Description of Artificial Sequence: Synthetic oligonucleotide
  Antisense strand to SEQ ID NO: 108744
acagcuaaggaucuggccc

SEQ ID NO: 108746 - RNA, 19 nt, Artificial Sequence
  Description of Artificial Sequence: Synthetic oligonucleotide
  Sense strand starting at position 2897 of SEQ ID NO: 1384
gacuucuggccugggaauu

SEQ ID NO: 108747 - RNA, 19 nt, Artificial Sequence
  Description of Artificial Sequence: Synthetic oligonucleotide
  Antisense strand to SEQ ID NO: 108746
aauucccaggccagaaguc

SEQ ID NO: 108748 - RNA, 19 nt, Artificial Sequence
  Description of Artificial Sequence: Synthetic oligonucleotide
  Sense strand starting at position 2896 of SEQ ID NO: 1384
agacuucuggccugggaau

SEQ ID NO: 108749 - RNA, 19 nt, Artificial Sequence
  Description of Artificial Sequence: Synthetic oligonucleotide
  Antisense strand to SEQ ID NO: 108748
auucccaggccagaagucu

SEQ ID NO: 108750 - RNA, 19 nt, Artificial Sequence
  Description of Artificial Sequence: Synthetic oligonucleotide
  Sense strand starting at position 2748 of SEQ ID NO: 1384
aacucugagccuggaaaga

SEQ ID NO: 108751 - RNA, 19 nt, Artificial Sequence
  Description of Artificial Sequence: Synthetic oligonucleotide
  Antisense strand to SEQ ID NO: 108750
ucuuuccaggcucagaguu

SEQ ID NO: 108752 - RNA, 19 nt, Artificial Sequence
  Description of Artificial Sequence: Synthetic oligonucleotide
  Sense strand starting at position 2723 of SEQ ID NO: 1384
acccguagaguuuguacaa

SEQ ID NO: 108753 - RNA, 19 nt, Artificial Sequence
  Description of Artificial Sequence: Synthetic oligonucleotide
  Antisense strand to SEQ ID NO: 108752
uuguacaaacucuacgggu

SEQ ID NO: 108754 - RNA, 19 nt, Artificial Sequence
  Description of Artificial Sequence: Synthetic oligonucleotide
  Sense strand starting at position 2631 of SEQ ID NO: 1384
acaauucuguauggacaaa

SEQ ID NO: 108755 - RNA, 19 nt, Artificial Sequence
  Description of Artificial Sequence: Synthetic oligonucleotide
  Antisense strand to SEQ ID NO: 108754
uuuguccauacagaauugu

SEQ ID NO: 108756 - RNA, 19 nt, Artificial Sequence
  Description of Artificial Sequence: Synthetic oligonucleotide
  Sense strand starting at position 2627 of SEQ ID NO: 1384
gaucacaauucuguaugga

SEQ ID NO: 108757 - RNA, 19 nt, Artificial Sequence
  Description of Artificial Sequence: Synthetic oligonucleotide
  Antisense strand to SEQ ID NO: 108756
uccauacagaauugugauc

SEQ ID NO: 108758 - RNA, 19 nt, Artificial Sequence
  Description of Artificial Sequence: Synthetic oligonucleotide
  Sense strand starting at position 2620 of SEQ ID NO: 1384
ggagucugaucacaauucu

SEQ ID NO: 108759 - RNA, 19 nt, Artificial Sequence
  Description of Artificial Sequence: Synthetic oligonucleotide
  Antisense strand to SEQ ID NO: 108758
agaauugugaucagacucc

SEQ ID NO: 108760 - RNA, 19 nt, Artificial Sequence
  Description of Artificial Sequence: Synthetic oligonucleotide
  Sense strand starting at position 2617 of SEQ ID NO: 1384
ccaggagucugaucacaau

SEQ ID NO: 108761 - RNA, 19 nt, Artificial Sequence
  Description of Artificial Sequence: Synthetic oligonucleotide
  Antisense strand to SEQ ID NO: 108760
auugugaucagacuccugg

SEQ ID NO: 108762 - RNA, 19 nt, Artificial Sequence
  Description of Artificial Sequence: Synthetic oligonucleotide
  Sense strand starting at position 2262 of SEQ ID NO: 1384
gucauaaauugagauugga

SEQ ID NO: 108763 - RNA, 19 nt, Artificial Sequence
  Description of Artificial Sequence: Synthetic oligonucleotide
  Antisense strand to SEQ ID NO: 108762
uccaaucucaauuuaugac

SEQ ID NO: 108764 - RNA, 19 nt, Artificial Sequence
  Description of Artificial Sequence: Synthetic oligonucleotide
  Sense strand starting at position 2245 of SEQ ID NO: 1384
ccagcuaauuuccagaugu

SEQ ID NO: 108765 - RNA, 19 nt, Artificial Sequence
  Description of Artificial Sequence: Synthetic oligonucleotide
  Antisense strand to SEQ ID NO: 108764
acaucuggaaauuagcugg

SEQ ID NO: 108766 - RNA, 19 nt, Artificial Sequence
  Description of Artificial Sequence: Synthetic oligonucleotide
  Sense strand starting at position 2040 of SEQ ID NO: 1384
ggcagauacuucgugcucu

SEQ ID NO: 108767 - RNA, 19 nt, Artificial Sequence
  Description of Artificial Sequence: Synthetic oligonucleotide
  Antisense strand to SEQ ID NO: 108766
agagcacgaaguaucugcc

SEQ ID NO: 108768 - RNA, 19 nt, Artificial Sequence
  Description of Artificial Sequence: Synthetic oligonucleotide
  Sense strand starting at position 1636 of SEQ ID NO: 1384
gaaagugugucgagagcug

SEQ ID NO: 108769 - RNA, 19 nt, Artificial Sequence
  Description of Artificial Sequence: Synthetic oligonucleotide
  Antisense strand to SEQ ID NO: 108768
cagcucucgacacacuuuc

SEQ ID NO: 108770 - RNA, 19 nt, Artificial Sequence
  Description of Artificial Sequence: Synthetic oligonucleotide
  Sense strand starting at position 1632 of SEQ ID NO: 1384
uggagaaagugugucgaga

SEQ ID NO: 108771 - RNA, 19 nt, Artificial Sequence
  Description of Artificial Sequence: Synthetic oligonucleotide
  Antisense strand to SEQ ID NO: 108770
ucucgacacacuuucucca

SEQ ID NO: 108772 - RNA, 19 nt, Artificial Sequence
  Description of Artificial Sequence: Synthetic oligonucleotide
  Sense strand starting at position 1570 of SEQ ID NO: 1384
acaggcuuggguuauuauu

SEQ ID NO: 108773 - RNA, 19 nt, Artificial Sequence
  Description of Artificial Sequence: Synthetic oligonucleotide
  Antisense strand to SEQ ID NO: 108772
aauaauaacccaagccugu

SEQ ID NO: 108774 - RNA, 19 nt, Artificial Sequence
  Description of Artificial Sequence: Synthetic oligonucleotide
  Sense strand starting at position 1368 of SEQ ID NO: 1384
gcgagcauucuggcucuuu

SEQ ID NO: 108775 - RNA, 19 nt, Artificial Sequence
  Description of Artificial Sequence: Synthetic oligonucleotide
  Antisense strand to SEQ ID NO: 108774
aaagagccagaaugcucgc

SEQ ID NO: 108776 - RNA, 19 nt, Artificial Sequence
  Description of Artificial Sequence: Synthetic oligonucleotide
  Sense strand starting at position 1337 of SEQ ID NO: 1384
guguuuguucaaggucaac

SEQ ID NO: 108777 - RNA, 19 nt, Artificial Sequence
  Description of Artificial Sequence: Synthetic oligonucleotide
  Antisense strand to SEQ ID NO: 108776
guugaccuugaacaaacac

SEQ ID NO: 108778 - RNA, 19 nt, Artificial Sequence
  Description of Artificial Sequence: Synthetic oligonucleotide
  Sense strand starting at position 1315 of SEQ ID NO: 1384
ggugaauaugaacgugaga

SEQ ID NO: 108779 - RNA, 19 nt, Artificial Sequence
  Description of Artificial Sequence: Synthetic oligonucleotide
  Antisense strand to SEQ ID NO: 108778
ucucacguucauauucacc

SEQ ID NO: 108780 - RNA, 19 nt, Artificial Sequence
  Description of Artificial Sequence: Synthetic oligonucleotide
  Sense strand starting at position 1148 of SEQ ID NO: 1384
agucacugaucugaaguua

SEQ ID NO: 108781 - RNA, 19 nt, Artificial Sequence
  Description of Artificial Sequence: Synthetic oligonucleotide
  Antisense strand to SEQ ID NO: 108780
uaacuucagaucagugacu

SEQ ID NO: 108782 - RNA, 19 nt, Artificial Sequence
  Description of Artificial Sequence: Synthetic oligonucleotide
  Sense strand starting at position 1145 of SEQ ID NO: 1384
ccaagucacugaucugaag

SEQ ID NO: 108783 - RNA, 19 nt, Artificial Sequence
  Description of Artificial Sequence: Synthetic oligonucleotide
  Antisense strand to SEQ ID NO: 108782
cuucagaucagugacuugg

SEQ ID NO: 108784 - RNA, 19 nt, Artificial Sequence
  Description of Artificial Sequence: Synthetic oligonucleotide
  Sense strand starting at position 1119 of SEQ ID NO: 1384
cagccaauguccuggauuu

SEQ ID NO: 108785 - RNA, 19 nt, Artificial Sequence
  Description of Artificial Sequence: Synthetic oligonucleotide
  Antisense strand to SEQ ID NO: 108784
aaauccaggacauuggcug

SEQ ID NO: 108786 - RNA, 19 nt, Artificial Sequence
  Description of Artificial Sequence: Synthetic oligonucleotide
  Sense strand starting at position 161 of SEQ ID NO: 1384
ugaauuucguggugaaaga

SEQ ID NO: 108787 - RNA, 19 nt, Artificial Sequence
  Description of Artificial Sequence: Synthetic oligonucleotide
  Antisense strand to SEQ ID NO: 108786
ucuuucaccacgaaauuca

SEQ ID NO: 108788 - RNA, 19 nt, Artificial Sequence
  Description of Artificial Sequence: Synthetic oligonucleotide
  Sense strand starting at position 159 of SEQ ID NO: 1384
guugaauuucguggugaaa

SEQ ID NO: 108789 - RNA, 19 nt, Artificial Sequence
  Description of Artificial Sequence: Synthetic oligonucleotide
  Antisense strand to SEQ ID NO: 108788
uuucaccacgaaauucaac

SEQ ID NO: 108790 - RNA, 19 nt, Artificial Sequence
  Description of Artificial Sequence: Synthetic oligonucleotide
  Sense strand starting at position 147 of SEQ ID NO: 1384
acuauuaugucuguugaau

SEQ ID NO: 108791 - RNA, 19 nt, Artificial Sequence
  Description of Artificial Sequence: Synthetic oligonucleotide
  Antisense strand to SEQ ID NO: 108790
auucaacagacauaauagu

SEQ ID NO: 108792 - RNA, 19 nt, Artificial Sequence
  Description of Artificial Sequence: Synthetic oligonucleotide
  Sense strand starting at position 145 of SEQ ID NO: 1384
ucacuauuaugucuguuga

SEQ ID NO: 108793 - RNA, 19 nt, Artificial Sequence
  Description of Artificial Sequence: Synthetic oligonucleotide
  Antisense strand to SEQ ID NO: 108792
ucaacagacauaauaguga

SEQ ID NO: 108794 - RNA, 19 nt, Artificial Sequence
  Description of Artificial Sequence: Synthetic oligonucleotide
  Sense strand starting at position 137 of SEQ ID NO: 1384
uguuguuaucacuauuaug

SEQ ID NO: 108795 - RNA, 19 nt, Artificial Sequence
  Description of Artificial Sequence: Synthetic oligonucleotide
  Antisense strand to SEQ ID NO: 108794
cauaauagugauaacaaca

SEQ ID NO: 108796 - RNA, 19 nt, Artificial Sequence
  Description of Artificial Sequence: Synthetic oligonucleotide
  Sense strand starting at position 65 of SEQ ID NO: 1384
gguauuuacugggacccau

SEQ ID NO: 108797 - RNA, 19 nt, Artificial Sequence
  Description of Artificial Sequence: Synthetic oligonucleotide
  Antisense strand to SEQ ID NO: 108796
augggucccaguaaauacc

SEQ ID NO: 108798 - RNA, 19 nt, Artificial Sequence
  Description of Artificial Sequence: Synthetic oligonucleotide
  Sense strand starting at position 43 of SEQ ID NO: 1384
uuuaaauugguagggacuu

SEQ ID NO: 108799 - RNA, 19 nt, Artificial Sequence
  Description of Artificial Sequence: Synthetic oligonucleotide
  Antisense strand to SEQ ID NO: 108798
aagucccuaccaauuuaaa

SEQ ID NO: 108800 - RNA, 19 nt, Artificial Sequence
  Description of Artificial Sequence: Synthetic oligonucleotide
  Sense strand starting at position 3706 of SEQ ID NO: 1383
agcuauaggagucagguuu

SEQ ID NO: 108801 - RNA, 19 nt, Artificial Sequence
  Description of Artificial Sequence: Synthetic oligonucleotide
  Antisense strand to SEQ ID NO: 108800
aaaccugacuccuauagcu

SEQ ID NO: 108802 - RNA, 19 nt, Artificial Sequence
  Description of Artificial Sequence: Synthetic oligonucleotide
  Sense strand starting at position 3559 of SEQ ID NO: 1383
gggaauaacugcucccucu

SEQ ID NO: 108803 - RNA, 19 nt, Artificial Sequence
  Description of Artificial Sequence: Synthetic oligonucleotide
  Antisense strand to SEQ ID NO: 108802
agagggagcaguuauuccc

SEQ ID NO: 108804 - RNA, 19 nt, Artificial Sequence
  Description of Artificial Sequence: Synthetic oligonucleotide
  Sense strand starting at position 3548 of SEQ ID NO: 1383
gacucugggcugggaauaa

SEQ ID NO: 108805 - RNA, 19 nt, Artificial Sequence
  Description of Artificial Sequence: Synthetic oligonucleotide
  Antisense strand to SEQ ID NO: 108804
uuauucccagcccagaguc

SEQ ID NO: 108806 - RNA, 19 nt, Artificial Sequence
  Description of Artificial Sequence: Synthetic oligonucleotide
  Sense strand starting at position 3547 of SEQ ID NO: 1383
agacucugggcugggaaua

SEQ ID NO: 108807 - RNA, 19 nt, Artificial Sequence
  Description of Artificial Sequence: Synthetic oligonucleotide
  Antisense strand to SEQ ID NO: 108806
uauucccagcccagagucu

SEQ ID NO: 108808 - RNA, 19 nt, Artificial Sequence
  Description of Artificial Sequence: Synthetic oligonucleotide
  Sense strand starting at position 3461 of SEQ ID NO: 1383
gagccuccuuucuugguaa

SEQ ID NO: 108809 - RNA, 19 nt, Artificial Sequence
  Description of Artificial Sequence: Synthetic oligonucleotide
  Antisense strand to SEQ ID NO: 108808
uuaccaagaaaggaggcuc

SEQ ID NO: 108810 - RNA, 19 nt, Artificial Sequence
  Description of Artificial Sequence: Synthetic oligonucleotide
  Sense strand starting at position 3359 of SEQ ID NO: 1383
ccgccaugucuguccuacu

SEQ ID NO: 108811 - RNA, 19 nt, Artificial Sequence
  Description of Artificial Sequence: Synthetic oligonucleotide
  Antisense strand to SEQ ID NO: 108810
aguaggacagacauggcgg

SEQ ID NO: 108812 - RNA, 19 nt, Artificial Sequence
  Description of Artificial Sequence: Synthetic oligonucleotide
  Sense strand starting at position 3131 of SEQ ID NO: 1383
cccuguuaggcguguuaca

SEQ ID NO: 108813 - RNA, 19 nt, Artificial Sequence
  Description of Artificial Sequence: Synthetic oligonucleotide
  Antisense strand to SEQ ID NO: 108812
uguaacacgccuaacaggg

SEQ ID NO: 108814 - RNA, 19 nt, Artificial Sequence
  Description of Artificial Sequence: Synthetic oligonucleotide
  Sense strand starting at position 2866 of SEQ ID NO: 1383
gagaucguguuuccagaga

SEQ ID NO: 108815 - RNA, 19 nt, Artificial Sequence
  Description of Artificial Sequence: Synthetic oligonucleotide
  Antisense strand to SEQ ID NO: 108814
ucucuggaaacacgaucuc

SEQ ID NO: 108816 - RNA, 19 nt, Artificial Sequence
  Description of Artificial Sequence: Synthetic oligonucleotide
  Sense strand starting at position 2864 of SEQ ID NO: 1383
aggagaucguguuuccaga

SEQ ID NO: 108817 - RNA, 19 nt, Artificial Sequence
  Description of Artificial Sequence: Synthetic oligonucleotide
  Antisense strand to SEQ ID NO: 108816
ucuggaaacacgaucuccu

SEQ ID NO: 108818 - RNA, 19 nt, Artificial Sequence
  Description of Artificial Sequence: Synthetic oligonucleotide
  Sense strand starting at position 2859 of SEQ ID NO: 1383
ggaggaggagaucguguuu

SEQ ID NO: 108819 - RNA, 19 nt, Artificial Sequence
  Description of Artificial Sequence: Synthetic oligonucleotide
  Antisense strand to SEQ ID NO: 108818
aaacacgaucuccuccucc

SEQ ID NO: 108820 - RNA, 19 nt, Artificial Sequence
  Description of Artificial Sequence: Synthetic oligonucleotide
  Sense strand starting at position 2608 of SEQ ID NO: 1383
agaggagcuuuccaaagcu

SEQ ID NO: 108821 - RNA, 19 nt, Artificial Sequence
  Description of Artificial Sequence: Synthetic oligonucleotide
  Antisense strand to SEQ ID NO: 108820
agcuuuggaaagcuccucu

SEQ ID NO: 108822 - RNA, 19 nt, Artificial Sequence
  Description of Artificial Sequence: Synthetic oligonucleotide
  Sense strand starting at position 2287 of SEQ ID NO: 1383
gacacauaugcacgagaga

SEQ ID NO: 108823 - RNA, 19 nt, Artificial Sequence
  Description of Artificial Sequence: Synthetic oligonucleotide
  Antisense strand to SEQ ID NO: 108822
ucucucgugcauauguguc

SEQ ID NO: 108824 - RNA, 19 nt, Artificial Sequence
  Description of Artificial Sequence: Synthetic oligonucleotide
  Sense strand starting at position 2219 of SEQ ID NO: 1383
agaggcucaccaugcuuaa

SEQ ID NO: 108825 - RNA, 19 nt, Artificial Sequence
  Description of Artificial Sequence: Synthetic oligonucleotide
  Antisense strand to SEQ ID NO: 108824
uuaagcauggugagccucu

SEQ ID NO: 108826 - RNA, 19 nt, Artificial Sequence
  Description of Artificial Sequence: Synthetic oligonucleotide
  Sense strand starting at position 2192 of SEQ ID NO: 1383
uggcuuagagaucagccaa

SEQ ID NO: 108827 - RNA, 19 nt, Artificial Sequence
  Description of Artificial Sequence: Synthetic oligonucleotide
  Antisense strand to SEQ ID NO: 108826
uuggcugaucucuaagcca

SEQ ID NO: 108828 - RNA, 19 nt, Artificial Sequence
  Description of Artificial Sequence: Synthetic oligonucleotide
  Sense strand starting at position 2187 of SEQ ID NO: 1383
cugaguggcuuagagauca

SEQ ID NO: 108829 - RNA, 19 nt, Artificial Sequence
  Description of Artificial Sequence: Synthetic oligonucleotide
  Antisense strand to SEQ ID NO: 108828
ugaucucuaagccacucag

SEQ ID NO: 108830 - RNA, 19 nt, Artificial Sequence
  Description of Artificial Sequence: Synthetic oligonucleotide
  Sense strand starting at position 2185 of SEQ ID NO: 1383
agcugaguggcuuagagau

SEQ ID NO: 108831 - RNA, 19 nt, Artificial Sequence
  Description of Artificial Sequence: Synthetic oligonucleotide
  Antisense strand to SEQ ID NO: 108830
aucucuaagccacucagcu

SEQ ID NO: 108832 - RNA, 19 nt, Artificial Sequence
  Description of Artificial Sequence: Synthetic oligonucleotide
  Sense strand starting at position 2090 of SEQ ID NO: 1383
uauccauucggcugcuaga

SEQ ID NO: 108833 - RNA, 19 nt, Artificial Sequence
  Description of Artificial Sequence: Synthetic oligonucleotide
  Antisense strand to SEQ ID NO: 108832
ucuagcagccgaauggaua

SEQ ID NO: 108834 - RNA, 19 nt, Artificial Sequence
  Description of Artificial Sequence: Synthetic oligonucleotide
  Sense strand starting at position 1733 of SEQ ID NO: 1383
uauccugagccaugucaag

SEQ ID NO: 108835 - RNA, 19 nt, Artificial Sequence
  Description of Artificial Sequence: Synthetic oligonucleotide
  Antisense strand to SEQ ID NO: 108834
cuugacauggcucaggaua

SEQ ID NO: 108836 - RNA, 19 nt, Artificial Sequence
  Description of Artificial Sequence: Synthetic oligonucleotide
  Sense strand starting at position 1729 of SEQ ID NO: 1383
guucuauccugagccaugu

SEQ ID NO: 108837 - RNA, 19 nt, Artificial Sequence
  Description of Artificial Sequence: Synthetic oligonucleotide
  Antisense strand to SEQ ID NO: 108836
acauggcucaggauagaac

SEQ ID NO: 108838 - RNA, 19 nt, Artificial Sequence
  Description of Artificial Sequence: Synthetic oligonucleotide
  Sense strand starting at position 1656 of SEQ ID NO: 1383
gcagucaacucccugauca

SEQ ID NO: 108839 - RNA, 19 nt, Artificial Sequence
  Description of Artificial Sequence: Synthetic oligonucleotide
  Antisense strand to SEQ ID NO: 108838
ugaucagggaguugacugc

SEQ ID NO: 108840 - RNA, 19 nt, Artificial Sequence
  Description of Artificial Sequence: Synthetic oligonucleotide
  Sense strand starting at position 1635 of SEQ ID NO: 1383
gcaggaucauccuaccuuu

SEQ ID NO: 108841 - RNA, 19 nt, Artificial Sequence
  Description of Artificial Sequence: Synthetic oligonucleotide
  Antisense strand to SEQ ID NO: 108840
aaagguaggaugauccugc

SEQ ID NO: 108842 - RNA, 19 nt, Artificial Sequence
  Description of Artificial Sequence: Synthetic oligonucleotide
  Sense strand starting at position 1271 of SEQ ID NO: 1383
cuggguuccugagagcaag

SEQ ID NO: 108843 - RNA, 19 nt, Artificial Sequence
  Description of Artificial Sequence: Synthetic oligonucleotide
  Antisense strand to SEQ ID NO: 108842
cuugcucucaggaacccag

SEQ ID NO: 108844 - RNA, 19 nt, Artificial Sequence
  Description of Artificial Sequence: Synthetic oligonucleotide
  Sense strand starting at position 1254 of SEQ ID NO: 1383
auugauacugggugaaucu

SEQ ID NO: 108845 - RNA, 19 nt, Artificial Sequence
  Description of Artificial Sequence: Synthetic oligonucleotide
  Antisense strand to SEQ ID NO: 108844
agauucacccaguaucaau

SEQ ID NO: 108846 - RNA, 19 nt, Artificial Sequence
  Description of Artificial Sequence: Synthetic oligonucleotide
  Sense strand starting at position 1253 of SEQ ID NO: 1383
gauugauacugggugaauc

SEQ ID NO: 108847 - RNA, 19 nt, Artificial Sequence
  Description of Artificial Sequence: Synthetic oligonucleotide
  Antisense strand to SEQ ID NO: 108846
gauucacccaguaucaauc

SEQ ID NO: 108848 - RNA, 19 nt, Artificial Sequence
  Description of Artificial Sequence: Synthetic oligonucleotide
  Sense strand starting at position 1250 of SEQ ID NO: 1383
ccagauugauacuggguga

SEQ ID NO: 108849 - RNA, 19 nt, Artificial Sequence
  Description of Artificial Sequence: Synthetic oligonucleotide
  Antisense strand to SEQ ID NO: 108848
ucacccaguaucaaucugg

SEQ ID NO: 108850 - RNA, 19 nt, Artificial Sequence
  Description of Artificial Sequence: Synthetic oligonucleotide
  Sense strand starting at position 956 of SEQ ID NO: 1383
cuuccuugccuugagaguu

SEQ ID NO: 108851 - RNA, 19 nt, Artificial Sequence
  Description of Artificial Sequence: Synthetic oligonucleotide
  Antisense strand to SEQ ID NO: 108850
aacucucaaggcaaggaag

SEQ ID NO: 108852 - RNA, 19 nt, Artificial Sequence
  Description of Artificial Sequence: Synthetic oligonucleotide
  Sense strand starting at position 955 of SEQ ID NO: 1383
ccuuccuugccuugagagu

SEQ ID NO: 108853 - RNA, 19 nt, Artificial Sequence
  Description of Artificial Sequence: Synthetic oligonucleotide
  Antisense strand to SEQ ID NO: 108852
acucucaaggcaaggaagg

SEQ ID NO: 108854 - RNA, 19 nt, Artificial Sequence
  Description of Artificial Sequence: Synthetic oligonucleotide
  Sense strand starting at position 841 of SEQ ID NO: 1383
guccacuucugggaaagga

SEQ ID NO: 108855 - RNA, 19 nt, Artificial Sequence
  Description of Artificial Sequence: Synthetic oligonucleotide
  Antisense strand to SEQ ID NO: 108854
uccuuucccagaaguggac

SEQ ID NO: 108856 - RNA, 19 nt, Artificial Sequence
  Description of Artificial Sequence: Synthetic oligonucleotide
  Sense strand starting at position 760 of SEQ ID NO: 1383
aaguauucugacggauaug

SEQ ID NO: 108857 - RNA, 19 nt, Artificial Sequence
  Description of Artificial Sequence: Synthetic oligonucleotide
  Antisense strand to SEQ ID NO: 108856
cauauccgucagaauacuu

SEQ ID NO: 108858 - RNA, 19 nt, Artificial Sequence
  Description of Artificial Sequence: Synthetic oligonucleotide
  Sense strand starting at position 756 of SEQ ID NO: 1383
aaggaaguauucugacgga

SEQ ID NO: 108859 - RNA, 19 nt, Artificial Sequence
  Description of Artificial Sequence: Synthetic oligonucleotide
  Antisense strand to SEQ ID NO: 108858
uccgucagaauacuuccuu

SEQ ID NO: 108860 - RNA, 19 nt, Artificial Sequence
  Description of Artificial Sequence: Synthetic oligonucleotide
  Sense strand starting at position 720 of SEQ ID NO: 1383
gcagguauuaccgaccuga

SEQ ID NO: 108861 - RNA, 19 nt, Artificial Sequence
  Description of Artificial Sequence: Synthetic oligonucleotide
  Antisense strand to SEQ ID NO: 108860
ucaggucgguaauaccugc

SEQ ID NO: 108862 - RNA, 19 nt, Artificial Sequence
  Description of Artificial Sequence: Synthetic oligonucleotide
  Sense strand starting at position 689 of SEQ ID NO: 1383
gugggugauccaggaagug

SEQ ID NO: 108863 - RNA, 19 nt, Artificial Sequence
  Description of Artificial Sequence: Synthetic oligonucleotide
  Antisense strand to SEQ ID NO: 108862
cacuuccuggaucacccac

SEQ ID NO: 108864 - RNA, 19 nt, Artificial Sequence
  Description of Artificial Sequence: Synthetic oligonucleotide
  Sense strand starting at position 545 of SEQ ID NO: 1383
gaguucucuggugauagcu

SEQ ID NO: 108865 - RNA, 19 nt, Artificial Sequence
  Description of Artificial Sequence: Synthetic oligonucleotide
  Antisense strand to SEQ ID NO: 108864
agcuaucaccagagaacuc

SEQ ID NO: 108866 - RNA, 19 nt, Artificial Sequence
  Description of Artificial Sequence: Synthetic oligonucleotide
  Sense strand starting at position 541 of SEQ ID NO: 1383
aguagaguucucuggugau

SEQ ID NO: 108867 - RNA, 19 nt, Artificial Sequence
  Description of Artificial Sequence: Synthetic oligonucleotide
  Antisense strand to SEQ ID NO: 108866
aucaccagagaacucuacu

SEQ ID NO: 108868 - RNA, 19 nt, Artificial Sequence
  Description of Artificial Sequence: Synthetic oligonucleotide
  Sense strand starting at position 539 of SEQ ID NO: 1383
gcaguagaguucucuggug

SEQ ID NO: 108869 - RNA, 19 nt, Artificial Sequence
  Description of Artificial Sequence: Synthetic oligonucleotide
  Antisense strand to SEQ ID NO: 108868
caccagagaacucuacugc

SEQ ID NO: 108870 - RNA, 19 nt, Artificial Sequence
  Description of Artificial Sequence: Synthetic oligonucleotide
  Sense strand starting at position 184 of SEQ ID NO: 1383
gagguuuggucccucuguu

SEQ ID NO: 108871 - RNA, 19 nt, Artificial Sequence
  Description of Artificial Sequence: Synthetic oligonucleotide
  Antisense strand to SEQ ID NO: 108870
aacagagggaccaaaccuc

SEQ ID NO: 108872 - RNA, 19 nt, Artificial Sequence
  Description of Artificial Sequence: Synthetic oligonucleotide
  Sense strand starting at position 118 of SEQ ID NO: 1383
gauccuuagcugugggaac

SEQ ID NO: 108873 - RNA, 19 nt, Artificial Sequence
  Description of Artificial Sequence: Synthetic oligonucleotide
  Antisense strand to SEQ ID NO: 108872
guucccacagcuaaggauc

SEQ ID NO: 108874 - RNA, 19 nt, Artificial Sequence
  Description of Artificial Sequence: Synthetic oligonucleotide
  Sense strand starting at position 112 of SEQ ID NO: 1383
gggccagauccuuagcugu

SEQ ID NO: 108875 - RNA, 19 nt, Artificial Sequence
  Description of Artificial Sequence: Synthetic oligonucleotide
  Antisense strand to SEQ ID NO: 108874
acagcuaaggaucuggccc

SEQ ID NO: 108876 - RNA, 19 nt, Artificial Sequence
  Description of Artificial Sequence: Synthetic oligonucleotide
  Sense strand starting at position 65 of SEQ ID NO: 1383
gacuucuggccugggaauu

SEQ ID NO: 108877 - RNA, 19 nt, Artificial Sequence
  Description of Artificial Sequence: Synthetic oligonucleotide
  Antisense strand to SEQ ID NO: 108876
aauucccaggccagaaguc

SEQ ID NO: 108878 - RNA, 19 nt, Artificial Sequence
  Description of Artificial Sequence: Synthetic oligonucleotide
  Sense strand starting at position 64 of SEQ ID NO: 1383
agacuucuggccugggaau

SEQ ID NO: 108879 - RNA, 19 nt, Artificial Sequence
  Description of Artificial Sequence: Synthetic oligonucleotide
  Antisense strand to SEQ ID NO: 108878
auucccaggccagaagucu

SEQ ID NO: 108880 - RNA, 19 nt, Artificial Sequence
  Description of Artificial Sequence: Synthetic oligonucleotide
  Sense strand starting at position 3949 of SEQ ID NO: 1385
uggucuagaucuguugacu

SEQ ID NO: 108881 - RNA, 19 nt, Artificial Sequence
  Description of Artificial Sequence: Synthetic oligonucleotide
  Antisense strand to SEQ ID NO: 108880
agucaacagaucuagacca

SEQ ID NO: 108882 - RNA, 19 nt, Artificial Sequence
  Description of Artificial Sequence: Synthetic oligonucleotide
  Sense strand starting at position 3549 of SEQ ID NO: 1385
ccuggcagucuuuauuaua

SEQ ID NO: 108883 - RNA, 19 nt, Artificial Sequence
  Description of Artificial Sequence: Synthetic oligonucleotide
  Antisense strand to SEQ ID NO: 108882
uauaauaaagacugccagg

SEQ ID NO: 108884 - RNA, 19 nt, Artificial Sequence
  Description of Artificial Sequence: Synthetic oligonucleotide
  Sense strand starting at position 3546 of SEQ ID NO: 1385
gugccuggcagucuuuauu

SEQ ID NO: 108885 - RNA, 19 nt, Artificial Sequence
  Description of Artificial Sequence: Synthetic oligonucleotide
  Antisense strand to SEQ ID NO: 108884
aauaaagacugccaggcac

SEQ ID NO: 108886 - RNA, 19 nt, Artificial Sequence
  Description of Artificial Sequence: Synthetic oligonucleotide
  Sense strand starting at position 3295 of SEQ ID NO: 1385
uauuauacauuggagguau

SEQ ID NO: 108887 - RNA, 19 nt, Artificial Sequence
  Description of Artificial Sequence: Synthetic oligonucleotide
  Antisense strand to SEQ ID NO: 108886
auaccuccaauguauaaua

SEQ ID NO: 108888 - RNA, 19 nt, Artificial Sequence
  Description of Artificial Sequence: Synthetic oligonucleotide
  Sense strand starting at position 3293 of SEQ ID NO: 1385
gauauuauacauuggaggu

SEQ ID NO: 108889 - RNA, 19 nt, Artificial Sequence
  Description of Artificial Sequence: Synthetic oligonucleotide
  Antisense strand to SEQ ID NO: 108888
accuccaauguauaauauc

SEQ ID NO: 108890 - RNA, 19 nt, Artificial Sequence
  Description of Artificial Sequence: Synthetic oligonucleotide
  Sense strand starting at position 3281 of SEQ ID NO: 1385
cagggugcaugagauauua

SEQ ID NO: 108891 - RNA, 19 nt, Artificial Sequence
  Description of Artificial Sequence: Synthetic oligonucleotide
  Antisense strand to SEQ ID NO: 108890
uaauaucucaugcacccug

SEQ ID NO: 108892 - RNA, 19 nt, Artificial Sequence
  Description of Artificial Sequence: Synthetic oligonucleotide
  Sense strand starting at position 3247 of SEQ ID NO: 1385
aaguguuguguguaugucu

SEQ ID NO: 108893 - RNA, 19 nt, Artificial Sequence
  Description of Artificial Sequence: Synthetic oligonucleotide
  Antisense strand to SEQ ID NO: 108892
agacauacacacaacacuu

SEQ ID NO: 108894 - RNA, 19 nt, Artificial Sequence
  Description of Artificial Sequence: Synthetic oligonucleotide
  Sense strand starting at position 3191 of SEQ ID NO: 1385
ccugucaucuguuccagaa

SEQ ID NO: 108895 - RNA, 19 nt, Artificial Sequence
  Description of Artificial Sequence: Synthetic oligonucleotide
  Antisense strand to SEQ ID NO: 108894
uucuggaacagaugacagg

SEQ ID NO: 108896 - RNA, 19 nt, Artificial Sequence
  Description of Artificial Sequence: Synthetic oligonucleotide
  Sense strand starting at position 3134 of SEQ ID NO: 1385
ggcagucgcaguucuuuga

SEQ ID NO: 108897 - RNA, 19 nt, Artificial Sequence
  Description of Artificial Sequence: Synthetic oligonucleotide
  Antisense strand to SEQ ID NO: 108896
ucaaagaacugcgacugcc

SEQ ID NO: 108898 - RNA, 19 nt, Artificial Sequence
  Description of Artificial Sequence: Synthetic oligonucleotide
  Sense strand starting at position 3107 of SEQ ID NO: 1385
guggcuagcacaugggaaa

SEQ ID NO: 108899 - RNA, 19 nt, Artificial Sequence
  Description of Artificial Sequence: Synthetic oligonucleotide
  Antisense strand to SEQ ID NO: 108898
uuucccaugugcuagccac

SEQ ID NO: 108900 - RNA, 19 nt, Artificial Sequence
  Description of Artificial Sequence: Synthetic oligonucleotide
  Sense strand starting at position 3062 of SEQ ID NO: 1385
gcuugcuauagggauuaac

SEQ ID NO: 108901 - RNA, 19 nt, Artificial Sequence
  Description of Artificial Sequence: Synthetic oligonucleotide
  Antisense strand to SEQ ID NO: 108900
guuaaucccuauagcaagc

SEQ ID NO: 108902 - RNA, 19 nt, Artificial Sequence
  Description of Artificial Sequence: Synthetic oligonucleotide
  Sense strand starting at position 3060 of SEQ ID NO: 1385
aggcuugcuauagggauua

SEQ ID NO: 108903 - RNA, 19 nt, Artificial Sequence
  Description of Artificial Sequence: Synthetic oligonucleotide
  Antisense strand to SEQ ID NO: 108902
uaaucccuauagcaagccu

SEQ ID NO: 108904 - RNA, 19 nt, Artificial Sequence
  Description of Artificial Sequence: Synthetic oligonucleotide
  Sense strand starting at position 3058 of SEQ ID NO: 1385
ggaggcuugcuauagggau

SEQ ID NO: 108905 - RNA, 19 nt, Artificial Sequence
  Description of Artificial Sequence: Synthetic oligonucleotide
  Antisense strand to SEQ ID NO: 108904
aucccuauagcaagccucc

SEQ ID NO: 108906 - RNA, 19 nt, Artificial Sequence
  Description of Artificial Sequence: Synthetic oligonucleotide
  Sense strand starting at position 2988 of SEQ ID NO: 1385
cuaggaaaguuucuuaacu

SEQ ID NO: 108907 - RNA, 19 nt, Artificial Sequence
  Description of Artificial Sequence: Synthetic oligonucleotide
  Antisense strand to SEQ ID NO: 108906
aguuaagaaacuuuccuag

SEQ ID NO: 108908 - RNA, 19 nt, Artificial Sequence
  Description of Artificial Sequence: Synthetic oligonucleotide
  Sense strand starting at position 2972 of SEQ ID NO: 1385
ccaauuucgugugacucua

SEQ ID NO: 108909 - RNA, 19 nt, Artificial Sequence
  Description of Artificial Sequence: Synthetic oligonucleotide
  Antisense strand to SEQ ID NO: 108908
uagagucacacgaaauugg

SEQ ID NO: 108910 - RNA, 19 nt, Artificial Sequence
  Description of Artificial Sequence: Synthetic oligonucleotide
  Sense strand starting at position 2971 of SEQ ID NO: 1385
accaauuucgugugacucu

SEQ ID NO: 108911 - RNA, 19 nt, Artificial Sequence
  Description of Artificial Sequence: Synthetic oligonucleotide
  Antisense strand to SEQ ID NO: 108910
agagucacacgaaauuggu

SEQ ID NO: 108912 - RNA, 19 nt, Artificial Sequence
  Description of Artificial Sequence: Synthetic oligonucleotide
  Sense strand starting at position 2499 of SEQ ID NO: 1385
gcaugcucacgacaacacu

SEQ ID NO: 108913 - RNA, 19 nt, Artificial Sequence
  Description of Artificial Sequence: Synthetic oligonucleotide
  Antisense strand to SEQ ID NO: 108912
aguguugucgugagcaugc

SEQ ID NO: 108914 - RNA, 19 nt, Artificial Sequence
  Description of Artificial Sequence: Synthetic oligonucleotide
  Sense strand starting at position 2466 of SEQ ID NO: 1385
gugaguucuugcuccuuuc

SEQ ID NO: 108915 - RNA, 19 nt, Artificial Sequence
  Description of Artificial Sequence: Synthetic oligonucleotide
  Antisense strand to SEQ ID NO: 108914
gaaaggagcaagaacucac

SEQ ID NO: 108916 - RNA, 19 nt, Artificial Sequence
  Description of Artificial Sequence: Synthetic oligonucleotide
  Sense strand starting at position 1844 of SEQ ID NO: 1385
gaaggaagguccuuaagcu

SEQ ID NO: 108917 - RNA, 19 nt, Artificial Sequence
  Description of Artificial Sequence: Synthetic oligonucleotide
  Antisense strand to SEQ ID NO: 108916
agcuuaaggaccuuccuuc

SEQ ID NO: 108918 - RNA, 19 nt, Artificial Sequence
  Description of Artificial Sequence: Synthetic oligonucleotide
  Sense strand starting at position 1819 of SEQ ID NO: 1385
gaggaaaucuguuaaagag

SEQ ID NO: 108919 - RNA, 19 nt, Artificial Sequence
  Description of Artificial Sequence: Synthetic oligonucleotide
  Antisense strand to SEQ ID NO: 108918
cucuuuaacagauuuccuc

SEQ ID NO: 108920 - RNA, 19 nt, Artificial Sequence
  Description of Artificial Sequence: Synthetic oligonucleotide
  Sense strand starting at position 1779 of SEQ ID NO: 1385
ugaguucaggucugggaga

SEQ ID NO: 108921 - RNA, 19 nt, Artificial Sequence
  Description of Artificial Sequence: Synthetic oligonucleotide
  Antisense strand to SEQ ID NO: 108920
ucucccagaccugaacuca

SEQ ID NO: 108922 - RNA, 19 nt, Artificial Sequence
  Description of Artificial Sequence: Synthetic oligonucleotide
  Sense strand starting at position 1630 of SEQ ID NO: 1385
cguagacuuuagguuaaga

SEQ ID NO: 108923 - RNA, 19 nt, Artificial Sequence
  Description of Artificial Sequence: Synthetic oligonucleotide
  Antisense strand to SEQ ID NO: 108922
ucuuaaccuaaagucuacg

SEQ ID NO: 108924 - RNA, 19 nt, Artificial Sequence
  Description of Artificial Sequence: Synthetic oligonucleotide
  Sense strand starting at position 1627 of SEQ ID NO: 1385
gaucguagacuuuagguua

SEQ ID NO: 108925 - RNA, 19 nt, Artificial Sequence
  Description of Artificial Sequence: Synthetic oligonucleotide
  Antisense strand to SEQ ID NO: 108924
uaaccuaaagucuacgauc

SEQ ID NO: 108926 - RNA, 19 nt, Artificial Sequence
  Description of Artificial Sequence: Synthetic oligonucleotide
  Sense strand starting at position 1620 of SEQ ID NO: 1385
ggauaaggaucguagacuu

SEQ ID NO: 108927 - RNA, 19 nt, Artificial Sequence
  Description of Artificial Sequence: Synthetic oligonucleotide
  Antisense strand to SEQ ID NO: 108926
aagucuacgauccuuaucc

SEQ ID NO: 108928 - RNA, 19 nt, Artificial Sequence
  Description of Artificial Sequence: Synthetic oligonucleotide
  Sense strand starting at position 1506 of SEQ ID NO: 1385
ggaagugcuggcuauguuu

SEQ ID NO: 108929 - RNA, 19 nt, Artificial Sequence
  Description of Artificial Sequence: Synthetic oligonucleotide
  Antisense strand to SEQ ID NO: 108928
aaacauagccagcacuucc

SEQ ID NO: 108930 - RNA, 19 nt, Artificial Sequence
  Description of Artificial Sequence: Synthetic oligonucleotide
  Sense strand starting at position 1493 of SEQ ID NO: 1385
cggaguuacagccggaagu

SEQ ID NO: 108931 - RNA, 19 nt, Artificial Sequence
  Description of Artificial Sequence: Synthetic oligonucleotide
  Antisense strand to SEQ ID NO: 108930
acuuccggcuguaacuccg

SEQ ID NO: 108932 - RNA, 19 nt, Artificial Sequence
  Description of Artificial Sequence: Synthetic oligonucleotide
  Sense strand starting at position 1469 of SEQ ID NO: 1385
gaguguuccaguugggcaa

SEQ ID NO: 108933 - RNA, 19 nt, Artificial Sequence
  Description of Artificial Sequence: Synthetic oligonucleotide
  Antisense strand to SEQ ID NO: 108932
uugcccaacuggaacacuc

SEQ ID NO: 108934 - RNA, 19 nt, Artificial Sequence
  Description of Artificial Sequence: Synthetic oligonucleotide
  Sense strand starting at position 1463 of SEQ ID NO: 1385
ugggcagaguguuccaguu

SEQ ID NO: 108935 - RNA, 19 nt, Artificial Sequence
  Description of Artificial Sequence: Synthetic oligonucleotide
  Antisense strand to SEQ ID NO: 108934
aacuggaacacucugccca

SEQ ID NO: 108936 - RNA, 19 nt, Artificial Sequence
  Description of Artificial Sequence: Synthetic oligonucleotide
  Sense strand starting at position 1439 of SEQ ID NO: 1385
gcgaguucgccaagugaag

SEQ ID NO: 108937 - RNA, 19 nt, Artificial Sequence
  Description of Artificial Sequence: Synthetic oligonucleotide
  Antisense strand to SEQ ID NO: 108936
cuucacuuggcgaacucgc

SEQ ID NO: 108938 - RNA, 19 nt, Artificial Sequence
  Description of Artificial Sequence: Synthetic oligonucleotide
  Sense strand starting at position 1437 of SEQ ID NO: 1385
uugcgaguucgccaaguga

SEQ ID NO: 108939 - RNA, 19 nt, Artificial Sequence
  Description of Artificial Sequence: Synthetic oligonucleotide
  Antisense strand to SEQ ID NO: 108938
ucacuuggcgaacucgcaa

SEQ ID NO: 108940 - RNA, 19 nt, Artificial Sequence
  Description of Artificial Sequence: Synthetic oligonucleotide
  Sense strand starting at position 1398 of SEQ ID NO: 1385
gaacucugcccggagacuu

SEQ ID NO: 108941 - RNA, 19 nt, Artificial Sequence
  Description of Artificial Sequence: Synthetic oligonucleotide
  Antisense strand to SEQ ID NO: 108940
aagucuccgggcagaguuc

SEQ ID NO: 108942 - RNA, 19 nt, Artificial Sequence
  Description of Artificial Sequence: Synthetic oligonucleotide
  Sense strand starting at position 1371 of SEQ ID NO: 1385
uggguaagagcucgaagga

SEQ ID NO: 108943 - RNA, 19 nt, Artificial Sequence
  Description of Artificial Sequence: Synthetic oligonucleotide
  Antisense strand to SEQ ID NO: 108942
uccuucgagcucuuaccca

SEQ ID NO: 108944 - RNA, 19 nt, Artificial Sequence
  Description of Artificial Sequence: Synthetic oligonucleotide
  Sense strand starting at position 1256 of SEQ ID NO: 1385
gucaucauuuacugaguag

SEQ ID NO: 108945 - RNA, 19 nt, Artificial Sequence
  Description of Artificial Sequence: Synthetic oligonucleotide
  Antisense strand to SEQ ID NO: 108944
cuacucaguaaaugaugac

SEQ ID NO: 108946 - RNA, 19 nt, Artificial Sequence
  Description of Artificial Sequence: Synthetic oligonucleotide
  Sense strand starting at position 894 of SEQ ID NO: 1385
guguacucaugguagauuu

SEQ ID NO: 108947 - RNA, 19 nt, Artificial Sequence
  Description of Artificial Sequence: Synthetic oligonucleotide
  Antisense strand to SEQ ID NO: 108946
aaaucuaccaugaguacac

SEQ ID NO: 108948 - RNA, 19 nt, Artificial Sequence
  Description of Artificial Sequence: Synthetic oligonucleotide
  Sense strand starting at position 892 of SEQ ID NO: 1385
auguguacucaugguagau

SEQ ID NO: 108949 - RNA, 19 nt, Artificial Sequence
  Description of Artificial Sequence: Synthetic oligonucleotide
  Antisense strand to SEQ ID NO: 108948
aucuaccaugaguacacau

SEQ ID NO: 108950 - RNA, 19 nt, Artificial Sequence
  Description of Artificial Sequence: Synthetic oligonucleotide
  Sense strand starting at position 739 of SEQ ID NO: 1385
acuuacuuuguagacuauu

SEQ ID NO: 108951 - RNA, 19 nt, Artificial Sequence
  Description of Artificial Sequence: Synthetic oligonucleotide
  Antisense strand to SEQ ID NO: 108950
aauagucuacaaaguaagu

SEQ ID NO: 108952 - RNA, 19 nt, Artificial Sequence
  Description of Artificial Sequence: Synthetic oligonucleotide
  Sense strand starting at position 737 of SEQ ID NO: 1385
agacuuacuuuguagacua

SEQ ID NO: 108953 - RNA, 19 nt, Artificial Sequence
  Description of Artificial Sequence: Synthetic oligonucleotide
  Antisense strand to SEQ ID NO: 108952
uagucuacaaaguaagucu

SEQ ID NO: 108954 - RNA, 19 nt, Artificial Sequence
  Description of Artificial Sequence: Synthetic oligonucleotide
  Sense strand starting at position 732 of SEQ ID NO: 1385
gguuaagacuuacuuugua

SEQ ID NO: 108955 - RNA, 19 nt, Artificial Sequence
  Description of Artificial Sequence: Synthetic oligonucleotide
  Antisense strand to SEQ ID NO: 108954
uacaaaguaagucuuaacc

SEQ ID NO: 108956 - RNA, 19 nt, Artificial Sequence
  Description of Artificial Sequence: Synthetic oligonucleotide
  Sense strand starting at position 718 of SEQ ID NO: 1385
gagcgaaagaaauggguua

SEQ ID NO: 108957 - RNA, 19 nt, Artificial Sequence
  Description of Artificial Sequence: Synthetic oligonucleotide
  Antisense strand to SEQ ID NO: 108956
uaacccauuucuuucgcuc

SEQ ID NO: 108958 - RNA, 19 nt, Artificial Sequence
  Description of Artificial Sequence: Synthetic oligonucleotide
  Sense strand starting at position 644 of SEQ ID NO: 1385
gagcuaugaccuggccacu

SEQ ID NO: 108959 - RNA, 19 nt, Artificial Sequence
  Description of Artificial Sequence: Synthetic oligonucleotide
  Antisense strand to SEQ ID NO: 108958
aguggccaggucauagcuc

SEQ ID NO: 108960 - RNA, 19 nt, Artificial Sequence
  Description of Artificial Sequence: Synthetic oligonucleotide
  Sense strand starting at position 3959 of SEQ ID NO: 1386
acaauaaugcuauguuuag

SEQ ID NO: 108961 - RNA, 19 nt, Artificial Sequence
  Description of Artificial Sequence: Synthetic oligonucleotide
  Antisense strand to SEQ ID NO: 108960
cuaaacauagcauuauugu

SEQ ID NO: 108962 - RNA, 19 nt, Artificial Sequence
  Description of Artificial Sequence: Synthetic oligonucleotide
  Sense strand starting at position 3951 of SEQ ID NO: 1386
ugaguuauacaauaaugcu

SEQ ID NO: 108963 - RNA, 19 nt, Artificial Sequence
  Description of Artificial Sequence: Synthetic oligonucleotide
  Antisense strand to SEQ ID NO: 108962
agcauuauuguauaacuca

SEQ ID NO: 108964 - RNA, 19 nt, Artificial Sequence
  Description of Artificial Sequence: Synthetic oligonucleotide
  Sense strand starting at position 3940 of SEQ ID NO: 1386
agugaaacugcugaguuau

SEQ ID NO: 108965 - RNA, 19 nt, Artificial Sequence
  Description of Artificial Sequence: Synthetic oligonucleotide
  Antisense strand to SEQ ID NO: 108964
auaacucagcaguuucacu

SEQ ID NO: 108966 - RNA, 19 nt, Artificial Sequence
  Description of Artificial Sequence: Synthetic oligonucleotide
  Sense strand starting at position 3926 of SEQ ID NO: 1386
aguguauacauaggaguga

SEQ ID NO: 108967 - RNA, 19 nt, Artificial Sequence
  Description of Artificial Sequence: Synthetic oligonucleotide
  Antisense strand to SEQ ID NO: 108966
ucacuccuauguauacacu

SEQ ID NO: 108968 - RNA, 19 nt, Artificial Sequence
  Description of Artificial Sequence: Synthetic oligonucleotide
  Sense strand starting at position 3871 of SEQ ID NO: 1386
uacuaugagcauugguguu

SEQ ID NO: 108969 - RNA, 19 nt, Artificial Sequence
  Description of Artificial Sequence: Synthetic oligonucleotide
  Antisense strand to SEQ ID NO: 108968
aacaccaaugcucauagua

SEQ ID NO: 108970 - RNA, 19 nt, Artificial Sequence
  Description of Artificial Sequence: Synthetic oligonucleotide
  Sense strand starting at position 3828 of SEQ ID NO: 1386
caacaauugggauguuauc

SEQ ID NO: 108971 - RNA, 19 nt, Artificial Sequence
  Description of Artificial Sequence: Synthetic oligonucleotide
  Antisense strand to SEQ ID NO: 108970
gauaacaucccaauuguug

SEQ ID NO: 108972 - RNA, 19 nt, Artificial Sequence
  Description of Artificial Sequence: Synthetic oligonucleotide
  Sense strand starting at position 3735 of SEQ ID NO: 1386
ucauguagcauggaucaga

SEQ ID NO: 108973 - RNA, 19 nt, Artificial Sequence
  Description of Artificial Sequence: Synthetic oligonucleotide
  Antisense strand to SEQ ID NO: 108972
ucugauccaugcuacauga

SEQ ID NO: 108974 - RNA, 19 nt, Artificial Sequence
  Description of Artificial Sequence: Synthetic oligonucleotide
  Sense strand starting at position 3482 of SEQ ID NO: 1386
cugugaaauuaaguacauu

SEQ ID NO: 108975 - RNA, 19 nt, Artificial Sequence
  Description of Artificial Sequence: Synthetic oligonucleotide
  Antisense strand to SEQ ID NO: 108974
aauguacuuaauuucacag

SEQ ID NO: 108976 - RNA, 19 nt, Artificial Sequence
  Description of Artificial Sequence: Synthetic oligonucleotide
  Sense strand starting at position 3473 of SEQ ID NO: 1386
uguacaaugcugugaaauu

SEQ ID NO: 108977 - RNA, 19 nt, Artificial Sequence
  Description of Artificial Sequence: Synthetic oligonucleotide
  Antisense strand to SEQ ID NO: 108976
aauuucacagcauuguaca

SEQ ID NO: 108978 - RNA, 19 nt, Artificial Sequence
  Description of Artificial Sequence: Synthetic oligonucleotide
  Sense strand starting at position 2975 of SEQ ID NO: 1386
gggugaagcugaucccaaa

SEQ ID NO: 108979 - RNA, 19 nt, Artificial Sequence
  Description of Artificial Sequence: Synthetic oligonucleotide
  Antisense strand to SEQ ID NO: 108978
uuugggaucagcuucaccc

SEQ ID NO: 108980 - RNA, 19 nt, Artificial Sequence
  Description of Artificial Sequence: Synthetic oligonucleotide
  Sense strand starting at position 2926 of SEQ ID NO: 1386
ccauucucucauugaguug

SEQ ID NO: 108981 - RNA, 19 nt, Artificial Sequence
  Description of Artificial Sequence: Synthetic oligonucleotide
  Antisense strand to SEQ ID NO: 108980
caacucaaugagagaaugg

SEQ ID NO: 108982 - RNA, 19 nt, Artificial Sequence
  Description of Artificial Sequence: Synthetic oligonucleotide
  Sense strand starting at position 2925 of SEQ ID NO: 1386
accauucucucauugaguu

SEQ ID NO: 108983 - RNA, 19 nt, Artificial Sequence
  Description of Artificial Sequence: Synthetic oligonucleotide
  Antisense strand to SEQ ID NO: 108982
aacucaaugagagaauggu

SEQ ID NO: 108984 - RNA, 19 nt, Artificial Sequence
  Description of Artificial Sequence: Synthetic oligonucleotide
  Sense strand starting at position 2865 of SEQ ID NO: 1386
agaauauucugggagauac

SEQ ID NO: 108985 - RNA, 19 nt, Artificial Sequence
  Description of Artificial Sequence: Synthetic oligonucleotide
  Antisense strand to SEQ ID NO: 108984
guaucucccagaauauucu

SEQ ID NO: 108986 - RNA, 19 nt, Artificial Sequence
  Description of Artificial Sequence: Synthetic oligonucleotide
  Sense strand starting at position 2852 of SEQ ID NO: 1386
uucgauuucucccagaaua

SEQ ID NO: 108987 - RNA, 19 nt, Artificial Sequence
  Description of Artificial Sequence: Synthetic oligonucleotide
  Antisense strand to SEQ ID NO: 108986
uauucugggagaaaucgaa

SEQ ID NO: 108988 - RNA, 19 nt, Artificial Sequence
  Description of Artificial Sequence: Synthetic oligonucleotide
  Sense strand starting at position 2312 of SEQ ID NO: 1386
gcgccuccucugccugaau

SEQ ID NO: 108989 - RNA, 19 nt, Artificial Sequence
  Description of Artificial Sequence: Synthetic oligonucleotide
  Antisense strand to SEQ ID NO: 108988
auucaggcagaggaggcgc

SEQ ID NO: 108990 - RNA, 19 nt, Artificial Sequence
  Description of Artificial Sequence: Synthetic oligonucleotide
  Sense strand starting at position 1583 of SEQ ID NO: 1386
gcgcuagauacggcuuuaa

SEQ ID NO: 108991 - RNA, 19 nt, Artificial Sequence
  Description of Artificial Sequence: Synthetic oligonucleotide
  Antisense strand to SEQ ID NO: 108990
uuaaagccguaucuagcgc

SEQ ID NO: 108992 - RNA, 19 nt, Artificial Sequence
  Description of Artificial Sequence: Synthetic oligonucleotide
  Sense strand starting at position 1513 of SEQ ID NO: 1386
agagaagcgucugugacau

SEQ ID NO: 108993 - RNA, 19 nt, Artificial Sequence
  Description of Artificial Sequence: Synthetic oligonucleotide
  Antisense strand to SEQ ID NO: 108992
augucacagacgcuucucu

SEQ ID NO: 108994 - RNA, 19 nt, Artificial Sequence
  Description of Artificial Sequence: Synthetic oligonucleotide
  Sense strand starting at position 1512 of SEQ ID NO: 1386
aagagaagcgucugugaca

SEQ ID NO: 108995 - RNA, 19 nt, Artificial Sequence
  Description of Artificial Sequence: Synthetic oligonucleotide
  Antisense strand to SEQ ID NO: 108994
ugucacagacgcuucucuu

SEQ ID NO: 108996 - RNA, 19 nt, Artificial Sequence
  Description of Artificial Sequence: Synthetic oligonucleotide
  Sense strand starting at position 1435 of SEQ ID NO: 1386
ggauuuccgucugugauag

SEQ ID NO: 108997 - RNA, 19 nt, Artificial Sequence
  Description of Artificial Sequence: Synthetic oligonucleotide
  Antisense strand to SEQ ID NO: 108996
cuaucacagacggaaaucc

SEQ ID NO: 108998 - RNA, 19 nt, Artificial Sequence
  Description of Artificial Sequence: Synthetic oligonucleotide
  Sense strand starting at position 1434 of SEQ ID NO: 1386
gggauuuccgucugugaua

SEQ ID NO: 108999 - RNA, 19 nt, Artificial Sequence
  Description of Artificial Sequence: Synthetic oligonucleotide
  Antisense strand to SEQ ID NO: 108998
uaucacagacggaaauccc

SEQ ID NO: 109000 - RNA, 19 nt, Artificial Sequence
  Description of Artificial Sequence: Synthetic oligonucleotide
  Sense strand starting at position 1362 of SEQ ID NO: 1386
cuucgaccgucaccuuaaa

SEQ ID NO: 109001 - RNA, 19 nt, Artificial Sequence
  Description of Artificial Sequence: Synthetic oligonucleotide
  Antisense strand to SEQ ID NO: 109000
uuuaaggugacggucgaag

SEQ ID NO: 109002 - RNA, 19 nt, Artificial Sequence
  Description of Artificial Sequence: Synthetic oligonucleotide
  Sense strand starting at position 1307 of SEQ ID NO: 1386
ugugaucaagggugaaauu

SEQ ID NO: 109003 - RNA, 19 nt, Artificial Sequence
  Description of Artificial Sequence: Synthetic oligonucleotide
  Antisense strand to SEQ ID NO: 109002
aauuucacccuugaucaca

SEQ ID NO: 109004 - RNA, 19 nt, Artificial Sequence
  Description of Artificial Sequence: Synthetic oligonucleotide
  Sense strand starting at position 1304 of SEQ ID NO: 1386
ggcugugaucaagggugaa

SEQ ID NO: 109005 - RNA, 19 nt, Artificial Sequence
  Description of Artificial Sequence: Synthetic oligonucleotide
  Antisense strand to SEQ ID NO: 109004
uucacccuugaucacagcc

SEQ ID NO: 109006 - RNA, 19 nt, Artificial Sequence
  Description of Artificial Sequence: Synthetic oligonucleotide
  Sense strand starting at position 1243 of SEQ ID NO: 1386
guguuuauucgucucaggu

SEQ ID NO: 109007 - RNA, 19 nt, Artificial Sequence
  Description of Artificial Sequence: Synthetic oligonucleotide
  Antisense strand to SEQ ID NO: 109006
accugagacgaauaaacac

SEQ ID NO: 109008 - RNA, 19 nt, Artificial Sequence
  Description of Artificial Sequence: Synthetic oligonucleotide
  Sense strand starting at position 1214 of SEQ ID NO: 1386
agagauacucaguauguuu

SEQ ID NO: 109009 - RNA, 19 nt, Artificial Sequence
  Description of Artificial Sequence: Synthetic oligonucleotide
  Antisense strand to SEQ ID NO: 109008
aaacauacugaguaucucu

SEQ ID NO: 109010 - RNA, 19 nt, Artificial Sequence
  Description of Artificial Sequence: Synthetic oligonucleotide
  Sense strand starting at position 1213 of SEQ ID NO: 1386
cagagauacucaguauguu

SEQ ID NO: 109011 - RNA, 19 nt, Artificial Sequence
  Description of Artificial Sequence: Synthetic oligonucleotide
  Antisense strand to SEQ ID NO: 109010
aacauacugaguaucucug

SEQ ID NO: 109012 - RNA, 19 nt, Artificial Sequence
  Description of Artificial Sequence: Synthetic oligonucleotide
  Sense strand starting at position 1211 of SEQ ID NO: 1386
ugcagagauacucaguaug

SEQ ID NO: 109013 - RNA, 19 nt, Artificial Sequence
  Description of Artificial Sequence: Synthetic oligonucleotide
  Antisense strand to SEQ ID NO: 109012
cauacugaguaucucugca

SEQ ID NO: 109014 - RNA, 19 nt, Artificial Sequence
  Description of Artificial Sequence: Synthetic oligonucleotide
  Sense strand starting at position 1200 of SEQ ID NO: 1386
cuguguuccuuugcagaga

SEQ ID NO: 109015 - RNA, 19 nt, Artificial Sequence
  Description of Artificial Sequence: Synthetic oligonucleotide
  Antisense strand to SEQ ID NO: 109014
ucucugcaaaggaacacag

SEQ ID NO: 109016 - RNA, 19 nt, Artificial Sequence
  Description of Artificial Sequence: Synthetic oligonucleotide
  Sense strand starting at position 1058 of SEQ ID NO: 1386
cuguaugaaguguaucuuu

SEQ ID NO: 109017 - RNA, 19 nt, Artificial Sequence
  Description of Artificial Sequence: Synthetic oligonucleotide
  Antisense strand to SEQ ID NO: 109016
aaagauacacuucauacag

SEQ ID NO: 109018 - RNA, 19 nt, Artificial Sequence
  Description of Artificial Sequence: Synthetic oligonucleotide
  Sense strand starting at position 1049 of SEQ ID NO: 1386
ccagguugucuguaugaag

SEQ ID NO: 109019 - RNA, 19 nt, Artificial Sequence
  Description of Artificial Sequence: Synthetic oligonucleotide
  Antisense strand to SEQ ID NO: 109018
cuucauacagacaaccugg

SEQ ID NO: 109020 - RNA, 19 nt, Artificial Sequence
  Description of Artificial Sequence: Synthetic oligonucleotide
  Sense strand starting at position 812 of SEQ ID NO: 1386
auaugucaugaauguaaug

SEQ ID NO: 109021 - RNA, 19 nt, Artificial Sequence
  Description of Artificial Sequence: Synthetic oligonucleotide
  Antisense strand to SEQ ID NO: 109020
cauuacauucaugacauau

SEQ ID NO: 109022 - RNA, 19 nt, Artificial Sequence
  Description of Artificial Sequence: Synthetic oligonucleotide
  Sense strand starting at position 721 of SEQ ID NO: 1386
ccaucaaugguuugauggu

SEQ ID NO: 109023 - RNA, 19 nt, Artificial Sequence
  Description of Artificial Sequence: Synthetic oligonucleotide
  Antisense strand to SEQ ID NO: 109022
accaucaaaccauugaugg

SEQ ID NO: 109024 - RNA, 19 nt, Artificial Sequence
  Description of Artificial Sequence: Synthetic oligonucleotide
  Sense strand starting at position 710 of SEQ ID NO: 1386
gggcuagacgaccaucaau

SEQ ID NO: 109025 - RNA, 19 nt, Artificial Sequence
  Description of Artificial Sequence: Synthetic oligonucleotide
  Antisense strand to SEQ ID NO: 109024
auugauggucgucuagccc

SEQ ID NO: 109026 - RNA, 19 nt, Artificial Sequence
  Description of Artificial Sequence: Synthetic oligonucleotide
  Sense strand starting at position 293 of SEQ ID NO: 1386
gguaguuuccucuaagcua

SEQ ID NO: 109027 - RNA, 19 nt, Artificial Sequence
  Description of Artificial Sequence: Synthetic oligonucleotide
  Antisense strand to SEQ ID NO: 109026
uagcuuagaggaaacuacc

SEQ ID NO: 109028 - RNA, 19 nt, Artificial Sequence
  Description of Artificial Sequence: Synthetic oligonucleotide
  Sense strand starting at position 236 of SEQ ID NO: 1386
ucuuaccaggccugagauu

SEQ ID NO: 109029 - RNA, 19 nt, Artificial Sequence
  Description of Artificial Sequence: Synthetic oligonucleotide
  Antisense strand to SEQ ID NO: 109028
aaucucaggccugguaaga

SEQ ID NO: 109030 - RNA, 19 nt, Artificial Sequence
  Description of Artificial Sequence: Synthetic oligonucleotide
  Sense strand starting at position 172 of SEQ ID NO: 1386
ugucuugagggcugcacaa

SEQ ID NO: 109031 - RNA, 19 nt, Artificial Sequence
  Description of Artificial Sequence: Synthetic oligonucleotide
  Antisense strand to SEQ ID NO: 109030
uugugcagcccucaagaca

SEQ ID NO: 109032 - RNA, 19 nt, Artificial Sequence
  Description of Artificial Sequence: Synthetic oligonucleotide
  Sense strand starting at position 144 of SEQ ID NO: 1386
gccaguucucaagaacccu

SEQ ID NO: 109033 - RNA, 19 nt, Artificial Sequence
  Description of Artificial Sequence: Synthetic oligonucleotide
  Antisense strand to SEQ ID NO: 109032
aggguucuugagaacuggc

SEQ ID NO: 109034 - RNA, 19 nt, Artificial Sequence
  Description of Artificial Sequence: Synthetic oligonucleotide
  Sense strand starting at position 140 of SEQ ID NO: 1386
cuaugccaguucucaagaa

SEQ ID NO: 109035 - RNA, 19 nt, Artificial Sequence
  Description of Artificial Sequence: Synthetic oligonucleotide
  Antisense strand to SEQ ID NO: 109034
uucuugagaacuggcauag

SEQ ID NO: 109036 - RNA, 19 nt, Artificial Sequence
  Description of Artificial Sequence: Synthetic oligonucleotide
  Sense strand starting at position 129 of SEQ ID NO: 1386
cuuagaagucccuaugcca

SEQ ID NO: 109037 - RNA, 19 nt, Artificial Sequence
  Description of Artificial Sequence: Synthetic oligonucleotide
  Antisense strand to SEQ ID NO: 109036
uggcauagggacuucuaag

SEQ ID NO: 109038 - RNA, 19 nt, Artificial Sequence
  Description of Artificial Sequence: Synthetic oligonucleotide
  Sense strand starting at position 108 of SEQ ID NO: 1386
agguguuuccaggaggcuu

SEQ ID NO: 109039 - RNA, 19 nt, Artificial Sequence
  Description of Artificial Sequence: Synthetic oligonucleotide
  Antisense strand to SEQ ID NO: 109038
aagccuccuggaaacaccu

SEQ ID NO: 109040 - RNA, 19 nt, Artificial Sequence
  Description of Artificial Sequence: Synthetic oligonucleotide
  Sense strand starting at position 110 of SEQ ID NO: 1387
auacgauaguauuccaaau

SEQ ID NO: 109041 - RNA, 19 nt, Artificial Sequence
  Description of Artificial Sequence: Synthetic oligonucleotide
  Antisense strand to SEQ ID NO: 109040
auuuggaauacuaucguau

SEQ ID NO: 109042 - RNA, 19 nt, Artificial Sequence
  Description of Artificial Sequence: Synthetic oligonucleotide
  Sense strand starting at position 112 of SEQ ID NO: 1387
acgauaguauuccaaauuu

SEQ ID NO: 109043 - RNA, 19 nt, Artificial Sequence
  Description of Artificial Sequence: Synthetic oligonucleotide
  Antisense strand to SEQ ID NO: 109042
aaauuuggaauacuaucgu

SEQ ID NO: 109044 - RNA, 19 nt, Artificial Sequence
  Description of Artificial Sequence: Synthetic oligonucleotide
  Sense strand starting at position 243 of SEQ ID NO: 1387
acaugucauguacacugau

SEQ ID NO: 109045 - RNA, 19 nt, Artificial Sequence
  Description of Artificial Sequence: Synthetic oligonucleotide
  Antisense strand to SEQ ID NO: 109044
aucaguguacaugacaugu

SEQ ID NO: 109046 - RNA, 19 nt, Artificial Sequence
  Description of Artificial Sequence: Synthetic oligonucleotide
  Sense strand starting at position 385 of SEQ ID NO: 1387
gggcguuuagcuuuguuua

SEQ ID NO: 109047 - RNA, 19 nt, Artificial Sequence
  Description of Artificial Sequence: Synthetic oligonucleotide
  Antisense strand to SEQ ID NO: 109046
uaaacaaagcuaaacgccc

SEQ ID NO: 109048 - RNA, 19 nt, Artificial Sequence
  Description of Artificial Sequence: Synthetic oligonucleotide
  Sense strand starting at position 403 of SEQ ID NO: 1387
agaucuaagcuuugcugau

SEQ ID NO: 109049 - RNA, 19 nt, Artificial Sequence
  Description of Artificial Sequence: Synthetic oligonucleotide
  Antisense strand to SEQ ID NO: 109048
aucagcaaagcuuagaucu

SEQ ID NO: 109050 - RNA, 19 nt, Artificial Sequence
  Description of Artificial Sequence: Synthetic oligonucleotide
  Sense strand starting at position 497 of SEQ ID NO: 1387
ggguauggauguuuauuaa

SEQ ID NO: 109051 - RNA, 19 nt, Artificial Sequence
  Description of Artificial Sequence: Synthetic oligonucleotide
  Antisense strand to SEQ ID NO: 109050
uuaauaaacauccauaccc

SEQ ID NO: 109052 - RNA, 19 nt, Artificial Sequence
  Description of Artificial Sequence: Synthetic oligonucleotide
  Sense strand starting at position 595 of SEQ ID NO: 1387
ggaggaagguaggaauaaa

SEQ ID NO: 109053 - RNA, 19 nt, Artificial Sequence
  Description of Artificial Sequence: Synthetic oligonucleotide
  Antisense strand to SEQ ID NO: 109052
uuuauuccuaccuuccucc

SEQ ID NO: 109054 - RNA, 19 nt, Artificial Sequence
  Description of Artificial Sequence: Synthetic oligonucleotide
  Sense strand starting at position 694 of SEQ ID NO: 1387
acacaugugugagugacaa

SEQ ID NO: 109055 - RNA, 19 nt, Artificial Sequence
  Description of Artificial Sequence: Synthetic oligonucleotide
  Antisense strand to SEQ ID NO: 109054
uugucacucacacaugugu

SEQ ID NO: 109056 - RNA, 19 nt, Artificial Sequence
  Description of Artificial Sequence: Synthetic oligonucleotide
  Sense strand starting at position 696 of SEQ ID NO: 1387
acaugugugagugacaaug

SEQ ID NO: 109057 - RNA, 19 nt, Artificial Sequence
  Description of Artificial Sequence: Synthetic oligonucleotide
  Antisense strand to SEQ ID NO: 109056
cauugucacucacacaugu

SEQ ID NO: 109058 - RNA, 19 nt, Artificial Sequence
  Description of Artificial Sequence: Synthetic oligonucleotide
  Sense strand starting at position 775 of SEQ ID NO: 1387
ugguucuuacagcauggaa

SEQ ID NO: 109059 - RNA, 19 nt, Artificial Sequence
  Description of Artificial Sequence: Synthetic oligonucleotide
  Antisense strand to SEQ ID NO: 109058
uuccaugcuguaagaacca

SEQ ID NO: 109060 - RNA, 19 nt, Artificial Sequence
  Description of Artificial Sequence: Synthetic oligonucleotide
  Sense strand starting at position 777 of SEQ ID NO: 1387
guucuuacagcauggaagu

SEQ ID NO: 109061 - RNA, 19 nt, Artificial Sequence
  Description of Artificial Sequence: Synthetic oligonucleotide
  Antisense strand to SEQ ID NO: 109060
acuuccaugcuguaagaac

SEQ ID NO: 109062 - RNA, 19 nt, Artificial Sequence
  Description of Artificial Sequence: Synthetic oligonucleotide
  Sense strand starting at position 812 of SEQ ID NO: 1387
augugagaguaugugaguu

SEQ ID NO: 109063 - RNA, 19 nt, Artificial Sequence
  Description of Artificial Sequence: Synthetic oligonucleotide
  Antisense strand to SEQ ID NO: 109062
aacucacauacucucacau

SEQ ID NO: 109064 - RNA, 19 nt, Artificial Sequence
  Description of Artificial Sequence: Synthetic oligonucleotide
  Sense strand starting at position 816 of SEQ ID NO: 1387
gagaguaugugaguuagua

SEQ ID NO: 109065 - RNA, 19 nt, Artificial Sequence
  Description of Artificial Sequence: Synthetic oligonucleotide
  Antisense strand to SEQ ID NO: 109064
uacuaacucacauacucuc

SEQ ID NO: 109066 - RNA, 19 nt, Artificial Sequence
  Description of Artificial Sequence: Synthetic oligonucleotide
  Sense strand starting at position 818 of SEQ ID NO: 1387
gaguaugugaguuaguaug

SEQ ID NO: 109067 - RNA, 19 nt, Artificial Sequence
  Description of Artificial Sequence: Synthetic oligonucleotide
  Antisense strand to SEQ ID NO: 109066
cauacuaacucacauacuc

SEQ ID NO: 109068 - RNA, 19 nt, Artificial Sequence
  Description of Artificial Sequence: Synthetic oligonucleotide
  Sense strand starting at position 826 of SEQ ID NO: 1387
gaguuaguauguuuaugga

SEQ ID NO: 109069 - RNA, 19 nt, Artificial Sequence
  Description of Artificial Sequence: Synthetic oligonucleotide
  Antisense strand to SEQ ID NO: 109068
uccauaaacauacuaacuc

SEQ ID NO: 109070 - RNA, 19 nt, Artificial Sequence
  Description of Artificial Sequence: Synthetic oligonucleotide
  Sense strand starting at position 844 of SEQ ID NO: 1387
aaauaagauuuaugagggu

SEQ ID NO: 109071 - RNA, 19 nt, Artificial Sequence
  Description of Artificial Sequence: Synthetic oligonucleotide
  Antisense strand to SEQ ID NO: 109070
acccucauaaaucuuauuu

SEQ ID NO: 109072 - RNA, 19 nt, Artificial Sequence
  Description of Artificial Sequence: Synthetic oligonucleotide
  Sense strand starting at position 1069 of SEQ ID NO: 1387
auuagagucguggagauaa

SEQ ID NO: 109073 - RNA, 19 nt, Artificial Sequence
  Description of Artificial Sequence: Synthetic oligonucleotide
  Antisense strand to SEQ ID NO: 109072
uuaucuccacgacucuaau

SEQ ID NO: 109074 - RNA, 19 nt, Artificial Sequence
  Description of Artificial Sequence: Synthetic oligonucleotide
  Sense strand starting at position 1270 of SEQ ID NO: 1387
agaaaucgagccuaagugu

SEQ ID NO: 109075 - RNA, 19 nt, Artificial Sequence
  Description of Artificial Sequence: Synthetic oligonucleotide
  Antisense strand to SEQ ID NO: 109074
acacuuaggcucgauuucu

SEQ ID NO: 109076 - RNA, 19 nt, Artificial Sequence
  Description of Artificial Sequence: Synthetic oligonucleotide
  Sense strand starting at position 1278 of SEQ ID NO: 1387
agccuaaguguccaaguga

SEQ ID NO: 109077 - RNA, 19 nt, Artificial Sequence
  Description of Artificial Sequence: Synthetic oligonucleotide
  Antisense strand to SEQ ID NO: 109076
ucacuuggacacuuaggcu

SEQ ID NO: 109078 - RNA, 19 nt, Artificial Sequence
  Description of Artificial Sequence: Synthetic oligonucleotide
  Sense strand starting at position 1319 of SEQ ID NO: 1387
agaacagcaguuugaaaga

SEQ ID NO: 109079 - RNA, 19 nt, Artificial Sequence
  Description of Artificial Sequence: Synthetic oligonucleotide
  Antisense strand to SEQ ID NO: 109078
ucuuucaaacugcuguucu

SEQ ID NO: 109080 - RNA, 19 nt, Artificial Sequence
  Description of Artificial Sequence: Synthetic oligonucleotide
  Sense strand starting at position 1332 of SEQ ID NO: 1387
gaaagagucgcuuaugcug

SEQ ID NO: 109081 - RNA, 19 nt, Artificial Sequence
  Description of Artificial Sequence: Synthetic oligonucleotide
  Antisense strand to SEQ ID NO: 109080
cagcauaagcgacucuuuc

SEQ ID NO: 109082 - RNA, 19 nt, Artificial Sequence
  Description of Artificial Sequence: Synthetic oligonucleotide
  Sense strand starting at position 1339 of SEQ ID NO: 1387
ucgcuuaugcuggaguaaa

SEQ ID NO: 109083 - RNA, 19 nt, Artificial Sequence
  Description of Artificial Sequence: Synthetic oligonucleotide
  Antisense strand to SEQ ID NO: 109082
uuuacuccagcauaagcga

SEQ ID NO: 109084 - RNA, 19 nt, Artificial Sequence
  Description of Artificial Sequence: Synthetic oligonucleotide
  Sense strand starting at position 1370 of SEQ ID NO: 1387
cugauaaacuugucagacu

SEQ ID NO: 109085 - RNA, 19 nt, Artificial Sequence
  Description of Artificial Sequence: Synthetic oligonucleotide
  Antisense strand to SEQ ID NO: 109084
agucugacaaguuuaucag

SEQ ID NO: 109086 - RNA, 19 nt, Artificial Sequence
  Description of Artificial Sequence: Synthetic oligonucleotide
  Sense strand starting at position 1504 of SEQ ID NO: 1387
cggcaaagugcuuuagcau

SEQ ID NO: 109087 - RNA, 19 nt, Artificial Sequence
  Description of Artificial Sequence: Synthetic oligonucleotide
  Antisense strand to SEQ ID NO: 109086
augcuaaagcacuuugccg

SEQ ID NO: 109088 - RNA, 19 nt, Artificial Sequence
  Description of Artificial Sequence: Synthetic oligonucleotide
  Sense strand starting at position 1585 of SEQ ID NO: 1387
ccuggaauucuugggaugu

SEQ ID NO: 109089 - RNA, 19 nt, Artificial Sequence
  Description of Artificial Sequence: Synthetic oligonucleotide
  Antisense strand to SEQ ID NO: 109088
acaucccaagaauuccagg

SEQ ID NO: 109090 - RNA, 19 nt, Artificial Sequence
  Description of Artificial Sequence: Synthetic oligonucleotide
  Sense strand starting at position 1602 of SEQ ID NO: 1387
guggucuuuccaugaugag

SEQ ID NO: 109091 - RNA, 19 nt, Artificial Sequence
  Description of Artificial Sequence: Synthetic oligonucleotide
  Antisense strand to SEQ ID NO: 109090
cucaucauggaaagaccac

SEQ ID NO: 109092 - RNA, 19 nt, Artificial Sequence
  Description of Artificial Sequence: Synthetic oligonucleotide
  Sense strand starting at position 1629 of SEQ ID NO: 1387
gcauuauugcuuguguuau

SEQ ID NO: 109093 - RNA, 19 nt, Artificial Sequence
  Description of Artificial Sequence: Synthetic oligonucleotide
  Antisense strand to SEQ ID NO: 109092
auaacacaagcaauaaugc

SEQ ID NO: 109094 - RNA, 19 nt, Artificial Sequence
  Description of Artificial Sequence: Synthetic oligonucleotide
  Sense strand starting at position 1639 of SEQ ID NO: 1387
uuguguuauaaagaaggca

SEQ ID NO: 109095 - RNA, 19 nt, Artificial Sequence
  Description of Artificial Sequence: Synthetic oligonucleotide
  Antisense strand to SEQ ID NO: 109094
ugccuucuuuauaacacaa

SEQ ID NO: 109096 - RNA, 19 nt, Artificial Sequence
  Description of Artificial Sequence: Synthetic oligonucleotide
  Sense strand starting at position 1965 of SEQ ID NO: 1387
cgagucuucccgggaacca

SEQ ID NO: 109097 - RNA, 19 nt, Artificial Sequence
  Description of Artificial Sequence: Synthetic oligonucleotide
  Antisense strand to SEQ ID NO: 109096
ugguucccgggaagacucg

SEQ ID NO: 109098 - RNA, 19 nt, Artificial Sequence
  Description of Artificial Sequence: Synthetic oligonucleotide
  Sense strand starting at position 2656 of SEQ ID NO: 1387
gagggauucuuugcuagaa

SEQ ID NO: 109099 - RNA, 19 nt, Artificial Sequence
  Description of Artificial Sequence: Synthetic oligonucleotide
  Antisense strand to SEQ ID NO: 109098
uucuagcaaagaaucccuc

SEQ ID NO: 109100 - RNA, 19 nt, Artificial Sequence
  Description of Artificial Sequence: Synthetic oligonucleotide
  Sense strand starting at position 2657 of SEQ ID NO: 1387
agggauucuuugcuagaaa

SEQ ID NO: 109101 - RNA, 19 nt, Artificial Sequence
  Description of Artificial Sequence: Synthetic oligonucleotide
  Antisense strand to SEQ ID NO: 109100
uuucuagcaaagaaucccu

SEQ ID NO: 109102 - RNA, 19 nt, Artificial Sequence
  Description of Artificial Sequence: Synthetic oligonucleotide
  Sense strand starting at position 3041 of SEQ ID NO: 1387
ggguguugacacuaaguug

SEQ ID NO: 109103 - RNA, 19 nt, Artificial Sequence
  Description of Artificial Sequence: Synthetic oligonucleotide
  Antisense strand to SEQ ID NO: 109102
caacuuagugucaacaccc

SEQ ID NO: 109104 - RNA, 19 nt, Artificial Sequence
  Description of Artificial Sequence: Synthetic oligonucleotide
  Sense strand starting at position 3075 of SEQ ID NO: 1387
gauuguuuauggucaacau

SEQ ID NO: 109105 - RNA, 19 nt, Artificial Sequence
  Description of Artificial Sequence: Synthetic oligonucleotide
  Antisense strand to SEQ ID NO: 109104
auguugaccauaaacaauc

SEQ ID NO: 109106 - RNA, 19 nt, Artificial Sequence
  Description of Artificial Sequence: Synthetic oligonucleotide
  Sense strand starting at position 3281 of SEQ ID NO: 1387
agccuaucaggccgaauaa

SEQ ID NO: 109107 - RNA, 19 nt, Artificial Sequence
  Description of Artificial Sequence: Synthetic oligonucleotide
  Antisense strand to SEQ ID NO: 109106
uuauucggccugauaggcu

SEQ ID NO: 109108 - RNA, 19 nt, Artificial Sequence
  Description of Artificial Sequence: Synthetic oligonucleotide
  Sense strand starting at position 3282 of SEQ ID NO: 1387
gccuaucaggccgaauaau

SEQ ID NO: 109109 - RNA, 19 nt, Artificial Sequence
  Description of Artificial Sequence: Synthetic oligonucleotide
  Antisense strand to SEQ ID NO: 109108
auuauucggccugauaggc

SEQ ID NO: 109110 - RNA, 19 nt, Artificial Sequence
  Description of Artificial Sequence: Synthetic oligonucleotide
  Sense strand starting at position 3589 of SEQ ID NO: 1387
uuugcaaaucaaugcgaga

SEQ ID NO: 109111 - RNA, 19 nt, Artificial Sequence
  Description of Artificial Sequence: Synthetic oligonucleotide
  Antisense strand to SEQ ID NO: 109110
ucucgcauugauuugcaaa

SEQ ID NO: 109112 - RNA, 19 nt, Artificial Sequence
  Description of Artificial Sequence: Synthetic oligonucleotide
  Sense strand starting at position 3613 of SEQ ID NO: 1387
ggcugagucguuagcaguu

SEQ ID NO: 109113 - RNA, 19 nt, Artificial Sequence
  Description of Artificial Sequence: Synthetic oligonucleotide
  Antisense strand to SEQ ID NO: 109112
aacugcuaacgacucagcc

SEQ ID NO: 109114 - RNA, 19 nt, Artificial Sequence
  Description of Artificial Sequence: Synthetic oligonucleotide
  Sense strand starting at position 3760 of SEQ ID NO: 1387
uuuagcaguguuugaagaa

SEQ ID NO: 109115 - RNA, 19 nt, Artificial Sequence
  Description of Artificial Sequence: Synthetic oligonucleotide
  Antisense strand to SEQ ID NO: 109114
uucuucaaacacugcuaaa

SEQ ID NO: 109116 - RNA, 19 nt, Artificial Sequence
  Description of Artificial Sequence: Synthetic oligonucleotide
  Sense strand starting at position 3775 of SEQ ID NO: 1387
agaagauauucuuugccag

SEQ ID NO: 109117 - RNA, 19 nt, Artificial Sequence
  Description of Artificial Sequence: Synthetic oligonucleotide
  Antisense strand to SEQ ID NO: 109116
cuggcaaagaauaucuucu

SEQ ID NO: 109118 - RNA, 19 nt, Artificial Sequence
  Description of Artificial Sequence: Synthetic oligonucleotide
  Sense strand starting at position 3778 of SEQ ID NO: 1387
agauauucuuugccagauc

SEQ ID NO: 109119 - RNA, 19 nt, Artificial Sequence
  Description of Artificial Sequence: Synthetic oligonucleotide
  Antisense strand to SEQ ID NO: 109118
gaucuggcaaagaauaucu

SEQ ID NO: 109120 - RNA, 19 nt, Artificial Sequence
  Description of Artificial Sequence: Synthetic oligonucleotide
  Sense strand starting at position 40 of SEQ ID NO: 1388
gccagagucaacugaguca

SEQ ID NO: 109121 - RNA, 19 nt, Artificial Sequence
  Description of Artificial Sequence: Synthetic oligonucleotide
  Antisense strand to SEQ ID NO: 109120
ugacucaguugacucuggc

SEQ ID NO: 109122 - RNA, 19 nt, Artificial Sequence
  Description of Artificial Sequence: Synthetic oligonucleotide
  Sense strand starting at position 43 of SEQ ID NO: 1388
agagucaacugagucauca

SEQ ID NO: 109123 - RNA, 19 nt, Artificial Sequence
  Description of Artificial Sequence: Synthetic oligonucleotide
  Antisense strand to SEQ ID NO: 109122
ugaugacucaguugacucu

SEQ ID NO: 109124 - RNA, 19 nt, Artificial Sequence
  Description of Artificial Sequence: Synthetic oligonucleotide
  Sense strand starting at position 52 of SEQ ID NO: 1388
ugagucaucacucgaagaa

SEQ ID NO: 109125 - RNA, 19 nt, Artificial Sequence
  Description of Artificial Sequence: Synthetic oligonucleotide
  Antisense strand to SEQ ID NO: 109124
uucuucgagugaugacuca

SEQ ID NO: 109126 - RNA, 19 nt, Artificial Sequence
  Description of Artificial Sequence: Synthetic oligonucleotide
  Sense strand starting at position 105 of SEQ ID NO: 1388
gcaguuauacagcauauaa

SEQ ID NO: 109127 - RNA, 19 nt, Artificial Sequence
  Description of Artificial Sequence: Synthetic oligonucleotide
  Antisense strand to SEQ ID NO: 109126
uuauaugcuguauaacugc

SEQ ID NO: 109128 - RNA, 19 nt, Artificial Sequence
  Description of Artificial Sequence: Synthetic oligonucleotide
  Sense strand starting at position 337 of SEQ ID NO: 1388
ggcacaugucacuauaccu

SEQ ID NO: 109129 - RNA, 19 nt, Artificial Sequence
  Description of Artificial Sequence: Synthetic oligonucleotide
  Antisense strand to SEQ ID NO: 109128
agguauagugacaugugcc

SEQ ID NO: 109130 - RNA, 19 nt, Artificial Sequence
  Description of Artificial Sequence: Synthetic oligonucleotide
  Sense strand starting at position 515 of SEQ ID NO: 1388
gguguugauucaccaggaa

SEQ ID NO: 109131 - RNA, 19 nt, Artificial Sequence
  Description of Artificial Sequence: Synthetic oligonucleotide
  Antisense strand to SEQ ID NO: 109130
uuccuggugaaucaacacc

SEQ ID NO: 109132 - RNA, 19 nt, Artificial Sequence
  Description of Artificial Sequence: Synthetic oligonucleotide
  Sense strand starting at position 725 of SEQ ID NO: 1388
uacaauguacaguguugua

SEQ ID NO: 109133 - RNA, 19 nt, Artificial Sequence
  Description of Artificial Sequence: Synthetic oligonucleotide
  Antisense strand to SEQ ID NO: 109132
uacaacacuguacauugua

SEQ ID NO: 109134 - RNA, 19 nt, Artificial Sequence
  Description of Artificial Sequence: Synthetic oligonucleotide
  Sense strand starting at position 737 of SEQ ID NO: 1388
uguuguauugguccgguca

SEQ ID NO: 109135 - RNA, 19 nt, Artificial Sequence
  Description of Artificial Sequence: Synthetic oligonucleotide
  Antisense strand to SEQ ID NO: 109134
ugaccggaccaauacaaca

SEQ ID NO: 109136 - RNA, 19 nt, Artificial Sequence
  Description of Artificial Sequence: Synthetic oligonucleotide
  Sense strand starting at position 750 of SEQ ID NO: 1388
cggucaauaauccgaucau

SEQ ID NO: 109137 - RNA, 19 nt, Artificial Sequence
  Description of Artificial Sequence: Synthetic oligonucleotide
  Antisense strand to SEQ ID NO: 109136
augaucggauuauugaccg

SEQ ID NO: 109138 - RNA, 19 nt, Artificial Sequence
  Description of Artificial Sequence: Synthetic oligonucleotide
  Sense strand starting at position 766 of SEQ ID NO: 1388
cauaguaacgaacgauguu

SEQ ID NO: 109139 - RNA, 19 nt, Artificial Sequence
  Description of Artificial Sequence: Synthetic oligonucleotide
  Antisense strand to SEQ ID NO: 109138
aacaucguucguuacuaug

SEQ ID NO: 109140 - RNA, 19 nt, Artificial Sequence
  Description of Artificial Sequence: Synthetic oligonucleotide
  Sense strand starting at position 857 of SEQ ID NO: 1388
auagucaaguucuuuccaa

SEQ ID NO: 109141 - RNA, 19 nt, Artificial Sequence
  Description of Artificial Sequence: Synthetic oligonucleotide
  Antisense strand to SEQ ID NO: 109140
uuggaaagaacuugacuau

SEQ ID NO: 109142 - RNA, 19 nt, Artificial Sequence
  Description of Artificial Sequence: Synthetic oligonucleotide
  Sense strand starting at position 1030 of SEQ ID NO: 1388
cugugaguuuacuuccaua

SEQ ID NO: 109143 - RNA, 19 nt, Artificial Sequence
  Description of Artificial Sequence: Synthetic oligonucleotide
  Antisense strand to SEQ ID NO: 109142
uauggaaguaaacucacag

SEQ ID NO: 109144 - RNA, 19 nt, Artificial Sequence
  Description of Artificial Sequence: Synthetic oligonucleotide
  Sense strand starting at position 1059 of SEQ ID NO: 1388
aguucuaagcaguaaaugu

SEQ ID NO: 109145 - RNA, 19 nt, Artificial Sequence
  Description of Artificial Sequence: Synthetic oligonucleotide
  Antisense strand to SEQ ID NO: 109144
acauuuacugcuuagaacu

SEQ ID NO: 109146 - RNA, 19 nt, Artificial Sequence
  Description of Artificial Sequence: Synthetic oligonucleotide
  Sense strand starting at position 1249 of SEQ ID NO: 1388
ugguaaagaucccuccauc

SEQ ID NO: 109147 - RNA, 19 nt, Artificial Sequence
  Description of Artificial Sequence: Synthetic oligonucleotide
  Antisense strand to SEQ ID NO: 109146
gauggagggaucuuuacca

SEQ ID NO: 109148 - RNA, 19 nt, Artificial Sequence
  Description of Artificial Sequence: Synthetic oligonucleotide
  Sense strand starting at position 1367 of SEQ ID NO: 1388
gagggagucugacugcaga

SEQ ID NO: 109149 - RNA, 19 nt, Artificial Sequence
  Description of Artificial Sequence: Synthetic oligonucleotide
  Antisense strand to SEQ ID NO: 109148
ucugcagucagacucccuc

SEQ ID NO: 109150 - RNA, 19 nt, Artificial Sequence
  Description of Artificial Sequence: Synthetic oligonucleotide
  Sense strand starting at position 1464 of SEQ ID NO: 1388
aggaauuaguuaccuguca

SEQ ID NO: 109151 - RNA, 19 nt, Artificial Sequence
  Description of Artificial Sequence: Synthetic oligonucleotide
  Antisense strand to SEQ ID NO: 109150
ugacagguaacuaauuccu

SEQ ID NO: 109152 - RNA, 19 nt, Artificial Sequence
  Description of Artificial Sequence: Synthetic oligonucleotide
  Sense strand starting at position 1485 of SEQ ID NO: 1388
aauggaagguccuuagcaa

SEQ ID NO: 109153 - RNA, 19 nt, Artificial Sequence
  Description of Artificial Sequence: Synthetic oligonucleotide
  Antisense strand to SEQ ID NO: 109152
uugcuaaggaccuuccauu

SEQ ID NO: 109154 - RNA, 19 nt, Artificial Sequence
  Description of Artificial Sequence: Synthetic oligonucleotide
  Sense strand starting at position 2045 of SEQ ID NO: 1388
ccucucucauuggcuaaga

SEQ ID NO: 109155 - RNA, 19 nt, Artificial Sequence
  Description of Artificial Sequence: Synthetic oligonucleotide
  Antisense strand to SEQ ID NO: 109154
ucuuagccaaugagagagg

SEQ ID NO: 109156 - RNA, 19 nt, Artificial Sequence
  Description of Artificial Sequence: Synthetic oligonucleotide
  Sense strand starting at position 2046 of SEQ ID NO: 1388
cucucucauuggcuaagaa

SEQ ID NO: 109157 - RNA, 19 nt, Artificial Sequence
  Description of Artificial Sequence: Synthetic oligonucleotide
  Antisense strand to SEQ ID NO: 109156
uucuuagccaaugagagag

SEQ ID NO: 109158 - RNA, 19 nt, Artificial Sequence
  Description of Artificial Sequence: Synthetic oligonucleotide
  Sense strand starting at position 2221 of SEQ ID NO: 1388
gauagagaucgccaaggua

SEQ ID NO: 109159 - RNA, 19 nt, Artificial Sequence
  Description of Artificial Sequence: Synthetic oligonucleotide
  Antisense strand to SEQ ID NO: 109158
uaccuuggcgaucucuauc

SEQ ID NO: 109160 - RNA, 19 nt, Artificial Sequence
  Description of Artificial Sequence: Synthetic oligonucleotide
  Sense strand starting at position 2396 of SEQ ID NO: 1388
ugaggauaugcugagagcu

SEQ ID NO: 109161 - RNA, 19 nt, Artificial Sequence
  Description of Artificial Sequence: Synthetic oligonucleotide
  Antisense strand to SEQ ID NO: 109160
agcucucagcauauccuca

SEQ ID NO: 109162 - RNA, 19 nt, Artificial Sequence
  Description of Artificial Sequence: Synthetic oligonucleotide
  Sense strand starting at position 2922 of SEQ ID NO: 1388
acacgucuugucccguuua

SEQ ID NO: 109163 - RNA, 19 nt, Artificial Sequence
  Description of Artificial Sequence: Synthetic oligonucleotide
  Antisense strand to SEQ ID NO: 109162
uaaacgggacaagacgugu

SEQ ID NO: 109164 - RNA, 19 nt, Artificial Sequence
  Description of Artificial Sequence: Synthetic oligonucleotide
  Sense strand starting at position 2924 of SEQ ID NO: 1388
acgucuugucccguuuaug

SEQ ID NO: 109165 - RNA, 19 nt, Artificial Sequence
  Description of Artificial Sequence: Synthetic oligonucleotide
  Antisense strand to SEQ ID NO: 109164
cauaaacgggacaagacgu

SEQ ID NO: 109166 - RNA, 19 nt, Artificial Sequence
  Description of Artificial Sequence: Synthetic oligonucleotide
  Sense strand starting at position 2925 of SEQ ID NO: 1388
cgucuugucccguuuaugu

SEQ ID NO: 109167 - RNA, 19 nt, Artificial Sequence
  Description of Artificial Sequence: Synthetic oligonucleotide
  Antisense strand to SEQ ID NO: 109166
acauaaacgggacaagacg

SEQ ID NO: 109168 - RNA, 19 nt, Artificial Sequence
  Description of Artificial Sequence: Synthetic oligonucleotide
  Sense strand starting at position 3085 of SEQ ID NO: 1388
ccauccagggcuuguuaga

SEQ ID NO: 109169 - RNA, 19 nt, Artificial Sequence
  Description of Artificial Sequence: Synthetic oligonucleotide
  Antisense strand to SEQ ID NO: 109168
ucuaacaagcccuggaugg

SEQ ID NO: 109170 - RNA, 19 nt, Artificial Sequence
  Description of Artificial Sequence: Synthetic oligonucleotide
  Sense strand starting at position 3092 of SEQ ID NO: 1388
gggcuuguuagaggaauau

SEQ ID NO: 109171 - RNA, 19 nt, Artificial Sequence
  Description of Artificial Sequence: Synthetic oligonucleotide
  Antisense strand to SEQ ID NO: 109170
auauuccucuaacaagccc

SEQ ID NO: 109172 - RNA, 19 nt, Artificial Sequence
  Description of Artificial Sequence: Synthetic oligonucleotide
  Sense strand starting at position 3098 of SEQ ID NO: 1388
guuagaggaauauguaaau

SEQ ID NO: 109173 - RNA, 19 nt, Artificial Sequence
  Description of Artificial Sequence: Synthetic oligonucleotide
  Antisense strand to SEQ ID NO: 109172
auuuacauauuccucuaac

SEQ ID NO: 109174 - RNA, 19 nt, Artificial Sequence
  Description of Artificial Sequence: Synthetic oligonucleotide
  Sense strand starting at position 3110 of SEQ ID NO: 1388
uguaaauuaccagaaagcu

SEQ ID NO: 109175 - RNA, 19 nt, Artificial Sequence
  Description of Artificial Sequence: Synthetic oligonucleotide
  Antisense strand to SEQ ID NO: 109174
agcuuucugguaauuuaca

SEQ ID NO: 109176 - RNA, 19 nt, Artificial Sequence
  Description of Artificial Sequence: Synthetic oligonucleotide
  Sense strand starting at position 3119 of SEQ ID NO: 1388
ccagaaagcuaauaauuug

SEQ ID NO: 109177 - RNA, 19 nt, Artificial Sequence
  Description of Artificial Sequence: Synthetic oligonucleotide
  Antisense strand to SEQ ID NO: 109176
caaauuauuagcuuucugg

SEQ ID NO: 109178 - RNA, 19 nt, Artificial Sequence
  Description of Artificial Sequence: Synthetic oligonucleotide
  Sense strand starting at position 3125 of SEQ ID NO: 1388
agcuaauaauuuggaaaug

SEQ ID NO: 109179 - RNA, 19 nt, Artificial Sequence
  Description of Artificial Sequence: Synthetic oligonucleotide
  Antisense strand to SEQ ID NO: 109178
cauuuccaaauuauuagcu

SEQ ID NO: 109180 - RNA, 19 nt, Artificial Sequence
  Description of Artificial Sequence: Synthetic oligonucleotide
  Sense strand starting at position 3433 of SEQ ID NO: 1388
acagauugguauccauaga

SEQ ID NO: 109181 - RNA, 19 nt, Artificial Sequence
  Description of Artificial Sequence: Synthetic oligonucleotide
  Antisense strand to SEQ ID NO: 109180
ucuauggauaccaaucugu

SEQ ID NO: 109182 - RNA, 19 nt, Artificial Sequence
  Description of Artificial Sequence: Synthetic oligonucleotide
  Sense strand starting at position 3490 of SEQ ID NO: 1388
guuggaaacuauucuuaau

SEQ ID NO: 109183 - RNA, 19 nt, Artificial Sequence
  Description of Artificial Sequence: Synthetic oligonucleotide
  Antisense strand to SEQ ID NO: 109182
auuaagaauaguuuccaac

SEQ ID NO: 109184 - RNA, 19 nt, Artificial Sequence
  Description of Artificial Sequence: Synthetic oligonucleotide
  Sense strand starting at position 3531 of SEQ ID NO: 1388
ccuuuaaauugauuggguu

SEQ ID NO: 109185 - RNA, 19 nt, Artificial Sequence
  Description of Artificial Sequence: Synthetic oligonucleotide
  Antisense strand to SEQ ID NO: 109184
aacccaaucaauuuaaagg

SEQ ID NO: 109186 - RNA, 19 nt, Artificial Sequence
  Description of Artificial Sequence: Synthetic oligonucleotide
  Sense strand starting at position 3532 of SEQ ID NO: 1388
cuuuaaauugauuggguua

SEQ ID NO: 109187 - RNA, 19 nt, Artificial Sequence
  Description of Artificial Sequence: Synthetic oligonucleotide
  Antisense strand to SEQ ID NO: 109186
uaacccaaucaauuuaaag

SEQ ID NO: 109188 - RNA, 19 nt, Artificial Sequence
  Description of Artificial Sequence: Synthetic oligonucleotide
  Sense strand starting at position 3535 of SEQ ID NO: 1388
uaaauugauuggguuauga

SEQ ID NO: 109189 - RNA, 19 nt, Artificial Sequence
  Description of Artificial Sequence: Synthetic oligonucleotide
  Antisense strand to SEQ ID NO: 109188
ucauaacccaaucaauuua

SEQ ID NO: 109190 - RNA, 19 nt, Artificial Sequence
  Description of Artificial Sequence: Synthetic oligonucleotide
  Sense strand starting at position 3564 of SEQ ID NO: 1388
ucacgaauggauuaacgua

SEQ ID NO: 109191 - RNA, 19 nt, Artificial Sequence
  Description of Artificial Sequence: Synthetic oligonucleotide
  Antisense strand to SEQ ID NO: 109190
uacguuaauccauucguga

SEQ ID NO: 109192 - RNA, 19 nt, Artificial Sequence
  Description of Artificial Sequence: Synthetic oligonucleotide
  Sense strand starting at position 3592 of SEQ ID NO: 1388
guggguuaucuugagaguc

SEQ ID NO: 109193 - RNA, 19 nt, Artificial Sequence
  Description of Artificial Sequence: Synthetic oligonucleotide
  Antisense strand to SEQ ID NO: 109192
gacucucaagauaacccac

SEQ ID NO: 109194 - RNA, 19 nt, Artificial Sequence
  Description of Artificial Sequence: Synthetic oligonucleotide
  Sense strand starting at position 3595 of SEQ ID NO: 1388
gguuaucuugagagucggu

SEQ ID NO: 109195 - RNA, 19 nt, Artificial Sequence
  Description of Artificial Sequence: Synthetic oligonucleotide
  Antisense strand to SEQ ID NO: 109194
accgacucucaagauaacc

SEQ ID NO: 109196 - RNA, 19 nt, Artificial Sequence
  Description of Artificial Sequence: Synthetic oligonucleotide
  Sense strand starting at position 3604 of SEQ ID NO: 1388
gagagucgguugguuauaa

SEQ ID NO: 109197 - RNA, 19 nt, Artificial Sequence
  Description of Artificial Sequence: Synthetic oligonucleotide
  Antisense strand to SEQ ID NO: 109196
uuauaaccaaccgacucuc

SEQ ID NO: 109198 - RNA, 19 nt, Artificial Sequence
  Description of Artificial Sequence: Synthetic oligonucleotide
  Sense strand starting at position 3605 of SEQ ID NO: 1388
agagucgguugguuauaaa

SEQ ID NO: 109199 - RNA, 19 nt, Artificial Sequence
  Description of Artificial Sequence: Synthetic oligonucleotide
  Antisense strand to SEQ ID NO: 109198
uuuauaaccaaccgacucu

SEQ ID NO: 109200 - RNA, 19 nt, Artificial Sequence
  Description of Artificial Sequence: Synthetic oligonucleotide
  Sense strand starting at position 3983 of SEQ ID NO: 1389
agagcaacuagauguuaga

SEQ ID NO: 109201 - RNA, 19 nt, Artificial Sequence
  Description of Artificial Sequence: Synthetic oligonucleotide
  Antisense strand to SEQ ID NO: 109200
ucuaacaucuaguugcucu

SEQ ID NO: 109202 - RNA, 19 nt, Artificial Sequence
  Description of Artificial Sequence: Synthetic oligonucleotide
  Sense strand starting at position 3855 of SEQ ID NO: 1389
gguauaguuguagaaucuu

SEQ ID NO: 109203 - RNA, 19 nt, Artificial Sequence
  Description of Artificial Sequence: Synthetic oligonucleotide
  Antisense strand to SEQ ID NO: 109202
aagauucuacaacuauacc

SEQ ID NO: 109204 - RNA, 19 nt, Artificial Sequence
  Description of Artificial Sequence: Synthetic oligonucleotide
  Sense strand starting at position 3845 of SEQ ID NO: 1389
guacaagaaggguauaguu

SEQ ID NO: 109205 - RNA, 19 nt, Artificial Sequence
  Description of Artificial Sequence: Synthetic oligonucleotide
  Antisense strand to SEQ ID NO: 109204
aacuauacccuucuuguac

SEQ ID NO: 109206 - RNA, 19 nt, Artificial Sequence
  Description of Artificial Sequence: Synthetic oligonucleotide
  Sense strand starting at position 3684 of SEQ ID NO: 1389
gcuacccaggguuagaaua

SEQ ID NO: 109207 - RNA, 19 nt, Artificial Sequence
  Description of Artificial Sequence: Synthetic oligonucleotide
  Antisense strand to SEQ ID NO: 109206
uauucuaacccuggguagc

SEQ ID NO: 109208 - RNA, 19 nt, Artificial Sequence
  Description of Artificial Sequence: Synthetic oligonucleotide
  Sense strand starting at position 3612 of SEQ ID NO: 1389
aaauauguuugucugggaa

SEQ ID NO: 109209 - RNA, 19 nt, Artificial Sequence
  Description of Artificial Sequence: Synthetic oligonucleotide
  Antisense strand to SEQ ID NO: 109208
uucccagacaaacauauuu

SEQ ID NO: 109210 - RNA, 19 nt, Artificial Sequence
  Description of Artificial Sequence: Synthetic oligonucleotide
  Sense strand starting at position 3611 of SEQ ID NO: 1389
uaaauauguuugucuggga

SEQ ID NO: 109211 - RNA, 19 nt, Artificial Sequence
  Description of Artificial Sequence: Synthetic oligonucleotide
  Antisense strand to SEQ ID NO: 109210
ucccagacaaacauauuua

SEQ ID NO: 109212 - RNA, 19 nt, Artificial Sequence
  Description of Artificial Sequence: Synthetic oligonucleotide
  Sense strand starting at position 3480 of SEQ ID NO: 1389
ugucauagagcuuauauug

SEQ ID NO: 109213 - RNA, 19 nt, Artificial Sequence
  Description of Artificial Sequence: Synthetic oligonucleotide
  Antisense strand to SEQ ID NO: 109212
caauauaagcucuaugaca

SEQ ID NO: 109214 - RNA, 19 nt, Artificial Sequence
  Description of Artificial Sequence: Synthetic oligonucleotide
  Sense strand starting at position 3452 of SEQ ID NO: 1389
acagcucaccgagauauac

SEQ ID NO: 109215 - RNA, 19 nt, Artificial Sequence
  Description of Artificial Sequence: Synthetic oligonucleotide
  Antisense strand to SEQ ID NO: 109214
guauaucucggugagcugu

SEQ ID NO: 109216 - RNA, 19 nt, Artificial Sequence
  Description of Artificial Sequence: Synthetic oligonucleotide
  Sense strand starting at position 3449 of SEQ ID NO: 1389
acaacagcucaccgagaua

SEQ ID NO: 109217 - RNA, 19 nt, Artificial Sequence
  Description of Artificial Sequence: Synthetic oligonucleotide
  Antisense strand to SEQ ID NO: 109216
uaucucggugagcuguugu

SEQ ID NO: 109218 - RNA, 19 nt, Artificial Sequence
  Description of Artificial Sequence: Synthetic oligonucleotide
  Sense strand starting at position 2994 of SEQ ID NO: 1389
uguuaaagccaugaaauua

SEQ ID NO: 109219 - RNA, 19 nt, Artificial Sequence
  Description of Artificial Sequence: Synthetic oligonucleotide
  Antisense strand to SEQ ID NO: 109218
uaauuucauggcuuuaaca

SEQ ID NO: 109220 - RNA, 19 nt, Artificial Sequence
  Description of Artificial Sequence: Synthetic oligonucleotide
  Sense strand starting at position 2993 of SEQ ID NO: 1389
auguuaaagccaugaaauu

SEQ ID NO: 109221 - RNA, 19 nt, Artificial Sequence
  Description of Artificial Sequence: Synthetic oligonucleotide
  Antisense strand to SEQ ID NO: 109220
aauuucauggcuuuaacau

SEQ ID NO: 109222 - RNA, 19 nt, Artificial Sequence
  Description of Artificial Sequence: Synthetic oligonucleotide
  Sense strand starting at position 2956 of SEQ ID NO: 1389
agccaagaaugaguagauu

SEQ ID NO: 109223 - RNA, 19 nt, Artificial Sequence
  Description of Artificial Sequence: Synthetic oligonucleotide
  Antisense strand to SEQ ID NO: 109222
aaucuacucauucuuggcu

SEQ ID NO: 109224 - RNA, 19 nt, Artificial Sequence
  Description of Artificial Sequence: Synthetic oligonucleotide
  Sense strand starting at position 2883 of SEQ ID NO: 1389
agacgugcucauuaaauug

SEQ ID NO: 109225 - RNA, 19 nt, Artificial Sequence
  Description of Artificial Sequence: Synthetic oligonucleotide
  Antisense strand to SEQ ID NO: 109224
caauuuaaugagcacgucu

SEQ ID NO: 109226 - RNA, 19 nt, Artificial Sequence
  Description of Artificial Sequence: Synthetic oligonucleotide
  Sense strand starting at position 2880 of SEQ ID NO: 1389
auaagacgugcucauuaaa

SEQ ID NO: 109227 - RNA, 19 nt, Artificial Sequence
  Description of Artificial Sequence: Synthetic oligonucleotide
  Antisense strand to SEQ ID NO: 109226
uuuaaugagcacgucuuau

SEQ ID NO: 109228 - RNA, 19 nt, Artificial Sequence
  Description of Artificial Sequence: Synthetic oligonucleotide
  Sense strand starting at position 2864 of SEQ ID NO: 1389
ccacaaagcuuggcauaua

SEQ ID NO: 109229 - RNA, 19 nt, Artificial Sequence
  Description of Artificial Sequence: Synthetic oligonucleotide
  Antisense strand to SEQ ID NO: 109228
uauaugccaagcuuugugg

SEQ ID NO: 109230 - RNA, 19 nt, Artificial Sequence
  Description of Artificial Sequence: Synthetic oligonucleotide
  Sense strand starting at position 2830 of SEQ ID NO: 1389
guuagaauuaagugagaua

SEQ ID NO: 109231 - RNA, 19 nt, Artificial Sequence
  Description of Artificial Sequence: Synthetic oligonucleotide
  Antisense strand to SEQ ID NO: 109230
uaucucacuuaauucuaac

SEQ ID NO: 109232 - RNA, 19 nt, Artificial Sequence
  Description of Artificial Sequence: Synthetic oligonucleotide
  Sense strand starting at position 2819 of SEQ ID NO: 1389
cuaggaccauaguuagaau

SEQ ID NO: 109233 - RNA, 19 nt, Artificial Sequence
  Description of Artificial Sequence: Synthetic oligonucleotide
  Antisense strand to SEQ ID NO: 109232
auucuaacuaugguccuag

SEQ ID NO: 109234 - RNA, 19 nt, Artificial Sequence
  Description of Artificial Sequence: Synthetic oligonucleotide
  Sense strand starting at position 2792 of SEQ ID NO: 1389
aaaggagauuaguuguaau

SEQ ID NO: 109235 - RNA, 19 nt, Artificial Sequence
  Description of Artificial Sequence: Synthetic oligonucleotide
  Antisense strand to SEQ ID NO: 109234
auuacaacuaaucuccuuu

SEQ ID NO: 109236 - RNA, 19 nt, Artificial Sequence
  Description of Artificial Sequence: Synthetic oligonucleotide
  Sense strand starting at position 2775 of SEQ ID NO: 1389
cucaguaacucucuguaaa

SEQ ID NO: 109237 - RNA, 19 nt, Artificial Sequence
  Description of Artificial Sequence: Synthetic oligonucleotide
  Antisense strand to SEQ ID NO: 109236
uuuacagagaguuacugag

SEQ ID NO: 109238 - RNA, 19 nt, Artificial Sequence
  Description of Artificial Sequence: Synthetic oligonucleotide
  Sense strand starting at position 2748 of SEQ ID NO: 1389
gcugcaaguuauuuaaccu

SEQ ID NO: 109239 - RNA, 19 nt, Artificial Sequence
  Description of Artificial Sequence: Synthetic oligonucleotide
  Antisense strand to SEQ ID NO: 109238
agguuaaauaacuugcagc

SEQ ID NO: 109240 - RNA, 19 nt, Artificial Sequence
  Description of Artificial Sequence: Synthetic oligonucleotide
  Sense strand starting at position 2717 of SEQ ID NO: 1389
gucucaacucagugauuaa

SEQ ID NO: 109241 - RNA, 19 nt, Artificial Sequence
  Description of Artificial Sequence: Synthetic oligonucleotide
  Antisense strand to SEQ ID NO: 109240
uuaaucacugaguugagac

SEQ ID NO: 109242 - RNA, 19 nt, Artificial Sequence
  Description of Artificial Sequence: Synthetic oligonucleotide
  Sense strand starting at position 2547 of SEQ ID NO: 1389
uacggaggaucuuugaaau

SEQ ID NO: 109243 - RNA, 19 nt, Artificial Sequence
  Description of Artificial Sequence: Synthetic oligonucleotide
  Antisense strand to SEQ ID NO: 109242
auuucaaagauccuccgua

SEQ ID NO: 109244 - RNA, 19 nt, Artificial Sequence
  Description of Artificial Sequence: Synthetic oligonucleotide
  Sense strand starting at position 2356 of SEQ ID NO: 1389
gcguuugugaucccaucuu

SEQ ID NO: 109245 - RNA, 19 nt, Artificial Sequence
  Description of Artificial Sequence: Synthetic oligonucleotide
  Antisense strand to SEQ ID NO: 109244
aagaugggaucacaaacgc

SEQ ID NO: 109246 - RNA, 19 nt, Artificial Sequence
  Description of Artificial Sequence: Synthetic oligonucleotide
  Sense strand starting at position 2319 of SEQ ID NO: 1389
ggugaaccgacuuacugau

SEQ ID NO: 109247 - RNA, 19 nt, Artificial Sequence
  Description of Artificial Sequence: Synthetic oligonucleotide
  Antisense strand to SEQ ID NO: 109246
aucaguaagucgguucacc

SEQ ID NO: 109248 - RNA, 19 nt, Artificial Sequence
  Description of Artificial Sequence: Synthetic oligonucleotide
  Sense strand starting at position 1353 of SEQ ID NO: 1389
gcgggacuucgcuuaaguu

SEQ ID NO: 109249 - RNA, 19 nt, Artificial Sequence
  Description of Artificial Sequence: Synthetic oligonucleotide
  Antisense strand to SEQ ID NO: 109248
aacuuaagcgaagucccgc

SEQ ID NO: 109250 - RNA, 19 nt, Artificial Sequence
  Description of Artificial Sequence: Synthetic oligonucleotide
  Sense strand starting at position 1304 of SEQ ID NO: 1389
auccgcgagagauaaauaa

SEQ ID NO: 109251 - RNA, 19 nt, Artificial Sequence
  Description of Artificial Sequence: Synthetic oligonucleotide
  Antisense strand to SEQ ID NO: 109250
uuauuuaucucucgcggau

SEQ ID NO: 109252 - RNA, 19 nt, Artificial Sequence
  Description of Artificial Sequence: Synthetic oligonucleotide
  Sense strand starting at position 1300 of SEQ ID NO: 1389
accaauccgcgagagauaa

SEQ ID NO: 109253 - RNA, 19 nt, Artificial Sequence
  Description of Artificial Sequence: Synthetic oligonucleotide
  Antisense strand to SEQ ID NO: 109252
uuaucucucgcggauuggu

SEQ ID NO: 109254 - RNA, 19 nt, Artificial Sequence
  Description of Artificial Sequence: Synthetic oligonucleotide
  Sense strand starting at position 1298 of SEQ ID NO: 1389
ucaccaauccgcgagagau

SEQ ID NO: 109255 - RNA, 19 nt, Artificial Sequence
  Description of Artificial Sequence: Synthetic oligonucleotide
  Antisense strand to SEQ ID NO: 109254
aucucucgcggauugguga

SEQ ID NO: 109256 - RNA, 19 nt, Artificial Sequence
  Description of Artificial Sequence: Synthetic oligonucleotide
  Sense strand starting at position 1093 of SEQ ID NO: 1389
uucgcuauugccucgcaau

SEQ ID NO: 109257 - RNA, 19 nt, Artificial Sequence
  Description of Artificial Sequence: Synthetic oligonucleotide
  Antisense strand to SEQ ID NO: 109256
auugcgaggcaauagcgaa

SEQ ID NO: 109258 - RNA, 19 nt, Artificial Sequence
  Description of Artificial Sequence: Synthetic oligonucleotide
  Sense strand starting at position 959 of SEQ ID NO: 1389
gguugugcucgcuuccuua

SEQ ID NO: 109259 - RNA, 19 nt, Artificial Sequence
  Description of Artificial Sequence: Synthetic oligonucleotide
  Antisense strand to SEQ ID NO: 109258
uaaggaagcgagcacaacc

SEQ ID NO: 109260 - RNA, 19 nt, Artificial Sequence
  Description of Artificial Sequence: Synthetic oligonucleotide
  Sense strand starting at position 923 of SEQ ID NO: 1389
acagaaguucuuuagcucu

SEQ ID NO: 109261 - RNA, 19 nt, Artificial Sequence
  Description of Artificial Sequence: Synthetic oligonucleotide
  Antisense strand to SEQ ID NO: 109260
agagcuaaagaacuucugu

SEQ ID NO: 109262 - RNA, 19 nt, Artificial Sequence
  Description of Artificial Sequence: Synthetic oligonucleotide
  Sense strand starting at position 752 of SEQ ID NO: 1389
uguaucuuacuguaaacua

SEQ ID NO: 109263 - RNA, 19 nt, Artificial Sequence
  Description of Artificial Sequence: Synthetic oligonucleotide
  Antisense strand to SEQ ID NO: 109262
uaguuuacaguaagauaca

SEQ ID NO: 109264 - RNA, 19 nt, Artificial Sequence
  Description of Artificial Sequence: Synthetic oligonucleotide
  Sense strand starting at position 596 of SEQ ID NO: 1389
ccauuaugauggguacauu

SEQ ID NO: 109265 - RNA, 19 nt, Artificial Sequence
  Description of Artificial Sequence: Synthetic oligonucleotide
  Antisense strand to SEQ ID NO: 109264
aauguacccaucauaaugg

SEQ ID NO: 109266 - RNA, 19 nt, Artificial Sequence
  Description of Artificial Sequence: Synthetic oligonucleotide
  Sense strand starting at position 594 of SEQ ID NO: 1389
ucccauuaugauggguaca

SEQ ID NO: 109267 - RNA, 19 nt, Artificial Sequence
  Description of Artificial Sequence: Synthetic oligonucleotide
  Antisense strand to SEQ ID NO: 109266
uguacccaucauaauggga

SEQ ID NO: 109268 - RNA, 19 nt, Artificial Sequence
  Description of Artificial Sequence: Synthetic oligonucleotide
  Sense strand starting at position 588 of SEQ ID NO: 1389
agugguucccauuaugaug

SEQ ID NO: 109269 - RNA, 19 nt, Artificial Sequence
  Description of Artificial Sequence: Synthetic oligonucleotide
  Antisense strand to SEQ ID NO: 109268
caucauaaugggaaccacu

SEQ ID NO: 109270 - RNA, 19 nt, Artificial Sequence
  Description of Artificial Sequence: Synthetic oligonucleotide
  Sense strand starting at position 558 of SEQ ID NO: 1389
uguaaauuccuuggaggag

SEQ ID NO: 109271 - RNA, 19 nt, Artificial Sequence
  Description of Artificial Sequence: Synthetic oligonucleotide
  Antisense strand to SEQ ID NO: 109270
cuccuccaaggaauuuaca

SEQ ID NO: 109272 - RNA, 19 nt, Artificial Sequence
  Description of Artificial Sequence: Synthetic oligonucleotide
  Sense strand starting at position 557 of SEQ ID NO: 1389
cuguaaauuccuuggagga

SEQ ID NO: 109273 - RNA, 19 nt, Artificial Sequence
  Description of Artificial Sequence: Synthetic oligonucleotide
  Antisense strand to SEQ ID NO: 109272
uccuccaaggaauuuacag

SEQ ID NO: 109274 - RNA, 19 nt, Artificial Sequence
  Description of Artificial Sequence: Synthetic oligonucleotide
  Sense strand starting at position 441 of SEQ ID NO: 1389
gcucaagguccugaacaga

SEQ ID NO: 109275 - RNA, 19 nt, Artificial Sequence
  Description of Artificial Sequence: Synthetic oligonucleotide
  Antisense strand to SEQ ID NO: 109274
ucuguucaggaccuugagc

SEQ ID NO: 109276 - RNA, 19 nt, Artificial Sequence
  Description of Artificial Sequence: Synthetic oligonucleotide
  Sense strand starting at position 315 of SEQ ID NO: 1389
gcauuagaggguuaacugu

SEQ ID NO: 109277 - RNA, 19 nt, Artificial Sequence
  Description of Artificial Sequence: Synthetic oligonucleotide
  Antisense strand to SEQ ID NO: 109276
acaguuaacccucuaaugc

SEQ ID NO: 109278 - RNA, 19 nt, Artificial Sequence
  Description of Artificial Sequence: Synthetic oligonucleotide
  Sense strand starting at position 139 of SEQ ID NO: 1389
uguucuaagagugaagcaa

SEQ ID NO: 109279 - RNA, 19 nt, Artificial Sequence
  Description of Artificial Sequence: Synthetic oligonucleotide
  Antisense strand to SEQ ID NO: 109278
uugcuucacucuuagaaca

SEQ ID NO: 109280 - RNA, 19 nt, Artificial Sequence
  Description of Artificial Sequence: Synthetic oligonucleotide
  Sense strand starting at position 3903 of SEQ ID NO: 1390
uuaggaucccuuugcccaa

SEQ ID NO: 109281 - RNA, 19 nt, Artificial Sequence
  Description of Artificial Sequence: Synthetic oligonucleotide
  Antisense strand to SEQ ID NO: 109280
uugggcaaagggauccuaa

SEQ ID NO: 109282 - RNA, 19 nt, Artificial Sequence
  Description of Artificial Sequence: Synthetic oligonucleotide
  Sense strand starting at position 3759 of SEQ ID NO: 1390
gaaucacucugguuaggac

SEQ ID NO: 109283 - RNA, 19 nt, Artificial Sequence
  Description of Artificial Sequence: Synthetic oligonucleotide
  Antisense strand to SEQ ID NO: 109282
guccuaaccagagugauuc

SEQ ID NO: 109284 - RNA, 19 nt, Artificial Sequence
  Description of Artificial Sequence: Synthetic oligonucleotide
  Sense strand starting at position 3732 of SEQ ID NO: 1390
ggcuuuaucugaccuuuau

SEQ ID NO: 109285 - RNA, 19 nt, Artificial Sequence
  Description of Artificial Sequence: Synthetic oligonucleotide
  Antisense strand to SEQ ID NO: 109284
auaaaggucagauaaagcc

SEQ ID NO: 109286 - RNA, 19 nt, Artificial Sequence
  Description of Artificial Sequence: Synthetic oligonucleotide
  Sense strand starting at position 3725 of SEQ ID NO: 1390
cagguuuggcuuuaucuga

SEQ ID NO: 109287 - RNA, 19 nt, Artificial Sequence
  Description of Artificial Sequence: Synthetic oligonucleotide
  Antisense strand to SEQ ID NO: 109286
ucagauaaagccaaaccug

SEQ ID NO: 109288 - RNA, 19 nt, Artificial Sequence
  Description of Artificial Sequence: Synthetic oligonucleotide
  Sense strand starting at position 3699 of SEQ ID NO: 1390
ccuaucuuccugggaaagu

SEQ ID NO: 109289 - RNA, 19 nt, Artificial Sequence
  Description of Artificial Sequence: Synthetic oligonucleotide
  Antisense strand to SEQ ID NO: 109288
acuuucccaggaagauagg

SEQ ID NO: 109290 - RNA, 19 nt, Artificial Sequence
  Description of Artificial Sequence: Synthetic oligonucleotide
  Sense strand starting at position 3698 of SEQ ID NO: 1390
gccuaucuuccugggaaag

SEQ ID NO: 109291 - RNA, 19 nt, Artificial Sequence
  Description of Artificial Sequence: Synthetic oligonucleotide
  Antisense strand to SEQ ID NO: 109290
cuuucccaggaagauaggc

SEQ ID NO: 109292 - RNA, 19 nt, Artificial Sequence
  Description of Artificial Sequence: Synthetic oligonucleotide
  Sense strand starting at position 3696 of SEQ ID NO: 1390
gugccuaucuuccugggaa

SEQ ID NO: 109293 - RNA, 19 nt, Artificial Sequence
  Description of Artificial Sequence: Synthetic oligonucleotide
  Antisense strand to SEQ ID NO: 109292
uucccaggaagauaggcac

SEQ ID NO: 109294 - RNA, 19 nt, Artificial Sequence
  Description of Artificial Sequence: Synthetic oligonucleotide
  Sense strand starting at position 3538 of SEQ ID NO: 1390
cuuguuacagacuauuagu

SEQ ID NO: 109295 - RNA, 19 nt, Artificial Sequence
  Description of Artificial Sequence: Synthetic oligonucleotide
  Antisense strand to SEQ ID NO: 109294
acuaauagucuguaacaag

SEQ ID NO: 109296 - RNA, 19 nt, Artificial Sequence
  Description of Artificial Sequence: Synthetic oligonucleotide
  Sense strand starting at position 3530 of SEQ ID NO: 1390
augaucagcuuguuacaga

SEQ ID NO: 109297 - RNA, 19 nt, Artificial Sequence
  Description of Artificial Sequence: Synthetic oligonucleotide
  Antisense strand to SEQ ID NO: 109296
ucuguaacaagcugaucau

SEQ ID NO: 109298 - RNA, 19 nt, Artificial Sequence
  Description of Artificial Sequence: Synthetic oligonucleotide
  Sense strand starting at position 3528 of SEQ ID NO: 1390
cuaugaucagcuuguuaca

SEQ ID NO: 109299 - RNA, 19 nt, Artificial Sequence
  Description of Artificial Sequence: Synthetic oligonucleotide
  Antisense strand to SEQ ID NO: 109298
uguaacaagcugaucauag

SEQ ID NO: 109300 - RNA, 19 nt, Artificial Sequence
  Description of Artificial Sequence: Synthetic oligonucleotide
  Sense strand starting at position 3440 of SEQ ID NO: 1390
gcaaguauuguuuauauag

SEQ ID NO: 109301 - RNA, 19 nt, Artificial Sequence
  Description of Artificial Sequence: Synthetic oligonucleotide
  Antisense strand to SEQ ID NO: 109300
cuauauaaacaauacuugc

SEQ ID NO: 109302 - RNA, 19 nt, Artificial Sequence
  Description of Artificial Sequence: Synthetic oligonucleotide
  Sense strand starting at position 3412 of SEQ ID NO: 1390
uaguauccuugcuuugaag

SEQ ID NO: 109303 - RNA, 19 nt, Artificial Sequence
  Description of Artificial Sequence: Synthetic oligonucleotide
  Antisense strand to SEQ ID NO: 109302
cuucaaagcaaggauacua

SEQ ID NO: 109304 - RNA, 19 nt, Artificial Sequence
  Description of Artificial Sequence: Synthetic oligonucleotide
  Sense strand starting at position 3277 of SEQ ID NO: 1390
ggucucauuccagacccaa

SEQ ID NO: 109305 - RNA, 19 nt, Artificial Sequence
  Description of Artificial Sequence: Synthetic oligonucleotide
  Antisense strand to SEQ ID NO: 109304
uugggucuggaaugagacc

SEQ ID NO: 109306 - RNA, 19 nt, Artificial Sequence
  Description of Artificial Sequence: Synthetic oligonucleotide
  Sense strand starting at position 3097 of SEQ ID NO: 1390
cauaaaugcggaggaauga

SEQ ID NO: 109307 - RNA, 19 nt, Artificial Sequence
  Description of Artificial Sequence: Synthetic oligonucleotide
  Antisense strand to SEQ ID NO: 109306
ucauuccuccgcauuuaug

SEQ ID NO: 109308 - RNA, 19 nt, Artificial Sequence
  Description of Artificial Sequence: Synthetic oligonucleotide
  Sense strand starting at position 3095 of SEQ ID NO: 1390
ugcauaaaugcggaggaau

SEQ ID NO: 109309 - RNA, 19 nt, Artificial Sequence
  Description of Artificial Sequence: Synthetic oligonucleotide
  Antisense strand to SEQ ID NO: 109308
auuccuccgcauuuaugca

SEQ ID NO: 109310 - RNA, 19 nt, Artificial Sequence
  Description of Artificial Sequence: Synthetic oligonucleotide
  Sense strand starting at position 3067 of SEQ ID NO: 1390
ggaagagcacuuuggucaa

SEQ ID NO: 109311 - RNA, 19 nt, Artificial Sequence
  Description of Artificial Sequence: Synthetic oligonucleotide
  Antisense strand to SEQ ID NO: 109310
uugaccaaagugcucuucc

SEQ ID NO: 109312 - RNA, 19 nt, Artificial Sequence
  Description of Artificial Sequence: Synthetic oligonucleotide
  Sense strand starting at position 2559 of SEQ ID NO: 1390
auaagaugcuaaguaguau

SEQ ID NO: 109313 - RNA, 19 nt, Artificial Sequence
  Description of Artificial Sequence: Synthetic oligonucleotide
  Antisense strand to SEQ ID NO: 109312
auacuacuuagcaucuuau

SEQ ID NO: 109314 - RNA, 19 nt, Artificial Sequence
  Description of Artificial Sequence: Synthetic oligonucleotide
  Sense strand starting at position 2536 of SEQ ID NO: 1390
uacauugugugggcagaua

SEQ ID NO: 109315 - RNA, 19 nt, Artificial Sequence
  Description of Artificial Sequence: Synthetic oligonucleotide
  Antisense strand to SEQ ID NO: 109314
uaucugcccacacaaugua

SEQ ID NO: 109316 - RNA, 19 nt, Artificial Sequence
  Description of Artificial Sequence: Synthetic oligonucleotide
  Sense strand starting at position 2391 of SEQ ID NO: 1390
ccgauacgcccugaaauaa

SEQ ID NO: 109317 - RNA, 19 nt, Artificial Sequence
  Description of Artificial Sequence: Synthetic oligonucleotide
  Antisense strand to SEQ ID NO: 109316
uuauuucagggcguaucgg

SEQ ID NO: 109318 - RNA, 19 nt, Artificial Sequence
  Description of Artificial Sequence: Synthetic oligonucleotide
  Sense strand starting at position 2390 of SEQ ID NO: 1390
accgauacgcccugaaaua

SEQ ID NO: 109319 - RNA, 19 nt, Artificial Sequence
  Description of Artificial Sequence: Synthetic oligonucleotide
  Antisense strand to SEQ ID NO: 109318
uauuucagggcguaucggu

SEQ ID NO: 109320 - RNA, 19 nt, Artificial Sequence
  Description of Artificial Sequence: Synthetic oligonucleotide
  Sense strand starting at position 2348 of SEQ ID NO: 1390
ucugguucccaaggagauu

SEQ ID NO: 109321 - RNA, 19 nt, Artificial Sequence
  Description of Artificial Sequence: Synthetic oligonucleotide
  Antisense strand to SEQ ID NO: 109320
aaucuccuugggaaccaga

SEQ ID NO: 109322 - RNA, 19 nt, Artificial Sequence
  Description of Artificial Sequence: Synthetic oligonucleotide
  Sense strand starting at position 2341 of SEQ ID NO: 1390
uuaaguuucugguucccaa

SEQ ID NO: 109323 - RNA, 19 nt, Artificial Sequence
  Description of Artificial Sequence: Synthetic oligonucleotide
  Antisense strand to SEQ ID NO: 109322
uugggaaccagaaacuuaa

SEQ ID NO: 109324 - RNA, 19 nt, Artificial Sequence
  Description of Artificial Sequence: Synthetic oligonucleotide
  Sense strand starting at position 2203 of SEQ ID NO: 1390
cacagugguuccuugauca

SEQ ID NO: 109325 - RNA, 19 nt, Artificial Sequence
  Description of Artificial Sequence: Synthetic oligonucleotide
  Antisense strand to SEQ ID NO: 109324
ugaucaaggaaccacugug

SEQ ID NO: 109326 - RNA, 19 nt, Artificial Sequence
  Description of Artificial Sequence: Synthetic oligonucleotide
  Sense strand starting at position 2124 of SEQ ID NO: 1390
gcagcuggaaccuggaaau

SEQ ID NO: 109327 - RNA, 19 nt, Artificial Sequence
  Description of Artificial Sequence: Synthetic oligonucleotide
  Antisense strand to SEQ ID NO: 109326
auuuccagguuccagcugc

SEQ ID NO: 109328 - RNA, 19 nt, Artificial Sequence
  Description of Artificial Sequence: Synthetic oligonucleotide
  Sense strand starting at position 1463 of SEQ ID NO: 1390
gaggucuguacgcagauca

SEQ ID NO: 109329 - RNA, 19 nt, Artificial Sequence
  Description of Artificial Sequence: Synthetic oligonucleotide
  Antisense strand to SEQ ID NO: 109328
ugaucugcguacagaccuc

SEQ ID NO: 109330 - RNA, 19 nt, Artificial Sequence
  Description of Artificial Sequence: Synthetic oligonucleotide
  Sense strand starting at position 1269 of SEQ ID NO: 1390
gaugcagaggccugggaua

SEQ ID NO: 109331 - RNA, 19 nt, Artificial Sequence
  Description of Artificial Sequence: Synthetic oligonucleotide
  Antisense strand to SEQ ID NO: 109330
uaucccaggccucugcauc

SEQ ID NO: 109332 - RNA, 19 nt, Artificial Sequence
  Description of Artificial Sequence: Synthetic oligonucleotide
  Sense strand starting at position 962 of SEQ ID NO: 1390
ucugaaauacuaugguacu

SEQ ID NO: 109333 - RNA, 19 nt, Artificial Sequence
  Description of Artificial Sequence: Synthetic oligonucleotide
  Antisense strand to SEQ ID NO: 109332
aguaccauaguauuucaga

SEQ ID NO: 109334 - RNA, 19 nt, Artificial Sequence
  Description of Artificial Sequence: Synthetic oligonucleotide
  Sense strand starting at position 721 of SEQ ID NO: 1390
acugacucaugguucuaaa

SEQ ID NO: 109335 - RNA, 19 nt, Artificial Sequence
  Description of Artificial Sequence: Synthetic oligonucleotide
  Antisense strand to SEQ ID NO: 109334
uuuagaaccaugagucagu

SEQ ID NO: 109336 - RNA, 19 nt, Artificial Sequence
  Description of Artificial Sequence: Synthetic oligonucleotide
  Sense strand starting at position 509 of SEQ ID NO: 1390
accguuauuggguagggaa

SEQ ID NO: 109337 - RNA, 19 nt, Artificial Sequence
  Description of Artificial Sequence: Synthetic oligonucleotide
  Antisense strand to SEQ ID NO: 109336
uucccuacccaauaacggu

SEQ ID NO: 109338 - RNA, 19 nt, Artificial Sequence
  Description of Artificial Sequence: Synthetic oligonucleotide
  Sense strand starting at position 508 of SEQ ID NO: 1390
caccguuauuggguaggga

SEQ ID NO: 109339 - RNA, 19 nt, Artificial Sequence
  Description of Artificial Sequence: Synthetic oligonucleotide
  Antisense strand to SEQ ID NO: 109338
ucccuacccaauaacggug

SEQ ID NO: 109340 - RNA, 19 nt, Artificial Sequence
  Description of Artificial Sequence: Synthetic oligonucleotide
  Sense strand starting at position 482 of SEQ ID NO: 1390
guauauacggccuaggcaa

SEQ ID NO: 109341 - RNA, 19 nt, Artificial Sequence
  Description of Artificial Sequence: Synthetic oligonucleotide
  Antisense strand to SEQ ID NO: 109340
uugccuaggccguauauac

SEQ ID NO: 109342 - RNA, 19 nt, Artificial Sequence
  Description of Artificial Sequence: Synthetic oligonucleotide
  Sense strand starting at position 375 of SEQ ID NO: 1390
gcuagagaugcccauuaga

SEQ ID NO: 109343 - RNA, 19 nt, Artificial Sequence
  Description of Artificial Sequence: Synthetic oligonucleotide
  Antisense strand to SEQ ID NO: 109342
ucuaaugggcaucucuagc

SEQ ID NO: 109344 - RNA, 19 nt, Artificial Sequence
  Description of Artificial Sequence: Synthetic oligonucleotide
  Sense strand starting at position 362 of SEQ ID NO: 1390
agaacauuccucugcuaga

SEQ ID NO: 109345 - RNA, 19 nt, Artificial Sequence
  Description of Artificial Sequence: Synthetic oligonucleotide
  Antisense strand to SEQ ID NO: 109344
ucuagcagaggaauguucu

SEQ ID NO: 109346 - RNA, 19 nt, Artificial Sequence
  Description of Artificial Sequence: Synthetic oligonucleotide
  Sense strand starting at position 360 of SEQ ID NO: 1390
gcagaacauuccucugcua

SEQ ID NO: 109347 - RNA, 19 nt, Artificial Sequence
  Description of Artificial Sequence: Synthetic oligonucleotide
  Antisense strand to SEQ ID NO: 109346
uagcagaggaauguucugc

SEQ ID NO: 109348 - RNA, 19 nt, Artificial Sequence
  Description of Artificial Sequence: Synthetic oligonucleotide
  Sense strand starting at position 351 of SEQ ID NO: 1390
auucuucuggcagaacauu

SEQ ID NO: 109349 - RNA, 19 nt, Artificial Sequence
  Description of Artificial Sequence: Synthetic oligonucleotide
  Antisense strand to SEQ ID NO: 109348
aauguucugccagaagaau

SEQ ID NO: 109350 - RNA, 19 nt, Artificial Sequence
  Description of Artificial Sequence: Synthetic oligonucleotide
  Sense strand starting at position 262 of SEQ ID NO: 1390
ggaaucuaugugcagguuu

SEQ ID NO: 109351 - RNA, 19 nt, Artificial Sequence
  Description of Artificial Sequence: Synthetic oligonucleotide
  Antisense strand to SEQ ID NO: 109350
aaaccugcacauagauucc

SEQ ID NO: 109352 - RNA, 19 nt, Artificial Sequence
  Description of Artificial Sequence: Synthetic oligonucleotide
  Sense strand starting at position 261 of SEQ ID NO: 1390
gggaaucuaugugcagguu

SEQ ID NO: 109353 - RNA, 19 nt, Artificial Sequence
  Description of Artificial Sequence: Synthetic oligonucleotide
  Antisense strand to SEQ ID NO: 109352
aaccugcacauagauuccc

SEQ ID NO: 109354 - RNA, 19 nt, Artificial Sequence
  Description of Artificial Sequence: Synthetic oligonucleotide
  Sense strand starting at position 187 of SEQ ID NO: 1390
gaaggaagauuccaagaac

SEQ ID NO: 109355 - RNA, 19 nt, Artificial Sequence
  Description of Artificial Sequence: Synthetic oligonucleotide
  Antisense strand to SEQ ID NO: 109354
guucuuggaaucuuccuuc

SEQ ID NO: 109356 - RNA, 19 nt, Artificial Sequence
  Description of Artificial Sequence: Synthetic oligonucleotide
  Sense strand starting at position 172 of SEQ ID NO: 1390
guuggagagucccuagaag

SEQ ID NO: 109357 - RNA, 19 nt, Artificial Sequence
  Description of Artificial Sequence: Synthetic oligonucleotide
  Antisense strand to SEQ ID NO: 109356
cuucuagggacucuccaac

SEQ ID NO: 109358 - RNA, 19 nt, Artificial Sequence
  Description of Artificial Sequence: Synthetic oligonucleotide
  Sense strand starting at position 101 of SEQ ID NO: 1390
cuguaaccucaguggugaa

SEQ ID NO: 109359 - RNA, 19 nt, Artificial Sequence
  Description of Artificial Sequence: Synthetic oligonucleotide
  Antisense strand to SEQ ID NO: 109358
uucaccacugagguuacag

SEQ ID NO: 109360 - RNA, 19 nt, Artificial Sequence
  Description of Artificial Sequence: Synthetic oligonucleotide
  Sense strand starting at position 49 of SEQ ID NO: 1391
ggcugacuuaucuguguag

SEQ ID NO: 109361 - RNA, 19 nt, Artificial Sequence
  Description of Artificial Sequence: Synthetic oligonucleotide
  Antisense strand to SEQ ID NO: 109360
cuacacagauaagucagcc

SEQ ID NO: 109362 - RNA, 19 nt, Artificial Sequence
  Description of Artificial Sequence: Synthetic oligonucleotide
  Sense strand starting at position 52 of SEQ ID NO: 1391
ugacuuaucuguguagcag

SEQ ID NO: 109363 - RNA, 19 nt, Artificial Sequence
  Description of Artificial Sequence: Synthetic oligonucleotide
  Antisense strand to SEQ ID NO: 109362
cugcuacacagauaaguca

SEQ ID NO: 109364 - RNA, 19 nt, Artificial Sequence
  Description of Artificial Sequence: Synthetic oligonucleotide
  Sense strand starting at position 53 of SEQ ID NO: 1391
gacuuaucuguguagcaga

SEQ ID NO: 109365 - RNA, 19 nt, Artificial Sequence
  Description of Artificial Sequence: Synthetic oligonucleotide
  Antisense strand to SEQ ID NO: 109364
ucugcuacacagauaaguc

SEQ ID NO: 109366 - RNA, 19 nt, Artificial Sequence
  Description of Artificial Sequence: Synthetic oligonucleotide
  Sense strand starting at position 185 of SEQ ID NO: 1391
ugaggaugcugauuaaaug

SEQ ID NO: 109367 - RNA, 19 nt, Artificial Sequence
  Description of Artificial Sequence: Synthetic oligonucleotide
  Antisense strand to SEQ ID NO: 109366
cauuuaaucagcauccuca

SEQ ID NO: 109368 - RNA, 19 nt, Artificial Sequence
  Description of Artificial Sequence: Synthetic oligonucleotide
  Sense strand starting at position 206 of SEQ ID NO: 1391
agcacauguugcucagaac

SEQ ID NO: 109369 - RNA, 19 nt, Artificial Sequence
  Description of Artificial Sequence: Synthetic oligonucleotide
  Antisense strand to SEQ ID NO: 109368
guucugagcaacaugugcu

SEQ ID NO: 109370 - RNA, 19 nt, Artificial Sequence
  Description of Artificial Sequence: Synthetic oligonucleotide
  Sense strand starting at position 207 of SEQ ID NO: 1391
gcacauguugcucagaaca

SEQ ID NO: 109371 - RNA, 19 nt, Artificial Sequence
  Description of Artificial Sequence: Synthetic oligonucleotide
  Antisense strand to SEQ ID NO: 109370
uguucugagcaacaugugc

SEQ ID NO: 109372 - RNA, 19 nt, Artificial Sequence
  Description of Artificial Sequence: Synthetic oligonucleotide
  Sense strand starting at position 316 of SEQ ID NO: 1391
acgauuaaucaagaugccu

SEQ ID NO: 109373 - RNA, 19 nt, Artificial Sequence
  Description of Artificial Sequence: Synthetic oligonucleotide
  Antisense strand to SEQ ID NO: 109372
aggcaucuugauuaaucgu

SEQ ID NO: 109374 - RNA, 19 nt, Artificial Sequence
  Description of Artificial Sequence: Synthetic oligonucleotide
  Sense strand starting at position 458 of SEQ ID NO: 1391
gauucugucuccucugaga

SEQ ID NO: 109375 - RNA, 19 nt, Artificial Sequence
  Description of Artificial Sequence: Synthetic oligonucleotide
  Antisense strand to SEQ ID NO: 109374
ucucagaggagacagaauc

SEQ ID NO: 109376 - RNA, 19 nt, Artificial Sequence
  Description of Artificial Sequence: Synthetic oligonucleotide
  Sense strand starting at position 548 of SEQ ID NO: 1391
acaucugugcccugugaga

SEQ ID NO: 109377 - RNA, 19 nt, Artificial Sequence
  Description of Artificial Sequence: Synthetic oligonucleotide
  Antisense strand to SEQ ID NO: 109376
ucucacagggcacagaugu

SEQ ID NO: 109378 - RNA, 19 nt, Artificial Sequence
  Description of Artificial Sequence: Synthetic oligonucleotide
  Sense strand starting at position 550 of SEQ ID NO: 1391
aucugugcccugugagaag

SEQ ID NO: 109379 - RNA, 19 nt, Artificial Sequence
  Description of Artificial Sequence: Synthetic oligonucleotide
  Antisense strand to SEQ ID NO: 109378
cuucucacagggcacagau

SEQ ID NO: 109380 - RNA, 19 nt, Artificial Sequence
  Description of Artificial Sequence: Synthetic oligonucleotide
  Sense strand starting at position 686 of SEQ ID NO: 1391
cugugaggaacuuggugau

SEQ ID NO: 109381 - RNA, 19 nt, Artificial Sequence
  Description of Artificial Sequence: Synthetic oligonucleotide
  Antisense strand to SEQ ID NO: 109380
aucaccaaguuccucacag

SEQ ID NO: 109382 - RNA, 19 nt, Artificial Sequence
  Description of Artificial Sequence: Synthetic oligonucleotide
  Sense strand starting at position 698 of SEQ ID NO: 1391
uggugauucugaguggcca

SEQ ID NO: 109383 - RNA, 19 nt, Artificial Sequence
  Description of Artificial Sequence: Synthetic oligonucleotide
  Antisense strand to SEQ ID NO: 109382
uggccacucagaaucacca

SEQ ID NO: 109384 - RNA, 19 nt, Artificial Sequence
  Description of Artificial Sequence: Synthetic oligonucleotide
  Sense strand starting at position 876 of SEQ ID NO: 1391
cgggaugugcuucgagaag

SEQ ID NO: 109385 - RNA, 19 nt, Artificial Sequence
  Description of Artificial Sequence: Synthetic oligonucleotide
  Antisense strand to SEQ ID NO: 109384
cuucucgaagcacaucccg

SEQ ID NO: 109386 - RNA, 19 nt, Artificial Sequence
  Description of Artificial Sequence: Synthetic oligonucleotide
  Sense strand starting at position 946 of SEQ ID NO: 1391
ggcaccagguuucugagaa

SEQ ID NO: 109387 - RNA, 19 nt, Artificial Sequence
  Description of Artificial Sequence: Synthetic oligonucleotide
  Antisense strand to SEQ ID NO: 109386
uucucagaaaccuggugcc

SEQ ID NO: 109388 - RNA, 19 nt, Artificial Sequence
  Description of Artificial Sequence: Synthetic oligonucleotide
  Sense strand starting at position 1005 of SEQ ID NO: 1391
ccagaaggucucugagcuu

SEQ ID NO: 109389 - RNA, 19 nt, Artificial Sequence
  Description of Artificial Sequence: Synthetic oligonucleotide
  Antisense strand to SEQ ID NO: 109388
aagcucagagaccuucugg

SEQ ID NO: 109390 - RNA, 19 nt, Artificial Sequence
  Description of Artificial Sequence: Synthetic oligonucleotide
  Sense strand starting at position 1038 of SEQ ID NO: 1391
uggagcuuucugggacuuu

SEQ ID NO: 109391 - RNA, 19 nt, Artificial Sequence
  Description of Artificial Sequence: Synthetic oligonucleotide
  Antisense strand to SEQ ID NO: 109390
aaagucccagaaagcucca

SEQ ID NO: 109392 - RNA, 19 nt, Artificial Sequence
  Description of Artificial Sequence: Synthetic oligonucleotide
  Sense strand starting at position 2161 of SEQ ID NO: 1391
gaagcuguaccauggagaa

SEQ ID NO: 109393 - RNA, 19 nt, Artificial Sequence
  Description of Artificial Sequence: Synthetic oligonucleotide
  Antisense strand to SEQ ID NO: 109392
uucuccaugguacagcuuc

SEQ ID NO: 109394 - RNA, 19 nt, Artificial Sequence
  Description of Artificial Sequence: Synthetic oligonucleotide
  Sense strand starting at position 2171 of SEQ ID NO: 1391
cauggagaaucggaucuga

SEQ ID NO: 109395 - RNA, 19 nt, Artificial Sequence
  Description of Artificial Sequence: Synthetic oligonucleotide
  Antisense strand to SEQ ID NO: 109394
ucagauccgauucuccaug

SEQ ID NO: 109396 - RNA, 19 nt, Artificial Sequence
  Description of Artificial Sequence: Synthetic oligonucleotide
  Sense strand starting at position 2247 of SEQ ID NO: 1391
gcagauaaugcacagaacu

SEQ ID NO: 109397 - RNA, 19 nt, Artificial Sequence
  Description of Artificial Sequence: Synthetic oligonucleotide
  Antisense strand to SEQ ID NO: 109396
aguucugugcauuaucugc

SEQ ID NO: 109398 - RNA, 19 nt, Artificial Sequence
  Description of Artificial Sequence: Synthetic oligonucleotide
  Sense strand starting at position 2344 of SEQ ID NO: 1391
agguaucacuuacugaauu

SEQ ID NO: 109399 - RNA, 19 nt, Artificial Sequence
  Description of Artificial Sequence: Synthetic oligonucleotide
  Antisense strand to SEQ ID NO: 109398
aauucaguaagugauaccu

SEQ ID NO: 109400 - RNA, 19 nt, Artificial Sequence
  Description of Artificial Sequence: Synthetic oligonucleotide
  Sense strand starting at position 2391 of SEQ ID NO: 1391
aaaugugagcaaugaugga

SEQ ID NO: 109401 - RNA, 19 nt, Artificial Sequence
  Description of Artificial Sequence: Synthetic oligonucleotide
  Antisense strand to SEQ ID NO: 109400
uccaucauugcucacauuu

SEQ ID NO: 109402 - RNA, 19 nt, Artificial Sequence
  Description of Artificial Sequence: Synthetic oligonucleotide
  Sense strand starting at position 2504 of SEQ ID NO: 1391
guacuacagcauugcagaa

SEQ ID NO: 109403 - RNA, 19 nt, Artificial Sequence
  Description of Artificial Sequence: Synthetic oligonucleotide
  Antisense strand to SEQ ID NO: 109402
uucugcaaugcuguaguac

SEQ ID NO: 109404 - RNA, 19 nt, Artificial Sequence
  Description of Artificial Sequence: Synthetic oligonucleotide
  Sense strand starting at position 2670 of SEQ ID NO: 1391
ccgucaugggcuuaagaac

SEQ ID NO: 109405 - RNA, 19 nt, Artificial Sequence
  Description of Artificial Sequence: Synthetic oligonucleotide
  Antisense strand to SEQ ID NO: 109404
guucuuaagcccaugacgg

SEQ ID NO: 109406 - RNA, 19 nt, Artificial Sequence
  Description of Artificial Sequence: Synthetic oligonucleotide
  Sense strand starting at position 2702 of SEQ ID NO: 1391
uccuacaagucuucuguau

SEQ ID NO: 109407 - RNA, 19 nt, Artificial Sequence
  Description of Artificial Sequence: Synthetic oligonucleotide
  Antisense strand to SEQ ID NO: 109406
auacagaagacuuguagga

SEQ ID NO: 109408 - RNA, 19 nt, Artificial Sequence
  Description of Artificial Sequence: Synthetic oligonucleotide
  Sense strand starting at position 2706 of SEQ ID NO: 1391
acaagucuucuguauaacu

SEQ ID NO: 109409 - RNA, 19 nt, Artificial Sequence
  Description of Artificial Sequence: Synthetic oligonucleotide
  Antisense strand to SEQ ID NO: 109408
aguuauacagaagacuugu

SEQ ID NO: 109410 - RNA, 19 nt, Artificial Sequence
  Description of Artificial Sequence: Synthetic oligonucleotide
  Sense strand starting at position 2717 of SEQ ID NO: 1391
guauaacugcgagguucaa

SEQ ID NO: 109411 - RNA, 19 nt, Artificial Sequence
  Description of Artificial Sequence: Synthetic oligonucleotide
  Antisense strand to SEQ ID NO: 109410
uugaaccucgcaguuauac

SEQ ID NO: 109412 - RNA, 19 nt, Artificial Sequence
  Description of Artificial Sequence: Synthetic oligonucleotide
  Sense strand starting at position 2796 of SEQ ID NO: 1391
gggaauguuggguagugga

SEQ ID NO: 109413 - RNA, 19 nt, Artificial Sequence
  Description of Artificial Sequence: Synthetic oligonucleotide
  Antisense strand to SEQ ID NO: 109412
uccacuacccaacauuccc

SEQ ID NO: 109414 - RNA, 19 nt, Artificial Sequence
  Description of Artificial Sequence: Synthetic oligonucleotide
  Sense strand starting at position 2904 of SEQ ID NO: 1391
ugaugugcccagucguguu

SEQ ID NO: 109415 - RNA, 19 nt, Artificial Sequence
  Description of Artificial Sequence: Synthetic oligonucleotide
  Antisense strand to SEQ ID NO: 109414
aacacgacugggcacauca

SEQ ID NO: 109416 - RNA, 19 nt, Artificial Sequence
  Description of Artificial Sequence: Synthetic oligonucleotide
  Sense strand starting at position 2908 of SEQ ID NO: 1391
gugcccagucguguuccaa

SEQ ID NO: 109417 - RNA, 19 nt, Artificial Sequence
  Description of Artificial Sequence: Synthetic oligonucleotide
  Antisense strand to SEQ ID NO: 109416
uuggaacacgacugggcac

SEQ ID NO: 109418 - RNA, 19 nt, Artificial Sequence
  Description of Artificial Sequence: Synthetic oligonucleotide
  Sense strand starting at position 2909 of SEQ ID NO: 1391
ugcccagucguguuccaau

SEQ ID NO: 109419 - RNA, 19 nt, Artificial Sequence
  Description of Artificial Sequence: Synthetic oligonucleotide
  Antisense strand to SEQ ID NO: 109418
auuggaacacgacugggca

SEQ ID NO: 109420 - RNA, 19 nt, Artificial Sequence
  Description of Artificial Sequence: Synthetic oligonucleotide
  Sense strand starting at position 3197 of SEQ ID NO: 1391
aguguuaauugaguaccua

SEQ ID NO: 109421 - RNA, 19 nt, Artificial Sequence
  Description of Artificial Sequence: Synthetic oligonucleotide
  Antisense strand to SEQ ID NO: 109420
uagguacucaauuaacacu

SEQ ID NO: 109422 - RNA, 19 nt, Artificial Sequence
  Description of Artificial Sequence: Synthetic oligonucleotide
  Sense strand starting at position 3198 of SEQ ID NO: 1391
guguuaauugaguaccuac

SEQ ID NO: 109423 - RNA, 19 nt, Artificial Sequence
  Description of Artificial Sequence: Synthetic oligonucleotide
  Antisense strand to SEQ ID NO: 109422
guagguacucaauuaacac

SEQ ID NO: 109424 - RNA, 19 nt, Artificial Sequence
  Description of Artificial Sequence: Synthetic oligonucleotide
  Sense strand starting at position 3259 of SEQ ID NO: 1391
ccuggaaaugcuuauaguu

SEQ ID NO: 109425 - RNA, 19 nt, Artificial Sequence
  Description of Artificial Sequence: Synthetic oligonucleotide
  Antisense strand to SEQ ID NO: 109424
aacuauaagcauuuccagg

SEQ ID NO: 109426 - RNA, 19 nt, Artificial Sequence
  Description of Artificial Sequence: Synthetic oligonucleotide
  Sense strand starting at position 3266 of SEQ ID NO: 1391
augcuuauaguuuggugau

SEQ ID NO: 109427 - RNA, 19 nt, Artificial Sequence
  Description of Artificial Sequence: Synthetic oligonucleotide
  Antisense strand to SEQ ID NO: 109426
aucaccaaacuauaagcau

SEQ ID NO: 109428 - RNA, 19 nt, Artificial Sequence
  Description of Artificial Sequence: Synthetic oligonucleotide
  Sense strand starting at position 3283 of SEQ ID NO: 1391
augugaggucaacagugau

SEQ ID NO: 109429 - RNA, 19 nt, Artificial Sequence
  Description of Artificial Sequence: Synthetic oligonucleotide
  Antisense strand to SEQ ID NO: 109428
aucacuguugaccucacau

SEQ ID NO: 109430 - RNA, 19 nt, Artificial Sequence
  Description of Artificial Sequence: Synthetic oligonucleotide
  Sense strand starting at position 3311 of SEQ ID NO: 1391
uagucuguugguggaggua

SEQ ID NO: 109431 - RNA, 19 nt, Artificial Sequence
  Description of Artificial Sequence: Synthetic oligonucleotide
  Antisense strand to SEQ ID NO: 109430
uaccuccaccaacagacua

SEQ ID NO: 109432 - RNA, 19 nt, Artificial Sequence
  Description of Artificial Sequence: Synthetic oligonucleotide
  Sense strand starting at position 3565 of SEQ ID NO: 1391
ggguuagugacaggacauu

SEQ ID NO: 109433 - RNA, 19 nt, Artificial Sequence
  Description of Artificial Sequence: Synthetic oligonucleotide
  Antisense strand to SEQ ID NO: 109432
aauguccugucacuaaccc

SEQ ID NO: 109434 - RNA, 19 nt, Artificial Sequence
  Description of Artificial Sequence: Synthetic oligonucleotide
  Sense strand starting at position 3692 of SEQ ID NO: 1391
cagaguuguggccagcaga

SEQ ID NO: 109435 - RNA, 19 nt, Artificial Sequence
  Description of Artificial Sequence: Synthetic oligonucleotide
  Antisense strand to SEQ ID NO: 109434
ucugcuggccacaacucug

SEQ ID NO: 109436 - RNA, 19 nt, Artificial Sequence
  Description of Artificial Sequence: Synthetic oligonucleotide
  Sense strand starting at position 3705 of SEQ ID NO: 1391
agcagagcuugcuuggaau

SEQ ID NO: 109437 - RNA, 19 nt, Artificial Sequence
  Description of Artificial Sequence: Synthetic oligonucleotide
  Antisense strand to SEQ ID NO: 109436
auuccaagcaagcucugcu

SEQ ID NO: 109438 - RNA, 19 nt, Artificial Sequence
  Description of Artificial Sequence: Synthetic oligonucleotide
  Sense strand starting at position 3707 of SEQ ID NO: 1391
cagagcuugcuuggaaucu

SEQ ID NO: 109439 - RNA, 19 nt, Artificial Sequence
  Description of Artificial Sequence: Synthetic oligonucleotide
  Antisense strand to SEQ ID NO: 109438
agauuccaagcaagcucug

SEQ ID NO: 109440 - RNA, 19 nt, Artificial Sequence
  Description of Artificial Sequence: Synthetic oligonucleotide
  Sense strand starting at position 3976 of SEQ ID NO: 1392
aaugcugcuuccucggaga

SEQ ID NO: 109441 - RNA, 19 nt, Artificial Sequence
  Description of Artificial Sequence: Synthetic oligonucleotide
  Antisense strand to SEQ ID NO: 109440
ucuccgaggaagcagcauu

SEQ ID NO: 109442 - RNA, 19 nt, Artificial Sequence
  Description of Artificial Sequence: Synthetic oligonucleotide
  Sense strand starting at position 3961 of SEQ ID NO: 1392
cccgaucucuucuuaaaug

SEQ ID NO: 109443 - RNA, 19 nt, Artificial Sequence
  Description of Artificial Sequence: Synthetic oligonucleotide
  Antisense strand to SEQ ID NO: 109442
cauuuaagaagagaucggg

SEQ ID NO: 109444 - RNA, 19 nt, Artificial Sequence
  Description of Artificial Sequence: Synthetic oligonucleotide
  Sense strand starting at position 3901 of SEQ ID NO: 1392
uuguucccugcaugaaauc

SEQ ID NO: 109445 - RNA, 19 nt, Artificial Sequence
  Description of Artificial Sequence: Synthetic oligonucleotide
  Antisense strand to SEQ ID NO: 109444
gauuucaugcagggaacaa

SEQ ID NO: 109446 - RNA, 19 nt, Artificial Sequence
  Description of Artificial Sequence: Synthetic oligonucleotide
  Sense strand starting at position 3899 of SEQ ID NO: 1392
aguuguucccugcaugaaa

SEQ ID NO: 109447 - RNA, 19 nt, Artificial Sequence
  Description of Artificial Sequence: Synthetic oligonucleotide
  Antisense strand to SEQ ID NO: 109446
uuucaugcagggaacaacu

SEQ ID NO: 109448 - RNA, 19 nt, Artificial Sequence
  Description of Artificial Sequence: Synthetic oligonucleotide
  Sense strand starting at position 3897 of SEQ ID NO: 1392
uaaguuguucccugcauga

SEQ ID NO: 109449 - RNA, 19 nt, Artificial Sequence
  Description of Artificial Sequence: Synthetic oligonucleotide
  Antisense strand to SEQ ID NO: 109448
ucaugcagggaacaacuua

SEQ ID NO: 109450 - RNA, 19 nt, Artificial Sequence
  Description of Artificial Sequence: Synthetic oligonucleotide
  Sense strand starting at position 3811 of SEQ ID NO: 1392
ugcccuugcucucuuugau

SEQ ID NO: 109451 - RNA, 19 nt, Artificial Sequence
  Description of Artificial Sequence: Synthetic oligonucleotide
  Antisense strand to SEQ ID NO: 109450
aucaaagagagcaagggca

SEQ ID NO: 109452 - RNA, 19 nt, Artificial Sequence
  Description of Artificial Sequence: Synthetic oligonucleotide
  Sense strand starting at position 3781 of SEQ ID NO: 1392
agugauagguggucuuggu

SEQ ID NO: 109453 - RNA, 19 nt, Artificial Sequence
  Description of Artificial Sequence: Synthetic oligonucleotide
  Antisense strand to SEQ ID NO: 109452
accaagaccaccuaucacu

SEQ ID NO: 109454 - RNA, 19 nt, Artificial Sequence
  Description of Artificial Sequence: Synthetic oligonucleotide
  Sense strand starting at position 3778 of SEQ ID NO: 1392
gauagugauagguggucuu

SEQ ID NO: 109455 - RNA, 19 nt, Artificial Sequence
  Description of Artificial Sequence: Synthetic oligonucleotide
  Antisense strand to SEQ ID NO: 109454
aagaccaccuaucacuauc

SEQ ID NO: 109456 - RNA, 19 nt, Artificial Sequence
  Description of Artificial Sequence: Synthetic oligonucleotide
  Sense strand starting at position 3757 of SEQ ID NO: 1392
auuuaaauguaccgaacua

SEQ ID NO: 109457 - RNA, 19 nt, Artificial Sequence
  Description of Artificial Sequence: Synthetic oligonucleotide
  Antisense strand to SEQ ID NO: 109456
uaguucgguacauuuaaau

SEQ ID NO: 109458 - RNA, 19 nt, Artificial Sequence
  Description of Artificial Sequence: Synthetic oligonucleotide
  Sense strand starting at position 3669 of SEQ ID NO: 1392
aguauuuacucaggaugga

SEQ ID NO: 109459 - RNA, 19 nt, Artificial Sequence
  Description of Artificial Sequence: Synthetic oligonucleotide
  Antisense strand to SEQ ID NO: 109458
uccauccugaguaaauacu

SEQ ID NO: 109460 - RNA, 19 nt, Artificial Sequence
  Description of Artificial Sequence: Synthetic oligonucleotide
  Sense strand starting at position 2961 of SEQ ID NO: 1392
gguuauauuucagggaugu

SEQ ID NO: 109461 - RNA, 19 nt, Artificial Sequence
  Description of Artificial Sequence: Synthetic oligonucleotide
  Antisense strand to SEQ ID NO: 109460
acaucccugaaauauaacc

SEQ ID NO: 109462 - RNA, 19 nt, Artificial Sequence
  Description of Artificial Sequence: Synthetic oligonucleotide
  Sense strand starting at position 2732 of SEQ ID NO: 1392
ggcaucuuugacuauuaga

SEQ ID NO: 109463 - RNA, 19 nt, Artificial Sequence
  Description of Artificial Sequence: Synthetic oligonucleotide
  Antisense strand to SEQ ID NO: 109462
ucuaauagucaaagaugcc

SEQ ID NO: 109464 - RNA, 19 nt, Artificial Sequence
  Description of Artificial Sequence: Synthetic oligonucleotide
  Sense strand starting at position 2425 of SEQ ID NO: 1392
gcagcaauccgggaacacu

SEQ ID NO: 109465 - RNA, 19 nt, Artificial Sequence
  Description of Artificial Sequence: Synthetic oligonucleotide
  Antisense strand to SEQ ID NO: 109464
aguguucccggauugcugc

SEQ ID NO: 109466 - RNA, 19 nt, Artificial Sequence
  Description of Artificial Sequence: Synthetic oligonucleotide
  Sense strand starting at position 2379 of SEQ ID NO: 1392
agcauugaccuuuggccaa

SEQ ID NO: 109467 - RNA, 19 nt, Artificial Sequence
  Description of Artificial Sequence: Synthetic oligonucleotide
  Antisense strand to SEQ ID NO: 109466
uuggccaaaggucaaugcu

SEQ ID NO: 109468 - RNA, 19 nt, Artificial Sequence
  Description of Artificial Sequence: Synthetic oligonucleotide
  Sense strand starting at position 2209 of SEQ ID NO: 1392
cugccuccgccaugggaaa

SEQ ID NO: 109469 - RNA, 19 nt, Artificial Sequence
  Description of Artificial Sequence: Synthetic oligonucleotide
  Antisense strand to SEQ ID NO: 109468
uuucccauggcggaggcag

SEQ ID NO: 109470 - RNA, 19 nt, Artificial Sequence
  Description of Artificial Sequence: Synthetic oligonucleotide
  Sense strand starting at position 2115 of SEQ ID NO: 1392
gccagaauuugucugucuc

SEQ ID NO: 109471 - RNA, 19 nt, Artificial Sequence
  Description of Artificial Sequence: Synthetic oligonucleotide
  Antisense strand to SEQ ID NO: 109470
gagacagacaaauucuggc

SEQ ID NO: 109472 - RNA, 19 nt, Artificial Sequence
  Description of Artificial Sequence: Synthetic oligonucleotide
  Sense strand starting at position 2105 of SEQ ID NO: 1392
ccaacuuuccgccagaauu

SEQ ID NO: 109473 - RNA, 19 nt, Artificial Sequence
  Description of Artificial Sequence: Synthetic oligonucleotide
  Antisense strand to SEQ ID NO: 109472
aauucuggcggaaaguugg

SEQ ID NO: 109474 - RNA, 19 nt, Artificial Sequence
  Description of Artificial Sequence: Synthetic oligonucleotide
  Sense strand starting at position 2103 of SEQ ID NO: 1392
ugccaacuuuccgccagaa

SEQ ID NO: 109475 - RNA, 19 nt, Artificial Sequence
  Description of Artificial Sequence: Synthetic oligonucleotide
  Antisense strand to SEQ ID NO: 109474
uucuggcggaaaguuggca

SEQ ID NO: 109476 - RNA, 19 nt, Artificial Sequence
  Description of Artificial Sequence: Synthetic oligonucleotide
  Sense strand starting at position 2062 of SEQ ID NO: 1392
guggagaguugaggagaaa

SEQ ID NO: 109477 - RNA, 19 nt, Artificial Sequence
  Description of Artificial Sequence: Synthetic oligonucleotide
  Antisense strand to SEQ ID NO: 109476
uuucuccucaacucuccac

SEQ ID NO: 109478 - RNA, 19 nt, Artificial Sequence
  Description of Artificial Sequence: Synthetic oligonucleotide
  Sense strand starting at position 2061 of SEQ ID NO: 1392
gguggagaguugaggagaa

SEQ ID NO: 109479 - RNA, 19 nt, Artificial Sequence
  Description of Artificial Sequence: Synthetic oligonucleotide
  Antisense strand to SEQ ID NO: 109478
uucuccucaacucuccacc

SEQ ID NO: 109480 - RNA, 19 nt, Artificial Sequence
  Description of Artificial Sequence: Synthetic oligonucleotide
  Sense strand starting at position 2039 of SEQ ID NO: 1392
cgccguuaucacccggagu

SEQ ID NO: 109481 - RNA, 19 nt, Artificial Sequence
  Description of Artificial Sequence: Synthetic oligonucleotide
  Antisense strand to SEQ ID NO: 109480
acuccgggugauaacggcg

SEQ ID NO: 109482 - RNA, 19 nt, Artificial Sequence
  Description of Artificial Sequence: Synthetic oligonucleotide
  Sense strand starting at position 1350 of SEQ ID NO: 1392
aaggguucagccgagggau

SEQ ID NO: 109483 - RNA, 19 nt, Artificial Sequence
  Description of Artificial Sequence: Synthetic oligonucleotide
  Antisense strand to SEQ ID NO: 109482
aucccucggcugaacccuu

SEQ ID NO: 109484 - RNA, 19 nt, Artificial Sequence
  Description of Artificial Sequence: Synthetic oligonucleotide
  Sense strand starting at position 1204 of SEQ ID NO: 1392
ggaguaauaggcuguuaaa

SEQ ID NO: 109485 - RNA, 19 nt, Artificial Sequence
  Description of Artificial Sequence: Synthetic oligonucleotide
  Antisense strand to SEQ ID NO: 109484
uuuaacagccuauuacucc

SEQ ID NO: 109486 - RNA, 19 nt, Artificial Sequence
  Description of Artificial Sequence: Synthetic oligonucleotide
  Sense strand starting at position 1076 of SEQ ID NO: 1392
uacguaaacuucguaaacu

SEQ ID NO: 109487 - RNA, 19 nt, Artificial Sequence
  Description of Artificial Sequence: Synthetic oligonucleotide
  Antisense strand to SEQ ID NO: 109486
aguuuacgaaguuuacgua

SEQ ID NO: 109488 - RNA, 19 nt, Artificial Sequence
  Description of Artificial Sequence: Synthetic oligonucleotide
  Sense strand starting at position 1075 of SEQ ID NO: 1392
cuacguaaacuucguaaac

SEQ ID NO: 109489 - RNA, 19 nt, Artificial Sequence
  Description of Artificial Sequence: Synthetic oligonucleotide
  Antisense strand to SEQ ID NO: 109488
guuuacgaaguuuacguag

SEQ ID NO: 109490 - RNA, 19 nt, Artificial Sequence
  Description of Artificial Sequence: Synthetic oligonucleotide
  Sense strand starting at position 1036 of SEQ ID NO: 1392
gaguucucaagaggugacu

SEQ ID NO: 109491 - RNA, 19 nt, Artificial Sequence
  Description of Artificial Sequence: Synthetic oligonucleotide
  Antisense strand to SEQ ID NO: 109490
agucaccucuugagaacuc

SEQ ID NO: 109492 - RNA, 19 nt, Artificial Sequence
  Description of Artificial Sequence: Synthetic oligonucleotide
  Sense strand starting at position 891 of SEQ ID NO: 1392
ucucuaagucacugcagua

SEQ ID NO: 109493 - RNA, 19 nt, Artificial Sequence
  Description of Artificial Sequence: Synthetic oligonucleotide
  Antisense strand to SEQ ID NO: 109492
uacugcagugacuuagaga

SEQ ID NO: 109494 - RNA, 19 nt, Artificial Sequence
  Description of Artificial Sequence: Synthetic oligonucleotide
  Sense strand starting at position 859 of SEQ ID NO: 1392
cacguugugcuuuaauaac

SEQ ID NO: 109495 - RNA, 19 nt, Artificial Sequence
  Description of Artificial Sequence: Synthetic oligonucleotide
  Antisense strand to SEQ ID NO: 109494
guuauuaaagcacaacgug

SEQ ID NO: 109496 - RNA, 19 nt, Artificial Sequence
  Description of Artificial Sequence: Synthetic oligonucleotide
  Sense strand starting at position 807 of SEQ ID NO: 1392
aggacauauccuuaugcua

SEQ ID NO: 109497 - RNA, 19 nt, Artificial Sequence
  Description of Artificial Sequence: Synthetic oligonucleotide
  Antisense strand to SEQ ID NO: 109496
uagcauaaggauauguccu

SEQ ID NO: 109498 - RNA, 19 nt, Artificial Sequence
  Description of Artificial Sequence: Synthetic oligonucleotide
  Sense strand starting at position 714 of SEQ ID NO: 1392
gaugaaugauauucccguu

SEQ ID NO: 109499 - RNA, 19 nt, Artificial Sequence
  Description of Artificial Sequence: Synthetic oligonucleotide
  Antisense strand to SEQ ID NO: 109498
aacgggaauaucauucauc

SEQ ID NO: 109500 - RNA, 19 nt, Artificial Sequence
  Description of Artificial Sequence: Synthetic oligonucleotide
  Sense strand starting at position 645 of SEQ ID NO: 1392
agacauaguuauguuguga

SEQ ID NO: 109501 - RNA, 19 nt, Artificial Sequence
  Description of Artificial Sequence: Synthetic oligonucleotide
  Antisense strand to SEQ ID NO: 109500
ucacaacauaacuaugucu

SEQ ID NO: 109502 - RNA, 19 nt, Artificial Sequence
  Description of Artificial Sequence: Synthetic oligonucleotide
  Sense strand starting at position 589 of SEQ ID NO: 1392
ugacuaagauaugaacuua

SEQ ID NO: 109503 - RNA, 19 nt, Artificial Sequence
  Description of Artificial Sequence: Synthetic oligonucleotide
  Antisense strand to SEQ ID NO: 109502
uaaguucauaucuuaguca

SEQ ID NO: 109504 - RNA, 19 nt, Artificial Sequence
  Description of Artificial Sequence: Synthetic oligonucleotide
  Sense strand starting at position 580 of SEQ ID NO: 1392
aauaacgugugacuaagau

SEQ ID NO: 109505 - RNA, 19 nt, Artificial Sequence
  Description of Artificial Sequence: Synthetic oligonucleotide
  Antisense strand to SEQ ID NO: 109504
aucuuagucacacguuauu

SEQ ID NO: 109506 - RNA, 19 nt, Artificial Sequence
  Description of Artificial Sequence: Synthetic oligonucleotide
  Sense strand starting at position 577 of SEQ ID NO: 1392
auaaauaacgugugacuaa

SEQ ID NO: 109507 - RNA, 19 nt, Artificial Sequence
  Description of Artificial Sequence: Synthetic oligonucleotide
  Antisense strand to SEQ ID NO: 109506
uuagucacacguuauuuau

SEQ ID NO: 109508 - RNA, 19 nt, Artificial Sequence
  Description of Artificial Sequence: Synthetic oligonucleotide
  Sense strand starting at position 555 of SEQ ID NO: 1392
cucaauaacgugugacuaa

SEQ ID NO: 109509 - RNA, 19 nt, Artificial Sequence
  Description of Artificial Sequence: Synthetic oligonucleotide
  Antisense strand to SEQ ID NO: 109508
uuagucacacguuauugag

SEQ ID NO: 109510 - RNA, 19 nt, Artificial Sequence
  Description of Artificial Sequence: Synthetic oligonucleotide
  Sense strand starting at position 539 of SEQ ID NO: 1392
gaaauuaugugguccacuc

SEQ ID NO: 109511 - RNA, 19 nt, Artificial Sequence
  Description of Artificial Sequence: Synthetic oligonucleotide
  Antisense strand to SEQ ID NO: 109510
gaguggaccacauaauuuc

SEQ ID NO: 109512 - RNA, 19 nt, Artificial Sequence
  Description of Artificial Sequence: Synthetic oligonucleotide
  Sense strand starting at position 501 of SEQ ID NO: 1392
gcagcaguuuaaccuguaa

SEQ ID NO: 109513 - RNA, 19 nt, Artificial Sequence
  Description of Artificial Sequence: Synthetic oligonucleotide
  Antisense strand to SEQ ID NO: 109512
uuacagguuaaacugcugc

SEQ ID NO: 109514 - RNA, 19 nt, Artificial Sequence
  Description of Artificial Sequence: Synthetic oligonucleotide
  Sense strand starting at position 364 of SEQ ID NO: 1392
agcuacauugguuaaucaa

SEQ ID NO: 109515 - RNA, 19 nt, Artificial Sequence
  Description of Artificial Sequence: Synthetic oligonucleotide
  Antisense strand to SEQ ID NO: 109514
uugauuaaccaauguagcu

SEQ ID NO: 109516 - RNA, 19 nt, Artificial Sequence
  Description of Artificial Sequence: Synthetic oligonucleotide
  Sense strand starting at position 227 of SEQ ID NO: 1392
agaauucuuuaagggaauu

SEQ ID NO: 109517 - RNA, 19 nt, Artificial Sequence
  Description of Artificial Sequence: Synthetic oligonucleotide
  Antisense strand to SEQ ID NO: 109516
aauucccuuaaagaauucu

SEQ ID NO: 109518 - RNA, 19 nt, Artificial Sequence
  Description of Artificial Sequence: Synthetic oligonucleotide
  Sense strand starting at position 160 of SEQ ID NO: 1392
acuggauuacauuguaacu

SEQ ID NO: 109519 - RNA, 19 nt, Artificial Sequence
  Description of Artificial Sequence: Synthetic oligonucleotide
  Antisense strand to SEQ ID NO: 109518
aguuacaauguaauccagu

SEQ ID NO: 109520 - RNA, 19 nt, Artificial Sequence
  Description of Artificial Sequence: Synthetic oligonucleotide
  Sense strand starting at position 3944 of SEQ ID NO: 1393
ggagguuuaacuugguaug

SEQ ID NO: 109521 - RNA, 19 nt, Artificial Sequence
  Description of Artificial Sequence: Synthetic oligonucleotide
  Antisense strand to SEQ ID NO: 109520
cauaccaaguuaaaccucc

SEQ ID NO: 109522 - RNA, 19 nt, Artificial Sequence
  Description of Artificial Sequence: Synthetic oligonucleotide
  Sense strand starting at position 3935 of SEQ ID NO: 1393
aucauugguggagguuuaa

SEQ ID NO: 109523 - RNA, 19 nt, Artificial Sequence
  Description of Artificial Sequence: Synthetic oligonucleotide
  Antisense strand to SEQ ID NO: 109522
uuaaaccuccaccaaugau

SEQ ID NO: 109524 - RNA, 19 nt, Artificial Sequence
  Description of Artificial Sequence: Synthetic oligonucleotide
  Sense strand starting at position 3933 of SEQ ID NO: 1393
gcaucauugguggagguuu

SEQ ID NO: 109525 - RNA, 19 nt, Artificial Sequence
  Description of Artificial Sequence: Synthetic oligonucleotide
  Antisense strand to SEQ ID NO: 109524
aaaccuccaccaaugaugc

SEQ ID NO: 109526 - RNA, 19 nt, Artificial Sequence
  Description of Artificial Sequence: Synthetic oligonucleotide
  Sense strand starting at position 3922 of SEQ ID NO: 1393
ggcagauucgugcaucauu

SEQ ID NO: 109527 - RNA, 19 nt, Artificial Sequence
  Description of Artificial Sequence: Synthetic oligonucleotide
  Antisense strand to SEQ ID NO: 109526
aaugaugcacgaaucugcc

SEQ ID NO: 109528 - RNA, 19 nt, Artificial Sequence
  Description of Artificial Sequence: Synthetic oligonucleotide
  Sense strand starting at position 3890 of SEQ ID NO: 1393
ccacacuggucccuaggaa

SEQ ID NO: 109529 - RNA, 19 nt, Artificial Sequence
  Description of Artificial Sequence: Synthetic oligonucleotide
  Antisense strand to SEQ ID NO: 109528
uuccuagggaccagugugg

SEQ ID NO: 109530 - RNA, 19 nt, Artificial Sequence
  Description of Artificial Sequence: Synthetic oligonucleotide
  Sense strand starting at position 3821 of SEQ ID NO: 1393
gccucauccugggcucaga

SEQ ID NO: 109531 - RNA, 19 nt, Artificial Sequence
  Description of Artificial Sequence: Synthetic oligonucleotide
  Antisense strand to SEQ ID NO: 109530
ucugagcccaggaugaggc

SEQ ID NO: 109532 - RNA, 19 nt, Artificial Sequence
  Description of Artificial Sequence: Synthetic oligonucleotide
  Sense strand starting at position 3737 of SEQ ID NO: 1393
guccucugucauggugaau

SEQ ID NO: 109533 - RNA, 19 nt, Artificial Sequence
  Description of Artificial Sequence: Synthetic oligonucleotide
  Antisense strand to SEQ ID NO: 109532
auucaccaugacagaggac

SEQ ID NO: 109534 - RNA, 19 nt, Artificial Sequence
  Description of Artificial Sequence: Synthetic oligonucleotide
  Sense strand starting at position 3593 of SEQ ID NO: 1393
gcagaaagugguugcucuu

SEQ ID NO: 109535 - RNA, 19 nt, Artificial Sequence
  Description of Artificial Sequence: Synthetic oligonucleotide
  Antisense strand to SEQ ID NO: 109534
aagagcaaccacuuucugc

SEQ ID NO: 109536 - RNA, 19 nt, Artificial Sequence
  Description of Artificial Sequence: Synthetic oligonucleotide
  Sense strand starting at position 3592 of SEQ ID NO: 1393
ggcagaaagugguugcucu

SEQ ID NO: 109537 - RNA, 19 nt, Artificial Sequence
  Description of Artificial Sequence: Synthetic oligonucleotide
  Antisense strand to SEQ ID NO: 109536
agagcaaccacuuucugcc

SEQ ID NO: 109538 - RNA, 19 nt, Artificial Sequence
  Description of Artificial Sequence: Synthetic oligonucleotide
  Sense strand starting at position 3377 of SEQ ID NO: 1393
aauuaagugugggccuaaa

SEQ ID NO: 109539 - RNA, 19 nt, Artificial Sequence
  Description of Artificial Sequence: Synthetic oligonucleotide
  Antisense strand to SEQ ID NO: 109538
uuuaggcccacacuuaauu

SEQ ID NO: 109540 - RNA, 19 nt, Artificial Sequence
  Description of Artificial Sequence: Synthetic oligonucleotide
  Sense strand starting at position 3376 of SEQ ID NO: 1393
aaauuaagugugggccuaa

SEQ ID NO: 109541 - RNA, 19 nt, Artificial Sequence
  Description of Artificial Sequence: Synthetic oligonucleotide
  Antisense strand to SEQ ID NO: 109540
uuaggcccacacuuaauuu

SEQ ID NO: 109542 - RNA, 19 nt, Artificial Sequence
  Description of Artificial Sequence: Synthetic oligonucleotide
  Sense strand starting at position 3321 of SEQ ID NO: 1393
ugguuuggugguugaaacu

SEQ ID NO: 109543 - RNA, 19 nt, Artificial Sequence
  Description of Artificial Sequence: Synthetic oligonucleotide
  Antisense strand to SEQ ID NO: 109542
aguuucaaccaccaaacca

SEQ ID NO: 109544 - RNA, 19 nt, Artificial Sequence
  Description of Artificial Sequence: Synthetic oligonucleotide
  Sense strand starting at position 3320 of SEQ ID NO: 1393
gugguuuggugguugaaac

SEQ ID NO: 109545 - RNA, 19 nt, Artificial Sequence
  Description of Artificial Sequence: Synthetic oligonucleotide
  Antisense strand to SEQ ID NO: 109544
guuucaaccaccaaaccac

SEQ ID NO: 109546 - RNA, 19 nt, Artificial Sequence
  Description of Artificial Sequence: Synthetic oligonucleotide
  Sense strand starting at position 3071 of SEQ ID NO: 1393
guugaaggaucacaggauu

SEQ ID NO: 109547 - RNA, 19 nt, Artificial Sequence
  Description of Artificial Sequence: Synthetic oligonucleotide
  Antisense strand to SEQ ID NO: 109546
aauccugugauccuucaac

SEQ ID NO: 109548 - RNA, 19 nt, Artificial Sequence
  Description of Artificial Sequence: Synthetic oligonucleotide
  Sense strand starting at position 3055 of SEQ ID NO: 1393
cuucuaauauggucaaguu

SEQ ID NO: 109549 - RNA, 19 nt, Artificial Sequence
  Description of Artificial Sequence: Synthetic oligonucleotide
  Antisense strand to SEQ ID NO: 109548
aacuugaccauauuagaag

SEQ ID NO: 109550 - RNA, 19 nt, Artificial Sequence
  Description of Artificial Sequence: Synthetic oligonucleotide
  Sense strand starting at position 3012 of SEQ ID NO: 1393
uaagaugggcccuacaagu

SEQ ID NO: 109551 - RNA, 19 nt, Artificial Sequence
  Description of Artificial Sequence: Synthetic oligonucleotide
  Antisense strand to SEQ ID NO: 109550
acuuguagggcccaucuua

SEQ ID NO: 109552 - RNA, 19 nt, Artificial Sequence
  Description of Artificial Sequence: Synthetic oligonucleotide
  Sense strand starting at position 2977 of SEQ ID NO: 1393
ucugacagugccuaguuaa

SEQ ID NO: 109553 - RNA, 19 nt, Artificial Sequence
  Description of Artificial Sequence: Synthetic oligonucleotide
  Antisense strand to SEQ ID NO: 109552
uuaacuaggcacugucaga

SEQ ID NO: 109554 - RNA, 19 nt, Artificial Sequence
  Description of Artificial Sequence: Synthetic oligonucleotide
  Sense strand starting at position 2976 of SEQ ID NO: 1393
aucugacagugccuaguua

SEQ ID NO: 109555 - RNA, 19 nt, Artificial Sequence
  Description of Artificial Sequence: Synthetic oligonucleotide
  Antisense strand to SEQ ID NO: 109554
uaacuaggcacugucagau

SEQ ID NO: 109556 - RNA, 19 nt, Artificial Sequence
  Description of Artificial Sequence: Synthetic oligonucleotide
  Sense strand starting at position 2866 of SEQ ID NO: 1393
cuacuuucucugugcucau

SEQ ID NO: 109557 - RNA, 19 nt, Artificial Sequence
  Description of Artificial Sequence: Synthetic oligonucleotide
  Antisense strand to SEQ ID NO: 109556
augagcacagagaaaguag

SEQ ID NO: 109558 - RNA, 19 nt, Artificial Sequence
  Description of Artificial Sequence: Synthetic oligonucleotide
  Sense strand starting at position 2769 of SEQ ID NO: 1393
aaucuuugucuuggaagag

SEQ ID NO: 109559 - RNA, 19 nt, Artificial Sequence
  Description of Artificial Sequence: Synthetic oligonucleotide
  Antisense strand to SEQ ID NO: 109558
cucuuccaagacaaagauu

SEQ ID NO: 109560 - RNA, 19 nt, Artificial Sequence
  Description of Artificial Sequence: Synthetic oligonucleotide
  Sense strand starting at position 2690 of SEQ ID NO: 1393
gcauuagguucugugcaca

SEQ ID NO: 109561 - RNA, 19 nt, Artificial Sequence
  Description of Artificial Sequence: Synthetic oligonucleotide
  Antisense strand to SEQ ID NO: 109560
ugugcacagaaccuaaugc

SEQ ID NO: 109562 - RNA, 19 nt, Artificial Sequence
  Description of Artificial Sequence: Synthetic oligonucleotide
  Sense strand starting at position 2597 of SEQ ID NO: 1393
acauuuaucuguggacauc

SEQ ID NO: 109563 - RNA, 19 nt, Artificial Sequence
  Description of Artificial Sequence: Synthetic oligonucleotide
  Antisense strand to SEQ ID NO: 109562
gauguccacagauaaaugu

SEQ ID NO: 109564 - RNA, 19 nt, Artificial Sequence
  Description of Artificial Sequence: Synthetic oligonucleotide
  Sense strand starting at position 2581 of SEQ ID NO: 1393
cugacaugauagcaagaca

SEQ ID NO: 109565 - RNA, 19 nt, Artificial Sequence
  Description of Artificial Sequence: Synthetic oligonucleotide
  Antisense strand to SEQ ID NO: 109564
ugucuugcuaucaugucag

SEQ ID NO: 109566 - RNA, 19 nt, Artificial Sequence
  Description of Artificial Sequence: Synthetic oligonucleotide
  Sense strand starting at position 2573 of SEQ ID NO: 1393
agaacuaucugacaugaua

SEQ ID NO: 109567 - RNA, 19 nt, Artificial Sequence
  Description of Artificial Sequence: Synthetic oligonucleotide
  Antisense strand to SEQ ID NO: 109566
uaucaugucagauaguucu

SEQ ID NO: 109568 - RNA, 19 nt, Artificial Sequence
  Description of Artificial Sequence: Synthetic oligonucleotide
  Sense strand starting at position 2571 of SEQ ID NO: 1393
ggagaacuaucugacauga

SEQ ID NO: 109569 - RNA, 19 nt, Artificial Sequence
  Description of Artificial Sequence: Synthetic oligonucleotide
  Antisense strand to SEQ ID NO: 109568
ucaugucagauaguucucc

SEQ ID NO: 109570 - RNA, 19 nt, Artificial Sequence
  Description of Artificial Sequence: Synthetic oligonucleotide
  Sense strand starting at position 2558 of SEQ ID NO: 1393
cucagucguggcuggagaa

SEQ ID NO: 109571 - RNA, 19 nt, Artificial Sequence
  Description of Artificial Sequence: Synthetic oligonucleotide
  Antisense strand to SEQ ID NO: 109570
uucuccagccacgacugag

SEQ ID NO: 109572 - RNA, 19 nt, Artificial Sequence
  Description of Artificial Sequence: Synthetic oligonucleotide
  Sense strand starting at position 2484 of SEQ ID NO: 1393
uugugacugcuaugaacag

SEQ ID NO: 109573 - RNA, 19 nt, Artificial Sequence
  Description of Artificial Sequence: Synthetic oligonucleotide
  Antisense strand to SEQ ID NO: 109572
cuguucauagcagucacaa

SEQ ID NO: 109574 - RNA, 19 nt, Artificial Sequence
  Description of Artificial Sequence: Synthetic oligonucleotide
  Sense strand starting at position 2461 of SEQ ID NO: 1393
cugauucagggaugugaga

SEQ ID NO: 109575 - RNA, 19 nt, Artificial Sequence
  Description of Artificial Sequence: Synthetic oligonucleotide
  Antisense strand to SEQ ID NO: 109574
ucucacaucccugaaucag

SEQ ID NO: 109576 - RNA, 19 nt, Artificial Sequence
  Description of Artificial Sequence: Synthetic oligonucleotide
  Sense strand starting at position 2414 of SEQ ID NO: 1393
gugguaaacucuccagcaa

SEQ ID NO: 109577 - RNA, 19 nt, Artificial Sequence
  Description of Artificial Sequence: Synthetic oligonucleotide
  Antisense strand to SEQ ID NO: 109576
uugcuggagaguuuaccac

SEQ ID NO: 109578 - RNA, 19 nt, Artificial Sequence
  Description of Artificial Sequence: Synthetic oligonucleotide
  Sense strand starting at position 2402 of SEQ ID NO: 1393
agagacuuguuugugguaa

SEQ ID NO: 109579 - RNA, 19 nt, Artificial Sequence
  Description of Artificial Sequence: Synthetic oligonucleotide
  Antisense strand to SEQ ID NO: 109578
uuaccacaaacaagucucu

SEQ ID NO: 109580 - RNA, 19 nt, Artificial Sequence
  Description of Artificial Sequence: Synthetic oligonucleotide
  Sense strand starting at position 2401 of SEQ ID NO: 1393
cagagacuuguuuguggua

SEQ ID NO: 109581 - RNA, 19 nt, Artificial Sequence
  Description of Artificial Sequence: Synthetic oligonucleotide
  Antisense strand to SEQ ID NO: 109580
uaccacaaacaagucucug

SEQ ID NO: 109582 - RNA, 19 nt, Artificial Sequence
  Description of Artificial Sequence: Synthetic oligonucleotide
  Sense strand starting at position 2217 of SEQ ID NO: 1393
gggcuugccuggagaguga

SEQ ID NO: 109583 - RNA, 19 nt, Artificial Sequence
  Description of Artificial Sequence: Synthetic oligonucleotide
  Antisense strand to SEQ ID NO: 109582
ucacucuccaggcaagccc

SEQ ID NO: 109584 - RNA, 19 nt, Artificial Sequence
  Description of Artificial Sequence: Synthetic oligonucleotide
  Sense strand starting at position 1822 of SEQ ID NO: 1393
ggguuuccaugacucucua

SEQ ID NO: 109585 - RNA, 19 nt, Artificial Sequence
  Description of Artificial Sequence: Synthetic oligonucleotide
  Antisense strand to SEQ ID NO: 109584
uagagagucauggaaaccc

SEQ ID NO: 109586 - RNA, 19 nt, Artificial Sequence
  Description of Artificial Sequence: Synthetic oligonucleotide
  Sense strand starting at position 1689 of SEQ ID NO: 1393
cgaacagaaucggauggau

SEQ ID NO: 109587 - RNA, 19 nt, Artificial Sequence
  Description of Artificial Sequence: Synthetic oligonucleotide
  Antisense strand to SEQ ID NO: 109586
auccauccgauucuguucg

SEQ ID NO: 109588 - RNA, 19 nt, Artificial Sequence
  Description of Artificial Sequence: Synthetic oligonucleotide
  Sense strand starting at position 1468 of SEQ ID NO: 1393
augugugcgguaggaaaua

SEQ ID NO: 109589 - RNA, 19 nt, Artificial Sequence
  Description of Artificial Sequence: Synthetic oligonucleotide
  Antisense strand to SEQ ID NO: 109588
uauuuccuaccgcacacau

SEQ ID NO: 109590 - RNA, 19 nt, Artificial Sequence
  Description of Artificial Sequence: Synthetic oligonucleotide
  Sense strand starting at position 1466 of SEQ ID NO: 1393
ugaugugugcgguaggaaa

SEQ ID NO: 109591 - RNA, 19 nt, Artificial Sequence
  Description of Artificial Sequence: Synthetic oligonucleotide
  Antisense strand to SEQ ID NO: 109590
uuuccuaccgcacacauca

SEQ ID NO: 109592 - RNA, 19 nt, Artificial Sequence
  Description of Artificial Sequence: Synthetic oligonucleotide
  Sense strand starting at position 914 of SEQ ID NO: 1393
ggagucugcucagucauuc

SEQ ID NO: 109593 - RNA, 19 nt, Artificial Sequence
  Description of Artificial Sequence: Synthetic oligonucleotide
  Antisense strand to SEQ ID NO: 109592
gaaugacugagcagacucc

SEQ ID NO: 109594 - RNA, 19 nt, Artificial Sequence
  Description of Artificial Sequence: Synthetic oligonucleotide
  Sense strand starting at position 721 of SEQ ID NO: 1393
accagauucuaggugauuc

SEQ ID NO: 109595 - RNA, 19 nt, Artificial Sequence
  Description of Artificial Sequence: Synthetic oligonucleotide
  Antisense strand to SEQ ID NO: 109594
gaaucaccuagaaucuggu

SEQ ID NO: 109596 - RNA, 19 nt, Artificial Sequence
  Description of Artificial Sequence: Synthetic oligonucleotide
  Sense strand starting at position 595 of SEQ ID NO: 1393
ggcaucucugcucaacaca

SEQ ID NO: 109597 - RNA, 19 nt, Artificial Sequence
  Description of Artificial Sequence: Synthetic oligonucleotide
  Antisense strand to SEQ ID NO: 109596
uguguugagcagagaugcc

SEQ ID NO: 109598 - RNA, 19 nt, Artificial Sequence
  Description of Artificial Sequence: Synthetic oligonucleotide
  Sense strand starting at position 111 of SEQ ID NO: 1393
agaaauuacucccuccgaa

SEQ ID NO: 109599 - RNA, 19 nt, Artificial Sequence
  Description of Artificial Sequence: Synthetic oligonucleotide
  Antisense strand to SEQ ID NO: 109598
uucggagggaguaauuucu

SEQ ID NO: 109600 - RNA, 19 nt, Artificial Sequence
  Description of Artificial Sequence: Synthetic oligonucleotide
  Sense strand starting at position 3973 of SEQ ID NO: 1394
ccagguaugacauacgugu

SEQ ID NO: 109601 - RNA, 19 nt, Artificial Sequence
  Description of Artificial Sequence: Synthetic oligonucleotide
  Antisense strand to SEQ ID NO: 109600
acacguaugucauaccugg

SEQ ID NO: 109602 - RNA, 19 nt, Artificial Sequence
  Description of Artificial Sequence: Synthetic oligonucleotide
  Sense strand starting at position 3950 of SEQ ID NO: 1394
cugcccucucucguuagua

SEQ ID NO: 109603 - RNA, 19 nt, Artificial Sequence
  Description of Artificial Sequence: Synthetic oligonucleotide
  Antisense strand to SEQ ID NO: 109602
uacuaacgagagagggcag

SEQ ID NO: 109604 - RNA, 19 nt, Artificial Sequence
  Description of Artificial Sequence: Synthetic oligonucleotide
  Sense strand starting at position 3925 of SEQ ID NO: 1394
agcucuggucuagaacacu

SEQ ID NO: 109605 - RNA, 19 nt, Artificial Sequence
  Description of Artificial Sequence: Synthetic oligonucleotide
  Antisense strand to SEQ ID NO: 109604
aguguucuagaccagagcu

SEQ ID NO: 109606 - RNA, 19 nt, Artificial Sequence
  Description of Artificial Sequence: Synthetic oligonucleotide
  Sense strand starting at position 3923 of SEQ ID NO: 1394
uaagcucuggucuagaaca

SEQ ID NO: 109607 - RNA, 19 nt, Artificial Sequence
  Description of Artificial Sequence: Synthetic oligonucleotide
  Antisense strand to SEQ ID NO: 109606
uguucuagaccagagcuua

SEQ ID NO: 109608 - RNA, 19 nt, Artificial Sequence
  Description of Artificial Sequence: Synthetic oligonucleotide
  Sense strand starting at position 3697 of SEQ ID NO: 1394
ggcaaacagaaaugugcua

SEQ ID NO: 109609 - RNA, 19 nt, Artificial Sequence
  Description of Artificial Sequence: Synthetic oligonucleotide
  Antisense strand to SEQ ID NO: 109608
uagcacauuucuguuugcc

SEQ ID NO: 109610 - RNA, 19 nt, Artificial Sequence
  Description of Artificial Sequence: Synthetic oligonucleotide
  Sense strand starting at position 3624 of SEQ ID NO: 1394
gcauuuaugggaugcagug

SEQ ID NO: 109611 - RNA, 19 nt, Artificial Sequence
  Description of Artificial Sequence: Synthetic oligonucleotide
  Antisense strand to SEQ ID NO: 109610
cacugcaucccauaaaugc

SEQ ID NO: 109612 - RNA, 19 nt, Artificial Sequence
  Description of Artificial Sequence: Synthetic oligonucleotide
  Sense strand starting at position 3313 of SEQ ID NO: 1394
ggucacugauuauugcaau

SEQ ID NO: 109613 - RNA, 19 nt, Artificial Sequence
  Description of Artificial Sequence: Synthetic oligonucleotide
  Antisense strand to SEQ ID NO: 109612
auugcaauaaucagugacc

SEQ ID NO: 109614 - RNA, 19 nt, Artificial Sequence
  Description of Artificial Sequence: Synthetic oligonucleotide
  Sense strand starting at position 3307 of SEQ ID NO: 1394
aaagcaggucacugauuau

SEQ ID NO: 109615 - RNA, 19 nt, Artificial Sequence
  Description of Artificial Sequence: Synthetic oligonucleotide
  Antisense strand to SEQ ID NO: 109614
auaaucagugaccugcuuu

SEQ ID NO: 109616 - RNA, 19 nt, Artificial Sequence
  Description of Artificial Sequence: Synthetic oligonucleotide
  Sense strand starting at position 3259 of SEQ ID NO: 1394
gcgagagauccugggagac

SEQ ID NO: 109617 - RNA, 19 nt, Artificial Sequence
  Description of Artificial Sequence: Synthetic oligonucleotide
  Antisense strand to SEQ ID NO: 109616
gucucccaggaucucucgc

SEQ ID NO: 109618 - RNA, 19 nt, Artificial Sequence
  Description of Artificial Sequence: Synthetic oligonucleotide
  Sense strand starting at position 2970 of SEQ ID NO: 1394
uuaagauugccugagguuc

SEQ ID NO: 109619 - RNA, 19 nt, Artificial Sequence
  Description of Artificial Sequence: Synthetic oligonucleotide
  Antisense strand to SEQ ID NO: 109618
gaaccucaggcaaucuuaa

SEQ ID NO: 109620 - RNA, 19 nt, Artificial Sequence
  Description of Artificial Sequence: Synthetic oligonucleotide
  Sense strand starting at position 2959 of SEQ ID NO: 1394
aauagagugcuuuaagauu

SEQ ID NO: 109621 - RNA, 19 nt, Artificial Sequence
  Description of Artificial Sequence: Synthetic oligonucleotide
  Antisense strand to SEQ ID NO: 109620
aaucuuaaagcacucuauu

SEQ ID NO: 109622 - RNA, 19 nt, Artificial Sequence
  Description of Artificial Sequence: Synthetic oligonucleotide
  Sense strand starting at position 2957 of SEQ ID NO: 1394
caaauagagugcuuuaaga

SEQ ID NO: 109623 - RNA, 19 nt, Artificial Sequence
  Description of Artificial Sequence: Synthetic oligonucleotide
  Antisense strand to SEQ ID NO: 109622
ucuuaaagcacucuauuug

SEQ ID NO: 109624 - RNA, 19 nt, Artificial Sequence
  Description of Artificial Sequence: Synthetic oligonucleotide
  Sense strand starting at position 2954 of SEQ ID NO: 1394
acucaaauagagugcuuua

SEQ ID NO: 109625 - RNA, 19 nt, Artificial Sequence
  Description of Artificial Sequence: Synthetic oligonucleotide
  Antisense strand to SEQ ID NO: 109624
uaaagcacucuauuugagu

SEQ ID NO: 109626 - RNA, 19 nt, Artificial Sequence
  Description of Artificial Sequence: Synthetic oligonucleotide
  Sense strand starting at position 2932 of SEQ ID NO: 1394
gcaagaauggccuacagcu

SEQ ID NO: 109627 - RNA, 19 nt, Artificial Sequence
  Description of Artificial Sequence: Synthetic oligonucleotide
  Antisense strand to SEQ ID NO: 109626
agcuguaggccauucuugc

SEQ ID NO: 109628 - RNA, 19 nt, Artificial Sequence
  Description of Artificial Sequence: Synthetic oligonucleotide
  Sense strand starting at position 2779 of SEQ ID NO: 1394
gaguaaacagcauguauga

SEQ ID NO: 109629 - RNA, 19 nt, Artificial Sequence
  Description of Artificial Sequence: Synthetic oligonucleotide
  Antisense strand to SEQ ID NO: 109628
ucauacaugcuguuuacuc

SEQ ID NO: 109630 - RNA, 19 nt, Artificial Sequence
  Description of Artificial Sequence: Synthetic oligonucleotide
  Sense strand starting at position 2777 of SEQ ID NO: 1394
uagaguaaacagcauguau

SEQ ID NO: 109631 - RNA, 19 nt, Artificial Sequence
  Description of Artificial Sequence: Synthetic oligonucleotide
  Antisense strand to SEQ ID NO: 109630
auacaugcuguuuacucua

SEQ ID NO: 109632 - RNA, 19 nt, Artificial Sequence
  Description of Artificial Sequence: Synthetic oligonucleotide
  Sense strand starting at position 2600 of SEQ ID NO: 1394
ggguuagauaagugaagac

SEQ ID NO: 109633 - RNA, 19 nt, Artificial Sequence
  Description of Artificial Sequence: Synthetic oligonucleotide
  Antisense strand to SEQ ID NO: 109632
gucuucacuuaucuaaccc

SEQ ID NO: 109634 - RNA, 19 nt, Artificial Sequence
  Description of Artificial Sequence: Synthetic oligonucleotide
  Sense strand starting at position 2193 of SEQ ID NO: 1394
gguauuguaagauguuuag

SEQ ID NO: 109635 - RNA, 19 nt, Artificial Sequence
  Description of Artificial Sequence: Synthetic oligonucleotide
  Antisense strand to SEQ ID NO: 109634
cuaaacaucuuacaauacc

SEQ ID NO: 109636 - RNA, 19 nt, Artificial Sequence
  Description of Artificial Sequence: Synthetic oligonucleotide
  Sense strand starting at position 2183 of SEQ ID NO: 1394
aacuguccuggguauugua

SEQ ID NO: 109637 - RNA, 19 nt, Artificial Sequence
  Description of Artificial Sequence: Synthetic oligonucleotide
  Antisense strand to SEQ ID NO: 109636
uacaauacccaggacaguu

SEQ ID NO: 109638 - RNA, 19 nt, Artificial Sequence
  Description of Artificial Sequence: Synthetic oligonucleotide
  Sense strand starting at position 2181 of SEQ ID NO: 1394
ggaacuguccuggguauug

SEQ ID NO: 109639 - RNA, 19 nt, Artificial Sequence
  Description of Artificial Sequence: Synthetic oligonucleotide
  Antisense strand to SEQ ID NO: 109638
caauacccaggacaguucc

SEQ ID NO: 109640 - RNA, 19 nt, Artificial Sequence
  Description of Artificial Sequence: Synthetic oligonucleotide
  Sense strand starting at position 2180 of SEQ ID NO: 1394
gggaacuguccuggguauu

SEQ ID NO: 109641 - RNA, 19 nt, Artificial Sequence
  Description of Artificial Sequence: Synthetic oligonucleotide
  Antisense strand to SEQ ID NO: 109640
aauacccaggacaguuccc

SEQ ID NO: 109642 - RNA, 19 nt, Artificial Sequence
  Description of Artificial Sequence: Synthetic oligonucleotide
  Sense strand starting at position 2095 of SEQ ID NO: 1394
uuggucacagaguaauguu

SEQ ID NO: 109643 - RNA, 19 nt, Artificial Sequence
  Description of Artificial Sequence: Synthetic oligonucleotide
  Antisense strand to SEQ ID NO: 109642
aacauuacucugugaccaa

SEQ ID NO: 109644 - RNA, 19 nt, Artificial Sequence
  Description of Artificial Sequence: Synthetic oligonucleotide
  Sense strand starting at position 1656 of SEQ ID NO: 1394
gugucaauucuuuggagag

SEQ ID NO: 109645 - RNA, 19 nt, Artificial Sequence
  Description of Artificial Sequence: Synthetic oligonucleotide
  Antisense strand to SEQ ID NO: 109644
cucuccaaagaauugacac

SEQ ID NO: 109646 - RNA, 19 nt, Artificial Sequence
  Description of Artificial Sequence: Synthetic oligonucleotide
  Sense strand starting at position 1655 of SEQ ID NO: 1394
ugugucaauucuuuggaga

SEQ ID NO: 109647 - RNA, 19 nt, Artificial Sequence
  Description of Artificial Sequence: Synthetic oligonucleotide
  Antisense strand to SEQ ID NO: 109646
ucuccaaagaauugacaca

SEQ ID NO: 109648 - RNA, 19 nt, Artificial Sequence
  Description of Artificial Sequence: Synthetic oligonucleotide
  Sense strand starting at position 1387 of SEQ ID NO: 1394
ggguguggauuugaauaua

SEQ ID NO: 109649 - RNA, 19 nt, Artificial Sequence
  Description of Artificial Sequence: Synthetic oligonucleotide
  Antisense strand to SEQ ID NO: 109648
uauauucaaauccacaccc

SEQ ID NO: 109650 - RNA, 19 nt, Artificial Sequence
  Description of Artificial Sequence: Synthetic oligonucleotide
  Sense strand starting at position 1380 of SEQ ID NO: 1394
gcccgaaggguguggauuu

SEQ ID NO: 109651 - RNA, 19 nt, Artificial Sequence
  Description of Artificial Sequence: Synthetic oligonucleotide
  Antisense strand to SEQ ID NO: 109650
aaauccacacccuucgggc

SEQ ID NO: 109652 - RNA, 19 nt, Artificial Sequence
  Description of Artificial Sequence: Synthetic oligonucleotide
  Sense strand starting at position 1295 of SEQ ID NO: 1394
cucauuuagccaugucuuu

SEQ ID NO: 109653 - RNA, 19 nt, Artificial Sequence
  Description of Artificial Sequence: Synthetic oligonucleotide
  Antisense strand to SEQ ID NO: 109652
aaagacauggcuaaaugag

SEQ ID NO: 109654 - RNA, 19 nt, Artificial Sequence
  Description of Artificial Sequence: Synthetic oligonucleotide
  Sense strand starting at position 1207 of SEQ ID NO: 1394
ucuuuacugcaggaaaguu

SEQ ID NO: 109655 - RNA, 19 nt, Artificial Sequence
  Description of Artificial Sequence: Synthetic oligonucleotide
  Antisense strand to SEQ ID NO: 109654
aacuuuccugcaguaaaga

SEQ ID NO: 109656 - RNA, 19 nt, Artificial Sequence
  Description of Artificial Sequence: Synthetic oligonucleotide
  Sense strand starting at position 1206 of SEQ ID NO: 1394
aucuuuacugcaggaaagu

SEQ ID NO: 109657 - RNA, 19 nt, Artificial Sequence
  Description of Artificial Sequence: Synthetic oligonucleotide
  Antisense strand to SEQ ID NO: 109656
acuuuccugcaguaaagau

SEQ ID NO: 109658 - RNA, 19 nt, Artificial Sequence
  Description of Artificial Sequence: Synthetic oligonucleotide
  Sense strand starting at position 1141 of SEQ ID NO: 1394
uaugauucugauggucaaa

SEQ ID NO: 109659 - RNA, 19 nt, Artificial Sequence
  Description of Artificial Sequence: Synthetic oligonucleotide
  Antisense strand to SEQ ID NO: 109658
uuugaccaucagaaucaua

SEQ ID NO: 109660 - RNA, 19 nt, Artificial Sequence
  Description of Artificial Sequence: Synthetic oligonucleotide
  Sense strand starting at position 1099 of SEQ ID NO: 1394
uggagacauggcuguuaga

SEQ ID NO: 109661 - RNA, 19 nt, Artificial Sequence
  Description of Artificial Sequence: Synthetic oligonucleotide
  Antisense strand to SEQ ID NO: 109660
ucuaacagccaugucucca

SEQ ID NO: 109662 - RNA, 19 nt, Artificial Sequence
  Description of Artificial Sequence: Synthetic oligonucleotide
  Sense strand starting at position 1086 of SEQ ID NO: 1394
cagauaugguugguggaga

SEQ ID NO: 109663 - RNA, 19 nt, Artificial Sequence
  Description of Artificial Sequence: Synthetic oligonucleotide
  Antisense strand to SEQ ID NO: 109662
ucuccaccaaccauaucug

SEQ ID NO: 109664 - RNA, 19 nt, Artificial Sequence
  Description of Artificial Sequence: Synthetic oligonucleotide
  Sense strand starting at position 1084 of SEQ ID NO: 1394
aacagauaugguuggugga

SEQ ID NO: 109665 - RNA, 19 nt, Artificial Sequence
  Description of Artificial Sequence: Synthetic oligonucleotide
  Antisense strand to SEQ ID NO: 109664
uccaccaaccauaucuguu

SEQ ID NO: 109666 - RNA, 19 nt, Artificial Sequence
  Description of Artificial Sequence: Synthetic oligonucleotide
  Sense strand starting at position 860 of SEQ ID NO: 1394
gacaucuguuaacuggaga

SEQ ID NO: 109667 - RNA, 19 nt, Artificial Sequence
  Description of Artificial Sequence: Synthetic oligonucleotide
  Antisense strand to SEQ ID NO: 109666
ucuccaguuaacagauguc

SEQ ID NO: 109668 - RNA, 19 nt, Artificial Sequence
  Description of Artificial Sequence: Synthetic oligonucleotide
  Sense strand starting at position 712 of SEQ ID NO: 1394
gcuauuaugggugaaguag

SEQ ID NO: 109669 - RNA, 19 nt, Artificial Sequence
  Description of Artificial Sequence: Synthetic oligonucleotide
  Antisense strand to SEQ ID NO: 109668
cuacuucacccauaauagc

SEQ ID NO: 109670 - RNA, 19 nt, Artificial Sequence
  Description of Artificial Sequence: Synthetic oligonucleotide
  Sense strand starting at position 711 of SEQ ID NO: 1394
agcuauuaugggugaagua

SEQ ID NO: 109671 - RNA, 19 nt, Artificial Sequence
  Description of Artificial Sequence: Synthetic oligonucleotide
  Antisense strand to SEQ ID NO: 109670
uacuucacccauaauagcu

SEQ ID NO: 109672 - RNA, 19 nt, Artificial Sequence
  Description of Artificial Sequence: Synthetic oligonucleotide
  Sense strand starting at position 643 of SEQ ID NO: 1394
cugggucugacuuacaguu

SEQ ID NO: 109673 - RNA, 19 nt, Artificial Sequence
  Description of Artificial Sequence: Synthetic oligonucleotide
  Antisense strand to SEQ ID NO: 109672
aacuguaagucagacccag

SEQ ID NO: 109674 - RNA, 19 nt, Artificial Sequence
  Description of Artificial Sequence: Synthetic oligonucleotide
  Sense strand starting at position 410 of SEQ ID NO: 1394
ccaggcuccuuauuagacu

SEQ ID NO: 109675 - RNA, 19 nt, Artificial Sequence
  Description of Artificial Sequence: Synthetic oligonucleotide
  Antisense strand to SEQ ID NO: 109674
agucuaauaaggagccugg

SEQ ID NO: 109676 - RNA, 19 nt, Artificial Sequence
  Description of Artificial Sequence: Synthetic oligonucleotide
  Sense strand starting at position 198 of SEQ ID NO: 1394
ccuguagagcuuuagaauu

SEQ ID NO: 109677 - RNA, 19 nt, Artificial Sequence
  Description of Artificial Sequence: Synthetic oligonucleotide
  Antisense strand to SEQ ID NO: 109676
aauucuaaagcucuacagg

SEQ ID NO: 109678 - RNA, 19 nt, Artificial Sequence
  Description of Artificial Sequence: Synthetic oligonucleotide
  Sense strand starting at position 12 of SEQ ID NO: 1394
aaccauuugcugugugacu

SEQ ID NO: 109679 - RNA, 19 nt, Artificial Sequence
  Description of Artificial Sequence: Synthetic oligonucleotide
  Antisense strand to SEQ ID NO: 109678
agucacacagcaaaugguu

SEQ ID NO: 109680 - RNA, 19 nt, Artificial Sequence
  Description of Artificial Sequence: Synthetic oligonucleotide
  Sense strand starting at position 3864 of SEQ ID NO: 1397
ucucuuccagagcagauua

SEQ ID NO: 109681 - RNA, 19 nt, Artificial Sequence
  Description of Artificial Sequence: Synthetic oligonucleotide
  Antisense strand to SEQ ID NO: 109680
uaaucugcucuggaagaga

SEQ ID NO: 109682 - RNA, 19 nt, Artificial Sequence
  Description of Artificial Sequence: Synthetic oligonucleotide
  Sense strand starting at position 3861 of SEQ ID NO: 1397
agcucucuuccagagcaga

SEQ ID NO: 109683 - RNA, 19 nt, Artificial Sequence
  Description of Artificial Sequence: Synthetic oligonucleotide
  Antisense strand to SEQ ID NO: 109682
ucugcucuggaagagagcu

SEQ ID NO: 109684 - RNA, 19 nt, Artificial Sequence
  Description of Artificial Sequence: Synthetic oligonucleotide
  Sense strand starting at position 3774 of SEQ ID NO: 1397
guuuccucgauagaaguuu

SEQ ID NO: 109685 - RNA, 19 nt, Artificial Sequence
  Description of Artificial Sequence: Synthetic oligonucleotide
  Antisense strand to SEQ ID NO: 109684
aaacuucuaucgaggaaac

SEQ ID NO: 109686 - RNA, 19 nt, Artificial Sequence
  Description of Artificial Sequence: Synthetic oligonucleotide
  Sense strand starting at position 3772 of SEQ ID NO: 1397
aaguuuccucgauagaagu

SEQ ID NO: 109687 - RNA, 19 nt, Artificial Sequence
  Description of Artificial Sequence: Synthetic oligonucleotide
  Antisense strand to SEQ ID NO: 109686
acuucuaucgaggaaacuu

SEQ ID NO: 109688 - RNA, 19 nt, Artificial Sequence
  Description of Artificial Sequence: Synthetic oligonucleotide
  Sense strand starting at position 3770 of SEQ ID NO: 1397
ccaaguuuccucgauagaa

SEQ ID NO: 109689 - RNA, 19 nt, Artificial Sequence
  Description of Artificial Sequence: Synthetic oligonucleotide
  Antisense strand to SEQ ID NO: 109688
uucuaucgaggaaacuugg

SEQ ID NO: 109690 - RNA, 19 nt, Artificial Sequence
  Description of Artificial Sequence: Synthetic oligonucleotide
  Sense strand starting at position 3736 of SEQ ID NO: 1397
gaaccuuugcugggaucua

SEQ ID NO: 109691 - RNA, 19 nt, Artificial Sequence
  Description of Artificial Sequence: Synthetic oligonucleotide
  Antisense strand to SEQ ID NO: 109690
uagaucccagcaaagguuc

SEQ ID NO: 109692 - RNA, 19 nt, Artificial Sequence
  Description of Artificial Sequence: Synthetic oligonucleotide
  Sense strand starting at position 3733 of SEQ ID NO: 1397
cgagaaccuuugcugggau

SEQ ID NO: 109693 - RNA, 19 nt, Artificial Sequence
  Description of Artificial Sequence: Synthetic oligonucleotide
  Antisense strand to SEQ ID NO: 109692
aucccagcaaagguucucg

SEQ ID NO: 109694 - RNA, 19 nt, Artificial Sequence
  Description of Artificial Sequence: Synthetic oligonucleotide
  Sense strand starting at position 3732 of SEQ ID NO: 1397
acgagaaccuuugcuggga

SEQ ID NO: 109695 - RNA, 19 nt, Artificial Sequence
  Description of Artificial Sequence: Synthetic oligonucleotide
  Antisense strand to SEQ ID NO: 109694
ucccagcaaagguucucgu

SEQ ID NO: 109696 - RNA, 19 nt, Artificial Sequence
  Description of Artificial Sequence: Synthetic oligonucleotide
  Sense strand starting at position 3702 of SEQ ID NO: 1397
agcuguguuacagagacaa

SEQ ID NO: 109697 - RNA, 19 nt, Artificial Sequence
  Description of Artificial Sequence: Synthetic oligonucleotide
  Antisense strand to SEQ ID NO: 109696
uugucucuguaacacagcu

SEQ ID NO: 109698 - RNA, 19 nt, Artificial Sequence
  Description of Artificial Sequence: Synthetic oligonucleotide
  Sense strand starting at position 3570 of SEQ ID NO: 1397
auuauuuacuaaggaguga

SEQ ID NO: 109699 - RNA, 19 nt, Artificial Sequence
  Description of Artificial Sequence: Synthetic oligonucleotide
  Antisense strand to SEQ ID NO: 109698
ucacuccuuaguaaauaau

SEQ ID NO: 109700 - RNA, 19 nt, Artificial Sequence
  Description of Artificial Sequence: Synthetic oligonucleotide
  Sense strand starting at position 3544 of SEQ ID NO: 1397
cugaacauccuuggaaauc

SEQ ID NO: 109701 - RNA, 19 nt, Artificial Sequence
  Description of Artificial Sequence: Synthetic oligonucleotide
  Antisense strand to SEQ ID NO: 109700
gauuuccaaggauguucag

SEQ ID NO: 109702 - RNA, 19 nt, Artificial Sequence
  Description of Artificial Sequence: Synthetic oligonucleotide
  Sense strand starting at position 3543 of SEQ ID NO: 1397
ccugaacauccuuggaaau

SEQ ID NO: 109703 - RNA, 19 nt, Artificial Sequence
  Description of Artificial Sequence: Synthetic oligonucleotide
  Antisense strand to SEQ ID NO: 109702
auuuccaaggauguucagg

SEQ ID NO: 109704 - RNA, 19 nt, Artificial Sequence
  Description of Artificial Sequence: Synthetic oligonucleotide
  Sense strand starting at position 3505 of SEQ ID NO: 1397
ccgaaugcucaagaaccau

SEQ ID NO: 109705 - RNA, 19 nt, Artificial Sequence
  Description of Artificial Sequence: Synthetic oligonucleotide
  Antisense strand to SEQ ID NO: 109704
augguucuugagcauucgg

SEQ ID NO: 109706 - RNA, 19 nt, Artificial Sequence
  Description of Artificial Sequence: Synthetic oligonucleotide
  Sense strand starting at position 3501 of SEQ ID NO: 1397
auucccgaaugcucaagaa

SEQ ID NO: 109707 - RNA, 19 nt, Artificial Sequence
  Description of Artificial Sequence: Synthetic oligonucleotide
  Antisense strand to SEQ ID NO: 109706
uucuugagcauucgggaau

SEQ ID NO: 109708 - RNA, 19 nt, Artificial Sequence
  Description of Artificial Sequence: Synthetic oligonucleotide
  Sense strand starting at position 3498 of SEQ ID NO: 1397
auaauucccgaaugcucaa

SEQ ID NO: 109709 - RNA, 19 nt, Artificial Sequence
  Description of Artificial Sequence: Synthetic oligonucleotide
  Antisense strand to SEQ ID NO: 109708
uugagcauucgggaauuau

SEQ ID NO: 109710 - RNA, 19 nt, Artificial Sequence
  Description of Artificial Sequence: Synthetic oligonucleotide
  Sense strand starting at position 3434 of SEQ ID NO: 1397
ugaaauaauucugcaucug

SEQ ID NO: 109711 - RNA, 19 nt, Artificial Sequence
  Description of Artificial Sequence: Synthetic oligonucleotide
  Antisense strand to SEQ ID NO: 109710
cagaugcagaauuauuuca

SEQ ID NO: 109712 - RNA, 19 nt, Artificial Sequence
  Description of Artificial Sequence: Synthetic oligonucleotide
  Sense strand starting at position 3293 of SEQ ID NO: 1397
gacauuccuguaggaaagu

SEQ ID NO: 109713 - RNA, 19 nt, Artificial Sequence
  Description of Artificial Sequence: Synthetic oligonucleotide
  Antisense strand to SEQ ID NO: 109712
acuuuccuacaggaauguc

SEQ ID NO: 109714 - RNA, 19 nt, Artificial Sequence
  Description of Artificial Sequence: Synthetic oligonucleotide
  Sense strand starting at position 2828 of SEQ ID NO: 1397
cuggacauaggcuaucauu

SEQ ID NO: 109715 - RNA, 19 nt, Artificial Sequence
  Description of Artificial Sequence: Synthetic oligonucleotide
  Antisense strand to SEQ ID NO: 109714
aaugauagccuauguccag

SEQ ID NO: 109716 - RNA, 19 nt, Artificial Sequence
  Description of Artificial Sequence: Synthetic oligonucleotide
  Sense strand starting at position 2711 of SEQ ID NO: 1397
cagaaacaacagugguuua

SEQ ID NO: 109717 - RNA, 19 nt, Artificial Sequence
  Description of Artificial Sequence: Synthetic oligonucleotide
  Antisense strand to SEQ ID NO: 109716
uaaaccacuguuguuucug

SEQ ID NO: 109718 - RNA, 19 nt, Artificial Sequence
  Description of Artificial Sequence: Synthetic oligonucleotide
  Sense strand starting at position 2659 of SEQ ID NO: 1397
gugaaacuaguggguuuga

SEQ ID NO: 109719 - RNA, 19 nt, Artificial Sequence
  Description of Artificial Sequence: Synthetic oligonucleotide
  Antisense strand to SEQ ID NO: 109718
ucaaacccacuaguuucac

SEQ ID NO: 109720 - RNA, 19 nt, Artificial Sequence
  Description of Artificial Sequence: Synthetic oligonucleotide
  Sense strand starting at position 2627 of SEQ ID NO: 1397
ggagauuaaugagcguuau

SEQ ID NO: 109721 - RNA, 19 nt, Artificial Sequence
  Description of Artificial Sequence: Synthetic oligonucleotide
  Antisense strand to SEQ ID NO: 109720
auaacgcucauuaaucucc

SEQ ID NO: 109722 - RNA, 19 nt, Artificial Sequence
  Description of Artificial Sequence: Synthetic oligonucleotide
  Sense strand starting at position 2564 of SEQ ID NO: 1397
aggaaucagugcccacaga

SEQ ID NO: 109723 - RNA, 19 nt, Artificial Sequence
  Description of Artificial Sequence: Synthetic oligonucleotide
  Antisense strand to SEQ ID NO: 109722
ucugugggcacugauuccu

SEQ ID NO: 109724 - RNA, 19 nt, Artificial Sequence
  Description of Artificial Sequence: Synthetic oligonucleotide
  Sense strand starting at position 2493 of SEQ ID NO: 1397
gguaauuaugcacacaauc

SEQ ID NO: 109725 - RNA, 19 nt, Artificial Sequence
  Description of Artificial Sequence: Synthetic oligonucleotide
  Antisense strand to SEQ ID NO: 109724
gauugugugcauaauuacc

SEQ ID NO: 109726 - RNA, 19 nt, Artificial Sequence
  Description of Artificial Sequence: Synthetic oligonucleotide
  Sense strand starting at position 2490 of SEQ ID NO: 1397
agagguaauuaugcacaca

SEQ ID NO: 109727 - RNA, 19 nt, Artificial Sequence
  Description of Artificial Sequence: Synthetic oligonucleotide
  Antisense strand to SEQ ID NO: 109726
ugugugcauaauuaccucu

SEQ ID NO: 109728 - RNA, 19 nt, Artificial Sequence
  Description of Artificial Sequence: Synthetic oligonucleotide
  Sense strand starting at position 2480 of SEQ ID NO: 1397
auucgucggcagagguaau

SEQ ID NO: 109729 - RNA, 19 nt, Artificial Sequence
  Description of Artificial Sequence: Synthetic oligonucleotide
  Antisense strand to SEQ ID NO: 109728
auuaccucugccgacgaau

SEQ ID NO: 109730 - RNA, 19 nt, Artificial Sequence
  Description of Artificial Sequence: Synthetic oligonucleotide
  Sense strand starting at position 2478 of SEQ ID NO: 1397
agauucgucggcagaggua

SEQ ID NO: 109731 - RNA, 19 nt, Artificial Sequence
  Description of Artificial Sequence: Synthetic oligonucleotide
  Antisense strand to SEQ ID NO: 109730
uaccucugccgacgaaucu

SEQ ID NO: 109732 - RNA, 19 nt, Artificial Sequence
  Description of Artificial Sequence: Synthetic oligonucleotide
  Sense strand starting at position 2461 of SEQ ID NO: 1397
aagcuuucugugggaauag

SEQ ID NO: 109733 - RNA, 19 nt, Artificial Sequence
  Description of Artificial Sequence: Synthetic oligonucleotide
  Antisense strand to SEQ ID NO: 109732
cuauucccacagaaagcuu

SEQ ID NO: 109734 - RNA, 19 nt, Artificial Sequence
  Description of Artificial Sequence: Synthetic oligonucleotide
  Sense strand starting at position 2444 of SEQ ID NO: 1397
uuguaaucucuccagcgaa

SEQ ID NO: 109735 - RNA, 19 nt, Artificial Sequence
  Description of Artificial Sequence: Synthetic oligonucleotide
  Antisense strand to SEQ ID NO: 109734
uucgcuggagagauuacaa

SEQ ID NO: 109736 - RNA, 19 nt, Artificial Sequence
  Description of Artificial Sequence: Synthetic oligonucleotide
  Sense strand starting at position 2189 of SEQ ID NO: 1397
ggaugugcuuaagcaaaca

SEQ ID NO: 109737 - RNA, 19 nt, Artificial Sequence
  Description of Artificial Sequence: Synthetic oligonucleotide
  Antisense strand to SEQ ID NO: 109736
uguuugcuuaagcacaucc

SEQ ID NO: 109738 - RNA, 19 nt, Artificial Sequence
  Description of Artificial Sequence: Synthetic oligonucleotide
  Sense strand starting at position 2186 of SEQ ID NO: 1397
acaggaugugcuuaagcaa

SEQ ID NO: 109739 - RNA, 19 nt, Artificial Sequence
  Description of Artificial Sequence: Synthetic oligonucleotide
  Antisense strand to SEQ ID NO: 109738
uugcuuaagcacauccugu

SEQ ID NO: 109740 - RNA, 19 nt, Artificial Sequence
  Description of Artificial Sequence: Synthetic oligonucleotide
  Sense strand starting at position 1484 of SEQ ID NO: 1397
ggcuuaccugggugagaca

SEQ ID NO: 109741 - RNA, 19 nt, Artificial Sequence
  Description of Artificial Sequence: Synthetic oligonucleotide
  Antisense strand to SEQ ID NO: 109740
ugucucacccagguaagcc

SEQ ID NO: 109742 - RNA, 19 nt, Artificial Sequence
  Description of Artificial Sequence: Synthetic oligonucleotide
  Sense strand starting at position 1112 of SEQ ID NO: 1397
cagauuucugcgugucaug

SEQ ID NO: 109743 - RNA, 19 nt, Artificial Sequence
  Description of Artificial Sequence: Synthetic oligonucleotide
  Antisense strand to SEQ ID NO: 109742
caugacacgcagaaaucug

SEQ ID NO: 109744 - RNA, 19 nt, Artificial Sequence
  Description of Artificial Sequence: Synthetic oligonucleotide
  Sense strand starting at position 1111 of SEQ ID NO: 1397
ccagauuucugcgugucau

SEQ ID NO: 109745 - RNA, 19 nt, Artificial Sequence
  Description of Artificial Sequence: Synthetic oligonucleotide
  Antisense strand to SEQ ID NO: 109744
augacacgcagaaaucugg

SEQ ID NO: 109746 - RNA, 19 nt, Artificial Sequence
  Description of Artificial Sequence: Synthetic oligonucleotide
  Sense strand starting at position 903 of SEQ ID NO: 1397
aaaguaagaguucgggaag

SEQ ID NO: 109747 - RNA, 19 nt, Artificial Sequence
  Description of Artificial Sequence: Synthetic oligonucleotide
  Antisense strand to SEQ ID NO: 109746
cuucccgaacucuuacuuu

SEQ ID NO: 109748 - RNA, 19 nt, Artificial Sequence
  Description of Artificial Sequence: Synthetic oligonucleotide
  Sense strand starting at position 238 of SEQ ID NO: 1397
guaccaaagcaguaugaaa

SEQ ID NO: 109749 - RNA, 19 nt, Artificial Sequence
  Description of Artificial Sequence: Synthetic oligonucleotide
  Antisense strand to SEQ ID NO: 109748
uuucauacugcuuugguac

SEQ ID NO: 109750 - RNA, 19 nt, Artificial Sequence
  Description of Artificial Sequence: Synthetic oligonucleotide
  Sense strand starting at position 214 of SEQ ID NO: 1397
ggugauuaauggucagauc

SEQ ID NO: 109751 - RNA, 19 nt, Artificial Sequence
  Description of Artificial Sequence: Synthetic oligonucleotide
  Antisense strand to SEQ ID NO: 109750
gaucugaccauuaaucacc

SEQ ID NO: 109752 - RNA, 19 nt, Artificial Sequence
  Description of Artificial Sequence: Synthetic oligonucleotide
  Sense strand starting at position 188 of SEQ ID NO: 1397
uuaugugaagcauauaacu

SEQ ID NO: 109753 - RNA, 19 nt, Artificial Sequence
  Description of Artificial Sequence: Synthetic oligonucleotide
  Antisense strand to SEQ ID NO: 109752
aguuauaugcuucacauaa

SEQ ID NO: 109754 - RNA, 19 nt, Artificial Sequence
  Description of Artificial Sequence: Synthetic oligonucleotide
  Sense strand starting at position 100 of SEQ ID NO: 1397
uccagaaacuauuccgguu

SEQ ID NO: 109755 - RNA, 19 nt, Artificial Sequence
  Description of Artificial Sequence: Synthetic oligonucleotide
  Antisense strand to SEQ ID NO: 109754
aaccggaauaguuucugga

SEQ ID NO: 109756 - RNA, 19 nt, Artificial Sequence
  Description of Artificial Sequence: Synthetic oligonucleotide
  Sense strand starting at position 32 of SEQ ID NO: 1397
ggaugucaugugggaaaua

SEQ ID NO: 109757 - RNA, 19 nt, Artificial Sequence
  Description of Artificial Sequence: Synthetic oligonucleotide
  Antisense strand to SEQ ID NO: 109756
uauuucccacaugacaucc

SEQ ID NO: 109758 - RNA, 19 nt, Artificial Sequence
  Description of Artificial Sequence: Synthetic oligonucleotide
  Sense strand starting at position 30 of SEQ ID NO: 1397
agggaugucaugugggaaa

SEQ ID NO: 109759 - RNA, 19 nt, Artificial Sequence
  Description of Artificial Sequence: Synthetic oligonucleotide
  Antisense strand to SEQ ID NO: 109758
uuucccacaugacaucccu

SEQ ID NO: 109760 - RNA, 19 nt, Artificial Sequence
  Description of Artificial Sequence: Synthetic oligonucleotide
  Sense strand starting at position 3879 of SEQ ID NO: 1395
gauguagcggcuucaguuu

SEQ ID NO: 109761 - RNA, 19 nt, Artificial Sequence
  Description of Artificial Sequence: Synthetic oligonucleotide
  Antisense strand to SEQ ID NO: 109760
aaacugaagccgcuacauc

SEQ ID NO: 109762 - RNA, 19 nt, Artificial Sequence
  Description of Artificial Sequence: Synthetic oligonucleotide
  Sense strand starting at position 3620 of SEQ ID NO: 1395
aguuaaauuggagguuaga

SEQ ID NO: 109763 - RNA, 19 nt, Artificial Sequence
  Description of Artificial Sequence: Synthetic oligonucleotide
  Antisense strand to SEQ ID NO: 109762
ucuaaccuccaauuuaacu

SEQ ID NO: 109764 - RNA, 19 nt, Artificial Sequence
  Description of Artificial Sequence: Synthetic oligonucleotide
  Sense strand starting at position 3607 of SEQ ID NO: 1395
caggaccuugcauaguuaa

SEQ ID NO: 109765 - RNA, 19 nt, Artificial Sequence
  Description of Artificial Sequence: Synthetic oligonucleotide
  Antisense strand to SEQ ID NO: 109764
uuaacuaugcaagguccug

SEQ ID NO: 109766 - RNA, 19 nt, Artificial Sequence
  Description of Artificial Sequence: Synthetic oligonucleotide
  Sense strand starting at position 3580 of SEQ ID NO: 1395
uggugaagguaccuaauua

SEQ ID NO: 109767 - RNA, 19 nt, Artificial Sequence
  Description of Artificial Sequence: Synthetic oligonucleotide
  Antisense strand to SEQ ID NO: 109766
uaauuagguaccuucacca

SEQ ID NO: 109768 - RNA, 19 nt, Artificial Sequence
  Description of Artificial Sequence: Synthetic oligonucleotide
  Sense strand starting at position 3493 of SEQ ID NO: 1395
cuuaccuggcuugauuaaa

SEQ ID NO: 109769 - RNA, 19 nt, Artificial Sequence
  Description of Artificial Sequence: Synthetic oligonucleotide
  Antisense strand to SEQ ID NO: 109768
uuuaaucaagccagguaag

SEQ ID NO: 109770 - RNA, 19 nt, Artificial Sequence
  Description of Artificial Sequence: Synthetic oligonucleotide
  Sense strand starting at position 3438 of SEQ ID NO: 1395
gagucaguuaaggagcaua

SEQ ID NO: 109771 - RNA, 19 nt, Artificial Sequence
  Description of Artificial Sequence: Synthetic oligonucleotide
  Antisense strand to SEQ ID NO: 109770
uaugcuccuuaacugacuc

SEQ ID NO: 109772 - RNA, 19 nt, Artificial Sequence
  Description of Artificial Sequence: Synthetic oligonucleotide
  Sense strand starting at position 3434 of SEQ ID NO: 1395
cuuugagucaguuaaggag

SEQ ID NO: 109773 - RNA, 19 nt, Artificial Sequence
  Description of Artificial Sequence: Synthetic oligonucleotide
  Antisense strand to SEQ ID NO: 109772
cuccuuaacugacucaaag

SEQ ID NO: 109774 - RNA, 19 nt, Artificial Sequence
  Description of Artificial Sequence: Synthetic oligonucleotide
  Sense strand starting at position 3057 of SEQ ID NO: 1395
ggaguuaucucuuuaaaug

SEQ ID NO: 109775 - RNA, 19 nt, Artificial Sequence
  Description of Artificial Sequence: Synthetic oligonucleotide
  Antisense strand to SEQ ID NO: 109774
cauuuaaagagauaacucc

SEQ ID NO: 109776 - RNA, 19 nt, Artificial Sequence
  Description of Artificial Sequence: Synthetic oligonucleotide
  Sense strand starting at position 3037 of SEQ ID NO: 1395
aaauaagacucugaaggga

SEQ ID NO: 109777 - RNA, 19 nt, Artificial Sequence
  Description of Artificial Sequence: Synthetic oligonucleotide
  Antisense strand to SEQ ID NO: 109776
ucccuucagagucuuauuu

SEQ ID NO: 109778 - RNA, 19 nt, Artificial Sequence
  Description of Artificial Sequence: Synthetic oligonucleotide
  Sense strand starting at position 2955 of SEQ ID NO: 1395
gaccauguagucuggauau

SEQ ID NO: 109779 - RNA, 19 nt, Artificial Sequence
  Description of Artificial Sequence: Synthetic oligonucleotide
  Antisense strand to SEQ ID NO: 109778
auauccagacuacaugguc

SEQ ID NO: 109780 - RNA, 19 nt, Artificial Sequence
  Description of Artificial Sequence: Synthetic oligonucleotide
  Sense strand starting at position 2660 of SEQ ID NO: 1395
ucugcagaugacugaacau

SEQ ID NO: 109781 - RNA, 19 nt, Artificial Sequence
  Description of Artificial Sequence: Synthetic oligonucleotide
  Antisense strand to SEQ ID NO: 109780
auguucagucaucugcaga

SEQ ID NO: 109782 - RNA, 19 nt, Artificial Sequence
  Description of Artificial Sequence: Synthetic oligonucleotide
  Sense strand starting at position 2654 of SEQ ID NO: 1395
cuauucucugcagaugacu

SEQ ID NO: 109783 - RNA, 19 nt, Artificial Sequence
  Description of Artificial Sequence: Synthetic oligonucleotide
  Antisense strand to SEQ ID NO: 109782
agucaucugcagagaauag

SEQ ID NO: 109784 - RNA, 19 nt, Artificial Sequence
  Description of Artificial Sequence: Synthetic oligonucleotide
  Sense strand starting at position 2652 of SEQ ID NO: 1395
cucuauucucugcagauga

SEQ ID NO: 109785 - RNA, 19 nt, Artificial Sequence
  Description of Artificial Sequence: Synthetic oligonucleotide
  Antisense strand to SEQ ID NO: 109784
ucaucugcagagaauagag

SEQ ID NO: 109786 - RNA, 19 nt, Artificial Sequence
  Description of Artificial Sequence: Synthetic oligonucleotide
  Sense strand starting at position 2595 of SEQ ID NO: 1395
gggaacuugcagugaaaua

SEQ ID NO: 109787 - RNA, 19 nt, Artificial Sequence
  Description of Artificial Sequence: Synthetic oligonucleotide
  Antisense strand to SEQ ID NO: 109786
uauuucacugcaaguuccc

SEQ ID NO: 109788 - RNA, 19 nt, Artificial Sequence
  Description of Artificial Sequence: Synthetic oligonucleotide
  Sense strand starting at position 2553 of SEQ ID NO: 1395
uccucuuuggugcauuaaa

SEQ ID NO: 109789 - RNA, 19 nt, Artificial Sequence
  Description of Artificial Sequence: Synthetic oligonucleotide
  Antisense strand to SEQ ID NO: 109788
uuuaaugcaccaaagagga

SEQ ID NO: 109790 - RNA, 19 nt, Artificial Sequence
  Description of Artificial Sequence: Synthetic oligonucleotide
  Sense strand starting at position 2528 of SEQ ID NO: 1395
acuaguguagaccaagagu

SEQ ID NO: 109791 - RNA, 19 nt, Artificial Sequence
  Description of Artificial Sequence: Synthetic oligonucleotide
  Antisense strand to SEQ ID NO: 109790
acucuuggucuacacuagu

SEQ ID NO: 109792 - RNA, 19 nt, Artificial Sequence
  Description of Artificial Sequence: Synthetic oligonucleotide
  Sense strand starting at position 2496 of SEQ ID NO: 1395
gaugguuagugagagauuu

SEQ ID NO: 109793 - RNA, 19 nt, Artificial Sequence
  Description of Artificial Sequence: Synthetic oligonucleotide
  Antisense strand to SEQ ID NO: 109792
aaaucucucacuaaccauc

SEQ ID NO: 109794 - RNA, 19 nt, Artificial Sequence
  Description of Artificial Sequence: Synthetic oligonucleotide
  Sense strand starting at position 2484 of SEQ ID NO: 1395
aggcuaguucaugaugguu

SEQ ID NO: 109795 - RNA, 19 nt, Artificial Sequence
  Description of Artificial Sequence: Synthetic oligonucleotide
  Antisense strand to SEQ ID NO: 109794
aaccaucaugaacuagccu

SEQ ID NO: 109796 - RNA, 19 nt, Artificial Sequence
  Description of Artificial Sequence: Synthetic oligonucleotide
  Sense strand starting at position 2057 of SEQ ID NO: 1395
ccuuguuuauuuccgcaau

SEQ ID NO: 109797 - RNA, 19 nt, Artificial Sequence
  Description of Artificial Sequence: Synthetic oligonucleotide
  Antisense strand to SEQ ID NO: 109796
auugcggaaauaaacaagg

SEQ ID NO: 109798 - RNA, 19 nt, Artificial Sequence
  Description of Artificial Sequence: Synthetic oligonucleotide
  Sense strand starting at position 1998 of SEQ ID NO: 1395
guacgagacuuugcagaag

SEQ ID NO: 109799 - RNA, 19 nt, Artificial Sequence
  Description of Artificial Sequence: Synthetic oligonucleotide
  Antisense strand to SEQ ID NO: 109798
cuucugcaaagucucguac

SEQ ID NO: 109800 - RNA, 19 nt, Artificial Sequence
  Description of Artificial Sequence: Synthetic oligonucleotide
  Sense strand starting at position 1533 of SEQ ID NO: 1395
auaugcgagcuagagaaau

SEQ ID NO: 109801 - RNA, 19 nt, Artificial Sequence
  Description of Artificial Sequence: Synthetic oligonucleotide
  Antisense strand to SEQ ID NO: 109800
auuucucuagcucgcauau

SEQ ID NO: 109802 - RNA, 19 nt, Artificial Sequence
  Description of Artificial Sequence: Synthetic oligonucleotide
  Sense strand starting at position 1378 of SEQ ID NO: 1395
cugucaagcucagcaauuu

SEQ ID NO: 109803 - RNA, 19 nt, Artificial Sequence
  Description of Artificial Sequence: Synthetic oligonucleotide
  Antisense strand to SEQ ID NO: 109802
aaauugcugagcuugacag

SEQ ID NO: 109804 - RNA, 19 nt, Artificial Sequence
  Description of Artificial Sequence: Synthetic oligonucleotide
  Sense strand starting at position 1226 of SEQ ID NO: 1395
ggaucaaaucgucaauuau

SEQ ID NO: 109805 - RNA, 19 nt, Artificial Sequence
  Description of Artificial Sequence: Synthetic oligonucleotide
  Antisense strand to SEQ ID NO: 109804
auaauugacgauuugaucc

SEQ ID NO: 109806 - RNA, 19 nt, Artificial Sequence
  Description of Artificial Sequence: Synthetic oligonucleotide
  Sense strand starting at position 1225 of SEQ ID NO: 1395
aggaucaaaucgucaauua

SEQ ID NO: 109807 - RNA, 19 nt, Artificial Sequence
  Description of Artificial Sequence: Synthetic oligonucleotide
  Antisense strand to SEQ ID NO: 109806
uaauugacgauuugauccu

SEQ ID NO: 109808 - RNA, 19 nt, Artificial Sequence
  Description of Artificial Sequence: Synthetic oligonucleotide
  Sense strand starting at position 1223 of SEQ ID NO: 1395
agaggaucaaaucgucaau

SEQ ID NO: 109809 - RNA, 19 nt, Artificial Sequence
  Description of Artificial Sequence: Synthetic oligonucleotide
  Antisense strand to SEQ ID NO: 109808
auugacgauuugauccucu

SEQ ID NO: 109810 - RNA, 19 nt, Artificial Sequence
  Description of Artificial Sequence: Synthetic oligonucleotide
  Sense strand starting at position 1169 of SEQ ID NO: 1395
cuuccuuaugauuggauaa

SEQ ID NO: 109811 - RNA, 19 nt, Artificial Sequence
  Description of Artificial Sequence: Synthetic oligonucleotide
  Antisense strand to SEQ ID NO: 109810
uuauccaaucauaaggaag

SEQ ID NO: 109812 - RNA, 19 nt, Artificial Sequence
  Description of Artificial Sequence: Synthetic oligonucleotide
  Sense strand starting at position 1168 of SEQ ID NO: 1395
gcuuccuuaugauuggaua

SEQ ID NO: 109813 - RNA, 19 nt, Artificial Sequence
  Description of Artificial Sequence: Synthetic oligonucleotide
  Antisense strand to SEQ ID NO: 109812
uauccaaucauaaggaagc

SEQ ID NO: 109814 - RNA, 19 nt, Artificial Sequence
  Description of Artificial Sequence: Synthetic oligonucleotide
  Sense strand starting at position 1056 of SEQ ID NO: 1395
agcgcuuguagcuuugaca

SEQ ID NO: 109815 - RNA, 19 nt, Artificial Sequence
  Description of Artificial Sequence: Synthetic oligonucleotide
  Antisense strand to SEQ ID NO: 109814
ugucaaagcuacaagcgcu

SEQ ID NO: 109816 - RNA, 19 nt, Artificial Sequence
  Description of Artificial Sequence: Synthetic oligonucleotide
  Sense strand starting at position 863 of SEQ ID NO: 1395
accagcuucccugagcaua

SEQ ID NO: 109817 - RNA, 19 nt, Artificial Sequence
  Description of Artificial Sequence: Synthetic oligonucleotide
  Antisense strand to SEQ ID NO: 109816
uaugcucagggaagcuggu

SEQ ID NO: 109818 - RNA, 19 nt, Artificial Sequence
  Description of Artificial Sequence: Synthetic oligonucleotide
  Sense strand starting at position 759 of SEQ ID NO: 1395
cugaauacgcaauauauua

SEQ ID NO: 109819 - RNA, 19 nt, Artificial Sequence
  Description of Artificial Sequence: Synthetic oligonucleotide
  Antisense strand to SEQ ID NO: 109818
uaauauauugcguauucag

SEQ ID NO: 109820 - RNA, 19 nt, Artificial Sequence
  Description of Artificial Sequence: Synthetic oligonucleotide
  Sense strand starting at position 724 of SEQ ID NO: 1395
cuucuaagauaaucagagu

SEQ ID NO: 109821 - RNA, 19 nt, Artificial Sequence
  Description of Artificial Sequence: Synthetic oligonucleotide
  Antisense strand to SEQ ID NO: 109820
acucugauuaucuuagaag

SEQ ID NO: 109822 - RNA, 19 nt, Artificial Sequence
  Description of Artificial Sequence: Synthetic oligonucleotide
  Sense strand starting at position 679 of SEQ ID NO: 1395
aagagagguuuaccuauua

SEQ ID NO: 109823 - RNA, 19 nt, Artificial Sequence
  Description of Artificial Sequence: Synthetic oligonucleotide
  Antisense strand to SEQ ID NO: 109822
uaauagguaaaccucucuu

SEQ ID NO: 109824 - RNA, 19 nt, Artificial Sequence
  Description of Artificial Sequence: Synthetic oligonucleotide
  Sense strand starting at position 386 of SEQ ID NO: 1395
guugguuuccacuggauuu

SEQ ID NO: 109825 - RNA, 19 nt, Artificial Sequence
  Description of Artificial Sequence: Synthetic oligonucleotide
  Antisense strand to SEQ ID NO: 109824
aaauccaguggaaaccaac

SEQ ID NO: 109826 - RNA, 19 nt, Artificial Sequence
  Description of Artificial Sequence: Synthetic oligonucleotide
  Sense strand starting at position 357 of SEQ ID NO: 1395
aguuacugucuccaagaca

SEQ ID NO: 109827 - RNA, 19 nt, Artificial Sequence
  Description of Artificial Sequence: Synthetic oligonucleotide
  Antisense strand to SEQ ID NO: 109826
ugucuuggagacaguaacu

SEQ ID NO: 109828 - RNA, 19 nt, Artificial Sequence
  Description of Artificial Sequence: Synthetic oligonucleotide
  Sense strand starting at position 292 of SEQ ID NO: 1395
aacagaauugggugucuac

SEQ ID NO: 109829 - RNA, 19 nt, Artificial Sequence
  Description of Artificial Sequence: Synthetic oligonucleotide
  Antisense strand to SEQ ID NO: 109828
guagacacccaauucuguu

SEQ ID NO: 109830 - RNA, 19 nt, Artificial Sequence
  Description of Artificial Sequence: Synthetic oligonucleotide
  Sense strand starting at position 225 of SEQ ID NO: 1395
gaaauagcucgaugggaau

SEQ ID NO: 109831 - RNA, 19 nt, Artificial Sequence
  Description of Artificial Sequence: Synthetic oligonucleotide
  Antisense strand to SEQ ID NO: 109830
auucccaucgagcuauuuc

SEQ ID NO: 109832 - RNA, 19 nt, Artificial Sequence
  Description of Artificial Sequence: Synthetic oligonucleotide
  Sense strand starting at position 211 of SEQ ID NO: 1395
gccuaaagccuugggaaau

SEQ ID NO: 109833 - RNA, 19 nt, Artificial Sequence
  Description of Artificial Sequence: Synthetic oligonucleotide
  Antisense strand to SEQ ID NO: 109832
auuucccaaggcuuuaggc

SEQ ID NO: 109834 - RNA, 19 nt, Artificial Sequence
  Description of Artificial Sequence: Synthetic oligonucleotide
  Sense strand starting at position 210 of SEQ ID NO: 1395
ggccuaaagccuugggaaa

SEQ ID NO: 109835 - RNA, 19 nt, Artificial Sequence
  Description of Artificial Sequence: Synthetic oligonucleotide
  Antisense strand to SEQ ID NO: 109834
uuucccaaggcuuuaggcc

SEQ ID NO: 109836 - RNA, 19 nt, Artificial Sequence
  Description of Artificial Sequence: Synthetic oligonucleotide
  Sense strand starting at position 141 of SEQ ID NO: 1395
aaucauguugcugaaguga

SEQ ID NO: 109837 - RNA, 19 nt, Artificial Sequence
  Description of Artificial Sequence: Synthetic oligonucleotide
  Antisense strand to SEQ ID NO: 109836
ucacuucagcaacaugauu

SEQ ID NO: 109838 - RNA, 19 nt, Artificial Sequence
  Description of Artificial Sequence: Synthetic oligonucleotide
  Sense strand starting at position 10 of SEQ ID NO: 1395
accauaacucuguaguucu

SEQ ID NO: 109839 - RNA, 19 nt, Artificial Sequence
  Description of Artificial Sequence: Synthetic oligonucleotide
  Antisense strand to SEQ ID NO: 109838
agaacuacagaguuauggu

SEQ ID NO: 109840 - RNA, 19 nt, Artificial Sequence
  Description of Artificial Sequence: Synthetic oligonucleotide
  Sense strand starting at position 3717 of SEQ ID NO: 1396
uggauaugggacgauuguu

SEQ ID NO: 109841 - RNA, 19 nt, Artificial Sequence
  Description of Artificial Sequence: Synthetic oligonucleotide
  Antisense strand to SEQ ID NO: 109840
aacaaucgucccauaucca

SEQ ID NO: 109842 - RNA, 19 nt, Artificial Sequence
  Description of Artificial Sequence: Synthetic oligonucleotide
  Sense strand starting at position 3658 of SEQ ID NO: 1396
agcuuucugcgguuagcaa

SEQ ID NO: 109843 - RNA, 19 nt, Artificial Sequence
  Description of Artificial Sequence: Synthetic oligonucleotide
  Antisense strand to SEQ ID NO: 109842
uugcuaaccgcagaaagcu

SEQ ID NO: 109844 - RNA, 19 nt, Artificial Sequence
  Description of Artificial Sequence: Synthetic oligonucleotide
  Sense strand starting at position 3657 of SEQ ID NO: 1396
cagcuuucugcgguuagca

SEQ ID NO: 109845 - RNA, 19 nt, Artificial Sequence
  Description of Artificial Sequence: Synthetic oligonucleotide
  Antisense strand to SEQ ID NO: 109844
ugcuaaccgcagaaagcug

SEQ ID NO: 109846 - RNA, 19 nt, Artificial Sequence
  Description of Artificial Sequence: Synthetic oligonucleotide
  Sense strand starting at position 3492 of SEQ ID NO: 1396
cggcaaagauucuuacuuu

SEQ ID NO: 109847 - RNA, 19 nt, Artificial Sequence
  Description of Artificial Sequence: Synthetic oligonucleotide
  Antisense strand to SEQ ID NO: 109846
aaaguaagaaucuuugccg

SEQ ID NO: 109848 - RNA, 19 nt, Artificial Sequence
  Description of Artificial Sequence: Synthetic oligonucleotide
  Sense strand starting at position 3418 of SEQ ID NO: 1396
ucucuuccagagcagauua

SEQ ID NO: 109849 - RNA, 19 nt, Artificial Sequence
  Description of Artificial Sequence: Synthetic oligonucleotide
  Antisense strand to SEQ ID NO: 109848
uaaucugcucuggaagaga

SEQ ID NO: 109850 - RNA, 19 nt, Artificial Sequence
  Description of Artificial Sequence: Synthetic oligonucleotide
  Sense strand starting at position 3415 of SEQ ID NO: 1396
agcucucuuccagagcaga

SEQ ID NO: 109851 - RNA, 19 nt, Artificial Sequence
  Description of Artificial Sequence: Synthetic oligonucleotide
  Antisense strand to SEQ ID NO: 109850
ucugcucuggaagagagcu

SEQ ID NO: 109852 - RNA, 19 nt, Artificial Sequence
  Description of Artificial Sequence: Synthetic oligonucleotide
  Sense strand starting at position 3328 of SEQ ID NO: 1396
guuuccucgauagaaguuu

SEQ ID NO: 109853 - RNA, 19 nt, Artificial Sequence
  Description of Artificial Sequence: Synthetic oligonucleotide
  Antisense strand to SEQ ID NO: 109852
aaacuucuaucgaggaaac

SEQ ID NO: 109854 - RNA, 19 nt, Artificial Sequence
  Description of Artificial Sequence: Synthetic oligonucleotide
  Sense strand starting at position 3326 of SEQ ID NO: 1396
aaguuuccucgauagaagu

SEQ ID NO: 109855 - RNA, 19 nt, Artificial Sequence
  Description of Artificial Sequence: Synthetic oligonucleotide
  Antisense strand to SEQ ID NO: 109854
acuucuaucgaggaaacuu

SEQ ID NO: 109856 - RNA, 19 nt, Artificial Sequence
  Description of Artificial Sequence: Synthetic oligonucleotide
  Sense strand starting at position 3324 of SEQ ID NO: 1396
ccaaguuuccucgauagaa

SEQ ID NO: 109857 - RNA, 19 nt, Artificial Sequence
  Description of Artificial Sequence: Synthetic oligonucleotide
  Antisense strand to SEQ ID NO: 109856
uucuaucgaggaaacuugg

SEQ ID NO: 109858 - RNA, 19 nt, Artificial Sequence
  Description of Artificial Sequence: Synthetic oligonucleotide
  Sense strand starting at position 3322 of SEQ ID NO: 1396
cuccaaguuuccucgauag

SEQ ID NO: 109859 - RNA, 19 nt, Artificial Sequence
  Description of Artificial Sequence: Synthetic oligonucleotide
  Antisense strand to SEQ ID NO: 109858
cuaucgaggaaacuuggag

SEQ ID NO: 109860 - RNA, 19 nt, Artificial Sequence
  Description of Artificial Sequence: Synthetic oligonucleotide
  Sense strand starting at position 3290 of SEQ ID NO: 1396
gaaccuuugcugggaucua

SEQ ID NO: 109861 - RNA, 19 nt, Artificial Sequence
  Description of Artificial Sequence: Synthetic oligonucleotide
  Antisense strand to SEQ ID NO: 109860
uagaucccagcaaagguuc

SEQ ID NO: 109862 - RNA, 19 nt, Artificial Sequence
  Description of Artificial Sequence: Synthetic oligonucleotide
  Sense strand starting at position 3287 of SEQ ID NO: 1396
cgagaaccuuugcugggau

SEQ ID NO: 109863 - RNA, 19 nt, Artificial Sequence
  Description of Artificial Sequence: Synthetic oligonucleotide
  Antisense strand to SEQ ID NO: 109862
aucccagcaaagguucucg

SEQ ID NO: 109864 - RNA, 19 nt, Artificial Sequence
  Description of Artificial Sequence: Synthetic oligonucleotide
  Sense strand starting at position 3286 of SEQ ID NO: 1396
acgagaaccuuugcuggga

SEQ ID NO: 109865 - RNA, 19 nt, Artificial Sequence
  Description of Artificial Sequence: Synthetic oligonucleotide
  Antisense strand to SEQ ID NO: 109864
ucccagcaaagguucucgu

SEQ ID NO: 109866 - RNA, 19 nt, Artificial Sequence
  Description of Artificial Sequence: Synthetic oligonucleotide
  Sense strand starting at position 3256 of SEQ ID NO: 1396
agcuguguuacagagacaa

SEQ ID NO: 109867 - RNA, 19 nt, Artificial Sequence
  Description of Artificial Sequence: Synthetic oligonucleotide
  Antisense strand to SEQ ID NO: 109866
uugucucuguaacacagcu

SEQ ID NO: 109868 - RNA, 19 nt, Artificial Sequence
  Description of Artificial Sequence: Synthetic oligonucleotide
  Sense strand starting at position 3124 of SEQ ID NO: 1396
auuauuuacuaaggaguga

SEQ ID NO: 109869 - RNA, 19 nt, Artificial Sequence
  Description of Artificial Sequence: Synthetic oligonucleotide
  Antisense strand to SEQ ID NO: 109868
ucacuccuuaguaaauaau

SEQ ID NO: 109870 - RNA, 19 nt, Artificial Sequence
  Description of Artificial Sequence: Synthetic oligonucleotide
  Sense strand starting at position 3098 of SEQ ID NO: 1396
cugaacauccuuggaaauc

SEQ ID NO: 109871 - RNA, 19 nt, Artificial Sequence
  Description of Artificial Sequence: Synthetic oligonucleotide
  Antisense strand to SEQ ID NO: 109870
gauuuccaaggauguucag

SEQ ID NO: 109872 - RNA, 19 nt, Artificial Sequence
  Description of Artificial Sequence: Synthetic oligonucleotide
  Sense strand starting at position 3097 of SEQ ID NO: 1396
ccugaacauccuuggaaau

SEQ ID NO: 109873 - RNA, 19 nt, Artificial Sequence
  Description of Artificial Sequence: Synthetic oligonucleotide
  Antisense strand to SEQ ID NO: 109872
auuuccaaggauguucagg

SEQ ID NO: 109874 - RNA, 19 nt, Artificial Sequence
  Description of Artificial Sequence: Synthetic oligonucleotide
  Sense strand starting at position 3059 of SEQ ID NO: 1396
ccgaaugcucaagaaccau

SEQ ID NO: 109875 - RNA, 19 nt, Artificial Sequence
  Description of Artificial Sequence: Synthetic oligonucleotide
  Antisense strand to SEQ ID NO: 109874
augguucuugagcauucgg

SEQ ID NO: 109876 - RNA, 19 nt, Artificial Sequence
  Description of Artificial Sequence: Synthetic oligonucleotide
  Sense strand starting at position 3055 of SEQ ID NO: 1396
auucccgaaugcucaagaa

SEQ ID NO: 109877 - RNA, 19 nt, Artificial Sequence
  Description of Artificial Sequence: Synthetic oligonucleotide
  Antisense strand to SEQ ID NO: 109876
uucuugagcauucgggaau

SEQ ID NO: 109878 - RNA, 19 nt, Artificial Sequence
  Description of Artificial Sequence: Synthetic oligonucleotide
  Sense strand starting at position 3052 of SEQ ID NO: 1396
auaauucccgaaugcucaa

SEQ ID NO: 109879 - RNA, 19 nt, Artificial Sequence
  Description of Artificial Sequence: Synthetic oligonucleotide
  Antisense strand to SEQ ID NO: 109878
uugagcauucgggaauuau

SEQ ID NO: 109880 - RNA, 19 nt, Artificial Sequence
  Description of Artificial Sequence: Synthetic oligonucleotide
  Sense strand starting at position 2988 of SEQ ID NO: 1396
ugaaauaauucugcaucug

SEQ ID NO: 109881 - RNA, 19 nt, Artificial Sequence
  Description of Artificial Sequence: Synthetic oligonucleotide
  Antisense strand to SEQ ID NO: 109880
cagaugcagaauuauuuca

SEQ ID NO: 109882 - RNA, 19 nt, Artificial Sequence
  Description of Artificial Sequence: Synthetic oligonucleotide
  Sense strand starting at position 2847 of SEQ ID NO: 1396
gacauuccuguaggaaagu

SEQ ID NO: 109883 - RNA, 19 nt, Artificial Sequence
  Description of Artificial Sequence: Synthetic oligonucleotide
  Antisense strand to SEQ ID NO: 109882
acuuuccuacaggaauguc

SEQ ID NO: 109884 - RNA, 19 nt, Artificial Sequence
  Description of Artificial Sequence: Synthetic oligonucleotide
  Sense strand starting at position 2382 of SEQ ID NO: 1396
cuggacauaggcuaucauu

SEQ ID NO: 109885 - RNA, 19 nt, Artificial Sequence
  Description of Artificial Sequence: Synthetic oligonucleotide
  Antisense strand to SEQ ID NO: 109884
aaugauagccuauguccag

SEQ ID NO: 109886 - RNA, 19 nt, Artificial Sequence
  Description of Artificial Sequence: Synthetic oligonucleotide
  Sense strand starting at position 2265 of SEQ ID NO: 1396
cagaaacaacagugguuua

SEQ ID NO: 109887 - RNA, 19 nt, Artificial Sequence
  Description of Artificial Sequence: Synthetic oligonucleotide
  Antisense strand to SEQ ID NO: 109886
uaaaccacuguuguuucug

SEQ ID NO: 109888 - RNA, 19 nt, Artificial Sequence
  Description of Artificial Sequence: Synthetic oligonucleotide
  Sense strand starting at position 2213 of SEQ ID NO: 1396
gugaaacuaguggguuuga

SEQ ID NO: 109889 - RNA, 19 nt, Artificial Sequence
  Description of Artificial Sequence: Synthetic oligonucleotide
  Antisense strand to SEQ ID NO: 109888
ucaaacccacuaguuucac

SEQ ID NO: 109890 - RNA, 19 nt, Artificial Sequence
  Description of Artificial Sequence: Synthetic oligonucleotide
  Sense strand starting at position 2182 of SEQ ID NO: 1396
gagauuaaugagcguuauc

SEQ ID NO: 109891 - RNA, 19 nt, Artificial Sequence
  Description of Artificial Sequence: Synthetic oligonucleotide
  Antisense strand to SEQ ID NO: 109890
gauaacgcucauuaaucuc

SEQ ID NO: 109892 - RNA, 19 nt, Artificial Sequence
  Description of Artificial Sequence: Synthetic oligonucleotide
  Sense strand starting at position 2181 of SEQ ID NO: 1396
ggagauuaaugagcguuau

SEQ ID NO: 109893 - RNA, 19 nt, Artificial Sequence
  Description of Artificial Sequence: Synthetic oligonucleotide
  Antisense strand to SEQ ID NO: 109892
auaacgcucauuaaucucc

SEQ ID NO: 109894 - RNA, 19 nt, Artificial Sequence
  Description of Artificial Sequence: Synthetic oligonucleotide
  Sense strand starting at position 2118 of SEQ ID NO: 1396
aggaaucagugcccacaga

SEQ ID NO: 109895 - RNA, 19 nt, Artificial Sequence
  Description of Artificial Sequence: Synthetic oligonucleotide
  Antisense strand to SEQ ID NO: 109894
ucugugggcacugauuccu

SEQ ID NO: 109896 - RNA, 19 nt, Artificial Sequence
  Description of Artificial Sequence: Synthetic oligonucleotide
  Sense strand starting at position 2047 of SEQ ID NO: 1396
gguaauuaugcacacaauc

SEQ ID NO: 109897 - RNA, 19 nt, Artificial Sequence
  Description of Artificial Sequence: Synthetic oligonucleotide
  Antisense strand to SEQ ID NO: 109896
gauugugugcauaauuacc

SEQ ID NO: 109898 - RNA, 19 nt, Artificial Sequence
  Description of Artificial Sequence: Synthetic oligonucleotide
  Sense strand starting at position 2044 of SEQ ID NO: 1396
agagguaauuaugcacaca

SEQ ID NO: 109899 - RNA, 19 nt, Artificial Sequence
  Description of Artificial Sequence: Synthetic oligonucleotide
  Antisense strand to SEQ ID NO: 109898
ugugugcauaauuaccucu

SEQ ID NO: 109900 - RNA, 19 nt, Artificial Sequence
  Description of Artificial Sequence: Synthetic oligonucleotide
  Sense strand starting at position 2034 of SEQ ID NO: 1396
auucgucggcagagguaau

SEQ ID NO: 109901 - RNA, 19 nt, Artificial Sequence
  Description of Artificial Sequence: Synthetic oligonucleotide
  Antisense strand to SEQ ID NO: 109900
auuaccucugccgacgaau

SEQ ID NO: 109902 - RNA, 19 nt, Artificial Sequence
  Description of Artificial Sequence: Synthetic oligonucleotide
  Sense strand starting at position 2032 of SEQ ID NO: 1396
agauucgucggcagaggua

SEQ ID NO: 109903 - RNA, 19 nt, Artificial Sequence
  Description of Artificial Sequence: Synthetic oligonucleotide
  Antisense strand to SEQ ID NO: 109902
uaccucugccgacgaaucu

SEQ ID NO: 109904 - RNA, 19 nt, Artificial Sequence
  Description of Artificial Sequence: Synthetic oligonucleotide
  Sense strand starting at position 2015 of SEQ ID NO: 1396
aagcuuucugugggaauag

SEQ ID NO: 109905 - RNA, 19 nt, Artificial Sequence
  Description of Artificial Sequence: Synthetic oligonucleotide
  Antisense strand to SEQ ID NO: 109904
cuauucccacagaaagcuu

SEQ ID NO: 109906 - RNA, 19 nt, Artificial Sequence
  Description of Artificial Sequence: Synthetic oligonucleotide
  Sense strand starting at position 1998 of SEQ ID NO: 1396
uuguaaucucuccagcgaa

SEQ ID NO: 109907 - RNA, 19 nt, Artificial Sequence
  Description of Artificial Sequence: Synthetic oligonucleotide
  Antisense strand to SEQ ID NO: 109906
uucgcuggagagauuacaa

SEQ ID NO: 109908 - RNA, 19 nt, Artificial Sequence
  Description of Artificial Sequence: Synthetic oligonucleotide
  Sense strand starting at position 1743 of SEQ ID NO: 1396
ggaugugcuuaagcaaaca

SEQ ID NO: 109909 - RNA, 19 nt, Artificial Sequence
  Description of Artificial Sequence: Synthetic oligonucleotide
  Antisense strand to SEQ ID NO: 109908
uguuugcuuaagcacaucc

SEQ ID NO: 109910 - RNA, 19 nt, Artificial Sequence
  Description of Artificial Sequence: Synthetic oligonucleotide
  Sense strand starting at position 1740 of SEQ ID NO: 1396
acaggaugugcuuaagcaa

SEQ ID NO: 109911 - RNA, 19 nt, Artificial Sequence
  Description of Artificial Sequence: Synthetic oligonucleotide
  Antisense strand to SEQ ID NO: 109910
uugcuuaagcacauccugu

SEQ ID NO: 109912 - RNA, 19 nt, Artificial Sequence
  Description of Artificial Sequence: Synthetic oligonucleotide
  Sense strand starting at position 1038 of SEQ ID NO: 1396
ggcuuaccugggugagaca

SEQ ID NO: 109913 - RNA, 19 nt, Artificial Sequence
  Description of Artificial Sequence: Synthetic oligonucleotide
  Antisense strand to SEQ ID NO: 109912
ugucucacccagguaagcc

SEQ ID NO: 109914 - RNA, 19 nt, Artificial Sequence
  Description of Artificial Sequence: Synthetic oligonucleotide
  Sense strand starting at position 666 of SEQ ID NO: 1396
cagauuucugcgugucaug

SEQ ID NO: 109915 - RNA, 19 nt, Artificial Sequence
  Description of Artificial Sequence: Synthetic oligonucleotide
  Antisense strand to SEQ ID NO: 109914
caugacacgcagaaaucug

SEQ ID NO: 109916 - RNA, 19 nt, Artificial Sequence
  Description of Artificial Sequence: Synthetic oligonucleotide
  Sense strand starting at position 665 of SEQ ID NO: 1396
ccagauuucugcgugucau

SEQ ID NO: 109917 - RNA, 19 nt, Artificial Sequence
  Description of Artificial Sequence: Synthetic oligonucleotide
  Antisense strand to SEQ ID NO: 109916
augacacgcagaaaucugg

SEQ ID NO: 109918 - RNA, 19 nt, Artificial Sequence
  Description of Artificial Sequence: Synthetic oligonucleotide
  Sense strand starting at position 457 of SEQ ID NO: 1396
aaaguaagaguucgggaag

SEQ ID NO: 109919 - RNA, 19 nt, Artificial Sequence
  Description of Artificial Sequence: Synthetic oligonucleotide
  Antisense strand to SEQ ID NO: 109918
cuucccgaacucuuacuuu

SEQ ID NO: 109920 - RNA, 19 nt, Artificial Sequence
  Description of Artificial Sequence: Synthetic oligonucleotide
  Sense strand starting at position 3913 of SEQ ID NO: 1398
gugaaagacuucucacccu

SEQ ID NO: 109921 - RNA, 19 nt, Artificial Sequence
  Description of Artificial Sequence: Synthetic oligonucleotide
  Antisense strand to SEQ ID NO: 109920
agggugagaagucuuucac

SEQ ID NO: 109922 - RNA, 19 nt, Artificial Sequence
  Description of Artificial Sequence: Synthetic oligonucleotide
  Sense strand starting at position 3889 of SEQ ID NO: 1398
cuggccugucccuaggaga

SEQ ID NO: 109923 - RNA, 19 nt, Artificial Sequence
  Description of Artificial Sequence: Synthetic oligonucleotide
  Antisense strand to SEQ ID NO: 109922
ucuccuagggacaggccag

SEQ ID NO: 109924 - RNA, 19 nt, Artificial Sequence
  Description of Artificial Sequence: Synthetic oligonucleotide
  Sense strand starting at position 3832 of SEQ ID NO: 1398
ugcuauagucuuuauuauc

SEQ ID NO: 109925 - RNA, 19 nt, Artificial Sequence
  Description of Artificial Sequence: Synthetic oligonucleotide
  Antisense strand to SEQ ID NO: 109924
gauaauaaagacuauagca

SEQ ID NO: 109926 - RNA, 19 nt, Artificial Sequence
  Description of Artificial Sequence: Synthetic oligonucleotide
  Sense strand starting at position 3743 of SEQ ID NO: 1398
cagguaguacuagaguauu

SEQ ID NO: 109927 - RNA, 19 nt, Artificial Sequence
  Description of Artificial Sequence: Synthetic oligonucleotide
  Antisense strand to SEQ ID NO: 109926
aauacucuaguacuaccug

SEQ ID NO: 109928 - RNA, 19 nt, Artificial Sequence
  Description of Artificial Sequence: Synthetic oligonucleotide
  Sense strand starting at position 3706 of SEQ ID NO: 1398
gggaguggucaggagguuu

SEQ ID NO: 109929 - RNA, 19 nt, Artificial Sequence
  Description of Artificial Sequence: Synthetic oligonucleotide
  Antisense strand to SEQ ID NO: 109928
aaaccuccugaccacuccc

SEQ ID NO: 109930 - RNA, 19 nt, Artificial Sequence
  Description of Artificial Sequence: Synthetic oligonucleotide
  Sense strand starting at position 3579 of SEQ ID NO: 1398
agugcucaagcauagauga

SEQ ID NO: 109931 - RNA, 19 nt, Artificial Sequence
  Description of Artificial Sequence: Synthetic oligonucleotide
  Antisense strand to SEQ ID NO: 109930
ucaucuaugcuugagcacu

SEQ ID NO: 109932 - RNA, 19 nt, Artificial Sequence
  Description of Artificial Sequence: Synthetic oligonucleotide
  Sense strand starting at position 3573 of SEQ ID NO: 1398
acaaguagugcucaagcau

SEQ ID NO: 109933 - RNA, 19 nt, Artificial Sequence
  Description of Artificial Sequence: Synthetic oligonucleotide
  Antisense strand to SEQ ID NO: 109932
augcuugagcacuacuugu

SEQ ID NO: 109934 - RNA, 19 nt, Artificial Sequence
  Description of Artificial Sequence: Synthetic oligonucleotide
  Sense strand starting at position 3540 of SEQ ID NO: 1398
auuagcuaagagugauauu

SEQ ID NO: 109935 - RNA, 19 nt, Artificial Sequence
  Description of Artificial Sequence: Synthetic oligonucleotide
  Antisense strand to SEQ ID NO: 109934
aauaucacucuuagcuaau

SEQ ID NO: 109936 - RNA, 19 nt, Artificial Sequence
  Description of Artificial Sequence: Synthetic oligonucleotide
  Sense strand starting at position 3498 of SEQ ID NO: 1398
uuggguugcccucagaaau

SEQ ID NO: 109937 - RNA, 19 nt, Artificial Sequence
  Description of Artificial Sequence: Synthetic oligonucleotide
  Antisense strand to SEQ ID NO: 109936
auuucugagggcaacccaa

SEQ ID NO: 109938 - RNA, 19 nt, Artificial Sequence
  Description of Artificial Sequence: Synthetic oligonucleotide
  Sense strand starting at position 3345 of SEQ ID NO: 1398
guacuuauugcauauacua

SEQ ID NO: 109939 - RNA, 19 nt, Artificial Sequence
  Description of Artificial Sequence: Synthetic oligonucleotide
  Antisense strand to SEQ ID NO: 109938
uaguauaugcaauaaguac

SEQ ID NO: 109940 - RNA, 19 nt, Artificial Sequence
  Description of Artificial Sequence: Synthetic oligonucleotide
  Sense strand starting at position 3333 of SEQ ID NO: 1398
gauguuuauugaguacuua

SEQ ID NO: 109941 - RNA, 19 nt, Artificial Sequence
  Description of Artificial Sequence: Synthetic oligonucleotide
  Antisense strand to SEQ ID NO: 109940
uaaguacucaauaaacauc

SEQ ID NO: 109942 - RNA, 19 nt, Artificial Sequence
  Description of Artificial Sequence: Synthetic oligonucleotide
  Sense strand starting at position 3326 of SEQ ID NO: 1398
cucuacagauguuuauuga

SEQ ID NO: 109943 - RNA, 19 nt, Artificial Sequence
  Description of Artificial Sequence: Synthetic oligonucleotide
  Antisense strand to SEQ ID NO: 109942
ucaauaaacaucuguagag

SEQ ID NO: 109944 - RNA, 19 nt, Artificial Sequence
  Description of Artificial Sequence: Synthetic oligonucleotide
  Sense strand starting at position 3271 of SEQ ID NO: 1398
guauguugagauuguagag

SEQ ID NO: 109945 - RNA, 19 nt, Artificial Sequence
  Description of Artificial Sequence: Synthetic oligonucleotide
  Antisense strand to SEQ ID NO: 109944
cucuacaaucucaacauac

SEQ ID NO: 109946 - RNA, 19 nt, Artificial Sequence
  Description of Artificial Sequence: Synthetic oligonucleotide
  Sense strand starting at position 2952 of SEQ ID NO: 1398
ggcacucuauuugaugaau

SEQ ID NO: 109947 - RNA, 19 nt, Artificial Sequence
  Description of Artificial Sequence: Synthetic oligonucleotide
  Antisense strand to SEQ ID NO: 109946
auucaucaaauagagugcc

SEQ ID NO: 109948 - RNA, 19 nt, Artificial Sequence
  Description of Artificial Sequence: Synthetic oligonucleotide
  Sense strand starting at position 2886 of SEQ ID NO: 1398
gaguaaacccucgacuuga

SEQ ID NO: 109949 - RNA, 19 nt, Artificial Sequence
  Description of Artificial Sequence: Synthetic oligonucleotide
  Antisense strand to SEQ ID NO: 109948
ucaagucgaggguuuacuc

SEQ ID NO: 109950 - RNA, 19 nt, Artificial Sequence
  Description of Artificial Sequence: Synthetic oligonucleotide
  Sense strand starting at position 2885 of SEQ ID NO: 1398
ggaguaaacccucgacuug

SEQ ID NO: 109951 - RNA, 19 nt, Artificial Sequence
  Description of Artificial Sequence: Synthetic oligonucleotide
  Antisense strand to SEQ ID NO: 109950
caagucgaggguuuacucc

SEQ ID NO: 109952 - RNA, 19 nt, Artificial Sequence
  Description of Artificial Sequence: Synthetic oligonucleotide
  Sense strand starting at position 2849 of SEQ ID NO: 1398
guuuauaacccuggugaua

SEQ ID NO: 109953 - RNA, 19 nt, Artificial Sequence
  Description of Artificial Sequence: Synthetic oligonucleotide
  Antisense strand to SEQ ID NO: 109952
uaucaccaggguuauaaac

SEQ ID NO: 109954 - RNA, 19 nt, Artificial Sequence
  Description of Artificial Sequence: Synthetic oligonucleotide
  Sense strand starting at position 2848 of SEQ ID NO: 1398
gguuuauaacccuggugau

SEQ ID NO: 109955 - RNA, 19 nt, Artificial Sequence
  Description of Artificial Sequence: Synthetic oligonucleotide
  Antisense strand to SEQ ID NO: 109954
aucaccaggguuauaaacc

SEQ ID NO: 109956 - RNA, 19 nt, Artificial Sequence
  Description of Artificial Sequence: Synthetic oligonucleotide
  Sense strand starting at position 2800 of SEQ ID NO: 1398
uugcauggguccucaauaa

SEQ ID NO: 109957 - RNA, 19 nt, Artificial Sequence
  Description of Artificial Sequence: Synthetic oligonucleotide
  Antisense strand to SEQ ID NO: 109956
uuauugaggacccaugcaa

SEQ ID NO: 109958 - RNA, 19 nt, Artificial Sequence
  Description of Artificial Sequence: Synthetic oligonucleotide
  Sense strand starting at position 2783 of SEQ ID NO: 1398
ccuuucugagacuaguguu

SEQ ID NO: 109959 - RNA, 19 nt, Artificial Sequence
  Description of Artificial Sequence: Synthetic oligonucleotide
  Antisense strand to SEQ ID NO: 109958
aacacuagucucagaaagg

SEQ ID NO: 109960 - RNA, 19 nt, Artificial Sequence
  Description of Artificial Sequence: Synthetic oligonucleotide
  Sense strand starting at position 2699 of SEQ ID NO: 1398
gaguuagugcauuagguaa

SEQ ID NO: 109961 - RNA, 19 nt, Artificial Sequence
  Description of Artificial Sequence: Synthetic oligonucleotide
  Antisense strand to SEQ ID NO: 109960
uuaccuaaugcacuaacuc

SEQ ID NO: 109962 - RNA, 19 nt, Artificial Sequence
  Description of Artificial Sequence: Synthetic oligonucleotide
  Sense strand starting at position 2669 of SEQ ID NO: 1398
augugucuugaauggaauu

SEQ ID NO: 109963 - RNA, 19 nt, Artificial Sequence
  Description of Artificial Sequence: Synthetic oligonucleotide
  Antisense strand to SEQ ID NO: 109962
aauuccauucaagacacau

SEQ ID NO: 109964 - RNA, 19 nt, Artificial Sequence
  Description of Artificial Sequence: Synthetic oligonucleotide
  Sense strand starting at position 2654 of SEQ ID NO: 1398
agguauagucaucaaaugu

SEQ ID NO: 109965 - RNA, 19 nt, Artificial Sequence
  Description of Artificial Sequence: Synthetic oligonucleotide
  Antisense strand to SEQ ID NO: 109964
acauuugaugacuauaccu

SEQ ID NO: 109966 - RNA, 19 nt, Artificial Sequence
  Description of Artificial Sequence: Synthetic oligonucleotide
  Sense strand starting at position 2653 of SEQ ID NO: 1398
uagguauagucaucaaaug

SEQ ID NO: 109967 - RNA, 19 nt, Artificial Sequence
  Description of Artificial Sequence: Synthetic oligonucleotide
  Antisense strand to SEQ ID NO: 109966
cauuugaugacuauaccua

SEQ ID NO: 109968 - RNA, 19 nt, Artificial Sequence
  Description of Artificial Sequence: Synthetic oligonucleotide
  Sense strand starting at position 2524 of SEQ ID NO: 1398
guccaaaggcaucaggauu

SEQ ID NO: 109969 - RNA, 19 nt, Artificial Sequence
  Description of Artificial Sequence: Synthetic oligonucleotide
  Antisense strand to SEQ ID NO: 109968
aauccugaugccuuuggac

SEQ ID NO: 109970 - RNA, 19 nt, Artificial Sequence
  Description of Artificial Sequence: Synthetic oligonucleotide
  Sense strand starting at position 2397 of SEQ ID NO: 1398
accuuacgucgacauaguu

SEQ ID NO: 109971 - RNA, 19 nt, Artificial Sequence
  Description of Artificial Sequence: Synthetic oligonucleotide
  Antisense strand to SEQ ID NO: 109970
aacuaugucgacguaaggu

SEQ ID NO: 109972 - RNA, 19 nt, Artificial Sequence
  Description of Artificial Sequence: Synthetic oligonucleotide
  Sense strand starting at position 2378 of SEQ ID NO: 1398
caagaauaguuagcuugua

SEQ ID NO: 109973 - RNA, 19 nt, Artificial Sequence
  Description of Artificial Sequence: Synthetic oligonucleotide
  Antisense strand to SEQ ID NO: 109972
uacaagcuaacuauucuug

SEQ ID NO: 109974 - RNA, 19 nt, Artificial Sequence
  Description of Artificial Sequence: Synthetic oligonucleotide
  Sense strand starting at position 2344 of SEQ ID NO: 1398
agugauguccucuagaaua

SEQ ID NO: 109975 - RNA, 19 nt, Artificial Sequence
  Description of Artificial Sequence: Synthetic oligonucleotide
  Antisense strand to SEQ ID NO: 109974
uauucuagaggacaucacu

SEQ ID NO: 109976 - RNA, 19 nt, Artificial Sequence
  Description of Artificial Sequence: Synthetic oligonucleotide
  Sense strand starting at position 2260 of SEQ ID NO: 1398
ggcguuccagauuaagcau

SEQ ID NO: 109977 - RNA, 19 nt, Artificial Sequence
  Description of Artificial Sequence: Synthetic oligonucleotide
  Antisense strand to SEQ ID NO: 109976
augcuuaaucuggaacgcc

SEQ ID NO: 109978 - RNA, 19 nt, Artificial Sequence
  Description of Artificial Sequence: Synthetic oligonucleotide
  Sense strand starting at position 2257 of SEQ ID NO: 1398
cauggcguuccagauuaag

SEQ ID NO: 109979 - RNA, 19 nt, Artificial Sequence
  Description of Artificial Sequence: Synthetic oligonucleotide
  Antisense strand to SEQ ID NO: 109978
cuuaaucuggaacgccaug

SEQ ID NO: 109980 - RNA, 19 nt, Artificial Sequence
  Description of Artificial Sequence: Synthetic oligonucleotide
  Sense strand starting at position 1989 of SEQ ID NO: 1398
cggaaugagaucugagagu

SEQ ID NO: 109981 - RNA, 19 nt, Artificial Sequence
  Description of Artificial Sequence: Synthetic oligonucleotide
  Antisense strand to SEQ ID NO: 109980
acucucagaucucauuccg

SEQ ID NO: 109982 - RNA, 19 nt, Artificial Sequence
  Description of Artificial Sequence: Synthetic oligonucleotide
  Sense strand starting at position 901 of SEQ ID NO: 1398
aaaccucaguguuugaaug

SEQ ID NO: 109983 - RNA, 19 nt, Artificial Sequence
  Description of Artificial Sequence: Synthetic oligonucleotide
  Antisense strand to SEQ ID NO: 109982
cauucaaacacugagguuu

SEQ ID NO: 109984 - RNA, 19 nt, Artificial Sequence
  Description of Artificial Sequence: Synthetic oligonucleotide
  Sense strand starting at position 604 of SEQ ID NO: 1398
agccaugaccuguauccuu

SEQ ID NO: 109985 - RNA, 19 nt, Artificial Sequence
  Description of Artificial Sequence: Synthetic oligonucleotide
  Antisense strand to SEQ ID NO: 109984
aaggauacaggucauggcu

SEQ ID NO: 109986 - RNA, 19 nt, Artificial Sequence
  Description of Artificial Sequence: Synthetic oligonucleotide
  Sense strand starting at position 358 of SEQ ID NO: 1398
aguccuguuccuuaagaag

SEQ ID NO: 109987 - RNA, 19 nt, Artificial Sequence
  Description of Artificial Sequence: Synthetic oligonucleotide
  Antisense strand to SEQ ID NO: 109986
cuucuuaaggaacaggacu

SEQ ID NO: 109988 - RNA, 19 nt, Artificial Sequence
  Description of Artificial Sequence: Synthetic oligonucleotide
  Sense strand starting at position 342 of SEQ ID NO: 1398
ccagaaaguguugacaagu

SEQ ID NO: 109989 - RNA, 19 nt, Artificial Sequence
  Description of Artificial Sequence: Synthetic oligonucleotide
  Antisense strand to SEQ ID NO: 109988
acuugucaacacuuucugg

SEQ ID NO: 109990 - RNA, 19 nt, Artificial Sequence
  Description of Artificial Sequence: Synthetic oligonucleotide
  Sense strand starting at position 306 of SEQ ID NO: 1398
gacucuggauuggaauaaa

SEQ ID NO: 109991 - RNA, 19 nt, Artificial Sequence
  Description of Artificial Sequence: Synthetic oligonucleotide
  Antisense strand to SEQ ID NO: 109990
uuuauuccaauccagaguc

SEQ ID NO: 109992 - RNA, 19 nt, Artificial Sequence
  Description of Artificial Sequence: Synthetic oligonucleotide
  Sense strand starting at position 305 of SEQ ID NO: 1398
cgacucuggauuggaauaa

SEQ ID NO: 109993 - RNA, 19 nt, Artificial Sequence
  Description of Artificial Sequence: Synthetic oligonucleotide
  Antisense strand to SEQ ID NO: 109992
uuauuccaauccagagucg

SEQ ID NO: 109994 - RNA, 19 nt, Artificial Sequence
  Description of Artificial Sequence: Synthetic oligonucleotide
  Sense strand starting at position 304 of SEQ ID NO: 1398
acgacucuggauuggaaua

SEQ ID NO: 109995 - RNA, 19 nt, Artificial Sequence
  Description of Artificial Sequence: Synthetic oligonucleotide
  Antisense strand to SEQ ID NO: 109994
uauuccaauccagagucgu

SEQ ID NO: 109996 - RNA, 19 nt, Artificial Sequence
  Description of Artificial Sequence: Synthetic oligonucleotide
  Sense strand starting at position 190 of SEQ ID NO: 1398
acauaaauguguuuccaug

SEQ ID NO: 109997 - RNA, 19 nt, Artificial Sequence
  Description of Artificial Sequence: Synthetic oligonucleotide
  Antisense strand to SEQ ID NO: 109996
cauggaaacacauuuaugu

SEQ ID NO: 109998 - RNA, 19 nt, Artificial Sequence
  Description of Artificial Sequence: Synthetic oligonucleotide
  Sense strand starting at position 88 of SEQ ID NO: 1398
guuucuugaaauugguaug

SEQ ID NO: 109999 - RNA, 19 nt, Artificial Sequence
  Description of Artificial Sequence: Synthetic oligonucleotide
  Antisense strand to SEQ ID NO: 109998
cauaccaauuucaagaaac

SEQ ID NO: 110000 - RNA, 19 nt, Artificial Sequence
  Description of Artificial Sequence: Synthetic oligonucleotide
  Sense strand starting at position 3978 of SEQ ID NO: 1399
auuagcuaagagugauauu

SEQ ID NO: 110001 - RNA, 19 nt, Artificial Sequence
  Description of Artificial Sequence: Synthetic oligonucleotide
  Antisense strand to SEQ ID NO: 110000
aauaucacucuuagcuaau

SEQ ID NO: 110002 - RNA, 19 nt, Artificial Sequence
  Description of Artificial Sequence: Synthetic oligonucleotide
  Sense strand starting at position 3936 of SEQ ID NO: 1399
uuggguugcccucagaaau

SEQ ID NO: 110003 - RNA, 19 nt, Artificial Sequence
  Description of Artificial Sequence: Synthetic oligonucleotide
  Antisense strand to SEQ ID NO: 110002
auuucugagggcaacccaa

SEQ ID NO: 110004 - RNA, 19 nt, Artificial Sequence
  Description of Artificial Sequence: Synthetic oligonucleotide
  Sense strand starting at position 3783 of SEQ ID NO: 1399
guacuuauugcauauacua

SEQ ID NO: 110005 - RNA, 19 nt, Artificial Sequence
  Description of Artificial Sequence: Synthetic oligonucleotide
  Antisense strand to SEQ ID NO: 110004
uaguauaugcaauaaguac

SEQ ID NO: 110006 - RNA, 19 nt, Artificial Sequence
  Description of Artificial Sequence: Synthetic oligonucleotide
  Sense strand starting at position 3771 of SEQ ID NO: 1399
gauguuuauugaguacuua

SEQ ID NO: 110007 - RNA, 19 nt, Artificial Sequence
  Description of Artificial Sequence: Synthetic oligonucleotide
  Antisense strand to SEQ ID NO: 110006
uaaguacucaauaaacauc

SEQ ID NO: 110008 - RNA, 19 nt, Artificial Sequence
  Description of Artificial Sequence: Synthetic oligonucleotide
  Sense strand starting at position 3764 of SEQ ID NO: 1399
cucuacagauguuuauuga

SEQ ID NO: 110009 - RNA, 19 nt, Artificial Sequence
  Description of Artificial Sequence: Synthetic oligonucleotide
  Antisense strand to SEQ ID NO: 110008
ucaauaaacaucuguagag

SEQ ID NO: 110010 - RNA, 19 nt, Artificial Sequence
  Description of Artificial Sequence: Synthetic oligonucleotide
  Sense strand starting at position 3709 of SEQ ID NO: 1399
guauguugagauuguagag

SEQ ID NO: 110011 - RNA, 19 nt, Artificial Sequence
  Description of Artificial Sequence: Synthetic oligonucleotide
  Antisense strand to SEQ ID NO: 110010
cucuacaaucucaacauac

SEQ ID NO: 110012 - RNA, 19 nt, Artificial Sequence
  Description of Artificial Sequence: Synthetic oligonucleotide
  Sense strand starting at position 3390 of SEQ ID NO: 1399
ggcacucuauuugaugaau

SEQ ID NO: 110013 - RNA, 19 nt, Artificial Sequence
  Description of Artificial Sequence: Synthetic oligonucleotide
  Antisense strand to SEQ ID NO: 110012
auucaucaaauagagugcc

SEQ ID NO: 110014 - RNA, 19 nt, Artificial Sequence
  Description of Artificial Sequence: Synthetic oligonucleotide
  Sense strand starting at position 3324 of SEQ ID NO: 1399
gaguaaacccucgacuuga

SEQ ID NO: 110015 - RNA, 19 nt, Artificial Sequence
  Description of Artificial Sequence: Synthetic oligonucleotide
  Antisense strand to SEQ ID NO: 110014
ucaagucgaggguuuacuc

SEQ ID NO: 110016 - RNA, 19 nt, Artificial Sequence
  Description of Artificial Sequence: Synthetic oligonucleotide
  Sense strand starting at position 3323 of SEQ ID NO: 1399
ggaguaaacccucgacuug

SEQ ID NO: 110017 - RNA, 19 nt, Artificial Sequence
  Description of Artificial Sequence: Synthetic oligonucleotide
  Antisense strand to SEQ ID NO: 110016
caagucgaggguuuacucc

SEQ ID NO: 110018 - RNA, 19 nt, Artificial Sequence
  Description of Artificial Sequence: Synthetic oligonucleotide
  Sense strand starting at position 3287 of SEQ ID NO: 1399
guuuauaacccuggugaua

SEQ ID NO: 110019 - RNA, 19 nt, Artificial Sequence
  Description of Artificial Sequence: Synthetic oligonucleotide
  Antisense strand to SEQ ID NO: 110018
uaucaccaggguuauaaac

SEQ ID NO: 110020 - RNA, 19 nt, Artificial Sequence
  Description of Artificial Sequence: Synthetic oligonucleotide
  Sense strand starting at position 3286 of SEQ ID NO: 1399
gguuuauaacccuggugau

SEQ ID NO: 110021 - RNA, 19 nt, Artificial Sequence
  Description of Artificial Sequence: Synthetic oligonucleotide
  Antisense strand to SEQ ID NO: 110020
aucaccaggguuauaaacc

SEQ ID NO: 110022 - RNA, 19 nt, Artificial Sequence
  Description of Artificial Sequence: Synthetic oligonucleotide
  Sense strand starting at position 3238 of SEQ ID NO: 1399
uugcauggguccucaauaa

SEQ ID NO: 110023 - RNA, 19 nt, Artificial Sequence
  Description of Artificial Sequence: Synthetic oligonucleotide
  Antisense strand to SEQ ID NO: 110022
uuauugaggacccaugcaa

SEQ ID NO: 110024 - RNA, 19 nt, Artificial Sequence
  Description of Artificial Sequence: Synthetic oligonucleotide
  Sense strand starting at position 3221 of SEQ ID NO: 1399
ccuuucugagacuaguguu

SEQ ID NO: 110025 - RNA, 19 nt, Artificial Sequence
  Description of Artificial Sequence: Synthetic oligonucleotide
  Antisense strand to SEQ ID NO: 110024
aacacuagucucagaaagg

SEQ ID NO: 110026 - RNA, 19 nt, Artificial Sequence
  Description of Artificial Sequence: Synthetic oligonucleotide
  Sense strand starting at position 3137 of SEQ ID NO: 1399
gaguuagugcauuagguaa

SEQ ID NO: 110027 - RNA, 19 nt, Artificial Sequence
  Description of Artificial Sequence: Synthetic oligonucleotide
  Antisense strand to SEQ ID NO: 110026
uuaccuaaugcacuaacuc

SEQ ID NO: 110028 - RNA, 19 nt, Artificial Sequence
  Description of Artificial Sequence: Synthetic oligonucleotide
  Sense strand starting at position 3107 of SEQ ID NO: 1399
augugucuugaauggaauu

SEQ ID NO: 110029 - RNA, 19 nt, Artificial Sequence
  Description of Artificial Sequence: Synthetic oligonucleotide
  Antisense strand to SEQ ID NO: 110028
aauuccauucaagacacau

SEQ ID NO: 110030 - RNA, 19 nt, Artificial Sequence
  Description of Artificial Sequence: Synthetic oligonucleotide
  Sense strand starting at position 3092 of SEQ ID NO: 1399
agguauagucaucaaaugu

SEQ ID NO: 110031 - RNA, 19 nt, Artificial Sequence
  Description of Artificial Sequence: Synthetic oligonucleotide
  Antisense strand to SEQ ID NO: 110030
acauuugaugacuauaccu

SEQ ID NO: 110032 - RNA, 19 nt, Artificial Sequence
  Description of Artificial Sequence: Synthetic oligonucleotide
  Sense strand starting at position 3091 of SEQ ID NO: 1399
uagguauagucaucaaaug

SEQ ID NO: 110033 - RNA, 19 nt, Artificial Sequence
  Description of Artificial Sequence: Synthetic oligonucleotide
  Antisense strand to SEQ ID NO: 110032
cauuugaugacuauaccua

SEQ ID NO: 110034 - RNA, 19 nt, Artificial Sequence
  Description of Artificial Sequence: Synthetic oligonucleotide
  Sense strand starting at position 2962 of SEQ ID NO: 1399
guccaaaggcaucaggauu

SEQ ID NO: 110035 - RNA, 19 nt, Artificial Sequence
  Description of Artificial Sequence: Synthetic oligonucleotide
  Antisense strand to SEQ ID NO: 110034
aauccugaugccuuuggac

SEQ ID NO: 110036 - RNA, 19 nt, Artificial Sequence
  Description of Artificial Sequence: Synthetic oligonucleotide
  Sense strand starting at position 2835 of SEQ ID NO: 1399
accuuacgucgacauaguu

SEQ ID NO: 110037 - RNA, 19 nt, Artificial Sequence
  Description of Artificial Sequence: Synthetic oligonucleotide
  Antisense strand to SEQ ID NO: 110036
aacuaugucgacguaaggu

SEQ ID NO: 110038 - RNA, 19 nt, Artificial Sequence
  Description of Artificial Sequence: Synthetic oligonucleotide
  Sense strand starting at position 2816 of SEQ ID NO: 1399
caagaauaguuagcuugua

SEQ ID NO: 110039 - RNA, 19 nt, Artificial Sequence
  Description of Artificial Sequence: Synthetic oligonucleotide
  Antisense strand to SEQ ID NO: 110038
uacaagcuaacuauucuug

SEQ ID NO: 110040 - RNA, 19 nt, Artificial Sequence
  Description of Artificial Sequence: Synthetic oligonucleotide
  Sense strand starting at position 2782 of SEQ ID NO: 1399
agugauguccucuagaaua

SEQ ID NO: 110041 - RNA, 19 nt, Artificial Sequence
  Description of Artificial Sequence: Synthetic oligonucleotide
  Antisense strand to SEQ ID NO: 110040
uauucuagaggacaucacu

SEQ ID NO: 110042 - RNA, 19 nt, Artificial Sequence
  Description of Artificial Sequence: Synthetic oligonucleotide
  Sense strand starting at position 2698 of SEQ ID NO: 1399
ggcguuccagauuaagcau

SEQ ID NO: 110043 - RNA, 19 nt, Artificial Sequence
  Description of Artificial Sequence: Synthetic oligonucleotide
  Antisense strand to SEQ ID NO: 110042
augcuuaaucuggaacgcc

SEQ ID NO: 110044 - RNA, 19 nt, Artificial Sequence
  Description of Artificial Sequence: Synthetic oligonucleotide
  Sense strand starting at position 2695 of SEQ ID NO: 1399
cauggcguuccagauuaag

SEQ ID NO: 110045 - RNA, 19 nt, Artificial Sequence
  Description of Artificial Sequence: Synthetic oligonucleotide
  Antisense strand to SEQ ID NO: 110044
cuuaaucuggaacgccaug

SEQ ID NO: 110046 - RNA, 19 nt, Artificial Sequence
  Description of Artificial Sequence: Synthetic oligonucleotide
  Sense strand starting at position 2427 of SEQ ID NO: 1399
cggaaugagaucugagagu

SEQ ID NO: 110047 - RNA, 19 nt, Artificial Sequence
  Description of Artificial Sequence: Synthetic oligonucleotide
  Antisense strand to SEQ ID NO: 110046
acucucagaucucauuccg

SEQ ID NO: 110048 - RNA, 19 nt, Artificial Sequence
  Description of Artificial Sequence: Synthetic oligonucleotide
  Sense strand starting at position 1339 of SEQ ID NO: 1399
aaaccucaguguuugaaug

SEQ ID NO: 110049 - RNA, 19 nt, Artificial Sequence
  Description of Artificial Sequence: Synthetic oligonucleotide
  Antisense strand to SEQ ID NO: 110048
cauucaaacacugagguuu

SEQ ID NO: 110050 - RNA, 19 nt, Artificial Sequence
  Description of Artificial Sequence: Synthetic oligonucleotide
  Sense strand starting at position 1042 of SEQ ID NO: 1399
agccaugaccuguauccuu

SEQ ID NO: 110051 - RNA, 19 nt, Artificial Sequence
  Description of Artificial Sequence: Synthetic oligonucleotide
  Antisense strand to SEQ ID NO: 110050
aaggauacaggucauggcu

SEQ ID NO: 110052 - RNA, 19 nt, Artificial Sequence
  Description of Artificial Sequence: Synthetic oligonucleotide
  Sense strand starting at position 796 of SEQ ID NO: 1399
aguccuguuccuuaagaag

SEQ ID NO: 110053 - RNA, 19 nt, Artificial Sequence
  Description of Artificial Sequence: Synthetic oligonucleotide
  Antisense strand to SEQ ID NO: 110052
cuucuuaaggaacaggacu

SEQ ID NO: 110054 - RNA, 19 nt, Artificial Sequence
  Description of Artificial Sequence: Synthetic oligonucleotide
  Sense strand starting at position 780 of SEQ ID NO: 1399
ccagaaaguguugacaagu

SEQ ID NO: 110055 - RNA, 19 nt, Artificial Sequence
  Description of Artificial Sequence: Synthetic oligonucleotide
  Antisense strand to SEQ ID NO: 110054
acuugucaacacuuucugg

SEQ ID NO: 110056 - RNA, 19 nt, Artificial Sequence
  Description of Artificial Sequence: Synthetic oligonucleotide
  Sense strand starting at position 744 of SEQ ID NO: 1399
gacucuggauuggaauaaa

SEQ ID NO: 110057 - RNA, 19 nt, Artificial Sequence
  Description of Artificial Sequence: Synthetic oligonucleotide
  Antisense strand to SEQ ID NO: 110056
uuuauuccaauccagaguc

SEQ ID NO: 110058 - RNA, 19 nt, Artificial Sequence
  Description of Artificial Sequence: Synthetic oligonucleotide
  Sense strand starting at position 743 of SEQ ID NO: 1399
cgacucuggauuggaauaa

SEQ ID NO: 110059 - RNA, 19 nt, Artificial Sequence
  Description of Artificial Sequence: Synthetic oligonucleotide
  Antisense strand to SEQ ID NO: 110058
uuauuccaauccagagucg

SEQ ID NO: 110060 - RNA, 19 nt, Artificial Sequence
  Description of Artificial Sequence: Synthetic oligonucleotide
  Sense strand starting at position 742 of SEQ ID NO: 1399
acgacucuggauuggaaua

SEQ ID NO: 110061 - RNA, 19 nt, Artificial Sequence
  Description of Artificial Sequence: Synthetic oligonucleotide
  Antisense strand to SEQ ID NO: 110060
uauuccaauccagagucgu

SEQ ID NO: 110062 - RNA, 19 nt, Artificial Sequence
  Description of Artificial Sequence: Synthetic oligonucleotide
  Sense strand starting at position 628 of SEQ ID NO: 1399
acauaaauguguuuccaug

SEQ ID NO: 110063 - RNA, 19 nt, Artificial Sequence
  Description of Artificial Sequence: Synthetic oligonucleotide
  Antisense strand to SEQ ID NO: 110062
cauggaaacacauuuaugu

SEQ ID NO: 110064 - RNA, 19 nt, Artificial Sequence
  Description of Artificial Sequence: Synthetic oligonucleotide
  Sense strand starting at position 526 of SEQ ID NO: 1399
guuucuugaaauugguaug

SEQ ID NO: 110065 - RNA, 19 nt, Artificial Sequence
  Description of Artificial Sequence: Synthetic oligonucleotide
  Antisense strand to SEQ ID NO: 110064
cauaccaauuucaagaaac

SEQ ID NO: 110066 - RNA, 19 nt, Artificial Sequence
  Description of Artificial Sequence: Synthetic oligonucleotide
  Sense strand starting at position 394 of SEQ ID NO: 1399
ggacgauaaugccuaccua

SEQ ID NO: 110067 - RNA, 19 nt, Artificial Sequence
  Description of Artificial Sequence: Synthetic oligonucleotide
  Antisense strand to SEQ ID NO: 110066
uagguaggcauuaucgucc

SEQ ID NO: 110068 - RNA, 19 nt, Artificial Sequence
  Description of Artificial Sequence: Synthetic oligonucleotide
  Sense strand starting at position 112 of SEQ ID NO: 1399
uggucugaauccuuaagca

SEQ ID NO: 110069 - RNA, 19 nt, Artificial Sequence
  Description of Artificial Sequence: Synthetic oligonucleotide
  Antisense strand to SEQ ID NO: 110068
ugcuuaaggauucagacca

SEQ ID NO: 110070 - RNA, 19 nt, Artificial Sequence
  Description of Artificial Sequence: Synthetic oligonucleotide
  Sense strand starting at position 103 of SEQ ID NO: 1399
acaauucuguggucugaau

SEQ ID NO: 110071 - RNA, 19 nt, Artificial Sequence
  Description of Artificial Sequence: Synthetic oligonucleotide
  Antisense strand to SEQ ID NO: 110070
auucagaccacagaauugu

SEQ ID NO: 110072 - RNA, 19 nt, Artificial Sequence
  Description of Artificial Sequence: Synthetic oligonucleotide
  Sense strand starting at position 86 of SEQ ID NO: 1399
ccauauucucuaugguuac

SEQ ID NO: 110073 - RNA, 19 nt, Artificial Sequence
  Description of Artificial Sequence: Synthetic oligonucleotide
  Antisense strand to SEQ ID NO: 110072
guaaccauagagaauaugg

SEQ ID NO: 110074 - RNA, 19 nt, Artificial Sequence
  Description of Artificial Sequence: Synthetic oligonucleotide
  Sense strand starting at position 84 of SEQ ID NO: 1399
acccauauucucuaugguu

SEQ ID NO: 110075 - RNA, 19 nt, Artificial Sequence
  Description of Artificial Sequence: Synthetic oligonucleotide
  Antisense strand to SEQ ID NO: 110074
aaccauagagaauaugggu

SEQ ID NO: 110076 - RNA, 19 nt, Artificial Sequence
  Description of Artificial Sequence: Synthetic oligonucleotide
  Sense strand starting at position 65 of SEQ ID NO: 1399
uugaauaccuagcugaaga

SEQ ID NO: 110077 - RNA, 19 nt, Artificial Sequence
  Description of Artificial Sequence: Synthetic oligonucleotide
  Antisense strand to SEQ ID NO: 110076
ucuucagcuagguauucaa

SEQ ID NO: 110078 - RNA, 19 nt, Artificial Sequence
  Description of Artificial Sequence: Synthetic oligonucleotide
  Sense strand starting at position 10 of SEQ ID NO: 1399
gcagcaauuuacuugguaa

SEQ ID NO: 110079 - RNA, 19 nt, Artificial Sequence
  Description of Artificial Sequence: Synthetic oligonucleotide
  Antisense strand to SEQ ID NO: 110078
uuaccaaguaaauugcugc

SEQ ID NO: 110080 - RNA, 19 nt, Artificial Sequence
  Description of Artificial Sequence: Synthetic oligonucleotide
  Sense strand starting at position 65 of SEQ ID NO: 1400
ucaaauuaguguucucaug

SEQ ID NO: 110081 - RNA, 19 nt, Artificial Sequence
  Description of Artificial Sequence: Synthetic oligonucleotide
  Antisense strand to SEQ ID NO: 110080
caugagaacacuaauuuga

SEQ ID NO: 110082 - RNA, 19 nt, Artificial Sequence
  Description of Artificial Sequence: Synthetic oligonucleotide
  Sense strand starting at position 329 of SEQ ID NO: 1400
cagguugacguaugacuua

SEQ ID NO: 110083 - RNA, 19 nt, Artificial Sequence
  Description of Artificial Sequence: Synthetic oligonucleotide
  Antisense strand to SEQ ID NO: 110082
uaagucauacgucaaccug

SEQ ID NO: 110084 - RNA, 19 nt, Artificial Sequence
  Description of Artificial Sequence: Synthetic oligonucleotide
  Sense strand starting at position 361 of SEQ ID NO: 1400
acccaucagguuugauaca

SEQ ID NO: 110085 - RNA, 19 nt, Artificial Sequence
  Description of Artificial Sequence: Synthetic oligonucleotide
  Antisense strand to SEQ ID NO: 110084
uguaucaaaccugaugggu

SEQ ID NO: 110086 - RNA, 19 nt, Artificial Sequence
  Description of Artificial Sequence: Synthetic oligonucleotide
  Sense strand starting at position 544 of SEQ ID NO: 1400
gcuucaagaguuugaggac

SEQ ID NO: 110087 - RNA, 19 nt, Artificial Sequence
  Description of Artificial Sequence: Synthetic oligonucleotide
  Antisense strand to SEQ ID NO: 110086
guccucaaacucuugaagc

SEQ ID NO: 110088 - RNA, 19 nt, Artificial Sequence
  Description of Artificial Sequence: Synthetic oligonucleotide
  Sense strand starting at position 721 of SEQ ID NO: 1400
uuccauuggccuuggauga

SEQ ID NO: 110089 - RNA, 19 nt, Artificial Sequence
  Description of Artificial Sequence: Synthetic oligonucleotide
  Antisense strand to SEQ ID NO: 110088
ucauccaaggccaauggaa

SEQ ID NO: 110090 - RNA, 19 nt, Artificial Sequence
  Description of Artificial Sequence: Synthetic oligonucleotide
  Sense strand starting at position 774 of SEQ ID NO: 1400
uugguuuccagcugggaac

SEQ ID NO: 110091 - RNA, 19 nt, Artificial Sequence
  Description of Artificial Sequence: Synthetic oligonucleotide
  Antisense strand to SEQ ID NO: 110090
guucccagcuggaaaccaa

SEQ ID NO: 110092 - RNA, 19 nt, Artificial Sequence
  Description of Artificial Sequence: Synthetic oligonucleotide
  Sense strand starting at position 787 of SEQ ID NO: 1400
gggaacgugcacuaaguuu

SEQ ID NO: 110093 - RNA, 19 nt, Artificial Sequence
  Description of Artificial Sequence: Synthetic oligonucleotide
  Antisense strand to SEQ ID NO: 110092
aaacuuagugcacguuccc

SEQ ID NO: 110094 - RNA, 19 nt, Artificial Sequence
  Description of Artificial Sequence: Synthetic oligonucleotide
  Sense strand starting at position 829 of SEQ ID NO: 1400
aaggcuuugcuguaauaca

SEQ ID NO: 110095 - RNA, 19 nt, Artificial Sequence
  Description of Artificial Sequence: Synthetic oligonucleotide
  Antisense strand to SEQ ID NO: 110094
uguauuacagcaaagccuu

SEQ ID NO: 110096 - RNA, 19 nt, Artificial Sequence
  Description of Artificial Sequence: Synthetic oligonucleotide
  Sense strand starting at position 984 of SEQ ID NO: 1400
cgaaacaccuuccuuaaga

SEQ ID NO: 110097 - RNA, 19 nt, Artificial Sequence
  Description of Artificial Sequence: Synthetic oligonucleotide
  Antisense strand to SEQ ID NO: 110096
ucuuaaggaagguguuucg

SEQ ID NO: 110098 - RNA, 19 nt, Artificial Sequence
  Description of Artificial Sequence: Synthetic oligonucleotide
  Sense strand starting at position 1074 of SEQ ID NO: 1400
ggagguuuguaauuagagg

SEQ ID NO: 110099 - RNA, 19 nt, Artificial Sequence
  Description of Artificial Sequence: Synthetic oligonucleotide
  Antisense strand to SEQ ID NO: 110098
ccucuaauuacaaaccucc

SEQ ID NO: 110100 - RNA, 19 nt, Artificial Sequence
  Description of Artificial Sequence: Synthetic oligonucleotide
  Sense strand starting at position 1080 of SEQ ID NO: 1400
uuguaauuagagggagcua

SEQ ID NO: 110101 - RNA, 19 nt, Artificial Sequence
  Description of Artificial Sequence: Synthetic oligonucleotide
  Antisense strand to SEQ ID NO: 110100
uagcucccucuaauuacaa

SEQ ID NO: 110102 - RNA, 19 nt, Artificial Sequence
  Description of Artificial Sequence: Synthetic oligonucleotide
  Sense strand starting at position 1361 of SEQ ID NO: 1400
cgcagacuuccugcguuaa

SEQ ID NO: 110103 - RNA, 19 nt, Artificial Sequence
  Description of Artificial Sequence: Synthetic oligonucleotide
  Antisense strand to SEQ ID NO: 110102
uuaacgcaggaagucugcg

SEQ ID NO: 110104 - RNA, 19 nt, Artificial Sequence
  Description of Artificial Sequence: Synthetic oligonucleotide
  Sense strand starting at position 1617 of SEQ ID NO: 1400
cucacuugcgcguuaucca

SEQ ID NO: 110105 - RNA, 19 nt, Artificial Sequence
  Description of Artificial Sequence: Synthetic oligonucleotide
  Antisense strand to SEQ ID NO: 110104
uggauaacgcgcaagugag

SEQ ID NO: 110106 - RNA, 19 nt, Artificial Sequence
  Description of Artificial Sequence: Synthetic oligonucleotide
  Sense strand starting at position 1624 of SEQ ID NO: 1400
gcgcguuauccacuucuag

SEQ ID NO: 110107 - RNA, 19 nt, Artificial Sequence
  Description of Artificial Sequence: Synthetic oligonucleotide
  Antisense strand to SEQ ID NO: 110106
cuagaaguggauaacgcgc

SEQ ID NO: 110108 - RNA, 19 nt, Artificial Sequence
  Description of Artificial Sequence: Synthetic oligonucleotide
  Sense strand starting at position 2480 of SEQ ID NO: 1400
uccuuaucccaggauaggu

SEQ ID NO: 110109 - RNA, 19 nt, Artificial Sequence
  Description of Artificial Sequence: Synthetic oligonucleotide
  Antisense strand to SEQ ID NO: 110108
accuauccugggauaagga

SEQ ID NO: 110110 - RNA, 19 nt, Artificial Sequence
  Description of Artificial Sequence: Synthetic oligonucleotide
  Sense strand starting at position 2704 of SEQ ID NO: 1400
cugaaacuguaggcugauu

SEQ ID NO: 110111 - RNA, 19 nt, Artificial Sequence
  Description of Artificial Sequence: Synthetic oligonucleotide
  Antisense strand to SEQ ID NO: 110110
aaucagccuacaguuucag

SEQ ID NO: 110112 - RNA, 19 nt, Artificial Sequence
  Description of Artificial Sequence: Synthetic oligonucleotide
  Sense strand starting at position 2923 of SEQ ID NO: 1400
aggagagcuugccugacuu

SEQ ID NO: 110113 - RNA, 19 nt, Artificial Sequence
  Description of Artificial Sequence: Synthetic oligonucleotide
  Antisense strand to SEQ ID NO: 110112
aagucaggcaagcucuccu

SEQ ID NO: 110114 - RNA, 19 nt, Artificial Sequence
  Description of Artificial Sequence: Synthetic oligonucleotide
  Sense strand starting at position 3009 of SEQ ID NO: 1400
agucaaauuugucaccaaa

SEQ ID NO: 110115 - RNA, 19 nt, Artificial Sequence
  Description of Artificial Sequence: Synthetic oligonucleotide
  Antisense strand to SEQ ID NO: 110114
uuuggugacaaauuugacu

SEQ ID NO: 110116 - RNA, 19 nt, Artificial Sequence
  Description of Artificial Sequence: Synthetic oligonucleotide
  Sense strand starting at position 3120 of SEQ ID NO: 1400
cgcuucuuccuauagcaaa

SEQ ID NO: 110117 - RNA, 19 nt, Artificial Sequence
  Description of Artificial Sequence: Synthetic oligonucleotide
  Antisense strand to SEQ ID NO: 110116
uuugcuauaggaagaagcg

SEQ ID NO: 110118 - RNA, 19 nt, Artificial Sequence
  Description of Artificial Sequence: Synthetic oligonucleotide
  Sense strand starting at position 3217 of SEQ ID NO: 1400
ggcacagaaucucccuauu

SEQ ID NO: 110119 - RNA, 19 nt, Artificial Sequence
  Description of Artificial Sequence: Synthetic oligonucleotide
  Antisense strand to SEQ ID NO: 110118
aauagggagauucugugcc

SEQ ID NO: 110120 - RNA, 19 nt, Artificial Sequence
  Description of Artificial Sequence: Synthetic oligonucleotide
  Sense strand starting at position 3292 of SEQ ID NO: 1400
uuuagugaagcagaugauu

SEQ ID NO: 110121 - RNA, 19 nt, Artificial Sequence
  Description of Artificial Sequence: Synthetic oligonucleotide
  Antisense strand to SEQ ID NO: 110120
aaucaucugcuucacuaaa

SEQ ID NO: 110122 - RNA, 19 nt, Artificial Sequence
  Description of Artificial Sequence: Synthetic oligonucleotide
  Sense strand starting at position 3304 of SEQ ID NO: 1400
gaugauuccuguccuaagu

SEQ ID NO: 110123 - RNA, 19 nt, Artificial Sequence
  Description of Artificial Sequence: Synthetic oligonucleotide
  Antisense strand to SEQ ID NO: 110122
acuuaggacaggaaucauc

SEQ ID NO: 110124 - RNA, 19 nt, Artificial Sequence
  Description of Artificial Sequence: Synthetic oligonucleotide
  Sense strand starting at position 3346 of SEQ ID NO: 1400
auggauggcacuugagcaa

SEQ ID NO: 110125 - RNA, 19 nt, Artificial Sequence
  Description of Artificial Sequence: Synthetic oligonucleotide
  Antisense strand to SEQ ID NO: 110124
uugcucaagugccauccau

SEQ ID NO: 110126 - RNA, 19 nt, Artificial Sequence
  Description of Artificial Sequence: Synthetic oligonucleotide
  Sense strand starting at position 3403 of SEQ ID NO: 1400
cagauuagucuugaggucu

SEQ ID NO: 110127 - RNA, 19 nt, Artificial Sequence
  Description of Artificial Sequence: Synthetic oligonucleotide
  Antisense strand to SEQ ID NO: 110126
agaccucaagacuaaucug

SEQ ID NO: 110128 - RNA, 19 nt, Artificial Sequence
  Description of Artificial Sequence: Synthetic oligonucleotide
  Sense strand starting at position 3416 of SEQ ID NO: 1400
aggucuuacuucuuucuau

SEQ ID NO: 110129 - RNA, 19 nt, Artificial Sequence
  Description of Artificial Sequence: Synthetic oligonucleotide
  Antisense strand to SEQ ID NO: 110128
auagaaagaaguaagaccu

SEQ ID NO: 110130 - RNA, 19 nt, Artificial Sequence
  Description of Artificial Sequence: Synthetic oligonucleotide
  Sense strand starting at position 3417 of SEQ ID NO: 1400
ggucuuacuucuuucuauu

SEQ ID NO: 110131 - RNA, 19 nt, Artificial Sequence
  Description of Artificial Sequence: Synthetic oligonucleotide
  Antisense strand to SEQ ID NO: 110130
aauagaaagaaguaagacc

SEQ ID NO: 110132 - RNA, 19 nt, Artificial Sequence
  Description of Artificial Sequence: Synthetic oligonucleotide
  Sense strand starting at position 3517 of SEQ ID NO: 1400
ggaagucagccuuagcuuu

SEQ ID NO: 110133 - RNA, 19 nt, Artificial Sequence
  Description of Artificial Sequence: Synthetic oligonucleotide
  Antisense strand to SEQ ID NO: 110132
aaagcuaaggcugacuucc

SEQ ID NO: 110134 - RNA, 19 nt, Artificial Sequence
  Description of Artificial Sequence: Synthetic oligonucleotide
  Sense strand starting at position 3673 of SEQ ID NO: 1400
uaucauagucgaggugauc

SEQ ID NO: 110135 - RNA, 19 nt, Artificial Sequence
  Description of Artificial Sequence: Synthetic oligonucleotide
  Antisense strand to SEQ ID NO: 110134
gaucaccucgacuaugaua

SEQ ID NO: 110136 - RNA, 19 nt, Artificial Sequence
  Description of Artificial Sequence: Synthetic oligonucleotide
  Sense strand starting at position 3686 of SEQ ID NO: 1400
gugauccauuaggaaauuu

SEQ ID NO: 110137 - RNA, 19 nt, Artificial Sequence
  Description of Artificial Sequence: Synthetic oligonucleotide
  Antisense strand to SEQ ID NO: 110136
aaauuuccuaauggaucac

SEQ ID NO: 110138 - RNA, 19 nt, Artificial Sequence
  Description of Artificial Sequence: Synthetic oligonucleotide
  Sense strand starting at position 3761 of SEQ ID NO: 1400
ucaugucauguauaaacuu

SEQ ID NO: 110139 - RNA, 19 nt, Artificial Sequence
  Description of Artificial Sequence: Synthetic oligonucleotide
  Antisense strand to SEQ ID NO: 110138
aaguuuauacaugacauga

SEQ ID NO: 110140 - RNA, 19 nt, Artificial Sequence
  Description of Artificial Sequence: Synthetic oligonucleotide
  Sense strand starting at position 3771 of SEQ ID NO: 1400
uauaaacuuguuuggaaag

SEQ ID NO: 110141 - RNA, 19 nt, Artificial Sequence
  Description of Artificial Sequence: Synthetic oligonucleotide
  Antisense strand to SEQ ID NO: 110140
cuuuccaaacaaguuuaua

SEQ ID NO: 110142 - RNA, 19 nt, Artificial Sequence
  Description of Artificial Sequence: Synthetic oligonucleotide
  Sense strand starting at position 3809 of SEQ ID NO: 1400
auaauagcugccugagaau

SEQ ID NO: 110143 - RNA, 19 nt, Artificial Sequence
  Description of Artificial Sequence: Synthetic oligonucleotide
  Antisense strand to SEQ ID NO: 110142
auucucaggcagcuauuau

SEQ ID NO: 110144 - RNA, 19 nt, Artificial Sequence
  Description of Artificial Sequence: Synthetic oligonucleotide
  Sense strand starting at position 3824 of SEQ ID NO: 1400
gaauuuggguaugaaauua

SEQ ID NO: 110145 - RNA, 19 nt, Artificial Sequence
  Description of Artificial Sequence: Synthetic oligonucleotide
  Antisense strand to SEQ ID NO: 110144
uaauuucauacccaaauuc

SEQ ID NO: 110146 - RNA, 19 nt, Artificial Sequence
  Description of Artificial Sequence: Synthetic oligonucleotide
  Sense strand starting at position 3880 of SEQ ID NO: 1400
agagcauuuguauguguuc

SEQ ID NO: 110147 - RNA, 19 nt, Artificial Sequence
  Description of Artificial Sequence: Synthetic oligonucleotide
  Antisense strand to SEQ ID NO: 110146
gaacacauacaaaugcucu

SEQ ID NO: 110148 - RNA, 19 nt, Artificial Sequence
  Description of Artificial Sequence: Synthetic oligonucleotide
  Sense strand starting at position 3881 of SEQ ID NO: 1400
gagcauuuguauguguucu

SEQ ID NO: 110149 - RNA, 19 nt, Artificial Sequence
  Description of Artificial Sequence: Synthetic oligonucleotide
  Antisense strand to SEQ ID NO: 110148
agaacacauacaaaugcuc

SEQ ID NO: 110150 - RNA, 19 nt, Artificial Sequence
  Description of Artificial Sequence: Synthetic oligonucleotide
  Sense strand starting at position 3882 of SEQ ID NO: 1400
agcauuuguauguguucuu

SEQ ID NO: 110151 - RNA, 19 nt, Artificial Sequence
  Description of Artificial Sequence: Synthetic oligonucleotide
  Antisense strand to SEQ ID NO: 110150
aagaacacauacaaaugcu

SEQ ID NO: 110152 - RNA, 19 nt, Artificial Sequence
  Description of Artificial Sequence: Synthetic oligonucleotide
  Sense strand starting at position 3889 of SEQ ID NO: 1400
guauguguucuuguggcau

SEQ ID NO: 110153 - RNA, 19 nt, Artificial Sequence
  Description of Artificial Sequence: Synthetic oligonucleotide
  Antisense strand to SEQ ID NO: 110152
augccacaagaacacauac

SEQ ID NO: 110154 - RNA, 19 nt, Artificial Sequence
  Description of Artificial Sequence: Synthetic oligonucleotide
  Sense strand starting at position 3968 of SEQ ID NO: 1400
gggaaacuuuaagugaugu

SEQ ID NO: 110155 - RNA, 19 nt, Artificial Sequence
  Description of Artificial Sequence: Synthetic oligonucleotide
  Antisense strand to SEQ ID NO: 110154
acaucacuuaaaguuuccc

SEQ ID NO: 110156 - RNA, 19 nt, Artificial Sequence
  Description of Artificial Sequence: Synthetic oligonucleotide
  Sense strand starting at position 3969 of SEQ ID NO: 1400
ggaaacuuuaagugaugua

SEQ ID NO: 110157 - RNA, 19 nt, Artificial Sequence
  Description of Artificial Sequence: Synthetic oligonucleotide
  Antisense strand to SEQ ID NO: 110156
uacaucacuuaaaguuucc

SEQ ID NO: 110158 - RNA, 19 nt, Artificial Sequence
  Description of Artificial Sequence: Synthetic oligonucleotide
  Sense strand starting at position 3983 of SEQ ID NO: 1400
auguaagcagauuauaagu

SEQ ID NO: 110159 - RNA, 19 nt, Artificial Sequence
  Description of Artificial Sequence: Synthetic oligonucleotide
  Antisense strand to SEQ ID NO: 110158
acuuauaaucugcuuacau

SEQ ID NO: 110160 - RNA, 19 nt, Artificial Sequence
  Description of Artificial Sequence: Synthetic oligonucleotide
  Sense strand starting at position 3925 of SEQ ID NO: 1401
gucauuggguaacagacau

SEQ ID NO: 110161 - RNA, 19 nt, Artificial Sequence
  Description of Artificial Sequence: Synthetic oligonucleotide
  Antisense strand to SEQ ID NO: 110160
augucuguuacccaaugac

SEQ ID NO: 110162 - RNA, 19 nt, Artificial Sequence
  Description of Artificial Sequence: Synthetic oligonucleotide
  Sense strand starting at position 3919 of SEQ ID NO: 1401
accagagucauuggguaac

SEQ ID NO: 110163 - RNA, 19 nt, Artificial Sequence
  Description of Artificial Sequence: Synthetic oligonucleotide
  Antisense strand to SEQ ID NO: 110162
guuacccaaugacucuggu

SEQ ID NO: 110164 - RNA, 19 nt, Artificial Sequence
  Description of Artificial Sequence: Synthetic oligonucleotide
  Sense strand starting at position 3917 of SEQ ID NO: 1401
aaaccagagucauugggua

SEQ ID NO: 110165 - RNA, 19 nt, Artificial Sequence
  Description of Artificial Sequence: Synthetic oligonucleotide
  Antisense strand to SEQ ID NO: 110164
uacccaaugacucugguuu

SEQ ID NO: 110166 - RNA, 19 nt, Artificial Sequence
  Description of Artificial Sequence: Synthetic oligonucleotide
  Sense strand starting at position 3670 of SEQ ID NO: 1401
ugccauggugcugauuaaa

SEQ ID NO: 110167 - RNA, 19 nt, Artificial Sequence
  Description of Artificial Sequence: Synthetic oligonucleotide
  Antisense strand to SEQ ID NO: 110166
uuuaaucagcaccauggca

SEQ ID NO: 110168 - RNA, 19 nt, Artificial Sequence
  Description of Artificial Sequence: Synthetic oligonucleotide
  Sense strand starting at position 3345 of SEQ ID NO: 1401
ggagauaauauguguagug

SEQ ID NO: 110169 - RNA, 19 nt, Artificial Sequence
  Description of Artificial Sequence: Synthetic oligonucleotide
  Antisense strand to SEQ ID NO: 110168
cacuacacauauuaucucc

SEQ ID NO: 110170 - RNA, 19 nt, Artificial Sequence
  Description of Artificial Sequence: Synthetic oligonucleotide
  Sense strand starting at position 3323 of SEQ ID NO: 1401
uuagguugccauggaaauu

SEQ ID NO: 110171 - RNA, 19 nt, Artificial Sequence
  Description of Artificial Sequence: Synthetic oligonucleotide
  Antisense strand to SEQ ID NO: 110170
aauuuccauggcaaccuaa

SEQ ID NO: 110172 - RNA, 19 nt, Artificial Sequence
  Description of Artificial Sequence: Synthetic oligonucleotide
  Sense strand starting at position 3211 of SEQ ID NO: 1401
gguagugugguacagugaa

SEQ ID NO: 110173 - RNA, 19 nt, Artificial Sequence
  Description of Artificial Sequence: Synthetic oligonucleotide
  Antisense strand to SEQ ID NO: 110172
uucacuguaccacacuacc

SEQ ID NO: 110174 - RNA, 19 nt, Artificial Sequence
  Description of Artificial Sequence: Synthetic oligonucleotide
  Sense strand starting at position 3161 of SEQ ID NO: 1401
cugaaccuuugagaguauu

SEQ ID NO: 110175 - RNA, 19 nt, Artificial Sequence
  Description of Artificial Sequence: Synthetic oligonucleotide
  Antisense strand to SEQ ID NO: 110174
aauacucucaaagguucag

SEQ ID NO: 110176 - RNA, 19 nt, Artificial Sequence
  Description of Artificial Sequence: Synthetic oligonucleotide
  Sense strand starting at position 3159 of SEQ ID NO: 1401
cucugaaccuuugagagua

SEQ ID NO: 110177 - RNA, 19 nt, Artificial Sequence
  Description of Artificial Sequence: Synthetic oligonucleotide
  Antisense strand to SEQ ID NO: 110176
uacucucaaagguucagag

SEQ ID NO: 110178 - RNA, 19 nt, Artificial Sequence
  Description of Artificial Sequence: Synthetic oligonucleotide
  Sense strand starting at position 3150 of SEQ ID NO: 1401
ggaugucuucucugaaccu

SEQ ID NO: 110179 - RNA, 19 nt, Artificial Sequence
  Description of Artificial Sequence: Synthetic oligonucleotide
  Antisense strand to SEQ ID NO: 110178
agguucagagaagacaucc

SEQ ID NO: 110180 - RNA, 19 nt, Artificial Sequence
  Description of Artificial Sequence: Synthetic oligonucleotide
  Sense strand starting at position 3148 of SEQ ID NO: 1401
uuggaugucuucucugaac

SEQ ID NO: 110181 - RNA, 19 nt, Artificial Sequence
  Description of Artificial Sequence: Synthetic oligonucleotide
  Antisense strand to SEQ ID NO: 110180
guucagagaagacauccaa

SEQ ID NO: 110182 - RNA, 19 nt, Artificial Sequence
  Description of Artificial Sequence: Synthetic oligonucleotide
  Sense strand starting at position 3112 of SEQ ID NO: 1401
gguuucagugucugaaguu

SEQ ID NO: 110183 - RNA, 19 nt, Artificial Sequence
  Description of Artificial Sequence: Synthetic oligonucleotide
  Antisense strand to SEQ ID NO: 110182
aacuucagacacugaaacc

SEQ ID NO: 110184 - RNA, 19 nt, Artificial Sequence
  Description of Artificial Sequence: Synthetic oligonucleotide
  Sense strand starting at position 3111 of SEQ ID NO: 1401
ggguuucagugucugaagu

SEQ ID NO: 110185 - RNA, 19 nt, Artificial Sequence
  Description of Artificial Sequence: Synthetic oligonucleotide
  Antisense strand to SEQ ID NO: 110184
acuucagacacugaaaccc

SEQ ID NO: 110186 - RNA, 19 nt, Artificial Sequence
  Description of Artificial Sequence: Synthetic oligonucleotide
  Sense strand starting at position 3006 of SEQ ID NO: 1401
ugugaauguaagugugagu

SEQ ID NO: 110187 - RNA, 19 nt, Artificial Sequence
  Description of Artificial Sequence: Synthetic oligonucleotide
  Antisense strand to SEQ ID NO: 110186
acucacacuuacauucaca

SEQ ID NO: 110188 - RNA, 19 nt, Artificial Sequence
  Description of Artificial Sequence: Synthetic oligonucleotide
  Sense strand starting at position 2934 of SEQ ID NO: 1401
gcaaaugggcacugauuaa

SEQ ID NO: 110189 - RNA, 19 nt, Artificial Sequence
  Description of Artificial Sequence: Synthetic oligonucleotide
  Antisense strand to SEQ ID NO: 110188
uuaaucagugcccauuugc

SEQ ID NO: 110190 - RNA, 19 nt, Artificial Sequence
  Description of Artificial Sequence: Synthetic oligonucleotide
  Sense strand starting at position 2892 of SEQ ID NO: 1401
ggcaucaaaucagcaauaa

SEQ ID NO: 110191 - RNA, 19 nt, Artificial Sequence
  Description of Artificial Sequence: Synthetic oligonucleotide
  Antisense strand to SEQ ID NO: 110190
uuauugcugauuugaugcc

SEQ ID NO: 110192 - RNA, 19 nt, Artificial Sequence
  Description of Artificial Sequence: Synthetic oligonucleotide
  Sense strand starting at position 2756 of SEQ ID NO: 1401
gagggcucuuaggaagaaa

SEQ ID NO: 110193 - RNA, 19 nt, Artificial Sequence
  Description of Artificial Sequence: Synthetic oligonucleotide
  Antisense strand to SEQ ID NO: 110192
uuucuuccuaagagcccuc

SEQ ID NO: 110194 - RNA, 19 nt, Artificial Sequence
  Description of Artificial Sequence: Synthetic oligonucleotide
  Sense strand starting at position 2681 of SEQ ID NO: 1401
ggaucaaauuugggacaca

SEQ ID NO: 110195 - RNA, 19 nt, Artificial Sequence
  Description of Artificial Sequence: Synthetic oligonucleotide
  Antisense strand to SEQ ID NO: 110194
ugugucccaaauuugaucc

SEQ ID NO: 110196 - RNA, 19 nt, Artificial Sequence
  Description of Artificial Sequence: Synthetic oligonucleotide
  Sense strand starting at position 2340 of SEQ ID NO: 1401
cccagcaagcuaugguuaa

SEQ ID NO: 110197 - RNA, 19 nt, Artificial Sequence
  Description of Artificial Sequence: Synthetic oligonucleotide
  Antisense strand to SEQ ID NO: 110196
uuaaccauagcuugcuggg

SEQ ID NO: 110198 - RNA, 19 nt, Artificial Sequence
  Description of Artificial Sequence: Synthetic oligonucleotide
  Sense strand starting at position 2207 of SEQ ID NO: 1401
aucuguucuccaugcauau

SEQ ID NO: 110199 - RNA, 19 nt, Artificial Sequence
  Description of Artificial Sequence: Synthetic oligonucleotide
  Antisense strand to SEQ ID NO: 110198
auaugcauggagaacagau

SEQ ID NO: 110200 - RNA, 19 nt, Artificial Sequence
  Description of Artificial Sequence: Synthetic oligonucleotide
  Sense strand starting at position 2205 of SEQ ID NO: 1401
acaucuguucuccaugcau

SEQ ID NO: 110201 - RNA, 19 nt, Artificial Sequence
  Description of Artificial Sequence: Synthetic oligonucleotide
  Antisense strand to SEQ ID NO: 110200
augcauggagaacagaugu

SEQ ID NO: 110202 - RNA, 19 nt, Artificial Sequence
  Description of Artificial Sequence: Synthetic oligonucleotide
  Sense strand starting at position 2201 of SEQ ID NO: 1401
agggacaucuguucuccau

SEQ ID NO: 110203 - RNA, 19 nt, Artificial Sequence
  Description of Artificial Sequence: Synthetic oligonucleotide
  Antisense strand to SEQ ID NO: 110202
auggagaacagaugucccu

SEQ ID NO: 110204 - RNA, 19 nt, Artificial Sequence
  Description of Artificial Sequence: Synthetic oligonucleotide
  Sense strand starting at position 2118 of SEQ ID NO: 1401
cagccauuggcagagggau

SEQ ID NO: 110205 - RNA, 19 nt, Artificial Sequence
  Description of Artificial Sequence: Synthetic oligonucleotide
  Antisense strand to SEQ ID NO: 110204
aucccucugccaauggcug

SEQ ID NO: 110206 - RNA, 19 nt, Artificial Sequence
  Description of Artificial Sequence: Synthetic oligonucleotide
  Sense strand starting at position 2011 of SEQ ID NO: 1401
ggcccagcccuauguauau

SEQ ID NO: 110207 - RNA, 19 nt, Artificial Sequence
  Description of Artificial Sequence: Synthetic oligonucleotide
  Antisense strand to SEQ ID NO: 110206
auauacauagggcugggcc

SEQ ID NO: 110208 - RNA, 19 nt, Artificial Sequence
  Description of Artificial Sequence: Synthetic oligonucleotide
  Sense strand starting at position 1672 of SEQ ID NO: 1401
gggcuugagccagagaaug

SEQ ID NO: 110209 - RNA, 19 nt, Artificial Sequence
  Description of Artificial Sequence: Synthetic oligonucleotide
  Antisense strand to SEQ ID NO: 110208
cauucucuggcucaagccc

SEQ ID NO: 110210 - RNA, 19 nt, Artificial Sequence
  Description of Artificial Sequence: Synthetic oligonucleotide
  Sense strand starting at position 1075 of SEQ ID NO: 1401
gugguuagugcugaaauug

SEQ ID NO: 110211 - RNA, 19 nt, Artificial Sequence
  Description of Artificial Sequence: Synthetic oligonucleotide
  Antisense strand to SEQ ID NO: 110210
caauuucagcacuaaccac

SEQ ID NO: 110212 - RNA, 19 nt, Artificial Sequence
  Description of Artificial Sequence: Synthetic oligonucleotide
  Sense strand starting at position 998 of SEQ ID NO: 1401
cuaugaagcucuggaggga

SEQ ID NO: 110213 - RNA, 19 nt, Artificial Sequence
  Description of Artificial Sequence: Synthetic oligonucleotide
  Antisense strand to SEQ ID NO: 110212
ucccuccagagcuucauag

SEQ ID NO: 110214 - RNA, 19 nt, Artificial Sequence
  Description of Artificial Sequence: Synthetic oligonucleotide
  Sense strand starting at position 926 of SEQ ID NO: 1401
ggguuaggauccucccaag

SEQ ID NO: 110215 - RNA, 19 nt, Artificial Sequence
  Description of Artificial Sequence: Synthetic oligonucleotide
  Antisense strand to SEQ ID NO: 110214
cuugggaggauccuaaccc

SEQ ID NO: 110216 - RNA, 19 nt, Artificial Sequence
  Description of Artificial Sequence: Synthetic oligonucleotide
  Sense strand starting at position 896 of SEQ ID NO: 1401
ggcuuuccugucugauaga

SEQ ID NO: 110217 - RNA, 19 nt, Artificial Sequence
  Description of Artificial Sequence: Synthetic oligonucleotide
  Antisense strand to SEQ ID NO: 110216
ucuaucagacaggaaagcc

SEQ ID NO: 110218 - RNA, 19 nt, Artificial Sequence
  Description of Artificial Sequence: Synthetic oligonucleotide
  Sense strand starting at position 895 of SEQ ID NO: 1401
uggcuuuccugucugauag

SEQ ID NO: 110219 - RNA, 19 nt, Artificial Sequence
  Description of Artificial Sequence: Synthetic oligonucleotide
  Antisense strand to SEQ ID NO: 110218
cuaucagacaggaaagcca

SEQ ID NO: 110220 - RNA, 19 nt, Artificial Sequence
  Description of Artificial Sequence: Synthetic oligonucleotide
  Sense strand starting at position 694 of SEQ ID NO: 1401
agguuugcuuguccuagga

SEQ ID NO: 110221 - RNA, 19 nt, Artificial Sequence
  Description of Artificial Sequence: Synthetic oligonucleotide
  Antisense strand to SEQ ID NO: 110220
uccuaggacaagcaaaccu

SEQ ID NO: 110222 - RNA, 19 nt, Artificial Sequence
  Description of Artificial Sequence: Synthetic oligonucleotide
  Sense strand starting at position 680 of SEQ ID NO: 1401
augggacucagcuaagguu

SEQ ID NO: 110223 - RNA, 19 nt, Artificial Sequence
  Description of Artificial Sequence: Synthetic oligonucleotide
  Antisense strand to SEQ ID NO: 110222
aaccuuagcugagucccau

SEQ ID NO: 110224 - RNA, 19 nt, Artificial Sequence
  Description of Artificial Sequence: Synthetic oligonucleotide
  Sense strand starting at position 667 of SEQ ID NO: 1401
uggagcuacccuuauggga

SEQ ID NO: 110225 - RNA, 19 nt, Artificial Sequence
  Description of Artificial Sequence: Synthetic oligonucleotide
  Antisense strand to SEQ ID NO: 110224
ucccauaaggguagcucca

SEQ ID NO: 110226 - RNA, 19 nt, Artificial Sequence
  Description of Artificial Sequence: Synthetic oligonucleotide
  Sense strand starting at position 505 of SEQ ID NO: 1401
accucugucuucgaaauuu

SEQ ID NO: 110227 - RNA, 19 nt, Artificial Sequence
  Description of Artificial Sequence: Synthetic oligonucleotide
  Antisense strand to SEQ ID NO: 110226
aaauuucgaagacagaggu

SEQ ID NO: 110228 - RNA, 19 nt, Artificial Sequence
  Description of Artificial Sequence: Synthetic oligonucleotide
  Sense strand starting at position 503 of SEQ ID NO: 1401
ccaccucugucuucgaaau

SEQ ID NO: 110229 - RNA, 19 nt, Artificial Sequence
  Description of Artificial Sequence: Synthetic oligonucleotide
  Antisense strand to SEQ ID NO: 110228
auuucgaagacagaggugg

SEQ ID NO: 110230 - RNA, 19 nt, Artificial Sequence
  Description of Artificial Sequence: Synthetic oligonucleotide
  Sense strand starting at position 425 of SEQ ID NO: 1401
augagauccuguccacuaa

SEQ ID NO: 110231 - RNA, 19 nt, Artificial Sequence
  Description of Artificial Sequence: Synthetic oligonucleotide
  Antisense strand to SEQ ID NO: 110230
uuaguggacaggaucucau

SEQ ID NO: 110232 - RNA, 19 nt, Artificial Sequence
  Description of Artificial Sequence: Synthetic oligonucleotide
  Sense strand starting at position 408 of SEQ ID NO: 1401
gcagaaccauuguagauau

SEQ ID NO: 110233 - RNA, 19 nt, Artificial Sequence
  Description of Artificial Sequence: Synthetic oligonucleotide
  Antisense strand to SEQ ID NO: 110232
auaucuacaaugguucugc

SEQ ID NO: 110234 - RNA, 19 nt, Artificial Sequence
  Description of Artificial Sequence: Synthetic oligonucleotide
  Sense strand starting at position 327 of SEQ ID NO: 1401
agaauagacuaggacauau

SEQ ID NO: 110235 - RNA, 19 nt, Artificial Sequence
  Description of Artificial Sequence: Synthetic oligonucleotide
  Antisense strand to SEQ ID NO: 110234
auauguccuagucuauucu

SEQ ID NO: 110236 - RNA, 19 nt, Artificial Sequence
  Description of Artificial Sequence: Synthetic oligonucleotide
  Sense strand starting at position 312 of SEQ ID NO: 1401
cagauugcccauuguagaa

SEQ ID NO: 110237 - RNA, 19 nt, Artificial Sequence
  Description of Artificial Sequence: Synthetic oligonucleotide
  Antisense strand to SEQ ID NO: 110236
uucuacaaugggcaaucug

SEQ ID NO: 110238 - RNA, 19 nt, Artificial Sequence
  Description of Artificial Sequence: Synthetic oligonucleotide
  Sense strand starting at position 183 of SEQ ID NO: 1401
agaaguuagcuaugacucu

SEQ ID NO: 110239 - RNA, 19 nt, Artificial Sequence
  Description of Artificial Sequence: Synthetic oligonucleotide
  Antisense strand to SEQ ID NO: 110238
agagucauagcuaacuucu

SEQ ID NO: 110240 - RNA, 19 nt, Artificial Sequence
  Description of Artificial Sequence: Synthetic oligonucleotide
  Sense strand starting at position 2 of SEQ ID NO: 1403
gugccucuuccggccaaau

SEQ ID NO: 110241 - RNA, 19 nt, Artificial Sequence
  Description of Artificial Sequence: Synthetic oligonucleotide
  Antisense strand to SEQ ID NO: 110240
auuuggccggaagaggcac

SEQ ID NO: 110242 - RNA, 19 nt, Artificial Sequence
  Description of Artificial Sequence: Synthetic oligonucleotide
  Sense strand starting at position 629 of SEQ ID NO: 1403
gcaucucugccggcaaagu

SEQ ID NO: 110243 - RNA, 19 nt, Artificial Sequence
  Description of Artificial Sequence: Synthetic oligonucleotide
  Antisense strand to SEQ ID NO: 110242
acuuugccggcagagaugc

SEQ ID NO: 110244 - RNA, 19 nt, Artificial Sequence
  Description of Artificial Sequence: Synthetic oligonucleotide
  Sense strand starting at position 1001 of SEQ ID NO: 1403
gagaaauccgcgucggcga

SEQ ID NO: 110245 - RNA, 19 nt, Artificial Sequence
  Description of Artificial Sequence: Synthetic oligonucleotide
  Antisense strand to SEQ ID NO: 110244
ucgccgacgcggauuucuc

SEQ ID NO: 110246 - RNA, 19 nt, Artificial Sequence
  Description of Artificial Sequence: Synthetic oligonucleotide
  Sense strand starting at position 1020 of SEQ ID NO: 1403
cguauaggagcguuugcuu

SEQ ID NO: 110247 - RNA, 19 nt, Artificial Sequence
  Description of Artificial Sequence: Synthetic oligonucleotide
  Antisense strand to SEQ ID NO: 110246
aagcaaacgcuccuauacg

SEQ ID NO: 110248 - RNA, 19 nt, Artificial Sequence
  Description of Artificial Sequence: Synthetic oligonucleotide
  Sense strand starting at position 1115 of SEQ ID NO: 1403
agcuuuaauuucccugcga

SEQ ID NO: 110249 - RNA, 19 nt, Artificial Sequence
  Description of Artificial Sequence: Synthetic oligonucleotide
  Antisense strand to SEQ ID NO: 110248
ucgcagggaaauuaaagcu

SEQ ID NO: 110250 - RNA, 19 nt, Artificial Sequence
  Description of Artificial Sequence: Synthetic oligonucleotide
  Sense strand starting at position 1116 of SEQ ID NO: 1403
gcuuuaauuucccugcgag

SEQ ID NO: 110251 - RNA, 19 nt, Artificial Sequence
  Description of Artificial Sequence: Synthetic oligonucleotide
  Antisense strand to SEQ ID NO: 110250
cucgcagggaaauuaaagc

SEQ ID NO: 110252 - RNA, 19 nt, Artificial Sequence
  Description of Artificial Sequence: Synthetic oligonucleotide
  Sense strand starting at position 1117 of SEQ ID NO: 1403
cuuuaauuucccugcgagg

SEQ ID NO: 110253 - RNA, 19 nt, Artificial Sequence
  Description of Artificial Sequence: Synthetic oligonucleotide
  Antisense strand to SEQ ID NO: 110252
ccucgcagggaaauuaaag

SEQ ID NO: 110254 - RNA, 19 nt, Artificial Sequence
  Description of Artificial Sequence: Synthetic oligonucleotide
  Sense strand starting at position 1209 of SEQ ID NO: 1403
ucggguacguuuaugagua

SEQ ID NO: 110255 - RNA, 19 nt, Artificial Sequence
  Description of Artificial Sequence: Synthetic oligonucleotide
  Antisense strand to SEQ ID NO: 110254
uacucauaaacguacccga

SEQ ID NO: 110256 - RNA, 19 nt, Artificial Sequence
  Description of Artificial Sequence: Synthetic oligonucleotide
  Sense strand starting at position 1214 of SEQ ID NO: 1403
uacguuuaugaguagaaca

SEQ ID NO: 110257 - RNA, 19 nt, Artificial Sequence
  Description of Artificial Sequence: Synthetic oligonucleotide
  Antisense strand to SEQ ID NO: 110256
uguucuacucauaaacgua

SEQ ID NO: 110258 - RNA, 19 nt, Artificial Sequence
  Description of Artificial Sequence: Synthetic oligonucleotide
  Sense strand starting at position 1216 of SEQ ID NO: 1403
cguuuaugaguagaacaac

SEQ ID NO: 110259 - RNA, 19 nt, Artificial Sequence
  Description of Artificial Sequence: Synthetic oligonucleotide
  Antisense strand to SEQ ID NO: 110258
guuguucuacucauaaacg

SEQ ID NO: 110260 - RNA, 19 nt, Artificial Sequence
  Description of Artificial Sequence: Synthetic oligonucleotide
  Sense strand starting at position 1491 of SEQ ID NO: 1403
aaaggagucuuaccuugca

SEQ ID NO: 110261 - RNA, 19 nt, Artificial Sequence
  Description of Artificial Sequence: Synthetic oligonucleotide
  Antisense strand to SEQ ID NO: 110260
ugcaagguaagacuccuuu

SEQ ID NO: 110262 - RNA, 19 nt, Artificial Sequence
  Description of Artificial Sequence: Synthetic oligonucleotide
  Sense strand starting at position 1682 of SEQ ID NO: 1403
agacgauaugaaugauugu

SEQ ID NO: 110263 - RNA, 19 nt, Artificial Sequence
  Description of Artificial Sequence: Synthetic oligonucleotide
  Antisense strand to SEQ ID NO: 110262
acaaucauucauaucgucu

SEQ ID NO: 110264 - RNA, 19 nt, Artificial Sequence
  Description of Artificial Sequence: Synthetic oligonucleotide
  Sense strand starting at position 1701 of SEQ ID NO: 1403
ucacuuaguugauagauuu

SEQ ID NO: 110265 - RNA, 19 nt, Artificial Sequence
  Description of Artificial Sequence: Synthetic oligonucleotide
  Antisense strand to SEQ ID NO: 110264
aaaucuaucaacuaaguga

SEQ ID NO: 110266 - RNA, 19 nt, Artificial Sequence
  Description of Artificial Sequence: Synthetic oligonucleotide
  Sense strand starting at position 1747 of SEQ ID NO: 1403
guucucaaacauugcaaga

SEQ ID NO: 110267 - RNA, 19 nt, Artificial Sequence
  Description of Artificial Sequence: Synthetic oligonucleotide
  Antisense strand to SEQ ID NO: 110266
ucuugcaauguuugagaac

SEQ ID NO: 110268 - RNA, 19 nt, Artificial Sequence
  Description of Artificial Sequence: Synthetic oligonucleotide
  Sense strand starting at position 1760 of SEQ ID NO: 1403
gcaagaaauucguugauga

SEQ ID NO: 110269 - RNA, 19 nt, Artificial Sequence
  Description of Artificial Sequence: Synthetic oligonucleotide
  Antisense strand to SEQ ID NO: 110268
ucaucaacgaauuucuugc

SEQ ID NO: 110270 - RNA, 19 nt, Artificial Sequence
  Description of Artificial Sequence: Synthetic oligonucleotide
  Sense strand starting at position 1761 of SEQ ID NO: 1403
caagaaauucguugaugau

SEQ ID NO: 110271 - RNA, 19 nt, Artificial Sequence
  Description of Artificial Sequence: Synthetic oligonucleotide
  Antisense strand to SEQ ID NO: 110270
aucaucaacgaauuucuug

SEQ ID NO: 110272 - RNA, 19 nt, Artificial Sequence
  Description of Artificial Sequence: Synthetic oligonucleotide
  Sense strand starting at position 1783 of SEQ ID NO: 1403
uuuaaacgauguguugaaa

SEQ ID NO: 110273 - RNA, 19 nt, Artificial Sequence
  Description of Artificial Sequence: Synthetic oligonucleotide
  Antisense strand to SEQ ID NO: 110272
uuucaacacaucguuuaaa

SEQ ID NO: 110274 - RNA, 19 nt, Artificial Sequence
  Description of Artificial Sequence: Synthetic oligonucleotide
  Sense strand starting at position 1878 of SEQ ID NO: 1403
agggcugauuccuccacuu

SEQ ID NO: 110275 - RNA, 19 nt, Artificial Sequence
  Description of Artificial Sequence: Synthetic oligonucleotide
  Antisense strand to SEQ ID NO: 110274
aaguggaggaaucagcccu

SEQ ID NO: 110276 - RNA, 19 nt, Artificial Sequence
  Description of Artificial Sequence: Synthetic oligonucleotide
  Sense strand starting at position 1880 of SEQ ID NO: 1403
ggcugauuccuccacuuuc

SEQ ID NO: 110277 - RNA, 19 nt, Artificial Sequence
  Description of Artificial Sequence: Synthetic oligonucleotide
  Antisense strand to SEQ ID NO: 110276
gaaaguggaggaaucagcc

SEQ ID NO: 110278 - RNA, 19 nt, Artificial Sequence
  Description of Artificial Sequence: Synthetic oligonucleotide
  Sense strand starting at position 1895 of SEQ ID NO: 1403
uuucuaauagcggaauaau

SEQ ID NO: 110279 - RNA, 19 nt, Artificial Sequence
  Description of Artificial Sequence: Synthetic oligonucleotide
  Antisense strand to SEQ ID NO: 110278
auuauuccgcuauuagaaa

SEQ ID NO: 110280 - RNA, 19 nt, Artificial Sequence
  Description of Artificial Sequence: Synthetic oligonucleotide
  Sense strand starting at position 1932 of SEQ ID NO: 1403
agauaagauuccgcuccua

SEQ ID NO: 110281 - RNA, 19 nt, Artificial Sequence
  Description of Artificial Sequence: Synthetic oligonucleotide
  Antisense strand to SEQ ID NO: 110280
uaggagcggaaucuuaucu

SEQ ID NO: 110282 - RNA, 19 nt, Artificial Sequence
  Description of Artificial Sequence: Synthetic oligonucleotide
  Sense strand starting at position 1999 of SEQ ID NO: 1403
gcaggacagagaugugauc

SEQ ID NO: 110283 - RNA, 19 nt, Artificial Sequence
  Description of Artificial Sequence: Synthetic oligonucleotide
  Antisense strand to SEQ ID NO: 110282
gaucacaucucuguccugc

SEQ ID NO: 110284 - RNA, 19 nt, Artificial Sequence
  Description of Artificial Sequence: Synthetic oligonucleotide
  Sense strand starting at position 2010 of SEQ ID NO: 1403
augugaucuugcucagaag

SEQ ID NO: 110285 - RNA, 19 nt, Artificial Sequence
  Description of Artificial Sequence: Synthetic oligonucleotide
  Antisense strand to SEQ ID NO: 110284
cuucugagcaagaucacau

SEQ ID NO: 110286 - RNA, 19 nt, Artificial Sequence
  Description of Artificial Sequence: Synthetic oligonucleotide
  Sense strand starting at position 2011 of SEQ ID NO: 1403
ugugaucuugcucagaagu

SEQ ID NO: 110287 - RNA, 19 nt, Artificial Sequence
  Description of Artificial Sequence: Synthetic oligonucleotide
  Antisense strand to SEQ ID NO: 110286
acuucugagcaagaucaca

SEQ ID NO: 110288 - RNA, 19 nt, Artificial Sequence
  Description of Artificial Sequence: Synthetic oligonucleotide
  Sense strand starting at position 2101 of SEQ ID NO: 1403
guaacuaggagcuaagguu

SEQ ID NO: 110289 - RNA, 19 nt, Artificial Sequence
  Description of Artificial Sequence: Synthetic oligonucleotide
  Antisense strand to SEQ ID NO: 110288
aaccuuagcuccuaguuac

SEQ ID NO: 110290 - RNA, 19 nt, Artificial Sequence
  Description of Artificial Sequence: Synthetic oligonucleotide
  Sense strand starting at position 2264 of SEQ ID NO: 1403
cuuggagaugcuuggagaa

SEQ ID NO: 110291 - RNA, 19 nt, Artificial Sequence
  Description of Artificial Sequence: Synthetic oligonucleotide
  Antisense strand to SEQ ID NO: 110290
uucuccaagcaucuccaag

SEQ ID NO: 110292 - RNA, 19 nt, Artificial Sequence
  Description of Artificial Sequence: Synthetic oligonucleotide
  Sense strand starting at position 2298 of SEQ ID NO: 1403
gaacgucuccuggaguaac

SEQ ID NO: 110293 - RNA, 19 nt, Artificial Sequence
  Description of Artificial Sequence: Synthetic oligonucleotide
  Antisense strand to SEQ ID NO: 110292
guuacuccaggagacguuc

SEQ ID NO: 110294 - RNA, 19 nt, Artificial Sequence
  Description of Artificial Sequence: Synthetic oligonucleotide
  Sense strand starting at position 2519 of SEQ ID NO: 1403
ggacaugagucacuuaauu

SEQ ID NO: 110295 - RNA, 19 nt, Artificial Sequence
  Description of Artificial Sequence: Synthetic oligonucleotide
  Antisense strand to SEQ ID NO: 110294
aauuaagugacucaugucc

SEQ ID NO: 110296 - RNA, 19 nt, Artificial Sequence
  Description of Artificial Sequence: Synthetic oligonucleotide
  Sense strand starting at position 2815 of SEQ ID NO: 1403
guguccagaacauggaaau

SEQ ID NO: 110297 - RNA, 19 nt, Artificial Sequence
  Description of Artificial Sequence: Synthetic oligonucleotide
  Antisense strand to SEQ ID NO: 110296
auuuccauguucuggacac

SEQ ID NO: 110298 - RNA, 19 nt, Artificial Sequence
  Description of Artificial Sequence: Synthetic oligonucleotide
  Sense strand starting at position 2879 of SEQ ID NO: 1403
gccaacauuuauuagagau

SEQ ID NO: 110299 - RNA, 19 nt, Artificial Sequence
  Description of Artificial Sequence: Synthetic oligonucleotide
  Antisense strand to SEQ ID NO: 110298
aucucuaauaaauguuggc

SEQ ID NO: 110300 - RNA, 19 nt, Artificial Sequence
  Description of Artificial Sequence: Synthetic oligonucleotide
  Sense strand starting at position 2926 of SEQ ID NO: 1403
agguuugauuaagcauauu

SEQ ID NO: 110301 - RNA, 19 nt, Artificial Sequence
  Description of Artificial Sequence: Synthetic oligonucleotide
  Antisense strand to SEQ ID NO: 110300
aauaugcuuaaucaaaccu

SEQ ID NO: 110302 - RNA, 19 nt, Artificial Sequence
  Description of Artificial Sequence: Synthetic oligonucleotide
  Sense strand starting at position 2953 of SEQ ID NO: 1403
ugagaaaugaucugcuaug

SEQ ID NO: 110303 - RNA, 19 nt, Artificial Sequence
  Description of Artificial Sequence: Synthetic oligonucleotide
  Antisense strand to SEQ ID NO: 110302
cauagcagaucauuucuca

SEQ ID NO: 110304 - RNA, 19 nt, Artificial Sequence
  Description of Artificial Sequence: Synthetic oligonucleotide
  Sense strand starting at position 2954 of SEQ ID NO: 1403
gagaaaugaucugcuauga

SEQ ID NO: 110305 - RNA, 19 nt, Artificial Sequence
  Description of Artificial Sequence: Synthetic oligonucleotide
  Antisense strand to SEQ ID NO: 110304
ucauagcagaucauuucuc

SEQ ID NO: 110306 - RNA, 19 nt, Artificial Sequence
  Description of Artificial Sequence: Synthetic oligonucleotide
  Sense strand starting at position 2964 of SEQ ID NO: 1403
cugcuaugagacuaacuua

SEQ ID NO: 110307 - RNA, 19 nt, Artificial Sequence
  Description of Artificial Sequence: Synthetic oligonucleotide
  Antisense strand to SEQ ID NO: 110306
uaaguuagucucauagcag

SEQ ID NO: 110308 - RNA, 19 nt, Artificial Sequence
  Description of Artificial Sequence: Synthetic oligonucleotide
  Sense strand starting at position 3009 of SEQ ID NO: 1403
agauuaagccauuggugga

SEQ ID NO: 110309 - RNA, 19 nt, Artificial Sequence
  Description of Artificial Sequence: Synthetic oligonucleotide
  Antisense strand to SEQ ID NO: 110308
uccaccaauggcuuaaucu

SEQ ID NO: 110310 - RNA, 19 nt, Artificial Sequence
  Description of Artificial Sequence: Synthetic oligonucleotide
  Sense strand starting at position 3141 of SEQ ID NO: 1403
acauguguugauuauugca

SEQ ID NO: 110311 - RNA, 19 nt, Artificial Sequence
  Description of Artificial Sequence: Synthetic oligonucleotide
  Antisense strand to SEQ ID NO: 110310
ugcaauaaucaacacaugu

SEQ ID NO: 110312 - RNA, 19 nt, Artificial Sequence
  Description of Artificial Sequence: Synthetic oligonucleotide
  Sense strand starting at position 3258 of SEQ ID NO: 1403
augccuuugccuuacauga

SEQ ID NO: 110313 - RNA, 19 nt, Artificial Sequence
  Description of Artificial Sequence: Synthetic oligonucleotide
  Antisense strand to SEQ ID NO: 110312
ucauguaaggcaaaggcau

SEQ ID NO: 110314 - RNA, 19 nt, Artificial Sequence
  Description of Artificial Sequence: Synthetic oligonucleotide
  Sense strand starting at position 3343 of SEQ ID NO: 1403
uuaugaagauacucauagu

SEQ ID NO: 110315 - RNA, 19 nt, Artificial Sequence
  Description of Artificial Sequence: Synthetic oligonucleotide
  Antisense strand to SEQ ID NO: 110314
acuaugaguaucuucauaa

SEQ ID NO: 110316 - RNA, 19 nt, Artificial Sequence
  Description of Artificial Sequence: Synthetic oligonucleotide
  Sense strand starting at position 3469 of SEQ ID NO: 1403
gggaacauuuguggagaga

SEQ ID NO: 110317 - RNA, 19 nt, Artificial Sequence
  Description of Artificial Sequence: Synthetic oligonucleotide
  Antisense strand to SEQ ID NO: 110316
ucucuccacaaauguuccc

SEQ ID NO: 110318 - RNA, 19 nt, Artificial Sequence
  Description of Artificial Sequence: Synthetic oligonucleotide
  Sense strand starting at position 3876 of SEQ ID NO: 1403
uucucacucuaguuaggaa

SEQ ID NO: 110319 - RNA, 19 nt, Artificial Sequence
  Description of Artificial Sequence: Synthetic oligonucleotide
  Antisense strand to SEQ ID NO: 110318
uuccuaacuagagugagaa

SEQ ID NO: 110320 - RNA, 19 nt, Artificial Sequence
  Description of Artificial Sequence: Synthetic oligonucleotide
  Sense strand starting at position 215 of SEQ ID NO: 1402
gcaucucugccggcaaagu

SEQ ID NO: 110321 - RNA, 19 nt, Artificial Sequence
  Description of Artificial Sequence: Synthetic oligonucleotide
  Antisense strand to SEQ ID NO: 110320
acuuugccggcagagaugc

SEQ ID NO: 110322 - RNA, 19 nt, Artificial Sequence
  Description of Artificial Sequence: Synthetic oligonucleotide
  Sense strand starting at position 587 of SEQ ID NO: 1402
gagaaauccgcgucggcga

SEQ ID NO: 110323 - RNA, 19 nt, Artificial Sequence
  Description of Artificial Sequence: Synthetic oligonucleotide
  Antisense strand to SEQ ID NO: 110322
ucgccgacgcggauuucuc

SEQ ID NO: 110324 - RNA, 19 nt, Artificial Sequence
  Description of Artificial Sequence: Synthetic oligonucleotide
  Sense strand starting at position 606 of SEQ ID NO: 1402
cguauaggagcguuugcuu

SEQ ID NO: 110325 - RNA, 19 nt, Artificial Sequence
  Description of Artificial Sequence: Synthetic oligonucleotide
  Antisense strand to SEQ ID NO: 110324
aagcaaacgcuccuauacg

SEQ ID NO: 110326 - RNA, 19 nt, Artificial Sequence
  Description of Artificial Sequence: Synthetic oligonucleotide
  Sense strand starting at position 701 of SEQ ID NO: 1402
agcuuuaauuucccugcga

SEQ ID NO: 110327 - RNA, 19 nt, Artificial Sequence
  Description of Artificial Sequence: Synthetic oligonucleotide
  Antisense strand to SEQ ID NO: 110326
ucgcagggaaauuaaagcu

SEQ ID NO: 110328 - RNA, 19 nt, Artificial Sequence
  Description of Artificial Sequence: Synthetic oligonucleotide
  Sense strand starting at position 702 of SEQ ID NO: 1402
gcuuuaauuucccugcgag

SEQ ID NO: 110329 - RNA, 19 nt, Artificial Sequence
  Description of Artificial Sequence: Synthetic oligonucleotide
  Antisense strand to SEQ ID NO: 110328
cucgcagggaaauuaaagc

SEQ ID NO: 110330 - RNA, 19 nt, Artificial Sequence
  Description of Artificial Sequence: Synthetic oligonucleotide
  Sense strand starting at position 703 of SEQ ID NO: 1402
cuuuaauuucccugcgagg

SEQ ID NO: 110331 - RNA, 19 nt, Artificial Sequence
  Description of Artificial Sequence: Synthetic oligonucleotide
  Antisense strand to SEQ ID NO: 110330
ccucgcagggaaauuaaag

SEQ ID NO: 110332 - RNA, 19 nt, Artificial Sequence
  Description of Artificial Sequence: Synthetic oligonucleotide
  Sense strand starting at position 795 of SEQ ID NO: 1402
ucggguacguuuaugagua

SEQ ID NO: 110333 - RNA, 19 nt, Artificial Sequence
  Description of Artificial Sequence: Synthetic oligonucleotide
  Antisense strand to SEQ ID NO: 110332
uacucauaaacguacccga

SEQ ID NO: 110334 - RNA, 19 nt, Artificial Sequence
  Description of Artificial Sequence: Synthetic oligonucleotide
  Sense strand starting at position 800 of SEQ ID NO: 1402
uacguuuaugaguagaaca

SEQ ID NO: 110335 - RNA, 19 nt, Artificial Sequence
  Description of Artificial Sequence: Synthetic oligonucleotide
  Antisense strand to SEQ ID NO: 110334
uguucuacucauaaacgua

SEQ ID NO: 110336 - RNA, 19 nt, Artificial Sequence
  Description of Artificial Sequence: Synthetic oligonucleotide
  Sense strand starting at position 802 of SEQ ID NO: 1402
cguuuaugaguagaacaac

SEQ ID NO: 110337 - RNA, 19 nt, Artificial Sequence
  Description of Artificial Sequence: Synthetic oligonucleotide
  Antisense strand to SEQ ID NO: 110336
guuguucuacucauaaacg

SEQ ID NO: 110338 - RNA, 19 nt, Artificial Sequence
  Description of Artificial Sequence: Synthetic oligonucleotide
  Sense strand starting at position 1077 of SEQ ID NO: 1402
aaaggagucuuaccuugca

SEQ ID NO: 110339 - RNA, 19 nt, Artificial Sequence
  Description of Artificial Sequence: Synthetic oligonucleotide
  Antisense strand to SEQ ID NO: 110338
ugcaagguaagacuccuuu

SEQ ID NO: 110340 - RNA, 19 nt, Artificial Sequence
  Description of Artificial Sequence: Synthetic oligonucleotide
  Sense strand starting at position 1268 of SEQ ID NO: 1402
agacgauaugaaugauugu

SEQ ID NO: 110341 - RNA, 19 nt, Artificial Sequence
  Description of Artificial Sequence: Synthetic oligonucleotide
  Antisense strand to SEQ ID NO: 110340
acaaucauucauaucgucu

SEQ ID NO: 110342 - RNA, 19 nt, Artificial Sequence
  Description of Artificial Sequence: Synthetic oligonucleotide
  Sense strand starting at position 1333 of SEQ ID NO: 1402
guucucaaacauugcaaga

SEQ ID NO: 110343 - RNA, 19 nt, Artificial Sequence
  Description of Artificial Sequence: Synthetic oligonucleotide
  Antisense strand to SEQ ID NO: 110342
ucuugcaauguuugagaac

SEQ ID NO: 110344 - RNA, 19 nt, Artificial Sequence
  Description of Artificial Sequence: Synthetic oligonucleotide
  Sense strand starting at position 1346 of SEQ ID NO: 1402
gcaagaaauucguugauga

SEQ ID NO: 110345 - RNA, 19 nt, Artificial Sequence
  Description of Artificial Sequence: Synthetic oligonucleotide
  Antisense strand to SEQ ID NO: 110344
ucaucaacgaauuucuugc

SEQ ID NO: 110346 - RNA, 19 nt, Artificial Sequence
  Description of Artificial Sequence: Synthetic oligonucleotide
  Sense strand starting at position 1347 of SEQ ID NO: 1402
caagaaauucguugaugau

SEQ ID NO: 110347 - RNA, 19 nt, Artificial Sequence
  Description of Artificial Sequence: Synthetic oligonucleotide
  Antisense strand to SEQ ID NO: 110346
aucaucaacgaauuucuug

SEQ ID NO: 110348 - RNA, 19 nt, Artificial Sequence
  Description of Artificial Sequence: Synthetic oligonucleotide
  Sense strand starting at position 1369 of SEQ ID NO: 1402
uuuaaacgauguguugaaa

SEQ ID NO: 110349 - RNA, 19 nt, Artificial Sequence
  Description of Artificial Sequence: Synthetic oligonucleotide
  Antisense strand to SEQ ID NO: 110348
uuucaacacaucguuuaaa

SEQ ID NO: 110350 - RNA, 19 nt, Artificial Sequence
  Description of Artificial Sequence: Synthetic oligonucleotide
  Sense strand starting at position 1466 of SEQ ID NO: 1402
ggcugauuccuccacuuuc

SEQ ID NO: 110351 - RNA, 19 nt, Artificial Sequence
  Description of Artificial Sequence: Synthetic oligonucleotide
  Antisense strand to SEQ ID NO: 110350
gaaaguggaggaaucagcc

SEQ ID NO: 110352 - RNA, 19 nt, Artificial Sequence
  Description of Artificial Sequence: Synthetic oligonucleotide
  Sense strand starting at position 1481 of SEQ ID NO: 1402
uuucuaauagcggaauaau

SEQ ID NO: 110353 - RNA, 19 nt, Artificial Sequence
  Description of Artificial Sequence: Synthetic oligonucleotide
  Antisense strand to SEQ ID NO: 110352
auuauuccgcuauuagaaa

SEQ ID NO: 110354 - RNA, 19 nt, Artificial Sequence
  Description of Artificial Sequence: Synthetic oligonucleotide
  Sense strand starting at position 1518 of SEQ ID NO: 1402
agauaagauuccgcuccua

SEQ ID NO: 110355 - RNA, 19 nt, Artificial Sequence
  Description of Artificial Sequence: Synthetic oligonucleotide
  Antisense strand to SEQ ID NO: 110354
uaggagcggaaucuuaucu

SEQ ID NO: 110356 - RNA, 19 nt, Artificial Sequence
  Description of Artificial Sequence: Synthetic oligonucleotide
  Sense strand starting at position 1585 of SEQ ID NO: 1402
gcaggacagagaugugauc

SEQ ID NO: 110357 - RNA, 19 nt, Artificial Sequence
  Description of Artificial Sequence: Synthetic oligonucleotide
  Antisense strand to SEQ ID NO: 110356
gaucacaucucuguccugc

SEQ ID NO: 110358 - RNA, 19 nt, Artificial Sequence
  Description of Artificial Sequence: Synthetic oligonucleotide
  Sense strand starting at position 1596 of SEQ ID NO: 1402
augugaucuugcucagaag

SEQ ID NO: 110359 - RNA, 19 nt, Artificial Sequence
  Description of Artificial Sequence: Synthetic oligonucleotide
  Antisense strand to SEQ ID NO: 110358
cuucugagcaagaucacau

SEQ ID NO: 110360 - RNA, 19 nt, Artificial Sequence
  Description of Artificial Sequence: Synthetic oligonucleotide
  Sense strand starting at position 1597 of SEQ ID NO: 1402
ugugaucuugcucagaagu

SEQ ID NO: 110361 - RNA, 19 nt, Artificial Sequence
  Description of Artificial Sequence: Synthetic oligonucleotide
  Antisense strand to SEQ ID NO: 110360
acuucugagcaagaucaca

SEQ ID NO: 110362 - RNA, 19 nt, Artificial Sequence
  Description of Artificial Sequence: Synthetic oligonucleotide
  Sense strand starting at position 1687 of SEQ ID NO: 1402
guaacuaggagcuaagguu

SEQ ID NO: 110363 - RNA, 19 nt, Artificial Sequence
  Description of Artificial Sequence: Synthetic oligonucleotide
  Antisense strand to SEQ ID NO: 110362
aaccuuagcuccuaguuac

SEQ ID NO: 110364 - RNA, 19 nt, Artificial Sequence
  Description of Artificial Sequence: Synthetic oligonucleotide
  Sense strand starting at position 1850 of SEQ ID NO: 1402
cuuggagaugcuuggagaa

SEQ ID NO: 110365 - RNA, 19 nt, Artificial Sequence
  Description of Artificial Sequence: Synthetic oligonucleotide
  Antisense strand to SEQ ID NO: 110364
uucuccaagcaucuccaag

SEQ ID NO: 110366 - RNA, 19 nt, Artificial Sequence
  Description of Artificial Sequence: Synthetic oligonucleotide
  Sense strand starting at position 1884 of SEQ ID NO: 1402
gaacgucuccuggaguaac

SEQ ID NO: 110367 - RNA, 19 nt, Artificial Sequence
  Description of Artificial Sequence: Synthetic oligonucleotide
  Antisense strand to SEQ ID NO: 110366
guuacuccaggagacguuc

SEQ ID NO: 110368 - RNA, 19 nt, Artificial Sequence
  Description of Artificial Sequence: Synthetic oligonucleotide
  Sense strand starting at position 2105 of SEQ ID NO: 1402
ggacaugagucacuuaauu

SEQ ID NO: 110369 - RNA, 19 nt, Artificial Sequence
  Description of Artificial Sequence: Synthetic oligonucleotide
  Antisense strand to SEQ ID NO: 110368
aauuaagugacucaugucc

SEQ ID NO: 110370 - RNA, 19 nt, Artificial Sequence
  Description of Artificial Sequence: Synthetic oligonucleotide
  Sense strand starting at position 2401 of SEQ ID NO: 1402
guguccagaacauggaaau

SEQ ID NO: 110371 - RNA, 19 nt, Artificial Sequence
  Description of Artificial Sequence: Synthetic oligonucleotide
  Antisense strand to SEQ ID NO: 110370
auuuccauguucuggacac

SEQ ID NO: 110372 - RNA, 19 nt, Artificial Sequence
  Description of Artificial Sequence: Synthetic oligonucleotide
  Sense strand starting at position 2465 of SEQ ID NO: 1402
gccaacauuuauuagagau

SEQ ID NO: 110373 - RNA, 19 nt, Artificial Sequence
  Description of Artificial Sequence: Synthetic oligonucleotide
  Antisense strand to SEQ ID NO: 110372
aucucuaauaaauguuggc

SEQ ID NO: 110374 - RNA, 19 nt, Artificial Sequence
  Description of Artificial Sequence: Synthetic oligonucleotide
  Sense strand starting at position 2512 of SEQ ID NO: 1402
agguuugauuaagcauauu

SEQ ID NO: 110375 - RNA, 19 nt, Artificial Sequence
  Description of Artificial Sequence: Synthetic oligonucleotide
  Antisense strand to SEQ ID NO: 110374
aauaugcuuaaucaaaccu

SEQ ID NO: 110376 - RNA, 19 nt, Artificial Sequence
  Description of Artificial Sequence: Synthetic oligonucleotide
  Sense strand starting at position 2539 of SEQ ID NO: 1402
ugagaaaugaucugcuaug

SEQ ID NO: 110377 - RNA, 19 nt, Artificial Sequence
  Description of Artificial Sequence: Synthetic oligonucleotide
  Antisense strand to SEQ ID NO: 110376
cauagcagaucauuucuca

SEQ ID NO: 110378 - RNA, 19 nt, Artificial Sequence
  Description of Artificial Sequence: Synthetic oligonucleotide
  Sense strand starting at position 2540 of SEQ ID NO: 1402
gagaaaugaucugcuauga

SEQ ID NO: 110379 - RNA, 19 nt, Artificial Sequence
  Description of Artificial Sequence: Synthetic oligonucleotide
  Antisense strand to SEQ ID NO: 110378
ucauagcagaucauuucuc

SEQ ID NO: 110380 - RNA, 19 nt, Artificial Sequence
  Description of Artificial Sequence: Synthetic oligonucleotide
  Sense strand starting at position 2550 of SEQ ID NO: 1402
cugcuaugagacuaacuua

SEQ ID NO: 110381 - RNA, 19 nt, Artificial Sequence
  Description of Artificial Sequence: Synthetic oligonucleotide
  Antisense strand to SEQ ID NO: 110380
uaaguuagucucauagcag

SEQ ID NO: 110382 - RNA, 19 nt, Artificial Sequence
  Description of Artificial Sequence: Synthetic oligonucleotide
  Sense strand starting at position 2595 of SEQ ID NO: 1402
agauuaagccauuggugga

SEQ ID NO: 110383 - RNA, 19 nt, Artificial Sequence
  Description of Artificial Sequence: Synthetic oligonucleotide
  Antisense strand to SEQ ID NO: 110382
uccaccaauggcuuaaucu

SEQ ID NO: 110384 - RNA, 19 nt, Artificial Sequence
  Description of Artificial Sequence: Synthetic oligonucleotide
  Sense strand starting at position 2727 of SEQ ID NO: 1402
acauguguugauuauugca

SEQ ID NO: 110385 - RNA, 19 nt, Artificial Sequence
  Description of Artificial Sequence: Synthetic oligonucleotide
  Antisense strand to SEQ ID NO: 110384
ugcaauaaucaacacaugu

SEQ ID NO: 110386 - RNA, 19 nt, Artificial Sequence
  Description of Artificial Sequence: Synthetic oligonucleotide
  Sense strand starting at position 2844 of SEQ ID NO: 1402
augccuuugccuuacauga

SEQ ID NO: 110387 - RNA, 19 nt, Artificial Sequence
  Description of Artificial Sequence: Synthetic oligonucleotide
  Antisense strand to SEQ ID NO: 110386
ucauguaaggcaaaggcau

SEQ ID NO: 110388 - RNA, 19 nt, Artificial Sequence
  Description of Artificial Sequence: Synthetic oligonucleotide
  Sense strand starting at position 2929 of SEQ ID NO: 1402
uuaugaagauacucauagu

SEQ ID NO: 110389 - RNA, 19 nt, Artificial Sequence
  Description of Artificial Sequence: Synthetic oligonucleotide
  Antisense strand to SEQ ID NO: 110388
acuaugaguaucuucauaa

SEQ ID NO: 110390 - RNA, 19 nt, Artificial Sequence
  Description of Artificial Sequence: Synthetic oligonucleotide
  Sense strand starting at position 3055 of SEQ ID NO: 1402
gggaacauuuguggagaga

SEQ ID NO: 110391 - RNA, 19 nt, Artificial Sequence
  Description of Artificial Sequence: Synthetic oligonucleotide
  Antisense strand to SEQ ID NO: 110390
ucucuccacaaauguuccc

SEQ ID NO: 110392 - RNA, 19 nt, Artificial Sequence
  Description of Artificial Sequence: Synthetic oligonucleotide
  Sense strand starting at position 3462 of SEQ ID NO: 1402
uucucacucuaguuaggaa

SEQ ID NO: 110393 - RNA, 19 nt, Artificial Sequence
  Description of Artificial Sequence: Synthetic oligonucleotide
  Antisense strand to SEQ ID NO: 110392
uuccuaacuagagugagaa

SEQ ID NO: 110394 - RNA, 19 nt, Artificial Sequence
  Description of Artificial Sequence: Synthetic oligonucleotide
  Sense strand starting at position 3630 of SEQ ID NO: 1402
gggucuaaucaccauagcu

SEQ ID NO: 110395 - RNA, 19 nt, Artificial Sequence
  Description of Artificial Sequence: Synthetic oligonucleotide
  Antisense strand to SEQ ID NO: 110394
agcuauggugauuagaccc

SEQ ID NO: 110396 - RNA, 19 nt, Artificial Sequence
  Description of Artificial Sequence: Synthetic oligonucleotide
  Sense strand starting at position 3846 of SEQ ID NO: 1402
gaaguaagccuguauaaac

SEQ ID NO: 110397 - RNA, 19 nt, Artificial Sequence
  Description of Artificial Sequence: Synthetic oligonucleotide
  Antisense strand to SEQ ID NO: 110396
guuuauacaggcuuacuuc

SEQ ID NO: 110398 - RNA, 19 nt, Artificial Sequence
  Description of Artificial Sequence: Synthetic oligonucleotide
  Sense strand starting at position 3875 of SEQ ID NO: 1402
ucagauccauacuuaguga

SEQ ID NO: 110399 - RNA, 19 nt, Artificial Sequence
  Description of Artificial Sequence: Synthetic oligonucleotide
  Antisense strand to SEQ ID NO: 110398
ucacuaaguauggaucuga

SEQ ID NO: 110400 - RNA, 19 nt, Artificial Sequence
  Description of Artificial Sequence: Synthetic oligonucleotide
  Sense strand starting at position 355 of SEQ ID NO: 1404
gagcauaagauguguguuu

SEQ ID NO: 110401 - RNA, 19 nt, Artificial Sequence
  Description of Artificial Sequence: Synthetic oligonucleotide
  Antisense strand to SEQ ID NO: 110400
aaacacacaucuuaugcuc

SEQ ID NO: 110402 - RNA, 19 nt, Artificial Sequence
  Description of Artificial Sequence: Synthetic oligonucleotide
  Sense strand starting at position 748 of SEQ ID NO: 1404
cuacaaguuccacgugagu

SEQ ID NO: 110403 - RNA, 19 nt, Artificial Sequence
  Description of Artificial Sequence: Synthetic oligonucleotide
  Antisense strand to SEQ ID NO: 110402
acucacguggaacuuguag

SEQ ID NO: 110404 - RNA, 19 nt, Artificial Sequence
  Description of Artificial Sequence: Synthetic oligonucleotide
  Sense strand starting at position 750 of SEQ ID NO: 1404
acaaguuccacgugagugu

SEQ ID NO: 110405 - RNA, 19 nt, Artificial Sequence
  Description of Artificial Sequence: Synthetic oligonucleotide
  Antisense strand to SEQ ID NO: 110404
acacucacguggaacuugu

SEQ ID NO: 110406 - RNA, 19 nt, Artificial Sequence
  Description of Artificial Sequence: Synthetic oligonucleotide
  Sense strand starting at position 759 of SEQ ID NO: 1404
acgugaguguugucuaagg

SEQ ID NO: 110407 - RNA, 19 nt, Artificial Sequence
  Description of Artificial Sequence: Synthetic oligonucleotide
  Antisense strand to SEQ ID NO: 110406
ccuuagacaacacucacgu

SEQ ID NO: 110408 - RNA, 19 nt, Artificial Sequence
  Description of Artificial Sequence: Synthetic oligonucleotide
  Sense strand starting at position 895 of SEQ ID NO: 1404
gcacacaagccuuauauga

SEQ ID NO: 110409 - RNA, 19 nt, Artificial Sequence
  Description of Artificial Sequence: Synthetic oligonucleotide
  Antisense strand to SEQ ID NO: 110408
ucauauaaggcuugugugc

SEQ ID NO: 110410 - RNA, 19 nt, Artificial Sequence
  Description of Artificial Sequence: Synthetic oligonucleotide
  Sense strand starting at position 1098 of SEQ ID NO: 1404
cuguguuucccgcucugga

SEQ ID NO: 110411 - RNA, 19 nt, Artificial Sequence
  Description of Artificial Sequence: Synthetic oligonucleotide
  Antisense strand to SEQ ID NO: 110410
uccagagcgggaaacacag

SEQ ID NO: 110412 - RNA, 19 nt, Artificial Sequence
  Description of Artificial Sequence: Synthetic oligonucleotide
  Sense strand starting at position 2145 of SEQ ID NO: 1404
ggugccugcgauucucgaa

SEQ ID NO: 110413 - RNA, 19 nt, Artificial Sequence
  Description of Artificial Sequence: Synthetic oligonucleotide
  Antisense strand to SEQ ID NO: 110412
uucgagaaucgcaggcacc

SEQ ID NO: 110414 - RNA, 19 nt, Artificial Sequence
  Description of Artificial Sequence: Synthetic oligonucleotide
  Sense strand starting at position 2146 of SEQ ID NO: 1404
gugccugcgauucucgaaa

SEQ ID NO: 110415 - RNA, 19 nt, Artificial Sequence
  Description of Artificial Sequence: Synthetic oligonucleotide
  Antisense strand to SEQ ID NO: 110414
uuucgagaaucgcaggcac

SEQ ID NO: 110416 - RNA, 19 nt, Artificial Sequence
  Description of Artificial Sequence: Synthetic oligonucleotide
  Sense strand starting at position 2465 of SEQ ID NO: 1404
guggagguucgccaggaaa

SEQ ID NO: 110417 - RNA, 19 nt, Artificial Sequence
  Description of Artificial Sequence: Synthetic oligonucleotide
  Antisense strand to SEQ ID NO: 110416
uuuccuggcgaaccuccac

SEQ ID NO: 110418 - RNA, 19 nt, Artificial Sequence
  Description of Artificial Sequence: Synthetic oligonucleotide
  Sense strand starting at position 2501 of SEQ ID NO: 1404
aggcaaagucaccagugua

SEQ ID NO: 110419 - RNA, 19 nt, Artificial Sequence
  Description of Artificial Sequence: Synthetic oligonucleotide
  Antisense strand to SEQ ID NO: 110418
uacacuggugacuuugccu

SEQ ID NO: 110420 - RNA, 19 nt, Artificial Sequence
  Description of Artificial Sequence: Synthetic oligonucleotide
  Sense strand starting at position 2619 of SEQ ID NO: 1404
ccgggugcucuggaaggaa

SEQ ID NO: 110421 - RNA, 19 nt, Artificial Sequence
  Description of Artificial Sequence: Synthetic oligonucleotide
  Antisense strand to SEQ ID NO: 110420
uuccuuccagagcacccgg

SEQ ID NO: 110422 - RNA, 19 nt, Artificial Sequence
  Description of Artificial Sequence: Synthetic oligonucleotide
  Sense strand starting at position 2683 of SEQ ID NO: 1404
ggguuuauucagggcacca

SEQ ID NO: 110423 - RNA, 19 nt, Artificial Sequence
  Description of Artificial Sequence: Synthetic oligonucleotide
  Antisense strand to SEQ ID NO: 110422
uggugcccugaauaaaccc

SEQ ID NO: 110424 - RNA, 19 nt, Artificial Sequence
  Description of Artificial Sequence: Synthetic oligonucleotide
  Sense strand starting at position 2722 of SEQ ID NO: 1404
ggagggaccgguugaagua

SEQ ID NO: 110425 - RNA, 19 nt, Artificial Sequence
  Description of Artificial Sequence: Synthetic oligonucleotide
  Antisense strand to SEQ ID NO: 110424
uacuucaaccggucccucc

SEQ ID NO: 110426 - RNA, 19 nt, Artificial Sequence
  Description of Artificial Sequence: Synthetic oligonucleotide
  Sense strand starting at position 2735 of SEQ ID NO: 1404
gaaguacagccuugaauca

SEQ ID NO: 110427 - RNA, 19 nt, Artificial Sequence
  Description of Artificial Sequence: Synthetic oligonucleotide
  Antisense strand to SEQ ID NO: 110426
ugauucaaggcuguacuuc

SEQ ID NO: 110428 - RNA, 19 nt, Artificial Sequence
  Description of Artificial Sequence: Synthetic oligonucleotide
  Sense strand starting at position 2774 of SEQ ID NO: 1404
cgcucugucacucggagaa

SEQ ID NO: 110429 - RNA, 19 nt, Artificial Sequence
  Description of Artificial Sequence: Synthetic oligonucleotide
  Antisense strand to SEQ ID NO: 110428
uucuccgagugacagagcg

SEQ ID NO: 110430 - RNA, 19 nt, Artificial Sequence
  Description of Artificial Sequence: Synthetic oligonucleotide
  Sense strand starting at position 2789 of SEQ ID NO: 1404
agaagaaacuauugaaagu

SEQ ID NO: 110431 - RNA, 19 nt, Artificial Sequence
  Description of Artificial Sequence: Synthetic oligonucleotide
  Antisense strand to SEQ ID NO: 110430
acuuucaauaguuucuucu

SEQ ID NO: 110432 - RNA, 19 nt, Artificial Sequence
  Description of Artificial Sequence: Synthetic oligonucleotide
  Sense strand starting at position 2842 of SEQ ID NO: 1404
uccugaauaaucgguugau

SEQ ID NO: 110433 - RNA, 19 nt, Artificial Sequence
  Description of Artificial Sequence: Synthetic oligonucleotide
  Antisense strand to SEQ ID NO: 110432
aucaaccgauuauucagga

SEQ ID NO: 110434 - RNA, 19 nt, Artificial Sequence
  Description of Artificial Sequence: Synthetic oligonucleotide
  Sense strand starting at position 2843 of SEQ ID NO: 1404
ccugaauaaucgguugauc

SEQ ID NO: 110435 - RNA, 19 nt, Artificial Sequence
  Description of Artificial Sequence: Synthetic oligonucleotide
  Antisense strand to SEQ ID NO: 110434
gaucaaccgauuauucagg

SEQ ID NO: 110436 - RNA, 19 nt, Artificial Sequence
  Description of Artificial Sequence: Synthetic oligonucleotide
  Sense strand starting at position 2845 of SEQ ID NO: 1404
ugaauaaucgguugaucgu

SEQ ID NO: 110437 - RNA, 19 nt, Artificial Sequence
  Description of Artificial Sequence: Synthetic oligonucleotide
  Antisense strand to SEQ ID NO: 110436
acgaucaaccgauuauuca

SEQ ID NO: 110438 - RNA, 19 nt, Artificial Sequence
  Description of Artificial Sequence: Synthetic oligonucleotide
  Sense strand starting at position 2846 of SEQ ID NO: 1404
gaauaaucgguugaucguu

SEQ ID NO: 110439 - RNA, 19 nt, Artificial Sequence
  Description of Artificial Sequence: Synthetic oligonucleotide
  Antisense strand to SEQ ID NO: 110438
aacgaucaaccgauuauuc

SEQ ID NO: 110440 - RNA, 19 nt, Artificial Sequence
  Description of Artificial Sequence: Synthetic oligonucleotide
  Sense strand starting at position 2887 of SEQ ID NO: 1404
agagacagguaaguuauua

SEQ ID NO: 110441 - RNA, 19 nt, Artificial Sequence
  Description of Artificial Sequence: Synthetic oligonucleotide
  Antisense strand to SEQ ID NO: 110440
uaauaacuuaccugucucu

SEQ ID NO: 110442 - RNA, 19 nt, Artificial Sequence
  Description of Artificial Sequence: Synthetic oligonucleotide
  Sense strand starting at position 2941 of SEQ ID NO: 1404
agcaaauccugauuauaag

SEQ ID NO: 110443 - RNA, 19 nt, Artificial Sequence
  Description of Artificial Sequence: Synthetic oligonucleotide
  Antisense strand to SEQ ID NO: 110442
cuuauaaucaggauuugcu

SEQ ID NO: 110444 - RNA, 19 nt, Artificial Sequence
  Description of Artificial Sequence: Synthetic oligonucleotide
  Sense strand starting at position 2950 of SEQ ID NO: 1404
ugauuauaagauuggcauu

SEQ ID NO: 110445 - RNA, 19 nt, Artificial Sequence
  Description of Artificial Sequence: Synthetic oligonucleotide
  Antisense strand to SEQ ID NO: 110444
aaugccaaucuuauaauca

SEQ ID NO: 110446 - RNA, 19 nt, Artificial Sequence
  Description of Artificial Sequence: Synthetic oligonucleotide
  Sense strand starting at position 2952 of SEQ ID NO: 1404
auuauaagauuggcauuga

SEQ ID NO: 110447 - RNA, 19 nt, Artificial Sequence
  Description of Artificial Sequence: Synthetic oligonucleotide
  Antisense strand to SEQ ID NO: 110446
ucaaugccaaucuuauaau

SEQ ID NO: 110448 - RNA, 19 nt, Artificial Sequence
  Description of Artificial Sequence: Synthetic oligonucleotide
  Sense strand starting at position 3068 of SEQ ID NO: 1404
gacagcuggaguuggauau

SEQ ID NO: 110449 - RNA, 19 nt, Artificial Sequence
  Description of Artificial Sequence: Synthetic oligonucleotide
  Antisense strand to SEQ ID NO: 110448
auauccaacuccagcuguc

SEQ ID NO: 110450 - RNA, 19 nt, Artificial Sequence
  Description of Artificial Sequence: Synthetic oligonucleotide
  Sense strand starting at position 3072 of SEQ ID NO: 1404
gcuggaguuggauauguuu

SEQ ID NO: 110451 - RNA, 19 nt, Artificial Sequence
  Description of Artificial Sequence: Synthetic oligonucleotide
  Antisense strand to SEQ ID NO: 110450
aaacauauccaacuccagc

SEQ ID NO: 110452 - RNA, 19 nt, Artificial Sequence
  Description of Artificial Sequence: Synthetic oligonucleotide
  Sense strand starting at position 3074 of SEQ ID NO: 1404
uggaguuggauauguuuga

SEQ ID NO: 110453 - RNA, 19 nt, Artificial Sequence
  Description of Artificial Sequence: Synthetic oligonucleotide
  Antisense strand to SEQ ID NO: 110452
ucaaacauauccaacucca

SEQ ID NO: 110454 - RNA, 19 nt, Artificial Sequence
  Description of Artificial Sequence: Synthetic oligonucleotide
  Sense strand starting at position 3075 of SEQ ID NO: 1404
ggaguuggauauguuugau

SEQ ID NO: 110455 - RNA, 19 nt, Artificial Sequence
  Description of Artificial Sequence: Synthetic oligonucleotide
  Antisense strand to SEQ ID NO: 110454
aucaaacauauccaacucc

SEQ ID NO: 110456 - RNA, 19 nt, Artificial Sequence
  Description of Artificial Sequence: Synthetic oligonucleotide
  Sense strand starting at position 3285 of SEQ ID NO: 1404
uugauuuacucaugagaac

SEQ ID NO: 110457 - RNA, 19 nt, Artificial Sequence
  Description of Artificial Sequence: Synthetic oligonucleotide
  Antisense strand to SEQ ID NO: 110456
guucucaugaguaaaucaa

SEQ ID NO: 110458 - RNA, 19 nt, Artificial Sequence
  Description of Artificial Sequence: Synthetic oligonucleotide
  Sense strand starting at position 3358 of SEQ ID NO: 1404
agagacagcauguguucua

SEQ ID NO: 110459 - RNA, 19 nt, Artificial Sequence
  Description of Artificial Sequence: Synthetic oligonucleotide
  Antisense strand to SEQ ID NO: 110458
uagaacacaugcugucucu

SEQ ID NO: 110460 - RNA, 19 nt, Artificial Sequence
  Description of Artificial Sequence: Synthetic oligonucleotide
  Sense strand starting at position 3361 of SEQ ID NO: 1404
gacagcauguguucuacaa

SEQ ID NO: 110461 - RNA, 19 nt, Artificial Sequence
  Description of Artificial Sequence: Synthetic oligonucleotide
  Antisense strand to SEQ ID NO: 110460
uuguagaacacaugcuguc

SEQ ID NO: 110462 - RNA, 19 nt, Artificial Sequence
  Description of Artificial Sequence: Synthetic oligonucleotide
  Sense strand starting at position 3365 of SEQ ID NO: 1404
gcauguguucuacaaguau

SEQ ID NO: 110463 - RNA, 19 nt, Artificial Sequence
  Description of Artificial Sequence: Synthetic oligonucleotide
  Antisense strand to SEQ ID NO: 110462
auacuuguagaacacaugc

SEQ ID NO: 110464 - RNA, 19 nt, Artificial Sequence
  Description of Artificial Sequence: Synthetic oligonucleotide
  Sense strand starting at position 3551 of SEQ ID NO: 1404
gcauuaagugcccucuguu

SEQ ID NO: 110465 - RNA, 19 nt, Artificial Sequence
  Description of Artificial Sequence: Synthetic oligonucleotide
  Antisense strand to SEQ ID NO: 110464
aacagagggcacuuaaugc

SEQ ID NO: 110466 - RNA, 19 nt, Artificial Sequence
  Description of Artificial Sequence: Synthetic oligonucleotide
  Sense strand starting at position 3587 of SEQ ID NO: 1404
gccugcagucuguugucaa

SEQ ID NO: 110467 - RNA, 19 nt, Artificial Sequence
  Description of Artificial Sequence: Synthetic oligonucleotide
  Antisense strand to SEQ ID NO: 110466
uugacaacagacugcaggc

SEQ ID NO: 110468 - RNA, 19 nt, Artificial Sequence
  Description of Artificial Sequence: Synthetic oligonucleotide
  Sense strand starting at position 3590 of SEQ ID NO: 1404
ugcagucuguugucaaaua

SEQ ID NO: 110469 - RNA, 19 nt, Artificial Sequence
  Description of Artificial Sequence: Synthetic oligonucleotide
  Antisense strand to SEQ ID NO: 110468
uauuugacaacagacugca

SEQ ID NO: 110470 - RNA, 19 nt, Artificial Sequence
  Description of Artificial Sequence: Synthetic oligonucleotide
  Sense strand starting at position 3697 of SEQ ID NO: 1404
ccaucuguguuucugacua

SEQ ID NO: 110471 - RNA, 19 nt, Artificial Sequence
  Description of Artificial Sequence: Synthetic oligonucleotide
  Antisense strand to SEQ ID NO: 110470
uagucagaaacacagaugg

SEQ ID NO: 110472 - RNA, 19 nt, Artificial Sequence
  Description of Artificial Sequence: Synthetic oligonucleotide
  Sense strand starting at position 3760 of SEQ ID NO: 1404
aggaucucuguauggagau

SEQ ID NO: 110473 - RNA, 19 nt, Artificial Sequence
  Description of Artificial Sequence: Synthetic oligonucleotide
  Antisense strand to SEQ ID NO: 110472
aucuccauacagagauccu

SEQ ID NO: 110474 - RNA, 19 nt, Artificial Sequence
  Description of Artificial Sequence: Synthetic oligonucleotide
  Sense strand starting at position 3772 of SEQ ID NO: 1404
uggagauucuucucuaucu

SEQ ID NO: 110475 - RNA, 19 nt, Artificial Sequence
  Description of Artificial Sequence: Synthetic oligonucleotide
  Antisense strand to SEQ ID NO: 110474
agauagagaagaaucucca

SEQ ID NO: 110476 - RNA, 19 nt, Artificial Sequence
  Description of Artificial Sequence: Synthetic oligonucleotide
  Sense strand starting at position 3773 of SEQ ID NO: 1404
ggagauucuucucuaucuu

SEQ ID NO: 110477 - RNA, 19 nt, Artificial Sequence
  Description of Artificial Sequence: Synthetic oligonucleotide
  Antisense strand to SEQ ID NO: 110476
aagauagagaagaaucucc

SEQ ID NO: 110478 - RNA, 19 nt, Artificial Sequence
  Description of Artificial Sequence: Synthetic oligonucleotide
  Sense strand starting at position 3929 of SEQ ID NO: 1404
cagagcugucucugaagcu

SEQ ID NO: 110479 - RNA, 19 nt, Artificial Sequence
  Description of Artificial Sequence: Synthetic oligonucleotide
  Antisense strand to SEQ ID NO: 110478
agcuucagagacagcucug

SEQ ID NO: 110480 - RNA, 19 nt, Artificial Sequence
  Description of Artificial Sequence: Synthetic oligonucleotide
  Sense strand starting at position 3919 of SEQ ID NO: 1405
ucuaaugauuggucaacaa

SEQ ID NO: 110481 - RNA, 19 nt, Artificial Sequence
  Description of Artificial Sequence: Synthetic oligonucleotide
  Antisense strand to SEQ ID NO: 110480
uuguugaccaaucauuaga

SEQ ID NO: 110482 - RNA, 19 nt, Artificial Sequence
  Description of Artificial Sequence: Synthetic oligonucleotide
  Sense strand starting at position 3918 of SEQ ID NO: 1405
cucuaaugauuggucaaca

SEQ ID NO: 110483 - RNA, 19 nt, Artificial Sequence
  Description of Artificial Sequence: Synthetic oligonucleotide
  Antisense strand to SEQ ID NO: 110482
uguugaccaaucauuagag

SEQ ID NO: 110484 - RNA, 19 nt, Artificial Sequence
  Description of Artificial Sequence: Synthetic oligonucleotide
  Sense strand starting at position 3916 of SEQ ID NO: 1405
gccucuaaugauuggucaa

SEQ ID NO: 110485 - RNA, 19 nt, Artificial Sequence
  Description of Artificial Sequence: Synthetic oligonucleotide
  Antisense strand to SEQ ID NO: 110484
uugaccaaucauuagaggc

SEQ ID NO: 110486 - RNA, 19 nt, Artificial Sequence
  Description of Artificial Sequence: Synthetic oligonucleotide
  Sense strand starting at position 3909 of SEQ ID NO: 1405
uugaaacgccucuaaugau

SEQ ID NO: 110487 - RNA, 19 nt, Artificial Sequence
  Description of Artificial Sequence: Synthetic oligonucleotide
  Antisense strand to SEQ ID NO: 110486
aucauuagaggcguuucaa

SEQ ID NO: 110488 - RNA, 19 nt, Artificial Sequence
  Description of Artificial Sequence: Synthetic oligonucleotide
  Sense strand starting at position 3849 of SEQ ID NO: 1405
gcuacaggcccugauguaa

SEQ ID NO: 110489 - RNA, 19 nt, Artificial Sequence
  Description of Artificial Sequence: Synthetic oligonucleotide
  Antisense strand to SEQ ID NO: 110488
uuacaucagggccuguagc

SEQ ID NO: 110490 - RNA, 19 nt, Artificial Sequence
  Description of Artificial Sequence: Synthetic oligonucleotide
  Sense strand starting at position 3738 of SEQ ID NO: 1405
gguauauuccuugaagcag

SEQ ID NO: 110491 - RNA, 19 nt, Artificial Sequence
  Description of Artificial Sequence: Synthetic oligonucleotide
  Antisense strand to SEQ ID NO: 110490
cugcuucaaggaauauacc

SEQ ID NO: 110492 - RNA, 19 nt, Artificial Sequence
  Description of Artificial Sequence: Synthetic oligonucleotide
  Sense strand starting at position 3737 of SEQ ID NO: 1405
agguauauuccuugaagca

SEQ ID NO: 110493 - RNA, 19 nt, Artificial Sequence
  Description of Artificial Sequence: Synthetic oligonucleotide
  Antisense strand to SEQ ID NO: 110492
ugcuucaaggaauauaccu

SEQ ID NO: 110494 - RNA, 19 nt, Artificial Sequence
  Description of Artificial Sequence: Synthetic oligonucleotide
  Sense strand starting at position 3736 of SEQ ID NO: 1405
uagguauauuccuugaagc

SEQ ID NO: 110495 - RNA, 19 nt, Artificial Sequence
  Description of Artificial Sequence: Synthetic oligonucleotide
  Antisense strand to SEQ ID NO: 110494
gcuucaaggaauauaccua

SEQ ID NO: 110496 - RNA, 19 nt, Artificial Sequence
  Description of Artificial Sequence: Synthetic oligonucleotide
  Sense strand starting at position 3735 of SEQ ID NO: 1405
uuagguauauuccuugaag

SEQ ID NO: 110497 - RNA, 19 nt, Artificial Sequence
  Description of Artificial Sequence: Synthetic oligonucleotide
  Antisense strand to SEQ ID NO: 110496
cuucaaggaauauaccuaa

SEQ ID NO: 110498 - RNA, 19 nt, Artificial Sequence
  Description of Artificial Sequence: Synthetic oligonucleotide
  Sense strand starting at position 2771 of SEQ ID NO: 1405
gagaaagcuccuugggaac

SEQ ID NO: 110499 - RNA, 19 nt, Artificial Sequence
  Description of Artificial Sequence: Synthetic oligonucleotide
  Antisense strand to SEQ ID NO: 110498
guucccaaggagcuuucuc

SEQ ID NO: 110500 - RNA, 19 nt, Artificial Sequence
  Description of Artificial Sequence: Synthetic oligonucleotide
  Sense strand starting at position 2657 of SEQ ID NO: 1405
gaucgucacagccaugagu

SEQ ID NO: 110501 - RNA, 19 nt, Artificial Sequence
  Description of Artificial Sequence: Synthetic oligonucleotide
  Antisense strand to SEQ ID NO: 110500
acucauggcugugacgauc

SEQ ID NO: 110502 - RNA, 19 nt, Artificial Sequence
  Description of Artificial Sequence: Synthetic oligonucleotide
  Sense strand starting at position 2621 of SEQ ID NO: 1405
cgcucacacguugucauau

SEQ ID NO: 110503 - RNA, 19 nt, Artificial Sequence
  Description of Artificial Sequence: Synthetic oligonucleotide
  Antisense strand to SEQ ID NO: 110502
auaugacaacgugugagcg

SEQ ID NO: 110504 - RNA, 19 nt, Artificial Sequence
  Description of Artificial Sequence: Synthetic oligonucleotide
  Sense strand starting at position 2568 of SEQ ID NO: 1405
cggccaugauaauuaacau

SEQ ID NO: 110505 - RNA, 19 nt, Artificial Sequence
  Description of Artificial Sequence: Synthetic oligonucleotide
  Antisense strand to SEQ ID NO: 110504
auguuaauuaucauggccg

SEQ ID NO: 110506 - RNA, 19 nt, Artificial Sequence
  Description of Artificial Sequence: Synthetic oligonucleotide
  Sense strand starting at position 2562 of SEQ ID NO: 1405
uuaucacggccaugauaau

SEQ ID NO: 110507 - RNA, 19 nt, Artificial Sequence
  Description of Artificial Sequence: Synthetic oligonucleotide
  Antisense strand to SEQ ID NO: 110506
auuaucauggccgugauaa

SEQ ID NO: 110508 - RNA, 19 nt, Artificial Sequence
  Description of Artificial Sequence: Synthetic oligonucleotide
  Sense strand starting at position 2115 of SEQ ID NO: 1405
uugcuugaagcauaaggga

SEQ ID NO: 110509 - RNA, 19 nt, Artificial Sequence
  Description of Artificial Sequence: Synthetic oligonucleotide
  Antisense strand to SEQ ID NO: 110508
ucccuuaugcuucaagcaa

SEQ ID NO: 110510 - RNA, 19 nt, Artificial Sequence
  Description of Artificial Sequence: Synthetic oligonucleotide
  Sense strand starting at position 2036 of SEQ ID NO: 1405
aggcauuucgcgcaggcaa

SEQ ID NO: 110511 - RNA, 19 nt, Artificial Sequence
  Description of Artificial Sequence: Synthetic oligonucleotide
  Antisense strand to SEQ ID NO: 110510
uugccugcgcgaaaugccu

SEQ ID NO: 110512 - RNA, 19 nt, Artificial Sequence
  Description of Artificial Sequence: Synthetic oligonucleotide
  Sense strand starting at position 1833 of SEQ ID NO: 1405
gguguuaaucacuacucac

SEQ ID NO: 110513 - RNA, 19 nt, Artificial Sequence
  Description of Artificial Sequence: Synthetic oligonucleotide
  Antisense strand to SEQ ID NO: 110512
gugaguagugauuaacacc

SEQ ID NO: 110514 - RNA, 19 nt, Artificial Sequence
  Description of Artificial Sequence: Synthetic oligonucleotide
  Sense strand starting at position 1631 of SEQ ID NO: 1405
uggcaucaccuuuaguaag

SEQ ID NO: 110515 - RNA, 19 nt, Artificial Sequence
  Description of Artificial Sequence: Synthetic oligonucleotide
  Antisense strand to SEQ ID NO: 110514
cuuacuaaaggugaugcca

SEQ ID NO: 110516 - RNA, 19 nt, Artificial Sequence
  Description of Artificial Sequence: Synthetic oligonucleotide
  Sense strand starting at position 1452 of SEQ ID NO: 1405
cuuacaacucgaggagaca

SEQ ID NO: 110517 - RNA, 19 nt, Artificial Sequence
  Description of Artificial Sequence: Synthetic oligonucleotide
  Antisense strand to SEQ ID NO: 110516
ugucuccucgaguuguaag

SEQ ID NO: 110518 - RNA, 19 nt, Artificial Sequence
  Description of Artificial Sequence: Synthetic oligonucleotide
  Sense strand starting at position 1277 of SEQ ID NO: 1405
agcgucuguauucgaauuu

SEQ ID NO: 110519 - RNA, 19 nt, Artificial Sequence
  Description of Artificial Sequence: Synthetic oligonucleotide
  Antisense strand to SEQ ID NO: 110518
aaauucgaauacagacgcu

SEQ ID NO: 110520 - RNA, 19 nt, Artificial Sequence
  Description of Artificial Sequence: Synthetic oligonucleotide
  Sense strand starting at position 1270 of SEQ ID NO: 1405
ggcucauagcgucuguauu

SEQ ID NO: 110521 - RNA, 19 nt, Artificial Sequence
  Description of Artificial Sequence: Synthetic oligonucleotide
  Antisense strand to SEQ ID NO: 110520
aauacagacgcuaugagcc

SEQ ID NO: 110522 - RNA, 19 nt, Artificial Sequence
  Description of Artificial Sequence: Synthetic oligonucleotide
  Sense strand starting at position 1269 of SEQ ID NO: 1405
uggcucauagcgucuguau

SEQ ID NO: 110523 - RNA, 19 nt, Artificial Sequence
  Description of Artificial Sequence: Synthetic oligonucleotide
  Antisense strand to SEQ ID NO: 110522
auacagacgcuaugagcca

SEQ ID NO: 110524 - RNA, 19 nt, Artificial Sequence
  Description of Artificial Sequence: Synthetic oligonucleotide
  Sense strand starting at position 1208 of SEQ ID NO: 1405
guuuaucucgaugacggau

SEQ ID NO: 110525 - RNA, 19 nt, Artificial Sequence
  Description of Artificial Sequence: Synthetic oligonucleotide
  Antisense strand to SEQ ID NO: 110524
auccgucaucgagauaaac

SEQ ID NO: 110526 - RNA, 19 nt, Artificial Sequence
  Description of Artificial Sequence: Synthetic oligonucleotide
  Sense strand starting at position 1107 of SEQ ID NO: 1405
gucaccucugcguugucaa

SEQ ID NO: 110527 - RNA, 19 nt, Artificial Sequence
  Description of Artificial Sequence: Synthetic oligonucleotide
  Antisense strand to SEQ ID NO: 110526
uugacaacgcagaggugac

SEQ ID NO: 110528 - RNA, 19 nt, Artificial Sequence
  Description of Artificial Sequence: Synthetic oligonucleotide
  Sense strand starting at position 1085 of SEQ ID NO: 1405
acauaugcccgagaggcaa

SEQ ID NO: 110529 - RNA, 19 nt, Artificial Sequence
  Description of Artificial Sequence: Synthetic oligonucleotide
  Antisense strand to SEQ ID NO: 110528
uugccucucgggcauaugu

SEQ ID NO: 110530 - RNA, 19 nt, Artificial Sequence
  Description of Artificial Sequence: Synthetic oligonucleotide
  Sense strand starting at position 1007 of SEQ ID NO: 1405
gcuguacucccuuauaaga

SEQ ID NO: 110531 - RNA, 19 nt, Artificial Sequence
  Description of Artificial Sequence: Synthetic oligonucleotide
  Antisense strand to SEQ ID NO: 110530
ucuuauaagggaguacagc

SEQ ID NO: 110532 - RNA, 19 nt, Artificial Sequence
  Description of Artificial Sequence: Synthetic oligonucleotide
  Sense strand starting at position 744 of SEQ ID NO: 1405
agaccuuagcgacauguca

SEQ ID NO: 110533 - RNA, 19 nt, Artificial Sequence
  Description of Artificial Sequence: Synthetic oligonucleotide
  Antisense strand to SEQ ID NO: 110532
ugacaugucgcuaaggucu

SEQ ID NO: 110534 - RNA, 19 nt, Artificial Sequence
  Description of Artificial Sequence: Synthetic oligonucleotide
  Sense strand starting at position 645 of SEQ ID NO: 1405
agucaagaaugccuuucua

SEQ ID NO: 110535 - RNA, 19 nt, Artificial Sequence
  Description of Artificial Sequence: Synthetic oligonucleotide
  Antisense strand to SEQ ID NO: 110534
uagaaaggcauucuugacu

SEQ ID NO: 110536 - RNA, 19 nt, Artificial Sequence
  Description of Artificial Sequence: Synthetic oligonucleotide
  Sense strand starting at position 506 of SEQ ID NO: 1405
gccugacagugacuucuau

SEQ ID NO: 110537 - RNA, 19 nt, Artificial Sequence
  Description of Artificial Sequence: Synthetic oligonucleotide
  Antisense strand to SEQ ID NO: 110536
auagaagucacugucaggc

SEQ ID NO: 110538 - RNA, 19 nt, Artificial Sequence
  Description of Artificial Sequence: Synthetic oligonucleotide
  Sense strand starting at position 416 of SEQ ID NO: 1405
gaagcagucauggaguuga

SEQ ID NO: 110539 - RNA, 19 nt, Artificial Sequence
  Description of Artificial Sequence: Synthetic oligonucleotide
  Antisense strand to SEQ ID NO: 110538
ucaacuccaugacugcuuc

SEQ ID NO: 110540 - RNA, 19 nt, Artificial Sequence
  Description of Artificial Sequence: Synthetic oligonucleotide
  Sense strand starting at position 358 of SEQ ID NO: 1405
uuaagaguggcucaggguu

SEQ ID NO: 110541 - RNA, 19 nt, Artificial Sequence
  Description of Artificial Sequence: Synthetic oligonucleotide
  Antisense strand to SEQ ID NO: 110540
aacccugagccacucuuaa

SEQ ID NO: 110542 - RNA, 19 nt, Artificial Sequence
  Description of Artificial Sequence: Synthetic oligonucleotide
  Sense strand starting at position 347 of SEQ ID NO: 1405
ucauaagagccuuaagagu

SEQ ID NO: 110543 - RNA, 19 nt, Artificial Sequence
  Description of Artificial Sequence: Synthetic oligonucleotide
  Antisense strand to SEQ ID NO: 110542
acucuuaaggcucuuauga

SEQ ID NO: 110544 - RNA, 19 nt, Artificial Sequence
  Description of Artificial Sequence: Synthetic oligonucleotide
  Sense strand starting at position 306 of SEQ ID NO: 1405
uguguuacauuucuguaaa

SEQ ID NO: 110545 - RNA, 19 nt, Artificial Sequence
  Description of Artificial Sequence: Synthetic oligonucleotide
  Antisense strand to SEQ ID NO: 110544
uuuacagaaauguaacaca

SEQ ID NO: 110546 - RNA, 19 nt, Artificial Sequence
  Description of Artificial Sequence: Synthetic oligonucleotide
  Sense strand starting at position 245 of SEQ ID NO: 1405
ugcaaucuuguggaaagca

SEQ ID NO: 110547 - RNA, 19 nt, Artificial Sequence
  Description of Artificial Sequence: Synthetic oligonucleotide
  Antisense strand to SEQ ID NO: 110546
ugcuuuccacaagauugca

SEQ ID NO: 110548 - RNA, 19 nt, Artificial Sequence
  Description of Artificial Sequence: Synthetic oligonucleotide
  Sense strand starting at position 232 of SEQ ID NO: 1405
augaauauguguuugcaau

SEQ ID NO: 110549 - RNA, 19 nt, Artificial Sequence
  Description of Artificial Sequence: Synthetic oligonucleotide
  Antisense strand to SEQ ID NO: 110548
auugcaaacacauauucau

SEQ ID NO: 110550 - RNA, 19 nt, Artificial Sequence
  Description of Artificial Sequence: Synthetic oligonucleotide
  Sense strand starting at position 208 of SEQ ID NO: 1405
agacuucccugccuguaaa

SEQ ID NO: 110551 - RNA, 19 nt, Artificial Sequence
  Description of Artificial Sequence: Synthetic oligonucleotide
  Antisense strand to SEQ ID NO: 110550
uuuacaggcagggaagucu

SEQ ID NO: 110552 - RNA, 19 nt, Artificial Sequence
  Description of Artificial Sequence: Synthetic oligonucleotide
  Sense strand starting at position 172 of SEQ ID NO: 1405
cggguaacuuuaucaggua

SEQ ID NO: 110553 - RNA, 19 nt, Artificial Sequence
  Description of Artificial Sequence: Synthetic oligonucleotide
  Antisense strand to SEQ ID NO: 110552
uaccugauaaaguuacccg

SEQ ID NO: 110554 - RNA, 19 nt, Artificial Sequence
  Description of Artificial Sequence: Synthetic oligonucleotide
  Sense strand starting at position 121 of SEQ ID NO: 1405
ugcagacgagguuauauau

SEQ ID NO: 110555 - RNA, 19 nt, Artificial Sequence
  Description of Artificial Sequence: Synthetic oligonucleotide
  Antisense strand to SEQ ID NO: 110554
auauauaaccucgucugca

SEQ ID NO: 110556 - RNA, 19 nt, Artificial Sequence
  Description of Artificial Sequence: Synthetic oligonucleotide
  Sense strand starting at position 90 of SEQ ID NO: 1405
agggccucaggaugaaauu

SEQ ID NO: 110557 - RNA, 19 nt, Artificial Sequence
  Description of Artificial Sequence: Synthetic oligonucleotide
  Antisense strand to SEQ ID NO: 110556
aauuucauccugaggcccu

SEQ ID NO: 110558 - RNA, 19 nt, Artificial Sequence
  Description of Artificial Sequence: Synthetic oligonucleotide
  Sense strand starting at position 8 of SEQ ID NO: 1405
uguccaguccugggauaca

SEQ ID NO: 110559 - RNA, 19 nt, Artificial Sequence
  Description of Artificial Sequence: Synthetic oligonucleotide
  Antisense strand to SEQ ID NO: 110558
uguaucccaggacuggaca

SEQ ID NO: 110560 - RNA, 19 nt, Artificial Sequence
  Description of Artificial Sequence: Synthetic oligonucleotide
  Sense strand starting at position 3911 of SEQ ID NO: 1408
gaaaucccugggugaucaa

SEQ ID NO: 110561 - RNA, 19 nt, Artificial Sequence
  Description of Artificial Sequence: Synthetic oligonucleotide
  Antisense strand to SEQ ID NO: 110560
uugaucacccagggauuuc

SEQ ID NO: 110562 - RNA, 19 nt, Artificial Sequence
  Description of Artificial Sequence: Synthetic oligonucleotide
  Sense strand starting at position 3909 of SEQ ID NO: 1408
uugaaaucccugggugauc

SEQ ID NO: 110563 - RNA, 19 nt, Artificial Sequence
  Description of Artificial Sequence: Synthetic oligonucleotide
  Antisense strand to SEQ ID NO: 110562
gaucacccagggauuucaa

SEQ ID NO: 110564 - RNA, 19 nt, Artificial Sequence
  Description of Artificial Sequence: Synthetic oligonucleotide
  Sense strand starting at position 3908 of SEQ ID NO: 1408
cuugaaaucccugggugau

SEQ ID NO: 110565 - RNA, 19 nt, Artificial Sequence
  Description of Artificial Sequence: Synthetic oligonucleotide
  Antisense strand to SEQ ID NO: 110564
aucacccagggauuucaag

SEQ ID NO: 110566 - RNA, 19 nt, Artificial Sequence
  Description of Artificial Sequence: Synthetic oligonucleotide
  Sense strand starting at position 3877 of SEQ ID NO: 1408
gugcaauggcgugaugaua

SEQ ID NO: 110567 - RNA, 19 nt, Artificial Sequence
  Description of Artificial Sequence: Synthetic oligonucleotide
  Antisense strand to SEQ ID NO: 110566
uaucaucacgccauugcac

SEQ ID NO: 110568 - RNA, 19 nt, Artificial Sequence
  Description of Artificial Sequence: Synthetic oligonucleotide
  Sense strand starting at position 3492 of SEQ ID NO: 1408
ggaauaugguuucugacuu

SEQ ID NO: 110569 - RNA, 19 nt, Artificial Sequence
  Description of Artificial Sequence: Synthetic oligonucleotide
  Antisense strand to SEQ ID NO: 110568
aagucagaaaccauauucc

SEQ ID NO: 110570 - RNA, 19 nt, Artificial Sequence
  Description of Artificial Sequence: Synthetic oligonucleotide
  Sense strand starting at position 3489 of SEQ ID NO: 1408
uauggaauaugguuucuga

SEQ ID NO: 110571 - RNA, 19 nt, Artificial Sequence
  Description of Artificial Sequence: Synthetic oligonucleotide
  Antisense strand to SEQ ID NO: 110570
ucagaaaccauauuccaua

SEQ ID NO: 110572 - RNA, 19 nt, Artificial Sequence
  Description of Artificial Sequence: Synthetic oligonucleotide
  Sense strand starting at position 3479 of SEQ ID NO: 1408
uauaaagugcuauggaaua

SEQ ID NO: 110573 - RNA, 19 nt, Artificial Sequence
  Description of Artificial Sequence: Synthetic oligonucleotide
  Antisense strand to SEQ ID NO: 110572
uauuccauagcacuuuaua

SEQ ID NO: 110574 - RNA, 19 nt, Artificial Sequence
  Description of Artificial Sequence: Synthetic oligonucleotide
  Sense strand starting at position 3463 of SEQ ID NO: 1408
aguguccuaagagaaguau

SEQ ID NO: 110575 - RNA, 19 nt, Artificial Sequence
  Description of Artificial Sequence: Synthetic oligonucleotide
  Antisense strand to SEQ ID NO: 110574
auacuucucuuaggacacu

SEQ ID NO: 110576 - RNA, 19 nt, Artificial Sequence
  Description of Artificial Sequence: Synthetic oligonucleotide
  Sense strand starting at position 3456 of SEQ ID NO: 1408
gaagauaaguguccuaaga

SEQ ID NO: 110577 - RNA, 19 nt, Artificial Sequence
  Description of Artificial Sequence: Synthetic oligonucleotide
  Antisense strand to SEQ ID NO: 110576
ucuuaggacacuuaucuuc

SEQ ID NO: 110578 - RNA, 19 nt, Artificial Sequence
  Description of Artificial Sequence: Synthetic oligonucleotide
  Sense strand starting at position 3453 of SEQ ID NO: 1408
gcagaagauaaguguccua

SEQ ID NO: 110579 - RNA, 19 nt, Artificial Sequence
  Description of Artificial Sequence: Synthetic oligonucleotide
  Antisense strand to SEQ ID NO: 110578
uaggacacuuaucuucugc

SEQ ID NO: 110580 - RNA, 19 nt, Artificial Sequence
  Description of Artificial Sequence: Synthetic oligonucleotide
  Sense strand starting at position 3398 of SEQ ID NO: 1408
ucucgaagagcauagucua

SEQ ID NO: 110581 - RNA, 19 nt, Artificial Sequence
  Description of Artificial Sequence: Synthetic oligonucleotide
  Antisense strand to SEQ ID NO: 110580
uagacuaugcucuucgaga

SEQ ID NO: 110582 - RNA, 19 nt, Artificial Sequence
  Description of Artificial Sequence: Synthetic oligonucleotide
  Sense strand starting at position 3393 of SEQ ID NO: 1408
gcuggucucgaagagcaua

SEQ ID NO: 110583 - RNA, 19 nt, Artificial Sequence
  Description of Artificial Sequence: Synthetic oligonucleotide
  Antisense strand to SEQ ID NO: 110582
uaugcucuucgagaccagc

SEQ ID NO: 110584 - RNA, 19 nt, Artificial Sequence
  Description of Artificial Sequence: Synthetic oligonucleotide
  Sense strand starting at position 3170 of SEQ ID NO: 1408
gcagauguaucagcauaaa

SEQ ID NO: 110585 - RNA, 19 nt, Artificial Sequence
  Description of Artificial Sequence: Synthetic oligonucleotide
  Antisense strand to SEQ ID NO: 110584
uuuaugcugauacaucugc

SEQ ID NO: 110586 - RNA, 19 nt, Artificial Sequence
  Description of Artificial Sequence: Synthetic oligonucleotide
  Sense strand starting at position 3161 of SEQ ID NO: 1408
uuaauacaagcagauguau

SEQ ID NO: 110587 - RNA, 19 nt, Artificial Sequence
  Description of Artificial Sequence: Synthetic oligonucleotide
  Antisense strand to SEQ ID NO: 110586
auacaucugcuuguauuaa

SEQ ID NO: 110588 - RNA, 19 nt, Artificial Sequence
  Description of Artificial Sequence: Synthetic oligonucleotide
  Sense strand starting at position 2691 of SEQ ID NO: 1408
ucgggaagcguuugauaag

SEQ ID NO: 110589 - RNA, 19 nt, Artificial Sequence
  Description of Artificial Sequence: Synthetic oligonucleotide
  Antisense strand to SEQ ID NO: 110588
cuuaucaaacgcuucccga

SEQ ID NO: 110590 - RNA, 19 nt, Artificial Sequence
  Description of Artificial Sequence: Synthetic oligonucleotide
  Sense strand starting at position 2626 of SEQ ID NO: 1408
cgaauuucuuuagagacca

SEQ ID NO: 110591 - RNA, 19 nt, Artificial Sequence
  Description of Artificial Sequence: Synthetic oligonucleotide
  Antisense strand to SEQ ID NO: 110590
uggucucuaaagaaauucg

SEQ ID NO: 110592 - RNA, 19 nt, Artificial Sequence
  Description of Artificial Sequence: Synthetic oligonucleotide
  Sense strand starting at position 2606 of SEQ ID NO: 1408
ucgggaguucauuacuaga

SEQ ID NO: 110593 - RNA, 19 nt, Artificial Sequence
  Description of Artificial Sequence: Synthetic oligonucleotide
  Antisense strand to SEQ ID NO: 110592
ucuaguaaugaacucccga

SEQ ID NO: 110594 - RNA, 19 nt, Artificial Sequence
  Description of Artificial Sequence: Synthetic oligonucleotide
  Sense strand starting at position 2580 of SEQ ID NO: 1408
ccuaguguucuauauacua

SEQ ID NO: 110595 - RNA, 19 nt, Artificial Sequence
  Description of Artificial Sequence: Synthetic oligonucleotide
  Antisense strand to SEQ ID NO: 110594
uaguauauagaacacuagg

SEQ ID NO: 110596 - RNA, 19 nt, Artificial Sequence
  Description of Artificial Sequence: Synthetic oligonucleotide
  Sense strand starting at position 2508 of SEQ ID NO: 1408
uuacgugauccugaaccca

SEQ ID NO: 110597 - RNA, 19 nt, Artificial Sequence
  Description of Artificial Sequence: Synthetic oligonucleotide
  Antisense strand to SEQ ID NO: 110596
uggguucaggaucacguaa

SEQ ID NO: 110598 - RNA, 19 nt, Artificial Sequence
  Description of Artificial Sequence: Synthetic oligonucleotide
  Sense strand starting at position 2504 of SEQ ID NO: 1408
ucuguuacgugauccugaa

SEQ ID NO: 110599 - RNA, 19 nt, Artificial Sequence
  Description of Artificial Sequence: Synthetic oligonucleotide
  Antisense strand to SEQ ID NO: 110598
uucaggaucacguaacaga

SEQ ID NO: 110600 - RNA, 19 nt, Artificial Sequence
  Description of Artificial Sequence: Synthetic oligonucleotide
  Sense strand starting at position 2450 of SEQ ID NO: 1408
gcaagacagcucgaaacua

SEQ ID NO: 110601 - RNA, 19 nt, Artificial Sequence
  Description of Artificial Sequence: Synthetic oligonucleotide
  Antisense strand to SEQ ID NO: 110600
uaguuucgagcugucuugc

SEQ ID NO: 110602 - RNA, 19 nt, Artificial Sequence
  Description of Artificial Sequence: Synthetic oligonucleotide
  Sense strand starting at position 2437 of SEQ ID NO: 1408
agguuauggcugggcaaga

SEQ ID NO: 110603 - RNA, 19 nt, Artificial Sequence
  Description of Artificial Sequence: Synthetic oligonucleotide
  Antisense strand to SEQ ID NO: 110602
ucuugcccagccauaaccu

SEQ ID NO: 110604 - RNA, 19 nt, Artificial Sequence
  Description of Artificial Sequence: Synthetic oligonucleotide
  Sense strand starting at position 2435 of SEQ ID NO: 1408
acagguuauggcugggcaa

SEQ ID NO: 110605 - RNA, 19 nt, Artificial Sequence
  Description of Artificial Sequence: Synthetic oligonucleotide
  Antisense strand to SEQ ID NO: 110604
uugcccagccauaaccugu

SEQ ID NO: 110606 - RNA, 19 nt, Artificial Sequence
  Description of Artificial Sequence: Synthetic oligonucleotide
  Sense strand starting at position 2370 of SEQ ID NO: 1408
ggaagaugcacaggucuga

SEQ ID NO: 110607 - RNA, 19 nt, Artificial Sequence
  Description of Artificial Sequence: Synthetic oligonucleotide
  Antisense strand to SEQ ID NO: 110606
ucagaccugugcaucuucc

SEQ ID NO: 110608 - RNA, 19 nt, Artificial Sequence
  Description of Artificial Sequence: Synthetic oligonucleotide
  Sense strand starting at position 1481 of SEQ ID NO: 1408
ucugcucgccgccugaaua

SEQ ID NO: 110609 - RNA, 19 nt, Artificial Sequence
  Description of Artificial Sequence: Synthetic oligonucleotide
  Antisense strand to SEQ ID NO: 110608
uauucaggcggcgagcaga

SEQ ID NO: 110610 - RNA, 19 nt, Artificial Sequence
  Description of Artificial Sequence: Synthetic oligonucleotide
  Sense strand starting at position 1362 of SEQ ID NO: 1408
uuuauacugugagccugaa

SEQ ID NO: 110611 - RNA, 19 nt, Artificial Sequence
  Description of Artificial Sequence: Synthetic oligonucleotide
  Antisense strand to SEQ ID NO: 110610
uucaggcucacaguauaaa

SEQ ID NO: 110612 - RNA, 19 nt, Artificial Sequence
  Description of Artificial Sequence: Synthetic oligonucleotide
  Sense strand starting at position 1329 of SEQ ID NO: 1408
gcaauaaauuucuaggauu

SEQ ID NO: 110613 - RNA, 19 nt, Artificial Sequence
  Description of Artificial Sequence: Synthetic oligonucleotide
  Antisense strand to SEQ ID NO: 110612
aauccuagaaauuuauugc

SEQ ID NO: 110614 - RNA, 19 nt, Artificial Sequence
  Description of Artificial Sequence: Synthetic oligonucleotide
  Sense strand starting at position 1289 of SEQ ID NO: 1408
ugaggaaggugagauauga

SEQ ID NO: 110615 - RNA, 19 nt, Artificial Sequence
  Description of Artificial Sequence: Synthetic oligonucleotide
  Antisense strand to SEQ ID NO: 110614
ucauaucucaccuuccuca

SEQ ID NO: 110616 - RNA, 19 nt, Artificial Sequence
  Description of Artificial Sequence: Synthetic oligonucleotide
  Sense strand starting at position 1091 of SEQ ID NO: 1408
aucaaauguguggauaguu

SEQ ID NO: 110617 - RNA, 19 nt, Artificial Sequence
  Description of Artificial Sequence: Synthetic oligonucleotide
  Antisense strand to SEQ ID NO: 110616
aacuauccacacauuugau

SEQ ID NO: 110618 - RNA, 19 nt, Artificial Sequence
  Description of Artificial Sequence: Synthetic oligonucleotide
  Sense strand starting at position 1089 of SEQ ID NO: 1408
caaucaaauguguggauag

SEQ ID NO: 110619 - RNA, 19 nt, Artificial Sequence
  Description of Artificial Sequence: Synthetic oligonucleotide
  Antisense strand to SEQ ID NO: 110618
cuauccacacauuugauug

SEQ ID NO: 110620 - RNA, 19 nt, Artificial Sequence
  Description of Artificial Sequence: Synthetic oligonucleotide
  Sense strand starting at position 1088 of SEQ ID NO: 1408
ccaaucaaauguguggaua

SEQ ID NO: 110621 - RNA, 19 nt, Artificial Sequence
  Description of Artificial Sequence: Synthetic oligonucleotide
  Antisense strand to SEQ ID NO: 110620
uauccacacauuugauugg

SEQ ID NO: 110622 - RNA, 19 nt, Artificial Sequence
  Description of Artificial Sequence: Synthetic oligonucleotide
  Sense strand starting at position 1074 of SEQ ID NO: 1408
gcuaguagggcucaccaau

SEQ ID NO: 110623 - RNA, 19 nt, Artificial Sequence
  Description of Artificial Sequence: Synthetic oligonucleotide
  Antisense strand to SEQ ID NO: 110622
auuggugagcccuacuagc

SEQ ID NO: 110624 - RNA, 19 nt, Artificial Sequence
  Description of Artificial Sequence: Synthetic oligonucleotide
  Sense strand starting at position 952 of SEQ ID NO: 1408
uaggcaggauucucagauu

SEQ ID NO: 110625 - RNA, 19 nt, Artificial Sequence
  Description of Artificial Sequence: Synthetic oligonucleotide
  Antisense strand to SEQ ID NO: 110624
aaucugagaauccugccua

SEQ ID NO: 110626 - RNA, 19 nt, Artificial Sequence
  Description of Artificial Sequence: Synthetic oligonucleotide
  Sense strand starting at position 667 of SEQ ID NO: 1408
ucgcuauuucccugauacc

SEQ ID NO: 110627 - RNA, 19 nt, Artificial Sequence
  Description of Artificial Sequence: Synthetic oligonucleotide
  Antisense strand to SEQ ID NO: 110626
gguaucagggaaauagcga

SEQ ID NO: 110628 - RNA, 19 nt, Artificial Sequence
  Description of Artificial Sequence: Synthetic oligonucleotide
  Sense strand starting at position 665 of SEQ ID NO: 1408
ccucgcuauuucccugaua

SEQ ID NO: 110629 - RNA, 19 nt, Artificial Sequence
  Description of Artificial Sequence: Synthetic oligonucleotide
  Antisense strand to SEQ ID NO: 110628
uaucagggaaauagcgagg

SEQ ID NO: 110630 - RNA, 19 nt, Artificial Sequence
  Description of Artificial Sequence: Synthetic oligonucleotide
  Sense strand starting at position 595 of SEQ ID NO: 1408
cugacuucucaaggcucua

SEQ ID NO: 110631 - RNA, 19 nt, Artificial Sequence
  Description of Artificial Sequence: Synthetic oligonucleotide
  Antisense strand to SEQ ID NO: 110630
uagagccuugagaagucag

SEQ ID NO: 110632 - RNA, 19 nt, Artificial Sequence
  Description of Artificial Sequence: Synthetic oligonucleotide
  Sense strand starting at position 390 of SEQ ID NO: 1408
gagaaacaauucuggagaa

SEQ ID NO: 110633 - RNA, 19 nt, Artificial Sequence
  Description of Artificial Sequence: Synthetic oligonucleotide
  Antisense strand to SEQ ID NO: 110632
uucuccagaauuguuucuc

SEQ ID NO: 110634 - RNA, 19 nt, Artificial Sequence
  Description of Artificial Sequence: Synthetic oligonucleotide
  Sense strand starting at position 358 of SEQ ID NO: 1408
cccuaaauccuugggucaa

SEQ ID NO: 110635 - RNA, 19 nt, Artificial Sequence
  Description of Artificial Sequence: Synthetic oligonucleotide
  Antisense strand to SEQ ID NO: 110634
uugacccaaggauuuaggg

SEQ ID NO: 110636 - RNA, 19 nt, Artificial Sequence
  Description of Artificial Sequence: Synthetic oligonucleotide
  Sense strand starting at position 323 of SEQ ID NO: 1408
gauaguuuauaggcuagga

SEQ ID NO: 110637 - RNA, 19 nt, Artificial Sequence
  Description of Artificial Sequence: Synthetic oligonucleotide
  Antisense strand to SEQ ID NO: 110636
uccuagccuauaaacuauc

SEQ ID NO: 110638 - RNA, 19 nt, Artificial Sequence
  Description of Artificial Sequence: Synthetic oligonucleotide
  Sense strand starting at position 269 of SEQ ID NO: 1408
aaggaauaucagugcuggu

SEQ ID NO: 110639 - RNA, 19 nt, Artificial Sequence
  Description of Artificial Sequence: Synthetic oligonucleotide
  Antisense strand to SEQ ID NO: 110638
accagcacugauauuccuu

SEQ ID NO: 110640 - RNA, 19 nt, Artificial Sequence
  Description of Artificial Sequence: Synthetic oligonucleotide
  Sense strand starting at position 3956 of SEQ ID NO: 1407
gaaaucccugggugaucaa

SEQ ID NO: 110641 - RNA, 19 nt, Artificial Sequence
  Description of Artificial Sequence: Synthetic oligonucleotide
  Antisense strand to SEQ ID NO: 110640
uugaucacccagggauuuc

SEQ ID NO: 110642 - RNA, 19 nt, Artificial Sequence
  Description of Artificial Sequence: Synthetic oligonucleotide
  Sense strand starting at position 3954 of SEQ ID NO: 1407
uugaaaucccugggugauc

SEQ ID NO: 110643 - RNA, 19 nt, Artificial Sequence
  Description of Artificial Sequence: Synthetic oligonucleotide
  Antisense strand to SEQ ID NO: 110642
gaucacccagggauuucaa

SEQ ID NO: 110644 - RNA, 19 nt, Artificial Sequence
  Description of Artificial Sequence: Synthetic oligonucleotide
  Sense strand starting at position 3953 of SEQ ID NO: 1407
cuugaaaucccugggugau

SEQ ID NO: 110645 - RNA, 19 nt, Artificial Sequence
  Description of Artificial Sequence: Synthetic oligonucleotide
  Antisense strand to SEQ ID NO: 110644
aucacccagggauuucaag

SEQ ID NO: 110646 - RNA, 19 nt, Artificial Sequence
  Description of Artificial Sequence: Synthetic oligonucleotide
  Sense strand starting at position 3922 of SEQ ID NO: 1407
gugcaauggcgugaugaua

SEQ ID NO: 110647 - RNA, 19 nt, Artificial Sequence
  Description of Artificial Sequence: Synthetic oligonucleotide
  Antisense strand to SEQ ID NO: 110646
uaucaucacgccauugcac

SEQ ID NO: 110648 - RNA, 19 nt, Artificial Sequence
  Description of Artificial Sequence: Synthetic oligonucleotide
  Sense strand starting at position 3537 of SEQ ID NO: 1407
ggaauaugguuucugacuu

SEQ ID NO: 110649 - RNA, 19 nt, Artificial Sequence
  Description of Artificial Sequence: Synthetic oligonucleotide
  Antisense strand to SEQ ID NO: 110648
aagucagaaaccauauucc

SEQ ID NO: 110650 - RNA, 19 nt, Artificial Sequence
  Description of Artificial Sequence: Synthetic oligonucleotide
  Sense strand starting at position 3534 of SEQ ID NO: 1407
uauggaauaugguuucuga

SEQ ID NO: 110651 - RNA, 19 nt, Artificial Sequence
  Description of Artificial Sequence: Synthetic oligonucleotide
  Antisense strand to SEQ ID NO: 110650
ucagaaaccauauuccaua

SEQ ID NO: 110652 - RNA, 19 nt, Artificial Sequence
  Description of Artificial Sequence: Synthetic oligonucleotide
  Sense strand starting at position 3524 of SEQ ID NO: 1407
uauaaagugcuauggaaua

SEQ ID NO: 110653 - RNA, 19 nt, Artificial Sequence
  Description of Artificial Sequence: Synthetic oligonucleotide
  Antisense strand to SEQ ID NO: 110652
uauuccauagcacuuuaua

SEQ ID NO: 110654 - RNA, 19 nt, Artificial Sequence
  Description of Artificial Sequence: Synthetic oligonucleotide
  Sense strand starting at position 3508 of SEQ ID NO: 1407
aguguccuaagagaaguau

SEQ ID NO: 110655 - RNA, 19 nt, Artificial Sequence
  Description of Artificial Sequence: Synthetic oligonucleotide
  Antisense strand to SEQ ID NO: 110654
auacuucucuuaggacacu

SEQ ID NO: 110656 - RNA, 19 nt, Artificial Sequence
  Description of Artificial Sequence: Synthetic oligonucleotide
  Sense strand starting at position 3501 of SEQ ID NO: 1407
gaagauaaguguccuaaga

SEQ ID NO: 110657 - RNA, 19 nt, Artificial Sequence
  Description of Artificial Sequence: Synthetic oligonucleotide
  Antisense strand to SEQ ID NO: 110656
ucuuaggacacuuaucuuc

SEQ ID NO: 110658 - RNA, 19 nt, Artificial Sequence
  Description of Artificial Sequence: Synthetic oligonucleotide
  Sense strand starting at position 3498 of SEQ ID NO: 1407
gcagaagauaaguguccua

SEQ ID NO: 110659 - RNA, 19 nt, Artificial Sequence
  Description of Artificial Sequence: Synthetic oligonucleotide
  Antisense strand to SEQ ID NO: 110658
uaggacacuuaucuucugc

SEQ ID NO: 110660 - RNA, 19 nt, Artificial Sequence
  Description of Artificial Sequence: Synthetic oligonucleotide
  Sense strand starting at position 3443 of SEQ ID NO: 1407
ucucgaagagcauagucua

SEQ ID NO: 110661 - RNA, 19 nt, Artificial Sequence
  Description of Artificial Sequence: Synthetic oligonucleotide
  Antisense strand to SEQ ID NO: 110660
uagacuaugcucuucgaga

SEQ ID NO: 110662 - RNA, 19 nt, Artificial Sequence
  Description of Artificial Sequence: Synthetic oligonucleotide
  Sense strand starting at position 3438 of SEQ ID NO: 1407
gcuggucucgaagagcaua

SEQ ID NO: 110663 - RNA, 19 nt, Artificial Sequence
  Description of Artificial Sequence: Synthetic oligonucleotide
  Antisense strand to SEQ ID NO: 110662
uaugcucuucgagaccagc

SEQ ID NO: 110664 - RNA, 19 nt, Artificial Sequence
  Description of Artificial Sequence: Synthetic oligonucleotide
  Sense strand starting at position 3215 of SEQ ID NO: 1407
gcagauguaucagcauaaa

SEQ ID NO: 110665 - RNA, 19 nt, Artificial Sequence
  Description of Artificial Sequence: Synthetic oligonucleotide
  Antisense strand to SEQ ID NO: 110664
uuuaugcugauacaucugc

SEQ ID NO: 110666 - RNA, 19 nt, Artificial Sequence
  Description of Artificial Sequence: Synthetic oligonucleotide
  Sense strand starting at position 3206 of SEQ ID NO: 1407
uuaauacaagcagauguau

SEQ ID NO: 110667 - RNA, 19 nt, Artificial Sequence
  Description of Artificial Sequence: Synthetic oligonucleotide
  Antisense strand to SEQ ID NO: 110666
auacaucugcuuguauuaa

SEQ ID NO: 110668 - RNA, 19 nt, Artificial Sequence
  Description of Artificial Sequence: Synthetic oligonucleotide
  Sense strand starting at position 2736 of SEQ ID NO: 1407
ucgggaagcguuugauaag

SEQ ID NO: 110669 - RNA, 19 nt, Artificial Sequence
  Description of Artificial Sequence: Synthetic oligonucleotide
  Antisense strand to SEQ ID NO: 110668
cuuaucaaacgcuucccga

SEQ ID NO: 110670 - RNA, 19 nt, Artificial Sequence
  Description of Artificial Sequence: Synthetic oligonucleotide
  Sense strand starting at position 2671 of SEQ ID NO: 1407
cgaauuucuuuagagacca

SEQ ID NO: 110671 - RNA, 19 nt, Artificial Sequence
  Description of Artificial Sequence: Synthetic oligonucleotide
  Antisense strand to SEQ ID NO: 110670
uggucucuaaagaaauucg

SEQ ID NO: 110672 - RNA, 19 nt, Artificial Sequence
  Description of Artificial Sequence: Synthetic oligonucleotide
  Sense strand starting at position 2651 of SEQ ID NO: 1407
ucgggaguucauuacuaga

SEQ ID NO: 110673 - RNA, 19 nt, Artificial Sequence
  Description of Artificial Sequence: Synthetic oligonucleotide
  Antisense strand to SEQ ID NO: 110672
ucuaguaaugaacucccga

SEQ ID NO: 110674 - RNA, 19 nt, Artificial Sequence
  Description of Artificial Sequence: Synthetic oligonucleotide
  Sense strand starting at position 2625 of SEQ ID NO: 1407
ccuaguguucuauauacua

SEQ ID NO: 110675 - RNA, 19 nt, Artificial Sequence
  Description of Artificial Sequence: Synthetic oligonucleotide
  Antisense strand to SEQ ID NO: 110674
uaguauauagaacacuagg

SEQ ID NO: 110676 - RNA, 19 nt, Artificial Sequence
  Description of Artificial Sequence: Synthetic oligonucleotide
  Sense strand starting at position 2553 of SEQ ID NO: 1407
uuacgugauccugaaccca

SEQ ID NO: 110677 - RNA, 19 nt, Artificial Sequence
  Description of Artificial Sequence: Synthetic oligonucleotide
  Antisense strand to SEQ ID NO: 110676
uggguucaggaucacguaa

SEQ ID NO: 110678 - RNA, 19 nt, Artificial Sequence
  Description of Artificial Sequence: Synthetic oligonucleotide
  Sense strand starting at position 2549 of SEQ ID NO: 1407
ucuguuacgugauccugaa

SEQ ID NO: 110679 - RNA, 19 nt, Artificial Sequence
  Description of Artificial Sequence: Synthetic oligonucleotide
  Antisense strand to SEQ ID NO: 110678
uucaggaucacguaacaga

SEQ ID NO: 110680 - RNA, 19 nt, Artificial Sequence
  Description of Artificial Sequence: Synthetic oligonucleotide
  Sense strand starting at position 2495 of SEQ ID NO: 1407
gcaagacagcucgaaacua

SEQ ID NO: 110681 - RNA, 19 nt, Artificial Sequence
  Description of Artificial Sequence: Synthetic oligonucleotide
  Antisense strand to SEQ ID NO: 110680
uaguuucgagcugucuugc

SEQ ID NO: 110682 - RNA, 19 nt, Artificial Sequence
  Description of Artificial Sequence: Synthetic oligonucleotide
  Sense strand starting at position 2482 of SEQ ID NO: 1407
agguuauggcugggcaaga

SEQ ID NO: 110683 - RNA, 19 nt, Artificial Sequence
  Description of Artificial Sequence: Synthetic oligonucleotide
  Antisense strand to SEQ ID NO: 110682
ucuugcccagccauaaccu

SEQ ID NO: 110684 - RNA, 19 nt, Artificial Sequence
  Description of Artificial Sequence: Synthetic oligonucleotide
  Sense strand starting at position 2480 of SEQ ID NO: 1407
acagguuauggcugggcaa

SEQ ID NO: 110685 - RNA, 19 nt, Artificial Sequence
  Description of Artificial Sequence: Synthetic oligonucleotide
  Antisense strand to SEQ ID NO: 110684
uugcccagccauaaccugu

SEQ ID NO: 110686 - RNA, 19 nt, Artificial Sequence
  Description of Artificial Sequence: Synthetic oligonucleotide
  Sense strand starting at position 2415 of SEQ ID NO: 1407
ggaagaugcacaggucuga

SEQ ID NO: 110687 - RNA, 19 nt, Artificial Sequence
  Description of Artificial Sequence: Synthetic oligonucleotide
  Antisense strand to SEQ ID NO: 110686
ucagaccugugcaucuucc

SEQ ID NO: 110688 - RNA, 19 nt, Artificial Sequence
  Description of Artificial Sequence: Synthetic oligonucleotide
  Sense strand starting at position 1526 of SEQ ID NO: 1407
ucugcucgccgccugaaua

SEQ ID NO: 110689 - RNA, 19 nt, Artificial Sequence
  Description of Artificial Sequence: Synthetic oligonucleotide
  Antisense strand to SEQ ID NO: 110688
uauucaggcggcgagcaga

SEQ ID NO: 110690 - RNA, 19 nt, Artificial Sequence
  Description of Artificial Sequence: Synthetic oligonucleotide
  Sense strand starting at position 1407 of SEQ ID NO: 1407
uuuauacugugagccugaa

SEQ ID NO: 110691 - RNA, 19 nt, Artificial Sequence
  Description of Artificial Sequence: Synthetic oligonucleotide
  Antisense strand to SEQ ID NO: 110690
uucaggcucacaguauaaa

SEQ ID NO: 110692 - RNA, 19 nt, Artificial Sequence
  Description of Artificial Sequence: Synthetic oligonucleotide
  Sense strand starting at position 1374 of SEQ ID NO: 1407
gcaauaaauuucuaggauu

SEQ ID NO: 110693 - RNA, 19 nt, Artificial Sequence
  Description of Artificial Sequence: Synthetic oligonucleotide
  Antisense strand to SEQ ID NO: 110692
aauccuagaaauuuauugc

SEQ ID NO: 110694 - RNA, 19 nt, Artificial Sequence
  Description of Artificial Sequence: Synthetic oligonucleotide
  Sense strand starting at position 1334 of SEQ ID NO: 1407
ugaggaaggugagauauga

SEQ ID NO: 110695 - RNA, 19 nt, Artificial Sequence
  Description of Artificial Sequence: Synthetic oligonucleotide
  Antisense strand to SEQ ID NO: 110694
ucauaucucaccuuccuca

SEQ ID NO: 110696 - RNA, 19 nt, Artificial Sequence
  Description of Artificial Sequence: Synthetic oligonucleotide
  Sense strand starting at position 1136 of SEQ ID NO: 1407
aucaaauguguggauaguu

SEQ ID NO: 110697 - RNA, 19 nt, Artificial Sequence
  Description of Artificial Sequence: Synthetic oligonucleotide
  Antisense strand to SEQ ID NO: 110696
aacuauccacacauuugau

SEQ ID NO: 110698 - RNA, 19 nt, Artificial Sequence
  Description of Artificial Sequence: Synthetic oligonucleotide
  Sense strand starting at position 1134 of SEQ ID NO: 1407
caaucaaauguguggauag

SEQ ID NO: 110699 - RNA, 19 nt, Artificial Sequence
  Description of Artificial Sequence: Synthetic oligonucleotide
  Antisense strand to SEQ ID NO: 110698
cuauccacacauuugauug

SEQ ID NO: 110700 - RNA, 19 nt, Artificial Sequence
  Description of Artificial Sequence: Synthetic oligonucleotide
  Sense strand starting at position 1133 of SEQ ID NO: 1407
ccaaucaaauguguggaua

SEQ ID NO: 110701 - RNA, 19 nt, Artificial Sequence
  Description of Artificial Sequence: Synthetic oligonucleotide
  Antisense strand to SEQ ID NO: 110700
uauccacacauuugauugg

SEQ ID NO: 110702 - RNA, 19 nt, Artificial Sequence
  Description of Artificial Sequence: Synthetic oligonucleotide
  Sense strand starting at position 1119 of SEQ ID NO: 1407
gcuaguagggcucaccaau

SEQ ID NO: 110703 - RNA, 19 nt, Artificial Sequence
  Description of Artificial Sequence: Synthetic oligonucleotide
  Antisense strand to SEQ ID NO: 110702
auuggugagcccuacuagc

SEQ ID NO: 110704 - RNA, 19 nt, Artificial Sequence
  Description of Artificial Sequence: Synthetic oligonucleotide
  Sense strand starting at position 997 of SEQ ID NO: 1407
uaggcaggauucucagauu

SEQ ID NO: 110705 - RNA, 19 nt, Artificial Sequence
  Description of Artificial Sequence: Synthetic oligonucleotide
  Antisense strand to SEQ ID NO: 110704
aaucugagaauccugccua

SEQ ID NO: 110706 - RNA, 19 nt, Artificial Sequence
  Description of Artificial Sequence: Synthetic oligonucleotide
  Sense strand starting at position 712 of SEQ ID NO: 1407
ucgcuauuucccugauacc

SEQ ID NO: 110707 - RNA, 19 nt, Artificial Sequence
  Description of Artificial Sequence: Synthetic oligonucleotide
  Antisense strand to SEQ ID NO: 110706
gguaucagggaaauagcga

SEQ ID NO: 110708 - RNA, 19 nt, Artificial Sequence
  Description of Artificial Sequence: Synthetic oligonucleotide
  Sense strand starting at position 710 of SEQ ID NO: 1407
ccucgcuauuucccugaua

SEQ ID NO: 110709 - RNA, 19 nt, Artificial Sequence
  Description of Artificial Sequence: Synthetic oligonucleotide
  Antisense strand to SEQ ID NO: 110708
uaucagggaaauagcgagg

SEQ ID NO: 110710 - RNA, 19 nt, Artificial Sequence
  Description of Artificial Sequence: Synthetic oligonucleotide
  Sense strand starting at position 640 of SEQ ID NO: 1407
cugacuucucaaggcucua

SEQ ID NO: 110711 - RNA, 19 nt, Artificial Sequence
  Description of Artificial Sequence: Synthetic oligonucleotide
  Antisense strand to SEQ ID NO: 110710
uagagccuugagaagucag

SEQ ID NO: 110712 - RNA, 19 nt, Artificial Sequence
  Description of Artificial Sequence: Synthetic oligonucleotide
  Sense strand starting at position 435 of SEQ ID NO: 1407
gagaaacaauucuggagaa

SEQ ID NO: 110713 - RNA, 19 nt, Artificial Sequence
  Description of Artificial Sequence: Synthetic oligonucleotide
  Antisense strand to SEQ ID NO: 110712
uucuccagaauuguuucuc

SEQ ID NO: 110714 - RNA, 19 nt, Artificial Sequence
  Description of Artificial Sequence: Synthetic oligonucleotide
  Sense strand starting at position 403 of SEQ ID NO: 1407
cccuaaauccuugggucaa

SEQ ID NO: 110715 - RNA, 19 nt, Artificial Sequence
  Description of Artificial Sequence: Synthetic oligonucleotide
  Antisense strand to SEQ ID NO: 110714
uugacccaaggauuuaggg

SEQ ID NO: 110716 - RNA, 19 nt, Artificial Sequence
  Description of Artificial Sequence: Synthetic oligonucleotide
  Sense strand starting at position 368 of SEQ ID NO: 1407
gauaguuuauaggcuagga

SEQ ID NO: 110717 - RNA, 19 nt, Artificial Sequence
  Description of Artificial Sequence: Synthetic oligonucleotide
  Antisense strand to SEQ ID NO: 110716
uccuagccuauaaacuauc

SEQ ID NO: 110718 - RNA, 19 nt, Artificial Sequence
  Description of Artificial Sequence: Synthetic oligonucleotide
  Sense strand starting at position 314 of SEQ ID NO: 1407
aaggaauaucagugcuggu

SEQ ID NO: 110719 - RNA, 19 nt, Artificial Sequence
  Description of Artificial Sequence: Synthetic oligonucleotide
  Antisense strand to SEQ ID NO: 110718
accagcacugauauuccuu

SEQ ID NO: 110720 - RNA, 19 nt, Artificial Sequence
  Description of Artificial Sequence: Synthetic oligonucleotide
  Sense strand starting at position 3957 of SEQ ID NO: 1406
gaaaucccugggugaucaa

SEQ ID NO: 110721 - RNA, 19 nt, Artificial Sequence
  Description of Artificial Sequence: Synthetic oligonucleotide
  Antisense strand to SEQ ID NO: 110720
uugaucacccagggauuuc

SEQ ID NO: 110722 - RNA, 19 nt, Artificial Sequence
  Description of Artificial Sequence: Synthetic oligonucleotide
  Sense strand starting at position 3955 of SEQ ID NO: 1406
uugaaaucccugggugauc

SEQ ID NO: 110723 - RNA, 19 nt, Artificial Sequence
  Description of Artificial Sequence: Synthetic oligonucleotide
  Antisense strand to SEQ ID NO: 110722
gaucacccagggauuucaa

SEQ ID NO: 110724 - RNA, 19 nt, Artificial Sequence
  Description of Artificial Sequence: Synthetic oligonucleotide
  Sense strand starting at position 3954 of SEQ ID NO: 1406
cuugaaaucccugggugau

SEQ ID NO: 110725 - RNA, 19 nt, Artificial Sequence
  Description of Artificial Sequence: Synthetic oligonucleotide
  Antisense strand to SEQ ID NO: 110724
aucacccagggauuucaag

SEQ ID NO: 110726 - RNA, 19 nt, Artificial Sequence
  Description of Artificial Sequence: Synthetic oligonucleotide
  Sense strand starting at position 3923 of SEQ ID NO: 1406
gugcaauggcgugaugaua

SEQ ID NO: 110727 - RNA, 19 nt, Artificial Sequence
  Description of Artificial Sequence: Synthetic oligonucleotide
  Antisense strand to SEQ ID NO: 110726
uaucaucacgccauugcac

SEQ ID NO: 110728 - RNA, 19 nt, Artificial Sequence
  Description of Artificial Sequence: Synthetic oligonucleotide
  Sense strand starting at position 3538 of SEQ ID NO: 1406
ggaauaugguuucugacuu

SEQ ID NO: 110729 - RNA, 19 nt, Artificial Sequence
  Description of Artificial Sequence: Synthetic oligonucleotide
  Antisense strand to SEQ ID NO: 110728
aagucagaaaccauauucc

SEQ ID NO: 110730 - RNA, 19 nt, Artificial Sequence
  Description of Artificial Sequence: Synthetic oligonucleotide
  Sense strand starting at position 3535 of SEQ ID NO: 1406
uauggaauaugguuucuga

SEQ ID NO: 110731 - RNA, 19 nt, Artificial Sequence
  Description of Artificial Sequence: Synthetic oligonucleotide
  Antisense strand to SEQ ID NO: 110730
ucagaaaccauauuccaua

SEQ ID NO: 110732 - RNA, 19 nt, Artificial Sequence
  Description of Artificial Sequence: Synthetic oligonucleotide
  Sense strand starting at position 3525 of SEQ ID NO: 1406
uauaaagugcuauggaaua

SEQ ID NO: 110733 - RNA, 19 nt, Artificial Sequence
  Description of Artificial Sequence: Synthetic oligonucleotide
  Antisense strand to SEQ ID NO: 110732
uauuccauagcacuuuaua

SEQ ID NO: 110734 - RNA, 19 nt, Artificial Sequence
  Description of Artificial Sequence: Synthetic oligonucleotide
  Sense strand starting at position 3509 of SEQ ID NO: 1406
aguguccuaagagaaguau

SEQ ID NO: 110735 - RNA, 19 nt, Artificial Sequence
  Description of Artificial Sequence: Synthetic oligonucleotide
  Antisense strand to SEQ ID NO: 110734
auacuucucuuaggacacu

SEQ ID NO: 110736 - RNA, 19 nt, Artificial Sequence
  Description of Artificial Sequence: Synthetic oligonucleotide
  Sense strand starting at position 3502 of SEQ ID NO: 1406
gaagauaaguguccuaaga

SEQ ID NO: 110737 - RNA, 19 nt, Artificial Sequence
  Description of Artificial Sequence: Synthetic oligonucleotide
  Antisense strand to SEQ ID NO: 110736
ucuuaggacacuuaucuuc

SEQ ID NO: 110738 - RNA, 19 nt, Artificial Sequence
  Description of Artificial Sequence: Synthetic oligonucleotide
  Sense strand starting at position 3499 of SEQ ID NO: 1406
gcagaagauaaguguccua

SEQ ID NO: 110739 - RNA, 19 nt, Artificial Sequence
  Description of Artificial Sequence: Synthetic oligonucleotide
  Antisense strand to SEQ ID NO: 110738
uaggacacuuaucuucugc

SEQ ID NO: 110740 - RNA, 19 nt, Artificial Sequence
  Description of Artificial Sequence: Synthetic oligonucleotide
  Sense strand starting at position 3444 of SEQ ID NO: 1406
ucucgaagagcauagucua

SEQ ID NO: 110741 - RNA, 19 nt, Artificial Sequence
  Description of Artificial Sequence: Synthetic oligonucleotide
  Antisense strand to SEQ ID NO: 110740
uagacuaugcucuucgaga

SEQ ID NO: 110742 - RNA, 19 nt, Artificial Sequence
  Description of Artificial Sequence: Synthetic oligonucleotide
  Sense strand starting at position 3439 of SEQ ID NO: 1406
gcuggucucgaagagcaua

SEQ ID NO: 110743 - RNA, 19 nt, Artificial Sequence
  Description of Artificial Sequence: Synthetic oligonucleotide
  Antisense strand to SEQ ID NO: 110742
uaugcucuucgagaccagc

SEQ ID NO: 110744 - RNA, 19 nt, Artificial Sequence
  Description of Artificial Sequence: Synthetic oligonucleotide
  Sense strand starting at position 3216 of SEQ ID NO: 1406
gcagauguaucagcauaaa

SEQ ID NO: 110745 - RNA, 19 nt, Artificial Sequence
  Description of Artificial Sequence: Synthetic oligonucleotide
  Antisense strand to SEQ ID NO: 110744
uuuaugcugauacaucugc

SEQ ID NO: 110746 - RNA, 19 nt, Artificial Sequence
  Description of Artificial Sequence: Synthetic oligonucleotide
  Sense strand starting at position 3207 of SEQ ID NO: 1406
uuaauacaagcagauguau

SEQ ID NO: 110747 - RNA, 19 nt, Artificial Sequence
  Description of Artificial Sequence: Synthetic oligonucleotide
  Antisense strand to SEQ ID NO: 110746
auacaucugcuuguauuaa

SEQ ID NO: 110748 - RNA, 19 nt, Artificial Sequence
  Description of Artificial Sequence: Synthetic oligonucleotide
  Sense strand starting at position 2737 of SEQ ID NO: 1406
ucgggaagcguuugauaag

SEQ ID NO: 110749 - RNA, 19 nt, Artificial Sequence
  Description of Artificial Sequence: Synthetic oligonucleotide
  Antisense strand to SEQ ID NO: 110748
cuuaucaaacgcuucccga

SEQ ID NO: 110750 - RNA, 19 nt, Artificial Sequence
  Description of Artificial Sequence: Synthetic oligonucleotide
  Sense strand starting at position 2672 of SEQ ID NO: 1406
cgaauuucuuuagagacca

SEQ ID NO: 110751 - RNA, 19 nt, Artificial Sequence
  Description of Artificial Sequence: Synthetic oligonucleotide
  Antisense strand to SEQ ID NO: 110750
uggucucuaaagaaauucg

SEQ ID NO: 110752 - RNA, 19 nt, Artificial Sequence
  Description of Artificial Sequence: Synthetic oligonucleotide
  Sense strand starting at position 2652 of SEQ ID NO: 1406
ucgggaguucauuacuaga

SEQ ID NO: 110753 - RNA, 19 nt, Artificial Sequence
  Description of Artificial Sequence: Synthetic oligonucleotide
  Antisense strand to SEQ ID NO: 110752
ucuaguaaugaacucccga

SEQ ID NO: 110754 - RNA, 19 nt, Artificial Sequence
  Description of Artificial Sequence: Synthetic oligonucleotide
  Sense strand starting at position 2626 of SEQ ID NO: 1406
ccuaguguucuauauacua

SEQ ID NO: 110755 - RNA, 19 nt, Artificial Sequence
  Description of Artificial Sequence: Synthetic oligonucleotide
  Antisense strand to SEQ ID NO: 110754
uaguauauagaacacuagg

SEQ ID NO: 110756 - RNA, 19 nt, Artificial Sequence
  Description of Artificial Sequence: Synthetic oligonucleotide
  Sense strand starting at position 2554 of SEQ ID NO: 1406
uuacgugauccugaaccca

SEQ ID NO: 110757 - RNA, 19 nt, Artificial Sequence
  Description of Artificial Sequence: Synthetic oligonucleotide
  Antisense strand to SEQ ID NO: 110756
uggguucaggaucacguaa

SEQ ID NO: 110758 - RNA, 19 nt, Artificial Sequence
  Description of Artificial Sequence: Synthetic oligonucleotide
  Sense strand starting at position 2550 of SEQ ID NO: 1406
ucuguuacgugauccugaa

SEQ ID NO: 110759 - RNA, 19 nt, Artificial Sequence
  Description of Artificial Sequence: Synthetic oligonucleotide
  Antisense strand to SEQ ID NO: 110758
uucaggaucacguaacaga

SEQ ID NO: 110760 - RNA, 19 nt, Artificial Sequence
  Description of Artificial Sequence: Synthetic oligonucleotide
  Sense strand starting at position 2496 of SEQ ID NO: 1406
gcaagacagcucgaaacua

SEQ ID NO: 110761 - RNA, 19 nt, Artificial Sequence
  Description of Artificial Sequence: Synthetic oligonucleotide
  Antisense strand to SEQ ID NO: 110760
uaguuucgagcugucuugc

SEQ ID NO: 110762 - RNA, 19 nt, Artificial Sequence
  Description of Artificial Sequence: Synthetic oligonucleotide
  Sense strand starting at position 2483 of SEQ ID NO: 1406
agguuauggcugggcaaga

SEQ ID NO: 110763 - RNA, 19 nt, Artificial Sequence
  Description of Artificial Sequence: Synthetic oligonucleotide
  Antisense strand to SEQ ID NO: 110762
ucuugcccagccauaaccu

SEQ ID NO: 110764 - RNA, 19 nt, Artificial Sequence
  Description of Artificial Sequence: Synthetic oligonucleotide
  Sense strand starting at position 2481 of SEQ ID NO: 1406
acagguuauggcugggcaa

SEQ ID NO: 110765 - RNA, 19 nt, Artificial Sequence
  Description of Artificial Sequence: Synthetic oligonucleotide
  Antisense strand to SEQ ID NO: 110764
uugcccagccauaaccugu

SEQ ID NO: 110766 - RNA, 19 nt, Artificial Sequence
  Description of Artificial Sequence: Synthetic oligonucleotide
  Sense strand starting at position 2416 of SEQ ID NO: 1406
ggaagaugcacaggucuga

SEQ ID NO: 110767 - RNA, 19 nt, Artificial Sequence
  Description of Artificial Sequence: Synthetic oligonucleotide
  Antisense strand to SEQ ID NO: 110766
ucagaccugugcaucuucc

SEQ ID NO: 110768 - RNA, 19 nt, Artificial Sequence
  Description of Artificial Sequence: Synthetic oligonucleotide
  Sense strand starting at position 1527 of SEQ ID NO: 1406
ucugcucgccgccugaaua

SEQ ID NO: 110769 - RNA, 19 nt, Artificial Sequence
  Description of Artificial Sequence: Synthetic oligonucleotide
  Antisense strand to SEQ ID NO: 110768
uauucaggcggcgagcaga

SEQ ID NO: 110770 - RNA, 19 nt, Artificial Sequence
  Description of Artificial Sequence: Synthetic oligonucleotide
  Sense strand starting at position 1408 of SEQ ID NO: 1406
uuuauacugugagccugaa

SEQ ID NO: 110771 - RNA, 19 nt, Artificial Sequence
  Description of Artificial Sequence: Synthetic oligonucleotide
  Antisense strand to SEQ ID NO: 110770
uucaggcucacaguauaaa

SEQ ID NO: 110772 - RNA, 19 nt, Artificial Sequence
  Description of Artificial Sequence: Synthetic oligonucleotide
  Sense strand starting at position 1375 of SEQ ID NO: 1406
gcaauaaauuucuaggauu

SEQ ID NO: 110773 - RNA, 19 nt, Artificial Sequence
  Description of Artificial Sequence: Synthetic oligonucleotide
  Antisense strand to SEQ ID NO: 110772
aauccuagaaauuuauugc

SEQ ID NO: 110774 - RNA, 19 nt, Artificial Sequence
  Description of Artificial Sequence: Synthetic oligonucleotide
  Sense strand starting at position 1335 of SEQ ID NO: 1406
ugaggaaggugagauauga

SEQ ID NO: 110775 - RNA, 19 nt, Artificial Sequence
  Description of Artificial Sequence: Synthetic oligonucleotide
  Antisense strand to SEQ ID NO: 110774
ucauaucucaccuuccuca

SEQ ID NO: 110776 - RNA, 19 nt, Artificial Sequence
  Description of Artificial Sequence: Synthetic oligonucleotide
  Sense strand starting at position 1137 of SEQ ID NO: 1406
aucaaauguguggauaguu

SEQ ID NO: 110777 - RNA, 19 nt, Artificial Sequence
  Description of Artificial Sequence: Synthetic oligonucleotide
  Antisense strand to SEQ ID NO: 110776
aacuauccacacauuugau

SEQ ID NO: 110778 - RNA, 19 nt, Artificial Sequence
  Description of Artificial Sequence: Synthetic oligonucleotide
  Sense strand starting at position 1135 of SEQ ID NO: 1406
caaucaaauguguggauag

SEQ ID NO: 110779 - RNA, 19 nt, Artificial Sequence
  Description of Artificial Sequence: Synthetic oligonucleotide
  Antisense strand to SEQ ID NO: 110778
cuauccacacauuugauug

SEQ ID NO: 110780 - RNA, 19 nt, Artificial Sequence
  Description of Artificial Sequence: Synthetic oligonucleotide
  Sense strand starting at position 1134 of SEQ ID NO: 1406
ccaaucaaauguguggaua

SEQ ID NO: 110781 - RNA, 19 nt, Artificial Sequence
  Description of Artificial Sequence: Synthetic oligonucleotide
  Antisense strand to SEQ ID NO: 110780
uauccacacauuugauugg

SEQ ID NO: 110782 - RNA, 19 nt, Artificial Sequence
  Description of Artificial Sequence: Synthetic oligonucleotide
  Sense strand starting at position 1120 of SEQ ID NO: 1406
gcuaguagggcucaccaau

SEQ ID NO: 110783 - RNA, 19 nt, Artificial Sequence
  Description of Artificial Sequence: Synthetic oligonucleotide
  Antisense strand to SEQ ID NO: 110782
auuggugagcccuacuagc

SEQ ID NO: 110784 - RNA, 19 nt, Artificial Sequence
  Description of Artificial Sequence: Synthetic oligonucleotide
  Sense strand starting at position 998 of SEQ ID NO: 1406
uaggcaggauucucagauu

SEQ ID NO: 110785 - RNA, 19 nt, Artificial Sequence
  Description of Artificial Sequence: Synthetic oligonucleotide
  Antisense strand to SEQ ID NO: 110784
aaucugagaauccugccua

SEQ ID NO: 110786 - RNA, 19 nt, Artificial Sequence
  Description of Artificial Sequence: Synthetic oligonucleotide
  Sense strand starting at position 713 of SEQ ID NO: 1406
ucgcuauuucccugauacc

SEQ ID NO: 110787 - RNA, 19 nt, Artificial Sequence
  Description of Artificial Sequence: Synthetic oligonucleotide
  Antisense strand to SEQ ID NO: 110786
gguaucagggaaauagcga

SEQ ID NO: 110788 - RNA, 19 nt, Artificial Sequence
  Description of Artificial Sequence: Synthetic oligonucleotide
  Sense strand starting at position 711 of SEQ ID NO: 1406
ccucgcuauuucccugaua

SEQ ID NO: 110789 - RNA, 19 nt, Artificial Sequence
  Description of Artificial Sequence: Synthetic oligonucleotide
  Antisense strand to SEQ ID NO: 110788
uaucagggaaauagcgagg

SEQ ID NO: 110790 - RNA, 19 nt, Artificial Sequence
  Description of Artificial Sequence: Synthetic oligonucleotide
  Sense strand starting at position 641 of SEQ ID NO: 1406
cugacuucucaaggcucua

SEQ ID NO: 110791 - RNA, 19 nt, Artificial Sequence
  Description of Artificial Sequence: Synthetic oligonucleotide
  Antisense strand to SEQ ID NO: 110790
uagagccuugagaagucag

SEQ ID NO: 110792 - RNA, 19 nt, Artificial Sequence
  Description of Artificial Sequence: Synthetic oligonucleotide
  Sense strand starting at position 436 of SEQ ID NO: 1406
gagaaacaauucuggagaa

SEQ ID NO: 110793 - RNA, 19 nt, Artificial Sequence
  Description of Artificial Sequence: Synthetic oligonucleotide
  Antisense strand to SEQ ID NO: 110792
uucuccagaauuguuucuc

SEQ ID NO: 110794 - RNA, 19 nt, Artificial Sequence
  Description of Artificial Sequence: Synthetic oligonucleotide
  Sense strand starting at position 404 of SEQ ID NO: 1406
cccuaaauccuugggucaa

SEQ ID NO: 110795 - RNA, 19 nt, Artificial Sequence
  Description of Artificial Sequence: Synthetic oligonucleotide
  Antisense strand to SEQ ID NO: 110794
uugacccaaggauuuaggg

SEQ ID NO: 110796 - RNA, 19 nt, Artificial Sequence
  Description of Artificial Sequence: Synthetic oligonucleotide
  Sense strand starting at position 369 of SEQ ID NO: 1406
gauaguuuauaggcuagga

SEQ ID NO: 110797 - RNA, 19 nt, Artificial Sequence
  Description of Artificial Sequence: Synthetic oligonucleotide
  Antisense strand to SEQ ID NO: 110796
uccuagccuauaaacuauc

SEQ ID NO: 110798 - RNA, 19 nt, Artificial Sequence
  Description of Artificial Sequence: Synthetic oligonucleotide
  Sense strand starting at position 315 of SEQ ID NO: 1406
aaggaauaucagugcuggu

SEQ ID NO: 110799 - RNA, 19 nt, Artificial Sequence
  Description of Artificial Sequence: Synthetic oligonucleotide
  Antisense strand to SEQ ID NO: 110798
accagcacugauauuccuu

SEQ ID NO: 110800 - RNA, 19 nt, Artificial Sequence
  Description of Artificial Sequence: Synthetic oligonucleotide
  Sense strand starting at position 36 of SEQ ID NO: 1409
gaagaauccucugaaaggu

SEQ ID NO: 110801 - RNA, 19 nt, Artificial Sequence
  Description of Artificial Sequence: Synthetic oligonucleotide
  Antisense strand to SEQ ID NO: 110800
accuuucagaggauucuuc

SEQ ID NO: 110802 - RNA, 19 nt, Artificial Sequence
  Description of Artificial Sequence: Synthetic oligonucleotide
  Sense strand starting at position 157 of SEQ ID NO: 1409
cucugcaauccucagggau

SEQ ID NO: 110803 - RNA, 19 nt, Artificial Sequence
  Description of Artificial Sequence: Synthetic oligonucleotide
  Antisense strand to SEQ ID NO: 110802
aucccugaggauugcagag

SEQ ID NO: 110804 - RNA, 19 nt, Artificial Sequence
  Description of Artificial Sequence: Synthetic oligonucleotide
  Sense strand starting at position 160 of SEQ ID NO: 1409
ugcaauccucagggauaau

SEQ ID NO: 110805 - RNA, 19 nt, Artificial Sequence
  Description of Artificial Sequence: Synthetic oligonucleotide
  Antisense strand to SEQ ID NO: 110804
auuaucccugaggauugca

SEQ ID NO: 110806 - RNA, 19 nt, Artificial Sequence
  Description of Artificial Sequence: Synthetic oligonucleotide
  Sense strand starting at position 430 of SEQ ID NO: 1409
gauggaugcaggcaagagu

SEQ ID NO: 110807 - RNA, 19 nt, Artificial Sequence
  Description of Artificial Sequence: Synthetic oligonucleotide
  Antisense strand to SEQ ID NO: 110806
acucuugccugcauccauc

SEQ ID NO: 110808 - RNA, 19 nt, Artificial Sequence
  Description of Artificial Sequence: Synthetic oligonucleotide
  Sense strand starting at position 586 of SEQ ID NO: 1409
caaucucagcucuagggua

SEQ ID NO: 110809 - RNA, 19 nt, Artificial Sequence
  Description of Artificial Sequence: Synthetic oligonucleotide
  Antisense strand to SEQ ID NO: 110808
uacccuagagcugagauug

SEQ ID NO: 110810 - RNA, 19 nt, Artificial Sequence
  Description of Artificial Sequence: Synthetic oligonucleotide
  Sense strand starting at position 657 of SEQ ID NO: 1409
gccugauuugaagggcagu

SEQ ID NO: 110811 - RNA, 19 nt, Artificial Sequence
  Description of Artificial Sequence: Synthetic oligonucleotide
  Antisense strand to SEQ ID NO: 110810
acugcccuucaaaucaggc

SEQ ID NO: 110812 - RNA, 19 nt, Artificial Sequence
  Description of Artificial Sequence: Synthetic oligonucleotide
  Sense strand starting at position 670 of SEQ ID NO: 1409
ggcagugcuguuucuucua

SEQ ID NO: 110813 - RNA, 19 nt, Artificial Sequence
  Description of Artificial Sequence: Synthetic oligonucleotide
  Antisense strand to SEQ ID NO: 110812
uagaagaaacagcacugcc

SEQ ID NO: 110814 - RNA, 19 nt, Artificial Sequence
  Description of Artificial Sequence: Synthetic oligonucleotide
  Sense strand starting at position 678 of SEQ ID NO: 1409
uguuucuucuaguccacua

SEQ ID NO: 110815 - RNA, 19 nt, Artificial Sequence
  Description of Artificial Sequence: Synthetic oligonucleotide
  Antisense strand to SEQ ID NO: 110814
uaguggacuagaagaaaca

SEQ ID NO: 110816 - RNA, 19 nt, Artificial Sequence
  Description of Artificial Sequence: Synthetic oligonucleotide
  Sense strand starting at position 699 of SEQ ID NO: 1409
gucacuccucccugagaca

SEQ ID NO: 110817 - RNA, 19 nt, Artificial Sequence
  Description of Artificial Sequence: Synthetic oligonucleotide
  Antisense strand to SEQ ID NO: 110816
ugucucagggaggagugac

SEQ ID NO: 110818 - RNA, 19 nt, Artificial Sequence
  Description of Artificial Sequence: Synthetic oligonucleotide
  Sense strand starting at position 721 of SEQ ID NO: 1409
accugaguucccuaugcug

SEQ ID NO: 110819 - RNA, 19 nt, Artificial Sequence
  Description of Artificial Sequence: Synthetic oligonucleotide
  Antisense strand to SEQ ID NO: 110818
cagcauagggaacucaggu

SEQ ID NO: 110820 - RNA, 19 nt, Artificial Sequence
  Description of Artificial Sequence: Synthetic oligonucleotide
  Sense strand starting at position 746 of SEQ ID NO: 1409
ggcacaguguccucagaug

SEQ ID NO: 110821 - RNA, 19 nt, Artificial Sequence
  Description of Artificial Sequence: Synthetic oligonucleotide
  Antisense strand to SEQ ID NO: 110820
caucugaggacacugugcc

SEQ ID NO: 110822 - RNA, 19 nt, Artificial Sequence
  Description of Artificial Sequence: Synthetic oligonucleotide
  Sense strand starting at position 1022 of SEQ ID NO: 1409
aaaggauuggaggguucuu

SEQ ID NO: 110823 - RNA, 19 nt, Artificial Sequence
  Description of Artificial Sequence: Synthetic oligonucleotide
  Antisense strand to SEQ ID NO: 110822
aagaacccuccaauccuuu

SEQ ID NO: 110824 - RNA, 19 nt, Artificial Sequence
  Description of Artificial Sequence: Synthetic oligonucleotide
  Sense strand starting at position 1035 of SEQ ID NO: 1409
guucuuggagucuaagauc

SEQ ID NO: 110825 - RNA, 19 nt, Artificial Sequence
  Description of Artificial Sequence: Synthetic oligonucleotide
  Antisense strand to SEQ ID NO: 110824
gaucuuagacuccaagaac

SEQ ID NO: 110826 - RNA, 19 nt, Artificial Sequence
  Description of Artificial Sequence: Synthetic oligonucleotide
  Sense strand starting at position 1043 of SEQ ID NO: 1409
agucuaagaucccagaaca

SEQ ID NO: 110827 - RNA, 19 nt, Artificial Sequence
  Description of Artificial Sequence: Synthetic oligonucleotide
  Antisense strand to SEQ ID NO: 110826
uguucugggaucuuagacu

SEQ ID NO: 110828 - RNA, 19 nt, Artificial Sequence
  Description of Artificial Sequence: Synthetic oligonucleotide
  Sense strand starting at position 1075 of SEQ ID NO: 1409
gccagaaauggucagcgau

SEQ ID NO: 110829 - RNA, 19 nt, Artificial Sequence
  Description of Artificial Sequence: Synthetic oligonucleotide
  Antisense strand to SEQ ID NO: 110828
aucgcugaccauuucuggc

SEQ ID NO: 110830 - RNA, 19 nt, Artificial Sequence
  Description of Artificial Sequence: Synthetic oligonucleotide
  Sense strand starting at position 1136 of SEQ ID NO: 1409
agcagagacuuugugagaa

SEQ ID NO: 110831 - RNA, 19 nt, Artificial Sequence
  Description of Artificial Sequence: Synthetic oligonucleotide
  Antisense strand to SEQ ID NO: 110830
uucucacaaagucucugcu

SEQ ID NO: 110832 - RNA, 19 nt, Artificial Sequence
  Description of Artificial Sequence: Synthetic oligonucleotide
  Sense strand starting at position 1138 of SEQ ID NO: 1409
cagagacuuugugagaaac

SEQ ID NO: 110833 - RNA, 19 nt, Artificial Sequence
  Description of Artificial Sequence: Synthetic oligonucleotide
  Antisense strand to SEQ ID NO: 110832
guuucucacaaagucucug

SEQ ID NO: 110834 - RNA, 19 nt, Artificial Sequence
  Description of Artificial Sequence: Synthetic oligonucleotide
  Sense strand starting at position 1209 of SEQ ID NO: 1409
caugcaaacgagggaucua

SEQ ID NO: 110835 - RNA, 19 nt, Artificial Sequence
  Description of Artificial Sequence: Synthetic oligonucleotide
  Antisense strand to SEQ ID NO: 110834
uagaucccucguuugcaug

SEQ ID NO: 110836 - RNA, 19 nt, Artificial Sequence
  Description of Artificial Sequence: Synthetic oligonucleotide
  Sense strand starting at position 2301 of SEQ ID NO: 1409
ugaacaaaguaggaauaau

SEQ ID NO: 110837 - RNA, 19 nt, Artificial Sequence
  Description of Artificial Sequence: Synthetic oligonucleotide
  Antisense strand to SEQ ID NO: 110836
auuauuccuacuuuguuca

SEQ ID NO: 110838 - RNA, 19 nt, Artificial Sequence
  Description of Artificial Sequence: Synthetic oligonucleotide
  Sense strand starting at position 2323 of SEQ ID NO: 1409
gccucuuuaguguagauau

SEQ ID NO: 110839 - RNA, 19 nt, Artificial Sequence
  Description of Artificial Sequence: Synthetic oligonucleotide
  Antisense strand to SEQ ID NO: 110838
auaucuacacuaaagaggc

SEQ ID NO: 110840 - RNA, 19 nt, Artificial Sequence
  Description of Artificial Sequence: Synthetic oligonucleotide
  Sense strand starting at position 2325 of SEQ ID NO: 1409
cucuuuaguguagauauga

SEQ ID NO: 110841 - RNA, 19 nt, Artificial Sequence
  Description of Artificial Sequence: Synthetic oligonucleotide
  Antisense strand to SEQ ID NO: 110840
ucauaucuacacuaaagag

SEQ ID NO: 110842 - RNA, 19 nt, Artificial Sequence
  Description of Artificial Sequence: Synthetic oligonucleotide
  Sense strand starting at position 2448 of SEQ ID NO: 1409
uuggacuucuaguucuauu

SEQ ID NO: 110843 - RNA, 19 nt, Artificial Sequence
  Description of Artificial Sequence: Synthetic oligonucleotide
  Antisense strand to SEQ ID NO: 110842
aauagaacuagaaguccaa

SEQ ID NO: 110844 - RNA, 19 nt, Artificial Sequence
  Description of Artificial Sequence: Synthetic oligonucleotide
  Sense strand starting at position 2504 of SEQ ID NO: 1409
cugagugucuggccacauu

SEQ ID NO: 110845 - RNA, 19 nt, Artificial Sequence
  Description of Artificial Sequence: Synthetic oligonucleotide
  Antisense strand to SEQ ID NO: 110844
aauguggccagacacucag

SEQ ID NO: 110846 - RNA, 19 nt, Artificial Sequence
  Description of Artificial Sequence: Synthetic oligonucleotide
  Sense strand starting at position 2622 of SEQ ID NO: 1409
uuccaaaucccguagagcu

SEQ ID NO: 110847 - RNA, 19 nt, Artificial Sequence
  Description of Artificial Sequence: Synthetic oligonucleotide
  Antisense strand to SEQ ID NO: 110846
agcucuacgggauuuggaa

SEQ ID NO: 110848 - RNA, 19 nt, Artificial Sequence
  Description of Artificial Sequence: Synthetic oligonucleotide
  Sense strand starting at position 2747 of SEQ ID NO: 1409
gggacagagucagaaguuu

SEQ ID NO: 110849 - RNA, 19 nt, Artificial Sequence
  Description of Artificial Sequence: Synthetic oligonucleotide
  Antisense strand to SEQ ID NO: 110848
aaacuucugacucuguccc

SEQ ID NO: 110850 - RNA, 19 nt, Artificial Sequence
  Description of Artificial Sequence: Synthetic oligonucleotide
  Sense strand starting at position 2761 of SEQ ID NO: 1409
aguuucccagcagaagauu

SEQ ID NO: 110851 - RNA, 19 nt, Artificial Sequence
  Description of Artificial Sequence: Synthetic oligonucleotide
  Antisense strand to SEQ ID NO: 110850
aaucuucugcugggaaacu

SEQ ID NO: 110852 - RNA, 19 nt, Artificial Sequence
  Description of Artificial Sequence: Synthetic oligonucleotide
  Sense strand starting at position 2876 of SEQ ID NO: 1409
ggcaauuagcaucacccaa

SEQ ID NO: 110853 - RNA, 19 nt, Artificial Sequence
  Description of Artificial Sequence: Synthetic oligonucleotide
  Antisense strand to SEQ ID NO: 110852
uugggugaugcuaauugcc

SEQ ID NO: 110854 - RNA, 19 nt, Artificial Sequence
  Description of Artificial Sequence: Synthetic oligonucleotide
  Sense strand starting at position 2894 of SEQ ID NO: 1409
aguggaauuuccuagguca

SEQ ID NO: 110855 - RNA, 19 nt, Artificial Sequence
  Description of Artificial Sequence: Synthetic oligonucleotide
  Antisense strand to SEQ ID NO: 110854
ugaccuaggaaauuccacu

SEQ ID NO: 110856 - RNA, 19 nt, Artificial Sequence
  Description of Artificial Sequence: Synthetic oligonucleotide
  Sense strand starting at position 2938 of SEQ ID NO: 1409
ucugaucugucacuacauu

SEQ ID NO: 110857 - RNA, 19 nt, Artificial Sequence
  Description of Artificial Sequence: Synthetic oligonucleotide
  Antisense strand to SEQ ID NO: 110856
aauguagugacagaucaga

SEQ ID NO: 110858 - RNA, 19 nt, Artificial Sequence
  Description of Artificial Sequence: Synthetic oligonucleotide
  Sense strand starting at position 3588 of SEQ ID NO: 1409
cugauacugagacgacaau

SEQ ID NO: 110859 - RNA, 19 nt, Artificial Sequence
  Description of Artificial Sequence: Synthetic oligonucleotide
  Antisense strand to SEQ ID NO: 110858
auugucgucucaguaucag

SEQ ID NO: 110860 - RNA, 19 nt, Artificial Sequence
  Description of Artificial Sequence: Synthetic oligonucleotide
  Sense strand starting at position 3635 of SEQ ID NO: 1409
gaguguucugguggaagaa

SEQ ID NO: 110861 - RNA, 19 nt, Artificial Sequence
  Description of Artificial Sequence: Synthetic oligonucleotide
  Antisense strand to SEQ ID NO: 110860
uucuuccaccagaacacuc

SEQ ID NO: 110862 - RNA, 19 nt, Artificial Sequence
  Description of Artificial Sequence: Synthetic oligonucleotide
  Sense strand starting at position 3636 of SEQ ID NO: 1409
aguguucugguggaagaaa

SEQ ID NO: 110863 - RNA, 19 nt, Artificial Sequence
  Description of Artificial Sequence: Synthetic oligonucleotide
  Antisense strand to SEQ ID NO: 110862
uuucuuccaccagaacacu

SEQ ID NO: 110864 - RNA, 19 nt, Artificial Sequence
  Description of Artificial Sequence: Synthetic oligonucleotide
  Sense strand starting at position 3654 of SEQ ID NO: 1409
acagaagguucuuauucuu

SEQ ID NO: 110865 - RNA, 19 nt, Artificial Sequence
  Description of Artificial Sequence: Synthetic oligonucleotide
  Antisense strand to SEQ ID NO: 110864
aagaauaagaaccuucugu

SEQ ID NO: 110866 - RNA, 19 nt, Artificial Sequence
  Description of Artificial Sequence: Synthetic oligonucleotide
  Sense strand starting at position 3694 of SEQ ID NO: 1409
uagcccucuugauucgaga

SEQ ID NO: 110867 - RNA, 19 nt, Artificial Sequence
  Description of Artificial Sequence: Synthetic oligonucleotide
  Antisense strand to SEQ ID NO: 110866
ucucgaaucaagagggcua

SEQ ID NO: 110868 - RNA, 19 nt, Artificial Sequence
  Description of Artificial Sequence: Synthetic oligonucleotide
  Sense strand starting at position 3696 of SEQ ID NO: 1409
gcccucuugauucgagaga

SEQ ID NO: 110869 - RNA, 19 nt, Artificial Sequence
  Description of Artificial Sequence: Synthetic oligonucleotide
  Antisense strand to SEQ ID NO: 110868
ucucucgaaucaagagggc

SEQ ID NO: 110870 - RNA, 19 nt, Artificial Sequence
  Description of Artificial Sequence: Synthetic oligonucleotide
  Sense strand starting at position 3715 of SEQ ID NO: 1409
caggaaguaugguaagaug

SEQ ID NO: 110871 - RNA, 19 nt, Artificial Sequence
  Description of Artificial Sequence: Synthetic oligonucleotide
  Antisense strand to SEQ ID NO: 110870
caucuuaccauacuuccug

SEQ ID NO: 110872 - RNA, 19 nt, Artificial Sequence
  Description of Artificial Sequence: Synthetic oligonucleotide
  Sense strand starting at position 3718 of SEQ ID NO: 1409
gaaguaugguaagauguag

SEQ ID NO: 110873 - RNA, 19 nt, Artificial Sequence
  Description of Artificial Sequence: Synthetic oligonucleotide
  Antisense strand to SEQ ID NO: 110872
cuacaucuuaccauacuuc

SEQ ID NO: 110874 - RNA, 19 nt, Artificial Sequence
  Description of Artificial Sequence: Synthetic oligonucleotide
  Sense strand starting at position 3722 of SEQ ID NO: 1409
uaugguaagauguagguua

SEQ ID NO: 110875 - RNA, 19 nt, Artificial Sequence
  Description of Artificial Sequence: Synthetic oligonucleotide
  Antisense strand to SEQ ID NO: 110874
uaaccuacaucuuaccaua

SEQ ID NO: 110876 - RNA, 19 nt, Artificial Sequence
  Description of Artificial Sequence: Synthetic oligonucleotide
  Sense strand starting at position 3781 of SEQ ID NO: 1409
ccagcacugucacuuguuu

SEQ ID NO: 110877 - RNA, 19 nt, Artificial Sequence
  Description of Artificial Sequence: Synthetic oligonucleotide
  Antisense strand to SEQ ID NO: 110876
aaacaagugacagugcugg

SEQ ID NO: 110878 - RNA, 19 nt, Artificial Sequence
  Description of Artificial Sequence: Synthetic oligonucleotide
  Sense strand starting at position 3793 of SEQ ID NO: 1409
cuuguuugcugcucacaua

SEQ ID NO: 110879 - RNA, 19 nt, Artificial Sequence
  Description of Artificial Sequence: Synthetic oligonucleotide
  Antisense strand to SEQ ID NO: 110878
uaugugagcagcaaacaag

SEQ ID NO: 110880 - RNA, 19 nt, Artificial Sequence
  Description of Artificial Sequence: Synthetic oligonucleotide
  Sense strand starting at position 3901 of SEQ ID NO: 1411
uggcuauagaagugugaaa

SEQ ID NO: 110881 - RNA, 19 nt, Artificial Sequence
  Description of Artificial Sequence: Synthetic oligonucleotide
  Antisense strand to SEQ ID NO: 110880
uuucacacuucuauagcca

SEQ ID NO: 110882 - RNA, 19 nt, Artificial Sequence
  Description of Artificial Sequence: Synthetic oligonucleotide
  Sense strand starting at position 3895 of SEQ ID NO: 1411
agauguuggcuauagaagu

SEQ ID NO: 110883 - RNA, 19 nt, Artificial Sequence
  Description of Artificial Sequence: Synthetic oligonucleotide
  Antisense strand to SEQ ID NO: 110882
acuucuauagccaacaucu

SEQ ID NO: 110884 - RNA, 19 nt, Artificial Sequence
  Description of Artificial Sequence: Synthetic oligonucleotide
  Sense strand starting at position 3892 of SEQ ID NO: 1411
uaaagauguuggcuauaga

SEQ ID NO: 110885 - RNA, 19 nt, Artificial Sequence
  Description of Artificial Sequence: Synthetic oligonucleotide
  Antisense strand to SEQ ID NO: 110884
ucuauagccaacaucuuua

SEQ ID NO: 110886 - RNA, 19 nt, Artificial Sequence
  Description of Artificial Sequence: Synthetic oligonucleotide
  Sense strand starting at position 3890 of SEQ ID NO: 1411
aauaaagauguuggcuaua

SEQ ID NO: 110887 - RNA, 19 nt, Artificial Sequence
  Description of Artificial Sequence: Synthetic oligonucleotide
  Antisense strand to SEQ ID NO: 110886
uauagccaacaucuuuauu

SEQ ID NO: 110888 - RNA, 19 nt, Artificial Sequence
  Description of Artificial Sequence: Synthetic oligonucleotide
  Sense strand starting at position 3108 of SEQ ID NO: 1411
cuccaugaaccaggugaaa

SEQ ID NO: 110889 - RNA, 19 nt, Artificial Sequence
  Description of Artificial Sequence: Synthetic oligonucleotide
  Antisense strand to SEQ ID NO: 110888
uuucaccugguucauggag

SEQ ID NO: 110890 - RNA, 19 nt, Artificial Sequence
  Description of Artificial Sequence: Synthetic oligonucleotide
  Sense strand starting at position 3098 of SEQ ID NO: 1411
agaccugagucuccaugaa

SEQ ID NO: 110891 - RNA, 19 nt, Artificial Sequence
  Description of Artificial Sequence: Synthetic oligonucleotide
  Antisense strand to SEQ ID NO: 110890
uucauggagacucaggucu

SEQ ID NO: 110892 - RNA, 19 nt, Artificial Sequence
  Description of Artificial Sequence: Synthetic oligonucleotide
  Sense strand starting at position 2914 of SEQ ID NO: 1411
auccuagaaggcugucaga

SEQ ID NO: 110893 - RNA, 19 nt, Artificial Sequence
  Description of Artificial Sequence: Synthetic oligonucleotide
  Antisense strand to SEQ ID NO: 110892
ucugacagccuucuaggau

SEQ ID NO: 110894 - RNA, 19 nt, Artificial Sequence
  Description of Artificial Sequence: Synthetic oligonucleotide
  Sense strand starting at position 2908 of SEQ ID NO: 1411
guaccuauccuagaaggcu

SEQ ID NO: 110895 - RNA, 19 nt, Artificial Sequence
  Description of Artificial Sequence: Synthetic oligonucleotide
  Antisense strand to SEQ ID NO: 110894
agccuucuaggauagguac

SEQ ID NO: 110896 - RNA, 19 nt, Artificial Sequence
  Description of Artificial Sequence: Synthetic oligonucleotide
  Sense strand starting at position 2904 of SEQ ID NO: 1411
aacgguaccuauccuagaa

SEQ ID NO: 110897 - RNA, 19 nt, Artificial Sequence
  Description of Artificial Sequence: Synthetic oligonucleotide
  Antisense strand to SEQ ID NO: 110896
uucuaggauagguaccguu

SEQ ID NO: 110898 - RNA, 19 nt, Artificial Sequence
  Description of Artificial Sequence: Synthetic oligonucleotide
  Sense strand starting at position 2897 of SEQ ID NO: 1411
cccaaauaacgguaccuau

SEQ ID NO: 110899 - RNA, 19 nt, Artificial Sequence
  Description of Artificial Sequence: Synthetic oligonucleotide
  Antisense strand to SEQ ID NO: 110898
auagguaccguuauuuggg

SEQ ID NO: 110900 - RNA, 19 nt, Artificial Sequence
  Description of Artificial Sequence: Synthetic oligonucleotide
  Sense strand starting at position 2773 of SEQ ID NO: 1411
gccugcuacuucuuuagau

SEQ ID NO: 110901 - RNA, 19 nt, Artificial Sequence
  Description of Artificial Sequence: Synthetic oligonucleotide
  Antisense strand to SEQ ID NO: 110900
aucuaaagaaguagcaggc

SEQ ID NO: 110902 - RNA, 19 nt, Artificial Sequence
  Description of Artificial Sequence: Synthetic oligonucleotide
  Sense strand starting at position 2762 of SEQ ID NO: 1411
ugacaauaauugccugcua

SEQ ID NO: 110903 - RNA, 19 nt, Artificial Sequence
  Description of Artificial Sequence: Synthetic oligonucleotide
  Antisense strand to SEQ ID NO: 110902
uagcaggcaauuauuguca

SEQ ID NO: 110904 - RNA, 19 nt, Artificial Sequence
  Description of Artificial Sequence: Synthetic oligonucleotide
  Sense strand starting at position 2739 of SEQ ID NO: 1411
ugugccucauaccuguaaa

SEQ ID NO: 110905 - RNA, 19 nt, Artificial Sequence
  Description of Artificial Sequence: Synthetic oligonucleotide
  Antisense strand to SEQ ID NO: 110904
uuuacagguaugaggcaca

SEQ ID NO: 110906 - RNA, 19 nt, Artificial Sequence
  Description of Artificial Sequence: Synthetic oligonucleotide
  Sense strand starting at position 2479 of SEQ ID NO: 1411
ugacucaccuguuccacua

SEQ ID NO: 110907 - RNA, 19 nt, Artificial Sequence
  Description of Artificial Sequence: Synthetic oligonucleotide
  Antisense strand to SEQ ID NO: 110906
uaguggaacaggugaguca

SEQ ID NO: 110908 - RNA, 19 nt, Artificial Sequence
  Description of Artificial Sequence: Synthetic oligonucleotide
  Sense strand starting at position 2422 of SEQ ID NO: 1411
acagguucucuccgacaug

SEQ ID NO: 110909 - RNA, 19 nt, Artificial Sequence
  Description of Artificial Sequence: Synthetic oligonucleotide
  Antisense strand to SEQ ID NO: 110908
caugucggagagaaccugu

SEQ ID NO: 110910 - RNA, 19 nt, Artificial Sequence
  Description of Artificial Sequence: Synthetic oligonucleotide
  Sense strand starting at position 2320 of SEQ ID NO: 1411
ugccaugcgagugaguaaa

SEQ ID NO: 110911 - RNA, 19 nt, Artificial Sequence
  Description of Artificial Sequence: Synthetic oligonucleotide
  Antisense strand to SEQ ID NO: 110910
uuuacucacucgcauggca

SEQ ID NO: 110912 - RNA, 19 nt, Artificial Sequence
  Description of Artificial Sequence: Synthetic oligonucleotide
  Sense strand starting at position 2252 of SEQ ID NO: 1411
ggauguugccucugacacu

SEQ ID NO: 110913 - RNA, 19 nt, Artificial Sequence
  Description of Artificial Sequence: Synthetic oligonucleotide
  Antisense strand to SEQ ID NO: 110912
agugucagaggcaacaucc

SEQ ID NO: 110914 - RNA, 19 nt, Artificial Sequence
  Description of Artificial Sequence: Synthetic oligonucleotide
  Sense strand starting at position 2232 of SEQ ID NO: 1411
ucaaaucggcagugcuaaa

SEQ ID NO: 110915 - RNA, 19 nt, Artificial Sequence
  Description of Artificial Sequence: Synthetic oligonucleotide
  Antisense strand to SEQ ID NO: 110914
uuuagcacugccgauuuga

SEQ ID NO: 110916 - RNA, 19 nt, Artificial Sequence
  Description of Artificial Sequence: Synthetic oligonucleotide
  Sense strand starting at position 1869 of SEQ ID NO: 1411
ugcauuaaccaggacaagu

SEQ ID NO: 110917 - RNA, 19 nt, Artificial Sequence
  Description of Artificial Sequence: Synthetic oligonucleotide
  Antisense strand to SEQ ID NO: 110916
acuuguccugguuaaugca

SEQ ID NO: 110918 - RNA, 19 nt, Artificial Sequence
  Description of Artificial Sequence: Synthetic oligonucleotide
  Sense strand starting at position 1868 of SEQ ID NO: 1411
gugcauuaaccaggacaag

SEQ ID NO: 110919 - RNA, 19 nt, Artificial Sequence
  Description of Artificial Sequence: Synthetic oligonucleotide
  Antisense strand to SEQ ID NO: 110918
cuuguccugguuaaugcac

SEQ ID NO: 110920 - RNA, 19 nt, Artificial Sequence
  Description of Artificial Sequence: Synthetic oligonucleotide
  Sense strand starting at position 1818 of SEQ ID NO: 1411
ccagaaauguuguugaagc

SEQ ID NO: 110921 - RNA, 19 nt, Artificial Sequence
  Description of Artificial Sequence: Synthetic oligonucleotide
  Antisense strand to SEQ ID NO: 110920
gcuucaacaacauuucugg

SEQ ID NO: 110922 - RNA, 19 nt, Artificial Sequence
  Description of Artificial Sequence: Synthetic oligonucleotide
  Sense strand starting at position 1784 of SEQ ID NO: 1411
acacguagagcccaaauaa

SEQ ID NO: 110923 - RNA, 19 nt, Artificial Sequence
  Description of Artificial Sequence: Synthetic oligonucleotide
  Antisense strand to SEQ ID NO: 110922
uuauuugggcucuacgugu

SEQ ID NO: 110924 - RNA, 19 nt, Artificial Sequence
  Description of Artificial Sequence: Synthetic oligonucleotide
  Sense strand starting at position 1712 of SEQ ID NO: 1411
guggguguaaacuaugguu

SEQ ID NO: 110925 - RNA, 19 nt, Artificial Sequence
  Description of Artificial Sequence: Synthetic oligonucleotide
  Antisense strand to SEQ ID NO: 110924
aaccauaguuuacacccac

SEQ ID NO: 110926 - RNA, 19 nt, Artificial Sequence
  Description of Artificial Sequence: Synthetic oligonucleotide
  Sense strand starting at position 1705 of SEQ ID NO: 1411
ugaagucguggguguaaac

SEQ ID NO: 110927 - RNA, 19 nt, Artificial Sequence
  Description of Artificial Sequence: Synthetic oligonucleotide
  Antisense strand to SEQ ID NO: 110926
guuuacacccacgacuuca

SEQ ID NO: 110928 - RNA, 19 nt, Artificial Sequence
  Description of Artificial Sequence: Synthetic oligonucleotide
  Sense strand starting at position 1622 of SEQ ID NO: 1411
gcccuuuggucuuuaagga

SEQ ID NO: 110929 - RNA, 19 nt, Artificial Sequence
  Description of Artificial Sequence: Synthetic oligonucleotide
  Antisense strand to SEQ ID NO: 110928
uccuuaaagaccaaagggc

SEQ ID NO: 110930 - RNA, 19 nt, Artificial Sequence
  Description of Artificial Sequence: Synthetic oligonucleotide
  Sense strand starting at position 1563 of SEQ ID NO: 1411
ucaggauucugccuuucuu

SEQ ID NO: 110931 - RNA, 19 nt, Artificial Sequence
  Description of Artificial Sequence: Synthetic oligonucleotide
  Antisense strand to SEQ ID NO: 110930
aagaaaggcagaauccuga

SEQ ID NO: 110932 - RNA, 19 nt, Artificial Sequence
  Description of Artificial Sequence: Synthetic oligonucleotide
  Sense strand starting at position 1552 of SEQ ID NO: 1411
uuccaucugcaucaggauu

SEQ ID NO: 110933 - RNA, 19 nt, Artificial Sequence
  Description of Artificial Sequence: Synthetic oligonucleotide
  Antisense strand to SEQ ID NO: 110932
aauccugaugcagauggaa

SEQ ID NO: 110934 - RNA, 19 nt, Artificial Sequence
  Description of Artificial Sequence: Synthetic oligonucleotide
  Sense strand starting at position 1506 of SEQ ID NO: 1411
gcccuauuagcuccgcaua

SEQ ID NO: 110935 - RNA, 19 nt, Artificial Sequence
  Description of Artificial Sequence: Synthetic oligonucleotide
  Antisense strand to SEQ ID NO: 110934
uaugcggagcuaauagggc

SEQ ID NO: 110936 - RNA, 19 nt, Artificial Sequence
  Description of Artificial Sequence: Synthetic oligonucleotide
  Sense strand starting at position 1487 of SEQ ID NO: 1411
ggugacugcucuccagaca

SEQ ID NO: 110937 - RNA, 19 nt, Artificial Sequence
  Description of Artificial Sequence: Synthetic oligonucleotide
  Antisense strand to SEQ ID NO: 110936
ugucuggagagcagucacc

SEQ ID NO: 110938 - RNA, 19 nt, Artificial Sequence
  Description of Artificial Sequence: Synthetic oligonucleotide
  Sense strand starting at position 1297 of SEQ ID NO: 1411
gaauuucugugacugcagu

SEQ ID NO: 110939 - RNA, 19 nt, Artificial Sequence
  Description of Artificial Sequence: Synthetic oligonucleotide
  Antisense strand to SEQ ID NO: 110938
acugcagucacagaaauuc

SEQ ID NO: 110940 - RNA, 19 nt, Artificial Sequence
  Description of Artificial Sequence: Synthetic oligonucleotide
  Sense strand starting at position 1295 of SEQ ID NO: 1411
uggaauuucugugacugca

SEQ ID NO: 110941 - RNA, 19 nt, Artificial Sequence
  Description of Artificial Sequence: Synthetic oligonucleotide
  Antisense strand to SEQ ID NO: 110940
ugcagucacagaaauucca

SEQ ID NO: 110942 - RNA, 19 nt, Artificial Sequence
  Description of Artificial Sequence: Synthetic oligonucleotide
  Sense strand starting at position 1278 of SEQ ID NO: 1411
gguggagcucuccaaauug

SEQ ID NO: 110943 - RNA, 19 nt, Artificial Sequence
  Description of Artificial Sequence: Synthetic oligonucleotide
  Antisense strand to SEQ ID NO: 110942
caauuuggagagcuccacc

SEQ ID NO: 110944 - RNA, 19 nt, Artificial Sequence
  Description of Artificial Sequence: Synthetic oligonucleotide
  Sense strand starting at position 1174 of SEQ ID NO: 1411
uuggaauuguucccuccuu

SEQ ID NO: 110945 - RNA, 19 nt, Artificial Sequence
  Description of Artificial Sequence: Synthetic oligonucleotide
  Antisense strand to SEQ ID NO: 110944
aaggagggaacaauuccaa

SEQ ID NO: 110946 - RNA, 19 nt, Artificial Sequence
  Description of Artificial Sequence: Synthetic oligonucleotide
  Sense strand starting at position 1038 of SEQ ID NO: 1411
gguguaucacugcagcauu

SEQ ID NO: 110947 - RNA, 19 nt, Artificial Sequence
  Description of Artificial Sequence: Synthetic oligonucleotide
  Antisense strand to SEQ ID NO: 110946
aaugcugcagugauacacc

SEQ ID NO: 110948 - RNA, 19 nt, Artificial Sequence
  Description of Artificial Sequence: Synthetic oligonucleotide
  Sense strand starting at position 943 of SEQ ID NO: 1411
augagaccaugucuuccau

SEQ ID NO: 110949 - RNA, 19 nt, Artificial Sequence
  Description of Artificial Sequence: Synthetic oligonucleotide
  Antisense strand to SEQ ID NO: 110948
auggaagacauggucucau

SEQ ID NO: 110950 - RNA, 19 nt, Artificial Sequence
  Description of Artificial Sequence: Synthetic oligonucleotide
  Sense strand starting at position 758 of SEQ ID NO: 1411
uagagcuuuccacaggcua

SEQ ID NO: 110951 - RNA, 19 nt, Artificial Sequence
  Description of Artificial Sequence: Synthetic oligonucleotide
  Antisense strand to SEQ ID NO: 110950
uagccuguggaaagcucua

SEQ ID NO: 110952 - RNA, 19 nt, Artificial Sequence
  Description of Artificial Sequence: Synthetic oligonucleotide
  Sense strand starting at position 725 of SEQ ID NO: 1411
ucgcaauuguuaucauuau

SEQ ID NO: 110953 - RNA, 19 nt, Artificial Sequence
  Description of Artificial Sequence: Synthetic oligonucleotide
  Antisense strand to SEQ ID NO: 110952
auaaugauaacaauugcga

SEQ ID NO: 110954 - RNA, 19 nt, Artificial Sequence
  Description of Artificial Sequence: Synthetic oligonucleotide
  Sense strand starting at position 344 of SEQ ID NO: 1411
gugagaugaagcugggagu

SEQ ID NO: 110955 - RNA, 19 nt, Artificial Sequence
  Description of Artificial Sequence: Synthetic oligonucleotide
  Antisense strand to SEQ ID NO: 110954
acucccagcuucaucucac

SEQ ID NO: 110956 - RNA, 19 nt, Artificial Sequence
  Description of Artificial Sequence: Synthetic oligonucleotide
  Sense strand starting at position 333 of SEQ ID NO: 1411
aguggauugaagugagaug

SEQ ID NO: 110957 - RNA, 19 nt, Artificial Sequence
  Description of Artificial Sequence: Synthetic oligonucleotide
  Antisense strand to SEQ ID NO: 110956
caucucacuucaauccacu

SEQ ID NO: 110958 - RNA, 19 nt, Artificial Sequence
  Description of Artificial Sequence: Synthetic oligonucleotide
  Sense strand starting at position 226 of SEQ ID NO: 1411
gugaguaaguguguugaua

SEQ ID NO: 110959 - RNA, 19 nt, Artificial Sequence
  Description of Artificial Sequence: Synthetic oligonucleotide
  Antisense strand to SEQ ID NO: 110958
uaucaacacacuuacucac

SEQ ID NO: 110960 - RNA, 19 nt, Artificial Sequence
  Description of Artificial Sequence: Synthetic oligonucleotide
  Sense strand starting at position 3967 of SEQ ID NO: 1410
cagagagacuaaugguuaa

SEQ ID NO: 110961 - RNA, 19 nt, Artificial Sequence
  Description of Artificial Sequence: Synthetic oligonucleotide
  Antisense strand to SEQ ID NO: 110960
uuaaccauuagucucucug

SEQ ID NO: 110962 - RNA, 19 nt, Artificial Sequence
  Description of Artificial Sequence: Synthetic oligonucleotide
  Sense strand starting at position 3946 of SEQ ID NO: 1410
ccacuuacaucagagcaga

SEQ ID NO: 110963 - RNA, 19 nt, Artificial Sequence
  Description of Artificial Sequence: Synthetic oligonucleotide
  Antisense strand to SEQ ID NO: 110962
ucugcucugauguaagugg

SEQ ID NO: 110964 - RNA, 19 nt, Artificial Sequence
  Description of Artificial Sequence: Synthetic oligonucleotide
  Sense strand starting at position 3762 of SEQ ID NO: 1410
ugcauuaaccaggacaagu

SEQ ID NO: 110965 - RNA, 19 nt, Artificial Sequence
  Description of Artificial Sequence: Synthetic oligonucleotide
  Antisense strand to SEQ ID NO: 110964
acuuguccugguuaaugca

SEQ ID NO: 110966 - RNA, 19 nt, Artificial Sequence
  Description of Artificial Sequence: Synthetic oligonucleotide
  Sense strand starting at position 3761 of SEQ ID NO: 1410
gugcauuaaccaggacaag

SEQ ID NO: 110967 - RNA, 19 nt, Artificial Sequence
  Description of Artificial Sequence: Synthetic oligonucleotide
  Antisense strand to SEQ ID NO: 110966
cuuguccugguuaaugcac

SEQ ID NO: 110968 - RNA, 19 nt, Artificial Sequence
  Description of Artificial Sequence: Synthetic oligonucleotide
  Sense strand starting at position 3747 of SEQ ID NO: 1410
agaagaaauuccuagugca

SEQ ID NO: 110969 - RNA, 19 nt, Artificial Sequence
  Description of Artificial Sequence: Synthetic oligonucleotide
  Antisense strand to SEQ ID NO: 110968
ugcacuaggaauuucuucu

SEQ ID NO: 110970 - RNA, 19 nt, Artificial Sequence
  Description of Artificial Sequence: Synthetic oligonucleotide
  Sense strand starting at position 3711 of SEQ ID NO: 1410
ccagaaauguuguugaagc

SEQ ID NO: 110971 - RNA, 19 nt, Artificial Sequence
  Description of Artificial Sequence: Synthetic oligonucleotide
  Antisense strand to SEQ ID NO: 110970
gcuucaacaacauuucugg

SEQ ID NO: 110972 - RNA, 19 nt, Artificial Sequence
  Description of Artificial Sequence: Synthetic oligonucleotide
  Sense strand starting at position 3677 of SEQ ID NO: 1410
acacguagagcccaaauaa

SEQ ID NO: 110973 - RNA, 19 nt, Artificial Sequence
  Description of Artificial Sequence: Synthetic oligonucleotide
  Antisense strand to SEQ ID NO: 110972
uuauuugggcucuacgugu

SEQ ID NO: 110974 - RNA, 19 nt, Artificial Sequence
  Description of Artificial Sequence: Synthetic oligonucleotide
  Sense strand starting at position 3605 of SEQ ID NO: 1410
guggguguaaacuaugguu

SEQ ID NO: 110975 - RNA, 19 nt, Artificial Sequence
  Description of Artificial Sequence: Synthetic oligonucleotide
  Antisense strand to SEQ ID NO: 110974
aaccauaguuuacacccac

SEQ ID NO: 110976 - RNA, 19 nt, Artificial Sequence
  Description of Artificial Sequence: Synthetic oligonucleotide
  Sense strand starting at position 3601 of SEQ ID NO: 1410
agucguggguguaaacuau

SEQ ID NO: 110977 - RNA, 19 nt, Artificial Sequence
  Description of Artificial Sequence: Synthetic oligonucleotide
  Antisense strand to SEQ ID NO: 110976
auaguuuacacccacgacu

SEQ ID NO: 110978 - RNA, 19 nt, Artificial Sequence
  Description of Artificial Sequence: Synthetic oligonucleotide
  Sense strand starting at position 3598 of SEQ ID NO: 1410
ugaagucguggguguaaac

SEQ ID NO: 110979 - RNA, 19 nt, Artificial Sequence
  Description of Artificial Sequence: Synthetic oligonucleotide
  Antisense strand to SEQ ID NO: 110978
guuuacacccacgacuuca

SEQ ID NO: 110980 - RNA, 19 nt, Artificial Sequence
  Description of Artificial Sequence: Synthetic oligonucleotide
  Sense strand starting at position 3533 of SEQ ID NO: 1410
agguuuguuuccuucugua

SEQ ID NO: 110981 - RNA, 19 nt, Artificial Sequence
  Description of Artificial Sequence: Synthetic oligonucleotide
  Antisense strand to SEQ ID NO: 110980
uacagaaggaaacaaaccu

SEQ ID NO: 110982 - RNA, 19 nt, Artificial Sequence
  Description of Artificial Sequence: Synthetic oligonucleotide
  Sense strand starting at position 3532 of SEQ ID NO: 1410
gagguuuguuuccuucugu

SEQ ID NO: 110983 - RNA, 19 nt, Artificial Sequence
  Description of Artificial Sequence: Synthetic oligonucleotide
  Antisense strand to SEQ ID NO: 110982
acagaaggaaacaaaccuc

SEQ ID NO: 110984 - RNA, 19 nt, Artificial Sequence
  Description of Artificial Sequence: Synthetic oligonucleotide
  Sense strand starting at position 3515 of SEQ ID NO: 1410
gcccuuuggucuuuaagga

SEQ ID NO: 110985 - RNA, 19 nt, Artificial Sequence
  Description of Artificial Sequence: Synthetic oligonucleotide
  Antisense strand to SEQ ID NO: 110984
uccuuaaagaccaaagggc

SEQ ID NO: 110986 - RNA, 19 nt, Artificial Sequence
  Description of Artificial Sequence: Synthetic oligonucleotide
  Sense strand starting at position 3456 of SEQ ID NO: 1410
ucaggauucugccuuucuu

SEQ ID NO: 110987 - RNA, 19 nt, Artificial Sequence
  Description of Artificial Sequence: Synthetic oligonucleotide
  Antisense strand to SEQ ID NO: 110986
aagaaaggcagaauccuga

SEQ ID NO: 110988 - RNA, 19 nt, Artificial Sequence
  Description of Artificial Sequence: Synthetic oligonucleotide
  Sense strand starting at position 3445 of SEQ ID NO: 1410
uuccaucugcaucaggauu

SEQ ID NO: 110989 - RNA, 19 nt, Artificial Sequence
  Description of Artificial Sequence: Synthetic oligonucleotide
  Antisense strand to SEQ ID NO: 110988
aauccugaugcagauggaa

SEQ ID NO: 110990 - RNA, 19 nt, Artificial Sequence
  Description of Artificial Sequence: Synthetic oligonucleotide
  Sense strand starting at position 3336 of SEQ ID NO: 1410
gcccuauuagcuccgcaua

SEQ ID NO: 110991 - RNA, 19 nt, Artificial Sequence
  Description of Artificial Sequence: Synthetic oligonucleotide
  Antisense strand to SEQ ID NO: 110990
uaugcggagcuaauagggc

SEQ ID NO: 110992 - RNA, 19 nt, Artificial Sequence
  Description of Artificial Sequence: Synthetic oligonucleotide
  Sense strand starting at position 3317 of SEQ ID NO: 1410
ggugacugcucuccagaca

SEQ ID NO: 110993 - RNA, 19 nt, Artificial Sequence
  Description of Artificial Sequence: Synthetic oligonucleotide
  Antisense strand to SEQ ID NO: 110992
ugucuggagagcagucacc

SEQ ID NO: 110994 - RNA, 19 nt, Artificial Sequence
  Description of Artificial Sequence: Synthetic oligonucleotide
  Sense strand starting at position 3190 of SEQ ID NO: 1410
gaauuucugugacugcagu

SEQ ID NO: 110995 - RNA, 19 nt, Artificial Sequence
  Description of Artificial Sequence: Synthetic oligonucleotide
  Antisense strand to SEQ ID NO: 110994
acugcagucacagaaauuc

SEQ ID NO: 110996 - RNA, 19 nt, Artificial Sequence
  Description of Artificial Sequence: Synthetic oligonucleotide
  Sense strand starting at position 3188 of SEQ ID NO: 1410
uggaauuucugugacugca

SEQ ID NO: 110997 - RNA, 19 nt, Artificial Sequence
  Description of Artificial Sequence: Synthetic oligonucleotide
  Antisense strand to SEQ ID NO: 110996
ugcagucacagaaauucca

SEQ ID NO: 110998 - RNA, 19 nt, Artificial Sequence
  Description of Artificial Sequence: Synthetic oligonucleotide
  Sense strand starting at position 3171 of SEQ ID NO: 1410
gguggagcucuccaaauug

SEQ ID NO: 110999 - RNA, 19 nt, Artificial Sequence
  Description of Artificial Sequence: Synthetic oligonucleotide
  Antisense strand to SEQ ID NO: 110998
caauuuggagagcuccacc

SEQ ID NO: 111000 - RNA, 19 nt, Artificial Sequence
  Description of Artificial Sequence: Synthetic oligonucleotide
  Sense strand starting at position 3067 of SEQ ID NO: 1410
uuggaauuguucccuccuu

SEQ ID NO: 111001 - RNA, 19 nt, Artificial Sequence
  Description of Artificial Sequence: Synthetic oligonucleotide
  Antisense strand to SEQ ID NO: 111000
aaggagggaacaauuccaa

SEQ ID NO: 111002 - RNA, 19 nt, Artificial Sequence
  Description of Artificial Sequence: Synthetic oligonucleotide
  Sense strand starting at position 3056 of SEQ ID NO: 1410
guuggcuuuguuuggaauu

SEQ ID NO: 111003 - RNA, 19 nt, Artificial Sequence
  Description of Artificial Sequence: Synthetic oligonucleotide
  Antisense strand to SEQ ID NO: 111002
aauuccaaacaaagccaac

SEQ ID NO: 111004 - RNA, 19 nt, Artificial Sequence
  Description of Artificial Sequence: Synthetic oligonucleotide
  Sense strand starting at position 2931 of SEQ ID NO: 1410
gguguaucacugcagcauu

SEQ ID NO: 111005 - RNA, 19 nt, Artificial Sequence
  Description of Artificial Sequence: Synthetic oligonucleotide
  Antisense strand to SEQ ID NO: 111004
aaugcugcagugauacacc

SEQ ID NO: 111006 - RNA, 19 nt, Artificial Sequence
  Description of Artificial Sequence: Synthetic oligonucleotide
  Sense strand starting at position 2836 of SEQ ID NO: 1410
augagaccaugucuuccau

SEQ ID NO: 111007 - RNA, 19 nt, Artificial Sequence
  Description of Artificial Sequence: Synthetic oligonucleotide
  Antisense strand to SEQ ID NO: 111006
auggaagacauggucucau

SEQ ID NO: 111008 - RNA, 19 nt, Artificial Sequence
  Description of Artificial Sequence: Synthetic oligonucleotide
  Sense strand starting at position 2651 of SEQ ID NO: 1410
uagagcuuuccacaggcua

SEQ ID NO: 111009 - RNA, 19 nt, Artificial Sequence
  Description of Artificial Sequence: Synthetic oligonucleotide
  Antisense strand to SEQ ID NO: 111008
uagccuguggaaagcucua

SEQ ID NO: 111010 - RNA, 19 nt, Artificial Sequence
  Description of Artificial Sequence: Synthetic oligonucleotide
  Sense strand starting at position 2618 of SEQ ID NO: 1410
ucgcaauuguuaucauuau

SEQ ID NO: 111011 - RNA, 19 nt, Artificial Sequence
  Description of Artificial Sequence: Synthetic oligonucleotide
  Antisense strand to SEQ ID NO: 111010
auaaugauaacaauugcga

SEQ ID NO: 111012 - RNA, 19 nt, Artificial Sequence
  Description of Artificial Sequence: Synthetic oligonucleotide
  Sense strand starting at position 2237 of SEQ ID NO: 1410
gugagaugaagcugggagu

SEQ ID NO: 111013 - RNA, 19 nt, Artificial Sequence
  Description of Artificial Sequence: Synthetic oligonucleotide
  Antisense strand to SEQ ID NO: 111012
acucccagcuucaucucac

SEQ ID NO: 111014 - RNA, 19 nt, Artificial Sequence
  Description of Artificial Sequence: Synthetic oligonucleotide
  Sense strand starting at position 2226 of SEQ ID NO: 1410
aguggauugaagugagaug

SEQ ID NO: 111015 - RNA, 19 nt, Artificial Sequence
  Description of Artificial Sequence: Synthetic oligonucleotide
  Antisense strand to SEQ ID NO: 111014
caucucacuucaauccacu

SEQ ID NO: 111016 - RNA, 19 nt, Artificial Sequence
  Description of Artificial Sequence: Synthetic oligonucleotide
  Sense strand starting at position 2119 of SEQ ID NO: 1410
gugaguaaguguguugaua

SEQ ID NO: 111017 - RNA, 19 nt, Artificial Sequence
  Description of Artificial Sequence: Synthetic oligonucleotide
  Antisense strand to SEQ ID NO: 111016
uaucaacacacuuacucac

SEQ ID NO: 111018 - RNA, 19 nt, Artificial Sequence
  Description of Artificial Sequence: Synthetic oligonucleotide
  Sense strand starting at position 2118 of SEQ ID NO: 1410
ggugaguaaguguguugau

SEQ ID NO: 111019 - RNA, 19 nt, Artificial Sequence
  Description of Artificial Sequence: Synthetic oligonucleotide
  Antisense strand to SEQ ID NO: 111018
aucaacacacuuacucacc

SEQ ID NO: 111020 - RNA, 19 nt, Artificial Sequence
  Description of Artificial Sequence: Synthetic oligonucleotide
  Sense strand starting at position 742 of SEQ ID NO: 1410
aggugcaaugccuguaauc

SEQ ID NO: 111021 - RNA, 19 nt, Artificial Sequence
  Description of Artificial Sequence: Synthetic oligonucleotide
  Antisense strand to SEQ ID NO: 111020
gauuacaggcauugcaccu

SEQ ID NO: 111022 - RNA, 19 nt, Artificial Sequence
  Description of Artificial Sequence: Synthetic oligonucleotide
  Sense strand starting at position 431 of SEQ ID NO: 1410
ggcaaauagaauggugguu

SEQ ID NO: 111023 - RNA, 19 nt, Artificial Sequence
  Description of Artificial Sequence: Synthetic oligonucleotide
  Antisense strand to SEQ ID NO: 111022
aaccaccauucuauuugcc

SEQ ID NO: 111024 - RNA, 19 nt, Artificial Sequence
  Description of Artificial Sequence: Synthetic oligonucleotide
  Sense strand starting at position 403 of SEQ ID NO: 1410
uacccagaguaguaagauu

SEQ ID NO: 111025 - RNA, 19 nt, Artificial Sequence
  Description of Artificial Sequence: Synthetic oligonucleotide
  Antisense strand to SEQ ID NO: 111024
aaucuuacuacucugggua

SEQ ID NO: 111026 - RNA, 19 nt, Artificial Sequence
  Description of Artificial Sequence: Synthetic oligonucleotide
  Sense strand starting at position 377 of SEQ ID NO: 1410
ugcuguauguuuccacuua

SEQ ID NO: 111027 - RNA, 19 nt, Artificial Sequence
  Description of Artificial Sequence: Synthetic oligonucleotide
  Antisense strand to SEQ ID NO: 111026
uaaguggaaacauacagca

SEQ ID NO: 111028 - RNA, 19 nt, Artificial Sequence
  Description of Artificial Sequence: Synthetic oligonucleotide
  Sense strand starting at position 296 of SEQ ID NO: 1410
ggaauuccgacacaugcua

SEQ ID NO: 111029 - RNA, 19 nt, Artificial Sequence
  Description of Artificial Sequence: Synthetic oligonucleotide
  Antisense strand to SEQ ID NO: 111028
uagcaugugucggaauucc

SEQ ID NO: 111030 - RNA, 19 nt, Artificial Sequence
  Description of Artificial Sequence: Synthetic oligonucleotide
  Sense strand starting at position 206 of SEQ ID NO: 1410
agaaguaauccagguguuc

SEQ ID NO: 111031 - RNA, 19 nt, Artificial Sequence
  Description of Artificial Sequence: Synthetic oligonucleotide
  Antisense strand to SEQ ID NO: 111030
gaacaccuggauuacuucu

SEQ ID NO: 111032 - RNA, 19 nt, Artificial Sequence
  Description of Artificial Sequence: Synthetic oligonucleotide
  Sense strand starting at position 204 of SEQ ID NO: 1410
guagaaguaauccaggugu

SEQ ID NO: 111033 - RNA, 19 nt, Artificial Sequence
  Description of Artificial Sequence: Synthetic oligonucleotide
  Antisense strand to SEQ ID NO: 111032
acaccuggauuacuucuac

SEQ ID NO: 111034 - RNA, 19 nt, Artificial Sequence
  Description of Artificial Sequence: Synthetic oligonucleotide
  Sense strand starting at position 153 of SEQ ID NO: 1410
aagagauauuugugcacca

SEQ ID NO: 111035 - RNA, 19 nt, Artificial Sequence
  Description of Artificial Sequence: Synthetic oligonucleotide
  Antisense strand to SEQ ID NO: 111034
uggugcacaaauaucucuu

SEQ ID NO: 111036 - RNA, 19 nt, Artificial Sequence
  Description of Artificial Sequence: Synthetic oligonucleotide
  Sense strand starting at position 82 of SEQ ID NO: 1410
acagaauuaccguaugauu

SEQ ID NO: 111037 - RNA, 19 nt, Artificial Sequence
  Description of Artificial Sequence: Synthetic oligonucleotide
  Antisense strand to SEQ ID NO: 111036
aaucauacgguaauucugu

SEQ ID NO: 111038 - RNA, 19 nt, Artificial Sequence
  Description of Artificial Sequence: Synthetic oligonucleotide
  Sense strand starting at position 29 of SEQ ID NO: 1410
ggaaauggugcagauggua

SEQ ID NO: 111039 - RNA, 19 nt, Artificial Sequence
  Description of Artificial Sequence: Synthetic oligonucleotide
  Antisense strand to SEQ ID NO: 111038
uaccaucugcaccauuucc

SEQ ID NO: 111040 - RNA, 19 nt, Artificial Sequence
  Description of Artificial Sequence: Synthetic oligonucleotide
  Sense strand starting at position 14 of SEQ ID NO: 1412
ucauauuaaguuugaagga

SEQ ID NO: 111041 - RNA, 19 nt, Artificial Sequence
  Description of Artificial Sequence: Synthetic oligonucleotide
  Antisense strand to SEQ ID NO: 111040
uccuucaaacuuaauauga

SEQ ID NO: 111042 - RNA, 19 nt, Artificial Sequence
  Description of Artificial Sequence: Synthetic oligonucleotide
  Sense strand starting at position 63 of SEQ ID NO: 1412
ugaguuaggcauuaguaga

SEQ ID NO: 111043 - RNA, 19 nt, Artificial Sequence
  Description of Artificial Sequence: Synthetic oligonucleotide
  Antisense strand to SEQ ID NO: 111042
ucuacuaaugccuaacuca

SEQ ID NO: 111044 - RNA, 19 nt, Artificial Sequence
  Description of Artificial Sequence: Synthetic oligonucleotide
  Sense strand starting at position 68 of SEQ ID NO: 1412
uaggcauuaguagaucuga

SEQ ID NO: 111045 - RNA, 19 nt, Artificial Sequence
  Description of Artificial Sequence: Synthetic oligonucleotide
  Antisense strand to SEQ ID NO: 111044
ucagaucuacuaaugccua

SEQ ID NO: 111046 - RNA, 19 nt, Artificial Sequence
  Description of Artificial Sequence: Synthetic oligonucleotide
  Sense strand starting at position 122 of SEQ ID NO: 1412
guuaguagaauccauguga

SEQ ID NO: 111047 - RNA, 19 nt, Artificial Sequence
  Description of Artificial Sequence: Synthetic oligonucleotide
  Antisense strand to SEQ ID NO: 111046
ucacauggauucuacuaac

SEQ ID NO: 111048 - RNA, 19 nt, Artificial Sequence
  Description of Artificial Sequence: Synthetic oligonucleotide
  Sense strand starting at position 130 of SEQ ID NO: 1412
aauccaugugaguggacaa

SEQ ID NO: 111049 - RNA, 19 nt, Artificial Sequence
  Description of Artificial Sequence: Synthetic oligonucleotide
  Antisense strand to SEQ ID NO: 111048
uuguccacucacauggauu

SEQ ID NO: 111050 - RNA, 19 nt, Artificial Sequence
  Description of Artificial Sequence: Synthetic oligonucleotide
  Sense strand starting at position 131 of SEQ ID NO: 1412
auccaugugaguggacaaa

SEQ ID NO: 111051 - RNA, 19 nt, Artificial Sequence
  Description of Artificial Sequence: Synthetic oligonucleotide
  Antisense strand to SEQ ID NO: 111050
uuuguccacucacauggau

SEQ ID NO: 111052 - RNA, 19 nt, Artificial Sequence
  Description of Artificial Sequence: Synthetic oligonucleotide
  Sense strand starting at position 430 of SEQ ID NO: 1412
ucaagaaguuuacugauag

SEQ ID NO: 111053 - RNA, 19 nt, Artificial Sequence
  Description of Artificial Sequence: Synthetic oligonucleotide
  Antisense strand to SEQ ID NO: 111052
cuaucaguaaacuucuuga

SEQ ID NO: 111054 - RNA, 19 nt, Artificial Sequence
  Description of Artificial Sequence: Synthetic oligonucleotide
  Sense strand starting at position 527 of SEQ ID NO: 1412
ugacuugagcacugaagag

SEQ ID NO: 111055 - RNA, 19 nt, Artificial Sequence
  Description of Artificial Sequence: Synthetic oligonucleotide
  Antisense strand to SEQ ID NO: 111054
cucuucagugcucaaguca

SEQ ID NO: 111056 - RNA, 19 nt, Artificial Sequence
  Description of Artificial Sequence: Synthetic oligonucleotide
  Sense strand starting at position 642 of SEQ ID NO: 1412
auggauggauuauccuuua

SEQ ID NO: 111057 - RNA, 19 nt, Artificial Sequence
  Description of Artificial Sequence: Synthetic oligonucleotide
  Antisense strand to SEQ ID NO: 111056
uaaaggauaauccauccau

SEQ ID NO: 111058 - RNA, 19 nt, Artificial Sequence
  Description of Artificial Sequence: Synthetic oligonucleotide
  Sense strand starting at position 744 of SEQ ID NO: 1412
gaagaaauggccuguuaua

SEQ ID NO: 111059 - RNA, 19 nt, Artificial Sequence
  Description of Artificial Sequence: Synthetic oligonucleotide
  Antisense strand to SEQ ID NO: 111058
uauaacaggccauuucuuc

SEQ ID NO: 111060 - RNA, 19 nt, Artificial Sequence
  Description of Artificial Sequence: Synthetic oligonucleotide
  Sense strand starting at position 754 of SEQ ID NO: 1412
ccuguuauacuccaucaug

SEQ ID NO: 111061 - RNA, 19 nt, Artificial Sequence
  Description of Artificial Sequence: Synthetic oligonucleotide
  Antisense strand to SEQ ID NO: 111060
caugauggaguauaacagg

SEQ ID NO: 111062 - RNA, 19 nt, Artificial Sequence
  Description of Artificial Sequence: Synthetic oligonucleotide
  Sense strand starting at position 876 of SEQ ID NO: 1412
aggauugcugaguaguaug

SEQ ID NO: 111063 - RNA, 19 nt, Artificial Sequence
  Description of Artificial Sequence: Synthetic oligonucleotide
  Antisense strand to SEQ ID NO: 111062
cauacuacucagcaauccu

SEQ ID NO: 111064 - RNA, 19 nt, Artificial Sequence
  Description of Artificial Sequence: Synthetic oligonucleotide
  Sense strand starting at position 997 of SEQ ID NO: 1412
agauaugguaguuaaguga

SEQ ID NO: 111065 - RNA, 19 nt, Artificial Sequence
  Description of Artificial Sequence: Synthetic oligonucleotide
  Antisense strand to SEQ ID NO: 111064
ucacuuaacuaccauaucu

SEQ ID NO: 111066 - RNA, 19 nt, Artificial Sequence
  Description of Artificial Sequence: Synthetic oligonucleotide
  Sense strand starting at position 1132 of SEQ ID NO: 1412
cagugaauuccagaagcuc

SEQ ID NO: 111067 - RNA, 19 nt, Artificial Sequence
  Description of Artificial Sequence: Synthetic oligonucleotide
  Antisense strand to SEQ ID NO: 111066
gagcuucuggaauucacug

SEQ ID NO: 111068 - RNA, 19 nt, Artificial Sequence
  Description of Artificial Sequence: Synthetic oligonucleotide
  Sense strand starting at position 1141 of SEQ ID NO: 1412
ccagaagcucuccaagcaa

SEQ ID NO: 111069 - RNA, 19 nt, Artificial Sequence
  Description of Artificial Sequence: Synthetic oligonucleotide
  Antisense strand to SEQ ID NO: 111068
uugcuuggagagcuucugg

SEQ ID NO: 111070 - RNA, 19 nt, Artificial Sequence
  Description of Artificial Sequence: Synthetic oligonucleotide
  Sense strand starting at position 1308 of SEQ ID NO: 1412
ggcagugcucugccacuca

SEQ ID NO: 111071 - RNA, 19 nt, Artificial Sequence
  Description of Artificial Sequence: Synthetic oligonucleotide
  Antisense strand to SEQ ID NO: 111070
ugaguggcagagcacugcc

SEQ ID NO: 111072 - RNA, 19 nt, Artificial Sequence
  Description of Artificial Sequence: Synthetic oligonucleotide
  Sense strand starting at position 1354 of SEQ ID NO: 1412
ggagauucagaucaguguu

SEQ ID NO: 111073 - RNA, 19 nt, Artificial Sequence
  Description of Artificial Sequence: Synthetic oligonucleotide
  Antisense strand to SEQ ID NO: 111072
aacacugaucugaaucucc

SEQ ID NO: 111074 - RNA, 19 nt, Artificial Sequence
  Description of Artificial Sequence: Synthetic oligonucleotide
  Sense strand starting at position 1418 of SEQ ID NO: 1412
uaaugugaaucugugaaca

SEQ ID NO: 111075 - RNA, 19 nt, Artificial Sequence
  Description of Artificial Sequence: Synthetic oligonucleotide
  Antisense strand to SEQ ID NO: 111074
uguucacagauucacauua

SEQ ID NO: 111076 - RNA, 19 nt, Artificial Sequence
  Description of Artificial Sequence: Synthetic oligonucleotide
  Sense strand starting at position 1532 of SEQ ID NO: 1412
ucuagagacuuaguaacau

SEQ ID NO: 111077 - RNA, 19 nt, Artificial Sequence
  Description of Artificial Sequence: Synthetic oligonucleotide
  Antisense strand to SEQ ID NO: 111076
auguuacuaagucucuaga

SEQ ID NO: 111078 - RNA, 19 nt, Artificial Sequence
  Description of Artificial Sequence: Synthetic oligonucleotide
  Sense strand starting at position 1541 of SEQ ID NO: 1412
uuaguaacauuaguggaau

SEQ ID NO: 111079 - RNA, 19 nt, Artificial Sequence
  Description of Artificial Sequence: Synthetic oligonucleotide
  Antisense strand to SEQ ID NO: 111078
auuccacuaauguuacuaa

SEQ ID NO: 111080 - RNA, 19 nt, Artificial Sequence
  Description of Artificial Sequence: Synthetic oligonucleotide
  Sense strand starting at position 1773 of SEQ ID NO: 1412
auagguaucguugagacag

SEQ ID NO: 111081 - RNA, 19 nt, Artificial Sequence
  Description of Artificial Sequence: Synthetic oligonucleotide
  Antisense strand to SEQ ID NO: 111080
cugucucaacgauaccuau

SEQ ID NO: 111082 - RNA, 19 nt, Artificial Sequence
  Description of Artificial Sequence: Synthetic oligonucleotide
  Sense strand starting at position 1819 of SEQ ID NO: 1412
cgguuacucaggcaacaaa

SEQ ID NO: 111083 - RNA, 19 nt, Artificial Sequence
  Description of Artificial Sequence: Synthetic oligonucleotide
  Antisense strand to SEQ ID NO: 111082
uuuguugccugaguaaccg

SEQ ID NO: 111084 - RNA, 19 nt, Artificial Sequence
  Description of Artificial Sequence: Synthetic oligonucleotide
  Sense strand starting at position 1903 of SEQ ID NO: 1412
gaguaaucucagcugcguu

SEQ ID NO: 111085 - RNA, 19 nt, Artificial Sequence
  Description of Artificial Sequence: Synthetic oligonucleotide
  Antisense strand to SEQ ID NO: 111084
aacgcagcugagauuacuc

SEQ ID NO: 111086 - RNA, 19 nt, Artificial Sequence
  Description of Artificial Sequence: Synthetic oligonucleotide
  Sense strand starting at position 2469 of SEQ ID NO: 1412
gggaaagauuguuccggga

SEQ ID NO: 111087 - RNA, 19 nt, Artificial Sequence
  Description of Artificial Sequence: Synthetic oligonucleotide
  Antisense strand to SEQ ID NO: 111086
ucccggaacaaucuuuccc

SEQ ID NO: 111088 - RNA, 19 nt, Artificial Sequence
  Description of Artificial Sequence: Synthetic oligonucleotide
  Sense strand starting at position 2473 of SEQ ID NO: 1412
aagauuguuccgggaagac

SEQ ID NO: 111089 - RNA, 19 nt, Artificial Sequence
  Description of Artificial Sequence: Synthetic oligonucleotide
  Antisense strand to SEQ ID NO: 111088
gucuucccggaacaaucuu

SEQ ID NO: 111090 - RNA, 19 nt, Artificial Sequence
  Description of Artificial Sequence: Synthetic oligonucleotide
  Sense strand starting at position 2505 of SEQ ID NO: 1412
gaugaaacuuagguuucga

SEQ ID NO: 111091 - RNA, 19 nt, Artificial Sequence
  Description of Artificial Sequence: Synthetic oligonucleotide
  Antisense strand to SEQ ID NO: 111090
ucgaaaccuaaguuucauc

SEQ ID NO: 111092 - RNA, 19 nt, Artificial Sequence
  Description of Artificial Sequence: Synthetic oligonucleotide
  Sense strand starting at position 2781 of SEQ ID NO: 1412
guuagucgucggguucacu

SEQ ID NO: 111093 - RNA, 19 nt, Artificial Sequence
  Description of Artificial Sequence: Synthetic oligonucleotide
  Antisense strand to SEQ ID NO: 111092
agugaacccgacgacuaac

SEQ ID NO: 111094 - RNA, 19 nt, Artificial Sequence
  Description of Artificial Sequence: Synthetic oligonucleotide
  Sense strand starting at position 2820 of SEQ ID NO: 1412
aguacugagaacgaucuuu

SEQ ID NO: 111095 - RNA, 19 nt, Artificial Sequence
  Description of Artificial Sequence: Synthetic oligonucleotide
  Antisense strand to SEQ ID NO: 111094
aaagaucguucucaguacu

SEQ ID NO: 111096 - RNA, 19 nt, Artificial Sequence
  Description of Artificial Sequence: Synthetic oligonucleotide
  Sense strand starting at position 2933 of SEQ ID NO: 1412
gagucuguacuguaagaca

SEQ ID NO: 111097 - RNA, 19 nt, Artificial Sequence
  Description of Artificial Sequence: Synthetic oligonucleotide
  Antisense strand to SEQ ID NO: 111096
ugucuuacaguacagacuc

SEQ ID NO: 111098 - RNA, 19 nt, Artificial Sequence
  Description of Artificial Sequence: Synthetic oligonucleotide
  Sense strand starting at position 2941 of SEQ ID NO: 1412
acuguaagacaauguauac

SEQ ID NO: 111099 - RNA, 19 nt, Artificial Sequence
  Description of Artificial Sequence: Synthetic oligonucleotide
  Antisense strand to SEQ ID NO: 111098
guauacauugucuuacagu

SEQ ID NO: 111100 - RNA, 19 nt, Artificial Sequence
  Description of Artificial Sequence: Synthetic oligonucleotide
  Sense strand starting at position 3184 of SEQ ID NO: 1412
uugucauauggaugacaaa

SEQ ID NO: 111101 - RNA, 19 nt, Artificial Sequence
  Description of Artificial Sequence: Synthetic oligonucleotide
  Antisense strand to SEQ ID NO: 111100
uuugucauccauaugacaa

SEQ ID NO: 111102 - RNA, 19 nt, Artificial Sequence
  Description of Artificial Sequence: Synthetic oligonucleotide
  Sense strand starting at position 3266 of SEQ ID NO: 1412
gaguguauuggugaggaug

SEQ ID NO: 111103 - RNA, 19 nt, Artificial Sequence
  Description of Artificial Sequence: Synthetic oligonucleotide
  Antisense strand to SEQ ID NO: 111102
cauccucaccaauacacuc

SEQ ID NO: 111104 - RNA, 19 nt, Artificial Sequence
  Description of Artificial Sequence: Synthetic oligonucleotide
  Sense strand starting at position 3281 of SEQ ID NO: 1412
gauggugaaacggaguauu

SEQ ID NO: 111105 - RNA, 19 nt, Artificial Sequence
  Description of Artificial Sequence: Synthetic oligonucleotide
  Antisense strand to SEQ ID NO: 111104
aauacuccguuucaccauc

SEQ ID NO: 111106 - RNA, 19 nt, Artificial Sequence
  Description of Artificial Sequence: Synthetic oligonucleotide
  Sense strand starting at position 3455 of SEQ ID NO: 1412
acucuauguguuuauauga

SEQ ID NO: 111107 - RNA, 19 nt, Artificial Sequence
  Description of Artificial Sequence: Synthetic oligonucleotide
  Antisense strand to SEQ ID NO: 111106
ucauauaaacacauagagu

SEQ ID NO: 111108 - RNA, 19 nt, Artificial Sequence
  Description of Artificial Sequence: Synthetic oligonucleotide
  Sense strand starting at position 3647 of SEQ ID NO: 1412
guuugagccagauaacuag

SEQ ID NO: 111109 - RNA, 19 nt, Artificial Sequence
  Description of Artificial Sequence: Synthetic oligonucleotide
  Antisense strand to SEQ ID NO: 111108
cuaguuaucuggcucaaac

SEQ ID NO: 111110 - RNA, 19 nt, Artificial Sequence
  Description of Artificial Sequence: Synthetic oligonucleotide
  Sense strand starting at position 3745 of SEQ ID NO: 1412
guacuuuagauguacaagu

SEQ ID NO: 111111 - RNA, 19 nt, Artificial Sequence
  Description of Artificial Sequence: Synthetic oligonucleotide
  Antisense strand to SEQ ID NO: 111110
acuuguacaucuaaaguac

SEQ ID NO: 111112 - RNA, 19 nt, Artificial Sequence
  Description of Artificial Sequence: Synthetic oligonucleotide
  Sense strand starting at position 3792 of SEQ ID NO: 1412
uuaggugacuacucuuaaa

SEQ ID NO: 111113 - RNA, 19 nt, Artificial Sequence
  Description of Artificial Sequence: Synthetic oligonucleotide
  Antisense strand to SEQ ID NO: 111112
uuuaagaguagucaccuaa

SEQ ID NO: 111114 - RNA, 19 nt, Artificial Sequence
  Description of Artificial Sequence: Synthetic oligonucleotide
  Sense strand starting at position 3857 of SEQ ID NO: 1412
cuagaagauuacgauuuaa

SEQ ID NO: 111115 - RNA, 19 nt, Artificial Sequence
  Description of Artificial Sequence: Synthetic oligonucleotide
  Antisense strand to SEQ ID NO: 111114
uuaaaucguaaucuucuag

SEQ ID NO: 111116 - RNA, 19 nt, Artificial Sequence
  Description of Artificial Sequence: Synthetic oligonucleotide
  Sense strand starting at position 3916 of SEQ ID NO: 1412
gcaacuaggguguaucaaa

SEQ ID NO: 111117 - RNA, 19 nt, Artificial Sequence
  Description of Artificial Sequence: Synthetic oligonucleotide
  Antisense strand to SEQ ID NO: 111116
uuugauacacccuaguugc

SEQ ID NO: 111118 - RNA, 19 nt, Artificial Sequence
  Description of Artificial Sequence: Synthetic oligonucleotide
  Sense strand starting at position 3923 of SEQ ID NO: 1412
ggguguaucaaagaucucu

SEQ ID NO: 111119 - RNA, 19 nt, Artificial Sequence
  Description of Artificial Sequence: Synthetic oligonucleotide
  Antisense strand to SEQ ID NO: 111118
agagaucuuugauacaccc

SEQ ID NO: 111120 - RNA, 19 nt, Artificial Sequence
  Description of Artificial Sequence: Synthetic oligonucleotide
  Sense strand starting at position 3927 of SEQ ID NO: 1414
cauccagugugguuagacu

SEQ ID NO: 111121 - RNA, 19 nt, Artificial Sequence
  Description of Artificial Sequence: Synthetic oligonucleotide
  Antisense strand to SEQ ID NO: 111120
agucuaaccacacuggaug

SEQ ID NO: 111122 - RNA, 19 nt, Artificial Sequence
  Description of Artificial Sequence: Synthetic oligonucleotide
  Sense strand starting at position 3860 of SEQ ID NO: 1414
ugggcuucauagguagaaa

SEQ ID NO: 111123 - RNA, 19 nt, Artificial Sequence
  Description of Artificial Sequence: Synthetic oligonucleotide
  Antisense strand to SEQ ID NO: 111122
uuucuaccuaugaagccca

SEQ ID NO: 111124 - RNA, 19 nt, Artificial Sequence
  Description of Artificial Sequence: Synthetic oligonucleotide
  Sense strand starting at position 3848 of SEQ ID NO: 1414
ugaagaaugaacugggcuu

SEQ ID NO: 111125 - RNA, 19 nt, Artificial Sequence
  Description of Artificial Sequence: Synthetic oligonucleotide
  Antisense strand to SEQ ID NO: 111124
aagcccaguucauucuuca

SEQ ID NO: 111126 - RNA, 19 nt, Artificial Sequence
  Description of Artificial Sequence: Synthetic oligonucleotide
  Sense strand starting at position 3101 of SEQ ID NO: 1414
gaugcugguguauaaagaa

SEQ ID NO: 111127 - RNA, 19 nt, Artificial Sequence
  Description of Artificial Sequence: Synthetic oligonucleotide
  Antisense strand to SEQ ID NO: 111126
uucuuuauacaccagcauc

SEQ ID NO: 111128 - RNA, 19 nt, Artificial Sequence
  Description of Artificial Sequence: Synthetic oligonucleotide
  Sense strand starting at position 3085 of SEQ ID NO: 1414
guccaagauugugcuggau

SEQ ID NO: 111129 - RNA, 19 nt, Artificial Sequence
  Description of Artificial Sequence: Synthetic oligonucleotide
  Antisense strand to SEQ ID NO: 111128
auccagcacaaucuuggac

SEQ ID NO: 111130 - RNA, 19 nt, Artificial Sequence
  Description of Artificial Sequence: Synthetic oligonucleotide
  Sense strand starting at position 3010 of SEQ ID NO: 1414
agauuugaaugcuaaagaa

SEQ ID NO: 111131 - RNA, 19 nt, Artificial Sequence
  Description of Artificial Sequence: Synthetic oligonucleotide
  Antisense strand to SEQ ID NO: 111130
uucuuuagcauucaaaucu

SEQ ID NO: 111132 - RNA, 19 nt, Artificial Sequence
  Description of Artificial Sequence: Synthetic oligonucleotide
  Sense strand starting at position 2673 of SEQ ID NO: 1414
ggcagaaauaagugcuaaa

SEQ ID NO: 111133 - RNA, 19 nt, Artificial Sequence
  Description of Artificial Sequence: Synthetic oligonucleotide
  Antisense strand to SEQ ID NO: 111132
uuuagcacuuauuucugcc

SEQ ID NO: 111134 - RNA, 19 nt, Artificial Sequence
  Description of Artificial Sequence: Synthetic oligonucleotide
  Sense strand starting at position 2623 of SEQ ID NO: 1414
aguuuagucagaggagaua

SEQ ID NO: 111135 - RNA, 19 nt, Artificial Sequence
  Description of Artificial Sequence: Synthetic oligonucleotide
  Antisense strand to SEQ ID NO: 111134
uaucuccucugacuaaacu

SEQ ID NO: 111136 - RNA, 19 nt, Artificial Sequence
  Description of Artificial Sequence: Synthetic oligonucleotide
  Sense strand starting at position 2610 of SEQ ID NO: 1414
uucuguucuccagaguuua

SEQ ID NO: 111137 - RNA, 19 nt, Artificial Sequence
  Description of Artificial Sequence: Synthetic oligonucleotide
  Antisense strand to SEQ ID NO: 111136
uaaacucuggagaacagaa

SEQ ID NO: 111138 - RNA, 19 nt, Artificial Sequence
  Description of Artificial Sequence: Synthetic oligonucleotide
  Sense strand starting at position 2607 of SEQ ID NO: 1414
auauucuguucuccagagu

SEQ ID NO: 111139 - RNA, 19 nt, Artificial Sequence
  Description of Artificial Sequence: Synthetic oligonucleotide
  Antisense strand to SEQ ID NO: 111138
acucuggagaacagaauau

SEQ ID NO: 111140 - RNA, 19 nt, Artificial Sequence
  Description of Artificial Sequence: Synthetic oligonucleotide
  Sense strand starting at position 2545 of SEQ ID NO: 1414
ccaaauuaucgacguucua

SEQ ID NO: 111141 - RNA, 19 nt, Artificial Sequence
  Description of Artificial Sequence: Synthetic oligonucleotide
  Antisense strand to SEQ ID NO: 111140
uagaacgucgauaauuugg

SEQ ID NO: 111142 - RNA, 19 nt, Artificial Sequence
  Description of Artificial Sequence: Synthetic oligonucleotide
  Sense strand starting at position 2533 of SEQ ID NO: 1414
uuauauacgugaccaaauu

SEQ ID NO: 111143 - RNA, 19 nt, Artificial Sequence
  Description of Artificial Sequence: Synthetic oligonucleotide
  Antisense strand to SEQ ID NO: 111142
aauuuggucacguauauaa

SEQ ID NO: 111144 - RNA, 19 nt, Artificial Sequence
  Description of Artificial Sequence: Synthetic oligonucleotide
  Sense strand starting at position 2531 of SEQ ID NO: 1414
cuuuauauacgugaccaaa

SEQ ID NO: 111145 - RNA, 19 nt, Artificial Sequence
  Description of Artificial Sequence: Synthetic oligonucleotide
  Antisense strand to SEQ ID NO: 111144
uuuggucacguauauaaag

SEQ ID NO: 111146 - RNA, 19 nt, Artificial Sequence
  Description of Artificial Sequence: Synthetic oligonucleotide
  Sense strand starting at position 2529 of SEQ ID NO: 1414
gccuuuauauacgugacca

SEQ ID NO: 111147 - RNA, 19 nt, Artificial Sequence
  Description of Artificial Sequence: Synthetic oligonucleotide
  Antisense strand to SEQ ID NO: 111146
uggucacguauauaaaggc

SEQ ID NO: 111148 - RNA, 19 nt, Artificial Sequence
  Description of Artificial Sequence: Synthetic oligonucleotide
  Sense strand starting at position 2404 of SEQ ID NO: 1414
gugccaacgaguuaaucuu

SEQ ID NO: 111149 - RNA, 19 nt, Artificial Sequence
  Description of Artificial Sequence: Synthetic oligonucleotide
  Antisense strand to SEQ ID NO: 111148
aagauuaacucguuggcac

SEQ ID NO: 111150 - RNA, 19 nt, Artificial Sequence
  Description of Artificial Sequence: Synthetic oligonucleotide
  Sense strand starting at position 2400 of SEQ ID NO: 1414
gguggugccaacgaguuaa

SEQ ID NO: 111151 - RNA, 19 nt, Artificial Sequence
  Description of Artificial Sequence: Synthetic oligonucleotide
  Antisense strand to SEQ ID NO: 111150
uuaacucguuggcaccacc

SEQ ID NO: 111152 - RNA, 19 nt, Artificial Sequence
  Description of Artificial Sequence: Synthetic oligonucleotide
  Sense strand starting at position 2338 of SEQ ID NO: 1414
gucugagagcgguuucugu

SEQ ID NO: 111153 - RNA, 19 nt, Artificial Sequence
  Description of Artificial Sequence: Synthetic oligonucleotide
  Antisense strand to SEQ ID NO: 111152
acagaaaccgcucucagac

SEQ ID NO: 111154 - RNA, 19 nt, Artificial Sequence
  Description of Artificial Sequence: Synthetic oligonucleotide
  Sense strand starting at position 2329 of SEQ ID NO: 1414
agauauagugucugagagc

SEQ ID NO: 111155 - RNA, 19 nt, Artificial Sequence
  Description of Artificial Sequence: Synthetic oligonucleotide
  Antisense strand to SEQ ID NO: 111154
gcucucagacacuauaucu

SEQ ID NO: 111156 - RNA, 19 nt, Artificial Sequence
  Description of Artificial Sequence: Synthetic oligonucleotide
  Sense strand starting at position 2328 of SEQ ID NO: 1414
cagauauagugucugagag

SEQ ID NO: 111157 - RNA, 19 nt, Artificial Sequence
  Description of Artificial Sequence: Synthetic oligonucleotide
  Antisense strand to SEQ ID NO: 111156
cucucagacacuauaucug

SEQ ID NO: 111158 - RNA, 19 nt, Artificial Sequence
  Description of Artificial Sequence: Synthetic oligonucleotide
  Sense strand starting at position 2316 of SEQ ID NO: 1414
gacccuccgcuccagauau

SEQ ID NO: 111159 - RNA, 19 nt, Artificial Sequence
  Description of Artificial Sequence: Synthetic oligonucleotide
  Antisense strand to SEQ ID NO: 111158
auaucuggagcggaggguc

SEQ ID NO: 111160 - RNA, 19 nt, Artificial Sequence
  Description of Artificial Sequence: Synthetic oligonucleotide
  Sense strand starting at position 2279 of SEQ ID NO: 1414
agaucagaguacuaagaga

SEQ ID NO: 111161 - RNA, 19 nt, Artificial Sequence
  Description of Artificial Sequence: Synthetic oligonucleotide
  Antisense strand to SEQ ID NO: 111160
ucucuuaguacucugaucu

SEQ ID NO: 111162 - RNA, 19 nt, Artificial Sequence
  Description of Artificial Sequence: Synthetic oligonucleotide
  Sense strand starting at position 2179 of SEQ ID NO: 1414
uguaguccugaugaauaau

SEQ ID NO: 111163 - RNA, 19 nt, Artificial Sequence
  Description of Artificial Sequence: Synthetic oligonucleotide
  Antisense strand to SEQ ID NO: 111162
auuauucaucaggacuaca

SEQ ID NO: 111164 - RNA, 19 nt, Artificial Sequence
  Description of Artificial Sequence: Synthetic oligonucleotide
  Sense strand starting at position 2067 of SEQ ID NO: 1414
aguuaucuggacugccuua

SEQ ID NO: 111165 - RNA, 19 nt, Artificial Sequence
  Description of Artificial Sequence: Synthetic oligonucleotide
  Antisense strand to SEQ ID NO: 111164
uaaggcaguccagauaacu

SEQ ID NO: 111166 - RNA, 19 nt, Artificial Sequence
  Description of Artificial Sequence: Synthetic oligonucleotide
  Sense strand starting at position 2062 of SEQ ID NO: 1414
guggaaguuaucuggacug

SEQ ID NO: 111167 - RNA, 19 nt, Artificial Sequence
  Description of Artificial Sequence: Synthetic oligonucleotide
  Antisense strand to SEQ ID NO: 111166
caguccagauaacuuccac

SEQ ID NO: 111168 - RNA, 19 nt, Artificial Sequence
  Description of Artificial Sequence: Synthetic oligonucleotide
  Sense strand starting at position 2061 of SEQ ID NO: 1414
aguggaaguuaucuggacu

SEQ ID NO: 111169 - RNA, 19 nt, Artificial Sequence
  Description of Artificial Sequence: Synthetic oligonucleotide
  Antisense strand to SEQ ID NO: 111168
aguccagauaacuuccacu

SEQ ID NO: 111170 - RNA, 19 nt, Artificial Sequence
  Description of Artificial Sequence: Synthetic oligonucleotide
  Sense strand starting at position 1297 of SEQ ID NO: 1414
gcuugccucgggucauauu

SEQ ID NO: 111171 - RNA, 19 nt, Artificial Sequence
  Description of Artificial Sequence: Synthetic oligonucleotide
  Antisense strand to SEQ ID NO: 111170
aauaugacccgaggcaagc

SEQ ID NO: 111172 - RNA, 19 nt, Artificial Sequence
  Description of Artificial Sequence: Synthetic oligonucleotide
  Sense strand starting at position 1199 of SEQ ID NO: 1414
aucuguuccgaaggucaga

SEQ ID NO: 111173 - RNA, 19 nt, Artificial Sequence
  Description of Artificial Sequence: Synthetic oligonucleotide
  Antisense strand to SEQ ID NO: 111172
ucugaccuucggaacagau

SEQ ID NO: 111174 - RNA, 19 nt, Artificial Sequence
  Description of Artificial Sequence: Synthetic oligonucleotide
  Sense strand starting at position 1191 of SEQ ID NO: 1414
gugaauccaucuguuccga

SEQ ID NO: 111175 - RNA, 19 nt, Artificial Sequence
  Description of Artificial Sequence: Synthetic oligonucleotide
  Antisense strand to SEQ ID NO: 111174
ucggaacagauggauucac

SEQ ID NO: 111176 - RNA, 19 nt, Artificial Sequence
  Description of Artificial Sequence: Synthetic oligonucleotide
  Sense strand starting at position 1178 of SEQ ID NO: 1414
uuuccuuuccaaggugaau

SEQ ID NO: 111177 - RNA, 19 nt, Artificial Sequence
  Description of Artificial Sequence: Synthetic oligonucleotide
  Antisense strand to SEQ ID NO: 111176
auucaccuuggaaaggaaa

SEQ ID NO: 111178 - RNA, 19 nt, Artificial Sequence
  Description of Artificial Sequence: Synthetic oligonucleotide
  Sense strand starting at position 1083 of SEQ ID NO: 1414
agucguucggaaugaagga

SEQ ID NO: 111179 - RNA, 19 nt, Artificial Sequence
  Description of Artificial Sequence: Synthetic oligonucleotide
  Antisense strand to SEQ ID NO: 111178
uccuucauuccgaacgacu

SEQ ID NO: 111180 - RNA, 19 nt, Artificial Sequence
  Description of Artificial Sequence: Synthetic oligonucleotide
  Sense strand starting at position 1078 of SEQ ID NO: 1414
agggaagucguucggaaug

SEQ ID NO: 111181 - RNA, 19 nt, Artificial Sequence
  Description of Artificial Sequence: Synthetic oligonucleotide
  Antisense strand to SEQ ID NO: 111180
cauuccgaacgacuucccu

SEQ ID NO: 111182 - RNA, 19 nt, Artificial Sequence
  Description of Artificial Sequence: Synthetic oligonucleotide
  Sense strand starting at position 612 of SEQ ID NO: 1414
uggguuuacaggugucaca

SEQ ID NO: 111183 - RNA, 19 nt, Artificial Sequence
  Description of Artificial Sequence: Synthetic oligonucleotide
  Antisense strand to SEQ ID NO: 111182
ugugacaccuguaaaccca

SEQ ID NO: 111184 - RNA, 19 nt, Artificial Sequence
  Description of Artificial Sequence: Synthetic oligonucleotide
  Sense strand starting at position 449 of SEQ ID NO: 1414
gauguuguucuguggacua

SEQ ID NO: 111185 - RNA, 19 nt, Artificial Sequence
  Description of Artificial Sequence: Synthetic oligonucleotide
  Antisense strand to SEQ ID NO: 111184
uaguccacagaacaacauc

SEQ ID NO: 111186 - RNA, 19 nt, Artificial Sequence
  Description of Artificial Sequence: Synthetic oligonucleotide
  Sense strand starting at position 448 of SEQ ID NO: 1414
ugauguuguucuguggacu

SEQ ID NO: 111187 - RNA, 19 nt, Artificial Sequence
  Description of Artificial Sequence: Synthetic oligonucleotide
  Antisense strand to SEQ ID NO: 111186
aguccacagaacaacauca

SEQ ID NO: 111188 - RNA, 19 nt, Artificial Sequence
  Description of Artificial Sequence: Synthetic oligonucleotide
  Sense strand starting at position 207 of SEQ ID NO: 1414
uauccuggguagcugaaau

SEQ ID NO: 111189 - RNA, 19 nt, Artificial Sequence
  Description of Artificial Sequence: Synthetic oligonucleotide
  Antisense strand to SEQ ID NO: 111188
auuucagcuacccaggaua

SEQ ID NO: 111190 - RNA, 19 nt, Artificial Sequence
  Description of Artificial Sequence: Synthetic oligonucleotide
  Sense strand starting at position 202 of SEQ ID NO: 1414
aaguuuauccuggguagcu

SEQ ID NO: 111191 - RNA, 19 nt, Artificial Sequence
  Description of Artificial Sequence: Synthetic oligonucleotide
  Antisense strand to SEQ ID NO: 111190
agcuacccaggauaaacuu

SEQ ID NO: 111192 - RNA, 19 nt, Artificial Sequence
  Description of Artificial Sequence: Synthetic oligonucleotide
  Sense strand starting at position 187 of SEQ ID NO: 1414
gguaaucauaguuagaagu

SEQ ID NO: 111193 - RNA, 19 nt, Artificial Sequence
  Description of Artificial Sequence: Synthetic oligonucleotide
  Antisense strand to SEQ ID NO: 111192
acuucuaacuaugauuacc

SEQ ID NO: 111194 - RNA, 19 nt, Artificial Sequence
  Description of Artificial Sequence: Synthetic oligonucleotide
  Sense strand starting at position 186 of SEQ ID NO: 1414
ugguaaucauaguuagaag

SEQ ID NO: 111195 - RNA, 19 nt, Artificial Sequence
  Description of Artificial Sequence: Synthetic oligonucleotide
  Antisense strand to SEQ ID NO: 111194
cuucuaacuaugauuacca

SEQ ID NO: 111196 - RNA, 19 nt, Artificial Sequence
  Description of Artificial Sequence: Synthetic oligonucleotide
  Sense strand starting at position 181 of SEQ ID NO: 1414
uucugugguaaucauaguu

SEQ ID NO: 111197 - RNA, 19 nt, Artificial Sequence
  Description of Artificial Sequence: Synthetic oligonucleotide
  Antisense strand to SEQ ID NO: 111196
aacuaugauuaccacagaa

SEQ ID NO: 111198 - RNA, 19 nt, Artificial Sequence
  Description of Artificial Sequence: Synthetic oligonucleotide
  Sense strand starting at position 174 of SEQ ID NO: 1414
gguagaguucugugguaau

SEQ ID NO: 111199 - RNA, 19 nt, Artificial Sequence
  Description of Artificial Sequence: Synthetic oligonucleotide
  Antisense strand to SEQ ID NO: 111198
auuaccacagaacucuacc

SEQ ID NO: 111200 - RNA, 19 nt, Artificial Sequence
  Description of Artificial Sequence: Synthetic oligonucleotide
  Sense strand starting at position 3606 of SEQ ID NO: 1413
gaugcugguguauaaagaa

SEQ ID NO: 111201 - RNA, 19 nt, Artificial Sequence
  Description of Artificial Sequence: Synthetic oligonucleotide
  Antisense strand to SEQ ID NO: 111200
uucuuuauacaccagcauc

SEQ ID NO: 111202 - RNA, 19 nt, Artificial Sequence
  Description of Artificial Sequence: Synthetic oligonucleotide
  Sense strand starting at position 3590 of SEQ ID NO: 1413
guccaagauugugcuggau

SEQ ID NO: 111203 - RNA, 19 nt, Artificial Sequence
  Description of Artificial Sequence: Synthetic oligonucleotide
  Antisense strand to SEQ ID NO: 111202
auccagcacaaucuuggac

SEQ ID NO: 111204 - RNA, 19 nt, Artificial Sequence
  Description of Artificial Sequence: Synthetic oligonucleotide
  Sense strand starting at position 3515 of SEQ ID NO: 1413
agauuugaaugcuaaagaa

SEQ ID NO: 111205 - RNA, 19 nt, Artificial Sequence
  Description of Artificial Sequence: Synthetic oligonucleotide
  Antisense strand to SEQ ID NO: 111204
uucuuuagcauucaaaucu

SEQ ID NO: 111206 - RNA, 19 nt, Artificial Sequence
  Description of Artificial Sequence: Synthetic oligonucleotide
  Sense strand starting at position 3178 of SEQ ID NO: 1413
ggcagaaauaagugcuaaa

SEQ ID NO: 111207 - RNA, 19 nt, Artificial Sequence
  Description of Artificial Sequence: Synthetic oligonucleotide
  Antisense strand to SEQ ID NO: 111206
uuuagcacuuauuucugcc

SEQ ID NO: 111208 - RNA, 19 nt, Artificial Sequence
  Description of Artificial Sequence: Synthetic oligonucleotide
  Sense strand starting at position 3128 of SEQ ID NO: 1413
aguuuagucagaggagaua

SEQ ID NO: 111209 - RNA, 19 nt, Artificial Sequence
  Description of Artificial Sequence: Synthetic oligonucleotide
  Antisense strand to SEQ ID NO: 111208
uaucuccucugacuaaacu

SEQ ID NO: 111210 - RNA, 19 nt, Artificial Sequence
  Description of Artificial Sequence: Synthetic oligonucleotide
  Sense strand starting at position 3115 of SEQ ID NO: 1413
uucuguucuccagaguuua

SEQ ID NO: 111211 - RNA, 19 nt, Artificial Sequence
  Description of Artificial Sequence: Synthetic oligonucleotide
  Antisense strand to SEQ ID NO: 111210
uaaacucuggagaacagaa

SEQ ID NO: 111212 - RNA, 19 nt, Artificial Sequence
  Description of Artificial Sequence: Synthetic oligonucleotide
  Sense strand starting at position 3112 of SEQ ID NO: 1413
auauucuguucuccagagu

SEQ ID NO: 111213 - RNA, 19 nt, Artificial Sequence
  Description of Artificial Sequence: Synthetic oligonucleotide
  Antisense strand to SEQ ID NO: 111212
acucuggagaacagaauau

SEQ ID NO: 111214 - RNA, 19 nt, Artificial Sequence
  Description of Artificial Sequence: Synthetic oligonucleotide
  Sense strand starting at position 3050 of SEQ ID NO: 1413
ccaaauuaucgacguucua

SEQ ID NO: 111215 - RNA, 19 nt, Artificial Sequence
  Description of Artificial Sequence: Synthetic oligonucleotide
  Antisense strand to SEQ ID NO: 111214
uagaacgucgauaauuugg

SEQ ID NO: 111216 - RNA, 19 nt, Artificial Sequence
  Description of Artificial Sequence: Synthetic oligonucleotide
  Sense strand starting at position 3038 of SEQ ID NO: 1413
uuauauacgugaccaaauu

SEQ ID NO: 111217 - RNA, 19 nt, Artificial Sequence
  Description of Artificial Sequence: Synthetic oligonucleotide
  Antisense strand to SEQ ID NO: 111216
aauuuggucacguauauaa

SEQ ID NO: 111218 - RNA, 19 nt, Artificial Sequence
  Description of Artificial Sequence: Synthetic oligonucleotide
  Sense strand starting at position 3036 of SEQ ID NO: 1413
cuuuauauacgugaccaaa

SEQ ID NO: 111219 - RNA, 19 nt, Artificial Sequence
  Description of Artificial Sequence: Synthetic oligonucleotide
  Antisense strand to SEQ ID NO: 111218
uuuggucacguauauaaag

SEQ ID NO: 111220 - RNA, 19 nt, Artificial Sequence
  Description of Artificial Sequence: Synthetic oligonucleotide
  Sense strand starting at position 3034 of SEQ ID NO: 1413
gccuuuauauacgugacca

SEQ ID NO: 111221 - RNA, 19 nt, Artificial Sequence
  Description of Artificial Sequence: Synthetic oligonucleotide
  Antisense strand to SEQ ID NO: 111220
uggucacguauauaaaggc

SEQ ID NO: 111222 - RNA, 19 nt, Artificial Sequence
  Description of Artificial Sequence: Synthetic oligonucleotide
  Sense strand starting at position 2909 of SEQ ID NO: 1413
gugccaacgaguuaaucuu

SEQ ID NO: 111223 - RNA, 19 nt, Artificial Sequence
  Description of Artificial Sequence: Synthetic oligonucleotide
  Antisense strand to SEQ ID NO: 111222
aagauuaacucguuggcac

SEQ ID NO: 111224 - RNA, 19 nt, Artificial Sequence
  Description of Artificial Sequence: Synthetic oligonucleotide
  Sense strand starting at position 2905 of SEQ ID NO: 1413
gguggugccaacgaguuaa

SEQ ID NO: 111225 - RNA, 19 nt, Artificial Sequence
  Description of Artificial Sequence: Synthetic oligonucleotide
  Antisense strand to SEQ ID NO: 111224
uuaacucguuggcaccacc

SEQ ID NO: 111226 - RNA, 19 nt, Artificial Sequence
  Description of Artificial Sequence: Synthetic oligonucleotide
  Sense strand starting at position 2843 of SEQ ID NO: 1413
gucugagagcgguuucugu

SEQ ID NO: 111227 - RNA, 19 nt, Artificial Sequence
  Description of Artificial Sequence: Synthetic oligonucleotide
  Antisense strand to SEQ ID NO: 111226
acagaaaccgcucucagac

SEQ ID NO: 111228 - RNA, 19 nt, Artificial Sequence
  Description of Artificial Sequence: Synthetic oligonucleotide
  Sense strand starting at position 2834 of SEQ ID NO: 1413
agauauagugucugagagc

SEQ ID NO: 111229 - RNA, 19 nt, Artificial Sequence
  Description of Artificial Sequence: Synthetic oligonucleotide
  Antisense strand to SEQ ID NO: 111228
gcucucagacacuauaucu

SEQ ID NO: 111230 - RNA, 19 nt, Artificial Sequence
  Description of Artificial Sequence: Synthetic oligonucleotide
  Sense strand starting at position 2833 of SEQ ID NO: 1413
cagauauagugucugagag

SEQ ID NO: 111231 - RNA, 19 nt, Artificial Sequence
  Description of Artificial Sequence: Synthetic oligonucleotide
  Antisense strand to SEQ ID NO: 111230
cucucagacacuauaucug

SEQ ID NO: 111232 - RNA, 19 nt, Artificial Sequence
  Description of Artificial Sequence: Synthetic oligonucleotide
  Sense strand starting at position 2821 of SEQ ID NO: 1413
gacccuccgcuccagauau

SEQ ID NO: 111233 - RNA, 19 nt, Artificial Sequence
  Description of Artificial Sequence: Synthetic oligonucleotide
  Antisense strand to SEQ ID NO: 111232
auaucuggagcggaggguc

SEQ ID NO: 111234 - RNA, 19 nt, Artificial Sequence
  Description of Artificial Sequence: Synthetic oligonucleotide
  Sense strand starting at position 2784 of SEQ ID NO: 1413
agaucagaguacuaagaga

SEQ ID NO: 111235 - RNA, 19 nt, Artificial Sequence
  Description of Artificial Sequence: Synthetic oligonucleotide
  Antisense strand to SEQ ID NO: 111234
ucucuuaguacucugaucu

SEQ ID NO: 111236 - RNA, 19 nt, Artificial Sequence
  Description of Artificial Sequence: Synthetic oligonucleotide
  Sense strand starting at position 2684 of SEQ ID NO: 1413
uguaguccugaugaauaau

SEQ ID NO: 111237 - RNA, 19 nt, Artificial Sequence
  Description of Artificial Sequence: Synthetic oligonucleotide
  Antisense strand to SEQ ID NO: 111236
auuauucaucaggacuaca

SEQ ID NO: 111238 - RNA, 19 nt, Artificial Sequence
  Description of Artificial Sequence: Synthetic oligonucleotide
  Sense strand starting at position 2572 of SEQ ID NO: 1413
aguuaucuggacugccuua

SEQ ID NO: 111239 - RNA, 19 nt, Artificial Sequence
  Description of Artificial Sequence: Synthetic oligonucleotide
  Antisense strand to SEQ ID NO: 111238
uaaggcaguccagauaacu

SEQ ID NO: 111240 - RNA, 19 nt, Artificial Sequence
  Description of Artificial Sequence: Synthetic oligonucleotide
  Sense strand starting at position 2567 of SEQ ID NO: 1413
guggaaguuaucuggacug

SEQ ID NO: 111241 - RNA, 19 nt, Artificial Sequence
  Description of Artificial Sequence: Synthetic oligonucleotide
  Antisense strand to SEQ ID NO: 111240
caguccagauaacuuccac

SEQ ID NO: 111242 - RNA, 19 nt, Artificial Sequence
  Description of Artificial Sequence: Synthetic oligonucleotide
  Sense strand starting at position 2566 of SEQ ID NO: 1413
aguggaaguuaucuggacu

SEQ ID NO: 111243 - RNA, 19 nt, Artificial Sequence
  Description of Artificial Sequence: Synthetic oligonucleotide
  Antisense strand to SEQ ID NO: 111242
aguccagauaacuuccacu

SEQ ID NO: 111244 - RNA, 19 nt, Artificial Sequence
  Description of Artificial Sequence: Synthetic oligonucleotide
  Sense strand starting at position 1802 of SEQ ID NO: 1413
gcuugccucgggucauauu

SEQ ID NO: 111245 - RNA, 19 nt, Artificial Sequence
  Description of Artificial Sequence: Synthetic oligonucleotide
  Antisense strand to SEQ ID NO: 111244
aauaugacccgaggcaagc

SEQ ID NO: 111246 - RNA, 19 nt, Artificial Sequence
  Description of Artificial Sequence: Synthetic oligonucleotide
  Sense strand starting at position 1704 of SEQ ID NO: 1413
aucuguuccgaaggucaga

SEQ ID NO: 111247 - RNA, 19 nt, Artificial Sequence
  Description of Artificial Sequence: Synthetic oligonucleotide
  Antisense strand to SEQ ID NO: 111246
ucugaccuucggaacagau

SEQ ID NO: 111248 - RNA, 19 nt, Artificial Sequence
  Description of Artificial Sequence: Synthetic oligonucleotide
  Sense strand starting at position 1696 of SEQ ID NO: 1413
gugaauccaucuguuccga

SEQ ID NO: 111249 - RNA, 19 nt, Artificial Sequence
  Description of Artificial Sequence: Synthetic oligonucleotide
  Antisense strand to SEQ ID NO: 111248
ucggaacagauggauucac

SEQ ID NO: 111250 - RNA, 19 nt, Artificial Sequence
  Description of Artificial Sequence: Synthetic oligonucleotide
  Sense strand starting at position 1683 of SEQ ID NO: 1413
uuuccuuuccaaggugaau

SEQ ID NO: 111251 - RNA, 19 nt, Artificial Sequence
  Description of Artificial Sequence: Synthetic oligonucleotide
  Antisense strand to SEQ ID NO: 111250
auucaccuuggaaaggaaa

SEQ ID NO: 111252 - RNA, 19 nt, Artificial Sequence
  Description of Artificial Sequence: Synthetic oligonucleotide
  Sense strand starting at position 1659 of SEQ ID NO: 1413
ucaagacucuucuagaaag

SEQ ID NO: 111253 - RNA, 19 nt, Artificial Sequence
  Description of Artificial Sequence: Synthetic oligonucleotide
  Antisense strand to SEQ ID NO: 111252
cuuucuagaagagucuuga

SEQ ID NO: 111254 - RNA, 19 nt, Artificial Sequence
  Description of Artificial Sequence: Synthetic oligonucleotide
  Sense strand starting at position 1588 of SEQ ID NO: 1413
agucguucggaaugaagga

SEQ ID NO: 111255 - RNA, 19 nt, Artificial Sequence
  Description of Artificial Sequence: Synthetic oligonucleotide
  Antisense strand to SEQ ID NO: 111254
uccuucauuccgaacgacu

SEQ ID NO: 111256 - RNA, 19 nt, Artificial Sequence
  Description of Artificial Sequence: Synthetic oligonucleotide
  Sense strand starting at position 1583 of SEQ ID NO: 1413
agggaagucguucggaaug

SEQ ID NO: 111257 - RNA, 19 nt, Artificial Sequence
  Description of Artificial Sequence: Synthetic oligonucleotide
  Antisense strand to SEQ ID NO: 111256
cauuccgaacgacuucccu

SEQ ID NO: 111258 - RNA, 19 nt, Artificial Sequence
  Description of Artificial Sequence: Synthetic oligonucleotide
  Sense strand starting at position 1117 of SEQ ID NO: 1413
uggguuuacaggugucaca

SEQ ID NO: 111259 - RNA, 19 nt, Artificial Sequence
  Description of Artificial Sequence: Synthetic oligonucleotide
  Antisense strand to SEQ ID NO: 111258
ugugacaccuguaaaccca

SEQ ID NO: 111260 - RNA, 19 nt, Artificial Sequence
  Description of Artificial Sequence: Synthetic oligonucleotide
  Sense strand starting at position 954 of SEQ ID NO: 1413
gauguuguucuguggacua

SEQ ID NO: 111261 - RNA, 19 nt, Artificial Sequence
  Description of Artificial Sequence: Synthetic oligonucleotide
  Antisense strand to SEQ ID NO: 111260
uaguccacagaacaacauc

SEQ ID NO: 111262 - RNA, 19 nt, Artificial Sequence
  Description of Artificial Sequence: Synthetic oligonucleotide
  Sense strand starting at position 953 of SEQ ID NO: 1413
ugauguuguucuguggacu

SEQ ID NO: 111263 - RNA, 19 nt, Artificial Sequence
  Description of Artificial Sequence: Synthetic oligonucleotide
  Antisense strand to SEQ ID NO: 111262
aguccacagaacaacauca

SEQ ID NO: 111264 - RNA, 19 nt, Artificial Sequence
  Description of Artificial Sequence: Synthetic oligonucleotide
  Sense strand starting at position 712 of SEQ ID NO: 1413
uauccuggguagcugaaau

SEQ ID NO: 111265 - RNA, 19 nt, Artificial Sequence
  Description of Artificial Sequence: Synthetic oligonucleotide
  Antisense strand to SEQ ID NO: 111264
auuucagcuacccaggaua

SEQ ID NO: 111266 - RNA, 19 nt, Artificial Sequence
  Description of Artificial Sequence: Synthetic oligonucleotide
  Sense strand starting at position 707 of SEQ ID NO: 1413
aaguuuauccuggguagcu

SEQ ID NO: 111267 - RNA, 19 nt, Artificial Sequence
  Description of Artificial Sequence: Synthetic oligonucleotide
  Antisense strand to SEQ ID NO: 111266
agcuacccaggauaaacuu

SEQ ID NO: 111268 - RNA, 19 nt, Artificial Sequence
  Description of Artificial Sequence: Synthetic oligonucleotide
  Sense strand starting at position 692 of SEQ ID NO: 1413
gguaaucauaguuagaagu

SEQ ID NO: 111269 - RNA, 19 nt, Artificial Sequence
  Description of Artificial Sequence: Synthetic oligonucleotide
  Antisense strand to SEQ ID NO: 111268
acuucuaacuaugauuacc

SEQ ID NO: 111270 - RNA, 19 nt, Artificial Sequence
  Description of Artificial Sequence: Synthetic oligonucleotide
  Sense strand starting at position 691 of SEQ ID NO: 1413
ugguaaucauaguuagaag

SEQ ID NO: 111271 - RNA, 19 nt, Artificial Sequence
  Description of Artificial Sequence: Synthetic oligonucleotide
  Antisense strand to SEQ ID NO: 111270
cuucuaacuaugauuacca

SEQ ID NO: 111272 - RNA, 19 nt, Artificial Sequence
  Description of Artificial Sequence: Synthetic oligonucleotide
  Sense strand starting at position 686 of SEQ ID NO: 1413
uucugugguaaucauaguu

SEQ ID NO: 111273 - RNA, 19 nt, Artificial Sequence
  Description of Artificial Sequence: Synthetic oligonucleotide
  Antisense strand to SEQ ID NO: 111272
aacuaugauuaccacagaa

SEQ ID NO: 111274 - RNA, 19 nt, Artificial Sequence
  Description of Artificial Sequence: Synthetic oligonucleotide
  Sense strand starting at position 679 of SEQ ID NO: 1413
gguagaguucugugguaau

SEQ ID NO: 111275 - RNA, 19 nt, Artificial Sequence
  Description of Artificial Sequence: Synthetic oligonucleotide
  Antisense strand to SEQ ID NO: 111274
auuaccacagaacucuacc

SEQ ID NO: 111276 - RNA, 19 nt, Artificial Sequence
  Description of Artificial Sequence: Synthetic oligonucleotide
  Sense strand starting at position 59 of SEQ ID NO: 1413
ugacucugucacugugaau

SEQ ID NO: 111277 - RNA, 19 nt, Artificial Sequence
  Description of Artificial Sequence: Synthetic oligonucleotide
  Antisense strand to SEQ ID NO: 111276
auucacagugacagaguca

SEQ ID NO: 111278 - RNA, 19 nt, Artificial Sequence
  Description of Artificial Sequence: Synthetic oligonucleotide
  Sense strand starting at position 58 of SEQ ID NO: 1413
cugacucugucacugugaa

SEQ ID NO: 111279 - RNA, 19 nt, Artificial Sequence
  Description of Artificial Sequence: Synthetic oligonucleotide
  Antisense strand to SEQ ID NO: 111278
uucacagugacagagucag

SEQ ID NO: 111280 - RNA, 19 nt, Artificial Sequence
  Description of Artificial Sequence: Synthetic oligonucleotide
  Sense strand starting at position 1 of SEQ ID NO: 1415
guguucuuagggcacugau

SEQ ID NO: 111281 - RNA, 19 nt, Artificial Sequence
  Description of Artificial Sequence: Synthetic oligonucleotide
  Antisense strand to SEQ ID NO: 111280
aucagugcccuaagaacac

SEQ ID NO: 111282 - RNA, 19 nt, Artificial Sequence
  Description of Artificial Sequence: Synthetic oligonucleotide
  Sense strand starting at position 4 of SEQ ID NO: 1415
uucuuagggcacugauagu

SEQ ID NO: 111283 - RNA, 19 nt, Artificial Sequence
  Description of Artificial Sequence: Synthetic oligonucleotide
  Antisense strand to SEQ ID NO: 111282
acuaucagugcccuaagaa

SEQ ID NO: 111284 - RNA, 19 nt, Artificial Sequence
  Description of Artificial Sequence: Synthetic oligonucleotide
  Sense strand starting at position 13 of SEQ ID NO: 1415
cacugauaguccuuagaag

SEQ ID NO: 111285 - RNA, 19 nt, Artificial Sequence
  Description of Artificial Sequence: Synthetic oligonucleotide
  Antisense strand to SEQ ID NO: 111284
cuucuaaggacuaucagug

SEQ ID NO: 111286 - RNA, 19 nt, Artificial Sequence
  Description of Artificial Sequence: Synthetic oligonucleotide
  Sense strand starting at position 73 of SEQ ID NO: 1415
guccuuauuuaacaggcaa

SEQ ID NO: 111287 - RNA, 19 nt, Artificial Sequence
  Description of Artificial Sequence: Synthetic oligonucleotide
  Antisense strand to SEQ ID NO: 111286
uugccuguuaaauaaggac

SEQ ID NO: 111288 - RNA, 19 nt, Artificial Sequence
  Description of Artificial Sequence: Synthetic oligonucleotide
  Sense strand starting at position 94 of SEQ ID NO: 1415
uggcauugguucuuaauaa

SEQ ID NO: 111289 - RNA, 19 nt, Artificial Sequence
  Description of Artificial Sequence: Synthetic oligonucleotide
  Antisense strand to SEQ ID NO: 111288
uuauuaagaaccaaugcca

SEQ ID NO: 111290 - RNA, 19 nt, Artificial Sequence
  Description of Artificial Sequence: Synthetic oligonucleotide
  Sense strand starting at position 171 of SEQ ID NO: 1415
ccuucuaucguguagauau

SEQ ID NO: 111291 - RNA, 19 nt, Artificial Sequence
  Description of Artificial Sequence: Synthetic oligonucleotide
  Antisense strand to SEQ ID NO: 111290
auaucuacacgauagaagg

SEQ ID NO: 111292 - RNA, 19 nt, Artificial Sequence
  Description of Artificial Sequence: Synthetic oligonucleotide
  Sense strand starting at position 181 of SEQ ID NO: 1415
uguagauaugccuacccga

SEQ ID NO: 111293 - RNA, 19 nt, Artificial Sequence
  Description of Artificial Sequence: Synthetic oligonucleotide
  Antisense strand to SEQ ID NO: 111292
ucggguaggcauaucuaca

SEQ ID NO: 111294 - RNA, 19 nt, Artificial Sequence
  Description of Artificial Sequence: Synthetic oligonucleotide
  Sense strand starting at position 197 of SEQ ID NO: 1415
cgauuugcccuuugcucaa

SEQ ID NO: 111295 - RNA, 19 nt, Artificial Sequence
  Description of Artificial Sequence: Synthetic oligonucleotide
  Antisense strand to SEQ ID NO: 111294
uugagcaaagggcaaaucg

SEQ ID NO: 111296 - RNA, 19 nt, Artificial Sequence
  Description of Artificial Sequence: Synthetic oligonucleotide
  Sense strand starting at position 201 of SEQ ID NO: 1415
uugcccuuugcucaaagua

SEQ ID NO: 111297 - RNA, 19 nt, Artificial Sequence
  Description of Artificial Sequence: Synthetic oligonucleotide
  Antisense strand to SEQ ID NO: 111296
uacuuugagcaaagggcaa

SEQ ID NO: 111298 - RNA, 19 nt, Artificial Sequence
  Description of Artificial Sequence: Synthetic oligonucleotide
  Sense strand starting at position 209 of SEQ ID NO: 1415
ugcucaaaguaguucuaua

SEQ ID NO: 111299 - RNA, 19 nt, Artificial Sequence
  Description of Artificial Sequence: Synthetic oligonucleotide
  Antisense strand to SEQ ID NO: 111298
uauagaacuacuuugagca

SEQ ID NO: 111300 - RNA, 19 nt, Artificial Sequence
  Description of Artificial Sequence: Synthetic oligonucleotide
  Sense strand starting at position 220 of SEQ ID NO: 1415
guucuauauucuuuccaug

SEQ ID NO: 111301 - RNA, 19 nt, Artificial Sequence
  Description of Artificial Sequence: Synthetic oligonucleotide
  Antisense strand to SEQ ID NO: 111300
cauggaaagaauauagaac

SEQ ID NO: 111302 - RNA, 19 nt, Artificial Sequence
  Description of Artificial Sequence: Synthetic oligonucleotide
  Sense strand starting at position 225 of SEQ ID NO: 1415
auauucuuuccaugagguu

SEQ ID NO: 111303 - RNA, 19 nt, Artificial Sequence
  Description of Artificial Sequence: Synthetic oligonucleotide
  Antisense strand to SEQ ID NO: 111302
aaccucauggaaagaauau

SEQ ID NO: 111304 - RNA, 19 nt, Artificial Sequence
  Description of Artificial Sequence: Synthetic oligonucleotide
  Sense strand starting at position 643 of SEQ ID NO: 1415
cuuugaguccuacgagcag

SEQ ID NO: 111305 - RNA, 19 nt, Artificial Sequence
  Description of Artificial Sequence: Synthetic oligonucleotide
  Antisense strand to SEQ ID NO: 111304
cugcucguaggacucaaag

SEQ ID NO: 111306 - RNA, 19 nt, Artificial Sequence
  Description of Artificial Sequence: Synthetic oligonucleotide
  Sense strand starting at position 709 of SEQ ID NO: 1415
gcaucuaucgaucaccuuu

SEQ ID NO: 111307 - RNA, 19 nt, Artificial Sequence
  Description of Artificial Sequence: Synthetic oligonucleotide
  Antisense strand to SEQ ID NO: 111306
aaaggugaucgauagaugc

SEQ ID NO: 111308 - RNA, 19 nt, Artificial Sequence
  Description of Artificial Sequence: Synthetic oligonucleotide
  Sense strand starting at position 810 of SEQ ID NO: 1415
aaacaaacgcgcgauaagu

SEQ ID NO: 111309 - RNA, 19 nt, Artificial Sequence
  Description of Artificial Sequence: Synthetic oligonucleotide
  Antisense strand to SEQ ID NO: 111308
acuuaucgcgcguuuguuu

SEQ ID NO: 111310 - RNA, 19 nt, Artificial Sequence
  Description of Artificial Sequence: Synthetic oligonucleotide
  Sense strand starting at position 1158 of SEQ ID NO: 1415
auccgaaauuaaucuugaa

SEQ ID NO: 111311 - RNA, 19 nt, Artificial Sequence
  Description of Artificial Sequence: Synthetic oligonucleotide
  Antisense strand to SEQ ID NO: 111310
uucaagauuaauuucggau

SEQ ID NO: 111312 - RNA, 19 nt, Artificial Sequence
  Description of Artificial Sequence: Synthetic oligonucleotide
  Sense strand starting at position 1217 of SEQ ID NO: 1415
uugcgaaucccaggcacau

SEQ ID NO: 111313 - RNA, 19 nt, Artificial Sequence
  Description of Artificial Sequence: Synthetic oligonucleotide
  Antisense strand to SEQ ID NO: 111312
augugccugggauucgcaa

SEQ ID NO: 111314 - RNA, 19 nt, Artificial Sequence
  Description of Artificial Sequence: Synthetic oligonucleotide
  Sense strand starting at position 1241 of SEQ ID NO: 1415
auuuaacuccuucgagcuu

SEQ ID NO: 111315 - RNA, 19 nt, Artificial Sequence
  Description of Artificial Sequence: Synthetic oligonucleotide
  Antisense strand to SEQ ID NO: 111314
aagcucgaaggaguuaaau

SEQ ID NO: 111316 - RNA, 19 nt, Artificial Sequence
  Description of Artificial Sequence: Synthetic oligonucleotide
  Sense strand starting at position 1254 of SEQ ID NO: 1415
gagcuuucggcccauccua

SEQ ID NO: 111317 - RNA, 19 nt, Artificial Sequence
  Description of Artificial Sequence: Synthetic oligonucleotide
  Antisense strand to SEQ ID NO: 111316
uaggaugggccgaaagcuc

SEQ ID NO: 111318 - RNA, 19 nt, Artificial Sequence
  Description of Artificial Sequence: Synthetic oligonucleotide
  Sense strand starting at position 1693 of SEQ ID NO: 1415
gaaugugcccuuuggugau

SEQ ID NO: 111319 - RNA, 19 nt, Artificial Sequence
  Description of Artificial Sequence: Synthetic oligonucleotide
  Antisense strand to SEQ ID NO: 111318
aucaccaaagggcacauuc

SEQ ID NO: 111320 - RNA, 19 nt, Artificial Sequence
  Description of Artificial Sequence: Synthetic oligonucleotide
  Sense strand starting at position 1735 of SEQ ID NO: 1415
gcaagauaacgugggucuu

SEQ ID NO: 111321 - RNA, 19 nt, Artificial Sequence
  Description of Artificial Sequence: Synthetic oligonucleotide
  Antisense strand to SEQ ID NO: 111320
aagacccacguuaucuugc

SEQ ID NO: 111322 - RNA, 19 nt, Artificial Sequence
  Description of Artificial Sequence: Synthetic oligonucleotide
  Sense strand starting at position 2092 of SEQ ID NO: 1415
cuuagaguuuauccagaag

SEQ ID NO: 111323 - RNA, 19 nt, Artificial Sequence
  Description of Artificial Sequence: Synthetic oligonucleotide
  Antisense strand to SEQ ID NO: 111322
cuucuggauaaacucuaag

SEQ ID NO: 111324 - RNA, 19 nt, Artificial Sequence
  Description of Artificial Sequence: Synthetic oligonucleotide
  Sense strand starting at position 2155 of SEQ ID NO: 1415
gugugagcucuuucugccu

SEQ ID NO: 111325 - RNA, 19 nt, Artificial Sequence
  Description of Artificial Sequence: Synthetic oligonucleotide
  Antisense strand to SEQ ID NO: 111324
aggcagaaagagcucacac

SEQ ID NO: 111326 - RNA, 19 nt, Artificial Sequence
  Description of Artificial Sequence: Synthetic oligonucleotide
  Sense strand starting at position 2377 of SEQ ID NO: 1415
ccaaacuauugaguugagu

SEQ ID NO: 111327 - RNA, 19 nt, Artificial Sequence
  Description of Artificial Sequence: Synthetic oligonucleotide
  Antisense strand to SEQ ID NO: 111326
acucaacucaauaguuugg

SEQ ID NO: 111328 - RNA, 19 nt, Artificial Sequence
  Description of Artificial Sequence: Synthetic oligonucleotide
  Sense strand starting at position 2385 of SEQ ID NO: 1415
uugaguugaguccaaaucu

SEQ ID NO: 111329 - RNA, 19 nt, Artificial Sequence
  Description of Artificial Sequence: Synthetic oligonucleotide
  Antisense strand to SEQ ID NO: 111328
agauuuggacucaacucaa

SEQ ID NO: 111330 - RNA, 19 nt, Artificial Sequence
  Description of Artificial Sequence: Synthetic oligonucleotide
  Sense strand starting at position 2481 of SEQ ID NO: 1415
augcuauccguuugagaga

SEQ ID NO: 111331 - RNA, 19 nt, Artificial Sequence
  Description of Artificial Sequence: Synthetic oligonucleotide
  Antisense strand to SEQ ID NO: 111330
ucucucaaacggauagcau

SEQ ID NO: 111332 - RNA, 19 nt, Artificial Sequence
  Description of Artificial Sequence: Synthetic oligonucleotide
  Sense strand starting at position 2915 of SEQ ID NO: 1415
guguuucuugagggcucau

SEQ ID NO: 111333 - RNA, 19 nt, Artificial Sequence
  Description of Artificial Sequence: Synthetic oligonucleotide
  Antisense strand to SEQ ID NO: 111332
augagcccucaagaaacac

SEQ ID NO: 111334 - RNA, 19 nt, Artificial Sequence
  Description of Artificial Sequence: Synthetic oligonucleotide
  Sense strand starting at position 2933 of SEQ ID NO: 1415
uuaugugucaaguauugcu

SEQ ID NO: 111335 - RNA, 19 nt, Artificial Sequence
  Description of Artificial Sequence: Synthetic oligonucleotide
  Antisense strand to SEQ ID NO: 111334
agcaauacuugacacauaa

SEQ ID NO: 111336 - RNA, 19 nt, Artificial Sequence
  Description of Artificial Sequence: Synthetic oligonucleotide
  Sense strand starting at position 2938 of SEQ ID NO: 1415
ugucaaguauugcuauaaa

SEQ ID NO: 111337 - RNA, 19 nt, Artificial Sequence
  Description of Artificial Sequence: Synthetic oligonucleotide
  Antisense strand to SEQ ID NO: 111336
uuuauagcaauacuugaca

SEQ ID NO: 111338 - RNA, 19 nt, Artificial Sequence
  Description of Artificial Sequence: Synthetic oligonucleotide
  Sense strand starting at position 3039 of SEQ ID NO: 1415
acaguaagugaaugcaauu

SEQ ID NO: 111339 - RNA, 19 nt, Artificial Sequence
  Description of Artificial Sequence: Synthetic oligonucleotide
  Antisense strand to SEQ ID NO: 111338
aauugcauucacuuacugu

SEQ ID NO: 111340 - RNA, 19 nt, Artificial Sequence
  Description of Artificial Sequence: Synthetic oligonucleotide
  Sense strand starting at position 3098 of SEQ ID NO: 1415
cgaaucaaguagucugaga

SEQ ID NO: 111341 - RNA, 19 nt, Artificial Sequence
  Description of Artificial Sequence: Synthetic oligonucleotide
  Antisense strand to SEQ ID NO: 111340
ucucagacuacuugauucg

SEQ ID NO: 111342 - RNA, 19 nt, Artificial Sequence
  Description of Artificial Sequence: Synthetic oligonucleotide
  Sense strand starting at position 3100 of SEQ ID NO: 1415
aaucaaguagucugagaag

SEQ ID NO: 111343 - RNA, 19 nt, Artificial Sequence
  Description of Artificial Sequence: Synthetic oligonucleotide
  Antisense strand to SEQ ID NO: 111342
cuucucagacuacuugauu

SEQ ID NO: 111344 - RNA, 19 nt, Artificial Sequence
  Description of Artificial Sequence: Synthetic oligonucleotide
  Sense strand starting at position 3164 of SEQ ID NO: 1415
guaguugcuagcucacgua

SEQ ID NO: 111345 - RNA, 19 nt, Artificial Sequence
  Description of Artificial Sequence: Synthetic oligonucleotide
  Antisense strand to SEQ ID NO: 111344
uacgugagcuagcaacuac

SEQ ID NO: 111346 - RNA, 19 nt, Artificial Sequence
  Description of Artificial Sequence: Synthetic oligonucleotide
  Sense strand starting at position 3191 of SEQ ID NO: 1415
cagggaagggcuuacugua

SEQ ID NO: 111347 - RNA, 19 nt, Artificial Sequence
  Description of Artificial Sequence: Synthetic oligonucleotide
  Antisense strand to SEQ ID NO: 111346
uacaguaagcccuucccug

SEQ ID NO: 111348 - RNA, 19 nt, Artificial Sequence
  Description of Artificial Sequence: Synthetic oligonucleotide
  Sense strand starting at position 3499 of SEQ ID NO: 1415
uggaguuguccugagacca

SEQ ID NO: 111349 - RNA, 19 nt, Artificial Sequence
  Description of Artificial Sequence: Synthetic oligonucleotide
  Antisense strand to SEQ ID NO: 111348
uggucucaggacaacucca

SEQ ID NO: 111350 - RNA, 19 nt, Artificial Sequence
  Description of Artificial Sequence: Synthetic oligonucleotide
  Sense strand starting at position 3507 of SEQ ID NO: 1415
uccugagaccaggguuuau

SEQ ID NO: 111351 - RNA, 19 nt, Artificial Sequence
  Description of Artificial Sequence: Synthetic oligonucleotide
  Antisense strand to SEQ ID NO: 111350
auaaacccuggucucagga

SEQ ID NO: 111352 - RNA, 19 nt, Artificial Sequence
  Description of Artificial Sequence: Synthetic oligonucleotide
  Sense strand starting at position 3550 of SEQ ID NO: 1415
auggucucaggauauguuu

SEQ ID NO: 111353 - RNA, 19 nt, Artificial Sequence
  Description of Artificial Sequence: Synthetic oligonucleotide
  Antisense strand to SEQ ID NO: 111352
aaacauauccugagaccau

SEQ ID NO: 111354 - RNA, 19 nt, Artificial Sequence
  Description of Artificial Sequence: Synthetic oligonucleotide
  Sense strand starting at position 3603 of SEQ ID NO: 1415
gacugaaauugagaauggu

SEQ ID NO: 111355 - RNA, 19 nt, Artificial Sequence
  Description of Artificial Sequence: Synthetic oligonucleotide
  Antisense strand to SEQ ID NO: 111354
accauucucaauuucaguc

SEQ ID NO: 111356 - RNA, 19 nt, Artificial Sequence
  Description of Artificial Sequence: Synthetic oligonucleotide
  Sense strand starting at position 3630 of SEQ ID NO: 1415
auagauguucuaugcuuau

SEQ ID NO: 111357 - RNA, 19 nt, Artificial Sequence
  Description of Artificial Sequence: Synthetic oligonucleotide
  Antisense strand to SEQ ID NO: 111356
auaagcauagaacaucuau

SEQ ID NO: 111358 - RNA, 19 nt, Artificial Sequence
  Description of Artificial Sequence: Synthetic oligonucleotide
  Sense strand starting at position 3675 of SEQ ID NO: 1415
gcagaugaauuggauauag

SEQ ID NO: 111359 - RNA, 19 nt, Artificial Sequence
  Description of Artificial Sequence: Synthetic oligonucleotide
  Antisense strand to SEQ ID NO: 111358
cuauauccaauucaucugc

SEQ ID NO: 111360 - RNA, 19 nt, Artificial Sequence
  Description of Artificial Sequence: Synthetic oligonucleotide
  Sense strand starting at position 226 of SEQ ID NO: 1416
gucucuaagcccuacugaa

SEQ ID NO: 111361 - RNA, 19 nt, Artificial Sequence
  Description of Artificial Sequence: Synthetic oligonucleotide
  Antisense strand to SEQ ID NO: 111360
uucaguagggcuuagagac

SEQ ID NO: 111362 - RNA, 19 nt, Artificial Sequence
  Description of Artificial Sequence: Synthetic oligonucleotide
  Sense strand starting at position 256 of SEQ ID NO: 1416
uuggcuuuauuuguuugaa

SEQ ID NO: 111363 - RNA, 19 nt, Artificial Sequence
  Description of Artificial Sequence: Synthetic oligonucleotide
  Antisense strand to SEQ ID NO: 111362
uucaaacaaauaaagccaa

SEQ ID NO: 111364 - RNA, 19 nt, Artificial Sequence
  Description of Artificial Sequence: Synthetic oligonucleotide
  Sense strand starting at position 487 of SEQ ID NO: 1416
ggcacuugggucuguauuu

SEQ ID NO: 111365 - RNA, 19 nt, Artificial Sequence
  Description of Artificial Sequence: Synthetic oligonucleotide
  Antisense strand to SEQ ID NO: 111364
aaauacagacccaagugcc

SEQ ID NO: 111366 - RNA, 19 nt, Artificial Sequence
  Description of Artificial Sequence: Synthetic oligonucleotide
  Sense strand starting at position 531 of SEQ ID NO: 1416
guguaaguuguuaggugau

SEQ ID NO: 111367 - RNA, 19 nt, Artificial Sequence
  Description of Artificial Sequence: Synthetic oligonucleotide
  Antisense strand to SEQ ID NO: 111366
aucaccuaacaacuuacac

SEQ ID NO: 111368 - RNA, 19 nt, Artificial Sequence
  Description of Artificial Sequence: Synthetic oligonucleotide
  Sense strand starting at position 680 of SEQ ID NO: 1416
gugagugcuuauucgauuu

SEQ ID NO: 111369 - RNA, 19 nt, Artificial Sequence
  Description of Artificial Sequence: Synthetic oligonucleotide
  Antisense strand to SEQ ID NO: 111368
aaaucgaauaagcacucac

SEQ ID NO: 111370 - RNA, 19 nt, Artificial Sequence
  Description of Artificial Sequence: Synthetic oligonucleotide
  Sense strand starting at position 692 of SEQ ID NO: 1416
ucgauuugguccuuuaguc

SEQ ID NO: 111371 - RNA, 19 nt, Artificial Sequence
  Description of Artificial Sequence: Synthetic oligonucleotide
  Antisense strand to SEQ ID NO: 111370
gacuaaaggaccaaaucga

SEQ ID NO: 111372 - RNA, 19 nt, Artificial Sequence
  Description of Artificial Sequence: Synthetic oligonucleotide
  Sense strand starting at position 702 of SEQ ID NO: 1416
ccuuuagucccagauccuu

SEQ ID NO: 111373 - RNA, 19 nt, Artificial Sequence
  Description of Artificial Sequence: Synthetic oligonucleotide
  Antisense strand to SEQ ID NO: 111372
aaggaucugggacuaaagg

SEQ ID NO: 111374 - RNA, 19 nt, Artificial Sequence
  Description of Artificial Sequence: Synthetic oligonucleotide
  Sense strand starting at position 752 of SEQ ID NO: 1416
ggagcugggugaucacauu

SEQ ID NO: 111375 - RNA, 19 nt, Artificial Sequence
  Description of Artificial Sequence: Synthetic oligonucleotide
  Antisense strand to SEQ ID NO: 111374
aaugugaucacccagcucc

SEQ ID NO: 111376 - RNA, 19 nt, Artificial Sequence
  Description of Artificial Sequence: Synthetic oligonucleotide
  Sense strand starting at position 909 of SEQ ID NO: 1416
guuugauccauauguggga

SEQ ID NO: 111377 - RNA, 19 nt, Artificial Sequence
  Description of Artificial Sequence: Synthetic oligonucleotide
  Antisense strand to SEQ ID NO: 111376
ucccacauauggaucaaac

SEQ ID NO: 111378 - RNA, 19 nt, Artificial Sequence
  Description of Artificial Sequence: Synthetic oligonucleotide
  Sense strand starting at position 987 of SEQ ID NO: 1416
auaaauacaggcuaguuau

SEQ ID NO: 111379 - RNA, 19 nt, Artificial Sequence
  Description of Artificial Sequence: Synthetic oligonucleotide
  Antisense strand to SEQ ID NO: 111378
auaacuagccuguauuuau

SEQ ID NO: 111380 - RNA, 19 nt, Artificial Sequence
  Description of Artificial Sequence: Synthetic oligonucleotide
  Sense strand starting at position 1249 of SEQ ID NO: 1416
gugacuugugucuugugua

SEQ ID NO: 111381 - RNA, 19 nt, Artificial Sequence
  Description of Artificial Sequence: Synthetic oligonucleotide
  Antisense strand to SEQ ID NO: 111380
uacacaagacacaagucac

SEQ ID NO: 111382 - RNA, 19 nt, Artificial Sequence
  Description of Artificial Sequence: Synthetic oligonucleotide
  Sense strand starting at position 1254 of SEQ ID NO: 1416
uugugucuuguguauuuaa

SEQ ID NO: 111383 - RNA, 19 nt, Artificial Sequence
  Description of Artificial Sequence: Synthetic oligonucleotide
  Antisense strand to SEQ ID NO: 111382
uuaaauacacaagacacaa

SEQ ID NO: 111384 - RNA, 19 nt, Artificial Sequence
  Description of Artificial Sequence: Synthetic oligonucleotide
  Sense strand starting at position 1257 of SEQ ID NO: 1416
ugucuuguguauuuaaggu

SEQ ID NO: 111385 - RNA, 19 nt, Artificial Sequence
  Description of Artificial Sequence: Synthetic oligonucleotide
  Antisense strand to SEQ ID NO: 111384
accuuaaauacacaagaca

SEQ ID NO: 111386 - RNA, 19 nt, Artificial Sequence
  Description of Artificial Sequence: Synthetic oligonucleotide
  Sense strand starting at position 1265 of SEQ ID NO: 1416
guauuuaagguuugaggcu

SEQ ID NO: 111387 - RNA, 19 nt, Artificial Sequence
  Description of Artificial Sequence: Synthetic oligonucleotide
  Antisense strand to SEQ ID NO: 111386
agccucaaaccuuaaauac

SEQ ID NO: 111388 - RNA, 19 nt, Artificial Sequence
  Description of Artificial Sequence: Synthetic oligonucleotide
  Sense strand starting at position 1354 of SEQ ID NO: 1416
cguacaaaggcaugaagau

SEQ ID NO: 111389 - RNA, 19 nt, Artificial Sequence
  Description of Artificial Sequence: Synthetic oligonucleotide
  Antisense strand to SEQ ID NO: 111388
aucuucaugccuuuguacg

SEQ ID NO: 111390 - RNA, 19 nt, Artificial Sequence
  Description of Artificial Sequence: Synthetic oligonucleotide
  Sense strand starting at position 1363 of SEQ ID NO: 1416
gcaugaagauaugauauuu

SEQ ID NO: 111391 - RNA, 19 nt, Artificial Sequence
  Description of Artificial Sequence: Synthetic oligonucleotide
  Antisense strand to SEQ ID NO: 111390
aaauaucauaucuucaugc

SEQ ID NO: 111392 - RNA, 19 nt, Artificial Sequence
  Description of Artificial Sequence: Synthetic oligonucleotide
  Sense strand starting at position 1495 of SEQ ID NO: 1416
gaaacaaucgauugcagaa

SEQ ID NO: 111393 - RNA, 19 nt, Artificial Sequence
  Description of Artificial Sequence: Synthetic oligonucleotide
  Antisense strand to SEQ ID NO: 111392
uucugcaaucgauuguuuc

SEQ ID NO: 111394 - RNA, 19 nt, Artificial Sequence
  Description of Artificial Sequence: Synthetic oligonucleotide
  Sense strand starting at position 1545 of SEQ ID NO: 1416
gaugauagguuacccacau

SEQ ID NO: 111395 - RNA, 19 nt, Artificial Sequence
  Description of Artificial Sequence: Synthetic oligonucleotide
  Antisense strand to SEQ ID NO: 111394
auguggguaaccuaucauc

SEQ ID NO: 111396 - RNA, 19 nt, Artificial Sequence
  Description of Artificial Sequence: Synthetic oligonucleotide
  Sense strand starting at position 1546 of SEQ ID NO: 1416
augauagguuacccacauu

SEQ ID NO: 111397 - RNA, 19 nt, Artificial Sequence
  Description of Artificial Sequence: Synthetic oligonucleotide
  Antisense strand to SEQ ID NO: 111396
aauguggguaaccuaucau

SEQ ID NO: 111398 - RNA, 19 nt, Artificial Sequence
  Description of Artificial Sequence: Synthetic oligonucleotide
  Sense strand starting at position 1648 of SEQ ID NO: 1416
ggcugaugucccuaaacag

SEQ ID NO: 111399 - RNA, 19 nt, Artificial Sequence
  Description of Artificial Sequence: Synthetic oligonucleotide
  Antisense strand to SEQ ID NO: 111398
cuguuuagggacaucagcc

SEQ ID NO: 111400 - RNA, 19 nt, Artificial Sequence
  Description of Artificial Sequence: Synthetic oligonucleotide
  Sense strand starting at position 1834 of SEQ ID NO: 1416
gccugaauuuccucuaguu

SEQ ID NO: 111401 - RNA, 19 nt, Artificial Sequence
  Description of Artificial Sequence: Synthetic oligonucleotide
  Antisense strand to SEQ ID NO: 111400
aacuagaggaaauucaggc

SEQ ID NO: 111402 - RNA, 19 nt, Artificial Sequence
  Description of Artificial Sequence: Synthetic oligonucleotide
  Sense strand starting at position 1862 of SEQ ID NO: 1416
ccaucuauuugucugguuu

SEQ ID NO: 111403 - RNA, 19 nt, Artificial Sequence
  Description of Artificial Sequence: Synthetic oligonucleotide
  Antisense strand to SEQ ID NO: 111402
aaaccagacaaauagaugg

SEQ ID NO: 111404 - RNA, 19 nt, Artificial Sequence
  Description of Artificial Sequence: Synthetic oligonucleotide
  Sense strand starting at position 2086 of SEQ ID NO: 1416
ucauaugcucccgcuugua

SEQ ID NO: 111405 - RNA, 19 nt, Artificial Sequence
  Description of Artificial Sequence: Synthetic oligonucleotide
  Antisense strand to SEQ ID NO: 111404
uacaagcgggagcauauga

SEQ ID NO: 111406 - RNA, 19 nt, Artificial Sequence
  Description of Artificial Sequence: Synthetic oligonucleotide
  Sense strand starting at position 2529 of SEQ ID NO: 1416
aagucugugucauuugcau

SEQ ID NO: 111407 - RNA, 19 nt, Artificial Sequence
  Description of Artificial Sequence: Synthetic oligonucleotide
  Antisense strand to SEQ ID NO: 111406
augcaaaugacacagacuu

SEQ ID NO: 111408 - RNA, 19 nt, Artificial Sequence
  Description of Artificial Sequence: Synthetic oligonucleotide
  Sense strand starting at position 2535 of SEQ ID NO: 1416
gugucauuugcauggaauc

SEQ ID NO: 111409 - RNA, 19 nt, Artificial Sequence
  Description of Artificial Sequence: Synthetic oligonucleotide
  Antisense strand to SEQ ID NO: 111408
gauuccaugcaaaugacac

SEQ ID NO: 111410 - RNA, 19 nt, Artificial Sequence
  Description of Artificial Sequence: Synthetic oligonucleotide
  Sense strand starting at position 2602 of SEQ ID NO: 1416
ccuuucugaguacaaguuu

SEQ ID NO: 111411 - RNA, 19 nt, Artificial Sequence
  Description of Artificial Sequence: Synthetic oligonucleotide
  Antisense strand to SEQ ID NO: 111410
aaacuuguacucagaaagg

SEQ ID NO: 111412 - RNA, 19 nt, Artificial Sequence
  Description of Artificial Sequence: Synthetic oligonucleotide
  Sense strand starting at position 2608 of SEQ ID NO: 1416
ugaguacaaguuuaccaua

SEQ ID NO: 111413 - RNA, 19 nt, Artificial Sequence
  Description of Artificial Sequence: Synthetic oligonucleotide
  Antisense strand to SEQ ID NO: 111412
uaugguaaacuuguacuca

SEQ ID NO: 111414 - RNA, 19 nt, Artificial Sequence
  Description of Artificial Sequence: Synthetic oligonucleotide
  Sense strand starting at position 2610 of SEQ ID NO: 1416
aguacaaguuuaccauaca

SEQ ID NO: 111415 - RNA, 19 nt, Artificial Sequence
  Description of Artificial Sequence: Synthetic oligonucleotide
  Antisense strand to SEQ ID NO: 111414
uguaugguaaacuuguacu

SEQ ID NO: 111416 - RNA, 19 nt, Artificial Sequence
  Description of Artificial Sequence: Synthetic oligonucleotide
  Sense strand starting at position 2629 of SEQ ID NO: 1416
cgcuucuuaacauagggau

SEQ ID NO: 111417 - RNA, 19 nt, Artificial Sequence
  Description of Artificial Sequence: Synthetic oligonucleotide
  Antisense strand to SEQ ID NO: 111416
aucccuauguuaagaagcg

SEQ ID NO: 111418 - RNA, 19 nt, Artificial Sequence
  Description of Artificial Sequence: Synthetic oligonucleotide
  Sense strand starting at position 2646 of SEQ ID NO: 1416
auaauucgagcuugaaaua

SEQ ID NO: 111419 - RNA, 19 nt, Artificial Sequence
  Description of Artificial Sequence: Synthetic oligonucleotide
  Antisense strand to SEQ ID NO: 111418
uauuucaagcucgaauuau

SEQ ID NO: 111420 - RNA, 19 nt, Artificial Sequence
  Description of Artificial Sequence: Synthetic oligonucleotide
  Sense strand starting at position 2647 of SEQ ID NO: 1416
uaauucgagcuugaaauag

SEQ ID NO: 111421 - RNA, 19 nt, Artificial Sequence
  Description of Artificial Sequence: Synthetic oligonucleotide
  Antisense strand to SEQ ID NO: 111420
cuauuucaagcucgaauua

SEQ ID NO: 111422 - RNA, 19 nt, Artificial Sequence
  Description of Artificial Sequence: Synthetic oligonucleotide
  Sense strand starting at position 2651 of SEQ ID NO: 1416
ucgagcuugaaauagacuu

SEQ ID NO: 111423 - RNA, 19 nt, Artificial Sequence
  Description of Artificial Sequence: Synthetic oligonucleotide
  Antisense strand to SEQ ID NO: 111422
aagucuauuucaagcucga

SEQ ID NO: 111424 - RNA, 19 nt, Artificial Sequence
  Description of Artificial Sequence: Synthetic oligonucleotide
  Sense strand starting at position 3152 of SEQ ID NO: 1416
acagcuuucuuauuugugu

SEQ ID NO: 111425 - RNA, 19 nt, Artificial Sequence
  Description of Artificial Sequence: Synthetic oligonucleotide
  Antisense strand to SEQ ID NO: 111424
acacaaauaagaaagcugu

SEQ ID NO: 111426 - RNA, 19 nt, Artificial Sequence
  Description of Artificial Sequence: Synthetic oligonucleotide
  Sense strand starting at position 3155 of SEQ ID NO: 1416
gcuuucuuauuuguguuua

SEQ ID NO: 111427 - RNA, 19 nt, Artificial Sequence
  Description of Artificial Sequence: Synthetic oligonucleotide
  Antisense strand to SEQ ID NO: 111426
uaaacacaaauaagaaagc

SEQ ID NO: 111428 - RNA, 19 nt, Artificial Sequence
  Description of Artificial Sequence: Synthetic oligonucleotide
  Sense strand starting at position 3212 of SEQ ID NO: 1416
ggaacagaguucccuucua

SEQ ID NO: 111429 - RNA, 19 nt, Artificial Sequence
  Description of Artificial Sequence: Synthetic oligonucleotide
  Antisense strand to SEQ ID NO: 111428
uagaagggaacucuguucc

SEQ ID NO: 111430 - RNA, 19 nt, Artificial Sequence
  Description of Artificial Sequence: Synthetic oligonucleotide
  Sense strand starting at position 3388 of SEQ ID NO: 1416
gugaauauguuaucuuaac

SEQ ID NO: 111431 - RNA, 19 nt, Artificial Sequence
  Description of Artificial Sequence: Synthetic oligonucleotide
  Antisense strand to SEQ ID NO: 111430
guuaagauaacauauucac

SEQ ID NO: 111432 - RNA, 19 nt, Artificial Sequence
  Description of Artificial Sequence: Synthetic oligonucleotide
  Sense strand starting at position 3551 of SEQ ID NO: 1416
cguuuccaguaauuuauua

SEQ ID NO: 111433 - RNA, 19 nt, Artificial Sequence
  Description of Artificial Sequence: Synthetic oligonucleotide
  Antisense strand to SEQ ID NO: 111432
uaauaaauuacuggaaacg

SEQ ID NO: 111434 - RNA, 19 nt, Artificial Sequence
  Description of Artificial Sequence: Synthetic oligonucleotide
  Sense strand starting at position 3675 of SEQ ID NO: 1416
uacugcauugaguggagaa

SEQ ID NO: 111435 - RNA, 19 nt, Artificial Sequence
  Description of Artificial Sequence: Synthetic oligonucleotide
  Antisense strand to SEQ ID NO: 111434
uucuccacucaaugcagua

SEQ ID NO: 111436 - RNA, 19 nt, Artificial Sequence
  Description of Artificial Sequence: Synthetic oligonucleotide
  Sense strand starting at position 3676 of SEQ ID NO: 1416
acugcauugaguggagaaa

SEQ ID NO: 111437 - RNA, 19 nt, Artificial Sequence
  Description of Artificial Sequence: Synthetic oligonucleotide
  Antisense strand to SEQ ID NO: 111436
uuucuccacucaaugcagu

SEQ ID NO: 111438 - RNA, 19 nt, Artificial Sequence
  Description of Artificial Sequence: Synthetic oligonucleotide
  Sense strand starting at position 3851 of SEQ ID NO: 1416
uuuguaauuccuuagguua

SEQ ID NO: 111439 - RNA, 19 nt, Artificial Sequence
  Description of Artificial Sequence: Synthetic oligonucleotide
  Antisense strand to SEQ ID NO: 111438
uaaccuaaggaauuacaaa

SEQ ID NO: 111440 - RNA, 19 nt, Artificial Sequence
  Description of Artificial Sequence: Synthetic oligonucleotide
  Sense strand starting at position 82 of SEQ ID NO: 1417
acaggauugccaggaggua

SEQ ID NO: 111441 - RNA, 19 nt, Artificial Sequence
  Description of Artificial Sequence: Synthetic oligonucleotide
  Antisense strand to SEQ ID NO: 111440
uaccuccuggcaauccugu

SEQ ID NO: 111442 - RNA, 19 nt, Artificial Sequence
  Description of Artificial Sequence: Synthetic oligonucleotide
  Sense strand starting at position 318 of SEQ ID NO: 1417
aggcaaaucucugucucua

SEQ ID NO: 111443 - RNA, 19 nt, Artificial Sequence
  Description of Artificial Sequence: Synthetic oligonucleotide
  Antisense strand to SEQ ID NO: 111442
uagagacagagauuugccu

SEQ ID NO: 111444 - RNA, 19 nt, Artificial Sequence
  Description of Artificial Sequence: Synthetic oligonucleotide
  Sense strand starting at position 345 of SEQ ID NO: 1417
cacgcaacuugucaucaga

SEQ ID NO: 111445 - RNA, 19 nt, Artificial Sequence
  Description of Artificial Sequence: Synthetic oligonucleotide
  Antisense strand to SEQ ID NO: 111444
ucugaugacaaguugcgug

SEQ ID NO: 111446 - RNA, 19 nt, Artificial Sequence
  Description of Artificial Sequence: Synthetic oligonucleotide
  Sense strand starting at position 347 of SEQ ID NO: 1417
cgcaacuugucaucagauc

SEQ ID NO: 111447 - RNA, 19 nt, Artificial Sequence
  Description of Artificial Sequence: Synthetic oligonucleotide
  Antisense strand to SEQ ID NO: 111446
gaucugaugacaaguugcg

SEQ ID NO: 111448 - RNA, 19 nt, Artificial Sequence
  Description of Artificial Sequence: Synthetic oligonucleotide
  Sense strand starting at position 348 of SEQ ID NO: 1417
gcaacuugucaucagaucu

SEQ ID NO: 111449 - RNA, 19 nt, Artificial Sequence
  Description of Artificial Sequence: Synthetic oligonucleotide
  Antisense strand to SEQ ID NO: 111448
agaucugaugacaaguugc

SEQ ID NO: 111450 - RNA, 19 nt, Artificial Sequence
  Description of Artificial Sequence: Synthetic oligonucleotide
  Sense strand starting at position 389 of SEQ ID NO: 1417
guucgugccuccucucaaa

SEQ ID NO: 111451 - RNA, 19 nt, Artificial Sequence
  Description of Artificial Sequence: Synthetic oligonucleotide
  Antisense strand to SEQ ID NO: 111450
uuugagaggaggcacgaac

SEQ ID NO: 111452 - RNA, 19 nt, Artificial Sequence
  Description of Artificial Sequence: Synthetic oligonucleotide
  Sense strand starting at position 434 of SEQ ID NO: 1417
accuaaaggucucucuguu

SEQ ID NO: 111453 - RNA, 19 nt, Artificial Sequence
  Description of Artificial Sequence: Synthetic oligonucleotide
  Antisense strand to SEQ ID NO: 111452
aacagagagaccuuuaggu

SEQ ID NO: 111454 - RNA, 19 nt, Artificial Sequence
  Description of Artificial Sequence: Synthetic oligonucleotide
  Sense strand starting at position 483 of SEQ ID NO: 1417
cgcucaaacccagaaguaa

SEQ ID NO: 111455 - RNA, 19 nt, Artificial Sequence
  Description of Artificial Sequence: Synthetic oligonucleotide
  Antisense strand to SEQ ID NO: 111454
uuacuucuggguuugagcg

SEQ ID NO: 111456 - RNA, 19 nt, Artificial Sequence
  Description of Artificial Sequence: Synthetic oligonucleotide
  Sense strand starting at position 515 of SEQ ID NO: 1417
gaggcaaucuuaugacggu

SEQ ID NO: 111457 - RNA, 19 nt, Artificial Sequence
  Description of Artificial Sequence: Synthetic oligonucleotide
  Antisense strand to SEQ ID NO: 111456
accgucauaagauugccuc

SEQ ID NO: 111458 - RNA, 19 nt, Artificial Sequence
  Description of Artificial Sequence: Synthetic oligonucleotide
  Sense strand starting at position 518 of SEQ ID NO: 1417
gcaaucuuaugacggucua

SEQ ID NO: 111459 - RNA, 19 nt, Artificial Sequence
  Description of Artificial Sequence: Synthetic oligonucleotide
  Antisense strand to SEQ ID NO: 111458
uagaccgucauaagauugc

SEQ ID NO: 111460 - RNA, 19 nt, Artificial Sequence
  Description of Artificial Sequence: Synthetic oligonucleotide
  Sense strand starting at position 709 of SEQ ID NO: 1417
cuccuuguucgaggucuuu

SEQ ID NO: 111461 - RNA, 19 nt, Artificial Sequence
  Description of Artificial Sequence: Synthetic oligonucleotide
  Antisense strand to SEQ ID NO: 111460
aaagaccucgaacaaggag

SEQ ID NO: 111462 - RNA, 19 nt, Artificial Sequence
  Description of Artificial Sequence: Synthetic oligonucleotide
  Sense strand starting at position 715 of SEQ ID NO: 1417
guucgaggucuuuauucag

SEQ ID NO: 111463 - RNA, 19 nt, Artificial Sequence
  Description of Artificial Sequence: Synthetic oligonucleotide
  Antisense strand to SEQ ID NO: 111462
cugaauaaagaccucgaac

SEQ ID NO: 111464 - RNA, 19 nt, Artificial Sequence
  Description of Artificial Sequence: Synthetic oligonucleotide
  Sense strand starting at position 1250 of SEQ ID NO: 1417
cuccgcuccuucuaacaga

SEQ ID NO: 111465 - RNA, 19 nt, Artificial Sequence
  Description of Artificial Sequence: Synthetic oligonucleotide
  Antisense strand to SEQ ID NO: 111464
ucuguuagaaggagcggag

SEQ ID NO: 111466 - RNA, 19 nt, Artificial Sequence
  Description of Artificial Sequence: Synthetic oligonucleotide
  Sense strand starting at position 1376 of SEQ ID NO: 1417
acgugagaguucuccuaga

SEQ ID NO: 111467 - RNA, 19 nt, Artificial Sequence
  Description of Artificial Sequence: Synthetic oligonucleotide
  Antisense strand to SEQ ID NO: 111466
ucuaggagaacucucacgu

SEQ ID NO: 111468 - RNA, 19 nt, Artificial Sequence
  Description of Artificial Sequence: Synthetic oligonucleotide
  Sense strand starting at position 1443 of SEQ ID NO: 1417
gacagaguuuggcacggaa

SEQ ID NO: 111469 - RNA, 19 nt, Artificial Sequence
  Description of Artificial Sequence: Synthetic oligonucleotide
  Antisense strand to SEQ ID NO: 111468
uuccgugccaaacucuguc

SEQ ID NO: 111470 - RNA, 19 nt, Artificial Sequence
  Description of Artificial Sequence: Synthetic oligonucleotide
  Sense strand starting at position 1445 of SEQ ID NO: 1417
cagaguuuggcacggaaca

SEQ ID NO: 111471 - RNA, 19 nt, Artificial Sequence
  Description of Artificial Sequence: Synthetic oligonucleotide
  Antisense strand to SEQ ID NO: 111470
uguuccgugccaaacucug

SEQ ID NO: 111472 - RNA, 19 nt, Artificial Sequence
  Description of Artificial Sequence: Synthetic oligonucleotide
  Sense strand starting at position 1468 of SEQ ID NO: 1417
cucaguaaacaucggauga

SEQ ID NO: 111473 - RNA, 19 nt, Artificial Sequence
  Description of Artificial Sequence: Synthetic oligonucleotide
  Antisense strand to SEQ ID NO: 111472
ucauccgauguuuacugag

SEQ ID NO: 111474 - RNA, 19 nt, Artificial Sequence
  Description of Artificial Sequence: Synthetic oligonucleotide
  Sense strand starting at position 1469 of SEQ ID NO: 1417
ucaguaaacaucggaugaa

SEQ ID NO: 111475 - RNA, 19 nt, Artificial Sequence
  Description of Artificial Sequence: Synthetic oligonucleotide
  Antisense strand to SEQ ID NO: 111474
uucauccgauguuuacuga

SEQ ID NO: 111476 - RNA, 19 nt, Artificial Sequence
  Description of Artificial Sequence: Synthetic oligonucleotide
  Sense strand starting at position 1470 of SEQ ID NO: 1417
caguaaacaucggaugaaa

SEQ ID NO: 111477 - RNA, 19 nt, Artificial Sequence
  Description of Artificial Sequence: Synthetic oligonucleotide
  Antisense strand to SEQ ID NO: 111476
uuucauccgauguuuacug

SEQ ID NO: 111478 - RNA, 19 nt, Artificial Sequence
  Description of Artificial Sequence: Synthetic oligonucleotide
  Sense strand starting at position 1488 of SEQ ID NO: 1417
agaguaaguuaagcugaaa

SEQ ID NO: 111479 - RNA, 19 nt, Artificial Sequence
  Description of Artificial Sequence: Synthetic oligonucleotide
  Antisense strand to SEQ ID NO: 111478
uuucagcuuaacuuacucu

SEQ ID NO: 111480 - RNA, 19 nt, Artificial Sequence
  Description of Artificial Sequence: Synthetic oligonucleotide
  Sense strand starting at position 1599 of SEQ ID NO: 1417
agagguucugcucacgcau

SEQ ID NO: 111481 - RNA, 19 nt, Artificial Sequence
  Description of Artificial Sequence: Synthetic oligonucleotide
  Antisense strand to SEQ ID NO: 111480
augcgugagcagaaccucu

SEQ ID NO: 111482 - RNA, 19 nt, Artificial Sequence
  Description of Artificial Sequence: Synthetic oligonucleotide
  Sense strand starting at position 2895 of SEQ ID NO: 1417
gagggcucuucggagaaac

SEQ ID NO: 111483 - RNA, 19 nt, Artificial Sequence
  Description of Artificial Sequence: Synthetic oligonucleotide
  Antisense strand to SEQ ID NO: 111482
guuucuccgaagagcccuc

SEQ ID NO: 111484 - RNA, 19 nt, Artificial Sequence
  Description of Artificial Sequence: Synthetic oligonucleotide
  Sense strand starting at position 687 of SEQ ID NO: 1418
cugcauuagacagggaauc

SEQ ID NO: 111485 - RNA, 19 nt, Artificial Sequence
  Description of Artificial Sequence: Synthetic oligonucleotide
  Antisense strand to SEQ ID NO: 111484
gauucccugucuaaugcag

SEQ ID NO: 111486 - RNA, 19 nt, Artificial Sequence
  Description of Artificial Sequence: Synthetic oligonucleotide
  Sense strand starting at position 714 of SEQ ID NO: 1418
uggcauccacguuaagaau

SEQ ID NO: 111487 - RNA, 19 nt, Artificial Sequence
  Description of Artificial Sequence: Synthetic oligonucleotide
  Antisense strand to SEQ ID NO: 111486
auucuuaacguggaugcca

SEQ ID NO: 111488 - RNA, 19 nt, Artificial Sequence
  Description of Artificial Sequence: Synthetic oligonucleotide
  Sense strand starting at position 729 of SEQ ID NO: 1418
gaaucaggcugccugaguu

SEQ ID NO: 111489 - RNA, 19 nt, Artificial Sequence
  Description of Artificial Sequence: Synthetic oligonucleotide
  Antisense strand to SEQ ID NO: 111488
aacucaggcagccugauuc

SEQ ID NO: 111490 - RNA, 19 nt, Artificial Sequence
  Description of Artificial Sequence: Synthetic oligonucleotide
  Sense strand starting at position 762 of SEQ ID NO: 1418
cccucuacuguguaaguua

SEQ ID NO: 111491 - RNA, 19 nt, Artificial Sequence
  Description of Artificial Sequence: Synthetic oligonucleotide
  Antisense strand to SEQ ID NO: 111490
uaacuuacacaguagaggg

SEQ ID NO: 111492 - RNA, 19 nt, Artificial Sequence
  Description of Artificial Sequence: Synthetic oligonucleotide
  Sense strand starting at position 791 of SEQ ID NO: 1418
gucuccucgucuguaaaca

SEQ ID NO: 111493 - RNA, 19 nt, Artificial Sequence
  Description of Artificial Sequence: Synthetic oligonucleotide
  Antisense strand to SEQ ID NO: 111492
uguuuacagacgaggagac

SEQ ID NO: 111494 - RNA, 19 nt, Artificial Sequence
  Description of Artificial Sequence: Synthetic oligonucleotide
  Sense strand starting at position 821 of SEQ ID NO: 1418
ggacaacuacuccguaaga

SEQ ID NO: 111495 - RNA, 19 nt, Artificial Sequence
  Description of Artificial Sequence: Synthetic oligonucleotide
  Antisense strand to SEQ ID NO: 111494
ucuuacggaguaguugucc

SEQ ID NO: 111496 - RNA, 19 nt, Artificial Sequence
  Description of Artificial Sequence: Synthetic oligonucleotide
  Sense strand starting at position 834 of SEQ ID NO: 1418
guaagagagcuggauguuu

SEQ ID NO: 111497 - RNA, 19 nt, Artificial Sequence
  Description of Artificial Sequence: Synthetic oligonucleotide
  Antisense strand to SEQ ID NO: 111496
aaacauccagcucucuuac

SEQ ID NO: 111498 - RNA, 19 nt, Artificial Sequence
  Description of Artificial Sequence: Synthetic oligonucleotide
  Sense strand starting at position 836 of SEQ ID NO: 1418
aagagagcuggauguuuaa

SEQ ID NO: 111499 - RNA, 19 nt, Artificial Sequence
  Description of Artificial Sequence: Synthetic oligonucleotide
  Antisense strand to SEQ ID NO: 111498
uuaaacauccagcucucuu

SEQ ID NO: 111500 - RNA, 19 nt, Artificial Sequence
  Description of Artificial Sequence: Synthetic oligonucleotide
  Sense strand starting at position 894 of SEQ ID NO: 1418
ccuggaauuucugagcucu

SEQ ID NO: 111501 - RNA, 19 nt, Artificial Sequence
  Description of Artificial Sequence: Synthetic oligonucleotide
  Antisense strand to SEQ ID NO: 111500
agagcucagaaauuccagg

SEQ ID NO: 111502 - RNA, 19 nt, Artificial Sequence
  Description of Artificial Sequence: Synthetic oligonucleotide
  Sense strand starting at position 1917 of SEQ ID NO: 1418
gggccuaccgcgcgagaau

SEQ ID NO: 111503 - RNA, 19 nt, Artificial Sequence
  Description of Artificial Sequence: Synthetic oligonucleotide
  Antisense strand to SEQ ID NO: 111502
auucucgcgcgguaggccc

SEQ ID NO: 111504 - RNA, 19 nt, Artificial Sequence
  Description of Artificial Sequence: Synthetic oligonucleotide
  Sense strand starting at position 1927 of SEQ ID NO: 1418
cgcgagaaucucgcgagau

SEQ ID NO: 111505 - RNA, 19 nt, Artificial Sequence
  Description of Artificial Sequence: Synthetic oligonucleotide
  Antisense strand to SEQ ID NO: 111504
aucucgcgagauucucgcg

SEQ ID NO: 111506 - RNA, 19 nt, Artificial Sequence
  Description of Artificial Sequence: Synthetic oligonucleotide
  Sense strand starting at position 2079 of SEQ ID NO: 1418
cuccauuuacguuacgcaa

SEQ ID NO: 111507 - RNA, 19 nt, Artificial Sequence
  Description of Artificial Sequence: Synthetic oligonucleotide
  Antisense strand to SEQ ID NO: 111506
uugcguaacguaaauggag

SEQ ID NO: 111508 - RNA, 19 nt, Artificial Sequence
  Description of Artificial Sequence: Synthetic oligonucleotide
  Sense strand starting at position 2081 of SEQ ID NO: 1418
ccauuuacguuacgcaaau

SEQ ID NO: 111509 - RNA, 19 nt, Artificial Sequence
  Description of Artificial Sequence: Synthetic oligonucleotide
  Antisense strand to SEQ ID NO: 111508
auuugcguaacguaaaugg

SEQ ID NO: 111510 - RNA, 19 nt, Artificial Sequence
  Description of Artificial Sequence: Synthetic oligonucleotide
  Sense strand starting at position 2082 of SEQ ID NO: 1418
cauuuacguuacgcaaauu

SEQ ID NO: 111511 - RNA, 19 nt, Artificial Sequence
  Description of Artificial Sequence: Synthetic oligonucleotide
  Antisense strand to SEQ ID NO: 111510
aauuugcguaacguaaaug

SEQ ID NO: 111512 - RNA, 19 nt, Artificial Sequence
  Description of Artificial Sequence: Synthetic oligonucleotide
  Sense strand starting at position 2205 of SEQ ID NO: 1418
gcuuuaggauuggcaguuu

SEQ ID NO: 111513 - RNA, 19 nt, Artificial Sequence
  Description of Artificial Sequence: Synthetic oligonucleotide
  Antisense strand to SEQ ID NO: 111512
aaacugccaauccuaaagc

SEQ ID NO: 111514 - RNA, 19 nt, Artificial Sequence
  Description of Artificial Sequence: Synthetic oligonucleotide
  Sense strand starting at position 2261 of SEQ ID NO: 1418
ugcauuuguuucgaaguga

SEQ ID NO: 111515 - RNA, 19 nt, Artificial Sequence
  Description of Artificial Sequence: Synthetic oligonucleotide
  Antisense strand to SEQ ID NO: 111514
ucacuucgaaacaaaugca

SEQ ID NO: 111516 - RNA, 19 nt, Artificial Sequence
  Description of Artificial Sequence: Synthetic oligonucleotide
  Sense strand starting at position 2265 of SEQ ID NO: 1418
uuuguuucgaagugagcaa

SEQ ID NO: 111517 - RNA, 19 nt, Artificial Sequence
  Description of Artificial Sequence: Synthetic oligonucleotide
  Antisense strand to SEQ ID NO: 111516
uugcucacuucgaaacaaa

SEQ ID NO: 111518 - RNA, 19 nt, Artificial Sequence
  Description of Artificial Sequence: Synthetic oligonucleotide
  Sense strand starting at position 2297 of SEQ ID NO: 1418
ggcgaaaguauaugacaau

SEQ ID NO: 111519 - RNA, 19 nt, Artificial Sequence
  Description of Artificial Sequence: Synthetic oligonucleotide
  Antisense strand to SEQ ID NO: 111518
auugucauauacuuucgcc

SEQ ID NO: 111520 - RNA, 19 nt, Artificial Sequence
  Description of Artificial Sequence: Synthetic oligonucleotide
  Sense strand starting at position 2298 of SEQ ID NO: 1418
gcgaaaguauaugacaauu

SEQ ID NO: 111521 - RNA, 19 nt, Artificial Sequence
  Description of Artificial Sequence: Synthetic oligonucleotide
  Antisense strand to SEQ ID NO: 111520
aauugucauauacuuucgc

SEQ ID NO: 111522 - RNA, 19 nt, Artificial Sequence
  Description of Artificial Sequence: Synthetic oligonucleotide
  Sense strand starting at position 2320 of SEQ ID NO: 1418
ucagaaucuuaaugucaga

SEQ ID NO: 111523 - RNA, 19 nt, Artificial Sequence
  Description of Artificial Sequence: Synthetic oligonucleotide
  Antisense strand to SEQ ID NO: 111522
ucugacauuaagauucuga

SEQ ID NO: 111524 - RNA, 19 nt, Artificial Sequence
  Description of Artificial Sequence: Synthetic oligonucleotide
  Sense strand starting at position 2367 of SEQ ID NO: 1418
gacucaaagcugugucuca

SEQ ID NO: 111525 - RNA, 19 nt, Artificial Sequence
  Description of Artificial Sequence: Synthetic oligonucleotide
  Antisense strand to SEQ ID NO: 111524
ugagacacagcuuugaguc

SEQ ID NO: 111526 - RNA, 19 nt, Artificial Sequence
  Description of Artificial Sequence: Synthetic oligonucleotide
  Sense strand starting at position 2368 of SEQ ID NO: 1418
acucaaagcugugucucau

SEQ ID NO: 111527 - RNA, 19 nt, Artificial Sequence
  Description of Artificial Sequence: Synthetic oligonucleotide
  Antisense strand to SEQ ID NO: 111526
augagacacagcuuugagu

SEQ ID NO: 111528 - RNA, 19 nt, Artificial Sequence
  Description of Artificial Sequence: Synthetic oligonucleotide
  Sense strand starting at position 2372 of SEQ ID NO: 1418
aaagcugugucucauuuag

SEQ ID NO: 111529 - RNA, 19 nt, Artificial Sequence
  Description of Artificial Sequence: Synthetic oligonucleotide
  Antisense strand to SEQ ID NO: 111528
cuaaaugagacacagcuuu

SEQ ID NO: 111530 - RNA, 19 nt, Artificial Sequence
  Description of Artificial Sequence: Synthetic oligonucleotide
  Sense strand starting at position 2374 of SEQ ID NO: 1418
agcugugucucauuuagua

SEQ ID NO: 111531 - RNA, 19 nt, Artificial Sequence
  Description of Artificial Sequence: Synthetic oligonucleotide
  Antisense strand to SEQ ID NO: 111530
uacuaaaugagacacagcu

SEQ ID NO: 111532 - RNA, 19 nt, Artificial Sequence
  Description of Artificial Sequence: Synthetic oligonucleotide
  Sense strand starting at position 2378 of SEQ ID NO: 1418
gugucucauuuaguaaacu

SEQ ID NO: 111533 - RNA, 19 nt, Artificial Sequence
  Description of Artificial Sequence: Synthetic oligonucleotide
  Antisense strand to SEQ ID NO: 111532
aguuuacuaaaugagacac

SEQ ID NO: 111534 - RNA, 19 nt, Artificial Sequence
  Description of Artificial Sequence: Synthetic oligonucleotide
  Sense strand starting at position 2424 of SEQ ID NO: 1418
ucgcaacacccggagaaau

SEQ ID NO: 111535 - RNA, 19 nt, Artificial Sequence
  Description of Artificial Sequence: Synthetic oligonucleotide
  Antisense strand to SEQ ID NO: 111534
auuucuccggguguugcga

SEQ ID NO: 111536 - RNA, 19 nt, Artificial Sequence
  Description of Artificial Sequence: Synthetic oligonucleotide
  Sense strand starting at position 2434 of SEQ ID NO: 1418
cggagaaauuguguuccag

SEQ ID NO: 111537 - RNA, 19 nt, Artificial Sequence
  Description of Artificial Sequence: Synthetic oligonucleotide
  Antisense strand to SEQ ID NO: 111536
cuggaacacaauuucuccg

SEQ ID NO: 111538 - RNA, 19 nt, Artificial Sequence
  Description of Artificial Sequence: Synthetic oligonucleotide
  Sense strand starting at position 2676 of SEQ ID NO: 1418
gccugaaguuaggaagcau

SEQ ID NO: 111539 - RNA, 19 nt, Artificial Sequence
  Description of Artificial Sequence: Synthetic oligonucleotide
  Antisense strand to SEQ ID NO: 111538
augcuuccuaacuucaggc

SEQ ID NO: 111540 - RNA, 19 nt, Artificial Sequence
  Description of Artificial Sequence: Synthetic oligonucleotide
  Sense strand starting at position 3106 of SEQ ID NO: 1418
caccuaagugcuggcuaga

SEQ ID NO: 111541 - RNA, 19 nt, Artificial Sequence
  Description of Artificial Sequence: Synthetic oligonucleotide
  Antisense strand to SEQ ID NO: 111540
ucuagccagcacuuaggug

SEQ ID NO: 111542 - RNA, 19 nt, Artificial Sequence
  Description of Artificial Sequence: Synthetic oligonucleotide
  Sense strand starting at position 3167 of SEQ ID NO: 1418
gcuguuagaauguguugua

SEQ ID NO: 111543 - RNA, 19 nt, Artificial Sequence
  Description of Artificial Sequence: Synthetic oligonucleotide
  Antisense strand to SEQ ID NO: 111542
uacaacacauucuaacagc

SEQ ID NO: 111544 - RNA, 19 nt, Artificial Sequence
  Description of Artificial Sequence: Synthetic oligonucleotide
  Sense strand starting at position 3168 of SEQ ID NO: 1418
cuguuagaauguguuguau

SEQ ID NO: 111545 - RNA, 19 nt, Artificial Sequence
  Description of Artificial Sequence: Synthetic oligonucleotide
  Antisense strand to SEQ ID NO: 111544
auacaacacauucuaacag

SEQ ID NO: 111546 - RNA, 19 nt, Artificial Sequence
  Description of Artificial Sequence: Synthetic oligonucleotide
  Sense strand starting at position 3198 of SEQ ID NO: 1418
ugaaauugguucuuggcuu

SEQ ID NO: 111547 - RNA, 19 nt, Artificial Sequence
  Description of Artificial Sequence: Synthetic oligonucleotide
  Antisense strand to SEQ ID NO: 111546
aagccaagaaccaauuuca

SEQ ID NO: 111548 - RNA, 19 nt, Artificial Sequence
  Description of Artificial Sequence: Synthetic oligonucleotide
  Sense strand starting at position 3202 of SEQ ID NO: 1418
auugguucuuggcuuugua

SEQ ID NO: 111549 - RNA, 19 nt, Artificial Sequence
  Description of Artificial Sequence: Synthetic oligonucleotide
  Antisense strand to SEQ ID NO: 111548
uacaaagccaagaaccaau

SEQ ID NO: 111550 - RNA, 19 nt, Artificial Sequence
  Description of Artificial Sequence: Synthetic oligonucleotide
  Sense strand starting at position 3644 of SEQ ID NO: 1418
uaggauucuccaugguucu

SEQ ID NO: 111551 - RNA, 19 nt, Artificial Sequence
  Description of Artificial Sequence: Synthetic oligonucleotide
  Antisense strand to SEQ ID NO: 111550
agaaccauggagaauccua

SEQ ID NO: 111552 - RNA, 19 nt, Artificial Sequence
  Description of Artificial Sequence: Synthetic oligonucleotide
  Sense strand starting at position 3645 of SEQ ID NO: 1418
aggauucuccaugguucuu

SEQ ID NO: 111553 - RNA, 19 nt, Artificial Sequence
  Description of Artificial Sequence: Synthetic oligonucleotide
  Antisense strand to SEQ ID NO: 111552
aagaaccauggagaauccu

SEQ ID NO: 111554 - RNA, 19 nt, Artificial Sequence
  Description of Artificial Sequence: Synthetic oligonucleotide
  Sense strand starting at position 3689 of SEQ ID NO: 1418
cccauuagaugcuuuagga

SEQ ID NO: 111555 - RNA, 19 nt, Artificial Sequence
  Description of Artificial Sequence: Synthetic oligonucleotide
  Antisense strand to SEQ ID NO: 111554
uccuaaagcaucuaauggg

SEQ ID NO: 111556 - RNA, 19 nt, Artificial Sequence
  Description of Artificial Sequence: Synthetic oligonucleotide
  Sense strand starting at position 3699 of SEQ ID NO: 1418
gcuuuaggagcuugacaaa

SEQ ID NO: 111557 - RNA, 19 nt, Artificial Sequence
  Description of Artificial Sequence: Synthetic oligonucleotide
  Antisense strand to SEQ ID NO: 111556
uuugucaagcuccuaaagc

SEQ ID NO: 111558 - RNA, 19 nt, Artificial Sequence
  Description of Artificial Sequence: Synthetic oligonucleotide
  Sense strand starting at position 3702 of SEQ ID NO: 1418
uuaggagcuugacaaauau

SEQ ID NO: 111559 - RNA, 19 nt, Artificial Sequence
  Description of Artificial Sequence: Synthetic oligonucleotide
  Antisense strand to SEQ ID NO: 111558
auauuugucaagcuccuaa

SEQ ID NO: 111560 - RNA, 19 nt, Artificial Sequence
  Description of Artificial Sequence: Synthetic oligonucleotide
  Sense strand starting at position 3914 of SEQ ID NO: 1418
ugccuuagccucgggagua

SEQ ID NO: 111561 - RNA, 19 nt, Artificial Sequence
  Description of Artificial Sequence: Synthetic oligonucleotide
  Antisense strand to SEQ ID NO: 111560
uacucccgaggcuaaggca

SEQ ID NO: 111562 - RNA, 19 nt, Artificial Sequence
  Description of Artificial Sequence: Synthetic oligonucleotide
  Sense strand starting at position 3942 of SEQ ID NO: 1418
auaggcaugugucaccaua

SEQ ID NO: 111563 - RNA, 19 nt, Artificial Sequence
  Description of Artificial Sequence: Synthetic oligonucleotide
  Antisense strand to SEQ ID NO: 111562
uauggugacacaugccuau

SEQ ID NO: 111564 - RNA, 19 nt, Artificial Sequence
  Description of Artificial Sequence: Synthetic oligonucleotide
  Sense strand starting at position 3852 of SEQ ID NO: 1419
ugauguggcacagagugau

SEQ ID NO: 111565 - RNA, 19 nt, Artificial Sequence
  Description of Artificial Sequence: Synthetic oligonucleotide
  Antisense strand to SEQ ID NO: 111564
aucacucugugccacauca

SEQ ID NO: 111566 - RNA, 19 nt, Artificial Sequence
  Description of Artificial Sequence: Synthetic oligonucleotide
  Sense strand starting at position 3840 of SEQ ID NO: 1419
auacuaagucagugaugug

SEQ ID NO: 111567 - RNA, 19 nt, Artificial Sequence
  Description of Artificial Sequence: Synthetic oligonucleotide
  Antisense strand to SEQ ID NO: 111566
cacaucacugacuuaguau

SEQ ID NO: 111568 - RNA, 19 nt, Artificial Sequence
  Description of Artificial Sequence: Synthetic oligonucleotide
  Sense strand starting at position 3839 of SEQ ID NO: 1419
cauacuaagucagugaugu

SEQ ID NO: 111569 - RNA, 19 nt, Artificial Sequence
  Description of Artificial Sequence: Synthetic oligonucleotide
  Antisense strand to SEQ ID NO: 111568
acaucacugacuuaguaug

SEQ ID NO: 111570 - RNA, 19 nt, Artificial Sequence
  Description of Artificial Sequence: Synthetic oligonucleotide
  Sense strand starting at position 3832 of SEQ ID NO: 1419
guacuuacauacuaaguca

SEQ ID NO: 111571 - RNA, 19 nt, Artificial Sequence
  Description of Artificial Sequence: Synthetic oligonucleotide
  Antisense strand to SEQ ID NO: 111570
ugacuuaguauguaaguac

SEQ ID NO: 111572 - RNA, 19 nt, Artificial Sequence
  Description of Artificial Sequence: Synthetic oligonucleotide
  Sense strand starting at position 3816 of SEQ ID NO: 1419
uuuggcaaugaauguugua

SEQ ID NO: 111573 - RNA, 19 nt, Artificial Sequence
  Description of Artificial Sequence: Synthetic oligonucleotide
  Antisense strand to SEQ ID NO: 111572
uacaacauucauugccaaa

SEQ ID NO: 111574 - RNA, 19 nt, Artificial Sequence
  Description of Artificial Sequence: Synthetic oligonucleotide
  Sense strand starting at position 3813 of SEQ ID NO: 1419
gucuuuggcaaugaauguu

SEQ ID NO: 111575 - RNA, 19 nt, Artificial Sequence
  Description of Artificial Sequence: Synthetic oligonucleotide
  Antisense strand to SEQ ID NO: 111574
aacauucauugccaaagac

SEQ ID NO: 111576 - RNA, 19 nt, Artificial Sequence
  Description of Artificial Sequence: Synthetic oligonucleotide
  Sense strand starting at position 3812 of SEQ ID NO: 1419
ugucuuuggcaaugaaugu

SEQ ID NO: 111577 - RNA, 19 nt, Artificial Sequence
  Description of Artificial Sequence: Synthetic oligonucleotide
  Antisense strand to SEQ ID NO: 111576
acauucauugccaaagaca

SEQ ID NO: 111578 - RNA, 19 nt, Artificial Sequence
  Description of Artificial Sequence: Synthetic oligonucleotide
  Sense strand starting at position 3806 of SEQ ID NO: 1419
cuguguugucuuuggcaau

SEQ ID NO: 111579 - RNA, 19 nt, Artificial Sequence
  Description of Artificial Sequence: Synthetic oligonucleotide
  Antisense strand to SEQ ID NO: 111578
auugccaaagacaacacag

SEQ ID NO: 111580 - RNA, 19 nt, Artificial Sequence
  Description of Artificial Sequence: Synthetic oligonucleotide
  Sense strand starting at position 3787 of SEQ ID NO: 1419
uagugucuccuuugcagaa

SEQ ID NO: 111581 - RNA, 19 nt, Artificial Sequence
  Description of Artificial Sequence: Synthetic oligonucleotide
  Antisense strand to SEQ ID NO: 111580
uucugcaaaggagacacua

SEQ ID NO: 111582 - RNA, 19 nt, Artificial Sequence
  Description of Artificial Sequence: Synthetic oligonucleotide
  Sense strand starting at position 3781 of SEQ ID NO: 1419
acaaauuagugucuccuuu

SEQ ID NO: 111583 - RNA, 19 nt, Artificial Sequence
  Description of Artificial Sequence: Synthetic oligonucleotide
  Antisense strand to SEQ ID NO: 111582
aaaggagacacuaauuugu

SEQ ID NO: 111584 - RNA, 19 nt, Artificial Sequence
  Description of Artificial Sequence: Synthetic oligonucleotide
  Sense strand starting at position 3343 of SEQ ID NO: 1419
aaguccugugaauauguga

SEQ ID NO: 111585 - RNA, 19 nt, Artificial Sequence
  Description of Artificial Sequence: Synthetic oligonucleotide
  Antisense strand to SEQ ID NO: 111584
ucacauauucacaggacuu

SEQ ID NO: 111586 - RNA, 19 nt, Artificial Sequence
  Description of Artificial Sequence: Synthetic oligonucleotide
  Sense strand starting at position 3254 of SEQ ID NO: 1419
caccaagugccaugagaaa

SEQ ID NO: 111587 - RNA, 19 nt, Artificial Sequence
  Description of Artificial Sequence: Synthetic oligonucleotide
  Antisense strand to SEQ ID NO: 111586
uuucucauggcacuuggug

SEQ ID NO: 111588 - RNA, 19 nt, Artificial Sequence
  Description of Artificial Sequence: Synthetic oligonucleotide
  Sense strand starting at position 3051 of SEQ ID NO: 1419
guuaauggcucauugaaga

SEQ ID NO: 111589 - RNA, 19 nt, Artificial Sequence
  Description of Artificial Sequence: Synthetic oligonucleotide
  Antisense strand to SEQ ID NO: 111588
ucuucaaugagccauuaac

SEQ ID NO: 111590 - RNA, 19 nt, Artificial Sequence
  Description of Artificial Sequence: Synthetic oligonucleotide
  Sense strand starting at position 3049 of SEQ ID NO: 1419
uuguuaauggcucauugaa

SEQ ID NO: 111591 - RNA, 19 nt, Artificial Sequence
  Description of Artificial Sequence: Synthetic oligonucleotide
  Antisense strand to SEQ ID NO: 111590
uucaaugagccauuaacaa

SEQ ID NO: 111592 - RNA, 19 nt, Artificial Sequence
  Description of Artificial Sequence: Synthetic oligonucleotide
  Sense strand starting at position 3044 of SEQ ID NO: 1419
gcaauuuguuaauggcuca

SEQ ID NO: 111593 - RNA, 19 nt, Artificial Sequence
  Description of Artificial Sequence: Synthetic oligonucleotide
  Antisense strand to SEQ ID NO: 111592
ugagccauuaacaaauugc

SEQ ID NO: 111594 - RNA, 19 nt, Artificial Sequence
  Description of Artificial Sequence: Synthetic oligonucleotide
  Sense strand starting at position 3031 of SEQ ID NO: 1419
gucaguacuggaggcaauu

SEQ ID NO: 111595 - RNA, 19 nt, Artificial Sequence
  Description of Artificial Sequence: Synthetic oligonucleotide
  Antisense strand to SEQ ID NO: 111594
aauugccuccaguacugac

SEQ ID NO: 111596 - RNA, 19 nt, Artificial Sequence
  Description of Artificial Sequence: Synthetic oligonucleotide
  Sense strand starting at position 3024 of SEQ ID NO: 1419
cauuguggucaguacugga

SEQ ID NO: 111597 - RNA, 19 nt, Artificial Sequence
  Description of Artificial Sequence: Synthetic oligonucleotide
  Antisense strand to SEQ ID NO: 111596
uccaguacugaccacaaug

SEQ ID NO: 111598 - RNA, 19 nt, Artificial Sequence
  Description of Artificial Sequence: Synthetic oligonucleotide
  Sense strand starting at position 3021 of SEQ ID NO: 1419
ugacauuguggucaguacu

SEQ ID NO: 111599 - RNA, 19 nt, Artificial Sequence
  Description of Artificial Sequence: Synthetic oligonucleotide
  Antisense strand to SEQ ID NO: 111598
aguacugaccacaauguca

SEQ ID NO: 111600 - RNA, 19 nt, Artificial Sequence
  Description of Artificial Sequence: Synthetic oligonucleotide
  Sense strand starting at position 3020 of SEQ ID NO: 1419
uugacauuguggucaguac

SEQ ID NO: 111601 - RNA, 19 nt, Artificial Sequence
  Description of Artificial Sequence: Synthetic oligonucleotide
  Antisense strand to SEQ ID NO: 111600
guacugaccacaaugucaa

SEQ ID NO: 111602 - RNA, 19 nt, Artificial Sequence
  Description of Artificial Sequence: Synthetic oligonucleotide
  Sense strand starting at position 3009 of SEQ ID NO: 1419
cuacauccagguugacauu

SEQ ID NO: 111603 - RNA, 19 nt, Artificial Sequence
  Description of Artificial Sequence: Synthetic oligonucleotide
  Antisense strand to SEQ ID NO: 111602
aaugucaaccuggauguag

SEQ ID NO: 111604 - RNA, 19 nt, Artificial Sequence
  Description of Artificial Sequence: Synthetic oligonucleotide
  Sense strand starting at position 2989 of SEQ ID NO: 1419
ggcugagacaguugauaau

SEQ ID NO: 111605 - RNA, 19 nt, Artificial Sequence
  Description of Artificial Sequence: Synthetic oligonucleotide
  Antisense strand to SEQ ID NO: 111604
auuaucaacugucucagcc

SEQ ID NO: 111606 - RNA, 19 nt, Artificial Sequence
  Description of Artificial Sequence: Synthetic oligonucleotide
  Sense strand starting at position 2918 of SEQ ID NO: 1419
ggcaguuguagacaacuca

SEQ ID NO: 111607 - RNA, 19 nt, Artificial Sequence
  Description of Artificial Sequence: Synthetic oligonucleotide
  Antisense strand to SEQ ID NO: 111606
ugaguugucuacaacugcc

SEQ ID NO: 111608 - RNA, 19 nt, Artificial Sequence
  Description of Artificial Sequence: Synthetic oligonucleotide
  Sense strand starting at position 2892 of SEQ ID NO: 1419
agugcuugucuguugggua

SEQ ID NO: 111609 - RNA, 19 nt, Artificial Sequence
  Description of Artificial Sequence: Synthetic oligonucleotide
  Antisense strand to SEQ ID NO: 111608
uacccaacagacaagcacu

SEQ ID NO: 111610 - RNA, 19 nt, Artificial Sequence
  Description of Artificial Sequence: Synthetic oligonucleotide
  Sense strand starting at position 2887 of SEQ ID NO: 1419
gcuggagugcuugucuguu

SEQ ID NO: 111611 - RNA, 19 nt, Artificial Sequence
  Description of Artificial Sequence: Synthetic oligonucleotide
  Antisense strand to SEQ ID NO: 111610
aacagacaagcacuccagc

SEQ ID NO: 111612 - RNA, 19 nt, Artificial Sequence
  Description of Artificial Sequence: Synthetic oligonucleotide
  Sense strand starting at position 2830 of SEQ ID NO: 1419
ugcuuuccagucugaacau

SEQ ID NO: 111613 - RNA, 19 nt, Artificial Sequence
  Description of Artificial Sequence: Synthetic oligonucleotide
  Antisense strand to SEQ ID NO: 111612
auguucagacuggaaagca

SEQ ID NO: 111614 - RNA, 19 nt, Artificial Sequence
  Description of Artificial Sequence: Synthetic oligonucleotide
  Sense strand starting at position 2455 of SEQ ID NO: 1419
gagggcucucugcacacau

SEQ ID NO: 111615 - RNA, 19 nt, Artificial Sequence
  Description of Artificial Sequence: Synthetic oligonucleotide
  Antisense strand to SEQ ID NO: 111614
augugugcagagagcccuc

SEQ ID NO: 111616 - RNA, 19 nt, Artificial Sequence
  Description of Artificial Sequence: Synthetic oligonucleotide
  Sense strand starting at position 2418 of SEQ ID NO: 1419
aguagagaauccugcauac

SEQ ID NO: 111617 - RNA, 19 nt, Artificial Sequence
  Description of Artificial Sequence: Synthetic oligonucleotide
  Antisense strand to SEQ ID NO: 111616
guaugcaggauucucuacu

SEQ ID NO: 111618 - RNA, 19 nt, Artificial Sequence
  Description of Artificial Sequence: Synthetic oligonucleotide
  Sense strand starting at position 2242 of SEQ ID NO: 1419
ggguaagcuuaaucuugca

SEQ ID NO: 111619 - RNA, 19 nt, Artificial Sequence
  Description of Artificial Sequence: Synthetic oligonucleotide
  Antisense strand to SEQ ID NO: 111618
ugcaagauuaagcuuaccc

SEQ ID NO: 111620 - RNA, 19 nt, Artificial Sequence
  Description of Artificial Sequence: Synthetic oligonucleotide
  Sense strand starting at position 2236 of SEQ ID NO: 1419
agagaaggguaagcuuaau

SEQ ID NO: 111621 - RNA, 19 nt, Artificial Sequence
  Description of Artificial Sequence: Synthetic oligonucleotide
  Antisense strand to SEQ ID NO: 111620
auuaagcuuacccuucucu

SEQ ID NO: 111622 - RNA, 19 nt, Artificial Sequence
  Description of Artificial Sequence: Synthetic oligonucleotide
  Sense strand starting at position 2201 of SEQ ID NO: 1419
ggacaacugcuaugggaag

SEQ ID NO: 111623 - RNA, 19 nt, Artificial Sequence
  Description of Artificial Sequence: Synthetic oligonucleotide
  Antisense strand to SEQ ID NO: 111622
cuucccauagcaguugucc

SEQ ID NO: 111624 - RNA, 19 nt, Artificial Sequence
  Description of Artificial Sequence: Synthetic oligonucleotide
  Sense strand starting at position 2180 of SEQ ID NO: 1419
ucuauuugguucuaaggaa

SEQ ID NO: 111625 - RNA, 19 nt, Artificial Sequence
  Description of Artificial Sequence: Synthetic oligonucleotide
  Antisense strand to SEQ ID NO: 111624
uuccuuagaaccaaauaga

SEQ ID NO: 111626 - RNA, 19 nt, Artificial Sequence
  Description of Artificial Sequence: Synthetic oligonucleotide
  Sense strand starting at position 2103 of SEQ ID NO: 1419
gaugguggguggcuauuaa

SEQ ID NO: 111627 - RNA, 19 nt, Artificial Sequence
  Description of Artificial Sequence: Synthetic oligonucleotide
  Antisense strand to SEQ ID NO: 111626
uuaauagccacccaccauc

SEQ ID NO: 111628 - RNA, 19 nt, Artificial Sequence
  Description of Artificial Sequence: Synthetic oligonucleotide
  Sense strand starting at position 2086 of SEQ ID NO: 1419
uuguaaucuggaugucaga

SEQ ID NO: 111629 - RNA, 19 nt, Artificial Sequence
  Description of Artificial Sequence: Synthetic oligonucleotide
  Antisense strand to SEQ ID NO: 111628
ucugacauccagauuacaa

SEQ ID NO: 111630 - RNA, 19 nt, Artificial Sequence
  Description of Artificial Sequence: Synthetic oligonucleotide
  Sense strand starting at position 2084 of SEQ ID NO: 1419
uauuguaaucuggauguca

SEQ ID NO: 111631 - RNA, 19 nt, Artificial Sequence
  Description of Artificial Sequence: Synthetic oligonucleotide
  Antisense strand to SEQ ID NO: 111630
ugacauccagauuacaaua

SEQ ID NO: 111632 - RNA, 19 nt, Artificial Sequence
  Description of Artificial Sequence: Synthetic oligonucleotide
  Sense strand starting at position 2037 of SEQ ID NO: 1419
guuuguuucuuccuauauc

SEQ ID NO: 111633 - RNA, 19 nt, Artificial Sequence
  Description of Artificial Sequence: Synthetic oligonucleotide
  Antisense strand to SEQ ID NO: 111632
gauauaggaagaaacaaac

SEQ ID NO: 111634 - RNA, 19 nt, Artificial Sequence
  Description of Artificial Sequence: Synthetic oligonucleotide
  Sense strand starting at position 2034 of SEQ ID NO: 1419
ugaguuuguuucuuccuau

SEQ ID NO: 111635 - RNA, 19 nt, Artificial Sequence
  Description of Artificial Sequence: Synthetic oligonucleotide
  Antisense strand to SEQ ID NO: 111634
auaggaagaaacaaacuca

SEQ ID NO: 111636 - RNA, 19 nt, Artificial Sequence
  Description of Artificial Sequence: Synthetic oligonucleotide
  Sense strand starting at position 2033 of SEQ ID NO: 1419
cugaguuuguuucuuccua

SEQ ID NO: 111637 - RNA, 19 nt, Artificial Sequence
  Description of Artificial Sequence: Synthetic oligonucleotide
  Antisense strand to SEQ ID NO: 111636
uaggaagaaacaaacucag

SEQ ID NO: 111638 - RNA, 19 nt, Artificial Sequence
  Description of Artificial Sequence: Synthetic oligonucleotide
  Sense strand starting at position 2029 of SEQ ID NO: 1419
gaaacugaguuuguuucuu

SEQ ID NO: 111639 - RNA, 19 nt, Artificial Sequence
  Description of Artificial Sequence: Synthetic oligonucleotide
  Antisense strand to SEQ ID NO: 111638
aagaaacaaacucaguuuc

SEQ ID NO: 111640 - RNA, 19 nt, Artificial Sequence
  Description of Artificial Sequence: Synthetic oligonucleotide
  Sense strand starting at position 2001 of SEQ ID NO: 1419
gaaguauguugugacagua

SEQ ID NO: 111641 - RNA, 19 nt, Artificial Sequence
  Description of Artificial Sequence: Synthetic oligonucleotide
  Antisense strand to SEQ ID NO: 111640
uacugucacaacauacuuc

SEQ ID NO: 111642 - RNA, 19 nt, Artificial Sequence
  Description of Artificial Sequence: Synthetic oligonucleotide
  Sense strand starting at position 1998 of SEQ ID NO: 1419
auagaaguauguugugaca

SEQ ID NO: 111643 - RNA, 19 nt, Artificial Sequence
  Description of Artificial Sequence: Synthetic oligonucleotide
  Antisense strand to SEQ ID NO: 111642
ugucacaacauacuucuau

SEQ ID NO: 111644 - RNA, 19 nt, Artificial Sequence
  Description of Artificial Sequence: Synthetic oligonucleotide
  Sense strand starting at position 3959 of SEQ ID NO: 1420
ggaacugaauaauaauaga

SEQ ID NO: 111645 - RNA, 19 nt, Artificial Sequence
  Description of Artificial Sequence: Synthetic oligonucleotide
  Antisense strand to SEQ ID NO: 111644
ucuauuauuauucaguucc

SEQ ID NO: 111646 - RNA, 19 nt, Artificial Sequence
  Description of Artificial Sequence: Synthetic oligonucleotide
  Sense strand starting at position 3936 of SEQ ID NO: 1420
guagacagccaauaauuau

SEQ ID NO: 111647 - RNA, 19 nt, Artificial Sequence
  Description of Artificial Sequence: Synthetic oligonucleotide
  Antisense strand to SEQ ID NO: 111646
auaauuauuggcugucuac

SEQ ID NO: 111648 - RNA, 19 nt, Artificial Sequence
  Description of Artificial Sequence: Synthetic oligonucleotide
  Sense strand starting at position 3850 of SEQ ID NO: 1420
auaacacauuguuuguaga

SEQ ID NO: 111649 - RNA, 19 nt, Artificial Sequence
  Description of Artificial Sequence: Synthetic oligonucleotide
  Antisense strand to SEQ ID NO: 111648
ucuacaaacaauguguuau

SEQ ID NO: 111650 - RNA, 19 nt, Artificial Sequence
  Description of Artificial Sequence: Synthetic oligonucleotide
  Sense strand starting at position 3799 of SEQ ID NO: 1420
guuugagucuaacuggacu

SEQ ID NO: 111651 - RNA, 19 nt, Artificial Sequence
  Description of Artificial Sequence: Synthetic oligonucleotide
  Antisense strand to SEQ ID NO: 111650
aguccaguuagacucaaac

SEQ ID NO: 111652 - RNA, 19 nt, Artificial Sequence
  Description of Artificial Sequence: Synthetic oligonucleotide
  Sense strand starting at position 3793 of SEQ ID NO: 1420
agauuaguuugagucuaac

SEQ ID NO: 111653 - RNA, 19 nt, Artificial Sequence
  Description of Artificial Sequence: Synthetic oligonucleotide
  Antisense strand to SEQ ID NO: 111652
guuagacucaaacuaaucu

SEQ ID NO: 111654 - RNA, 19 nt, Artificial Sequence
  Description of Artificial Sequence: Synthetic oligonucleotide
  Sense strand starting at position 3707 of SEQ ID NO: 1420
gcaagaccuuaaguaacua

SEQ ID NO: 111655 - RNA, 19 nt, Artificial Sequence
  Description of Artificial Sequence: Synthetic oligonucleotide
  Antisense strand to SEQ ID NO: 111654
uaguuacuuaaggucuugc

SEQ ID NO: 111656 - RNA, 19 nt, Artificial Sequence
  Description of Artificial Sequence: Synthetic oligonucleotide
  Sense strand starting at position 3623 of SEQ ID NO: 1420
ugacucuuugaaugucaaa

SEQ ID NO: 111657 - RNA, 19 nt, Artificial Sequence
  Description of Artificial Sequence: Synthetic oligonucleotide
  Antisense strand to SEQ ID NO: 111656
uuugacauucaaagaguca

SEQ ID NO: 111658 - RNA, 19 nt, Artificial Sequence
  Description of Artificial Sequence: Synthetic oligonucleotide
  Sense strand starting at position 3618 of SEQ ID NO: 1420
auguuugacucuuugaaug

SEQ ID NO: 111659 - RNA, 19 nt, Artificial Sequence
  Description of Artificial Sequence: Synthetic oligonucleotide
  Antisense strand to SEQ ID NO: 111658
cauucaaagagucaaacau

SEQ ID NO: 111660 - RNA, 19 nt, Artificial Sequence
  Description of Artificial Sequence: Synthetic oligonucleotide
  Sense strand starting at position 3600 of SEQ ID NO: 1420
augaaagucuaaucaggca

SEQ ID NO: 111661 - RNA, 19 nt, Artificial Sequence
  Description of Artificial Sequence: Synthetic oligonucleotide
  Antisense strand to SEQ ID NO: 111660
ugccugauuagacuuucau

SEQ ID NO: 111662 - RNA, 19 nt, Artificial Sequence
  Description of Artificial Sequence: Synthetic oligonucleotide
  Sense strand starting at position 3413 of SEQ ID NO: 1420
ugaaauuacuggucaagau

SEQ ID NO: 111663 - RNA, 19 nt, Artificial Sequence
  Description of Artificial Sequence: Synthetic oligonucleotide
  Antisense strand to SEQ ID NO: 111662
aucuugaccaguaauuuca

SEQ ID NO: 111664 - RNA, 19 nt, Artificial Sequence
  Description of Artificial Sequence: Synthetic oligonucleotide
  Sense strand starting at position 3411 of SEQ ID NO: 1420
gcugaaauuacuggucaag

SEQ ID NO: 111665 - RNA, 19 nt, Artificial Sequence
  Description of Artificial Sequence: Synthetic oligonucleotide
  Antisense strand to SEQ ID NO: 111664
cuugaccaguaauuucagc

SEQ ID NO: 111666 - RNA, 19 nt, Artificial Sequence
  Description of Artificial Sequence: Synthetic oligonucleotide
  Sense strand starting at position 3301 of SEQ ID NO: 1420
augacagauuucuacaaga

SEQ ID NO: 111667 - RNA, 19 nt, Artificial Sequence
  Description of Artificial Sequence: Synthetic oligonucleotide
  Antisense strand to SEQ ID NO: 111666
ucuuguagaaaucugucau

SEQ ID NO: 111668 - RNA, 19 nt, Artificial Sequence
  Description of Artificial Sequence: Synthetic oligonucleotide
  Sense strand starting at position 3188 of SEQ ID NO: 1420
cgacuugcagaccaaacau

SEQ ID NO: 111669 - RNA, 19 nt, Artificial Sequence
  Description of Artificial Sequence: Synthetic oligonucleotide
  Antisense strand to SEQ ID NO: 111668
auguuuggucugcaagucg

SEQ ID NO: 111670 - RNA, 19 nt, Artificial Sequence
  Description of Artificial Sequence: Synthetic oligonucleotide
  Sense strand starting at position 3117 of SEQ ID NO: 1420
gggucagauucucuguuga

SEQ ID NO: 111671 - RNA, 19 nt, Artificial Sequence
  Description of Artificial Sequence: Synthetic oligonucleotide
  Antisense strand to SEQ ID NO: 111670
ucaacagagaaucugaccc

SEQ ID NO: 111672 - RNA, 19 nt, Artificial Sequence
  Description of Artificial Sequence: Synthetic oligonucleotide
  Sense strand starting at position 3095 of SEQ ID NO: 1420
aucugagauuccuuagacc

SEQ ID NO: 111673 - RNA, 19 nt, Artificial Sequence
  Description of Artificial Sequence: Synthetic oligonucleotide
  Antisense strand to SEQ ID NO: 111672
ggucuaaggaaucucagau

SEQ ID NO: 111674 - RNA, 19 nt, Artificial Sequence
  Description of Artificial Sequence: Synthetic oligonucleotide
  Sense strand starting at position 2966 of SEQ ID NO: 1420
ggaguucgugaccaaguau

SEQ ID NO: 111675 - RNA, 19 nt, Artificial Sequence
  Description of Artificial Sequence: Synthetic oligonucleotide
  Antisense strand to SEQ ID NO: 111674
auacuuggucacgaacucc

SEQ ID NO: 111676 - RNA, 19 nt, Artificial Sequence
  Description of Artificial Sequence: Synthetic oligonucleotide
  Sense strand starting at position 2963 of SEQ ID NO: 1420
ggaggaguucgugaccaag

SEQ ID NO: 111677 - RNA, 19 nt, Artificial Sequence
  Description of Artificial Sequence: Synthetic oligonucleotide
  Antisense strand to SEQ ID NO: 111676
cuuggucacgaacuccucc

SEQ ID NO: 111678 - RNA, 19 nt, Artificial Sequence
  Description of Artificial Sequence: Synthetic oligonucleotide
  Sense strand starting at position 2933 of SEQ ID NO: 1420
ggugcaagauaugcaaaua

SEQ ID NO: 111679 - RNA, 19 nt, Artificial Sequence
  Description of Artificial Sequence: Synthetic oligonucleotide
  Antisense strand to SEQ ID NO: 111678
uauuugcauaucuugcacc

SEQ ID NO: 111680 - RNA, 19 nt, Artificial Sequence
  Description of Artificial Sequence: Synthetic oligonucleotide
  Sense strand starting at position 2925 of SEQ ID NO: 1420
uucugaacggugcaagaua

SEQ ID NO: 111681 - RNA, 19 nt, Artificial Sequence
  Description of Artificial Sequence: Synthetic oligonucleotide
  Antisense strand to SEQ ID NO: 111680
uaucuugcaccguucagaa

SEQ ID NO: 111682 - RNA, 19 nt, Artificial Sequence
  Description of Artificial Sequence: Synthetic oligonucleotide
  Sense strand starting at position 2907 of SEQ ID NO: 1420
guguccuauguguucaguu

SEQ ID NO: 111683 - RNA, 19 nt, Artificial Sequence
  Description of Artificial Sequence: Synthetic oligonucleotide
  Antisense strand to SEQ ID NO: 111682
aacugaacacauaggacac

SEQ ID NO: 111684 - RNA, 19 nt, Artificial Sequence
  Description of Artificial Sequence: Synthetic oligonucleotide
  Sense strand starting at position 2882 of SEQ ID NO: 1420
gcagauaucggguaaugga

SEQ ID NO: 111685 - RNA, 19 nt, Artificial Sequence
  Description of Artificial Sequence: Synthetic oligonucleotide
  Antisense strand to SEQ ID NO: 111684
uccauuacccgauaucugc

SEQ ID NO: 111686 - RNA, 19 nt, Artificial Sequence
  Description of Artificial Sequence: Synthetic oligonucleotide
  Sense strand starting at position 2870 of SEQ ID NO: 1420
aucuccaucuuggcagaua

SEQ ID NO: 111687 - RNA, 19 nt, Artificial Sequence
  Description of Artificial Sequence: Synthetic oligonucleotide
  Antisense strand to SEQ ID NO: 111686
uaucugccaagauggagau

SEQ ID NO: 111688 - RNA, 19 nt, Artificial Sequence
  Description of Artificial Sequence: Synthetic oligonucleotide
  Sense strand starting at position 2789 of SEQ ID NO: 1420
gcucaauuugccuauugcu

SEQ ID NO: 111689 - RNA, 19 nt, Artificial Sequence
  Description of Artificial Sequence: Synthetic oligonucleotide
  Antisense strand to SEQ ID NO: 111688
agcaauaggcaaauugagc

SEQ ID NO: 111690 - RNA, 19 nt, Artificial Sequence
  Description of Artificial Sequence: Synthetic oligonucleotide
  Sense strand starting at position 2765 of SEQ ID NO: 1420
guucccaucuuaguaaaug

SEQ ID NO: 111691 - RNA, 19 nt, Artificial Sequence
  Description of Artificial Sequence: Synthetic oligonucleotide
  Antisense strand to SEQ ID NO: 111690
cauuuacuaagaugggaac

SEQ ID NO: 111692 - RNA, 19 nt, Artificial Sequence
  Description of Artificial Sequence: Synthetic oligonucleotide
  Sense strand starting at position 2692 of SEQ ID NO: 1420
uuauauucuugacugucua

SEQ ID NO: 111693 - RNA, 19 nt, Artificial Sequence
  Description of Artificial Sequence: Synthetic oligonucleotide
  Antisense strand to SEQ ID NO: 111692
uagacagucaagaauauaa

SEQ ID NO: 111694 - RNA, 19 nt, Artificial Sequence
  Description of Artificial Sequence: Synthetic oligonucleotide
  Sense strand starting at position 2454 of SEQ ID NO: 1420
agucuugucccagauaucc

SEQ ID NO: 111695 - RNA, 19 nt, Artificial Sequence
  Description of Artificial Sequence: Synthetic oligonucleotide
  Antisense strand to SEQ ID NO: 111694
ggauaucugggacaagacu

SEQ ID NO: 111696 - RNA, 19 nt, Artificial Sequence
  Description of Artificial Sequence: Synthetic oligonucleotide
  Sense strand starting at position 1370 of SEQ ID NO: 1420
gaguuacccucccuaagag

SEQ ID NO: 111697 - RNA, 19 nt, Artificial Sequence
  Description of Artificial Sequence: Synthetic oligonucleotide
  Antisense strand to SEQ ID NO: 111696
cucuuagggaggguaacuc

SEQ ID NO: 111698 - RNA, 19 nt, Artificial Sequence
  Description of Artificial Sequence: Synthetic oligonucleotide
  Sense strand starting at position 1292 of SEQ ID NO: 1420
ggcaauaccgcucaaacuu

SEQ ID NO: 111699 - RNA, 19 nt, Artificial Sequence
  Description of Artificial Sequence: Synthetic oligonucleotide
  Antisense strand to SEQ ID NO: 111698
aaguuugagcgguauugcc

SEQ ID NO: 111700 - RNA, 19 nt, Artificial Sequence
  Description of Artificial Sequence: Synthetic oligonucleotide
  Sense strand starting at position 1241 of SEQ ID NO: 1420
guccuaggcggguaaggau

SEQ ID NO: 111701 - RNA, 19 nt, Artificial Sequence
  Description of Artificial Sequence: Synthetic oligonucleotide
  Antisense strand to SEQ ID NO: 111700
auccuuacccgccuaggac

SEQ ID NO: 111702 - RNA, 19 nt, Artificial Sequence
  Description of Artificial Sequence: Synthetic oligonucleotide
  Sense strand starting at position 963 of SEQ ID NO: 1420
ugcagaggagucuggcaaa

SEQ ID NO: 111703 - RNA, 19 nt, Artificial Sequence
  Description of Artificial Sequence: Synthetic oligonucleotide
  Antisense strand to SEQ ID NO: 111702
uuugccagacuccucugca

SEQ ID NO: 111704 - RNA, 19 nt, Artificial Sequence
  Description of Artificial Sequence: Synthetic oligonucleotide
  Sense strand starting at position 882 of SEQ ID NO: 1420
cuacuagaugcugaaacuu

SEQ ID NO: 111705 - RNA, 19 nt, Artificial Sequence
  Description of Artificial Sequence: Synthetic oligonucleotide
  Antisense strand to SEQ ID NO: 111704
aaguuucagcaucuaguag

SEQ ID NO: 111706 - RNA, 19 nt, Artificial Sequence
  Description of Artificial Sequence: Synthetic oligonucleotide
  Sense strand starting at position 871 of SEQ ID NO: 1420
gcaacaguucccuacuaga

SEQ ID NO: 111707 - RNA, 19 nt, Artificial Sequence
  Description of Artificial Sequence: Synthetic oligonucleotide
  Antisense strand to SEQ ID NO: 111706
ucuaguagggaacuguugc

SEQ ID NO: 111708 - RNA, 19 nt, Artificial Sequence
  Description of Artificial Sequence: Synthetic oligonucleotide
  Sense strand starting at position 617 of SEQ ID NO: 1420
ggucaaguggcuugaagga

SEQ ID NO: 111709 - RNA, 19 nt, Artificial Sequence
  Description of Artificial Sequence: Synthetic oligonucleotide
  Antisense strand to SEQ ID NO: 111708
uccuucaagccacuugacc

SEQ ID NO: 111710 - RNA, 19 nt, Artificial Sequence
  Description of Artificial Sequence: Synthetic oligonucleotide
  Sense strand starting at position 533 of SEQ ID NO: 1420
gccuacuuagagggacaau

SEQ ID NO: 111711 - RNA, 19 nt, Artificial Sequence
  Description of Artificial Sequence: Synthetic oligonucleotide
  Antisense strand to SEQ ID NO: 111710
auugucccucuaaguaggc

SEQ ID NO: 111712 - RNA, 19 nt, Artificial Sequence
  Description of Artificial Sequence: Synthetic oligonucleotide
  Sense strand starting at position 409 of SEQ ID NO: 1420
auggaauaauccuuucgug

SEQ ID NO: 111713 - RNA, 19 nt, Artificial Sequence
  Description of Artificial Sequence: Synthetic oligonucleotide
  Antisense strand to SEQ ID NO: 111712
cacgaaaggauuauuccau

SEQ ID NO: 111714 - RNA, 19 nt, Artificial Sequence
  Description of Artificial Sequence: Synthetic oligonucleotide
  Sense strand starting at position 358 of SEQ ID NO: 1420
gcacaugucagauacucga

SEQ ID NO: 111715 - RNA, 19 nt, Artificial Sequence
  Description of Artificial Sequence: Synthetic oligonucleotide
  Antisense strand to SEQ ID NO: 111714
ucgaguaucugacaugugc

SEQ ID NO: 111716 - RNA, 19 nt, Artificial Sequence
  Description of Artificial Sequence: Synthetic oligonucleotide
  Sense strand starting at position 311 of SEQ ID NO: 1420
ccauauacaugagaaagaa

SEQ ID NO: 111717 - RNA, 19 nt, Artificial Sequence
  Description of Artificial Sequence: Synthetic oligonucleotide
  Antisense strand to SEQ ID NO: 111716
uucuuucucauguauaugg

SEQ ID NO: 111718 - RNA, 19 nt, Artificial Sequence
  Description of Artificial Sequence: Synthetic oligonucleotide
  Sense strand starting at position 251 of SEQ ID NO: 1420
gcaaauauggcugggauaa

SEQ ID NO: 111719 - RNA, 19 nt, Artificial Sequence
  Description of Artificial Sequence: Synthetic oligonucleotide
  Antisense strand to SEQ ID NO: 111718
uuaucccagccauauuugc

SEQ ID NO: 111720 - RNA, 19 nt, Artificial Sequence
  Description of Artificial Sequence: Synthetic oligonucleotide
  Sense strand starting at position 250 of SEQ ID NO: 1420
agcaaauauggcugggaua

SEQ ID NO: 111721 - RNA, 19 nt, Artificial Sequence
  Description of Artificial Sequence: Synthetic oligonucleotide
  Antisense strand to SEQ ID NO: 111720
uaucccagccauauuugcu

SEQ ID NO: 111722 - RNA, 19 nt, Artificial Sequence
  Description of Artificial Sequence: Synthetic oligonucleotide
  Sense strand starting at position 133 of SEQ ID NO: 1420
agauaagaucuuggcugca

SEQ ID NO: 111723 - RNA, 19 nt, Artificial Sequence
  Description of Artificial Sequence: Synthetic oligonucleotide
  Antisense strand to SEQ ID NO: 111722
ugcagccaagaucuuaucu

SEQ ID NO: 111724 - RNA, 19 nt, Artificial Sequence
  Description of Artificial Sequence: Synthetic oligonucleotide
  Sense strand starting at position 1479 of SEQ ID NO: 1421
uguccaaacucuugggaac

SEQ ID NO: 111725 - RNA, 19 nt, Artificial Sequence
  Description of Artificial Sequence: Synthetic oligonucleotide
  Antisense strand to SEQ ID NO: 111724
guucccaagaguuuggaca

SEQ ID NO: 111726 - RNA, 19 nt, Artificial Sequence
  Description of Artificial Sequence: Synthetic oligonucleotide
  Sense strand starting at position 1930 of SEQ ID NO: 1421
aacuuucucgggugugcaa

SEQ ID NO: 111727 - RNA, 19 nt, Artificial Sequence
  Description of Artificial Sequence: Synthetic oligonucleotide
  Antisense strand to SEQ ID NO: 111726
uugcacacccgagaaaguu

SEQ ID NO: 111728 - RNA, 19 nt, Artificial Sequence
  Description of Artificial Sequence: Synthetic oligonucleotide
  Sense strand starting at position 3470 of SEQ ID NO: 1421
aggaaugaauccgagacaa

SEQ ID NO: 111729 - RNA, 19 nt, Artificial Sequence
  Description of Artificial Sequence: Synthetic oligonucleotide
  Antisense strand to SEQ ID NO: 111728
uugucucggauucauuccu

SEQ ID NO: 111730 - RNA, 19 nt, Artificial Sequence
  Description of Artificial Sequence: Synthetic oligonucleotide
  Sense strand starting at position 3480 of SEQ ID NO: 1421
ccgagacaauguuaaagaa

SEQ ID NO: 111731 - RNA, 19 nt, Artificial Sequence
  Description of Artificial Sequence: Synthetic oligonucleotide
  Antisense strand to SEQ ID NO: 111730
uucuuuaacauugucucgg

SEQ ID NO: 111732 - RNA, 19 nt, Artificial Sequence
  Description of Artificial Sequence: Synthetic oligonucleotide
  Sense strand starting at position 3548 of SEQ ID NO: 1421
uccuguugggaugggaaau

SEQ ID NO: 111733 - RNA, 19 nt, Artificial Sequence
  Description of Artificial Sequence: Synthetic oligonucleotide
  Antisense strand to SEQ ID NO: 111732
auuucccaucccaacagga

SEQ ID NO: 111734 - RNA, 19 nt, Artificial Sequence
  Description of Artificial Sequence: Synthetic oligonucleotide
  Sense strand starting at position 3701 of SEQ ID NO: 1421
aguauugacuaacuugaga

SEQ ID NO: 111735 - RNA, 19 nt, Artificial Sequence
  Description of Artificial Sequence: Synthetic oligonucleotide
  Antisense strand to SEQ ID NO: 111734
ucucaaguuagucaauacu

SEQ ID NO: 111736 - RNA, 19 nt, Artificial Sequence
  Description of Artificial Sequence: Synthetic oligonucleotide
  Sense strand starting at position 3146 of SEQ ID NO: 1422
gacauaucauuccgggaaa

SEQ ID NO: 111737 - RNA, 19 nt, Artificial Sequence
  Description of Artificial Sequence: Synthetic oligonucleotide
  Antisense strand to SEQ ID NO: 111736
uuucccggaaugauauguc

SEQ ID NO: 111738 - RNA, 19 nt, Artificial Sequence
  Description of Artificial Sequence: Synthetic oligonucleotide
  Sense strand starting at position 3147 of SEQ ID NO: 1422
acauaucauuccgggaaag

SEQ ID NO: 111739 - RNA, 19 nt, Artificial Sequence
  Description of Artificial Sequence: Synthetic oligonucleotide
  Antisense strand to SEQ ID NO: 111738
cuuucccggaaugauaugu

SEQ ID NO: 111740 - RNA, 19 nt, Artificial Sequence
  Description of Artificial Sequence: Synthetic oligonucleotide
  Sense strand starting at position 3148 of SEQ ID NO: 1422
cauaucauuccgggaaaga

SEQ ID NO: 111741 - RNA, 19 nt, Artificial Sequence
  Description of Artificial Sequence: Synthetic oligonucleotide
  Antisense strand to SEQ ID NO: 111740
ucuuucccggaaugauaug

SEQ ID NO: 111742 - RNA, 19 nt, Artificial Sequence
  Description of Artificial Sequence: Synthetic oligonucleotide
  Sense strand starting at position 39 of SEQ ID NO: 1423
cucacauucuaugguuacu

SEQ ID NO: 111743 - RNA, 19 nt, Artificial Sequence
  Description of Artificial Sequence: Synthetic oligonucleotide
  Antisense strand to SEQ ID NO: 111742
aguaaccauagaaugugag

SEQ ID NO: 111744 - RNA, 19 nt, Artificial Sequence
  Description of Artificial Sequence: Synthetic oligonucleotide
  Sense strand starting at position 42 of SEQ ID NO: 1423
acauucuaugguuacuauu

SEQ ID NO: 111745 - RNA, 19 nt, Artificial Sequence
  Description of Artificial Sequence: Synthetic oligonucleotide
  Antisense strand to SEQ ID NO: 111744
aauaguaaccauagaaugu

SEQ ID NO: 111746 - RNA, 19 nt, Artificial Sequence
  Description of Artificial Sequence: Synthetic oligonucleotide
  Sense strand starting at position 94 of SEQ ID NO: 1423
cgccaucuuacagaugaga

SEQ ID NO: 111747 - RNA, 19 nt, Artificial Sequence
  Description of Artificial Sequence: Synthetic oligonucleotide
  Antisense strand to SEQ ID NO: 111746
ucucaucuguaagauggcg

SEQ ID NO: 111748 - RNA, 19 nt, Artificial Sequence
  Description of Artificial Sequence: Synthetic oligonucleotide
  Sense strand starting at position 379 of SEQ ID NO: 1423
aaaugagagcugugaaauc

SEQ ID NO: 111749 - RNA, 19 nt, Artificial Sequence
  Description of Artificial Sequence: Synthetic oligonucleotide
  Antisense strand to SEQ ID NO: 111748
gauuucacagcucucauuu

SEQ ID NO: 111750 - RNA, 19 nt, Artificial Sequence
  Description of Artificial Sequence: Synthetic oligonucleotide
  Sense strand starting at position 399 of SEQ ID NO: 1423
ccuugagaucucugcuucu

SEQ ID NO: 111751 - RNA, 19 nt, Artificial Sequence
  Description of Artificial Sequence: Synthetic oligonucleotide
  Antisense strand to SEQ ID NO: 111750
agaagcagagaucucaagg

SEQ ID NO: 111752 - RNA, 19 nt, Artificial Sequence
  Description of Artificial Sequence: Synthetic oligonucleotide
  Sense strand starting at position 408 of SEQ ID NO: 1423
cucugcuucugcugaucua

SEQ ID NO: 111753 - RNA, 19 nt, Artificial Sequence
  Description of Artificial Sequence: Synthetic oligonucleotide
  Antisense strand to SEQ ID NO: 111752
uagaucagcagaagcagag

SEQ ID NO: 111754 - RNA, 19 nt, Artificial Sequence
  Description of Artificial Sequence: Synthetic oligonucleotide
  Sense strand starting at position 409 of SEQ ID NO: 1423
ucugcuucugcugaucuau

SEQ ID NO: 111755 - RNA, 19 nt, Artificial Sequence
  Description of Artificial Sequence: Synthetic oligonucleotide
  Antisense strand to SEQ ID NO: 111754
auagaucagcagaagcaga

SEQ ID NO: 111756 - RNA, 19 nt, Artificial Sequence
  Description of Artificial Sequence: Synthetic oligonucleotide
  Sense strand starting at position 431 of SEQ ID NO: 1423
gcaacuauuucccgagcac

SEQ ID NO: 111757 - RNA, 19 nt, Artificial Sequence
  Description of Artificial Sequence: Synthetic oligonucleotide
  Antisense strand to SEQ ID NO: 111756
gugcucgggaaauaguugc

SEQ ID NO: 111758 - RNA, 19 nt, Artificial Sequence
  Description of Artificial Sequence: Synthetic oligonucleotide
  Sense strand starting at position 443 of SEQ ID NO: 1423
cgagcacuuguguuccagu

SEQ ID NO: 111759 - RNA, 19 nt, Artificial Sequence
  Description of Artificial Sequence: Synthetic oligonucleotide
  Antisense strand to SEQ ID NO: 111758
acuggaacacaagugcucg

SEQ ID NO: 111760 - RNA, 19 nt, Artificial Sequence
  Description of Artificial Sequence: Synthetic oligonucleotide
  Sense strand starting at position 446 of SEQ ID NO: 1423
gcacuuguguuccagugca

SEQ ID NO: 111761 - RNA, 19 nt, Artificial Sequence
  Description of Artificial Sequence: Synthetic oligonucleotide
  Antisense strand to SEQ ID NO: 111760
ugcacuggaacacaagugc

SEQ ID NO: 111762 - RNA, 19 nt, Artificial Sequence
  Description of Artificial Sequence: Synthetic oligonucleotide
  Sense strand starting at position 451 of SEQ ID NO: 1423
uguguuccagugcauaaga

SEQ ID NO: 111763 - RNA, 19 nt, Artificial Sequence
  Description of Artificial Sequence: Synthetic oligonucleotide
  Antisense strand to SEQ ID NO: 111762
ucuuaugcacuggaacaca

SEQ ID NO: 111764 - RNA, 19 nt, Artificial Sequence
  Description of Artificial Sequence: Synthetic oligonucleotide
  Sense strand starting at position 462 of SEQ ID NO: 1423
gcauaagaaggcugucaaa

SEQ ID NO: 111765 - RNA, 19 nt, Artificial Sequence
  Description of Artificial Sequence: Synthetic oligonucleotide
  Antisense strand to SEQ ID NO: 111764
uuugacagccuucuuaugc

SEQ ID NO: 111766 - RNA, 19 nt, Artificial Sequence
  Description of Artificial Sequence: Synthetic oligonucleotide
  Sense strand starting at position 465 of SEQ ID NO: 1423
uaagaaggcugucaaaugu

SEQ ID NO: 111767 - RNA, 19 nt, Artificial Sequence
  Description of Artificial Sequence: Synthetic oligonucleotide
  Antisense strand to SEQ ID NO: 111766
acauuugacagccuucuua

SEQ ID NO: 111768 - RNA, 19 nt, Artificial Sequence
  Description of Artificial Sequence: Synthetic oligonucleotide
  Sense strand starting at position 474 of SEQ ID NO: 1423
ugucaaaugugcugucuuc

SEQ ID NO: 111769 - RNA, 19 nt, Artificial Sequence
  Description of Artificial Sequence: Synthetic oligonucleotide
  Antisense strand to SEQ ID NO: 111768
gaagacagcacauuugaca

SEQ ID NO: 111770 - RNA, 19 nt, Artificial Sequence
  Description of Artificial Sequence: Synthetic oligonucleotide
  Sense strand starting at position 648 of SEQ ID NO: 1423
auguguaaugccugagacc

SEQ ID NO: 111771 - RNA, 19 nt, Artificial Sequence
  Description of Artificial Sequence: Synthetic oligonucleotide
  Antisense strand to SEQ ID NO: 111770
ggucucaggcauuacacau

SEQ ID NO: 111772 - RNA, 19 nt, Artificial Sequence
  Description of Artificial Sequence: Synthetic oligonucleotide
  Sense strand starting at position 691 of SEQ ID NO: 1423
gaagcagaggucugauuaa

SEQ ID NO: 111773 - RNA, 19 nt, Artificial Sequence
  Description of Artificial Sequence: Synthetic oligonucleotide
  Antisense strand to SEQ ID NO: 111772
uuaaucagaccucugcuuc

SEQ ID NO: 111774 - RNA, 19 nt, Artificial Sequence
  Description of Artificial Sequence: Synthetic oligonucleotide
  Sense strand starting at position 706 of SEQ ID NO: 1423
uuaagcacugccuggaauu

SEQ ID NO: 111775 - RNA, 19 nt, Artificial Sequence
  Description of Artificial Sequence: Synthetic oligonucleotide
  Antisense strand to SEQ ID NO: 111774
aauuccaggcagugcuuaa

SEQ ID NO: 111776 - RNA, 19 nt, Artificial Sequence
  Description of Artificial Sequence: Synthetic oligonucleotide
  Sense strand starting at position 768 of SEQ ID NO: 1423
gagaaacggucuugaacac

SEQ ID NO: 111777 - RNA, 19 nt, Artificial Sequence
  Description of Artificial Sequence: Synthetic oligonucleotide
  Antisense strand to SEQ ID NO: 111776
guguucaagaccguuucuc

SEQ ID NO: 111778 - RNA, 19 nt, Artificial Sequence
  Description of Artificial Sequence: Synthetic oligonucleotide
  Sense strand starting at position 828 of SEQ ID NO: 1423
ggcacaaauuagcauacaa

SEQ ID NO: 111779 - RNA, 19 nt, Artificial Sequence
  Description of Artificial Sequence: Synthetic oligonucleotide
  Antisense strand to SEQ ID NO: 111778
uuguaugcuaauuugugcc

SEQ ID NO: 111780 - RNA, 19 nt, Artificial Sequence
  Description of Artificial Sequence: Synthetic oligonucleotide
  Sense strand starting at position 853 of SEQ ID NO: 1423
acaagugugaccuacggaa

SEQ ID NO: 111781 - RNA, 19 nt, Artificial Sequence
  Description of Artificial Sequence: Synthetic oligonucleotide
  Antisense strand to SEQ ID NO: 111780
uuccguaggucacacuugu

SEQ ID NO: 111782 - RNA, 19 nt, Artificial Sequence
  Description of Artificial Sequence: Synthetic oligonucleotide
  Sense strand starting at position 1040 of SEQ ID NO: 1423
gcggucuccuaagaaguua

SEQ ID NO: 111783 - RNA, 19 nt, Artificial Sequence
  Description of Artificial Sequence: Synthetic oligonucleotide
  Antisense strand to SEQ ID NO: 111782
uaacuucuuaggagaccgc

SEQ ID NO: 111784 - RNA, 19 nt, Artificial Sequence
  Description of Artificial Sequence: Synthetic oligonucleotide
  Sense strand starting at position 3301 of SEQ ID NO: 1423
ucagccucacuuugugauu

SEQ ID NO: 111785 - RNA, 19 nt, Artificial Sequence
  Description of Artificial Sequence: Synthetic oligonucleotide
  Antisense strand to SEQ ID NO: 111784
aaucacaaagugaggcuga

SEQ ID NO: 111786 - RNA, 19 nt, Artificial Sequence
  Description of Artificial Sequence: Synthetic oligonucleotide
  Sense strand starting at position 3344 of SEQ ID NO: 1423
ucuugcuuccugucgugau

SEQ ID NO: 111787 - RNA, 19 nt, Artificial Sequence
  Description of Artificial Sequence: Synthetic oligonucleotide
  Antisense strand to SEQ ID NO: 111786
aucacgacaggaagcaaga

SEQ ID NO: 111788 - RNA, 19 nt, Artificial Sequence
  Description of Artificial Sequence: Synthetic oligonucleotide
  Sense strand starting at position 3345 of SEQ ID NO: 1423
cuugcuuccugucgugaua

SEQ ID NO: 111789 - RNA, 19 nt, Artificial Sequence
  Description of Artificial Sequence: Synthetic oligonucleotide
  Antisense strand to SEQ ID NO: 111788
uaucacgacaggaagcaag

SEQ ID NO: 111790 - RNA, 19 nt, Artificial Sequence
  Description of Artificial Sequence: Synthetic oligonucleotide
  Sense strand starting at position 3508 of SEQ ID NO: 1423
uugucugcccuguguugaa

SEQ ID NO: 111791 - RNA, 19 nt, Artificial Sequence
  Description of Artificial Sequence: Synthetic oligonucleotide
  Antisense strand to SEQ ID NO: 111790
uucaacacagggcagacaa

SEQ ID NO: 111792 - RNA, 19 nt, Artificial Sequence
  Description of Artificial Sequence: Synthetic oligonucleotide
  Sense strand starting at position 3518 of SEQ ID NO: 1423
uguguugaacuguguccaa

SEQ ID NO: 111793 - RNA, 19 nt, Artificial Sequence
  Description of Artificial Sequence: Synthetic oligonucleotide
  Antisense strand to SEQ ID NO: 111792
uuggacacaguucaacaca

SEQ ID NO: 111794 - RNA, 19 nt, Artificial Sequence
  Description of Artificial Sequence: Synthetic oligonucleotide
  Sense strand starting at position 3570 of SEQ ID NO: 1423
gugggcuauuagcauuuau

SEQ ID NO: 111795 - RNA, 19 nt, Artificial Sequence
  Description of Artificial Sequence: Synthetic oligonucleotide
  Antisense strand to SEQ ID NO: 111794
auaaaugcuaauagcccac

SEQ ID NO: 111796 - RNA, 19 nt, Artificial Sequence
  Description of Artificial Sequence: Synthetic oligonucleotide
  Sense strand starting at position 61 of SEQ ID NO: 1424
gaguguggugcuaggugaa

SEQ ID NO: 111797 - RNA, 19 nt, Artificial Sequence
  Description of Artificial Sequence: Synthetic oligonucleotide
  Antisense strand to SEQ ID NO: 111796
uucaccuagcaccacacuc

SEQ ID NO: 111798 - RNA, 19 nt, Artificial Sequence
  Description of Artificial Sequence: Synthetic oligonucleotide
  Sense strand starting at position 316 of SEQ ID NO: 1424
acugucuuacucugggauu

SEQ ID NO: 111799 - RNA, 19 nt, Artificial Sequence
  Description of Artificial Sequence: Synthetic oligonucleotide
  Antisense strand to SEQ ID NO: 111798
aaucccagaguaagacagu

SEQ ID NO: 111800 - RNA, 19 nt, Artificial Sequence
  Description of Artificial Sequence: Synthetic oligonucleotide
  Sense strand starting at position 357 of SEQ ID NO: 1424
acacgacuugggcauguua

SEQ ID NO: 111801 - RNA, 19 nt, Artificial Sequence
  Description of Artificial Sequence: Synthetic oligonucleotide
  Antisense strand to SEQ ID NO: 111800
uaacaugcccaagucgugu

SEQ ID NO: 111802 - RNA, 19 nt, Artificial Sequence
  Description of Artificial Sequence: Synthetic oligonucleotide
  Sense strand starting at position 376 of SEQ ID NO: 1424
cuuaauuucucagagcaug

SEQ ID NO: 111803 - RNA, 19 nt, Artificial Sequence
  Description of Artificial Sequence: Synthetic oligonucleotide
  Antisense strand to SEQ ID NO: 111802
caugcucugagaaauuaag

SEQ ID NO: 111804 - RNA, 19 nt, Artificial Sequence
  Description of Artificial Sequence: Synthetic oligonucleotide
  Sense strand starting at position 412 of SEQ ID NO: 1424
agaggauggugagagauua

SEQ ID NO: 111805 - RNA, 19 nt, Artificial Sequence
  Description of Artificial Sequence: Synthetic oligonucleotide
  Antisense strand to SEQ ID NO: 111804
uaaucucucaccauccucu

SEQ ID NO: 111806 - RNA, 19 nt, Artificial Sequence
  Description of Artificial Sequence: Synthetic oligonucleotide
  Sense strand starting at position 586 of SEQ ID NO: 1424
agagguuucugacugauga

SEQ ID NO: 111807 - RNA, 19 nt, Artificial Sequence
  Description of Artificial Sequence: Synthetic oligonucleotide
  Antisense strand to SEQ ID NO: 111806
ucaucagucagaaaccucu

SEQ ID NO: 111808 - RNA, 19 nt, Artificial Sequence
  Description of Artificial Sequence: Synthetic oligonucleotide
  Sense strand starting at position 587 of SEQ ID NO: 1424
gagguuucugacugaugaa

SEQ ID NO: 111809 - RNA, 19 nt, Artificial Sequence
  Description of Artificial Sequence: Synthetic oligonucleotide
  Antisense strand to SEQ ID NO: 111808
uucaucagucagaaaccuc

SEQ ID NO: 111810 - RNA, 19 nt, Artificial Sequence
  Description of Artificial Sequence: Synthetic oligonucleotide
  Sense strand starting at position 608 of SEQ ID NO: 1424
gguaucaucaacugggcaa

SEQ ID NO: 111811 - RNA, 19 nt, Artificial Sequence
  Description of Artificial Sequence: Synthetic oligonucleotide
  Antisense strand to SEQ ID NO: 111810
uugcccaguugaugauacc

SEQ ID NO: 111812 - RNA, 19 nt, Artificial Sequence
  Description of Artificial Sequence: Synthetic oligonucleotide
  Sense strand starting at position 629 of SEQ ID NO: 1424
caguauuaacgugacccau

SEQ ID NO: 111813 - RNA, 19 nt, Artificial Sequence
  Description of Artificial Sequence: Synthetic oligonucleotide
  Antisense strand to SEQ ID NO: 111812
augggucacguuaauacug

SEQ ID NO: 111814 - RNA, 19 nt, Artificial Sequence
  Description of Artificial Sequence: Synthetic oligonucleotide
  Sense strand starting at position 631 of SEQ ID NO: 1424
guauuaacgugacccauuu

SEQ ID NO: 111815 - RNA, 19 nt, Artificial Sequence
  Description of Artificial Sequence: Synthetic oligonucleotide
  Antisense strand to SEQ ID NO: 111814
aaaugggucacguuaauac

SEQ ID NO: 111816 - RNA, 19 nt, Artificial Sequence
  Description of Artificial Sequence: Synthetic oligonucleotide
  Sense strand starting at position 801 of SEQ ID NO: 1424
cugucaucccacuaaagug

SEQ ID NO: 111817 - RNA, 19 nt, Artificial Sequence
  Description of Artificial Sequence: Synthetic oligonucleotide
  Antisense strand to SEQ ID NO: 111816
cacuuuagugggaugacag

SEQ ID NO: 111818 - RNA, 19 nt, Artificial Sequence
  Description of Artificial Sequence: Synthetic oligonucleotide
  Sense strand starting at position 886 of SEQ ID NO: 1424
guuucuccugcagaagcaa

SEQ ID NO: 111819 - RNA, 19 nt, Artificial Sequence
  Description of Artificial Sequence: Synthetic oligonucleotide
  Antisense strand to SEQ ID NO: 111818
uugcuucugcaggagaaac

SEQ ID NO: 111820 - RNA, 19 nt, Artificial Sequence
  Description of Artificial Sequence: Synthetic oligonucleotide
  Sense strand starting at position 965 of SEQ ID NO: 1424
gcuggaauugaguaaguuu

SEQ ID NO: 111821 - RNA, 19 nt, Artificial Sequence
  Description of Artificial Sequence: Synthetic oligonucleotide
  Antisense strand to SEQ ID NO: 111820
aaacuuacucaauuccagc

SEQ ID NO: 111822 - RNA, 19 nt, Artificial Sequence
  Description of Artificial Sequence: Synthetic oligonucleotide
  Sense strand starting at position 986 of SEQ ID NO: 1424
guuccagacuuugugcaaa

SEQ ID NO: 111823 - RNA, 19 nt, Artificial Sequence
  Description of Artificial Sequence: Synthetic oligonucleotide
  Antisense strand to SEQ ID NO: 111822
uuugcacaaagucuggaac

SEQ ID NO: 111824 - RNA, 19 nt, Artificial Sequence
  Description of Artificial Sequence: Synthetic oligonucleotide
  Sense strand starting at position 988 of SEQ ID NO: 1424
uccagacuuugugcaaagu

SEQ ID NO: 111825 - RNA, 19 nt, Artificial Sequence
  Description of Artificial Sequence: Synthetic oligonucleotide
  Antisense strand to SEQ ID NO: 111824
acuuugcacaaagucugga

SEQ ID NO: 111826 - RNA, 19 nt, Artificial Sequence
  Description of Artificial Sequence: Synthetic oligonucleotide
  Sense strand starting at position 1056 of SEQ ID NO: 1424
gguacuguuauaggagaga

SEQ ID NO: 111827 - RNA, 19 nt, Artificial Sequence
  Description of Artificial Sequence: Synthetic oligonucleotide
  Antisense strand to SEQ ID NO: 111826
ucucuccuauaacaguacc

SEQ ID NO: 111828 - RNA, 19 nt, Artificial Sequence
  Description of Artificial Sequence: Synthetic oligonucleotide
  Sense strand starting at position 1075 of SEQ ID NO: 1424
ugguuaagguccuuccuau

SEQ ID NO: 111829 - RNA, 19 nt, Artificial Sequence
  Description of Artificial Sequence: Synthetic oligonucleotide
  Antisense strand to SEQ ID NO: 111828
auaggaaggaccuuaacca

SEQ ID NO: 111830 - RNA, 19 nt, Artificial Sequence
  Description of Artificial Sequence: Synthetic oligonucleotide
  Sense strand starting at position 1111 of SEQ ID NO: 1424
gugguugagcugugauuua

SEQ ID NO: 111831 - RNA, 19 nt, Artificial Sequence
  Description of Artificial Sequence: Synthetic oligonucleotide
  Antisense strand to SEQ ID NO: 111830
uaaaucacagcucaaccac

SEQ ID NO: 111832 - RNA, 19 nt, Artificial Sequence
  Description of Artificial Sequence: Synthetic oligonucleotide
  Sense strand starting at position 1454 of SEQ ID NO: 1424
auguucuuugcucaccaua

SEQ ID NO: 111833 - RNA, 19 nt, Artificial Sequence
  Description of Artificial Sequence: Synthetic oligonucleotide
  Antisense strand to SEQ ID NO: 111832
uauggugagcaaagaacau

SEQ ID NO: 111834 - RNA, 19 nt, Artificial Sequence
  Description of Artificial Sequence: Synthetic oligonucleotide
  Sense strand starting at position 2259 of SEQ ID NO: 1424
ccuggaggguuccuaaugu

SEQ ID NO: 111835 - RNA, 19 nt, Artificial Sequence
  Description of Artificial Sequence: Synthetic oligonucleotide
  Antisense strand to SEQ ID NO: 111834
acauuaggaacccuccagg

SEQ ID NO: 111836 - RNA, 19 nt, Artificial Sequence
  Description of Artificial Sequence: Synthetic oligonucleotide
  Sense strand starting at position 2377 of SEQ ID NO: 1424
gaggaacaguuguuaguaa

SEQ ID NO: 111837 - RNA, 19 nt, Artificial Sequence
  Description of Artificial Sequence: Synthetic oligonucleotide
  Antisense strand to SEQ ID NO: 111836
uuacuaacaacuguuccuc

SEQ ID NO: 111838 - RNA, 19 nt, Artificial Sequence
  Description of Artificial Sequence: Synthetic oligonucleotide
  Sense strand starting at position 2484 of SEQ ID NO: 1424
ucgaauuagggucacuuua

SEQ ID NO: 111839 - RNA, 19 nt, Artificial Sequence
  Description of Artificial Sequence: Synthetic oligonucleotide
  Antisense strand to SEQ ID NO: 111838
uaaagugacccuaauucga

SEQ ID NO: 111840 - RNA, 19 nt, Artificial Sequence
  Description of Artificial Sequence: Synthetic oligonucleotide
  Sense strand starting at position 2486 of SEQ ID NO: 1424
gaauuagggucacuuuaag

SEQ ID NO: 111841 - RNA, 19 nt, Artificial Sequence
  Description of Artificial Sequence: Synthetic oligonucleotide
  Antisense strand to SEQ ID NO: 111840
cuuaaagugacccuaauuc

SEQ ID NO: 111842 - RNA, 19 nt, Artificial Sequence
  Description of Artificial Sequence: Synthetic oligonucleotide
  Sense strand starting at position 2596 of SEQ ID NO: 1424
auauccuggcccuaguuau

SEQ ID NO: 111843 - RNA, 19 nt, Artificial Sequence
  Description of Artificial Sequence: Synthetic oligonucleotide
  Antisense strand to SEQ ID NO: 111842
auaacuagggccaggauau

SEQ ID NO: 111844 - RNA, 19 nt, Artificial Sequence
  Description of Artificial Sequence: Synthetic oligonucleotide
  Sense strand starting at position 2603 of SEQ ID NO: 1424
ggcccuaguuauucuacau

SEQ ID NO: 111845 - RNA, 19 nt, Artificial Sequence
  Description of Artificial Sequence: Synthetic oligonucleotide
  Antisense strand to SEQ ID NO: 111844
auguagaauaacuagggcc

SEQ ID NO: 111846 - RNA, 19 nt, Artificial Sequence
  Description of Artificial Sequence: Synthetic oligonucleotide
  Sense strand starting at position 2648 of SEQ ID NO: 1424
ugauuccuccugggaguau

SEQ ID NO: 111847 - RNA, 19 nt, Artificial Sequence
  Description of Artificial Sequence: Synthetic oligonucleotide
  Antisense strand to SEQ ID NO: 111846
auacucccaggaggaauca

SEQ ID NO: 111848 - RNA, 19 nt, Artificial Sequence
  Description of Artificial Sequence: Synthetic oligonucleotide
  Sense strand starting at position 2705 of SEQ ID NO: 1424
auguguuucgucucuguua

SEQ ID NO: 111849 - RNA, 19 nt, Artificial Sequence
  Description of Artificial Sequence: Synthetic oligonucleotide
  Antisense strand to SEQ ID NO: 111848
uaacagagacgaaacacau

SEQ ID NO: 111850 - RNA, 19 nt, Artificial Sequence
  Description of Artificial Sequence: Synthetic oligonucleotide
  Sense strand starting at position 2712 of SEQ ID NO: 1424
ucgucucuguuauuauuua

SEQ ID NO: 111851 - RNA, 19 nt, Artificial Sequence
  Description of Artificial Sequence: Synthetic oligonucleotide
  Antisense strand to SEQ ID NO: 111850
uaaauaauaacagagacga

SEQ ID NO: 111852 - RNA, 19 nt, Artificial Sequence
  Description of Artificial Sequence: Synthetic oligonucleotide
  Sense strand starting at position 2765 of SEQ ID NO: 1424
augcaaugcuucuugaaga

SEQ ID NO: 111853 - RNA, 19 nt, Artificial Sequence
  Description of Artificial Sequence: Synthetic oligonucleotide
  Antisense strand to SEQ ID NO: 111852
ucuucaagaagcauugcau

SEQ ID NO: 111854 - RNA, 19 nt, Artificial Sequence
  Description of Artificial Sequence: Synthetic oligonucleotide
  Sense strand starting at position 2770 of SEQ ID NO: 1424
augcuucuugaagaaucau

SEQ ID NO: 111855 - RNA, 19 nt, Artificial Sequence
  Description of Artificial Sequence: Synthetic oligonucleotide
  Antisense strand to SEQ ID NO: 111854
augauucuucaagaagcau

SEQ ID NO: 111856 - RNA, 19 nt, Artificial Sequence
  Description of Artificial Sequence: Synthetic oligonucleotide
  Sense strand starting at position 2841 of SEQ ID NO: 1424
ccgugcuuccaugaugaaa

SEQ ID NO: 111857 - RNA, 19 nt, Artificial Sequence
  Description of Artificial Sequence: Synthetic oligonucleotide
  Antisense strand to SEQ ID NO: 111856
uuucaucauggaagcacgg

SEQ ID NO: 111858 - RNA, 19 nt, Artificial Sequence
  Description of Artificial Sequence: Synthetic oligonucleotide
  Sense strand starting at position 3245 of SEQ ID NO: 1424
ggccacugggaguaaagua

SEQ ID NO: 111859 - RNA, 19 nt, Artificial Sequence
  Description of Artificial Sequence: Synthetic oligonucleotide
  Antisense strand to SEQ ID NO: 111858
uacuuuacucccaguggcc

SEQ ID NO: 111860 - RNA, 19 nt, Artificial Sequence
  Description of Artificial Sequence: Synthetic oligonucleotide
  Sense strand starting at position 3315 of SEQ ID NO: 1424
cugaucauugcaugggcua

SEQ ID NO: 111861 - RNA, 19 nt, Artificial Sequence
  Description of Artificial Sequence: Synthetic oligonucleotide
  Antisense strand to SEQ ID NO: 111860
uagcccaugcaaugaucag

SEQ ID NO: 111862 - RNA, 19 nt, Artificial Sequence
  Description of Artificial Sequence: Synthetic oligonucleotide
  Sense strand starting at position 3371 of SEQ ID NO: 1424
uugauaguuucugccuaca

SEQ ID NO: 111863 - RNA, 19 nt, Artificial Sequence
  Description of Artificial Sequence: Synthetic oligonucleotide
  Antisense strand to SEQ ID NO: 111862
uguaggcagaaacuaucaa

SEQ ID NO: 111864 - RNA, 19 nt, Artificial Sequence
  Description of Artificial Sequence: Synthetic oligonucleotide
  Sense strand starting at position 3416 of SEQ ID NO: 1424
cugcguuuggcucaaagag

SEQ ID NO: 111865 - RNA, 19 nt, Artificial Sequence
  Description of Artificial Sequence: Synthetic oligonucleotide
  Antisense strand to SEQ ID NO: 111864
cucuuugagccaaacgcag

SEQ ID NO: 111866 - RNA, 19 nt, Artificial Sequence
  Description of Artificial Sequence: Synthetic oligonucleotide
  Sense strand starting at position 3550 of SEQ ID NO: 1424
guagcauuuauugguguuu

SEQ ID NO: 111867 - RNA, 19 nt, Artificial Sequence
  Description of Artificial Sequence: Synthetic oligonucleotide
  Antisense strand to SEQ ID NO: 111866
aaacaccaauaaaugcuac

SEQ ID NO: 111868 - RNA, 19 nt, Artificial Sequence
  Description of Artificial Sequence: Synthetic oligonucleotide
  Sense strand starting at position 3817 of SEQ ID NO: 1424
uggcuucuuugaccacuga

SEQ ID NO: 111869 - RNA, 19 nt, Artificial Sequence
  Description of Artificial Sequence: Synthetic oligonucleotide
  Antisense strand to SEQ ID NO: 111868
ucaguggucaaagaagcca

SEQ ID NO: 111870 - RNA, 19 nt, Artificial Sequence
  Description of Artificial Sequence: Synthetic oligonucleotide
  Sense strand starting at position 3890 of SEQ ID NO: 1424
acaagucugcugggauuau

SEQ ID NO: 111871 - RNA, 19 nt, Artificial Sequence
  Description of Artificial Sequence: Synthetic oligonucleotide
  Antisense strand to SEQ ID NO: 111870
auaaucccagcagacuugu

SEQ ID NO: 111872 - RNA, 19 nt, Artificial Sequence
  Description of Artificial Sequence: Synthetic oligonucleotide
  Sense strand starting at position 3894 of SEQ ID NO: 1424
gucugcugggauuaugagu

SEQ ID NO: 111873 - RNA, 19 nt, Artificial Sequence
  Description of Artificial Sequence: Synthetic oligonucleotide
  Antisense strand to SEQ ID NO: 111872
acucauaaucccagcagac

SEQ ID NO: 111874 - RNA, 19 nt, Artificial Sequence
  Description of Artificial Sequence: Synthetic oligonucleotide
  Sense strand starting at position 3928 of SEQ ID NO: 1424
agagaagcugcauaccauu

SEQ ID NO: 111875 - RNA, 19 nt, Artificial Sequence
  Description of Artificial Sequence: Synthetic oligonucleotide
  Antisense strand to SEQ ID NO: 111874
aaugguaugcagcuucucu

SEQ ID NO: 111876 - RNA, 19 nt, Artificial Sequence
  Description of Artificial Sequence: Synthetic oligonucleotide
  Sense strand starting at position 3983 of SEQ ID NO: 1425
ugcaaugaacuuggucaga

SEQ ID NO: 111877 - RNA, 19 nt, Artificial Sequence
  Description of Artificial Sequence: Synthetic oligonucleotide
  Antisense strand to SEQ ID NO: 111876
ucugaccaaguucauugca

SEQ ID NO: 111878 - RNA, 19 nt, Artificial Sequence
  Description of Artificial Sequence: Synthetic oligonucleotide
  Sense strand starting at position 3834 of SEQ ID NO: 1425
aggccaagagggugagauu

SEQ ID NO: 111879 - RNA, 19 nt, Artificial Sequence
  Description of Artificial Sequence: Synthetic oligonucleotide
  Antisense strand to SEQ ID NO: 111878
aaucucacccucuuggccu

SEQ ID NO: 111880 - RNA, 19 nt, Artificial Sequence
  Description of Artificial Sequence: Synthetic oligonucleotide
  Sense strand starting at position 3811 of SEQ ID NO: 1425
ggacauagugucuauccaa

SEQ ID NO: 111881 - RNA, 19 nt, Artificial Sequence
  Description of Artificial Sequence: Synthetic oligonucleotide
  Antisense strand to SEQ ID NO: 111880
uuggauagacacuaugucc

SEQ ID NO: 111882 - RNA, 19 nt, Artificial Sequence
  Description of Artificial Sequence: Synthetic oligonucleotide
  Sense strand starting at position 3810 of SEQ ID NO: 1425
aggacauagugucuaucca

SEQ ID NO: 111883 - RNA, 19 nt, Artificial Sequence
  Description of Artificial Sequence: Synthetic oligonucleotide
  Antisense strand to SEQ ID NO: 111882
uggauagacacuauguccu

SEQ ID NO: 111884 - RNA, 19 nt, Artificial Sequence
  Description of Artificial Sequence: Synthetic oligonucleotide
  Sense strand starting at position 3532 of SEQ ID NO: 1425
gaggguguuccagaaacgu

SEQ ID NO: 111885 - RNA, 19 nt, Artificial Sequence
  Description of Artificial Sequence: Synthetic oligonucleotide
  Antisense strand to SEQ ID NO: 111884
acguuucuggaacacccuc

SEQ ID NO: 111886 - RNA, 19 nt, Artificial Sequence
  Description of Artificial Sequence: Synthetic oligonucleotide
  Sense strand starting at position 3528 of SEQ ID NO: 1425
gcaggaggguguuccagaa

SEQ ID NO: 111887 - RNA, 19 nt, Artificial Sequence
  Description of Artificial Sequence: Synthetic oligonucleotide
  Antisense strand to SEQ ID NO: 111886
uucuggaacacccuccugc

SEQ ID NO: 111888 - RNA, 19 nt, Artificial Sequence
  Description of Artificial Sequence: Synthetic oligonucleotide
  Sense strand starting at position 3465 of SEQ ID NO: 1425
gcucuaaucugggcugaag

SEQ ID NO: 111889 - RNA, 19 nt, Artificial Sequence
  Description of Artificial Sequence: Synthetic oligonucleotide
  Antisense strand to SEQ ID NO: 111888
cuucagcccagauuagagc

SEQ ID NO: 111890 - RNA, 19 nt, Artificial Sequence
  Description of Artificial Sequence: Synthetic oligonucleotide
  Sense strand starting at position 3464 of SEQ ID NO: 1425
agcucuaaucugggcugaa

SEQ ID NO: 111891 - RNA, 19 nt, Artificial Sequence
  Description of Artificial Sequence: Synthetic oligonucleotide
  Antisense strand to SEQ ID NO: 111890
uucagcccagauuagagcu

SEQ ID NO: 111892 - RNA, 19 nt, Artificial Sequence
  Description of Artificial Sequence: Synthetic oligonucleotide
  Sense strand starting at position 3419 of SEQ ID NO: 1425
gguaaaugcagugauagac

SEQ ID NO: 111893 - RNA, 19 nt, Artificial Sequence
  Description of Artificial Sequence: Synthetic oligonucleotide
  Antisense strand to SEQ ID NO: 111892
gucuaucacugcauuuacc

SEQ ID NO: 111894 - RNA, 19 nt, Artificial Sequence
  Description of Artificial Sequence: Synthetic oligonucleotide
  Sense strand starting at position 3418 of SEQ ID NO: 1425
ugguaaaugcagugauaga

SEQ ID NO: 111895 - RNA, 19 nt, Artificial Sequence
  Description of Artificial Sequence: Synthetic oligonucleotide
  Antisense strand to SEQ ID NO: 111894
ucuaucacugcauuuacca

SEQ ID NO: 111896 - RNA, 19 nt, Artificial Sequence
  Description of Artificial Sequence: Synthetic oligonucleotide
  Sense strand starting at position 3321 of SEQ ID NO: 1425
gggagagucucacugcauu

SEQ ID NO: 111897 - RNA, 19 nt, Artificial Sequence
  Description of Artificial Sequence: Synthetic oligonucleotide
  Antisense strand to SEQ ID NO: 111896
aaugcagugagacucuccc

SEQ ID NO: 111898 - RNA, 19 nt, Artificial Sequence
  Description of Artificial Sequence: Synthetic oligonucleotide
  Sense strand starting at position 3275 of SEQ ID NO: 1425
ggcugacaucuguggaaca

SEQ ID NO: 111899 - RNA, 19 nt, Artificial Sequence
  Description of Artificial Sequence: Synthetic oligonucleotide
  Antisense strand to SEQ ID NO: 111898
uguuccacagaugucagcc

SEQ ID NO: 111900 - RNA, 19 nt, Artificial Sequence
  Description of Artificial Sequence: Synthetic oligonucleotide
  Sense strand starting at position 3273 of SEQ ID NO: 1425
agggcugacaucuguggaa

SEQ ID NO: 111901 - RNA, 19 nt, Artificial Sequence
  Description of Artificial Sequence: Synthetic oligonucleotide
  Antisense strand to SEQ ID NO: 111900
uuccacagaugucagcccu

SEQ ID NO: 111902 - RNA, 19 nt, Artificial Sequence
  Description of Artificial Sequence: Synthetic oligonucleotide
  Sense strand starting at position 3206 of SEQ ID NO: 1425
uuagaugugcaagaaacuu

SEQ ID NO: 111903 - RNA, 19 nt, Artificial Sequence
  Description of Artificial Sequence: Synthetic oligonucleotide
  Antisense strand to SEQ ID NO: 111902
aaguuucuugcacaucuaa

SEQ ID NO: 111904 - RNA, 19 nt, Artificial Sequence
  Description of Artificial Sequence: Synthetic oligonucleotide
  Sense strand starting at position 3202 of SEQ ID NO: 1425
gggauuagaugugcaagaa

SEQ ID NO: 111905 - RNA, 19 nt, Artificial Sequence
  Description of Artificial Sequence: Synthetic oligonucleotide
  Antisense strand to SEQ ID NO: 111904
uucuugcacaucuaauccc

SEQ ID NO: 111906 - RNA, 19 nt, Artificial Sequence
  Description of Artificial Sequence: Synthetic oligonucleotide
  Sense strand starting at position 3166 of SEQ ID NO: 1425
auuuguuagugucuaccaa

SEQ ID NO: 111907 - RNA, 19 nt, Artificial Sequence
  Description of Artificial Sequence: Synthetic oligonucleotide
  Antisense strand to SEQ ID NO: 111906
uugguagacacuaacaaau

SEQ ID NO: 111908 - RNA, 19 nt, Artificial Sequence
  Description of Artificial Sequence: Synthetic oligonucleotide
  Sense strand starting at position 3071 of SEQ ID NO: 1425
ggcuuaacauugucaacca

SEQ ID NO: 111909 - RNA, 19 nt, Artificial Sequence
  Description of Artificial Sequence: Synthetic oligonucleotide
  Antisense strand to SEQ ID NO: 111908
ugguugacaauguuaagcc

SEQ ID NO: 111910 - RNA, 19 nt, Artificial Sequence
  Description of Artificial Sequence: Synthetic oligonucleotide
  Sense strand starting at position 3063 of SEQ ID NO: 1425
ggucauuaggcuuaacauu

SEQ ID NO: 111911 - RNA, 19 nt, Artificial Sequence
  Description of Artificial Sequence: Synthetic oligonucleotide
  Antisense strand to SEQ ID NO: 111910
aauguuaagccuaaugacc

SEQ ID NO: 111912 - RNA, 19 nt, Artificial Sequence
  Description of Artificial Sequence: Synthetic oligonucleotide
  Sense strand starting at position 3057 of SEQ ID NO: 1425
gguauaggucauuaggcuu

SEQ ID NO: 111913 - RNA, 19 nt, Artificial Sequence
  Description of Artificial Sequence: Synthetic oligonucleotide
  Antisense strand to SEQ ID NO: 111912
aagccuaaugaccuauacc

SEQ ID NO: 111914 - RNA, 19 nt, Artificial Sequence
  Description of Artificial Sequence: Synthetic oligonucleotide
  Sense strand starting at position 3056 of SEQ ID NO: 1425
agguauaggucauuaggcu

SEQ ID NO: 111915 - RNA, 19 nt, Artificial Sequence
  Description of Artificial Sequence: Synthetic oligonucleotide
  Antisense strand to SEQ ID NO: 111914
agccuaaugaccuauaccu

SEQ ID NO: 111916 - RNA, 19 nt, Artificial Sequence
  Description of Artificial Sequence: Synthetic oligonucleotide
  Sense strand starting at position 3015 of SEQ ID NO: 1425
acaguuuaauaagugcaaa

SEQ ID NO: 111917 - RNA, 19 nt, Artificial Sequence
  Description of Artificial Sequence: Synthetic oligonucleotide
  Antisense strand to SEQ ID NO: 111916
uuugcacuuauuaaacugu

SEQ ID NO: 111918 - RNA, 19 nt, Artificial Sequence
  Description of Artificial Sequence: Synthetic oligonucleotide
  Sense strand starting at position 2803 of SEQ ID NO: 1425
ucaaguaguccagaagcuu

SEQ ID NO: 111919 - RNA, 19 nt, Artificial Sequence
  Description of Artificial Sequence: Synthetic oligonucleotide
  Antisense strand to SEQ ID NO: 111918
aagcuucuggacuacuuga

SEQ ID NO: 111920 - RNA, 19 nt, Artificial Sequence
  Description of Artificial Sequence: Synthetic oligonucleotide
  Sense strand starting at position 2742 of SEQ ID NO: 1425
gguuuaaagaguugaagua

SEQ ID NO: 111921 - RNA, 19 nt, Artificial Sequence
  Description of Artificial Sequence: Synthetic oligonucleotide
  Antisense strand to SEQ ID NO: 111920
uacuucaacucuuuaaacc

SEQ ID NO: 111922 - RNA, 19 nt, Artificial Sequence
  Description of Artificial Sequence: Synthetic oligonucleotide
  Sense strand starting at position 2468 of SEQ ID NO: 1425
auggcugaugcuuauuauu

SEQ ID NO: 111923 - RNA, 19 nt, Artificial Sequence
  Description of Artificial Sequence: Synthetic oligonucleotide
  Antisense strand to SEQ ID NO: 111922
aauaauaagcaucagccau

SEQ ID NO: 111924 - RNA, 19 nt, Artificial Sequence
  Description of Artificial Sequence: Synthetic oligonucleotide
  Sense strand starting at position 2406 of SEQ ID NO: 1425
agagacaaguccucaguuu

SEQ ID NO: 111925 - RNA, 19 nt, Artificial Sequence
  Description of Artificial Sequence: Synthetic oligonucleotide
  Antisense strand to SEQ ID NO: 111924
aaacugaggacuugucucu

SEQ ID NO: 111926 - RNA, 19 nt, Artificial Sequence
  Description of Artificial Sequence: Synthetic oligonucleotide
  Sense strand starting at position 2372 of SEQ ID NO: 1425
ucauguacugugugaauaa

SEQ ID NO: 111927 - RNA, 19 nt, Artificial Sequence
  Description of Artificial Sequence: Synthetic oligonucleotide
  Antisense strand to SEQ ID NO: 111926
uuauucacacaguacauga

SEQ ID NO: 111928 - RNA, 19 nt, Artificial Sequence
  Description of Artificial Sequence: Synthetic oligonucleotide
  Sense strand starting at position 2357 of SEQ ID NO: 1425
agucuuauucuaggaucau

SEQ ID NO: 111929 - RNA, 19 nt, Artificial Sequence
  Description of Artificial Sequence: Synthetic oligonucleotide
  Antisense strand to SEQ ID NO: 111928
augauccuagaauaagacu

SEQ ID NO: 111930 - RNA, 19 nt, Artificial Sequence
  Description of Artificial Sequence: Synthetic oligonucleotide
  Sense strand starting at position 2243 of SEQ ID NO: 1425
ugaauuaucuacucauacg

SEQ ID NO: 111931 - RNA, 19 nt, Artificial Sequence
  Description of Artificial Sequence: Synthetic oligonucleotide
  Antisense strand to SEQ ID NO: 111930
cguaugaguagauaauuca

SEQ ID NO: 111932 - RNA, 19 nt, Artificial Sequence
  Description of Artificial Sequence: Synthetic oligonucleotide
  Sense strand starting at position 2211 of SEQ ID NO: 1425
ucguguuaaagagagauga

SEQ ID NO: 111933 - RNA, 19 nt, Artificial Sequence
  Description of Artificial Sequence: Synthetic oligonucleotide
  Antisense strand to SEQ ID NO: 111932
ucaucucucuuuaacacga

SEQ ID NO: 111934 - RNA, 19 nt, Artificial Sequence
  Description of Artificial Sequence: Synthetic oligonucleotide
  Sense strand starting at position 2209 of SEQ ID NO: 1425
ucucguguuaaagagagau

SEQ ID NO: 111935 - RNA, 19 nt, Artificial Sequence
  Description of Artificial Sequence: Synthetic oligonucleotide
  Antisense strand to SEQ ID NO: 111934
aucucucuuuaacacgaga

SEQ ID NO: 111936 - RNA, 19 nt, Artificial Sequence
  Description of Artificial Sequence: Synthetic oligonucleotide
  Sense strand starting at position 2035 of SEQ ID NO: 1425
ggcuccgcugcgucuuaau

SEQ ID NO: 111937 - RNA, 19 nt, Artificial Sequence
  Description of Artificial Sequence: Synthetic oligonucleotide
  Antisense strand to SEQ ID NO: 111936
auuaagacgcagcggagcc

SEQ ID NO: 111938 - RNA, 19 nt, Artificial Sequence
  Description of Artificial Sequence: Synthetic oligonucleotide
  Sense strand starting at position 1320 of SEQ ID NO: 1425
auguaucagguuuaacuuu

SEQ ID NO: 111939 - RNA, 19 nt, Artificial Sequence
  Description of Artificial Sequence: Synthetic oligonucleotide
  Antisense strand to SEQ ID NO: 111938
aaaguuaaaccugauacau

SEQ ID NO: 111940 - RNA, 19 nt, Artificial Sequence
  Description of Artificial Sequence: Synthetic oligonucleotide
  Sense strand starting at position 1234 of SEQ ID NO: 1425
gggacagguacucggagaa

SEQ ID NO: 111941 - RNA, 19 nt, Artificial Sequence
  Description of Artificial Sequence: Synthetic oligonucleotide
  Antisense strand to SEQ ID NO: 111940
uucuccgaguaccuguccc

SEQ ID NO: 111942 - RNA, 19 nt, Artificial Sequence
  Description of Artificial Sequence: Synthetic oligonucleotide
  Sense strand starting at position 1132 of SEQ ID NO: 1425
auuaaagcugccuaaguca

SEQ ID NO: 111943 - RNA, 19 nt, Artificial Sequence
  Description of Artificial Sequence: Synthetic oligonucleotide
  Antisense strand to SEQ ID NO: 111942
ugacuuaggcagcuuuaau

SEQ ID NO: 111944 - RNA, 19 nt, Artificial Sequence
  Description of Artificial Sequence: Synthetic oligonucleotide
  Sense strand starting at position 1074 of SEQ ID NO: 1425
gguauuacucuugaaaucu

SEQ ID NO: 111945 - RNA, 19 nt, Artificial Sequence
  Description of Artificial Sequence: Synthetic oligonucleotide
  Antisense strand to SEQ ID NO: 111944
agauuucaagaguaauacc

SEQ ID NO: 111946 - RNA, 19 nt, Artificial Sequence
  Description of Artificial Sequence: Synthetic oligonucleotide
  Sense strand starting at position 1001 of SEQ ID NO: 1425
aagcgaauagcucaaaugu

SEQ ID NO: 111947 - RNA, 19 nt, Artificial Sequence
  Description of Artificial Sequence: Synthetic oligonucleotide
  Antisense strand to SEQ ID NO: 111946
acauuugagcuauucgcuu

SEQ ID NO: 111948 - RNA, 19 nt, Artificial Sequence
  Description of Artificial Sequence: Synthetic oligonucleotide
  Sense strand starting at position 961 of SEQ ID NO: 1425
ugggaauguuaugcuuuga

SEQ ID NO: 111949 - RNA, 19 nt, Artificial Sequence
  Description of Artificial Sequence: Synthetic oligonucleotide
  Antisense strand to SEQ ID NO: 111948
ucaaagcauaacauuccca

SEQ ID NO: 111950 - RNA, 19 nt, Artificial Sequence
  Description of Artificial Sequence: Synthetic oligonucleotide
  Sense strand starting at position 902 of SEQ ID NO: 1425
ugcuuugaagcauaacaga

SEQ ID NO: 111951 - RNA, 19 nt, Artificial Sequence
  Description of Artificial Sequence: Synthetic oligonucleotide
  Antisense strand to SEQ ID NO: 111950
ucuguuaugcuucaaagca

SEQ ID NO: 111952 - RNA, 19 nt, Artificial Sequence
  Description of Artificial Sequence: Synthetic oligonucleotide
  Sense strand starting at position 336 of SEQ ID NO: 1425
acaucagaguuauuaagca

SEQ ID NO: 111953 - RNA, 19 nt, Artificial Sequence
  Description of Artificial Sequence: Synthetic oligonucleotide
  Antisense strand to SEQ ID NO: 111952
ugcuuaauaacucugaugu

SEQ ID NO: 111954 - RNA, 19 nt, Artificial Sequence
  Description of Artificial Sequence: Synthetic oligonucleotide
  Sense strand starting at position 16 of SEQ ID NO: 1425
gggucugggucucuauuga

SEQ ID NO: 111955 - RNA, 19 nt, Artificial Sequence
  Description of Artificial Sequence: Synthetic oligonucleotide
  Antisense strand to SEQ ID NO: 111954
ucaauagagacccagaccc

SEQ ID NO: 111956 - RNA, 19 nt, Artificial Sequence
  Description of Artificial Sequence: Synthetic oligonucleotide
  Sense strand starting at position 59 of SEQ ID NO: 1426
guuagcauaagaugugaga

SEQ ID NO: 111957 - RNA, 19 nt, Artificial Sequence
  Description of Artificial Sequence: Synthetic oligonucleotide
  Antisense strand to SEQ ID NO: 111956
ucucacaucuuaugcuaac

SEQ ID NO: 111958 - RNA, 19 nt, Artificial Sequence
  Description of Artificial Sequence: Synthetic oligonucleotide
  Sense strand starting at position 95 of SEQ ID NO: 1426
gcagcuuagaugggaugau

SEQ ID NO: 111959 - RNA, 19 nt, Artificial Sequence
  Description of Artificial Sequence: Synthetic oligonucleotide
  Antisense strand to SEQ ID NO: 111958
aucaucccaucuaagcugc

SEQ ID NO: 111960 - RNA, 19 nt, Artificial Sequence
  Description of Artificial Sequence: Synthetic oligonucleotide
  Sense strand starting at position 126 of SEQ ID NO: 1426
gcaacaagaugacacaaau

SEQ ID NO: 111961 - RNA, 19 nt, Artificial Sequence
  Description of Artificial Sequence: Synthetic oligonucleotide
  Antisense strand to SEQ ID NO: 111960
auuugugucaucuuguugc

SEQ ID NO: 111962 - RNA, 19 nt, Artificial Sequence
  Description of Artificial Sequence: Synthetic oligonucleotide
  Sense strand starting at position 313 of SEQ ID NO: 1426
cucugaacuugauuacuga

SEQ ID NO: 111963 - RNA, 19 nt, Artificial Sequence
  Description of Artificial Sequence: Synthetic oligonucleotide
  Antisense strand to SEQ ID NO: 111962
ucaguaaucaaguucagag

SEQ ID NO: 111964 - RNA, 19 nt, Artificial Sequence
  Description of Artificial Sequence: Synthetic oligonucleotide
  Sense strand starting at position 383 of SEQ ID NO: 1426
augaauugauaagcaaguu

SEQ ID NO: 111965 - RNA, 19 nt, Artificial Sequence
  Description of Artificial Sequence: Synthetic oligonucleotide
  Antisense strand to SEQ ID NO: 111964
aacuugcuuaucaauucau

SEQ ID NO: 111966 - RNA, 19 nt, Artificial Sequence
  Description of Artificial Sequence: Synthetic oligonucleotide
  Sense strand starting at position 395 of SEQ ID NO: 1426
gcaaguuacucaucagagu

SEQ ID NO: 111967 - RNA, 19 nt, Artificial Sequence
  Description of Artificial Sequence: Synthetic oligonucleotide
  Antisense strand to SEQ ID NO: 111966
acucugaugaguaacuugc

SEQ ID NO: 111968 - RNA, 19 nt, Artificial Sequence
  Description of Artificial Sequence: Synthetic oligonucleotide
  Sense strand starting at position 467 of SEQ ID NO: 1426
gcuaaucagccaugcaaag

SEQ ID NO: 111969 - RNA, 19 nt, Artificial Sequence
  Description of Artificial Sequence: Synthetic oligonucleotide
  Antisense strand to SEQ ID NO: 111968
cuuugcauggcugauuagc

SEQ ID NO: 111970 - RNA, 19 nt, Artificial Sequence
  Description of Artificial Sequence: Synthetic oligonucleotide
  Sense strand starting at position 486 of SEQ ID NO: 1426
auaacuuggcucuaugaau

SEQ ID NO: 111971 - RNA, 19 nt, Artificial Sequence
  Description of Artificial Sequence: Synthetic oligonucleotide
  Antisense strand to SEQ ID NO: 111970
auucauagagccaaguuau

SEQ ID NO: 111972 - RNA, 19 nt, Artificial Sequence
  Description of Artificial Sequence: Synthetic oligonucleotide
  Sense strand starting at position 508 of SEQ ID NO: 1426
uuaauuucccagugcuagu

SEQ ID NO: 111973 - RNA, 19 nt, Artificial Sequence
  Description of Artificial Sequence: Synthetic oligonucleotide
  Antisense strand to SEQ ID NO: 111972
acuagcacugggaaauuaa

SEQ ID NO: 111974 - RNA, 19 nt, Artificial Sequence
  Description of Artificial Sequence: Synthetic oligonucleotide
  Sense strand starting at position 1225 of SEQ ID NO: 1426
gcagaaacuugagagggaa

SEQ ID NO: 111975 - RNA, 19 nt, Artificial Sequence
  Description of Artificial Sequence: Synthetic oligonucleotide
  Antisense strand to SEQ ID NO: 111974
uucccucucaaguuucugc

SEQ ID NO: 111976 - RNA, 19 nt, Artificial Sequence
  Description of Artificial Sequence: Synthetic oligonucleotide
  Sense strand starting at position 1636 of SEQ ID NO: 1426
uuccaaaugguccagcaaa

SEQ ID NO: 111977 - RNA, 19 nt, Artificial Sequence
  Description of Artificial Sequence: Synthetic oligonucleotide
  Antisense strand to SEQ ID NO: 111976
uuugcuggaccauuuggaa

SEQ ID NO: 111978 - RNA, 19 nt, Artificial Sequence
  Description of Artificial Sequence: Synthetic oligonucleotide
  Sense strand starting at position 1905 of SEQ ID NO: 1426
ggcgucgucaaggagcaau

SEQ ID NO: 111979 - RNA, 19 nt, Artificial Sequence
  Description of Artificial Sequence: Synthetic oligonucleotide
  Antisense strand to SEQ ID NO: 111978
auugcuccuugacgacgcc

SEQ ID NO: 111980 - RNA, 19 nt, Artificial Sequence
  Description of Artificial Sequence: Synthetic oligonucleotide
  Sense strand starting at position 2078 of SEQ ID NO: 1426
ugucacuugcagugauaaa

SEQ ID NO: 111981 - RNA, 19 nt, Artificial Sequence
  Description of Artificial Sequence: Synthetic oligonucleotide
  Antisense strand to SEQ ID NO: 111980
uuuaucacugcaagugaca

SEQ ID NO: 111982 - RNA, 19 nt, Artificial Sequence
  Description of Artificial Sequence: Synthetic oligonucleotide
  Sense strand starting at position 2079 of SEQ ID NO: 1426
gucacuugcagugauaaag

SEQ ID NO: 111983 - RNA, 19 nt, Artificial Sequence
  Description of Artificial Sequence: Synthetic oligonucleotide
  Antisense strand to SEQ ID NO: 111982
cuuuaucacugcaagugac

SEQ ID NO: 111984 - RNA, 19 nt, Artificial Sequence
  Description of Artificial Sequence: Synthetic oligonucleotide
  Sense strand starting at position 2208 of SEQ ID NO: 1426
cugcaagagccgcauucuu

SEQ ID NO: 111985 - RNA, 19 nt, Artificial Sequence
  Description of Artificial Sequence: Synthetic oligonucleotide
  Antisense strand to SEQ ID NO: 111984
aagaaugcggcucuugcag

SEQ ID NO: 111986 - RNA, 19 nt, Artificial Sequence
  Description of Artificial Sequence: Synthetic oligonucleotide
  Sense strand starting at position 2216 of SEQ ID NO: 1426
gccgcauucuuacugauuu

SEQ ID NO: 111987 - RNA, 19 nt, Artificial Sequence
  Description of Artificial Sequence: Synthetic oligonucleotide
  Antisense strand to SEQ ID NO: 111986
aaaucaguaagaaugcggc

SEQ ID NO: 111988 - RNA, 19 nt, Artificial Sequence
  Description of Artificial Sequence: Synthetic oligonucleotide
  Sense strand starting at position 2251 of SEQ ID NO: 1426
acuucaaaggugugagaag

SEQ ID NO: 111989 - RNA, 19 nt, Artificial Sequence
  Description of Artificial Sequence: Synthetic oligonucleotide
  Antisense strand to SEQ ID NO: 111988
cuucucacaccuuugaagu

SEQ ID NO: 111990 - RNA, 19 nt, Artificial Sequence
  Description of Artificial Sequence: Synthetic oligonucleotide
  Sense strand starting at position 2308 of SEQ ID NO: 1426
caggauucuuucuccucga

SEQ ID NO: 111991 - RNA, 19 nt, Artificial Sequence
  Description of Artificial Sequence: Synthetic oligonucleotide
  Antisense strand to SEQ ID NO: 111990
ucgaggagaaagaauccug

SEQ ID NO: 111992 - RNA, 19 nt, Artificial Sequence
  Description of Artificial Sequence: Synthetic oligonucleotide
  Sense strand starting at position 2599 of SEQ ID NO: 1426
uauauaaagucagcugaga

SEQ ID NO: 111993 - RNA, 19 nt, Artificial Sequence
  Description of Artificial Sequence: Synthetic oligonucleotide
  Antisense strand to SEQ ID NO: 111992
ucucagcugacuuuauaua

SEQ ID NO: 111994 - RNA, 19 nt, Artificial Sequence
  Description of Artificial Sequence: Synthetic oligonucleotide
  Sense strand starting at position 2797 of SEQ ID NO: 1426
guuuauagaugcucagacu

SEQ ID NO: 111995 - RNA, 19 nt, Artificial Sequence
  Description of Artificial Sequence: Synthetic oligonucleotide
  Antisense strand to SEQ ID NO: 111994
agucugagcaucuauaaac

SEQ ID NO: 111996 - RNA, 19 nt, Artificial Sequence
  Description of Artificial Sequence: Synthetic oligonucleotide
  Sense strand starting at position 2812 of SEQ ID NO: 1426
gacucuucgugucugaagu

SEQ ID NO: 111997 - RNA, 19 nt, Artificial Sequence
  Description of Artificial Sequence: Synthetic oligonucleotide
  Antisense strand to SEQ ID NO: 111996
acuucagacacgaagaguc

SEQ ID NO: 111998 - RNA, 19 nt, Artificial Sequence
  Description of Artificial Sequence: Synthetic oligonucleotide
  Sense strand starting at position 2820 of SEQ ID NO: 1426
gugucugaaguuuguuaac

SEQ ID NO: 111999 - RNA, 19 nt, Artificial Sequence
  Description of Artificial Sequence: Synthetic oligonucleotide
  Antisense strand to SEQ ID NO: 111998
guuaacaaacuucagacac

SEQ ID NO: 112000 - RNA, 19 nt, Artificial Sequence
  Description of Artificial Sequence: Synthetic oligonucleotide
  Sense strand starting at position 2822 of SEQ ID NO: 1426
gucugaaguuuguuaacau

SEQ ID NO: 112001 - RNA, 19 nt, Artificial Sequence
  Description of Artificial Sequence: Synthetic oligonucleotide
  Antisense strand to SEQ ID NO: 112000
auguuaacaaacuucagac

SEQ ID NO: 112002 - RNA, 19 nt, Artificial Sequence
  Description of Artificial Sequence: Synthetic oligonucleotide
  Sense strand starting at position 2914 of SEQ ID NO: 1426
auagucaguuucccucaau

SEQ ID NO: 112003 - RNA, 19 nt, Artificial Sequence
  Description of Artificial Sequence: Synthetic oligonucleotide
  Antisense strand to SEQ ID NO: 112002
auugagggaaacugacuau

SEQ ID NO: 112004 - RNA, 19 nt, Artificial Sequence
  Description of Artificial Sequence: Synthetic oligonucleotide
  Sense strand starting at position 3026 of SEQ ID NO: 1426
gcagcaagucugucuaugu

SEQ ID NO: 112005 - RNA, 19 nt, Artificial Sequence
  Description of Artificial Sequence: Synthetic oligonucleotide
  Antisense strand to SEQ ID NO: 112004
acauagacagacuugcugc

SEQ ID NO: 112006 - RNA, 19 nt, Artificial Sequence
  Description of Artificial Sequence: Synthetic oligonucleotide
  Sense strand starting at position 3033 of SEQ ID NO: 1426
gucugucuauguuuaauga

SEQ ID NO: 112007 - RNA, 19 nt, Artificial Sequence
  Description of Artificial Sequence: Synthetic oligonucleotide
  Antisense strand to SEQ ID NO: 112006
ucauuaaacauagacagac

SEQ ID NO: 112008 - RNA, 19 nt, Artificial Sequence
  Description of Artificial Sequence: Synthetic oligonucleotide
  Sense strand starting at position 3034 of SEQ ID NO: 1426
ucugucuauguuuaaugaa

SEQ ID NO: 112009 - RNA, 19 nt, Artificial Sequence
  Description of Artificial Sequence: Synthetic oligonucleotide
  Antisense strand to SEQ ID NO: 112008
uucauuaaacauagacaga

SEQ ID NO: 112010 - RNA, 19 nt, Artificial Sequence
  Description of Artificial Sequence: Synthetic oligonucleotide
  Sense strand starting at position 3079 of SEQ ID NO: 1426
aguguuagccauuaccauu

SEQ ID NO: 112011 - RNA, 19 nt, Artificial Sequence
  Description of Artificial Sequence: Synthetic oligonucleotide
  Antisense strand to SEQ ID NO: 112010
aaugguaauggcuaacacu

SEQ ID NO: 112012 - RNA, 19 nt, Artificial Sequence
  Description of Artificial Sequence: Synthetic oligonucleotide
  Sense strand starting at position 3548 of SEQ ID NO: 1426
guagaaaucuucccugccu

SEQ ID NO: 112013 - RNA, 19 nt, Artificial Sequence
  Description of Artificial Sequence: Synthetic oligonucleotide
  Antisense strand to SEQ ID NO: 112012
aggcagggaagauuucuac

SEQ ID NO: 112014 - RNA, 19 nt, Artificial Sequence
  Description of Artificial Sequence: Synthetic oligonucleotide
  Sense strand starting at position 3642 of SEQ ID NO: 1426
cugcaagauggccaucaua

SEQ ID NO: 112015 - RNA, 19 nt, Artificial Sequence
  Description of Artificial Sequence: Synthetic oligonucleotide
  Antisense strand to SEQ ID NO: 112014
uaugauggccaucuugcag

SEQ ID NO: 112016 - RNA, 19 nt, Artificial Sequence
  Description of Artificial Sequence: Synthetic oligonucleotide
  Sense strand starting at position 3645 of SEQ ID NO: 1426
caagauggccaucauaguu

SEQ ID NO: 112017 - RNA, 19 nt, Artificial Sequence
  Description of Artificial Sequence: Synthetic oligonucleotide
  Antisense strand to SEQ ID NO: 112016
aacuaugauggccaucuug

SEQ ID NO: 112018 - RNA, 19 nt, Artificial Sequence
  Description of Artificial Sequence: Synthetic oligonucleotide
  Sense strand starting at position 3653 of SEQ ID NO: 1426
ccaucauaguugucuuuau

SEQ ID NO: 112019 - RNA, 19 nt, Artificial Sequence
  Description of Artificial Sequence: Synthetic oligonucleotide
  Antisense strand to SEQ ID NO: 112018
auaaagacaacuaugaugg

SEQ ID NO: 112020 - RNA, 19 nt, Artificial Sequence
  Description of Artificial Sequence: Synthetic oligonucleotide
  Sense strand starting at position 3657 of SEQ ID NO: 1426
cauaguugucuuuauuggu

SEQ ID NO: 112021 - RNA, 19 nt, Artificial Sequence
  Description of Artificial Sequence: Synthetic oligonucleotide
  Antisense strand to SEQ ID NO: 112020
accaauaaagacaacuaug

SEQ ID NO: 112022 - RNA, 19 nt, Artificial Sequence
  Description of Artificial Sequence: Synthetic oligonucleotide
  Sense strand starting at position 3691 of SEQ ID NO: 1426
uagcacugugcugagaacu

SEQ ID NO: 112023 - RNA, 19 nt, Artificial Sequence
  Description of Artificial Sequence: Synthetic oligonucleotide
  Antisense strand to SEQ ID NO: 112022
aguucucagcacagugcua

SEQ ID NO: 112024 - RNA, 19 nt, Artificial Sequence
  Description of Artificial Sequence: Synthetic oligonucleotide
  Sense strand starting at position 3702 of SEQ ID NO: 1426
ugagaacuuuauggaaaug

SEQ ID NO: 112025 - RNA, 19 nt, Artificial Sequence
  Description of Artificial Sequence: Synthetic oligonucleotide
  Antisense strand to SEQ ID NO: 112024
cauuuccauaaaguucuca

SEQ ID NO: 112026 - RNA, 19 nt, Artificial Sequence
  Description of Artificial Sequence: Synthetic oligonucleotide
  Sense strand starting at position 3742 of SEQ ID NO: 1426
ccaggugguagauagcauu

SEQ ID NO: 112027 - RNA, 19 nt, Artificial Sequence
  Description of Artificial Sequence: Synthetic oligonucleotide
  Antisense strand to SEQ ID NO: 112026
aaugcuaucuaccaccugg

SEQ ID NO: 112028 - RNA, 19 nt, Artificial Sequence
  Description of Artificial Sequence: Synthetic oligonucleotide
  Sense strand starting at position 3748 of SEQ ID NO: 1426
gguagauagcauuguccuu

SEQ ID NO: 112029 - RNA, 19 nt, Artificial Sequence
  Description of Artificial Sequence: Synthetic oligonucleotide
  Antisense strand to SEQ ID NO: 112028
aaggacaaugcuaucuacc

SEQ ID NO: 112030 - RNA, 19 nt, Artificial Sequence
  Description of Artificial Sequence: Synthetic oligonucleotide
  Sense strand starting at position 3753 of SEQ ID NO: 1426
auagcauuguccuugcuua

SEQ ID NO: 112031 - RNA, 19 nt, Artificial Sequence
  Description of Artificial Sequence: Synthetic oligonucleotide
  Antisense strand to SEQ ID NO: 112030
uaagcaaggacaaugcuau

SEQ ID NO: 112032 - RNA, 19 nt, Artificial Sequence
  Description of Artificial Sequence: Synthetic oligonucleotide
  Sense strand starting at position 3866 of SEQ ID NO: 1426
cgcugaugucuguauccua

SEQ ID NO: 112033 - RNA, 19 nt, Artificial Sequence
  Description of Artificial Sequence: Synthetic oligonucleotide
  Antisense strand to SEQ ID NO: 112032
uaggauacagacaucagcg

SEQ ID NO: 112034 - RNA, 19 nt, Artificial Sequence
  Description of Artificial Sequence: Synthetic oligonucleotide
  Sense strand starting at position 3874 of SEQ ID NO: 1426
ucuguauccuagccuauuu

SEQ ID NO: 112035 - RNA, 19 nt, Artificial Sequence
  Description of Artificial Sequence: Synthetic oligonucleotide
  Antisense strand to SEQ ID NO: 112034
aaauaggcuaggauacaga

SEQ ID NO: 112036 - RNA, 19 nt, Artificial Sequence
  Description of Artificial Sequence: Synthetic oligonucleotide
  Sense strand starting at position 117 of SEQ ID NO: 1427
ccgguaugggaauguagau

SEQ ID NO: 112037 - RNA, 19 nt, Artificial Sequence
  Description of Artificial Sequence: Synthetic oligonucleotide
  Antisense strand to SEQ ID NO: 112036
aucuacauucccauaccgg

SEQ ID NO: 112038 - RNA, 19 nt, Artificial Sequence
  Description of Artificial Sequence: Synthetic oligonucleotide
  Sense strand starting at position 203 of SEQ ID NO: 1427
cagggagagugcuuuaaug

SEQ ID NO: 112039 - RNA, 19 nt, Artificial Sequence
  Description of Artificial Sequence: Synthetic oligonucleotide
  Antisense strand to SEQ ID NO: 112038
cauuaaagcacucucccug

SEQ ID NO: 112040 - RNA, 19 nt, Artificial Sequence
  Description of Artificial Sequence: Synthetic oligonucleotide
  Sense strand starting at position 205 of SEQ ID NO: 1427
gggagagugcuuuaauggu

SEQ ID NO: 112041 - RNA, 19 nt, Artificial Sequence
  Description of Artificial Sequence: Synthetic oligonucleotide
  Antisense strand to SEQ ID NO: 112040
accauuaaagcacucuccc

SEQ ID NO: 112042 - RNA, 19 nt, Artificial Sequence
  Description of Artificial Sequence: Synthetic oligonucleotide
  Sense strand starting at position 209 of SEQ ID NO: 1427
gagugcuuuaaugguggaa

SEQ ID NO: 112043 - RNA, 19 nt, Artificial Sequence
  Description of Artificial Sequence: Synthetic oligonucleotide
  Antisense strand to SEQ ID NO: 112042
uuccaccauuaaagcacuc

SEQ ID NO: 112044 - RNA, 19 nt, Artificial Sequence
  Description of Artificial Sequence: Synthetic oligonucleotide
  Sense strand starting at position 221 of SEQ ID NO: 1427
gguggaauuccaggcagag

SEQ ID NO: 112045 - RNA, 19 nt, Artificial Sequence
  Description of Artificial Sequence: Synthetic oligonucleotide
  Antisense strand to SEQ ID NO: 112044
cucugccuggaauuccacc

SEQ ID NO: 112046 - RNA, 19 nt, Artificial Sequence
  Description of Artificial Sequence: Synthetic oligonucleotide
  Sense strand starting at position 328 of SEQ ID NO: 1427
ccucaagugcuugagauau

SEQ ID NO: 112047 - RNA, 19 nt, Artificial Sequence
  Description of Artificial Sequence: Synthetic oligonucleotide
  Antisense strand to SEQ ID NO: 112046
auaucucaagcacuugagg

SEQ ID NO: 112048 - RNA, 19 nt, Artificial Sequence
  Description of Artificial Sequence: Synthetic oligonucleotide
  Sense strand starting at position 423 of SEQ ID NO: 1427
ccaugaagaugccuugaga

SEQ ID NO: 112049 - RNA, 19 nt, Artificial Sequence
  Description of Artificial Sequence: Synthetic oligonucleotide
  Antisense strand to SEQ ID NO: 112048
ucucaaggcaucuucaugg

SEQ ID NO: 112050 - RNA, 19 nt, Artificial Sequence
  Description of Artificial Sequence: Synthetic oligonucleotide
  Sense strand starting at position 464 of SEQ ID NO: 1427
uuggguugguuucuuugaa

SEQ ID NO: 112051 - RNA, 19 nt, Artificial Sequence
  Description of Artificial Sequence: Synthetic oligonucleotide
  Antisense strand to SEQ ID NO: 112050
uucaaagaaaccaacccaa

SEQ ID NO: 112052 - RNA, 19 nt, Artificial Sequence
  Description of Artificial Sequence: Synthetic oligonucleotide
  Sense strand starting at position 465 of SEQ ID NO: 1427
uggguugguuucuuugaaa

SEQ ID NO: 112053 - RNA, 19 nt, Artificial Sequence
  Description of Artificial Sequence: Synthetic oligonucleotide
  Antisense strand to SEQ ID NO: 112052
uuucaaagaaaccaaccca

SEQ ID NO: 112054 - RNA, 19 nt, Artificial Sequence
  Description of Artificial Sequence: Synthetic oligonucleotide
  Sense strand starting at position 472 of SEQ ID NO: 1427
guuucuuugaaaugaggga

SEQ ID NO: 112055 - RNA, 19 nt, Artificial Sequence
  Description of Artificial Sequence: Synthetic oligonucleotide
  Antisense strand to SEQ ID NO: 112054
ucccucauuucaaagaaac

SEQ ID NO: 112056 - RNA, 19 nt, Artificial Sequence
  Description of Artificial Sequence: Synthetic oligonucleotide
  Sense strand starting at position 533 of SEQ ID NO: 1427
gcuuauaauguugacuuua

SEQ ID NO: 112057 - RNA, 19 nt, Artificial Sequence
  Description of Artificial Sequence: Synthetic oligonucleotide
  Antisense strand to SEQ ID NO: 112056
uaaagucaacauuauaagc

SEQ ID NO: 112058 - RNA, 19 nt, Artificial Sequence
  Description of Artificial Sequence: Synthetic oligonucleotide
  Sense strand starting at position 569 of SEQ ID NO: 1427
ugugcucaaagguaagaaa

SEQ ID NO: 112059 - RNA, 19 nt, Artificial Sequence
  Description of Artificial Sequence: Synthetic oligonucleotide
  Antisense strand to SEQ ID NO: 112058
uuucuuaccuuugagcaca

SEQ ID NO: 112060 - RNA, 19 nt, Artificial Sequence
  Description of Artificial Sequence: Synthetic oligonucleotide
  Sense strand starting at position 732 of SEQ ID NO: 1427
cagcacugucagggaaaga

SEQ ID NO: 112061 - RNA, 19 nt, Artificial Sequence
  Description of Artificial Sequence: Synthetic oligonucleotide
  Antisense strand to SEQ ID NO: 112060
ucuuucccugacagugcug

SEQ ID NO: 112062 - RNA, 19 nt, Artificial Sequence
  Description of Artificial Sequence: Synthetic oligonucleotide
  Sense strand starting at position 755 of SEQ ID NO: 1427
gggugaugaugguuagggu

SEQ ID NO: 112063 - RNA, 19 nt, Artificial Sequence
  Description of Artificial Sequence: Synthetic oligonucleotide
  Antisense strand to SEQ ID NO: 112062
acccuaaccaucaucaccc

SEQ ID NO: 112064 - RNA, 19 nt, Artificial Sequence
  Description of Artificial Sequence: Synthetic oligonucleotide
  Sense strand starting at position 828 of SEQ ID NO: 1427
uuagucaucagacguuuga

SEQ ID NO: 112065 - RNA, 19 nt, Artificial Sequence
  Description of Artificial Sequence: Synthetic oligonucleotide
  Antisense strand to SEQ ID NO: 112064
ucaaacgucugaugacuaa

SEQ ID NO: 112066 - RNA, 19 nt, Artificial Sequence
  Description of Artificial Sequence: Synthetic oligonucleotide
  Sense strand starting at position 894 of SEQ ID NO: 1427
ggauuaucauugcucuggu

SEQ ID NO: 112067 - RNA, 19 nt, Artificial Sequence
  Description of Artificial Sequence: Synthetic oligonucleotide
  Antisense strand to SEQ ID NO: 112066
accagagcaaugauaaucc

SEQ ID NO: 112068 - RNA, 19 nt, Artificial Sequence
  Description of Artificial Sequence: Synthetic oligonucleotide
  Sense strand starting at position 960 of SEQ ID NO: 1427
ggaggaaauguuugguucu

SEQ ID NO: 112069 - RNA, 19 nt, Artificial Sequence
  Description of Artificial Sequence: Synthetic oligonucleotide
  Antisense strand to SEQ ID NO: 112068
agaaccaaacauuuccucc

SEQ ID NO: 112070 - RNA, 19 nt, Artificial Sequence
  Description of Artificial Sequence: Synthetic oligonucleotide
  Sense strand starting at position 962 of SEQ ID NO: 1427
aggaaauguuugguucucu

SEQ ID NO: 112071 - RNA, 19 nt, Artificial Sequence
  Description of Artificial Sequence: Synthetic oligonucleotide
  Antisense strand to SEQ ID NO: 112070
agagaaccaaacauuuccu

SEQ ID NO: 112072 - RNA, 19 nt, Artificial Sequence
  Description of Artificial Sequence: Synthetic oligonucleotide
  Sense strand starting at position 963 of SEQ ID NO: 1427
ggaaauguuugguucucuu

SEQ ID NO: 112073 - RNA, 19 nt, Artificial Sequence
  Description of Artificial Sequence: Synthetic oligonucleotide
  Antisense strand to SEQ ID NO: 112072
aagagaaccaaacauuucc

SEQ ID NO: 112074 - RNA, 19 nt, Artificial Sequence
  Description of Artificial Sequence: Synthetic oligonucleotide
  Sense strand starting at position 1067 of SEQ ID NO: 1427
agguauugugggcauggua

SEQ ID NO: 112075 - RNA, 19 nt, Artificial Sequence
  Description of Artificial Sequence: Synthetic oligonucleotide
  Antisense strand to SEQ ID NO: 112074
uaccaugcccacaauaccu

SEQ ID NO: 112076 - RNA, 19 nt, Artificial Sequence
  Description of Artificial Sequence: Synthetic oligonucleotide
  Sense strand starting at position 1216 of SEQ ID NO: 1427
ugacucuaacagugucaca

SEQ ID NO: 112077 - RNA, 19 nt, Artificial Sequence
  Description of Artificial Sequence: Synthetic oligonucleotide
  Antisense strand to SEQ ID NO: 112076
ugugacacuguuagaguca

SEQ ID NO: 112078 - RNA, 19 nt, Artificial Sequence
  Description of Artificial Sequence: Synthetic oligonucleotide
  Sense strand starting at position 2073 of SEQ ID NO: 1427
aggguuaucucugauuuau

SEQ ID NO: 112079 - RNA, 19 nt, Artificial Sequence
  Description of Artificial Sequence: Synthetic oligonucleotide
  Antisense strand to SEQ ID NO: 112078
auaaaucagagauaacccu

SEQ ID NO: 112080 - RNA, 19 nt, Artificial Sequence
  Description of Artificial Sequence: Synthetic oligonucleotide
  Sense strand starting at position 2175 of SEQ ID NO: 1427
gccgaccuuguauagaaau

SEQ ID NO: 112081 - RNA, 19 nt, Artificial Sequence
  Description of Artificial Sequence: Synthetic oligonucleotide
  Antisense strand to SEQ ID NO: 112080
auuucuauacaaggucggc

SEQ ID NO: 112082 - RNA, 19 nt, Artificial Sequence
  Description of Artificial Sequence: Synthetic oligonucleotide
  Sense strand starting at position 2687 of SEQ ID NO: 1427
ucuuauaguccuuacagca

SEQ ID NO: 112083 - RNA, 19 nt, Artificial Sequence
  Description of Artificial Sequence: Synthetic oligonucleotide
  Antisense strand to SEQ ID NO: 112082
ugcuguaaggacuauaaga

SEQ ID NO: 112084 - RNA, 19 nt, Artificial Sequence
  Description of Artificial Sequence: Synthetic oligonucleotide
  Sense strand starting at position 2745 of SEQ ID NO: 1427
uggguaugaccaggaacuu

SEQ ID NO: 112085 - RNA, 19 nt, Artificial Sequence
  Description of Artificial Sequence: Synthetic oligonucleotide
  Antisense strand to SEQ ID NO: 112084
aaguuccuggucauaccca

SEQ ID NO: 112086 - RNA, 19 nt, Artificial Sequence
  Description of Artificial Sequence: Synthetic oligonucleotide
  Sense strand starting at position 2802 of SEQ ID NO: 1427
agcagauuucgcuggaauu

SEQ ID NO: 112087 - RNA, 19 nt, Artificial Sequence
  Description of Artificial Sequence: Synthetic oligonucleotide
  Antisense strand to SEQ ID NO: 112086
aauuccagcgaaaucugcu

SEQ ID NO: 112088 - RNA, 19 nt, Artificial Sequence
  Description of Artificial Sequence: Synthetic oligonucleotide
  Sense strand starting at position 2834 of SEQ ID NO: 1427
uccagugaugacgaaguca

SEQ ID NO: 112089 - RNA, 19 nt, Artificial Sequence
  Description of Artificial Sequence: Synthetic oligonucleotide
  Antisense strand to SEQ ID NO: 112088
ugacuucgucaucacugga

SEQ ID NO: 112090 - RNA, 19 nt, Artificial Sequence
  Description of Artificial Sequence: Synthetic oligonucleotide
  Sense strand starting at position 2854 of SEQ ID NO: 1427
ccaagaaugccuuauaugu

SEQ ID NO: 112091 - RNA, 19 nt, Artificial Sequence
  Description of Artificial Sequence: Synthetic oligonucleotide
  Antisense strand to SEQ ID NO: 112090
acauauaaggcauucuugg

SEQ ID NO: 112092 - RNA, 19 nt, Artificial Sequence
  Description of Artificial Sequence: Synthetic oligonucleotide
  Sense strand starting at position 3261 of SEQ ID NO: 1427
cuggaaugaugguuaucua

SEQ ID NO: 112093 - RNA, 19 nt, Artificial Sequence
  Description of Artificial Sequence: Synthetic oligonucleotide
  Antisense strand to SEQ ID NO: 112092
uagauaaccaucauuccag

SEQ ID NO: 112094 - RNA, 19 nt, Artificial Sequence
  Description of Artificial Sequence: Synthetic oligonucleotide
  Sense strand starting at position 3367 of SEQ ID NO: 1427
uggccuggugauuagaagu

SEQ ID NO: 112095 - RNA, 19 nt, Artificial Sequence
  Description of Artificial Sequence: Synthetic oligonucleotide
  Antisense strand to SEQ ID NO: 112094
acuucuaaucaccaggcca

SEQ ID NO: 112096 - RNA, 19 nt, Artificial Sequence
  Description of Artificial Sequence: Synthetic oligonucleotide
  Sense strand starting at position 3373 of SEQ ID NO: 1427
ggugauuagaagugagacu

SEQ ID NO: 112097 - RNA, 19 nt, Artificial Sequence
  Description of Artificial Sequence: Synthetic oligonucleotide
  Antisense strand to SEQ ID NO: 112096
agucucacuucuaaucacc

SEQ ID NO: 112098 - RNA, 19 nt, Artificial Sequence
  Description of Artificial Sequence: Synthetic oligonucleotide
  Sense strand starting at position 3471 of SEQ ID NO: 1427
uccagagaauuggugucaa

SEQ ID NO: 112099 - RNA, 19 nt, Artificial Sequence
  Description of Artificial Sequence: Synthetic oligonucleotide
  Antisense strand to SEQ ID NO: 112098
uugacaccaauucucugga

SEQ ID NO: 112100 - RNA, 19 nt, Artificial Sequence
  Description of Artificial Sequence: Synthetic oligonucleotide
  Sense strand starting at position 3627 of SEQ ID NO: 1427
gguuauuauuccucacuuc

SEQ ID NO: 112101 - RNA, 19 nt, Artificial Sequence
  Description of Artificial Sequence: Synthetic oligonucleotide
  Antisense strand to SEQ ID NO: 112100
gaagugaggaauaauaacc

SEQ ID NO: 112102 - RNA, 19 nt, Artificial Sequence
  Description of Artificial Sequence: Synthetic oligonucleotide
  Sense strand starting at position 3651 of SEQ ID NO: 1427
aggaaaugguguucaugaa

SEQ ID NO: 112103 - RNA, 19 nt, Artificial Sequence
  Description of Artificial Sequence: Synthetic oligonucleotide
  Antisense strand to SEQ ID NO: 112102
uucaugaacaccauuuccu

SEQ ID NO: 112104 - RNA, 19 nt, Artificial Sequence
  Description of Artificial Sequence: Synthetic oligonucleotide
  Sense strand starting at position 3704 of SEQ ID NO: 1427
augauaaauccuggauucu

SEQ ID NO: 112105 - RNA, 19 nt, Artificial Sequence
  Description of Artificial Sequence: Synthetic oligonucleotide
  Antisense strand to SEQ ID NO: 112104
agaauccaggauuuaucau

SEQ ID NO: 112106 - RNA, 19 nt, Artificial Sequence
  Description of Artificial Sequence: Synthetic oligonucleotide
  Sense strand starting at position 3728 of SEQ ID NO: 1427
gucugauuagucuagccag

SEQ ID NO: 112107 - RNA, 19 nt, Artificial Sequence
  Description of Artificial Sequence: Synthetic oligonucleotide
  Antisense strand to SEQ ID NO: 112106
cuggcuagacuaaucagac

SEQ ID NO: 112108 - RNA, 19 nt, Artificial Sequence
  Description of Artificial Sequence: Synthetic oligonucleotide
  Sense strand starting at position 3773 of SEQ ID NO: 1427
uaaucacugccagggugau

SEQ ID NO: 112109 - RNA, 19 nt, Artificial Sequence
  Description of Artificial Sequence: Synthetic oligonucleotide
  Antisense strand to SEQ ID NO: 112108
aucacccuggcagugauua

SEQ ID NO: 112110 - RNA, 19 nt, Artificial Sequence
  Description of Artificial Sequence: Synthetic oligonucleotide
  Sense strand starting at position 3785 of SEQ ID NO: 1427
gggugaucacaagguguuu

SEQ ID NO: 112111 - RNA, 19 nt, Artificial Sequence
  Description of Artificial Sequence: Synthetic oligonucleotide
  Antisense strand to SEQ ID NO: 112110
aaacaccuugugaucaccc

SEQ ID NO: 112112 - RNA, 19 nt, Artificial Sequence
  Description of Artificial Sequence: Synthetic oligonucleotide
  Sense strand starting at position 3828 of SEQ ID NO: 1427
ucccgugucaucuaugaag

SEQ ID NO: 112113 - RNA, 19 nt, Artificial Sequence
  Description of Artificial Sequence: Synthetic oligonucleotide
  Antisense strand to SEQ ID NO: 112112
cuucauagaugacacggga

SEQ ID NO: 112114 - RNA, 19 nt, Artificial Sequence
  Description of Artificial Sequence: Synthetic oligonucleotide
  Sense strand starting at position 3965 of SEQ ID NO: 1427
ggguaagggcuguguaaag

SEQ ID NO: 112115 - RNA, 19 nt, Artificial Sequence
  Description of Artificial Sequence: Synthetic oligonucleotide
  Antisense strand to SEQ ID NO: 112114
cuuuacacagcccuuaccc

SEQ ID NO: 112116 - RNA, 19 nt, Artificial Sequence
  Description of Artificial Sequence: Synthetic oligonucleotide
  Sense strand starting at position 3942 of SEQ ID NO: 1428
ucauuaugguuccuaggca

SEQ ID NO: 112117 - RNA, 19 nt, Artificial Sequence
  Description of Artificial Sequence: Synthetic oligonucleotide
  Antisense strand to SEQ ID NO: 112116
ugccuaggaaccauaauga

SEQ ID NO: 112118 - RNA, 19 nt, Artificial Sequence
  Description of Artificial Sequence: Synthetic oligonucleotide
  Sense strand starting at position 3880 of SEQ ID NO: 1428
gcaucccuccaugagcaau

SEQ ID NO: 112119 - RNA, 19 nt, Artificial Sequence
  Description of Artificial Sequence: Synthetic oligonucleotide
  Antisense strand to SEQ ID NO: 112118
auugcucauggagggaugc

SEQ ID NO: 112120 - RNA, 19 nt, Artificial Sequence
  Description of Artificial Sequence: Synthetic oligonucleotide
  Sense strand starting at position 3865 of SEQ ID NO: 1428
gcaauauauuguccugcau

SEQ ID NO: 112121 - RNA, 19 nt, Artificial Sequence
  Description of Artificial Sequence: Synthetic oligonucleotide
  Antisense strand to SEQ ID NO: 112120
augcaggacaauauauugc

SEQ ID NO: 112122 - RNA, 19 nt, Artificial Sequence
  Description of Artificial Sequence: Synthetic oligonucleotide
  Sense strand starting at position 3864 of SEQ ID NO: 1428
ggcaauauauuguccugca

SEQ ID NO: 112123 - RNA, 19 nt, Artificial Sequence
  Description of Artificial Sequence: Synthetic oligonucleotide
  Antisense strand to SEQ ID NO: 112122
ugcaggacaauauauugcc

SEQ ID NO: 112124 - RNA, 19 nt, Artificial Sequence
  Description of Artificial Sequence: Synthetic oligonucleotide
  Sense strand starting at position 3305 of SEQ ID NO: 1428
uugcauucucuuuauguau

SEQ ID NO: 112125 - RNA, 19 nt, Artificial Sequence
  Description of Artificial Sequence: Synthetic oligonucleotide
  Antisense strand to SEQ ID NO: 112124
auacauaaagagaaugcaa

SEQ ID NO: 112126 - RNA, 19 nt, Artificial Sequence
  Description of Artificial Sequence: Synthetic oligonucleotide
  Sense strand starting at position 3304 of SEQ ID NO: 1428
cuugcauucucuuuaugua

SEQ ID NO: 112127 - RNA, 19 nt, Artificial Sequence
  Description of Artificial Sequence: Synthetic oligonucleotide
  Antisense strand to SEQ ID NO: 112126
uacauaaagagaaugcaag

SEQ ID NO: 112128 - RNA, 19 nt, Artificial Sequence
  Description of Artificial Sequence: Synthetic oligonucleotide
  Sense strand starting at position 3293 of SEQ ID NO: 1428
gcaugcuuuggcuugcauu

SEQ ID NO: 112129 - RNA, 19 nt, Artificial Sequence
  Description of Artificial Sequence: Synthetic oligonucleotide
  Antisense strand to SEQ ID NO: 112128
aaugcaagccaaagcaugc

SEQ ID NO: 112130 - RNA, 19 nt, Artificial Sequence
  Description of Artificial Sequence: Synthetic oligonucleotide
  Sense strand starting at position 3257 of SEQ ID NO: 1428
gcaaauuguggucgauagg

SEQ ID NO: 112131 - RNA, 19 nt, Artificial Sequence
  Description of Artificial Sequence: Synthetic oligonucleotide
  Antisense strand to SEQ ID NO: 112130
ccuaucgaccacaauuugc

SEQ ID NO: 112132 - RNA, 19 nt, Artificial Sequence
  Description of Artificial Sequence: Synthetic oligonucleotide
  Sense strand starting at position 3256 of SEQ ID NO: 1428
agcaaauuguggucgauag

SEQ ID NO: 112133 - RNA, 19 nt, Artificial Sequence
  Description of Artificial Sequence: Synthetic oligonucleotide
  Antisense strand to SEQ ID NO: 112132
cuaucgaccacaauuugcu

SEQ ID NO: 112134 - RNA, 19 nt, Artificial Sequence
  Description of Artificial Sequence: Synthetic oligonucleotide
  Sense strand starting at position 3187 of SEQ ID NO: 1428
agagcagaauguugaagua

SEQ ID NO: 112135 - RNA, 19 nt, Artificial Sequence
  Description of Artificial Sequence: Synthetic oligonucleotide
  Antisense strand to SEQ ID NO: 112134
uacuucaacauucugcucu

SEQ ID NO: 112136 - RNA, 19 nt, Artificial Sequence
  Description of Artificial Sequence: Synthetic oligonucleotide
  Sense strand starting at position 3170 of SEQ ID NO: 1428
agguauucuguguagacag

SEQ ID NO: 112137 - RNA, 19 nt, Artificial Sequence
  Description of Artificial Sequence: Synthetic oligonucleotide
  Antisense strand to SEQ ID NO: 112136
cugucuacacagaauaccu

SEQ ID NO: 112138 - RNA, 19 nt, Artificial Sequence
  Description of Artificial Sequence: Synthetic oligonucleotide
  Sense strand starting at position 3169 of SEQ ID NO: 1428
aagguauucuguguagaca

SEQ ID NO: 112139 - RNA, 19 nt, Artificial Sequence
  Description of Artificial Sequence: Synthetic oligonucleotide
  Antisense strand to SEQ ID NO: 112138
ugucuacacagaauaccuu

SEQ ID NO: 112140 - RNA, 19 nt, Artificial Sequence
  Description of Artificial Sequence: Synthetic oligonucleotide
  Sense strand starting at position 3168 of SEQ ID NO: 1428
aaagguauucuguguagac

SEQ ID NO: 112141 - RNA, 19 nt, Artificial Sequence
  Description of Artificial Sequence: Synthetic oligonucleotide
  Antisense strand to SEQ ID NO: 112140
gucuacacagaauaccuuu

SEQ ID NO: 112142 - RNA, 19 nt, Artificial Sequence
  Description of Artificial Sequence: Synthetic oligonucleotide
  Sense strand starting at position 3164 of SEQ ID NO: 1428
ugagaaagguauucugugu

SEQ ID NO: 112143 - RNA, 19 nt, Artificial Sequence
  Description of Artificial Sequence: Synthetic oligonucleotide
  Antisense strand to SEQ ID NO: 112142
acacagaauaccuuucuca

SEQ ID NO: 112144 - RNA, 19 nt, Artificial Sequence
  Description of Artificial Sequence: Synthetic oligonucleotide
  Sense strand starting at position 3082 of SEQ ID NO: 1428
gacucagaugagggcuauu

SEQ ID NO: 112145 - RNA, 19 nt, Artificial Sequence
  Description of Artificial Sequence: Synthetic oligonucleotide
  Antisense strand to SEQ ID NO: 112144
aauagcccucaucugaguc

SEQ ID NO: 112146 - RNA, 19 nt, Artificial Sequence
  Description of Artificial Sequence: Synthetic oligonucleotide
  Sense strand starting at position 3065 of SEQ ID NO: 1428
uggauaaauugcuaaagga

SEQ ID NO: 112147 - RNA, 19 nt, Artificial Sequence
  Description of Artificial Sequence: Synthetic oligonucleotide
  Antisense strand to SEQ ID NO: 112146
uccuuuagcaauuuaucca

SEQ ID NO: 112148 - RNA, 19 nt, Artificial Sequence
  Description of Artificial Sequence: Synthetic oligonucleotide
  Sense strand starting at position 3016 of SEQ ID NO: 1428
gggacaaauaaccguaaug

SEQ ID NO: 112149 - RNA, 19 nt, Artificial Sequence
  Description of Artificial Sequence: Synthetic oligonucleotide
  Antisense strand to SEQ ID NO: 112148
cauuacgguuauuuguccc

SEQ ID NO: 112150 - RNA, 19 nt, Artificial Sequence
  Description of Artificial Sequence: Synthetic oligonucleotide
  Sense strand starting at position 3005 of SEQ ID NO: 1428
gagcuccauuugggacaaa

SEQ ID NO: 112151 - RNA, 19 nt, Artificial Sequence
  Description of Artificial Sequence: Synthetic oligonucleotide
  Antisense strand to SEQ ID NO: 112150
uuugucccaaauggagcuc

SEQ ID NO: 112152 - RNA, 19 nt, Artificial Sequence
  Description of Artificial Sequence: Synthetic oligonucleotide
  Sense strand starting at position 2983 of SEQ ID NO: 1428
auauauaguccgugccuuu

SEQ ID NO: 112153 - RNA, 19 nt, Artificial Sequence
  Description of Artificial Sequence: Synthetic oligonucleotide
  Antisense strand to SEQ ID NO: 112152
aaaggcacggacuauauau

SEQ ID NO: 112154 - RNA, 19 nt, Artificial Sequence
  Description of Artificial Sequence: Synthetic oligonucleotide
  Sense strand starting at position 2929 of SEQ ID NO: 1428
gagaaccuucggugcauua

SEQ ID NO: 112155 - RNA, 19 nt, Artificial Sequence
  Description of Artificial Sequence: Synthetic oligonucleotide
  Antisense strand to SEQ ID NO: 112154
uaaugcaccgaagguucuc

SEQ ID NO: 112156 - RNA, 19 nt, Artificial Sequence
  Description of Artificial Sequence: Synthetic oligonucleotide
  Sense strand starting at position 2928 of SEQ ID NO: 1428
agagaaccuucggugcauu

SEQ ID NO: 112157 - RNA, 19 nt, Artificial Sequence
  Description of Artificial Sequence: Synthetic oligonucleotide
  Antisense strand to SEQ ID NO: 112156
aaugcaccgaagguucucu

SEQ ID NO: 112158 - RNA, 19 nt, Artificial Sequence
  Description of Artificial Sequence: Synthetic oligonucleotide
  Sense strand starting at position 2927 of SEQ ID NO: 1428
cagagaaccuucggugcau

SEQ ID NO: 112159 - RNA, 19 nt, Artificial Sequence
  Description of Artificial Sequence: Synthetic oligonucleotide
  Antisense strand to SEQ ID NO: 112158
augcaccgaagguucucug

SEQ ID NO: 112160 - RNA, 19 nt, Artificial Sequence
  Description of Artificial Sequence: Synthetic oligonucleotide
  Sense strand starting at position 2915 of SEQ ID NO: 1428
agcaaacauuuccagagaa

SEQ ID NO: 112161 - RNA, 19 nt, Artificial Sequence
  Description of Artificial Sequence: Synthetic oligonucleotide
  Antisense strand to SEQ ID NO: 112160
uucucuggaaauguuugcu

SEQ ID NO: 112162 - RNA, 19 nt, Artificial Sequence
  Description of Artificial Sequence: Synthetic oligonucleotide
  Sense strand starting at position 2812 of SEQ ID NO: 1428
cagugugcccucuaauggu

SEQ ID NO: 112163 - RNA, 19 nt, Artificial Sequence
  Description of Artificial Sequence: Synthetic oligonucleotide
  Antisense strand to SEQ ID NO: 112162
accauuagagggcacacug

SEQ ID NO: 112164 - RNA, 19 nt, Artificial Sequence
  Description of Artificial Sequence: Synthetic oligonucleotide
  Sense strand starting at position 2808 of SEQ ID NO: 1428
gaaucagugugcccucuaa

SEQ ID NO: 112165 - RNA, 19 nt, Artificial Sequence
  Description of Artificial Sequence: Synthetic oligonucleotide
  Antisense strand to SEQ ID NO: 112164
uuagagggcacacugauuc

SEQ ID NO: 112166 - RNA, 19 nt, Artificial Sequence
  Description of Artificial Sequence: Synthetic oligonucleotide
  Sense strand starting at position 2734 of SEQ ID NO: 1428
gaccacuggaggcguaaau

SEQ ID NO: 112167 - RNA, 19 nt, Artificial Sequence
  Description of Artificial Sequence: Synthetic oligonucleotide
  Antisense strand to SEQ ID NO: 112166
auuuacgccuccagugguc

SEQ ID NO: 112168 - RNA, 19 nt, Artificial Sequence
  Description of Artificial Sequence: Synthetic oligonucleotide
  Sense strand starting at position 2714 of SEQ ID NO: 1428
aaaugaaggcugugggaga

SEQ ID NO: 112169 - RNA, 19 nt, Artificial Sequence
  Description of Artificial Sequence: Synthetic oligonucleotide
  Antisense strand to SEQ ID NO: 112168
ucucccacagccuucauuu

SEQ ID NO: 112170 - RNA, 19 nt, Artificial Sequence
  Description of Artificial Sequence: Synthetic oligonucleotide
  Sense strand starting at position 2697 of SEQ ID NO: 1428
uguguugaggguuguuaaa

SEQ ID NO: 112171 - RNA, 19 nt, Artificial Sequence
  Description of Artificial Sequence: Synthetic oligonucleotide
  Antisense strand to SEQ ID NO: 112170
uuuaacaacccucaacaca

SEQ ID NO: 112172 - RNA, 19 nt, Artificial Sequence
  Description of Artificial Sequence: Synthetic oligonucleotide
  Sense strand starting at position 2608 of SEQ ID NO: 1428
cccaaauuguaggaagaug

SEQ ID NO: 112173 - RNA, 19 nt, Artificial Sequence
  Description of Artificial Sequence: Synthetic oligonucleotide
  Antisense strand to SEQ ID NO: 112172
caucuuccuacaauuuggg

SEQ ID NO: 112174 - RNA, 19 nt, Artificial Sequence
  Description of Artificial Sequence: Synthetic oligonucleotide
  Sense strand starting at position 2607 of SEQ ID NO: 1428
gcccaaauuguaggaagau

SEQ ID NO: 112175 - RNA, 19 nt, Artificial Sequence
  Description of Artificial Sequence: Synthetic oligonucleotide
  Antisense strand to SEQ ID NO: 112174
aucuuccuacaauuugggc

SEQ ID NO: 112176 - RNA, 19 nt, Artificial Sequence
  Description of Artificial Sequence: Synthetic oligonucleotide
  Sense strand starting at position 2578 of SEQ ID NO: 1428
uggugucagagaggaauua

SEQ ID NO: 112177 - RNA, 19 nt, Artificial Sequence
  Description of Artificial Sequence: Synthetic oligonucleotide
  Antisense strand to SEQ ID NO: 112176
uaauuccucucugacacca

SEQ ID NO: 112178 - RNA, 19 nt, Artificial Sequence
  Description of Artificial Sequence: Synthetic oligonucleotide
  Sense strand starting at position 2550 of SEQ ID NO: 1428
ugugcagauuagcugugaa

SEQ ID NO: 112179 - RNA, 19 nt, Artificial Sequence
  Description of Artificial Sequence: Synthetic oligonucleotide
  Antisense strand to SEQ ID NO: 112178
uucacagcuaaucugcaca

SEQ ID NO: 112180 - RNA, 19 nt, Artificial Sequence
  Description of Artificial Sequence: Synthetic oligonucleotide
  Sense strand starting at position 2541 of SEQ ID NO: 1428
cuuccagacugugcagauu

SEQ ID NO: 112181 - RNA, 19 nt, Artificial Sequence
  Description of Artificial Sequence: Synthetic oligonucleotide
  Antisense strand to SEQ ID NO: 112180
aaucugcacagucuggaag

SEQ ID NO: 112182 - RNA, 19 nt, Artificial Sequence
  Description of Artificial Sequence: Synthetic oligonucleotide
  Sense strand starting at position 2485 of SEQ ID NO: 1428
cagagugcuuguuacccau

SEQ ID NO: 112183 - RNA, 19 nt, Artificial Sequence
  Description of Artificial Sequence: Synthetic oligonucleotide
  Antisense strand to SEQ ID NO: 112182
auggguaacaagcacucug

SEQ ID NO: 112184 - RNA, 19 nt, Artificial Sequence
  Description of Artificial Sequence: Synthetic oligonucleotide
  Sense strand starting at position 2455 of SEQ ID NO: 1428
uggaaaguccguuaaaguu

SEQ ID NO: 112185 - RNA, 19 nt, Artificial Sequence
  Description of Artificial Sequence: Synthetic oligonucleotide
  Antisense strand to SEQ ID NO: 112184
aacuuuaacggacuuucca

SEQ ID NO: 112186 - RNA, 19 nt, Artificial Sequence
  Description of Artificial Sequence: Synthetic oligonucleotide
  Sense strand starting at position 2453 of SEQ ID NO: 1428
ucuggaaaguccguuaaag

SEQ ID NO: 112187 - RNA, 19 nt, Artificial Sequence
  Description of Artificial Sequence: Synthetic oligonucleotide
  Antisense strand to SEQ ID NO: 112186
cuuuaacggacuuuccaga

SEQ ID NO: 112188 - RNA, 19 nt, Artificial Sequence
  Description of Artificial Sequence: Synthetic oligonucleotide
  Sense strand starting at position 2442 of SEQ ID NO: 1428
ggugacggguuucuggaaa

SEQ ID NO: 112189 - RNA, 19 nt, Artificial Sequence
  Description of Artificial Sequence: Synthetic oligonucleotide
  Antisense strand to SEQ ID NO: 112188
uuuccagaaacccgucacc

SEQ ID NO: 112190 - RNA, 19 nt, Artificial Sequence
  Description of Artificial Sequence: Synthetic oligonucleotide
  Sense strand starting at position 2380 of SEQ ID NO: 1428
uugggauccuggcaggaaa

SEQ ID NO: 112191 - RNA, 19 nt, Artificial Sequence
  Description of Artificial Sequence: Synthetic oligonucleotide
  Antisense strand to SEQ ID NO: 112190
uuuccugccaggaucccaa

SEQ ID NO: 112192 - RNA, 19 nt, Artificial Sequence
  Description of Artificial Sequence: Synthetic oligonucleotide
  Sense strand starting at position 304 of SEQ ID NO: 1428
gugagaguuaagugguaac

SEQ ID NO: 112193 - RNA, 19 nt, Artificial Sequence
  Description of Artificial Sequence: Synthetic oligonucleotide
  Antisense strand to SEQ ID NO: 112192
guuaccacuuaacucucac

SEQ ID NO: 112194 - RNA, 19 nt, Artificial Sequence
  Description of Artificial Sequence: Synthetic oligonucleotide
  Sense strand starting at position 268 of SEQ ID NO: 1428
ggaggaaguuuagagauag

SEQ ID NO: 112195 - RNA, 19 nt, Artificial Sequence
  Description of Artificial Sequence: Synthetic oligonucleotide
  Antisense strand to SEQ ID NO: 112194
cuaucucuaaacuuccucc

SEQ ID NO: 112196 - RNA, 19 nt, Artificial Sequence
  Description of Artificial Sequence: Synthetic oligonucleotide
  Sense strand starting at position 150 of SEQ ID NO: 1429
uccuuuagaggagguaauu

SEQ ID NO: 112197 - RNA, 19 nt, Artificial Sequence
  Description of Artificial Sequence: Synthetic oligonucleotide
  Antisense strand to SEQ ID NO: 112196
aauuaccuccucuaaagga

SEQ ID NO: 112198 - RNA, 19 nt, Artificial Sequence
  Description of Artificial Sequence: Synthetic oligonucleotide
  Sense strand starting at position 234 of SEQ ID NO: 1429
gaauuaggcuuccugggua

SEQ ID NO: 112199 - RNA, 19 nt, Artificial Sequence
  Description of Artificial Sequence: Synthetic oligonucleotide
  Antisense strand to SEQ ID NO: 112198
uacccaggaagccuaauuc

SEQ ID NO: 112200 - RNA, 19 nt, Artificial Sequence
  Description of Artificial Sequence: Synthetic oligonucleotide
  Sense strand starting at position 237 of SEQ ID NO: 1429
uuaggcuuccuggguauga

SEQ ID NO: 112201 - RNA, 19 nt, Artificial Sequence
  Description of Artificial Sequence: Synthetic oligonucleotide
  Antisense strand to SEQ ID NO: 112200
ucauacccaggaagccuaa

SEQ ID NO: 112202 - RNA, 19 nt, Artificial Sequence
  Description of Artificial Sequence: Synthetic oligonucleotide
  Sense strand starting at position 238 of SEQ ID NO: 1429
uaggcuuccuggguaugaa

SEQ ID NO: 112203 - RNA, 19 nt, Artificial Sequence
  Description of Artificial Sequence: Synthetic oligonucleotide
  Antisense strand to SEQ ID NO: 112202
uucauacccaggaagccua

SEQ ID NO: 112204 - RNA, 19 nt, Artificial Sequence
  Description of Artificial Sequence: Synthetic oligonucleotide
  Sense strand starting at position 239 of SEQ ID NO: 1429
aggcuuccuggguaugaau

SEQ ID NO: 112205 - RNA, 19 nt, Artificial Sequence
  Description of Artificial Sequence: Synthetic oligonucleotide
  Antisense strand to SEQ ID NO: 112204
auucauacccaggaagccu

SEQ ID NO: 112206 - RNA, 19 nt, Artificial Sequence
  Description of Artificial Sequence: Synthetic oligonucleotide
  Sense strand starting at position 298 of SEQ ID NO: 1429
ucacuuaaucucugggcuu

SEQ ID NO: 112207 - RNA, 19 nt, Artificial Sequence
  Description of Artificial Sequence: Synthetic oligonucleotide
  Antisense strand to SEQ ID NO: 112206
aagcccagagauuaaguga

SEQ ID NO: 112208 - RNA, 19 nt, Artificial Sequence
  Description of Artificial Sequence: Synthetic oligonucleotide
  Sense strand starting at position 426 of SEQ ID NO: 1429
aacauaugguaagugugau

SEQ ID NO: 112209 - RNA, 19 nt, Artificial Sequence
  Description of Artificial Sequence: Synthetic oligonucleotide
  Antisense strand to SEQ ID NO: 112208
aucacacuuaccauauguu

SEQ ID NO: 112210 - RNA, 19 nt, Artificial Sequence
  Description of Artificial Sequence: Synthetic oligonucleotide
  Sense strand starting at position 427 of SEQ ID NO: 1429
acauaugguaagugugaua

SEQ ID NO: 112211 - RNA, 19 nt, Artificial Sequence
  Description of Artificial Sequence: Synthetic oligonucleotide
  Antisense strand to SEQ ID NO: 112210
uaucacacuuaccauaugu

SEQ ID NO: 112212 - RNA, 19 nt, Artificial Sequence
  Description of Artificial Sequence: Synthetic oligonucleotide
  Sense strand starting at position 434 of SEQ ID NO: 1429
guaagugugauaugaguau

SEQ ID NO: 112213 - RNA, 19 nt, Artificial Sequence
  Description of Artificial Sequence: Synthetic oligonucleotide
  Antisense strand to SEQ ID NO: 112212
auacucauaucacacuuac

SEQ ID NO: 112214 - RNA, 19 nt, Artificial Sequence
  Description of Artificial Sequence: Synthetic oligonucleotide
  Sense strand starting at position 480 of SEQ ID NO: 1429
acgauuuaugcgugccaca

SEQ ID NO: 112215 - RNA, 19 nt, Artificial Sequence
  Description of Artificial Sequence: Synthetic oligonucleotide
  Antisense strand to SEQ ID NO: 112214
uguggcacgcauaaaucgu

SEQ ID NO: 112216 - RNA, 19 nt, Artificial Sequence
  Description of Artificial Sequence: Synthetic oligonucleotide
  Sense strand starting at position 523 of SEQ ID NO: 1429
ucagaugcucuccagauua

SEQ ID NO: 112217 - RNA, 19 nt, Artificial Sequence
  Description of Artificial Sequence: Synthetic oligonucleotide
  Antisense strand to SEQ ID NO: 112216
uaaucuggagagcaucuga

SEQ ID NO: 112218 - RNA, 19 nt, Artificial Sequence
  Description of Artificial Sequence: Synthetic oligonucleotide
  Sense strand starting at position 525 of SEQ ID NO: 1429
agaugcucuccagauuaca

SEQ ID NO: 112219 - RNA, 19 nt, Artificial Sequence
  Description of Artificial Sequence: Synthetic oligonucleotide
  Antisense strand to SEQ ID NO: 112218
uguaaucuggagagcaucu

SEQ ID NO: 112220 - RNA, 19 nt, Artificial Sequence
  Description of Artificial Sequence: Synthetic oligonucleotide
  Sense strand starting at position 574 of SEQ ID NO: 1429
ggccgaauuccauaaagac

SEQ ID NO: 112221 - RNA, 19 nt, Artificial Sequence
  Description of Artificial Sequence: Synthetic oligonucleotide
  Antisense strand to SEQ ID NO: 112220
gucuuuauggaauucggcc

SEQ ID NO: 112222 - RNA, 19 nt, Artificial Sequence
  Description of Artificial Sequence: Synthetic oligonucleotide
  Sense strand starting at position 624 of SEQ ID NO: 1429
ucaucucuucuaugugauc

SEQ ID NO: 112223 - RNA, 19 nt, Artificial Sequence
  Description of Artificial Sequence: Synthetic oligonucleotide
  Antisense strand to SEQ ID NO: 112222
gaucacauagaagagauga

SEQ ID NO: 112224 - RNA, 19 nt, Artificial Sequence
  Description of Artificial Sequence: Synthetic oligonucleotide
  Sense strand starting at position 847 of SEQ ID NO: 1429
ggcuguguuaccuuuagcu

SEQ ID NO: 112225 - RNA, 19 nt, Artificial Sequence
  Description of Artificial Sequence: Synthetic oligonucleotide
  Antisense strand to SEQ ID NO: 112224
agcuaaagguaacacagcc

SEQ ID NO: 112226 - RNA, 19 nt, Artificial Sequence
  Description of Artificial Sequence: Synthetic oligonucleotide
  Sense strand starting at position 1497 of SEQ ID NO: 1429
agcagaaucuucuugagua

SEQ ID NO: 112227 - RNA, 19 nt, Artificial Sequence
  Description of Artificial Sequence: Synthetic oligonucleotide
  Antisense strand to SEQ ID NO: 112226
uacucaagaagauucugcu

SEQ ID NO: 112228 - RNA, 19 nt, Artificial Sequence
  Description of Artificial Sequence: Synthetic oligonucleotide
  Sense strand starting at position 1501 of SEQ ID NO: 1429
gaaucuucuugaguaugcu

SEQ ID NO: 112229 - RNA, 19 nt, Artificial Sequence
  Description of Artificial Sequence: Synthetic oligonucleotide
  Antisense strand to SEQ ID NO: 112228
agcauacucaagaagauuc

SEQ ID NO: 112230 - RNA, 19 nt, Artificial Sequence
  Description of Artificial Sequence: Synthetic oligonucleotide
  Sense strand starting at position 1664 of SEQ ID NO: 1429
cacugucuuggccagaaca

SEQ ID NO: 112231 - RNA, 19 nt, Artificial Sequence
  Description of Artificial Sequence: Synthetic oligonucleotide
  Antisense strand to SEQ ID NO: 112230
uguucuggccaagacagug

SEQ ID NO: 112232 - RNA, 19 nt, Artificial Sequence
  Description of Artificial Sequence: Synthetic oligonucleotide
  Sense strand starting at position 1666 of SEQ ID NO: 1429
cugucuuggccagaacauc

SEQ ID NO: 112233 - RNA, 19 nt, Artificial Sequence
  Description of Artificial Sequence: Synthetic oligonucleotide
  Antisense strand to SEQ ID NO: 112232
gauguucuggccaagacag

SEQ ID NO: 112234 - RNA, 19 nt, Artificial Sequence
  Description of Artificial Sequence: Synthetic oligonucleotide
  Sense strand starting at position 1788 of SEQ ID NO: 1429
cucagaagugcguagagaa

SEQ ID NO: 112235 - RNA, 19 nt, Artificial Sequence
  Description of Artificial Sequence: Synthetic oligonucleotide
  Antisense strand to SEQ ID NO: 112234
uucucuacgcacuucugag

SEQ ID NO: 112236 - RNA, 19 nt, Artificial Sequence
  Description of Artificial Sequence: Synthetic oligonucleotide
  Sense strand starting at position 1856 of SEQ ID NO: 1429
ggugcucaugguuagggau

SEQ ID NO: 112237 - RNA, 19 nt, Artificial Sequence
  Description of Artificial Sequence: Synthetic oligonucleotide
  Antisense strand to SEQ ID NO: 112236
aucccuaaccaugagcacc

SEQ ID NO: 112238 - RNA, 19 nt, Artificial Sequence
  Description of Artificial Sequence: Synthetic oligonucleotide
  Sense strand starting at position 1920 of SEQ ID NO: 1429
ugcuauuuauauucccagu

SEQ ID NO: 112239 - RNA, 19 nt, Artificial Sequence
  Description of Artificial Sequence: Synthetic oligonucleotide
  Antisense strand to SEQ ID NO: 112238
acugggaauauaaauagca

SEQ ID NO: 112240 - RNA, 19 nt, Artificial Sequence
  Description of Artificial Sequence: Synthetic oligonucleotide
  Sense strand starting at position 2064 of SEQ ID NO: 1429
ccacguggcacugauauca

SEQ ID NO: 112241 - RNA, 19 nt, Artificial Sequence
  Description of Artificial Sequence: Synthetic oligonucleotide
  Antisense strand to SEQ ID NO: 112240
ugauaucagugccacgugg

SEQ ID NO: 112242 - RNA, 19 nt, Artificial Sequence
  Description of Artificial Sequence: Synthetic oligonucleotide
  Sense strand starting at position 2161 of SEQ ID NO: 1429
guggauaaacaaggucauu

SEQ ID NO: 112243 - RNA, 19 nt, Artificial Sequence
  Description of Artificial Sequence: Synthetic oligonucleotide
  Antisense strand to SEQ ID NO: 112242
aaugaccuuguuuauccac

SEQ ID NO: 112244 - RNA, 19 nt, Artificial Sequence
  Description of Artificial Sequence: Synthetic oligonucleotide
  Sense strand starting at position 2332 of SEQ ID NO: 1429
cuggaagugccuuaucacu

SEQ ID NO: 112245 - RNA, 19 nt, Artificial Sequence
  Description of Artificial Sequence: Synthetic oligonucleotide
  Antisense strand to SEQ ID NO: 112244
agugauaaggcacuuccag

SEQ ID NO: 112246 - RNA, 19 nt, Artificial Sequence
  Description of Artificial Sequence: Synthetic oligonucleotide
  Sense strand starting at position 2334 of SEQ ID NO: 1429
ggaagugccuuaucacuag

SEQ ID NO: 112247 - RNA, 19 nt, Artificial Sequence
  Description of Artificial Sequence: Synthetic oligonucleotide
  Antisense strand to SEQ ID NO: 112246
cuagugauaaggcacuucc

SEQ ID NO: 112248 - RNA, 19 nt, Artificial Sequence
  Description of Artificial Sequence: Synthetic oligonucleotide
  Sense strand starting at position 2464 of SEQ ID NO: 1429
gaggccuccuccucugauu

SEQ ID NO: 112249 - RNA, 19 nt, Artificial Sequence
  Description of Artificial Sequence: Synthetic oligonucleotide
  Antisense strand to SEQ ID NO: 112248
aaucagaggaggaggccuc

SEQ ID NO: 112250 - RNA, 19 nt, Artificial Sequence
  Description of Artificial Sequence: Synthetic oligonucleotide
  Sense strand starting at position 3074 of SEQ ID NO: 1429
uuccuaaggcuagauucuu

SEQ ID NO: 112251 - RNA, 19 nt, Artificial Sequence
  Description of Artificial Sequence: Synthetic oligonucleotide
  Antisense strand to SEQ ID NO: 112250
aagaaucuagccuuaggaa

SEQ ID NO: 112252 - RNA, 19 nt, Artificial Sequence
  Description of Artificial Sequence: Synthetic oligonucleotide
  Sense strand starting at position 3294 of SEQ ID NO: 1429
acuugugaucugggcagaa

SEQ ID NO: 112253 - RNA, 19 nt, Artificial Sequence
  Description of Artificial Sequence: Synthetic oligonucleotide
  Antisense strand to SEQ ID NO: 112252
uucugcccagaucacaagu

SEQ ID NO: 112254 - RNA, 19 nt, Artificial Sequence
  Description of Artificial Sequence: Synthetic oligonucleotide
  Sense strand starting at position 3296 of SEQ ID NO: 1429
uugugaucugggcagaagu

SEQ ID NO: 112255 - RNA, 19 nt, Artificial Sequence
  Description of Artificial Sequence: Synthetic oligonucleotide
  Antisense strand to SEQ ID NO: 112254
acuucugcccagaucacaa

SEQ ID NO: 112256 - RNA, 19 nt, Artificial Sequence
  Description of Artificial Sequence: Synthetic oligonucleotide
  Sense strand starting at position 3346 of SEQ ID NO: 1429
cgggcaucuuucucagaug

SEQ ID NO: 112257 - RNA, 19 nt, Artificial Sequence
  Description of Artificial Sequence: Synthetic oligonucleotide
  Antisense strand to SEQ ID NO: 112256
caucugagaaagaugcccg

SEQ ID NO: 112258 - RNA, 19 nt, Artificial Sequence
  Description of Artificial Sequence: Synthetic oligonucleotide
  Sense strand starting at position 3351 of SEQ ID NO: 1429
aucuuucucagauggugga

SEQ ID NO: 112259 - RNA, 19 nt, Artificial Sequence
  Description of Artificial Sequence: Synthetic oligonucleotide
  Antisense strand to SEQ ID NO: 112258
uccaccaucugagaaagau

SEQ ID NO: 112260 - RNA, 19 nt, Artificial Sequence
  Description of Artificial Sequence: Synthetic oligonucleotide
  Sense strand starting at position 3518 of SEQ ID NO: 1429
uggcaucugcuccagaauc

SEQ ID NO: 112261 - RNA, 19 nt, Artificial Sequence
  Description of Artificial Sequence: Synthetic oligonucleotide
  Antisense strand to SEQ ID NO: 112260
gauucuggagcagaugcca

SEQ ID NO: 112262 - RNA, 19 nt, Artificial Sequence
  Description of Artificial Sequence: Synthetic oligonucleotide
  Sense strand starting at position 3520 of SEQ ID NO: 1429
gcaucugcuccagaaucca

SEQ ID NO: 112263 - RNA, 19 nt, Artificial Sequence
  Description of Artificial Sequence: Synthetic oligonucleotide
  Antisense strand to SEQ ID NO: 112262
uggauucuggagcagaugc

SEQ ID NO: 112264 - RNA, 19 nt, Artificial Sequence
  Description of Artificial Sequence: Synthetic oligonucleotide
  Sense strand starting at position 3560 of SEQ ID NO: 1429
uggguugauccuugaaccu

SEQ ID NO: 112265 - RNA, 19 nt, Artificial Sequence
  Description of Artificial Sequence: Synthetic oligonucleotide
  Antisense strand to SEQ ID NO: 112264
agguucaaggaucaaccca

SEQ ID NO: 112266 - RNA, 19 nt, Artificial Sequence
  Description of Artificial Sequence: Synthetic oligonucleotide
  Sense strand starting at position 3585 of SEQ ID NO: 1429
gccucccugggacaauaau

SEQ ID NO: 112267 - RNA, 19 nt, Artificial Sequence
  Description of Artificial Sequence: Synthetic oligonucleotide
  Antisense strand to SEQ ID NO: 112266
auuauugucccagggaggc

SEQ ID NO: 112268 - RNA, 19 nt, Artificial Sequence
  Description of Artificial Sequence: Synthetic oligonucleotide
  Sense strand starting at position 3632 of SEQ ID NO: 1429
aaaugagguccugguuguu

SEQ ID NO: 112269 - RNA, 19 nt, Artificial Sequence
  Description of Artificial Sequence: Synthetic oligonucleotide
  Antisense strand to SEQ ID NO: 112268
aacaaccaggaccucauuu

SEQ ID NO: 112270 - RNA, 19 nt, Artificial Sequence
  Description of Artificial Sequence: Synthetic oligonucleotide
  Sense strand starting at position 3635 of SEQ ID NO: 1429
ugagguccugguuguuaaa

SEQ ID NO: 112271 - RNA, 19 nt, Artificial Sequence
  Description of Artificial Sequence: Synthetic oligonucleotide
  Antisense strand to SEQ ID NO: 112270
uuuaacaaccaggaccuca

SEQ ID NO: 112272 - RNA, 19 nt, Artificial Sequence
  Description of Artificial Sequence: Synthetic oligonucleotide
  Sense strand starting at position 3946 of SEQ ID NO: 1429
acaagaauuucuggaggug

SEQ ID NO: 112273 - RNA, 19 nt, Artificial Sequence
  Description of Artificial Sequence: Synthetic oligonucleotide
  Antisense strand to SEQ ID NO: 112272
caccuccagaaauucuugu

SEQ ID NO: 112274 - RNA, 19 nt, Artificial Sequence
  Description of Artificial Sequence: Synthetic oligonucleotide
  Sense strand starting at position 3980 of SEQ ID NO: 1429
gggccugaagguuacgauu

SEQ ID NO: 112275 - RNA, 19 nt, Artificial Sequence
  Description of Artificial Sequence: Synthetic oligonucleotide
  Antisense strand to SEQ ID NO: 112274
aaucguaaccuucaggccc

SEQ ID NO: 112276 - RNA, 19 nt, Artificial Sequence
  Description of Artificial Sequence: Synthetic oligonucleotide
  Sense strand starting at position 25 of SEQ ID NO: 1430
augggcuguguccaucaga

SEQ ID NO: 112277 - RNA, 19 nt, Artificial Sequence
  Description of Artificial Sequence: Synthetic oligonucleotide
  Antisense strand to SEQ ID NO: 112276
ucugauggacacagcccau

SEQ ID NO: 112278 - RNA, 19 nt, Artificial Sequence
  Description of Artificial Sequence: Synthetic oligonucleotide
  Sense strand starting at position 28 of SEQ ID NO: 1430
ggcuguguccaucagacaa

SEQ ID NO: 112279 - RNA, 19 nt, Artificial Sequence
  Description of Artificial Sequence: Synthetic oligonucleotide
  Antisense strand to SEQ ID NO: 112278
uugucugauggacacagcc

SEQ ID NO: 112280 - RNA, 19 nt, Artificial Sequence
  Description of Artificial Sequence: Synthetic oligonucleotide
  Sense strand starting at position 63 of SEQ ID NO: 1430
cuguuaugccaccaguuua

SEQ ID NO: 112281 - RNA, 19 nt, Artificial Sequence
  Description of Artificial Sequence: Synthetic oligonucleotide
  Antisense strand to SEQ ID NO: 112280
uaaacugguggcauaacag

SEQ ID NO: 112282 - RNA, 19 nt, Artificial Sequence
  Description of Artificial Sequence: Synthetic oligonucleotide
  Sense strand starting at position 76 of SEQ ID NO: 1430
aguuuauacagugaugugu

SEQ ID NO: 112283 - RNA, 19 nt, Artificial Sequence
  Description of Artificial Sequence: Synthetic oligonucleotide
  Antisense strand to SEQ ID NO: 112282
acacaucacuguauaaacu

SEQ ID NO: 112284 - RNA, 19 nt, Artificial Sequence
  Description of Artificial Sequence: Synthetic oligonucleotide
  Sense strand starting at position 90 of SEQ ID NO: 1430
uguguuuggcaagauguag

SEQ ID NO: 112285 - RNA, 19 nt, Artificial Sequence
  Description of Artificial Sequence: Synthetic oligonucleotide
  Antisense strand to SEQ ID NO: 112284
cuacaucuugccaaacaca

SEQ ID NO: 112286 - RNA, 19 nt, Artificial Sequence
  Description of Artificial Sequence: Synthetic oligonucleotide
  Sense strand starting at position 145 of SEQ ID NO: 1430
ggaguaauguagcuggaca

SEQ ID NO: 112287 - RNA, 19 nt, Artificial Sequence
  Description of Artificial Sequence: Synthetic oligonucleotide
  Antisense strand to SEQ ID NO: 112286
uguccagcuacauuacucc

SEQ ID NO: 112288 - RNA, 19 nt, Artificial Sequence
  Description of Artificial Sequence: Synthetic oligonucleotide
  Sense strand starting at position 146 of SEQ ID NO: 1430
gaguaauguagcuggacag

SEQ ID NO: 112289 - RNA, 19 nt, Artificial Sequence
  Description of Artificial Sequence: Synthetic oligonucleotide
  Antisense strand to SEQ ID NO: 112288
cuguccagcuacauuacuc

SEQ ID NO: 112290 - RNA, 19 nt, Artificial Sequence
  Description of Artificial Sequence: Synthetic oligonucleotide
  Sense strand starting at position 181 of SEQ ID NO: 1430
ggguguaaaggcugacuaa

SEQ ID NO: 112291 - RNA, 19 nt, Artificial Sequence
  Description of Artificial Sequence: Synthetic oligonucleotide
  Antisense strand to SEQ ID NO: 112290
uuagucagccuuuacaccc

SEQ ID NO: 112292 - RNA, 19 nt, Artificial Sequence
  Description of Artificial Sequence: Synthetic oligonucleotide
  Sense strand starting at position 182 of SEQ ID NO: 1430
gguguaaaggcugacuaau

SEQ ID NO: 112293 - RNA, 19 nt, Artificial Sequence
  Description of Artificial Sequence: Synthetic oligonucleotide
  Antisense strand to SEQ ID NO: 112292
auuagucagccuuuacacc

SEQ ID NO: 112294 - RNA, 19 nt, Artificial Sequence
  Description of Artificial Sequence: Synthetic oligonucleotide
  Sense strand starting at position 448 of SEQ ID NO: 1430
ucuagagagucucuuucca

SEQ ID NO: 112295 - RNA, 19 nt, Artificial Sequence
  Description of Artificial Sequence: Synthetic oligonucleotide
  Antisense strand to SEQ ID NO: 112294
uggaaagagacucucuaga

SEQ ID NO: 112296 - RNA, 19 nt, Artificial Sequence
  Description of Artificial Sequence: Synthetic oligonucleotide
  Sense strand starting at position 1665 of SEQ ID NO: 1430
gggucuguuauguaaccca

SEQ ID NO: 112297 - RNA, 19 nt, Artificial Sequence
  Description of Artificial Sequence: Synthetic oligonucleotide
  Antisense strand to SEQ ID NO: 112296
uggguuacauaacagaccc

SEQ ID NO: 112298 - RNA, 19 nt, Artificial Sequence
  Description of Artificial Sequence: Synthetic oligonucleotide
  Sense strand starting at position 1931 of SEQ ID NO: 1430
ggaguugccagugauugga

SEQ ID NO: 112299 - RNA, 19 nt, Artificial Sequence
  Description of Artificial Sequence: Synthetic oligonucleotide
  Antisense strand to SEQ ID NO: 112298
uccaaucacuggcaacucc

SEQ ID NO: 112300 - RNA, 19 nt, Artificial Sequence
  Description of Artificial Sequence: Synthetic oligonucleotide
  Sense strand starting at position 1954 of SEQ ID NO: 1430
gggauuaugacccguagua

SEQ ID NO: 112301 - RNA, 19 nt, Artificial Sequence
  Description of Artificial Sequence: Synthetic oligonucleotide
  Antisense strand to SEQ ID NO: 112300
uacuacgggucauaauccc

SEQ ID NO: 112302 - RNA, 19 nt, Artificial Sequence
  Description of Artificial Sequence: Synthetic oligonucleotide
  Sense strand starting at position 1956 of SEQ ID NO: 1430
gauuaugacccguaguauc

SEQ ID NO: 112303 - RNA, 19 nt, Artificial Sequence
  Description of Artificial Sequence: Synthetic oligonucleotide
  Antisense strand to SEQ ID NO: 112302
gauacuacgggucauaauc

SEQ ID NO: 112304 - RNA, 19 nt, Artificial Sequence
  Description of Artificial Sequence: Synthetic oligonucleotide
  Sense strand starting at position 2141 of SEQ ID NO: 1430
ccuugugacucauuggaag

SEQ ID NO: 112305 - RNA, 19 nt, Artificial Sequence
  Description of Artificial Sequence: Synthetic oligonucleotide
  Antisense strand to SEQ ID NO: 112304
cuuccaaugagucacaagg

SEQ ID NO: 112306 - RNA, 19 nt, Artificial Sequence
  Description of Artificial Sequence: Synthetic oligonucleotide
  Sense strand starting at position 2143 of SEQ ID NO: 1430
uugugacucauuggaagcu

SEQ ID NO: 112307 - RNA, 19 nt, Artificial Sequence
  Description of Artificial Sequence: Synthetic oligonucleotide
  Antisense strand to SEQ ID NO: 112306
agcuuccaaugagucacaa

SEQ ID NO: 112308 - RNA, 19 nt, Artificial Sequence
  Description of Artificial Sequence: Synthetic oligonucleotide
  Sense strand starting at position 2156 of SEQ ID NO: 1430
gaagcugcugcuuauuaga

SEQ ID NO: 112309 - RNA, 19 nt, Artificial Sequence
  Description of Artificial Sequence: Synthetic oligonucleotide
  Antisense strand to SEQ ID NO: 112308
ucuaauaagcagcagcuuc

SEQ ID NO: 112310 - RNA, 19 nt, Artificial Sequence
  Description of Artificial Sequence: Synthetic oligonucleotide
  Sense strand starting at position 2165 of SEQ ID NO: 1430
gcuuauuagacucaucgag

SEQ ID NO: 112311 - RNA, 19 nt, Artificial Sequence
  Description of Artificial Sequence: Synthetic oligonucleotide
  Antisense strand to SEQ ID NO: 112310
cucgaugagucuaauaagc

SEQ ID NO: 112312 - RNA, 19 nt, Artificial Sequence
  Description of Artificial Sequence: Synthetic oligonucleotide
  Sense strand starting at position 2167 of SEQ ID NO: 1430
uuauuagacucaucgagau

SEQ ID NO: 112313 - RNA, 19 nt, Artificial Sequence
  Description of Artificial Sequence: Synthetic oligonucleotide
  Antisense strand to SEQ ID NO: 112312
aucucgaugagucuaauaa

SEQ ID NO: 112314 - RNA, 19 nt, Artificial Sequence
  Description of Artificial Sequence: Synthetic oligonucleotide
  Sense strand starting at position 2187 of SEQ ID NO: 1430
uucccuguugaugaguuua

SEQ ID NO: 112315 - RNA, 19 nt, Artificial Sequence
  Description of Artificial Sequence: Synthetic oligonucleotide
  Antisense strand to SEQ ID NO: 112314
uaaacucaucaacagggaa

SEQ ID NO: 112316 - RNA, 19 nt, Artificial Sequence
  Description of Artificial Sequence: Synthetic oligonucleotide
  Sense strand starting at position 2189 of SEQ ID NO: 1430
cccuguugaugaguuuaag

SEQ ID NO: 112317 - RNA, 19 nt, Artificial Sequence
  Description of Artificial Sequence: Synthetic oligonucleotide
  Antisense strand to SEQ ID NO: 112316
cuuaaacucaucaacaggg

SEQ ID NO: 112318 - RNA, 19 nt, Artificial Sequence
  Description of Artificial Sequence: Synthetic oligonucleotide
  Sense strand starting at position 2192 of SEQ ID NO: 1430
uguugaugaguuuaaggcu

SEQ ID NO: 112319 - RNA, 19 nt, Artificial Sequence
  Description of Artificial Sequence: Synthetic oligonucleotide
  Antisense strand to SEQ ID NO: 112318
agccuuaaacucaucaaca

SEQ ID NO: 112320 - RNA, 19 nt, Artificial Sequence
  Description of Artificial Sequence: Synthetic oligonucleotide
  Sense strand starting at position 2220 of SEQ ID NO: 1430
gccuucuguguacagagau

SEQ ID NO: 112321 - RNA, 19 nt, Artificial Sequence
  Description of Artificial Sequence: Synthetic oligonucleotide
  Antisense strand to SEQ ID NO: 112320
aucucuguacacagaaggc

SEQ ID NO: 112322 - RNA, 19 nt, Artificial Sequence
  Description of Artificial Sequence: Synthetic oligonucleotide
  Sense strand starting at position 2308 of SEQ ID NO: 1430
gcaguaugucaguacuaaa

SEQ ID NO: 112323 - RNA, 19 nt, Artificial Sequence
  Description of Artificial Sequence: Synthetic oligonucleotide
  Antisense strand to SEQ ID NO: 112322
uuuaguacugacauacugc

SEQ ID NO: 112324 - RNA, 19 nt, Artificial Sequence
  Description of Artificial Sequence: Synthetic oligonucleotide
  Sense strand starting at position 2325 of SEQ ID NO: 1430
aaagaagaggugugacagu

SEQ ID NO: 112325 - RNA, 19 nt, Artificial Sequence
  Description of Artificial Sequence: Synthetic oligonucleotide
  Antisense strand to SEQ ID NO: 112324
acugucacaccucuucuuu

SEQ ID NO: 112326 - RNA, 19 nt, Artificial Sequence
  Description of Artificial Sequence: Synthetic oligonucleotide
  Sense strand starting at position 2336 of SEQ ID NO: 1430
gugacaguuccacaaggcu

SEQ ID NO: 112327 - RNA, 19 nt, Artificial Sequence
  Description of Artificial Sequence: Synthetic oligonucleotide
  Antisense strand to SEQ ID NO: 112326
agccuuguggaacugucac

SEQ ID NO: 112328 - RNA, 19 nt, Artificial Sequence
  Description of Artificial Sequence: Synthetic oligonucleotide
  Sense strand starting at position 2708 of SEQ ID NO: 1430
uaaguaagagcuuacggaa

SEQ ID NO: 112329 - RNA, 19 nt, Artificial Sequence
  Description of Artificial Sequence: Synthetic oligonucleotide
  Antisense strand to SEQ ID NO: 112328
uuccguaagcucuuacuua

SEQ ID NO: 112330 - RNA, 19 nt, Artificial Sequence
  Description of Artificial Sequence: Synthetic oligonucleotide
  Sense strand starting at position 3510 of SEQ ID NO: 1430
aaagauccuuguuuagguu

SEQ ID NO: 112331 - RNA, 19 nt, Artificial Sequence
  Description of Artificial Sequence: Synthetic oligonucleotide
  Antisense strand to SEQ ID NO: 112330
aaccuaaacaaggaucuuu

SEQ ID NO: 112332 - RNA, 19 nt, Artificial Sequence
  Description of Artificial Sequence: Synthetic oligonucleotide
  Sense strand starting at position 3511 of SEQ ID NO: 1430
aagauccuuguuuagguua

SEQ ID NO: 112333 - RNA, 19 nt, Artificial Sequence
  Description of Artificial Sequence: Synthetic oligonucleotide
  Antisense strand to SEQ ID NO: 112332
uaaccuaaacaaggaucuu

SEQ ID NO: 112334 - RNA, 19 nt, Artificial Sequence
  Description of Artificial Sequence: Synthetic oligonucleotide
  Sense strand starting at position 3516 of SEQ ID NO: 1430
ccuuguuuagguuaccaga

SEQ ID NO: 112335 - RNA, 19 nt, Artificial Sequence
  Description of Artificial Sequence: Synthetic oligonucleotide
  Antisense strand to SEQ ID NO: 112334
ucugguaaccuaaacaagg

SEQ ID NO: 112336 - RNA, 19 nt, Artificial Sequence
  Description of Artificial Sequence: Synthetic oligonucleotide
  Sense strand starting at position 3518 of SEQ ID NO: 1430
uuguuuagguuaccagaau

SEQ ID NO: 112337 - RNA, 19 nt, Artificial Sequence
  Description of Artificial Sequence: Synthetic oligonucleotide
  Antisense strand to SEQ ID NO: 112336
auucugguaaccuaaacaa

SEQ ID NO: 112338 - RNA, 19 nt, Artificial Sequence
  Description of Artificial Sequence: Synthetic oligonucleotide
  Sense strand starting at position 3527 of SEQ ID NO: 1430
uuaccagaaugaguuggua

SEQ ID NO: 112339 - RNA, 19 nt, Artificial Sequence
  Description of Artificial Sequence: Synthetic oligonucleotide
  Antisense strand to SEQ ID NO: 112338
uaccaacucauucugguaa

SEQ ID NO: 112340 - RNA, 19 nt, Artificial Sequence
  Description of Artificial Sequence: Synthetic oligonucleotide
  Sense strand starting at position 3529 of SEQ ID NO: 1430
accagaaugaguugguaga

SEQ ID NO: 112341 - RNA, 19 nt, Artificial Sequence
  Description of Artificial Sequence: Synthetic oligonucleotide
  Antisense strand to SEQ ID NO: 112340
ucuaccaacucauucuggu

SEQ ID NO: 112342 - RNA, 19 nt, Artificial Sequence
  Description of Artificial Sequence: Synthetic oligonucleotide
  Sense strand starting at position 3530 of SEQ ID NO: 1430
ccagaaugaguugguagaa

SEQ ID NO: 112343 - RNA, 19 nt, Artificial Sequence
  Description of Artificial Sequence: Synthetic oligonucleotide
  Antisense strand to SEQ ID NO: 112342
uucuaccaacucauucugg

SEQ ID NO: 112344 - RNA, 19 nt, Artificial Sequence
  Description of Artificial Sequence: Synthetic oligonucleotide
  Sense strand starting at position 3633 of SEQ ID NO: 1430
ggaucuguuccuugggaga

SEQ ID NO: 112345 - RNA, 19 nt, Artificial Sequence
  Description of Artificial Sequence: Synthetic oligonucleotide
  Antisense strand to SEQ ID NO: 112344
ucucccaaggaacagaucc

SEQ ID NO: 112346 - RNA, 19 nt, Artificial Sequence
  Description of Artificial Sequence: Synthetic oligonucleotide
  Sense strand starting at position 3778 of SEQ ID NO: 1430
ugaguaagaugcucuccua

SEQ ID NO: 112347 - RNA, 19 nt, Artificial Sequence
  Description of Artificial Sequence: Synthetic oligonucleotide
  Antisense strand to SEQ ID NO: 112346
uaggagagcaucuuacuca

SEQ ID NO: 112348 - RNA, 19 nt, Artificial Sequence
  Description of Artificial Sequence: Synthetic oligonucleotide
  Sense strand starting at position 3857 of SEQ ID NO: 1430
uggucagaucagugauggu

SEQ ID NO: 112349 - RNA, 19 nt, Artificial Sequence
  Description of Artificial Sequence: Synthetic oligonucleotide
  Antisense strand to SEQ ID NO: 112348
accaucacugaucugacca

SEQ ID NO: 112350 - RNA, 19 nt, Artificial Sequence
  Description of Artificial Sequence: Synthetic oligonucleotide
  Sense strand starting at position 3888 of SEQ ID NO: 1430
gcauuauggcacugaaaua

SEQ ID NO: 112351 - RNA, 19 nt, Artificial Sequence
  Description of Artificial Sequence: Synthetic oligonucleotide
  Antisense strand to SEQ ID NO: 112350
uauuucagugccauaaugc

SEQ ID NO: 112352 - RNA, 19 nt, Artificial Sequence
  Description of Artificial Sequence: Synthetic oligonucleotide
  Sense strand starting at position 3914 of SEQ ID NO: 1430
accuaauucugcuuuggaa

SEQ ID NO: 112353 - RNA, 19 nt, Artificial Sequence
  Description of Artificial Sequence: Synthetic oligonucleotide
  Antisense strand to SEQ ID NO: 112352
uuccaaagcagaauuaggu

SEQ ID NO: 112354 - RNA, 19 nt, Artificial Sequence
  Description of Artificial Sequence: Synthetic oligonucleotide
  Sense strand starting at position 3975 of SEQ ID NO: 1430
uggcaacugaguugacuuu

SEQ ID NO: 112355 - RNA, 19 nt, Artificial Sequence
  Description of Artificial Sequence: Synthetic oligonucleotide
  Antisense strand to SEQ ID NO: 112354
aaagucaacucaguugcca

SEQ ID NO: 112356 - RNA, 19 nt, Artificial Sequence
  Description of Artificial Sequence: Synthetic oligonucleotide
  Sense strand starting at position 3611 of SEQ ID NO: 1432
uuggcuucucgcgccagaa

SEQ ID NO: 112357 - RNA, 19 nt, Artificial Sequence
  Description of Artificial Sequence: Synthetic oligonucleotide
  Antisense strand to SEQ ID NO: 112356
uucuggcgcgagaagccaa

SEQ ID NO: 112358 - RNA, 19 nt, Artificial Sequence
  Description of Artificial Sequence: Synthetic oligonucleotide
  Sense strand starting at position 3524 of SEQ ID NO: 1432
uagguaguguguccagaag

SEQ ID NO: 112359 - RNA, 19 nt, Artificial Sequence
  Description of Artificial Sequence: Synthetic oligonucleotide
  Antisense strand to SEQ ID NO: 112358
cuucuggacacacuaccua

SEQ ID NO: 112360 - RNA, 19 nt, Artificial Sequence
  Description of Artificial Sequence: Synthetic oligonucleotide
  Sense strand starting at position 3433 of SEQ ID NO: 1432
uucccaugcugauuucgaa

SEQ ID NO: 112361 - RNA, 19 nt, Artificial Sequence
  Description of Artificial Sequence: Synthetic oligonucleotide
  Antisense strand to SEQ ID NO: 112360
uucgaaaucagcaugggaa

SEQ ID NO: 112362 - RNA, 19 nt, Artificial Sequence
  Description of Artificial Sequence: Synthetic oligonucleotide
  Sense strand starting at position 3246 of SEQ ID NO: 1432
gcacaaaguucccucaaag

SEQ ID NO: 112363 - RNA, 19 nt, Artificial Sequence
  Description of Artificial Sequence: Synthetic oligonucleotide
  Antisense strand to SEQ ID NO: 112362
cuuugagggaacuuugugc

SEQ ID NO: 112364 - RNA, 19 nt, Artificial Sequence
  Description of Artificial Sequence: Synthetic oligonucleotide
  Sense strand starting at position 3245 of SEQ ID NO: 1432
cgcacaaaguucccucaaa

SEQ ID NO: 112365 - RNA, 19 nt, Artificial Sequence
  Description of Artificial Sequence: Synthetic oligonucleotide
  Antisense strand to SEQ ID NO: 112364
uuugagggaacuuugugcg

SEQ ID NO: 112366 - RNA, 19 nt, Artificial Sequence
  Description of Artificial Sequence: Synthetic oligonucleotide
  Sense strand starting at position 3180 of SEQ ID NO: 1432
ccaguuucggucuagggaa

SEQ ID NO: 112367 - RNA, 19 nt, Artificial Sequence
  Description of Artificial Sequence: Synthetic oligonucleotide
  Antisense strand to SEQ ID NO: 112366
uucccuagaccgaaacugg

SEQ ID NO: 112368 - RNA, 19 nt, Artificial Sequence
  Description of Artificial Sequence: Synthetic oligonucleotide
  Sense strand starting at position 3094 of SEQ ID NO: 1432
cagaguuucccagaugcuc

SEQ ID NO: 112369 - RNA, 19 nt, Artificial Sequence
  Description of Artificial Sequence: Synthetic oligonucleotide
  Antisense strand to SEQ ID NO: 112368
gagcaucugggaaacucug

SEQ ID NO: 112370 - RNA, 19 nt, Artificial Sequence
  Description of Artificial Sequence: Synthetic oligonucleotide
  Sense strand starting at position 3017 of SEQ ID NO: 1432
gguagagacucucuugaaa

SEQ ID NO: 112371 - RNA, 19 nt, Artificial Sequence
  Description of Artificial Sequence: Synthetic oligonucleotide
  Antisense strand to SEQ ID NO: 112370
uuucaagagagucucuacc

SEQ ID NO: 112372 - RNA, 19 nt, Artificial Sequence
  Description of Artificial Sequence: Synthetic oligonucleotide
  Sense strand starting at position 2814 of SEQ ID NO: 1432
uaacaaucgcgaugacagu

SEQ ID NO: 112373 - RNA, 19 nt, Artificial Sequence
  Description of Artificial Sequence: Synthetic oligonucleotide
  Antisense strand to SEQ ID NO: 112372
acugucaucgcgauuguua

SEQ ID NO: 112374 - RNA, 19 nt, Artificial Sequence
  Description of Artificial Sequence: Synthetic oligonucleotide
  Sense strand starting at position 2812 of SEQ ID NO: 1432
ccuaacaaucgcgaugaca

SEQ ID NO: 112375 - RNA, 19 nt, Artificial Sequence
  Description of Artificial Sequence: Synthetic oligonucleotide
  Antisense strand to SEQ ID NO: 112374
ugucaucgcgauuguuagg

SEQ ID NO: 112376 - RNA, 19 nt, Artificial Sequence
  Description of Artificial Sequence: Synthetic oligonucleotide
  Sense strand starting at position 2800 of SEQ ID NO: 1432
guugauagcucuccuaaca

SEQ ID NO: 112377 - RNA, 19 nt, Artificial Sequence
  Description of Artificial Sequence: Synthetic oligonucleotide
  Antisense strand to SEQ ID NO: 112376
uguuaggagagcuaucaac

SEQ ID NO: 112378 - RNA, 19 nt, Artificial Sequence
  Description of Artificial Sequence: Synthetic oligonucleotide
  Sense strand starting at position 2586 of SEQ ID NO: 1432
gugaguuagccagaguuug

SEQ ID NO: 112379 - RNA, 19 nt, Artificial Sequence
  Description of Artificial Sequence: Synthetic oligonucleotide
  Antisense strand to SEQ ID NO: 112378
caaacucuggcuaacucac

SEQ ID NO: 112380 - RNA, 19 nt, Artificial Sequence
  Description of Artificial Sequence: Synthetic oligonucleotide
  Sense strand starting at position 2584 of SEQ ID NO: 1432
gagugaguuagccagaguu

SEQ ID NO: 112381 - RNA, 19 nt, Artificial Sequence
  Description of Artificial Sequence: Synthetic oligonucleotide
  Antisense strand to SEQ ID NO: 112380
aacucuggcuaacucacuc

SEQ ID NO: 112382 - RNA, 19 nt, Artificial Sequence
  Description of Artificial Sequence: Synthetic oligonucleotide
  Sense strand starting at position 2389 of SEQ ID NO: 1432
cacaguaucgccgcaguga

SEQ ID NO: 112383 - RNA, 19 nt, Artificial Sequence
  Description of Artificial Sequence: Synthetic oligonucleotide
  Antisense strand to SEQ ID NO: 112382
ucacugcggcgauacugug

SEQ ID NO: 112384 - RNA, 19 nt, Artificial Sequence
  Description of Artificial Sequence: Synthetic oligonucleotide
  Sense strand starting at position 2320 of SEQ ID NO: 1432
aguuuccucugauuuguuu

SEQ ID NO: 112385 - RNA, 19 nt, Artificial Sequence
  Description of Artificial Sequence: Synthetic oligonucleotide
  Antisense strand to SEQ ID NO: 112384
aaacaaaucagaggaaacu

SEQ ID NO: 112386 - RNA, 19 nt, Artificial Sequence
  Description of Artificial Sequence: Synthetic oligonucleotide
  Sense strand starting at position 2315 of SEQ ID NO: 1432
gcagaaguuuccucugauu

SEQ ID NO: 112387 - RNA, 19 nt, Artificial Sequence
  Description of Artificial Sequence: Synthetic oligonucleotide
  Antisense strand to SEQ ID NO: 112386
aaucagaggaaacuucugc

SEQ ID NO: 112388 - RNA, 19 nt, Artificial Sequence
  Description of Artificial Sequence: Synthetic oligonucleotide
  Sense strand starting at position 2314 of SEQ ID NO: 1432
ggcagaaguuuccucugau

SEQ ID NO: 112389 - RNA, 19 nt, Artificial Sequence
  Description of Artificial Sequence: Synthetic oligonucleotide
  Antisense strand to SEQ ID NO: 112388
aucagaggaaacuucugcc

SEQ ID NO: 112390 - RNA, 19 nt, Artificial Sequence
  Description of Artificial Sequence: Synthetic oligonucleotide
  Sense strand starting at position 2046 of SEQ ID NO: 1432
ccgguauuucccggagacu

SEQ ID NO: 112391 - RNA, 19 nt, Artificial Sequence
  Description of Artificial Sequence: Synthetic oligonucleotide
  Antisense strand to SEQ ID NO: 112390
agucuccgggaaauaccgg

SEQ ID NO: 112392 - RNA, 19 nt, Artificial Sequence
  Description of Artificial Sequence: Synthetic oligonucleotide
  Sense strand starting at position 1851 of SEQ ID NO: 1432
auauaaacaccucgagauc

SEQ ID NO: 112393 - RNA, 19 nt, Artificial Sequence
  Description of Artificial Sequence: Synthetic oligonucleotide
  Antisense strand to SEQ ID NO: 112392
gaucucgagguguuuauau

SEQ ID NO: 112394 - RNA, 19 nt, Artificial Sequence
  Description of Artificial Sequence: Synthetic oligonucleotide
  Sense strand starting at position 1803 of SEQ ID NO: 1432
auugaagcccuguaaugaa

SEQ ID NO: 112395 - RNA, 19 nt, Artificial Sequence
  Description of Artificial Sequence: Synthetic oligonucleotide
  Antisense strand to SEQ ID NO: 112394
uucauuacagggcuucaau

SEQ ID NO: 112396 - RNA, 19 nt, Artificial Sequence
  Description of Artificial Sequence: Synthetic oligonucleotide
  Sense strand starting at position 1620 of SEQ ID NO: 1432
ucuguuagauaaucgaaac

SEQ ID NO: 112397 - RNA, 19 nt, Artificial Sequence
  Description of Artificial Sequence: Synthetic oligonucleotide
  Antisense strand to SEQ ID NO: 112396
guuucgauuaucuaacaga

SEQ ID NO: 112398 - RNA, 19 nt, Artificial Sequence
  Description of Artificial Sequence: Synthetic oligonucleotide
  Sense strand starting at position 1524 of SEQ ID NO: 1432
gcaaacucuguccgacaga

SEQ ID NO: 112399 - RNA, 19 nt, Artificial Sequence
  Description of Artificial Sequence: Synthetic oligonucleotide
  Antisense strand to SEQ ID NO: 112398
ucugucggacagaguuugc

SEQ ID NO: 112400 - RNA, 19 nt, Artificial Sequence
  Description of Artificial Sequence: Synthetic oligonucleotide
  Sense strand starting at position 1419 of SEQ ID NO: 1432
gucaccuucgccuaaggua

SEQ ID NO: 112401 - RNA, 19 nt, Artificial Sequence
  Description of Artificial Sequence: Synthetic oligonucleotide
  Antisense strand to SEQ ID NO: 112400
uaccuuaggcgaaggugac

SEQ ID NO: 112402 - RNA, 19 nt, Artificial Sequence
  Description of Artificial Sequence: Synthetic oligonucleotide
  Sense strand starting at position 1132 of SEQ ID NO: 1432
gugauugcugggcaaauau

SEQ ID NO: 112403 - RNA, 19 nt, Artificial Sequence
  Description of Artificial Sequence: Synthetic oligonucleotide
  Antisense strand to SEQ ID NO: 112402
auauuugcccagcaaucac

SEQ ID NO: 112404 - RNA, 19 nt, Artificial Sequence
  Description of Artificial Sequence: Synthetic oligonucleotide
  Sense strand starting at position 1131 of SEQ ID NO: 1432
ggugauugcugggcaaaua

SEQ ID NO: 112405 - RNA, 19 nt, Artificial Sequence
  Description of Artificial Sequence: Synthetic oligonucleotide
  Antisense strand to SEQ ID NO: 112404
uauuugcccagcaaucacc

SEQ ID NO: 112406 - RNA, 19 nt, Artificial Sequence
  Description of Artificial Sequence: Synthetic oligonucleotide
  Sense strand starting at position 1130 of SEQ ID NO: 1432
uggugauugcugggcaaau

SEQ ID NO: 112407 - RNA, 19 nt, Artificial Sequence
  Description of Artificial Sequence: Synthetic oligonucleotide
  Antisense strand to SEQ ID NO: 112406
auuugcccagcaaucacca

SEQ ID NO: 112408 - RNA, 19 nt, Artificial Sequence
  Description of Artificial Sequence: Synthetic oligonucleotide
  Sense strand starting at position 1103 of SEQ ID NO: 1432
guguuaauccugcaacaaa

SEQ ID NO: 112409 - RNA, 19 nt, Artificial Sequence
  Description of Artificial Sequence: Synthetic oligonucleotide
  Antisense strand to SEQ ID NO: 112408
uuuguugcaggauuaacac

SEQ ID NO: 112410 - RNA, 19 nt, Artificial Sequence
  Description of Artificial Sequence: Synthetic oligonucleotide
  Sense strand starting at position 1092 of SEQ ID NO: 1432
uuuacauguagguguuaau

SEQ ID NO: 112411 - RNA, 19 nt, Artificial Sequence
  Description of Artificial Sequence: Synthetic oligonucleotide
  Antisense strand to SEQ ID NO: 112410
auuaacaccuacauguaaa

SEQ ID NO: 112412 - RNA, 19 nt, Artificial Sequence
  Description of Artificial Sequence: Synthetic oligonucleotide
  Sense strand starting at position 887 of SEQ ID NO: 1432
uuugguguuggacauuaua

SEQ ID NO: 112413 - RNA, 19 nt, Artificial Sequence
  Description of Artificial Sequence: Synthetic oligonucleotide
  Antisense strand to SEQ ID NO: 112412
uauaauguccaacaccaaa

SEQ ID NO: 112414 - RNA, 19 nt, Artificial Sequence
  Description of Artificial Sequence: Synthetic oligonucleotide
  Sense strand starting at position 867 of SEQ ID NO: 1432
gaaguaauccacugguuua

SEQ ID NO: 112415 - RNA, 19 nt, Artificial Sequence
  Description of Artificial Sequence: Synthetic oligonucleotide
  Antisense strand to SEQ ID NO: 112414
uaaaccaguggauuacuuc

SEQ ID NO: 112416 - RNA, 19 nt, Artificial Sequence
  Description of Artificial Sequence: Synthetic oligonucleotide
  Sense strand starting at position 572 of SEQ ID NO: 1432
ggaaauaguuugucauauu

SEQ ID NO: 112417 - RNA, 19 nt, Artificial Sequence
  Description of Artificial Sequence: Synthetic oligonucleotide
  Antisense strand to SEQ ID NO: 112416
aauaugacaaacuauuucc

SEQ ID NO: 112418 - RNA, 19 nt, Artificial Sequence
  Description of Artificial Sequence: Synthetic oligonucleotide
  Sense strand starting at position 571 of SEQ ID NO: 1432
gggaaauaguuugucauau

SEQ ID NO: 112419 - RNA, 19 nt, Artificial Sequence
  Description of Artificial Sequence: Synthetic oligonucleotide
  Antisense strand to SEQ ID NO: 112418
auaugacaaacuauuuccc

SEQ ID NO: 112420 - RNA, 19 nt, Artificial Sequence
  Description of Artificial Sequence: Synthetic oligonucleotide
  Sense strand starting at position 570 of SEQ ID NO: 1432
ugggaaauaguuugucaua

SEQ ID NO: 112421 - RNA, 19 nt, Artificial Sequence
  Description of Artificial Sequence: Synthetic oligonucleotide
  Antisense strand to SEQ ID NO: 112420
uaugacaaacuauuuccca

SEQ ID NO: 112422 - RNA, 19 nt, Artificial Sequence
  Description of Artificial Sequence: Synthetic oligonucleotide
  Sense strand starting at position 561 of SEQ ID NO: 1432
aaauguauuugggaaauag

SEQ ID NO: 112423 - RNA, 19 nt, Artificial Sequence
  Description of Artificial Sequence: Synthetic oligonucleotide
  Antisense strand to SEQ ID NO: 112422
cuauuucccaaauacauuu

SEQ ID NO: 112424 - RNA, 19 nt, Artificial Sequence
  Description of Artificial Sequence: Synthetic oligonucleotide
  Sense strand starting at position 413 of SEQ ID NO: 1432
uuucuuggucuuuaugaua

SEQ ID NO: 112425 - RNA, 19 nt, Artificial Sequence
  Description of Artificial Sequence: Synthetic oligonucleotide
  Antisense strand to SEQ ID NO: 112424
uaucauaaagaccaagaaa

SEQ ID NO: 112426 - RNA, 19 nt, Artificial Sequence
  Description of Artificial Sequence: Synthetic oligonucleotide
  Sense strand starting at position 357 of SEQ ID NO: 1432
gcacuuaaauaggucauau

SEQ ID NO: 112427 - RNA, 19 nt, Artificial Sequence
  Description of Artificial Sequence: Synthetic oligonucleotide
  Antisense strand to SEQ ID NO: 112426
auaugaccuauuuaagugc

SEQ ID NO: 112428 - RNA, 19 nt, Artificial Sequence
  Description of Artificial Sequence: Synthetic oligonucleotide
  Sense strand starting at position 256 of SEQ ID NO: 1432
ugaauuuacugggaaugua

SEQ ID NO: 112429 - RNA, 19 nt, Artificial Sequence
  Description of Artificial Sequence: Synthetic oligonucleotide
  Antisense strand to SEQ ID NO: 112428
uacauucccaguaaauuca

SEQ ID NO: 112430 - RNA, 19 nt, Artificial Sequence
  Description of Artificial Sequence: Synthetic oligonucleotide
  Sense strand starting at position 177 of SEQ ID NO: 1432
gguuuaaguaauuguacug

SEQ ID NO: 112431 - RNA, 19 nt, Artificial Sequence
  Description of Artificial Sequence: Synthetic oligonucleotide
  Antisense strand to SEQ ID NO: 112430
caguacaauuacuuaaacc

SEQ ID NO: 112432 - RNA, 19 nt, Artificial Sequence
  Description of Artificial Sequence: Synthetic oligonucleotide
  Sense strand starting at position 176 of SEQ ID NO: 1432
ugguuuaaguaauuguacu

SEQ ID NO: 112433 - RNA, 19 nt, Artificial Sequence
  Description of Artificial Sequence: Synthetic oligonucleotide
  Antisense strand to SEQ ID NO: 112432
aguacaauuacuuaaacca

SEQ ID NO: 112434 - RNA, 19 nt, Artificial Sequence
  Description of Artificial Sequence: Synthetic oligonucleotide
  Sense strand starting at position 15 of SEQ ID NO: 1432
guaugagcuuuccuuauau

SEQ ID NO: 112435 - RNA, 19 nt, Artificial Sequence
  Description of Artificial Sequence: Synthetic oligonucleotide
  Antisense strand to SEQ ID NO: 112434
auauaaggaaagcucauac

SEQ ID NO: 112436 - RNA, 19 nt, Artificial Sequence
  Description of Artificial Sequence: Synthetic oligonucleotide
  Sense strand starting at position 3444 of SEQ ID NO: 1431
gcagucuuugucuaaagau

SEQ ID NO: 112437 - RNA, 19 nt, Artificial Sequence
  Description of Artificial Sequence: Synthetic oligonucleotide
  Antisense strand to SEQ ID NO: 112436
aucuuuagacaaagacugc

SEQ ID NO: 112438 - RNA, 19 nt, Artificial Sequence
  Description of Artificial Sequence: Synthetic oligonucleotide
  Sense strand starting at position 3443 of SEQ ID NO: 1431
agcagucuuugucuaaaga

SEQ ID NO: 112439 - RNA, 19 nt, Artificial Sequence
  Description of Artificial Sequence: Synthetic oligonucleotide
  Antisense strand to SEQ ID NO: 112438
ucuuuagacaaagacugcu

SEQ ID NO: 112440 - RNA, 19 nt, Artificial Sequence
  Description of Artificial Sequence: Synthetic oligonucleotide
  Sense strand starting at position 3363 of SEQ ID NO: 1431
uguguauggguacagauaa

SEQ ID NO: 112441 - RNA, 19 nt, Artificial Sequence
  Description of Artificial Sequence: Synthetic oligonucleotide
  Antisense strand to SEQ ID NO: 112440
uuaucuguacccauacaca

SEQ ID NO: 112442 - RNA, 19 nt, Artificial Sequence
  Description of Artificial Sequence: Synthetic oligonucleotide
  Sense strand starting at position 3360 of SEQ ID NO: 1431
uuguguguauggguacaga

SEQ ID NO: 112443 - RNA, 19 nt, Artificial Sequence
  Description of Artificial Sequence: Synthetic oligonucleotide
  Antisense strand to SEQ ID NO: 112442
ucuguacccauacacacaa

SEQ ID NO: 112444 - RNA, 19 nt, Artificial Sequence
  Description of Artificial Sequence: Synthetic oligonucleotide
  Sense strand starting at position 2621 of SEQ ID NO: 1431
gugaauauguaacacauuu

SEQ ID NO: 112445 - RNA, 19 nt, Artificial Sequence
  Description of Artificial Sequence: Synthetic oligonucleotide
  Antisense strand to SEQ ID NO: 112444
aaauguguuacauauucac

SEQ ID NO: 112446 - RNA, 19 nt, Artificial Sequence
  Description of Artificial Sequence: Synthetic oligonucleotide
  Sense strand starting at position 2593 of SEQ ID NO: 1431
augcuuugagauuaaugcu

SEQ ID NO: 112447 - RNA, 19 nt, Artificial Sequence
  Description of Artificial Sequence: Synthetic oligonucleotide
  Antisense strand to SEQ ID NO: 112446
agcauuaaucucaaagcau

SEQ ID NO: 112448 - RNA, 19 nt, Artificial Sequence
  Description of Artificial Sequence: Synthetic oligonucleotide
  Sense strand starting at position 2531 of SEQ ID NO: 1431
uuucuacauuggucauaug

SEQ ID NO: 112449 - RNA, 19 nt, Artificial Sequence
  Description of Artificial Sequence: Synthetic oligonucleotide
  Antisense strand to SEQ ID NO: 112448
cauaugaccaauguagaaa

SEQ ID NO: 112450 - RNA, 19 nt, Artificial Sequence
  Description of Artificial Sequence: Synthetic oligonucleotide
  Sense strand starting at position 2530 of SEQ ID NO: 1431
guuucuacauuggucauau

SEQ ID NO: 112451 - RNA, 19 nt, Artificial Sequence
  Description of Artificial Sequence: Synthetic oligonucleotide
  Antisense strand to SEQ ID NO: 112450
auaugaccaauguagaaac

SEQ ID NO: 112452 - RNA, 19 nt, Artificial Sequence
  Description of Artificial Sequence: Synthetic oligonucleotide
  Sense strand starting at position 2520 of SEQ ID NO: 1431
accuuagcuuguuucuaca

SEQ ID NO: 112453 - RNA, 19 nt, Artificial Sequence
  Description of Artificial Sequence: Synthetic oligonucleotide
  Antisense strand to SEQ ID NO: 112452
uguagaaacaagcuaaggu

SEQ ID NO: 112454 - RNA, 19 nt, Artificial Sequence
  Description of Artificial Sequence: Synthetic oligonucleotide
  Sense strand starting at position 2512 of SEQ ID NO: 1431
aggaguuaaccuuagcuug

SEQ ID NO: 112455 - RNA, 19 nt, Artificial Sequence
  Description of Artificial Sequence: Synthetic oligonucleotide
  Antisense strand to SEQ ID NO: 112454
caagcuaagguuaacuccu

SEQ ID NO: 112456 - RNA, 19 nt, Artificial Sequence
  Description of Artificial Sequence: Synthetic oligonucleotide
  Sense strand starting at position 2465 of SEQ ID NO: 1431
ucauguuguggucaaccaa

SEQ ID NO: 112457 - RNA, 19 nt, Artificial Sequence
  Description of Artificial Sequence: Synthetic oligonucleotide
  Antisense strand to SEQ ID NO: 112456
uugguugaccacaacauga

SEQ ID NO: 112458 - RNA, 19 nt, Artificial Sequence
  Description of Artificial Sequence: Synthetic oligonucleotide
  Sense strand starting at position 2399 of SEQ ID NO: 1431
uacaaaugugaucgacacu

SEQ ID NO: 112459 - RNA, 19 nt, Artificial Sequence
  Description of Artificial Sequence: Synthetic oligonucleotide
  Antisense strand to SEQ ID NO: 112458
agugucgaucacauuugua

SEQ ID NO: 112460 - RNA, 19 nt, Artificial Sequence
  Description of Artificial Sequence: Synthetic oligonucleotide
  Sense strand starting at position 2398 of SEQ ID NO: 1431
cuacaaaugugaucgacac

SEQ ID NO: 112461 - RNA, 19 nt, Artificial Sequence
  Description of Artificial Sequence: Synthetic oligonucleotide
  Antisense strand to SEQ ID NO: 112460
gugucgaucacauuuguag

SEQ ID NO: 112462 - RNA, 19 nt, Artificial Sequence
  Description of Artificial Sequence: Synthetic oligonucleotide
  Sense strand starting at position 2395 of SEQ ID NO: 1431
ugacuacaaaugugaucga

SEQ ID NO: 112463 - RNA, 19 nt, Artificial Sequence
  Description of Artificial Sequence: Synthetic oligonucleotide
  Antisense strand to SEQ ID NO: 112462
ucgaucacauuuguaguca

SEQ ID NO: 112464 - RNA, 19 nt, Artificial Sequence
  Description of Artificial Sequence: Synthetic oligonucleotide
  Sense strand starting at position 2371 of SEQ ID NO: 1431
ggcagacauuaauucuuua

SEQ ID NO: 112465 - RNA, 19 nt, Artificial Sequence
  Description of Artificial Sequence: Synthetic oligonucleotide
  Antisense strand to SEQ ID NO: 112464
uaaagaauuaaugucugcc

SEQ ID NO: 112466 - RNA, 19 nt, Artificial Sequence
  Description of Artificial Sequence: Synthetic oligonucleotide
  Sense strand starting at position 2300 of SEQ ID NO: 1431
caccucuuugcauagagga

SEQ ID NO: 112467 - RNA, 19 nt, Artificial Sequence
  Description of Artificial Sequence: Synthetic oligonucleotide
  Antisense strand to SEQ ID NO: 112466
uccucuaugcaaagaggug

SEQ ID NO: 112468 - RNA, 19 nt, Artificial Sequence
  Description of Artificial Sequence: Synthetic oligonucleotide
  Sense strand starting at position 2295 of SEQ ID NO: 1431
gucaucaccucuuugcaua

SEQ ID NO: 112469 - RNA, 19 nt, Artificial Sequence
  Description of Artificial Sequence: Synthetic oligonucleotide
  Antisense strand to SEQ ID NO: 112468
uaugcaaagaggugaugac

SEQ ID NO: 112470 - RNA, 19 nt, Artificial Sequence
  Description of Artificial Sequence: Synthetic oligonucleotide
  Sense strand starting at position 2265 of SEQ ID NO: 1431
uaaacuuuggcuugugaca

SEQ ID NO: 112471 - RNA, 19 nt, Artificial Sequence
  Description of Artificial Sequence: Synthetic oligonucleotide
  Antisense strand to SEQ ID NO: 112470
ugucacaagccaaaguuua

SEQ ID NO: 112472 - RNA, 19 nt, Artificial Sequence
  Description of Artificial Sequence: Synthetic oligonucleotide
  Sense strand starting at position 2074 of SEQ ID NO: 1431
auaagaggacccuguuaua

SEQ ID NO: 112473 - RNA, 19 nt, Artificial Sequence
  Description of Artificial Sequence: Synthetic oligonucleotide
  Antisense strand to SEQ ID NO: 112472
uauaacaggguccucuuau

SEQ ID NO: 112474 - RNA, 19 nt, Artificial Sequence
  Description of Artificial Sequence: Synthetic oligonucleotide
  Sense strand starting at position 2054 of SEQ ID NO: 1431
acaugacucuaugcagguu

SEQ ID NO: 112475 - RNA, 19 nt, Artificial Sequence
  Description of Artificial Sequence: Synthetic oligonucleotide
  Antisense strand to SEQ ID NO: 112474
aaccugcauagagucaugu

SEQ ID NO: 112476 - RNA, 19 nt, Artificial Sequence
  Description of Artificial Sequence: Synthetic oligonucleotide
  Sense strand starting at position 2040 of SEQ ID NO: 1431
ggcuuugacucaucacaug

SEQ ID NO: 112477 - RNA, 19 nt, Artificial Sequence
  Description of Artificial Sequence: Synthetic oligonucleotide
  Antisense strand to SEQ ID NO: 112476
caugugaugagucaaagcc

SEQ ID NO: 112478 - RNA, 19 nt, Artificial Sequence
  Description of Artificial Sequence: Synthetic oligonucleotide
  Sense strand starting at position 2033 of SEQ ID NO: 1431
uuugauaggcuuugacuca

SEQ ID NO: 112479 - RNA, 19 nt, Artificial Sequence
  Description of Artificial Sequence: Synthetic oligonucleotide
  Antisense strand to SEQ ID NO: 112478
ugagucaaagccuaucaaa

SEQ ID NO: 112480 - RNA, 19 nt, Artificial Sequence
  Description of Artificial Sequence: Synthetic oligonucleotide
  Sense strand starting at position 2004 of SEQ ID NO: 1431
gaugguuucuaaucagaag

SEQ ID NO: 112481 - RNA, 19 nt, Artificial Sequence
  Description of Artificial Sequence: Synthetic oligonucleotide
  Antisense strand to SEQ ID NO: 112480
cuucugauuagaaaccauc

SEQ ID NO: 112482 - RNA, 19 nt, Artificial Sequence
  Description of Artificial Sequence: Synthetic oligonucleotide
  Sense strand starting at position 2000 of SEQ ID NO: 1431
ucaugaugguuucuaauca

SEQ ID NO: 112483 - RNA, 19 nt, Artificial Sequence
  Description of Artificial Sequence: Synthetic oligonucleotide
  Antisense strand to SEQ ID NO: 112482
ugauuagaaaccaucauga

SEQ ID NO: 112484 - RNA, 19 nt, Artificial Sequence
  Description of Artificial Sequence: Synthetic oligonucleotide
  Sense strand starting at position 1643 of SEQ ID NO: 1431
uauguaguagcagaauaaa

SEQ ID NO: 112485 - RNA, 19 nt, Artificial Sequence
  Description of Artificial Sequence: Synthetic oligonucleotide
  Antisense strand to SEQ ID NO: 112484
uuuauucugcuacuacaua

SEQ ID NO: 112486 - RNA, 19 nt, Artificial Sequence
  Description of Artificial Sequence: Synthetic oligonucleotide
  Sense strand starting at position 1436 of SEQ ID NO: 1431
ggcugauuaggguauuaga

SEQ ID NO: 112487 - RNA, 19 nt, Artificial Sequence
  Description of Artificial Sequence: Synthetic oligonucleotide
  Antisense strand to SEQ ID NO: 112486
ucuaauacccuaaucagcc

SEQ ID NO: 112488 - RNA, 19 nt, Artificial Sequence
  Description of Artificial Sequence: Synthetic oligonucleotide
  Sense strand starting at position 1302 of SEQ ID NO: 1431
guuaaaguuugaucaauga

SEQ ID NO: 112489 - RNA, 19 nt, Artificial Sequence
  Description of Artificial Sequence: Synthetic oligonucleotide
  Antisense strand to SEQ ID NO: 112488
ucauugaucaaacuuuaac

SEQ ID NO: 112490 - RNA, 19 nt, Artificial Sequence
  Description of Artificial Sequence: Synthetic oligonucleotide
  Sense strand starting at position 1299 of SEQ ID NO: 1431
ucuguuaaaguuugaucaa

SEQ ID NO: 112491 - RNA, 19 nt, Artificial Sequence
  Description of Artificial Sequence: Synthetic oligonucleotide
  Antisense strand to SEQ ID NO: 112490
uugaucaaacuuuaacaga

SEQ ID NO: 112492 - RNA, 19 nt, Artificial Sequence
  Description of Artificial Sequence: Synthetic oligonucleotide
  Sense strand starting at position 1288 of SEQ ID NO: 1431
cuugacagcuaucuguuaa

SEQ ID NO: 112493 - RNA, 19 nt, Artificial Sequence
  Description of Artificial Sequence: Synthetic oligonucleotide
  Antisense strand to SEQ ID NO: 112492
uuaacagauagcugucaag

SEQ ID NO: 112494 - RNA, 19 nt, Artificial Sequence
  Description of Artificial Sequence: Synthetic oligonucleotide
  Sense strand starting at position 1134 of SEQ ID NO: 1431
uacuaaugauggucuaguu

SEQ ID NO: 112495 - RNA, 19 nt, Artificial Sequence
  Description of Artificial Sequence: Synthetic oligonucleotide
  Antisense strand to SEQ ID NO: 112494
aacuagaccaucauuagua

SEQ ID NO: 112496 - RNA, 19 nt, Artificial Sequence
  Description of Artificial Sequence: Synthetic oligonucleotide
  Sense strand starting at position 990 of SEQ ID NO: 1431
gaauuaauugaauguaguc

SEQ ID NO: 112497 - RNA, 19 nt, Artificial Sequence
  Description of Artificial Sequence: Synthetic oligonucleotide
  Antisense strand to SEQ ID NO: 112496
gacuacauucaauuaauuc

SEQ ID NO: 112498 - RNA, 19 nt, Artificial Sequence
  Description of Artificial Sequence: Synthetic oligonucleotide
  Sense strand starting at position 831 of SEQ ID NO: 1431
gcaaauucggagggaaauu

SEQ ID NO: 112499 - RNA, 19 nt, Artificial Sequence
  Description of Artificial Sequence: Synthetic oligonucleotide
  Antisense strand to SEQ ID NO: 112498
aauuucccuccgaauuugc

SEQ ID NO: 112500 - RNA, 19 nt, Artificial Sequence
  Description of Artificial Sequence: Synthetic oligonucleotide
  Sense strand starting at position 830 of SEQ ID NO: 1431
ugcaaauucggagggaaau

SEQ ID NO: 112501 - RNA, 19 nt, Artificial Sequence
  Description of Artificial Sequence: Synthetic oligonucleotide
  Antisense strand to SEQ ID NO: 112500
auuucccuccgaauuugca

SEQ ID NO: 112502 - RNA, 19 nt, Artificial Sequence
  Description of Artificial Sequence: Synthetic oligonucleotide
  Sense strand starting at position 789 of SEQ ID NO: 1431
uuauaauggagcugagacu

SEQ ID NO: 112503 - RNA, 19 nt, Artificial Sequence
  Description of Artificial Sequence: Synthetic oligonucleotide
  Antisense strand to SEQ ID NO: 112502
agucucagcuccauuauaa

SEQ ID NO: 112504 - RNA, 19 nt, Artificial Sequence
  Description of Artificial Sequence: Synthetic oligonucleotide
  Sense strand starting at position 729 of SEQ ID NO: 1431
ggagucagcugacuaggaa

SEQ ID NO: 112505 - RNA, 19 nt, Artificial Sequence
  Description of Artificial Sequence: Synthetic oligonucleotide
  Antisense strand to SEQ ID NO: 112504
uuccuagucagcugacucc

SEQ ID NO: 112506 - RNA, 19 nt, Artificial Sequence
  Description of Artificial Sequence: Synthetic oligonucleotide
  Sense strand starting at position 580 of SEQ ID NO: 1431
aauugauuguguguuacac

SEQ ID NO: 112507 - RNA, 19 nt, Artificial Sequence
  Description of Artificial Sequence: Synthetic oligonucleotide
  Antisense strand to SEQ ID NO: 112506
guguaacacacaaucaauu

SEQ ID NO: 112508 - RNA, 19 nt, Artificial Sequence
  Description of Artificial Sequence: Synthetic oligonucleotide
  Sense strand starting at position 575 of SEQ ID NO: 1431
agaacaauugauugugugu

SEQ ID NO: 112509 - RNA, 19 nt, Artificial Sequence
  Description of Artificial Sequence: Synthetic oligonucleotide
  Antisense strand to SEQ ID NO: 112508
acacacaaucaauuguucu

SEQ ID NO: 112510 - RNA, 19 nt, Artificial Sequence
  Description of Artificial Sequence: Synthetic oligonucleotide
  Sense strand starting at position 564 of SEQ ID NO: 1431
guguuaucugcagaacaau

SEQ ID NO: 112511 - RNA, 19 nt, Artificial Sequence
  Description of Artificial Sequence: Synthetic oligonucleotide
  Antisense strand to SEQ ID NO: 112510
auuguucugcagauaacac

SEQ ID NO: 112512 - RNA, 19 nt, Artificial Sequence
  Description of Artificial Sequence: Synthetic oligonucleotide
  Sense strand starting at position 562 of SEQ ID NO: 1431
cuguguuaucugcagaaca

SEQ ID NO: 112513 - RNA, 19 nt, Artificial Sequence
  Description of Artificial Sequence: Synthetic oligonucleotide
  Antisense strand to SEQ ID NO: 112512
uguucugcagauaacacag

SEQ ID NO: 112514 - RNA, 19 nt, Artificial Sequence
  Description of Artificial Sequence: Synthetic oligonucleotide
  Sense strand starting at position 542 of SEQ ID NO: 1431
cuuucuugugccuguauuu

SEQ ID NO: 112515 - RNA, 19 nt, Artificial Sequence
  Description of Artificial Sequence: Synthetic oligonucleotide
  Antisense strand to SEQ ID NO: 112514
aaauacaggcacaagaaag

SEQ ID NO: 112516 - RNA, 19 nt, Artificial Sequence
  Description of Artificial Sequence: Synthetic oligonucleotide
  Sense strand starting at position 55 of SEQ ID NO: 1433
aggccagguguugauuaaa

SEQ ID NO: 112517 - RNA, 19 nt, Artificial Sequence
  Description of Artificial Sequence: Synthetic oligonucleotide
  Antisense strand to SEQ ID NO: 112516
uuuaaucaacaccuggccu

SEQ ID NO: 112518 - RNA, 19 nt, Artificial Sequence
  Description of Artificial Sequence: Synthetic oligonucleotide
  Sense strand starting at position 467 of SEQ ID NO: 1433
ugaagacaaucuguaccau

SEQ ID NO: 112519 - RNA, 19 nt, Artificial Sequence
  Description of Artificial Sequence: Synthetic oligonucleotide
  Antisense strand to SEQ ID NO: 112518
augguacagauugucuuca

SEQ ID NO: 112520 - RNA, 19 nt, Artificial Sequence
  Description of Artificial Sequence: Synthetic oligonucleotide
  Sense strand starting at position 595 of SEQ ID NO: 1433
gcaggacaaguuuauggua

SEQ ID NO: 112521 - RNA, 19 nt, Artificial Sequence
  Description of Artificial Sequence: Synthetic oligonucleotide
  Antisense strand to SEQ ID NO: 112520
uaccauaaacuuguccugc

SEQ ID NO: 112522 - RNA, 19 nt, Artificial Sequence
  Description of Artificial Sequence: Synthetic oligonucleotide
  Sense strand starting at position 640 of SEQ ID NO: 1433
gggagagauucaguugcuc

SEQ ID NO: 112523 - RNA, 19 nt, Artificial Sequence
  Description of Artificial Sequence: Synthetic oligonucleotide
  Antisense strand to SEQ ID NO: 112522
gagcaacugaaucucuccc

SEQ ID NO: 112524 - RNA, 19 nt, Artificial Sequence
  Description of Artificial Sequence: Synthetic oligonucleotide
  Sense strand starting at position 864 of SEQ ID NO: 1433
guguuucucauguaauaga

SEQ ID NO: 112525 - RNA, 19 nt, Artificial Sequence
  Description of Artificial Sequence: Synthetic oligonucleotide
  Antisense strand to SEQ ID NO: 112524
ucuauuacaugagaaacac

SEQ ID NO: 112526 - RNA, 19 nt, Artificial Sequence
  Description of Artificial Sequence: Synthetic oligonucleotide
  Sense strand starting at position 910 of SEQ ID NO: 1433
ugaacucaacacugaguuu

SEQ ID NO: 112527 - RNA, 19 nt, Artificial Sequence
  Description of Artificial Sequence: Synthetic oligonucleotide
  Antisense strand to SEQ ID NO: 112526
aaacucaguguugaguuca

SEQ ID NO: 112528 - RNA, 19 nt, Artificial Sequence
  Description of Artificial Sequence: Synthetic oligonucleotide
  Sense strand starting at position 926 of SEQ ID NO: 1433
uuugcaauaguuuacagaa

SEQ ID NO: 112529 - RNA, 19 nt, Artificial Sequence
  Description of Artificial Sequence: Synthetic oligonucleotide
  Antisense strand to SEQ ID NO: 112528
uucuguaaacuauugcaaa

SEQ ID NO: 112530 - RNA, 19 nt, Artificial Sequence
  Description of Artificial Sequence: Synthetic oligonucleotide
  Sense strand starting at position 1003 of SEQ ID NO: 1433
cuauaaacacguuaagcuu

SEQ ID NO: 112531 - RNA, 19 nt, Artificial Sequence
  Description of Artificial Sequence: Synthetic oligonucleotide
  Antisense strand to SEQ ID NO: 112530
aagcuuaacguguuuauag

SEQ ID NO: 112532 - RNA, 19 nt, Artificial Sequence
  Description of Artificial Sequence: Synthetic oligonucleotide
  Sense strand starting at position 1093 of SEQ ID NO: 1433
ggguaaagaugauccgaca

SEQ ID NO: 112533 - RNA, 19 nt, Artificial Sequence
  Description of Artificial Sequence: Synthetic oligonucleotide
  Antisense strand to SEQ ID NO: 112532
ugucggaucaucuuuaccc

SEQ ID NO: 112534 - RNA, 19 nt, Artificial Sequence
  Description of Artificial Sequence: Synthetic oligonucleotide
  Sense strand starting at position 1102 of SEQ ID NO: 1433
ugauccgacaagugagaga

SEQ ID NO: 112535 - RNA, 19 nt, Artificial Sequence
  Description of Artificial Sequence: Synthetic oligonucleotide
  Antisense strand to SEQ ID NO: 112534
ucucucacuugucggauca

SEQ ID NO: 112536 - RNA, 19 nt, Artificial Sequence
  Description of Artificial Sequence: Synthetic oligonucleotide
  Sense strand starting at position 1154 of SEQ ID NO: 1433
accucuauggugggaucau

SEQ ID NO: 112537 - RNA, 19 nt, Artificial Sequence
  Description of Artificial Sequence: Synthetic oligonucleotide
  Antisense strand to SEQ ID NO: 112536
augaucccaccauagaggu

SEQ ID NO: 112538 - RNA, 19 nt, Artificial Sequence
  Description of Artificial Sequence: Synthetic oligonucleotide
  Sense strand starting at position 1202 of SEQ ID NO: 1433
uggauugucagugcgcuuu

SEQ ID NO: 112539 - RNA, 19 nt, Artificial Sequence
  Description of Artificial Sequence: Synthetic oligonucleotide
  Antisense strand to SEQ ID NO: 112538
aaagcgcacugacaaucca

SEQ ID NO: 112540 - RNA, 19 nt, Artificial Sequence
  Description of Artificial Sequence: Synthetic oligonucleotide
  Sense strand starting at position 1293 of SEQ ID NO: 1433
accaguaaucaggguuaau

SEQ ID NO: 112541 - RNA, 19 nt, Artificial Sequence
  Description of Artificial Sequence: Synthetic oligonucleotide
  Antisense strand to SEQ ID NO: 112540
auuaacccugauuacuggu

SEQ ID NO: 112542 - RNA, 19 nt, Artificial Sequence
  Description of Artificial Sequence: Synthetic oligonucleotide
  Sense strand starting at position 1390 of SEQ ID NO: 1433
uucuuaaagugacuagaga

SEQ ID NO: 112543 - RNA, 19 nt, Artificial Sequence
  Description of Artificial Sequence: Synthetic oligonucleotide
  Antisense strand to SEQ ID NO: 112542
ucucuagucacuuuaagaa

SEQ ID NO: 112544 - RNA, 19 nt, Artificial Sequence
  Description of Artificial Sequence: Synthetic oligonucleotide
  Sense strand starting at position 1422 of SEQ ID NO: 1433
ggauuaauaucggccucac

SEQ ID NO: 112545 - RNA, 19 nt, Artificial Sequence
  Description of Artificial Sequence: Synthetic oligonucleotide
  Antisense strand to SEQ ID NO: 112544
gugaggccgauauuaaucc

SEQ ID NO: 112546 - RNA, 19 nt, Artificial Sequence
  Description of Artificial Sequence: Synthetic oligonucleotide
  Sense strand starting at position 1665 of SEQ ID NO: 1433
uugucuccagcugauagau

SEQ ID NO: 112547 - RNA, 19 nt, Artificial Sequence
  Description of Artificial Sequence: Synthetic oligonucleotide
  Antisense strand to SEQ ID NO: 112546
aucuaucagcuggagacaa

SEQ ID NO: 112548 - RNA, 19 nt, Artificial Sequence
  Description of Artificial Sequence: Synthetic oligonucleotide
  Sense strand starting at position 1675 of SEQ ID NO: 1433
cugauagauucugcuccau

SEQ ID NO: 112549 - RNA, 19 nt, Artificial Sequence
  Description of Artificial Sequence: Synthetic oligonucleotide
  Antisense strand to SEQ ID NO: 112548
auggagcagaaucuaucag

SEQ ID NO: 112550 - RNA, 19 nt, Artificial Sequence
  Description of Artificial Sequence: Synthetic oligonucleotide
  Sense strand starting at position 1704 of SEQ ID NO: 1433
agugaaacgccugaacauu

SEQ ID NO: 112551 - RNA, 19 nt, Artificial Sequence
  Description of Artificial Sequence: Synthetic oligonucleotide
  Antisense strand to SEQ ID NO: 112550
aauguucaggcguuucacu

SEQ ID NO: 112552 - RNA, 19 nt, Artificial Sequence
  Description of Artificial Sequence: Synthetic oligonucleotide
  Sense strand starting at position 2060 of SEQ ID NO: 1433
uucuuucgccauuaacaga

SEQ ID NO: 112553 - RNA, 19 nt, Artificial Sequence
  Description of Artificial Sequence: Synthetic oligonucleotide
  Antisense strand to SEQ ID NO: 112552
ucuguuaauggcgaaagaa

SEQ ID NO: 112554 - RNA, 19 nt, Artificial Sequence
  Description of Artificial Sequence: Synthetic oligonucleotide
  Sense strand starting at position 2198 of SEQ ID NO: 1433
ugacccuugucaucuuaga

SEQ ID NO: 112555 - RNA, 19 nt, Artificial Sequence
  Description of Artificial Sequence: Synthetic oligonucleotide
  Antisense strand to SEQ ID NO: 112554
ucuaagaugacaaggguca

SEQ ID NO: 112556 - RNA, 19 nt, Artificial Sequence
  Description of Artificial Sequence: Synthetic oligonucleotide
  Sense strand starting at position 2289 of SEQ ID NO: 1433
auccauucccgugauauaa

SEQ ID NO: 112557 - RNA, 19 nt, Artificial Sequence
  Description of Artificial Sequence: Synthetic oligonucleotide
  Antisense strand to SEQ ID NO: 112556
uuauaucacgggaauggau

SEQ ID NO: 112558 - RNA, 19 nt, Artificial Sequence
  Description of Artificial Sequence: Synthetic oligonucleotide
  Sense strand starting at position 2299 of SEQ ID NO: 1433
gugauauaaaguugaacag

SEQ ID NO: 112559 - RNA, 19 nt, Artificial Sequence
  Description of Artificial Sequence: Synthetic oligonucleotide
  Antisense strand to SEQ ID NO: 112558
cuguucaacuuuauaucac

SEQ ID NO: 112560 - RNA, 19 nt, Artificial Sequence
  Description of Artificial Sequence: Synthetic oligonucleotide
  Sense strand starting at position 2330 of SEQ ID NO: 1433
gggucaagugucuguauuu

SEQ ID NO: 112561 - RNA, 19 nt, Artificial Sequence
  Description of Artificial Sequence: Synthetic oligonucleotide
  Antisense strand to SEQ ID NO: 112560
aaauacagacacuugaccc

SEQ ID NO: 112562 - RNA, 19 nt, Artificial Sequence
  Description of Artificial Sequence: Synthetic oligonucleotide
  Sense strand starting at position 2669 of SEQ ID NO: 1433
cuuuaaguggauugugaca

SEQ ID NO: 112563 - RNA, 19 nt, Artificial Sequence
  Description of Artificial Sequence: Synthetic oligonucleotide
  Antisense strand to SEQ ID NO: 112562
ugucacaauccacuuaaag

SEQ ID NO: 112564 - RNA, 19 nt, Artificial Sequence
  Description of Artificial Sequence: Synthetic oligonucleotide
  Sense strand starting at position 2738 of SEQ ID NO: 1433
uaagaaaugguuugccuau

SEQ ID NO: 112565 - RNA, 19 nt, Artificial Sequence
  Description of Artificial Sequence: Synthetic oligonucleotide
  Antisense strand to SEQ ID NO: 112564
auaggcaaaccauuucuua

SEQ ID NO: 112566 - RNA, 19 nt, Artificial Sequence
  Description of Artificial Sequence: Synthetic oligonucleotide
  Sense strand starting at position 2739 of SEQ ID NO: 1433
aagaaaugguuugccuaua

SEQ ID NO: 112567 - RNA, 19 nt, Artificial Sequence
  Description of Artificial Sequence: Synthetic oligonucleotide
  Antisense strand to SEQ ID NO: 112566
uauaggcaaaccauuucuu

SEQ ID NO: 112568 - RNA, 19 nt, Artificial Sequence
  Description of Artificial Sequence: Synthetic oligonucleotide
  Sense strand starting at position 2740 of SEQ ID NO: 1433
agaaaugguuugccuauac

SEQ ID NO: 112569 - RNA, 19 nt, Artificial Sequence
  Description of Artificial Sequence: Synthetic oligonucleotide
  Antisense strand to SEQ ID NO: 112568
guauaggcaaaccauuucu

SEQ ID NO: 112570 - RNA, 19 nt, Artificial Sequence
  Description of Artificial Sequence: Synthetic oligonucleotide
  Sense strand starting at position 2796 of SEQ ID NO: 1433
cucauaugguccucagaau

SEQ ID NO: 112571 - RNA, 19 nt, Artificial Sequence
  Description of Artificial Sequence: Synthetic oligonucleotide
  Antisense strand to SEQ ID NO: 112570
auucugaggaccauaugag

SEQ ID NO: 112572 - RNA, 19 nt, Artificial Sequence
  Description of Artificial Sequence: Synthetic oligonucleotide
  Sense strand starting at position 2797 of SEQ ID NO: 1433
ucauaugguccucagaauu

SEQ ID NO: 112573 - RNA, 19 nt, Artificial Sequence
  Description of Artificial Sequence: Synthetic oligonucleotide
  Antisense strand to SEQ ID NO: 112572
aauucugaggaccauauga

SEQ ID NO: 112574 - RNA, 19 nt, Artificial Sequence
  Description of Artificial Sequence: Synthetic oligonucleotide
  Sense strand starting at position 3001 of SEQ ID NO: 1433
cguuaaaugcaccaaauaa

SEQ ID NO: 112575 - RNA, 19 nt, Artificial Sequence
  Description of Artificial Sequence: Synthetic oligonucleotide
  Antisense strand to SEQ ID NO: 112574
uuauuuggugcauuuaacg

SEQ ID NO: 112576 - RNA, 19 nt, Artificial Sequence
  Description of Artificial Sequence: Synthetic oligonucleotide
  Sense strand starting at position 3125 of SEQ ID NO: 1433
acacgaggaagguguuaaa

SEQ ID NO: 112577 - RNA, 19 nt, Artificial Sequence
  Description of Artificial Sequence: Synthetic oligonucleotide
  Antisense strand to SEQ ID NO: 112576
uuuaacaccuuccucgugu

SEQ ID NO: 112578 - RNA, 19 nt, Artificial Sequence
  Description of Artificial Sequence: Synthetic oligonucleotide
  Sense strand starting at position 3147 of SEQ ID NO: 1433
gguguaauagcucaauaga

SEQ ID NO: 112579 - RNA, 19 nt, Artificial Sequence
  Description of Artificial Sequence: Synthetic oligonucleotide
  Antisense strand to SEQ ID NO: 112578
ucuauugagcuauuacacc

SEQ ID NO: 112580 - RNA, 19 nt, Artificial Sequence
  Description of Artificial Sequence: Synthetic oligonucleotide
  Sense strand starting at position 3544 of SEQ ID NO: 1433
guaagcaaccauuagguua

SEQ ID NO: 112581 - RNA, 19 nt, Artificial Sequence
  Description of Artificial Sequence: Synthetic oligonucleotide
  Antisense strand to SEQ ID NO: 112580
uaaccuaaugguugcuuac

SEQ ID NO: 112582 - RNA, 19 nt, Artificial Sequence
  Description of Artificial Sequence: Synthetic oligonucleotide
  Sense strand starting at position 3567 of SEQ ID NO: 1433
gcugaaccaauguguagaa

SEQ ID NO: 112583 - RNA, 19 nt, Artificial Sequence
  Description of Artificial Sequence: Synthetic oligonucleotide
  Antisense strand to SEQ ID NO: 112582
uucuacacauugguucagc

SEQ ID NO: 112584 - RNA, 19 nt, Artificial Sequence
  Description of Artificial Sequence: Synthetic oligonucleotide
  Sense strand starting at position 3586 of SEQ ID NO: 1433
aguccuaacuaguuauaag

SEQ ID NO: 112585 - RNA, 19 nt, Artificial Sequence
  Description of Artificial Sequence: Synthetic oligonucleotide
  Antisense strand to SEQ ID NO: 112584
cuuauaacuaguuaggacu

SEQ ID NO: 112586 - RNA, 19 nt, Artificial Sequence
  Description of Artificial Sequence: Synthetic oligonucleotide
  Sense strand starting at position 3702 of SEQ ID NO: 1433
cuuguaugcccucauacca

SEQ ID NO: 112587 - RNA, 19 nt, Artificial Sequence
  Description of Artificial Sequence: Synthetic oligonucleotide
  Antisense strand to SEQ ID NO: 112586
ugguaugagggcauacaag

SEQ ID NO: 112588 - RNA, 19 nt, Artificial Sequence
  Description of Artificial Sequence: Synthetic oligonucleotide
  Sense strand starting at position 3710 of SEQ ID NO: 1433
cccucauaccauugaguua

SEQ ID NO: 112589 - RNA, 19 nt, Artificial Sequence
  Description of Artificial Sequence: Synthetic oligonucleotide
  Antisense strand to SEQ ID NO: 112588
uaacucaaugguaugaggg

SEQ ID NO: 112590 - RNA, 19 nt, Artificial Sequence
  Description of Artificial Sequence: Synthetic oligonucleotide
  Sense strand starting at position 3843 of SEQ ID NO: 1433
gggcccucacuguaauuaa

SEQ ID NO: 112591 - RNA, 19 nt, Artificial Sequence
  Description of Artificial Sequence: Synthetic oligonucleotide
  Antisense strand to SEQ ID NO: 112590
uuaauuacagugagggccc

SEQ ID NO: 112592 - RNA, 19 nt, Artificial Sequence
  Description of Artificial Sequence: Synthetic oligonucleotide
  Sense strand starting at position 3961 of SEQ ID NO: 1433
augggacucuugccucaua

SEQ ID NO: 112593 - RNA, 19 nt, Artificial Sequence
  Description of Artificial Sequence: Synthetic oligonucleotide
  Antisense strand to SEQ ID NO: 112592
uaugaggcaagagucccau

SEQ ID NO: 112594 - RNA, 19 nt, Artificial Sequence
  Description of Artificial Sequence: Synthetic oligonucleotide
  Sense strand starting at position 3964 of SEQ ID NO: 1433
ggacucuugccucauauac

SEQ ID NO: 112595 - RNA, 19 nt, Artificial Sequence
  Description of Artificial Sequence: Synthetic oligonucleotide
  Antisense strand to SEQ ID NO: 112594
guauaugaggcaagagucc

SEQ ID NO: 112596 - RNA, 19 nt, Artificial Sequence
  Description of Artificial Sequence: Synthetic oligonucleotide
  Sense strand starting at position 315 of SEQ ID NO: 1434
ccagcucuguuauuauuua

SEQ ID NO: 112597 - RNA, 19 nt, Artificial Sequence
  Description of Artificial Sequence: Synthetic oligonucleotide
  Antisense strand to SEQ ID NO: 112596
uaaauaauaacagagcugg

SEQ ID NO: 112598 - RNA, 19 nt, Artificial Sequence
  Description of Artificial Sequence: Synthetic oligonucleotide
  Sense strand starting at position 326 of SEQ ID NO: 1434
auuauuuagcugugugauu

SEQ ID NO: 112599 - RNA, 19 nt, Artificial Sequence
  Description of Artificial Sequence: Synthetic oligonucleotide
  Antisense strand to SEQ ID NO: 112598
aaucacacagcuaaauaau

SEQ ID NO: 112600 - RNA, 19 nt, Artificial Sequence
  Description of Artificial Sequence: Synthetic oligonucleotide
  Sense strand starting at position 327 of SEQ ID NO: 1434
uuauuuagcugugugauuc

SEQ ID NO: 112601 - RNA, 19 nt, Artificial Sequence
  Description of Artificial Sequence: Synthetic oligonucleotide
  Antisense strand to SEQ ID NO: 112600
gaaucacacagcuaaauaa

SEQ ID NO: 112602 - RNA, 19 nt, Artificial Sequence
  Description of Artificial Sequence: Synthetic oligonucleotide
  Sense strand starting at position 331 of SEQ ID NO: 1434
uuagcugugugauucagag

SEQ ID NO: 112603 - RNA, 19 nt, Artificial Sequence
  Description of Artificial Sequence: Synthetic oligonucleotide
  Antisense strand to SEQ ID NO: 112602
cucugaaucacacagcuaa

SEQ ID NO: 112604 - RNA, 19 nt, Artificial Sequence
  Description of Artificial Sequence: Synthetic oligonucleotide
  Sense strand starting at position 621 of SEQ ID NO: 1434
auaagcuaccucugaagga

SEQ ID NO: 112605 - RNA, 19 nt, Artificial Sequence
  Description of Artificial Sequence: Synthetic oligonucleotide
  Antisense strand to SEQ ID NO: 112604
uccuucagagguagcuuau

SEQ ID NO: 112606 - RNA, 19 nt, Artificial Sequence
  Description of Artificial Sequence: Synthetic oligonucleotide
  Sense strand starting at position 770 of SEQ ID NO: 1434
uaauauauuccuggacgag

SEQ ID NO: 112607 - RNA, 19 nt, Artificial Sequence
  Description of Artificial Sequence: Synthetic oligonucleotide
  Antisense strand to SEQ ID NO: 112606
cucguccaggaauauauua

SEQ ID NO: 112608 - RNA, 19 nt, Artificial Sequence
  Description of Artificial Sequence: Synthetic oligonucleotide
  Sense strand starting at position 922 of SEQ ID NO: 1434
ucacuuaagugucccucaa

SEQ ID NO: 112609 - RNA, 19 nt, Artificial Sequence
  Description of Artificial Sequence: Synthetic oligonucleotide
  Antisense strand to SEQ ID NO: 112608
uugagggacacuuaaguga

SEQ ID NO: 112610 - RNA, 19 nt, Artificial Sequence
  Description of Artificial Sequence: Synthetic oligonucleotide
  Sense strand starting at position 924 of SEQ ID NO: 1434
acuuaagugucccucaaau

SEQ ID NO: 112611 - RNA, 19 nt, Artificial Sequence
  Description of Artificial Sequence: Synthetic oligonucleotide
  Antisense strand to SEQ ID NO: 112610
auuugagggacacuuaagu

SEQ ID NO: 112612 - RNA, 19 nt, Artificial Sequence
  Description of Artificial Sequence: Synthetic oligonucleotide
  Sense strand starting at position 926 of SEQ ID NO: 1434
uuaagugucccucaaauau

SEQ ID NO: 112613 - RNA, 19 nt, Artificial Sequence
  Description of Artificial Sequence: Synthetic oligonucleotide
  Antisense strand to SEQ ID NO: 112612
auauuugagggacacuuaa

SEQ ID NO: 112614 - RNA, 19 nt, Artificial Sequence
  Description of Artificial Sequence: Synthetic oligonucleotide
  Sense strand starting at position 1052 of SEQ ID NO: 1434
ggcugcguuccucaaagaa

SEQ ID NO: 112615 - RNA, 19 nt, Artificial Sequence
  Description of Artificial Sequence: Synthetic oligonucleotide
  Antisense strand to SEQ ID NO: 112614
uucuuugaggaacgcagcc

SEQ ID NO: 112616 - RNA, 19 nt, Artificial Sequence
  Description of Artificial Sequence: Synthetic oligonucleotide
  Sense strand starting at position 1081 of SEQ ID NO: 1434
uugcuuuagcgacuguauu

SEQ ID NO: 112617 - RNA, 19 nt, Artificial Sequence
  Description of Artificial Sequence: Synthetic oligonucleotide
  Antisense strand to SEQ ID NO: 112616
aauacagucgcuaaagcaa

SEQ ID NO: 112618 - RNA, 19 nt, Artificial Sequence
  Description of Artificial Sequence: Synthetic oligonucleotide
  Sense strand starting at position 1450 of SEQ ID NO: 1434
ggcuguucucgcccagauc

SEQ ID NO: 112619 - RNA, 19 nt, Artificial Sequence
  Description of Artificial Sequence: Synthetic oligonucleotide
  Antisense strand to SEQ ID NO: 112618
gaucugggcgagaacagcc

SEQ ID NO: 112620 - RNA, 19 nt, Artificial Sequence
  Description of Artificial Sequence: Synthetic oligonucleotide
  Sense strand starting at position 1661 of SEQ ID NO: 1434
agugacucuccucagcauu

SEQ ID NO: 112621 - RNA, 19 nt, Artificial Sequence
  Description of Artificial Sequence: Synthetic oligonucleotide
  Antisense strand to SEQ ID NO: 112620
aaugcugaggagagucacu

SEQ ID NO: 112622 - RNA, 19 nt, Artificial Sequence
  Description of Artificial Sequence: Synthetic oligonucleotide
  Sense strand starting at position 1945 of SEQ ID NO: 1434
caacgugacccggacugau

SEQ ID NO: 112623 - RNA, 19 nt, Artificial Sequence
  Description of Artificial Sequence: Synthetic oligonucleotide
  Antisense strand to SEQ ID NO: 112622
aucaguccgggucacguug

SEQ ID NO: 112624 - RNA, 19 nt, Artificial Sequence
  Description of Artificial Sequence: Synthetic oligonucleotide
  Sense strand starting at position 1968 of SEQ ID NO: 1434
ggaacagccagcgaacauu

SEQ ID NO: 112625 - RNA, 19 nt, Artificial Sequence
  Description of Artificial Sequence: Synthetic oligonucleotide
  Antisense strand to SEQ ID NO: 112624
aauguucgcuggcuguucc

SEQ ID NO: 112626 - RNA, 19 nt, Artificial Sequence
  Description of Artificial Sequence: Synthetic oligonucleotide
  Sense strand starting at position 2092 of SEQ ID NO: 1434
guggaaaccacugaguagu

SEQ ID NO: 112627 - RNA, 19 nt, Artificial Sequence
  Description of Artificial Sequence: Synthetic oligonucleotide
  Antisense strand to SEQ ID NO: 112626
acuacucagugguuuccac

SEQ ID NO: 112628 - RNA, 19 nt, Artificial Sequence
  Description of Artificial Sequence: Synthetic oligonucleotide
  Sense strand starting at position 2109 of SEQ ID NO: 1434
gugcuccgcgugucaaaga

SEQ ID NO: 112629 - RNA, 19 nt, Artificial Sequence
  Description of Artificial Sequence: Synthetic oligonucleotide
  Antisense strand to SEQ ID NO: 112628
ucuuugacacgcggagcac

SEQ ID NO: 112630 - RNA, 19 nt, Artificial Sequence
  Description of Artificial Sequence: Synthetic oligonucleotide
  Sense strand starting at position 2272 of SEQ ID NO: 1434
accagaacgccggaaguau

SEQ ID NO: 112631 - RNA, 19 nt, Artificial Sequence
  Description of Artificial Sequence: Synthetic oligonucleotide
  Antisense strand to SEQ ID NO: 112630
auacuuccggcguucuggu

SEQ ID NO: 112632 - RNA, 19 nt, Artificial Sequence
  Description of Artificial Sequence: Synthetic oligonucleotide
  Sense strand starting at position 2432 of SEQ ID NO: 1434
cuaacucuucugugugaaa

SEQ ID NO: 112633 - RNA, 19 nt, Artificial Sequence
  Description of Artificial Sequence: Synthetic oligonucleotide
  Antisense strand to SEQ ID NO: 112632
uuucacacagaagaguuag

SEQ ID NO: 112634 - RNA, 19 nt, Artificial Sequence
  Description of Artificial Sequence: Synthetic oligonucleotide
  Sense strand starting at position 2511 of SEQ ID NO: 1434
gcgucugcugccuucaagu

SEQ ID NO: 112635 - RNA, 19 nt, Artificial Sequence
  Description of Artificial Sequence: Synthetic oligonucleotide
  Antisense strand to SEQ ID NO: 112634
acuugaaggcagcagacgc

SEQ ID NO: 112636 - RNA, 19 nt, Artificial Sequence
  Description of Artificial Sequence: Synthetic oligonucleotide
  Sense strand starting at position 2710 of SEQ ID NO: 1434
gggagauguguugauaguu

SEQ ID NO: 112637 - RNA, 19 nt, Artificial Sequence
  Description of Artificial Sequence: Synthetic oligonucleotide
  Antisense strand to SEQ ID NO: 112636
aacuaucaacacaucuccc

SEQ ID NO: 112638 - RNA, 19 nt, Artificial Sequence
  Description of Artificial Sequence: Synthetic oligonucleotide
  Sense strand starting at position 2716 of SEQ ID NO: 1434
uguguugauaguuacugua

SEQ ID NO: 112639 - RNA, 19 nt, Artificial Sequence
  Description of Artificial Sequence: Synthetic oligonucleotide
  Antisense strand to SEQ ID NO: 112638
uacaguaacuaucaacaca

SEQ ID NO: 112640 - RNA, 19 nt, Artificial Sequence
  Description of Artificial Sequence: Synthetic oligonucleotide
  Sense strand starting at position 2751 of SEQ ID NO: 1434
ggccucuucugaguuccaa

SEQ ID NO: 112641 - RNA, 19 nt, Artificial Sequence
  Description of Artificial Sequence: Synthetic oligonucleotide
  Antisense strand to SEQ ID NO: 112640
uuggaacucagaagaggcc

SEQ ID NO: 112642 - RNA, 19 nt, Artificial Sequence
  Description of Artificial Sequence: Synthetic oligonucleotide
  Sense strand starting at position 2877 of SEQ ID NO: 1434
uugcuuugagccugggaau

SEQ ID NO: 112643 - RNA, 19 nt, Artificial Sequence
  Description of Artificial Sequence: Synthetic oligonucleotide
  Antisense strand to SEQ ID NO: 112642
auucccaggcucaaagcaa

SEQ ID NO: 112644 - RNA, 19 nt, Artificial Sequence
  Description of Artificial Sequence: Synthetic oligonucleotide
  Sense strand starting at position 2878 of SEQ ID NO: 1434
ugcuuugagccugggaauu

SEQ ID NO: 112645 - RNA, 19 nt, Artificial Sequence
  Description of Artificial Sequence: Synthetic oligonucleotide
  Antisense strand to SEQ ID NO: 112644
aauucccaggcucaaagca

SEQ ID NO: 112646 - RNA, 19 nt, Artificial Sequence
  Description of Artificial Sequence: Synthetic oligonucleotide
  Sense strand starting at position 3224 of SEQ ID NO: 1434
ucagaagucuuauugagga

SEQ ID NO: 112647 - RNA, 19 nt, Artificial Sequence
  Description of Artificial Sequence: Synthetic oligonucleotide
  Antisense strand to SEQ ID NO: 112646
uccucaauaagacuucuga

SEQ ID NO: 112648 - RNA, 19 nt, Artificial Sequence
  Description of Artificial Sequence: Synthetic oligonucleotide
  Sense strand starting at position 3274 of SEQ ID NO: 1434
uuuagacugcuccaaagca

SEQ ID NO: 112649 - RNA, 19 nt, Artificial Sequence
  Description of Artificial Sequence: Synthetic oligonucleotide
  Antisense strand to SEQ ID NO: 112648
ugcuuuggagcagucuaaa

SEQ ID NO: 112650 - RNA, 19 nt, Artificial Sequence
  Description of Artificial Sequence: Synthetic oligonucleotide
  Sense strand starting at position 3338 of SEQ ID NO: 1434
gugcuuggaaguuaaauca

SEQ ID NO: 112651 - RNA, 19 nt, Artificial Sequence
  Description of Artificial Sequence: Synthetic oligonucleotide
  Antisense strand to SEQ ID NO: 112650
ugauuuaacuuccaagcac

SEQ ID NO: 112652 - RNA, 19 nt, Artificial Sequence
  Description of Artificial Sequence: Synthetic oligonucleotide
  Sense strand starting at position 3499 of SEQ ID NO: 1434
gguagaacaucccuguagu

SEQ ID NO: 112653 - RNA, 19 nt, Artificial Sequence
  Description of Artificial Sequence: Synthetic oligonucleotide
  Antisense strand to SEQ ID NO: 112652
acuacagggauguucuacc

SEQ ID NO: 112654 - RNA, 19 nt, Artificial Sequence
  Description of Artificial Sequence: Synthetic oligonucleotide
  Sense strand starting at position 3500 of SEQ ID NO: 1434
guagaacaucccuguaguc

SEQ ID NO: 112655 - RNA, 19 nt, Artificial Sequence
  Description of Artificial Sequence: Synthetic oligonucleotide
  Antisense strand to SEQ ID NO: 112654
gacuacagggauguucuac

SEQ ID NO: 112656 - RNA, 19 nt, Artificial Sequence
  Description of Artificial Sequence: Synthetic oligonucleotide
  Sense strand starting at position 3556 of SEQ ID NO: 1434
gacuccugaguuugagguu

SEQ ID NO: 112657 - RNA, 19 nt, Artificial Sequence
  Description of Artificial Sequence: Synthetic oligonucleotide
  Antisense strand to SEQ ID NO: 112656
aaccucaaacucaggaguc

SEQ ID NO: 112658 - RNA, 19 nt, Artificial Sequence
  Description of Artificial Sequence: Synthetic oligonucleotide
  Sense strand starting at position 3688 of SEQ ID NO: 1434
agguuuagguggaagagua

SEQ ID NO: 112659 - RNA, 19 nt, Artificial Sequence
  Description of Artificial Sequence: Synthetic oligonucleotide
  Antisense strand to SEQ ID NO: 112658
uacucuuccaccuaaaccu

SEQ ID NO: 112660 - RNA, 19 nt, Artificial Sequence
  Description of Artificial Sequence: Synthetic oligonucleotide
  Sense strand starting at position 3702 of SEQ ID NO: 1434
gaguacacauguuuauaga

SEQ ID NO: 112661 - RNA, 19 nt, Artificial Sequence
  Description of Artificial Sequence: Synthetic oligonucleotide
  Antisense strand to SEQ ID NO: 112660
ucuauaaacauguguacuc

SEQ ID NO: 112662 - RNA, 19 nt, Artificial Sequence
  Description of Artificial Sequence: Synthetic oligonucleotide
  Sense strand starting at position 3703 of SEQ ID NO: 1434
aguacacauguuuauagau

SEQ ID NO: 112663 - RNA, 19 nt, Artificial Sequence
  Description of Artificial Sequence: Synthetic oligonucleotide
  Antisense strand to SEQ ID NO: 112662
aucuauaaacauguguacu

SEQ ID NO: 112664 - RNA, 19 nt, Artificial Sequence
  Description of Artificial Sequence: Synthetic oligonucleotide
  Sense strand starting at position 3771 of SEQ ID NO: 1434
ggucgagcaucauuggauu

SEQ ID NO: 112665 - RNA, 19 nt, Artificial Sequence
  Description of Artificial Sequence: Synthetic oligonucleotide
  Antisense strand to SEQ ID NO: 112664
aauccaaugaugcucgacc

SEQ ID NO: 112666 - RNA, 19 nt, Artificial Sequence
  Description of Artificial Sequence: Synthetic oligonucleotide
  Sense strand starting at position 3827 of SEQ ID NO: 1434
augggaacuugugcucuau

SEQ ID NO: 112667 - RNA, 19 nt, Artificial Sequence
  Description of Artificial Sequence: Synthetic oligonucleotide
  Antisense strand to SEQ ID NO: 112666
auagagcacaaguucccau

SEQ ID NO: 112668 - RNA, 19 nt, Artificial Sequence
  Description of Artificial Sequence: Synthetic oligonucleotide
  Sense strand starting at position 3883 of SEQ ID NO: 1434
agucacugaggcugugaaa

SEQ ID NO: 112669 - RNA, 19 nt, Artificial Sequence
  Description of Artificial Sequence: Synthetic oligonucleotide
  Antisense strand to SEQ ID NO: 112668
uuucacagccucagugacu

SEQ ID NO: 112670 - RNA, 19 nt, Artificial Sequence
  Description of Artificial Sequence: Synthetic oligonucleotide
  Sense strand starting at position 3910 of SEQ ID NO: 1434
gcaagagaguuugugaaau

SEQ ID NO: 112671 - RNA, 19 nt, Artificial Sequence
  Description of Artificial Sequence: Synthetic oligonucleotide
  Antisense strand to SEQ ID NO: 112670
auuucacaaacucucuugc

SEQ ID NO: 112672 - RNA, 19 nt, Artificial Sequence
  Description of Artificial Sequence: Synthetic oligonucleotide
  Sense strand starting at position 3923 of SEQ ID NO: 1434
ugaaauucugcugguaaac

SEQ ID NO: 112673 - RNA, 19 nt, Artificial Sequence
  Description of Artificial Sequence: Synthetic oligonucleotide
  Antisense strand to SEQ ID NO: 112672
guuuaccagcagaauuuca

SEQ ID NO: 112674 - RNA, 19 nt, Artificial Sequence
  Description of Artificial Sequence: Synthetic oligonucleotide
  Sense strand starting at position 3951 of SEQ ID NO: 1434
agacauggcuucuuauguu

SEQ ID NO: 112675 - RNA, 19 nt, Artificial Sequence
  Description of Artificial Sequence: Synthetic oligonucleotide
  Antisense strand to SEQ ID NO: 112674
aacauaagaagccaugucu

SEQ ID NO: 112676 - RNA, 19 nt, Artificial Sequence
  Description of Artificial Sequence: Synthetic oligonucleotide
  Sense strand starting at position 70 of SEQ ID NO: 1435
gcugaaacacaguguagau

SEQ ID NO: 112677 - RNA, 19 nt, Artificial Sequence
  Description of Artificial Sequence: Synthetic oligonucleotide
  Antisense strand to SEQ ID NO: 112676
aucuacacuguguuucagc

SEQ ID NO: 112678 - RNA, 19 nt, Artificial Sequence
  Description of Artificial Sequence: Synthetic oligonucleotide
  Sense strand starting at position 231 of SEQ ID NO: 1435
uugaguauccuuuauccga

SEQ ID NO: 112679 - RNA, 19 nt, Artificial Sequence
  Description of Artificial Sequence: Synthetic oligonucleotide
  Antisense strand to SEQ ID NO: 112678
ucggauaaaggauacucaa

SEQ ID NO: 112680 - RNA, 19 nt, Artificial Sequence
  Description of Artificial Sequence: Synthetic oligonucleotide
  Sense strand starting at position 298 of SEQ ID NO: 1435
ggaauauuugcguauacgu

SEQ ID NO: 112681 - RNA, 19 nt, Artificial Sequence
  Description of Artificial Sequence: Synthetic oligonucleotide
  Antisense strand to SEQ ID NO: 112680
acguauacgcaaauauucc

SEQ ID NO: 112682 - RNA, 19 nt, Artificial Sequence
  Description of Artificial Sequence: Synthetic oligonucleotide
  Sense strand starting at position 300 of SEQ ID NO: 1435
aauauuugcguauacguaa

SEQ ID NO: 112683 - RNA, 19 nt, Artificial Sequence
  Description of Artificial Sequence: Synthetic oligonucleotide
  Antisense strand to SEQ ID NO: 112682
uuacguauacgcaaauauu

SEQ ID NO: 112684 - RNA, 19 nt, Artificial Sequence
  Description of Artificial Sequence: Synthetic oligonucleotide
  Sense strand starting at position 308 of SEQ ID NO: 1435
cguauacguaaugagguau

SEQ ID NO: 112685 - RNA, 19 nt, Artificial Sequence
  Description of Artificial Sequence: Synthetic oligonucleotide
  Antisense strand to SEQ ID NO: 112684
auaccucauuacguauacg

SEQ ID NO: 112686 - RNA, 19 nt, Artificial Sequence
  Description of Artificial Sequence: Synthetic oligonucleotide
  Sense strand starting at position 441 of SEQ ID NO: 1435
aaaguuuguguacaugaac

SEQ ID NO: 112687 - RNA, 19 nt, Artificial Sequence
  Description of Artificial Sequence: Synthetic oligonucleotide
  Antisense strand to SEQ ID NO: 112686
guucauguacacaaacuuu

SEQ ID NO: 112688 - RNA, 19 nt, Artificial Sequence
  Description of Artificial Sequence: Synthetic oligonucleotide
  Sense strand starting at position 508 of SEQ ID NO: 1435
ugucauguuggcgcucaua

SEQ ID NO: 112689 - RNA, 19 nt, Artificial Sequence
  Description of Artificial Sequence: Synthetic oligonucleotide
  Antisense strand to SEQ ID NO: 112688
uaugagcgccaacaugaca

SEQ ID NO: 112690 - RNA, 19 nt, Artificial Sequence
  Description of Artificial Sequence: Synthetic oligonucleotide
  Sense strand starting at position 679 of SEQ ID NO: 1435
gagaaauuagguugguccu

SEQ ID NO: 112691 - RNA, 19 nt, Artificial Sequence
  Description of Artificial Sequence: Synthetic oligonucleotide
  Antisense strand to SEQ ID NO: 112690
aggaccaaccuaauuucuc

SEQ ID NO: 112692 - RNA, 19 nt, Artificial Sequence
  Description of Artificial Sequence: Synthetic oligonucleotide
  Sense strand starting at position 681 of SEQ ID NO: 1435
gaaauuagguugguccuga

SEQ ID NO: 112693 - RNA, 19 nt, Artificial Sequence
  Description of Artificial Sequence: Synthetic oligonucleotide
  Antisense strand to SEQ ID NO: 112692
ucaggaccaaccuaauuuc

SEQ ID NO: 112694 - RNA, 19 nt, Artificial Sequence
  Description of Artificial Sequence: Synthetic oligonucleotide
  Sense strand starting at position 682 of SEQ ID NO: 1435
aaauuagguugguccugaa

SEQ ID NO: 112695 - RNA, 19 nt, Artificial Sequence
  Description of Artificial Sequence: Synthetic oligonucleotide
  Antisense strand to SEQ ID NO: 112694
uucaggaccaaccuaauuu

SEQ ID NO: 112696 - RNA, 19 nt, Artificial Sequence
  Description of Artificial Sequence: Synthetic oligonucleotide
  Sense strand starting at position 1212 of SEQ ID NO: 1435
ccagcucuguuauuauuua

SEQ ID NO: 112697 - RNA, 19 nt, Artificial Sequence
  Description of Artificial Sequence: Synthetic oligonucleotide
  Antisense strand to SEQ ID NO: 112696
uaaauaauaacagagcugg

SEQ ID NO: 112698 - RNA, 19 nt, Artificial Sequence
  Description of Artificial Sequence: Synthetic oligonucleotide
  Sense strand starting at position 1223 of SEQ ID NO: 1435
auuauuuagcugugugauu

SEQ ID NO: 112699 - RNA, 19 nt, Artificial Sequence
  Description of Artificial Sequence: Synthetic oligonucleotide
  Antisense strand to SEQ ID NO: 112698
aaucacacagcuaaauaau

SEQ ID NO: 112700 - RNA, 19 nt, Artificial Sequence
  Description of Artificial Sequence: Synthetic oligonucleotide
  Sense strand starting at position 1224 of SEQ ID NO: 1435
uuauuuagcugugugauuc

SEQ ID NO: 112701 - RNA, 19 nt, Artificial Sequence
  Description of Artificial Sequence: Synthetic oligonucleotide
  Antisense strand to SEQ ID NO: 112700
gaaucacacagcuaaauaa

SEQ ID NO: 112702 - RNA, 19 nt, Artificial Sequence
  Description of Artificial Sequence: Synthetic oligonucleotide
  Sense strand starting at position 1228 of SEQ ID NO: 1435
uuagcugugugauucagag

SEQ ID NO: 112703 - RNA, 19 nt, Artificial Sequence
  Description of Artificial Sequence: Synthetic oligonucleotide
  Antisense strand to SEQ ID NO: 112702
cucugaaucacacagcuaa

SEQ ID NO: 112704 - RNA, 19 nt, Artificial Sequence
  Description of Artificial Sequence: Synthetic oligonucleotide
  Sense strand starting at position 1518 of SEQ ID NO: 1435
auaagcuaccucugaagga

SEQ ID NO: 112705 - RNA, 19 nt, Artificial Sequence
  Description of Artificial Sequence: Synthetic oligonucleotide
  Antisense strand to SEQ ID NO: 112704
uccuucagagguagcuuau

SEQ ID NO: 112706 - RNA, 19 nt, Artificial Sequence
  Description of Artificial Sequence: Synthetic oligonucleotide
  Sense strand starting at position 1667 of SEQ ID NO: 1435
uaauauauuccuggacgag

SEQ ID NO: 112707 - RNA, 19 nt, Artificial Sequence
  Description of Artificial Sequence: Synthetic oligonucleotide
  Antisense strand to SEQ ID NO: 112706
cucguccaggaauauauua

SEQ ID NO: 112708 - RNA, 19 nt, Artificial Sequence
  Description of Artificial Sequence: Synthetic oligonucleotide
  Sense strand starting at position 1792 of SEQ ID NO: 1435
guaacuuucguccacuagu

SEQ ID NO: 112709 - RNA, 19 nt, Artificial Sequence
  Description of Artificial Sequence: Synthetic oligonucleotide
  Antisense strand to SEQ ID NO: 112708
acuaguggacgaaaguuac

SEQ ID NO: 112710 - RNA, 19 nt, Artificial Sequence
  Description of Artificial Sequence: Synthetic oligonucleotide
  Sense strand starting at position 1819 of SEQ ID NO: 1435
ucacuuaagugucccucaa

SEQ ID NO: 112711 - RNA, 19 nt, Artificial Sequence
  Description of Artificial Sequence: Synthetic oligonucleotide
  Antisense strand to SEQ ID NO: 112710
uugagggacacuuaaguga

SEQ ID NO: 112712 - RNA, 19 nt, Artificial Sequence
  Description of Artificial Sequence: Synthetic oligonucleotide
  Sense strand starting at position 1821 of SEQ ID NO: 1435
acuuaagugucccucaaau

SEQ ID NO: 112713 - RNA, 19 nt, Artificial Sequence
  Description of Artificial Sequence: Synthetic oligonucleotide
  Antisense strand to SEQ ID NO: 112712
auuugagggacacuuaagu

SEQ ID NO: 112714 - RNA, 19 nt, Artificial Sequence
  Description of Artificial Sequence: Synthetic oligonucleotide
  Sense strand starting at position 1823 of SEQ ID NO: 1435
uuaagugucccucaaauau

SEQ ID NO: 112715 - RNA, 19 nt, Artificial Sequence
  Description of Artificial Sequence: Synthetic oligonucleotide
  Antisense strand to SEQ ID NO: 112714
auauuugagggacacuuaa

SEQ ID NO: 112716 - RNA, 19 nt, Artificial Sequence
  Description of Artificial Sequence: Synthetic oligonucleotide
  Sense strand starting at position 1949 of SEQ ID NO: 1435
ggcugcguuccucaaagaa

SEQ ID NO: 112717 - RNA, 19 nt, Artificial Sequence
  Description of Artificial Sequence: Synthetic oligonucleotide
  Antisense strand to SEQ ID NO: 112716
uucuuugaggaacgcagcc

SEQ ID NO: 112718 - RNA, 19 nt, Artificial Sequence
  Description of Artificial Sequence: Synthetic oligonucleotide
  Sense strand starting at position 1978 of SEQ ID NO: 1435
uugcuuuagcgacuguauu

SEQ ID NO: 112719 - RNA, 19 nt, Artificial Sequence
  Description of Artificial Sequence: Synthetic oligonucleotide
  Antisense strand to SEQ ID NO: 112718
aauacagucgcuaaagcaa

SEQ ID NO: 112720 - RNA, 19 nt, Artificial Sequence
  Description of Artificial Sequence: Synthetic oligonucleotide
  Sense strand starting at position 2347 of SEQ ID NO: 1435
ggcuguucucgcccagauc

SEQ ID NO: 112721 - RNA, 19 nt, Artificial Sequence
  Description of Artificial Sequence: Synthetic oligonucleotide
  Antisense strand to SEQ ID NO: 112720
gaucugggcgagaacagcc

SEQ ID NO: 112722 - RNA, 19 nt, Artificial Sequence
  Description of Artificial Sequence: Synthetic oligonucleotide
  Sense strand starting at position 2558 of SEQ ID NO: 1435
agugacucuccucagcauu

SEQ ID NO: 112723 - RNA, 19 nt, Artificial Sequence
  Description of Artificial Sequence: Synthetic oligonucleotide
  Antisense strand to SEQ ID NO: 112722
aaugcugaggagagucacu

SEQ ID NO: 112724 - RNA, 19 nt, Artificial Sequence
  Description of Artificial Sequence: Synthetic oligonucleotide
  Sense strand starting at position 2842 of SEQ ID NO: 1435
caacgugacccggacugau

SEQ ID NO: 112725 - RNA, 19 nt, Artificial Sequence
  Description of Artificial Sequence: Synthetic oligonucleotide
  Antisense strand to SEQ ID NO: 112724
aucaguccgggucacguug

SEQ ID NO: 112726 - RNA, 19 nt, Artificial Sequence
  Description of Artificial Sequence: Synthetic oligonucleotide
  Sense strand starting at position 2865 of SEQ ID NO: 1435
ggaacagccagcgaacauu

SEQ ID NO: 112727 - RNA, 19 nt, Artificial Sequence
  Description of Artificial Sequence: Synthetic oligonucleotide
  Antisense strand to SEQ ID NO: 112726
aauguucgcuggcuguucc

SEQ ID NO: 112728 - RNA, 19 nt, Artificial Sequence
  Description of Artificial Sequence: Synthetic oligonucleotide
  Sense strand starting at position 2989 of SEQ ID NO: 1435
guggaaaccacugaguagu

SEQ ID NO: 112729 - RNA, 19 nt, Artificial Sequence
  Description of Artificial Sequence: Synthetic oligonucleotide
  Antisense strand to SEQ ID NO: 112728
acuacucagugguuuccac

SEQ ID NO: 112730 - RNA, 19 nt, Artificial Sequence
  Description of Artificial Sequence: Synthetic oligonucleotide
  Sense strand starting at position 3006 of SEQ ID NO: 1435
gugcuccgcgugucaaaga

SEQ ID NO: 112731 - RNA, 19 nt, Artificial Sequence
  Description of Artificial Sequence: Synthetic oligonucleotide
  Antisense strand to SEQ ID NO: 112730
ucuuugacacgcggagcac

SEQ ID NO: 112732 - RNA, 19 nt, Artificial Sequence
  Description of Artificial Sequence: Synthetic oligonucleotide
  Sense strand starting at position 3146 of SEQ ID NO: 1435
ggcugugacucagcacaua

SEQ ID NO: 112733 - RNA, 19 nt, Artificial Sequence
  Description of Artificial Sequence: Synthetic oligonucleotide
  Antisense strand to SEQ ID NO: 112732
uaugugcugagucacagcc

SEQ ID NO: 112734 - RNA, 19 nt, Artificial Sequence
  Description of Artificial Sequence: Synthetic oligonucleotide
  Sense strand starting at position 3169 of SEQ ID NO: 1435
accagaacgccggaaguau

SEQ ID NO: 112735 - RNA, 19 nt, Artificial Sequence
  Description of Artificial Sequence: Synthetic oligonucleotide
  Antisense strand to SEQ ID NO: 112734
auacuuccggcguucuggu

SEQ ID NO: 112736 - RNA, 19 nt, Artificial Sequence
  Description of Artificial Sequence: Synthetic oligonucleotide
  Sense strand starting at position 3329 of SEQ ID NO: 1435
cuaacucuucugugugaaa

SEQ ID NO: 112737 - RNA, 19 nt, Artificial Sequence
  Description of Artificial Sequence: Synthetic oligonucleotide
  Antisense strand to SEQ ID NO: 112736
uuucacacagaagaguuag

SEQ ID NO: 112738 - RNA, 19 nt, Artificial Sequence
  Description of Artificial Sequence: Synthetic oligonucleotide
  Sense strand starting at position 3372 of SEQ ID NO: 1435
cuguuaaauucggccaauu

SEQ ID NO: 112739 - RNA, 19 nt, Artificial Sequence
  Description of Artificial Sequence: Synthetic oligonucleotide
  Antisense strand to SEQ ID NO: 112738
aauuggccgaauuuaacag

SEQ ID NO: 112740 - RNA, 19 nt, Artificial Sequence
  Description of Artificial Sequence: Synthetic oligonucleotide
  Sense strand starting at position 3408 of SEQ ID NO: 1435
gcgucugcugccuucaagu

SEQ ID NO: 112741 - RNA, 19 nt, Artificial Sequence
  Description of Artificial Sequence: Synthetic oligonucleotide
  Antisense strand to SEQ ID NO: 112740
acuugaaggcagcagacgc

SEQ ID NO: 112742 - RNA, 19 nt, Artificial Sequence
  Description of Artificial Sequence: Synthetic oligonucleotide
  Sense strand starting at position 3454 of SEQ ID NO: 1435
guggucuuugguuagcaau

SEQ ID NO: 112743 - RNA, 19 nt, Artificial Sequence
  Description of Artificial Sequence: Synthetic oligonucleotide
  Antisense strand to SEQ ID NO: 112742
auugcuaaccaaagaccac

SEQ ID NO: 112744 - RNA, 19 nt, Artificial Sequence
  Description of Artificial Sequence: Synthetic oligonucleotide
  Sense strand starting at position 3607 of SEQ ID NO: 1435
gggagauguguugauaguu

SEQ ID NO: 112745 - RNA, 19 nt, Artificial Sequence
  Description of Artificial Sequence: Synthetic oligonucleotide
  Antisense strand to SEQ ID NO: 112744
aacuaucaacacaucuccc

SEQ ID NO: 112746 - RNA, 19 nt, Artificial Sequence
  Description of Artificial Sequence: Synthetic oligonucleotide
  Sense strand starting at position 3613 of SEQ ID NO: 1435
uguguugauaguuacugua

SEQ ID NO: 112747 - RNA, 19 nt, Artificial Sequence
  Description of Artificial Sequence: Synthetic oligonucleotide
  Antisense strand to SEQ ID NO: 112746
uacaguaacuaucaacaca

SEQ ID NO: 112748 - RNA, 19 nt, Artificial Sequence
  Description of Artificial Sequence: Synthetic oligonucleotide
  Sense strand starting at position 3615 of SEQ ID NO: 1435
uguugauaguuacuguauc

SEQ ID NO: 112749 - RNA, 19 nt, Artificial Sequence
  Description of Artificial Sequence: Synthetic oligonucleotide
  Antisense strand to SEQ ID NO: 112748
gauacaguaacuaucaaca

SEQ ID NO: 112750 - RNA, 19 nt, Artificial Sequence
  Description of Artificial Sequence: Synthetic oligonucleotide
  Sense strand starting at position 3648 of SEQ ID NO: 1435
ggccucuucugaguuccaa

SEQ ID NO: 112751 - RNA, 19 nt, Artificial Sequence
  Description of Artificial Sequence: Synthetic oligonucleotide
  Antisense strand to SEQ ID NO: 112750
uuggaacucagaagaggcc

SEQ ID NO: 112752 - RNA, 19 nt, Artificial Sequence
  Description of Artificial Sequence: Synthetic oligonucleotide
  Sense strand starting at position 3774 of SEQ ID NO: 1435
uugcuuugagccugggaau

SEQ ID NO: 112753 - RNA, 19 nt, Artificial Sequence
  Description of Artificial Sequence: Synthetic oligonucleotide
  Antisense strand to SEQ ID NO: 112752
auucccaggcucaaagcaa

SEQ ID NO: 112754 - RNA, 19 nt, Artificial Sequence
  Description of Artificial Sequence: Synthetic oligonucleotide
  Sense strand starting at position 3775 of SEQ ID NO: 1435
ugcuuugagccugggaauu

SEQ ID NO: 112755 - RNA, 19 nt, Artificial Sequence
  Description of Artificial Sequence: Synthetic oligonucleotide
  Antisense strand to SEQ ID NO: 112754
aauucccaggcucaaagca

SEQ ID NO: 112756 - RNA, 19 nt, Artificial Sequence
  Description of Artificial Sequence: Synthetic oligonucleotide
  Sense strand starting at position 147 of SEQ ID NO: 1436
ugacguaagagucacuaua

SEQ ID NO: 112757 - RNA, 19 nt, Artificial Sequence
  Description of Artificial Sequence: Synthetic oligonucleotide
  Antisense strand to SEQ ID NO: 112756
uauagugacucuuacguca

SEQ ID NO: 112758 - RNA, 19 nt, Artificial Sequence
  Description of Artificial Sequence: Synthetic oligonucleotide
  Sense strand starting at position 149 of SEQ ID NO: 1436
acguaagagucacuauaua

SEQ ID NO: 112759 - RNA, 19 nt, Artificial Sequence
  Description of Artificial Sequence: Synthetic oligonucleotide
  Antisense strand to SEQ ID NO: 112758
uauauagugacucuuacgu

SEQ ID NO: 112760 - RNA, 19 nt, Artificial Sequence
  Description of Artificial Sequence: Synthetic oligonucleotide
  Sense strand starting at position 714 of SEQ ID NO: 1436
gggauugugugcuuccuua

SEQ ID NO: 112761 - RNA, 19 nt, Artificial Sequence
  Description of Artificial Sequence: Synthetic oligonucleotide
  Antisense strand to SEQ ID NO: 112760
uaaggaagcacacaauccc

SEQ ID NO: 112762 - RNA, 19 nt, Artificial Sequence
  Description of Artificial Sequence: Synthetic oligonucleotide
  Sense strand starting at position 718 of SEQ ID NO: 1436
uugugugcuuccuuauaac

SEQ ID NO: 112763 - RNA, 19 nt, Artificial Sequence
  Description of Artificial Sequence: Synthetic oligonucleotide
  Antisense strand to SEQ ID NO: 112762
guuauaaggaagcacacaa

SEQ ID NO: 112764 - RNA, 19 nt, Artificial Sequence
  Description of Artificial Sequence: Synthetic oligonucleotide
  Sense strand starting at position 747 of SEQ ID NO: 1436
cuacuuauauuagcggaaa

SEQ ID NO: 112765 - RNA, 19 nt, Artificial Sequence
  Description of Artificial Sequence: Synthetic oligonucleotide
  Antisense strand to SEQ ID NO: 112764
uuuccgcuaauauaaguag

SEQ ID NO: 112766 - RNA, 19 nt, Artificial Sequence
  Description of Artificial Sequence: Synthetic oligonucleotide
  Sense strand starting at position 796 of SEQ ID NO: 1436
gugaguuaugaaugaccac

SEQ ID NO: 112767 - RNA, 19 nt, Artificial Sequence
  Description of Artificial Sequence: Synthetic oligonucleotide
  Antisense strand to SEQ ID NO: 112766
guggucauucauaacucac

SEQ ID NO: 112768 - RNA, 19 nt, Artificial Sequence
  Description of Artificial Sequence: Synthetic oligonucleotide
  Sense strand starting at position 1202 of SEQ ID NO: 1436
ggcugacuuccagaauuac

SEQ ID NO: 112769 - RNA, 19 nt, Artificial Sequence
  Description of Artificial Sequence: Synthetic oligonucleotide
  Antisense strand to SEQ ID NO: 112768
guaauucuggaagucagcc

SEQ ID NO: 112770 - RNA, 19 nt, Artificial Sequence
  Description of Artificial Sequence: Synthetic oligonucleotide
  Sense strand starting at position 1217 of SEQ ID NO: 1436
uuacccuuuccaggagaau

SEQ ID NO: 112771 - RNA, 19 nt, Artificial Sequence
  Description of Artificial Sequence: Synthetic oligonucleotide
  Antisense strand to SEQ ID NO: 112770
auucuccuggaaaggguaa

SEQ ID NO: 112772 - RNA, 19 nt, Artificial Sequence
  Description of Artificial Sequence: Synthetic oligonucleotide
  Sense strand starting at position 1279 of SEQ ID NO: 1436
gccacuuuguaguuacuga

SEQ ID NO: 112773 - RNA, 19 nt, Artificial Sequence
  Description of Artificial Sequence: Synthetic oligonucleotide
  Antisense strand to SEQ ID NO: 112772
ucaguaacuacaaaguggc

SEQ ID NO: 112774 - RNA, 19 nt, Artificial Sequence
  Description of Artificial Sequence: Synthetic oligonucleotide
  Sense strand starting at position 1304 of SEQ ID NO: 1436
aaauguaacuaguucgaag

SEQ ID NO: 112775 - RNA, 19 nt, Artificial Sequence
  Description of Artificial Sequence: Synthetic oligonucleotide
  Antisense strand to SEQ ID NO: 112774
cuucgaacuaguuacauuu

SEQ ID NO: 112776 - RNA, 19 nt, Artificial Sequence
  Description of Artificial Sequence: Synthetic oligonucleotide
  Sense strand starting at position 1306 of SEQ ID NO: 1436
auguaacuaguucgaagau

SEQ ID NO: 112777 - RNA, 19 nt, Artificial Sequence
  Description of Artificial Sequence: Synthetic oligonucleotide
  Antisense strand to SEQ ID NO: 112776
aucuucgaacuaguuacau

SEQ ID NO: 112778 - RNA, 19 nt, Artificial Sequence
  Description of Artificial Sequence: Synthetic oligonucleotide
  Sense strand starting at position 1319 of SEQ ID NO: 1436
gaagaugugccguaaaugc

SEQ ID NO: 112779 - RNA, 19 nt, Artificial Sequence
  Description of Artificial Sequence: Synthetic oligonucleotide
  Antisense strand to SEQ ID NO: 112778
gcauuuacggcacaucuuc

SEQ ID NO: 112780 - RNA, 19 nt, Artificial Sequence
  Description of Artificial Sequence: Synthetic oligonucleotide
  Sense strand starting at position 1500 of SEQ ID NO: 1436
aagauuagcuugccuugua

SEQ ID NO: 112781 - RNA, 19 nt, Artificial Sequence
  Description of Artificial Sequence: Synthetic oligonucleotide
  Antisense strand to SEQ ID NO: 112780
uacaaggcaagcuaaucuu

SEQ ID NO: 112782 - RNA, 19 nt, Artificial Sequence
  Description of Artificial Sequence: Synthetic oligonucleotide
  Sense strand starting at position 1501 of SEQ ID NO: 1436
agauuagcuugccuuguau

SEQ ID NO: 112783 - RNA, 19 nt, Artificial Sequence
  Description of Artificial Sequence: Synthetic oligonucleotide
  Antisense strand to SEQ ID NO: 112782
auacaaggcaagcuaaucu

SEQ ID NO: 112784 - RNA, 19 nt, Artificial Sequence
  Description of Artificial Sequence: Synthetic oligonucleotide
  Sense strand starting at position 1503 of SEQ ID NO: 1436
auuagcuugccuuguauuu

SEQ ID NO: 112785 - RNA, 19 nt, Artificial Sequence
  Description of Artificial Sequence: Synthetic oligonucleotide
  Antisense strand to SEQ ID NO: 112784
aaauacaaggcaagcuaau

SEQ ID NO: 112786 - RNA, 19 nt, Artificial Sequence
  Description of Artificial Sequence: Synthetic oligonucleotide
  Sense strand starting at position 1669 of SEQ ID NO: 1436
uccuaagauccuggguguu

SEQ ID NO: 112787 - RNA, 19 nt, Artificial Sequence
  Description of Artificial Sequence: Synthetic oligonucleotide
  Antisense strand to SEQ ID NO: 112786
aacacccaggaucuuagga

SEQ ID NO: 112788 - RNA, 19 nt, Artificial Sequence
  Description of Artificial Sequence: Synthetic oligonucleotide
  Sense strand starting at position 1702 of SEQ ID NO: 1436
ugaguaaagaacuggcuaa

SEQ ID NO: 112789 - RNA, 19 nt, Artificial Sequence
  Description of Artificial Sequence: Synthetic oligonucleotide
  Antisense strand to SEQ ID NO: 112788
uuagccaguucuuuacuca

SEQ ID NO: 112790 - RNA, 19 nt, Artificial Sequence
  Description of Artificial Sequence: Synthetic oligonucleotide
  Sense strand starting at position 2021 of SEQ ID NO: 1436
ugguguaaccagcaugcau

SEQ ID NO: 112791 - RNA, 19 nt, Artificial Sequence
  Description of Artificial Sequence: Synthetic oligonucleotide
  Antisense strand to SEQ ID NO: 112790
augcaugcugguuacacca

SEQ ID NO: 112792 - RNA, 19 nt, Artificial Sequence
  Description of Artificial Sequence: Synthetic oligonucleotide
  Sense strand starting at position 2303 of SEQ ID NO: 1436
cuuguuuauggccauauga

SEQ ID NO: 112793 - RNA, 19 nt, Artificial Sequence
  Description of Artificial Sequence: Synthetic oligonucleotide
  Antisense strand to SEQ ID NO: 112792
ucauauggccauaaacaag

SEQ ID NO: 112794 - RNA, 19 nt, Artificial Sequence
  Description of Artificial Sequence: Synthetic oligonucleotide
  Sense strand starting at position 2390 of SEQ ID NO: 1436
gcgguaagcuaucuccaca

SEQ ID NO: 112795 - RNA, 19 nt, Artificial Sequence
  Description of Artificial Sequence: Synthetic oligonucleotide
  Antisense strand to SEQ ID NO: 112794
uguggagauagcuuaccgc

SEQ ID NO: 112796 - RNA, 19 nt, Artificial Sequence
  Description of Artificial Sequence: Synthetic oligonucleotide
  Sense strand starting at position 2423 of SEQ ID NO: 1436
ucuucugaguuccuggaau

SEQ ID NO: 112797 - RNA, 19 nt, Artificial Sequence
  Description of Artificial Sequence: Synthetic oligonucleotide
  Antisense strand to SEQ ID NO: 112796
auuccaggaacucagaaga

SEQ ID NO: 112798 - RNA, 19 nt, Artificial Sequence
  Description of Artificial Sequence: Synthetic oligonucleotide
  Sense strand starting at position 2435 of SEQ ID NO: 1436
cuggaaucguucccucacu

SEQ ID NO: 112799 - RNA, 19 nt, Artificial Sequence
  Description of Artificial Sequence: Synthetic oligonucleotide
  Antisense strand to SEQ ID NO: 112798
agugagggaacgauuccag

SEQ ID NO: 112800 - RNA, 19 nt, Artificial Sequence
  Description of Artificial Sequence: Synthetic oligonucleotide
  Sense strand starting at position 2504 of SEQ ID NO: 1436
augccacucuuugugggaa

SEQ ID NO: 112801 - RNA, 19 nt, Artificial Sequence
  Description of Artificial Sequence: Synthetic oligonucleotide
  Antisense strand to SEQ ID NO: 112800
uucccacaaagaguggcau

SEQ ID NO: 112802 - RNA, 19 nt, Artificial Sequence
  Description of Artificial Sequence: Synthetic oligonucleotide
  Sense strand starting at position 2905 of SEQ ID NO: 1436
gagugugguugcucacacu

SEQ ID NO: 112803 - RNA, 19 nt, Artificial Sequence
  Description of Artificial Sequence: Synthetic oligonucleotide
  Antisense strand to SEQ ID NO: 112802
agugugagcaaccacacuc

SEQ ID NO: 112804 - RNA, 19 nt, Artificial Sequence
  Description of Artificial Sequence: Synthetic oligonucleotide
  Sense strand starting at position 3060 of SEQ ID NO: 1436
uuacccauuacgugggaaa

SEQ ID NO: 112805 - RNA, 19 nt, Artificial Sequence
  Description of Artificial Sequence: Synthetic oligonucleotide
  Antisense strand to SEQ ID NO: 112804
uuucccacguaauggguaa

SEQ ID NO: 112806 - RNA, 19 nt, Artificial Sequence
  Description of Artificial Sequence: Synthetic oligonucleotide
  Sense strand starting at position 3062 of SEQ ID NO: 1436
acccauuacgugggaaacu

SEQ ID NO: 112807 - RNA, 19 nt, Artificial Sequence
  Description of Artificial Sequence: Synthetic oligonucleotide
  Antisense strand to SEQ ID NO: 112806
aguuucccacguaaugggu

SEQ ID NO: 112808 - RNA, 19 nt, Artificial Sequence
  Description of Artificial Sequence: Synthetic oligonucleotide
  Sense strand starting at position 3078 of SEQ ID NO: 1436
acuagagacuaauaauaga

SEQ ID NO: 112809 - RNA, 19 nt, Artificial Sequence
  Description of Artificial Sequence: Synthetic oligonucleotide
  Antisense strand to SEQ ID NO: 112808
ucuauuauuagucucuagu

SEQ ID NO: 112810 - RNA, 19 nt, Artificial Sequence
  Description of Artificial Sequence: Synthetic oligonucleotide
  Sense strand starting at position 3188 of SEQ ID NO: 1436
aguguaugcugguuaggga

SEQ ID NO: 112811 - RNA, 19 nt, Artificial Sequence
  Description of Artificial Sequence: Synthetic oligonucleotide
  Antisense strand to SEQ ID NO: 112810
ucccuaaccagcauacacu

SEQ ID NO: 112812 - RNA, 19 nt, Artificial Sequence
  Description of Artificial Sequence: Synthetic oligonucleotide
  Sense strand starting at position 3189 of SEQ ID NO: 1436
guguaugcugguuagggaa

SEQ ID NO: 112813 - RNA, 19 nt, Artificial Sequence
  Description of Artificial Sequence: Synthetic oligonucleotide
  Antisense strand to SEQ ID NO: 112812
uucccuaaccagcauacac

SEQ ID NO: 112814 - RNA, 19 nt, Artificial Sequence
  Description of Artificial Sequence: Synthetic oligonucleotide
  Sense strand starting at position 3235 of SEQ ID NO: 1436
gcuagaauuuggcacauuu

SEQ ID NO: 112815 - RNA, 19 nt, Artificial Sequence
  Description of Artificial Sequence: Synthetic oligonucleotide
  Antisense strand to SEQ ID NO: 112814
aaaugugccaaauucuagc

SEQ ID NO: 112816 - RNA, 19 nt, Artificial Sequence
  Description of Artificial Sequence: Synthetic oligonucleotide
  Sense strand starting at position 3342 of SEQ ID NO: 1436
gugggucaguaaggaauuu

SEQ ID NO: 112817 - RNA, 19 nt, Artificial Sequence
  Description of Artificial Sequence: Synthetic oligonucleotide
  Antisense strand to SEQ ID NO: 112816
aaauuccuuacugacccac

SEQ ID NO: 112818 - RNA, 19 nt, Artificial Sequence
  Description of Artificial Sequence: Synthetic oligonucleotide
  Sense strand starting at position 3801 of SEQ ID NO: 1436
gcaguauauaggcaagaga

SEQ ID NO: 112819 - RNA, 19 nt, Artificial Sequence
  Description of Artificial Sequence: Synthetic oligonucleotide
  Antisense strand to SEQ ID NO: 112818
ucucuugccuauauacugc

SEQ ID NO: 112820 - RNA, 19 nt, Artificial Sequence
  Description of Artificial Sequence: Synthetic oligonucleotide
  Sense strand starting at position 3804 of SEQ ID NO: 1436
guauauaggcaagagaugu

SEQ ID NO: 112821 - RNA, 19 nt, Artificial Sequence
  Description of Artificial Sequence: Synthetic oligonucleotide
  Antisense strand to SEQ ID NO: 112820
acaucucuugccuauauac

SEQ ID NO: 112822 - RNA, 19 nt, Artificial Sequence
  Description of Artificial Sequence: Synthetic oligonucleotide
  Sense strand starting at position 3812 of SEQ ID NO: 1436
gcaagagauguuggcuguu

SEQ ID NO: 112823 - RNA, 19 nt, Artificial Sequence
  Description of Artificial Sequence: Synthetic oligonucleotide
  Antisense strand to SEQ ID NO: 112822
aacagccaacaucucuugc

SEQ ID NO: 112824 - RNA, 19 nt, Artificial Sequence
  Description of Artificial Sequence: Synthetic oligonucleotide
  Sense strand starting at position 3839 of SEQ ID NO: 1436
gaugauagcaggugaguuu

SEQ ID NO: 112825 - RNA, 19 nt, Artificial Sequence
  Description of Artificial Sequence: Synthetic oligonucleotide
  Antisense strand to SEQ ID NO: 112824
aaacucaccugcuaucauc

SEQ ID NO: 112826 - RNA, 19 nt, Artificial Sequence
  Description of Artificial Sequence: Synthetic oligonucleotide
  Sense strand starting at position 3850 of SEQ ID NO: 1436
gugaguuugagaugaauac

SEQ ID NO: 112827 - RNA, 19 nt, Artificial Sequence
  Description of Artificial Sequence: Synthetic oligonucleotide
  Antisense strand to SEQ ID NO: 112826
guauucaucucaaacucac

SEQ ID NO: 112828 - RNA, 19 nt, Artificial Sequence
  Description of Artificial Sequence: Synthetic oligonucleotide
  Sense strand starting at position 3958 of SEQ ID NO: 1436
ugacucagauuauuagcuu

SEQ ID NO: 112829 - RNA, 19 nt, Artificial Sequence
  Description of Artificial Sequence: Synthetic oligonucleotide
  Antisense strand to SEQ ID NO: 112828
aagcuaauaaucugaguca

SEQ ID NO: 112830 - RNA, 19 nt, Artificial Sequence
  Description of Artificial Sequence: Synthetic oligonucleotide
  Sense strand starting at position 3964 of SEQ ID NO: 1436
agauuauuagcuugugcua

SEQ ID NO: 112831 - RNA, 19 nt, Artificial Sequence
  Description of Artificial Sequence: Synthetic oligonucleotide
  Antisense strand to SEQ ID NO: 112830
uagcacaagcuaauaaucu

SEQ ID NO: 112832 - RNA, 19 nt, Artificial Sequence
  Description of Artificial Sequence: Synthetic oligonucleotide
  Sense strand starting at position 3971 of SEQ ID NO: 1436
uagcuugugcuauagggaa

SEQ ID NO: 112833 - RNA, 19 nt, Artificial Sequence
  Description of Artificial Sequence: Synthetic oligonucleotide
  Antisense strand to SEQ ID NO: 112832
uucccuauagcacaagcua

SEQ ID NO: 112834 - RNA, 19 nt, Artificial Sequence
  Description of Artificial Sequence: Synthetic oligonucleotide
  Sense strand starting at position 3973 of SEQ ID NO: 1436
gcuugugcuauagggaaga

SEQ ID NO: 112835 - RNA, 19 nt, Artificial Sequence
  Description of Artificial Sequence: Synthetic oligonucleotide
  Antisense strand to SEQ ID NO: 112834
ucuucccuauagcacaagc

SEQ ID NO: 112836 - RNA, 19 nt, Artificial Sequence
  Description of Artificial Sequence: Synthetic oligonucleotide
  Sense strand starting at position 3514 of SEQ ID NO: 1438
uccgcaauuugagaagaca

SEQ ID NO: 112837 - RNA, 19 nt, Artificial Sequence
  Description of Artificial Sequence: Synthetic oligonucleotide
  Antisense strand to SEQ ID NO: 112836
ugucuucucaaauugcgga

SEQ ID NO: 112838 - RNA, 19 nt, Artificial Sequence
  Description of Artificial Sequence: Synthetic oligonucleotide
  Sense strand starting at position 3503 of SEQ ID NO: 1438
ggccuaacgcuuccgcaau

SEQ ID NO: 112839 - RNA, 19 nt, Artificial Sequence
  Description of Artificial Sequence: Synthetic oligonucleotide
  Antisense strand to SEQ ID NO: 112838
auugcggaagcguuaggcc

SEQ ID NO: 112840 - RNA, 19 nt, Artificial Sequence
  Description of Artificial Sequence: Synthetic oligonucleotide
  Sense strand starting at position 3483 of SEQ ID NO: 1438
ggugaugucaaauguugug

SEQ ID NO: 112841 - RNA, 19 nt, Artificial Sequence
  Description of Artificial Sequence: Synthetic oligonucleotide
  Antisense strand to SEQ ID NO: 112840
cacaacauuugacaucacc

SEQ ID NO: 112842 - RNA, 19 nt, Artificial Sequence
  Description of Artificial Sequence: Synthetic oligonucleotide
  Sense strand starting at position 3414 of SEQ ID NO: 1438
uuggcuguugaaugaucau

SEQ ID NO: 112843 - RNA, 19 nt, Artificial Sequence
  Description of Artificial Sequence: Synthetic oligonucleotide
  Antisense strand to SEQ ID NO: 112842
augaucauucaacagccaa

SEQ ID NO: 112844 - RNA, 19 nt, Artificial Sequence
  Description of Artificial Sequence: Synthetic oligonucleotide
  Sense strand starting at position 3407 of SEQ ID NO: 1438
cugauaauuggcuguugaa

SEQ ID NO: 112845 - RNA, 19 nt, Artificial Sequence
  Description of Artificial Sequence: Synthetic oligonucleotide
  Antisense strand to SEQ ID NO: 112844
uucaacagccaauuaucag

SEQ ID NO: 112846 - RNA, 19 nt, Artificial Sequence
  Description of Artificial Sequence: Synthetic oligonucleotide
  Sense strand starting at position 3406 of SEQ ID NO: 1438
ccugauaauuggcuguuga

SEQ ID NO: 112847 - RNA, 19 nt, Artificial Sequence
  Description of Artificial Sequence: Synthetic oligonucleotide
  Antisense strand to SEQ ID NO: 112846
ucaacagccaauuaucagg

SEQ ID NO: 112848 - RNA, 19 nt, Artificial Sequence
  Description of Artificial Sequence: Synthetic oligonucleotide
  Sense strand starting at position 3339 of SEQ ID NO: 1438
gguaacaaugccuguaauc

SEQ ID NO: 112849 - RNA, 19 nt, Artificial Sequence
  Description of Artificial Sequence: Synthetic oligonucleotide
  Antisense strand to SEQ ID NO: 112848
gauuacaggcauuguuacc

SEQ ID NO: 112850 - RNA, 19 nt, Artificial Sequence
  Description of Artificial Sequence: Synthetic oligonucleotide
  Sense strand starting at position 3338 of SEQ ID NO: 1438
ugguaacaaugccuguaau

SEQ ID NO: 112851 - RNA, 19 nt, Artificial Sequence
  Description of Artificial Sequence: Synthetic oligonucleotide
  Antisense strand to SEQ ID NO: 112850
auuacaggcauuguuacca

SEQ ID NO: 112852 - RNA, 19 nt, Artificial Sequence
  Description of Artificial Sequence: Synthetic oligonucleotide
  Sense strand starting at position 3290 of SEQ ID NO: 1438
gugcgagauccaugaaccu

SEQ ID NO: 112853 - RNA, 19 nt, Artificial Sequence
  Description of Artificial Sequence: Synthetic oligonucleotide
  Antisense strand to SEQ ID NO: 112852
agguucauggaucucgcac

SEQ ID NO: 112854 - RNA, 19 nt, Artificial Sequence
  Description of Artificial Sequence: Synthetic oligonucleotide
  Sense strand starting at position 3284 of SEQ ID NO: 1438
uuucuugugcgagauccau

SEQ ID NO: 112855 - RNA, 19 nt, Artificial Sequence
  Description of Artificial Sequence: Synthetic oligonucleotide
  Antisense strand to SEQ ID NO: 112854
auggaucucgcacaagaaa

SEQ ID NO: 112856 - RNA, 19 nt, Artificial Sequence
  Description of Artificial Sequence: Synthetic oligonucleotide
  Sense strand starting at position 3197 of SEQ ID NO: 1438
cugcucuaucuauggacua

SEQ ID NO: 112857 - RNA, 19 nt, Artificial Sequence
  Description of Artificial Sequence: Synthetic oligonucleotide
  Antisense strand to SEQ ID NO: 112856
uaguccauagauagagcag

SEQ ID NO: 112858 - RNA, 19 nt, Artificial Sequence
  Description of Artificial Sequence: Synthetic oligonucleotide
  Sense strand starting at position 2151 of SEQ ID NO: 1438
cguggagugcuugggaaag

SEQ ID NO: 112859 - RNA, 19 nt, Artificial Sequence
  Description of Artificial Sequence: Synthetic oligonucleotide
  Antisense strand to SEQ ID NO: 112858
cuuucccaagcacuccacg

SEQ ID NO: 112860 - RNA, 19 nt, Artificial Sequence
  Description of Artificial Sequence: Synthetic oligonucleotide
  Sense strand starting at position 2150 of SEQ ID NO: 1438
ccguggagugcuugggaaa

SEQ ID NO: 112861 - RNA, 19 nt, Artificial Sequence
  Description of Artificial Sequence: Synthetic oligonucleotide
  Antisense strand to SEQ ID NO: 112860
uuucccaagcacuccacgg

SEQ ID NO: 112862 - RNA, 19 nt, Artificial Sequence
  Description of Artificial Sequence: Synthetic oligonucleotide
  Sense strand starting at position 2073 of SEQ ID NO: 1438
acacuaacgcucgggacau

SEQ ID NO: 112863 - RNA, 19 nt, Artificial Sequence
  Description of Artificial Sequence: Synthetic oligonucleotide
  Antisense strand to SEQ ID NO: 112862
augucccgagcguuagugu

SEQ ID NO: 112864 - RNA, 19 nt, Artificial Sequence
  Description of Artificial Sequence: Synthetic oligonucleotide
  Sense strand starting at position 2055 of SEQ ID NO: 1438
agacguaacaaguggaaga

SEQ ID NO: 112865 - RNA, 19 nt, Artificial Sequence
  Description of Artificial Sequence: Synthetic oligonucleotide
  Antisense strand to SEQ ID NO: 112864
ucuuccacuuguuacgucu

SEQ ID NO: 112866 - RNA, 19 nt, Artificial Sequence
  Description of Artificial Sequence: Synthetic oligonucleotide
  Sense strand starting at position 1263 of SEQ ID NO: 1438
aaggccauccgcuagagua

SEQ ID NO: 112867 - RNA, 19 nt, Artificial Sequence
  Description of Artificial Sequence: Synthetic oligonucleotide
  Antisense strand to SEQ ID NO: 112866
uacucuagcggauggccuu

SEQ ID NO: 112868 - RNA, 19 nt, Artificial Sequence
  Description of Artificial Sequence: Synthetic oligonucleotide
  Sense strand starting at position 1156 of SEQ ID NO: 1438
uccaguuuccaaggguaca

SEQ ID NO: 112869 - RNA, 19 nt, Artificial Sequence
  Description of Artificial Sequence: Synthetic oligonucleotide
  Antisense strand to SEQ ID NO: 112868
uguacccuuggaaacugga

SEQ ID NO: 112870 - RNA, 19 nt, Artificial Sequence
  Description of Artificial Sequence: Synthetic oligonucleotide
  Sense strand starting at position 1143 of SEQ ID NO: 1438
gcgaaaucauggguccagu

SEQ ID NO: 112871 - RNA, 19 nt, Artificial Sequence
  Description of Artificial Sequence: Synthetic oligonucleotide
  Antisense strand to SEQ ID NO: 112870
acuggacccaugauuucgc

SEQ ID NO: 112872 - RNA, 19 nt, Artificial Sequence
  Description of Artificial Sequence: Synthetic oligonucleotide
  Sense strand starting at position 1142 of SEQ ID NO: 1438
ggcgaaaucauggguccag

SEQ ID NO: 112873 - RNA, 19 nt, Artificial Sequence
  Description of Artificial Sequence: Synthetic oligonucleotide
  Antisense strand to SEQ ID NO: 112872
cuggacccaugauuucgcc

SEQ ID NO: 112874 - RNA, 19 nt, Artificial Sequence
  Description of Artificial Sequence: Synthetic oligonucleotide
  Sense strand starting at position 1141 of SEQ ID NO: 1438
aggcgaaaucaugggucca

SEQ ID NO: 112875 - RNA, 19 nt, Artificial Sequence
  Description of Artificial Sequence: Synthetic oligonucleotide
  Antisense strand to SEQ ID NO: 112874
uggacccaugauuucgccu

SEQ ID NO: 112876 - RNA, 19 nt, Artificial Sequence
  Description of Artificial Sequence: Synthetic oligonucleotide
  Sense strand starting at position 1096 of SEQ ID NO: 1438
aggugaaaucgugaggcaa

SEQ ID NO: 112877 - RNA, 19 nt, Artificial Sequence
  Description of Artificial Sequence: Synthetic oligonucleotide
  Antisense strand to SEQ ID NO: 112876
uugccucacgauuucaccu

SEQ ID NO: 112878 - RNA, 19 nt, Artificial Sequence
  Description of Artificial Sequence: Synthetic oligonucleotide
  Sense strand starting at position 1008 of SEQ ID NO: 1438
gagagaucaucagcccagu

SEQ ID NO: 112879 - RNA, 19 nt, Artificial Sequence
  Description of Artificial Sequence: Synthetic oligonucleotide
  Antisense strand to SEQ ID NO: 112878
acugggcugaugaucucuc

SEQ ID NO: 112880 - RNA, 19 nt, Artificial Sequence
  Description of Artificial Sequence: Synthetic oligonucleotide
  Sense strand starting at position 882 of SEQ ID NO: 1438
gugguuuggguucacaaga

SEQ ID NO: 112881 - RNA, 19 nt, Artificial Sequence
  Description of Artificial Sequence: Synthetic oligonucleotide
  Antisense strand to SEQ ID NO: 112880
ucuugugaacccaaaccac

SEQ ID NO: 112882 - RNA, 19 nt, Artificial Sequence
  Description of Artificial Sequence: Synthetic oligonucleotide
  Sense strand starting at position 819 of SEQ ID NO: 1438
gcaugccugccugagaaga

SEQ ID NO: 112883 - RNA, 19 nt, Artificial Sequence
  Description of Artificial Sequence: Synthetic oligonucleotide
  Antisense strand to SEQ ID NO: 112882
ucuucucaggcaggcaugc

SEQ ID NO: 112884 - RNA, 19 nt, Artificial Sequence
  Description of Artificial Sequence: Synthetic oligonucleotide
  Sense strand starting at position 817 of SEQ ID NO: 1438
aggcaugccugccugagaa

SEQ ID NO: 112885 - RNA, 19 nt, Artificial Sequence
  Description of Artificial Sequence: Synthetic oligonucleotide
  Antisense strand to SEQ ID NO: 112884
uucucaggcaggcaugccu

SEQ ID NO: 112886 - RNA, 19 nt, Artificial Sequence
  Description of Artificial Sequence: Synthetic oligonucleotide
  Sense strand starting at position 764 of SEQ ID NO: 1438
gaggaaagaugggaguaau

SEQ ID NO: 112887 - RNA, 19 nt, Artificial Sequence
  Description of Artificial Sequence: Synthetic oligonucleotide
  Antisense strand to SEQ ID NO: 112886
auuacucccaucuuuccuc

SEQ ID NO: 112888 - RNA, 19 nt, Artificial Sequence
  Description of Artificial Sequence: Synthetic oligonucleotide
  Sense strand starting at position 751 of SEQ ID NO: 1438
uauguaggccucugaggaa

SEQ ID NO: 112889 - RNA, 19 nt, Artificial Sequence
  Description of Artificial Sequence: Synthetic oligonucleotide
  Antisense strand to SEQ ID NO: 112888
uuccucagaggccuacaua

SEQ ID NO: 112890 - RNA, 19 nt, Artificial Sequence
  Description of Artificial Sequence: Synthetic oligonucleotide
  Sense strand starting at position 553 of SEQ ID NO: 1438
acgagaugguuccugggaa

SEQ ID NO: 112891 - RNA, 19 nt, Artificial Sequence
  Description of Artificial Sequence: Synthetic oligonucleotide
  Antisense strand to SEQ ID NO: 112890
uucccaggaaccaucucgu

SEQ ID NO: 112892 - RNA, 19 nt, Artificial Sequence
  Description of Artificial Sequence: Synthetic oligonucleotide
  Sense strand starting at position 494 of SEQ ID NO: 1438
gauauaaacugguugccca

SEQ ID NO: 112893 - RNA, 19 nt, Artificial Sequence
  Description of Artificial Sequence: Synthetic oligonucleotide
  Antisense strand to SEQ ID NO: 112892
ugggcaaccaguuuauauc

SEQ ID NO: 112894 - RNA, 19 nt, Artificial Sequence
  Description of Artificial Sequence: Synthetic oligonucleotide
  Sense strand starting at position 386 of SEQ ID NO: 1438
guaugugacugucuuaacu

SEQ ID NO: 112895 - RNA, 19 nt, Artificial Sequence
  Description of Artificial Sequence: Synthetic oligonucleotide
  Antisense strand to SEQ ID NO: 112894
aguuaagacagucacauac

SEQ ID NO: 112896 - RNA, 19 nt, Artificial Sequence
  Description of Artificial Sequence: Synthetic oligonucleotide
  Sense strand starting at position 383 of SEQ ID NO: 1438
ggaguaugugacugucuua

SEQ ID NO: 112897 - RNA, 19 nt, Artificial Sequence
  Description of Artificial Sequence: Synthetic oligonucleotide
  Antisense strand to SEQ ID NO: 112896
uaagacagucacauacucc

SEQ ID NO: 112898 - RNA, 19 nt, Artificial Sequence
  Description of Artificial Sequence: Synthetic oligonucleotide
  Sense strand starting at position 382 of SEQ ID NO: 1438
gggaguaugugacugucuu

SEQ ID NO: 112899 - RNA, 19 nt, Artificial Sequence
  Description of Artificial Sequence: Synthetic oligonucleotide
  Antisense strand to SEQ ID NO: 112898
aagacagucacauacuccc

SEQ ID NO: 112900 - RNA, 19 nt, Artificial Sequence
  Description of Artificial Sequence: Synthetic oligonucleotide
  Sense strand starting at position 245 of SEQ ID NO: 1438
ggaguugugauguauggcu

SEQ ID NO: 112901 - RNA, 19 nt, Artificial Sequence
  Description of Artificial Sequence: Synthetic oligonucleotide
  Antisense strand to SEQ ID NO: 112900
agccauacaucacaacucc

SEQ ID NO: 112902 - RNA, 19 nt, Artificial Sequence
  Description of Artificial Sequence: Synthetic oligonucleotide
  Sense strand starting at position 190 of SEQ ID NO: 1438
gaccacagucaguaaggua

SEQ ID NO: 112903 - RNA, 19 nt, Artificial Sequence
  Description of Artificial Sequence: Synthetic oligonucleotide
  Antisense strand to SEQ ID NO: 112902
uaccuuacugacugugguc

SEQ ID NO: 112904 - RNA, 19 nt, Artificial Sequence
  Description of Artificial Sequence: Synthetic oligonucleotide
  Sense strand starting at position 113 of SEQ ID NO: 1438
uaacuauuggccgagacag

SEQ ID NO: 112905 - RNA, 19 nt, Artificial Sequence
  Description of Artificial Sequence: Synthetic oligonucleotide
  Antisense strand to SEQ ID NO: 112904
cugucucggccaauaguua

SEQ ID NO: 112906 - RNA, 19 nt, Artificial Sequence
  Description of Artificial Sequence: Synthetic oligonucleotide
  Sense strand starting at position 112 of SEQ ID NO: 1438
auaacuauuggccgagaca

SEQ ID NO: 112907 - RNA, 19 nt, Artificial Sequence
  Description of Artificial Sequence: Synthetic oligonucleotide
  Antisense strand to SEQ ID NO: 112906
ugucucggccaauaguuau

SEQ ID NO: 112908 - RNA, 19 nt, Artificial Sequence
  Description of Artificial Sequence: Synthetic oligonucleotide
  Sense strand starting at position 110 of SEQ ID NO: 1438
gcauaacuauuggccgaga

SEQ ID NO: 112909 - RNA, 19 nt, Artificial Sequence
  Description of Artificial Sequence: Synthetic oligonucleotide
  Antisense strand to SEQ ID NO: 112908
ucucggccaauaguuaugc

SEQ ID NO: 112910 - RNA, 19 nt, Artificial Sequence
  Description of Artificial Sequence: Synthetic oligonucleotide
  Sense strand starting at position 101 of SEQ ID NO: 1438
cugcucugagcauaacuau

SEQ ID NO: 112911 - RNA, 19 nt, Artificial Sequence
  Description of Artificial Sequence: Synthetic oligonucleotide
  Antisense strand to SEQ ID NO: 112910
auaguuaugcucagagcag

SEQ ID NO: 112912 - RNA, 19 nt, Artificial Sequence
  Description of Artificial Sequence: Synthetic oligonucleotide
  Sense strand starting at position 99 of SEQ ID NO: 1438
ggcugcucugagcauaacu

SEQ ID NO: 112913 - RNA, 19 nt, Artificial Sequence
  Description of Artificial Sequence: Synthetic oligonucleotide
  Antisense strand to SEQ ID NO: 112912
aguuaugcucagagcagcc

SEQ ID NO: 112914 - RNA, 19 nt, Artificial Sequence
  Description of Artificial Sequence: Synthetic oligonucleotide
  Sense strand starting at position 54 of SEQ ID NO: 1438
agcauauauggguauugca

SEQ ID NO: 112915 - RNA, 19 nt, Artificial Sequence
  Description of Artificial Sequence: Synthetic oligonucleotide
  Antisense strand to SEQ ID NO: 112914
ugcaauacccauauaugcu

SEQ ID NO: 112916 - RNA, 19 nt, Artificial Sequence
  Description of Artificial Sequence: Synthetic oligonucleotide
  Sense strand starting at position 3811 of SEQ ID NO: 1437
gcaucauguugacugacuu

SEQ ID NO: 112917 - RNA, 19 nt, Artificial Sequence
  Description of Artificial Sequence: Synthetic oligonucleotide
  Antisense strand to SEQ ID NO: 112916
aagucagucaacaugaugc

SEQ ID NO: 112918 - RNA, 19 nt, Artificial Sequence
  Description of Artificial Sequence: Synthetic oligonucleotide
  Sense strand starting at position 3464 of SEQ ID NO: 1437
uuaagaugaucauacaguu

SEQ ID NO: 112919 - RNA, 19 nt, Artificial Sequence
  Description of Artificial Sequence: Synthetic oligonucleotide
  Antisense strand to SEQ ID NO: 112918
aacuguaugaucaucuuaa

SEQ ID NO: 112920 - RNA, 19 nt, Artificial Sequence
  Description of Artificial Sequence: Synthetic oligonucleotide
  Sense strand starting at position 3461 of SEQ ID NO: 1437
cuguuaagaugaucauaca

SEQ ID NO: 112921 - RNA, 19 nt, Artificial Sequence
  Description of Artificial Sequence: Synthetic oligonucleotide
  Antisense strand to SEQ ID NO: 112920
uguaugaucaucuuaacag

SEQ ID NO: 112922 - RNA, 19 nt, Artificial Sequence
  Description of Artificial Sequence: Synthetic oligonucleotide
  Sense strand starting at position 3417 of SEQ ID NO: 1437
aaaucaugauaguuguuga

SEQ ID NO: 112923 - RNA, 19 nt, Artificial Sequence
  Description of Artificial Sequence: Synthetic oligonucleotide
  Antisense strand to SEQ ID NO: 112922
ucaacaacuaucaugauuu

SEQ ID NO: 112924 - RNA, 19 nt, Artificial Sequence
  Description of Artificial Sequence: Synthetic oligonucleotide
  Sense strand starting at position 3375 of SEQ ID NO: 1437
uuagaaaguucccuucugu

SEQ ID NO: 112925 - RNA, 19 nt, Artificial Sequence
  Description of Artificial Sequence: Synthetic oligonucleotide
  Antisense strand to SEQ ID NO: 112924
acagaagggaacuuucuaa

SEQ ID NO: 112926 - RNA, 19 nt, Artificial Sequence
  Description of Artificial Sequence: Synthetic oligonucleotide
  Sense strand starting at position 3361 of SEQ ID NO: 1437
guccuuucuuagguuuaga

SEQ ID NO: 112927 - RNA, 19 nt, Artificial Sequence
  Description of Artificial Sequence: Synthetic oligonucleotide
  Antisense strand to SEQ ID NO: 112926
ucuaaaccuaagaaaggac

SEQ ID NO: 112928 - RNA, 19 nt, Artificial Sequence
  Description of Artificial Sequence: Synthetic oligonucleotide
  Sense strand starting at position 3357 of SEQ ID NO: 1437
agauguccuuucuuagguu

SEQ ID NO: 112929 - RNA, 19 nt, Artificial Sequence
  Description of Artificial Sequence: Synthetic oligonucleotide
  Antisense strand to SEQ ID NO: 112928
aaccuaagaaaggacaucu

SEQ ID NO: 112930 - RNA, 19 nt, Artificial Sequence
  Description of Artificial Sequence: Synthetic oligonucleotide
  Sense strand starting at position 3351 of SEQ ID NO: 1437
guguauagauguccuuucu

SEQ ID NO: 112931 - RNA, 19 nt, Artificial Sequence
  Description of Artificial Sequence: Synthetic oligonucleotide
  Antisense strand to SEQ ID NO: 112930
agaaaggacaucuauacac

SEQ ID NO: 112932 - RNA, 19 nt, Artificial Sequence
  Description of Artificial Sequence: Synthetic oligonucleotide
  Sense strand starting at position 3341 of SEQ ID NO: 1437
guaccugcauguguauaga

SEQ ID NO: 112933 - RNA, 19 nt, Artificial Sequence
  Description of Artificial Sequence: Synthetic oligonucleotide
  Antisense strand to SEQ ID NO: 112932
ucuauacacaugcagguac

SEQ ID NO: 112934 - RNA, 19 nt, Artificial Sequence
  Description of Artificial Sequence: Synthetic oligonucleotide
  Sense strand starting at position 3338 of SEQ ID NO: 1437
cguguaccugcauguguau

SEQ ID NO: 112935 - RNA, 19 nt, Artificial Sequence
  Description of Artificial Sequence: Synthetic oligonucleotide
  Antisense strand to SEQ ID NO: 112934
auacacaugcagguacacg

SEQ ID NO: 112936 - RNA, 19 nt, Artificial Sequence
  Description of Artificial Sequence: Synthetic oligonucleotide
  Sense strand starting at position 3337 of SEQ ID NO: 1437
gcguguaccugcaugugua

SEQ ID NO: 112937 - RNA, 19 nt, Artificial Sequence
  Description of Artificial Sequence: Synthetic oligonucleotide
  Antisense strand to SEQ ID NO: 112936
uacacaugcagguacacgc

SEQ ID NO: 112938 - RNA, 19 nt, Artificial Sequence
  Description of Artificial Sequence: Synthetic oligonucleotide
  Sense strand starting at position 3233 of SEQ ID NO: 1437
aauguaaguggugauggua

SEQ ID NO: 112939 - RNA, 19 nt, Artificial Sequence
  Description of Artificial Sequence: Synthetic oligonucleotide
  Antisense strand to SEQ ID NO: 112938
uaccaucaccacuuacauu

SEQ ID NO: 112940 - RNA, 19 nt, Artificial Sequence
  Description of Artificial Sequence: Synthetic oligonucleotide
  Sense strand starting at position 3228 of SEQ ID NO: 1437
aguugaauguaagugguga

SEQ ID NO: 112941 - RNA, 19 nt, Artificial Sequence
  Description of Artificial Sequence: Synthetic oligonucleotide
  Antisense strand to SEQ ID NO: 112940
ucaccacuuacauucaacu

SEQ ID NO: 112942 - RNA, 19 nt, Artificial Sequence
  Description of Artificial Sequence: Synthetic oligonucleotide
  Sense strand starting at position 2513 of SEQ ID NO: 1437
uccgcaauuugagaagaca

SEQ ID NO: 112943 - RNA, 19 nt, Artificial Sequence
  Description of Artificial Sequence: Synthetic oligonucleotide
  Antisense strand to SEQ ID NO: 112942
ugucuucucaaauugcgga

SEQ ID NO: 112944 - RNA, 19 nt, Artificial Sequence
  Description of Artificial Sequence: Synthetic oligonucleotide
  Sense strand starting at position 2502 of SEQ ID NO: 1437
ggccuaacgcuuccgcaau

SEQ ID NO: 112945 - RNA, 19 nt, Artificial Sequence
  Description of Artificial Sequence: Synthetic oligonucleotide
  Antisense strand to SEQ ID NO: 112944
auugcggaagcguuaggcc

SEQ ID NO: 112946 - RNA, 19 nt, Artificial Sequence
  Description of Artificial Sequence: Synthetic oligonucleotide
  Sense strand starting at position 2482 of SEQ ID NO: 1437
ggugaugucaaauguugug

SEQ ID NO: 112947 - RNA, 19 nt, Artificial Sequence
  Description of Artificial Sequence: Synthetic oligonucleotide
  Antisense strand to SEQ ID NO: 112946
cacaacauuugacaucacc

SEQ ID NO: 112948 - RNA, 19 nt, Artificial Sequence
  Description of Artificial Sequence: Synthetic oligonucleotide
  Sense strand starting at position 2413 of SEQ ID NO: 1437
uuggcuguugaaugaucau

SEQ ID NO: 112949 - RNA, 19 nt, Artificial Sequence
  Description of Artificial Sequence: Synthetic oligonucleotide
  Antisense strand to SEQ ID NO: 112948
augaucauucaacagccaa

SEQ ID NO: 112950 - RNA, 19 nt, Artificial Sequence
  Description of Artificial Sequence: Synthetic oligonucleotide
  Sense strand starting at position 2409 of SEQ ID NO: 1437
auaauuggcuguugaauga

SEQ ID NO: 112951 - RNA, 19 nt, Artificial Sequence
  Description of Artificial Sequence: Synthetic oligonucleotide
  Antisense strand to SEQ ID NO: 112950
ucauucaacagccaauuau

SEQ ID NO: 112952 - RNA, 19 nt, Artificial Sequence
  Description of Artificial Sequence: Synthetic oligonucleotide
  Sense strand starting at position 2406 of SEQ ID NO: 1437
cugauaauuggcuguugaa

SEQ ID NO: 112953 - RNA, 19 nt, Artificial Sequence
  Description of Artificial Sequence: Synthetic oligonucleotide
  Antisense strand to SEQ ID NO: 112952
uucaacagccaauuaucag

SEQ ID NO: 112954 - RNA, 19 nt, Artificial Sequence
  Description of Artificial Sequence: Synthetic oligonucleotide
  Sense strand starting at position 2405 of SEQ ID NO: 1437
ccugauaauuggcuguuga

SEQ ID NO: 112955 - RNA, 19 nt, Artificial Sequence
  Description of Artificial Sequence: Synthetic oligonucleotide
  Antisense strand to SEQ ID NO: 112954
ucaacagccaauuaucagg

SEQ ID NO: 112956 - RNA, 19 nt, Artificial Sequence
  Description of Artificial Sequence: Synthetic oligonucleotide
  Sense strand starting at position 2338 of SEQ ID NO: 1437
gguaacaaugccuguaauc

SEQ ID NO: 112957 - RNA, 19 nt, Artificial Sequence
  Description of Artificial Sequence: Synthetic oligonucleotide
  Antisense strand to SEQ ID NO: 112956
gauuacaggcauuguuacc

SEQ ID NO: 112958 - RNA, 19 nt, Artificial Sequence
  Description of Artificial Sequence: Synthetic oligonucleotide
  Sense strand starting at position 2337 of SEQ ID NO: 1437
ugguaacaaugccuguaau

SEQ ID NO: 112959 - RNA, 19 nt, Artificial Sequence
  Description of Artificial Sequence: Synthetic oligonucleotide
  Antisense strand to SEQ ID NO: 112958
auuacaggcauuguuacca

SEQ ID NO: 112960 - RNA, 19 nt, Artificial Sequence
  Description of Artificial Sequence: Synthetic oligonucleotide
  Sense strand starting at position 2289 of SEQ ID NO: 1437
gugcgagauccaugaaccu

SEQ ID NO: 112961 - RNA, 19 nt, Artificial Sequence
  Description of Artificial Sequence: Synthetic oligonucleotide
  Antisense strand to SEQ ID NO: 112960
agguucauggaucucgcac

SEQ ID NO: 112962 - RNA, 19 nt, Artificial Sequence
  Description of Artificial Sequence: Synthetic oligonucleotide
  Sense strand starting at position 2283 of SEQ ID NO: 1437
uuucuugugcgagauccau

SEQ ID NO: 112963 - RNA, 19 nt, Artificial Sequence
  Description of Artificial Sequence: Synthetic oligonucleotide
  Antisense strand to SEQ ID NO: 112962
auggaucucgcacaagaaa

SEQ ID NO: 112964 - RNA, 19 nt, Artificial Sequence
  Description of Artificial Sequence: Synthetic oligonucleotide
  Sense strand starting at position 2196 of SEQ ID NO: 1437
cugcucuaucuauggacua

SEQ ID NO: 112965 - RNA, 19 nt, Artificial Sequence
  Description of Artificial Sequence: Synthetic oligonucleotide
  Antisense strand to SEQ ID NO: 112964
uaguccauagauagagcag

SEQ ID NO: 112966 - RNA, 19 nt, Artificial Sequence
  Description of Artificial Sequence: Synthetic oligonucleotide
  Sense strand starting at position 1151 of SEQ ID NO: 1437
guggagugcuugggaaaga

SEQ ID NO: 112967 - RNA, 19 nt, Artificial Sequence
  Description of Artificial Sequence: Synthetic oligonucleotide
  Antisense strand to SEQ ID NO: 112966
ucuuucccaagcacuccac

SEQ ID NO: 112968 - RNA, 19 nt, Artificial Sequence
  Description of Artificial Sequence: Synthetic oligonucleotide
  Sense strand starting at position 1150 of SEQ ID NO: 1437
cguggagugcuugggaaag

SEQ ID NO: 112969 - RNA, 19 nt, Artificial Sequence
  Description of Artificial Sequence: Synthetic oligonucleotide
  Antisense strand to SEQ ID NO: 112968
cuuucccaagcacuccacg

SEQ ID NO: 112970 - RNA, 19 nt, Artificial Sequence
  Description of Artificial Sequence: Synthetic oligonucleotide
  Sense strand starting at position 1149 of SEQ ID NO: 1437
ccguggagugcuugggaaa

SEQ ID NO: 112971 - RNA, 19 nt, Artificial Sequence
  Description of Artificial Sequence: Synthetic oligonucleotide
  Antisense strand to SEQ ID NO: 112970
uuucccaagcacuccacgg

SEQ ID NO: 112972 - RNA, 19 nt, Artificial Sequence
  Description of Artificial Sequence: Synthetic oligonucleotide
  Sense strand starting at position 1072 of SEQ ID NO: 1437
acacuaacgcucgggacau

SEQ ID NO: 112973 - RNA, 19 nt, Artificial Sequence
  Description of Artificial Sequence: Synthetic oligonucleotide
  Antisense strand to SEQ ID NO: 112972
augucccgagcguuagugu

SEQ ID NO: 112974 - RNA, 19 nt, Artificial Sequence
  Description of Artificial Sequence: Synthetic oligonucleotide
  Sense strand starting at position 1054 of SEQ ID NO: 1437
agacguaacaaguggaaga

SEQ ID NO: 112975 - RNA, 19 nt, Artificial Sequence
  Description of Artificial Sequence: Synthetic oligonucleotide
  Antisense strand to SEQ ID NO: 112974
ucuuccacuuguuacgucu

SEQ ID NO: 112976 - RNA, 19 nt, Artificial Sequence
  Description of Artificial Sequence: Synthetic oligonucleotide
  Sense strand starting at position 289 of SEQ ID NO: 1437
uagugugcuggucacagua

SEQ ID NO: 112977 - RNA, 19 nt, Artificial Sequence
  Description of Artificial Sequence: Synthetic oligonucleotide
  Antisense strand to SEQ ID NO: 112976
uacugugaccagcacacua

SEQ ID NO: 112978 - RNA, 19 nt, Artificial Sequence
  Description of Artificial Sequence: Synthetic oligonucleotide
  Sense strand starting at position 282 of SEQ ID NO: 1437
cagagauuagugugcuggu

SEQ ID NO: 112979 - RNA, 19 nt, Artificial Sequence
  Description of Artificial Sequence: Synthetic oligonucleotide
  Antisense strand to SEQ ID NO: 112978
accagcacacuaaucucug

SEQ ID NO: 112980 - RNA, 19 nt, Artificial Sequence
  Description of Artificial Sequence: Synthetic oligonucleotide
  Sense strand starting at position 270 of SEQ ID NO: 1437
ccgcuagaguaacagagau

SEQ ID NO: 112981 - RNA, 19 nt, Artificial Sequence
  Description of Artificial Sequence: Synthetic oligonucleotide
  Antisense strand to SEQ ID NO: 112980
aucucuguuacucuagcgg

SEQ ID NO: 112982 - RNA, 19 nt, Artificial Sequence
  Description of Artificial Sequence: Synthetic oligonucleotide
  Sense strand starting at position 262 of SEQ ID NO: 1437
aaggccauccgcuagagua

SEQ ID NO: 112983 - RNA, 19 nt, Artificial Sequence
  Description of Artificial Sequence: Synthetic oligonucleotide
  Antisense strand to SEQ ID NO: 112982
uacucuagcggauggccuu

SEQ ID NO: 112984 - RNA, 19 nt, Artificial Sequence
  Description of Artificial Sequence: Synthetic oligonucleotide
  Sense strand starting at position 155 of SEQ ID NO: 1437
uccaguuuccaaggguaca

SEQ ID NO: 112985 - RNA, 19 nt, Artificial Sequence
  Description of Artificial Sequence: Synthetic oligonucleotide
  Antisense strand to SEQ ID NO: 112984
uguacccuuggaaacugga

SEQ ID NO: 112986 - RNA, 19 nt, Artificial Sequence
  Description of Artificial Sequence: Synthetic oligonucleotide
  Sense strand starting at position 142 of SEQ ID NO: 1437
gcgaaaucauggguccagu

SEQ ID NO: 112987 - RNA, 19 nt, Artificial Sequence
  Description of Artificial Sequence: Synthetic oligonucleotide
  Antisense strand to SEQ ID NO: 112986
acuggacccaugauuucgc

SEQ ID NO: 112988 - RNA, 19 nt, Artificial Sequence
  Description of Artificial Sequence: Synthetic oligonucleotide
  Sense strand starting at position 141 of SEQ ID NO: 1437
ggcgaaaucauggguccag

SEQ ID NO: 112989 - RNA, 19 nt, Artificial Sequence
  Description of Artificial Sequence: Synthetic oligonucleotide
  Antisense strand to SEQ ID NO: 112988
cuggacccaugauuucgcc

SEQ ID NO: 112990 - RNA, 19 nt, Artificial Sequence
  Description of Artificial Sequence: Synthetic oligonucleotide
  Sense strand starting at position 140 of SEQ ID NO: 1437
aggcgaaaucaugggucca

SEQ ID NO: 112991 - RNA, 19 nt, Artificial Sequence
  Description of Artificial Sequence: Synthetic oligonucleotide
  Antisense strand to SEQ ID NO: 112990
uggacccaugauuucgccu

SEQ ID NO: 112992 - RNA, 19 nt, Artificial Sequence
  Description of Artificial Sequence: Synthetic oligonucleotide
  Sense strand starting at position 95 of SEQ ID NO: 1437
aggugaaaucgugaggcaa

SEQ ID NO: 112993 - RNA, 19 nt, Artificial Sequence
  Description of Artificial Sequence: Synthetic oligonucleotide
  Antisense strand to SEQ ID NO: 112992
uugccucacgauuucaccu

SEQ ID NO: 112994 - RNA, 19 nt, Artificial Sequence
  Description of Artificial Sequence: Synthetic oligonucleotide
  Sense strand starting at position 7 of SEQ ID NO: 1437
gagagaucaucagcccagu

SEQ ID NO: 112995 - RNA, 19 nt, Artificial Sequence
  Description of Artificial Sequence: Synthetic oligonucleotide
  Antisense strand to SEQ ID NO: 112994
acugggcugaugaucucuc

SEQ ID NO: 112996 - RNA, 19 nt, Artificial Sequence
  Description of Artificial Sequence: Synthetic oligonucleotide
  Sense strand starting at position 116 of SEQ ID NO: 1439
aguuguuugcaugacaaca

SEQ ID NO: 112997 - RNA, 19 nt, Artificial Sequence
  Description of Artificial Sequence: Synthetic oligonucleotide
  Antisense strand to SEQ ID NO: 112996
uguugucaugcaaacaacu

SEQ ID NO: 112998 - RNA, 19 nt, Artificial Sequence
  Description of Artificial Sequence: Synthetic oligonucleotide
  Sense strand starting at position 192 of SEQ ID NO: 1439
guuguugcuguguuuguau

SEQ ID NO: 112999 - RNA, 19 nt, Artificial Sequence
  Description of Artificial Sequence: Synthetic oligonucleotide
  Antisense strand to SEQ ID NO: 112998
auacaaacacagcaacaac

SEQ ID NO: 113000 - RNA, 19 nt, Artificial Sequence
  Description of Artificial Sequence: Synthetic oligonucleotide
  Sense strand starting at position 199 of SEQ ID NO: 1439
cuguguuuguauuuguaca

SEQ ID NO: 113001 - RNA, 19 nt, Artificial Sequence
  Description of Artificial Sequence: Synthetic oligonucleotide
  Antisense strand to SEQ ID NO: 113000
uguacaaauacaaacacag

SEQ ID NO: 113002 - RNA, 19 nt, Artificial Sequence
  Description of Artificial Sequence: Synthetic oligonucleotide
  Sense strand starting at position 201 of SEQ ID NO: 1439
guguuuguauuuguacagu

SEQ ID NO: 113003 - RNA, 19 nt, Artificial Sequence
  Description of Artificial Sequence: Synthetic oligonucleotide
  Antisense strand to SEQ ID NO: 113002
acuguacaaauacaaacac

SEQ ID NO: 113004 - RNA, 19 nt, Artificial Sequence
  Description of Artificial Sequence: Synthetic oligonucleotide
  Sense strand starting at position 241 of SEQ ID NO: 1439
accaauaagugguuggaaa
